(19) United States
(12) Patent Application Publication
(10) Pub. No.: US 2025/0223376 A1
(43) Pub. Date: Jul. 10, 2025

(54) COMPOSITIONS AND METHODS FOR THE TREATMENT OF HER2 POSITIVE CANCER

(71) Applicant: VOYAGER THERAPEUTICS, INC., Cambridge, MA (US)

(72) Inventors: Samuel Aaron HASSON, Arlington, MA (US); Kelly BALES, Lincoln, MA (US); Kenny CHEN, Watertown, MA (US); Usman Yasin HAMEEDI, Malden, MA (US); Dan Richard LAKS, Cambridge, MA (US); Xiaoqin I REN, North Attleboro, MA (US); Ishan Sanjeev SHAH, Andover, MA (US); Mathieu Emmanuel NONNENMACHER, Boston, MA (US); Jinzhao HOU, Lexington, MA (US); Matthew Alan CHILD, Ashland, MA (US); Wei WANG, Arlington, MA (US); Shaoyong LI, Hopkinton, MA (US); Brett HOFFMAN, Braintree, MA (US)

(21) Appl. No.: 18/693,275

(22) PCT Filed: Sep. 19, 2022
(86) PCT No.: PCT/US2022/076657

§ 371 Date: Mar. 19, 2024

Related U.S. Application Data
(60) Provisional application No. 63/246,279, filed on Sep. 20, 2021.
(60) Provisional application No. 63/332,034, filed on Apr. 18, 2022.

(51) Int. Cl. C07K 16/32; A61K 35/76; A61K 39/00; A61P 35/00; C12N 15/86

(52) U.S. Cl. CPC C07K 16/32; A61K 35/76; A61P 35/00; C12N 15/86; A61K 2039/505

(57) ABSTRACT

The disclosure provides compositions and methods for the preparation, manufacture and use of an adeno-associated virus (AAV) particle for the vectorized delivery of an antibody molecule that binds to HER2.

### RELATED APPLICATIONS

[0001] This application is a 35 U.S.C. 371 national stage filing of International Application No. PCT/US2022/076657 filed Sep. 19, 2022, which claims priority to U.S. provisional patent application Ser. No. 63/246,279, filed Sep. 20, 2021, and U.S. provisional patent application Ser. No. 63/332,034, filed Apr. 18, 2022, the contents of which are hereby incorporated by reference.

### SEQUENCE LISTING

[0002] The instant application contains a Sequence Listing which has been submitted electronically in XML format and is hereby incorporated by reference in its entirety. Said XML copy, created on Jan. 12, 2025, is named VTJ-1318US_SubstituteSequenceListing.xml and is 10,460 kilobytes in size.

### FIELD OF THE DISCLOSURE

[0003] The present disclosure relates generally to compositions and methods for vectorized delivery (VAD) of an antibody molecule, e.g., an antibody molecule that binds to HER2.

### BACKGROUND

[0004] Breast cancer is the most common form of cancer and the leading cause of cancer death in women worldwide. Today the systemic treatment of breast cancer offers three major different treatment modalities and the applicability of these different treatment options is substantially dependent on the receptor status of the patient (Bernard-Marty et al., “Facts and controversies in systemic treatment of metastatic breast cancer” Oncologist 9:617-632 (2004)). Endocrine and biological therapy requires the presence of the respective receptors on the cancer cells, whereas cytotoxic chemotherapy is independent of those specified receptors.

[0005] Although HER2 receptors are found overexpressed in various cancers, many of the cancer therapies targeting HER2 have been developed for breast cancer. HER2 overexpression and/or amplification have been detected in 10%-34% of invasive breast cancers and correlate with poor prognosis, and poor response to chemotherapy and endocrine therapy. Amplification and/or overexpression of HER2 may play a role in the occurrence or progression of brain metastases. The incidence of brain metastasis in patients with metastatic breast cancer varies from 10 to 15% and these rates increase up to 30-50% in patients with HER2+ breast cancer (Aversa et al., “Metastatic breast cancer subtypes and central nervous system metastases” Breast. 23: 623-628 (2014); Kennecke et al., “Metastatic behavior of breast cancer subtypes” J. Clin. Oncol. 28: 3271-3277 (2010)).

[0006] Brain metastases accompanying breast cancer are associated with particularly poor prognosis. Brain metastases seriously affect quality of life and are relatively resistant to systemic therapies. Though the biological basis is not yet fully understood, patients with HER2-positive breast cancer are at a particularly high risk of brain metastases. Currently, the standard component of systemic therapy in HER2-positive breast cancer patients is trastuzumab, a monoclonal antibody against the extracellular domain of the HER2 receptor. However, due to a high molecular weight (approx. 145,000 Da), and physical and chemical properties, trastuzumab does not cross the blood-brain barrier and is ineffective in preventing and treating brain metastases. In highlighting the potential impact of a therapy addressing brain metastases arising from HER2+ breast cancer, one study found that approximately 50% of their cohort of 122 women ultimately died of cerebral progression (Bendell et al., “Central nervous system metastases in women who receive trastuzumab-based therapy for metastatic breast carcinoma” Cancer 97(12):2972-2977 (2003)). Therefore, targeting the CNS progression of the tumors is a major unmet need tied to the shortcoming of current therapies (biodistribution, efficacy) and the patient outcomes when the metastases are unmitigated. As such, there is a medical need for improved compositions and methods of prevention, treatment, and diagnosis for diseases associated with overexpression of HER2, such as metastatic breast cancer.

### SUMMARY

[0007] The present disclosure pertains, at least in part, to compositions and methods for the treatment of a disease or disorder associated with HER2 over-expression, e.g., HER2-positive, HER2-amplified and/or HER2-mutated cancer, including modulating the activity of HER2 (e.g., inhibiting HER2 signaling), inducing antibody-dependent cellular cytotoxicity (ADCC), and/or delivery, e.g., vectorized delivery, of an antibody molecule that binds to HER2, e.g., an anti-HER2 antibody molecule described herein. In some embodiments, the level of HER2-mediated cell signaling and tumor growth, is reduced or inhibited using an isolated, e.g., recombinant, AAV particle comprising a genetic element encoding an anti-HER2 antibody molecule, e.g., an anti-HER2 antibody molecule described herein. In some embodiments, the inhibition of HER2 dimerization, downregulation of HER2, and antibody-dependent cell-mediated cytotoxicity is increased using an isolated, e.g., recombinant, AAV particle comprising a genetic element encoding an anti-HER2 antibody molecule, e.g., an anti-HER2 antibody molecule described herein. Such inhibition and/or degradation can be useful in treating disorders related to over-expression of HER2, such as cancer.

[0008] Accordingly, in one aspect, the present disclosure provides an isolated, e.g., recombinant nucleic acid comprising a transgene encoding an antibody molecule that binds to HER2, which comprises a heavy chain variable region (VH) encoded by a nucleotide sequence comprising a nucleotide sequence with at least 80% (e.g., at least about 85, 90, 95, 96, 97, 98, or 99%) sequence identity to the nucleotide sequence of SEQ ID NO: 5109 and/or a light chain variable region (VL) encoded by a nucleotide sequence comprising a nucleotide sequence with at least 80% (e.g., at least about 85, 90, 95, 96, 97, 98, or 99%) sequence identity to the nucleotide sequence of SEQ ID NO: 5113.

[0009] Accordingly, in one aspect, the present disclosure provides an isolated, e.g., recombinant nucleic acid comprising a transgene encoding an antibody molecule that binds to HER2, which comprises a heavy chain variable region (VH) encoded by a nucleotide sequence comprising a nucleotide sequence with at least 80% (e.g., at least about 85, 90, 95, 96, 97, 98, or 99%) sequence identity to the nucleotide sequence of SEQ ID NO: 5269 and/or a light chain variable region (VL) encoded by a nucleotide sequence comprising a nucleotide sequence with at least 80% (e.g., at least about 85, 90, 95, 96, 97, 98, or 99%) sequence identity to the nucleotide sequence of SEQ ID NO: 5273.

[0010] In another aspect, the present disclosure provides a genetic element comprising a promoter operably linked to a transgene encoding an antibody molecule that binds to HER2 (e.g., an anti-HER2 antibody molecule described herein), wherein the transgene is encoded by an isolated nucleic acid molecule described herein. In some embodiments, the genetic element further comprises an internal terminal repeat (ITR) sequence (e.g., an ITR region described herein), an enhancer (e.g., an enhancer described herein), an intron region (e.g., an intron region described herein) and/or an exon region (e.g., an exon region described herein), and/or a poly A signal region (e.g., a poly A signal sequence described herein). In some embodiments, the genetic element comprises the nucleotide sequence of any one of SEQ ID NOs: 5163, 5170, 5164, 5165, 5166, 5185, 5186, 5167, 5168, 5187, 5188, 5619, 5189, 5190, 5343, 5374, 5375, 6500, 6501, 6502, 6503, 6504, 6505, 6506, 6507, 6508, or 6509, or a sequence with at least 95% sequence identity thereto.

[0011] In yet another aspect, the present disclosure provides an isolated, e.g., recombinant, genetic element comprising a nucleic acid positioned between two inverted terminal repeats (ITRs), wherein the nucleic acid comprising a transgene encoding a multispecific, e.g., bispecific, antibody molecule comprising at least two antigen binding domains for two different domains of HER2. In some embodiments, the first antigen binding domain binds to domain I of HER2, and the second antigen binding domain binds to domain IV of HER2.

[0012] In yet another aspect, the present disclosure provides an isolated, e.g., recombinant, adeno-associated viral (AAV) vector comprising a transgene encoding an antibody molecule that binds to HER2 described herein. In some embodiments, the AAV vector comprises a genetic element comprising a promoter operably linked to a transgene encoding an antibody molecule that binds to HER2 described herein.

[0013] In yet another aspect, the present disclosure provides an isolated, e.g., recombinant, AAV particle comprising an AAV capsid polypeptide, e.g., an AAV capsid variant, and a nucleic acid comprising a transgene encoding an antibody molecule that binds to HER2 described herein. In some embodiments, the AAV particle comprises a genetic element comprising a promoter operably linked to a transgene encoding an antibody molecule that binds to HER2 described herein. In some embodiments, the AAV particle comprises an AAV vector described herein. In some embodiments, the AAV capsid polypeptide, comprises a VOY101 capsid polypeptide, a VOY9P39 capsid polypeptide, a VOY9P33 capsid protein, a AAVPHP.B (PHP.B) capsid polypeptide, a AAVPHP.N (PHP.N) capsid polypeptide, an AAV1 capsid polypeptide, an AAV2 capsid polypeptide, an AAV5 capsid polypeptide, an AAV9 capsid polypeptide, an AAV9 K449R capsid polypeptide, an AAVrh10 capsid polypeptide, or a functional variant thereof.

[0014] In yet another aspect, the present disclosure provides isolated, e.g., recombinant, AAV particle comprising an AAV capsid variant and a nucleic acid encoding an antibody molecule that binds HER2/neu described herein, wherein the AAV capsid variant: (i) is enriched at least about 5, 6, 7, 8, 9, 10, 20, 30, 40, 50, 100, 200, 300, or 400-fold, in the brain, e.g., the brain of a non-human primate (NHP) compared to a reference sequence of SEQ ID NO: 138 (e.g., as provided in Table 55), e.g., when measured by an assay as described in Example 9; (ii) transduces a brain region, e.g., a brain region of an NHP, e.g., selected from dentate nucleus, cerebellar cortex, cerebral cortex, brain stem, hippocampus, thalamus and putamen, wherein the level of transduction is at least 5, 10, 50, 100, 200, 500, 1,000, 2,000, 5,000, or 10,000-fold greater as compared to a reference sequence of SEQ ID NO: 138, e.g., when measured by an assay, e.g., an immunohistochemistry assay, a qRT-PCR, or a RT-ddPCR assay, e.g., as described in Example 10; (iii) delivers an increased level of a payload to a brain region, e.g., a brain region of an NHP, optionally wherein the level of the payload is increased by at least 500, 1,000, 2,000, 5,000, or 10,000-fold, as compared to a reference sequence of SEQ ID NO: 138, e.g., when measured by an assay, e.g., a qRT-PCR or a RT-ddPCR assay (e.g., as described in Example 10), optionally wherein the brain region comprises a frontal cortex, sensory cortex, motor cortex, putamen, thalamus, cerebellar cortex, dentate nucleus, caudate, and/or hippocampus; (iv) delivers an increased level of a payload to a spinal cord region, e.g., a spinal cord region of an NHP, optionally wherein the level of the payload is increased by at least 10, 20, 50, 100, 200, 300, 400, 500, 600, 700, 800 or 900-fold, as compared to a reference sequence of SEQ ID NO: 138, e.g., when measured by an assay, e.g., a qRT-PCR assay (e.g., as described in Example 10), optionally wherein the spinal cord region comprises a cervical, thoracic, and/or lumbar region; and/or (v) delivers an increased level of viral genomes to a brain region, e.g., a brain region of an NHP, optionally wherein the level of viral genomes is increased by at least 5, 10, 20, 30, 40 or 50-fold, as compared to a reference sequence of SEQ ID NO: 138, e.g., when measured by an assay, e.g., a qRT-PCR or a RT-ddPCR assay (e.g., as described in Example 10), optionally wherein the brain region comprises a frontal cortex, sensory cortex, motor cortex, putamen, thalamus, cerebellar cortex, dentate nucleus, caudate, and/or hippocampus.

[0015] In yet another aspect, the present disclosure provides an isolated, e.g., recombinant, AAV particle comprising an AAV capsid variant and a nucleic acid encoding an antibody molecule that binds HER2/neu described herein, wherein the AAV capsid variant comprises: (a) the amino acid sequence of any of SEQ ID NO: 3648-3659 or 11725-11775, 11785, 11798, or 11819; or (b) at least 5, 6, 7, 8, or 9 consecutive amino acids from the amino acid sequence of any of SEQ ID NO: 3648-3659; and wherein the capsid variant comprises the amino acid sequence of SEQ ID NO: 138, or an amino acid sequence with at least 95% sequence identity thereto.

[0016] In yet another aspect, the present disclosure provides an isolated, e.g., recombinant, AAV particle comprising an AAV capsid variant and a nucleic acid encoding an antibody molecule that binds HER2/neu described herein, wherein the AAV capsid variant comprises: (i) PLNG (SEQ ID NO: 3678); (ii) PLNGA (SEQ ID NO: 3679); (iii) PLNGAV (SEQ ID NO: 3680); (iv) PLNGAVH (SEQ ID NO: 3681); (v) PLNGAVHL (SEQ ID NO: 3682); or (vi) PLNGAVHLY (SEQ ID NO: 3648); and wherein the capsid variant comprises the amino acid sequence of SEQ ID NO: 138, or an amino acid sequence with at least 95% sequence identity thereto.

[0017] In yet another aspect, the present disclosure provides a method of making a genetic element. The method comprising providing a nucleic acid encoding a genetic element described herein and a backbone region suitable for replication of the genetic element in a cell, e.g., a bacterial cell (e.g., wherein the backbone region comprises one or both of a bacterial origin of replication and a selectable marker), and excising the genetic element from the backbone region, e.g., by cleaving the nucleic acid molecule at upstream and downstream of the genetic element.

[0018] In yet another aspect, the present disclosure provides a method of making an isolated, e.g., recombinant AAV particle. The method comprising providing a host cell comprising a genetic element described herein and incubating the host cell under conditions suitable to enclose the genetic element in the AAV particle, e.g., a VOY101 capsid protein, thereby making the isolated AAV particle.

[0019] In yet another aspect, the present disclosure provides method of delivering an exogenous antibody molecule that binds to HER2 (e.g., an anti-HER2 antibody molecule described herein), to a subject. The method comprising administering an effective amount of an AAV particle or a plurality of AAV particles, described herein, said AAV particle comprising an AAV vector and/or genetic element described herein.

[0020] In yet another aspect, the present disclosure provides a method of treating a subject having or being diagnosed as having disease and/or a disorder associated with over-expression of HER2. The method comprising administering to the subject an effective amount of an AAV particle or a plurality of AAV particles, described herein, comprising an AAV vector and/or genetic element described herein. In some embodiments, the disease and/or disorder associated with over-expression of HER2 includes tumors, cancers, and neoplastic tissue, along with pre-malignant and non-neoplastic or non-malignant hyperproliferative disorders.

[0021] Those skilled in the art will recognize or be able to ascertain using no more than routine experimentation, many equivalents to the specific embodiments of the invention described herein. Such equivalents are intended to be encompassed by the following enumerated embodiments.

### ENUMERATED EMBODIMENTS

[0022] 1. An isolated, e.g., recombinant, nucleic acid comprising a transgene encoding an antibody molecule that binds to HER2/neu, comprising:
[0023] (i) a heavy chain variable region (VH) encoded by a nucleotide sequence comprising a nucleotide sequence with at least 90% (e.g., at least about 95, 96, 97, 98, or 99%) sequence identity to the nucleotide sequence of SEQ ID NO: 5269; and
[0024] (ii) a light chain variable region (VL) encoded by a nucleotide sequence comprising a nucleotide sequence with at least 90% (e.g., at least about 95, 96, 97, 98, or 99%) sequence identity to the nucleotide sequence of SEQ ID NO: 5273 or 5245.

[0025] 2. The isolated nucleic acid of embodiment 1, wherein the VH is encoded by the nucleotide sequence of SEQ ID NO: 5269.

[0026] 3. The isolated nucleic acid of embodiments 1 or 2, wherein the VL is encoded by the nucleotide sequence of SEQ ID NO: 5273 or 5245.

[0027] 4. The isolated nucleic acid of any one of embodiments 1-3, wherein the VH is encoded by the nucleotide sequence of SEQ ID NO: 5269 and the VL is encoded by the nucleotide sequence of SEQ ID NO: 5273 or 5245.

[0028] 5. The isolated nucleic acid of any one of embodiments 1-4, wherein the encoded antibody molecule is a full-length antibody, a bispecific antibody, a Fab, a F(ab′)2, a Fv, a single chain Fv fragment (scFv), single domain antibody, or a camelid antibody.

[0029] 6. The isolated nucleic acid of any one of embodiments 1-5, wherein the heavy chain constant region is encoded by a nucleotide sequence comprising a nucleotide sequence with at least 90% (e.g., at least about 95, 96, 97, 98, or 99%) sequence identity to the nucleotide sequence of SEQ ID NO: 5219.

[0030] 7. The isolated nucleic acid of any one of embodiments 1-6, wherein the light chain constant region is encoded by a nucleotide sequence comprising a nucleotide sequence with at least 90% (e.g., at least about 95, 96, 97, 98, or 99%) sequence identity to the nucleotide sequence of SEQ ID NO: 5221.

[0031] 8. The isolated nucleic acid of any one of embodiments 1-7, wherein the heavy chain is encoded by a nucleotide sequence comprising a nucleotide sequence with at least 90% (e.g., at least about 95, 96, 97, 98, or 99%) sequence identity to the nucleotide sequence of SEQ ID NO: 5271.

[0032] 9. The isolated nucleic acid of embodiment 8, wherein the heavy chain is encoded by the nucleotide sequence of SEQ ID NO: 5271.

[0033] 10 An isolated, e.g., recombinant, nucleic acid comprising a transgene encoding an antibody molecule that binds to HER2/neu, comprising:
[0034] (i) heavy chain encoded by a nucleotide sequence comprising a nucleotide sequence with at least 90% (e.g., at least about 95, 96, 97, 98, or 99%) sequence identity to the nucleotide sequence of SEQ ID NO: 5271 or 5244; and
[0035] (ii) a light chain encoded by a nucleotide sequence comprising a nucleotide sequence with at least 90% (e.g., at least about 95, 96, 97, 98, or 99%) sequence identity to the nucleotide sequence of SEQ ID NO: 5275 or 5246.

[0036] 11. The isolated nucleic acid of embodiment 10, wherein the nucleotide sequence encoding the heavy chain comprises the nucleotide sequence of SEQ ID NO: 5271 or 5244, and the nucleotide sequence encoding the light chain comprises the nucleotide sequence of SEQ ID NO: 5275 or 5246.

[0037] 12. An isolated, e.g., recombinant, nucleic acid comprising a transgene encoding an antibody molecule that binds to HER2/neu, comprising:
[0038] (i) a heavy chain variable region (VH) encoded by a nucleotide sequence comprising a nucleotide sequence with at least 90% (e.g., at least about 95, 96, 97, 98, or 99%) sequence identity to the nucleotide sequence of SEQ ID NO: 5109; and
[0039] (ii) a light chain variable region (VL) encoded by a nucleotide sequence comprising a nucleotide sequence with at least 90% (e.g., at least about 95, 96, 97, 98, or 99%) sequence identity to the nucleotide sequence of SEQ ID NO: 5113.

[0040] 13. The isolated nucleic acid of embodiment 12, wherein the VH is encoded by the nucleotide sequence of SEQ ID NO: 5109.

[0041] 14. The isolated nucleic acid of embodiments 12 or 13, wherein the VL is encoded by the nucleotide sequence of SEQ ID NO: 5113.

[0042] 15. The isolated nucleic acid of any one of embodiments 12-14, wherein the encoded antibody molecule is a full-length antibody, a bispecific antibody, a Fab, a F(ab′)2, a Fv, a single chain Fv fragment (scFv), single domain antibody, or a camelid antibody.

[0043] 16. The isolated nucleic acid of any one of embodiments 12-15, wherein the heavy chain constant region is encoded by a nucleotide sequence comprising a nucleotide sequence with at least 90% (e.g., at least about 95, 96, 97, 98, or 99%) sequence identity to the nucleotide sequence of SEQ ID NO: 5017.

[0044] 17. The isolated nucleic acid of any one embodiments 12-16, wherein the light chain constant region is encoded by a nucleotide sequence comprising a nucleotide sequence with at least 90% (e.g., at least about 95, 96, 97, 98, or 99%) sequence identity to the nucleotide sequence of SEQ ID NO: 5007.

[0045] 18. The isolated nucleic acid of any one of embodiments 12-17, wherein the heavy chain is encoded by a nucleotide sequence comprising a nucleotide sequence with at least 90% (e.g., at least about 95, 96, 97, 98, or 99%) sequence identity to the nucleotide sequence of SEQ ID NO: 5111.

[0046] 19. The isolated nucleic acid of embodiment 18, wherein the heavy chain is encoded by the nucleotide sequence of SEQ ID NO: 5111.

[0047] 20. An isolated, e.g., recombinant, nucleic acid comprising a transgene encoding an antibody molecule that binds to HER2/neu, comprising:
[0048] (i) heavy chain encoded by a nucleotide sequence comprising a nucleotide sequence with at least 90% (e.g., at least about 95, 96, 97, 98, or 99%) sequence identity to the nucleotide sequence of SEQ ID NO: 5111; and
[0049] (ii) a light chain encoded by a nucleotide sequence comprising a nucleotide sequence with at least 90% (e.g., at least about 95, 96, 97, 98, or 99%) sequence identity to the nucleotide sequence of SEQ ID NO: 5115.

[0050] 21. The isolated nucleic acid of embodiment 20, wherein the nucleotide sequence encoding the heavy chain comprises the nucleotide sequence of SEQ ID NO: 5111, and the nucleotide sequence encoding the light chain comprises the nucleotide sequence of SEQ ID NO: 5115.

[0051] 22. An isolated, e.g., recombinant, nucleic acid comprising a transgene encoding an antibody molecule comprising an antigen binding region that binds to HER2/neu, comprising:
[0052] (i) a heavy chain variable region (VH) encoded by a nucleotide sequence comprising a nucleotide sequence with at least 90% (e.g., at least about 95, 96, 97, 98, or 99%) sequence identity to the nucleotide sequence of SEQ ID NO: 5002; and
[0053] (ii) a light chain variable region (VL) encoded by a nucleotide sequence comprising a nucleotide sequence with at least 90% (e.g., at least about 95, 96, 97, 98, or 99%) sequence identity to the nucleotide sequence of SEQ ID NO: 5005.

[0054] 23. The isolated nucleic acid of embodiment 22, wherein the VH is encoded by the nucleotide sequence of SEQ ID NO: 5002.

[0055] 24. The isolated nucleic acid of embodiments 22 or 23, wherein the VL is encoded by the nucleotide sequence of SEQ ID NO: 5005.

[0056] 25. The isolated nucleic acid of any one of embodiments 22-24, wherein the encoded antibody molecule is a full-length antibody, a bispecific antibody, a Fab, a F(ab′)2, a Fv, a single chain Fv fragment (scFv), single domain antibody, or a camelid antibody.

[0057] 26. The isolated nucleic acid of embodiment 25, wherein the antibody molecule is a scFv and the nucleotide sequence encoding the scFv comprises the nucleotide sequence of SEQ ID NO: 5352, or a nucleotide sequence with at least 90% (e.g., at least about 95, 96, 97, 98, or 99%) sequence identity thereto.

[0058] 27. The isolated nucleic acid of any one embodiments 22-25, wherein the heavy chain constant region is encoded by a nucleotide sequence comprising a nucleotide sequence with at least 80% (e.g., at least about 85, 90, 95, 96, 97, 98, or 99%) sequence identity to the nucleotide sequence of SEQ ID NO: 5003.

[0059] 28. The isolated nucleic acid of any one of embodiments 22-25, wherein the light chain constant region is encoded by a nucleotide sequence comprising a nucleotide sequence with at least 80% (e.g., at least about 85, 90, 95, 96, 97, 98, or 99%) sequence identity to the nucleotide sequence of SEQ ID NO: 5007.

[0060] 29. The isolated nucleic acid of any one of embodiments 22-25, wherein the heavy chain is encoded by a nucleotide sequence comprising a nucleotide sequence with at least 90% (e.g., at least about 95, 96, 97, 98, or 99%) sequence identity to the nucleotide sequence of SEQ ID NO: 5033 or 5369.

[0061] 30. The isolated nucleic acid of embodiment 29, wherein the heavy chain is encoded by the nucleotide sequence of SEQ ID NO: 5033.

[0062] 31. An isolated, e.g., recombinant, nucleic acid comprising a transgene encoding an antibody molecule that binds to HER2/neu, comprising:
[0063] (i) heavy chain encoded by a nucleotide sequence comprising a nucleotide sequence with at least 90% (e.g., at least about 95, 96, 97, 98, or 99%) sequence identity to the nucleotide sequence of SEQ ID NO: 5033; and
[0064] (ii) a light chain encoded by a nucleotide sequence comprising a nucleotide sequence with at least 90% (e.g., at least about 95, 96, 97, 98, or 99%) sequence identity to the nucleotide sequence of SEQ ID NO: 5035.

[0065] 32. The isolated nucleic acid of embodiment 31, wherein the nucleotide sequence encoding the heavy chain comprises the nucleotide sequence of SEQ ID NO: 5033, and the nucleotide sequence encoding the light chain constant region comprises the nucleotide sequence of SEQ ID NO: 5035.

[0066] 33. An isolated, e.g., recombinant, nucleic acid comprising a transgene encoding an antibody molecule that binds to HER2/neu, comprising:
[0067] (i) a heavy chain variable region (VH) encoded by a nucleotide sequence comprising a nucleotide sequence with at least 90% (e.g., at least about 95, 96, 97, 98, or 99%) sequence identity to the nucleotide sequence of SEQ ID NO: 5261; and
[0068] (ii) a light chain variable region (VL) encoded by a nucleotide sequence comprising a nucleotide sequence with at least 90% (e.g., at least about 95, 96, 97, 98, or 99%) sequence identity to the nucleotide sequence of SEQ ID NO: 5266.

[0069] 34. The isolated nucleic acid of embodiment 33, wherein the VH is encoded by the nucleotide sequence of SEQ ID NO: 5261.

[0070] 35. The isolated nucleic acid of embodiments 33 or 34, wherein the VL is encoded by the nucleotide sequence of SEQ ID NO: 5266.

[0071] 36. The isolated nucleic acid of any one of embodiments 33-35, wherein the encoded antibody molecule is a full-length antibody, a bispecific antibody, a Fab, a F(ab′)2, a Fv, a single chain Fv fragment (scFv), single domain antibody, or a camelid antibody.

[0072] 37. The isolated nucleic acid of any one of embodiments 33-36, wherein the heavy chain constant region is encoded by a nucleotide sequence comprising a nucleotide sequence with at least 90% (e.g., at least about 95, 96, 97, 98, or 99%) sequence identity to the nucleotide sequence of SEQ ID NO: 5215.

[0073] 38. The isolated nucleic acid of any one of embodiments 33-37, wherein the light chain constant region is encoded by a nucleotide sequence comprising a nucleotide sequence with at least 90% (e.g., at least about 95, 96, 97, 98, or 99%) sequence identity to the nucleotide sequence of SEQ ID NO: 5217.

[0074] 39. The isolated nucleic acid of any one of embodiments 33-38, wherein the heavy chain is encoded by a nucleotide sequence comprising a nucleotide sequence with at least 90% (e.g., at least about 95, 96, 97, 98, or 99%) sequence identity to the nucleotide sequence of SEQ ID NO: 5263.

[0075] 40. The isolated nucleic acid of embodiment 39, wherein the heavy chain is encoded by the nucleotide sequence of SEQ ID NO: 5263.

[0076] 41. An isolated, e.g., recombinant, nucleic acid comprising a transgene encoding an antibody molecule that binds to HER2/neu, comprising:
[0077] (i) heavy chain encoded by a nucleotide sequence comprising a nucleotide sequence with at least 90% (e.g., at least about 95, 96, 97, 98, or 99%) sequence identity to the nucleotide sequence of SEQ ID NO: 5263; and
[0078] (ii) a light chain encoded by a nucleotide sequence comprising a nucleotide sequence with at least 90% (e.g., at least about 95, 96, 97, 98, or 99%) sequence identity to the nucleotide sequence of SEQ ID NO: 5268.

[0079] 42. The isolated nucleic acid of embodiment 41, wherein the nucleotide sequence encoding the heavy chain comprises the nucleotide sequence of SEQ ID NO: 5263, and the nucleotide sequence encoding the light chain comprises the nucleotide sequence of SEQ ID NO: 5268.

[0080] 43. An isolated, e.g., recombinant, nucleic acid comprising a transgene encoding an antibody molecule that binds to HER2/neu, comprising:
[0081] (i) a heavy chain encoded by a nucleotide sequence comprising a nucleotide sequence with at least 90% (e.g., at least about 95, 96, 97, 98, or 99%) sequence identity to the nucleotide sequence of SEQ ID NO: 5173, and a light chain encoded by a nucleotide sequence comprising a nucleotide sequence with at least 90% (e.g., at least about 95, 96, 97, 98, or 99%) sequence identity to the nucleotide sequence of SEQ ID NO: 5177;
[0082] (ii) a heavy chain encoded by a nucleotide sequence comprising a nucleotide sequence with at least 90% (e.g., at least about 95, 96, 97, 98, or 99%) sequence identity to the nucleotide sequence of SEQ ID NO: 5049, and a light chain encoded by a nucleotide sequence comprising a nucleotide sequence with at least 90% (e.g., at least about 95, 96, 97, 98, or 99%) sequence identity to the nucleotide sequence of SEQ ID NO: 5051;
[0083] (iii) a heavy chain encoded by a nucleotide sequence comprising a nucleotide sequence with at least 90% (e.g., at least about 95, 96, 97, 98, or 99%) sequence identity to the nucleotide sequence of SEQ ID NO: 5065, and a light chain encoded by a nucleotide sequence comprising a nucleotide sequence with at least 90% (e.g., at least about 95, 96, 97, 98, or 99%) sequence identity to the nucleotide sequence of SEQ ID NO: 5067:
[0084] (iv) a heavy chain encoded by a nucleotide sequence comprising a nucleotide sequence with at least 90% (e.g., at least about 95, 96, 97, 98, or 99%) sequence identity to the nucleotide sequence of SEQ ID NO: 5083, and a light chain encoded by a nucleotide sequence comprising a nucleotide sequence with at least 90% (e.g., at least about 95, 96, 97, 98, or 99%) sequence identity to the nucleotide sequence of SEQ ID NO: 5087;
[0085] (v) a heavy chain encoded by a nucleotide sequence comprising a nucleotide sequence with at least 90% (e.g., at least about 95, 96, 97, 98, or 99%) sequence identity to the nucleotide sequence of SEQ ID NO: 5193, and a light chain encoded by a nucleotide sequence comprising a nucleotide sequence with at least 90% (e.g., at least about 95, 96, 97, 98, or 99%) sequence identity to the nucleotide sequence of SEQ ID NO: 5197;
[0086] (vi) a heavy chain encoded by a nucleotide sequence comprising a nucleotide sequence with at least 90% (e.g., at least about 95, 96, 97, 98, or 99%) sequence identity to the nucleotide sequence of SEQ ID NO: 5225, and a light chain encoded by a nucleotide sequence comprising a nucleotide sequence with at least 90% (e.g., at least about 95, 96, 97, 98, or 99%) sequence identity to the nucleotide sequence of SEQ ID NO: 5229;
[0087] (vii) a heavy chain encoded by a nucleotide sequence comprising a nucleotide sequence with at least 90% (e.g., at least about 95, 96, 97, 98, or 99%) sequence identity to the nucleotide sequence of SEQ ID NO: 5091, and a light chain encoded by a nucleotide sequence comprising a nucleotide sequence with at least 90% (e.g., at least about 95, 96, 97, 98, or 99%) sequence identity to the nucleotide sequence of SEQ ID NO: 5095; or
[0088] (viii) a heavy chain encoded by a nucleotide sequence comprising a nucleotide sequence with at least 90% (e.g., at least about 95, 96, 97, 98, or 99%) sequence identity to the nucleotide sequence of SEQ ID NO: 5131, and a light chain encoded by a nucleotide sequence comprising a nucleotide sequence with at least 90% (e.g., at least about 95, 96, 97, 98, or 99%) sequence identity to the nucleotide sequence of SEQ ID NO: 5135.

[0089] 44. The isolated nucleic acid of embodiment 43, wherein:
[0090] (i) the heavy chain is encoded by the nucleotide sequence of SEQ ID NO: 5173, and the light chain is encoded by the nucleotide sequence of SEQ ID NO: 5177;
[0091] (ii) the heavy chain is encoded the nucleotide sequence of SEQ ID NO: 5049, and the light chain is encoded by the nucleotide sequence of SEQ ID NO: 5051;
[0092] (iii) the heavy chain is encoded by the nucleotide sequence of SEQ ID NO: 5065, and the light chain is encoded by the nucleotide sequence of SEQ ID NO: 5067:
[0093] (iv) the heavy chain is encoded by the nucleotide sequence of SEQ ID NO: 5083, and the light chain is encoded by the nucleotide sequence of SEQ ID NO: 5087;
[0094] (v) the heavy chain is encoded by the nucleotide sequence of SEQ ID NO: 5193, and the light chain encoded by the nucleotide sequence of SEQ ID NO: 5197;
[0095] (vi) the heavy chain is encoded by the nucleotide sequence of SEQ ID NO: 5225, and the light chain is encoded by the nucleotide sequence of SEQ ID NO: 5229;
[0096] (vii) the heavy chain is encoded by the nucleotide sequence of SEQ ID NO: 5091, and the light chain is encoded by the nucleotide sequence of SEQ ID NO: 5095; or
[0097] (viii) the heavy chain is encoded by the nucleotide sequence of SEQ ID NO: 5131, and the light chain is encoded by the nucleotide sequence of SEQ ID NO: 5135.

[0098] 45. The isolated nucleic acid of any one of the embodiments 1-5, 12-15, 22-25 or 33-36 which encodes an Fc region or functional variant thereof.

[0099] 46. The isolated nucleic acid of any one of embodiments 1-5, 12-15, 22-25 or 33-36 wherein the encoded antibody comprises an scFv and an Fc region.

[0100] 47. The isolated nucleic acid of embodiment 45 or 46, wherein the Fc region has reduced affinity, e.g., ablated, affinity for an Fc receptor, e.g., as compared to a reference, wherein the reference is a wild-type Fc receptor.

[0101] 48. The isolated nucleic acid of any one of embodiments 45-47, wherein the Fc region comprises a mutation at one, two, or all of positions I253 (e.g., I235A), H310 (e.g., H310A or H310Q), and/or H435 (e.g., H435A or H435Q), numbered according to the EU index as in Kabat.

[0102] 49. The isolated nucleic acid of embodiment 45 or 46, wherein the Fc region has reduced effector function (e.g., reduced ADCC), compared to a reference wherein the reference is a wild-type Fc receptor.

[0103] 50. The isolated nucleic acid of any one of embodiments 45-48, wherein the Fc region comprises a mutation at one, two, three, four, or all of positions L235 (e.g., L235V), F243 (e.g., F243L), R292 (e.g., R292P), Y300 (e.g., Y300L), and P396 (e.g., P396L), numbered according to the EU index as in Kabat.

[0104] 51. The isolated nucleic acid of embodiment 45 or 46, wherein
[0105] (i) the encoded Fc region comprises the amino acid sequence of SEQ ID NO: 5275, or an amino acid sequence with at least 80% (e.g., at least about 85, 90, 95, 96, 97, 98, or 99%) sequence identity thereto; and/or
[0106] (ii) the nucleotide sequence encoding the Fc region comprises the nucleotide sequence of SEQ ID NO: 5277, or a nucleotide sequence with at least 80% (e.g., at least about 85, 90, 95, 96, 97, 98, or 99%) sequence identity thereto.

[0107] 52. The isolated nucleic acid of embodiment 46, wherein the nucleotide sequence encoding the scFv comprises the nucleotide sequence of SEQ ID NO: 5352, or a nucleotide sequence with at least 90% (e.g., at least 95, 96, 97, 98, or 99%) sequence identity thereto, and the nucleotide sequence encoding the Fc region comprises the nucleotide sequence of SEQ ID NO: 5277, or a nucleotide sequence with at least 80% (e.g., at least about 85, 90, 95, 96, 97, 98, or 99%) sequence identity thereto.

[0108] 53. The isolated nucleic acid of any one of the preceding embodiments, wherein the transgene further encodes an antibody mimetic, e.g., a designed ankyrin repeat protein (DARPIN), optionally wherein the encoded DARPIN comprises the amino acid sequence of SEQ ID NO: 5370, or an amino acid sequence with at least 80% (e.g., 85, 90, 95, 96, 97, 98, or 99%) sequence identity thereto, or the nucleotide sequence encoding the DARPIN comprises the nucleotide sequence of SEQ ID NO: 5371, or a nucleotide sequence with at least 80% (e.g., 85, 90, 95, 96, 97, 98, or 99%) sequence identity thereto.

[0109] 54. The isolated nucleic acid of any one of the preceding embodiments, wherein the transgene further encodes a fynomer, optionally wherein the encoded fynomer comprises the amino acid sequence of SEQ ID NO: 5156, or an amino acid sequence with at least 80% (e.g., 85, 90, 95, 96, 97, 98, or 99%) sequence identity thereto, or the nucleotide sequence encoding the fynomer comprises the nucleotide sequence of SEQ ID NO: 5155, or a nucleotide sequence with at least 80% (e.g., 85, 90, 95, 96, 97, 98, or 99%) sequence identity thereto.

[0110] 55. The isolated nucleic acid of any one of the preceding embodiments, further encoding a signal sequence, optionally wherein the signal sequence comprises a nucleotide sequence of any of the signal sequences listed in Table 14, or a nucleotide sequence with at least 95% sequence identity thereto.

[0111] 56. The isolated nucleic acid of embodiment 55, further encoding a second signal sequence, optionally wherein the second signal sequence comprises a nucleotide sequence of any of the signal sequences listed in Table 14, or a nucleotide sequence with at least 95% sequence identity thereto.

[0112] 57. The isolated nucleic acid of embodiment 56 wherein:
[0113] (i) the nucleotide sequence encoding the signal sequence comprises the nucleotide sequence of SEQ ID NO: 5157, and is located 5′ relative to the nucleotide sequence encoding the VH and/or the heavy chain;
[0114] (ii) the nucleotide sequence encoding the signal sequence comprises the nucleotide sequence of SEQ ID NO: 5032, and is located 5′ relative to the nucleotide sequence encoding the VH and/or the heavy chain; and/or
[0115] (ii) the nucleotide sequence encoding the signal sequence comprises the nucleotide sequence of SEQ ID NO: 5159, and is located 5′ relative to the nucleotide sequence encoding the VL and/or the light chain.

[0116] 58. The isolated nucleic acid of any one of the preceding embodiments, wherein:
[0117] (i) the sequences of the encoded VH and VL are connected directly, e.g., without a linker;
[0118] (ii) the sequences of the encoded VH and VL are connected via a linker;
[0119] (iii) the sequences of the encoded heavy chain and light chain are connected directly, e.g., without a linker; or
[0120] (iv) the sequences of the encoded heavy chain and light chain are connected via a linker.

[0121] 59. The isolated nucleic acid of embodiment 58, wherein:
[0122] (i) the linker comprises a nucleotide sequence of any of the linker sequences listed in Table 13, or a nucleotide sequence with at least 95% sequence identity thereto;
[0123] (ii) the linker comprises an encoded furin cleavage site;
[0124] (iii) the linker comprises an encoded T2A linker; and/or
[0125] (iv) the linker comprises a glycine-serine linker, e.g., a G4S linker or a (G4S)3 linker.

[0126] 60. The isolated nucleic acid embodiment 58 or 59, wherein:
[0127] (i) the linker comprises an encoded furin cleavage site and/or comprises the nucleotide sequence of SEQ ID NO: 1724; and/or
[0128] (ii) the linker comprises an encoded T2A linker and/or the nucleotide sequence of SEQ ID NO: 1726; and/or
[0129] (iii) the linker comprises an encoded glycine-serine linker encoded by the nucleotide sequence of SEQ ID NOs: 2245, 5161, 5162, 5347, or 5243.

[0130] 61. The isolated nucleic acid of any one of the preceding embodiments, wherein the transgene encodes a second antigen-binding region having a different binding specificity than the antigen-binding region that binds to HER2/neu.

[0131] 62. The isolated nucleic acid of embodiment 61, wherein the second antigen-binding region binds to a molecule selected from the group consisting of a cancer- or tumor-associated antigen; a cancer-associated integrin; a T cell and/or NK cell antigen; an angiogenic factor or other cancer-associated growth factor; receptor for an angiogenic factor; and a receptor associated with cancer progression.

[0132] 63. The isolated nucleic acid of embodiment 62, wherein the second antigen-binding region binds to carcinoembryonic antigen (CEA), prostate specific antigen (PSA), RAGE (renal antigen), α-fetoprotein, CAMEL (CTL-recognized antigen on melanoma), CT antigens (such as MAGE-B5, -B6, -C2, -C3, and D; Mage-12; CT10; NY-ESO-1, SSX-2, GAGE, BAGE, MAGE, and SAGE), mucin antigens (e.g., MUC1, mucin-CA125, etc.), ganglioside antigens, tyrosinase, gp75, c-Met, C-myc, Mart1., MelanA, MUM-1, MUM-2, MUM-3, HLA-B7, Ep-CAM or a cancer-associated integrin, such as a5133 integrin, a T cell and/or NK cell antigen, such as CD3 or CD16, an angiogenic factor or other cancer-associated growth factor, such as a vascular endothelial growth factor, a fibroblast growth factor, epidermal growth factor, and receptors associated with cancer progression.

[0133] 64. The isolated nucleic acid of embodiment 63, wherein the second antigen-binding region binds HER1, HER3, or HER4.

[0134] 65. The isolated nucleic acid of embodiment 61, wherein the second antigen-binding site binds a different, preferably non-blocking, site on HER2.

[0135] 66. The isolated nucleic acid of embodiment 61, wherein the first heavy chain variable region is encoded by the nucleotide sequence of SEQ ID NO: 5253, 5257 or 5261, and the second heavy chain variable is encoded by the nucleotide sequence of SEQ ID NO: 5254, 5258 or 5262.

[0136] 67. The isolated nucleic acid of any one of embodiments 61-66, wherein the first light chain variable region is encoded by the nucleotide sequence of SEQ ID NO: 5255, 5259 or 5265, and a second light chain variable region encoded by the nucleotide sequence of SEQ ID NO: 5256, 5260 or 5267.

[0137] 68. The isolated nucleic acid of any one of embodiments 1-61, wherein the encoded antibody is a multispecific antibody molecule, e.g., a bispecific antibody molecule.

[0138] 69. The isolated nucleic acid of any one of embodiments 1-61, wherein the encoded antibody is a bispecific, e.g., biparatopic, antibody molecule.

[0139] 70. The isolated nucleic acid of embodiment 69, wherein the encoded bispecific, e.g., biparatopic, antibody molecule comprises at least two antigen binding domains for two different domains of HER2.

[0140] 71. The isolated nucleic acid of embodiment 69 or 70, wherein the encoded bispecific, e.g., biparatopic, antibody molecule comprises a first antigen binding domain that binds domain IV of HER2 and a second antigen binding domain that binds domain I of HER2.

[0141] 72. The isolated nucleic acid of embodiment 69 or 70, wherein the encoded bispecific, e.g., biparatopic, antibody molecule comprises a first antigen binding domain that binds domain I of HER2 and a second antigen binding domain that binds domain IV of HER2.

[0142] 73. The isolated nucleic acid of any one of embodiments 69-72, wherein the first and/or second antigen binding domain comprise an IgG antibody, single-chain Fv (scFv), a scFv fragment, a Fab, a single-chain Fab (scFabs), a single-chain antibody, a diabody, an antibody variable domain, a VHH, a single domain antibody, and/or a nanobody.

[0143] 74. The isolated nucleic acid of any one of embodiments 69-73, wherein:
[0144] (i) the first antigen binding domain comprises an scFv, and the second antigen binding domain comprises a full antibody, e.g., an IgG antibody;
[0145] (ii) the first antigen binding domain comprises an antibody mimetic, e.g., a DARPIN, and the second antigen binding domain comprises a full antibody, e.g., an IgG antibody; or
[0146] (iii) the first antigen binding domain comprises a Fyn SH3-derived binding polypeptide (e.g., a fynomer), and the second antigen binding domain comprises a full antibody, e.g., an IgG antibody.

[0147] 75. The isolated nucleic acid of any one of embodiment 69-73, wherein:
[0148] (i) the first antigen binding domain comprises a full antibody, e.g., an IgG antibody, and the second antigen binding domain comprises an scFv;
[0149] (ii) the first antigen binding domain comprises a full antibody, e.g., an IgG antibody, and the second antigen binding domain comprises an antibody mimetic, e.g., a DARPIN; or
[0150] (iii) the first antigen binding domain comprises a full antibody, e.g., an IgG antibody, and the second antigen binding domain comprises a Fyn SH3-derived binding polypeptide (e.g., a fynomer).

[0151] 76. The isolated nucleic acid of any one of embodiments 70-74, wherein:
[0152] (i) the first antigen binding domain that binds domain IV of HER2, e.g., an scFv that binds domain IV of HER2, is situated N-terminal of the second antigen binding domain that binds domain I of HER2, e.g., a full antibody, e.g., an IgG antibody that binds domain I of HER2;
[0153] (ii) the first antigen binding domain that binds domain I of HER2, e.g., an antibody mimetic, e.g., a DARPIN, is situated N-terminal of the second antigen binding domain that binds domain IV of HER2, e.g., a full antibody, e.g., an IgG antibody that binds domain IV of HER2; or
[0154] (iii) the first antigen binding domain that binds domain I of HER2, e.g., a Fyn SH3-derived binding polypeptide (e.g., a fynomer), is situated N-terminal of the second antigen binding domain that binds domain IV of HER2, e.g., a full antibody, e.g., an IgG antibody that binds domain IV of HER2.

[0155] 77. The isolated nucleic acid of any one of embodiments, 69-76, wherein the encoded bispecific antibody molecule comprises:
[0156] (i) a first polypeptide comprising, from N-terminal to C-terminal: VH of the first binding domain, first peptide linker (e.g., a (G4S)3 linker), VL of first binding domain, second peptide linker (e.g., a (G4S) linker), VL of the second binding domain and CL; and
[0157] (ii) a second polypeptide comprising, from N-terminal to C-terminal: VH of the second binding domain, CH1, CH2, and CH3.

[0158] 78. The isolated nucleic acid of any one of embodiments 69-76, wherein the encoded bispecific antibody molecule comprises:
[0159] (i) a first polypeptide comprising, from N-terminal to C-terminal: a DARPIN, a peptide linker (e.g., a (G4S)3 linker), VL of the second binding domain and CL; and
[0160] (ii) a second polypeptide comprising from N-terminal to C-terminal: VH of the second binding domain, CH1, CH2, and CH3.

[0161] 79. The isolated nucleic acid of any one of embodiments, 69-76, wherein the encoded bispecific antibody molecule comprises:
[0162] (i) a first polypeptide comprising, from N-terminal to C-terminal: a Fyn SH3-derived binding polypeptide, a peptide linker (e.g., a (G4S)3 linker), VL of the second binding domain and CL; and
[0163] (ii) a second polypeptide comprising from N-terminal to C-terminal: VH of the second binding domain, CH1, CH2, and CH3.

[0164] 80. The isolated nucleic acid of any one of embodiments 69-79, which comprises an Fc region, optionally wherein the Fc region, is mutated to have reduced binding to Fc receptor or reduced ADCC, e.g., an Fc region having the mutations L235V, F243L, R292P, Y300L, and P396L, numbered according to the EU index as in Kabat.

[0165] 81. A genetic element comprising a nucleic acid positioned between two inverted terminal repeats (ITRs), wherein the nucleic acid comprising a transgene encoding a multispecific, e.g., bispecific, antibody molecule comprising at least two antigen binding domains for two different domains of HER2, optionally wherein the first antigen binding domain binds to domain I of HER2, and the second antigen binding domain binds to domain IV of HER2.

[0166] 82. The genetic element of embodiment 81, wherein:
[0167] (i) the first antigen binding domain binds domain I of HER2 and the second antigen binding domain that binds domain IV of HER2;
[0168] (ii) the first antigen binding domain that binds domain II of HER2 and the second antigen binding domain that binds domain IV of HER2;
[0169] (iii) the first antigen binding domain that binds domain III of HER2 and the second antigen binding domain that binds domain IV of HER2;
[0170] (iv) the first antigen binding domain that binds domain I of HER2 and the second antigen binding domain that binds domain II of HER2;
[0171] (v) the first antigen binding domain that binds domain I of HER2 and the second antigen binding domain that binds domain III of HER2; or
[0172] (vi) the first antigen binding domain that binds domain II of HER2 and the second antigen binding domain that binds domain III of HER2.

[0173] 83. The genetic element of embodiment 81 or 82, wherein the first antigen binding domain binds domain I of HER2 and the second antigen binding domain that binds domain IV of HER2.

[0174] 84. The genetic element of embodiment 81 or 82, wherein the first antigen binding domain binds domain IV of HER2 and the second antigen binding domain that binds domain I of HER2.

[0175] 85. The genetic element of any one of embodiments 81-84, wherein the first antigen binding domain and/or the second antigen binding domain comprise:
[0176] (i) a heavy chain variable region comprising one, two, or three HC CDR sequence of any of the CDR sequences of Table 11A-11C; and/or
[0177] (ii) a light chain variable region comprising one, two, or three LC CDR sequence of any of the CDR sequences of Table 11A-11C.

[0178] 86. The genetic element of any one of embodiments 81-85, wherein the first antigen binding domain and/or the second antigen binding domain comprise:
[0179] (i) a heavy chain variable region (VH) comprising an amino acid sequence of any of the VH sequences of Table 11A-11C, or a sequence having at least 80% (e.g., 85, 90, 95, 96, 97, 98, or 99%) sequence identity to any of the VH sequences of Table 11A-11C; and/or
[0180] (ii) a light chain variable region (VL) comprising an amino acid sequence of any of the VL sequences of Table 11A-11C, or a sequence having at least 80% (e.g., 85, 90, 95, 96, 97, 98, or 99%) sequence identity to any of the VL sequences of Table 11A-11C.

[0181] 87. The genetic element of any one of embodiments 81-86, wherein the first antigen binding domain and/or the second antigen binding domain comprise:
[0182] (i) a heavy chain constant region comprising an amino acid sequence of any of the heavy chain constant region sequences of Table 11A-11C, or a sequence having at least 80% (e.g., 85, 90, 95, 96, 97, 98, or 99%) sequence identity to the heavy chain constant region sequences of Table 11A-11C; and/or
[0183] (ii) a light chain constant region (CL) comprising an amino acid sequence of any of the CL sequences of Table 11A-11C, or a sequence having at least 80% (e.g., 85, 90, 95, 96, 97, 98, or 99%) sequence identity to any of the CL sequences of Table 11A-11C.

[0184] 88. The genetic element of any one of embodiments 81-87, wherein the first antigen binding domain and/or the second antigen binding domain comprise:
[0185] (i) a heavy chain comprising an amino acid sequence of any of the heavy chain sequences of Table 11A-11C, or a sequence having at least 80% (e.g., 85, 90, 95, 96, 97, 98, or 99%) sequence identity to any of the heavy chain sequences of Table 11A-11C; and/or
[0186] (ii) a light chain comprising an amino acid sequence of any of the light chain sequences of Table 11A-11C, or a sequence having at least 80% (e.g., 85, 90, 95, 96, 97, 98, or 99%) sequence identity to any of the light chain sequences of Table 11A-11C.

[0187] 89. The isolated nucleic acid of embodiment 1, 4, 5-8, 10, 12, 15-18, 20, 22, 25-29, 31, 33, 36-39, 41, 45-65, or 68-80, or the genetic element of any one of embodiments 81-88, wherein the encoded antibody molecule comprises at least 1-4, e.g., at least one, two, three, or four, modifications, e.g., substitutions, in a HC CDR3 region, e.g., an HC CDR3 according to SEQ ID NO: 5001.

[0188] 90. The isolated nucleic acid of embodiment 4, 5-8, 10, 12, 15-18, 20, 22, 25-29, 31, 33, 36-39, 41, 45-65, or 68-80, or 89, or the genetic element of any one of embodiments 81-88, wherein the encoded heavy chain variable region or the encoded heavy chain comprises:
[0189] (i) an amino acid substitution at one, two, three, or all of positions 102 (e.g., D102W), 107 (e.g., M107F), 108 (e.g., D108A), and/or 109 (e.g., Y109L), numbered according to the amino acid sequence of SEQ ID NO: 5001;
[0190] (ii) one, two, three, or all of an amino acid other than D at position 102, an amino acid other than M at position 107, an amino acid other than D at position 108, and/or an amino acid other than Y at position 109, numbered according to the amino acid sequence of SEQ ID NO: 5001; or
[0191] (iii) one, two, three or all of the amino acid W at position 102, the amino acid F at position 107, A at position 108, and/or L at position 109, numbered according to the amino acid sequence of SEQ ID NO: 5001.

[0192] 91. The isolated nucleic acid of embodiment 4, 5-8, 10, 12, 15-18, 20, 22, 25-29, 31, 33, 36-39, 41, 45-65, or 68-80, 89, or 90, or the genetic element of any one of embodiments 81-88, wherein the encoded heavy chain variable region or the encoded heavy chain comprises:
[0193] (a) the amino acid W at position 102, the amino acid F at position 107, the amino acid A position 108, and the amino acid L at position 109, relative to a reference sequence numbered according to the amino acid sequence of SEQ ID NO: 5001;
[0194] (b) the amino acid W at position 102, the amino acid F at position 107, and the amino acid A position 108, relative to a reference sequence numbered according to the amino acid sequence of SEQ ID NO: 5001;
[0195] (c) the amino acid W at position 102, the amino acid F at position 107, and the amino acid L at position 109, relative to a reference sequence numbered according to the amino acid sequence of SEQ ID NO: 5001;
[0196] (d) the amino acid W at position 102, the amino acid A position 108, and the amino acid L at position 109, relative to a reference sequence numbered according to the amino acid sequence of SEQ ID NO: 5001;
[0197] (e) the amino acid F at position 107, the amino acid A position 108, and the amino acid L at position 109, relative to a reference sequence numbered according to the amino acid sequence of SEQ ID NO: 5001.

[0198] 92. The isolated nucleic acid of embodiment 4, 5-8, 10, 12, 15-18, 20, 22, 25-29, 31, 33, 36-39, 41, 45-65, or 68-80, or 89-91, or the genetic element of any one of embodiments 81-88, wherein the encoded heavy chain variable region or the encoded heavy chain comprises:
[0199] (i) the amino acid substitutions D98W, M100F, D101A, and Y102L, numbered according to Kabat;
[0200] (ii) the amino acid substitutions D98W, M100F, and D101A, numbered according to Kabat;
[0201] (iii) the amino acid substitutions D98W, M100F, and Y102L, numbered according to Kabat;
[0202] (iv) the amino acid substitutions D98W, D101A, and Y102L, numbered according to Kabat;
[0203] (v) the amino acid substitutions M100F, D101A, and Y102L, numbered according to Kabat.

[0204] 93. The isolated nucleic acid of embodiment 4, 5-8, 10, 12, 15-18, 20, 22, 25-29, 31, 33, 36-39, 41, 45-65, or 68-80, or 89-92, or the genetic element of any one of embodiments 81-88, wherein the encoded heavy chain variable region or the encoded heavy chain comprises an HC CDR1, a HC CDR2, a HC CDR3, wherein:
[0205] (i) the HC CDR1, HC CDR2, HC CDR3 comprise the sequences of SEQ ID NO: 5281, 5282, 6510, respectively;
[0206] (ii) the HC CDR1, HC CDR2, HC CDR3 comprise the sequences of SEQ ID NO: 5281, 5282, 6515, respectively;
[0207] (iii) the HC CDR1, HC CDR2, HC CDR3 comprise the sequences of SEQ ID NO: 5281, 5282, 6520, respectively;
[0208] (iv) the HC CDR1, HC CDR2, HC CDR3 comprise the sequences of SEQ ID NO: 5281, 5282, 6525, respectively; or
[0209] (v) the HC CDR1, HC CDR2, HC CDR3 comprise the sequences of SEQ ID NO: 5281, 5282, 6530, respectively.

[0210] 94. The isolated nucleic acid of embodiment 4, 5-8, 10, 12, 15-18, 20, 22, 25-29, 31, 33, 36-39, 41, 45-65, or 68-80, or 89-93, or the genetic element of any one of embodiments 81-88, wherein the encoded antibody comprises an HC CDR1, a HC CDR2, a HC CDR3, a LC CDR1, a LC CDR2 and/or an LC CDR3, wherein:
[0211] (i) the HC CDR1, HC CDR2, HC CDR3, LC CDR1, LC CDR2, and LC CDR3 sequences comprise the sequences of SEQ ID NO: 5281, 5282, 6510, 5287, 5288, and 5289, respectively;
[0212] (ii) the HC CDR1, HC CDR2, HC CDR3, LC CDR1, LC CDR2, and LC CDR3 sequences comprise the sequences of SEQ ID NO: 5281, 5282, 6515, 5287, 5288, and 5289, respectively;
[0213] (iii) the HC CDR1, HC CDR2, HC CDR3, LC CDR1, LC CDR2, and LC CDR3 sequences comprise the sequences of SEQ ID NO: 5281, 5282, 6520, 5287, 5288, and 5289, respectively;
[0214] (iv) the HC CDR1, HC CDR2, HC CDR3, LC CDR1, LC CDR2, and LC CDR3 sequences comprise the sequences of SEQ ID NO: 5281, 5282, 6525, 5287, 5288, and 5289, respectively;
[0215] (v) the HC CDR1, HC CDR2, HC CDR3, LC CDR1, LC CDR2, and LC CDR3 sequences comprise the sequences of SEQ ID NO: 5281, 5282, 6530, 5287, 5288, and 5289, respectively.

[0216] 95. The genetic element of any one of embodiments 81-94, which comprises an Fc region. 96. The genetic element of embodiment 95, wherein the Fc receptor comprises:
[0217] (i) a mutation at one or more of (e.g., all of) positions I253 (e.g., I235A), H310 (e.g., H310A or H310Q), and/or H435 (e.g., H435A or H435Q), numbered according to the EU index as in Kabat; and/or
[0218] (ii) a mutation at one or more of (e.g., all of) positions L235 (e.g., L235V), F243 (e.g., F243L), R292 (e.g., R292P), Y300 (e.g., Y300L), and P396 (e.g., P396L), numbered according to the EU index as in Kabat.

[0219] 97. The genetic element of any one of embodiments 81-96, wherein the first and/or second antigen binding domain comprise an IgG antibody, single-chain Fv (scFv), a scFv fragment, a Fab, a single-chain Fab (scFabs), a single-chain antibody, a diabody, an antibody variable domain, a VHH, a single domain antibody, and/or a nanobody.

[0220] 98. The genetic element of any one of embodiments 81-97, wherein:
[0221] (i) the first antigen binding domain comprises an scFv, and the second antigen binding domain comprises a full antibody, e.g., an IgG antibody;
[0222] (ii) the first antigen binding domain comprises an antibody mimetic, e.g., a DARPIN, and the second antigen binding domain comprises a full antibody, e.g., an IgG antibody; or
[0223] (iii) the first antigen binding domain comprises a Fyn SH3-derived binding polypeptide (e.g., a fynomer), and the second antigen binding domain comprises a full antibody, e.g., an IgG antibody.

[0224] 99. The genetic element of any one of embodiments 91-97, wherein:
[0225] (i) the first antigen binding domain comprises a full antibody, e.g., an IgG antibody, and the second antigen binding domain comprises an scFv;
[0226] (ii) the first antigen binding domain comprises a full antibody, e.g., an IgG antibody, and the second antigen binding domain comprises an antibody mimetic, e.g., a DARPIN; or
[0227] (iii) the first antigen binding domain comprises a full antibody, e.g., an IgG antibody, and the second antigen binding domain comprises a Fyn SH3-derived binding polypeptide (e.g., a fynomer).

[0228] 100. The genetic element of any one of embodiments 81-99, wherein:
[0229] (i) the first antigen binding domain that binds domain IV of HER2, e.g., an scFv that binds domain IV of HER2, is situated N-terminal of the second antigen binding domain that binds domain I of HER2, e.g., a full antibody, e.g., an IgG antibody that binds domain I of HER2;
[0230] (ii) the first antigen binding domain that binds domain I of HER2, e.g., an antibody mimetic, e.g., a DARPIN, is situated N-terminal of the second antigen binding domain that binds domain IV of HER2, e.g., a full antibody, e.g., an IgG antibody that binds domain IV of HER2; or
[0231] (iii) the first antigen binding domain that binds domain I of HER2, e.g., a Fyn SH3-derived binding polypeptide (e.g., a fynomer), is situated N-terminal of the second antigen binding domain that binds domain IV of HER2, e.g., a full antibody, e.g., an IgG antibody that binds domain IV of HER2.

[0232] 101. The genetic element of any one of embodiments 81-100, wherein the encoded bispecific antibody molecule comprises:
[0233] (i) a first polypeptide comprising, from N-terminal to C-terminal: VH of the first binding domain, first peptide linker (e.g., a (G4S)3 linker), VL of first binding domain, second peptide linker (e.g., a (G4S) linker), VL of the second binding domain and CL; and
[0234] (ii) a second polypeptide comprising, from N-terminal to C-terminal: VH of the second binding domain, CH1, CH2, and CH3.

[0235] 102. The genetic element of any one of embodiments 81-100, wherein the encoded bispecific antibody molecule comprises:
[0236] (i) a first polypeptide comprising, from N-terminal to C-terminal: a DARPIN, a peptide linker (e.g., a (G4S)3 linker), VL of the second binding domain and CL; and
[0237] (ii) a second polypeptide comprising from N-terminal to C-terminal: VH of the second binding domain, CH1, CH2, and CH3.

[0238] 103. The genetic element of any one of embodiments 81-100, wherein the encoded bispecific antibody molecule comprises:
[0239] (i) a first polypeptide comprising, from N-terminal to C-terminal: a Fyn SH3-derived binding polypeptide, a peptide linker (e.g., a (G4S)3 linker), VL of the second binding domain and CL; and
[0240] (ii) a second polypeptide comprising from N-terminal to C-terminal: VH of the second binding domain, CH1, CH2, and CH3.

[0241] 104. The genetic element of any one of embodiments 81-100, the encoded bispecific antibody molecule comprises:
[0242] (i) a first chain, which comprises, from the N-terminus to the C-terminus, a first anti-HER2 VH comprising the amino acid sequence of SEQ ID NO: 5262, and a heavy chain constant region comprising the amino acid sequence of SEQ ID NO: 5216; and a second chain, which comprises from the N-terminus to the C-terminus, a second anti-HER2 VH comprising the amino sequence of 5290, a (G4S)3 linker, a first anti-HER2 VL comprising the amino acid sequence of SEQ ID NO: 5266, a (GS) linker, a second anti-HER2 VL comprising the amino acid sequence of SEQ ID NO: 5354, and a light chain constant region (CL) comprising the amino acid sequence of SEQ ID NO: 5218; or a sequence substantially identical (e.g., having at least 70%, 75%, 80%, 85%, 90%, 95%, or 99% sequence identity) to the any of the aforesaid sequences;
[0243] (ii) a first chain comprising a heavy chain comprising the amino acid sequence of SEQ ID NO: 5264; and a second chain comprising an scFv comprising the amino acid sequence of SEQ ID NO: 5351, fused to a light chain comprising the amino acid sequence of SEQ ID NO: 5268; or a sequence substantially identical (e.g., having at least 70%, 75%, 80%, 85%, 90%, 95%, or 99% sequence identity) to the any of the aforesaid sequences; and/or
[0244] (iii) a first chain comprising the amino acid sequence of SEQ ID NO: 5264, or an amino acid sequence substantially identical (e.g., having at least 70%, 75%, 80%, 85%, 90%, 95%, or 99% sequence identity) thereto; and/or a second chain comprising the amino acid sequence of SEQ ID NO: 5365, or an amino acid sequence substantially identical (e.g., having at least 70%, 75%, 80%, 85%, 90%, 95%, or 99% sequence identity) thereto.

[0245] 105. The genetic element of any one of embodiments 81-100 the encoded bispecific antibody molecule comprises:
[0246] (i) a first chain, which comprises, from the N-terminus to the C-terminus, a first anti-HER2 VH comprising the amino acid sequence of SEQ ID NO: 5262, and a heavy chain constant region comprising the amino acid sequence of SEQ ID NO: 5220; and a second chain, which comprises from the N-terminus to the C-terminus, a second anti-HER2 VH comprising the amino sequence of 5290, a (G4S)3 linker, a first anti-HER2 VL comprising the amino acid sequence of SEQ ID NO: 5266, a (GS) linker, a second anti-HER2 VL comprising the amino acid sequence of SEQ ID NO: 5354, and a light chain constant region (CL) comprising the amino acid sequence of SEQ ID NO: 5218; or a sequence substantially identical (e.g., having at least 70%, 75%, 80%, 85%, 90%, 95%, or 99% sequence identity) to the any of the aforesaid sequences;
[0247] (ii) a first chain comprising a heavy chain comprising the amino acid sequence of SEQ ID NO: 5376; and a second chain comprising an scFv comprising the amino acid sequence of SEQ ID NO: 5351, fused to a light chain comprising the amino acid sequence of SEQ ID NO: 5268; or a sequence substantially identical (e.g., having at least 70%, 75%, 80%, 85%, 90%, 95%, or 99% sequence identity) to the any of the aforesaid sequences; and/or
[0248] (iii) a first chain comprising the amino acid sequence of SEQ ID NO: 5376, or an amino acid sequence substantially identical (e.g., having at least 70%, 75%, 80%, 85%, 90%, 95%, or 99% sequence identity) thereto; and/or a second chain comprising the amino acid sequence of SEQ ID NO: 5365, or an amino acid sequence substantially identical (e.g., having at least 70%, 75%, 80%, 85%, 90%, 95%, or 99% sequence identity) thereto.

[0249] 106. The genetic element of any one of embodiments 81-100, the encoded bispecific antibody molecule comprises:
[0250] (i) a first chain, comprising from the N-terminus to the C-terminus, an anti-HER2 VH comprising the amino sequence comprising the amino acid sequence of SEQ ID NO: 5001, and a heavy chain constant region comprising the amino acid sequence of SEQ ID NO: 5018; and a second chain, comprising from the N-terminus to the C-terminus, a DARPIN molecule comprising the amino acid sequence of SEQ ID NO: 5370, a (G4S)3 linker, an anti-HER2 VL comprising the amino acid sequence of SEQ ID NO: 5006, and a light chain constant region (CL) comprising the amino acid sequence of SEQ ID NO: 5008; or a sequence substantially identical (e.g., having at least 70%, 75%, 80%, 85%, 90%, 95%, or 99% sequence identity) to the any of the aforesaid sequences;
[0251] (ii) a first chain comprising the amino acid sequence of SEQ ID NO: 5368; and a second chain comprising the amino acid sequence of SEQ ID NO: 5370, a (G4S)3 linker, and the amino acid sequence comprising of SEQ ID NO: 5063; or a sequence substantially identical (e.g., having at least 70%, 75%, 80%, 85%, 90%, 95%, or 99% sequence identity) to the any of the aforesaid sequences; and/or
[0252] (iii) a first chain comprising the amino acid sequence of SEQ ID NO: 5368, and a second chain comprising the amino acid sequence of SEQ ID NO: 5372; or a sequence substantially identical (e.g., having at least 70%, 75%, 80%, 85%, 90%, 95%, or 99% sequence identity) to the any of the aforesaid sequences.

[0253] 107. The genetic element of any one of embodiments 81-100, the encoded bispecific antibody molecule comprises:
[0254] (i) a first chain, comprising from the N-terminus to the C-terminus, an anti-HER2 VH comprising the amino sequence comprising the amino acid sequence of SEQ ID NO: 5010, and a heavy chain constant region comprising the amino acid sequence of SEQ ID NO: 5012; and a second chain, comprising from the N-terminus to the C-terminus, a C12 fynomer comprising the amino acid sequence of SEQ ID NO: 5156, a (G4S)3 linker, an anti-HER2 VL comprising the amino acid sequence of SEQ ID NO: 5014, and a light chain constant region (CL) comprising the amino acid sequence of SEQ ID NO: 5008; or a sequence substantially identical (e.g., having at least 70%, 75%, 80%, 85%, 90%, 95%, or 99% sequence identity) to the any of the aforesaid sequences; and/or
[0255] (ii) a first chain comprising the amino acid sequence of SEQ ID NO: 5066; and a second chain comprising the amino acid sequence of SEQ ID NO: 5156, a (G4S)3 linker, and the amino acid sequence comprising of SEQ ID NO: 5068; or a sequence substantially identical (e.g., having at least 70%, 75%, 80%, 85%, 90%, 95%, or 99% sequence identity) to the any of the aforesaid sequences.

[0256] 108. A genetic element comprising a promoter operably linked to transgene encoded by the isolated nucleic acid molecule of any one of embodiments 1-80, 89-94, or 228-264, optionally wherein the nucleic acid molecule is positioned between two inverted terminal repeats (ITRs).

[0257] 109. The genetic element of any one of claims 81-107 or 265-275, further comprising a promoter operably linked to transgene encoding a multispecific, e.g., bispecific, antibody molecule.

[0258] 110. The genetic element of embodiments 108 or 109, wherein:
[0259] (i) the promoter is chosen from human elongation factor 1α-subunit (EF1α), cytomegalovirus (CMV) immediate-early enhancer and/or promoter, chicken β-actin (CBA) and its derivative CAG, P glucuronidase (GUSB), or ubiquitin C (UBC), neuron-specific enolase (NSE), platelet-derived growth factor (PDGF), platelet-derived growth factor B-chain (PDGF-β), intercellular adhesion molecule 2 (ICAM-2), synapsin (Syn), methyl-CpG binding protein 2 (MeCP2), Ca2+/calmodulin-dependent protein kinase II (CaMKII), metabotropic glutamate receptor 2 (mGluR2), neurofilament light (NFL) or heavy (NFH), β-globin minigene nβ2, preproenkephalin (PPE), enkephalin (Enk) and excitatory amino acid transporter 2 (EAAT2), glial fibrillary acidic protein (GFAP), myelin basic protein (MBP), or a fragment, e.g., a truncation, or a functional variant thereof; and/or
[0260] (ii) the promoter comprises a nucleotide sequence chosen from any one of SEQ ID NOs: 2080-2089, 2238-2239, or 4599, or a nucleotide sequence with at least 95% sequence identity thereto.

[0261] 111. The genetic element of embodiment 110, wherein:
[0262] (i) the promoter is selected from a CAG promoter, a CBA promoter (e.g., a minimal CBA promoter), a CB promoter, a CMV(IE) promoter and/or enhancer, a GFAP promoter, a synapsin promoter, an ICAM2 promoter, or a functional variant thereof; and/or
[0263] (ii) the promoter comprises a nucleotide sequence selected from any one of SEQ ID NOs: 2082, 2083, 2085, 2086, 4599, 2239, or a nucleotide sequence with at least 95% sequence identity thereto.

[0264] 112. The genetic element of embodiments 108 or 109, wherein the promoter is a ubiquitous promoter.

[0265] 113. The genetic element of embodiment 112, wherein the ubiquitous promoter is selected from CMV, CBA (including derivatives CAG, CB6, CBh, etc.), EF-1α, PGK, UBC, GUSB (hGBp), or UCOE (promoter of HNRPA2B1-CBX3).

[0266] 114. The genetic element of embodiments 108 or 109, wherein the promoter is a tissue specific promoter, e.g., a GFAP promoter or a synapsin promoter.

[0267] 115. The genetic element of embodiment 111, wherein the promoter:
[0268] (i) is a CB promoter; and/or
[0269] (ii) comprises the nucleotide sequence of SEQ ID NO: 2083 or a nucleotide sequence with at least 95% sequence identity thereto.

[0270] 116. The genetic element of embodiment 111, wherein the promoter:
[0271] (i) is a CMV(IE) promoter; and/or
[0272] (ii) comprises the nucleotide sequence of SEQ ID NO: 2239, or a nucleotide sequence with at least 95% sequence identity thereto.

[0273] 117. The genetic element of embodiment 111, wherein the promoter:
[0274] (i) is a GFAP promoter; and/or
[0275] (ii) comprises the nucleotide sequence of SEQ ID NO: 2085, or a nucleotide sequence with at least 95% sequence identity thereto.

[0276] 118. The genetic element of any one of embodiments 81-117 or 265-275, which further comprises a CMV immediate-early (CMVie) enhancer, optionally wherein the CMVie enhancer comprises the nucleotide sequence of SEQ ID NO: 2081, or a nucleotide sequence with at least 95% sequence identity to SEQ ID NO: 2081.

[0277] 119. The genetic element of any one of embodiments 81-118 or 265-275, which further comprises a polyadenylation (polyA) signal region, optionally wherein the polyA signal region comprises a rabbit globin polyA signal region.

[0278] 120. The genetic element of embodiment 119, wherein the polyA signal region comprises:
[0279] (i) a nucleotide sequence of any of SEQ ID NOs: 2122-2124, or a nucleotide sequence with at least 95% sequence identity to any of SEQ ID NOs: 2122-2124; or
[0280] (ii) the nucleotide sequence of SEQ ID NO: 2122, or a nucleotide sequence with at least 95% sequence identity thereto.

[0281] 121. The genetic element of any one of embodiments 81-120 or 265-275, further comprising an inverted terminal repeat (ITR) sequence, optionally wherein the ITR sequence is positioned 5′ relative to the encoded transgene and/or ITR sequence is positioned 3′ relative to the encoded transgene.

[0282] 122. The genetic element of any one of embodiments 121, wherein the ITR sequence comprises a nucleotide sequence of any one of SEQ ID NOs: 2076-2079, or a nucleotide sequence with at least 95% sequence identity thereto.

[0283] 123. The genetic element of embodiment 121 or 122, wherein:
[0284] (i) the ITR sequence positioned 5′ relative to the encoded transgene comprises the nucleotide sequence of SEQ ID NO: 2076, or a nucleotide sequence with at least 95% sequence identity thereto; and/or
[0285] (ii) the ITR sequence positioned 3′ relative to the encoded transgene comprises the nucleotide sequence of SEQ ID NO: 2078, or a nucleotide sequence with at least 95% sequence identity thereto.

[0286] 124. The genetic element of any one of embodiments 81-123 or 228-264, which further comprises an intron region, optionally wherein the intron region comprises a nucleotide sequence of any one of SEQ ID NOs: 2095-2105, 2240, 2256, 2257 or 2258, or a nucleotide sequence with at least 95% identity thereto.

[0287] 125. The genetic element of embodiment 124, wherein the intron region comprises a human beta-globin intron region, optionally wherein the human beta-globin intron region comprises the nucleotide sequence of SEQ ID NO: 2097 or 2240, or a nucleotide sequence with at least 95% sequence identity thereto.

[0288] 126. The genetic element of embodiment 124, wherein the intron region comprises an ie intron 1 region, optionally wherein the ie intron 1 region comprises the nucleotide sequence of SEQ ID NO: 2095, or a nucleotide sequence with at least 95% sequence identity thereto.

[0289] 127. The genetic element of any one of embodiments 81-126 or 265-275, which comprises at least 2 intron regions.

[0290] 128. The genetic element of any one of embodiments 81-127 or 265-275, comprising
[0291] (i) an intron region comprising the nucleotide sequence of SEQ ID NO: 2095 and SEQ ID NO: 2095;
[0292] (ii) an intron region comprising the nucleotide sequence of SEQ ID NO: 2095 and 2240;
[0293] (iii) an ie intron 1 region and a human beta-globin intron region;
[0294] (iv) an intron region comprising the nucleotide sequence of SEQ ID NO: 2097 and 2240; or
[0295] (v) an intron region comprising the nucleotide sequence of 2240.

[0296] 129. The genetic element of any one of embodiments 81-128 or 265-275, which further comprises an exon region, optionally wherein the exon region comprises a nucleotide sequence of any of SEQ ID NOs: 2090-2094, or a sequence with at least 95% sequence identity thereto.

[0297] 130. The genetic element of embodiment 129, wherein the exon region comprises an ie exon 1 region, optionally wherein the ie exon 1 region comprises the nucleotide sequence of SEQ ID NO: 2090, or a nucleotide sequence with at least 95% sequence identity thereto.

[0298] 131. The genetic element of any one of embodiments 81-130 or 265-275, which further comprises a Kozak sequence, optionally wherein the Kozak sequence comprises:
[0299] (i) the nucleotide sequence of GCCGCCACCATG (SEQ ID NO: 2114) or GAGGAGCCACC (SEQ ID NO: 4543); or
[0300] (ii) the nucleotide sequence of GCCGCCACCATG (SEQ ID NO: 2114).

[0301] 132. The genetic element of any one of embodiments 81-131 or 265-275, which further comprises a nucleotide sequence encoding a miR binding site, e.g., a miR binding site that modulates, e.g., reduces, expression of the antibody molecule encoded by the genetic element in a cell or tissue where the corresponding miRNA is expressed.

[0302] 133. The genetic element of embodiment 132, wherein the encoded miRNA binding site is complementary, e.g., fully complementary or partially complementary, to a miRNA expressed in a cell or tissue of the DRG, liver, heart, hematopoietic, or a combination thereof.

[0303] 134. The genetic element of embodiment 132 or 133, wherein the encoded miR binding site modulates, e.g., reduces, expression of the encoded antibody molecule in a cell or tissue of the DRG, liver, heart, hematopoietic lineage, or a combination thereof.

[0304] 135. The genetic element of any one of embodiments 132-134, which comprises at least 1-5 copies of the encoded miR binding site, e.g., at least 1, 2, 3, 4, or 5 copies.

[0305] 136. The genetic element of any one of embodiments 132-135, which comprises at least 3 copies of an encoded miR binding sites, optionally wherein all three copies comprise the same miR binding site, or at least one, two, three, or all of the copies comprise a different miR binding site.

[0306] 137. The genetic element of embodiment 136, wherein the 3 copies of the encoded miR binding sites are continuous (e.g., not separated by a spacer), or are separated by a spacer, optionally wherein the spacer comprises the nucleotide sequence of SEQ ID NO: 1846, or a nucleotide sequence having at least one, two, or three modifications, but no more than four modifications of SEQ ID NO: 1846.

[0307] 138. The genetic element of any one of embodiments 132-135, which comprises at least 4 copies of an encoded miR binding site, optionally wherein all four copies comprise the same miR binding site, or at least one, two, three, or all of the copies comprise a different miR binding site, optionally wherein the 4 copies of the encoded miR binding sites are continuous (e.g., not separated by a spacer), or are separated by a spacer, and further optionally wherein the spacer comprises the nucleotide sequence of SEQ ID NO: 1846, or a nucleotide sequence having at least one, two, or three modifications, but no more than four modifications of SEQ ID NO: 1846.

[0308] 139. The genetic element of any one of embodiments 132-138, wherein the encoded miR binding site comprises a miR122 binding site, a miR183 binding site, a miR-142-3p binding site, a mir-1 binding site or a combination thereof, optionally wherein:
[0309] (i) the encoded miR122 binding site comprises the nucleotide sequence of SEQ ID NO: 4673, or a nucleotide sequence substantially identical (e.g., having at least 70%, 75%, 80%, 85%, 90%, 92%, 95%, 97%, 98%, or 99% sequence identity) thereto; or a nucleotide sequence having at least one, two, three, four, five, six, or seven modifications, but no more than ten modifications of SEQ ID NO: 4673;
[0310] (ii) the encoded miR183 binding site comprises the nucleotide sequence of SEQ ID NO: 4676, or a nucleotide sequence substantially identical (e.g., having at least 70%, 75%, 80%, 85%, 90%, 92%, 95%, 97%, 98%, or 99% sequence identity) thereto; or a nucleotide sequence having at least one, two, three, four, five, six, or seven modifications, but no more than ten modifications of SEQ ID NO: 4676;
[0311] (iii) the encoded miR-142-3p binding site comprises the nucleotide sequence of SEQ ID NO: 4675, or a nucleotide sequence substantially identical (e.g., having at least 70%, 75%, 80%, 85%, 90%, 92%, 95%, 97%, 98%, or 99% sequence identity) thereto; or a nucleotide sequence having at least one, two, three, four, five, six, or seven modifications, but no more than ten modifications of SEQ ID NO: 4675; and/or
[0312] (iv) the encoded miR-1 binding site comprises the nucleotide sequence of SEQ ID NO: 4679, or a nucleotide sequence substantially identical (e.g., having at least 70%, 75%, 80%, 85%, 90%, 92%, 95%, 97%, 98%, or 99% sequence identity) thereto; or a nucleotide sequence having at least one, two, three, four, five, six, or seven modifications, e.g., substitutions (e.g., conservative substitutions), but no more than ten modifications, e.g., substitutions (e.g., conservative substitutions), relative to SEQ ID NO: 4679.

[0313] 140. The genetic element of any one of embodiments 81-139 or 265-275, wherein the genetic element comprises:
[0314] (i) an encoded miR122 binding site, an encoded mir-1 binding site, or both; or
[0315] (ii) an encoded miR122 binding site, an encoded mir-1 binding site, and/or an encoded mir-183 binding site.

[0316] 141. The genetic element of any one of embodiments 81-140 or 265-275, wherein the genetic element comprises at least 1-5 copies, e.g., 1, 2, or 3 copies of a miR122 binding site, a mir-1 binding site, or a combination thereof, optionally wherein each copy is continuous (e.g., not separated by a spacer), or each copy is separated by a spacer, optionally wherein the spacer comprises the nucleotide sequence of SEQ ID NO: 1846, or a nucleotide sequence having at least one, two, or three modifications, but no more than four modifications of SEQ ID NO: 1846.

[0317] 142. The genetic element of embodiment 140 or 141, wherein:
[0318] (i) the encoded miR122 binding site comprises the nucleotide sequence of SEQ ID NO: 4673, or a nucleotide sequence substantially identical (e.g., having at least 70%, 75%, 80%, 85%, 90%, 92%, 95%, 97%, 98%, or 99% sequence identity) thereto; or a nucleotide sequence having at least one, two, three, four, five, six, or seven modifications, but no more than ten modifications of SEQ ID NO: 4673; and/or
[0319] (ii) the encoded miR-1 binding site comprises the nucleotide sequence of SEQ ID NO: 4679, or a nucleotide sequence substantially identical (e.g., having at least 70%, 75%, 80%, 85%, 90%, 92%, 95%, 97%, 98%, or 99% sequence identity) thereto; or a nucleotide sequence having at least one, two, three, four, five, six, or seven modifications, but no more than ten modifications of SEQ ID NO: 4679.

[0320] 143. The genetic element of any one of embodiments 81=142 or 265-275, wherein the genetic element comprises:
[0321] (A)(i) a first encoded miR122 binding site comprising the nucleotide sequence of SEQ ID NO: 4673, or a nucleotide sequence substantially identical (e.g., having at least 70%, 75%, 80%, 85%, 90%, 92%, 95%, 97%, 98%, or 99% sequence identity) thereto; or a nucleotide sequence having at least one, two, three, four, five, six, or seven modifications, but no more than ten modifications of SEQ ID NO: 4673;
[0322] (ii) a first spacer comprising the nucleotide sequence of SEQ ID NO: 1846, or a nucleotide sequence having at least one, two, or three modifications, but no more than four modifications of SEQ ID NO: 1846; and
[0323] (iii) a second encoded miR122 binding site comprising the nucleotide sequence of SEQ ID NO: 4673, or a nucleotide sequence substantially identical (e.g., having at least 70%, 75%, 80%, 85%, 90%, 92%, 95%, 97%, 98%, or 99% sequence identity) thereto; or a nucleotide sequence having at least one, two, three, four, five, six, or seven modifications, but no more than ten modifications of SEQ ID NO: 4673; or
[0324] (B)(i) a first encoded miR122 binding site comprising the nucleotide sequence of SEQ ID NO: 4673, or a nucleotide sequence substantially identical (e.g., having at least 70%, 75%, 80%, 85%, 90%, 92%, 95%, 97%, 98%, or 99% sequence identity) thereto; or a nucleotide sequence having at least one, two, three, four, five, six, or seven modifications, but no more than ten modifications of SEQ ID NO: 4673;
[0325] (ii) a first spacer comprising the nucleotide sequence of SEQ ID NO: 1846, or a nucleotide sequence having at least one, two, or three modifications, but no more than four modifications of SEQ ID NO: 1846;
[0326] (iii) a second encoded miR122 binding site comprising the nucleotide sequence of SEQ ID NO: 4673, or a nucleotide sequence substantially identical (e.g., having at least 70%, 75%, 80%, 85%, 90%, 92%, 95%, 97%, 98%, or 99% sequence identity) thereto; or a nucleotide sequence having at least one, two, three, four, five, six, or seven modifications, but no more than ten modifications of SEQ ID NO: 4673;
[0327] (iv) a second spacer comprising the nucleotide sequence of SEQ ID NO: 1846, or a nucleotide sequence having at least one, two, or three modifications, but no more than four modifications of SEQ ID NO: 1846; and
[0328] (v) a third encoded miR122 binding site comprising the nucleotide sequence of SEQ ID NO: 4673, or a nucleotide sequence substantially identical (e.g., having at least 70%, 75%, 80%, 85%, 90%, 92%, 95%, 97%, 98%, or 99% sequence identity) thereto; or a nucleotide sequence having at least one, two, three, four, five, six, or seven modifications, but no more than ten modifications of SEQ ID NO: 4673.

[0329] 144. The genetic element of any of one of embodiments 81-143 or 265-275, which comprises:
[0330] (i) the nucleotide sequence of any of SEQ ID NOs: 5163-5179 5185-5190, 5343, 5374, 5375, 6500, 6501, 6502, 6503, 6504, 6505, 6506, 6507, 6508, or 6509 or a sequence with at least 95% sequence identity thereto; and/or
[0331] (ii) is single stranded.

[0332] 145. The genetic element of any one of embodiments 81-143 or 265-275, which is self-complimentary.

[0333] 146. A genetic element comprising in 5′ to 3′ order:
[0334] (i) a 5′ adeno-associated (AAV) ITR, optionally wherein the 5′ AAV ITR comprises the nucleotide sequence of SEQ ID NO: 2076;
[0335] (ii) a CB promoter, optionally wherein the CB promoter comprises the nucleotide sequence of SEQ ID NO: 2083;
[0336] (iii) an ie exon 1 region, optionally wherein the ie exon 1 region comprises the nucleotide of SEQ ID NO: 2090;
[0337] (iv) an intron region, optionally wherein the intron region comprises the nucleotide sequence of SEQ ID NO: 2095 and SEQ ID NO: 2097;
[0338] (v) a human beta-globin exon region, optionally wherein the human beta-globin exon region comprises the nucleotide sequence of SEQ ID NO: 2093;
[0339] (vi) a signal sequence, optionally wherein the signal sequence comprises the nucleotide sequence of SEQ ID NO: 5157;
[0340] (vii) a transgene encoding a heavy chain variable region (VH) comprising a nucleotide sequence with at least 90% (e.g., at least about 95, 96, 97, 98, or 99%) sequence identity to the nucleotide sequence of SEQ ID NO: 5002;
[0341] (viii) an encoded heavy chain constant region, optionally wherein the nucleotide sequence encoding the heavy chain constant region comprises the nucleotide sequence of SEQ ID NO: 5003;
[0342] (ix) an encoded furin cleavage site, optionally wherein the nucleotide sequence encoding the furin cleavage site comprises the nucleotide sequence of SEQ ID NO: 1724;
[0343] (x) an encoded T2A linker, optionally wherein the nucleotide sequence encoding the T2A linker comprises the nucleotide sequence of SEQ ID NO: 1726;
[0344] (xi) a signal sequence, optionally wherein the signal sequence comprises the nucleotide sequence of SEQ ID NO: 5159;
[0345] (xii) a transgene encoding a light chain variable region (VL) comprising a nucleotide sequence with at least 90% (e.g., at least about 95, 96, 97, 98, or 99%) sequence identity to the nucleotide sequence of SEQ ID NO: 5005;
[0346] (xiii) an encoded light chain constant region, optionally wherein the nucleotide sequence encoding the light chain constant region comprises the nucleotide sequence of SEQ ID NO: 5007;
[0347] (xiv) a rabbit globin polyA signal region, optionally wherein the rabbit globin polyA signal region comprises the nucleotide sequence of SEQ ID NO: 2122; and
[0348] (xv) a 3′ AAV ITR, optionally wherein the 3′ AAV ITR comprises the nucleotide sequence of SEQ ID NO: 2078.

[0349] 147. A genetic element comprising in 5′ to 3′ order:
[0350] (i) a 5′ adeno-associated (AAV) ITR, optionally wherein the 5′ AAV ITR comprises the nucleotide sequence of SEQ ID NO: 2076;
[0351] (ii) a CB promoter, optionally wherein the CB promoter comprises the nucleotide sequence of SEQ ID NO: 2083;
[0352] (iii) an ie exon 1 region, optionally wherein the ie exon 1 region comprises the nucleotide of SEQ ID NO: 2090;
[0353] (iv) an intron region, optionally wherein the intron region comprises the nucleotide sequence of SEQ ID NO: 2095 and SEQ ID NO: 2097;
[0354] (v) a human beta-globin exon region, optionally wherein the human beta-globin exon region comprises the nucleotide sequence of SEQ ID NO: 2093;
[0355] (vi) a signal sequence, optionally wherein the signal sequence comprises the nucleotide sequence of SEQ ID NO: 5157;
[0356] (vii) a transgene encoding a heavy chain variable region (VH) comprising a nucleotide sequence with at least 90% (e.g., at least about 95, 96, 97, 98, or 99%) sequence identity to the nucleotide sequence of SEQ ID NO: 5171;
[0357] (viii) an encoded heavy chain constant region, optionally wherein the nucleotide sequence encoding the heavy chain constant region comprises the nucleotide sequence of SEQ ID NO: 5011;
[0358] (ix) an encoded furin cleavage site, optionally wherein the nucleotide sequence encoding the furin cleavage site comprises the nucleotide sequence of SEQ ID NO: 1724;
[0359] (x) an encoded T2A linker, optionally wherein the nucleotide sequence encoding the T2A linker comprises the nucleotide sequence of SEQ ID NO: 1726;
[0360] (xi) a signal sequence, optionally wherein the signal sequence comprises the nucleotide sequence of SEQ ID NO: 5159;
[0361] (xii) a transgene encoding a light chain variable region (VL) comprising a nucleotide sequence with at least 90% (e.g., at least about 95, 96, 97, 98, or 99%) sequence identity to the nucleotide sequence of SEQ ID NO: 5175;
[0362] (xiii) an encoded light chain constant region, optionally wherein the nucleotide sequence encoding the light chain constant region comprises the nucleotide sequence of SEQ ID NO: 5007;
[0363] (xiv) a rabbit globin polyA signal region, optionally wherein the rabbit globin polyA signal region comprises the nucleotide sequence of SEQ ID NO: 2122; and
[0364] (xv) a 3′ AAV ITR, optionally wherein the 3′ AAV ITR comprises the nucleotide sequence of SEQ ID NO: 2078.

[0365] 148. A genetic element comprising in 5′ to 3′ order:
[0366] (i) a 5′ adeno-associated (AAV) ITR, optionally wherein the 5′ AAV ITR comprises the nucleotide sequence of SEQ ID NO: 2076;
[0367] (ii) a CMV(IE) promoter and/or enhancer, optionally wherein the CMV(IE) promoter and/or enhancer comprises the nucleotide sequence of SEQ ID NO: 2239;
[0368] (iii) a CB promoter, optionally wherein the CB promoter comprises the nucleotide sequence of SEQ ID NO: 2083;
[0369] (iv) a human beta-globin intron region, optionally wherein the human beta-globin intron region comprises the nucleotide sequence of SEQ ID NO: 2240;
[0370] (v) a signal sequence, optionally wherein the signal sequence comprises the nucleotide sequence of SEQ ID NO: 5157;
[0371] (vi) a transgene encoding a heavy chain variable region (VH) comprising a nucleotide sequence with at least 90% (e.g., at least about 95, 96, 97, 98, or 99%) sequence identity to the nucleotide sequence of SEQ ID NO: 5009;
[0372] (vii) an encoded heavy chain constant region, optionally wherein the nucleotide sequence encoding the heavy chain constant region comprises the nucleotide sequence of SEQ ID NO: 5011;
[0373] (viii) an encoded furin cleavage site, optionally wherein the nucleotide sequence encoding the furin cleavage site comprises the nucleotide sequence of SEQ ID NO: 1724;
[0374] (ix) an encoded T2A linker, optionally wherein the nucleotide sequence encoding the T2A linker comprises the nucleotide sequence of SEQ ID NO: 1726;
[0375] (x) a signal sequence, optionally wherein the signal sequence comprises the nucleotide sequence of SEQ ID NO: 5159;
[0376] (xi) a C12 Fynomer sequence, optionally wherein the C12 Fynomer sequence comprises the nucleotide sequence of SEQ ID NO: 5155;
[0377] (xii) an encoded glycine-serine linker, optionally wherein the nucleotide sequence encoding the glycine-serine linker comprises the nucleotide sequence of SEQ ID NO: 5347;
[0378] (xiii) a transgene encoding a light chain variable region (VL) comprising a nucleotide sequence with at least 90% (e.g., at least about 95, 96, 97, 98, or 99%) sequence identity to the nucleotide sequence of SEQ ID NO: 5013;
[0379] (xiv) an encoded light chain constant region, optionally wherein the nucleotide sequence encoding the light chain constant region comprises the nucleotide sequence of SEQ ID NO: 5007;
[0380] (xv) a rabbit globin polyA signal region, optionally wherein the rabbit globin polyA signal region comprises the nucleotide sequence of SEQ ID NO: 2122; and
[0381] (xvi) a 3′ AAV ITR, optionally wherein the 3′ AAV ITR comprises the nucleotide sequence of SEQ ID NO: 2078.

[0382] 149. A genetic element comprising in 5′ to 3′ order:
[0383] (i) a 5′ adeno-associated (AAV) ITR, optionally wherein the 5′ AAV ITR comprises the nucleotide sequence of SEQ ID NO: 2076;
[0384] (ii) a CMV(IE) promoter and/or enhancer, optionally wherein the CMV(IE) promoter and/or enhancer comprises the nucleotide sequence of SEQ ID NO: 2239;
[0385] (iii) a CB promoter, optionally wherein the CB promoter comprises the nucleotide sequence of SEQ ID NO: 2083;
[0386] (iv) an intron region, optionally wherein the intron region comprises the nucleotide sequence of SEQ ID NO: 2240;
[0387] (v) a signal sequence, optionally wherein the signal sequence comprises the nucleotide sequence of SEQ ID NO: 5157;
[0388] (vi) a transgene encoding a heavy chain variable region (VH) comprising a nucleotide sequence with at least 90% (e.g., at least about 95, 96, 97, 98, or 99%) sequence identity to the nucleotide sequence of SEQ ID NO: 5015;
[0389] (vii) an encoded heavy chain constant region, optionally wherein the nucleotide sequence encoding the heavy chain constant region comprises the nucleotide sequence of SEQ ID NO: 5017;
[0390] (viii) an encoded furin cleavage site, optionally wherein the nucleotide sequence encoding the furin cleavage site comprises the nucleotide sequence of SEQ ID NO: 1724;
[0391] (ix) an encoded T2A linker, optionally wherein the nucleotide sequence encoding the T2A linker comprises the nucleotide sequence of SEQ ID NO: 1726;
[0392] (x) a signal sequence, optionally wherein the signal sequence comprises the nucleotide sequence of SEQ ID NO: 5159;
[0393] (xi) a transgene encoding a light chain variable region (VL) comprising a nucleotide sequence with at least 90% (e.g., at least about 95, 96, 97, 98, or 99%) sequence identity to the nucleotide sequence of SEQ ID NO: 5019;
[0394] (xii) an encoded light chain constant region, optionally wherein the nucleotide sequence encoding the light chain constant region comprises the nucleotide sequence of SEQ ID NO: 5021;
[0395] (xiii) a rabbit globin polyA signal region, optionally wherein the rabbit globin polyA signal region comprises the nucleotide sequence of SEQ ID NO: 2122; and
[0396] (xiv) a 3′ AAV ITR, optionally wherein the 3′ AAV ITR comprises the nucleotide sequence of SEQ ID NO: 2078.

[0397] 150. A genetic element comprising in 5′ to 3′ order:
[0398] (i) a 5′ adeno-associated (AAV) ITR, optionally wherein the 5′ AAV ITR comprises the nucleotide sequence of SEQ ID NO: 2076;
[0399] (ii) a CMV(IE) promoter and/or enhancer, optionally wherein the CMV(IE) promoter and/or enhancer comprises the nucleotide sequence of SEQ ID NO: 2239;
[0400] (iii) a CB promoter, optionally wherein the CB promoter comprises the nucleotide sequence of SEQ ID NO: 2083;
[0401] (iv) an intron region, optionally wherein the intron region comprises the nucleotide sequence of SEQ ID NO: 2240;
[0402] (v) a signal sequence, optionally wherein the signal sequence comprises the nucleotide sequence of SEQ ID NO: 5157;
[0403] (vi) a transgene encoding a heavy chain variable region (VH) comprising a nucleotide sequence with at least 90% (e.g., at least about 95, 96, 97, 98, or 99%) sequence identity to the nucleotide sequence of SEQ ID NO: 5070;
[0404] (vii) an encoded heavy chain constant region, optionally wherein the nucleotide sequence encoding the heavy chain constant region comprises the nucleotide sequence of SEQ ID NO: 5025;
[0405] (viii) an encoded furin cleavage site, optionally wherein the nucleotide sequence encoding the furin cleavage site comprises the nucleotide sequence of SEQ ID NO: 1724;
[0406] (ix) an encoded T2A linker, optionally wherein the nucleotide sequence encoding the T2A linker comprises the nucleotide sequence of SEQ ID NO: 1726;
[0407] (x) a signal sequence, optionally wherein the signal sequence comprises the nucleotide sequence of SEQ ID NO: 5159;
[0408] (xi) a transgene encoding a light chain variable region (VL) comprising a nucleotide sequence with at least 90% (e.g., at least about 95, 96, 97, 98, or 99%) sequence identity to the nucleotide sequence of SEQ ID NO: 5085;
[0409] (xii) an encoded light chain constant region, optionally wherein the nucleotide sequence encoding the light chain constant region comprises the nucleotide sequence of SEQ ID NO: 5007;
[0410] (xiii) a rabbit globin polyA signal region, optionally wherein the rabbit globin polyA signal region comprises the nucleotide sequence of SEQ ID NO: 2122; and
[0411] (xiv) a 3′ AAV ITR, optionally wherein the 3′ AAV ITR comprises the nucleotide sequence of SEQ ID NO: 2078.

[0412] 151. A genetic element comprising in 5′ to 3′ order:
[0413] (i) a 5′ adeno-associated (AAV) ITR, optionally wherein the 5′ AAV ITR comprises the nucleotide sequence of SEQ ID NO: 2076;
[0414] (ii) a CMV(IE) promoter and/or enhancer, optionally wherein the CMV(IE) promoter and/or enhancer comprises the nucleotide sequence of SEQ ID NO: 2239;
[0415] (iii) a CB promoter, optionally wherein the CB promoter comprises the nucleotide sequence of SEQ ID NO: 2083;
[0416] (iv) an intron region, optionally wherein the intron region comprises the nucleotide sequence of SEQ ID NO: 2240;
[0417] (v) a signal sequence, optionally wherein the signal sequence comprises the nucleotide sequence of SEQ ID NO: 5157;
[0418] (vi) a transgene encoding a heavy chain variable region (VH) comprising a nucleotide sequence with at least 90% (e.g., at least about 95, 96, 97, 98, or 99%) sequence identity to the nucleotide sequence of SEQ ID NO: 5089;
[0419] (vii) an encoded heavy chain constant region, optionally wherein the nucleotide sequence encoding the heavy chain constant region comprises the nucleotide sequence of SEQ ID NO: 5029;
[0420] (viii) an encoded furin cleavage site, optionally wherein the nucleotide sequence encoding the furin cleavage site comprises the nucleotide sequence of SEQ ID NO: 1724;
[0421] (ix) an encoded T2A linker, optionally wherein the nucleotide sequence encoding the T2A linker comprises the nucleotide sequence of SEQ ID NO: 1726;
[0422] (x) a signal sequence, optionally wherein the signal sequence comprises the nucleotide sequence of SEQ ID NO: 5159;
[0423] (xi) a transgene encoding a light chain variable region (VL) comprising a nucleotide sequence with at least 90% (e.g., at least about 95, 96, 97, 98, or 99%) sequence identity to the nucleotide sequence of SEQ ID NO: 5093;
[0424] (xii) an encoded light chain constant region, optionally wherein the nucleotide sequence encoding the light chain constant region comprises the nucleotide sequence of SEQ ID NO: 5007;
[0425] (xiii) a rabbit globin polyA signal region, optionally wherein the rabbit globin polyA signal region comprises the nucleotide sequence of SEQ ID NO: 2122; and
[0426] (xiv) a 3′ AAV ITR, optionally wherein the 3′ AAV ITR comprises the nucleotide sequence of SEQ ID NO: 2078.

[0427] 152. A genetic element comprising in 5′ to 3′ order:
[0428] (i) a 5′ adeno-associated (AAV) ITR, optionally wherein the 5′ AAV ITR comprises the nucleotide sequence of SEQ ID NO: 2076;
[0429] (ii) a CMV(IE) promoter and/or enhancer, optionally wherein the CMV(IE) promoter and/or enhancer comprises the nucleotide sequence of SEQ ID NO: 2239;
[0430] (iii) a CB promoter, optionally wherein the CB promoter comprises the nucleotide sequence of SEQ ID NO: 2083;
[0431] (iv) an intron region, optionally wherein the intron region comprises the nucleotide sequence of SEQ ID NO: 2240;
[0432] (v) a signal sequence, optionally wherein the signal sequence comprises the nucleotide sequence of SEQ ID NO: 5157;
[0433] (vi) a transgene encoding a heavy chain variable region (VH) comprising a nucleotide sequence with at least 90% (e.g., at least about 95, 96, 97, 98, or 99%) sequence identity to the nucleotide sequence of SEQ ID NO: 5109;
[0434] (vii) an encoded heavy chain constant region, optionally wherein the nucleotide sequence encoding the heavy chain constant region comprises the nucleotide sequence of SEQ ID NO: 5017;
[0435] (viii) an encoded furin cleavage site, optionally wherein the nucleotide sequence encoding the furin cleavage site comprises the nucleotide sequence of SEQ ID NO: 1724;
[0436] (ix) an encoded T2A linker, optionally wherein the nucleotide sequence encoding the T2A linker comprises the nucleotide sequence of SEQ ID NO: 1726;
[0437] (x) a signal sequence, optionally wherein the signal sequence comprises the nucleotide sequence of SEQ ID NO: 5159;
[0438] (xi) a transgene encoding a light chain variable region (VL) comprising a nucleotide sequence with at least 90% (e.g., at least about 95, 96, 97, 98, or 99%) sequence identity to the nucleotide sequence of SEQ ID NO: 5113;
[0439] (xii) an encoded light chain constant region, optionally wherein the nucleotide sequence encoding the light chain constant region comprises the nucleotide sequence of SEQ ID NO: 5007;
[0440] (xiii) a rabbit globin polyA signal region, optionally wherein the rabbit globin polyA signal region comprises the nucleotide sequence of SEQ ID NO: 2122; and
[0441] (xiv) a 3′ AAV ITR, optionally wherein the 3′ AAV ITR comprises the nucleotide sequence of SEQ ID NO: 2078.

[0442] 153. A genetic element comprising in 5′ to 3′ order:
[0443] (i) a 5′ adeno-associated (AAV) ITR, optionally wherein the 5′ AAV ITR comprises the nucleotide sequence of SEQ ID NO: 2076;
[0444] (ii) a CB promoter, optionally wherein the CB promoter comprises the nucleotide sequence of SEQ ID NO: 2083;
[0445] (iii) an ie exon 1 region, optionally wherein the ie exon 1 region comprises the nucleotide of SEQ ID NO: 2090;
[0446] (iv) an intron region, optionally wherein the intron region comprises the nucleotide sequence of SEQ ID NO: 2095 and SEQ ID NO: 2097;
[0447] (v) a human beta-globin exon region, optionally wherein the human beta-globin exon region comprises the nucleotide sequence of SEQ ID NO: 2093;
[0448] (vi) a signal sequence, optionally wherein the signal sequence comprises the nucleotide sequence of SEQ ID NO: 5157;
[0449] (vii) a transgene encoding a heavy chain variable region (VH) comprising a nucleotide sequence with at least 90% (e.g., at least about 95, 96, 97, 98, or 99%) sequence identity to the nucleotide sequence of SEQ ID NO: 5191;
[0450] (viii) an encoded heavy chain constant region, optionally wherein the nucleotide sequence encoding the heavy chain constant region comprises the nucleotide sequence of SEQ ID NO: 5211;
[0451] (ix) an encoded furin cleavage site, optionally wherein the nucleotide sequence encoding the furin cleavage site comprises the nucleotide sequence of SEQ ID NO: 1724;
[0452] (x) an encoded T2A linker, optionally wherein the nucleotide sequence encoding the T2A linker comprises the nucleotide sequence of SEQ ID NO: 1726;
[0453] (xi) a signal sequence, optionally wherein the signal sequence comprises the nucleotide sequence of SEQ ID NO: 5159;
[0454] (xii) a transgene encoding a light chain variable region (VL) comprising a nucleotide sequence with at least 90% (e.g., at least about 95, 96, 97, 98, or 99%) sequence identity to the nucleotide sequence of SEQ ID NO: 5195;
[0455] (xiii) an encoded light chain constant region, optionally wherein the nucleotide sequence encoding the light chain constant region comprises the nucleotide sequence of SEQ ID NO: 5007;
[0456] (xiv) a rabbit globin polyA signal region, optionally wherein the rabbit globin polyA signal region comprises the nucleotide sequence of SEQ ID NO: 2122; and
[0457] (xv) a 3′ AAV ITR, optionally wherein the 3′ AAV ITR comprises the nucleotide sequence of SEQ ID NO: 2078.

[0458] 154. A genetic element comprising in 5′ to 3′ order:
[0459] (i) a 5′ adeno-associated (AAV) ITR, optionally wherein the 5′ AAV ITR comprises the nucleotide sequence of SEQ ID NO: 2076;
[0460] (ii) a CB promoter, optionally wherein the CB promoter comprises the nucleotide sequence of SEQ ID NO: 2083;
[0461] (iii) an ie exon 1 region, optionally wherein the ie exon 1 region comprises the nucleotide of SEQ ID NO: 2090;
[0462] (iv) an intron region, optionally wherein the intron region comprises the nucleotide sequence of SEQ ID NO: 2095 and SEQ ID NO: 2097;
[0463] (v) a human beta-globin exon region, optionally wherein the human beta-globin exon region comprises the nucleotide sequence of SEQ ID NO: 2093;
[0464] (vi) a signal sequence, optionally wherein the signal sequence comprises the nucleotide sequence of SEQ ID NO: 5157;
[0465] (vii) a transgene encoding a heavy chain variable region (VH) encoded by a nucleotide sequence comprising a nucleotide sequence with at least 90% (e.g., at least about 95, 96, 97, 98, or 99%) sequence identity to the nucleotide sequence of SEQ ID NO: 5223;
[0466] (viii) an encoded heavy chain constant region, optionally wherein the nucleotide sequence encoding the heavy chain constant region comprises the nucleotide sequence of SEQ ID NO: 5213;
[0467] (ix) an encoded furin cleavage site, optionally wherein the nucleotide sequence encoding the furin cleavage site comprises the nucleotide sequence of SEQ ID NO: 1724;
[0468] (x) an encoded T2A linker, optionally wherein the nucleotide sequence encoding the T2A linker comprises the nucleotide sequence of SEQ ID NO: 1726;
[0469] (xi) a signal sequence, optionally wherein the signal sequence comprises the nucleotide sequence of SEQ ID NO: 5159;
[0470] (xii) a transgene encoding a light chain variable region (VL) encoded by a nucleotide sequence comprising a nucleotide sequence with at least 90% (e.g., at least about 95, 96, 97, 98, or 99%) sequence identity to the nucleotide sequence of SEQ ID NO: 5227;
[0471] (xiii) an encoded light chain constant region, optionally wherein the nucleotide sequence encoding the light chain constant region comprises the nucleotide sequence of SEQ ID NO: 5007;
[0472] (xiv) a rabbit globin polyA signal region, optionally wherein the rabbit globin polyA signal region comprises the nucleotide sequence of SEQ ID NO: 2122; and
[0473] (xv) a 3′ AAV ITR, optionally wherein the 3′ AAV ITR comprises the nucleotide sequence of SEQ ID NO: 2078.

[0474] 155. A genetic element comprising in 5′ to 3′ order:
[0475] (i) a 5′ adeno-associated (AAV) ITR, optionally wherein the 5′ AAV ITR comprises the nucleotide sequence of SEQ ID NO: 2076;
[0476] (ii) a CMV(IE) promoter and/or enhancer, optionally wherein the CMV(IE) promoter and/or enhancer comprises the nucleotide sequence of SEQ ID NO: 2239;
[0477] (iii) a CB promoter, optionally wherein the CB promoter comprises the nucleotide sequence of SEQ ID NO: 2083;
[0478] (iv) ie exon 1 region, optionally wherein the ie exon 1 region comprises the nucleotide sequence of SEQ ID NO: 2090;
[0479] (iv) an intron region, optionally wherein the intron region comprises the nucleotide sequence of SEQ ID NO: 2095 and SEQ ID NO: 2097;
[0480] (v) a human beta-globin exon region, optionally wherein the human beta-globin exon region comprises the nucleotide sequence of SEQ ID NO: 2093
[0481] (vi) a signal sequence, optionally wherein the signal sequence comprises the nucleotide sequence of SEQ ID NO: 5157;
[0482] (vii) a transgene encoding a heavy chain variable region (VH) comprising a nucleotide sequence with at least 90% (e.g., at least about 95, 96, 97, 98, or 99%) sequence identity to the nucleotide sequence of SEQ ID NO: 5253;
[0483] (viii) an encoded glycine-serine linker, optionally wherein the glycine-serine linker is encoded by the nucleotide sequence of SEQ ID NO: 5347;
[0484] (ix) a transgene encoding a light chain variable region (VL) comprising a nucleotide sequence with at least 90% (e.g., at least about 95, 96, 97, 98, or 99%) sequence identity to the nucleotide sequence of SEQ ID NO: 5255;
[0485] (x) an encoded light chain constant region, optionally wherein the nucleotide sequence encoding the light chain constant region comprises the nucleotide sequence of SEQ ID NO: 5277;
[0486] (xi) a rabbit globin polyA signal region, optionally wherein the rabbit globin polyA signal region comprises the nucleotide sequence of SEQ ID NO: 2122; and
[0487] (xii) a 3′ AAV ITR, optionally wherein the 3′ AAV ITR comprises the nucleotide sequence of SEQ ID NO: 2078.

[0488] 156. A genetic element comprising in 5′ to 3′ order:
[0489] (i) a 5′ adeno-associated (AAV) ITR, optionally wherein the 5′ AAV ITR comprises the nucleotide sequence of SEQ ID NO: 2076;
[0490] (ii) a GFAP promoter and/or enhancer, optionally wherein the GAFP comprises the nucleotide sequence of SEQ ID NO: 2085;
[0491] (iii) a human beta-globin intron region, optionally wherein the human beta-globin intron region comprises the nucleotide sequence of SEQ ID NO 2240;
[0492] (iv) a signal sequence, optionally wherein the signal sequence comprises the nucleotide sequence of SEQ ID NO: 5157;
[0493] (v) a transgene encoding a heavy chain variable region (VH) comprising a nucleotide sequence with at least 90% (e.g., at least about 95, 96, 97, 98, or 99%) sequence identity to the nucleotide sequence of SEQ ID NO: 5129;
[0494] (vi) an encoded heavy chain constant region, optionally wherein the nucleotide sequence encoding the heavy chain constant region comprises the nucleotide sequence of SEQ ID NO: 5017;
[0495] (vii) an encoded furin cleavage site, optionally wherein the nucleotide sequence encoding the furin cleavage site comprises the nucleotide sequence of SEQ ID NO: 1724;
[0496] (viii) an encoded T2A linker, optionally wherein the nucleotide sequence encoding the T2A linker comprises the nucleotide sequence of SEQ ID NO: 1726;
[0497] (ix) a signal sequence, optionally wherein the signal sequence comprises the nucleotide sequence of SEQ ID NO: 5159;
[0498] (x) a transgene encoding a light chain variable region (VL) comprising a nucleotide sequence with at least 90% (e.g., at least about 95, 96, 97, 98, or 99%) sequence identity to the nucleotide sequence of SEQ ID NO: 5133;
[0499] (xi) an encoded light chain constant region, optionally wherein the nucleotide sequence encoding the light chain constant region comprises the nucleotide sequence of SEQ ID NO: 5021;
[0500] (xii) a rabbit globin polyA signal region, optionally wherein the rabbit globin polyA signal region comprises the nucleotide sequence of SEQ ID NO: 2122; and
[0501] (xiii) a 3′ AAV ITR, optionally wherein the 3′ AAV ITR comprises the nucleotide sequence of SEQ ID NO: 2078.

[0502] 157. A genetic element comprising in 5′ to 3′ order:
[0503] (i) a 5′ adeno-associated (AAV) ITR, optionally wherein the 5′ AAV ITR comprises the nucleotide sequence of SEQ ID NO: 2076;
[0504] (ii) a CB promoter, optionally wherein the CB promoter comprises the nucleotide sequence of SEQ ID NO: 2083;
[0505] (iii) an ie exon 1 region, optionally wherein the ie exon 1 region comprises the nucleotide of SEQ ID NO: 2090;
[0506] (iv) an intron region, optionally wherein the intron region comprises the nucleotide sequence of SEQ ID NO: 2095 and SEQ ID NO: 2097;
[0507] (v) a human beta-globin exon region, optionally wherein the human beta-globin exon region comprises the nucleotide sequence of SEQ ID NO: 2093;
[0508] (vi) a signal sequence, optionally wherein the signal sequence comprises the nucleotide sequence of SEQ ID NO: 5157;
[0509] (vii) a transgene encoding a heavy chain variable region (VH) comprising a nucleotide sequence with at least 90% (e.g., at least about 95, 96, 97, 98, or 99%) sequence identity to the nucleotide sequence of SEQ ID NO: 5257;
[0510] (viii) an encoded glycine-serine linker, optionally wherein the glycine-serine linker is encoded by the nucleotide sequence of SEQ ID NO: 5347;
[0511] (xii) a transgene encoding a light chain variable region (VL) comprising a nucleotide sequence with at least 90% (e.g., at least about 95, 96, 97, 98, or 99%) sequence identity to the nucleotide sequence of SEQ ID NO: 5259;
[0512] (xiii) an encoded light chain constant region, optionally wherein the nucleotide sequence encoding the light chain constant region comprises the nucleotide sequence of SEQ ID NO: 5279;
[0513] (ix) a rabbit globin polyA signal region, optionally wherein the rabbit globin polyA signal region comprises the nucleotide sequence of SEQ ID NO: 2122; and
[0514] (x) a 3′ AAV ITR, optionally wherein the 3′ AAV ITR comprises the nucleotide sequence of SEQ ID NO: 2078.

[0515] 158. A genetic element comprising in 5′ to 3′ order:
[0516] (i) a 5′ adeno-associated (AAV) ITR, optionally wherein the 5′ AAV ITR comprises the nucleotide sequence of SEQ ID NO: 2076;
[0517] (ii) a CB promoter, optionally wherein the CB promoter comprises the nucleotide sequence of SEQ ID NO: 2083;
[0518] (iii) an ie exon 1 region, optionally wherein the ie exon 1 region comprises the nucleotide of SEQ ID NO: 2090;
[0519] (iv) an intron region, optionally wherein the intron region comprises the nucleotide sequence of SEQ ID NO: 2095 and SEQ ID NO: 2097;
[0520] (v) a human beta-globin exon region, optionally wherein the human beta-globin exon region comprises the nucleotide sequence of SEQ ID NO: 2093;
[0521] (vi) a signal sequence, optionally wherein the signal sequence comprises the nucleotide sequence of SEQ ID NO: 5157;
[0522] (vii) a transgene encoding a heavy chain variable region (VH) encoded by a nucleotide sequence comprising a nucleotide sequence with at least 90% (e.g., at least about 95, 96, 97, 98, or 99%) sequence identity to the nucleotide sequence of SEQ ID NO: 5261;
[0523] (viii) an encoded heavy chain constant region, optionally wherein the heavy chain constant region is encoded by the nucleotide sequence of SEQ ID NO: 5215;
[0524] (ix) an encoded furin cleavage site, optionally wherein the nucleotide sequence encoding the furin cleavage site comprises the nucleotide sequence of SEQ ID NO: 1724;
[0525] (x) an encoded T2A linker, optionally wherein the nucleotide sequence encoding the T2A linker comprises the nucleotide sequence of SEQ ID NO: 1726;
[0526] (xi) a signal sequence, optionally wherein the signal sequence comprises the nucleotide sequence of SEQ ID NO: 5159;
[0527] (xii) a transgene encoding a heavy chain variable region comprising a nucleotide sequence with at least 90% (e.g., at least about 95, 96, 97, 98, or 99%) sequence identity to the nucleotide sequence of SEQ ID NO: 5289;
[0528] (xiii) an encoded glycine-serine linker, optionally wherein the glycine-serine linker is encoded by the nucleotide sequence of SEQ ID NO: 5347;
[0529] (xiv) a transgene encoding a light chain variable region (VL) comprising a nucleotide sequence with at least 90% (e.g., at least about 95, 96, 97, 98, or 99%) sequence identity to the nucleotide sequence of SEQ ID NO: 5265;
[0530] (xv) an encoded glycine-serine linker, optionally wherein the glycine-serine linker is encoded by SEQ ID NO: 5243;
[0531] (xvi) a transgene encoding a light chain variable region (VL) comprising a nucleotide sequence with at least 90% (e.g., at least about 95, 96, 97, 98, or 99%) sequence identity to the nucleotide sequence of SEQ ID NO: 5353;
[0532] (xvii) an encoded light chain constant region, optionally wherein the nucleotide sequence encoding the light chain constant region comprises a nucleotide sequence with at least 90% (e.g., at least about 95, 96, 97, 98, or 99%) sequence identity to the nucleotide sequence of SEQ ID NO: 5217;
[0533] (xviii) a rabbit globin polyA signal region, optionally wherein the rabbit globin polyA signal region comprises the nucleotide sequence of SEQ ID NO: 2122; and
[0534] (xix) a 3′ AAV ITR, optionally wherein the 3′ AAV ITR comprises the nucleotide sequence of SEQ ID NO: 2078.

[0535] 159. A genetic element comprising in 5′ to 3′ order:
[0536] (i) a 5′ adeno-associated (AAV) ITR, optionally wherein the 5′ AAV ITR comprises the nucleotide sequence of SEQ ID NO: 2076;
[0537] (ii) a CB promoter, optionally wherein the CB promoter comprises the nucleotide sequence of SEQ ID NO: 2083;
[0538] (iii) an ie exon 1 region, optionally wherein the ie exon 1 region comprises the nucleotide of SEQ ID NO: 2090;
[0539] (iv) an intron region, optionally wherein the intron region comprises the nucleotide sequence of SEQ ID NO: 2095 and SEQ ID NO: 2097;
[0540] (v) a human beta-globin exon region, optionally wherein the human beta-globin exon region comprises the nucleotide sequence of SEQ ID NO: 2093;
[0541] (vi) a signal sequence, optionally wherein the signal sequence comprises the nucleotide sequence of SEQ ID NO: 5032;
[0542] (vii) a transgene encoding a heavy chain variable region (VH) encoded by a nucleotide sequence comprising a nucleotide sequence with at least 90% (e.g., at least about 95, 96, 97, 98, or 99%) sequence identity to the nucleotide sequence of SEQ ID NO: 5269;
[0543] (viii) an encoded heavy chain constant region, optionally wherein the heavy chain constant region is encoded by a nucleotide sequence comprising a nucleotide sequence with at least 90% (e.g., at least about 95, 96, 97, 98, or 99%) sequence identity to the nucleotide sequence of SEQ ID NO: 5219;
[0544] (ix) an encoded furin cleavage site, optionally wherein the nucleotide sequence encoding the furin cleavage site comprises the nucleotide sequence of SEQ ID NO: 1724;
[0545] (x) an encoded T2A linker, optionally wherein the nucleotide sequence encoding the T2A linker comprises the nucleotide sequence of SEQ ID NO: 1726;
[0546] (xi) a signal sequence, optionally wherein the signal sequence comprises the nucleotide sequence of SEQ ID NO: 5159;
[0547] (xii) a transgene encoding a light chain variable region (VL) encoded by a nucleotide sequence comprising a nucleotide sequence with at least 90% (e.g., at least about 95, 96, 97, 98, or 99%) sequence identity to the nucleotide sequence of SEQ ID NO: 5273;
[0548] (xiii) an encoded light chain constant region, optionally wherein the nucleotide sequence encoding the light chain constant region comprises the nucleotide sequence of SEQ ID NO: 5221;
[0549] (ix) a rabbit globin polyA signal region, optionally wherein the rabbit globin polyA signal region comprises the nucleotide sequence of SEQ ID NO: 2122; and
[0550] (x) a 3′ AAV ITR, optionally wherein the 3′ AAV ITR comprises the nucleotide sequence of SEQ ID NO: 2078.

[0551] 160. A genetic element comprising in 5′ to 3′ order:
[0552] (i) a 5′ adeno-associated (AAV) ITR, optionally wherein the 5′ AAV ITR comprises the nucleotide sequence of SEQ ID NO: 2076;
[0553] (ii) a CB promoter, optionally wherein the CB promoter comprises the nucleotide sequence of SEQ ID NO: 2083;
[0554] (iii) an ie exon 1 region, optionally wherein the ie exon 1 region comprises the nucleotide of SEQ ID NO: 2090;
[0555] (iv) an intron region, optionally wherein the intron region comprises the nucleotide sequence of SEQ ID NO: 2095 and SEQ ID NO: 2097;
[0556] (v) a human beta-globin exon region, optionally wherein the human beta-globin exon region comprises the nucleotide sequence of SEQ ID NO: 2093;
[0557] (vi) a signal sequence, optionally wherein the signal sequence comprises the nucleotide sequence of SEQ ID NO: 5032;
[0558] (vii) a transgene encoding a heavy chain variable region (VH) encoded by a nucleotide sequence comprising a nucleotide sequence with at least 90% (e.g., at least about 95, 96, 97, 98, or 99%) sequence identity to the nucleotide sequence of SEQ ID NO: 6512, 6517, 6522, 6527, or 6532;
[0559] (viii) an encoded heavy chain constant region, optionally wherein the heavy chain constant region is encoded by a nucleotide sequence comprising a nucleotide sequence with at least 90% (e.g., at least about 95, 96, 97, 98, or 99%) sequence identity to the nucleotide sequence of SEQ ID NO: 5219;
[0560] (ix) an encoded furin cleavage site, optionally wherein the nucleotide sequence encoding the furin cleavage site comprises the nucleotide sequence of SEQ ID NO: 1724;
[0561] (x) an encoded T2A linker, optionally wherein the nucleotide sequence encoding the T2A linker comprises the nucleotide sequence of SEQ ID NO: 1726;
[0562] (xi) a signal sequence, optionally wherein the signal sequence comprises the nucleotide sequence of SEQ ID NO: 5159;
[0563] (xii) a transgene encoding a light chain variable region (VL) encoded by a nucleotide sequence comprising a nucleotide sequence with at least 90% (e.g., at least about 95, 96, 97, 98, or 99%) sequence identity to the nucleotide sequence of SEQ ID NO: 5273;
[0564] (xiii) an encoded light chain constant region, optionally wherein the nucleotide sequence encoding the light chain constant region comprises the nucleotide sequence of SEQ ID NO: 5221;
[0565] (ix) a rabbit globin polyA signal region, optionally wherein the rabbit globin polyA signal region comprises the nucleotide sequence of SEQ ID NO: 2122; and
[0566] (x) a 3′ AAV ITR, optionally wherein the 3′ AAV ITR comprises the nucleotide sequence of SEQ ID NO: 2078.

[0567] 161. A genetic element comprising in 5′ to 3′ order:
[0568] (i) a 5′ adeno-associated (AAV) ITR, optionally wherein the 5′ AAV ITR comprises the nucleotide sequence of SEQ ID NO: 2076;
[0569] (ii) a CB promoter, optionally wherein the CB promoter comprises the nucleotide sequence of SEQ ID NO: 2083;
[0570] (iii) an ie exon 1 region, optionally wherein the ie exon 1 region comprises the nucleotide of SEQ ID NO: 2090;
[0571] (iv) an intron region, optionally wherein the intron region comprises the nucleotide sequence of SEQ ID NO: 2095 and SEQ ID NO: 2097;
[0572] (v) a human beta-globin exon region, optionally wherein the human beta-globin exon region comprises the nucleotide sequence of SEQ ID NO: 2093;
[0573] (vi) a signal sequence, optionally wherein the signal sequence comprises the nucleotide sequence of SEQ ID NO: 5157;
[0574] (vii) a transgene encoding a heavy chain variable region (VH) encoded by a nucleotide sequence comprising a nucleotide sequence with at least 90% (e.g., at least about 95, 96, 97, 98, or 99%) sequence identity to the nucleotide sequence of SEQ ID NO: 5261;
[0575] (viii) an encoded heavy chain constant region, optionally wherein the heavy chain constant region is encoded by the nucleotide sequence of SEQ ID NO: 5219;
[0576] (ix) an encoded furin cleavage site, optionally wherein the nucleotide sequence encoding the furin cleavage site comprises the nucleotide sequence of SEQ ID NO: 1724;
[0577] (x) an encoded T2A linker, optionally wherein the nucleotide sequence encoding the T2A linker comprises the nucleotide sequence of SEQ ID NO: 1726;
[0578] (xi) a signal sequence, optionally wherein the signal sequence comprises the nucleotide sequence of SEQ ID NO: 5159;
[0579] (xii) a transgene encoding a heavy chain variable region comprising a nucleotide sequence with at least 90% (e.g., at least about 95, 96, 97, 98, or 99%) sequence identity to the nucleotide sequence of SEQ ID NO: 5289, 6512, 6517, 6522, 6527, or 6532;
[0580] (xiii) an encoded glycine-serine linker, optionally wherein the glycine-serine linker is encoded by the nucleotide sequence of SEQ ID NO: 5347;
[0581] (xiv) a transgene encoding a light chain variable region (VL) comprising a nucleotide sequence with at least 90% (e.g., at least about 95, 96, 97, 98, or 99%) sequence identity to the nucleotide sequence of SEQ ID NO: 5265;
[0582] (xv) an encoded glycine-serine linker, optionally wherein the glycine-serine linker is encoded by SEQ ID NO: 5243;
[0583] (xvi) a transgene encoding a light chain variable region (VL) comprising a nucleotide sequence with at least 90% (e.g., at least about 95, 96, 97, 98, or 99%) sequence identity to the nucleotide sequence of SEQ ID NO: 5353;
[0584] (xvii) an encoded light chain constant region, optionally wherein the nucleotide sequence encoding the light chain constant region comprises a nucleotide sequence with at least 90% (e.g., at least about 95, 96, 97, 98, or 99%) sequence identity to the nucleotide sequence of SEQ ID NO: 5217;
[0585] (xvii) a rabbit globin polyA signal region, optionally wherein the rabbit globin polyA signal region comprises the nucleotide sequence of SEQ ID NO: 2122; and
[0586] (xviii) a 3′ AAV ITR, optionally wherein the 3′ AAV ITR comprises the nucleotide sequence of SEQ ID NO: 2078.

[0587] 162. A genetic element comprising in 5′ to 3′ order:
[0588] (i) a 5′ adeno-associated (AAV) ITR, optionally wherein the 5′ AAV ITR comprises the nucleotide sequence of SEQ ID NO: 2076;
[0589] (ii) a CB promoter, optionally wherein the CB promoter comprises the nucleotide sequence of SEQ ID NO: 2083;
[0590] (iii) an ie exon 1 region, optionally wherein the ie exon 1 region comprises the nucleotide of SEQ ID NO: 2090;
[0591] (iv) an intron region, optionally wherein the intron region comprises the nucleotide sequence of SEQ ID NO: 2095 and SEQ ID NO: 2097;
[0592] (v) a human beta-globin exon region, optionally wherein the human beta-globin exon region comprises the nucleotide sequence of SEQ ID NO: 2093;
[0593] (vi) a signal sequence, optionally wherein the signal sequence comprises the nucleotide sequence of SEQ ID NO: 5157;
[0594] (vii) a transgene encoding a heavy chain variable region (VH) encoded by a nucleotide sequence comprising a nucleotide sequence with at least 90% (e.g., at least about 95, 96, 97, 98, or 99%) sequence identity to the nucleotide sequence of SEQ ID NO: 5002;
[0595] (viii) an encoded heavy chain constant region, optionally wherein the heavy chain constant region is encoded by the nucleotide sequence of SEQ ID NO: 5017;
[0596] (ix) an encoded furin cleavage site, optionally wherein the nucleotide sequence encoding the furin cleavage site comprises the nucleotide sequence of SEQ ID NO: 1724;
[0597] (x) an encoded T2A linker, optionally wherein the nucleotide sequence encoding the T2A linker comprises the nucleotide sequence of SEQ ID NO: 1726;
[0598] (xi) a signal sequence, optionally wherein the signal sequence comprises the nucleotide sequence of SEQ ID NO: 5159;
[0599] (xii) a transgene encoding a DARPIN comprising a nucleotide sequence with at least 90% (e.g., at least about 95, 96, 97, 98, or 99%) sequence identity to the nucleotide sequence of SEQ ID NO: 5371;
[0600] (xiii) an encoded glycine-serine linker, optionally wherein the glycine-serine linker is encoded by the nucleotide sequence of SEQ ID NO: 5347;
[0601] (xiv) a transgene encoding a light chain variable region (VL) comprising a nucleotide sequence with at least 90% (e.g., at least about 95, 96, 97, 98, or 99%) sequence identity to the nucleotide sequence of SEQ ID NO: 5005;
[0602] (xvi) an encoded light chain constant region, optionally wherein the nucleotide sequence encoding the light chain constant region comprises a nucleotide sequence with at least 90% (e.g., at least about 95, 96, 97, 98, or 99%) sequence identity to the nucleotide sequence of SEQ ID NO: 5007;
[0603] (xvii) a rabbit globin polyA signal region, optionally wherein the rabbit globin polyA signal region comprises the nucleotide sequence of SEQ ID NO: 2122; and
[0604] (xviii) a 3′ AAV ITR, optionally wherein the 3′ AAV ITR comprises the nucleotide sequence of SEQ ID NO: 2078.

[0605] 163. An isolated, e.g., recombinant, antibody molecule encoded by the isolated, e.g., recombinant, nucleic acid of any one of embodiments 1-81, 89-94, or 228-264, or the genetic element of any one of embodiments 81-162 or 265-275.

[0606] 164. An isolated, e.g., recombinant, AAV vector comprising the isolated nucleic acid of any one of embodiments 1-81, 89-94, or 228-264, or the genetic element of any one of embodiments 81-162 or 265-275.

[0607] 165. The recombinant AAV vector of embodiment 164, which further encodes:
[0608] (i) an AAV capsid polypeptide, e.g., an AAV capsid variant, e.g., a structural protein, wherein the capsid protein comprises a VP1 polypeptide, a VP2 polypeptide, and/or a VP3 polypeptide, optionally wherein the VP1 polypeptide, the VP2 polypeptide, and/or the VP3 polypeptide are encoded by at least one Cap gene; and/or
[0609] (ii) a Rep protein, e.g., a non-structural protein, wherein the Rep protein comprises a Rep78 protein, a Rep68, Rep52 protein, and/or a Rep40 protein, optionally wherein the Rep78 protein, the Rep68 protein, the Rep52 protein, and/or the Rep40 protein are encoded by at least one Rep gene.

[0610] 166. An isolated, e.g., recombinant, AAV particle comprising:
[0611] (i) an AAV capsid polypeptide, e.g., an AAV capsid variant; and
[0612] (ii) the isolated nucleic acid of any one of embodiments 1-80 or 228-264, the genetic element of any one of embodiments 81-162 or 265-275, and/or the AAV vector of embodiment 164 or embodiment 165.

[0613] 167. The AAV particle of embodiment 166, wherein the AAV capsid polypeptide, e.g., the AAV capsid variant, comprises a VOY101 capsid polypeptide, a VOY9P39 capsid polypeptide, a VOY9P33 capsid protein, a AAVPHP.B (PHP.B) capsid polypeptide, a AAVPHP.N (PHP.N) capsid polypeptide, an AAV1 capsid polypeptide, an AAV2 capsid polypeptide, an AAV5 capsid polypeptide, an AAV9 capsid polypeptide, an AAV9 K449R capsid polypeptide, an AAVrh10 capsid polypeptide, or a functional variant thereof.

[0614] 168. The AAV particle of embodiment 166 or 167, wherein:
[0615] (i) the AAV capsid polypeptide, e.g., the AAV capsid variant, comprises the amino acid sequence of SEQ ID NO: 138, or an amino acid sequence at least 80% (e.g., at least about 85, 90, 95, 96, 97, 98, or 99%) identical thereto;
[0616] (ii) the AAV capsid polypeptide, e.g., the AAV capsid variant, an amino acid sequence having at least one, two or three modifications, but not more than 30, 20 or 10 modifications of the amino acid sequence of SEQ ID NO: 138; and/or
[0617] (iii) the AAV capsid polypeptide, e.g., the AAV capsid variant, an amino acid sequence encoded by the nucleotide sequence of SEQ ID NO: 137 or a sequence with at least identical thereto;
[0618] (iv) the AAV capsid polypeptide, e.g., the AAV capsid variant, comprises the amino acid sequence of SEQ ID NO: 11, or an amino acid sequence at least 80% (e.g., at least about 85, 90, 95, 96, 97, 98, or 99%) identical thereto;
[0619] (v) the AAV capsid polypeptide, e.g., the AAV capsid variant, comprises an amino acid sequence having at least one, two or three modifications but not more than 30, 20 or 10 modifications of the amino acid sequence of SEQ ID NO: 11; and/or
[0620] (vi) the nucleotide sequence encoding the AAV capsid polypeptide, e.g., the AAV capsid variant, comprises the nucleotide sequence of SEQ ID NO: 137, or a sequence at least 80% (e.g., at least about 85, 90, 95, 96, 97, 98, or 99%) identical thereto.

[0621] 169. The AAV particle of any one of embodiments 166-168, wherein the AAV capsid polypeptide, e.g., the AAV capsid variant, comprises:
[0622] (i) an amino acid substitution at position K449, e.g., a K449R substitution, numbered according to SEQ ID NO:138;
[0623] (ii) a peptide comprising the amino acid sequence of TLAVPFK (SEQ ID NO: 1262), optionally wherein the peptide is present immediately subsequent to position 588, relative to a reference sequence numbered according to SEQ ID NO:138;
[0624] (iii) an amino acid other than “A” at position 587 and/or an amino acid other than “Q” at position 588, numbered according to SEQ ID NO: 138;
[0625] (iv) the amino acid substitution of A587D and/or Q588G, numbered according to SEQ ID NO:138. 170. The AAV particle of embodiment 166 or 167, wherein:
[0626] (i) the AAV capsid polypeptide, e.g., the AAV capsid variant, comprises the amino acid sequence of SEQ ID NO: 12, or an amino acid sequence at least 80% (e.g., at least about 85, 90, 95, 96, 97, 98, or 99%) identical thereto;
[0627] (ii) the AAV capsid polypeptide, e.g., the AAV capsid variant, comprises an amino acid sequence having at least one, two or three modifications, but not more than 30, 20 or 10 modifications of the amino acid sequence of SEQ ID NO: 12;
[0628] (iii) the AAV capsid polypeptide, e.g., the AAV capsid variant, comprises an amino acid sequence encoded by the nucleotide sequence of SEQ ID NO: 13, or a sequence at least 80% (e.g., at least about 85, 90, 95, 96, 97, 98, or 99%) identical thereto;
[0629] (iv) the nucleotide sequence encoding the AAV capsid polypeptide, e.g., the AAV capsid variant, comprises the nucleotide sequence of SEQ ID NO: 13, or a nucleotide sequence at least 80% (e.g., at least about 85, 90, 95, 96, 97, 98, or 99%) identical thereto.

[0630] 171. The AAV particle of embodiment 166 or 167, wherein:
[0631] (i) the AAV capsid polypeptide, e.g., the AAV capsid variant, comprises the amino acid sequence of SEQ ID NO: 14, or an amino acid sequence at least 80% (e.g., at least about 85, 90, 95, 96, 97, 98, or 99%) identical thereto;
[0632] (ii) the AAV capsid polypeptide, e.g., the AAV capsid variant, comprises an amino acid sequence having at least one, two or three modifications, but not more than 30, 20 or 10 modifications of the amino acid sequence of SEQ ID NO: 14;
[0633] (iii) the AAV capsid polypeptide, e.g., the AAV capsid variant, comprises an amino acid sequence encoded by the nucleotide sequence of SEQ ID NO: 15, or a sequence at least 80% (e.g., at least about 85, 90, 95, 96, 97, 98, or 99%) identical thereto;
[0634] (iv) the nucleotide sequence encoding the AAV capsid polypeptide, e.g., the AAV capsid variant, comprises the nucleotide sequence of SEQ ID NO: 15, or a nucleotide sequence at least 80% (e.g., at least about 85, 90, 95, 96, 97, 98, or 99%) identical thereto.

[0635] 172. The AAV particle of any one of embodiment 166-169, wherein the AAV capsid polypeptide, e.g., the AAV capsid variant, comprises:
[0636] (a) the amino acid substitution of K449R numbered according to SEQ ID NO:138; and a peptide comprising the amino acid sequence of TLAVPFK, optionally wherein the peptide is present immediately subsequent to position 588 of SEQ ID NO:138;
[0637] (b) the amino acid substitution of K449R, numbered according to SEQ ID NO: 138; an peptide comprising the amino acid sequence of TLAVPFK (SEQ ID NO: 1262), wherein the insert is present immediately subsequent to position 588, relative to a reference sequence numbered according to SEQ ID NO: 138; and the amino acid substitutions of A587D and Q588G, numbered according to SEQ ID NO: 138; or
[0638] (c) a peptide comprising the amino acid sequence of TLAVPFK (SEQ ID NO: 1262), wherein the insert is present immediately subsequent to position 588, relative to a reference sequence numbered according to SEQ ID NO: 138; and the amino acid substitutions of A587D and Q588G, numbered according to SEQ ID NO: 138.

[0639] 173. The AAV particle of any one of embodiments 166, 167, 169 or 172, wherein:
[0640] (i) the AAV capsid polypeptide, e.g., the AAV capsid variant, comprises the amino acid sequence of SEQ ID NO: 1, or an amino acid sequence at least 80% (e.g., at least about 85, 90, 95, 96, 97, 98, or 99%) identical thereto;
[0641] (ii) the AAV capsid polypeptide, e.g., the AAV capsid variant, comprises an amino acid sequence having at least one, two or three modifications, but not more than 30, 20 or 10 modifications of the amino acid sequence of SEQ ID NO: 1.

[0642] 174. An isolated, e.g., recombinant, AAV particle comprising an AAV capsid variant and a nucleic acid encoding an antibody molecule that binds HER2/neu, wherein the AAV capsid variant:
[0643] (i) is enriched at least about 5, 6, 7, 8, 9, 10, 20, 30, 40, 50, 100, 200, 300, or 400-fold, in the brain, e.g., the brain of a non-human primate (NHP) compared to a reference sequence of SEQ ID NO: 138 (e.g., as provided in Table 55), e.g., when measured by an assay as described in Example 9;
[0644] (ii) transduces a brain region, e.g., a brain region of an NHP, e.g., selected from dentate nucleus, cerebellar cortex, cerebral cortex, brain stem, hippocampus, thalamus and putamen, wherein the level of transduction is at least 5, 10, 50, 100, 200, 500, 1,000, 2,000, 5,000, or 10,000-fold greater as compared to a reference sequence of SEQ ID NO: 138, e.g., when measured by an assay, e.g., an immunohistochemistry assay, a qRT-PCR, or a RT-ddPCR assay, e.g., as described in Example 10;
[0645] (iii) delivers an increased level of a payload to a brain region, e.g., a brain region of an NHP, optionally wherein the level of the payload is increased by at least 500, 1,000, 2,000, 5,000, or 10,000-fold, as compared to a reference sequence of SEQ ID NO: 138, e.g., when measured by an assay, e.g., a qRT-PCR or a RT-ddPCR assay (e.g., as described in Example 10), optionally wherein the brain region comprises a frontal cortex, sensory cortex, motor cortex, putamen, thalamus, cerebellar cortex, dentate nucleus, caudate, and/or hippocampus;
[0646] (iv) delivers an increased level of a payload to a spinal cord region, e.g., a spinal cord region of an NHP, optionally wherein the level of the payload is increased by at least 10, 20, 50, 100, 200, 300, 400, 500, 600, 700, 800 or 900-fold, as compared to a reference sequence of SEQ ID NO: 138, e.g., when measured by an assay, e.g., a qRT-PCR assay (e.g., as described in Example 10), optionally wherein the spinal cord region comprises a cervical, thoracic, and/or lumbar region; and/or
[0647] (v) delivers an increased level of viral genomes to a brain region, e.g., a brain region of an NHP, optionally wherein the level of viral genomes is increased by at least 5, 10, 20, 30, 40 or 50-fold, as compared to a reference sequence of SEQ ID NO: 138, e.g., when measured by an assay, e.g., a qRT-PCR or a RT-ddPCR assay (e.g., as described in Example 10), optionally wherein the brain region comprises a frontal cortex, sensory cortex, motor cortex, putamen, thalamus, cerebellar cortex, dentate nucleus, caudate, and/or hippocampus.

[0648] 175. An isolated, e.g., recombinant, AAV particle comprising an AAV capsid variant and a nucleic acid encoding an antibody molecule that binds HER2/neu, wherein the AAV capsid variant comprises:
[0649] (a) the amino acid sequence of any of SEQ ID NO: 3648-3659 or 11725-11775, 11785, 11798, or 11819; or
[0650] (b) at least 5, 6, 7, 8, or 9 consecutive amino acids from the amino acid sequence of any of SEQ ID NO: 3648-3659; and wherein the capsid variant comprises the amino acid sequence of SEQ ID NO: 138, or an amino acid sequence with at least 95% sequence identity thereto.

[0651] 176. The isolated AAV particle of embodiment 175, wherein the amino acid sequence is present immediately subsequent to position 586, 588, or 589, relative to a reference sequence numbered according to the amino acid sequence of SEQ ID NO: 138.

[0652] 177. An isolated, e.g., recombinant, AAV particle comprising an AAV capsid variant and a nucleic acid encoding an antibody molecule that binds HER2/neu, wherein the AAV capsid variant comprises:

(i)
(SEQ ID NO: 3678)
PLNG;
(ii)
(SEQ ID NO: 3679)
PLNGA;
(iii)
(SEQ ID NO: 3680)
PLNGAV;
(iv)
(SEQ ID NO: 3681)
PLNGAVH;
(v)
(SEQ ID NO: 3682)
PLNGAVHL;
or
(vi)
(SEQ ID NO: 3648)
PLNGAVHLY;

[0653] wherein the capsid variant comprises the amino acid sequence of SEQ ID NO: 138, or an amino acid sequence with at least 95% sequence identity thereto.

[0654] 178. The recombinant AAV particle of embodiment 177, wherein the amino acid sequence of (i), (ii), (iii), (iv), (v), (vi) is present in loop VIII, relative to a reference sequence of SEQ ID NO: 138.

[0655] 179. The recombinant AAV particle of embodiment 177 or 178, wherein the amino acid sequence of (i), (ii), (iii), (iv), (v), (vi) is present immediately subsequent to position 586, relative to a reference sequence numbered according to the amino acid sequence of SEQ ID NO: 138.

[0656] 180. The recombinant AAV particle of any one of embodiments 174-176, comprising:
[0657] (i) the amino acid sequence of PLNGAVHLY (SEQ ID NO: 3648), wherein the amino acid sequence of PLNGAVHLY (SEQ ID NO: 3648) is present immediately subsequent to position 586, relative to a reference sequence numbered according to the amino acid sequence of SEQ ID NO: 138;
[0658] (ii) the amino acid sequence of GGTLAVVSL (SEQ ID NO: 3654), wherein the amino acid sequence of GGTLAVVSL (SEQ ID NO: 3654) is present immediately subsequent to position 586, relative to a reference sequence numbered according to the amino acid sequence of SEQ ID NO: 138;
[0659] (iii) the amino acid sequence of IVMNSLK (SEQ ID NO: 3651), wherein the amino acid sequence of IVMNSLK (SEQ ID NO: 3651) is present immediately subsequent to position 588, relative to a reference sequence numbered according to the amino acid sequence of SEQ ID NO: 138; or
[0660] (iv) the amino acid sequence of any of SEQ ID NOs: 3649, 3650, 3652, 3653, or 3655-3659, wherein the amino acid sequence of any of the aforesaid sequences is present immediately subsequent to position 589, relative to a reference sequence numbered according to the amino acid sequence of SEQ ID NO: 138.

[0661] 181. The recombinant AAV particle of any one of embodiments 166-180, wherein:
[0662] (i) the capsid variant further comprises a substitution at position K449, numbered according to SEQ ID NO: 138;
[0663] (ii) the capsid variant further comprises an insertion, substitution, and/or deletion, in loop I, II, IV and/or VI;
[0664] (iii) the capsid variant comprises an amino acid residue other than “A” at position 587 and/or an amino acid residue other than “Q” at position 588, numbered according to SEQ ID NO: 138; or
[0665] (iv) the nucleotide sequence encoding the capsid variant comprises the nucleotide sequence of SEQ ID NO: 137, or a sequence with at least 95% sequence identity thereto.

[0666] 182. The recombinant AAV particle of any one of embodiments 174-181, wherein:
[0667] (i) the AAV capsid variant comprises the amino acid sequence of any one of SEQ ID NOs: 3636-3647, or an amino acid sequence with at least 95% sequence identity thereto; or
[0668] (ii) the nucleotide sequence encoding the AAV capsid variant comprises the nucleotide sequence of any one of SEQ ID NOs: 3623-3635, or a nucleotide sequence with at least 90% sequence identity thereto.

[0669] 183. The recombinant AAV particle of any one of embodiments 174-182, wherein the encoded antibody molecule comprises:
[0670] (i) a heavy chain variable region comprising one, two, or three HC CDR sequence of any of the CDR sequences of Table 11A-11C; and/or
[0671] (ii) a light chain variable region comprising one, two, or three LC CDR sequence of any of the CDR sequences of Table 11A-11C.

[0672] 184. The recombinant AAV particle of any one of embodiments 174-183, wherein the encoded antibody molecule comprises:
[0673] (i) a heavy chain variable region (VH) comprising an amino acid sequence of any of the VH sequences of Table 11A-11C, or a sequence having at least 80% (e.g., 85, 90, 95, 96, 97, 98, or 99%) sequence identity to any of the VH sequences of Table 11A-11C; and/or
[0674] (ii) a light chain variable region (VL) comprising an amino acid sequence of any of the VL sequences of Table 11A-11C, or a sequence having at least 80% (e.g., 85, 90, 95, 96, 97, 98, or 99%) sequence identity to any of the VL sequences of Table 11A-11C.

[0675] 185. The recombinant AAV particle of any one of embodiments 174-184, wherein the encoded antibody molecule comprises:
[0676] (i) a heavy chain constant region comprising an amino acid sequence of any of the heavy chain constant region sequences of Table 11A-11C, or a sequence having at least 80% (e.g., 85, 90, 95, 96, 97, 98, or 99%) sequence identity to the heavy chain constant region sequences of Table 11A-11C; and/or
[0677] (ii) a light chain constant region (CL) comprising an amino acid sequence of any of the CL sequences of Table 11A-11C, or a sequence having at least 80% (e.g., 85, 90, 95, 96, 97, 98, or 99%) sequence identity to any of the CL sequences of Table 11A-11C.

[0678] 186. The recombinant AAV particle of any one of embodiments 174-185, wherein the encoded antibody molecule comprises:
[0679] (i) a heavy chain comprising an amino acid sequence of any of the heavy chain sequences of Table 11A-11C, or a sequence having at least 80% (e.g., 85, 90, 95, 96, 97, 98, or 99%) sequence identity to any of the heavy chain sequences of Table 11A-11C; and/or
[0680] (ii) a light chain comprising an amino acid sequence of any of the light chain sequences of Table 11A-11C, or a sequence having at least 80% (e.g., 85, 90, 95, 96, 97, 98, or 99%) sequence identity to any of the light chain sequences of Table 11A-11C.

[0681] 187. The recombinant AAV particle of any one of embodiments 174-185, wherein the encoded antibody molecule is a full-length antibody, a bispecific antibody, a Fab, a F(ab′)2, a Fv, a single chain Fv fragment (scFv), single domain antibody, or a camelid antibody.

[0682] 188. The recombinant AAV particle of any one of embodiments 174-185, which comprises the nucleic acid of any one of embodiments 1-80 or 228-264.

[0683] 189. The recombinant AAV particle of any one of embodiments 174-185, which comprises the nucleic acid encoding a bispecific antibody molecule that binds HER2/neu of any one of embodiments 67-80 or 239-256.

[0684] 190. The recombinant AAV particle of any one of embodiments 174-185, which comprises a genetic element comprising the nucleic acid encoding the antibody molecule of any one of embodiments 81-162 or 265-275.

[0685] 191. A cell, e.g., a host cell, comprising the nucleic acid of any one of embodiments 1-80, 89-94, or 228-264, the genetic element of any one of embodiments-81-162 or 265-275, and/or the AAV vector of any one of embodiments 164 or 165, optionally wherein the cell is a mammalian cell, an insect cell, or a bacterial cell.

[0686] 192. A method of making an isolated, e.g., recombinant, AAV particle, the method comprising
[0687] (i) providing a host cell comprising the genetic element of any one of embodiments 81-162 or 265-275; and
[0688] (ii) incubating the host cell under conditions suitable to enclose the genetic element in an AAV capsid polypeptide, e.g., an AAV capsid variant;
[0689] thereby making the isolated AAV particle.

[0690] 193. The method of embodiment 192, further comprising, prior to step (i), introducing a first nucleic acid molecule comprising the genetic element into the host cell.

[0691] 194. The method of embodiment 192 or embodiment 193, wherein the host cell comprises a second nucleic acid encoding an AAV capsid polypeptide, e.g., an AAV capsid variant.

[0692] 195. The method of embodiment 193, further comprising introducing the second nucleic acid into the cell, optionally wherein the second nucleic acid molecule is introduced into the host cell prior to, concurrently with, or after the first nucleic acid molecule.

[0693] 196. A pharmaceutical composition comprising an AAV particle of any one of embodiments 166-195, an AAV particle comprising the AAV vector of embodiments 164 or 165, the genetic element of any one of embodiments 80-162 or 265-275, or the isolated nucleic acid of any one of embodiments 1-80, 89-94, or 228-264, and a pharmaceutically acceptable excipient.

[0694] 197. The pharmaceutical composition of embodiment 196, wherein the pharmaceutically acceptable excipient comprises a buffer, a gel, a hydrogel, or artificial cerebrospinal fluid.

[0695] 198. A method of delivering an exogenous antibody molecule that binds to HER2/neu, to a subject, comprising administering an effective amount of the pharmaceutical composition comprising a plurality of AAV particles, e.g., comprising the AAV vector of embodiments 164 or 165, the genetic element of any one of embodiments 81-162 or 265-275, or the isolated nucleic acid of any one of embodiments 1-80, 89-94, or 228-264.

[0696] 199. The method of embodiment 198, wherein:
[0697] (i) the subject has, has been diagnosed with having, or is at risk of having a disease associated with expression of HER2/neu; and/or
[0698] (ii) the subject has, has been diagnosed with having, or is at risk of having a cancer expressing HER2/neu.

[0699] 200. A method of treating a subject having or diagnosed with having cancer expressing HER2/neu, comprising administering to the subject an effective amount of the pharmaceutical composition of embodiment 196. 201. The method of any one of embodiments 198-200, wherein the disease associated with HER2/neu expression is a HER2/neu-positive solid tumor.

[0700] 202. The method of embodiment 201, wherein the HER2/neu positive tumor is metastatic.

[0701] 203. The method of any one of embodiments 201 or 202, wherein the HER/neu positive cancer is breast cancer, gastric cancer, gastroesophageal junction cancer, colorectal cancer, lung cancer (e.g., non-small cell lung carcinoma), pancreatic cancer, bladder cancer, salivary duct cancer, ovarian cancer (e.g., epithelial ovarian cancer), endometrial cancer, prostate cancer, bone cancer and brain cancer.

[0702] 204. The method of any one of embodiments 201-203, wherein the HER2/neu positive cancer has metastasized to the central nervous system (CNS).

[0703] 205. The method of any one of embodiments 201-204, wherein the HER2/neu positive cancer is breast cancer.

[0704] 206. The method of any one of embodiments 198-205, wherein the subject is a human.

[0705] 207. The method of any one of embodiments 198-206, wherein the subject has previously undergone localized therapy for a HER2/neu-positive solid tumor.

[0706] 208. The method of any one of embodiments 198-207, wherein the subject has previously undergone surgical resection of a HER2/neu-positive solid tumor.

[0707] 209. The method of any one of embodiments 198-208, wherein the subject has previously undergone radiotherapy for a HER2/neu-positive solid tumor.

[0708] 210. The method of any one of embodiments 198-209, wherein the subject has previously undergone immunotherapy and/or chemotherapy for a HER2/neu-positive solid tumor.

[0709] 211. The method of any one of embodiments 198-210, wherein the subject has triple-negative breast cancer.

[0710] 212. The method of any one of embodiments 198-211, wherein the HER2/neu positive tumor is refractory.

[0711] 213. The method of any one of embodiments 198-212, wherein the method reduces or prevents metastases.

[0712] 214. The method of embodiment 213, wherein the metastases are brain metastases.

[0713] 215. The method of any one of embodiments 198-214, wherein the AAV particle is administered to the subject intramuscularly, intravenously, intratumorally, intracerebrally, intrathecally, intraarterially, intracerebroventricularly, via intraparenchymal administration, via focused ultrasound (FUS), e.g., coupled with the intravenous administration of microbubbles (FUS-MB), or MRI-guided FUS coupled with intravenous administration, or via intra-cisterna magna injection (ICM).

[0714] 216. The method of any one of embodiments 198-215, wherein the AAV particle is administered to the subject intravenously.

[0715] 217. The method of any one of embodiments 198-215, wherein the AAV particle is administered to the subject intratumorally.

[0716] 218. The method of any one of embodiments 198-215, wherein the AAV particle is administered to the subject via intra-cisterna magna injection (ICM).

[0717] 219. The method of any one of embodiments 198-218, wherein the AAV particle is administered prior to, concurrently with, or post a surgical resection of a HER2/neu-positive solid tumor.

[0718] 220. The method of any one of embodiments 198-218, wherein the AAV particle is administered to a site of surgical resection of a HER2/neu-positive solid tumor in the subject.

[0719] 221. The method of any one of embodiments 198-218, wherein the AAV particle is administered to the area around a site of surgical resection of a HER2/neu-positive solid tumor, e.g., the margins of the tumor, in the subject.

[0720] 222. The method of any one of embodiments 198-221, further comprising administration of an additional therapeutic agent and/or therapy suitable for treatment or prevention of a disorder associated with HER2/neu expression.

[0721] 223. The method of embodiment 222, wherein the additional therapeutic agent comprises:
[0722] (i) trastuzumab, pertuzumab, a chemotherapeutic agent, or a combination thereof;
[0723] (ii) trastuzumab emtansine; and/or
[0724] (iii) trastuzumab, tucatinib, capecitabine, Fam-trastuzumab deruxtecan-nxki, Lapatanib/capecitabine, Lapatanib, Margetuxumab, a chemotherapeutic agent, Neratanib/capecitabine, or a combination thereof.

[0725] 224. The isolated nucleic acid of any one of embodiments 1-80, 89-94, or 228-264, the genetic element of any one of embodiments 81-162 or 265-275, the AAV vector of embodiment 164 or 165, the AAV particle of embodiments 166-200, or the pharmaceutical composition of embodiment 196, for use in the manufacture of a medicament.

[0726] 225. The isolated nucleic acid of any one of embodiments 1-80, 89-94, or 228-264, the genetic element of any one of embodiments 81-162 or 265-275, the AAV vector of embodiment 164 or 165, the AAV particle of embodiments 166-200, or the pharmaceutical composition of embodiment 196, for use in the treatment of a disease associated with expression of HER2/neu or a cancer expressing HER2/neu.

[0727] 226. Use of the isolated nucleic acid of any one of embodiments 1-80, 89-94, or 228-264, the genetic element of any one of embodiments 81-162 or 265-275, the AAV vector of embodiment 164 or 165, the AAV particle of embodiments 166-200, or the pharmaceutical composition of embodiment 196, in the manufacture of a medicament.

[0728] 227. Use of the isolated nucleic acid of any one of embodiments 1-80, 89-94, or 228-264, the genetic element of any one of embodiments 81-162 or 265-275, the AAV vector of embodiment 164 or 165, the AAV particle of embodiments 158-182, or the pharmaceutical composition of embodiment 196, in the manufacture of a medicament for treating a disease associated with expression of HER2/neu or a cancer expressing HER2/neu.

[0729] 228. An isolated, e.g., recombinant, nucleic acid comprising a transgene encoding an antibody molecule that binds to HER2/neu, wherein the encoded anti-HER2 antibody comprises:
[0730] (i) a HC CDR1, a HC CDR2, a HC CDR3, a LC CDR1, a LC CDR2 and an LC CDR3 comprising the amino acid sequences of SEQ ID NO: 5281, 5282, 6510, 5287, 5288, and 5289, respectively;
[0731] (ii) a HC CDR1, a HC CDR2, a HC CDR3, a LC CDR1, a LC CDR2 and an LC CDR3 comprising the amino acid sequences of SEQ ID NO: 5281, 5282, 6515, 5287, 5288, and 5289, respectively;
[0732] (iii) a HC CDR1, a HC CDR2, a HC CDR3, a LC CDR1, a LC CDR2 and an LC CDR3 comprising the amino acid sequences of SEQ ID NO: 5281, 5282, 6530, 5287, 5288, and 5289, respectively;
[0733] (iv) a HC CDR1, a HC CDR2, a HC CDR3, a LC CDR1, a LC CDR2 and an LC CDR3 comprising the amino acid sequences of SEQ ID NO: 5281, 5282, 6530, 5287, 5288, and 5289, respectively.

[0734] 229. An isolated, e.g., recombinant, nucleic acid comprising a transgene encoding an antibody molecule that binds to HER2/neu, wherein the antibody comprises a heavy chain variable region comprising an amino acid selected from SEQ ID NO: 5001, 5367, 5172, 5106, 5010, 5069, 5192, 5224, 5090, 5110, 5254, 5258, 5130, 5262, 5270, 5326, 6511, 6516, 6521, 6526, 6531, 6536, 6539, 6542, 6545, or 6548, or a sequence substantially identical (e.g., having at least about 80%, 85%, 90%, 92%, 95%, 97%, 98%, or 99% sequence identity) to any of the aforesaid sequences.

[0735] 230. An isolated, e.g., recombinant, nucleic acid comprising a transgene encoding an antibody molecule that binds to HER2/neu, wherein the antibody comprises a heavy chain variable region encoded by a nucleic acid sequence selected from SEQ ID NO: 5002, 5171, 5105, 5009, 5068, 5191, 5223, 5089, 5109, 5253, 5257, 5129, 5261, 5269, 5330, 6512, 6517, 6522, 6527, 6532, 6537, 6540, 6543, 6546, or 6549; or a sequence substantially identical (e.g., having at least about 80%, 85%, 90%, 92%, 95%, 97%, 98%, or 99% sequence identity) to any of the aforesaid sequences.

[0736] 231. An isolated, e.g., recombinant, nucleic acid comprising a transgene encoding an antibody molecule that binds to HER2/neu, wherein the antibody comprises a heavy chain variable region comprising:
[0737] (i) one, two, three or all of an amino acid other than D at position 102, an amino acid other than M at position 107, an amino acid other than D at position 108, and/or an amino acid other than Y at position 109, relative to a reference sequence numbered according to the amino acid sequence of SEQ ID NO: 5001;
[0738] (ii) one, two, three or all of the amino acid W at position 102, the amino acid F at position 107, A at position 108, and/or L at position 109, relative to a reference sequence numbered according to the amino acid sequence of SEQ ID NO: 5001;
[0739] (iii) the amino acid W at position 102, the amino acid F at position 107, the amino acid A position 108, and the amino acid L at position 109, relative to a reference sequence numbered according to the amino acid sequence of SEQ ID NO: 5001;
[0740] (iv) the amino acid W at position 102, the amino acid F at position 107, and the amino acid A position 108, relative to a reference sequence numbered according to the amino acid sequence of SEQ ID NO: 5001;
[0741] (v) the amino acid W at position 102, the amino acid F at position 107, and the amino acid L at position 109, relative to a reference sequence numbered according to the amino acid sequence of SEQ ID NO: 5001;
[0742] (vi) the amino acid W at position 102, the amino acid A position 108, and the amino acid L at position 109, relative to a reference sequence numbered according to the amino acid sequence of SEQ ID NO: 5001; or
[0743] (vii) the amino acid F at position 107, the amino acid A position 108, and the amino acid L at position 109, relative to a reference sequence numbered according to the amino acid sequence of SEQ ID NO: 5001.

[0744] 232. An isolated, e.g., recombinant, nucleic acid comprising a transgene encoding an antibody molecule that binds to HER2/neu, wherein the antibody comprises a heavy chain variable region comprising:
[0745] (i) an amino acid substitution at one, two, three, or all of positions, 98 (e.g., D98W), 100 (e.g., M100F), 101 (e.g., D101A), and/or 102 (e.g., Y102L), of the CDR3 region according to Kabat numbering;
[0746] (ii) amino acid substitutions D98W, M100F, D101A, and Y102L, numbered according to Kabat;
[0747] (iii) amino acid substitutions D98W, M100F, and D101A, numbered according to Kabat;
[0748] (iv) amino acid substitutions D98W, M100F, and Y102L, numbered according to Kabat;
[0749] (v) amino acid substitutions D98W, D101A, and Y102L, numbered according to Kabat;
[0750] (vi) amino acid substitutions M100F, D101A, and Y102L, numbered according to Kabat.

[0751] 233. The isolated nucleic acid of any one of embodiments 228-232, wherein the encoded antibody molecule is a full-length antibody, a bispecific antibody, a Fab, a F(ab′)2, a Fv, a single chain Fv fragment (scFv), single domain antibody, or a camelid antibody.

[0752] 234. The isolated nucleic acid of any one of embodiments 228-233, which encodes an Fc region or functional variant thereof.

[0753] 235. The isolated nucleic acid of any one of embodiments 228-233, wherein the encoded antibody comprises an scFv and an Fc region.

[0754] 236. The isolated nucleic acid of embodiment 234 or 235, wherein the Fc region has reduced affinity, e.g., ablated, affinity for an Fc receptor, e.g., as compared to a reference, wherein the reference is a wild-type Fc receptor.

[0755] 237. The isolated nucleic acid of any one of embodiments 234-236, wherein the Fc region comprises a mutation at one, two, or all of positions I253 (e.g., I235A), H310 (e.g., H310A or H310Q), and/or H435 (e.g., H435A or H435Q), numbered according to the EU index as in Kabat.

[0756] 238. The isolated nucleic acid of embodiment 234 or 235, wherein the Fc region has reduced effector function (e.g., reduced ADCC), compared to a reference wherein the reference is a wild-type Fc receptor.

[0757] 239. The isolated nucleic acid of any one of embodiments 234-237, wherein the Fc region comprises a mutation at one, two, three, four, or all of positions L235 (e.g., L235V), F243 (e.g., F243L), R292 (e.g., R292P), Y300 (e.g., Y300L), and P396 (e.g., P396L), numbered according to the EU index as in Kabat.

[0758] 240. The isolated nucleic acid of any one of embodiments 228-240, wherein the transgene further encodes an antibody mimetic, e.g., a designed ankyrin repeat protein (DARPIN).

[0759] 241. The isolated nucleic acid of any one of embodiments 228-240, wherein the transgene further encodes a fynomer, optionally wherein the encoded fynomer comprises the amino acid sequence of SEQ ID NO: 5156, or an amino acid sequence with at least 80% (e.g., 85, 90, 95, 96, 97, 98, or 99%) sequence identity thereto, or the nucleotide sequence encoding the fynomer comprises the nucleotide sequence of SEQ ID NO: 5155, or a nucleotide sequence with at least 80% (e.g., 85, 90, 95, 96, 97, 98, or 99%) sequence identity thereto.

[0760] 242. The isolated nucleic acid of any one of embodiments 228-241, further encoding a signal sequence, optionally wherein the signal sequence comprises a nucleotide sequence of any of the signal sequences listed in Table 14, or a nucleotide sequence with at least 95% sequence identity thereto.

[0761] 243. The isolated nucleic acid of embodiment 242, further encoding a encoding a second signal sequence, optionally wherein the second signal sequence comprises a nucleotide sequence of any of the signal sequences listed in Table 14, or a nucleotide sequence with at least 95% sequence identity thereto.

[0762] 244. The isolated nucleic acid of any one of embodiments 228-243, wherein:
[0763] (i) the sequences of the encoded VH and VL are connected directly, e.g., without a linker;
[0764] (ii) the sequences of the encoded VH and VL are connected via a linker;
[0765] (iii) the sequences of the encoded heavy chain and light chain are connected directly, e.g., without a linker; or
[0766] (iv) the sequences of the encoded heavy chain and light chain are connected via a linker.

[0767] 245. The isolated nucleic acid of embodiment 244, wherein:
[0768] (i) the linker comprises a nucleotide sequence of any of the linker sequences listed in Table 13, or a nucleotide sequence with at least 95% sequence identity thereto;
[0769] (ii) the linker comprises an encoded furin cleavage site;
[0770] (iii) the linker comprises an encoded T2A linker; and/or
[0771] (iv) the linker comprises a glycine-serine linker, e.g., a G4S linker or a (G4S)3 linker.

[0772] 246. The isolated nucleic acid embodiment 244 or 245, wherein:
[0773] (i) the linker comprises an encoded furin cleavage site and/or comprises the nucleotide sequence of SEQ ID NO: 1724; and/or
[0774] (ii) the linker comprises an encoded T2A linker and/or the nucleotide sequence of SEQ ID NO: 1726; and/or
[0775] (iii) the linker comprises an encoded glycine-serine linker encoded by the nucleotide sequence of SEQ ID NOs: 2245, 5161, 5162, 5347, or 5243.

[0776] 247. The isolated nucleic acid of any one of embodiments 228-246, wherein the transgene encodes a second antigen-binding region having a different binding specificity than the antigen-binding region that binds to HER2/neu.

[0777] 248. The isolated nucleic acid of embodiment 247 wherein the second antigen-binding region binds to a molecule selected from the group consisting of a cancer- or tumor-associated antigen; a cancer-associated integrin; a T cell and/or NK cell antigen; an angiogenic factor or other cancer-associated growth factor; receptor for an angiogenic factor; and a receptor associated with cancer progression.

[0778] 249. The isolated nucleic acid of embodiment 248, wherein the second antigen-binding region binds to carcinoembryonic antigen (CEA), prostate specific antigen (PSA), RAGE (renal antigen), α-fetoprotein, CAMEL (CTL-recognized antigen on melanoma), CT antigens (such as MAGE-B5, -B6, -C2, -C3, and D; Mage-12; CT10; NY-ESO-1, SSX-2, GAGE, BAGE, MAGE, and SAGE), mucin antigens (e.g., MUC1, mucin-CA125, etc.), ganglioside antigens, tyrosinase, gp75, c-Met, C-myc, Mart1., MelanA, MUM-1, MUM-2, MUM-3, HLA-B7, Ep-CAM or a cancer-associated integrin, such as a5133 integrin, a T cell and/or NK cell antigen, such as CD3 or CD16, an angiogenic factor or other cancer-associated growth factor, such as a vascular endothelial growth factor, a fibroblast growth factor, epidermal growth factor, and receptors associated with cancer progression.

[0779] 250. The isolated nucleic acid of embodiment 248, wherein the second antigen-binding region binds HER1, HER3, or HER4.

[0780] 251. The isolated nucleic acid of embodiment 248, wherein the second antigen-binding site binds a different, preferably non-blocking, site on HER2.

[0781] 252. The isolated nucleic acid of any one of embodiments 228-251, wherein the encoded antibody is a multispecific antibody molecule, e.g., a bispecific antibody molecule.

[0782] 253. The isolated nucleic acid of any one of embodiments 228-251, wherein the encoded antibody is a bispecific, e.g., biparatopic, antibody molecule.

[0783] 254. The isolated nucleic acid of embodiment 253, wherein the encoded bispecific, e.g., biparatopic, antibody molecule comprises at least two antigen binding domains for two different domains of HER2.

[0784] 255. The isolated nucleic acid of embodiment 253 or 254, wherein the encoded bispecific, e.g., biparatopic, antibody molecule comprises a first antigen binding domain that binds domain IV of HER2 and a second antigen binding domain that binds domain I of HER2.

[0785] 256. The isolated nucleic acid of embodiment 253 or 254, wherein the encoded bispecific, e.g., biparatopic, antibody molecule comprises a first antigen binding domain that binds domain I of HER2 and a second antigen binding domain that binds domain IV of HER2.

[0786] 257. The isolated nucleic acid of any one of embodiments 252-256, wherein the first and/or second antigen binding domain comprise an IgG antibody, single-chain Fv (scFv), a scFv fragment, a Fab, a single-chain Fab (scFabs), a single-chain antibody, a diabody, an antibody variable domain, a VHH, a single domain antibody, and/or a nanobody.

[0787] 258. The isolated nucleic acid of any one of embodiments 253-257, wherein:
[0788] (i) the first antigen binding domain comprises an scFv, and the second antigen binding domain comprises a full antibody, e.g., an IgG antibody;
[0789] (ii) the first antigen binding domain comprises an antibody mimetic, e.g., a DARPIN, and the second antigen binding domain comprises a full antibody, e.g., an IgG antibody; or
[0790] (iii) the first antigen binding domain comprises a Fyn SH3-derived binding polypeptide (e.g., a fynomer), and the second antigen binding domain comprises a full antibody, e.g., an IgG antibody.

[0791] 259. The isolated nucleic acid of any one of embodiments 253-257, wherein:
[0792] (i) the first antigen binding domain comprises a full antibody, e.g., an IgG antibody, and the second antigen binding domain comprises an scFv;
[0793] (ii) the first antigen binding domain comprises a full antibody, e.g., an IgG antibody, and the second antigen binding domain comprises an antibody mimetic, e.g., a DARPIN; or
[0794] (iii) the first antigen binding domain comprises a full antibody, e.g., an IgG antibody, and the second antigen binding domain comprises a Fyn SH3-derived binding polypeptide (e.g., a fynomer).

[0795] 260. The isolated nucleic acid of any one of embodiments 253-258, wherein:
[0796] (i) the first antigen binding domain that binds domain IV of HER2, e.g., an scFv that binds domain IV of HER2, is situated N-terminal of the second antigen binding domain that binds domain I of HER2, e.g., a full antibody, e.g., an IgG antibody that binds domain I of HER2;
[0797] (ii) the first antigen binding domain that binds domain I of HER2, e.g., an antibody mimetic, e.g., a DARPIN, is situated N-terminal of the second antigen binding domain that binds domain IV of HER2, e.g., a full antibody, e.g., an IgG antibody that binds domain IV of HER2; or
[0798] (iii) the first antigen binding domain that binds domain I of HER2, e.g., a Fyn SH3-derived binding polypeptide (e.g., a fynomer), is situated N-terminal of the second antigen binding domain that binds domain IV of HER2, e.g., a full antibody, e.g., an IgG antibody that binds domain IV of HER2.

[0799] 261. The isolated nucleic acid of any one of embodiments 253-260, wherein the encoded bispecific antibody molecule comprises:
[0800] (i) a first polypeptide comprising, from N-terminal to C-terminal: VH of the first binding domain, first peptide linker (e.g., a (G4S)3 linker), VL of first binding domain, second peptide linker (e.g., a (G4S) linker), VL of the second binding domain and CL; and
[0801] (ii) a second polypeptide comprising, from N-terminal to C-terminal: VH of the second binding domain, CH1, CH2, and CH3.

[0802] 262. The isolated nucleic acid of any one of embodiments 253-260, wherein the encoded bispecific antibody molecule comprises:
[0803] (i) a first polypeptide comprising, from N-terminal to C-terminal: a DARPIN, a peptide linker (e.g., a (G4S)3 linker), VL of the second binding domain and CL; and
[0804] (ii) a second polypeptide comprising from N-terminal to C-terminal: VH of the second binding domain, CH1, CH2, and CH3.

[0805] 263. The isolated nucleic acid of any one of embodiments 253-260, wherein the encoded bispecific antibody molecule comprises:
[0806] (i) a first polypeptide comprising, from N-terminal to C-terminal: a Fyn SH3-derived binding polypeptide, a peptide linker (e.g., a (G4S)3 linker), VL of the second binding domain and CL; and
[0807] (ii) a second polypeptide comprising from N-terminal to C-terminal: VH of the second binding domain, CH1, CH2, and CH3.

[0808] 264. The isolated nucleic acid of any one of embodiments 253-260, which comprises an Fc region, optionally wherein the Fc region, is mutated to have reduced binding to Fc receptor or reduced ADCC, e.g., an Fc region having the mutations L235V, F243L, R292P, Y300L, and P396L, numbered according to the EU index as in Kabat.

[0809] 265. A genetic element comprising the nucleic acid of any one of embodiments 228-264 positioned between two ITRs.

[0810] 266. The genetic element of any of one of embodiments 81-143 and 265, which comprise the nucleotide sequence of any of SEQ ID NOs: 5375, 6500, 6501, 6502, 6503, 6504, 6505, 6506, 6507, 6508, or 6509 or a sequence with at least 95% sequence identity thereto.

[0811] 267. The genetic element of embodiment 266, which comprises the nucleotide sequence of SEQ ID NO: 5190, 6500, 6501, 6502, 6503, or a nucleotide sequence substantially identical (e.g., having at least 70%, 75%, 80%, 85%, 90%, 95%, 99% or 100%, sequence identity) thereto.

[0812] 268. The genetic element of embodiment 267, wherein the encoded antibody comprises:
[0813] (i) a heavy chain variable region comprising a HC CDR1 amino acid sequence of SEQ ID NO: 5281, a HC CDR2 amino acid sequence of SEQ ID NO: 5282, and an HC CDR3 amino acid sequence of SEQ ID NO: 5283, 6510, 6515, 6520, 6525 or 6530; and
[0814] (ii) a light chain variable region comprising an LC CDR1 amino acid sequence of SEQ ID NO: 5287, an LC CDR2 amino acid sequence of SEQ ID NO: 5288, and an LC CDR3 amino acid sequence of SEQ ID NO: 5289 or a sequence substantially identical (e.g., having at least 70%, 75%, 80%, 85%, 90%, 95%, or 99% sequence identity) to the any of the aforesaid sequences.

[0815] 269. The genetic element of embodiment 267, wherein the encoded antibody comprises:
[0816] (i) a heavy chain variable region comprising a HC CDR1 amino acid sequence of SEQ ID NO: 5284, a HC CDR2 amino acid sequence of SEQ ID NO: 5285, and an HC CDR3 amino acid sequence of SEQ ID NO: 5286; and
[0817] (ii) a light chain variable region comprising an LC CDR1 amino acid sequence of SEQ ID NO: 5290, an LC CDR2 amino acid sequence of SEQ ID NO: 5291, and an LC CDR3 amino acid sequence of SEQ ID NO: 5292 or a sequence substantially identical (e.g., having at least 70%, 75%, 80%, 85%, 90%, 95%, or 99% sequence identity) to the any of the aforesaid sequences.

[0818] 270. The genetic element of embodiment 267, wherein the encoded antibody comprises:
[0819] (i) a heavy chain variable region comprising the amino acid sequence of SEQ ID NO: 5270, 6511, 6516, 6521, 6526 or 6531;
[0820] (i) and/or a light chain variable region comprising the amino acid sequence of SEQ ID NO: 5274;
[0821] or a sequence substantially identical (e.g., having at least 70%, 75%, 80%, 85%, 90%, 95%, or 99% sequence identity) to the any of the aforesaid sequences.

[0822] 271. The genetic element of embodiment 267, wherein the encoded antibody comprises:
[0823] (i) comprising a heavy chain comprising the amino acid sequence of SEQ ID NO: 5272, 6513, 6518, 6523, 6528, 6533;
[0824] (ii) and/or a light chain comprising the amino acid sequence of SEQ ID NO: 5276;
[0825] or a sequence substantially identical (e.g., having at least 70%, 75%, 80%, 85%, 90%, 95%, or 99% sequence identity) to the any of the aforesaid sequences.

[0826] 272. The genetic element of any one of embodiments 265-271, wherein the encoded antibody is a bispecific, e.g., biparatopic, antibody molecule.

[0827] 273. The genetic element of embodiment 272, wherein the first antigen binding domain comprises:
[0828] (i) a heavy chain variable region comprising a HC CDR1 amino acid sequence of SEQ ID NO: 5358, a HC CDR2 amino acid sequence of SEQ ID NO: 5359, and an HC CDR3 amino acid sequence of SEQ ID NO: 5360, 6535, 6538, 6541, 6544, or 6547; and
[0829] (ii) a light chain variable region comprising an LC CDR1 amino acid sequence of SEQ ID NO: 5355, an LC CDR2 amino acid sequence of SEQ ID NO: 5356, and an LC CDR3 amino acid sequence of SEQ ID NO: 5357.

[0830] 274. The genetic element of embodiment 272 or 273, wherein the second antigen binding domain comprises
[0831] (i) a HC CDR1 amino acid sequence of SEQ ID NO: 5361, a HC CDR2 amino acid sequence of SEQ ID NO: 5362, and an HC CDR3 amino acid sequence of SEQ ID NO: 5363; and
[0832] (ii) a light chain variable region comprising an LC CDR1 amino acid sequence of SEQ ID NO: 5317, an LC CDR2 amino acid sequence of SEQ ID NO: 5318, and an LC CDR3 amino acid sequence of SEQ ID NO: 5319.

[0833] 275. The genetic element of embodiment 272, encoding a multispecific antibody comprising:
[0834] (i) a first anti-HER2 VH comprising the amino acid sequence of SEQ ID NO: 5262, and a heavy chain constant region comprising the amino acid sequence of SEQ ID NO: 5220; and
[0835] (ii) a second chain, which comprises from the N-terminus to the C-terminus, a second anti-HER2 VH comprising the amino sequence of SEQ ID NO: 5290, 6536, 6539, 6542, 6545, or 6548, a (G4S)3 linker, a first anti-HER2 VL comprising the amino acid sequence of SEQ ID NO: 5266, a (GS) linker, a constant region (CL) comprising the amino acid sequence of SEQ ID NO: 5218;
[0836] or a sequence substantially identical (e.g., having at least 70%, 75%, 80%, 85%, 90%, 95%, or 99% sequence identity) to the any of the aforesaid sequences.

[0837] 276. The method of any one of embodiments 198-224, wherein the method reduces tumor cell proliferation.

[0838] 277. The method of embodiment 276, wherein the method induces an innate immune response to HER2/neu expressing tumor cells.

[0839] 278. The method of embodiment 277, wherein the innate immune response comprises an increase in CD45⁺ cells at the tumor site.

[0840] 279. The method of embodiment 278, wherein the innate immune response comprises an increase in the proportion of one or more of the following cell types at the tumor site
[0841] (i) active proliferating microglia;
[0842] (ii) dendritic cells (DC);
[0843] (iii) natural killer cells (NK); and/or
[0844] (iv) innate lymphocytic cells (ILC).

### BRIEF DESCRIPTION OF THE DRAWINGS

[0845] FIGS. 1A-1C are graphical representation of the data from the codon optimization of the anti-HER2 monospecific vectorized antibody genetic elements. FIGS. 1A and 1B show the expression comparison of HER-53 (SEQ ID NO: 5168), HER-75 (SEQ ID NO: 5190) and HER-77 (non-optimized) in HEK expi293 cells (adherent) 3 days post-transfection (FIG. 1A), and in HEK expi293 cells (suspension) at 2, 3, and 7 days post-transfection (FIG. 1B). The antibody concentration (μg/mL) is displayed on the Y-axis, and the antibody is indicated on the X-axis. Points on the columns indicate individual transfections. FIG. 1C shows the results from the codon optimization of the anti-HER2 monospecific vectorized antibody genetic elements in assays using HEK-Blue human TLR9 (hTLR9) cells. The Y-axis shows the OD630 value from the cell-based reporter gene assay, a surrogate for TLR9 activation level, and the synthesized DNA oligos from the codon optimized antibody coding sequence and the oligos from the corresponding non-codon optimized sequence is indicated on the X-axis. The codon optimization resulted in reduced NF-kB response to the DNA sequences in hTLR9 HEK Blue cells.

[0846] FIGS. 2A-2D are graphical representations of the BT-474 cell proliferation assay of the vectorized anti-HER2 antibodies HER-04 (SEQ ID NO: 5163) (FIG. 2A), HER-05 (SEQ ID NO: 5170) (FIG. 2B), HER-10 (SEQ ID NO: 5164) (FIG. 2C), and HER-15 (SEQ ID NO: 5165) (FIG. 2D), expressed by Expi293 cells. The relative viability is shown on the Y-axis as percent of human IgG1 isotype control antibody signal, and the antibody concentration is shown on the X-axis in μg/mL. BT-474 cell proliferation was measured using the CellTiter-Glo 2.0 reagent after four days of antibody treatment. Error bars: mean and standard deviation from four replicates.

[0847] FIG. 3 is a graphical representation of the BT-474 cell proliferation assay comparing the HER-53 (SEQ ID NO: 5168), human IgG1 isotype control antibody, HER-04 (SEQ ID NO: 5163), and HER-10 (SEQ ID NO: 5164) vectorized anti-HER2 antibodies expressed by Expi293 cells. The relative viability is shown on the Y-axis as percent of human IgG1 isotype control antibody signal, and the antibody concentration is shown on the X-axis in μg/mL. Similar cell growth inhibition was observed between the HER-53 antibody with an enhanced Fc region and HER-04. HER-10 demonstrated increased growth inhibition compared to HER-53 or HER-04. BT-474 cell proliferation was measured using the CellTiter-Glo 2.0 reagent after four days of antibody treatment. Error bars: mean and standard deviation from four replicates.

[0848] FIGS. 4A-4D are graphical representations of the MDA-MB-361-luc cell proliferation assay comparing the HER-04 (SEQ ID NO: 5163) (FIG. 4A), HER-10 (SEQ ID NO: 5164) (FIG. 4C) and HER-15 (SEQ ID NO: 5165) (FIG. 4D) vectorized anti-HER2 antibodies expressed by Expi293 cells with a recombinant reference antibody control (Creative Biolabs cat. #TAB-761) (FIG. 4B). The relative viability is shown on the Y-axis as percent of human IgG1 isotype control antibody signal, and the antibody concentration is shown on the X-axis in μg/mL. The vectorized anti-HER2 antibodies inhibited cell growth of MDA-MB-361-luc cells in a dose-dependent manner. Cell proliferation was measured using the CellTiter-Glo 2.0 reagent after 13 days of antibody treatment. Error bars: mean and standard deviation from three replicates.

[0849] FIGS. 5A-5G are graphical representations of the MDA-MB-361-luc cell proliferation assay with an expanded dose range comparing the human IgG1 isotype control antibody (FIG. 5A), HER-04 (SEQ ID NO: 5163) (FIG. 5B), HER-10 (SEQ ID NO: 5164) (FIG. 5D), HER-15 (SEQ ID NO: 5165) (FIG. 5E), and HER-53 (SEQ ID NO: 5168) (FIGS. 5F-5G), vectorized anti-HER2 antibodies expressed by Expi293 cells with a recombinant reference (naked)antibody control (Creative Biolabs cat. #TAB-761) (FIG. 5C). The relative viability is shown on the Y-axis as percent of human IgG1 isotype control antibody signal, and the antibody concentration is shown on the X-axis in μg/mL. The vectorized anti-HER2 antibodies inhibited cell growth of MDA-MB-361-luc cells in a dose-dependent manner. Cell proliferation was measured using the CellTiter-Glo 2.0 reagent after 13 days of antibody treatment. Error bars: mean and standard deviation from three replicates.

[0850] FIGS. 6A-6B are graphical representations of the MDA-MB-361-luc cell proliferation assay, with an expanded dose range, comparing the recombinant reference antibody control (Creative Biolabs cat. #TAB-761) (FIG. 6A), and HER-10 (SEQ ID NO: 5164) (FIG. 6B) vectorized anti-HER2 antibody expressed by Expi293 cells. The relative viability is shown on the Y-axis as percent of human IgG1 isotype control antibody signal, and the antibody concentration is shown on the X-axis in μg/mL. Error bars: mean and standard deviation from three replicates. The vectorized HER-10 antibody inhibited cell growth of MDA-MB-361-luc cells in a dose-dependent manner. Cell proliferation was measured using the CellTiter-Glo 2.0 reagent after 13 days of antibody treatment. Error bars: mean and standard deviation from three replicates.

[0851] FIGS. 7A-7B are graphical representations of the ADCC activity of human IgG1 isotype control antibody, HER-04 (SEQ ID NO: 5163), and HER-10 (SEQ ID NO: 5164) expressed by Expi293 cells in comparison to a reference antibody employing the high affinity (FIG. 7A) and low affinity (FIG. 7B) variants of the human FcgRIIIa receptor. The fold induction (relative to no antibody control) is shown on the Y-axis, and the antibody concentration is shown on the X-axis in μg/mL. HER-10 contains enhancements in the Fc region that promote ADCC activity. HER-10 ADCC activity is similar a reference anti-HER2 antibody, and is improved over HER-04 in assays employing both the high affinity and low affinity variants of the FcgRIIIa receptor. Error bars: mean and standard deviation from three replicates.

[0852] FIGS. 8A-8B are graphical representations of the ADCC activity of HER-53 (SEQ ID NO: 5168) in comparison to HER-10 (SEQ ID NO: 5164) and HER-04 (SEQ ID NO: 5163) vectorized anti-HER2 antibodies expressed by Expi293 cells, employing the high affinity (FIG. 8A) and low affinity (FIG. 8B) variants of the human FcgRIIIa receptor. The fold induction (relative to no antibody control) is shown on the Y-axis, and the antibody concentration is shown on the X-axis in μg/mL. ADCC activity is similar between HER-53 and HER-10 while both display increased activity over HER-04 in assays employing both the high affinity and low affinity variants of the FcgRIIIa receptor. Error bars: mean and standard deviation from three replicates.

[0853] FIGS. 9A-9D are graphical representations of the BT-474 cell (FIGS. 9A and 9B) and SK-BR-3 cell (FIGS. 9C and 9D) proliferation assays with tucatinib and HER-53 (SEQ ID NO: 5168), HER-75 (SEQ ID NO: 5190), human IgG1 isotype control antibody, HER-04 (SEQ ID NO: 5163), and HER-10 (SEQ ID NO: 5164) vectorized anti-HER2 antibodies expressed by Expi293 cells. The relative viability is shown on the Y-axis as percent of human IgG1 isotype control antibody signal, and the antibody concentration is shown on the X-axis in μg/mL. Similar cell growth inhibition was observed between the HER-53 and HER-04. Tucatinib-treated cells served as positive control for cell growth inhibition. Cell proliferation was measured using the CellTiter-Glo 2.0 reagent after four days. Error bars: mean and standard deviation from four replicates (FIG. 9A, tucatinib only: two replicates).

[0854] FIGS. 10A-10B are graphical representations of the BT-474 cell proliferation assay of HER-43 (SEQ ID NO: 5185) in comparison to HER-47 (SEQ ID NO: 5167) vectorized anti-HER2 antibodies expressed by Expi293 cells (FIG. 10A), and HER-46 (SEQ ID NO: 5186) in comparison to HER-47 (SEQ ID NO: 5167) vectorized anti-HER2 antibodies expressed by Expi293 cells (FIG. 10B). The relative viability is shown on the Y-axis as percent of human IgG1 isotype control signal, and the antibody concentration is shown on the X-axis in μg/mL. Similar cell growth inhibition was observed between HER-04 and engineered antibodies containing mutations that abrogate FcRn-binding (HER-43, HER-46, and HER-47). BT-474 cell proliferation was measured using the CellTiter-Glo 2.0 reagent after four days of antibody treatment. Error bars: mean and standard deviation from four replicates.

[0855] FIG. 11 is a graphical representation of the SK-BR-3 cell proliferation assay of the vectorized anti-HER2 antibody HER-57 (SEQ ID NO: 5187) in comparison to HER-04 (SEQ ID NO: 5163), human IgG1 isotype control antibody, HER-10 (SEQ ID NO: 5164) (expressed by Expi293 cells) and tucatinib. The relative viability is shown on the Y-axis as percent of human IgG1 isotype control antibody signal, and the antibody concentration is shown on the X-axis in μg/mL. SK-BR-3 cells were sensitive to cell growth inhibition by the HER-57 vectorized antibody. Tucatinib-treated cells served as positive control for cell growth inhibition. SK-BR-3 cell proliferation was measured using the CellTiter-Glo 2.0 reagent after four days. Error bars: mean and standard deviation from four replicates (tucatinib only: two replicates).

[0856] FIGS. 12A-12B are graphical representations of the SK-BR-3 cell proliferation assay (FIG. 12A) and the BT-474 cell proliferation assay (FIG. 12B) of the vectorized anti-HER2 antibody HER-53 (SEQ ID NO: 5168) in comparison to HER-75 (SEQ ID NO: 5190), human IgG1 isotype control antibody, HER-88 (SEQ ID NO: 6500) and tucatinib. The relative viability is shown on the Y-axis as percent of human IgG1 isotype control antibody signal, and the antibody concentration is shown on the X-axis in μg/mL. Tucatinib-treated cells served as positive control for cell growth inhibition.

[0857] FIGS. 13A-13C are images of mouse brain immunohistochemical staining depicting the tissue transduction distributions after IV administration of AAV vectors (4.0E11 vector genomes per mouse) carrying a CBA-promoter driven EGFP transgene in Fox Chase SCID CB17 mice (Charles River Labs, #236). After perfusion of animals, brains were dissected and then fixed in 10% Neutral Buffered Formalin. The fixed brain tissues were then paraffin embedded, sectioned, and stained with anti-EGFP and anti-human nucleoli antibodies. Immunohistochemistry (IHC) was performed with a chromogenic dye that correlated with the level of EGFP protein present in the tissue. IHC results are displayed on both ipsilateral (left side of diagram) and contralateral (right side of diagram) sagittal section in order of increasing brain distribution, where FIG. 13A is the VOY101 capsid, FIG. 13B is the VOY9P33 capsid. Tumor distinguished by human nucleoli staining is demarcated by black oval. FIG. 13C is the VOY9P39 capsid. Representative images are displayed for n=5 per cohort (AAV type). Scale bar indicates relative size in millimeters.

[0858] FIGS. 14A-14D are graphical representations of the mouse pharmacokinetics and pharmacodynamics of antibody expressed from IV administration of the HER10 construct, vectorized in the VOY9P39 capsid. Antibody concentration in mouse serum (FIG. 14A), CSF (FIG. 14B), and brain tissue (FIGS. 14C and 14D) after IV administration of AAV in Fox Chase SCID CB17 (Charles River Labs, #236). Human IgG1 was measured by an AlphaLISA assay. FIGS. 14A-14D X-axis indicates the days post treatment. In FIG. 14A the mean serum levels of human IgG1 (ug/ml) indicates increasing levels with time since injection of the AAV. In FIG. 14B the mean CSF levels remain constant (n=3 mice/cohort). In FIG. 14C, the mean brain levels also increase with time since AAV injection. In FIGS. 14A and 14B the Y-axis shows the concentration of hIgG1 (ug/ml), and in FIG. 14C the concentration of the hIgG1 is shown as a percent of total protein. In FIG. 14D, the number of viral vector genomes (VG) per diploid cell as measured by droplet digital PCR (ddPCR) indicates a decrease in mean VG with time since injection. In FIG. 14D the Y-axis depicts the number of viral vector genomes per diploid cell. The +/−standard error of the mean are depicted by whiskers in all panels.

[0859] FIGS. 15A-15D are graphical representation of the data from the prophylactic treatment of vectorized HER10. Prophylactic treatment 12 days prior to xenograft with IV administration of AAV particles (5.0E11 vector genomes per mouse) comprising a VOY9P39 capsid and either a genetic element comprising the HER-10 sequence (SEQ ID NO: 5164) (5.0E11 VG/mouse) or a sequence encoding an human IgG1 isotype control antibody to Fox Chase SCID CB17 mice (Charles River Labs, #236). FIG. 15A is a graph of mean bioluminescent imaging data (BLI) with photons/second displayed (Total Flux). Statistically significant reductions in tumor burden after HER10 treatment are denoted by stars, based on discovery determined using the two-stage linear step-up procedure of Benjamini, Krieger and Yekutieli, with Q=5% (Benjamini, Y., Krieger, A. M., & Yekutieli, D., 2006, Biometrika. 93, 491-507). Each row was analyzed individually, without assuming a consistent SD. Number of t tests: 3. Q values are adjusted for multiple comparison. Days 17; q=0.014, Day 24; q=0.031, Day 28; q=0.016 (n=10 mice/cohort). FIG. 15B shows plots of the mean values of IgG1 quantification at day 30 post xenograft from serum (ug/ml, P<0.001) and FIG. 15C is a plot of human IgG concentrations in the brain homogenate from mice, 30 days after xenotransplantation of MDA-MB-361-Luc tumor cells in the brain (% total protein, P<0.004). FIG. 15D is a plot of the mean values for vector genomes per diploid cell by group as measured from brain tissue homogenates by ddPCR quantification at day 30 post xenotransplantation of tumor cells. The +/−standard error of the mean are depicted by whiskers in all panels.

[0860] FIGS. 16A-16E are graphical representations of data generated from studies of Fox Chase SCID CB17 (Charles River Labs, #236) mice that underwent vectorized antibody treatment following tumor xenograft. Mice were xenotransplanted in the brain with MDA-MB-361-luc tumor cells 2 days prior to IV treatment (2.5e11 vector genomes per mouse). After allowing the engraftment of tumors for 2 days, mice were administered a genetic element comprising the HER-10 (FIGS. 16A-16C) or HER-53 (FIG. 16D-16E) sequence vectorized in a VOY9P39 capsid or a genetic element encoding a human IgG1 isotype control antibody vectorized in a VOY9P39 capsid. FIGS. 16A and 16D are graphs of the mean bioluminescent imaging data (BLI) for mice from each treatment group, with photons/second normalized to day 7 baseline reading. Statistically significant reductions in tumor burden after HER-10 and HER-53 treatment are denoted by stars, based on discovery determined using the two-stage linear step-up procedure of Benjamini, Krieger and Yekutieli, with Q=5% (Benjamini, Y., Krieger, A. M., & Yekutieli, D., 2006, Biometrika. 93, 491-507). Each row was analyzed individually, without assuming a consistent SD. FIG. 16A: number of t tests: 7; Q values are adjusted for multiple comparison; Days 21 & 28: q=0.001, Day 35; q=0.0015, Day 44; q=0.026, Day 49; q=0.0064 (n=5 mice/cohort). FIG. 16B is a plot of IgG1 concentrations in mouse serum as quantified by AlphaLISA at day 43 (q<0.0012. t-test), 63 (q=0.0019) and 99 (q=0.029) post AAV administration. Multiple t-tests, FDR(q) values reported. The +/−standard error of the mean are depicted by whiskers in all panels. FIGS. 16C and 16E are plots of the Kaplan-Meier curves depicting significant survival difference (P=0.0035; Log-rank (Mantel-Cox test) between HER-10 (FIG. 16C), HER-53 (FIG. 16E) and a human IgG1 isotype control antibody transduced mouse.

[0861] FIGS. 17A-17B are graphical representations of the data from the intracranial treatment of tumor xenografted mice with HER-10 (SEQ ID NO: 5164) or isotype control antibody vectorized in a VOY-101 capsid (6.0E10 vector genomes per mouse). FIG. 17A is a plot of the mean bioluminescent imaging data (BLI) for AAV treatment at Day 2 post xenograft, with photons/second normalized to day 7 baseline reading. FIG. 17B is a plot of the Kaplan-Meier curves depicting a survival difference between HER-10 and a human IgG1 isotype control antibody transduced mouse. HER-10 demonstrates persistent and significant tumor growth suppression as compared to vectorized human IgG1 isotype control treated CB17/SCID mice. Statistically significant reductions in tumor burden after HER-10 treatment are evident at indicated time points, based on discovery determined using multiple t-tests comparing human IgG1 isotype control vs HER-10. Each row was analyzed individually, without assuming a consistent SD.+/−standard error of the mean are depicted by whiskers in all panels.

[0862] FIG. 18 is an image of the immunohistochemical staining of anti-mouse Cd11b (black) of MDA-MB-361 orthotopic xenografts in a mouse brain. The monocytes aggregate around the tumor periphery and infiltrate within the human tumor mass at 28 days post AAV9P39 treatment.

[0863] FIGS. 19A-19D are graphical representations of the cell proliferation assays of the vectorized anti-HER2 bispecific antibody HER-73 (SEQ ID NO: 5189) and HER-78 (SEQ ID NO: 5375) in comparison to human IgG1 isotype control antibody, HER-10 (SEQ ID NO: 5164) (expressed by Expi293 cells), ZW-25, and tucatinib in BT-474 cells (FIGS. 19A and 19C) and SK-BR-3 cells (FIGS. 19B and 19D). The relative viability is shown on the Y-axis as percent of human IgG1 isotype control antibody signal, and the antibody concentration is shown on the X-axis in μg/mL. The HER-73 and HER-78 antibodies demonstrated an increased cell growth inhibition of BT-474 cells in comparison to HER-10 or the ZW-25 bispecific antibody. Tucatinib-treated cells served as positive control for cell growth inhibition. BT-474 cell proliferation was measured using the CellTiter-Glo 2.0 reagent after four days. Similar to BT-474 cells, SK-BR-3 cells were sensitive to HER-73 and HER-78. Tucatinib-treated cells served as positive control for cell growth inhibition. SK-BR-3 cell proliferation was measured using the CellTiter-Glo 2.0 reagent after four days. Error bars: mean and standard deviation from four replicates (tucatinib only: two replicates).

### DETAILED DESCRIPTION

[0864] Described herein, inter alia, are compositions comprising isolated, e.g., recombinant, viral particles, e.g., AAV particles, for delivery, e.g., vectorized delivery, of an antibody molecule and methods of making and using the same. In some embodiments, the antibody molecule is an antibody molecule that binds to HER2, e.g., an anti-HER2 antibody molecule described herein. Generally, the recombinant AAV particles will include a genetic element comprising a nucleotide sequence, e.g., encoding a transgene encoding an antibody molecule that binds to HER2.

[0865] Antibodies typically have short half-lives, presenting a challenge for antibody-based therapies. To achieve a sufficiently high concentration of an antibody for long lasting therapeutic effects, said antibody-based therapies are traditionally delivered by repeated administration, e.g. by multiple injections. These repeated dosing regimens can result in inconsistent levels of antibody throughout the treatment period, limited efficiency per administration, high cost of administration and consumption of the antibody. Hence, there is a need for improved methods of delivering antibodies and antibody-based therapeutics that increase duration and efficacy of the response and result in sustained, high levels of the therapeutic antibody.

[0866] Additionally, treatment modalities for brain and CSN diseases (e.g., HER2-positive metastatic cancer) are extremely limited due to the impermeability of the brain's blood vessels to most substances carried in the blood stream. The blood vessels of the brain, referred to collectively as the blood-brain barrier (BBB), are unique when compared to the blood vessels found in the periphery of the body. Tight apposition of BBB endothelial cells (EC) to neural cells like astrocytes, pericytes and neurons induces phenotypic features that contribute to the observed impermeability. Tight junctions between ECs comprising the BBB limit paracellular transport, while the lack of pinocytotic vesicles and fenestrae limit non-specific transcellular transport. These factors combine to restrict molecular flux from the blood to the brain to those molecules that are less than 500 daltons and also lipophilic. Thus, using the large mass transfer surface area of the bloodstream as a delivery vehicle is largely infeasible except in those circumstances where a drug with the desired pharmacological properties fortuitously possesses the size and lipophilicity attributes allowing it to pass freely through the blood vessel. Because of such restrictions, it has been estimated that greater than 98% of all small molecule pharmaceuticals and nearly 100% of the emerging class of protein (e.g., antibodies) and gene therapeutics do not cross the BBB.

[0867] Adeno-associated viral (AAV) vectors and particles are commonly used in gene therapy approaches as a result of a number of advantageous features. AAVs are typically non-replicating in infected cells, and therefore are generally not associated with disease. Further, AAVs may be introduced to a variety of host cells, do not integrate into the genome of the host cell, and are capable of infecting both quiescent and dividing cells. AAVs transduce non-replicating and long-lived cells in vivo, resulting in long term expression of the protein of interest. Further, AAVs can be manipulated with cellular and molecular biology techniques to produce non-toxic, isolated, recombinant, AAV particles comprising a payload that can be delivered to a target tissue or set of cells with limited or no side-effects. Without wishing to be bound by theory, it is believed in some embodiments, that expression vectors, e.g., an adeno-associated viral vector (AAVs) or AAV particle, e.g., an AAV particle described herein, can be used to administer and/or deliver antibody molecules, e.g., antibodies that bind to HER2, in order to achieve sustained, high concentrations, allowing for longer lasting efficacy, fewer dose treatments, and/or more consistent levels of the antibody throughout the treatment period.

[0868] Using a vectorized antibody delivery (VAD) approach of an anti-HER2 antibody described herein, an AAV particle is used as the delivery modality for a nucleotide sequence, e.g., an AAV vector, genetic element, or nucleic acid described herein, encoding a transgene encoding the anti-HER2 antibody molecule. In some embodiments, vectorized delivery of a functional anti-HER2 antibody molecule described herein, results in in vivo expression of the encoded antibody. In some embodiments, upon delivery of an AAV particle comprising genetic element comprising a nucleotide sequence encoding a transgene encoding an antibody molecule, the AAV particle enters the cell via endocytosis and is transported to the nucleus wherein the genetic element is released and converted into a double-stranded episomal molecule of DNA by the host cell. In some embodiments, the transcriptionally active episome results in the expression of encoded anti-HER2 antibodies (e.g., an anti-HER2 antibody molecule described herein) that is then secreted from the cell into the circulation.

[0869] Without wishing to be bound by theory, it is believed in some embodiments, that the use of an AAV particle or plurality of AAV particles for the vectorized delivery of an antibody molecule that binds to HER2 (e.g. an anti-HER2 antibody described herein) would lead to increased exposure in the central nervous system (CNS), and one-time administration would result in long-term, robust expression of anti-HER2 antibodies in the subject, e.g., a subject having or diagnosed with having a disease associated with over expression of HER2 (e.g., HER2+ metastatic cancer).

[0870] Without wishing to be bound by theory, it believed in some embodiments, that HER2+ tumors manifesting in the CNS exhibit sub-therapeutic thresholds of anti-HER2 antibody concentrations. In some embodiments, this sub-therapeutic thresholds of anti-HER2 antibody concentrations can result from blood-brain barrier that limits the entry of large biomolecules (e.g., antibodies) into the CNS. Additionally, rapid efflux of antibodies out of the CNS, has also been observed, e.g., by the HER2+ mouse brain xenograft studies with passive administration doses of trastuzumab that far exceed the clinical levels in addition to clinical trials of high-dose Trastuzumab+Pertuzumab combinations (Lin et al., Journal of Clinical Oncology 39(24): (2021)).

[0871] Without wishing to be bound by theory, it is believed that the anti-HER2 vectorized antibodies of the present disclosure generate durable expression of HER2-directed antibodies by both “factory” cells in the CNS (neurons, astrocytes, glial cells) in addition to the metastatic tumors that have infiltrated the CNS. In some embodiments, these cells transduced with AAV transgenes secrete antibody into the brain parenchyma, ISF, CSF, and tumor micro-environment. Without wishing to be bound by theory, it is believed in some embodiments, that this this can result in high levels of target engagement on HER2 amplified tumors leading to both disruption of aberrant HER-family receptor signaling and tumor killing by ADCC. In some embodiments, an AAV particle described herein encoding an anti-HER2 antibody molecule described herein may be administered through intravenous (IV), intra cisterna magna injection (ICM), and direct intra-tumoral injections. In some embodiments, each of the aforesaid routes of administration can complement the existing standard of care.

[0872] Also contemplated herein, inter alia, are compositions comprising an AAV capsid polypeptide, e.g., an AAV capsid variant, e.g., an AAV capsid variant described herein for delivery, e.g., vectorized delivery, of an anti-HER antibody molecule described herein, and methods of making and using the same. Generally, the AAV capsid variant has enhanced tropism for a cell or tissue, e.g., for the delivery of a payload to said cell or tissue, for example a CNS tissue or a CNS cell.

[0873] As demonstrated in the Examples herein below, certain AAV capsid variants described herein show multiple advantages over wild-type AAV9, including (i) increased penetrance through the blood brain barrier following intravenous administration, (ii) wider distribution throughout the multiple brain regions, e.g., frontal cortex, sensory cortex, motor cortex, putamen, thalamus, cerebellar cortex, dentate nucleus, caudate, and/or hippocampus, and/or (iii) elevated payload expression in multiple brain regions. Without wishing to be being bound by theory, it is believed that these advantages may be due, in part, to the dissemination of the AAV capsid variants through the brain vasculature. In some embodiments, the AAV capsids described herein enhance the delivery of a payload, e.g., an anti-HER-2 antibody molecule described herein, to multiple regions of the brain including for example, the frontal cortex, sensory cortex, motor cortex, putamen, thalamus, cerebellar cortex, dentate nucleus, caudate, and/or hippocampus. In some embodiments, enhance the expression of a payload, e.g., an anti-HER-2 antibody molecule described herein or mRNA encoding an anti-HER2 antibody molecule, to multiple cell types in the CNS, e.g., neurons, oligodendrocytes, and/or glial cells. Without wishing to be bound by theory, an AAV particle comprising an AAV capsid polypeptide, e.g., an AAV capsid variant described herein, for the vectorized delivery of an antibody molecule that binds to HER2/neu described here will result in increased penetrance through the blood brain barrier, e.g., following intravenous administration, and/or increased biodistribution of the antibody molecule that binds to HER2/neu in the central nervous system, e.g., the brain and the spinal cord.

### I. DEFINITIONS

[0874] Unless defined otherwise, all technical and scientific terms used herein have the same meaning as commonly understood by one of ordinary skill in the art to which the invention pertains.

[0875] Throughout this disclosure, various embodiments of the invention can be presented in a range format. It should be understood that the description in range format is merely for convenience and brevity and should not be construed as an inflexible limitation on the scope of the invention. Accordingly, the description of a range should be considered to have specifically disclosed all the possible subranges as well as individual numerical values within that range. For example, description of a range such as from 1 to 6 should be considered to have specifically disclosed subranges such as from 1 to 3, from 1 to 4, from 1 to 5, from 2 to 4, from 2 to 6, from 3 to 6 etc., as well as individual numbers within that range, for example, 1, 2, 2.7, 3, 4, 5, 5.3, and 6. As another example, a range such as 95-99% identity, includes something with 95%, 96%, 97%, 98%, or 99% identity, and includes subranges such as 96-99%, 96-98%, 96-97%, 97-99%, 97-98%, and 98-99% identity. This applies regardless of the breadth of the range.

[0876] The term “a” and “an” refers to one or to more than one (i.e., to at least one) of the grammatical object of the article. By way of example, “an element” means one element or more than one element.

[0877] The term “or” is used herein to mean, and is used interchangeably with the term “and/or”, unless context clearly indicates otherwise.

[0878] As used herein, the term “about” or “approximately” when referring to a measurable value such as an amount, a temporal duration, and the like, are meant to encompass variations of 20% or in some instances±10%, or in some instances±5%, or in some instances±1%, or in some instances±0.1% from the specified value, as such variations are appropriate to perform the disclosed methods.

[0879] As used herein, a “particle” is a vehicle comprised of at least two components, an interior component and an exterior component, e.g., a capsid. In some embodiments, the exterior component comprises an AAV capsid polypeptide, e.g., an AAV capsid variant. In some embodiments, the interior component comprises a polynucleotide sequence (e.g., a genetic element), optionally enclosed within the exterior component.

[0880] The term “AAV particle” or “AAV viral particle” refers to a particle or a virion comprising an AAV capsid, e.g., an AAV capsid variant, and a polynucleotide, e.g., a genetic element and/or a vector. In some embodiments, the genetic element of the AAV particle comprises at least one payload and at least one ITR region. In some embodiments, the AAV particle is capable of delivering a transgene encoding a payload to cells, typically, mammalian, e.g., human, cells. In some embodiments, the AAV particle may be produced recombinantly. In some embodiments, an AAV particle described herein may be derived from any serotype, described herein or known in the art, including combinations of serotypes (e.g., “pseudotyped” AAV) or from various genomes (e.g., single stranded or self-complementary). In some embodiments, the AAV particle may be replication defective and/or targeted.

[0881] As used herein, the term “capsid” refers to the exterior, e.g., a protein shell, of a virus particle, e.g., an AAV particle, that is substantially (e.g., >50%, >60%, >70%, >80%, >90%, >95%, >99%, or 100%) protein. In some embodiments, the capsid is an AAV capsid comprising an AAV capsid protein described herein, e.g., a VP1, VP2, and/or VP3 polypeptide). The AAV capsid protein can be a wild-type AAV capsid protein or a functional variant thereof. In some embodiments, the functional variant of a capsid protein described herein has the ability to enclose, e.g., encapsulate, an AAV genome (e.g., an AAV vector and/or a genetic element), and/or is capable of entry into a cell, e.g., a mammalian cell. In some embodiments, a functional variant of a capsid protein described herein may have modified tropism compared to that of a wild-type AAV capsid, e.g., the corresponding wild-type capsid. In some embodiments, the AAV capsid variant described herein has the ability to enclose, e.g., encapsulate, a genetic element and/or vector, and/or is capable of entry into a cell, e.g., a mammalian cell. In some embodiments, the AAV capsid variant described herein may have modified tropism compared to that of a wild-type AAV capsid, e.g., the corresponding wild-type capsid.

[0882] As used herein, the term “genetic element” refers to a nucleic acid sequence, generally in a particle, e.g., an AAV particle. The genetic element can be produced as naked DNA and optionally further assembled into a capsid. A particle, e.g., an AAV particle can insert its genetic element into a cell. For example, a payload of a genetic element described herein can be a polypeptide or a polynucleotide. In some embodiments, the genetic element comprises at least one inverted terminal repeat (ITR) and at least one payload. In some embodiments, the genetic element comprises a polynucleotide sequence encoding a payload flanked on one side by an ITR. In some embodiments, the genetic element comprises a polynucleotide sequence encoding a payload flanked on both sides by an ITR.

[0883] As used herein, a “viral genome” or “vector genome” is a polynucleotide comprising the genetic element. In some embodiments, the genetic element comprises at least one inverted terminal repeat (ITR) and at least one transgene encoding a payload, e.g., a payload region.

[0884] As used herein, a “transgene encoding a payload” or a “payload region” refers to a polynucleotide or polynucleotide region, e.g., within a viral genome, e.g., a genetic element, which encodes an expression product, e.g., a payload. In some embodiments, the payload is, or comprises, a polypeptide, e.g., an antibody molecule. In some embodiments, the payload comprises a transgene, a polynucleotide encoding a polypeptide or multi-polypeptide, e.g., antibody molecule, or a modulatory nucleic acid or regulatory nucleic acid.

[0885] As used herein, a “vector” is any molecule or moiety which transports, transduces or otherwise acts as a carrier of a heterologous molecule. Vectors of the present disclosure may be produced recombinantly. In some embodiments, the vector may be based on and/or may comprise adeno-associated virus (AAV) parent or reference sequence.

[0886] The term “AAV vector” as used herein refers to any vector which comprises a genetic element, e.g., as described herein. In some embodiments, the AAV vector comprises at least one inverted terminal repeat (ITR) and at least one payload region, optionally, the AAV vector further comprises a nucleic acid encoding a non-structural protein, e.g., a Rep protein and/or a nucleic acid encoding a structural protein, e.g., a capsid protein. In some embodiments, the AAV vector comprises, or derives, at least one component from AAV, e.g., a polynucleotide component of the AAV. In some embodiments, the AAV vector when enclosed, e.g., encapsidated, in an AAV viral particle delivers a transgene encoding a payload into a cell, e.g., a mammalian cell, typically, a human cell.

[0887] As used herein, the term “administered in combination” or “combined administration” means that two (or more) agents are delivered to a subject during the course of the subject's affliction with the disorder, for example, the two or more treatments are delivered after the subject has been diagnosed with the disorder and before the disorder has been cured or eliminated or treatment has ceased for other reasons. In some embodiments, the delivery of one treatment is still occurring when the delivery of the second begins, so that there is overlap in terms of administration. This is sometimes referred to herein as “simultaneous” or “concurrent delivery”. In other embodiments, the delivery of one treatment ends before the delivery of the other treatment begins. In some embodiments of either case, the treatment is more effective because of combined administration. For example, the second treatment is more effective, for example, an equivalent effect is seen with less of the second treatment, or the second treatment reduces symptoms to a greater extent, than would be seen if the second treatment were administered in the absence of the first treatment, or the analogous situation is seen with the first treatment. In some embodiments, delivery is such that the reduction in a symptom, or other parameter related to the disorder is greater than what would be observed with one treatment delivered in the absence of the other. The effect of the two treatments can be partially additive, wholly additive, or greater than additive. The delivery can be such that an effect of the first treatment delivered is still detectable when the second is delivered.

[0888] As used herein, the term “amelioration” or “ameliorating” refers to a decreasing, e.g., lessening, of the severity of at least one indicator or parameter of a condition or disease. In some embodiments, amelioration of an indicator of a condition or disease in a subject results from treating the subject with a treatment described herein, as compared to a second subject that has not received the treatment. In some embodiments, the indicator or parameter of a condition or disease comprises a sign and/or symptom of the disorder. For example, in the context of neurodegeneration disorder, amelioration includes the reduction of neuron loss.

[0889] As used herein, the term “antibody” or “antibody molecule” refers to a protein comprising at least one immunoglobulin variable domain sequence. Antibodies, for example, can be polyclonal or monoclonal, multiple or single chain, or intact immunoglobulins, and may be derived from natural sources or from recombinant sources. Antibodies can be tetramers of immunoglobulin molecules. In some embodiments, an antibody molecule comprises a full-length antibody, or a full-length immunoglobulin chain. In some embodiments, an antibody molecule comprises an antigen binding or functional fragment of a full-length antibody, or a full-length immunoglobulin chain. In some embodiments, the term antibody includes functional fragments thereof. In some embodiments, constant regions of the antibodies can be altered, e.g., mutated, to modify the properties of the antibody (e.g., to increase or decrease one or more of: Fc receptor binding, antibody glycosylation, the number of cysteine residues, effector cell function, or complement function).

[0890] As used herein, the term “antibody fragment” refers to at least one portion of an intact antibody, or recombinant variants thereof, and refers to the antigen binding domain, for example, an antigenic determining variable region of an intact antibody, that is sufficient to confer recognition and specific binding of the antibody fragment to a target, such as an antigen. Examples of antibody fragments include, but are not limited to, Fab, Fab′, F(ab′)2, and Fv fragments, scFv antibody fragments, linear antibodies, single domain antibodies such as sdAb (either VL or VH), camelid VHH domains, and multi-specific molecules formed from antibody fragments such as a bivalent fragment comprising two or more, for example, two, Fab fragments linked by a disulfide bridge at the hinge region, or two or more, for example, two isolated CDR or other epitope binding fragments of an antibody linked. An antibody fragment can also be incorporated into single domain antibodies, maxibodies, minibodies, nanobodies, intrabodies, diabodies, triabodies, tetrabodies, v-NAR and bis-scFv (see, for example, Hollinger and Hudson, Nature Biotechnology 23:1126-1136, 2005). Antibody fragments can also be grafted into scaffolds based on polypeptides such as a fibronectin type III (Fn3) (see U.S. Pat. No. 6,703,199, which describes fibronectin polypeptide minibodies).

[0891] The terms “complementarity determining region” or “CDR,” as used herein, refer to the sequences of amino acids within antibody variable regions which confer antigen specificity and binding affinity. For example, in general, there are three CDRs in each heavy chain variable region (for example, HCDR1, HCDR2, and HCDR3) and three CDRs in each light chain variable region (LCDR1, LCDR2, and LCDR3). The precise amino acid sequence boundaries of a given CDR can be determined using any of a number of well-known schemes, including those described by Kabat et al. (1991), “Sequences of Proteins of Immunological Interest,” 5th Ed. Public Health Service, National Institutes of Health, Bethesda, MD (“Kabat” numbering scheme), Al-Lazikani et al., (1997) JMB 273,927-948 (“Chothia” numbering scheme), or a combination thereof. In a combined Kabat and Chothia numbering scheme, in some embodiments, the CDRs correspond to the amino acid residues that are part of a Kabat CDR, a Chothia CDR, or both.

[0892] The term “scFv” refers to a fusion protein comprising at least one antibody fragment comprising a variable region of a light chain and at least one antibody fragment comprising a variable region of a heavy chain, wherein the light and heavy chain variable regions are contiguously linked via a short flexible polypeptide linker, and capable of being expressed as a single chain polypeptide, and wherein the scFv retains the specificity of the intact antibody from which it is derived. Unless specified, as used herein an scFv may have the VL and VH variable regions in either order, for example, with respect to the N-terminal and C-terminal ends of the polypeptide, the scFv may comprise VL-linker-VH or may comprise VH-linker-VL. In some embodiments, the scFv may comprise the structure of NH2-VL-linker-VH—COOH or NH2-VH-linker-VL-COOH.

[0893] As used herein, an “immunoglobulin variable domain sequence” or “variable domain” refers to an amino acid sequence which can form the structure of an immunoglobulin variable domain. For example, the sequence may include all or part of the amino acid sequence of a naturally-occurring variable domain. For example, the sequence may or may not include one, two, or more N- or C-terminal amino acids, or may include other alterations that are compatible with formation of the protein structure.

[0894] The term “antigen-binding site” refers to the part of an antibody molecule that comprises determinants that form an interface that binds to a polypeptide, or an epitope thereof. With respect to proteins (or protein mimetics), the antigen-binding site typically includes one or more loops (of at least, e.g., four amino acids or amino acid mimics) that form an interface that binds to a polypeptide. Typically, the antigen-binding site of an antibody molecule includes at least one or two CDRs and/or hypervariable loops, or more typically at least three, four, five or six CDRs and/or hypervariable loops.

[0895] As used herein, the term “epitope” refers to the moieties of an antigen that specifically interact with an antibody molecule. Such moieties, also referred to herein as epitopic determinants, typically comprise, or are part of, elements such as amino acid side chains or sugar side chains. An epitopic determinant can be defined by methods known in the art or disclosed herein, e.g., by crystallography or by hydrogen-deuterium exchange. At least one or some of the moieties on the antibody molecule that specifically interact with an epitopic determinant are typically located in a CDR(s). Typically, an epitope has a specific three dimensional structural characteristics. Typically, an epitope has specific charge characteristics. Some epitopes are linear epitopes while others are conformational epitopes.

[0896] The term “antibody heavy chain,” or “heavy chain” refers to the larger of the two types of polypeptide chains present in antibody molecules in their naturally occurring conformations, and which normally determines the class to which the antibody belongs.

[0897] The term “antibody light chain,” or “light chain” refers to the smaller of the two types of polypeptide chains present in antibody molecules in their naturally occurring conformations. Kappa (x) and lambda (λ) light chains refer to the two major antibody light chain isotypes.

[0898] As used herein, the terms “multibody” or “multispecific antibody” refer to an antibody comprising a plurality of immunoglobulin variable domain sequences, wherein a first immunoglobulin variable domain sequence of the plurality has binding specificity for a first epitope and a second immunoglobulin variable domain sequence of the plurality has binding specificity for a second epitope. In some embodiments, the first and second epitopes are on the same antigen, e.g., the same protein (or subunit of a multimeric protein). In some embodiments, the first and second epitopes overlap or substantially overlap. In some embodiments, the first and second epitopes do not overlap or do not substantially overlap. In some embodiments, the first and second epitopes are on different antigens, e.g., different proteins (or different subunits of a multimeric protein). In some embodiments, a multispecific antibody molecule comprises a third, fourth or fifth immunoglobulin variable domain. In some embodiments, a multispecific antibody molecule is a bispecific antibody molecule, a trispecific antibody molecule, or tetraspecific antibody molecule.

[0899] As used herein, the term “bispecific antibody” refers to an antibody that has specificity for no more than two antigens. A bispecific antibody molecule is characterized by a first immunoglobulin variable domain sequence which has binding specificity for a first epitope and a second immunoglobulin variable domain sequence that has binding specificity for a second epitope. In some embodiments, the first and second epitopes are on the same antigen, e.g., the same protein (or subunit of a multimeric protein). In some embodiments, the first and second epitopes overlap or substantially overlap. In some embodiments, the first and second epitopes do not overlap or do not substantially overlap (e.g., a biparatopic antibody). In some embodiments, the first and second epitopes are on different antigens, e.g., different proteins (or different subunits of a multimeric protein). In some embodiments, a bispecific antibody is able to bind two different antigens simultaneously or sequentially. Methods for making bispecific antibodies are well known in the art. Various formats for combining two antibodies are also known in the art. Forms of bispecific antibodies of the invention include, but are not limited to, a diabody, a single-chain diabody, Fab dimerization (Fab-Fab), Fab-scFv, and a tandem antibody, as known to those of skill in the art.

[0900] The terms “monoclonal antibody” or “monoclonal antibody composition” as used herein refer to a preparation of antibody molecules of single molecular composition. A monoclonal antibody composition displays a single binding specificity and affinity for a particular epitope. A monoclonal antibody can be made by hybridoma technology or by methods that do not use hybridoma technology (e.g., recombinant methods). “Humanized” forms of non-human (for example, murine) antibodies are chimeric immunoglobulins, immunoglobulin chains or fragments thereof (such as Fv, Fab, Fab′, F(ab′)2 or other antigen-binding subsequences of antibodies) which contain minimal sequence derived from non-human immunoglobulin. For the most part, humanized antibodies and antibody fragments thereof are human immunoglobulins (recipient antibody or antibody fragment) in which residues from a complementary-determining region (CDR) of the recipient are replaced by residues from a CDR of a non-human species (donor antibody) such as mouse, rat or rabbit having the desired specificity, affinity, and capacity. In some instances, Fv framework region (FR) residues of the human immunoglobulin are replaced by corresponding non-human residues. Furthermore, a humanized antibody/antibody fragment can comprise residues which are found neither in the recipient antibody nor in the imported CDR or framework sequences. These modifications can further refine and optimize antibody or antibody fragment performance. In general, the humanized antibody or antibody fragment thereof will comprise substantially all of at least one, and typically two, variable domains, in which all or substantially all of the CDR regions correspond to those of a non-human immunoglobulin and all or a significant portion of the FR regions are those of a human immunoglobulin sequence. The humanized antibody or antibody fragment can also comprise at least a portion of an immunoglobulin constant region (Fc), typically that of a human immunoglobulin. For further details, see Jones et al., Nature, 321: 522-525, 1986; Reichmann et al., Nature, 332: 323-329, 1988; Presta, Curr. Op. Struct. Biol., 2: 593-596, 1992.

[0901] “Fully human” as used herein refers to an immunoglobulin, such as an antibody or antibody fragment, where the whole molecule is of human origin or consists of an amino acid sequence identical to a human form of the antibody or immunoglobulin.

[0902] The term “Chimeric Antigen Receptor” or alternatively a “CAR” refers to a recombinant polypeptide construct comprising at least an extracellular antigen binding domain, a transmembrane domain and a cytoplasmic signaling domain (also referred to herein as “an intracellular signaling domain”) comprising a functional signaling domain derived from a stimulatory molecule. In some embodiments, the domains in the CAR polypeptide construct are in the same polypeptide chain, for example, comprise a chimeric fusion protein. In some embodiments, the domains in the CAR polypeptide construct are not contiguous with each other, for example, are in different polypeptide chains.

[0903] As used herein, the terms “associated with,” “conjugated,” “linked,” “attached,” “coupled,” and “tethered,” when used with respect to two or more moieties, means that the moieties are associated or connected, e.g., physically or chemically, with one another, either directly or via one or more additional moieties that serves as a linking agent, to form a structure that is sufficiently stable so that the moieties remain physically associated under the conditions in which the structure is used, e.g., physiological conditions. In some embodiments, the two or more moieties are covalently or non-covalently linked, coupled, or attached. In some embodiments, an association is through direct covalent chemical bonding. In other embodiments, the association is through ionic or hydrogen bonding or a hybridization based connectivity sufficiently stable such that the associated or linked entities remain physically associated.

[0904] As used herein, the term “complementary” when used to describe a first nucleotide sequence in relation to a second nucleotide sequence, refers to the ability of an oligonucleotide or polynucleotide comprising the first nucleotide sequence to hybridize and form base pairs, e.g., a duplex, with an oligonucleotide or polynucleotide comprising the second nucleotide sequence. In some embodiments, base pairs are typically formed by hydrogen bonds between nucleotide units in antiparallel polynucleotide strands. In some embodiments, complementary polynucleotide or oligonucleotide strands can form base pair in the Watson-Crick manner (e.g., A to T, A to U, C to G), or in any other manner that allows for the formation of duplexes. As persons skilled in the art are aware, when using RNA as opposed to DNA, uracil rather than thymine is the base that is considered to be complementary to adenosine. However, when a U is denoted in the context of the present disclosure, the ability to substitute a T is implied, unless otherwise stated. The term “complementary” as used herein can encompass fully complementary, partially complementary, or substantially complementary.

[0905] “Fully complementary”, “perfect complementarity”, or “100% complementarity” refers to the situation in which each nucleotide unit of one polynucleotide or oligonucleotide strand can base-pair with a nucleotide unit of a second polynucleotide or oligonucleotide strand. Where a first sequence is referred to as “substantially complementary” with respect to a second sequence herein, the two sequences can be fully complementary or they may form one or more, but generally not more than 5, 4, 3, or 2 mismatched or non-complimentary base pairs upon hybridization for a duplex, while still retaining the ability to hybridize under the conditions most relevant to their ultimate application. In some embodiments, two strands in which some but not all nucleotide units can base pair are considered substantially complementary or to have less than perfect complementarity. For example, for two 20-mers, if only two base pairs on each strand can base pair with each other, the polynucleotide strands exhibit 10% complementarity. In the same example, if 18 base pairs on each strand can base pair with each other, the polynucleotide strands exhibit 90% complementarity. In some embodiments, a siRNA (e.g., the antisense strand) that is substantially complementary to a desired target mRNA, has a sequence (e.g., the antisense strand) which is sufficient to bind the desired target mRNA, and to trigger the RNA silencing of the target mRNA.

[0906] As used herein, “control elements”, “regulatory control elements”, or “regulatory sequences” refers to elements used for expression of a gene or gene product. In some embodiments, these “control elements”, “regulatory control elements”, or “regulatory sequences” comprise promoter regions, polyadenylation signals, transcription termination sequences, upstream regulatory domains, origins of replication, internal ribosome entry sites (“IRES”), enhancers, and the like, which provide for the replication, transcription and translation of a coding sequence in a recipient cell. Not all of these control elements need always be present as long as the selected coding sequence is capable of being replicated, transcribed and/or translated in an appropriate host cell.

[0907] As used herein, the term “encapsulate” means to enclose, surround or encase. As an example, a capsid protein, e.g., an AAV capsid variant, often encapsulates a genetic element. In some embodiments, encapsulate within a capsid, e.g., an AAV capsid variant, encompasses 100% coverage by a capsid, as well as less than 100% coverage, e.g., 95%, 90%, 85%, 80%, 70%, 60% or less. For example, gaps or discontinuities may be present in the capsid so long as the genetic element is retained in the capsid, e.g., prior to entry into a cell.

[0908] As used herein, the term “effective amount” which can be used interchangeably herein, refer to an amount of a compound, formulation, material, or composition, as described herein to achieve a particular biological result. In some embodiments, an effective amount is a “therapeutically effective amount.” In some embodiments, the effective amount of an agent is that amount sufficient to effect beneficial or desired results, for example, clinical results. For example, in the context of administering an agent that treats cancer, an effective amount of an agent is, for example, an amount sufficient to achieve treatment, as defined herein, of cancer, as compared to the response obtained without administration of the agent.

[0909] As used herein, “expression” refers to transcription and/or translation of a particular nucleotide sequence. In some embodiments, expression comprises one or more of the following: (1) production of an RNA template from a DNA sequence (e.g., by transcription); (2) processing of an RNA transcript (e.g., by splicing, editing, 5′ cap formation, and/or 3′ end processing); (3) translation of an RNA into a polypeptide or protein; and (4) post-translational modification of a polypeptide or protein.

[0910] As used herein the term “heterologous” region or element (e.g., a nucleic acid sequence or an amino acid sequence), refers to a region or element that would not be considered a homologous region or element. In some embodiments, the heterologous region or element when used with respect to another region or element, refers to regions or elements that would not naturally be found together, e.g., in a wild-type virus, e.g., an AAV. In some embodiments, a heterologous nucleic acid sequence may be present in the same nucleic acid as a naturally occurring nucleic acid sequence (e.g., a sequence that is naturally occurring in the AAV). In some embodiments, a heterologous region or element is exogenous relative to an AAV from which other (e.g., the remainder of) elements/regions of the AAV particle are based.

[0911] As used herein the term “homologous region” refers to a region which is similar in position, structure, evolution origin, character, form or function.

[0912] As used herein, the term “homology” refers to the overall relatedness between polymeric molecules, e.g. between polynucleotide molecules (e.g. DNA molecules and/or RNA molecules) and/or between polypeptide molecules. In some embodiments, polymeric molecules are considered to be “homologous” to one another if their sequences are at least 25%, 30%, 35%, 40%, 45%, 50%, 55%, 60%, 65%, 70%, 75%, 80%, 85%, 90%, 95%, or 99% identical or similar. The term “homologous” necessarily refers to a comparison between at least two sequences (polynucleotide or polypeptide sequences). In accordance with the disclosure, two polynucleotide sequences are considered to be homologous if the polypeptides they encode are at least about 50%, 60%, 70%, 80%, 90%, 95%, or even 99% for at least one stretch of at least about 20 amino acids. In some embodiments, homologous polynucleotide sequences are characterized by the ability to encode a stretch of at least 4-5 uniquely specified amino acids. For polynucleotide sequences less than 60 nucleotides in length, homology is determined by the ability to encode a stretch of at least 4-5 uniquely specified amino acids. In accordance with the disclosure, two protein sequences are considered to be homologous if the proteins are at least about 50%, 60%, 70%, 80%, or 90% identical for at least one stretch of at least about 20 amino acids.

[0913] As used herein, the term “identity” refers to the subunit sequence identity between two polymeric molecules, e.g., between two nucleic acid molecules (e.g. two DNA molecules and/or two RNA molecules) and/or between two polypeptide molecules. When a subunit position in both of the two molecules is occupied by the same monomeric subunit; for example, if a position in each of two DNA molecules is occupied by adenine, then they are identical at that position. The identity between two sequences is a direct function of the number of matching positions; for example, if half (for example, five positions in a polymer ten subunits in length) of the positions in two sequences are homologous, the two sequences are 50% identical; if 90% of the positions (for example, 9 of 10), are matched, the two sequences are 90% identical.

[0914] Calculation of the percent identity of two polynucleotide sequences, for example, can be performed by aligning the two sequences for optimal comparison purposes (e.g., gaps can be introduced in one or both of a first and a second nucleic acid sequences for optimal alignment and non-identical sequences can be disregarded for comparison purposes). In certain embodiments, the length of a sequence aligned for comparison purposes is at least 30%, at least 40%, at least 50%, at least 60%, at least 70%, at least 80%, at least 90%, at least 95%, at least 99%, or 100% of the length of the reference sequence. The nucleotides at corresponding nucleotide positions are then compared. When a position in the first sequence is occupied by the same nucleotide as the corresponding position in the second sequence, then the molecules are identical at that position. The percent identity between the two sequences is a function of the number of identical positions shared by the sequences, taking into account the number of gaps, and the length of each gap, which needs to be introduced for optimal alignment of the two sequences.

[0915] The comparison of sequences and determination of percent identity between two sequences can be accomplished using a mathematical algorithm. For example, the percent identity between two nucleotide sequences can be determined using methods such as those described in Computational Molecular Biology, Lesk, A. M., ed., Oxford University Press, New York, 1988; Biocomputing: Informatics and Genome Projects, Smith, D. W., ed., Academic Press, New York, 1993; Sequence Analysis in Molecular Biology, von Heinje, G., Academic Press, 1987; Computer Analysis of Sequence Data, Part I, Griffin, A. M., and Griffin, H. G., eds., Humana Press, New Jersey, 1994; and Sequence Analysis Primer, Gribskov, M. and Devereux, J., eds., M Stockton Press, New York, 1991; each of which is incorporated herein by reference. For example, the percent identity between two nucleotide sequences can be determined using the algorithm of Meyers and Miller (CABIOS, 1989, 4:11-17), which has been incorporated into the ALIGN program (version 2.0) using a PAM120 weight residue table, a gap length penalty of 12 and a gap penalty of 4. The percent identity between two nucleotide sequences can, alternatively, be determined using the GAP program in the GCG software package using an NWSgapdna.CMP matrix. Methods commonly employed to determine percent identity between sequences include, but are not limited to those disclosed in Carillo, H. and Lipman, D., SIAM J Applied Math., 48:1073 (1988); incorporated herein by reference. Techniques for determining identity are codified in publicly available computer programs. Exemplary computer software to determine homology between two sequences include, but are not limited to, GCG program package, Devereux, J., et al., Nucleic Acids Research, 12(1), 387 (1984)), BLASTP, BLASTN, and FASTA Altschul, S. F. et al., J. Molec. Biol., 215, 403 (1990)).

[0916] The phrases “inhibit expression of,” “silence,” “down-regulate expression of,” and the like, in so far as they refer to a gene, herein refer to the at least a partial suppression or reduction in expression of the gene, as assessed, e.g., based on expression of products of the gene such as the corresponding mRNA transcribed from the gene, a protein translated from the corresponding mRNA transcribed from the gene, or another parameter functionally linked to the expression of the gene. In some embodiments, a reduction in the level of an mRNA results in a reduction in the level of a polypeptide translated therefrom. The level of expression may be determined using standard techniques for measuring mRNA or protein.

[0917] As used herein, the term “reduce” or “inhibit” is meant the ability to cause an overall decrease, for example, of 20% or greater, of 50% or greater, or of 75%, 85%, 90%, 95%, or greater. In certain embodiments, reduce or inhibit can refer to the reduction or inhibition of undesirable events (e.g., on-target/off-tumor effects or immunogenic effects), such as cytokine-driven toxicities (e.g., cytokine release syndrome (CRS)), infusion-related reactions (IRRs), macrophage activation syndrome (MAS), neurologic toxicities, severe tumor lysis syndrome (TLS), neutropenia, thrombocytopenia, elevated liver enzymes, and/or central nervous system (CNS) toxicities, following treatment with a HER2 AAV

[0918] As used herein, the term “isolated” refers to a substance or entity that is altered or removed from the natural state, e.g., altered or removed from at least some of component with which it is associated in the natural state. For example, a nucleic acid or a peptide naturally present in a living animal is not “isolated,” but the same nucleic acid or peptide partially or completely separated from the coexisting materials of its natural state is “isolated.” An isolated nucleic acid or protein can exist in substantially purified form, or can exist in a non-native environment such as, for example, a host cell. Such polynucleotides could be part of a vector and/or such polynucleotides or polypeptides could be part of a composition, and still be isolated in that such vector or composition is not part of the environment in which it is found in nature. In some embodiments, an isolated nucleic acid is recombinant, e.g., incorporated into a vector.

[0919] As used herein “linker” refers to a molecule or group of molecules which connects two molecules, such as to link a variable heavy and a variable light chain in the context of an scFv or an antibody. In some embodiments, the linker is a nucleic acid sequence connecting two nucleic acid sequences encoding two different polypeptides. In some embodiments, the linker may or may not be translated. In some embodiments, the linker is a cleavable linker. In some embodiments, the linker is a polypeptide linker, e.g., a flexible polypeptide linker, that comprises amino acids such as glycine or serine residues used alone or in combination.

[0920] The term “Fyn SH3-derived polypeptide”, used interchangeably herein with the term “Fynomer”, refers to a non-immunoglobulin-derived binding polypeptide (e.g. a so-called scaffold) derived from the human Fyn SH3 domain. Fyn SH3-derived polypeptides are well-known in the art and have been described e.g. in Grabulovski et al. (2007) JBC, 282, p. 3196-3204, WO 2008/022759, Bertschinger et al (2007) Protein Eng Des Sel 20(2):57-68, Gebauer and Skerra (2009) Curr Opinion in Chemical Biology 13:245-255, or Schlatter et al. (2012), MAbs 4:4, 1-12). FynomAbs are fusion proteins of an antibody and a Fyn SH3-derived binding protein (Brack et al. (2014), Mol Cancer Ther 13(8):2030-2039).

[0921] As used herein, the phrase “operably linked” refers to a functional connection between two or more molecules, constructs, transcripts, entities, moieties or the like. In some embodiments, operably linked refers to functional linkage between a regulatory sequence and a heterologous nucleic acid sequence resulting in expression of the latter. For example, a first nucleic acid sequence is operably linked with a second nucleic acid sequence when the first nucleic acid sequence is placed in a functional relationship with the second nucleic acid sequence. For instance, a promoter is operably linked to a coding sequence if the promoter affects the transcription or expression of the coding sequence. Operably linked DNA sequences can be contiguous with each other and, e.g., where necessary to join two protein coding regions, are in the same reading frame.

[0922] As used herein, a “microRNA (miRNA) binding site” or a “miR binding site” comprises a nucleic acid sequence (whether RNA or DNA, e.g., differ by “U” of RNA or “T” in DNA) that is capable of binding, or binds, in whole or in part to a microRNA (miR) through complete or partial hybridization. Typically, such binding occurs between the miR and the miR binding site in the reverse complement orientation. In some embodiments, the miR binding site is transcribed from the AAV genetic element encoding the miR binding site.

[0923] In some embodiments, a miR binding site may be encoded or transcribed in series. Such a “miR binding site series” or “miR BSs” may include two or more miR binding sites having the same or different nucleic acid sequence.

[0924] As used herein, a “spacer” is generally any selected nucleic acid sequence of, e.g., 1, 2, 3, 4, 5, 6, 7, 8, 9, or 10 nucleotides in length, which is located between two or more consecutive miR binding site sequences. Spacers may also be more than 10 nucleotides in length, e.g., 20, 30, 40, or 50 or more than 50 nucleotides.

[0925] As used herein, the term “polypeptide” refers to polymers of amino acids. The polymer may be linear or branched, it may comprise modified amino acids, and it may be interrupted by non-amino acids. The terms also encompass an amino acid polymer that has been modified; for example, disulfide bond formation, glycosylation, lipidation, acetylation, phosphorylation, or any other manipulation, such as conjugation with a labeling component. The polypeptide can be isolated from natural sources, can be a produced by recombinant techniques from a eukaryotic or prokaryotic host, or can be a product of synthetic procedures. In some embodiments, the polypeptide is greater than 50 amino acids in length.

[0926] As used herein, “peptide” is less than or equal to 50 amino acids long, e.g., about 5, 10, 15, 20, 25, 30, 35, 40, 45, or 50 amino acids long.

[0927] The term “polypeptide variant” refers to molecules which differ in their amino acid sequence from a native or reference sequence. In some embodiments, the amino acid sequence variants may possess substitutions, deletions, and/or insertions at certain positions within the amino acid sequence, as compared to a native or reference sequence. In some embodiments, a variant comprises a sequence having at least about 50%, at least about 80%, or at least about 90%, identical (homologous) to a native or a reference sequence.

[0928] The term “amino acid” is intended to embrace all molecules, whether natural or synthetic, which include both an amino functionality and an acid functionality and capable of being included in a polymer of naturally-occurring amino acids. Exemplary amino acids include naturally-occurring amino acids; analogs, derivatives and congeners thereof; amino acid analogs having variant side chains; and all stereoisomers of any of any of the foregoing. As used herein the term “amino acid” includes both the D- or L-optical isomers and peptidomimetics.

[0929] As used herein the term “conservative sequence modification” refers to the modification of an amino acid that does not significantly affect or alter the characteristics of the protein, e.g., the binding characteristics of an antibody or antibody fragment. Such conservative modifications include substitutions, additions, or deletions. Modifications can be introduced into a sequence described herein, e.g., an antibody or antibody fragment described herein, by standard techniques known in the art, such as site-directed mutagenesis and PCR-mediated mutagenesis. Conservative substitutions are ones in which the amino acid residue is replaced with an amino acid residue having a similar side chain. Families of amino acid residues having similar side chains have been defined in the art. These families include amino acids with basic side chains (for example, lysine, arginine, histidine), acidic side chains (for example, aspartic acid, glutamic acid), uncharged polar side chains (for example, glycine, asparagine, glutamine, serine, threonine, tyrosine, cysteine, tryptophan), nonpolar side chains (for example, alanine, valine, leucine, isoleucine, proline, phenylalanine, methionine), beta-branched side chains (for example, threonine, valine, isoleucine) and aromatic side chains (for example, tyrosine, phenylalanine, tryptophan, histidine).

[0930] “Insertional variants” when referring to proteins are those with one or more amino acids inserted, e.g., immediately adjacent or subsequent, to a position in an amino acid sequence. “Immediately adjacent” or “immediately subsequent” to an amino acid means connected to either the alpha-carboxy or alpha-amino functional group of the amino acid.

[0931] “Deletional variants” when referring to proteins, are those with one or more amino acids in deleted from a reference protein.

[0932] The term “variant” refers to a polypeptide or polynucleotide that has an amino acid or a nucleotide sequence that is substantially identical, e.g., having at least 70%, 75%, 80%, 85%, 90%, 95% or 99% sequence identity to a reference sequence. In some embodiments, the variant is a functional variant.

[0933] The term “functional variant” refers to a polypeptide variant or a polynucleotide variant that has at least one activity of the reference sequence.

[0934] The phrase “pharmaceutically acceptable” is employed herein to refer to those compounds, materials, compositions, and/or dosage forms which are, within the scope of sound medical judgment, suitable for use in contact with the tissues of human beings and animals without excessive toxicity, irritation, allergic response, or other problem or complication, commensurate with a reasonable benefit/risk ratio.

[0935] As used herein, the term “preventing,” “prevent,” and “prevention” refer to an action that occurs before the subject begins to suffer from the condition, or relapse of the condition. Prevention need not result in a complete prevention of the condition; partial prevention or reduction of the condition or a symptom of the condition, or reduction of the risk of developing the condition, is encompassed by this term.

[0936] As used herein, a “prophylaxis” means the prevention of or protective treatment for a disease or disease state.

[0937] The terms “nucleic acid,” “nucleic acid sequence,” “nucleotide sequence,” or “polynucleotide sequence,” and “polynucleotide” are used interchangeably. They refer to a polymeric form of nucleotides of any length, either deoxyribonucleotides or ribonucleotides, or analogs thereof. The polynucleotide may be either single-stranded or double-stranded, and if single-stranded may be the coding strand or non-coding (antisense) strand. A polynucleotide may comprise modified nucleotides, such as methylated nucleotides and nucleotide analogs. The sequence of nucleotides may be interrupted by non-nucleotide components. A polynucleotide may be further modified after polymerization, such as by conjugation with a labeling component. The nucleic acid may be a recombinant polynucleotide, or a polynucleotide of genomic, cDNA, semisynthetic, or synthetic origin which either does not occur in nature or is linked to another polynucleotide in a non-natural arrangement.

[0938] As used herein, the term “RNA” or “RNA molecule” or “ribonucleic acid molecule” refers to a polymer of ribonucleotides; the term “DNA” or “DNA molecule” or “deoxyribonucleic acid molecule” refers to a polymer of deoxyribonucleotides. DNA and RNA can be synthesized naturally, e.g., by DNA replication and transcription of DNA, respectively; or be chemically synthesized. DNA and RNA can be single-stranded (i.e., ssRNA or ssDNA, respectively) or multi-stranded (e.g., double stranded, i.e., dsRNA and dsDNA, respectively). The term “mRNA” or “messenger RNA”, as used herein, refers to a single stranded RNA that encodes the amino acid sequence of one or more polypeptide chains.

[0939] As used herein, a “self-complementary viral particle” is a particle comprised of at least two components, a capsid and a polynucleotide sequence encoding a self-complementary genome (e.g., a genetic element) enclosed within the capsid. As used herein, the phrase “signal sequence” refers to a sequence which can direct the transport or localization of a protein.

[0940] As used herein, the term “subject” refers to any organism to which a composition in accordance with the disclosure may be administered, e.g., for experimental, diagnostic, prophylactic, and/or therapeutic purposes. Typical subjects include animals (e.g., mammals such as mice, rats, rabbits, non-human primates, and humans) and/or plants. In some embodiments, an animal refers to any member of the animal kingdom. In some embodiments, animal refers to a human at any stage of development. In some embodiments, animal refers to a non-human animal at any stage of development. In certain embodiments, the non-human animal is a mammal (e.g., a rodent, a mouse, a rat, a rabbit, a monkey, a dog, a cat, a sheep, cattle, a primate, or a pig). In some embodiments, animals include, but are not limited to, mammals, birds, reptiles, amphibians, fish, and worms. In some embodiments, the animal is a transgenic animal, genetically-engineered animal, or a clone. In some embodiments, the subject is a patient.

[0941] An individual who is “susceptible to” a disease, disorder, and/or condition has not been diagnosed with and/or may not exhibit symptoms of the disease, disorder, and/or condition but harbors a propensity to develop a disease or its symptoms. In some embodiments, an individual who is susceptible to a disease, disorder, and/or condition (for example, cancer) may be characterized by one or more of the following: (1) a genetic mutation associated with development of the disease, disorder, and/or condition; (2) a genetic polymorphism associated with development of the disease, disorder, and/or condition; (3) increased and/or decreased expression and/or activity of a protein and/or nucleic acid associated with the disease, disorder, and/or condition; (4) habits and/or lifestyles associated with development of the disease, disorder, and/or condition; (5) a family history of the disease, disorder, and/or condition; and (6) exposure to and/or infection with a microbe associated with development of the disease, disorder, and/or condition. In some embodiments, an individual who is susceptible to a disease, disorder, and/or condition will develop the disease, disorder, and/or condition. In some embodiments, an individual who is susceptible to a disease, disorder, and/or condition will not develop the disease, disorder, and/or condition.

[0942] The term “synthetic” is generally used herein to refer to compositions, e.g., compositions described herein, that are not naturally occurring.

[0943] As used herein, “naturally occurring” or “wild-type” refers to a substance or entity that has not been altered, e.g., structurally altered, or removed from the natural state, e.g., removed from at least some of component with which it is associated in the natural state. In some embodiments, a naturally occurring when referring to sequence refers to a sequence identical to a wild-type sequence or a naturally occurring variant thereof.

[0944] As used herein, “transfection,” “transformed,” or “transduced” refers to a process by which an exogenous nucleic acid is transferred or introduced into a host cell. A “transfected” or “transformed” or “transduced” cell is one which has been transfected, transformed, or transduced with exogenous nucleic acid. The cell includes the primary subject cell and its progeny.

[0945] As used herein, the terms “treat,” “treatment,” and “treating” refer to partially or completely alleviating, ameliorating, improving, relieving, delaying onset of, inhibiting progression of, reducing duration of, reducing severity of, and/or reducing incidence of one or more symptoms or features (preferably, one or more discernable symptoms) of an infection, disease, disorder, and/or condition, resulting from administration of one or more therapies (for example one or more therapeutic agents such as an AAV particle of the invention). In some embodiments, the terms “treat”, “treatment” and “treating” refer to the amelioration of at least one measurable physical parameter of a disorder. In other embodiments, the terms “treat”, “treatment” and “treating” refer to the inhibition of the progression of a disorder, either physically by, for example, stabilization of a discernible symptom, physiologically by, for example, stabilization of a physical parameter, or both. In other embodiments the terms “treat”, “treatment” and “treating” refer to the reduction or stabilization of a symptom of the disorder. For example, “treating” a cancer may refer to inhibiting survival, growth, and/or spread of a tumor or a reduction or stabilization of tumor size or cancerous cell count. In some embodiments, treatment may be administered to a subject who does not exhibit signs of a disease, disorder, and/or condition and/or to a subject who exhibits only early signs of a disease, disorder, and/or condition for the purpose of decreasing the risk of developing pathology associated with the disease, disorder, and/or condition.

[0946] As used herein, the terms “Her-2,” “ErbB2,” “c-Erb-B2,” “HER2,” “Her2,” and “neu” are used interchangeably and refer to native HER2, and allelic variants thereof, as described, for example, in Semba et al., 1985, P.N.A.S. USA 82:6497-650 and Yamamoto et al., 1986, Nature 319:230-234 and GenBank accession number X03363. Unless indicated otherwise, the terms “HER2,” “ErbB2,” “c-Erb-B2,” “HER2,” and “Her2” when used herein refer to the human protein. The gene encoding Her2 is referred to herein as “ErbB2.”

[0947] As used herein, the term “HER2/ErbB2 status” refers to assessment of expression of HER2/ErbB2 in a patient, or patient's cells (e.g., cancer cells) as a biomarker, and the status typically is reported as “HER2/ErbB2 positive” when the biomarker is present in overabundance as compared to a normal healthy non-cancer breast tissue sample or “HER2/ErbB2 negative” when the biomarker is present at a level no greater than a normal healthy non-cancer breast tissue sample as determined by an IHC stain test of a fixed tissue sample. Various methods are known in the art for assessing HER2/ErbB2 status, typically focusing on the amount of the receptor (IHC), or mRNA levels (qPCR), or gene copy number (FISH), that is expressed by a patient's cells to thereby diagnose a patient as HER2/ErbB positive (when this receptor is overexpressed or amplified in the patient's cells) or HER2/ErbB negative (when this receptor is not overexpressed or not amplified on patient's cells). Overexpression and amplification are terms of art describing levels elevated above those found in similar tissue from a normal disease-free individual.

[0948] As used herein, the term “chemotherapy” or “chemotherapeutic agent” refers to treatment with a cytostatic or cytotoxic agent (i.e., a compound) to reduce or eliminate the growth or proliferation of undesirable cells, for example cancer cells. Thus, as used herein, “chemotherapy” or “chemotherapeutic agent” refers to a cytotoxic or cytostatic agent used to treat a proliferative disorder, for example cancer.

[0949] As used herein, the term “targeted pathway drug,” “pathway drug,” or “targeted drug,” refers to any molecule or antibody with therapeutic capacity designed to bind to a specific biomolecule (e.g., protein) involved in a disease process, thereby regulating its activity.

[0950] As used herein, the terms “HER2 therapy” or “HER2-targeted therapy” refer to treatments using one or more therapeutic agents that are designed to specifically target the HER2 molecule and/or signaling pathway(s), including but not limited to, for example antibodies and small molecules that target the HER2 molecule and/or signaling pathway(s). Such HER2 therapies may also target other members of the HER family, for example therapies that target both HER1 and HER2, HER1, HER2, and HER4, or HER3 alone.

[0951] As used herein, the term “CNS neoplasms” includes primary or metastatic cancers, which may be located in the brain (intracranial), meninges (connective tissue layer covering brain and spinal cord), or spinal cord.

[0952] As used herein, the term “progression-free survival (PFS)” refers to the time from treatment to first disease progression or death. For example, it is the time that the subject remains alive, without return of the cancer, e.g., for a defined period of time such as about 1 month, 1.2 months, 2 months, 2.4 months, 2.9 months, 3 months, 3.5 months, 4, months, 6 months, 7 months, 8 months, 9 months, 1 year, about 2 years, about 3 years, etc., from initiation of treatment or from initial diagnosis.

[0953] As used herein, the term “overall survival (OS)” refers to the subject remaining alive for a defined period of time, such as about 1 year, about 2 years, about 3 years, about 4 years, about 5 years, about 10 years, etc., from initiation of treatment or from initial diagnosis.

### II. COMPOSITIONS

[0954] According to the present disclosure, compositions for delivering functional anti-HER2 antibodies by adeno-associated virus particles (AAVs) are provided. In some embodiments, an AAV particle, e.g., an AAV particle as described herein, or plurality of particles, may be provided, e.g., delivered, via any of several routes of administration, to a cell, tissue, organ, or organism, in vivo, ex vivo, or in vitro.

[0955] In some embodiments, AAV particles, nucleic acids, e.g., nucleic acid molecules encoding an antibody molecule, and/or payloads, e.g., an antibody molecule, and methods of using and making the same are described in WO2017189963, the contents of which are herein incorporated by reference in their entirety.

[0956] In some embodiments, the nucleic acid sequences, genetic elements, AAV vectors, and polypeptides disclosed herein may be engineered to contain modular elements and/or sequence motifs assembled to enable expression of an antibody molecule or fragment thereof, e.g., an antibody molecule described herein. In some embodiments, the genetic element comprises a nucleotide sequence encoding a transgene encoding an antibody molecule (e.g., an antibody molecule described herein). In some embodiments, the nucleic acid sequence encodes an antibody molecule comprising one or more of the CDRs (e.g., heavy chain and/or light chain CDRs) of an antibody molecule, a variable heavy (VH) chain region and/or variable light (VL) chain region, a heavy and/or light chain constant region, a heavy and/or light chain, or a combination thereof. In some embodiments, the nucleic acid sequence encoding the antibody molecule may also encode a linker, e.g., such that the VH/heavy chain and the VL/light chain of the encoded antibody molecule are connected via a linker. In some embodiments, the order of expression, structural position, or concatemer count (e.g., the VH, VL, heavy chain, light chain, and/or linker) may be different within or among genetic element sequences. In some embodiments, the identity, position, and number of linkers expressed by a genetic element described herein may vary. In some embodiments, the genetic element may further comprise an internal repeat (ITR) sequence, promoter region, an intron region, an exon region, a Kozak sequence, an enhancer, a polyadenylation sequence, or combination thereof.

[0957] In some embodiments, the present disclosure provides methods for delivering an antibody molecule (e.g., an anti-HER2 antibody described herein) and/or a nucleic acid sequence encoding an antibody molecule (e.g., an anti-HER2 antibody described herein) comprised within the genetic element comprised within a recombinant, AAV particle (e.g., an AAV particle described herein) to a cell, tissue, organ, or subject.

### Adeno-Associated Viruses (AAVs) and AAV Particles

[0958] In some embodiments, an adeno-associated virus (AAV) comprises a small non-enveloped icosahedral capsid virus of the Parvoviridae family and is characterized by a single stranded DNA viral genome. The parvoviruses and other members of the Parvoviridae family are generally described in Kenneth I. Berns, “Parvoviridae: The Viruses and Their Replication,” Chapter 69 in FIELDS VIROLOGY (3d Ed. 1996), the contents of which are incorporated by reference in their entirety. In some embodiments, AAV is capable of replication in vertebrate hosts including, but not limited to, human, primate, bovine, canine, equine, and ovine species.

[0959] In some embodiments, AAV are used as a biological tool due to a relatively simple structure, their ability to infect a wide range of cells (including quiescent and dividing cells) without integration into the host genome and without replicating, and their relatively benign immunogenic profile. In some embodiments, the genome, e.g., genetic element, of the virus may be manipulated to contain a minimum of components for the assembly of a functional recombinant virus, or viral particle, which is loaded with or engineered to target a particular tissue and express or deliver a desired payload, e.g., an antibody molecule (e.g., an anti-HER2 antibody molecule).

[0960] In some embodiments, the AAV, e.g., naturally occurring (e.g., wild-type) AAV or a recombinant AAV, comprises a genetic element which is a linear, single-stranded nucleic acid molecule, e.g., DNA (ssDNA). In some embodiments, the genetic element, e.g., of a naturally occurring (e.g., wild-type) AAV, is approximately 5,000 nucleotides (nt) in length. In some embodiments, inverted terminal repeats (ITRs) traditionally cap the viral genome at both the 5′ and the 3′ end, providing origins of replication for the viral genome. In some embodiments, an AAV genetic element comprises two ITR sequences. In some embodiments, the ITRs have a characteristic T-shaped hairpin structure defined by a self-complementary region (145 nt in wild-type AAV) at the 5′ and 3′ ends of the ssDNA which form an energetically stable double stranded region. The double stranded hairpin structures comprise multiple functions including, but not limited to, acting as an origin for DNA replication by functioning as primers for the endogenous DNA polymerase complex of the host viral replication cell.

[0961] In some embodiments, the AAV particle, e.g., an AAV particle (e.g., ssAAVs) described herein comprises a viral genome, e.g., genetic element and/or AAV vector, that is self-complementary (scAAV). In some embodiments, the ssAAV comprises nucleic acid molecules, e.g., DNA strands, that anneal together to form double stranded DNA. In some embodiments, a scAAV allows for rapid expression in a transduced cell as it bypasses second strand synthesis.

[0962] In some embodiments, the AAV genetic element further comprises nucleotide sequences for two open reading frames, one for the four non-structural Rep proteins (Rep78, Rep68, Rep52, Rep40, encoded by Rep genes) and one for the three capsid, or structural, proteins (VP1, VP2, VP3, encoded by capsid genes or Cap genes). The Rep proteins are used for replication and packaging, while the capsid proteins are assembled to create the protein shell of the AAV particle, or AAV capsid. In some embodiments, alternative splicing and alternate initiation codons and promoters result in the generation of four different Rep proteins from a single open reading frame and the generation of three capsid proteins from a single open reading frame. For example, in some embodiments, for the AAV9/hu.14 serotype (SEQ ID NO: 123 of U.S. Pat. No. 7,906,111, the contents of which are herein incorporated by reference in their entirety), VP1 refers to amino acids 1-736, VP2 refers to amino acids 138-736, and VP3 refers to amino acids 203-736. In some embodiments, VP1 is the full-length capsid sequence, while VP2 and VP3 are shorter components of the whole. As a result, changes in the sequence in the VP3 region, are also changes to VP1 and VP2, however, the percent difference as compared to the parent sequence will be greatest for VP3 since it is the shortest sequence of the three. Though described here in relation to the amino acid sequence, the nucleotide sequence encoding these proteins can be similarly described. In some embodiments, the three capsid proteins assemble to create the AAV capsid protein. In some embodiments, the AAV capsid protein typically comprises a molar ratio of 1:1:10 of VP1:VP2:VP3. In some embodiments, the AAV serotype is defined by the AAV capsid. In some instances, the ITRs are also specifically described by the AAV serotype (e.g., AAV2/9).

[0963] In some embodiments, a genetic element of a wild-type, e.g., naturally occurring, AAV can be modified to replace the rep/cap sequences with a nucleic acid comprising a transgene encoding a payload, e.g., an antibody molecule, wherein the genetic element comprises at least one ITR region. In some embodiments, the genetic element of a recombinant AAV comprises two ITR regions, e.g., a 5′ITR or a 3′ITR. In some embodiments, the rep/cap sequences can be provided in trans during production to generate AAV particles. In some embodiments, the genetic element of an AAV is comprised in an AAV vector, which further encodes a capsid protein e.g., a structural protein, wherein the capsid protein comprises a VP1 polypeptide, a VP2 polypeptide, and/or a VP3 polypeptide; and/or a Rep protein, e.g., a non-structural protein, wherein the Rep protein comprises a Rep78 protein, a Rep68, Rep52 protein, and/or a Rep40 protein.

[0964] In some embodiments, in addition to the genetic element comprising a nucleic acid encoding a transgene encoding a payload (e.g., an antibody molecule, e.g., an anti-HER2 antibody molecule), an AAV particle, e.g., an AAV particle described herein, may comprise the genetic element, in whole or in part, of any naturally occurring and/or recombinant AAV serotype nucleotide sequence or variant. In some embodiments, AAV variants may have sequences of significant homology at the nucleic acid (genetic element or capsid) and amino acid levels (capsids), to produce constructs which are generally physical and functional equivalents, replicate by similar mechanisms, and assemble by similar mechanisms. Chiorini et al., J. Vir. 71: 6823-33(1997); Srivastava et al., J. Vir. 45:555-64 (1983); Chiorini et al., J. Vir. 73:1309-1319 (1999); Rutledge et al., J. Vir. 72:309-319 (1998); and Wu et al., J. Vir. 74: 8635-47 (2000), the contents of each of which are incorporated herein by reference in their entirety.

[0965] In some embodiments, AAV particles of the present disclosure are recombinant AAV particles which are replication defective and lacking the nucleotide sequences encoding functional Rep and Cap proteins. In some embodiments, these defective AAV particles may lack most or all parental coding sequences and carry only one or two AAV ITR sequences and the nucleic acid of interest for delivery to a cell, a tissue, an organ, or an organism.

[0966] In some embodiments, the genetic element or the AAV vector of the AAV particles described herein comprise at least one control element which provides for the replication, transcription, and translation of a coding sequence encoded therein. In some embodiments, a sufficient number of control elements are present such that the coding sequence of the transgene encoded by the genetic element is capable of being replicated, transcribed, and/or translated in a host cell. Non-limiting examples of expression control elements include sequences for transcription initiation and/or termination, promoter and/or enhancer sequences, efficient RNA processing signals such as splicing and polyadenylation signals, sequences that stabilize cytoplasmic mRNA, sequences that enhance translation efficacy (e.g., Kozak consensus sequence), sequences that enhance protein stability, and/or sequences that enhance protein processing and/or secretion.

[0967] According to the present disclosure, the AAV particles for use in therapeutics and/or diagnostics comprise a viral particle that has been distilled or reduced to the minimum components necessary for transduction of a nucleic acid encoding a payload interest. In some embodiments, AAV particles are engineered as vehicles for specific delivery while lacking the deleterious replication and/or integration features found in wild-type viruses/viral particles. In some embodiments, the recombinant AAV particles of the present disclosure are capable of providing, e.g., delivering, a transgene to a mammalian cell. In some embodiments, the recombinant AAV particles of the present disclosure are capable of vectorized delivery of an antibody molecule (e.g., an anti-HER2 antibody molecule) or fragment thereof.

[0968] In some embodiments, the AAV particles, vectors, genetic elements, and/or nucleic acids of the present disclosure may be produced recombinantly and may be based on adeno-associated virus (AAV) parent or reference sequences. Methods for producing and/or modifying AAV particles are disclosed in the art such as pseudotyped AAV vectors (PCT Patent Publication Nos. WO200028004; WO200123001; WO2004112727; WO2005005610; and WO2005072364, the content of each of which is incorporated herein by reference in its entirety). In some embodiments, the AAV particles described herein may be modified to enhance the efficiency of delivery, e.g., delivery of a transgene encoding a payload, e.g., an antibody molecule. Without wishing to be bound by theory, it is believed in some embodiments, that a modified, e.g., recombinant, AAV particle can be packaged efficiently and successfully infect target cells at high frequency and with minimal toxicity. In some embodiments, the capsid protein of the AAV particles are engineered according to the methods described in US Publication Number US20130195801, the contents of which are incorporated herein by reference in their entirety.

### AAV Capsids and Variants Thereof

[0969] In some embodiments, an AAV particle, e.g., an AAV particle for the vectorized delivery of an antibody molecule described herein (e.g., an HER-2 antibody molecule), may comprise an AAV capsid polypeptide, e.g., an AAV capsid variant. In some embodiments, the AAV capsid polypeptide, e.g., an AAV capsid variant comprises a VOY101 capsid polypeptide, a VOY9P39 capsid polypeptide, a VOY9P33 capsid polypeptide, a AAVPHP.B (PHP.B) capsid polypeptide, a AAVPHP.N (PHP.N) capsid polypeptide, an AAV1 capsid polypeptide, an AAV2 capsid polypeptide, an AAV5 capsid polypeptide, an AAV9 capsid polypeptide, an AAV9 K449R capsid polypeptide, an AAVrh10 capsid polypeptide, or a functional variant thereof. In some embodiments, the AAV capsid polypeptide, e.g., AAV capsid variant, comprises an amino acid sequence of any of the AAV capsid polypeptides in Table 1, or an amino acid sequence substantially identical (e.g., having at least 70%, 75%, 80%, 85%, 90%, 92%, 95%, 97%, 98%, or 99% sequence identity) thereto. In some embodiments, the nucleotide sequence encoding the AAV capsid polypeptide comprises any one of the nucleotide sequence in Table 1, or a nucleotide sequence substantially identical (e.g., having at least 70%, 75%, 80%, 85%, 90%, 92%, 95%, 97%, 98%, or 99% sequence identity) thereto.

TABLE 1
Exemplary full length capsid sequences

| | SEQ | |
|---|---|---|
| | ID | |
| Description | NO: | Sequence Information |
| VOY101 | 1 | MAADGYLPDWLEDNLSEGIREWWALKPGAPQPKANQQHQDNARGLVLPGYKYLGPGNGL |
| | | DKGEPVNAADAAALEHDKAYDQQLKAGDNPYLKYNHADAEFQERLKEDTSFGGNLGRAV |
| | | FQAKKRLLEPLGLVEEAAKTAPGKKRPVEQSPQEPDSSAGIGKSGAQPAKKRLNFGQTG |
| | | DTESVPDPQPIGEPPAAPSGVGSLTMASGGGAPVADNNEGADGVGSSSGNWHCDSQWLG |
| | | DRVITTSTRTWALPTYNNHLYKQISNSTSGGSSNDNAYFGYSTPWGYFDFNRFHCHFSP |
| | | RDWQRLINNNWGFRPKRLNFKLFNIQVKEVTDNNGVKTIANNLTSTVQVFTDSDYQLPY |
| | | VLGSAHEGCLPPFPADVFMIPQYGYLTLNDGSQAVGRSSFYCLEYFPSQMLRTGNNFQF |
| | | SYEFENVPFHSSYAHSQSLDRLMNPLIDQYLYYLSKTINGSGQNQQTLKFSVAGPSNMA |
| | | VQGRNYIPGPSYRQQRVSTTVTQNNNSEFAWPGASSWALNGRNSLMNPGPAMASHKEGE |
| | | DRFFPLSGSLIFGKQGTGRDNVDADKVMITNEEEIKTTNPVATESYGQVATNHQSDGTL |
| | | AVPFKAQAQTGWVQNQGILPGMVWQDRDVYLQGPIWAKIPHTDGNFHPSPLMGGFGMKH |
| | | PPPQILIKNTPVPADPPTAFNKDKLNSFITQYSTGQVSVEIEWELQKENSKRWNPEIQY |
| | | TSNYYKSNNVEFAVNTEGVYSEPRPIGTRYLTRNL |
| AAV9/hu.14 | 11 | MAADGYLPDWLEDNLSEGIREWWALKPGAPQPKANQQHQDNARGLVLPGYKYLGPGNGL |
| K449R | | DKGEPVNAADAAALEHDKAYDQQLKAGDNPYLKYNHADAEFQERLKEDTSFGGNLGRAV |
| | | FQAKKRLLEPLGLVEEAAKTAPGKKRPVEQSPQEPDSSAGIGKSGAQPAKKRLNEGQTG |
| | | DTESVPDPQPIGEPPAAPSGVGSLTMASGGGAPVADNNEGADGVGSSSGNWHCDSQWLG |
| | | DRVITTSTRTWALPTYNNHLYKQISNSTSGGSSNDNAYFGYSTPWGYFDFNRFHCHFSP |
| | | RDWQRLINNNWGFRPKRLNFKLFNIQVKEVTDNNGVKTIANNLTSTVQVFTDSDYQLPY |
| | | VLGSAHEGCLPPFPADVEMIPQYGYLTLNDGSQAVGRSSFYCLEYFPSQMLRTGNNFQF |
| | | SYEFENVPFHSSYAHSQSLDRLMNPLIDQYLYYLSRTINGSGQNQQTLKESVAGPSNMA |
| | | VQGRNYIPGPSYRQQRVSTTVTQNNNSEFAWPGASSWALNGRNSLMNPGPAMASHKEGE |
| | | DRFFPLSGSLIFGKQGTGRDNVDADKVMITNEEEIKTTNPVATESYGQVATNHQSAQAQ |
| | | AQTGWVQNQGILPGMVWQDRDVYLQGPIWAKIPHTDGNFHPSPLMGGFGMKHPPPQILI |
| | | KNTPVPADPPTAFNKDKLNSFITQYSTGQVSVEIEWELQKENSKRWNPEIQYTSNYYKS |
| | | NNVEFAVNTEGVYSEPRPIGTRYLTRNL |
| AAV9/hu. 14 | 138 | MAADGYLPDWLEDNLSEGIREWWALKPGAPQPKANQQHQDNARGLVLPGYKYLGPGNGL |
| WT (amino | | DKGEPVNAADAAALEHDKAYDQQLKAGDNPYLKYNHADAEFQERLKEDTSFGGNLGRAV |
| acid) | | FQAKKRLLEPLGLVEEAAKTAPGKKRPVEQSPQEPDSSAGIGKSGAQPAKKRLNFGQTG |
| | | DTESVPDPQPIGEPPAAPSGVGSLTMASGGGAPVADNNEGADGVGSSSGNWHCDSQWLG |
| | | DRVITTSTRTWALPTYNNHLYKQISNSTSGGSSNDNAYFGYSTPWGYEDFNRFHCHFSP |
| | | RDWQRLINNNWGFRPKRLNFKLFNIQVKEVTDNNGVKTIANNLTSTVQVFTDSDYQLPY |
| | | VLGSAHEGCLPPFPADVEMIPQYGYLTLNDGSQAVGRSSFYCLEYFPSQMLRTGNNFQF |
| | | SYEFENVPFHSSYAHSQSLDRLMNPLIDQYLYYLSKTINGSGQNQQTLKFSVAGPSNMA |
| | | VQGRNYIPGPSYRQQRVSTTVTQNNNSEFAWPGASSWALNGRNSLMNPGPAMASHKEGE |
| | | DRFFPLSGSLIFGKQGTGRDNVDADKVMITNEEEIKTTNPVATESYGQVATNHQSAQAQ |
| | | AQTGWVQNQGILPGMVWQDRDVYLQGPIWAKIPHTDGNFHPSPLMGGFGMKHPPPQILI |
| | | KNTPVPADPPTAFNKDKLNSFITQYSTGQVSVEIEWELQKENSKRWNPEIQYTSNYYKS |
| | | NNVEFAVNTEGVYSEPRPIGTRYLTRNL |
| AAV9/hu.14 | 137 | ATGGCTGCCGATGGTTATCTTCCAGATTGGCTCGAGGACAACCTTAGTGAAGGAATTCG |
| WT (DNA) | | CGAGTGGTGGGCTTTGAAACCTGGAGCCCCTCAACCCAAGGCAAATCAACAACATCAAG |
| | | ACAACGCTCGAGGTCTTGTGCTTCCGGGTTACAAATACCTTGGACCCGGCAACGGACTC |
| | | GACAAGGGGGAGCCGGTCAACGCAGCAGACGCGGCGGCCCTCGAGCACGACAAGGCCTA |
| | | CGACCAGCAGCTCAAGGCCGGAGACAACCCGTACCTCAAGTACAACCACGCCGACGCCG |
| | | AGTTCCAGGAGCGGCTCAAAGAAGATACGTCTTTTGGGGGCAACCTCGGGCGAGCAGTC |
| | | TTCCAGGCCAAAAAGAGGCTTCTTGAACCTCTTGGTCTGGTTGAGGAAGCGGCTAAGAC |
| | | GGCTCCTGGAAAGAAGAGGCCTGTAGAGCAGTCTCCTCAGGAACCGGACTCCTCCGCGG |
| | | GTATTGGCAAATCGGGTGCACAGCCCGCTAAAAAGAGACTCAATTTCGGTCAGACTGGC |
| | | GACACAGAGTCAGTCCCAGACCCTCAACCAATCGGAGAACCTCCCGCAGCCCCCTCAGG |
| | | TGTGGGATCTCTTACAATGGCTTCAGGTGGTGGCGCACCAGTGGCAGACAATAACGAAG |
| | | GTGCCGATGGAGTGGGTAGTTCCTCGGGAAATTGGCATTGCGATTCCCAATGGCTGGGG |
| | | GACAGAGTCATCACCACCAGCACCCGAACCTGGGCCCTGCCCACCTACAACAATCACCT |
| | | CTACAAGCAAATCTCCAACAGCACATCTGGAGGATCTTCAAATGACAACGCCTACTTCG |
| | | GCTACAGCACCCCCTGGGGGTATTTTGACTTCAACAGATTCCACTGCCACTTCTCACCA |
| | | CGTGACTGGCAGCGACTCATCAACAACAACTGGGGATTCCGGCCTAAGCGACTCAACTT |
| | | CAAGCTCTTCAACATTCAGGTCAAAGAGGTTACGGACAACAATGGAGTCAAGACCATCG |
| | | CCAATAACCTTACCAGCACGGTCCAGGTCTTCACGGACTCAGACTATCAGCTCCCGTAC |
| | | GTGCTCGGGTCGGCTCACGAGGGCTGCCTCCCGCCGTTCCCAGCGGACGTTTTCATGAT |
| | | TCCTCAGTACGGGTATCTGACGCTTAATGATGGAAGCCAGGCCGTGGGTCGTTCGTCCT |
| | | TTTACTGCCTGGAATATTTCCCGTCGCAAATGCTAAGAACGGGTAACAACTTCCAGTTC |
| | | AGCTACGAGTTTGAGAACGTACCTTTCCATAGCAGCTACGCTCACAGCCAAAGCCTGGA |
| | | CCGACTAATGAATCCACTCATCGACCAATACTTGTACTATCTCTCAAAGACTATTAACG |
| | | GTTCTGGACAGAATCAACAAACGCTAAAATTCAGTGTGGCCGGACCCAGCAACATGGCT |
| | | GTCCAGGGAAGAAACTACATACCTGGACCCAGCTACCGACAACAACGTGTCTCAACCAC |
| | | TGTGACTCAAAACAACAACAGCGAATTTGCTTGGCCTGGAGCTTCTTCTTGGGCTCTCA |
| | | ATGGACGTAATAGCTTGATGAATCCTGGACCTGCTATGGCCAGCCACAAAGAAGGAGAG |
| | | GACCGTTTCTTTCCTTTGTCTGGATCTTTAATTTTTGGCAAACAAGGAACTGGAAGAGA |
| | | CAACGTGGATGCGGACAAAGTCATGATAACCAACGAAGAAGAAATTAAAACTACTAACC |
| | | CGGTAGCAACGGAGTCCTATGGACAAGTGGCCACAAACCACCAGAGTGCCCAAGCACAG |
| | | GCGCAGACCGGCTGGGTTCAAAACCAAGGAATACTTCCGGGTATGGTTTGGCAGGACAG |
| | | AGATGTGTACCTGCAAGGACCCATTTGGGCCAAAATTCCTCACACGGACGGCAACTTTC |
| | | ACCCTTCTCCGCTGATGGGAGGGTTTGGAATGAAGCACCCGCCTCCTCAGATCCTCATC |
| | | AAAAACACACCTGTACCTGCGGATCCTCCAACGGCCTTCAACAAGGACAAGCTGAACTC |
| | | TTTCATCACCCAGTATTCTACTGGCCAAGTCAGCGTGGAGATCGAGTGGGAGCTGCAGA |
| | | AGGAAAACAGCAAGCGCTGGAACCCGGAGATCCAGTACACTTCCAACTATTACAAGTCT |
| | | AATAATGTTGAATTTGCTGTTAATACTGAAGGTGTATATAGTGAACCCCGCCCCATTGG |
| | | CACCAGATACCTGACTCGTAATCTGTAA |
| VOY9P39 | 12 | MAADGYLPDWLEDNLSEGIREWWALKPGAPQPKANQQHQDNARGLVLPGYKYLGPGNGL |
| (amino acid) | | DKGEPVNAADAAALEHDKAYDQQLKAGDNPYLKYNHADAEFQERLKEDTSFGGNLGRAV |
| | | FQAKKRLLEPLGLVEEAAKTAPGKKRPVEQSPQEPDSSAGIGKSGAQPAKKRLNEGQTG |
| | | DTESVPDPQPIGEPPAAPSGVGSLTMASGGGAPVADNNEGADGVGSSSGNWHCDSQWLG |
| | | DRVITTSTRTWALPTYNNHLYKQISNSTSGGSSNDNAYFGYSTPWGYFDFNRFHCHFSP |
| | | RDWQRLINNNWGFRPKRLNFKLFNIQVKEVTDNNGVKTIANNLTSTVQVFTDSDYQLPY |
| | | VLGSAHEGCLPPFPADVEMIPQYGYLTLNDGSQAVGRSSFYCLEYFPSQMLRTGNNFQF |
| | | SYEFENVPFHSSYAHSQSLDRLMNPLIDQYLYYLSKTINGSGQNQQTLKFSVAGPSNMA |
| | | VQGRNYIPGPSYRQQRVSTTVTQNNNSEFAWPGASSWALNGRNSLMNPGPAMASHKEGE |
| | | DRFFPLSGSLIFGKQGTGRDNVDADKVMITNEEEIKTTNPVATESYGQVATNHQSDGTG |
| | | STTGWAQAQTGWVQNQGILPGMVWQDRDVYLQGPIWAKIPHTDGNFHPSPLMGGFGMKH |
| | | PPPQILIKNTPVPADPPTAFNKDKLNSFITQYSTGQVSVEIEWELQKENSKRWNPEIQY |
| | | TSNYYKSNNVEFAVNTEGVYSEPRPIGTRYLTRNL |
| VOY9P39 | 13 | ATGGCTGCCGATGGTTATCTTCCAGattggcTCGAGGACAACCTTAGTGAAGGAATTCG |
| (DNA) | | CGAGTGGTGGGCTTTGAAACCTGGAGCCCCTCAACCCAAGGCAAATCAACAACATCAAG |
| | | ACAACGCTCGAGGTCTTGTGCTTCCGGGTTACAAATACCTTGGACCCGGCAACGGACTC |
| | | GACAAGGGGGAGCCGGTCAACGCAGCAGACGCGGCGGCCCTCGAGCACGACAAGGCCTA |
| | | CGACCAGCAGCTCAAGGCCGGAGACAACCCGTACCTCAAGTACAACCACGCCGACGCCG |
| | | AGTTCCAGGAGCGGCTCAAAGAAGATACGTCTTTTGGGGGCAACCTCGGGCGAGCAGTC |
| | | TTCCAGGCCAAAAAGAGGCTTCTTGAACCTCTTGGTCTGGTTGAGGAAGCGGCTAAGAC |
| | | GGCTCCTGGAAAGAAGAGGCCTGTAGAGCAGTCTCCTCAGGAACCGGACTCCTCCGCGG |
| | | GTATTGGCAAATCGGGTGCACAGCCCGCTAAAAAGAGACTCAATTTCGGTCAGACTGGC |
| | | GACACAGAGTCAGTCCCAGACCCTCAACCAATCGGAGAACCTCCCGCAGCCCCCTCAGG |
| | | TGTGGGATCTCTTACAATGGCTTCAGGTGGTGGCGCACCAGTGGCAGACAATAACGAAG |
| | | GTGCCGATGGAGTGGGTAGTTCCTCGGGAAATTGGCATTGCGATTCCCAATGGCTGGGG |
| | | GACAGAGTCATCACCACCAGCACCCGAACCTGGGCCCTGCCCACCTACAACAATCACCT |
| | | CTACAAGCAAATCTCCAACAGCACATCTGGAGGATCTTCAAATGACAACGCCTACTTCG |
| | | GCTACAGCACCCCCTGGGGGTATTTTGACTTCAACAGATTCCACTGCCACTTCTCACCA |
| | | CGTGACTGGCAGCGACTCATCAACAACAACTGGGGATTCCGGCCTAAGCGACTCAACTT |
| | | CAAGCTCTTCAACATTCAGGTCAAAGAGGTTACGGACAACAATGGAGTCAAGACCATCG |
| | | CCAATAACCTTACCAGCACGGTCCAGGTCTTCACGGACTCAGACTATCAGCTCCCGTAC |
| | | GTGCTCGGGTCGGCTCACGAGGGCTGCCTCCCGCCGTTCCCAGCGGACGTTTTCATGAT |
| | | TCCTCAGTACGGGTATCTGACGCTTAATGATGGAAGCCAGGCCGTGGGTCGTTCGTCCT |
| | | TTTACTGCCTGGAATATTTCCCGTCGCAAATGCTAAGAACGGGTAACAACTTCCAGTTC |
| | | AGCTACGAGTTTGAGAACGTACCTTTCCATAGCAGCTACGCTCACAGCCAAAGCCTGGA |
| | | CCGACTAATGAATCCACTCATCGACCAATACTTGTACTATCTCTCAAAGACTATTAACG |
| | | GTTCTGGACAGAATCAACAAACGCTAAAATTCAGTGTGGCCGGACCCAGCAACATGGCT |
| | | GTCCAGGGAAGAAACTACATACCTGGACCCAGCTACCGACAACAACGTGTCTCAACCAC |
| | | TGTGACTCAAAACAACAACAGCGAATTTGCTTGGCCTGGAGCTTCTTCTTGGGCTCTCA |
| | | ATGGACGTAATAGCTTGATGAATCCTGGACCTGCTATGGCCAGCCACAAAGAAGGAGAG |
| | | GACCGTTTCTTTCCTTTGTCTGGATCTTTAATTTTTGGCAAACAAGGAACTGGAAGAGA |
| | | CAACGTGGATGCGGACAAAGTCATGATAACCAACGAAGAAGAAATTAAAACTACTAACC |
| | | CGGTAGCAACGGAGTCCTATGGACAAGTGGCCACAAACCACCAGAGTGACGGAACAGGA |
| | | AGCACAACAGGATGGGCACAGGCGCAGACCGGCTGGGTTCAAAACCAAGGAATACTTCC |
| | | GGGTATGGTTTGGCAGGACAGAGATGTGTACCTGCAAGGACCCATTTGGGCCAAAATTC |
| | | CTCACACGGACGGCAACTTTCACCCTTCTCCGCTGATGGGAGGGTTTGGAATGAAGCAC |
| | | CCGCCTCCTCAGATCCTCATCAAAAACACACCTGTACCTGCCGATCCTCCAACGGCCTT |
| | | CAACAAGGACAAGCTGAACTCTTTCATCACCCAGTATTCTACTGGCCAAGTCAGCGTGG |
| | | AGATCGAGTGGGAGCTGCAGAAGGAAAACAGCAAGCGgTGGAACCCGGAGATCCAGTAC |
| | | ACTTCCAACTATTACAAGTCTAATAATGTTGAATTTGCTGTTAATACTGAAGGTGTATA |
| | | TAGTGAACCCCGCCCCATTGGCACCAGATACCTGACTCGTAATCTGTAA |
| VOY9P33 | 14 | MAADGYLPDWLEDNLSEGIREWWALKPGAPQPKANQQHQDNARGLVLPGYKYLGPGNGL |
| (amino acid) | | DKGEPVNAADAAALEHDKAYDQQLKAGDNPYLKYNHADAEFQERLKEDTSFGGNLGRAV |
| | | FQAKKRLLEPLGLVEEAAKTAPGKKRPVEQSPQEPDSSAGIGKSGAQPAKKRLNEGQTG |
| | | DTESVPDPQPIGEPPAAPSGVGSLTMASGGGAPVADNNEGADGVGSSSGNWHCDSQWLG |
| | | DRVITTSTRTWALPTYNNHLYKQISNSTSGGSSNDNAYFGYSTPWGYFDFNRFHCHFSP |
| | | RDWQRLINNNWGFRPKRLNFKLFNIQVKEVTDNNGVKTIANNLTSTVQVFTDSDYQLPY |
| | | VLGSAHEGCLPPFPADVFMIPQYGYLTLNDGSQAVGRSSFYCLEYFPSQMLRTGNNEQF |
| | | SYEFENVPFHSSYAHSQSLDRLMNPLIDQYLYYLSKTINGSGQNQQTLKESVAGPSNMA |
| | | VQGRNYIPGPSYRQQRVSTTVTQNNNSEFAWPGASSWALNGRNSLMNPGPAMASHKEGE |
| | | DRFFPLSGSLIFGKQGTGRDNVDADKVMITNEEEIKTTNPVATESYGQVATNHQSDGTG |
| | | QVTGWAQAQTGWVQNQGILPGMVWQDRDVYLQGPIWAKIPHTDGNFHPSPLMGGFGMKH |
| | | PPPQILIKNTPVPADPPTAFNKDKLNSFITQYSTGQVSVEIEWELQKENSKRWNPEIQY |
| | | TSNYYKSNNVEFAVNTEGVYSEPRPIGTRYLTRNL |
| VOY9P33 | 15 | ATGGCTGCCGATGGTTATCTTCCAGattggcTCGAGGACAACCTTAGTGAAGGAATTCG |
| (DNA) | | CGAGTGGTGGGCTTTGAAACCTGGAGCCCCTCAACCCAAGGCAAATCAACAACATCAAG |
| | | ACAACGCTCGAGGTCTTGTGCTTCCGGGTTACAAATACCTTGGACCCGGCAACGGACTC |
| | | GACAAGGGGGAGCCGGTCAACGCAGCAGACGCGGCGGCCCTCGAGCACGACAAGGCCTA |
| | | CGACCAGCAGCTCAAGGCCGGAGACAACCCGTACCTCAAGTACAACCACGCCGACGCCG |
| | | AGTTCCAGGAGCGGCTCAAAGAAGATACGTCTTTTGGGGGCAACCTCGGGCGAGCAGTC |
| | | TTCCAGGCCAAAAAGAGGCTTCTTGAACCTCTTGGTCTGGTTGAGGAAGCGGCTAAGAC |
| | | GGCTCCTGGAAAGAAGAGGCCTGTAGAGCAGTCTCCTCAGGAACCGGACTCCTCCGCGG |
| | | GTATTGGCAAATCGGGTGCACAGCCCGCTAAAAAGAGACTCAATTTCGGTCAGACTGGC |
| | | GACACAGAGTCAGTCCCAGACCCTCAACCAATCGGAGAACCTCCCGCAGCCCCCTCAGG |
| | | TGTGGGATCTCTTACAATGGCTTCAGGTGGTGGCGCACCAGTGGCAGACAATAACGAAG |
| | | GTGCCGATGGAGTGGGTAGTTCCTCGGGAAATTGGCATTGCGATTCCCAATGGCTGGGG |
| | | GACAGAGTCATCACCACCAGCACCCGAACCTGGGCCCTGCCCACCTACAACAATCACCT |
| | | CTACAAGCAAATCTCCAACAGCACATCTGGAGGATCTTCAAATGACAACGCCTACTTCG |
| | | GCTACAGCACCCCCTGGGGGTATTTTGACTTCAACAGATTCCACTGCCACTTCTCACCA |
| | | CGTGACTGGCAGCGACTCATCAACAACAACTGGGGATTCCGGCCTAAGCGACTCAACTT |
| | | CAAGCTCTTCAACATTCAGGTCAAAGAGGTTACGGACAACAATGGAGTCAAGACCATCG |
| | | CCAATAACCTTACCAGCACGGTCCAGGTCTTCACGGACTCAGACTATCAGCTCCCGTAC |
| | | GTGCTCGGGTCGGCTCACGAGGGCTGCCTCCCGCCGTTCCCAGCGGACGTTTTCATGAT |
| | | TCCTCAGTACGGGTATCTGACGCTTAATGATGGAAGCCAGGCCGTGGGTCGTTCGTCCT |
| | | TTTACTGCCTGGAATATTTCCCGTCGCAAATGCTAAGAACGGGTAACAACTTCCAGTTC |
| | | AGCTACGAGTTTGAGAACGTACCTTTCCATAGCAGCTACGCTCACAGCCAAAGCCTGGA |
| | | CCGACTAATGAATCCACTCATCGACCAATACTTGTACTATCTCTCAAAGACTATTAACG |
| | | GTTCTGGACAGAATCAACAAACGCTAAAATTCAGTGTGGCCGGACCCAGCAACATGGCT |
| | | GTCCAGGGAAGAAACTACATACCTGGACCCAGCTACCGACAACAACGTGTCTCAACCAC |
| | | TGTGACTCAAAACAACAACAGCGAATTTGCTTGGCCTGGAGCTTCTTCTTGGGCTCTCA |
| | | ATGGACGTAATAGCTTGATGAATCCTGGACCTGCTATGGCCAGCCACAAAGAAGGAGAG |
| | | GACCGTTTCTTTCCTTTGTCTGGATCTTTAATTTTTGGCAAACAAGGAACTGGAAGAGA |
| | | CAACGTGGATGCGGACAAAGTCATGATAACCAACGAAGAAGAAATTAAAACTACTAACC |
| | | CGGTAGCAACGGAGTCCTATGGACAAGTGGCCACAAACCACCAGAGTGACGGAACAGGA |
| | | CAAGTCACAGGATGGGCACAGGCGCAGACCGGCTGGGTTCAAAACCAAGGAATACTTCC |
| | | GGGTATGGTTTGGCAGGACAGAGATGTGTACCTGCAAGGACCCATTTGGGCCAAAATTC |
| | | CTCACACGGACGGCAACTTTCACCCTTCTCCGCTGATGGGAGGGTTTGGAATGAAGCAC |
| | | CCGCCTCCTCAGATCCTCATCAAAAACACACCTGTACCTGCCGATCCTCCAACGGCCTT |
| | | CAACAAGGACAAGCTGAACTCTTTCATCACCCAGTATTCTACTGGCCAAGTCAGCGTGG |
| | | AGATCGAGTGGGAGCTGCAGAAGGAAAACAGCAAGCGgTGGAACCCGGAGATCCAGTAC |
| | | ACTTCCAACTATTACAAGTCTAATAATGTTGAATTTGCTGTTAATACTGAAGGTGTATA |
| | | TAGTGAACCCCGCCCCATTGGCACCAGATACCTGACTCGTAATCTGTAA |

[0970] In some embodiments, the AAV capsid polypeptide, e.g., the AAV capsid variant, comprises the amino acid sequence of SEQ ID NO: 138 or an amino acid sequence substantially identical (e.g., having at least 70%, 75%, 80%, 85%, 90%, 92%, 95%, 97%, 98%, or 99% sequence identity) thereto. In some embodiments the AAV capsid polypeptide, e.g., the AAV capsid variant, comprises an amino acid sequence comprising at least one, two, or three modifications but no more than 30, 20, or 10 modifications, e.g., substitutions, relative to the amino acid sequence of SEQ ID NO: 138. In some embodiments, the AAV capsid polypeptide, e.g., the AAV capsid variant, comprises an amino acid sequence encoded by the nucleotide sequence of SEQ ID NO: 137 or a nucleotide sequence substantially identical (e.g., having at least 70%, 75%, 80%, 85%, 90%, 92%, 95%, 97%, 98%, or 99% sequence identity) thereto. In some embodiments, the nucleotide sequence encoding the AAV capsid polypeptide, e.g., the AAV capsid variant, comprises the nucleotide sequence of SEQ ID NO: 137 or a nucleotide sequence substantially identical (e.g., having at least 70%, 75%, 80%, 85%, 90%, 92%, 95%, 97%, 98%, or 99% sequence identity) thereto. In some embodiments, the AAV capsid polypeptide, e.g., the AAV capsid variant, comprises substitution at position K449, e.g., a K449R substitution, numbered according to SEQ ID NO: 138.

[0971] In some embodiments, the AAV capsid polypeptide, e.g., the AAV capsid variant, comprises a peptide comprising the amino acid sequence of TLAVPFK (SEQ ID NO: 1262). In some embodiments, the peptide is present immediately subsequent to position 588, relative to a reference sequence numbered according to SEQ ID NO: 138. In some embodiments, the capsid polypeptide comprises the amino acid substitutions of A587D and Q588G, numbered according to SEQ ID NO: 138.

[0972] In some embodiments, the AAV capsid polypeptide, e.g., the AAV capsid variant, comprises the amino acid substitution of K449R, numbered according to SEQ ID NO: 138; and a peptide comprising the amino acid sequence of TLAVPFK, wherein the peptide is present immediately subsequent to position 588, relative to a reference sequence numbered according to SEQ ID NO: 138.

[0973] In some embodiments, the AAV capsid polypeptide, e.g., the AAV capsid variant, comprises the amino acid substitution of K449R, numbered according to SEQ ID NO: 138; an peptide comprising the amino acid sequence of TLAVPFK (SEQ ID NO: 1262), wherein the insert is present immediately subsequent to position 588, relative to a reference sequence numbered according to SEQ ID NO: 138; and the amino acid substitutions of A587D and Q588G, numbered according to SEQ ID NO: 138.

[0974] In some embodiments, the AAV capsid polypeptide, e.g., the AAV capsid variant, comprises a peptide comprising the amino acid sequence of TLAVPFK (SEQ ID NO: 1262), wherein the insert is present immediately subsequent to position 588, relative to a reference sequence numbered according to SEQ ID NO: 138; and the amino acid substitutions of A587D and Q588G, numbered according to SEQ ID NO: 138.

[0975] In some embodiments, the AAV capsid polypeptide, e.g., the AAV capsid variant, comprises the amino acid sequence of SEQ ID NO: 11 or an amino acid sequence substantially identical (e.g., having at least 70%, 75%, 80%, 85%, 90%, 92%, 95%, 97%, 98%, or 99% sequence identity) thereto. In some embodiments the AAV capsid polypeptide, e.g., the AAV capsid variant, comprises an amino acid sequence comprising at least one, two, or three modifications but no more than 30, 20, or 10 modifications, e.g., substitutions, relative to the amino acid sequence of SEQ ID NO: 11, optionally wherein position 449 is not R.

[0976] In some embodiments, the capsid polypeptide, comprises the amino acid sequence of SEQ ID NO: 1 or an amino acid sequence substantially identical (e.g., having at least 70%, 75%, 80%, 85%, 90%, 92%, 95%, 97%, 98%, or 99% sequence identity) thereto. In some embodiments the AAV capsid polypeptide, e.g., the AAV capsid variant, comprises an amino acid sequence comprising at least one, two, or three modifications but no more than 30, 20, or 10 modifications, e.g., substitutions, relative to the amino acid sequence of SEQ ID NO: 1.

[0977] In some embodiments, the AAV capsid polypeptide, e.g., the AAV capsid variant, comprises the amino acid sequence of SEQ ID NO: 12 or an amino acid sequence substantially identical (e.g., having at least 70%, 75%, 80%, 85%, 90%, 92%, 95%, 97%, 98%, or 99% sequence identity) thereto. In some embodiments the AAV capsid polypeptide, e.g., the AAV capsid variant, comprises an amino acid sequence comprising at least one, two, or three modifications but no more than 30, 20, or 10 modifications, e.g., substitutions, relative to the amino acid sequence of SEQ ID NO: 12. In some embodiments, the AAV capsid polypeptide, e.g., the AAV capsid variant, comprises an amino acid sequence encoded by the nucleotide sequence of SEQ ID NO: 13 or a nucleotide sequence substantially identical (e.g., having at least 70%, 75%, 80%, 85%, 90%, 92%, 95%, 97%, 98%, or 99% sequence identity) thereto.

[0978] In some embodiments, the AAV capsid polypeptide, e.g., the AAV capsid variant, comprises the amino acid sequence of SEQ ID NO: 14 or an amino acid sequence substantially identical (e.g., having at least 70%, 75%, 80%, 85%, 90%, 92%, 95%, 97%, 98%, or 99% sequence identity) thereto. In some embodiments the AAV capsid polypeptide, e.g., the AAV capsid variant, comprises an amino acid sequence comprising at least one, two, or three modifications but no more than 30, 20, or 10 modifications, e.g., substitutions, relative to the amino acid sequence of SEQ ID NO: 14. In some embodiments, the AAV capsid polypeptide, e.g., the AAV capsid variant, comprises an amino acid sequence encoded by the nucleotide sequence of SEQ ID NO: 15 or a nucleotide sequence substantially identical (e.g., having at least 70%, 75%, 80%, 85%, 90%, 92%, 95%, 97%, 98%, or 99% sequence identity) thereto.

[0979] In some embodiments, an AAV particle described herein comprises an AAV capsid polypeptide, e.g., an AAV capsid variant. In some embodiments, the AAV capsid polypeptide, e.g., the AAV capsid variant, comprises a peptide sequence as described in Table 2.

TABLE 2
Exemplary Peptide Sequences

| | SEQ ID | Amino Acid | SEQ ID | |
|---|---|---|---|---|
| Peptide | NO: | Sequence | NO: | Nucleotide Sequence |
| 1 | 3648 | PLNGAVHLY | 3660 | ccgcttaatggtgccgtccatctttat |
| 2 | 3649 | RDSPKGW | 3661 | cgtgattctccgaagggttggca |
| 3 | 3650 | YSTDVRM | 3662 | tattctacggatgtgaggatgca |
| 4 | 3651 | IVMNSLK | 3663 | attgttatgaattcgttgaaggc |
| 5 | 3652 | RESPRGL | 3664 | cgggagagtcctcgtgggctgca |
| 6 | 3653 | SFNDTRA | 3665 | agttttaatgatactagggctca |
| 7 | 3654 | GGTLAVVSL | 3666 | ggtggtacgttggccgtcgtgtcgctt |
| 8 | 3655 | YGLPKGP | 3667 | tatgggttgccgaagggtcct |
| 9 | 3656 | STGTLRL | 3668 | tcgactgggacgcttcggctt |
| 10 | 3657 | YSTDERM | 3669 | tattcgacggatgagaggatg |
| 11 | 3658 | YSTDERK | 3670 | tattcgacggatgagaggaag |
| 12 | 3659 | YVSSVKM | 3671 | tatgtttcgtctgttaagatg |

[0980] In some embodiments, the AAV capsid polypeptide, e.g., the AAV capsid variant, comprises a peptide sequence as described in WO2021230987, the contents of which are hereby incorporated by reference in their entirety.

[0981] In some embodiments, the AAV capsid polypeptide, e.g., the AAV capsid variant, comprises at least 3, 4, 5, 6, 7, 8, or 9 consecutive amino acids from the amino acid sequence of any of SEQ ID NO: 3648-3659. In some embodiments, the AAV capsid variant comprises at least 3, 4, 5, 6, 7, 8, or 9 consecutive amino acids from the amino acid sequence of any of SEQ ID NO: 11725-11775, 11785, 11798, or 11819. In some embodiments, the amino acid sequence is present in loop VIII. In some embodiments, the amino acid sequence is present immediately subsequent to position 586, 588, or 589, relative to a reference sequence numbered according to the amino acid sequence of SEQ ID NO: 138.

[0982] In some embodiments, the AAV capsid polypeptide, e.g., the AAV capsid variant, comprises an amino acid sequence comprising at least one, two, or three but no more than four modifications, e.g., substitutions, relative to the amino acid sequence of any of SEQ ID NO: 3648-3659. In some embodiments, the AAV capsid polypeptide, e.g., the AAV capsid variant, comprises an amino acid sequence comprising at least one, two, or three but no more than four modifications, e.g., substitutions, relative to the amino acid sequence of any of SEQ ID NO: 11725-11775, 11785, 11798, or 11819. In some embodiments, the amino acid sequence is present in loop VIII. In some embodiments, the amino acid sequence is present immediately subsequent to position 586, 588, or 589, relative to a reference sequence numbered according to the amino acid sequence of SEQ ID NO: 138.

[0983] In some embodiments, the AAV capsid polypeptide, e.g., the AAV capsid variant, comprises the amino acid sequence of PLNGAVHLY (SEQ ID NO: 3648), or an amino acid sequence having at least one, two, or three but no more than four modifications, e.g., substitutions, relative to the amino acid sequence of PLNGAVHLY (SEQ ID NO: 3648), optionally wherein position 7 is H.

[0984] In some embodiments, the AAV capsid polypeptide, e.g. the AAV capsid variant, comprises the amino acid sequence of IVMNSLK (SEQ ID NO: 3651), or an amino acid sequence having at least one, two, or three modifications but no more than four modifications, e.g., substitutions, relative to the amino acid sequence of IVMNSLK (SEQ ID NO: 3651).

[0985] In some embodiments, the AAV capsid polypeptide, e.g., the AAV capsid variant, comprises the amino acid sequence of any of SEQ ID NO: 1725-3622. In some embodiments, the AAV capsid variant comprises the amino acid sequence of any of SEQ ID NO: 3648-3659. In some embodiments, the amino acid sequence is present in loop VIII of an AAV capsid variant described herein. In some embodiments, the amino acid sequence is present immediately subsequent to position 586, relative to a reference sequence numbered according to the amino acid sequence of SEQ ID NO: 138. In some embodiments, the amino acid sequence is present immediately subsequent to position 588, relative to a reference sequence numbered according to the amino acid sequence of SEQ ID NO: 138. In some embodiments, the amino acid sequence is present immediately subsequent to position 589, relative to a reference sequence numbered according to the amino acid sequence of SEQ ID NO: 138.

[0986] In some embodiments, the AAV capsid polypeptide, e.g., the AAV capsid variant (e.g., an AAV capsid variant described herein), comprises an amino acid sequence encoded by the nucleotide sequence of any one of SEQ ID NOs: 3660-3671, or a nucleotide sequence substantially identical (e.g., having at least 70%, 75%, 80%, 85%, 90%, 92%, 95%, 97%, 98%, or 99% sequence identity) thereto. In some embodiments, the AAV capsid, e.g., an AAV capsid variant described herein, comprises an amino acid sequence encoded by a nucleotide sequence comprising at least one, two, three, four, five, six, or seven modifications but no more than ten modifications of the nucleotide sequences of any of SEQ ID NOs: 3660-3671.

[0987] In some embodiments, the nucleotide sequence encoding the AAV capsid polypeptide, e.g., the AAV capsid variant (e.g., an AAV capsid variant described herein), comprises the nucleotide sequence of any one of SEQ ID NOs: 3660-3671, or a nucleotide sequence substantially identical (e.g., having at least 70%, 75%, 80%, 85%, 90%, 92%, 95%, 97%, 98%, or 99% sequence identity) thereto. In some embodiments, nucleic acid sequence encoding the AAV capsid variant, e.g., an AAV capsid variant described herein, comprises a nucleotide sequence comprising at least one, two, three, four, five, six, or seven modifications but no more than ten modifications of the nucleotide sequences of any of SEQ ID NOs: 3660-3671.

[0988] In some embodiments, the nucleotide sequence encoding the AAV capsid polypeptide, e.g., the AAV capsid variant (e.g., an AAV capsid variant described herein), comprises the nucleotide sequence of SEQ ID NO: 3660, or a nucleotide sequence substantially identical (e.g., having at least 70%, 75%, 80%, 85%, 90%, 92%, 95%, 97%, 98%, or 99% sequence identity) thereto. In some embodiments, the nucleic acid sequence encoding the AAV capsid variant comprises a nucleotide sequence comprising at least one, two, three, four, five, six, or seven modifications but no more than ten modifications of the nucleotide sequences of SEQ ID NO: 3660.

[0989] In some embodiments, the nucleotide sequence encoding the AAV capsid polypeptide, e.g., the AAV capsid variant (e.g., an AAV capsid variant described herein), comprises the nucleotide sequence of SEQ ID NO: 3663, or a nucleotide sequence substantially identical (e.g., having at least 70%, 75%, 80%, 85%, 90%, 92%, 95%, 97%, 98%, or 99% sequence identity) thereto. In some embodiments, the nucleic acid sequence encoding the AAV capsid variant comprises a nucleotide sequence comprising at least one, two, three, four, five, six, or seven modifications but no more than ten modifications of the nucleotide sequences of SEQ ID NO: 3663.

[0990] In some embodiments, the AAV capsid polypeptide, e.g., the AAV capsid variant, comprises an amino acid residue other than “A” at position 587 and/or an amino acid residue other than “Q” at position 588, numbered according to SEQ ID NO: 138.

[0991] In some embodiments, the AAV capsid polypeptide, e.g., the AAV capsid variant, comprises the amino acid sequence of PLNGAVHLY (SEQ ID NO: 3648) wherein the amino acid sequence of PLNGAVHLY (SEQ ID NO: 3648) is present immediately subsequent to position 586, relative to a reference sequence numbered according to the amino acid sequence of SEQ ID NO: 138.

[0992] In some embodiments, the polypeptide, e.g., the AAV capsid variant, comprises the amino acid sequence of GGTLAVVSL (SEQ ID NO: 3654), wherein the amino acid sequence of GGTLAVVSL (SEQ ID NO: 3654) is present immediately subsequent to position 586, relative to a reference sequence numbered according to the amino acid sequence of SEQ ID NO: 138.

[0993] In some embodiments, the AAV capsid polypeptide, e.g., the AAV capsid variant, comprises the amino acid sequence of IVMNSLK (SEQ ID NO: 3651), wherein the amino acid sequence of IVMNSLK (SEQ ID NO: 3651) is present immediately subsequent to position 588, relative to a reference sequence numbered according to the amino acid sequence of SEQ ID NO: 138.

[0994] In some embodiments, the AAV capsid polypeptide, e.g., the AAV capsid variant, comprises the amino acid sequence of any of SEQ ID NOs: 3649, 3650, 3652, 3653, or 3655-3659, wherein the amino acid sequence of any of the aforesaid sequences is present immediately subsequent to position 589, relative to a reference sequence numbered according to the amino acid sequence of SEQ ID NO: 138.

[0995] In some embodiments, the AAV capsid polypeptide, e.g., the AAV capsid variant, further comprises a substitution at position K449, e.g., a K449R substitution, numbered according to SEQ ID NO: 138. In some embodiments, the AAV capsid variant further comprises a modification, e.g., an insertion, substitution, and/or deletion in loop I, II, IV, and/or VI.

[0996] In some embodiments, the AAV capsid polypeptide, e.g., the AAV capsid variant, further comprises an amino acid sequence having at least one, two or three modifications but not more than 30, 20 or 10 modifications of the amino acid sequence of SEQ ID NO: 138. In some embodiments, the AAV capsid variant further comprises the amino acid sequence of SEQ ID NO: 138, or an amino acid sequence with at least 80% (e.g., at least about 85, 90, 95, 96, 97, 98, or 99%) sequence identity thereto. In some embodiments, the AAV capsid variant further comprises an amino acid sequence encoded by the nucleotide sequence of SEQ ID NO: 137, or a sequence with at least 80% (e.g., at least about 85, 90, 95, 96, 97, 98, or 99%) sequence identity thereto.

[0997] In some embodiments, an AAV capsid polypeptide, e.g., an AAV capsid variant, of the present disclosure comprises an amino acid sequence as described in WO2021230987, the contents of which are hereby incorporated by reference in their entirety.

[0998] In some embodiments, an AAV capsid polypeptide, e.g., an AAV capsid variant, of the present disclosure comprises an amino acid sequence as described herein, e.g. an amino acid sequence of an AAV capsid variant chosen from TTD-001, TTD-002, TTD-003, TTD-004, TTD-005, TTD-006, TTD-007, TTD-008, TTD-009, TTD-010, TTD-011, or TTD-012, e.g., as described in Tables 3 and 4.

[0999] In some embodiments, an AAV capsid polypeptide, e.g. the AAV capsid variant, comprises a VP1, VP2, and/or VP3 protein comprising an amino acid sequence described herein, e.g. an amino acid sequence of an AAV capsid variant chosen from TTD-001, TTD-002, TTD-003, TTD-004, TTD-005, TTD-006, TTD-007, TTD-008, TTD-009, TTD-010, TTD-011, or TTD-012, e.g., as described in Tables 3 and 4.

[1000] In some embodiments, an AAV capsid polypeptide, e.g., the AAV capsid variant, comprises an amino acid sequence encoded by a nucleotide sequence as described herein, e.g. a nucleotide sequence of Attorney Docket No.: VTJ-1318U Clean Substitute Specification an AAV capsid variant chosen from TTD-001, TTD-002, TTD-003, TTD-004, TTD-005, TTD-006, TTD-007, TTD-008, TTD-009, TTD-010, TTD-011, or TTD-012, e.g., as described in Tables 3 and 5.

[1001] In some embodiments, a polynucleotide encoding an AAV capsid polypeptide, e.g., an AAV capsid variant, of the present disclosure comprises a nucleotide sequence described herein, e.g. a nucleotide sequence of an AAV capsid variant chosen from TTD-001, TTD-002, TTD-003, TTD-004, TTD-005, TTD-006, TTD-007, TTD-008, TTD-009, TTD-010, TTD-011, or TTD-012, e.g., as described in Tables 3 and 5.

[1002] In some embodiments, insertion of a nucleic acid sequence, targeting nucleic acid sequence, or a peptide into a parent AAV sequence generates the non-limiting exemplary full length capsid sequences, e.g., an AAV capsid polypeptide, e.g., an AAV capsid variant, as described in Tables 3, 4 and 5.

TABLE 3
Exemplary full length capsid sequences (VP1 with insert)

| | VP1 DNA | VP1 PRT | Peptide PRT | Peptide DNA |
|---|---|---|---|---|
| Serotype | SEQ ID NO: | SEQ ID NO: | SEQ ID NO: | SEQ ID NO: |
| TTD-001 | 3623 | 3636 | 3648 | 3660 |
| TTD-002 | 3624 or 3625 | 3637 | 3649 | 3661 |
| TTD-003 | 3626 | 3638 | 3650 | 3662 |
| TTD-004 | 3627 | 3639 | 3651 | 3663 |
| TTD-005 | 3628 | 3640 | 3652 | 3664 |
| TTD-006 | 3629 | 3641 | 3653 | 3665 |
| TTD-007 | 3630 | 3642 | 3654 | 3666 |
| TTD-008 | 3631 | 3643 | 3655 | 3667 |
| TTD-009 | 3632 | 3644 | 3656 | 3668 |
| TTD-010 | 3633 | 3645 | 3657 | 3669 |
| TTD-011 | 3634 | 3646 | 3658 | 3670 |
| TTD-012 | 3635 | 3647 | 3659 | 3671 |

TABLE 4
Exemplary full length capsid amino acid sequences

| | SEQ | |
|---|---|---|
| Name and | ID | |
| Annotation | NO: | Amino Acid Sequence |
| TTD-001 | 3636 | MAADGYLPDWLEDNLSEGIREWWALKPGAPQPKANQQHQDNARGLVLPG |
| 9 mer peptide | | YKYLGPGNGLDKGEPVNAADAAALEHDKAYDQQLKAGDNPYLKYNHADA |
| underlined, starts at | | EFQERLKEDTSFGGNLGRAVFQAKKRLLEPLGLVEEAAKTAPGKKRPVE |
| position 587 | | QSPQEPDSSAGIGKSGAQPAKKRLNFGQTGDTESVPDPQPIGEPPAAPS |
| (immediately | | GVGSLTMASGGGAPVADNNEGADGVGSSSGNWHCDSQWLGDRVITTSTR |
| subsequent to | | TWALPTYNNHLYKQISNSTSGGSSNDNAYFGYSTPWGYFDFNRFHCHFS |
| position 586); | | PRDWQRLINNNWGFRPKRLNFKLFNIQVKEVTDNNGVKTIANNLTSTVQ |
| 743 aa | | VFTDSDYQLPYVLGSAHEGCLPPFPADVFMIPQYGYLTLNDGSQAVGRS |
| | | SFYCLEYFPSQMLRTGNNFQFSYEFENVPFHSSYAHSQSLDRLMNPLID |
| | | QYLYYLSKTINGSGQNQQTLKFSVAGPSNMAVQGRNYIPGPSYRQQRVS |
| | | TTVTQNNNSEFAWPGASSWALNGRNSLMNPGPAMASHKEGEDRFFPLSG |
| | | SLIFGKQGTGRDNVDADKVMITNEEEIKTTNPVATESYGQVATNHQSPL |
| | | NGAVHLYAQAQTGWVQNQGILPGMVWQDRDVYLQGPIWAKIPHTDGNFH |
| | | PSPLMGGFGMKHPPPQILIKNTPVPADPPTAFNKDKLNSFITQYSTGQV |
| | | SVEIEWELQKENSKRWNPEIQYTSNYYKSNNVEFAVNTEGVYSEPRPIG |
| | | TRYLTRNL |
| TTD-002 | 3637 | MAADGYLPDWLEDNLSEGIREWWALKPGAPQPKANQQHQDNARGLVLPG |
| 7 mer peptide | | YKYLGPGNGLDKGEPVNAADAAALEHDKAYDQQLKAGDNPYLKYNHADA |
| underlined, starts at | | EFQERLKEDTSFGGNLGRAVFQAKKRLLEPLGLVEEAAKTAPGKKRPVE |
| position 590 | | QSPQEPDSSAGIGKSGAQPAKKRLNFGQTGDTESVPDPQPIGEPPAAPS |
| (immediately | | GVGSLTMASGGGAPVADNNEGADGVGSSSGNWHCDSQWLGDRVITTSTR |
| subsequent to | | TWALPTYNNHLYKQISNSTSGGSSNDNAYFGYSTPWGYFDFNRFHCHFS |
| position 589); | | PRDWQRLINNNWGFRPKRLNFKLFNIQVKEVTDNNGVKTIANNLTSTVQ |
| 743 aa | | VFTDSDYQLPYVLGSAHEGCLPPFPADVFMIPQYGYLTLNDGSQAVGRS |
| | | SFYCLEYFPSQMLRTGNNFQFSYEFENVPFHSSYAHSQSLDRLMNPLID |
| | | QYLYYLSKTINGSGQNQQTLKFSVAGPSNMAVQGRNYIPGPSYRQQRVS |
| | | TTVTQNNNSEFAWPGASSWALNGRNSLMNPGPAMASHKEGEDRFFPLSG |
| | | SLIFGKQGTGRDNVDADKVMITNEEEIKTTNPVATESYGQVATNHQSAQ |
| | | ARDSPKGWQAQTGWVQNQGILPGMVWQDRDVYLQGPIWAKIPHTDGNFH |
| | | PSPLMGGFGMKHPPPQILIKNTPVPADPPTAFNKDKLNSFITQYSTGQV |
| | | SVEIEWELQKENSKRWNPEIQYTSNYYKSNNVEFAVNTEGVYSEPRPIG |
| | | TRYLTRNL |
| TTD-003 | 3638 | MAADGYLPDWLEDNLSEGIREWWALKPGAPQPKANQQHQDNARGLVLPG |
| 7 mer peptide | | YKYLGPGNGLDKGEPVNAADAAALEHDKAYDQQLKAGDNPYLKYNHADA |
| underlined, starts at | | EFQERLKEDTSFGGNLGRAVFQAKKRLLEPLGLVEEAAKTAPGKKRPVE |
| position 590 | | QSPQEPDSSAGIGKSGAQPAKKRLNFGQTGDTESVPDPQPIGEPPAAPS |
| (immediately | | GVGSLTMASGGGAPVADNNEGADGVGSSSGNWHCDSQWLGDRVITTSTR |
| subsequent to | | TWALPTYNNHLYKQISNSTSGGSSNDNAYFGYSTPWGYFDFNRFHCHFS |
| position 589); | | PRDWQRLINNNWGFRPKRLNFKLFNIQVKEVTDNNGVKTIANNLTSTVQ |
| 743 aa | | VFTDSDYQLPYVLGSAHEGCLPPFPADVFMIPQYGYLTLNDGSQAVGRS |
| | | SFYCLEYFPSQMLRTGNNFQFSYEFENVPFHSSYAHSQSLDRLMNPLID |
| | | QYLYYLSKTINGSGQNQQTLKFSVAGPSNMAVQGRNYIPGPSYRQQRVS |
| | | TTVTQNNNSEFAWPGASSWALNGRNSLMNPGPAMASHKEGEDRFFPLSG |
| | | SLIFGKQGTGRDNVDADKVMITNEEEIKTTNPVATESYGQVATNHQSAQ |
| | | AYSTDVRMQAQTGWVQNQGILPGMVWQDRDVYLQGPIWAKIPHTDGNFH |
| | | PSPLMGGFGMKHPPPQILIKNTPVPADPPTAFNKDKLNSFITQYSTGQV |
| | | SVEIEWELQKENSKRWNPEIQYTSNYYKSNNVEFAVNTEGVYSEPRPIG |
| | | TRYLTRNL |
| TTD-004 | 3639 | MAADGYLPDWLEDNLSEGIREWWALKPGAPQPKANQQHQDNARGLVLPG |
| 7 mer peptide | | YKYLGPGNGLDKGEPVNAADAAALEHDKAYDQQLKAGDNPYLKYNHADA |
| underlined, starts at | | EFQERLKEDTSFGGNLGRAVFQAKKRLLEPLGLVEEAAKTAPGKKRPVE |
| position 589 | | QSPQEPDSSAGIGKSGAQPAKKRLNFGQTGDTESVPDPQPIGEPPAAPS |
| (immediately | | GVGSLTMASGGGAPVADNNEGADGVGSSSGNWHCDSQWLGDRVITTSTR |
| subsequent to | | TWALPTYNNHLYKQISNSTSGGSSNDNAYFGYSTPWGYFDFNRFHCHFS |
| position 588); | | PRDWQRLINNNWGFRPKRLNFKLFNIQVKEVTDNNGVKTIANNLTSTVQ |
| 743 aa | | VFTDSDYQLPYVLGSAHEGCLPPFPADVFMIPQYGYLTLNDGSQAVGRS |
| | | SFYCLEYFPSQMLRTGNNFQFSYEFENVPFHSSYAHSQSLDRLMNPLID |
| | | QYLYYLSKTINGSGQNQQTLKFSVAGPSNMAVQGRNYIPGPSYRQQRVS |
| | | TTVTQNNNSEFAWPGASSWALNGRNSLMNPGPAMASHKEGEDRFFPLSG |
| | | SLIFGKQGTGRDNVDADKVMITNEEEIKTTNPVATESYGQVATNHQSAQ |
| | | IVMNSLKAQAQTGWVQNQGILPGMVWQDRDVYLQGPIWAKIPHTDGNFH |
| | | PSPLMGGFGMKHPPPQILIKNTPVPADPPTAFNKDKLNSFITQYSTGQV |
| | | SVEIEWELQKENSKRWNPEIQYTSNYYKSNNVEFAVNTEGVYSEPRPIG |
| | | TRYLTRNL |
| TTD-005 | 3640 | MAADGYLPDWLEDNLSEGIREWWALKPGAPQPKANQQHQDNARGLVLPG |
| 7 mer peptide | | YKYLGPGNGLDKGEPVNAADAAALEHDKAYDQQLKAGDNPYLKYNHADA |
| underlined, starts at | | EFQERLKEDTSFGGNLGRAVFQAKKRLLEPLGLVEEAAKTAPGKKRPVE |
| position 590 | | QSPQEPDSSAGIGKSGAQPAKKRLNFGQTGDTESVPDPQPIGEPPAAPS |
| (immediately | | GVGSLTMASGGGAPVADNNEGADGVGSSSGNWHCDSQWLGDRVITTSTR |
| subsequent to | | TWALPTYNNHLYKQISNSTSGGSSNDNAYFGYSTPWGYFDFNRFHCHFS |
| position 589); | | PRDWQRLINNNWGFRPKRLNFKLFNIQVKEVTDNNGVKTIANNLTSTVQ |
| 743 aa | | VFTDSDYQLPYVLGSAHEGCLPPFPADVFMIPQYGYLTLNDGSQAVGRS |
| | | SFYCLEYFPSQMLRTGNNFQFSYEFENVPFHSSYAHSQSLDRLMNPLID |
| | | QYLYYLSKTINGSGQNQQTLKFSVAGPSNMAVQGRNYIPGPSYRQQRVS |
| | | TTVTQNNNSEFAWPGASSWALNGRNSLMNPGPAMASHKEGEDRFFPLSG |
| | | SLIFGKQGTGRDNVDADKVMITNEEEIKTTNPVATESYGQVATNHQSAQ |
| | | ARESPRGLQAQTGWVQNQGILPGMVWQDRDVYLQGPIWAKIPHTDGNFH |
| | | PSPLMGGFGMKHPPPQILIKNTPVPADPPTAFNKDKLNSFITQYSTGQV |
| | | SVEIEWELQKENSKRWNPEIQYTSNYYKSNNVEFAVNTEGVYSEPRPIG |
| | | TRYLTRNL |
| TTD-006 | 3641 | MAADGYLPDWLEDNLSEGIREWWALKPGAPQPKANQQHQDNARGLVLPG |
| 7 mer peptide | | YKYLGPGNGLDKGEPVNAADAAALEHDKAYDQQLKAGDNPYLKYNHADA |
| underlined, starts at | | EFQERLKEDTSFGGNLGRAVFQAKKRLLEPLGLVEEAAKTAPGKKRPVE |
| position 590 | | QSPQEPDSSAGIGKSGAQPAKKRLNFGQTGDTESVPDPQPIGEPPAAPS |
| (immediately | | GVGSLTMASGGGAPVADNNEGADGVGSSSGNWHCDSQWLGDRVITTSTR |
| subsequent to 589); | | TWALPTYNNHLYKQISNSTSGGSSNDNAYFGYSTPWGYFDFNRFHCHFS |
| 743 aa | | PRDWQRLINNNWGFRPKRLNFKLFNIQVKEVTDNNGVKTIANNLTSTVQ |
| | | VFTDSDYQLPYVLGSAHEGCLPPFPADVFMIPQYGYLTLNDGSQAVGRS |
| | | SFYCLEYFPSQMLRTGNNFQFSYEFENVPFHSSYAHSQSLDRLMNPLID |
| | | QYLYYLSKTINGSGQNQQTLKFSVAGPSNMAVQGRNYIPGPSYRQQRVS |
| | | TTVTQNNNSEFAWPGASSWALNGRNSLMNPGPAMASHKEGEDRFFPLSG |
| | | SLIFGKQGTGRDNVDADKVMITNEEEIKTTNPVATESYGQVATNHQSAQ |
| | | ASFNDTRAQAQTGWVQNQGILPGMVWQDRDVYLQGPIWAKIPHTDGNFH |
| | | PSPLMGGFGMKHPPPQILIKNTPVPADPPTAFNKDKLNSFITQYSTGQV |
| | | SVEIEWELQKENSKRWNPEIQYTSNYYKSNNVEFAVNTEGVYSEPRPIG |
| | | TRYLTRNL |
| TTD-007 | 3642 | MAADGYLPDWLEDNLSEGIREWWALKPGAPQPKANQQHQDNARGLVLPG |
| 9 mer peptide | | YKYLGPGNGLDKGEPVNAADAAALEHDKAYDQQLKAGDNPYLKYNHADA |
| underlined, starts at | | EFQERLKEDTSFGGNLGRAVFQAKKRLLEPLGLVEEAAKTAPGKKRPVE |
| position 587 | | QSPQEPDSSAGIGKSGAQPAKKRLNFGQTGDTESVPDPQPIGEPPAAPS |
| (immediately | | GVGSLTMASGGGAPVADNNEGADGVGSSSGNWHCDSQWLGDRVITTSTR |
| subsequent to | | TWALPTYNNHLYKQISNSTSGGSSNDNAYFGYSTPWGYFDFNRFHCHFS |
| position 586); | | PRDWQRLINNNWGFRPKRLNFKLFNIQVKEVTDNNGVKTIANNLTSTVQ |
| 743 aa | | VFTDSDYQLPYVLGSAHEGCLPPFPADVFMIPQYGYLTLNDGSQAVGRS |
| | | SFYCLEYFPSQMLRTGNNFQFSYEFENVPFHSSYAHSQSLDRLMNPLID |
| | | QYLYYLSKTINGSGQNQQTLKFSVAGPSNMAVQGRNYIPGPSYRQQRVS |
| | | TTVTQNNNSEFAWPGASSWALNGRNSLMNPGPAMASHKEGEDRFFPLSG |
| | | SLIFGKQGTGRDNVDADKVMITNEEEIKTTNPVATESYGQVATNHQSGG |
| | | TLAVVSLAQAQTGWVQNQGILPGMVWQDRDVYLQGPIWAKIPHTDGNFH |
| | | PSPLMGGFGMKHPPPQILIKNTPVPADPPTAFNKDKLNSFITQYSTGQV |
| | | SVEIEWELQKENSKRWNPEIQYTSNYYKSNNVEFAVNTEGVYSEPRPIG |
| | | TRYLTRNL |
| TTD-008 | 3643 | MAADGYLPDWLEDNLSEGIREWWALKPGAPQPKANQQHQDNARGLVLPG |
| 7 mer peptide | | YKYLGPGNGLDKGEPVNAADAAALEHDKAYDQQLKAGDNPYLKYNHADA |
| underlined, starts at | | EFQERLKEDTSFGGNLGRAVFQAKKRLLEPLGLVEEAAKTAPGKKRPVE |
| position 590 | | QSPQEPDSSAGIGKSGAQPAKKRLNFGQTGDTESVPDPQPIGEPPAAPS |
| (immediately | | GVGSLTMASGGGAPVADNNEGADGVGSSSGNWHCDSQWLGDRVITTSTR |
| subsequent to 589); | | TWALPTYNNHLYKQISNSTSGGSSNDNAYFGYSTPWGYFDFNRFHCHFS |
| 743 aa | | PRDWQRLINNNWGFRPKRLNFKLFNIQVKEVTDNNGVKTIANNLTSTVQ |
| | | VFTDSDYQLPYVLGSAHEGCLPPFPADVFMIPQYGYLTLNDGSQAVGRS |
| | | SFYCLEYFPSQMLRTGNNFQFSYEFENVPFHSSYAHSQSLDRLMNPLID |
| | | QYLYYLSKTINGSGQNQQTLKFSVAGPSNMAVQGRNYIPGPSYRQQRVS |
| | | TTVTQNNNSEFAWPGASSWALNGRNSLMNPGPAMASHKEGEDRFFPLSG |
| | | SLIFGKQGTGRDNVDADKVMITNEEEIKTTNPVATESYGQVATNHQSAQ |
| | | AYGLPKGPQAQTGWVQNQGILPGMVWQDRDVYLQGPIWAKIPHTDGNFH |
| | | PSPLMGGFGMKHPPPQILIKNTPVPADPPTAFNKDKLNSFITQYSTGQV |
| | | SVEIEWELQKENSKRWNPEIQYTSNYYKSNNVEFAVNTEGVYSEPRPIG |
| | | TRYLTRNL |
| TTD-009 | 3644 | MAADGYLPDWLEDNLSEGIREWWALKPGAPQPKANQQHQDNARGLVLPG |
| 7 mer peptide | | YKYLGPGNGLDKGEPVNAADAAALEHDKAYDQQLKAGDNPYLKYNHADA |
| underlined, starts at | | EFQERLKEDTSFGGNLGRAVFQAKKRLLEPLGLVEEAAKTAPGKKRPVE |
| position 590 | | QSPQEPDSSAGIGKSGAQPAKKRLNFGQTGDTESVPDPQPIGEPPAAPS |
| (immediately | | GVGSLTMASGGGAPVADNNEGADGVGSSSGNWHCDSQWLGDRVITTSTR |
| subsequent to 589); | | TWALPTYNNHLYKQISNSTSGGSSNDNAYFGYSTPWGYFDFNRFHCHFS |
| 743 aa | | PRDWQRLINNNWGFRPKRLNFKLFNIQVKEVTDNNGVKTIANNLTSTVQ |
| | | VFTDSDYQLPYVLGSAHEGCLPPFPADVEMIPQYGYLTLNDGSQAVGRS |
| | | SFYCLEYFPSQMLRTGNNFQFSYEFENVPFHSSYAHSQSLDRLMNPLID |
| | | QYLYYLSKTINGSGQNQQTLKFSVAGPSNMAVQGRNYIPGPSYRQQRVS |
| | | TTVTQNNNSEFAWPGASSWALNGRNSLMNPGPAMASHKEGEDRFFPLSG |
| | | SLIFGKQGTGRDNVDADKVMITNEEEIKTTNPVATESYGQVATNHQSAQ |
| | | ASTGTLRLQAQTGWVQNQGILPGMVWQDRDVYLQGPIWAKIPHTDGNFH |
| | | PSPLMGGFGMKHPPPQILIKNTPVPADPPTAFNKDKLNSFITQYSTGQV |
| | | SVEIEWELQKENSKRWNPEIQYTSNYYKSNNVEFAVNTEGVYSEPRPIG |
| | | TRYLTRNL |
| TTD-010 | 3645 | MAADGYLPDWLEDNLSEGIREWWALKPGAPQPKANQQHQDNARGLVLPG |
| 7 mer peptide | | YKYLGPGNGLDKGEPVNAADAAALEHDKAYDQQLKAGDNPYLKYNHADA |
| underlined, starts at | | EFQERLKEDTSFGGNLGRAVFQAKKRLLEPLGLVEEAAKTAPGKKRPVE |
| position 590 | | QSPQEPDSSAGIGKSGAQPAKKRLNFGQTGDTESVPDPQPIGEPPAAPS |
| (immediately | | GVGSLTMASGGGAPVADNNEGADGVGSSSGNWHCDSQWLGDRVITTSTR |
| subsequent to 589); | | TWALPTYNNHLYKQISNSTSGGSSNDNAYFGYSTPWGYFDFNRFHCHFS |
| 743 aa | | PRDWQRLINNNWGFRPKRLNFKLFNIQVKEVTDNNGVKTIANNLTSTVQ |
| | | VFTDSDYQLPYVLGSAHEGCLPPFPADVFMIPQYGYLTLNDGSQAVGRS |
| | | SFYCLEYFPSQMLRTGNNFQFSYEFENVPFHSSYAHSQSLDRLMNPLID |
| | | QYLYYLSKTINGSGQNQQTLKFSVAGPSNMAVQGRNYIPGPSYRQQRVS |
| | | TTVTQNNNSEFAWPGASSWALNGRNSLMNPGPAMASHKEGEDRFFPLSG |
| | | SLIFGKQGTGRDNVDADKVMITNEEEIKTTNPVATESYGQVATNHQSAQ |
| | | AYSTDERMQAQTGWVQNQGILPGMVWQDRDVYLQGPIWAKIPHTDGNFH |
| | | PSPLMGGFGMKHPPPQILIKNTPVPADPPTAFNKDKLNSFITQYSTGQV |
| | | SVEIEWELQKENSKRWNPEIQYTSNYYKSNNVEFAVNTEGVYSEPRPIG |
| | | TRYLTRNL |
| TTD-011 | 3646 | MAADGYLPDWLEDNLSEGIREWWALKPGAPQPKANQQHQDNARGLVLPG |
| 7 mer peptide | | YKYLGPGNGLDKGEPVNAADAAALEHDKAYDQQLKAGDNPYLKYNHADA |
| underlined, starts at | | EFQERLKEDTSFGGNLGRAVFQAKKRLLEPLGLVEEAAKTAPGKKRPVE |
| position 590 | | QSPQEPDSSAGIGKSGAQPAKKRLNFGQTGDTESVPDPQPIGEPPAAPS |
| (immediately | | GVGSLTMASGGGAPVADNNEGADGVGSSSGNWHCDSQWLGDRVITTSTR |
| subsequent to 589); | | TWALPTYNNHLYKQISNSTSGGSSNDNAYFGYSTPWGYFDFNRFHCHFS |
| 743 aa | | PRDWQRLINNNWGFRPKRLNFKLFNIQVKEVTDNNGVKTIANNLTSTVQ |
| | | VFTDSDYQLPYVLGSAHEGCLPPFPADVFMIPQYGYLTLNDGSQAVGRS |
| | | SFYCLEYFPSQMLRTGNNFQFSYEFENVPFHSSYAHSQSLDRLMNPLID |
| | | QYLYYLSKTINGSGQNQQTLKFSVAGPSNMAVQGRNYIPGPSYRQQRVS |
| | | TTVTQNNNSEFAWPGASSWALNGRNSLMNPGPAMASHKEGEDRFFPLSG |
| | | SLIFGKQGTGRDNVDADKVMITNEEEIKTTNPVATESYGQVATNHQSAQ |
| | | AYSTDERKQAQTGWVQNQGILPGMVWQDRDVYLQGPIWAKIPHTDGNFH |
| | | PSPLMGGFGMKHPPPQILIKNTPVPADPPTAFNKDKLNSFITQYSTGQV |
| | | SVEIEWELQKENSKRWNPEIQYTSNYYKSNNVEFAVNTEGVYSEPRPIG |
| | | TRYLTRNL |
| TTD-012 | 3647 | MAADGYLPDWLEDNLSEGIREWWALKPGAPQPKANQQHQDNARGLVLPG |
| 7 mer peptide | | YKYLGPGNGLDKGEPVNAADAAALEHDKAYDQQLKAGDNPYLKYNHADA |
| underlined, starts at | | EFQERLKEDTSFGGNLGRAVFQAKKRLLEPLGLVEEAAKTAPGKKRPVE |
| position 590 | | QSPQEPDSSAGIGKSGAQPAKKRLNFGQTGDTESVPDPQPIGEPPAAPS |
| (immediately | | GVGSLTMASGGGAPVADNNEGADGVGSSSGNWHCDSQWLGDRVITTSTR |
| subsequent to 589); | | TWALPTYNNHLYKQISNSTSGGSSNDNAYFGYSTPWGYFDFNRFHCHFS |
| 743 aa | | PRDWQRLINNNWGFRPKRLNFKLFNIQVKEVTDNNGVKTIANNLTSTVQ |
| | | VFTDSDYQLPYVLGSAHEGCLPPFPADVFMIPQYGYLTLNDGSQAVGRS |
| | | SFYCLEYFPSQMLRTGNNFQFSYEFENVPFHSSYAHSQSLDRLMNPLID |
| | | QYLYYLSKTINGSGQNQQTLKFSVAGPSNMAVQGRNYIPGPSYRQQRVS |
| | | TTVTQNNNSEFAWPGASSWALNGRNSLMNPGPAMASHKEGEDRFFPLSG |
| | | SLIFGKQGTGRDNVDADKVMITNEEEIKTTNPVATESYGQVATNHQSAQ |
| | | AYVSSVKMQAQTGWVQNQGILPGMVWQDRDVYLQGPIWAKIPHTDGNFH |
| | | PSPLMGGFGMKHPPPQILIKNTPVPADPPTAFNKDKLNSFITQYSTGQV |
| | | SVEIEWELQKENSKRWNPEIQYTSNYYKSNNVEFAVNTEGVYSEPRPIG |
| | | TRYLTRNL |

TABLE 5
Exemplary full length capsid nucleic acid sequences

| | SEQ | |
|---|---|---|
| Name and | ID | |
| Annotation | NO: | NT Sequence |
| TTD-001 | 3623 | atggctgccgatggttatcttccagattggctcgaggacaaccttagtgaaggaattcgcg |
| 9 mer peptide | | agtggtgggctttgaaacctggagcccctcaacccaaggcaaatcaacaacatcaagacaa |
| underlined | | cgctcgaggtcttgtgcttccgggttacaaataccttggacccggcaacggactcgacaag |
| | | ggggagccggtcaacgcagcagacgcggcggccctcgagcacgacaaggcctacgaccagc |
| | | agctcaaggccggagacaacccgtacctcaagtacaaccacgccgacgccgagttccagga |
| | | gcggctcaaagaagatacgtcttttgggggcaacctcgggcgagcagtcttccaggccaaa |
| | | aagaggcttcttgaacctcttggtctggttgaggaagcggctaagacggctcctggaaaga |
| | | agaggcctgtagagcagtctcctcaggaaccggactcctccgcgggtattggcaaatcggg |
| | | tgcacagcccgctaaaaagagactcaatttcggtcagactggcgacacagagtcagtccca |
| | | gaccctcaaccaatcggagaacctcccgcagccccctcaggtgtgggatctcttacaatgg |
| | | cttcaggtggtggcgcaccagtggcagacaataacgaaggtgccgatggagtgggtagttc |
| | | ctcgggaaattggcattgcgattcccaatggctgggggacagagtcatcaccaccagcacc |
| | | cgaacctgggccctgcccacctacaacaatcacctctacaagcaaatctccaacagcacat |
| | | ctggaggatcttcaaatgacaacgcctacttcggctacagcaccccctgggggtattttga |
| | | cttcaacagattccactgccacttctcaccacgtgactggcagcgactcatcaacaacaac |
| | | tggggattccggcctaagcgactcaacttcaagctcttcaacattcaggtcaaagaggtta |
| | | cggacaacaatggagtcaagaccatcgccaataaccttaccagcacggtccaggtcttcac |
| | | ggactcagactatcagctcccgtacgtgctcgggtcggctcacgagggctgcctcccgccg |
| | | ttcccagcggacgttttcatgattcctcagtacgggtatctgacgcttaatgatggaagcc |
| | | aggccgtgggtcgttcgtccttttactgcctggaatatttcccgtcgcaaatgctaagaac |
| | | gggtaacaacttccagttcagctacgagtttgagaacgtacctttccatagcagctacgct |
| | | cacagccaaagcctggaccgactaatgaatccactcatcgaccaatacttgtactatctct |
| | | caaagactattaacggttctggacagaatcaacaaacgctaaaattcagtgtggccggacc |
| | | cagcaacatggctgtccagggaagaaactacatacctggacccagctaccgacaacaacgt |
| | | gtctcaaccactgtgactcaaaacaacaacagcgaatttgcttggcctggagcttcttctt |
| | | gggctctcaatggacgtaatagcttgatgaatcctggacctgctatggccagccacaaaga |
| | | aggagaggaccgtttctttcctttgtctggatctttaatttttggcaaacaaggaactgga |
| | | agagacaacgtggatgcggacaaagtcatgataaccaacgaagaagaaattaaaactacta |
| | | acccggtagcaacggagtcctatggacaagtggccacaaaccaccagagtccgcttaatgg |
| | | tgccgtccatctttatgctcaggcgcagaccggctgggttcaaaaccaaggaatacttccg |
| | | ggtatggtttggcaggacagagatgtgtacctgcaaggacccatttgggccaaaattcctc |
| | | acacggacggcaactttcacccttctccgctgatgggagggtttggaatgaagcacccgcc |
| | | tcctcagatcctcatcaaaaacacacctgtacctgcCgatcctccaacggccttcaacaag |
| | | gacaagctgaactctttcatcacccagtattctactggccaagtcagcgtggagatcgagt |
| | | gggagctgcagaaggaaaacagcaagcgGtggaacccggagatccagtacacttccaacta |
| | | ttacaagtctaataatgttgaatttgctgttaatactgaaggtgtatatagtgaaccccgc |
| | | cccattggcaccagatacctgactcgtaatctgtaa |
| TTD-002 | 3624 | atggctgccgatggttatcttccagattggctcgaggacaaccttagtgaaggaattcgcg |
| 7 mer peptide | | agtggtgggctttgaaacctggagcccctcaacccaaggcaaatcaacaacatcaagacaa |
| underlined | | cgctcgaggtcttgtgcttccgggttacaaataccttggacccggcaacggactcgacaag |
| | | ggggagccggtcaacgcagcagacgcggcggccctcgagcacgacaaggcctacgaccagc |
| | | agctcaaggccggagacaacccgtacctcaagtacaaccacgccgacgccgagttccagga |
| | | gcggctcaaagaagatacgtcttttgggggcaacctcgggcgagcagtcttccaggccaaa |
| | | aagaggcttcttgaacctcttggtctggttgaggaagcggctaagacggctcctggaaaga |
| | | agaggcctgtagagcagtctcctcaggaaccggactcctccgcgggtattggcaaatcggg |
| | | tgcacagcccgctaaaaagagactcaatttcggtcagactggcgacacagagtcagtccca |
| | | gaccctcaaccaatcggagaacctcccgcagccccctcaggtgtgggatctcttacaatgg |
| | | cttcaggtggtggcgcaccagtggcagacaataacgaaggtgccgatggagtgggtagttc |
| | | ctcgggaaattggcattgcgattcccaatggctgggggacagagtcatcaccaccagcacc |
| | | cgaacctgggccctgcccacctacaacaatcacctctacaagcaaatctccaacagcacat |
| | | ctggaggatcttcaaatgacaacgcctacttcggctacagcaccccctgggggtattttga |
| | | cttcaacagattccactgccacttctcaccacgtgactggcagcgactcatcaacaacaac |
| | | tggggattccggcctaagcgactcaacttcaagctcttcaacattcaggtcaaagaggtta |
| | | cggacaacaatggagtcaagaccatcgccaataaccttaccagcacggtccaggtcttcac |
| | | ggactcagactatcagctcccgtacgtgctcgggtcggctcacgagggctgcctcccgccg |
| | | ttcccagcggacgttttcatgattcctcagtacgggtatctgacgcttaatgatggaagcc |
| | | aggccgtgggtcgttcgtccttttactgcctggaatatttcccgtcgcaaatgctaagaac |
| | | gggtaacaacttccagttcagctacgagtttgagaacgtacctttccatagcagctacgct |
| | | cacagccaaagcctggaccgactaatgaatccactcatcgaccaatacttgtactatctct |
| | | caaagactattaacggttctggacagaatcaacaaacgctaaaattcagtgtggccggacc |
| | | cagcaacatggctgtccagggaagaaactacatacctggacccagctaccgacaacaacgt |
| | | gtctcaaccactgtgactcaaaacaacaacagcgaatttgcttggcctggagcttcttctt |
| | | gggctctcaatggacgtaatagcttgatgaatcctggacctgctatggccagccacaaaga |
| | | aggagaggaccgtttctttcctttgtctggatctttaatttttggcaaacaaggaactgga |
| | | agagacaacgtggatgcggacaaagtcatgataaccaacgaagaagaaattaaaactacta |
| | | acccggtagcaacggagtcctatggacaagtggccacaaaccaccagagtgcacaggctcg |
| | | tgattctccgaagggttggcaggcgcagaccggctgggttcaaaaccaaggaatacttccg |
| | | ggtatggtttggcaggacagagatgtgtacctgcaaggacccatttgggccaaaattcctc |
| | | acacggacggcaactttcacccttctccgctgatgggagggtttggaatgaagcacccgcc |
| | | tcctcagatcctcatcaaaaacacacctgtacctgcCgatcctccaacggccttcaacaag |
| | | gacaagctgaactctttcatcacccagtattctactggccaagtcagcgtggagatcgagt |
| | | gggagctgcagaaggaaaacagcaagcgGtggaacccggagatccagtacacttccaacta |
| | | ttacaagtctaataatgttgaatttgctgttaatactgaaggtgtatatagtgaaccccgc |
| | | cccattggcaccagatacctgactcgtaatctgtaa |
| | 3625 | atggctgccgatggttatcttccagattggctcgaggacaaccttagtgaaggaattcgcg |
| | | agtggtgggctttgaaacctggagcccctcaacccaaggcaaatcaacaacatcaagacaa |
| | | cgctcgaggtcttgtgcttccgggttacaaataccttggacccggcaacggactcgacaag |
| | | ggggagccggtcaacgcagcagacgcggcggccctcgagcacgacaaggcctacgaccagc |
| | | agctcaaggccggagacaacccgtacctcaagtacaaccacgccgacgccgagttccagga |
| | | gcggctcaaagaagatacgtcttttgggggcaacctcgggcgagcagtcttccaggccaaa |
| | | aagaggcttcttgaacctcttggtctggttgaggaagcggctaagacggctcctggaaaga |
| | | agaggcctgtagagcagtctcctcaggaaccggactcctccgcgggtattggcaaatcggg |
| | | tgcacagcccgctaaaaagagactcaatttcggtcagactggcgacacagagtcagtccca |
| | | gaccctcaaccaatcggagaacctcccgcagccccctcaggtgtgggatctcttacaatgg |
| | | cttcaggtggtggcgcaccagtggcagacaataacgaaggtgccgatggagtgggtagttc |
| | | ctcgggaaattggcattgcgattcccaatggctgggggacagagtcatcaccaccagcacc |
| | | cgaacctgggccctgcccacctacaacaatcacctctacaagcaaatctccaacagcacat |
| | | ctggaggatcttcaaatgacaacgcctacttcggctacagcaccccctgggggtattttga |
| | | cttcaacagattccactgccacttctcaccacgtgactggcagcgactcatcaacaacaac |
| | | tggggattccggcctaagcgactcaacttcaagctcttcaacattcaggtcaaagaggtta |
| | | cggacaacaatggagtcaagaccatcgccaataaccttaccagcacggtccaggtcttcac |
| | | ggactcagactatcagctcccgtacgtgctcgggtcggctcacgagggctgcctcccgccg |
| | | ttcccagcggacgttttcatgattcctcagtacgggtatctgacgcttaatgatggaagcc |
| | | aggccgtgggtcgttcgtccttttactgcctggaatatttcccgtcgcaaatgctaagaac |
| | | gggtaacaacttccagttcagctacgagtttgagaacgtacctttccatagcagctacgct |
| | | cacagccaaagcctggaccgactaatgaatccactcatcgaccaatacttgtactatctct |
| | | caaagactattaacggttctggacagaatcaacaaacgctaaaattcagtgtggccggacc |
| | | cagcaacatggctgtccagggaagaaactacatacctggacccagctaccgacaacaacgt |
| | | gtctcaaccactgtgactcaaaacaacaacagcgaatttgcttggcctggagcttcttctt |
| | | gggctctcaatggacgtaatagcttgatgaatcctggacctgctatggccagccacaaaga |
| | | aggagaggaccgtttctttcctttgtctggatctttaatttttggcaaacaaggaactgga |
| | | agagacaacgtggatgcggacaaagtcatgataaccaacgaagaagaaattaaaactacta |
| | | acccggtagcaacggagtcctatggacaagtggccacaaaccaccagagtgcacaggctcg |
| | | tgattctccgaagggttggcaggcgcagaccggctgggttcaaaaccaaggaatacttccg |
| | | ggtatggtttggcaggacagagatgtgtacctgcaaggacccatttgggccaaaattcctc |
| | | acacggacggcaactttcacccttctccgctgatgggagggtttggaatgaagcacccgcc |
| | | tcctcagatcctcatcaaaaacacacctgtacctgcggatcctccaacggccttcaacaag |
| | | gacaagctgaactctttcatcacccagtattctactggccaagtcagcgtggagatcgagt |
| | | gggagctgcagaaggaaaacagcaagcgctggaacccggagatccagtacacttccaacta |
| | | ttacaagtctaataatgttgaatttgctgttaatactgaaggtgtatatagtgaaccccgc |
| | | cccattggcaccagatacctgactcgtaatctgtaa |
| TTD-003 | 3626 | atggctgccgatggttatcttccagattggctcgaggacaaccttagtgaaggaattcgcg |
| 7 mer peptide | | agtggtgggctttgaaacctggagcccctcaacccaaggcaaatcaacaacatcaagacaa |
| underlined | | cgctcgaggtcttgtgcttccgggttacaaataccttggacccggcaacggactcgacaag |
| | | ggggagccggtcaacgcagcagacgcggcggccctcgagcacgacaaggcctacgaccagc |
| | | agctcaaggccggagacaacccgtacctcaagtacaaccacgccgacgccgagttccagga |
| | | gcggctcaaagaagatacgtcttttgggggcaacctcgggcgagcagtcttccaggccaaa |
| | | aagaggcttcttgaacctcttggtctggttgaggaagcggctaagacggctcctggaaaga |
| | | agaggcctgtagagcagtctcctcaggaaccggactcctccgcgggtattggcaaatcggg |
| | | tgcacagcccgctaaaaagagactcaatttcggtcagactggcgacacagagtcagtccca |
| | | gaccctcaaccaatcggagaacctcccgcagccccctcaggtgtgggatctcttacaatgg |
| | | cttcaggtggtggcgcaccagtggcagacaataacgaaggtgccgatggagtgggtagttc |
| | | ctcgggaaattggcattgcgattcccaatggctgggggacagagtcatcaccaccagcacc |
| | | cgaacctgggccctgcccacctacaacaatcacctctacaagcaaatctccaacagcacat |
| | | ctggaggatcttcaaatgacaacgcctacttcggctacagcaccccctgggggtattttga |
| | | cttcaacagattccactgccacttctcaccacgtgactggcagcgactcatcaacaacaac |
| | | tggggattccggcctaagcgactcaacttcaagctcttcaacattcaggtcaaagaggtta |
| | | cggacaacaatggagtcaagaccatcgccaataaccttaccagcacggtccaggtcttcac |
| | | ggactcagactatcagctcccgtacgtgctcgggtcggctcacgagggctgcctcccgccg |
| | | ttcccagcggacgttttcatgattcctcagtacgggtatctgacgcttaatgatggaagcc |
| | | aggccgtgggtcgttcgtccttttactgcctggaatatttcccgtcgcaaatgctaagaac |
| | | gggtaacaacttccagttcagctacgagtttgagaacgtacctttccatagcagctacgct |
| | | cacagccaaagcctggaccgactaatgaatccactcatcgaccaatacttgtactatctct |
| | | caaagactattaacggttctggacagaatcaacaaacgctaaaattcagtgtggccggacc |
| | | cagcaacatggctgtccagggaagaaactacatacctggacccagctaccgacaacaacgt |
| | | gtctcaaccactgtgactcaaaacaacaacagcgaatttgcttggcctggagcttcttctt |
| | | gggctctcaatggacgtaatagcttgatgaatcctggacctgctatggccagccacaaaga |
| | | aggagaggaccgtttctttcctttgtctggatctttaatttttggcaaacaaggaactgga |
| | | agagacaacgtggatgcggacaaagtcatgataaccaacgaagaagaaattaaaactacta |
| | | acccggtagcaacggagtcctatggacaagtggccacaaaccaccagagtgcacaggctta |
| | | ttctacggatgtgaggatgcaggcgcagaccggctgggttcaaaaccaaggaatacttccg |
| | | ggtatggtttggcaggacagagatgtgtacctgcaaggacccatttgggccaaaattcctc |
| | | acacggacggcaactttcacccttctccgctgatgggagggtttggaatgaagcacccgcc |
| | | tcctcagatcctcatcaaaaacacacctgtacctgcCgatcctccaacggccttcaacaag |
| | | gacaagctgaactctttcatcacccagtattctactggccaagtcagcgtggagatcgagt |
| | | gggagctgcagaaggaaaacagcaagcgGtggaacccggagatccagtacacttccaacta |
| | | ttacaagtctaataatgttgaatttgctgttaatactgaaggtgtatatagtgaaccccgc |
| | | cccattggcaccagatacctgactcgtaatctgtaa |
| TTD-004 | 3627 | atggctgccgatggttatcttccagattggctcgaggacaaccttagtgaaggaattcgcg |
| 7 mer peptide | | agtggtgggctttgaaacctggagcccctcaacccaaggcaaatcaacaacatcaagacaa |
| underlined | | cgctcgaggtcttgtgcttccgggttacaaataccttggacccggcaacggactcgacaag |
| | | ggggagccggtcaacgcagcagacgcggcggccctcgagcacgacaaggcctacgaccagc |
| | | agctcaaggccggagacaacccgtacctcaagtacaaccacgccgacgccgagttccagga |
| | | gcggctcaaagaagatacgtcttttgggggcaacctcgggcgagcagtcttccaggccaaa |
| | | aagaggcttcttgaacctcttggtctggttgaggaagcggctaagacggctcctggaaaga |
| | | agaggcctgtagagcagtctcctcaggaaccggactcctccgcgggtattggcaaatcggg |
| | | tgcacagcccgctaaaaagagactcaatttcggtcagactggcgacacagagtcagtccca |
| | | gaccctcaaccaatcggagaacctcccgcagccccctcaggtgtgggatctcttacaatgg |
| | | cttcaggtggtggcgcaccagtggcagacaataacgaaggtgccgatggagtgggtagttc |
| | | ctcgggaaattggcattgcgattcccaatggctgggggacagagtcatcaccaccagcacc |
| | | cgaacctgggccctgcccacctacaacaatcacctctacaagcaaatctccaacagcacat |
| | | ctggaggatcttcaaatgacaacgcctacttcggctacagcaccccctgggggtattttga |
| | | cttcaacagattccactgccacttctcaccacgtgactggcagcgactcatcaacaacaac |
| | | tggggattccggcctaagcgactcaacttcaagctcttcaacattcaggtcaaagaggtta |
| | | cggacaacaatggagtcaagaccatcgccaataaccttaccagcacggtccaggtcttcac |
| | | ggactcagactatcagctcccgtacgtgctcgggtcggctcacgagggctgcctcccgccg |
| | | ttcccagcggacgttttcatgattcctcagtacgggtatctgacgcttaatgatggaagcc |
| | | aggccgtgggtcgttcgtccttttactgcctggaatatttcccgtcgcaaatgctaagaac |
| | | gggtaacaacttccagttcagctacgagtttgagaacgtacctttccatagcagctacgct |
| | | cacagccaaagcctggaccgactaatgaatccactcatcgaccaatacttgtactatctct |
| | | caaagactattaacggttctggacagaatcaacaaacgctaaaattcagtgtggccggacc |
| | | cagcaacatggctgtccagggaagaaactacatacctggacccagctaccgacaacaacgt |
| | | gtctcaaccactgtgactcaaaacaacaacagcgaatttgcttggcctggagcttcttctt |
| | | gggctctcaatggacgtaatagcttgatgaatcctggacctgctatggccagccacaaaga |
| | | aggagaggaccgtttctttcctttgtctggatctttaatttttggcaaacaaggaactgga |
| | | agagacaacgtggatgcggacaaagtcatgataaccaacgaagaagaaattaaaactacta |
| | | acccggtagcaacggagtcctatggacaagtggccacaaaccaccagagtgcacagattgt |
| | | tatgaattcgttgaaggctcaggcgcagaccggctgggttcaaaaccaaggaatacttccg |
| | | ggtatggtttggcaggacagagatgtgtacctgcaaggacccatttgggccaaaattcctc |
| | | acacggacggcaactttcacccttctccgctgatgggagggtttggaatgaagcacccgcc |
| | | tcctcagatcctcatcaaaaacacacctgtacctgcCgatcctccaacggccttcaacaag |
| | | gacaagctgaactctttcatcacccagtattctactggccaagtcagcgtggagatcgagt |
| | | gggagctgcagaaggaaaacagcaagcgGtggaacccggagatccagtacacttccaacta |
| | | ttacaagtctaataatgttgaatttgctgttaatactgaaggtgtatatagtgaaccccgc |
| | | cccattggcaccagatacctgactcgtaatctgtaa |
| TTD-005 | 3628 | atggctgccgatggttatcttccagattggctcgaggacaaccttagtgaaggaattcgcg |
| 7 mer peptide | | agtggtgggctttgaaacctggagcccctcaacccaaggcaaatcaacaacatcaagacaa |
| underlined | | cgctcgaggtcttgtgcttccgggttacaaataccttggacccggcaacggactcgacaag |
| | | ggggagccggtcaacgcagcagacgcggcggccctcgagcacgacaaggcctacgaccagc |
| | | agctcaaggccggagacaacccgtacctcaagtacaaccacgccgacgccgagttccagga |
| | | gcggctcaaagaagatacgtcttttgggggcaacctcgggcgagcagtcttccaggccaaa |
| | | aagaggcttcttgaacctcttggtctggttgaggaagcggctaagacggctcctggaaaga |
| | | agaggcctgtagagcagtctcctcaggaaccggactcctccgcgggtattggcaaatcggg |
| | | tgcacagcccgctaaaaagagactcaatttcggtcagactggcgacacagagtcagtccca |
| | | gaccctcaaccaatcggagaacctcccgcagccccctcaggtgtgggatctcttacaatgg |
| | | cttcaggtggtggcgcaccagtggcagacaataacgaaggtgccgatggagtgggtagttc |
| | | ctcgggaaattggcattgcgattcccaatggctgggggacagagtcatcaccaccagcacc |
| | | cgaacctgggccctgcccacctacaacaatcacctctacaagcaaatctccaacagcacat |
| | | ctggaggatcttcaaatgacaacgcctacttcggctacagcaccccctgggggtattttga |
| | | cttcaacagattccactgccacttctcaccacgtgactggcagcgactcatcaacaacaac |
| | | tggggattccggcctaagcgactcaacttcaagctcttcaacattcaggtcaaagaggtta |
| | | cggacaacaatggagtcaagaccatcgccaataaccttaccagcacggtccaggtcttcac |
| | | ggactcagactatcagctcccgtacgtgctcgggtcggctcacgagggctgcctcccgccg |
| | | ttcccagcggacgttttcatgattcctcagtacgggtatctgacgcttaatgatggaagcc |
| | | aggccgtgggtcgttcgtccttttactgcctggaatatttcccgtcgcaaatgctaagaac |
| | | gggtaacaacttccagttcagctacgagtttgagaacgtacctttccatagcagctacgct |
| | | cacagccaaagcctggaccgactaatgaatccactcatcgaccaatacttgtactatctct |
| | | caaagactattaacggttctggacagaatcaacaaacgctaaaattcagtgtggccggacc |
| | | cagcaacatggctgtccagggaagaaactacatacctggacccagctaccgacaacaacgt |
| | | gtctcaaccactgtgactcaaaacaacaacagcgaatttgcttggcctggagcttcttctt |
| | | gggctctcaatggacgtaatagcttgatgaatcctggacctgctatggccagccacaaaga |
| | | aggagaggaccgtttctttcctttgtctggatctttaatttttggcaaacaaggaactgga |
| | | agagacaacgtggatgcggacaaagtcatgataaccaacgaagaagaaattaaaactacta |
| | | acccggtagcaacggagtcctatggacaagtggccacaaaccaccagagtgcacaggctcg |
| | | ggagagtcctcgtgggctgcaggcgcagaccggctgggttcaaaaccaaggaatacttccg |
| | | ggtatggtttggcaggacagagatgtgtacctgcaaggacccatttgggccaaaattcctc |
| | | acacggacggcaactttcacccttctccgctgatgggagggtttggaatgaagcacccgcc |
| | | tcctcagatcctcatcaaaaacacacctgtacctgcCgatcctccaacggccttcaacaag |
| | | gacaagctgaactctttcatcacccagtattctactggccaagtcagcgtggagatcgagt |
| | | gggagctgcagaaggaaaacagcaagcgGtggaacccggagatccagtacacttccaacta |
| | | ttacaagtctaataatgttgaatttgctgttaatactgaaggtgtatatagtgaaccccgc |
| | | cccattggcaccagatacctgactcgtaatctgtaa |
| TTD-006 | 3629 | atggctgccgatggttatcttccagattggctcgaggacaaccttagtgaaggaattcgcg |
| 7 mer peptide | | agtggtgggctttgaaacctggagcccctcaacccaaggcaaatcaacaacatcaagacaa |
| underlined | | cgctcgaggtcttgtgcttccgggttacaaataccttggacccggcaacggactcgacaag |
| | | ggggagccggtcaacgcagcagacgcggcggccctcgagcacgacaaggcctacgaccagc |
| | | agctcaaggccggagacaacccgtacctcaagtacaaccacgccgacgccgagttccagga |
| | | gcggctcaaagaagatacgtcttttgggggcaacctcgggcgagcagtcttccaggccaaa |
| | | aagaggcttcttgaacctcttggtctggttgaggaagcggctaagacggctcctggaaaga |
| | | agaggcctgtagagcagtctcctcaggaaccggactcctccgcgggtattggcaaatcggg |
| | | tgcacagcccgctaaaaagagactcaatttcggtcagactggcgacacagagtcagtccca |
| | | gaccctcaaccaatcggagaacctcccgcagccccctcaggtgtgggatctcttacaatgg |
| | | cttcaggtggtggcgcaccagtggcagacaataacgaaggtgccgatggagtgggtagttc |
| | | ctcgggaaattggcattgcgattcccaatggctgggggacagagtcatcaccaccagcacc |
| | | cgaacctgggccctgcccacctacaacaatcacctctacaagcaaatctccaacagcacat |
| | | ctggaggatcttcaaatgacaacgcctacttcggctacagcaccccctgggggtattttga |
| | | cttcaacagattccactgccacttctcaccacgtgactggcagcgactcatcaacaacaac |
| | | tggggattccggcctaagcgactcaacttcaagctcttcaacattcaggtcaaagaggtta |
| | | cggacaacaatggagtcaagaccatcgccaataaccttaccagcacggtccaggtcttcac |
| | | ggactcagactatcagctcccgtacgtgctcgggtcggctcacgagggctgcctcccgccg |
| | | ttcccagcggacgttttcatgattcctcagtacgggtatctgacgcttaatgatggaagcc |
| | | aggccgtgggtcgttcgtccttttactgcctggaatatttcccgtcgcaaatgctaagaac |
| | | gggtaacaacttccagttcagctacgagtttgagaacgtacctttccatagcagctacgct |
| | | cacagccaaagcctggaccgactaatgaatccactcatcgaccaatacttgtactatctct |
| | | caaagactattaacggttctggacagaatcaacaaacgctaaaattcagtgtggccggacc |
| | | cagcaacatggctgtccagggaagaaactacatacctggacccagctaccgacaacaacgt |
| | | gtctcaaccactgtgactcaaaacaacaacagcgaatttgcttggcctggagcttcttctt |
| | | gggctctcaatggacgtaatagcttgatgaatcctggacctgctatggccagccacaaaga |
| | | aggagaggaccgtttctttcctttgtctggatctttaatttttggcaaacaaggaactgga |
| | | agagacaacgtggatgcggacaaagtcatgataaccaacgaagaagaaattaaaactacta |
| | | acccggtagcaacggagtcctatggacaagtggccacaaaccaccagagtgcacaggctag |
| | | ttttaatgatactagggctcaggcgcagaccggctgggttcaaaaccaaggaatacttccg |
| | | ggtatggtttggcaggacagagatgtgtacctgcaaggacccatttgggccaaaattcctc |
| | | acacggacggcaactttcacccttctccgctgatgggagggtttggaatgaagcacccgcc |
| | | tcctcagatcctcatcaaaaacacacctgtacctgcCgatcctccaacggccttcaacaag |
| | | gacaagctgaactctttcatcacccagtattctactggccaagtcagcgtggagatcgagt |
| | | gggagctgcagaaggaaaacagcaagcgGtggaacccggagatccagtacacttccaacta |
| | | ttacaagtctaataatgttgaatttgctgttaatactgaaggtgtatatagtgaaccccgc |
| | | cccattggcaccagatacctgactcgtaatctgtaa |
| TTD-007 | 3630 | atggctgccgatggttatcttccagattggctcgaggacaaccttagtgaaggaattcgcg |
| 9 mer peptide | | agtggtgggctttgaaacctggagcccctcaacccaaggcaaatcaacaacatcaagacaa |
| underlined | | cgctcgaggtcttgtgcttccgggttacaaataccttggacccggcaacggactcgacaag |
| | | ggggagccggtcaacgcagcagacgcggcggccctcgagcacgacaaggcctacgaccagc |
| | | agctcaaggccggagacaacccgtacctcaagtacaaccacgccgacgccgagttccagga |
| | | gcggctcaaagaagatacgtcttttgggggcaacctcgggcgagcagtcttccaggccaaa |
| | | aagaggcttcttgaacctcttggtctggttgaggaagcggctaagacggctcctggaaaga |
| | | agaggcctgtagagcagtctcctcaggaaccggactcctccgcgggtattggcaaatcggg |
| | | tgcacagcccgctaaaaagagactcaatttcggtcagactggcgacacagagtcagtccca |
| | | gaccctcaaccaatcggagaacctcccgcagccccctcaggtgtgggatctcttacaatgg |
| | | cttcaggtggtggcgcaccagtggcagacaataacgaaggtgccgatggagtgggtagttc |
| | | ctcgggaaattggcattgcgattcccaatggctgggggacagagtcatcaccaccagcacc |
| | | cgaacctgggccctgcccacctacaacaatcacctctacaagcaaatctccaacagcacat |
| | | ctggaggatcttcaaatgacaacgcctacttcggctacagcaccccctgggggtattttga |
| | | cttcaacagattccactgccacttctcaccacgtgactggcagcgactcatcaacaacaac |
| | | tggggattccggcctaagcgactcaacttcaagctcttcaacattcaggtcaaagaggtta |
| | | cggacaacaatggagtcaagaccatcgccaataaccttaccagcacggtccaggtcttcac |
| | | ggactcagactatcagctcccgtacgtgctcgggtcggctcacgagggctgcctcccgccg |
| | | ttcccagcggacgttttcatgattcctcagtacgggtatctgacgcttaatgatggaagcc |
| | | aggccgtgggtcgttcgtccttttactgcctggaatatttcccgtcgcaaatgctaagaac |
| | | gggtaacaacttccagttcagctacgagtttgagaacgtacctttccatagcagctacgct |
| | | cacagccaaagcctggaccgactaatgaatccactcatcgaccaatacttgtactatctct |
| | | caaagactattaacggttctggacagaatcaacaaacgctaaaattcagtgtggccggacc |
| | | cagcaacatggctgtccagggaagaaactacatacctggacccagctaccgacaacaacgt |
| | | gtctcaaccactgtgactcaaaacaacaacagcgaatttgcttggcctggagcttcttctt |
| | | gggctctcaatggacgtaatagcttgatgaatcctggacctgctatggccagccacaaaga |
| | | aggagaggaccgtttctttcctttgtctggatctttaatttttggcaaacaaggaactgga |
| | | agagacaacgtggatgcggacaaagtcatgataaccaacgaagaagaaattaaaactacta |
| | | acccggtagcaacggagtcctatggacaagtggccacaaaccaccagagtggtggtacgtt |
| | | ggccgtcgtgtcgcttgctcaggcgcagaccggctgggttcaaaaccaaggaatacttccg |
| | | ggtatggtttggcaggacagagatgtgtacctgcaaggacccatttgggccaaaattcctc |
| | | acacggacggcaactttcacccttctccgctgatgggagggtttggaatgaagcacccgcc |
| | | tcctcagatcctcatcaaaaacacacctgtacctgcCgatcctccaacggccttcaacaag |
| | | gacaagctgaactctttcatcacccagtattctactggccaagtcagcgtggagatcgagt |
| | | gggagctgcagaaggaaaacagcaagcgGtggaacccggagatccagtacacttccaacta |
| | | ttacaagtctaataatgttgaatttgctgttaatactgaaggtgtatatagtgaaccccgc |
| | | cccattggcaccagatacctgactcgtaatctgtaa |
| TTD-008 | 3631 | atggctgccgatggttatcttccagattggctcgaggacaaccttagtgaaggaattcgcg |
| 7 mer peptide | | agtggtgggctttgaaacctggagcccctcaacccaaggcaaatcaacaacatcaagacaa |
| underlined | | cgctcgaggtcttgtgcttccgggttacaaataccttggacccggcaacggactcgacaag |
| | | ggggagccggtcaacgcagcagacgcggcggccctcgagcacgacaaggcctacgaccagc |
| | | agctcaaggccggagacaacccgtacctcaagtacaaccacgccgacgccgagttccagga |
| | | gcggctcaaagaagatacgtcttttgggggcaacctcgggcgagcagtcttccaggccaaa |
| | | aagaggcttcttgaacctcttggtctggttgaggaagcggctaagacggctcctggaaaga |
| | | agaggcctgtagagcagtctcctcaggaaccggactcctccgcgggtattggcaaatcggg |
| | | tgcacagcccgctaaaaagagactcaatttcggtcagactggcgacacagagtcagtccca |
| | | gaccctcaaccaatcggagaacctcccgcagccccctcaggtgtgggatctcttacaatgg |
| | | cttcaggtggtggcgcaccagtggcagacaataacgaaggtgccgatggagtgggtagttc |
| | | ctcgggaaattggcattgcgattcccaatggctgggggacagagtcatcaccaccagcacc |
| | | cgaacctgggccctgcccacctacaacaatcacctctacaagcaaatctccaacagcacat |
| | | ctggaggatcttcaaatgacaacgcctacttcggctacagcaccccctgggggtattttga |
| | | cttcaacagattccactgccacttctcaccacgtgactggcagcgactcatcaacaacaac |
| | | tggggattccggcctaagcgactcaacttcaagctcttcaacattcaggtcaaagaggtta |
| | | cggacaacaatggagtcaagaccatcgccaataaccttaccagcacggtccaggtcttcac |
| | | ggactcagactatcagctcccgtacgtgctcgggtcggctcacgagggctgcctcccgccg |
| | | ttcccagcggacgttttcatgattcctcagtacgggtatctgacgcttaatgatggaagcc |
| | | aggccgtgggtcgttcgtccttttactgcctggaatatttcccgtcgcaaatgctaagaac |
| | | gggtaacaacttccagttcagctacgagtttgagaacgtacctttccatagcagctacgct |
| | | cacagccaaagcctggaccgactaatgaatccactcatcgaccaatacttgtactatctct |
| | | caaagactattaacggttctggacagaatcaacaaacgctaaaattcagtgtggccggacc |
| | | cagcaacatggctgtccagggaagaaactacatacctggacccagctaccgacaacaacgt |
| | | gtctcaaccactgtgactcaaaacaacaacagcgaatttgcttggcctggagcttcttctt |
| | | gggctctcaatggacgtaatagcttgatgaatcctggacctgctatggccagccacaaaga |
| | | aggagaggaccgtttctttcctttgtctggatctttaatttttggcaaacaaggaactgga |
| | | agagacaacgtggatgcggacaaagtcatgataaccaacgaagaagaaattaaaactacta |
| | | acccggtagcaacggagtcctatggacaagtggccacaaaccaccagagtgcacaggctta |
| | | tgggttgccgaagggtcctcaggcgcagaccggctgggttcaaaaccaaggaatacttccg |
| | | ggtatggtttggcaggacagagatgtgtacctgcaaggacccatttgggccaaaattcctc |
| | | acacggacggcaactttcacccttctccgctgatgggagggtttggaatgaagcacccgcc |
| | | tcctcagatcctcatcaaaaacacacctgtacctgcCgatcctccaacggccttcaacaag |
| | | gacaagctgaactctttcatcacccagtattctactggccaagtcagcgtggagatcgagt |
| | | gggagctgcagaaggaaaacagcaagcgGtggaacccggagatccagtacacttccaacta |
| | | ttacaagtctaataatgttgaatttgctgttaatactgaaggtgtatatagtgaaccccgc |
| | | cccattggcaccagatacctgactcgtaatctgtaa |
| TTD-009 | 3632 | atggctgccgatggttatcttccagattggctcgaggacaaccttagtgaaggaattcgcg |
| 7 mer peptide | | agtggtgggctttgaaacctggagcccctcaacccaaggcaaatcaacaacatcaagacaa |
| underlined | | cgctcgaggtcttgtgcttccgggttacaaataccttggacccggcaacggactcgacaag |
| | | ggggagccggtcaacgcagcagacgcggcggccctcgagcacgacaaggcctacgaccagc |
| | | agctcaaggccggagacaacccgtacctcaagtacaaccacgccgacgccgagttccagga |
| | | gcggctcaaagaagatacgtcttttgggggcaacctcgggcgagcagtcttccaggccaaa |
| | | aagaggcttcttgaacctcttggtctggttgaggaagcggctaagacggctcctggaaaga |
| | | agaggcctgtagagcagtctcctcaggaaccggactcctccgcgggtattggcaaatcggg |
| | | tgcacagcccgctaaaaagagactcaatttcggtcagactggcgacacagagtcagtccca |
| | | gaccctcaaccaatcggagaacctcccgcagccccctcaggtgtgggatctcttacaatgg |
| | | cttcaggtggtggcgcaccagtggcagacaataacgaaggtgccgatggagtgggtagttc |
| | | ctcgggaaattggcattgcgattcccaatggctgggggacagagtcatcaccaccagcacc |
| | | cgaacctgggccctgcccacctacaacaatcacctctacaagcaaatctccaacagcacat |
| | | ctggaggatcttcaaatgacaacgcctacttcggctacagcaccccctgggggtattttga |
| | | cttcaacagattccactgccacttctcaccacgtgactggcagcgactcatcaacaacaac |
| | | tggggattccggcctaagcgactcaacttcaagctcttcaacattcaggtcaaagaggtta |
| | | cggacaacaatggagtcaagaccatcgccaataaccttaccagcacggtccaggtcttcac |
| | | ggactcagactatcagctcccgtacgtgctcgggtcggctcacgagggctgcctcccgccg |
| | | ttcccagcggacgttttcatgattcctcagtacgggtatctgacgcttaatgatggaagcc |
| | | aggccgtgggtcgttcgtccttttactgcctggaatatttcccgtcgcaaatgctaagaac |
| | | gggtaacaacttccagttcagctacgagtttgagaacgtacctttccatagcagctacgct |
| | | cacagccaaagcctggaccgactaatgaatccactcatcgaccaatacttgtactatctct |
| | | caaagactattaacggttctggacagaatcaacaaacgctaaaattcagtgtggccggacc |
| | | cagcaacatggctgtccagggaagaaactacatacctggacccagctaccgacaacaacgt |
| | | gtctcaaccactgtgactcaaaacaacaacagcgaatttgcttggcctggagcttcttctt |
| | | gggctctcaatggacgtaatagcttgatgaatcctggacctgctatggccagccacaaaga |
| | | aggagaggaccgtttctttcctttgtctggatctttaatttttggcaaacaaggaactgga |
| | | agagacaacgtggatgcggacaaagtcatgataaccaacgaagaagaaattaaaactacta |
| | | acccggtagcaacggagtcctatggacaagtggccacaaaccaccagagtgcacaggcttc |
| | | gactgggacgcttcggcttcaggcgcagaccggctgggttcaaaaccaaggaatacttccg |
| | | ggtatggtttggcaggacagagatgtgtacctgcaaggacccatttgggccaaaattcctc |
| | | acacggacggcaactttcacccttctccgctgatgggagggtttggaatgaagcacccgcc |
| | | tcctcagatcctcatcaaaaacacacctgtacctgcCgatcctccaacggccttcaacaag |
| | | gacaagctgaactctttcatcacccagtattctactggccaagtcagcgtggagatcgagt |
| | | gggagctgcagaaggaaaacagcaagcgGtggaacccggagatccagtacacttccaacta |
| | | ttacaagtctaataatgttgaatttgctgttaatactgaaggtgtatatagtgaaccccgc |
| | | cccattggcaccagatacctgactcgtaatctgtaa |
| TTD-010 | 3633 | atggctgccgatggttatcttccagattggctcgaggacaaccttagtgaaggaattcgcg |
| 7 mer peptide | | agtggtgggctttgaaacctggagcccctcaacccaaggcaaatcaacaacatcaagacaa |
| underlined | | cgctcgaggtcttgtgcttccgggttacaaataccttggacccggcaacggactcgacaag |
| | | ggggagccggtcaacgcagcagacgcggcggccctcgagcacgacaaggcctacgaccagc |
| | | agctcaaggccggagacaacccgtacctcaagtacaaccacgccgacgccgagttccagga |
| | | gcggctcaaagaagatacgtcttttgggggcaacctcgggcgagcagtcttccaggccaaa |
| | | aagaggcttcttgaacctcttggtctggttgaggaagcggctaagacggctcctggaaaga |
| | | agaggcctgtagagcagtctcctcaggaaccggactcctccgcgggtattggcaaatcggg |
| | | tgcacagcccgctaaaaagagactcaatttcggtcagactggcgacacagagtcagtccca |
| | | gaccctcaaccaatcggagaacctcccgcagccccctcaggtgtgggatctcttacaatgg |
| | | cttcaggtggtggcgcaccagtggcagacaataacgaaggtgccgatggagtgggtagttc |
| | | ctcgggaaattggcattgcgattcccaatggctgggggacagagtcatcaccaccagcacc |
| | | cgaacctgggccctgcccacctacaacaatcacctctacaagcaaatctccaacagcacat |
| | | ctggaggatcttcaaatgacaacgcctacttcggctacagcaccccctgggggtattttga |
| | | cttcaacagattccactgccacttctcaccacgtgactggcagcgactcatcaacaacaac |
| | | tggggattccggcctaagcgactcaacttcaagctcttcaacattcaggtcaaagaggtta |
| | | cggacaacaatggagtcaagaccatcgccaataaccttaccagcacggtccaggtcttcac |
| | | ggactcagactatcagctcccgtacgtgctcgggtcggctcacgagggctgcctcccgccg |
| | | ttcccagcggacgttttcatgattcctcagtacgggtatctgacgcttaatgatggaagcc |
| | | aggccgtgggtcgttcgtccttttactgcctggaatatttcccgtcgcaaatgctaagaac |
| | | gggtaacaacttccagttcagctacgagtttgagaacgtacctttccatagcagctacgct |
| | | cacagccaaagcctggaccgactaatgaatccactcatcgaccaatacttgtactatctct |
| | | caaagactattaacggttctggacagaatcaacaaacgctaaaattcagtgtggccggacc |
| | | cagcaacatggctgtccagggaagaaactacatacctggacccagctaccgacaacaacgt |
| | | gtctcaaccactgtgactcaaaacaacaacagcgaatttgcttggcctggagcttcttctt |
| | | gggctctcaatggacgtaatagcttgatgaatcctggacctgctatggccagccacaaaga |
| | | aggagaggaccgtttctttcctttgtctggatctttaatttttggcaaacaaggaactgga |
| | | agagacaacgtggatgcggacaaagtcatgataaccaacgaagaagaaattaaaactacta |
| | | acccggtagcaacggagtcctatggacaagtggccacaaaccaccagagtgcgcaggcgta |
| | | ttcgacggatgagaggatgcaggcgcagaccggctgggttcaaaaccaaggaatacttccg |
| | | ggtatggtttggcaggacagagatgtgtacctgcaaggacccatttgggccaaaattcctc |
| | | acacggacggcaactttcacccttctccgctgatgggagggtttggaatgaagcacccgcc |
| | | tcctcagatcctcatcaaaaacacacctgtacctgcCgatcctccaacggccttcaacaag |
| | | gacaagctgaactctttcatcacccagtattctactggccaagtcagcgtggagatcgagt |
| | | gggagctgcagaaggaaaacagcaagcgGtggaacccggagatccagtacacttccaacta |
| | | ttacaagtctaataatgttgaatttgctgttaatactgaaggtgtatatagtgaaccccgc |
| | | cccattggcaccagatacctgactcgtaatctgtaa |
| TTD-011 | 3634 | atggctgccgatggttatcttccagattggctcgaggacaaccttagtgaaggaattcgcg |
| 7 mer peptide | | agtggtgggctttgaaacctggagcccctcaacccaaggcaaatcaacaacatcaagacaa |
| underlined | | cgctcgaggtcttgtgcttccgggttacaaataccttggacccggcaacggactcgacaag |
| | | ggggagccggtcaacgcagcagacgcggcggccctcgagcacgacaaggcctacgaccagc |
| | | agctcaaggccggagacaacccgtacctcaagtacaaccacgccgacgccgagttccagga |
| | | gcggctcaaagaagatacgtcttttgggggcaacctcgggcgagcagtcttccaggccaaa |
| | | aagaggcttcttgaacctcttggtctggttgaggaagcggctaagacggctcctggaaaga |
| | | agaggcctgtagagcagtctcctcaggaaccggactcctccgcgggtattggcaaatcggg |
| | | tgcacagcccgctaaaaagagactcaatttcggtcagactggcgacacagagtcagtccca |
| | | gaccctcaaccaatcggagaacctcccgcagccccctcaggtgtgggatctcttacaatgg |
| | | cttcaggtggtggcgcaccagtggcagacaataacgaaggtgccgatggagtgggtagttc |
| | | ctcgggaaattggcattgcgattcccaatggctgggggacagagtcatcaccaccagcacc |
| | | cgaacctgggccctgcccacctacaacaatcacctctacaagcaaatctccaacagcacat |
| | | ctggaggatcttcaaatgacaacgcctacttcggctacagcaccccctgggggtattttga |
| | | cttcaacagattccactgccacttctcaccacgtgactggcagcgactcatcaacaacaac |
| | | tggggattccggcctaagcgactcaacttcaagctcttcaacattcaggtcaaagaggtta |
| | | cggacaacaatggagtcaagaccatcgccaataaccttaccagcacggtccaggtcttcac |
| | | ggactcagactatcagctcccgtacgtgctcgggtcggctcacgagggctgcctcccgccg |
| | | ttcccagcggacgttttcatgattcctcagtacgggtatctgacgcttaatgatggaagcc |
| | | aggccgtgggtcgttcgtccttttactgcctggaatatttcccgtcgcaaatgctaagaac |
| | | gggtaacaacttccagttcagctacgagtttgagaacgtacctttccatagcagctacgct |
| | | cacagccaaagcctggaccgactaatgaatccactcatcgaccaatacttgtactatctct |
| | | caaagactattaacggttctggacagaatcaacaaacgctaaaattcagtgtggccggacc |
| | | cagcaacatggctgtccagggaagaaactacatacctggacccagctaccgacaacaacgt |
| | | gtctcaaccactgtgactcaaaacaacaacagcgaatttgcttggcctggagcttcttctt |
| | | gggctctcaatggacgtaatagcttgatgaatcctggacctgctatggccagccacaaaga |
| | | aggagaggaccgtttctttcctttgtctggatctttaatttttggcaaacaaggaactgga |
| | | agagacaacgtggatgcggacaaagtcatgataaccaacgaagaagaaattaaaactacta |
| | | acccggtagcaacggagtcctatggacaagtggccacaaaccaccagagtgcgcaggcgta |
| | | ttcgacggatgagaggaagcaggcgcagaccggctgggttcaaaaccaaggaatacttccg |
| | | ggtatggtttggcaggacagagatgtgtacctgcaaggacccatttgggccaaaattcctc |
| | | acacggacggcaactttcacccttctccgctgatgggagggtttggaatgaagcacccgcc |
| | | tcctcagatcctcatcaaaaacacacctgtacctgcCgatcctccaacggccttcaacaag |
| | | gacaagctgaactctttcatcacccagtattctactggccaagtcagcgtggagatcgagt |
| | | gggagctgcagaaggaaaacagcaagcgGtggaacccggagatccagtacacttccaacta |
| | | ttacaagtctaataatgttgaatttgctgttaatactgaaggtgtatatagtgaaccccgc |
| | | cccattggcaccagatacctgactcgtaatctgtaa |
| TTD-012 | 3635 | atggctgccgatggttatcttccagattggctcgaggacaaccttagtgaaggaattcgcg |
| 7 mer peptide | | agtggtgggctttgaaacctggagcccctcaacccaaggcaaatcaacaacatcaagacaa |
| underlined | | cgctcgaggtcttgtgcttccgggttacaaataccttggacccggcaacggactcgacaag |
| | | ggggagccggtcaacgcagcagacgcggcggccctcgagcacgacaaggcctacgaccagc |
| | | agctcaaggccggagacaacccgtacctcaagtacaaccacgccgacgccgagttccagga |
| | | gcggctcaaagaagatacgtcttttgggggcaacctcgggcgagcagtcttccaggccaaa |
| | | aagaggcttcttgaacctcttggtctggttgaggaagcggctaagacggctcctggaaaga |
| | | agaggcctgtagagcagtctcctcaggaaccggactcctccgcgggtattggcaaatcggg |
| | | tgcacagcccgctaaaaagagactcaatttcggtcagactggcgacacagagtcagtccca |
| | | gaccctcaaccaatcggagaacctcccgcagccccctcaggtgtgggatctcttacaatgg |
| | | cttcaggtggtggcgcaccagtggcagacaataacgaaggtgccgatggagtgggtagttc |
| | | ctcgggaaattggcattgcgattcccaatggctgggggacagagtcatcaccaccagcacc |
| | | cgaacctgggccctgcccacctacaacaatcacctctacaagcaaatctccaacagcacat |
| | | ctggaggatcttcaaatgacaacgcctacttcggctacagcaccccctgggggtattttga |
| | | cttcaacagattccactgccacttctcaccacgtgactggcagcgactcatcaacaacaac |
| | | tggggattccggcctaagcgactcaacttcaagctcttcaacattcaggtcaaagaggtta |
| | | cggacaacaatggagtcaagaccatcgccaataaccttaccagcacggtccaggtcttcac |
| | | ggactcagactatcagctcccgtacgtgctcgggtcggctcacgagggctgcctcccgccg |
| | | ttcccagcggacgttttcatgattcctcagtacgggtatctgacgcttaatgatggaagcc |
| | | aggccgtgggtcgttcgtccttttactgcctggaatatttcccgtcgcaaatgctaagaac |
| | | gggtaacaacttccagttcagctacgagtttgagaacgtacctttccatagcagctacgct |
| | | cacagccaaagcctggaccgactaatgaatccactcatcgaccaatacttgtactatctct |
| | | caaagactattaacggttctggacagaatcaacaaacgctaaaattcagtgtggccggacc |
| | | cagcaacatggctgtccagggaagaaactacatacctggacccagctaccgacaacaacgt |
| | | gtctcaaccactgtgactcaaaacaacaacagcgaatttgcttggcctggagcttcttctt |
| | | gggctctcaatggacgtaatagcttgatgaatcctggacctgctatggccagccacaaaga |
| | | aggagaggaccgtttctttcctttgtctggatctttaatttttggcaaacaaggaactgga |
| | | agagacaacgtggatgcggacaaagtcatgataaccaacgaagaagaaattaaaactacta |
| | | acccggtagcaacggagtcctatggacaagtggccacaaaccaccagagtgcacaggctta |
| | | tgtttcgtctgttaagatgcaggcgcagaccggctgggttcaaaaccaaggaatacttccg |
| | | ggtatggtttggcaggacagagatgtgtacctgcaaggacccatttgggccaaaattcctc |
| | | acacggacggcaactttcacccttctccgctgatgggagggtttggaatgaagcacccgcc |
| | | tcctcagatcctcatcaaaaacacacctgtacctgcCgatcctccaacggccttcaacaag |
| | | gacaagctgaactctttcatcacccagtattctactggccaagtcagcgtggagatcgagt |
| | | gggagctgcagaaggaaaacagcaagcgGtggaacccggagatccagtacacttccaacta |
| | | ttacaagtctaataatgttgaatttgctgttaatactgaaggtgtatatagtgaaccccgc |
| | | cccattggcaccagatacctgactcgtaatctgtaa |

[1003] In some embodiments, an AAV capsid polypeptide, e.g., an AAV capsid variant, described herein comprises the amino acid sequence of any one of SEQ ID NOs: 3636-3647, or an amino acid sequence with at least 80% (e.g., at least about 85, 90, 95, 96, 97, 98, or 99%) sequence identity thereto. In some embodiments, an AAV capsid variant described herein comprises the amino acid sequence of SEQ ID NO: 3636, or an amino acid sequence with at least 80% (e.g., at least about 85, 90, 95, 96, 97, 98, or 99%) sequence identity thereto. In some embodiments, an AAV capsid variant described herein comprises the amino acid sequence of SEQ ID NO: 3639, or an amino acid sequence with at least 80% (e.g., at least about 85, 90, 95, 96, 97, 98, or 99%) sequence identity thereto.

[1004] In some embodiments, the polynucleotide encoding an AAV capsid polypeptide, e.g., AAV capsid variant, described herein comprises the nucleotide sequence of any one of SEQ ID NOs: 3623-3635, or a nucleotide sequence with at least 80% (e.g., at least about 85, 90, 95, 96, 97, 98, or 99%) sequence identity thereto. In some embodiments, the polynucleotide encoding an AAV capsid variant described herein comprises the nucleotide sequence of SEQ ID NO: 3623, or a nucleotide sequence with at least 80% (e.g., at least about 85, 90, 95, 96, 97, 98, or 99%) sequence identity thereto. In some embodiments, the polynucleotide encoding an AAV capsid variant described herein comprises the nucleotide sequence of SEQ ID NO: 3627, or a nucleotide sequence with at least 80% (e.g., at least about 85, 90, 95, 96, 97, 98, or 99%) sequence identity thereto. In some embodiments, the nucleic acid sequence encoding an AAV capsid polypeptide, e.g., an AAV capsid variant, described herein is codon optimized.

[1005] In some embodiments, the AAV capsid polypeptide, e.g., the AAV capsid variant, comprises a VP2 protein comprising the amino acid sequence corresponding to positions 138-743, of any one of SEQ ID NOs: 3636-3647, or a sequence with at least 80% (e.g., at least about 85, 90, 95, 96, 97, 98, or 99%) sequence identity thereto. In some embodiments, the AAV capsid comprises a VP3 protein comprising the amino acid sequence corresponding to positions 203-743, of any one of SEQ ID NOs: 3636-3647, or a sequence with at least 80% (e.g., at least about 85, 90, 95, 96, 97, 98, or 99%) sequence identity thereto.

[1006] In some embodiments, an AAV capsid polypeptide, e.g., an AAV capsid variant, described herein has an increased tropism for a CNS cell or tissue, e.g., a brain cell, brain tissue, spinal cord cell, or spinal cord tissue, relative to the tropism of a reference sequence comprising the amino acid sequence of SEQ ID NO: 138.

[1007] In some embodiments, an AAV capsid polypeptide, e.g., an AAV capsid variant, described herein transduces a brain region, e.g., selected from dentate nucleus, cerebellar cortex, cerebral cortex, brain stem, hippocampus, thalamus and putamen. In some embodiments, the level of transduction of said brain region is at least 5, 10, 50, 100, 200, 500, 1,000, 2,000, 5,000, or 10,000-fold greater as compared to a reference sequence of SEQ ID NO: 138.

[1008] In some embodiments, an AAV capsid polypeptide, e.g., an AAV capsid variant, described herein is enriched at least about 5, 6, 7, 8, 9, or 10-fold, in the brain compared to a reference sequence of SEQ ID NO: 138. In some embodiments, an AAV capsid variant described herein is enriched at least about 20, 30, 40, or 50-fold in the brain compared to a reference sequence of SEQ ID NO: 138. In some embodiments, an AAV capsid variant described herein is enriched at least about 100, 200, 300, or 400-fold in the brain compared to a reference sequence of SEQ ID NO: 138.

[1009] In some embodiments, an AAV capsid polypeptide, e.g., an AAV capsid variant, described herein delivers an increased level of viral genomes to a brain region. In some embodiments, the level of viral genomes is increased by at least 5, 10, 20, 30, 40 or 50-fold, as compared to a reference sequence of SEQ ID NO: 138. In some embodiments, the brain region comprises a frontal cortex, sensory cortex, motor cortex, putamen, thalamus, cerebellar cortex, dentate nucleus, caudate, and/or hippocampus.

[1010] In some embodiments, an AAV capsid polypeptide, e.g., an AAV capsid variant, described herein delivers an increased level of a payload to a brain region. In some embodiments, the level of the payload is increased by at least 5, 10, 50, 100, 200, 500, 1,000, 2,000, 5,000, or 10,000-fold, as compared to a reference sequence of SEQ ID NO: 138. In some embodiments, the brain region comprises a frontal cortex, sensory cortex, motor cortex, putamen, thalamus, cerebellar cortex, dentate nucleus, caudate, and/or hippocampus.

[1011] In some embodiments, an AAV capsid polypeptide, e.g., an AAV capsid variant, described herein delivers an increased level of a payload to a spinal cord region. In some embodiments, the level of the payload is increased by at least 10, 20, 50, 100, 200, 300, 400, 500, 600, 700, 800 or 900-fold, as compared to a reference sequence of SEQ ID NO: 138. In some embodiments, the spinal cord region comprises a cervical, thoracic, and/or lumbar region.

[1012] In some embodiments, an AAV capsid polypeptide, e.g., an AAV capsid variant, described herein shows preferential transduction in a brain region relative to the transduction in the dorsal root ganglia (DRG).

[1013] In some embodiments, an AAV capsid polypeptide, e.g., an AAV capsid variant, described herein has an increased tropism for a muscle cell or tissue, e.g., a heart cell or tissue, relative to the tropism of a reference sequence comprising the amino acid sequence of SEQ ID NO: 138. In some embodiments, the AAV capsid variant delivers an increased level of a payload to a muscle region. In some embodiments, the payload is increased by at least 10, 15, 20, 30, or 40-fold, as compared to a reference sequence of SEQ ID NO: 138. In some embodiments, the muscle region comprises a heart muscle, quadriceps muscle, and/or a diaphragm muscle region. In some embodiments, the muscle region comprises a heart muscle region, e.g., a heart atrium muscle region or a heart ventricle muscle region.

[1014] In some embodiments, an, AAV capsid polypeptide, e.g., an AAV capsid variant, of the present disclosure is isolated, e.g., recombinant. In some embodiments, a polynucleotide encoding an AAV capsid polypeptide, e.g., an AAV capsid variant, of the present disclosure is isolated, e.g., recombinant.

[1015] Also provided herein are polynucleotide sequences encoding any of the AAV capsid variants described above and AAV particles, vectors, and cells comprising the same.

### Genetic Element

[1016] In some embodiments, an AAV particle, e.g., an AAV particle for the vectorized delivery of an antibody molecule described herein (e.g., an anti-HER2 antibody molecule), comprises a genetic element. In some embodiments, the genetic element comprises a nucleotide sequence encoding a transgene, wherein the transgene encodes a payload, e.g., an antibody molecule (e.g., an anti-HER2 antibody molecule described herein). In some embodiments, the genetic element further comprises an inverted terminal repeat (ITR) region, a promoter, an enhancer, an intron region, an exon region, a nucleic acid encoding a transgene encoding a payload, a poly A signal region, or a combination thereof. In some embodiments, a genetic element comprises a 5′AAV ITR and/or a 3′ AAV ITR. In some embodiments, any or all components of the genetic elements can be modified or optimized to improve expression or targeting of the payload (e.g., an antibody molecule) encoded by the transgene.

### Genetic Element Component: Inverted Terminal Repeats (ITRs)

[1017] In some embodiments, the genetic element comprises an ITR region. In some embodiments, the genetic element comprises at least one ITR region and a nucleic acid encoding a transgene encoding a payload, e.g., an antibody molecule (e.g., an anti-HER2 antibody molecule). In some embodiments, the genetic element comprises two ITRs. In some embodiments, the two ITRs flank the nucleic acid encoding the transgene at the 5′ and 3′ ends. In some embodiments, the ITR functions as an origin of replication comprising recognition sites for replication. In some embodiments, the ITRs comprise sequence regions which can be complementary and symmetrically arranged. In some embodiments, the ITR incorporated into a genetic element may be comprised of naturally occurring nucleotide sequences or recombinantly derived nucleotide sequences.

[1018] In some embodiments, the ITR may be of the same AAV serotype as the capsid, e.g., a capsid protein selected from any of the AAV serotypes listed in Table 1, or a functional variant thereof. In some embodiments, the ITR may be of a different AAV serotype than the capsid protein. In some embodiments, the AAV particle comprises a genetic element comprising two ITRs wherein the two ITRs of the genetic element are of the same AAV serotype. In other embodiments, the two ITRs of a genetic element are of different AAV serotypes. In some embodiments both ITRs of the genetic element of the AAV particle are AAV2 ITRs or a functional variant thereof.

[1019] In some embodiments, the ITR may be about 100 to about 150 nucleotides in length. An ITR may be about 100-180 nucleotides in length, e.g., about 100-115, about 100-120, about 100-130, about 100-140, about 100-150, about 100-160, about 100-170, about 100-180, about 110-120, about 110-130, about 110-140, about 110-150, about 110-160, about 110-170, about 110-180, about 120-130, about 120-140, about 120-150, about 120-160, about 120-170, about 120-180, about 130-140, about 130-150, about 130-160, about 130-170, about 130-180, about 140-150, about 140-160, about 140-170, about 140-180, about 150-160, about 150-170, about 150-180, about 160-170, about 160-180, or about 170-180 nucleotides in length. In some embodiments, the ITR comprises about 120-140 nucleotides in length, e.g., about 130 nucleotides in length. In some embodiments, the ITR comprises about 140-150 nucleotides in length, about 141 nucleotides in length. In some embodiments, the genetic element comprises an ITR region comprising the nucleotide sequence of any of the sequences provided in Table 6 or a nucleotide sequence with at least 70%, 75%, 80%, 85%, 90%, 95% or 99% sequence identity thereto. In some embodiments, the genetic element comprises two ITR regions comprising the nucleotide sequence of any of the sequences provided in Table 6 or a nucleotide sequence with at least 70%, 75%, 80%, 85%, 90%, 95% or 99% sequence identity thereto, wherein the first and second ITR comprise the same sequence or wherein the first and second ITR comprise different sequences.

TABLE 6
Inverted Terminal Repeat (ITR) Sequence Regions

| Sequence Region Name | Sequence Length | SEQ ID NO |
|---|---|---|
| ITR1 | 130 | 2076 |
| ITR2 | 141 | 2077 |
| ITR3 | 130 | 2078 |
| ITR4 | 141 | 2079 |

[1020] In some embodiment, the genetic element comprises an ITR provided in Table 6. In some embodiments, the genetic element comprises an ITR chosen from any one of ITR1-ITR4 or a functional variant thereof. In some embodiments, the genetic element comprises ITR1. In some embodiments, the genetic element comprises ITR1. In some embodiments, the ITR comprises the nucleotide sequence of any one of SEQ ID NOs: 2076-2079, or a sequence with at least 70%, 75%, 80%, 85%, 90%, 95% or 99% sequence identity thereto. In some embodiments, the ITR comprises the nucleotide sequence of SEQ ID NO: 2076 or a nucleotide sequence with at least 70%, 75%, 80%, 85%, 90%, 95% or 99% sequence identity thereto. In some embodiments, the ITR comprises the nucleotide sequence of SEQ ID NO: 2078 or a nucleotide sequence with at least 70%, 75%, 80%, 85%, 90%, 95% or 99% sequence identity thereto.

[1021] In some embodiments, the genetic element comprises ITR1 and ITR2. In some embodiments, the genetic element comprises ITR1 at the 5′ end and ITR2 at the 3′ end. In some embodiments, the genetic element comprises an ITR, e.g., a 5′ ITR, comprising the nucleotide sequence of SEQ ID NO: 2076 or a sequence with at least with at least 70%, 75%, 80%, 85%, 90%, 95% or 99% sequence identity thereto; and an ITR, e.g., a 3′ ITR, comprising the nucleotide sequence of SEQ ID NO: 2078 or a nucleotide sequence at least 70%, 75%, 80%, 85%, 90%, 95% or 99% sequence identity thereto.

### Genetic Element Component: Promoters

[1022] In some embodiments, the genetic element comprises an element to enhance the transgene target specificity and/or expression (See e.g., Powell et al. Viral Expression Cassette Elements to Enhance Transgene Target Specificity and Expression in Gene Therapy, 2015; the contents of which are herein incorporated by reference in its entirety). In some embodiments, an element to enhance the transgene target specificity and/or expression comprise a promoter, an enhancer, e.g., a CMV enhancer, or both. In some embodiments, the genetic element comprises a promoter operably linked to a transgene encoded by a nucleic acid molecule encoding a payload, e.g., antibody molecule (e.g., an anti-HER2 antibody molecule). In some embodiments, the genetic element comprises an enhancer, e.g., a CMV enhancer. In some embodiment, the genetic element comprises at least two promoters.

[1023] In some embodiments, the genetic element comprises a promoter that is species specific, inducible, tissue-specific, and/or cell cycle-specific (e.g., as described in Parr et al., Nat. Med. 3:1145-9 (1997); the contents of which are herein incorporated by reference in their entirety). In some embodiments, the genetic element comprises a promoter that is sufficient for expression, e.g., in a target cell, of a payload (e.g., an antibody molecule, e.g., an anti-HER2 molecule) encoded by a transgene.

[1024] In some embodiments, the promoter results in expression of the payload, e.g., an antibody molecule (e.g., an anti-HER2 antibody molecule) for a sufficient period of time in a cell, tissue, and/or organ. In some embodiments, the promoter results in expression of the payload for at least 1 hour to 24 hours, e.g., 1-5 hours, 1-10 hours, 1-15 hours, 1-20 hours, 2-5 hours, 2-10 hours, 2-15 hours, 2-20 hours, or 2-24 hours, 3-5 hours, 3-15 hours, 3-20 hours, 3-24 hours, 4-5 hours, 4-15 hours, 4-20 hours, 4-24 hours, 5-15 hours, 5-20 hours, 5-23 hours, 6-15 hours, 6-20 hours 6-24 hours, 7-15 hours, 7-20 hours, 7-24 hours, 8-10 hours, 8-15 hours, 8-20 hours, 8-24 hours, 9-10 hours, 9-15 hours, 9-20 hours, 9-24 hours, 10-15 hours, 10-20 hours, 10-23 hours, 11-15 hours, 11-20 hours 11-24 hours, 12-15 hours, 12-20 hours, 12-24 hours, 13-15 hours, 13-20 hours, 13-24 hours, 14-15 hours, 14-20 hours, 14-23 hours, 15-20 hours, 15-24 hours, 16-20 hours, 16-24 hours, 17-20 hours, 17-24 hours, 18-20 hours, 18-24 hours, 19-20 hours, 19-24 hours, 20-24 hours, 21-24 hours, 22-24 hours, or 23-24 hours, e.g., 1 hour, 5 hours, 10 hours, 12 hours, 14 hours, 18 hours, 20 hours, or 24 hours. In some embodiments, the promoter results in expression of the payload for at least 1-7 days, e.g., 1-6 days, 1-5 days, 1-4 days, 1-3 days, 1-2 days, 2-7 days, 2-6 days, 2-5 days, 2-4 days, 2-3 days, 3-7 days, 3-6 days, 3-5 days, 3-4 days, 4-7 days, 4-6 days, 4-5 days, 5-7 days, 5-6 days, or 6-7 days, e.g., 1 day, 5 days, or 7 days. In some embodiments, the promoter results in expression of the payload for 1 week to 4 weeks, e.g., 1-3 weeks, 1-2 weeks, 2-4 weeks, 2-3 weeks, or 3-4 weeks. In some embodiments, the promoter results in expression of the payload for at least 1-12 months, at least 10-24 months, or at least 1-10 years, e.g., at least 1 year, at least 5 years, at least 10 years, or more than 10 years.

[1025] In some embodiments, the promoter may be a naturally occurring promoter, or a non-naturally occurring promoter. In some embodiments, the promoter is from a naturally expressed protein. In some embodiments, the promoter is an engineered promoter. In some embodiments, the promoter comprises a viral promoter, plant promoter, and/or a mammalian promoter. In some embodiments, the promoter may be a human promoter. In some embodiments, the promoter may be truncated. In some embodiments, the promoter is not a cell specific promoter.

[1026] In some embodiments, the genetic element comprises a promoter that results in expression in one or more, e.g., multiple, cells and/or tissues, e.g., a ubiquitous promoter. In some embodiments, a promoter that results in expression in one or more tissues includes but is not limited to a human elongation factor 1α-subunit (EF1α) promoter, a cytomegalovirus (CMV) immediate-early enhancer and/or promoter, a chicken β-actin (CBA) promoter and its derivative CAG, a β glucuronidase (GUSB) promoter, or ubiquitin C (UBC) promoter. In some embodiments, a tissue-specific expression elements can be used to restrict expression to certain cell types such as, but not limited to, muscle specific promoters, B cell promoters, monocyte promoters, leukocyte promoters, macrophage promoters, pancreatic acinar cell promoters, endothelial cell promoters, lung tissue promoters, astrocyte promoters, or nervous system promoters which can be used to restrict expression to neurons, astrocytes, or oligodendrocytes. In some embodiments, the genetic element comprises a ubiquitous promoter as described in Yu et al. (Molecular Pain 2011, 7:63), Soderblom et al. (E. Neuro 2015), Gill et al., (Gene Therapy 2001, Vol. 8, 1539-1546), and Husain et al. (Gene Therapy 2009), each of which are incorporated by reference in their entirety. In some embodiments, the genetic element comprises a ubiquitous promoter chosen from CMV, CBA (including derivatives CAG, CB6, CBh, etc.), EF-1α, PGK, UBC, GUSB (hGBp), or UCOE (promoter of HNRPA2B1-CBX3).

[1027] In some embodiments, the genetic element comprises a muscle-specific promoter, e.g., a promoter that results in expression in a muscle cell. In some embodiments, a muscle-specific promoter includes but is not limited to a mammalian muscle creatine kinase (MCK) promoter, a mammalian desmin (DES) promoter, a mammalian troponin I (TNNI2) promoter, a synthetic C5-12 promoter, and a mammalian skeletal alpha-actin (ASKA) promoter (see, e.g. U.S. Patent Publication US20110212529, the contents of which are herein incorporated by reference in their entirety).

[1028] In some embodiments, the genetic element comprises a nervous system specific promoter, e.g., a promoter that results in expression of a payload in a neuron, an astrocyte, and/or an oligodendrocyte. In some embodiments, a nervous system specific promoter that results in expression in neurons includes but is not limited to a neuron-specific enolase (NSE) promoter, a platelet-derived growth factor (PDGF) promoter, a platelet-derived growth factor B-chain (PDGF-β) promoter, a synapsin (Syn) promoter, a methyl-CpG binding protein 2 (MeCP2) promoter, a Ca²⁺/calmodulin-dependent protein kinase II (CaMKII) promoter, a metabotropic glutamate receptor 2 (mGluR2) promoter, a neurofilament light (NFL) or heavy (NFH) promoter, a β-globin minigene nβ2 promoter, a preproenkephalin (PPE) promoter, a enkephalin (Enk) promoter, and an excitatory amino acid transporter 2 (EAAT2) promoter. In some embodiments, a nervous system specific promoter that results in expression in astrocytes includes but is not limited to a glial fibrillary acidic protein (GFAP) promoter and an EAAT2 promoter. In some embodiments, a nervous system specific promoter that results in expression in oligodendrocytes includes but is not limited to a myelin basic protein (MBP) promoter. In some embodiments, the genetic element comprises a nervous system specific promoter as described in Husain et al. (Gene Therapy 2009), Passini and Wolfe (J. Virol. 2001, 12382-12392), Xu et al. (Gene Therapy 2001, 8, 1323-1332), Drews et al. (Mamm Genome (2007) 18:723-731), and Raymond et al. (Journal of Biological Chemistry (2004) 279(44) 46234-46241), each of which are incorporated by reference in their entirety.

[1029] In some embodiments, the genetic element comprises a liver promoter, e.g. a promoter that results in expression a liver cell. In some embodiments, the liver promoter is chosen from human α-1-antitrypsin (hAAT) or thyroxine binding globulin (TBG). In some embodiments, the genetic element comprises an RNA pol III promoter. In some embodiments, the RNA pol III promoter is chosen from U6 or H1. In some embodiments, the genetic element comprises an endothelial cell promoter, e.g., a promoter that results in expression in an endothelial cell. In some embodiments, the endothelial cell promoter is an intercellular adhesion molecule 2 (ICAM2) promoter.

[1030] In some embodiments, the genetic element comprises a promoter chosen from a CAG promoter, a CBA promoter (e.g., a minimal CBA promoter), a CB promoter, a CMV(IE) promoter and/or enhancer, a GFAP promoter, a synapsin promoter, an ICAM2 promoter, or a functional variant thereof. In some embodiments, the genetic element comprises a CAG promoter, a CMVie enhancer, and a minimal CBA promoter. In some embodiments, the genetic element comprises a CMV(IE) promoter and a CB promoter.

[1031] In some embodiments, the CAG promoter comprises the nucleotide sequence of SEQ ID NO: 2080 or nucleotide sequence with at least 70%, 75%, 80%, 85%, 90%, 95%, or 99% sequence identity thereto. In some embodiments, the CBA promoter (e.g., a minimal CBA promoter) comprises the nucleotide sequence of SEQ ID NO: 2082 or nucleotide sequence with at least 70%, 75%, 80%, 85%, 90%, 95%, or 99% sequence identity thereto. In some embodiments, the CB promoter comprises the nucleotide sequence of SEQ ID NO: 2083 or nucleotide sequence with at least 70%, 75%, 80%, 85%, 90%, 95%, or 99% sequence identity thereto. In some embodiments, the GFAP promoter comprises the nucleotide sequence of SEQ ID NO: 2085 or nucleotide sequence with at least 70%, 75%, 80%, 85%, 90%, 95%, or 99% sequence identity thereto. In some embodiments, the synapsin promoter comprises the nucleotide sequence of SEQ ID NO: 2086 or nucleotide sequence with at least 70%, 75%, 80%, 85%, 90%, 95%, or 99% sequence identity thereto. In some embodiments, the CMV(IE) promoter comprises the nucleotide sequence of SEQ ID NO: 2239 or nucleotide sequence with at least 70%, 75%, 80%, 85%, 90%, 95%, or 99% sequence identity thereto. In some embodiments, the CMV(ie) enhancer comprises the nucleotide sequence of SEQ ID NO: 2081 or nucleotide sequence with at least 70%, 75%, 80%, 85%, 90%, 95%, or 99% sequence identity thereto.

[1032] In some embodiments, the genetic element comprises a promoter provided in Table 7. In some embodiments, the promoter is chosen from any one of Promoter 1-Promoter 12, or a functional variant thereof. In some embodiments, the promoter comprises the nucleotide sequence of any one of SEQ ID NOs: 2080-2089, or 2238-2239, or a sequence with at least 70%, 75%, 80%, 85%, 90%, 95% or 99% sequence identity thereto. In some embodiments, the promoter comprises the nucleotide sequence of SEQ ID NO: 2080 or a sequence with at least 70%, 75%, 80%, 85%, 90%, 95% or 99% sequence identity thereto. In some embodiments, the promoter comprises the nucleotide sequence of SEQ ID NO: 2081, or a sequence with at least 70%, 75%, 80%, 85%, 90%, 95% or 99% sequence identity thereto. In some embodiments, the promoter comprises the nucleotide sequence of SEQ ID NO: 2082, or a sequence with at least 70%, 75%, 80%, 85%, 90%, 95% or 99% sequence identity thereto. In some embodiments, the promoter comprises the nucleotide sequence of SEQ ID NO: 2083, or a sequence with at least 70%, 75%, 80%, 85%, 90%, 95% or 99% sequence identity thereto. In some embodiments, the promoter comprises the nucleotide sequence of SEQ ID NO: 2085, or a sequence with at least 70%, 75%, 80%, 85%, 90%, 95% or 99% sequence identity thereto. In some embodiments, the promoter comprises the nucleotide sequence of SEQ ID NO: 2086, or a sequence with at least 70%, 75%, 80%, 85%, 90%, 95% or 99% sequence identity thereto. In some embodiments, the promoter comprises the nucleotide sequence of SEQ ID NO: 2239, or a sequence with at least 70%, 75%, 80%, 85%, 90%, 95% or 99% sequence identity thereto. In some embodiments, the promoter comprises the nucleotide sequence of SEQ ID NO: 4599, or a sequence with at least 70%, 75%, 80%, 85%, 90%, 95% or 99% sequence identity thereto.

TABLE 7
Promoter Sequence Regions

| Sequence Region Name | Sequence Length | SEQ ID NO |
|---|---|---|
| Promoter 1 | 1715 | 2080 |
| Promoter 2 | 299 | 2081 |
| Promoter 3 | 283 | 2082 |
| Promoter 4 | 260 | 2083 |
| Promoter 5 | 654 | 2084 |
| Promoter 6 | 699 | 2085 |
| Promoter 7 | 557 | 2086 |
| Promoter 8 | 382 | 2087 |
| Promoter 9 | 1736 | 2088 |
| Promoter 10 | 365 | 2089 |
| Promoter 11 | 1714 | 2238 |
| Promoter 12 | 380 | 2239 |

[1033] In some embodiments, the genetic element comprises Promoter 1. In some embodiments, the genetic element comprises Promoter 2. In some embodiments, the genetic element comprises Promoter 3. In some embodiments, the genetic element comprises Promoter 4. In some embodiments, the genetic element comprises Promoter 5. In some embodiments, the genetic element comprises Promoter 6. In some embodiments, the genetic element comprises Promoter 12.

[1034] In some embodiments, the promoter of the genetic element further comprises at least one promoter sub-region. In some embodiments, the promoter comprises Promoter 1, further comprising Promoter 2 and Promoter 3 sub-regions. In some embodiments, the genetic element comprises at least 2 or more promoters. In some embodiments, the genetic element comprises Promoter 12 and Promoter 4.

[1035] In some embodiments, the genetic element comprises a promoter that has a length between about 100-2000 nucleotides. In some embodiments, the promoter has a length between about 100-700 nucleotides, e.g., between about 100-600 nucleotides, 100-500 nucleotides, 100-400 nucleotides, 100-300 nucleotides, 100-200 nucleotides, 200-700 nucleotides, 200-600 nucleotides, 200-500 nucleotides, 200-400 nucleotides, 200-300 nucleotides, 300-700 nucleotides, 300-600 nucleotides, 300-500 nucleotides, 300-400 nucleotides, 400-700 nucleotides, 400-600 nucleotides, 400-500 nucleotides, 500-700 nucleotides, 500-600 nucleotides, or 600-700 nucleotides. In some embodiments, the promoter has a length between about 900-2000 nucleotides, e.g., between about 900-1000 nucleotides, 9000-1500 nucleotides, 1000-1500 nucleotides, 1000-2000 nucleotides, or 1500-2000 nucleotides. In some embodiments, the promoter has a length between about 1500 to about 1800 nucleotides, e.g., about 1715 nucleotides. In some embodiments, the promoter has a length of about 500 to about 750 nucleotides, e.g., about 557 nucleotides or about 699 nucleotides. In some embodiments, the promoter has a length of about 200 to about 450 nucleotides, e.g., about 260 nucleotides, about 283 nucleotides, about 299 nucleotides, about 380 nucleotides, or about 399 nucleotides.

### Genetic Element Component: Untranslated Regions (UTRs)

[1036] In some embodiments, the genetic element comprises an untranslated region (UTR). In some embodiments, a wild type UTR of a gene are transcribed but not translated. In some embodiments, the 5′ UTR starts at the transcription start site and ends at the start codon and the 3′ UTR starts immediately following the stop codon and continues until the termination signal for transcription.

[1037] In some embodiments, a UTR comprises a feature found in abundantly expressed genes of specific target organs to enhance the stability and protein production. As a non-limiting example, a 5′ UTR from mRNA normally expressed in the liver (e.g., albumin, serum amyloid A, Apolipoprotein A/B/E, transferrin, alpha fetoprotein, erythropoietin, or Factor VIII) may be used in the genetic element of an AAV particle described herein to enhance expression in hepatic cell lines or liver.

[1038] In some embodiments, a genetic element comprises a 5′UTR, e.g., a wild-type (e.g., naturally occurring) 5′UTR or a recombinant (e.g., non-naturally occurring) 5′UTR. In some embodiments, a 5′ UTR comprises a feature which plays a role in translation initiation. In some embodiments, a UTR, e.g., a 5′ UTR, comprises a Kozak sequence. In some embodiments, a Kozak sequence is involved in the process by which the ribosome initiates translation of many genes. In some embodiments, a Kozak sequence has the consensus sequence of CCR(A/G)CCAUGG, where R is a purine (adenine or guanine) three bases upstream of the start codon (ATG), which is followed by another ‘G’. In some embodiments, a Kozak sequence comprises the nucleotide sequence of GAGGAGCCACC (SEQ ID NO: 4543) or a nucleotide sequence with at least 95-99% sequence identity thereto. In some embodiments, a Kozak sequence comprises the nucleotide sequence of GCCGCCACCATG (SEQ ID NO: 2114), or a nucleotide sequence with at least 95-99% sequence identity thereto. In some embodiments, a genetic element comprises a 5′UTR comprising a Kozak sequence. In some embodiments, a genetic element comprises a 5′UTR that does not comprise a Kozak sequence.

[1039] In some embodiments, the genetic element comprises a 3′UTR, e.g., a wild-type (e.g., naturally occurring) 3′UTR or a recombinant (e.g., non-naturally occurring) 3′UTR. In some embodiments, a 3′ UTR comprises an element that modulates, e.g., increases or decreases, stability of a nucleic acid. In some embodiments, a 3′ UTR comprises stretches of Adenosines and Uridines embedded therein, e.g., an AU rich signature. These AU rich signatures are generally prevalent in genes with high rates of turnover and are described, e.g., in Chen et al, 1995, the contents of which are herein incorporated by reference in its entirety. In some embodiments, an AR rich signature comprises an AU rich element (ARE). In some embodiments, a 3′UTR comprises an ARE chosen from a class I ARE (e.g., c-Myc and MyoD), a class II ARE (e.g., GM-CSF and TNF-a), a class III ARE (e.g., c-Jun and Myogenin), or combination thereto. In some embodiments, a class I ARE comprises several dispersed copies of an AUUUA motif within U-rich regions. In some embodiments, a class II ARE comprises two or more overlapping UUAUUUA(U/A)(U/A) nonamers. In some embodiments, a class III ARE comprises U rich regions and/or do not contain an AUUUA motif. In some embodiments, an ARE destabilizes the messenger.

[1040] In some embodiments, a 3′UTR comprises a binding site for a protein member of the ELAV family. In some embodiments, a 3′ UTR comprises a binding site for an HuR protein. In some embodiments, an HuR protein binds to an ARE of any one of classes I-III and/or increases the stability of mRNA. Without wishing to be bound by theory, it is believed in some embodiments, that a 3′UTR comprising an HuR specific binding sites will lead to HuR binding and, stabilization of a message in vivo.

[1041] In some embodiments, the 3′ UTR of the genetic element comprises an oligo(dT) sequence for templated addition of a poly-A tail.

[1042] In some embodiments, the genetic element comprises a miRNA seed, binding site and/or full sequence. Generally, microRNAs (or miRNA or miR) are 19-25 nucleotide noncoding RNAs that bind to the sites of nucleic acid targets and down-regulate gene expression either by reducing nucleic acid molecule stability or by inhibiting translation. In some embodiments, the microRNA sequence comprises a seed region, e.g., a sequence in the region of positions 2-8 of the mature microRNA, which sequence has perfect Watson-Crick complementarity to the miRNA target sequence of the nucleic acid. In some embodiments, the genetic element or viral genome may be engineered to include, alter or remove at least one miRNA binding site, sequence, or seed region.

[1043] In some embodiments, a UTR from any gene known in the art may be incorporated into the genetic element of an AAV particle described herein. These UTRs, or portions thereof, may be placed in the same orientation as in the gene from which they were selected, or they may be altered in orientation or location. In some embodiments, the UTR used in the genetic element of the AAV particle may be inverted, shortened, lengthened, made with one or more other 5′ UTRs or 3′ UTRs known in the art. In some embodiments, an altered UTR, comprises a UTR has been changed in some way in relation to a reference sequence. For example, a 3′ or 5′ UTR may be altered relative to a wild type or native UTR by the change in orientation or location as taught above or may be altered by the inclusion of additional nucleotides, deletion of nucleotides, swapping or transposition of nucleotides. In some embodiments, the genetic element comprises an artificial UTR, e.g., a UTR that is not a variant of a wild-type, e.g., a naturally occurring, UTR. In some embodiments, the genetic element comprises a UTR selected from a family of transcripts whose proteins share a common function, structure, feature or property.

### Genetic Element Component: miR Binding Site

[1044] Tissue- or cell-specific expression of the AAV viral particles of the invention can be enhanced by introducing tissue- or cell-specific regulatory sequences, e.g., promoters, enhancers, microRNA binding sites, e.g., a detargeting site. Without wishing to be bound by theory, it is believed that an encoded miR binding site can modulate, e.g., prevent, suppress, or otherwise inhibit, the expression of a gene of interest on the genetic element of the invention, based on the expression of the corresponding endogenous microRNA (miRNA) or a corresponding controlled exogenous miRNA in a tissue or cell, e.g., a non-targeting cell or tissue. In some embodiments, a miR binding site modulates, e.g., reduces, expression of the payload encoded by a genetic element of an AAV particle described herein in a cell or tissue where the corresponding mRNA is expressed.

[1045] In some embodiments, the genetic element of an AAV particle described herein comprises a nucleotide sequence encoding a microRNA binding site, e.g., a detargeting site. In some embodiments, the genetic element of an AAV particle described herein comprises a nucleotide sequence encoding a miR binding site, a microRNA binding site series (miR BSs), or a reverse complement thereof.

[1046] In some embodiments, the nucleotide sequence encoding the miR binding site series or the miR binding site is located in the 3′-UTR region of the genetic element (e.g., 3′ relative to the nucleotide sequence encoding a payload), e.g., before the polyA sequence, 5′-UTR region of the genetic element (e.g., 5′ relative to the nucleotide sequence encoding a payload), or both.

[1047] In some embodiments, the encoded miR binding site series comprise at least 1-5 copies, e.g., at least 1-3, 2-4, 3-5, 1, 2, 3, 4, 5 or more copies of a miR binding site (miR BS). In some embodiments, all copies are identical, e.g., comprise the same miR binding site. In some embodiments, the miR binding sites within the encoded miR binding site series are continuous and not separated by a spacer. In some embodiments, the miR binding sites within an encoded miR binding site series are separated by a spacer, e.g., a non-coding sequence. In some embodiments, the spacer is about 1 to 6 nucleotides or about 5 to 10 nucleotides, e.g., about 7-8 nucleotides, nucleotides in length. In some embodiments, the spacer coding sequence or reverse complement thereof comprises one or more of (i) GGAT; (ii) CACGTG; (iii) GCATGC, or a repeat of one or more of (i)-(iii). In some embodiments, the spacer comprises the nucleotide sequence of GATAGTTA (SEQ ID NO: 1846), or a nucleotide sequence having at least one, two, or three modifications, but no more than four modifications of GATAGTTA (SEQ ID NO: 1846).

[1048] In some embodiments, the encoded miR binding site series comprise at least 1-5 copies, e.g., at least 1-3, 2-4, 3-5, 1, 2, 3, 4, 5 or more copies of a miR binding site (miR BS). In some embodiments, at least 1, 2, 3, 4, 5, or all of the copies are different, e.g., comprise a different miR binding site. In some embodiments, the miR binding sites within the encoded miR binding site series are continuous and not separated by a spacer. In some embodiments, the miR binding sites within an encoded miR binding site series are separated by a spacer, e.g., a non-coding sequence. In some embodiments, the spacer is about 1 to 6 nucleotides or about 5 to 10 nucleotides, e.g., about 7-8 nucleotides, in length. In some embodiments, the spacer comprises one or more of (i) GGAT; (ii) CACGTG; (iii) GCATGC, or a repeat of one or more of (i)-(iii). In some embodiments, the spacer comprises the nucleotide sequence of GATAGTTA (SEQ ID NO: 1846), or a nucleotide sequence having at least one, two, or three modifications, but no more than four modifications of GATAGTTA (SEQ ID NO: 1846).

[1049] In some embodiments, the encoded miR binding site is substantially identical (e.g., at least 70%, 75%, 80%, 85%, 90%, 95%, 99% or 100% identical), to the miR in the host cell. In some embodiments, the encoded miR binding site comprises at least 1, 2, 3, 4, or 5 mismatches or no more than 6, 7, 8, 9, or 10 mismatches to a miR in the host cell. In some embodiments, the mismatched nucleotides are contiguous. In some embodiments, the mismatched nucleotides are non-contiguous. In some embodiments, the mismatched nucleotides occur outside the seed region-binding sequence of the miR binding site, such as at one or both ends of the miR binding site. In some embodiments, the miR binding site is 100% identical to the miR in the host cell.

[1050] In some embodiments, the nucleotide sequence encoding the miR binding site is substantially complimentary (e.g., at least 70%, 75%, 80%, 85%, 90%, 95%, 99% or 100% complimentary), to the miR in the host cell. In some embodiments, to complementary sequence of the nucleotide sequence encoding the miR binding site comprises at least 1, 2, 3, 4, or 5 mismatches or no more than 6, 7, 8, 9, or 10 mismatches to a miR in the host cell. In some embodiments, the mismatched nucleotides are contiguous.

[1051] In some embodiments, the mismatched nucleotides are non-contiguous. In some embodiments, the mismatched nucleotides occur outside the seed region-binding sequence of the miR binding site, such as at one or both ends of the miR binding site. In some embodiments, the encoded miR binding site is 100% complimentary to the miR in the host cell.

[1052] In some embodiments, an encoded miR binding site or sequence region is at least about 10 to about 125 nucleotides in length, e.g., at least about 10 to 50 nucleotides, 10 to 100 nucleotides, 50 to 100 nucleotides, 50 to 125 nucleotides, or 100 to 125 nucleotides in length. In some embodiments, an encoded miR binding site or sequence region is at least about 7 to about 28 nucleotides in length, e.g., at least about 8-28 nucleotides, 7-28 nucleotides, 8-18 nucleotides, 12-28 nucleotides, 20-26 nucleotides, 22 nucleotides, 24 nucleotides, or 26 nucleotides in length, and optionally comprises at least one consecutive region (e.g., 7 or 8 nucleotides) complementary (e.g., fully or partially complementary) to the seed sequence of a miRNA (e.g., a miR122, a miR142, a miR183).

[1053] In some embodiments, the encoded miR binding site is complementary (e.g., fully or partially complementary) to a miR expressed in liver or hepatocytes, such as miR122. In some embodiments, the encoded miR binding site or encoded miR binding site series comprises a miR122 binding site sequence.

[1054] In some embodiments, the encoded miR122 binding site comprises the nucleotide sequence of ACAAACACCATTGTCACACTCCA (SEQ ID NO: 4673), or a nucleotide sequence having at least 50%, 55%, 60%, 65%, 70%, 75%, 80%, 85%, 90%, at least 95%, at least 99%, or 100% sequence identity, or having at least one, two, three, four, five, six, or seven modifications but no more than ten modifications to SEQ ID NO: 4673, e.g., wherein the modification can result in a mismatch between the encoded miR binding site and the corresponding miRNA. In some embodiments, the viral genome comprises at least 2, 3, 4, or 5 copies of the encoded miR122 binding site, e.g., an encoded miR122 binding site series, optionally wherein the encoded miR122 binding site series comprises the nucleotide sequence of: ACAAACACCATTGTCACACTCCACACAAACACCATTGTCACACTCCACACAAACACCATTGTCACACTCC A (SEQ ID NO: 4674), or a nucleotide sequence having at least 50%, 55%, 60%, 65%, 70%, 75%, 80%, 85%, 90%, at least 95%, at least 99%, or 100% sequence identity, or having at least one, two, three, four, five, six, or seven modifications but no more than ten modifications to SEQ ID NO: 4674, e.g., wherein the modification can result in a mismatch between the encoded miR binding site and the corresponding miRNA. In some embodiments, at least two of the encoded miR122 binding sites are connected directly, e.g., without a spacer. In other embodiments, at least two of the encoded miR122 binding sites are separated by a spacer, e.g., 1, 2, 3, 4, 5, 6, 7, 8, 9, or 10 nucleotides in length, which is located between two or more consecutive encoded miR122 binding site sequences. In embodiments, the spacer is about 1 to 6 nucleotides or about 5 to 10 nucleotides, e.g., about 7-8, in length. In some embodiments, the spacer coding sequence or reverse complement thereof comprises one or more of (i) GGAT; (ii) CACGTG; (iii) GCATGC, or a repeat of one or more of (i)-(iii). In some embodiments, an encoded miR binding site series comprises at least 3-5 copies (e.g., 4 copies) of a miR122 binding site, with or without a spacer, wherein the spacer is about 1 to 6 nucleotides or about 5 to 10 nucleotides, e.g., about 7-8 nucleotides or about 8 nucleotides, in length. In some embodiments, the spacer comprises the nucleotide sequence of GATAGTTA (SEQ ID NO: 1846), or a nucleotide sequence having at least one, two, or three modifications, but no more than four modifications of GATAGTTA (SEQ ID NO: 1846).

[1055] In some embodiments, the encoded miR binding site is complementary (e.g., fully or partially complementary) to a miR expressed in hematopoietic lineage, including immune cells (e.g., antigen presenting cells or APC, including dendritic cells (DCs), macrophages, and B-lymphocytes). In some embodiments, the encoded miR binding site complementary to a miR expressed in hematopoietic lineage comprises a nucleotide sequence disclosed, e.g., in US 2018/0066279, the contents of which are incorporated by reference herein in its entirety.

[1056] In some embodiments, the encoded miR binding site is complementary (e.g., fully or partially complementary) to a miR expressed in the heart. In embodiments, the encoded miR binding site or encoded miR binding site series comprises a miR-1 binding site. In some embodiments, the encoded miR-1 binding site comprises the nucleotide sequence of ATACATACTTCTTTACATTCCA (SEQ ID NO: 4679), a nucleotide sequence having at least 50%, 55%, 60%, 65%, 70%, 75%, 80%, 85%, 90%, at least 95%, at least 99%, or 100% sequence identity, or having at least one, two, three, four, five, six, or seven modifications, e.g., substitutions (e.g., conservative substitutions), insertions, or deletions, but no more than ten modifications, e.g., substitutions (e.g., conservative substitutions), insertions, or deletions, relative to the nucleotide sequence of SEQ ID NO: 4679, e.g., wherein the modification can result in a mismatch between the encoded miR binding site and the corresponding miRNA. In some embodiments, the genetic element comprises at least 2, 3, 4, or 5 copies of the encoded miR-1 binding site, e.g., an encoded miR-1 binding site series. In some embodiments, the at least 2, 3, 4, or 5 copies (e.g., 2 or 3 copies) of the encoded miR-1 binding site are continuous (e.g., not separated by a spacer) or separated by a spacer. In some embodiments, the spacer is about 1 to 6 nucleotides or about 5 to 10 nucleotides, e.g., about 7-8 nucleotides or about 8 nucleotides, in length. In some embodiments, the spacer sequence comprises one or more of (i) GGAT; (ii) CACGTG; (iii) GCATGC, or a repeat of one or more of (i)-(iii). In some embodiments, the spacer comprises the nucleotide sequence of GATAGTTA (SEQ ID NO: 1846), or a nucleotide sequence having at least one, two, or three modifications, e.g., substitutions (e.g., conservative substitutions), insertions, or deletions, but no more than four modifications, e.g., substitutions (e.g., conservative substitutions), insertions, or deletions, relative to the nucleotide sequence of GATAGTTA (SEQ ID NO: 1846).

[1057] In embodiments, the encoded miR binding site or encoded miR binding site series comprises a miR-142-3p binding site sequence. In some embodiments, the encoded miR-142-3p binding site comprises the nucleotide sequence of TCCATAAAGTAGGAAACACTACA (SEQ ID NO: 4675), a nucleotide sequence having at least 50%, 55%, 60%, 65%, 70%, 75%, 80%, 85%, 90%, at least 95%, at least 99%, or 100% sequence identity, or having at least one, two, three, four, five, six, or seven modifications but no more than ten modifications to SEQ ID NO: 4675, e.g., wherein the modification can result in a mismatch between the encoded miR binding site and the corresponding miRNA. In some embodiments, the viral genome comprises at least 2, 3, 4, or 5 copies of the encoded miR-142-3p binding site, e.g., an encoded miR-142-3p binding site series. In some embodiments, the at least 2, 3, 4, or 5 copies (e.g., 2 or 3 copies) of the encoded miR-142-3p binding site are continuous (e.g., not separated by a spacer) or separated by a spacer. In some embodiments, the spacer is about 1 to 6 nucleotides or about 5 to 10 nucleotides, e.g., about 7-8 nucleotides or about 8 nucleotides, in length. In some embodiments, the spacer sequence comprises one or more of (i) GGAT; (ii) CACGTG; (iii) GCATGC, or a repeat of one or more of (i)-(iii). In some embodiments, the spacer comprises the nucleotide sequence of GATAGTTA (SEQ ID NO: 1846), or a nucleotide sequence having at least one, two, or three modifications, but no more than four modifications of GATAGTTA (SEQ ID NO: 1846).

[1058] In some embodiments, the encoded miR binding site is complementary (e.g., fully complementary or partially complementary) to a miR expressed in a DRG (dorsal root ganglion) neuron, e.g., a miR183, a miR182, and/or miR96 binding site. In some embodiments, the encoded miR binding site is complementary to a miR expressed in expressed in a DRG neuron comprises a nucleotide sequence disclosed, e.g., in WO2020/132455, the contents of which are incorporated by reference herein in its entirety.

[1059] In some embodiments, the encoded miR binding site or encoded miR binding site series comprises a miR183 binding site sequence. In some embodiments, the encoded miR183 binding site comprises the nucleotide sequence of AGTGAATTCTACCAGTGCCATA (SEQ ID NO: 4676), or a nucleotide sequence having at least 50%, 55%, 60%, 65%, 70%, 75%, 80%, 85%, 90%, at least 95%, at least 99%, or 100% sequence identity, or having at least one, two, three, four, five, six, or seven modifications but no more than ten modifications to SEQ ID NO: 4676, e.g., wherein the modification can result in a mismatch between the encoded miR binding site and the corresponding miRNA. In some embodiments, the sequence complementary to the seed sequence corresponds to the double underlined of the encoded miR-183 binding site sequence. In some embodiments, the viral genome comprises at least comprises at least 2, 3, 4, or 5 copies (e.g., at least 2 or 3 copies) of the encoded miR183 binding site, e.g. an encoded miR183 binding site. In some embodiments, the at least 2, 3, 4, or 5 copies (e.g., 2 or 3 copies) of the encoded miR183 binding site are continuous (e.g., not separated by a spacer) or separated by a spacer. In some embodiments, the spacer is about 1 to 6 nucleotides or about 5 to 10 nucleotides, e.g., about 7-8 nucleotides or about 8 nucleotides, in length. In some embodiments, the spacer comprises the nucleotide sequence of GATAGTTA (SEQ ID NO: 1846), or a nucleotide sequence having at least one, two, or three modifications, but no more than four modifications of GATAGTTA (SEQ ID NO: 1846). In some embodiments, the spacer sequence comprises one or more of (i) GGAT; (ii) CACGTG; (iii) GCATGC, or a repeat of one or more of (i)-(iii).

[1060] In some embodiments, the encoded miR binding site or the encoded miR binding site series comprises a miR182 binding site sequence. In some embodiments, the encoded miR182 binding site comprises, the nucleotide sequence of AGTGTGAGTTCTACCATTGCCAAA (SEQ ID NO: 4677), a sequence having at least 50%, 55%, 60%, 65%, 70%, 75%, 80%, 85%, 90%, at least 95%, at least 99%, or 100% sequence identity, or having at least one, two, three, four, five, six, or seven modifications but no more than ten modifications to SEQ ID NO: 4677, e.g., wherein the modification can result in a mismatch between the encoded miR binding site and the corresponding miRNA. In some embodiments, the viral genome comprises at least 2, 3, 4, or 5 copies of the encoded miR182 binding site, e.g., an encoded miR182 binding site series. In some embodiments, the at least 2, 3, 4, or 5 copies (e.g., 2 or 3 copies) of the encoded miR182 binding site are continuous (e.g., not separated by a spacer) or separated by a spacer. In some embodiments, the spacer is about 1 to 6 nucleotides or about 5 to 10 nucleotides, e.g., about 7-8 nucleotides or about 8 nucleotides, in length. In some embodiments, the spacer comprises the nucleotide sequence of GATAGTTA (SEQ ID NO: 1846), or a nucleotide sequence having at least one, two, or three modifications, but no more than four modifications of GATAGTTA (SEQ ID NO: 1846). In some embodiments, the spacer sequence comprises one or more of (i) GGAT; (ii) CACGTG; (iii) GCATGC, or a repeat of one or more of (i)-(iii).

[1061] In certain embodiments, the encoded miR binding site or the encoded miR binding site series comprises a miR96 binding site sequence. In some embodiments, the encoded miR96 binding site comprises the nucleotide sequence of AGCAAAAATGTGCTAGTGCCAAA (SEQ ID NO: 4678), a sequence having at least 50%, 55%, 60%, 65%, 70%, 75%, 80%, 85%, 90%, at least 95%, at least 99%, or 100% sequence identity, or having at least one, two, three, four, five, six, or seven modifications but no more than ten modifications to SEQ ID NO: 4678, e.g., wherein the modification can result in a mismatch between the encoded miR binding site and the corresponding miRNA. In some embodiments, the viral genome comprises at least 2, 3, 4, or 5 copies of the encoded miR96 binding site, e.g., an encoded miR96 binding site series. In some embodiments, the at least 2, 3, 4, or 5 copies (e.g., 2 or 3 copies) of the encoded miR96 binding site are continuous (e.g., not separated by a spacer) or separated by a spacer. In some embodiments, the spacer is about 1 to 6 nucleotides or about 5 to 10 nucleotides, e.g., about 7-8 nucleotides or about 8 nucleotides, in length. In some embodiments, the spacer comprises the nucleotide sequence of GATAGTTA (SEQ ID NO: 1846), or a nucleotide sequence having at least one, two, or three modifications, but no more than four modifications of GATAGTTA (SEQ ID NO: 1846). In some embodiments, the spacer sequence comprises one or more of (i) GGAT; (ii) CACGTG; (iii) GCATGC, or a repeat of one or more of (i)-(iii).

[1062] In some embodiments, the encoded miR binding site series comprises a miR122 binding site, a miR142 binding site, a miR183 binding site, a miR182 binding site, a miR 96 binding site, a mir-1 binding site, or a combination thereof. In some embodiments, the encoded miR binding site series comprises at least 2, 3, 4, or 5 copies of a miR122 binding site, a miR142 binding site, a miR183 binding site, a miR182 binding site, a miR 96 binding site, or a combination thereof. In some embodiments, at least two of the encoded miR binding sites are connected directly, e.g., without a spacer. In other embodiments, at least two of the encoded miR binding sites are separated by a spacer, e.g., 1, 2, 3, 4, 5, 6, 7, 8, 9, or 10 nucleotides in length, which is located between two or more consecutive encoded miR binding site sequences. In embodiments, the spacer is at least about 5 to 10 nucleotides, e.g., about 7-8 nucleotides or about 8 nucleotides, in length. In some embodiments, the spacer coding sequence or reverse complement thereof comprises one or more of (i) GGAT; (ii) CACGTG; (iii) GCATGC, or a repeat of one or more of (i)-(iii). In some embodiments, the spacer comprises the nucleotide sequence of GATAGTTA (SEQ ID NO: 1846), or a nucleotide sequence having at least one, two, or three modifications, but no more than four modifications of GATAGTTA (SEQ ID NO: 1846).

[1063] In some embodiments, an encoded miR binding site series comprises at least 2-5 copies (e.g., 2 or 3 copies) of a combination of at least two, three, four, five, or all of a miR122 binding site, a miR142 binding site, a miR183 binding site, a miR182 binding site, a miR96 binding site, and/or a mir-1 binding site, wherein each of the miR binding sites within the series are continuous (e.g., not separated by a spacer) or are separated by a spacer. In some embodiments, the spacer is about 1 to 6 nucleotides or about 5 to 10 nucleotides, e.g., about 7-8 nucleotides or about 8 nucleotides, in length. In some embodiments, the spacer sequence comprises one or more of (i) GGAT; (ii) CACGTG; (iii) GCATGC, or a repeat of one or more of (i)-(iii). In some embodiments, the spacer comprises the nucleotide sequence of GATAGTTA (SEQ ID NO: 1846), or a nucleotide sequence having at least one, two, or three modifications, but no more than four modifications of GATAGTTA (SEQ ID NO: 1846).

### Genetic Element Component: Polyadenylation Sequence

[1064] In some embodiments, the genetic element of the AAV particles of the present disclosure comprise a polyadenylation sequence. In some embodiments, the genetic element comprises a polyadenylation (referred to herein as poly A, polyA, or poly-A) sequence between the 3′ end of the transgene encoding the payload and the 5′ end of the 3′ITR. In some embodiments, the genetic element comprises two or more polyA sequences. In some embodiments, the genetic element does not comprise a polyA sequence.

[1065] In some embodiments, the genetic element comprises a rabbit globin polyA signal region. In some embodiments, the rabbit globin polyA signal region comprises the nucleotide sequence of SEQ ID NO: 2122, or a nucleotide sequence with at least 70%, 75%, 80%, 85%, 90%, 95%, or 99% sequence identity thereto.

TABLE 8
PolyA Signal Sequence Regions

| Sequence Region Name | Sequence Length | SEQ ID NO |
|---|---|---|
| PolyA1 | 127 | 2122 |
| PolyA2 | 477 | 2123 |
| PolyA3 | 552 | 2124 |

[1066] In some embodiments, the polyA signal region is provided in Table 8. In some embodiments, the genetic element comprises a polyA sequence region chosen from polyA1, polyA2, polyA3, or a functional variant thereof. In some embodiments, the genetic element comprises the polyA signal region of PolyA1 or a functional variant thereof. In some embodiments, the polyA signal region comprises the nucleotide sequence of any one of SEQ ID NOs: 2122-2124, or a sequence with at least 70%, 75%, 80%, 85%, 90%, 95%, or 99% sequence identity thereto. In some embodiments, the polyA signal region comprises the nucleotide sequence of SEQ ID NO: 2122, or a nucleotide sequence with at least 70%, 75%, 80%, 85%, 90%, 95%, or 99% sequence identity thereto.

[1067] In some embodiments, the polyA signal region comprises a length of about 100-600 nucleotides, e.g., about 100-500 nucleotides, about 100-400 nucleotides, about 100-300 nucleotides, about 100-200 nucleotides, about 200-600 nucleotides, about 200-500 nucleotides, about 200-400 nucleotides, about 200-300 nucleotides, about 300-600 nucleotides, about 300-500 nucleotides, about 300-400 nucleotides, about 400-600 nucleotides, about 400-500 nucleotides, or about 500-600 nucleotides. In some embodiments, the polyA signal region comprises a length of about 100 to 150 nucleotides, e.g., about 127 nucleotides. In some embodiments, the polyA signal region comprises a length of about 450 to 500 nucleotides, e.g., about 477 nucleotides. In some embodiments, the polyA signal region comprises a length of about 520 to about 560 nucleotides, e.g., about 552 nucleotides. In some embodiments, the polyA signal region comprises a length of about 127 nucleotides.

### Genetic Element Component: Introns

[1068] In some embodiments, the genetic element comprises at least one element to enhance the expression of a transgene encoding a payload. In some embodiments, an element that enhances expression of a transgene comprises an introns or functional variant thereof. In some embodiments, the genetic element comprises an intron or functional variant thereof. In some embodiments, the genetic element comprises at least two intron regions, e.g., at least 2 intron regions, at least 3 intron regions, at least 4 intron regions, or 5 or more intron regions.

[1069] In some embodiments, the genetic element comprises an intron chosen from a MVM intron (67-97 bps), an FIX truncated intron 1 (300 bps), an β-globin SD/immunoglobulin heavy chain splice acceptor intron (250 bps), an adenovirus splice donor/immunoglobin splice acceptor intron (500 bps), SV40 late splice donor/splice acceptor intron (19S/16S) (180 bps), or a hybrid adenovirus splice donor/IgG splice acceptor intron (230 bps). In some embodiments, the genetic element comprises a human beta-globin intron region. In some embodiments, the human beta-globin intron region comprises the nucleotide sequence of SEQ ID NO: 2097 or 2240, or a nucleotide sequence with at least 70%, 75%, 80%, 85%, 90%, 95% or 99% sequence identity to SEQ ID NO: 2097 or 2240. In some embodiments, the genetic element comprises an ie intron 1 region. In some embodiments, the ie intron 1 region comprises the nucleotide sequence of SEQ ID NO: 2095, or a nucleotide sequence with at least 70%, 75%, 80%, 85%, 90%, 95% or 99% sequence identity thereto. In some embodiments, the genetic element comprises a first human beta-globin intron region, e.g., a first human beta-globin intron region comprising SEQ ID NO: 2240, and a second human beta-globin intron region, e.g., a second human beta-globin intron region comprising SEQ ID NO: 2097. In some embodiments, an ie intron 1 region, e.g., an ie intron 1 region comprising SEQ ID NO: 2095, and a human beta-globin intron region, e.g., a human beta-globin intron region comprising SEQ ID NO: 2240.

[1070] In some embodiments, the genetic element comprises an intron region provided in Table 9. In some embodiments, the genetic element comprises an intron region chosen from any one of Intron1 to Intron15, or a functional variant thereof. In some embodiments, the genetic element comprises Intron1. In some embodiments, the genetic element comprises Intron3. In some embodiments, the genetic element comprises Intron12. In some embodiments, the genetic element comprises Intron 12 and Intron3. In some embodiments, the genetic element comprises Intron1 and Intron12. In some embodiments, the genetic element comprises an intron region of any one of SEQ ID NOs: 2095-2105, 2240, or 2256-2258, or a sequence with at least 70%, 75%, 80%, 85%, 90%, 95%, or 99% sequence identity thereto. In some embodiments, the intron region comprises the nucleotide sequence of SEQ ID NO: 2095, or a nucleotide sequence with at least 70%, 75%, 80%, 85%, 90%, 95%, or 99% sequence identity thereto. In some embodiments, the intron region comprises the nucleotide sequence of SEQ ID NO: 2097, or a nucleotide sequence with at least 70%, 75%, 80%, 85%, 90%, 95%, or 99% sequence identity thereto. In some embodiments, the intron region comprises the nucleotide sequence of SEQ ID NO: 2040, or a nucleotide sequence with at least 70%, 75%, 80%, 85%, 90%, 95%, or 99% sequence identity thereto.

TABLE 9
Intron Sequence Regions

| Sequence Region Name | Sequence Length | SEQ ID NO |
|---|---|---|
| Intron1 | 32 | 2095 |
| Intron2 | 15 | 2096 |
| Intron3 | 347 | 2097 |
| Intron4 | 168 | 2098 |
| Intron5 | 73 | 2099 |
| Intron6 | 73 | 2100 |
| Intron7 | 73 | 2101 |
| Intron8 | 53 | 2102 |
| Intron9 | 172 | 2103 |
| Intron10 | 1074 | 2104 |
| Intron11 | 41 | 2105 |
| Intron12 | 566 | 2240 |
| Intron13 | 491 | 2256 |
| Intron14 | 387 | 2257 |
| Intron15 | 292 | 2258 |

[1071] In some embodiments, the genetic element comprises an intron region comprising about 10 nucleotides to about 1200 nucleotides in length. In some embodiments, the intron region comprises about 10-100 nucleotides in length, e.g., about 10-90 nucleotides, about 10-80 nucleotides, about 10-70 nucleotides, about 10-60 nucleotides, about 10-50 nucleotides, about 10-40 nucleotides, about 10-30 nucleotides, about 10-20 nucleotides, about 20-100 nucleotides, about 20-90 nucleotides, about 20-80 nucleotides, about 20-70 nucleotides, about 20-60 nucleotides, about 20-50 nucleotides, about 20-40 nucleotides, about 20-30 nucleotides, about 30-100 nucleotides, about 30-90 nucleotides, about 30-80 nucleotides, about 30-70 nucleotides, about 30-60 nucleotides, about 30-50 nucleotides, about 30-40 nucleotides, about 40-100 nucleotides, about 40-90 nucleotides, about 40-80 nucleotides, about 40-70 nucleotides, about 40-60 nucleotides, about 40-50 nucleotides, about 50-100, about 50-90 nucleotides, about 50-80 nucleotides, about 50-70 nucleotides, about 50-60 nucleotides, about 60-100 nucleotides, about 60-90 nucleotides, about 60-80 nucleotides, about 60-70 nucleotides, about 70-100 nucleotides, about 70-90 nucleotides, about 70-80 nucleotides, about 80-100 nucleotides, about 80-90 nucleotides, or about 90-100 nucleotides in length. In some embodiments, the intron region comprises about 100-600 nucleotides in length, e.g., about 100-500 nucleotides, about 100-400 nucleotides, about 100-300 nucleotides, about 100-200 nucleotides, about 200-600 nucleotides, about 200-500 nucleotides, about 200-400 nucleotides, about 200-300 nucleotides, about 300-600 nucleotides, about 300-500 nucleotides, about 300-400 nucleotides, about 400-600 nucleotides, about 400-500 nucleotides, or about 500-600 nucleotides in length. In some embodiments, the intron region comprises about 900-1200 nucleotides in length, e.g., about 900-1100 nucleotides, about 900-1000 nucleotides, about 1000-1200 nucleotides, about 1000-1100 nucleotides, or about 1100-1200 nucleotides.

[1072] In some embodiments, the intron region comprises about 20 to about 40 nucleotides in length, e.g., about 32 nucleotides. In some embodiments, the intron region comprises about 340 to about 360 nucleotides in length, e.g., about 347 nucleotides. In some embodiments, the intron region comprises about 550 to about 570 nucleotides in length, e.g., about 566 nucleotides.

### Genetic Element Component: Exons

[1073] In some embodiments, the genetic element comprises an exon sequence region. In some embodiments, the genetic element comprises at least 2, at least 3, at least 4, or at least 5 exon regions. In some embodiments, the genetic element comprises 2 exon regions.

[1074] In some embodiments, the genetic element comprises an ie exon 1 region. In some embodiments, the ie exon 1 region comprises the nucleotide sequence of SEQ ID NO: 2090, or a nucleotide sequence with at least 70%, 75%, 80%, 85%, 90%, 95%, or 99% sequence identity thereto. In some embodiments, the genetic element comprises a human beta-globin exon region. In some embodiments, the human beta-globin exon region comprises a nucleotide sequence of SEQ ID NO: 2093 or a sequence with at least 70%, 75%, 80%, 85%, 90%, 95%, or 99% sequence identity thereto. In some embodiments, the genetic element comprises an ie exon 1 region and a human beta-globin exon region.

[1075] In some embodiments, the exon region is provided in Table 10. In some embodiments, the genetic element comprises an exon region chosen from Exon1, Exon2, Exon3, Exon4, or a function variant thereof. In some embodiments, the genetic element comprises Exon1. In some embodiments, the genetic element comprises Exon4. In some embodiments, the genetic element comprises Exon1 and Exon4. In some embodiments, the exon region comprises the nucleotide sequence of any one of SEQ ID NOs: 2090-2094, or a nucleotide sequence with at least 70%, 75%, 80%, 85%, 90%, 95%, or 99% sequence identity thereto. In some embodiments, the exon region comprises the nucleotide sequence of SEQ ID NO: 2090, or a nucleotide sequence with at least 70%, 75%, 80%, 85%, 90%, 95%, or 99% sequence identity thereto. In some embodiments, the exon region comprises the nucleotide sequence of SEQ ID NO: 2093, or a nucleotide sequence with at least 70%, 75%, 80%, 85%, 90%, 95%, or 99% sequence identity thereto.

TABLE 10
Exon Sequence Regions

| Sequence Region Name | Sequence Length | SEQ ID NO |
|---|---|---|
| Exon1 | 134 | 2090 |
| Exon2 | 102 | 2091 |
| Exon3 | 59 | 2092 |
| Exon4 | 53 | 2093 |
| Exon5 | 54 | 2094 |

[1076] In some embodiments, the exon comprises about 50-150 nucleotides in length, e.g., about 50-140 nucleotides, about 50-130 nucleotides, about 50-120 nucleotides, about 50-110 nucleotides, about 50-100 nucleotides, about 50-90 nucleotides, about 50-80 nucleotides, about 50-80 nucleotides, about 50-70 nucleotides, about 50-60 nucleotides, about 60-150 nucleotides, about 60-140 nucleotides, about 60-130 nucleotides, about 60-120 nucleotides, about 60-110 nucleotides, about 60-100 nucleotides, about 60-90 nucleotides, about 60-80 nucleotides, about 60-80 nucleotides, about 60-70 nucleotides, about 70-150 nucleotides, about 70-140 nucleotides, about 70-130 nucleotides, about 70-120 nucleotides, about 70-110 nucleotides, about 70-100 nucleotides, about 70-90 nucleotides, about 70-80 nucleotides, about 80-150 nucleotides, about 80-140 nucleotides, about 80-130 nucleotides, about 80-120 nucleotides, about 80-110 nucleotides, about 80-100 nucleotides, about 80-90 nucleotides, about 90-150 nucleotides, about 90-140 nucleotides, about 90-130 nucleotides, about 90-120 nucleotides, about 90-110 nucleotides, about 90-100 nucleotides, about 100-150 nucleotides, about 100-140 nucleotides, about 100-130 nucleotides, about 100-120 nucleotides, about 100-110 nucleotides, about 110-150 nucleotides, about 110-140 nucleotides, about 110-130 nucleotides, about 110-120 nucleotides, about 120-150 nucleotides, about 120-140 nucleotides, about 120-130 nucleotides, about 130-150 nucleotides, about 130-140 nucleotides, or about 140-150 nucleotides. In some embodiments, the exon region comprises about 120 nucleotides to about 140 nucleotides in length, e.g., about 134 nucleotides. In some embodiments, the exon region comprises about 40 nucleotides to about 60 nucleotides in length, e.g., about 53 nucleotides.

### Payloads

[1077] In some embodiments, an AAV particle, e.g., an AAV particle for the vectorized delivery of an antibody molecule described herein (e.g., an anti-HER2 antibody molecule), comprises a payload. In some embodiments, an AAV particle described herein comprises at least two, at least three, or at least 4 payloads. In some embodiments, an AAV particle, e.g., an AAV particle for the vectorized delivery of an antibody molecule described herein (e.g., an anti-HER2 antibody molecule), comprises a nucleic acid comprising a transgene encoding a payload. In some embodiments, the payload comprises an antibody molecule, e.g., an anti-HER2 antibody molecule. In some embodiments, the payload comprises a secreted protein, an intracellular protein, an extracellular protein, a membrane protein, a structural protein, a functional protein, or a protein, e.g., a mammalian protein, involved in immune system regulation. In some embodiments, a nucleic acid comprises a transgene encoding an antibody molecule that binds to HER2.

[1078] In some embodiments, the nucleic acid molecule comprising the transgene encoding a payload further comprises a nucleotide sequence encoding a linker (e.g., a linker connecting a heavy chain variable region (VH) and a light chain variable region (VL) of an antibody molecule) and/or a cleavage site. In some embodiments, the nucleic acid molecule comprising the transgene encoding a payload further comprises a nucleotide sequence encoding a signal sequence.

[1079] In some embodiments, the nucleic acid encoding the payload may be constructed, e.g., organized, similar to, e.g., mirroring, the natural organization of an mRNA. In some embodiments, the nucleic acid encoding the payload may comprise coding and/or non-coding nucleotide sequences. In some embodiments, the nucleic acid encoding the payload may encode a coding and/or a non-coding RNA.

[1080] In such an embodiment, the nucleic acid comprising a transgene encoding a payload (e.g., an antibody molecule) is replicated and packaged into an AAV particle. In some embodiments, following transduction of a cell with an AAV particle comprising a payload (e.g., an antibody molecule), the cell expresses the payload. In some embodiments, the payload, e.g., antibody molecule, produced by a cell transduced by an AAV particle comprising the payload, is secreted from the cell.

### Antibody Molecules

[1081] In some embodiments, the nucleic acid comprises a transgene encoding an antibody molecule. In some embodiments, the encoded antibody molecule binds to HER2. For example, the encoded antibody molecule binds to an epitope, e.g. a linear or conformational epitope on HER2.

[1082] In some embodiments, the encoded antibody molecule comprises at least one immunoglobulin variable domain sequence. An antibody molecule may include, for example, full-length, mature antibodies and antigen-binding fragments of an antibody. For example, an antibody molecule can include a heavy (H) chain variable domain sequence (abbreviated herein as VH), and a light (L) chain variable domain sequence (abbreviated herein as VL). In another example, an antibody molecule includes two heavy (H) chain variable domain sequences and two light (L) chain variable domain sequence, thereby forming two antigen binding sites, such as Fab, Fab′, F(ab′)2, Fc, Fd, Fd′, Fv, single chain antibodies (scFv for example), single variable domain antibodies, diabodies (Dab) (bivalent and bispecific), and chimeric (e.g., humanized) antibodies, which may be produced by the modification of whole antibodies or those synthesized de novo using recombinant DNA technologies. These functional antibody fragments retain the ability to selectively bind with their respective antigen or receptor. Antibodies and antibody fragments can be from any class of antibodies including, but not limited to, IgG, IgA, IgM, IgD, and IgE, and from any subclass (e.g., IgG1, IgG2, IgG3, and IgG4) of antibodies. The encoded antibodies of the present disclosure can be monoclonal or polyclonal. The encoded antibody can also be a human, humanized, CDR-grafted, or in vitro generated antibody. The encoded antibody can have a heavy chain constant region chosen from, e.g., IgG1, IgG2, IgG3, or IgG4. The encoded antibody can also have a light chain chosen from, e.g., kappa or lambda.

[1083] Examples of antigen-binding fragments include: (i) a Fab fragment, a monovalent fragment consisting of the VL, VH, CL and CH1 domains; (ii) a F(ab′)2 fragment, a bivalent fragment comprising two Fab fragments linked by a disulfide bridge at the hinge region; (iii) a Fd fragment consisting of the VH and CH1 domains; (iv) a Fv fragment consisting of the VL and VH domains of a single arm of an antibody, (v) a diabody (dAb) fragment, which consists of a VH domain; (vi) a camelid or camelized variable domain; (vii) a single chain Fv (scFv), see e.g., Bird et al. (1988) Science 242:423-426; and Huston et al. (1988) Proc. Natl. Acad. Sci. USA 85:5879-5883); and (viii) a single domain antibody. These antibody fragments are obtained using conventional techniques known to those with skill in the art, and the fragments are screened for utility in the same manner as are intact antibodies. An antibody fragment can also be incorporated into single domain antibodies, maxibodies, minibodies, nanobodies, intrabodies, diabodies, triabodies, tetrabodies, v-NAR and bis-scFv (see, for example, Hollinger and Hudson, Nature Biotechnology 23:1126-1136, 2005).

[1084] In some embodiments, an encoded antibody molecule of the present disclosure comprises a functional fragment or variant thereof. Constant regions of the antibodies can be altered, e.g., mutated, to modify the properties of the antibody (e.g., to increase or decrease one or more of: Fc receptor binding, antibody glycosylation, the number of cysteine residues, effector cell function, or complement function).

[1085] In some embodiments, the encoded antibody molecule can be single domain antibody. Single domain antibodies can include antibodies whose complementary determining regions are part of a single domain polypeptide. Examples include, but are not limited to, heavy chain antibodies, antibodies naturally devoid of light chains, single domain antibodies derived from conventional 4-chain antibodies, engineered antibodies and single domain scaffolds other than those derived from antibodies. Single domain antibodies may be any of the art, or any future single domain antibodies. Single domain antibodies may be derived from any species including, but not limited to mouse, human, camel, llama, fish, shark, goat, rabbit, and bovine. According to another aspect of the invention, a single domain antibody is a naturally occurring single domain antibody known as heavy chain antibody devoid of light chains. Such single domain antibodies are disclosed in WO 9404678, for example. For clarity reasons, this variable domain derived from a heavy chain antibody naturally devoid of light chain is known herein as a VHH or nanobody to distinguish it from the conventional VH of four chain immunoglobulins. Such a VHH molecule can be derived from antibodies raised in Camelidae species, for example in camel, llama, dromedary, alpaca and guanaco. Other species besides Camelidae may produce heavy chain antibodies naturally devoid of light chain; such VHHs are within the scope of the invention.

[1086] In some embodiments, the VH and VL regions of the encoded antibody molecule can be subdivided into regions of hypervariability, termed complementarity determining regions (CDR), interspersed with regions that are more conserved, termed framework regions (FR or FW).

[1087] The extent of the framework region and CDRs has been precisely defined by a number of methods (see, Kabat, E. A., et al. (1991) Sequences of Proteins of Immunological Interest, Fifth Edition, U.S. Department of Health and Human Services, NIH Publication No. 91-3242; Chothia, C. et al. (1987) J. Mol. Biol. 196:901-917; and the AbM definition used by Oxford Molecular's AbM antibody modeling software. See, generally, e.g., Protein Sequence and Structure Analysis of Antibody Variable Domains. In: Antibody Engineering Lab Manual (Ed.: Duebel, S. and Kontermann, R., Springer-Verlag, Heidelberg).

[1088] Complementarity determining region, and CDR, as used herein refer to the sequences of amino acids within antibody variable regions which confer antigen specificity and binding affinity. In general, there are three CDRs in each heavy chain variable region (HCDR1, HCDR2, HCDR3) and three CDRs in each light chain variable region (LCDR1, LCDR2, LCDR3).

[1089] The precise amino acid sequence boundaries of a given CDR can be determined using any of a number of well-known schemes, including those described by Kabat et al. (1991), “Sequences of Proteins of Immunological Interest,” 5th Ed. Public Health Service, National Institutes of Health, Bethesda, MD (Kabat numbering scheme), Al-Lazikani et al., (1997) JMB 273,927-948 (Chothia numbering scheme). In some embodiments, the CDRs defined according the Chothia number scheme are also sometimes referred to as hypervariable loops.

[1090] For example, under Kabat, the CDR amino acid residues in the heavy chain variable domain (VH) are numbered 31-35 (HCDR1), 50-65 (HCDR2), and 95-102 (HCDR3); and the CDR amino acid residues in the light chain variable domain (VL) are numbered 24-34 (LCDR1), 50-56 (LCDR2), and 89-97 (LCDR3). Under Chothia the CDR amino acids in the VH are numbered 26-32 (HCDR1), 52-56 (HCDR2), and 95-102 (HCDR3); and the amino acid residues in VL are numbered 26-32 (LCDR1), 50-52 (LCDR2), and 91-96 (LCDR3). By combining the CDR definitions of both Kabat and Chothia, the CDRs consist of amino acid residues 26-35 (HCDR1), 50-65 (HCDR2), and 95-102 (HCDR3) in human VH and amino acid residues 24-34 (LCDR1), 50-56 (LCDR2), and 89-97 (LCDR3) in human VL.

[1091] In some embodiments, the antigen binding domain of the encoded antibody molecules of the present disclosure is the part of the encoded antibody molecule that comprises determinants that form an interface that binds to the HER2 protein or an epitope thereof. With respect to proteins (or protein mimetics), the antigen-binding site typically includes one or more loops (of at least four amino acids or amino acid mimics) that form an interface that binds to the HER2 protein. Typically, the antigen-binding site of an antibody molecule includes at least one or two CDRs and/or hypervariable loops, or more typically at least three, four, five or six CDRs and/or hypervariable loops.

[1092] The encoded antibody molecule can be a monoclonal antibody molecule or a polyclonal antibody molecule. In some embodiments, a monoclonal antibody or a monoclonal antibody composition refer to a preparation of antibody molecules of single molecular composition. A monoclonal antibody composition displays a single binding specificity and affinity for a particular epitope. A monoclonal antibody can be made by hybridoma technology or by methods that do not use hybridoma technology (e.g., recombinant methods).

[1093] In some embodiments, the sequences of an antibody molecule to be included in an encoded payload described herein can be generated by recombinant libraries, e.g., generated by phage display or by combinatorial methods.

[1094] Phage display and combinatorial methods for generating antibodies are known in the art (as described in, e.g., Ladner et al. U.S. Pat. No. 5,223,409; Kang et al. International Publication No. WO 92/18619; Dower et al. International Publication No. WO 91/17271; Winter et al. International Publication WO 92/20791; Markland et al. International Publication No. WO 92/15679; Breitling et al. International Publication WO 93/01288; McCafferty et al. International Publication No. WO 92/01047; Garrard et al. International Publication No. WO 92/09690; Ladner et al. International Publication No. WO 90/02809; Fuchs et al. (1991) Bio/Technology 9:1370-1372; Hay et al. (1992) Hum Antibody Hybridomas 3:81-85; Huse et al. (1989) Science 246:1275-1281; Griffths et al. (1993) EMBO J 12:725-734; Hawkins et al. (1992) J Mol Biol 226:889-896; Clackson et al. (1991) Nature 352:624-628; Gram et al. (1992) PNAS 89:3576-3580; Garrad et al. (1991) Bio/Technology 9:1373-1377; Hoogenboom et al. (1991) Nuc Acid Res 19:4133-4137; and Barbas et al. (1991) PNAS 88:7978-7982, the contents of all of which are incorporated by reference herein).

[1095] In some embodiments, the sequences of an antibody molecule to be included in an encoded payload described herein can be generated from an antibody molecule that is designed using the VERSITOPE™ Antibody Generation or BIOATLA®, e.g., in US20130303399, US20130281303, WO2012009026, WO2016033331, WO2016036916, and U.S. Pat. No. 8,859,467, the contents of which are herein incorporated by reference in their entirety. In some embodiments, the sequences of an antibody molecule to be included in an encoded payload described herein can be derived from an antibody molecule that is designed and/or produced using the methods described, e.g., in WO2017189959 and WO2020223276, the contents of which are herein incorporated by reference in their entirety.

[1096] In some embodiments, the encoded antibody comprises an amino acid sequence of a fully human antibody (e.g., an antibody made in a mouse which has been genetically engineered to produce an antibody from a human immunoglobulin sequence), or a non-human antibody, e.g., a rodent (mouse or rat), goat, primate (e.g., monkey), camel antibody. Preferably, the non-human antibody is a rodent (mouse or rat antibody). Methods of producing rodent antibodies are known in the art.

[1097] Human monoclonal antibodies can be generated using transgenic mice carrying the human immunoglobulin genes rather than the mouse system. Splenocytes from these transgenic mice immunized with the antigen of interest are used to produce hybridomas that secrete human mAbs with specific affinities for epitopes from a human protein (see, e.g., Wood et al. International Application WO 91/00906, Kucherlapati et al. PCT publication WO 91/10741; Lonberg et al. International Application WO 92/03918; Kay et al. International Application 92/03917; Lonberg, N. et al. 1994 Nature 368:856-859; Green, L. L. et al. 1994 Nature Genet. 7:13-21; Morrison, S. L. et al. 1994 Proc. Natl. Acad. Sci. USA 81:6851-6855; Bruggeman et al. 1993 Year Immunol 7:33-40; Tuaillon et al. 1993 PNAS 90:3720-3724; Bruggeman et al. 1991 Eur J Immunol 21:1323-1326).

[1098] In some embodiments, the encoded antibody comprises an amino acid sequence of an antibody in which the variable region, or a portion thereof, e.g., the CDRs, are generated in a non-human organism, e.g., a rat or mouse. Encoded antibody molecules comprising chimeric, CDR-grafted, and humanized antibodies are within the invention. Encoded antibody molecules comprising the sequences of antibodies generated in a non-human organism, e.g., a rat or mouse, and then modified, e.g., in the variable framework or constant region, to decrease antigenicity in a human are within the invention.

[1099] An effectively human protein is a protein that does substantially not evoke a neutralizing antibody response, e.g., the human anti-murine antibody (HAMA) response. HAMA can be problematic in a number of circumstances, e.g., if the antibody molecule is administered repeatedly, e.g., in treatment of a chronic or recurrent disease condition. A HAMA response can make repeated antibody administration potentially ineffective because of an increased antibody clearance from the serum (see, e.g., Saleh et al., Cancer Immunol. Immunother., 32:180-190 (1990)) and also because of potential allergic reactions (see, e.g., LoBuglio et al., Hybridoma, 5:5117-5123 (1986)).

[1100] Chimeric antibodies can be produced by recombinant DNA techniques known in the art (see Robinson et al., International Patent Publication PCT/US86/02269; Akira, et al., European Patent Application 184,187; Taniguchi, M., European Patent Application 171,496; Morrison et al., European Patent Application 173,494; Neuberger et al., International Application WO 86/01533; Cabilly et al. U.S. Pat. No. 4,816,567; Cabilly et al., European Patent Application 125,023; Better et al. (1988 Science 240:1041-1043); Liu et al. (1987) PNAS 84:3439-3443; Liu et al., 1987, J. Immunol. 139:3521-3526; Sun et al. (1987) PNAS 84:214-218; Nishimura et al., 1987, Canc. Res. 47:999-1005; Wood et al. (1985) Nature 314:446-449; and Shaw et al., 1988, J. Natl Cancer Inst. 80:1553-1559).

[1101] A humanized or CDR-grafted antibody will have at least one or two but generally all three recipient CDRs (of heavy and or light immuoglobulin chains) replaced with a donor CDR. The antibody may be replaced with at least a portion of a non-human CDR or only some of the CDRs may be replaced with non-human CDRs. It is only necessary to replace the number of CDRs required for binding of the humanized antibody to PD-1. Preferably, the donor will be a rodent antibody, e.g., a rat or mouse antibody, and the recipient will be a human framework or a human consensus framework. Typically, the immunoglobulin providing the CDRs is called the donor and the immunoglobulin providing the framework is called the acceptor. In some embodiments, the donor immunoglobulin is a non-human (e.g., rodent). The acceptor framework is a naturally-occurring (e.g., a human) framework or a consensus framework, or a sequence about 85% or higher, preferably 90%, 95%, 99% or higher identical thereto.

[1102] In some embodiments, the consensus sequence refers to the sequence formed from the most frequently occurring amino acids (or nucleotides) in a family of related sequences (See e.g., Winnaker, From Genes to Clones (Verlagsgesellschaft, Weinheim, Germany 1987). In a family of proteins, each position in the consensus sequence is occupied by the amino acid occurring most frequently at that position in the family. If two amino acids occur equally frequently, either can be included in the consensus sequence. In some embodiments, the consensus framework refers to the framework region in the consensus immunoglobulin sequence.

[1103] An antibody can be humanized by methods known in the art (see e.g., Morrison, S. L., 1985, Science 229:1202-1207, by Oi et al., 1986, BioTechniques 4:214, and by Queen et al. U.S. Pat. Nos. 5,585,089, 5,693,761 and 5,693,762, the contents of all of which are hereby incorporated by reference).

[1104] Humanized or CDR-grafted antibodies can be produced by CDR-grafting or CDR substitution, wherein one, two, or all CDRs of an immunoglobulin chain can be replaced. See e.g., U.S. Pat. No. 5,225,539; Jones et al. 1986 Nature 321:552-525; Verhoeyan et al. 1988 Science 239:1534; Beidler et al. 1988 J. Immunol. 141:4053-4060; Winter U.S. Pat. No. 5,225,539, the contents of all of which are hereby expressly incorporated by reference. Winter describes a CDR-grafting method which may be used to prepare the humanized antibodies of the present invention (UK Patent Application GB 2188638A, filed on Mar. 26, 1987; Winter U.S. Pat. No. 5,225,539), the contents of which is expressly incorporated by reference.

[1105] In some embodiments, the encoded antibodies comprise the sequences of humanized antibodies in which specific amino acids have been substituted, deleted or added. Criteria for selecting amino acids from the donor are described in U.S. Pat. No. 5,585,089, e.g., columns 12-16 of U.S. Pat. No. 5,585,089, e.g., columns 12-16 of U.S. Pat. No. 5,585,089, the contents of which are hereby incorporated by reference. Other techniques for humanizing antibodies are described in Padlan et al. EP 519596 A1, published on Dec. 23, 1992.

[1106] In some embodiments, the encoded antibody molecule can be a single chain antibody. A single-chain antibody (scFV) may be engineered (see, for example, Colcher, D. et al. (1999) Ann N Y Acad Sci 880:263-80; and Reiter, Y. (1996) Clin Cancer Res 2:245-52). The single chain antibody can be dimerized or multimerized to generate multivalent antibodies having specificities for different epitopes of the same target protein.

[1107] In yet other embodiments, the antibody molecule has a heavy chain constant region chosen from, e.g., the heavy chain constant regions of IgG1, IgG2, IgG3, IgG4, IgM, IgA1, IgA2, IgD, and IgE; particularly, chosen from, e.g., the (e.g., human) heavy chain constant regions of IgG1, IgG2, IgG3, and IgG4. In another embodiment, the antibody molecule has a light chain constant region chosen from, e.g., the (e.g., human) light chain constant regions of kappa or lambda. The constant region can be altered, e.g., mutated, to modify the properties of the antibody (e.g., to increase or decrease one or more of: Fc receptor binding, antibody glycosylation, the number of cysteine residues, effector cell function, and/or complement function). In some embodiments the antibody has: effector function; and can fix complement. In other embodiments the antibody does not recruit effector cells; or fix complement. In other embodiments, the antibody has reduced or no ability to bind an Fc receptor. For example, it is an isotype or subtype, fragment or other mutant, which does not support binding to an Fc receptor, e.g., it has a mutagenized or deleted Fc receptor binding region.

[1108] Methods for altering an antibody constant region are known in the art. Antibodies with altered function, e.g. altered affinity for an effector ligand, such as FcR on a cell, or the C1 component of complement can be produced by replacing at least one amino acid residue in the constant portion of the antibody with a different residue (see e.g., EP 388,151 A1, U.S. Pat. Nos. 5,624,821 and 5,648,260, the contents of all of which are hereby incorporated by reference). Similar type of alterations could be described which if applied to the murine, or other species immunoglobulin would reduce or eliminate these functions.

[1109] An antibody molecule can be derivatized or linked to another functional molecule (e.g., another peptide or protein). In some embodiments, a derivatized antibody molecule is one that has been modified. Methods of derivatization include but are not limited to the addition of a fluorescent moiety, a radionucleotide, a toxin, an enzyme or an affinity ligand such as biotin. In some embodiments, the nucleic acid sequence comprising the transgene encoding the antibody molecule further encodes a fluorescent moiety, a radionucleotide, a toxin, an enzyme or an affinity ligand such as biotin. Accordingly, the encoded antibody molecules of the invention are intended to include derivatized and otherwise modified forms of the antibodies described herein, including immunoadhesion molecules. For example, an encoded antibody molecule can be functionally linked (by genetic fusion or otherwise) to one or more other molecular entities, such as another antibody (e.g., a bispecific antibody or a diabody), a detectable agent, a cytotoxic agent, a pharmaceutical agent, and/or a protein or peptide that can mediate association of the antibody or antibody portion with another molecule (such as a streptavidin core region or a polyhistidine tag). In some embodiments, the nucleic acid sequence comprising the transgene encoding the antibody molecule further encodes a another antibody (e.g., a bispecific antibody or a diabody), a detectable agent, a cytotoxic agent, a pharmaceutical agent, and/or a protein or peptide that can mediate association of the antibody or antibody portion with another molecule (e.g., a tag, e.g., a tag described herein).

### Multispecific Antibody Molecules

[1110] In some embodiments, the encoded antibody molecule is a multispecific antibody molecule, e.g., it comprises a plurality of immunoglobulin variable domains sequences, wherein a first immunoglobulin variable domain sequence of the plurality has binding specificity for a first epitope and a second immunoglobulin variable domain sequence of the plurality has binding specificity for a second epitope. In some embodiments, the first and second epitopes are on the same antigen, e.g., the same protein (or subunit of a multimeric protein). In some embodiments, the first and second epitopes overlap. In some embodiments, the first and second epitopes do not overlap. In some embodiments, the first and second epitopes are on different antigens, e.g., the different proteins (or different subunits of a multimeric protein). In some embodiments, a multispecific antibody molecule comprises a third, fourth or fifth immunoglobulin variable domain. In some embodiments, a multispecific antibody molecule is a bispecific antibody molecule, a trispecific antibody molecule, or tetraspecific antibody molecule. In some embodiments, the encoded anti-HER2 molecule is a multispecific antibody molecule.

[1111] In some embodiments, an encoded multispecific antibody molecule is an encoded bispecific antibody molecule. A bispecific antibody has specificity for no more than two antigens. A bispecific antibody molecule is characterized by a first immunoglobulin variable domain sequence which has binding specificity for a first epitope and a second immunoglobulin variable domain sequence that has binding specificity for a second epitope. In some embodiments, the first and second epitopes are on the same antigen, e.g., the same protein (or subunit of a multimeric protein). In some embodiments, the first and second epitopes overlap. In some embodiments, the first and second epitopes do not overlap. In some embodiments, the first and second epitopes are on different antigens, e.g., the different proteins (or different subunits of a multimeric protein). In some embodiments, a bispecific antibody molecule comprises a heavy chain variable domain sequence and a light chain variable domain sequence which have binding specificity for a first epitope and a heavy chain variable domain sequence and a light chain variable domain sequence which have binding specificity for a second epitope. In some embodiments, a bispecific antibody molecule comprises a half antibody having binding specificity for a first epitope and a half antibody having binding specificity for a second epitope. In some embodiments, a bispecific antibody molecule comprises a half antibody, or fragment thereof, having binding specificity for a first epitope and a half antibody, or fragment thereof, having binding specificity for a second epitope. In some embodiments, a bispecific antibody molecule comprises a scFv, or fragment thereof, have binding specificity for a first epitope and a scFv, or fragment thereof, have binding specificity for a second epitope. In some embodiment, the encoded anti-HER2 antibody is a bispecific antibody molecule.

[1112] In another aspect, the invention relates to a multispecific, e.g., bispecific (e.g., biparatopic), antibody molecule comprising one or more HER-2 antigen binding domains, such as but not limited to an anti-HER2 antibody or antibody fragment comprising one or more CDRs, VH, heavy chain, VL, and/or light chain thereof. Non-limiting anti-HER2 antibody molecule sequences are provided in Tables 11A-11C and 12.

[1113] In some embodiments, the antibody molecule encoded by a transgene described herein is an anti-HER2 bispecific antibody molecule. In some embodiments, the anti-HER2 bispecific antibody molecule is monovalent or bivalent. In some embodiments, the anti-HER2 bispecific antibody molecule is a biparatopic antibody molecule. In some embodiments, the anti-HER2 bispecific antibody molecule comprises an Fc region or a variant thereof, e.g., as provided in Table 12. In some embodiments, the Fc region has reduced, e.g., ablated, affinity for an Fc receptor, e.g., an Fc receptor described herein. In some embodiments, the reduced affinity is compared to an otherwise similar antibody with a wild type Fe region. In some embodiments, the Fc receptor comprises a mutation at one or more of (e.g., all of) positions I253 (e.g., I235A), H310 (e.g., H310A or H310Q), and/or H435 (e.g., H435A or H435Q), numbered according to the EU index as in Kabat. In some embodiments, a bispecific antibody molecule described herein comprises a variant Fc region with reduced effector function (e.g., reduced ADCC). In some embodiments, the Fc region comprises a mutation at one or more of (e.g., all of) positions L235 (e.g., L235V), F243 (e.g., F243L), R292 (e.g., R292P), Y300 (e.g., Y300L), and P396 (e.g., P396L), numbered according to the EU index as in Kabat.

[1114] In some embodiments, an anti-HER2 bispecific antibody molecule comprises a first antigen binding domain and a second antigen binding domain. In some embodiments, the first antigen binding domain binds domain I of HER2 and the second antigen binding domain that binds domain IV of HER2. In some embodiments, the first antigen binding domain that binds domain II of HER2 and the second antigen binding domain that binds domain IV of HER2. In some embodiments, the first antigen binding domain that binds domain III of HER2 and the second antigen binding domain that binds domain IV of HER2. In some embodiments, the first antigen binding domain that binds domain I of HER2 and the second antigen binding domain that binds domain II of HER2. In some embodiments, the first antigen binding domain that binds domain I of HER2 and the second antigen binding domain that binds domain III of HER2. In some embodiments, the first antigen binding domain that binds domain II of HER2 and the second antigen binding domain that binds domain III of HER2. In some embodiments, the first and/or second antigen binding domain comprise an IgG antibody, single-chain Fv (scFv), a scFv fragment, a Fab, a single-chain Fab (scFabs), a single-chain antibody, a diabody, an antibody variable domain, a VHH, a single domain antibody, and/or a nanobody.

[1115] In some embodiments, the first antigen binding domain (e.g., an scFv) is located at the N-terminus of the VL of the second binding domain (e.g., a full antibody, e.g., an IgG antibody), e.g., linked via a peptide linker. In some embodiments, a polypeptide of the bispecific antibody molecule comprises the following sequences, from N-terminal to C-terminal: VH of the first binding domain, first peptide linker (e.g., a (G4S)3 linker), VL of first binding domain, second peptide linker (e.g., a (G4S) linker), VL of the second binding domain and CL. In some embodiments, a polypeptide of the bispecific antibody molecule comprises the following sequences: from N-terminal to C-terminal: VH of the second binding domain, CH1, CH2, and CH3. In some embodiments, the bispecific antibody molecule comprises an Fc region that is mutated to have reduced binding to Fc receptor or reduced ADCC, e.g., an Fc region having the mutations L235V, F243L, R292P, Y300L, and P396L, numbered according to the EU index as in Kabat. In some embodiments, the first antigen binding fragment comprises an anti-HER2 binding domain that binds domain IV of HER2, e.g., an anti-HER2 scFv that binds domain IV of HER2, e.g., comprising an anti-HER2 scFv sequence disclosed in Tables 11A-11C. In some embodiments, the second antigen binding domain comprises an anti-HER2 binding domain that binds domain I of HER2, e.g., an anti-HER2 antibody molecule (e.g., an IgG antibody) that binds domain I of HER2, comprising an anti-HER2 CDR, VH, VL, HC, and/or LC sequence as provided in Tables 11A-11C.

[1116] In some embodiments, the first antigen binding domain (e.g., an antibody mimetic, e.g., a designed ankyrin repeat protein (DARPIN)) is located at the N-terminus of the VL of the second binding domain (e.g., a full antibody, e.g., an IgG antibody), e.g., linked via a peptide linker. In some embodiments, a polypeptide of the bispecific antibody molecule comprises the following sequences, from N-terminal to C-terminal: an antibody mimetic, e.g., a designed ankyrin repeat protein (DARPIN), a peptide linker (e.g., a (G4S)3 linker), VL of the second binding domain and CL. In some embodiments, a polypeptide of the bispecific antibody molecule comprises the following sequences: from N-terminal to C-terminal: VH of the second binding domain, CH1, CH2, and CH3. In some embodiments, the bispecific antibody molecule comprises an Fc region that is mutated to have reduced binding to Fc receptor or reduced ADCC, e.g., an Fc region having the mutations L235V, F243L, R292P, Y300L, and P396L, numbered according to the EU index as in Kabat. In some embodiments, the first antigen binding fragment comprises an anti-HER2 binding domain that binds domain I of HER2, e.g., an anti-HER2 antibody mimetic, e.g., DARPIN that binds domain I of HER2, e.g., comprising an anti-HER2 antibody mimetic, e.g., DARPIN, sequence disclosed in Table 11A. In some embodiments, the second antigen binding domain comprises an anti-HER2 binding domain that binds domain IV of HER2, e.g., an anti-HER2 antibody molecule (e.g., an IgG antibody) that binds domain IV of HER2, comprising an anti-HER2 CDR, VH, VL, HC, and/or LC sequence as provided in Table 11A.

[1117] In some embodiments, the first antigen binding domain (e.g., a Fyn SH3-derived binding polypeptide (e.g., a fynomer)) is located at the N-terminus of the VL of the second binding domain (e.g., a full antibody, e.g., an IgG antibody), e.g., linked via a peptide linker. In some embodiments, a polypeptide of the bispecific antibody molecule comprises the following sequences, from N-terminal to C-terminal: a Fyn SH3-derived binding polypeptide, a peptide linker (e.g., a (G4S)3 linker), VL of the second binding domain and CL. In some embodiments, a polypeptide of the bispecific antibody molecule comprises the following sequences: from N-terminal to C-terminal: VH of the second binding domain, CH1, CH2, and CH3. In some embodiments, the bispecific antibody molecule comprises an Fc region that is mutated to have reduced binding to Fc receptor or reduced ADCC, e.g., an Fc region having the mutations L235V, F243L, R292P, Y300L, and P396L, numbered according to the EU index as in Kabat. In some embodiments, the first antigen binding fragment comprises an anti-HER2 binding domain that binds domain I of HER2, e.g., a Fyn SH3-derived binding polypeptide that binds domain I of HER2, e.g., comprising a Fyn SH3-derived binding polypeptide sequence disclosed in Table 11A. In some embodiments, the second antigen binding domain comprises an anti-HER2 binding domain that binds domain IV of HER2, e.g., an anti-HER2 antibody molecule (e.g., an IgG antibody) that binds domain IV of HER2, comprising an anti-HER2 CDR, VH, VL, HC, and/or LC sequence as provided in Tables 11A-11C. In some embodiments, the second antigen binding domain comprises an anti-HER2 binding domain that binds domain II of HER2, e.g., an anti-HER2 antibody molecule (e.g., an IgG antibody) that binds domain II of HER2, comprising an anti-HER2 CDR, VH, VL, HC, and/or LC sequence as provided in Tables 11A-11C.

[1118] In a further aspect, the invention relates to a bispecific molecule comprising a first antigen binding site from a HER2 antibody of the invention as described herein above and a second antigen binding site with a different binding specificity, such as a binding specificity for a human effector cell, a human Fc receptor, a T cell receptor, a B cell receptor or a binding specificity for a non-overlapping epitope of HER2, i.e. a bispecific antibody wherein the first and second antigen binding sites do not cross-block each other for binding to HER2, e.g. when tested as described in Example 14.

[1119] Exemplary bispecific antibody molecules of the invention comprise (i) two antibodies, one with a specificity to HER2 and another to a second target that are conjugated together, (ii) a single antibody that has one chain or arm specific to HER2 and a second chain or arm specific to a second molecule, (iii) a single chain antibody that has specificity to HER2 and a second molecule, e.g., via two scFvs linked in tandem by an extra peptide linker; (iv) a dual-variable-domain antibody (DVD-Ig), where each light chain and heavy chain contains two variable domains in tandem through a short peptide linkage (Wu et al., Generation and Characterization of a Dual Variable Domain Immunoglobulin (DVD-Ig™) Molecule, In: Antibody Engineering, Springer Berlin Heidelberg (2010)); (v) a chemically-linked bispecific (Fab′).sub.2 fragment; (vi) a Tandab, which is a fusion of two single chain diabodies resulting in a tetravalent bispecific antibody that has two binding sites for each of the target antigens; (vii) a flexibody, which is a combination of scFvs with a diabody resulting in a multivalent molecule; (viii) a so called “dock and lock” molecule, based on the “dimerization and docking domain” in Protein Kinase A, which, when applied to Fabs, can yield a trivalent bispecific binding protein consisting of two identical Fab fragments linked to a different Fab fragment; (ix) a so-called Scorpion molecule, comprising, e.g., two scFvs fused to both termini of a human Fc-region; and (x) a diabody. In one embodiment, the bispecific antibody of the present invention is a diabody.

[1120] In one embodiment, the second molecule is a cancer antigen/tumor-associated antigen such as carcinoembryonic antigen (CEA), prostate specific antigen (PSA), RAGE (renal antigen), .alpha.-fetoprotein, CAMEL (CTL-recognized antigen on melanoma), CT antigens (such as MAGE-B5, -B6, -C2, -C3, and D; Mage-12; CT10; NY-ESO-1, SSX-2, GAGE, BAGE, MAGE, and SAGE), mucin antigens (e.g., MUC1, mucin-CA125, etc.), ganglioside antigens, tyrosinase, gp75, c-Met, C-myc, Mart1., MelanA, MUM-1, MUM-2, MUM-3, HLA-B7, Ep-CAM or a cancer-associated integrin, such as a5133 integrin. In another embodiment, the second molecule is a T cell and/or NK cell antigen, such as CD3 or CD16. In another embodiment, the second molecule is an angiogenic factor or other cancer-associated growth factor, such as a vascular endothelial growth factor, a fibroblast growth factor, epidermal growth factor, angiogenin or a receptor of any of these, particularly receptors associated with cancer progression (for instance another one of the HER receptors; HER1, HER3, or HER4). In one embodiment, the second antigen-binding site binds a different, preferably non-blocking, site on HER2 than the one bound by the antibody of the invention. For example, the second molecule may be derived from, or cross-block HER2-binding of, trastuzumab, pertuzumab, F5, or C1.

[1121] In some embodiments, the sequences of the encoded antibody molecules of the present disclosure can be generated from bispecific or heterodimeric antibody molecules produced using protocols known in the art; including but not limited to, for example, the “knob in a hole” approach described in, e.g., U.S. Pat. No. 5,731,168; the electrostatic steering Fe pairing as described in, e.g., WO 09/089004, WO 06/106905 and WO 2010/129304; Strand Exchange Engineered Domains (SEED) heterodimer formation as described in, e.g., WO 07/110205; Fab arm exchange as described in, e.g., WO 08/119353, WO 2011/131746, and WO 2013/060867; double antibody conjugate, e.g., by antibody cross-linking to generate a bi-specific structure using a heterobifunctional reagent having an amine-reactive group and a sulfhydryl reactive group as described in, e.g., U.S. Pat. No. 4,433,059; bispecific antibody determinants generated by recombining half antibodies (heavy-light chain pairs or Fabs) from different antibodies through cycle of reduction and oxidation of disulfide bonds between the two heavy chains, as described in, e.g., U.S. Pat. No. 4,444,878; trifunctional antibodies, e.g., three Fab′ fragments cross-linked through sulfhydryl reactive groups, as described in, e.g., U.S. Pat. No. 5,273,743; biosynthetic binding proteins, e.g., pair of scFvs cross-linked through C-terminal tails preferably through disulfide or amine-reactive chemical cross-linking, as described in, e.g., U.S. Pat. No. 5,534,254; bifunctional antibodies, e.g., Fab fragments with different binding specificities dimerized through leucine zippers (e.g., c-fos and c-jun) that have replaced the constant domain, as described in, e.g., U.S. Pat. No. 5,582,996; bispecific and oligospecific mono- and oligovalent receptors, e.g., VH-CH1 regions of two antibodies (two Fab fragments) linked through a polypeptide spacer between the CH1 region of one antibody and the VH region of the other antibody typically with associated light chains, as described in, e.g., U.S. Pat. No. 5,591,828; bispecific DNA-antibody conjugates, e.g., crosslinking of antibodies or Fab fragments through a double stranded piece of DNA, as described in, e.g., U.S. Pat. No. 5,635,602; bispecific fusion proteins, e.g., an expression construct containing two scFvs with a hydrophilic helical peptide linker between them and a full constant region, as described in, e.g., U.S. Pat. No. 5,637,481; multivalent and multispecific binding proteins, e.g., dimer of polypeptides having first domain with binding region of Ig heavy chain variable region, and second domain with binding region of Ig light chain variable region, generally termed diabodies (higher order structures are also disclosed creating bispecific, trispecific, or tetraspecific molecules, as described in, e.g., U.S. Pat. No. 5,837,242; minibody constructs with linked VL and VH chains further connected with peptide spacers to an antibody hinge region and CH3 region, which can be dimerized to form bispecific/multivalent molecules, as described in, e.g., U.S. Pat. No. 5,837,821; VH and VL domains linked with a short peptide linker (e.g., 5 or 10 amino acids) or no linker at all in either orientation, which can form dimers to form bispecific diabodies; trimers and tetramers, as described in, e.g., U.S. Pat. No. 5,844,094; String of VH domains (or VL domains in family members) connected by peptide linkages with crosslinkable groups at the C-terminus further associated with VL domains to form a series of FVs (or scFvs), as described in, e.g., U.S. Pat. No. 5,864,019; and single chain binding polypeptides with both a VH and a VL domain linked through a peptide linker are combined into multivalent structures through non-covalent or chemical crosslinking to form, e.g., homobivalent, heterobivalent, trivalent, and tetravalent structures using both scFV or diabody type format, as described in, e.g., U.S. Pat. No. 5,869,620. Additional exemplary multispecific and bispecific molecules and methods of making the same are found, for example, in U.S. Pat. Nos. 5,910,573, 5,932,448, 5,959,083, 5,989,830, 6,005,079, 6,239,259, 6,294,353, 6,333,396, 6,476,198, 6,511,663, 6,670,453, 6,743,896, 6,809,185, 6,833,441, 7,129,330, 7,183,076, 7,521,056, 7,527,787, 7,534,866, 7,612,181, US2002/004587A1, US2002/076406A1, US2002/103345A1, US2003/207346A1, US2003/211078A1, US2004/219643A1, US2004/220388A1, US2004/242847A1, US2005/003403A1, US2005/004352A1, US2005/069552A1, US2005/079170A1, US2005/100543A1, US2005/136049A1, US2005/136051A1, US2005/163782A1, US2005/266425A1, US2006/083747A1, US2006/120960A1, US2006/204493A1, US2006/263367A1, US2007/004909A1, US2007/087381A1, US2007/128150A1, US2007/141049A1, US2007/154901A1, US2007/274985A1, US2008/050370A1, US2008/069820A1, US2008/152645A1, US2008/171855A1, US2008/241884A1, US2008/254512A1, US2008/260738A1, US2009/130106A1, US2009/148905A1, US2009/155275A1, US2009/162359A1, US2009/162360A1, US2009/175851A1, US2009/175867A1, US2009/232811A1, US2009/234105A1, US2009/263392A1, US2009/274649A1, EP346087A2, WO00/06605A2, WO02/072635A2, WO04/081051A1, WO06/020258A2, WO2007/044887A2, WO2007/095338A2, WO2007/137760A2, WO2008/119353A1, WO2009/021754A2, WO2009/068630A1, WO91/03493A1, WO93/23537A1, WO94/09131A1, WO94/12625A2, WO95/09917A1, WO96/37621A2, WO99/64460A1. The contents of the above-referenced applications are incorporated herein by reference in their entireties.

[1122] In some embodiments, the encoded antibody molecule is a bispecific Fynomer-antibody fusion protein, e.g., it comprises a plurality of immunoglobulin variable domains sequences with one of more Fynomers fused to any of the light- or heavy-chain termini, wherein a first immunoglobulin variable domain sequence of the plurality has binding specificity for a first epitope and the Fynomer has binding specificity for a second epitope. In some embodiments, the first and second epitopes are on the same antigen, e.g., the same protein (or subunit of a multimeric protein). In some embodiments, the first and second epitopes overlap. In some embodiments, the first and second epitopes do not overlap. In some embodiments, the first and second epitopes are on different antigens, e.g., the different proteins (or different subunits of a multimeric protein). In some embodiments, the encoded anti-HER2 molecule is a multispecific Fynomer-antibody fusion molecule. Fynomers that bind a target of interest can routinely be selected using recombinant technology as described for example, in Grbulovski et al., J. Biol. Chem. 282(5) 3196-3204 (2007) and WO 2008/022759. Methods for forming Fynomer-antibody fusion proteins are known in the art including, for example, Brack et al. (2014), Mol Cancer Ther 13(8):2030-2039, US2017/0281768, US2015/0105285A1, WO2014/170063A1, WO2015/141862A1, WO2013/135588A1, U.S. Ser. No. 10/996,226B2, U.S. Pat. No. 9,989,536B2, U.S. Pat. No. 9,689,879B2, U.S. Pat. No. 9,513,296B2, U.S. Ser. No. 10/323,095B2, and U.S. Pat. No. 9,593,314B2.

[1123] This present disclosure provides in some embodiments, a nucleic acid (e.g., an isolated nucleic acid) comprising a transgene encoding a payload comprising any of the above antibody molecules and genetic elements, AAV vectors, and AAV particles comprising the same.

### Chimeric Antigen Receptors

[1124] In some embodiments, the nucleic acid comprises a transgene encoding a payload (e.g., an antibody molecule that can be used to generate a chimeric antigen receptor (CAR) or a cell expressing a CAR (e.g., a CAR-expressing cell). The CAR may comprise i) an extracellular antigen binding domain, ii) a transmembrane domain, and iii) an intracellular signaling domain (which may comprise one or both of a primary signaling domain and a costimulatory domain). The CAR may further comprise a leader sequence and/or a hinge sequence. In specific embodiments, the CAR construct comprises a scFv domain, wherein the scFv may be preceded by an optional leader sequence, and followed by an optional hinge sequence, a transmembrane region, and an intracellular signaling domain, e.g., wherein the domains are contiguous with and in the same reading frame to form a single fusion protein.

[1125] The antigen binding domain of the CAR can be any domain that binds to the antigen including but not limited to a monoclonal antibody, a polyclonal antibody, a recombinant antibody, a human antibody, a humanized antibody, and a functional fragment thereof, including but not limited to a single-domain antibody such as a heavy chain variable domain (VH), a light chain variable domain (VL) and a variable domain (VHH) of camelid derived nanobody, and to an alternative scaffold known in the art to function as antigen binding domain, such as a recombinant fibronectin domain, a T cell receptor (TCR), or a fragment there of, e.g., single chain TCR, and the like. In some instances, it is beneficial for the antigen binding domain to be derived from the same species in which the CAR will ultimately be used in. For example, for use in humans, it may be beneficial for the antigen binding domain of the CAR to comprise human or humanized residues for the antigen binding domain of an antibody or antibody fragment. In some embodiments, the antigen binding domain of the CAR is an scFv antibody fragment that is humanized compared to the murine sequence of the scFv from which it is derived.

[1126] In some embodiments, a CAR can be used in the treatment of disease categories which include for example, cancer, autoimmune disorders, B-cell mediated diseases, inflammatory diseases, neuronal disorders, cardiovascular disease and circulatory disorders, or infectious diseases.

### Payload Antibodies

[1127] In some embodiments, the nucleic acid molecule comprises a transgene encoding an antibody molecule that binds to HER2. In some embodiments, the encoded HER2 antibody molecule comprises at least one antigen-binding domain, e.g., a variable region or antigen binding fragment thereof, from an antibody molecule described herein, e.g., antibody molecule chosen from Ab-HER-04, Ab-HER-05, Ab-HER-10, Ab-HER-15, Ab-HER-42, Ab-HER-43, Ab-HER-46, Ab-HER-47, Ab-HER-53, Ab-HER-57, Ab-HER-62, Ab-HER-69, Ab-HER-73, Ab-HER-75, Ab-HER-77, Ab-HER-78, Ab-HER-82, Ab-HER-88, Ab-HER-89, Ab-HER-90, Ab-HER-91, Ab-HER-92, Ab-HER-97, Ab-HER-98, Ab-HER-99, Ab-HER-100, or Ab-HER-101, e.g., as described in Tables 11A-11C, or a sequence substantially identical (e.g., having at least about 70%, 75%, 80%, 85%, 90%, 92%, 95%, 97%, 98%, or 99% sequence identity) to any of the aforesaid sequences.

[1128] In some embodiments, the nucleotide sequence encoding HER2 antibody molecule comprises the nucleotide sequence of at least one antigen-binding domain, e.g., a variable region or antigen binding fragment thereof, from an antibody molecule described herein, e.g., antibody molecule chosen from Ab-HER-04, Ab-HER-05, Ab-HER-10, Ab-HER-15, Ab-HER-42, Ab-HER-43, Ab-HER-46, Ab-HER-47, Ab-HER-53, Ab-HER-57, Ab-HER-62, Ab-HER-69, Ab-HER-73, Ab-HER-75, Ab-HER-77, Ab-HER-78, Ab-HER-82, Ab-HER-88, Ab-HER-89, Ab-HER-90, Ab-HER-91, Ab-HER-92, Ab-HER-97, Ab-HER-98, Ab-HER-99, Ab-HER-100, or Ab-HER-101, e.g., as described in Tables 11A-11C, or a nucleotide sequence substantially identical (e.g., having at least about 70%, 75%, 80%, 85%, 90%, 92%, 95%, 97%, 98%, or 99% sequence identity) to any of the aforesaid sequences.

[1129] In some embodiments, the encoded anti-HER2 molecule comprises at least one, two, three, or four variable regions from an antibody molecule described herein, e.g., an antibody molecule chosen from Ab-HER-04, Ab-HER-05, Ab-HER-10, Ab-HER-15, Ab-HER-42, Ab-HER-43, Ab-HER-46, Ab-HER-47, Ab-HER-53, Ab-HER-57, Ab-HER-62, Ab-HER-69, Ab-HER-73, Ab-HER-75, Ab-HER-77, Ab-HER-78, Ab-HER-82, Ab-HER-88, Ab-HER-89, Ab-HER-90, Ab-HER-91, Ab-HER-92, Ab-HER-97, Ab-HER-98, Ab-HER-99, Ab-HER-100, or Ab-HER-101, e.g., as described in Tables 11A-11C, or a sequence substantially identical (e.g., having at least about 70%, 75%, 80%, 85%, 90%, 92%, 95%, 97%, 98%, or 99% sequence identity) to any of the aforesaid sequences.

[1130] In some embodiments, the nucleotide sequence encoding the anti-HER2 molecule comprises the nucleotide sequence of at least one, two, three, or four variable regions from an antibody molecule described herein, e.g., an antibody molecule chosen from Ab-HER-04, Ab-HER-05, Ab-HER-10, Ab-HER-15, Ab-HER-42, Ab-HER-43, Ab-HER-46, Ab-HER-47, Ab-HER-53, Ab-HER-57, Ab-HER-62, Ab-HER-69, Ab-HER-73, Ab-HER-75, Ab-HER-77, Ab-HER-78, Ab-HER-82, Ab-HER-88, Ab-HER-89, Ab-HER-90, Ab-HER-91, Ab-HER-92, Ab-HER-97, Ab-HER-98, Ab-HER-99, Ab-HER-100, or Ab-HER-101, e.g., as described in Tables 11A-11C, or a nucleotide sequence substantially identical (e.g., having at least about 70%, 75%, 80%, 85%, 90%, 92%, 95%, 97%, 98%, or 99% sequence identity) to any of the aforesaid sequences.

[1131] In some embodiments, the encoded anti-HER2 molecule comprises a heavy chain variable region from an antibody molecule described herein, e.g., chosen from Ab-HER-04, Ab-HER-05, Ab-HER-10, Ab-HER-15, Ab-HER-42, Ab-HER-43, Ab-HER-46, Ab-HER-47, Ab-HER-53, Ab-HER-57, Ab-HER-62, Ab-HER-69, Ab-HER-73, Ab-HER-75, Ab-HER-77, Ab-HER-78, Ab-HER-82, Ab-HER-88, Ab-HER-89, Ab-HER-90, Ab-HER-91, Ab-HER-92, Ab-HER-97, Ab-HER-98, Ab-HER-99, Ab-HER-100, or Ab-HER-101, e.g., as described in Tables 11A-11C, or a sequence substantially identical (e.g., having at least about 70%, 75%, 80%, 85%, 90%, 92%, 95%, 97%, 98%, or 99% sequence identity) to any of the aforesaid sequences.

[1132] In some embodiments, the nucleotide sequence encoding the anti-HER2 molecule comprises the nucleotide sequence of a heavy chain variable region from an antibody molecule described herein, e.g., chosen from Ab-HER-04, Ab-HER-05, Ab-HER-10, Ab-HER-15, Ab-HER-42, Ab-HER-43, Ab-HER-46, Ab-HER-47, Ab-HER-53, Ab-HER-57, Ab-HER-62, Ab-HER-69, Ab-HER-73, Ab-HER-75, Ab-HER-77, Ab-HER-78, Ab-HER-82, Ab-HER-88, Ab-HER-89, Ab-HER-90, Ab-HER-91, Ab-HER-92, Ab-HER-97, Ab-HER-98, Ab-HER-99, Ab-HER-100, or Ab-HER-101, e.g., as described in Tables 11A-11C, or a nucleotide sequence substantially identical (e.g., having at least about 70%, 75%, 80%, 85%, 90%, 92%, 95%, 97%, 98%, or 99% sequence identity) to any of the aforesaid sequences.

[1133] In some embodiments, the encoded anti-HER2 molecule comprises a light chain variable region from an antibody molecule described herein, e.g., chosen from Ab-HER-04, Ab-HER-05, Ab-HER-10, Ab-HER-15, Ab-HER-42, Ab-HER-43, Ab-HER-46, Ab-HER-47, Ab-HER-53, Ab-HER-57, Ab-HER-62, Ab-HER-69, Ab-HER-73, Ab-HER-75, Ab-HER-77, Ab-HER-78, or Ab-HER-82, e.g., as described in Table 11A, or a sequence substantially identical (e.g., having at least about 70%, 75%, 80%, 85%, 90%, 92%, 95%, 97%, 98%, or 99% sequence identity) to any of the aforesaid sequences.

[1134] In some embodiments, the nucleic acid encoding the anti-HER2 molecule comprises the nucleotide sequence of a light chain variable region from an antibody molecule described herein, e.g., chosen from Ab-HER-04, Ab-HER-05, Ab-HER-10, Ab-HER-15, Ab-HER-42, Ab-HER-43, Ab-HER-46, Ab-HER-47, Ab-HER-53, Ab-HER-57, Ab-HER-62, Ab-HER-69, Ab-HER-73, Ab-HER-75, Ab-HER-77, Ab-HER-78, or Ab-HER-82, e.g., as described in Table 11A, or a nucleotide sequence substantially identical (e.g., having at least about 70%, 75%, 80%, 85%, 90%, 92%, 95%, 97%, 98%, or 99% sequence identity) to any of the aforesaid sequences.

[1135] In some embodiments, the encoded anti-HER2 antibody molecule comprises a heavy chain constant region, e.g., a human IgG1 constant region or a murine IgG2A. In some embodiments, the encoded heavy chain constant comprises an amino acid sequence set forth in Table 12, or a sequence substantially identical (e.g., having at least about 70%, 75%, 80%, 85%, 90%, 92%, 95%, 97%, 98%, or 99% sequence identity) to any of the aforesaid sequences. In some embodiments, nucleic acid encoding the heavy chain constant region comprises a nucleotide sequence set forth in Table 12, or a nucleotide sequence substantially identical (e.g., having at least about 70%, 75%, 80%, 85%, 90%, 92%, 95%, 97%, 98%, or 99% sequence identity) to any of the aforesaid sequences.

[1136] In some embodiments, the encoded anti-HER2 antibody molecule comprises a kappa light chain constant region, e.g., a human kappa light chain constant region or a murine kappa light chain constant region. In some embodiments, the encoded light chain constant comprises an amino acid sequence set forth in Table 12, or a sequence substantially identical (e.g., having at least about 70%, 75%, 80%, 85%, 90%, 92%, 95%, 97%, 98%, or 99% sequence identity) to any of the aforesaid sequences. In some embodiments, nucleic acid encoding the light chain constant region comprises a nucleotide sequence set forth in Table 12, or a nucleotide sequence substantially identical (e.g., having at least about 70%, 75%, 80%, 85%, 90%, 92%, 95%, 97%, 98%, or 99% sequence identity) to any of the aforesaid sequences.

[1137] In some embodiments, the encoded anti-HER2 antibody molecule comprises a heavy chain constant region of an IgG1, e.g., a human IgG1, and a kappa light chain constant region, e.g. a human kappa light chain constant region, e.g., a heavy and light chain constant region comprising an amino acid sequence set forth in Table 12, or a sequence substantially identical (e.g., having at least about 80%, 85%, 90%, 92%, 95%, 97%, 98%, or 99% sequence identity) thereto. In some embodiments, the nucleotide sequence encoding the anti-HER2 antibody comprises the nucleotide sequence of a heavy chain constant region of an IgG1 (e.g., human IgG1) and the nucleotide sequence of a kappa light chain constant region (e.g., a human kappa light chain constant region) comprising a nucleotide sequence set forth in Table 12, or a nucleotide sequence substantially identical (e.g., having at least about 80%, 85%, 90%, 92%, 95%, 97%, 98%, or 99% sequence identity) thereto.

[1138] In some embodiments, the encoded anti-HER2 antibody molecule comprises an Fc region or a variant thereof, e.g., as provided in Table 12. In some embodiments, the Fc region has reduced, e.g., ablated, affinity for an Fc receptor, e.g., an Fc receptor described herein. In some embodiments, the reduced affinity is compared to an otherwise similar antibody with a wild type Fc region. In some embodiments, the Fc receptor comprises a mutation at one or more of (e.g., all of) positions I253 (e.g., I235A), H310 (e.g., H310A or H310Q), and/or H435 (e.g., H435A or H435Q), numbered according to the EU index as in Kabat. In some embodiments, a bispecific antibody molecule described herein comprises a variant Fc region with reduced effector function (e.g., reduced ADCC). In some embodiments, the Fe region comprises a mutation at one or more of (e.g., all of) positions L235 (e.g., L235V), F243 (e.g., F243L), R292 (e.g., R292P), Y300 (e.g., Y300L), and P396 (e.g., P396L), numbered according to the EU index as in Kabat.

[1139] In some embodiments, the encoded HER2 antibody molecule comprises a heavy chain variable region and a constant region, a light chain variable region and a constant region, or both, comprising an amino acid sequence of Tables 11A-11C and Table 12; or is encoded by a nucleotide sequence of Tables 11A-11C and Table 12; or a sequence substantially identical (e.g., having at least about 80%, 85%, 90%, 92%, 95%, 97%, 98%, or 99% sequence identity) to any of the aforesaid sequences.

[1140] In some embodiments, the encoded HER2 antibody molecule comprises a heavy chain, light chain, or both a heavy chain and a light chain from an antibody molecule described herein, e.g., chosen from Ab-HER-04, Ab-HER-05, Ab-HER-10, Ab-HER-15, Ab-HER-42, Ab-HER-43, Ab-HER-46, Ab-HER-47, Ab-HER-53, Ab-HER-57, Ab-HER-62, Ab-HER-69, Ab-HER-73, Ab-HER-75, Ab-HER-77, Ab-HER-78, Ab-HER-82, Ab-HER-88, Ab-HER-89, Ab-HER-90, Ab-HER-91, Ab-HER-92, Ab-HER-97, Ab-HER-98, Ab-HER-99, Ab-HER-100, or Ab-HER-101, e.g., as described in Tables 11A-11C, or a sequence substantially identical (e.g., having at least about 70%, 75%, 80%, 85%, 90%, 92%, 95%, 97%, 98%, or 99% sequence identity) to any of the aforesaid sequences.

[1141] In some embodiments, the nucleic acid encoding HER2 antibody molecule comprises the nucleotide sequence of a heavy chain, light chain, or both a heavy chain and a light chain from an antibody molecule described herein, e.g., chosen from Ab-HER-04, Ab-HER-05, Ab-HER-10, Ab-HER-15, Ab-HER-42, Ab-HER-43, Ab-HER-46, Ab-HER-47, Ab-HER-53, Ab-HER-57, Ab-HER-62, Ab-HER-69, Ab-HER-73, Ab-HER-75, Ab-HER-77, Ab-HER-78, or Ab-HER-82, Ab-HER-88, Ab-HER-89, Ab-HER-90, Ab-HER-91, Ab-HER-92, Ab-HER-97, Ab-HER-98, Ab-HER-99, Ab-HER-100, or Ab-HER-101, e.g., as described in Tables 11A-11C, or a nucleotide sequence substantially identical (e.g., having at least about 70%, 75%, 80%, 85%, 90%, 92%, 95%, 97%, 98%, or 99% sequence identity) to any of the aforesaid sequences.

[1142] In some embodiments, the encoded anti-HER2 molecule comprises at least one, two, or three complementarity determining regions (CDRs) from a heavy chain variable region comprising an amino acid sequence in Tables 11A-11C, or is encoded by a nucleotide sequence in Tables 11A-11C; or a sequence substantially identical (e.g., having at least about 80%, 85%, 90%, 92%, 95%, 97%, 98%, or 99% sequence identity) to any of the aforesaid sequences. In some embodiments, one or more of the CDRs (or collectively all of the CDRs) have one, two, three, four, five or more changes, e.g., amino acid substitutions, insertions, or deletions, relative to the amino acid sequence shown in Tables 11A-11C, or encoded by a nucleotide sequence shown in Tables 11A-11C. In certain embodiments, the encoded anti-HER2 antibody molecule includes a substitution in a heavy chain CDR, e.g., one or more substitutions in a CDR1, CDR2 and/or CDR3 of the heavy chain. In some embodiments, the CDRs are according to the Kabat definition (e.g., as set out in Tables 11A-11C). In some embodiments, the CDRs are according to the Chothia definition (e.g., as set out in Table 11A).

[1143] In some embodiments, the encoded anti-HER2 molecule comprises at least one, two, or three complementarity determining regions (CDRs) from a light chain variable region comprising an amino acid sequence in Table 11A, or is encoded by a nucleotide sequence in Table 11A; or a sequence substantially identical (e.g., having at least about 80%, 85%, 90%, 92%, 95%, 97%, 98%, or 99% sequence identity) to any of the aforesaid sequences. In some embodiments, one or more of the CDRs (or collectively all of the CDRs) have one, two, three, four, five or more changes, e.g., amino acid substitutions, insertions, or deletions, relative to the amino acid sequence shown in Table 11A, or encoded by a nucleotide sequence shown in Table 11A. In certain embodiments, the encoded anti-HER2 antibody molecule includes a substitution in a light chain CDR, e.g., one or more substitutions in a CDR1, CDR2 and/or CDR3 of the heavy chain. In some embodiments, the CDRs are according to the Kabat definition (e.g., as set out in Tables 11A-11C). In some embodiments, the CDRs are according to the Chothia definition (e.g., as set out in Table 11A).

[1144] In some embodiments, the encoded anti-HER2 antibody molecule comprises at least one, two, three, four, five or six CDRs (or collectively all of the CDRs) from a heavy and light chain variable region comprising an amino acid sequence shown in Tables 11A-11C, or is encoded by a nucleotide sequence shown in Tables 11A-11C. In some embodiments, one or more of the CDRs (or collectively all of the CDRs) have one, two, three, four, five, six or more changes, e.g., amino acid substitutions (e.g., conservative substitutions), insertions, or deletions, relative to the CDRs shown in Tables 11A-11C, or encoded by a nucleotide sequence shown in Tables 11A-11C. In some embodiments, the CDRs are according to the Kabat definition (e.g., as set out in Tables 11A-11C). In some embodiments, the CDRs are according to the Chothia definition (e.g., as set out in Table 11A).

[1145] In some embodiments, the encoded anti-HER2 antibody molecule comprises all three CDRs from a heavy chain variable region, all three CDRs from light chain variable region, or both (e.g., all six CDRs from a heavy chain variable region and a light chain variable region) comprising an amino acid sequence shown in Tables 11A-11C, or is encoded by a nucleotide sequence shown in Tables 11A-11C. In some embodiments, the CDRs are according to the Kabat definition (e.g., as set out in Tables 11A-11C). In some embodiments, the CDRs are according to the Chothia definition (e.g., as set out in Table 11A).

[1146] In some embodiments, the encoded anti-HER2 antibody comprises a heavy chain complementary determining region 1 (HC CDR1), a HC CDR2, and a HC CDR3, wherein the HC CDR1, HC CDR2, and HC CDR3 sequences comprise the sequences of SEQ ID NO: 5037, 5038, and 5039, respectively. In some embodiments, the encoded anti-HER2 antibody comprises a LC CDR1, a LC CDR2 and an LC CDR3, wherein the LC CDR1, LC CDR2, and LC CDR3 sequences comprise the sequences of SEQ ID NO: 5043, 5044, and 5045, respectively. In some embodiments, the encoded anti-HER2 antibody comprises HC CDR1, a HC CDR2, a HC CDR3, a LC CDR1, a LC CDR2 and an LC CDR3, wherein the HC CDR1, HC CDR2, HC CDR3, LC CDR1, LC CDR2, and LC CDR3 sequences comprise the sequences of SEQ ID NO: 5037, 5038, 5039, 5043, 5044, and 5045, respectively. In some embodiments, one or more of the CDRs (or collectively all of the CDRs) have one, two, three, four, five, six or more changes, e.g., amino acid substitutions (e.g., conservative substitutions), insertions, or deletions, relative to SEQ ID NO: 5043, 5044, 5045, 5037, 5038, 5039, 5043, 5044, and 5045. In some embodiments, an antibody molecule described herein has one, two, three or four changes, e.g., substitutions, relative to SEQ ID NO: 5039.

[1147] In some embodiments, the encoded anti-HER2 antibody molecule comprises a heavy chain complementary determining region 1 (HC CDR1), a HC CDR2, and a HC CDR3, wherein the HC CDR1, HC CDR2, and HC CDR3 sequences comprise the sequences of SEQ ID NO: 5179, 5180, and 5181, respectively. In some embodiments, the encoded anti-HER2 antibody molecule comprises a LC CDR1, a LC CDR2 and an LC CDR3, wherein the LC CDR1, LC CDR2, and LC CDR3 sequences comprise the sequences of SEQ ID NO: 5182, 5183, and 5184, respectively. In some embodiments, the encoded anti-HER2 antibody molecule comprises HC CDR1, a HC CDR2, a HC CDR3, a LC CDR1, a LC CDR2 and an LC CDR3, wherein the HC CDR1, HC CDR2, HC CDR3, LC CDR1, LC CDR2, and LC CDR3 sequences comprise the sequences of SEQ ID NO: 5179, 5180, 5181, 5182, 5183, and 5184, respectively.

[1148] In some embodiments, the encoded anti-HER2 antibody molecule comprises a heavy chain complementary determining region 1 (HC CDR1), a HC CDR2, and a HC CDR3, wherein the HC CDR1, HC CDR2, and HC CDR3 sequences comprise the sequences of SEQ ID NO: 5053, 5054, and, 5055, respectively. In some embodiments, the encoded anti-HER2 antibody molecule comprises a LC CDR1, a LC CDR2 and an LC CDR3, wherein the LC CDR1, LC CDR2, and LC CDR3 sequences comprise the sequences of SEQ ID NO: 5059, 5060, and 5061, respectively. In some embodiments, the encoded anti-HER2 antibody molecule comprises HC CDR1, a HC CDR2, a HC CDR3, a LC CDR1, a LC CDR2 and an LC CDR3, wherein the HC CDR1, HC CDR2, HC CDR3, LC CDR1, LC CDR2, and LC CDR3 sequences comprise the sequences of SEQ ID NO: 5053, 5054, 5055, 5059, 5060, and 5061, respectively.

[1149] In some embodiments, the encoded anti-HER2 antibody molecule comprises HC CDR1, a HC CDR2, a HC CDR3, a LC CDR1, a LC CDR2 and/or an LC CDR3, wherein the HC CDR1, HC CDR2, HC CDR3, LC CDR1, LC CDR2, and LC CDR3 sequences comprise the sequences of SEQ ID NO: 5117, 5118, 5119 5123, 5124, and 5125, respectively. In some embodiments, the encoded anti-HER2 antibody molecule comprises HC CDR1, a HC CDR2, a HC CDR3, a LC CDR1, a LC CDR2 and/or an LC CDR3, wherein the HC CDR1, HC CDR2, HC CDR3, LC CDR1, LC CDR2, and LC CDR3 sequences comprise the sequences of SEQ ID NO: 5120, 5121, 5122; 5126, 5127, and 5128, respectively.

[1150] In some embodiments, the encoded anti-HER2 antibody molecule comprises HC CDR1, a HC CDR2, a HC CDR3, a LC CDR1, a LC CDR2 and/or an LC CDR3, wherein the HC CDR1, HC CDR2, HC CDR3, LC CDR1, LC CDR2, and LC CDR3 sequences comprise the sequences of SEQ ID NO: 5281, 5282, 5283, 5287, 5288, and 5289, respectively. In some embodiments, the encoded anti-HER2 antibody molecule comprises HC CDR1, a HC CDR2, a HC CDR3, a LC CDR1, a LC CDR2 and/or an LC CDR3, wherein the HC CDR1, HC CDR2, HC CDR3, LC CDR1, LC CDR2, and LC CDR3 sequences comprise the sequences of SEQ ID NO: 5284, 5285, 5286, 5290, 5291, and 5292, respectively.

[1151] In some embodiments, the encoded anti-HER2 antibody molecule comprises HC CDR1, a HC CDR2, a HC CDR3, a LC CDR1, a LC CDR2 and/or an LC CDR3, wherein the HC CDR1, HC CDR2, HC CDR3, LC CDR1, LC CDR2, and LC CDR3 sequences comprise the sequences of SEQ ID NO: 5281, 5282, 6510, 5287, 5288, and 5289, respectively.

[1152] In some embodiments, the encoded anti-HER2 antibody molecule comprises HC CDR1, a HC CDR2, a HC CDR3, a LC CDR1, a LC CDR2 and/or an LC CDR3, wherein the HC CDR1, HC CDR2, HC CDR3, LC CDR1, LC CDR2, and LC CDR3 sequences comprise the sequences of SEQ ID NO: 5281, 5282, 6515, 5287, 5288, and 5289, respectively.

[1153] In some embodiments, the encoded anti-HER2 antibody molecule comprises HC CDR1, a HC CDR2, a HC CDR3, a LC CDR1, a LC CDR2 and/or an LC CDR3, wherein the HC CDR1, HC CDR2, HC CDR3, LC CDR1, LC CDR2, and LC CDR3 sequences comprise the sequences of SEQ ID NO: 5281, 5282, 6520, 5287, 5288, and 5289, respectively.

[1154] In some embodiments, the encoded anti-HER2 antibody molecule comprises HC CDR1, a HC CDR2, a HC CDR3, a LC CDR1, a LC CDR2 and/or an LC CDR3, wherein the HC CDR1, HC CDR2, HC CDR3, LC CDR1, LC CDR2, and LC CDR3 sequences comprise the sequences of SEQ ID NO: 5281, 5282, 6525, 5287, 5288, and 5289, respectively.

[1155] In some embodiments, the encoded anti-HER2 antibody molecule comprises HC CDR1, a HC CDR2, a HC CDR3, a LC CDR1, a LC CDR2 and/or an LC CDR3, wherein the HC CDR1, HC CDR2, HC CDR3, LC CDR1, LC CDR2, and LC CDR3 sequences comprise the sequences of SEQ ID NO: 5281, 5282, 6530, 5287, 5288, and 5289, respectively.

[1156] In some embodiments, the encoded anti-HER2 antibody molecule comprises a heavy chain variable region comprising the amino acid sequence of SEQ ID NO: 5001, 5367, 5172, 5106, 5010, 5069, 5192, 5224, 5090, 5110, 5254, 5258, 5130, 5262, 5270, 5326, 6511, 6516, 6521, 6526, 6531, 6536, 6539, 6542, 6545, or 6548; or encoded by the nucleotide sequence of SEQ ID NO: 5002, 5171, 5105, 5009, 5068, 5191, 5223, 5089, 5109, 5253, 5257, 5129, 5261, 5269, 5330, 6512, 6517, 6522, 6527, 6532, 6537, 6540, 6543, 6546, or 6549; or a sequence substantially identical (e.g., having at least about 80%, 85%, 90%, 92%, 95%, 97%, 98%, or 99% sequence identity) to any of the aforesaid sequences.

[1157] In some embodiments, an encoded anti-HER2 antibody molecule described herein comprises a heavy chain variable region comprising one, two, three or all of an amino acid other than D at position 102, an amino acid other than M at position 107, an amino acid other than D at position 108, and/or an amino acid other than Y at position 109, relative to a reference sequence numbered according to the amino acid sequence of SEQ ID NO: 5001. In some embodiments, the anti-HER2 antibody molecule comprises one, two, three or all of the amino acid W at position 102, the amino acid F at position 107, A at position 108, and/or L at position 109, relative to a reference sequence numbered according to the amino acid sequence of SEQ ID NO: 5001. In some embodiments, the anti-HER antibody molecule comprises the amino acid W at position 102, the amino acid F at position 107, the amino acid A position 108, and the amino acid L at position 109, relative to a reference sequence numbered according to the amino acid sequence of SEQ ID NO: 5001. In some embodiments, the anti-HER antibody molecule comprises the amino acid W at position 102, the amino acid F at position 107, and the amino acid A position 108, relative to a reference sequence numbered according to the amino acid sequence of SEQ ID NO: 5001. In some embodiments, the anti-HER antibody molecule comprises the amino acid W at position 102, the amino acid F at position 107, and the amino acid L at position 109, relative to a reference sequence numbered according to the amino acid sequence of SEQ ID NO: 5001. In some embodiments, the anti-HER antibody molecule comprises the amino acid W at position 102, the amino acid A position 108, and the amino acid L at position 109, relative to a reference sequence numbered according to the amino acid sequence of SEQ ID NO: 5001. In some embodiments, the anti-HER antibody molecule comprises the amino acid F at position 107, the amino acid A position 108, and the amino acid L at position 109, relative to a reference sequence numbered according to the amino acid sequence of SEQ ID NO: 5001.

[1158] In some embodiments, an encoded anti-HER2 antibody molecule described herein comprises a heavy chain variable region comprising an amino acid substitution at one, two, three, or all of positions 102 (e.g., D102W), 107 (e.g., M107F), 108 (e.g., D108A), and/or 109 (e.g., Y109L), relative to a reference sequence numbered according to the amino acid sequence of SEQ ID NO: 5001. In some embodiments, the anti-HER2 antibody molecule comprises the amino acid substitutions D102W, M107F, D108A, and Y109L, relative to a reference sequence numbered according to the amino acid sequence of SEQ ID NO: 5001. In some embodiments, the anti-HER2 antibody molecule comprises the amino acid substitutions D102W, M107F, and D108A, relative to a reference sequence numbered according to the amino acid sequence of SEQ ID NO: 5001. In some embodiments, the anti-HER2 antibody molecule comprises the amino acid substitutions D102W, M107F, and Y109L, relative to a reference sequence numbered according to the amino acid sequence of SEQ ID NO: 5001. In some embodiments, the anti-HER2 antibody molecule comprises the amino acid substitutions D102W, D108A, and Y109L, relative to a reference sequence numbered according to the amino acid sequence of SEQ ID NO: 5001. In some embodiments, the anti-HER2 antibody molecule comprises the amino acid substitutions M107F, D108A, and Y109L, relative to a reference sequence numbered according to the amino acid sequence of SEQ ID NO: 5001.

[1159] In some embodiments, an encoded anti-HER2 antibody described herein comprises a heavy chain variable region comprising an amino acid substitution at one, two, three, or all of positions, 98 (e.g., D98W), 100 (e.g., M100F), 101 (e.g., D101A), and/or 102 (e.g., Y102L), of the CDR3 region according to Kabat numbering (e.g., as shown in Moon et al., Mol. Cells 39(3): 217-228 (2016), which is hereby incorporated by reference in its entirety). In some embodiments, the anti-HER2 antibody molecule comprises the amino acid substitutions D98W, M100F, D101A, and Y102L, numbered according to Kabat. In some embodiments, the anti-HER2 antibody molecule comprises the amino acid substitutions D98W, M100F, and D101A, numbered according to Kabat. In some embodiments, the anti-HER2 antibody molecule comprises the amino acid substitutions D98W, M100F, and Y102L, numbered according to Kabat. In some embodiments, the anti-HER2 antibody molecule comprises the amino acid substitutions D98W, D101A, and Y102L, numbered according to Kabat. In some embodiments, the anti-HER2 antibody molecule comprises the amino acid substitutions M100F, D101A, and Y102L, numbered according to Kabat.

[1160] In some embodiments, the encoded anti-HER2 antibody molecule comprises a light chain variable region comprising the amino acid sequence of SEQ ID NO: 5006, 5176, 5020, 5014, 5086, 5196, 5228, 5094, 5114. 5256, 5260, 5134, 5266, 5274, 5339, or 5354; or encoded by the nucleotide sequence of SEQ ID NO: 5005, 5175, 5019, 5013, 5085, 5195, 5227, 5094, 5113, 5255, 5259, 5133, 5265, 5273, 5340, or 5353; or a sequence substantially identical (e.g., having at least about 80%, 85%, 90%, 92%, 95%, 97%, 98%, or 99% sequence identity) to any of the aforesaid sequences.

[1161] In some embodiments, the encoded anti-HER2 antibody molecule comprises a heavy chain variable region and a light chain variable region comprising the amino acid sequences of SEQ ID NO: 5110 and 5114; or encoded by the nucleotide sequences of SEQ ID NO: 5109 and 5113; or a sequence substantially identical (e.g., having at least about 80%, 85%, 90%, 92%, 95%, 97%, 98%, or 99% sequence identity) to any of the aforesaid sequences.

[1162] In some embodiments, the encoded anti-HER2 antibody molecule comprises a heavy chain variable region comprising the amino acid sequence of SEQ ID NO: 5110; or encoded by the nucleotide sequence of SEQ ID NO: 5109; or a sequence substantially identical (e.g., having at least about 80%, 85%, 90%, 92%, 95%, 97%, 98%, or 99% sequence identity) to any of the aforesaid sequences. In some embodiments, the encoded anti-HER2 antibody molecule comprises a light chain variable region comprising the amino acid sequence of SEQ ID NO: 5114; or encoded by the nucleotide sequence of SEQ ID NO: 5113; or a sequence substantially identical (e.g., having at least about 80%, 85%, 90%, 92%, 95%, 97%, 98%, or 99% sequence identity) to any of the aforesaid sequences. In some embodiments, the encoded anti-HER2 antibody molecule comprises a heavy chain variable region and a light chain variable region comprising the amino acid sequences of SEQ ID NO: 5110 and 5114, respectively; or encoded by the nucleotide sequences of SEQ ID NO: 5109 and 5113, respectively; or a sequence substantially identical (e.g., having at least about 80%, 85%, 90%, 92%, 95%, 97%, 98%, or 99% sequence identity) to any of the aforesaid sequences.

[1163] In some embodiments, the encoded anti-HER2 antibody molecule comprises a heavy chain variable region and a light chain variable region comprising the amino acid sequences of SEQ ID NO: 5270 and 5274; or encoded by the nucleotide sequences of SEQ ID NO: 5269 and 5273; or a sequence substantially identical (e.g., having at least about 80%, 85%, 90%, 92%, 95%, 97%, 98%, or 99% sequence identity) to any of the aforesaid sequences.

[1164] In some embodiments, the encoded anti-HER2 antibody molecule comprises a heavy chain variable region comprising the amino acid sequence of SEQ ID NO: 5270; or encoded by the nucleotide sequence of SEQ ID NO: 5269; or a sequence substantially identical (e.g., having at least about 80%, 85%, 90%, 92%, 95%, 97%, 98%, or 99% sequence identity) to any of the aforesaid sequences. In some embodiments, the encoded anti-HER2 antibody molecule comprises a light chain variable region comprising the amino acid sequence of SEQ ID NO: 5274; or encoded by the nucleotide sequence of SEQ ID NO: 5273; or a sequence substantially identical (e.g., having at least about 80%, 85%, 90%, 92%, 95%, 97%, 98%, or 99% sequence identity) to any of the aforesaid sequences. In some embodiments, the encoded anti-HER2 antibody molecule comprises a heavy chain variable region and a light chain variable region comprising the amino acid sequences of SEQ ID NO: 5270 and 5274, respectively; or encoded by the nucleotide sequences of SEQ ID NO: 5269 and 5273, respectively; or a sequence substantially identical (e.g., having at least about 80%, 85%, 90%, 92%, 95%, 97%, 98%, or 99% sequence identity) to any of the aforesaid sequences.

[1165] In some embodiments, the encoded anti-HER2 antibody molecule comprises a heavy chain constant region comprising the amino acid sequence of SEQ ID NO: 5004, 5018, 5012, 5026, 5030, 5212, 5214, 5216, 5220, 5264, 5278, 5280, or 5345; or encoded by the nucleotide sequence of SEQ ID NO: 5005, 5017, 50121, 5025, 5029, 5211, 5213, 5215, 5219, 5263, 5277, 5279, or 5344; or a sequence substantially identical (e.g., having at least about 80%, 85%, 90%, 92%, 95%, 97%, 98%, or 99% sequence identity) to any of the aforesaid sequences. In some embodiments, the encoded anti-HER2 antibody molecule comprises a light chain constant region comprising the amino acid sequence of SEQ ID NO: 5008, 5022, 5218, or 5222; or encoded by the nucleotide sequence of SEQ ID NO: 5007, 5021, 5218, 5221, or 5346; or a sequence substantially identical (e.g., having at least about 80%, 85%, 90%, 92%, 95%, 97%, 98%, or 99% sequence identity) to any of the aforesaid sequences.

[1166] In some embodiments, the encoded anti-HER2 antibody molecule comprises a heavy chain comprising the amino acid sequence of SEQ ID NO: 5034, 5174, 5050, 5066, 5084, 5194, 5226, 5092, 5112, 5254, 5258, 5132, 5264, 5272, 5331, 6513, 6518, 6523, 6528, or 6533; or encoded by the nucleotide sequence of SEQ ID NO: 5033, 5173, 5049, 5065, 5083, 5193, 5225, 5091, 5111, 5253, 5257, 5131, 5263, 5271, 5332, 6514, 6519, 6524, 6529, or 6534; or a sequence substantially identical (e.g., having at least about 80%, 85%, 90%, 92%, 95%, 97%, 98%, or 99% sequence identity) to any of the aforesaid sequences. In some embodiments, the encoded anti-HER2 antibody comprises a light chain comprising the amino acid sequence of SEQ ID NO: 5036, 5178, 5052, 5068, 5088, 5198, 5230, 5096, 5116, 5136, 5268, 5276, 5341, or 5365; or encoded by the nucleotide sequence of SEQ ID NO: 5035, 5177, 5051, 5067, 5087, 5197, 5229, 5095, 5115, 5135, 5267, 5275, 5342, or 5366; or a sequence substantially identical (e.g., having at least about 80%, 85%, 90%, 92%, 95%, 97%, 98%, or 99% sequence identity) to any of the aforesaid sequences.

[1167] In some embodiments, the encoded anti-HER2 antibody molecule comprises a heavy chain and a light chain comprising the amino acid sequence of SEQ ID NO: 5112 and 5116, respectively; or encoded by the nucleotide sequence of SEQ ID NO: 5111 and 5115, respectively; or a sequence substantially identical (e.g., having at least about 80%, 85%, 90%, 92%, 95%, 97%, 98%, or 99% sequence identity) to any of the aforesaid sequences.

[1168] In some embodiments, the encoded anti-HER2 antibody molecule comprises a heavy chain and a light chain comprising the amino acid sequence of SEQ ID NO: 5272 and 5276, respectively; or encoded by the nucleotide sequence of SEQ ID NO: 5271 and 5275, respectively; or a sequence substantially identical (e.g., having at least about 80%, 85%, 90%, 92%, 95%, 97%, 98%, or 99% sequence identity) to any of the aforesaid sequences.

[1169] In some embodiments, the encoded HER-2 antibody molecule comprises an anti-HER2 antigen binding domain, e.g., an scFv, and an Fc region. In some embodiments, the encoded HER-2 antibody molecule comprises an anti-HER2 scFv fused to an Fc region. In some embodiments, the encoded HER-2 antibody molecule described herein comprises an Fc region that is mutated to have reduced binding to an Fc receptor or reduced ADCC. In some embodiments, the scFv comprises the amino acid sequence of SEQ ID NO: 5349, 5352, or is encoded by the nucleotide sequence of SEQ ID NO: 5350, 5351, 5364; a sequence substantially identical (e.g., having at least about 80%, 85%, 90%, 92%, 95%, 97%, 98%, or 99% sequence identity) to any of the aforesaid sequences. In some embodiments, the Fc region comprises the amino acid sequence of SEQ ID NO: 5278, or is encoded by the nucleotide sequence of SEQ ID NO: 5277; or a sequence substantially identical (e.g., having at least about 80%, 85%, 90%, 92%, 95%, 97%, 98%, or 99% sequence identity) to any of the aforesaid sequences.

[1170] In some embodiments, the encoded HER2 antibody molecule comprises VH, VL, scFv, heavy chain, and/or light chain encoded by a codon-optimized nucleotide sequence. Codon-optimization may be achieved by any method known to one with skill in the art such as, but not limited to, by a method according to Genescript, EMBOSS, Bioinformatics, NUS, NUS2, Geneinfinity, JDT, NUS3, GregThatcher, Insilico, Molbio, N2P, Snapgene, and/or VectorNTI.

[1171] In some embodiments, disclosed herein is an encoded an antibody molecule that competes for binding to HER2 with the aforesaid antibody molecules. In some embodiments, disclosed herein is an encoded antibody molecule that binds to the same epitope as, substantially the same epitope as, an epitope that overlaps with, or an epitope that substantially overlaps with, the epitope of the aforesaid anti-HER2 antibody molecules.

[1172] This present disclosure provides in some embodiments, a nucleic acid (e.g., an isolated nucleic acid) comprising a transgene encoding any of the above described antibody molecules and genetic elements, AAV vectors, AAV particles, and cells comprising the same.

TABLE 11A
Exemplary Anti-HER2 Antibodies

| | SEQ | | |
|---|---|---|---|
| Ab ID | ID NO | Description | Sequence |
| Ab-HER- | 5037 | HC CDR1 | DTYIH |
| 04 | | (Kabat) | |
| | 5038 | HC CDR2 | RIYPTNGYTRYADSVKG |
| | | (Kabat) | |
| | 5039 | HC CDR3 | WGGDGFYAMDY |
| | | (Kabat) | |
| | 5040 | HC CDR1 | GFNIKDT |
| | | (Chothia) | |
| | 5041 | HC CDR2 | YPTNGY |
| | | (Chothia) | |
| | 5042 | HC CDR3 | WGGDGFYAMDY |
| | | (Chothia) | |
| | 5001 | VH | EVQLVESGGGLVQPGGSLRLSCAASGFNIKDTYIHWVRQAPGKGLEWVAR |
| | | | IYPTNGYTRYADSVKGRFTISADTSKNTAYLQMNSLRAEDTAVYYCSRW |
| | | | GGDGFYAMDYWGQGTLVTVSS |
| | 5367 | VH | EVQLVESGGGLVQPGGSLRLSCAASGFNIKDTYIHWVRQAPGKGLEWVAR |
| | | | IYPTNGYTRYADSVKGRFTISADTSKNTAYLQMNSLRAEDTAVYYCSRW |
| | | | GGWGFYAFALWGQGTLVTVSS |
| | 5002 | DNA VH | gaggttcagctggtggagtctggcggtggcctggtgcagccagggggctc |
| | | | actccgtttgtcctgtgcagcttctggcttcaacattaaagacacctat |
| | | | atacactgggtgcgtcaggccccgggtaagggcctggaatgggttgcaa |
| | | | ggatttatcctacgaatggttatactagatatgccgatagcgtcaaggg |
| | | | ccgtttcactataagcgcagacacatccaaaaacacagcctacctgcag |
| | | | atgaacagcctgcgtgctgaggacactgccgtctattattgttctagat |
| | | | ggggaggggacggcttctatgctatggacTACtggggtcaaggaaccct |
| | | | ggtcaccgtctcctcg |
| | 5034 | Heavy Chain | EVQLVESGGGLVQPGGSLRLSCAASGFNIKDTYIHWVRQAPGKGLEWVAR |
| | | (hIgG1) | IYPTNGYTRYADSVKGRFTISADTSKNTAYLQMNSLRAEDTAVYYCSRWG |
| | | | GDGFYAMDYWGQGTLVTVSSASTKGPSVFPLAPSSKSTSGGTAALGCLVK |
| | | | DYFPEPVTVSWNSGALTSGVHTFPAVLQSSGLYSLSSVVTVPSSSLGTQT |
| | | | YICNVNHKPSNTKVDKKVEPPKSCDKTHTCPPCPAPELLGGPSVFLFPPK |
| | | | PKDTLMISRTPEVTCVVVDVSHEDPEVKFNWYVDGVEVHNAKTKPREEQY |
| | | | NSTYRVVSVLTVLHQDWLNGKEYKCKVSNKALPAPIEKTISKAKGQPREP |
| | | | QVYTLPPSRDELTKNQVSLTCLVKGFYPSDIAVEWESNGQPENNYKTTPP |
| | | | VLDSDGSFFLYSKLTVDKSRWQQGNVFSCSVMHEALHNHYTQKSLSLSPG |
| | | | K |
| | 5033 | DNA Heavy | gaggttcagctggtggagtctggcggtggcctggtgcagccagggggctc |
| | | Chain | actccgtttgtcctgtgcagcttctggcttcaacattaaagacacctata |
| | | (hIgG1) | tacactgggtgcgtcaggccccgggtaagggcctggaatgggttgcaagg |
| | | | atttatcctacgaatggttatactagatatgccgatagcgtcaagggccg |
| | | | tttcactataagcgcagacacatccaaaaacacagcctacctgcagatga |
| | | | acagcctgcgtgctgaggacactgccgtctattattgttctagatgggga |
| | | | ggggacggcttctatgctatggacTACtggggtcaaggaaccctggtcac |
| | | | cgtctcctcggcgtcgaccaagggcccatcggtcttccccctggcaccct |
| | | | cctccaagagcacctctgggggcacagcggccctgggctgcctggtcaag |
| | | | gactacttccccgaacctgtgacggtctcgtggaactcaggcgccctgac |
| | | | cagcggcgtgcacaccttcccggctgtcctacagtcctcaggactctact |
| | | | ccctcagcagcgtggtgaccgtgccctccagcagcttgggcacccagacc |
| | | | tacatctgcaacgtgaatcacaagcccagcaacaccaaggtggacaagaa |
| | | | agttgagcccCCCaaatcttgtgacaaaactcacacatgcccaccgtgcc |
| | | | cagcacctgaactcctggggggaccgtcagtcttcctcttccccccaaaa |
| | | | cccaaggacaccctcatgatctcccggacccctgaggtcacatgcgtggt |
| | | | ggtggacgtgagccacgaagaccctgaggtcaagttcaactggtacgtgg |
| | | | acggcgtggaggtgcataatgccaagacaaagccgcgggaggagcagtac |
| | | | aacagcacgtaccgtgtggtcagcgtcctcaccgtcctgcaccaggactg |
| | | | gctgaatggcaaggagtacaagtgcaaggtctccaacaaagccctcccag |
| | | | cccccatcgagaaaaccatctccaaagccaaagggcagccccgagaacca |
| | | | caggtgtacaccctgcccccatcccgggatgagctgaccaagaaccaggt |
| | | | cagcctgacctgcctggtcaaaggcttctatcccagcgacatcgccgtgg |
| | | | agtgggagagcaatgggcagccggagaacaactacaagaccacgcctccc |
| | | | gtgctggactccgacggctccttcttcctctacagcaagctcaccgtgga |
| | | | caagagcaggtggcagcaggggaacgtcttctcatgctccgtgatgcatg |
| | | | aggctctgcacaaccactacacgcagaagagcctctccctgtctccgggt |
| | | | aaa |
| | 5043 | LC CDR 1 | RASQDVNTAVA |
| | | (Kabat) | |
| | 5044 | LC CDR2 | SASFLYS |
| | | (Kabat) | |
| | 5045 | LC CDR3 | QQHYTTPPT |
| | | (Kabat) | |
| | 5046 | LC CDR1 | RASQDVNTAVA |
| | | (Chothia) | |
| | 5047 | LC CDR2 | SASFLYS |
| | | (Chothia) | |
| | 5048 | LC CDR3 | QQHYTTPPT |
| | | (Chothia) | |
| | 5006 | VL | DIQMTQSPSSLSASVGDRVTITCRASQDVNTAVAWYQQKPGKAPKLLIYS |
| | | | ASFLYSGVPSRFSGSRSGTDETLTISSLQPEDFATYYCQQHYTTPPTFGQ |
| | | | GTKVEIK |
| | 5005 | DNA VL | gatatccagatgacccagtccccgagctccctgtccgcctctgtgggcga |
| | | | tagggtcaccatcacctgccgtgccagtcaggatgtgaatactgctgtag |
| | | | cctggtatcaacagaaaccaggaaaagctccgaaactactgatttactcg |
| | | | gcatccttcctcTACtctggagtcccttctcgcttctctggatccagatc |
| | | | tgggacggatttcactctgaccatcagcagtctgcagccggaagacttcg |
| | | | caacttattactgtcagcaacattatactactcctcccacgttcggacag |
| | | | ggtaccaaggtggagatcaaa |
| | 5036 | Light Chain | DIQMTQSPSSLSASVGDRVTITCRASQDVNTAVAWYQQKPGKAPKLLIYS |
| | | (hIgG kappa) | ASFLYSGVPSRFSGSRSGTDFTLTISSLQPEDFATYYCQQHYTTPPTFGQ |
| | | | GTKVEIKRTVAAPSVFIFPPSDEQLKSGTASVVCLLNNFYPREAKVQWKV |
| | | | DNALQSGNSQESVTEQDSKDSTYSLSSTLTLSKADYEKHKVYACEVTHQG |
| | | | LSSPVTKSFNRGEC |
| | 5035 | DNA Light | gatatccagatgacccagtccccgagctccctgtccgcctctgtgggcga |
| | | Chain (hIgG | tagggtcaccatcacctgccgtgccagtcaggatgtgaatactgctgtag |
| | | kappa) | cctggtatcaacagaaaccaggaaaagctccgaaactactgatttactcg |
| | | | gcatccttcctcTACtctggagtcccttctcgcttctctggatccagatc |
| | | | tgggacggatttcactctgaccatcagcagtctgcagccggaagacttcg |
| | | | caacttattactgtcagcaacattatactactcctcccacgttcggacag |
| | | | ggtaccaaggtggagatcaaacgaactgtggctgcaccatctgtcttcat |
| | | | cttcccgccatctgatgagcagttgaaatctggaactgcctctgttgtgt |
| | | | gcctgctgaataacttctatcccagagaggccaaagtacagtggaaggtg |
| | | | gataacgccctccaatcgggtaactcccaggagagtgtcacagagcagga |
| | | | cagcaaggacagcacctacagcctcagcagcaccctgacgctgagcaaag |
| | | | cagactacgagaaacacaaagtctacgcctgcgaagtcacccatcagggc |
| | | | ctgagctcgcccgtcacaaagagcttcaacaggggagagtgt |
| Ab-HER- | 5179 | HC CDR1 | DYTMD |
| 05 | | (Kabat) | |
| | 5180 | HC CDR2 | DVNPNSGGSIYNQRFKG |
| | | (Kabat) | |
| | 5181 | HC CDR3 | NLGPSFYFDYW |
| | | (Kabat) | |
| | 5172 | VH | EVQLVESGGGLVQPGGSLRLSCAASGFTFTDYTMDWVRQAPGKGLEWVAD |
| | | | VNPNSGGSIYNQRFKGRFTLSVDRSKNTLYLQMNSLRAEDTAVYYCARNL |
| | | | GPSFYFDYWGQGTLVTVSS |
| | 5171 | DNA VH | gaggttcagctggtggagtctggcggtggcctggtgcagccagggggctc |
| | | | actccgtttgtcctgtgcagcttctggcttcaCcTTCaCCgacTATACCA |
| | | | TGGATtgggtgcgtcaggccccgggtaagggcctggaatgggttgcaGAC |
| | | | GTGAATcctAATTCTggtGGTTCTATAtatAATCAGCGTTTCaagggccg |
| | | | tttcactCTGagcGTTgacCGTtccaaaaacacaCTGtacctgcagatga |
| | | | acagcctgcgtgctgaggacactgccgtctattattgtGCAagaAATCTG |
| | | | gggCCTAGCttctatTTCgacTACtggggtcaaggaaccctggtcaccgt |
| | | | ctcctcg |
| | 5174 | Heavy Chain | EVQLVESGGGLVQPGGSLRLSCAASGFTFTDYTMDWVRQAPGKGLEWVAD |
| | | (hIgG1) | VNPNSGGSIYNQRFKGRFTLSVDRSKNTLYLQMNSLRAEDTAVYYCARNL |
| | | | GPSFYFDYWGQGTLVTVSSASTKGPSVFPLAPSSKSTSGGTAALGCLVKD |
| | | | YFPEPVTVSWNSGALTSGVHTFPAVLQSSGLYSLSSVVTVPSSSLGTQTY |
| | | | ICNVNHKPSNTKVDKKVEPKSCDKTHTCPPCPAPELLGGPSVFLFPPKPK |
| | | | DTLMISRTPEVTCVVVDVSHEDPEVKFNWYVDGVEVHNAKTKPREEQYNS |
| | | | TYRVVSVLTVLHQDWLNGKEYKCKVSNKALPAPIEKTISKAKGQPREPQV |
| | | | YTLPPSREEMTKNQVSLTCLVKGFYPSDIAVEWESNGQPENNYKTTPPVL |
| | | | DSDGSFFLYSKLTVDKSRWQQGNVFSCSVMHEALHNHYTQKSLSLSPGK |
| | 5173 | DNA Heavy | gaggttcagctggtggagtctggcggtggcctggtgcagccagggggctc |
| | | Chain | actccgtttgtcctgtgcagcttctggcttcaCcTTCaCCgacTATACCA |
| | | (hIgG1) | TGGATtgggtgcgtcaggccccgggtaagggcctggaatgggttgcaGAC |
| | | | GTGAATcctAATTCTggtGGTTCTATAtatAATCAGCGTTTCaagggccg |
| | | | tttcactCTGagcGTTgacCGTtccaaaaacacaCTGtacctgcagatga |
| | | | acagcctgcgtgctgaggacactgccgtctattattgtGCAagaAATCTG |
| | | | gggCCTAGCttctatTTCgacTACtggggtcaaggaaccctggtcaccgt |
| | | | ctcctcggcgtcgaccaagggcccatcggtcttccccctggcaccctcct |
| | | | ccaagagcacctctgggggcacagcggccctgggctgcctggtcaaggac |
| | | | tacttccccgaacctgtgacggtctcgtggaactcaggcgccctgaccag |
| | | | cggcgtgcacaccttcccggctgtcctacagtcctcaggactctactccc |
| | | | tcagcagcgtggtgaccgtgccctccagcagcttgggcacccagacctac |
| | | | atctgcaacgtgaatcacaagcccagcaacaccaaggtggacaagaaagt |
| | | | tgagcccaaatcttgtgacaaaactcacacatgcccaccgtgcccagcac |
| | | | ctgaactcctggggggaccgtcagtcttcctcttccccccaaaacccaag |
| | | | gacaccctcatgatctcccggacccctgaggtcacatgcgtggtggtgga |
| | | | cgtgagccacgaagaccctgaggtcaagttcaactggtacgtggacggcg |
| | | | tggaggtgcataatgccaagacaaagccgcgggaggagcagtacaacagc |
| | | | acgtaccgtgtggtcagcgtcctcaccgtcctgcaccaggactggctgaa |
| | | | tggcaaggagtacaagtgcaaggtctccaacaaagccctcccagccccca |
| | | | tcgagaaaaccatctccaaagccaaagggcagccccgagaaccacaggtg |
| | | | tacaccctgcccccatcccgggaGgagAtgaccaagaaccaggtcagcct |
| | | | gacctgcctggtcaaaggcttctatcccagcgacatcgccgtggagtggg |
| | | | agagcaatgggcagccggagaacaactacaagaccacgcctcccgtgctg |
| | | | gactccgacggctccttcttcctctacagcaagctcaccgtggacaagag |
| | | | caggtggcagcaggggaacgtcttctcatgctccgtgatgcatgaggctc |
| | | | tgcacaaccactacacgcagaagagcctctccctgtctccgggtaaa |
| | 5182 | LC CDR 1 | KASQDVSIGVA |
| | | (Kabat) | |
| | 5183 | LC CDR2 | SASYRYT |
| | | (Kabat) | |
| | 5184 | LC CDR3 | QQYYIYPYT |
| | | (Kabat) | |
| | 5176 | VL | DIQMTQSPSSLSASVGDRVTITCKASQDVSIGVAWYQQKPGKAPKLLIYS |
| | | | ASYRYTGVPSRFSGSGSGTDFTLTISSLQPEDFATYYCQQYYIYPYTFGQ |
| | | | GTKVEIK |
| | 5175 | DNA VL | gatatccagatgacccagtccccgagctccctgtccgcctctgtgggcga |
| | | | tagggtcaccatcacctgcAAAgccagtcaggatgtgTCCATTGGGgtag |
| | | | cctggtatcaacagaaaccaggaaaagctccgaaactactgatttactcg |
| | | | gcatccTATCGCTACACGggagtcccttctcgcttctctggatccGGTtc |
| | | | tgggacggatttcactctgaccatcagcagtctgcagccggaagacttcg |
| | | | caacttattactgtcagcaaTACtatATCTATcctTACacgttcggacag |
| | | | ggtaccaaggtggagatcaaa |
| | 5178 | Light Chain | DIQMTQSPSSLSASVGDRVTITCKASQDVSIGVAWYQQKPGKAPKLLIYS |
| | | (hIgG1) | ASYRYTGVPSRFSGSGSGTDFTLTISSLQPEDFATYYCQQYYIYPYTFGQ |
| | | | GTKVEIKRTVAAPSVFIFPPSDEQLKSGTASVVCLLNNFYPREAKVQWKV |
| | | | DNALQSGNSQESVTEQDSKDSTYSLSSTLTLSKADYEKHKVYACEVTHQG |
| | | | LSSPVTKSFNRGEC |
| | 5177 | DNA Light | gatatccagatgacccagtccccgagctccctgtccgcctctgtgggcga |
| | | Chain | tagggtcaccatcacctgcAAAgccagtcaggatgtgTCCATTGGGgtag |
| | | (hIgG1) | cctggtatcaacagaaaccaggaaaagctccgaaactactgatttactcg |
| | | | gcatccTATCGCTACACGggagtcccttctcgcttctctggatccGGTtc |
| | | | tgggacggatttcactctgaccatcagcagtctgcagccggaagacttcg |
| | | | caacttattactgtcagcaaTACtatATCTATcctTACacgttcggacag |
| | | | ggtaccaaggtggagatcaaacgaactgtggctgcaccatctgtcttcat |
| | | | cttcccgccatctgatgagcagttgaaatctggaactgcctctgttgtgt |
| | | | gcctgctgaataacttctatcccagagaggccaaagtacagtggaaggtg |
| | | | gataacgccctccaatcgggtaactcccaggagagtgtcacagagcagga |
| | | | cagcaaggacagcacctacagcctcagcagcaccctgacgctgagcaaag |
| | | | cagactacgagaaacacaaagtctacgcctgcgaagtcacccatcagggc |
| | | | ctgagctcgcccgtcacaaagagcttcaacaggggagagtgt |
| Ab-HER- | 5053 | HC CDR1 | DTYIH |
| 10 | | (Kabat) | |
| | 5054 | HC CDR2 | RIYPTNGYTRYDPKFQD |
| | | (Kabat) | |
| | 5055 | HC CDR3 | WGGDGFYAMDY |
| | | (Kabat) | |
| | 5056 | HC CDR1 | GFNIKDT |
| | | (Chothia) | |
| | 5057 | HC CDR2 | YPTNGY |
| | | (Chothia) | |
| | 5058 | HC CDR3 | WGGDGFYAMDY |
| | | (Chothia) | |
| | 5016 | VH | QVQLQQSGPELVKPGASLKLSCTASGFNIKDTYIHWVKQRPEQGLEWIGR |
| | | | IYPTNGYTRYDPKFQDKATITADTSSNTAYLQVSRLTSEDTAVYYCSRWG |
| | | | GDGFYAMDYWGQGASVTVSS |
| | 5015 | DNA VH | CAGGTGCAGCTGCAGCAGAGCGGCCCCGAGCTGGTGAAGCCCGGCGCCAG |
| | | | CCTGAAGCTGAGCTGCACCGCCAGCGGCTTCAACATCAAGGACACCTACA |
| | | | TCCACTGGGTGAAGCAGAGACCCGAGCAGGGCCTGGAGTGGATCGGCAGA |
| | | | ATCTACCCCACCAACGGCTACACCAGATACGACCCCAAGTTCCAGGACAA |
| | | | GGCCACCATCACCGCCGACACCAGCAGCAACACCGCCTACCTGCAGGTGA |
| | | | GCAGACTGACCAGCGAGGACACCGCCGTGTACTACTGCAGCAGATGGGGC |
| | | | GGCGACGGCTTCTACGCCATGGACTACTGGGGCCAGGGCGCCAGCGTGAC |
| | | | CGTGAGCAGC |
| | 5050 | Heavy Chain | QVQLQQSGPELVKPGASLKLSCTASGFNIKDTYIHWVKQRPEQGLEWIGR |
| | | (hIgG1) | IYPTNGYTRYDPKFQDKATITADTSSNTAYLQVSRLTSEDTAVYYCSRWG |
| | | | GDGFYAMDYWGQGASVTVSSASTKGPSVFPLAPSSKSTSGGTAALGCLVK |
| | | | DYFPEPVTVSWNSGALTSGVHTFPAVLQSSGLYSLSSVVTVPSSSLGTQT |
| | | | YICNVNHKPSNTKVDKRVEPKSCDKTHTCPPCPAPELVGGPSVFLLPPKP |
| | | | KDTLMISRTPEVTCVVVDVSHEDPEVKFNWYVDGVEVHNAKTKPPEEQYN |
| | | | STLRVVSVLTVLHQDWLNGKEYKCKVSNKALPAPIEKTISKAKGQPREPQ |
| | | | VYTLPPSRDELTKNQVSLTCLVKGFYPSDIAVEWESNGQPENNYKTTPLV |
| | | | LDSDGSFFLYSKLTVDKSRWQQGNVFSCSVMHEALHNHYTQKSLSLSPGK |
| | 5049 | DNA Heavy | CAGGTGCAGCTGCAGCAGAGCGGCCCCGAGCTGGTGAAGCCCGGCGCCAG |
| | | Chain | CCTGAAGCTGAGCTGCACCGCCAGCGGCTTCAACATCAAGGACACCTACA |
| | | (hIgG1) | TCCACTGGGTGAAGCAGAGACCCGAGCAGGGCCTGGAGTGGATCGGCAGA |
| | | | ATCTACCCCACCAACGGCTACACCAGATACGACCCCAAGTTCCAGGACAA |
| | | | GGCCACCATCACCGCCGACACCAGCAGCAACACCGCCTACCTGCAGGTGA |
| | | | GCAGACTGACCAGCGAGGACACCGCCGTGTACTACTGCAGCAGATGGGGC |
| | | | GGCGACGGCTTCTACGCCATGGACTACTGGGGCCAGGGCGCCAGCGTGAC |
| | | | CGTGAGCAGCgcgtcgaccaagggcccatcggtcttccccctggcaccct |
| | | | cctccaagagcacctctgggggcacagcggccctgggctgcctggtcaag |
| | | | gactacttccccgaacctgtgacggtctcgtggaactcaggcgccctgac |
| | | | cagcggcgtgcacaccttcccggctgtcctacagtcctcaggactctact |
| | | | ccctcagcagcgtggtgaccgtgccctccagcagcttgggcacccagacc |
| | | | tacatctgcaacgtgaatcacaagcccagcaacaccaaggtggacaagaG |
| | | | agttgagcccaaatcttgtgacaaaactcacacatgcccaccgtgcccag |
| | | | cacctgaactcGtggggggaccgtcagtcttcctcCtccccccaaaaccc |
| | | | aaggacaccctcatgatctcccggacccctgaggtcacatgcgtggtggt |
| | | | ggacgtgagccacgaagaccctgaggtcaagttcaactggtacgtggacg |
| | | | gcgtggaggtgcataatgccaagacaaagccgcCggaggagcagtacaac |
| | | | agcacgCTccgtgtggtcagcgtcctcaccgtcctgcaccaggactggct |
| | | | gaatggcaaggagtacaagtgcaaggtctccaacaaagccctcccagccc |
| | | | ccatcgagaaaaccatctccaaagccaaagggcagccccgagaaccacag |
| | | | gtgtacaccctgcccccatcccgggaTgagCtgaccaagaaccaggtcag |
| | | | cctgacctgcctggtcaaaggcttctatcccagcgacatcgccgtggagt |
| | | | gggagagcaatgggcagccggagaacaactacaagaccacgcctcTcgtg |
| | | | ctggactccgacggctccttcttcctctacagcaagctcaccgtggacaa |
| | | | gagcaggtggcagcaggggaacgtcttctcatgctccgtgatgcatgagg |
| | | | ctctgcacaaccactacacgcagaagagcctctccctgtctccgggtaaa |
| | 5059 | LC CDR 1 | KASQDVNTAVA |
| | | (Kabat) | |
| | 5060 | LC CDR2 | SASFRYT |
| | | (Kabat) | |
| | 5061 | LC CDR3 | QQHYTTPPT |
| | | (Kabat) | |
| | 5062 | LC CDR1 | KASQDVNTAVA |
| | | (Chothia) | |
| | 5063 | LC CDR2 | SASFRYT |
| | | (Chothia) | |
| | 5064 | LC CDR3 | QQHYTTPPT |
| | | (Chothia) | |
| | 5020 | VL | DIVMTQSHKFMSTSVGDRVSITCKASQDVNTAVAWYQQKPGHSPKLLIYS |
| | | | ASFRYTGVPDRFTGSRSGTDFTFTISSVQAEDLAVYYCQQHYTTPPTEGG |
| | | | GTKVEIK |
| | 5019 | DNA VL | GACATCGTGATGACCCAGAGCCACAAGTTCATGAGCACCAGCGTGGGCGA |
| | | | CAGAGTGAGCATCACCTGCAAGGCCAGCCAGGACGTGAACACCGCCGTGG |
| | | | CCTGGTACCAGCAGAAGCCCGGCCACAGCCCCAAGCTGCTGATCTACAGC |
| | | | GCCAGCTTCAGATACACCGGCGTGCCGGACAGATTCACCGGCAGCAGAAG |
| | | | CGGCACCGACTTCACCTTCACCATCAGCAGCGTGCAGGCCGAGGACCTGG |
| | | | CCGTGTACTACTGCCAGCAGCACTACACCACCCCTCCTACCTTCGGCGGC |
| | | | GGCACCAAGGTGGAGATCAAG |
| | 5052 | Light Chain | DIVMTQSHKFMSTSVGDRVSITCKASQDVNTAVAWYQQKPGHSPKLLIYS |
| | | (hIgG1) | ASFRYTGVPDRFTGSRSGTDFTFTISSVQAEDLAVYYCQQHYTTPPTEGG |
| | | | GTKVEIKRTVAAPSVFIFPPSDEQLKSGTASVVCLLNNFYPREAKVQWKV |
| | | | DNALQSGNSQESVTEQDSKDSTYSLSSTLTLSKADYEKHKVYACEVTHQG |
| | | | LSSPVTKSFNRGEC |
| | 5051 | DNA Light | GACATCGTGATGACCCAGAGCCACAAGTTCATGAGCACCAGCGTGGGCGA |
| | | Chain | CAGAGTGAGCATCACCTGCAAGGCCAGCCAGGACGTGAACACCGCCGTGG |
| | | (hIgG1) | CCTGGTACCAGCAGAAGCCCGGCCACAGCCCCAAGCTGCTGATCTACAGC |
| | | | GCCAGCTTCAGATACACCGGCGTGCCGGACAGATTCACCGGCAGCAGAAG |
| | | | CGGCACCGACTTCACCTTCACCATCAGCAGCGTGCAGGCCGAGGACCTGG |
| | | | CCGTGTACTACTGCCAGCAGCACTACACCACCCCTCCTACCTTCGGCGGC |
| | | | GGCACCAAGGTGGAGATCAAGAGAACCGTGGCCGCCCCTAGCGTGTTCAT |
| | | | CTTCCCGCCAAGCGACGAGCAGCTGAAGAGCGGCACCGCCAGCGTGGTGT |
| | | | GCCTGCTGAACAACTTCTACCCCAGAGAGGCCAAGGTGCAGTGGAAGGTG |
| | | | GACAACGCCCTGCAGAGCGGCAACAGCCAGGAGAGCGTGACCGAGCAGGA |
| | | | CAGCAAGGACAGCACCTACAGCCTGAGCAGCACCCTGACCCTGAGCAAGG |
| | | | CCGACTACGAGAAGCACAAGGTGTACGCCTGCGAGGTGACCCACCAGGGC |
| | | | CTGAGCAGCCCCGTGACCAAGAGCTTCAACAGAGGCGAGTGCt |
| Ab-HER- | 5149 | HC CDR1 | DYTMD |
| 15 | | (Kabat) | |
| | 5150 | HC CDR2 | DVNPNSGGSIYNQRFKG |
| | | (Kabat) | |
| | 5151 | HC CDR3 | NLGPSFYFDYW |
| | | (Kabat) | |
| | 5010 | VH | EVQLVESGGGLVQPGGSLRLSCAASGFTFTDYTMDWVRQAPGKGLEWVAD |
| | | | VNPNSGGSIYNQRFKGRFTLSVDRSKNTLYLQMNSLRAEDTAVYYCARNL |
| | | | GPSFYFDYWGQGTLVTVSS |
| | 5009 | DNA VH | gaggttcagctggtggagtctggcggtggcctggtgcagccagggggctc |
| | | | actccgtttgtcctgtgcagcttctggcttcaCcTTCaCCgacTATACCA |
| | | | TGGATtgggtgcgtcaggccccgggtaagggcctggaatgggttgcaGAC |
| | | | GTGAATcctAATTCTggtGGTTCTATAtatAATCAGCGTTTCaagggccg |
| | | | tttcactCTGagcGTTgacCGTtccaaaaacacaCTGtacctgcagatga |
| | | | acagcctgcgtgctgaggacactgccgtctattattgtGCAagaAATCTG |
| | | | gggCCTAGCttctatTTCgacTACtggggtcaaggaaccctggtcaccgt |
| | | | ctcctcg |
| | 5066 | Heavy Chain | EVQLVESGGGLVQPGGSLRLSCAASGFTFTDYTMDWVRQAPGKGLEWVAD |
| | | (hIgG1) | VNPNSGGSIYNQRFKGRFTLSVDRSKNTLYLQMNSLRAEDTAVYYCARNL |
| | | | GPSFYFDYWGQGTLVTVSSASTKGPSVFPLAPSSKSTSGGTAALGCLVKD |
| | | | YFPEPVTVSWNSGALTSGVHTFPAVLQSSGLYSLSSVVTVPSSSLGTQTY |
| | | | ICNVNHKPSNTKVDKKVEPKSCDKTHTCPPCPAPELLGGPSVFLFPPKPK |
| | | | DTLMISRTPEVTCVVVDVSHEDPEVKFNWYVDGVEVHNAKTKPREEQYNS |
| | | | TYRVVSVLTVLHQDWLNGKEYKCKVSNKALPAPIEKTISKAKGQPREPQV |
| | | | YTLPPSREEMTKNQVSLTCLVKGFYPSDIAVEWESNGQPENNYKTTPPVL |
| | | | DSDGSFFLYSKLTVDKSRWQQGNVFSCSVMHEALHNHYTQKSLSLSPGK |
| | 5065 | DNA Heavy | gaggttcagctggtggagtctggcggtggcctggtgcagccagggggctc |
| | | Chain | actccgtttgtcctgtgcagcttctggcttcaCcTTCaCCgacTATACCA |
| | | (hIgG1) | TGGATtgggtgcgtcaggccccgggtaagggcctggaatgggttgcaGAC |
| | | | GTGAATcctAATTCTggtGGTTCTATAtatAATCAGCGTTTCaagggccg |
| | | | tttcactCTGagcGTTgacCGTtccaaaaacacaCTGtacctgcagatga |
| | | | acagcctgcgtgctgaggacactgccgtctattattgtGCAagaAATCTG |
| | | | gggCCTAGCttctatTTCgacTACtggggtcaaggaaccctggtcaccgt |
| | | | ctcctcggcgtcgaccaagggcccatcggtcttccccctggcaccctcct |
| | | | ccaagagcacctctgggggcacagcggccctgggctgcctggtcaaggac |
| | | | tacttccccgaacctgtgacggtctcgtggaactcaggcgccctgaccag |
| | | | cggcgtgcacaccttcccggctgtcctacagtcctcaggactctactccc |
| | | | tcagcagcgtggtgaccgtgccctccagcagcttgggcacccagacctac |
| | | | atctgcaacgtgaatcacaagcccagcaacaccaaggtggacaagaaagt |
| | | | tgagcccaaatcttgtgacaaaactcacacatgcccaccgtgcccagcac |
| | | | ctgaactcctggggggaccgtcagtcttcctcttccccccaaaacccaag |
| | | | gacaccctcatgatctcccggacccctgaggtcacatgcgtggtggtgga |
| | | | cgtgagccacgaagaccctgaggtcaagttcaactggtacgtggacggcg |
| | | | tggaggtgcataatgccaagacaaagccgcgggaggagcagtacaacagc |
| | | | acgtaccgtgtggtcagcgtcctcaccgtcctgcaccaggactggctgaa |
| | | | tggcaaggagtacaagtgcaaggtctccaacaaagccctcccagccccca |
| | | | tcgagaaaaccatctccaaagccaaagggcagccccgagaaccacaggtg |
| | | | tacaccctgcccccatcccgggaGgagAtgaccaagaaccaggtcagcct |
| | | | gacctgcctggtcaaaggcttctatcccagcgacatcgccgtggagtggg |
| | | | agagcaatgggcagccggagaacaactacaagaccacgcctcccgtgctg |
| | | | gactccgacggctccttcttcctctacagcaagctcaccgtggacaagag |
| | | | caggtggcagcaggggaacgtcttctcatgctccgtgatgcatgaggctc |
| | | | tgcacaaccactacacgcagaagagcctctccctgtctccgggtaaa |
| | 5156 | C12 Fynomer | GVTLFVALYDYTSYNTRDLSFHKGEKFQILRMEDGVWWEARSLTTGETGY |
| | | | IPSNYVAPVDSIQ |
| | 5155 | DNA C12 | GGCGTGACCCTGTTCGTGGCCCTGTACGACTACACCAGCTACAACACCAG |
| | | Fynomer | GGACCTGAGCTTCCACAAGGGCGAGAAGTTCCAGATCCTGAGGATGGAGG |
| | | | ACGGCGTGTGGTGGGAGGCCAGGAGCCTGACCACCGGCGAGACCGGCTAC |
| | | | ATCCCCAGCAACTACGTGGCCCCCGTGGACAGCATCCAG |
| | 5152 | LC CDR 1 | KASQDVSIGVA |
| | | (Kabat) | |
| | 5153 | LC CDR2 | SASYRYT |
| | | (Kabat) | |
| | 5154 | LC CDR3 | QQYYIYPYT |
| | | (Kabat) | |
| | 5014 | VL | DIQMTQSPSSLSASVGDRVTITCKASQDVSIGVAWYQQKPGKAPKLLIYS |
| | | | ASYRYTGVPSRFSGSGSGTDFTLTISSLQPEDFATYYCQQYYIYPYTFGQ |
| | | | GTKVEIK |
| | 5013 | DNA VL | gatatccagatgacccagtccccgagctccctgtccgcctctgtgggcga |
| | | | tagggtcaccatcacctgcAAAgccagtcaggatgtgTCCATTGGGgtag |
| | | | cctggtatcaacagaaaccaggaaaagctccgaaactactgatttactcg |
| | | | gcatccTATCGCTACACGggagtcccttctcgcttctctggatccGGTtc |
| | | | tgggacggatttcactctgaccatcagcagtctgcagccggaagacttcg |
| | | | caacttattactgtcagcaaTACtatATCTATcctTACacgttcggacag |
| | | | ggtaccaaggtggagatcaaa |
| | 5068 | Light Chain | DIQMTQSPSSLSASVGDRVTITCKASQDVSIGVAWYQQKPGKAPKLLIYS |
| | | (hIgG1) | ASYRYTGVPSRFSGSGSGTDFTLTISSLQPEDFATYYCQQYYTYPYTFGQ |
| | | | GTKVEIKRTVAAPSVFIFPPSDEQLKSGTASVVCLLNNFYPREAKVQWKV |
| | | | DNALQSGNSQESVTEQDSKDSTYSLSSTLTLSKADYEKHKVYACEVTHQG |
| | | | LSSPVTKSFNRGEC |
| | 5067 | DNA Light | gatatccagatgacccagtccccgagctccctgtccgcctctgtgggcga |
| | | Chain | tagggtcaccatcacctgcAAAgccagtcaggatgtgTCCATTGGGgtag |
| | | (hIgG1) | cctggtatcaacagaaaccaggaaaagctccgaaactactgatttactcg |
| | | | gcatccTATCGCTACACGggagtcccttctcgcttctctggatccGGTtc |
| | | | tgggacggatttcactctgaccatcagcagtctgcagccggaagacttcg |
| | | | caacttattactgtcagcaaTACtatATCTATcctTACacgttcggacag |
| | | | ggtaccaaggtggagatcaaacgaactgtggctgcaccatctgtcttcat |
| | | | cttcccgccatctgatgagcagttgaaatctggaactgcctctgttgtgt |
| | | | gcctgctgaataacttctatcccagagaggccaaagtacagtggaaggtg |
| | | | gataacgccctccaatcgggtaactcccaggagagtgtcacagagcagga |
| | | | cagcaaggacagcacctacagcctcagcagcaccctgacgctgagcaaag |
| | | | cagactacgagaaacacaaagtctacgcctgcgaagtcacccatcagggc |
| | | | ctgagctcgcccgtcacaaagagcttcaacaggggagagtgt |
| Ab-HER- | 5071 | HC CDR1 | DTYIH |
| 42 | | (Kabat) | |
| | 5072 | HC CDR2 | RIYPTNGYTRYADSVKG |
| | | (Kabat) | |
| | 5073 | HC CDR3 | WGGDGFYAMDY |
| | | (Kabat) | |
| | 5074 | HC CDR1 | GFNIKDT |
| | | (Chothia) | |
| | 5075 | HC CDR2 | YPTNGY |
| | | (Chothia) | |
| | 5076 | HC CDR3 | WGGDGFYAMDY |
| | | (Chothia) | |
| | 5069 | VH | EVQLVESGGGLVQPGGSLRLSCAASGFNIKDTYIHWVRQAPGKGLEWVAR |
| | | | IYPTNGYTRYADSVKGRFTISADTSKNTAYLQMNSLRAEDTAVYYCSRWG |
| | | | GDGFYAMDYWGQGTLVTVSS |
| | 5070 | DNA VH | gaggttcagctggtggagtctggcggtggcctggtgcagccagggggctc |
| | | | actccgtttgtcctgtgcagcttctggcttcaacattaaagacacctata |
| | | | tacactgggtgcgtcaggccccgggtaagggcctggaatgggttgcaagg |
| | | | atttatcctacgaatggttatactagatatgccgatagcgtcaagggccg |
| | | | tttcactataagcgcagacacatccaaaaacacagcctacctgcagatga |
| | | | acagcctgcgtgctgaggacactgccgtctattattgttctagatgggga |
| | | | ggggacggcttctatgctatggacTACtggggtcaaggaaccctggtcac |
| | | | cgtctcctcg |
| | 5084 | Heavy Chain | EVQLVESGGGLVQPGGSLRLSCAASGFNIKDTYIHWVRQAPGKGLEWVAR |
| | | (hIgG1) | IYPTNGYTRYADSVKGRFTISADTSKNTAYLQMNSLRAEDTAVYYCSRWG |
| | | | GDGFYAMDYWGQGTLVTVSSASTKGPSVEPLAPSSKSTSGGTAALGCLVK |
| | | | DYFPEPVTVSWNSGALTSGVHTFPAVLQSSGLYSLSSVVTVPSSSLGTQT |
| | | | YICNVNHKPSNTKVDKKVEPPKSCDKTHTCPPCPAPELLGGPSVFLFPPK |
| | | | PKDTLMISRTPEVTCVVVDVSHEDPEVKFNWYVDGVEVHNAKTKPREEQY |
| | | | NSTYRVVSVLTVLHQDWLNGKEYKCKVSNKALPAPIEKTISKAKGQPREP |
| | | | QVYTLPPSRDELTKNQVSLTCLVKGFYPSDIAVEWESNGQPENNYKTTPP |
| | | | VLDSDGSFFLYSKLTVDKSRWQQGNVESCSVMHEALHNQYTQKSLSLSPG |
| | | | K |
| | 5083 | DNA Heavy | gaggttcagctggtggagtctggcggtggcctggtgcagccagggggctc |
| | | Chain | actccgtttgtcctgtgcagcttctggcttcaacattaaagacacctata |
| | | (hIgG1) | tacactgggtgcgtcaggccccgggtaagggcctggaatgggttgcaagg |
| | | | atttatcctacgaatggttatactagatatgccgatagcgtcaagggccg |
| | | | tttcactataagcgcagacacatccaaaaacacagcctacctgcagatga |
| | | | acagcctgcgtgctgaggacactgccgtctattattgttctagatgggga |
| | | | ggggacggcttctatgctatggacTACtggggtcaaggaaccctggtcac |
| | | | cgtctcctcggcgtcgaccaagggcccatcggtcttccccctggcaccct |
| | | | cctccaagagcacctctgggggcacagcggccctgggctgcctggtcaag |
| | | | gactacttccccgaacctgtgacggtctcgtggaactcaggcgccctgac |
| | | | cagcggcgtgcacaccttcccggctgtcctacagtcctcaggactctact |
| | | | ccctcagcagcgtggtgaccgtgccctccagcagcttgggcacccagacc |
| | | | tacatctgcaacgtgaatcacaagcccagcaacaccaaggtggacaagaa |
| | | | agttgagcccCCCaaatcttgtgacaaaactcacacatgcccaccgtgcc |
| | | | cagcacctgaactcctggggggaccgtcagtcttcctcttccccccaaaa |
| | | | cccaaggacaccctcatgatctcccggacccctgaggtcacatgcgtggt |
| | | | ggtggacgtgagccacgaagaccctgaggtcaagttcaactggtacgtgg |
| | | | acggcgtggaggtgcataatgccaagacaaagccgcgggaggagcagtac |
| | | | aacagcacgtaccgtgtggtcagcgtcctcaccgtcctgcaccaggactg |
| | | | gctgaatggcaaggagtacaagtgcaaggtctccaacaaagccctcccag |
| | | | cccccatcgagaaaaccatctccaaagccaaagggcagccccgagaacca |
| | | | caggtgtacaccctgcccccatcccgggatgagctgaccaagaaccaggt |
| | | | cagcctgacctgcctggtcaaaggcttctatcccagcgacatcgccgtgg |
| | | | agtgggagagcaatgggcagccggagaacaactacaagaccacgcctccc |
| | | | gtgctggactccgacggctccttcttcctctacagcaagctcaccgtgga |
| | | | caagagcaggtggcagcaggggaacgtcttctcatgctccgtgatgcatg |
| | | | aggctctgcacaacCAGtacacgcagaagagcctctccctgtctccgggt |
| | | | aaa |
| | 5077 | LC CDR 1 | RASQDVNTAVA |
| | | (Kabat) | |
| | 5078 | LC CDR2 | SASFLYS |
| | | (Kabat) | |
| | 5079 | LC CDR3 | QQHYTTPPT |
| | | (Kabat) | |
| | 5080 | LC CDR1 | RASQDVNTAVA |
| | | (Chothia) | |
| | 5081 | LC CDR2 | SASFLYS |
| | | (Chothia) | |
| | 5082 | LC CDR3 | QQHYTTPPT |
| | | (Chothia) | |
| | 5086 | VL | DIQMTQSPSSLSASVGDRVTITCRASQDVNTAVAWYQQKPGKAPKLLIYS |
| | | | ASFLYSGVPSRFSGSRSGTDFTLTISSLQPEDFATYYCQQHYTTPPTFGQ |
| | | | GTKVEIK |
| | 5085 | DNA VL | gatatccagatgacccagtccccgagctccctgtccgcctctgtgggcga |
| | | | tagggtcaccatcacctgccgtgccagtcaggatgtgaatactgctgtag |
| | | | cctggtatcaacagaaaccaggaaaagctccgaaactactgatttactcg |
| | | | gcatccttcctcTACtctggagtcccttctcgcttctctggatccagatc |
| | | | tgggacggatttcactctgaccatcagcagtctgcagccggaagacttcg |
| | | | caacttattactgtcagcaacattatactactcctcccacgttcggacag |
| | | | ggtaccaaggtggagatcaaa |
| | 5088 | Light Chain | DIQMTQSPSSLSASVGDRVTITCRASQDVNTAVAWYQQKPGKAPKLLIYS |
| | | (hIgG1) | ASFLYSGVPSRFSGSRSGTDFTLTISSLQPEDFATYYCQQHYTTPPTFGQ |
| | | | GTKVEIKRTVAAPSVFIFPPSDEQLKSGTASVVCLLNNFYPREAKVQWKV |
| | | | DNALQSGNSQESVTEQDSKDSTYSLSSTLTLSKADYEKHKVYACEVTHQG |
| | | | LSSPVTKSFNRGEC |
| | 5087 | DNA Light | gatatccagatgacccagtccccgagctccctgtccgcctctgtgggcga |
| | | Chain | tagggtcaccatcacctgccgtgccagtcaggatgtgaatactgctgtag |
| | | (hIgG1) | cctggtatcaacagaaaccaggaaaagctccgaaactactgatttactcg |
| | | | gcatccttcctcTACtctggagtcccttctcgcttctctggatccagatc |
| | | | tgggacggatttcactctgaccatcagcagtctgcagccggaagacttcg |
| | | | caacttattactgtcagcaacattatactactcctcccacgttcggacag |
| | | | ggtaccaaggtggagatcaaacgaactgtggctgcaccatctgtcttcat |
| | | | cttcccgccatctgatgagcagttgaaatctggaactgcctctgttgtgt |
| | | | gcctgctgaataacttctatcccagagaggccaaagtacagtggaaggtg |
| | | | gataacgccctccaatcgggtaactcccaggagagtgtcacagagcagga |
| | | | cagcaaggacagcacctacagcctcagcagcaccctgacgctgagcaaag |
| | | | cagactacgagaaacacaaagtctacgcctgcgaagtcacccatcagggc |
| | | | ctgagctcgcccgtcacaaagagcttcaacaggggagagtgt |
| Ab-HER- | 5199 | HC CDR1 | DTYIH |
| 43 | | (Kabat) | |
| | 5200 | HC CDR2 | RIYPTNGYTRYADSVKG |
| | | (Kabat) | |
| | 5201 | HC CDR3 | WGGDGFYAMDY |
| | | (Kabat) | |
| | 5202 | HC CDR1 | GFNIKDT |
| | | (Chothia) | |
| | 5203 | HC CDR2 | YPTNGY |
| | | (Chothia) | |
| | 5204 | HC CDR3 | WGGDGFYAMDY |
| | | (Chothia) | |
| | 5192 | VH | EVQLVESGGGLVQPGGSLRLSCAASGFNIKDTYIHWVRQAPGKGLEWVAR |
| | | | IYPTNGYTRYADSVKGRFTISADTSKNTAYLQMNSLRAEDTAVYYCSRWG |
| | | | GDGFYAMDYWGQGTLVTVSS |
| | 5191 | DNA VH | gaggttcagctggtggagtctggcggtggcctggtgcagccagggggctc |
| | | | actccgtttgtcctgtgcagcttctggcttcaacattaaagacacctata |
| | | | tacactgggtgcgtcaggccccgggtaagggcctggaatgggttgcaagg |
| | | | atttatcctacgaatggttatactagatatgccgatagcgtcaagggccg |
| | | | tttcactataagcgcagacacatccaaaaacacagcctacctgcagatga |
| | | | acagcctgcgtgctgaggacactgccgtctattattgttctagatgggga |
| | | | ggggacggcttctatgctatggacTACtggggtcaaggaaccctggtcac |
| | | | cgtctcctcg |
| | 5194 | Heavy Chain | EVQLVESGGGLVQPGGSLRLSCAASGFNIKDTYIHWVRQAPGKGLEWVAR |
| | | (hIgG1) | IYPTNGYTRYADSVKGRFTISADTSKNTAYLQMNSLRAEDTAVYYCSRWG |
| | | | GDGFYAMDYWGQGTLVTVSSASTKGPSVFPLAPSSKSTSGGTAALGCLVK |
| | | | DYFPEPVTVSWNSGALTSGVHTFPAVLQSSGLYSLSSVVTVPSSSLGTQT |
| | | | YICNVNHKPSNTKVDKKVEPPKSCDKTHTCPPCPAPELLGGPSVFLFPPK |
| | | | PKDTLMASRTPEVTCVVVDVSHEDPEVKFNWYVDGVEVHNAKTKPREEQY |
| | | | NSTYRVVSVLTVLAQDWLNGKEYKCKVSNKALPAPIEKTISKAKGQPREP |
| | | | QVYTLPPSRDELTKNQVSLTCLVKGFYPSDIAVEWESNGQPENNYKTTPP |
| | | | VLDSDGSFFLYSKLTVDKSRWQQGNVFSCSVMHEALHNHYTQKSLSLSPG |
| | | | K |
| | 5193 | DNA Heavy | gaggttcagctggtggagtctggcggtggcctggtgcagccagggggctc |
| | | Chain | actccgtttgtcctgtgcagcttctggcttcaacattaaagacacctata |
| | | (hIgG1) | tacactgggtgcgtcaggccccgggtaagggcctggaatgggttgcaagg |
| | | | atttatcctacgaatggttatactagatatgccgatagcgtcaagggccg |
| | | | tttcactataagcgcagacacatccaaaaacacagcctacctgcagatga |
| | | | acagcctgcgtgctgaggacactgccgtctattattgttctagatgggga |
| | | | ggggacggcttctatgctatggacTACtggggtcaaggaaccctggtcac |
| | | | cgtctcctcggcgtcgaccaagggcccatcggtcttccccctggcaccct |
| | | | cctccaagagcacctctgggggcacagcggccctgggctgcctggtcaag |
| | | | gactacttccccgaacctgtgacggtctcgtggaactcaggcgccctgac |
| | | | cagcggcgtgcacaccttcccggctgtcctacagtcctcaggactctact |
| | | | ccctcagcagcgtggtgaccgtgccctccagcagcttgggcacccagacc |
| | | | tacatctgcaacgtgaatcacaagcccagcaacaccaaggtggacaagaa |
| | | | agttgagcccCCCaaatcttgtgacaaaactcacacatgcccaccgtgcc |
| | | | cagcacctgaactcctggggggaccgtcagtcttcctcttccccccaaaa |
| | | | cccaaggacaccctcatgGCAtcccggacccctgaggtcacatgcgtggt |
| | | | ggtggacgtgagccacgaagaccctgaggtcaagttcaactggtacgtgg |
| | | | acggcgtggaggtgcataatgccaagacaaagccgcgggaggagcagtac |
| | | | aacagcacgtaccgtgtggtcagcgtcctcaccgtcctgGCCcaggactg |
| | | | gctgaatggcaaggagtacaagtgcaaggtctccaacaaagccctcccag |
| | | | cccccatcgagaaaaccatctccaaagccaaagggcagccccgagaacca |
| | | | caggtgtacaccctgcccccatcccgggatgagctgaccaagaaccaggt |
| | | | cagcctgacctgcctggtcaaaggcttctatcccagcgacatcgccgtgg |
| | | | agtgggagagcaatgggcagccggagaacaactacaagaccacgcctccc |
| | | | gtgctggactccgacggctccttcttcctctacagcaagctcaccgtgga |
| | | | caagagcaggtggcagcaggggaacgtcttctcatgctccgtgatgcatg |
| | | | aggctctgcacaaccactacacgcagaagagcctctccctgtctccgggt |
| | | | aaa |
| | 5205 | LC CDR 1 | RASQDVNTAVA |
| | | (Kabat) | |
| | 5206 | LC CDR2 | SASFLYS |
| | | (Kabat) | |
| | 5207 | LC CDR3 | QQHYTTPPT |
| | | (Kabat) | |
| | 5208 | LC CDR1 | RASQDVNTAVA |
| | | (Chothia) | |
| | 5209 | LC CDR2 | SASFLYS |
| | | (Chothia) | |
| | 5210 | LC CDR3 | QQHYTTPPT |
| | | (Chothia) | |
| | 5196 | VL | DIQMTQSPSSLSASVGDRVTITCRASQDVNTAVAWYQQKPGKAPKLLIYS |
| | | | ASFLYSGVPSRFSGSRSGTDFTLTISSLQPEDFATYYCQQHYTTPPTFGQ |
| | | | GTKVEIK |
| | 5195 | DNA VL | gatatccagatgacccagtccccgagctccctgtccgcctctgtgggcga |
| | | | tagggtcaccatcacctgccgtgccagtcaggatgtgaatactgctgtag |
| | | | cctggtatcaacagaaaccaggaaaagctccgaaactactgatttactcg |
| | | | gcatccttcctcTACtctggagtcccttctcgcttctctggatccagatc |
| | | | tgggacggatttcactctgaccatcagcagtctgcagccggaagacttcg |
| | | | caacttattactgtcagcaacattatactactcctcccacgttcggacag |
| | | | ggtaccaaggtggagatcaaa |
| | 5198 | Light Chain | DIQMTQSPSSLSASVGDRVTITCRASQDVNTAVAWYQQKPGKAPKLLIYS |
| | | (hIgG1) | ASFLYSGVPSRFSGSRSGTDFTLTISSLQPEDFATYYCQQHYTTPPTFGQ |
| | | | GTKVEIKRTVAAPSVFIFPPSDEQLKSGTASVVCLLNNFYPREAKVQWKV |
| | | | DNALQSGNSQESVTEQDSKDSTYSLSSTLTLSKADYEKHKVYACEVTHQG |
| | | | LSSPVTKSFNRGEC |
| | 5197 | DNA Light | gatatccagatgacccagtccccgagctccctgtccgcctctgtgggcga |
| | | Chain | tagggtcaccatcacctgccgtgccagtcaggatgtgaatactgctgtag |
| | | (hIgG1) | cctggtatcaacagaaaccaggaaaagctccgaaactactgatttactcg |
| | | | gcatccttcctcTACtctggagtcccttctcgcttctctggatccagatc |
| | | | tgggacggatttcactctgaccatcagcagtctgcagccggaagacttcg |
| | | | caacttattactgtcagcaacattatactactcctcccacgttcggacag |
| | | | ggtaccaaggtggagatcaaacgaactgtggctgcaccatctgtcttcat |
| | | | cttcccgccatctgatgagcagttgaaatctggaactgcctctgttgtgt |
| | | | gcctgctgaataacttctatcccagagaggccaaagtacagtggaaggtg |
| | | | gataacgccctccaatcgggtaactcccaggagagtgtcacagagcagga |
| | | | cagcaaggacagcacctacagcctcagcagcaccctgacgctgagcaaag |
| | | | cagactacgagaaacacaaagtctacgcctgcgaagtcacccatcagggc |
| | | | ctgagctcgcccgtcacaaagagcttcaacaggggagagtgt |
| Ab-HER- | 5231 | HC CDR1 | DTYIH |
| 46 | | (Kabat) | |
| | 5232 | HC CDR2 | RIYPTNGYTRYADSVKG |
| | | (Kabat) | |
| | 5233 | HC CDR3 | WGGDGFYAMDY |
| | | (Kabat) | |
| | 5234 | HC CDR1 | GFNIKDT |
| | | (Chothia) | |
| | 5235 | HC CDR2 | YPTNGY |
| | | (Chothia) | |
| | 5236 | HC CDR3 | WGGDGFYAMDY |
| | | (Chothia) | |
| | 5224 | VH | EVQLVESGGGLVQPGGSLRLSCAASGFNIKDTYIHWVRQAPGKGLEWVAR |
| | | | IYPTNGYTRYADSVKGRFTISADTSKNTAYLQMNSLRAEDTAVYYCSRWG |
| | | | GDGFYAMDYWGQGTLVTVSS |
| | 5223 | DNA VH | gaggttcagctggtggagtctggcggtggcctggtgcagccagggggctc |
| | | | actccgtttgtcctgtgcagcttctggcttcaacattaaagacacctata |
| | | | tacactgggtgcgtcaggccccgggtaagggcctggaatgggttgcaagg |
| | | | atttatcctacgaatggttatactagatatgccgatagcgtcaagggccg |
| | | | tttcactataagcgcagacacatccaaaaacacagcctacctgcagatga |
| | | | acagcctgcgtgctgaggacactgccgtctattattgttctagatgggga |
| | | | ggggacggcttctatgctatggacTACtggggtcaaggaaccctggtcac |
| | | | cgtctcctcg |
| | 5226 | Heavy Chain | EVQLVESGGGLVQPGGSLRLSCAASGFNIKDTYIHWVRQAPGKGLEWVAR |
| | | (hIgG1) | IYPTNGYTRYADSVKGRFTISADTSKNTAYLQMNSLRAEDTAVYYCSRWG |
| | | | GDGFYAMDYWGQGTLVTVSSASTKGPSVFPLAPSSKSTSGGTAALGCLVK |
| | | | DYFPEPVTVSWNSGALTSGVHTFPAVLQSSGLYSLSSVVTVPSSSLGTQT |
| | | | YICNVNHKPSNTKVDKKVEPPKSCDKTHTCPPCPAPELLGGPSVFLFPPK |
| | | | PKDTLMASRTPEVTCVVVDVSHEDPEVKFNWYVDGVEVHNAKTKPREEQY |
| | | | NSTYRVVSVLTVLHQDWLNGKEYKCKVSNKALPAPIEKTISKAKGQPREP |
| | | | QVYTLPPSRDELTKNQVSLTCLVKGFYPSDIAVEWESNGQPENNYKTTPP |
| | | | VLDSDGSFFLYSKLTVDKSRWQQGNVFSCSVMHEALHNQYTQKSLSLSPG |
| | | | K |
| | 5225 | DNA Heavy | gaggttcagctggtggagtctggcggtggcctggtgcagccagggggctc |
| | | Chain | actccgtttgtcctgtgcagcttctggcttcaacattaaagacacctata |
| | | (hIgG1) | tacactgggtgcgtcaggccccgggtaagggcctggaatgggttgcaagg |
| | | | atttatcctacgaatggttatactagatatgccgatagcgtcaagggccg |
| | | | tttcactataagcgcagacacatccaaaaacacagcctacctgcagatga |
| | | | acagcctgcgtgctgaggacactgccgtctattattgttctagatgggga |
| | | | ggggacggcttctatgctatggacTACtggggtcaaggaaccctggtcac |
| | | | cgtctcctcggcgtcgaccaagggcccatcggtcttccccctggcaccct |
| | | | cctccaagagcacctctgggggcacagcggccctgggctgcctggtcaag |
| | | | gactacttccccgaacctgtgacggtctcgtggaactcaggcgccctgac |
| | | | cagcggcgtgcacaccttcccggctgtcctacagtcctcaggactctact |
| | | | ccctcagcagcgtggtgaccgtgccctccagcagcttgggcacccagacc |
| | | | tacatctgcaacgtgaatcacaagcccagcaacaccaaggtggacaagaa |
| | | | agttgagcccCCCaaatcttgtgacaaaactcacacatgcccaccgtgcc |
| | | | cagcacctgaactcctggggggaccgtcagtcttcctcttccccccaaaa |
| | | | cccaaggacaccctcatgGCAtcccggacccctgaggtcacatgcgtggt |
| | | | ggtggacgtgagccacgaagaccctgaggtcaagttcaactggtacgtgg |
| | | | acggcgtggaggtgcataatgccaagacaaagccgcgggaggagcagtac |
| | | | aacagcacgtaccgtgtggtcagcgtcctcaccgtcctgcaccaggactg |
| | | | gctgaatggcaaggagtacaagtgcaaggtctccaacaaagccctcccag |
| | | | cccccatcgagaaaaccatctccaaagccaaagggcagccccgagaacca |
| | | | caggtgtacaccctgcccccatcccgggatgagctgaccaagaaccaggt |
| | | | cagcctgacctgcctggtcaaaggcttctatcccagcgacatcgccgtgg |
| | | | agtgggagagcaatgggcagccggagaacaactacaagaccacgcctccc |
| | | | gtgctggactccgacggctccttcttcctctacagcaagctcaccgtgga |
| | | | caagagcaggtggcagcaggggaacgtcttctcatgctccgtgatgcatg |
| | | | aggctctgcacaacCAGtacacgcagaagagcctctccctgtctccgggt |
| | | | aaa |
| | 5237 | LC CDR 1 | RASQDVNTAVA |
| | | (Kabat) | |
| | 5238 | LC CDR2 | SASFLYS |
| | | (Kabat) | |
| | 5239 | LC CDR3 | QQHYTTPPT |
| | | (Kabat) | |
| | 5240 | LC CDR1 | RASQDVNTAVA |
| | | (Chothia) | |
| | 5241 | LC CDR2 | SASFLYS |
| | | (Chothia) | |
| | 5242 | LC CDR3 | QQHYTTPPT |
| | | (Chothia) | |
| | 5228 | VL | DIQMTQSPSSLSASVGDRVTITCRASQDVNTAVAWYQQKPGKAPKLLIYS |
| | | | ASFLYSGVPSRFSGSRSGTDFTLTISSLQPEDFATYYCQQHYTTPPTEGQ |
| | | | GTKVEIK |
| | 5227 | DNA VL | gatatccagatgacccagtccccgagctccctgtccgcctctgtgggcga |
| | | | tagggtcaccatcacctgccgtgccagtcaggatgtgaatactgctgtag |
| | | | cctggtatcaacagaaaccaggaaaagctccgaaactactgatttactcg |
| | | | gcatccttcctcTACtctggagtcccttctcgcttctctggatccagatc |
| | | | tgggacggatttcactctgaccatcagcagtctgcagccggaagacttcg |
| | | | caacttattactgtcagcaacattatactactcctcccacgttcggacag |
| | | | ggtaccaaggtggagatcaaa |
| | 5230 | Light Chain | DIQMTQSPSSLSASVGDRVTITCRASQDVNTAVAWYQQKPGKAPKLLIYS |
| | | (hIgG1) | ASFLYSGVPSRFSGSRSGTDFTLTISSLQPEDFATYYCQQHYTTPPTFGQ |
| | | | GTKVEIKRTVAAPSVFIFPPSDEQLKSGTASVVCLLNNFYPREAKVQWKV |
| | | | DNALQSGNSQESVTEQDSKDSTYSLSSTLTLSKADYEKHKVYACEVTHQG |
| | | | LSSPVTKSFNRGEC |
| | 5229 | DNA Light | gatatccagatgacccagtccccgagctccctgtccgcctctgtgggcga |
| | | Chain | tagggtcaccatcacctgccgtgccagtcaggatgtgaatactgctgtag |
| | | (hIgG1) | cctggtatcaacagaaaccaggaaaagctccgaaactactgatttactcg |
| | | | gcatccttcctcTACtctggagtcccttctcgcttctctggatccagatc |
| | | | tgggacggatttcactctgaccatcagcagtctgcagccggaagacttcg |
| | | | caacttattactgtcagcaacattatactactcctcccacgttcggacag |
| | | | ggtaccaaggtggagatcaaacgaactgtggctgcaccatctgtcttcat |
| | | | cttcccgccatctgatgagcagttgaaatctggaactgcctctgttgtgt |
| | | | gcctgctgaataacttctatcccagagaggccaaagtacagtggaaggtg |
| | | | gataacgccctccaatcgggtaactcccaggagagtgtcacagagcagga |
| | | | cagcaaggacagcacctacagcctcagcagcaccctgacgctgagcaaag |
| | | | cagactacgagaaacacaaagtctacgcctgcgaagtcacccatcagggc |
| | | | ctgagctcgcccgtcacaaagagcttcaacaggggagagtgt |
| Ab-HER- | 5097 | HC CDR1 | DTYIH |
| 47 | | (Kabat) | |
| | 5098 | HC CDR2 | RIYPTNGYTRYADSVKG |
| | | (Kabat) | |
| | 5099 | HC CDR3 | WGGDGFYAMDY |
| | | (Kabat) | |
| | 5100 | HC CDR1 | GFNIKDT |
| | | (Chothia) | |
| | 5101 | HC CDR2 | YPTNGY |
| | | (Chothia) | |
| | 5102 | HC CDR3 | WGGDGFYAMDY |
| | | (Chothia) | |
| | 5090 | VH | EVQLVESGGGLVQPGGSLRLSCAASGFNIKDTYIHWVRQAPGKGLEWVAR |
| | | | IYPTNGYTRYADSVKGRFTISADTSKNTAYLQMNSLRAEDTAVYYCSRWG |
| | | | GDGFYAMDYWGQGTLVTVSS |
| | 5089 | DNA VH | gaggttcagctggtggagtctggcggtggcctggtgcagccagggggctc |
| | | | actccgtttgtcctgtgcagcttctggcttcaacattaaagacacctata |
| | | | tacactgggtgcgtcaggccccgggtaagggcctggaatgggttgcaagg |
| | | | atttatcctacgaatggttatactagatatgccgatagcgtcaagggccg |
| | | | tttcactataagcgcagacacatccaaaaacacagcctacctgcagatga |
| | | | acagcctgcgtgctgaggacactgccgtctattattgttctagatgggga |
| | | | ggggacggcttctatgctatggacTACtggggtcaaggaaccctggtcac |
| | | | cgtctcctcg |
| | 5092 | Heavy Chain | EVQLVESGGGLVQPGGSLRLSCAASGFNIKDTYIHWVRQAPGKGLEWVAR |
| | | (hIgG1) | IYPTNGYTRYADSVKGRFTISADTSKNTAYLQMNSLRAEDTAVYYCSRWG |
| | | | GDGFYAMDYWGQGTLVTVSSASTKGPSVFPLAPSSKSTSGGTAALGCLVK |
| | | | DYFPEPVTVSWNSGALTSGVHTFPAVLQSSGLYSLSSVVTVPSSSLGTQT |
| | | | YICNVNHKPSNTKVDKKVEPPKSCDKTHTCPPCPAPELLGGPSVFLFPPK |
| | | | PKDTLMASRTPEVTCVVVDVSHEDPEVKFNWYVDGVEVHNAKTKPREEQY |
| | | | NSTYRVVSVLTVLAQDWLNGKEYKCKVSNKALPAPIEKTISKAKGQPREP |
| | | | QVYTLPPSRDELTKNQVSLTCLVKGFYPSDIAVEWESNGQPENNYKTTPP |
| | | | VLDSDGSFFLYSKLTVDKSRWQQGNVFSCSVMHEALHNAYTQKSLSLSPG |
| | | | K |
| | 5091 | DNA Heavy | gaggttcagctggtggagtctggcggtggcctggtgcagccagggggctc |
| | | Chain | actccgtttgtcctgtgcagcttctggcttcaacattaaagacacctata |
| | | (hIgG1) | tacactgggtgcgtcaggccccgggtaagggcctggaatgggttgcaagg |
| | | | atttatcctacgaatggttatactagatatgccgatagcgtcaagggccg |
| | | | tttcactataagcgcagacacatccaaaaacacagcctacctgcagatga |
| | | | acagcctgcgtgctgaggacactgccgtctattattgttctagatgggga |
| | | | ggggacggcttctatgctatggacTACtggggtcaaggaaccctggtcac |
| | | | cgtctcctcggcgtcgaccaagggcccatcggtcttccccctggcaccct |
| | | | cctccaagagcacctctgggggcacagcggccctgggctgcctggtcaag |
| | | | gactacttccccgaacctgtgacggtctcgtggaactcaggcgccctgac |
| | | | cagcggcgtgcacaccttcccggctgtcctacagtcctcaggactctact |
| | | | ccctcagcagcgtggtgaccgtgccctccagcagcttgggcacccagacc |
| | | | tacatctgcaacgtgaatcacaagcccagcaacaccaaggtggacaagaa |
| | | | agttgagcccCCCaaatcttgtgacaaaactcacacatgcccaccgtgcc |
| | | | cagcacctgaactcctggggggaccgtcagtcttcctcttccccccaaaa |
| | | | cccaaggacaccctcatgGCAtcccggacccctgaggtcacatgcgtggt |
| | | | ggtggacgtgagccacgaagaccctgaggtcaagttcaactggtacgtgg |
| | | | acggcgtggaggtgcataatgccaagacaaagccgcgggaggagcagtac |
| | | | aacagcacgtaccgtgtggtcagcgtcctcaccgtcctgGCCcaggactg |
| | | | gctgaatggcaaggagtacaagtgcaaggtctccaacaaagccctcccag |
| | | | cccccatcgagaaaaccatctccaaagccaaagggcagccccgagaacca |
| | | | caggtgtacaccctgcccccatcccgggatgagctgaccaagaaccaggt |
| | | | cagcctgacctgcctggtcaaaggcttctatcccagcgacatcgccgtgg |
| | | | agtgggagagcaatgggcagccggagaacaactacaagaccacgcctccc |
| | | | gtgctggactccgacggctccttcttcctctacagcaagctcaccgtgga |
| | | | caagagcaggtggcagcaggggaacgtcttctcatgctccgtgatgcatg |
| | | | aggctctgcacaacGCTtacacgcagaagagcctctccctgtctccgggt |
| | | | aaa |
| | 5103 | LC CDR 1 | RASQDVNTAVA |
| | | (Kabat) | |
| | 5104 | LC CDR2 | SASFLYS |
| | | (Kabat) | |
| | 5105 | LC CDR3 | QQHYTTPPT |
| | | (Kabat) | |
| | 5106 | LC CDR1 | RASQDVNTAVA |
| | | (Chothia) | |
| | 5107 | LC CDR2 | SASFLYS |
| | | (Chothia) | |
| | 5108 | LC CDR3 | QQHYTTPPT |
| | | (Chothia) | |
| | 5094 | VL | DIQMTQSPSSLSASVGDRVTITCRASQDVNTAVAWYQQKPGKAPKLLIYS |
| | | | ASFLYSGVPSRFSGSRSGTDFTLTISSLQPEDFATYYCQQHYTTPPTFGQ |
| | | | GTKVEIK |
| | 5093 | DNA VL | gatatccagatgacccagtccccgagctccctgtccgcctctgtgggcga |
| | | | tagggtcaccatcacctgccgtgccagtcaggatgtgaatactgctgtag |
| | | | cctggtatcaacagaaaccaggaaaagctccgaaactactgatttactcg |
| | | | gcatccttcctcTACtctggagtcccttctcgcttctctggatccagatc |
| | | | tgggacggatttcactctgaccatcagcagtctgcagccggaagacttcg |
| | | | caacttattactgtcagcaacattatactactcctcccacgttcggacag |
| | | | ggtaccaaggtggagatcaaa |
| | 5096 | Light Chain | DIQMTQSPSSLSASVGDRVTITCRASQDVNTAVAWYQQKPGKAPKLLIYS |
| | | (hIgG1) | ASFLYSGVPSRFSGSRSGTDFTLTISSLQPEDFATYYCQQHYTTPPTFGQ |
| | | | GTKVEIKRTVAAPSVFIFPPSDEQLKSGTASVVCLLNNFYPREAKVQWKV |
| | | | DNALQSGNSQESVTEQDSKDSTYSLSSTLTLSKADYEKHKVYACEVTHQG |
| | | | LSSPVTKSFNRGEC |
| | 5095 | DNA Light | gatatccagatgacccagtccccgagctccctgtccgcctctgtgggcga |
| | | Chain | tagggtcaccatcacctgccgtgccagtcaggatgtgaatactgctgtag |
| | | (hIgG1) | cctggtatcaacagaaaccaggaaaagctccgaaactactgatttactcg |
| | | | gcatccttcctcTACtctggagtcccttctcgcttctctggatccagatc |
| | | | tgggacggatttcactctgaccatcagcagtctgcagccggaagacttcg |
| | | | caacttattactgtcagcaacattatactactcctcccacgttcggacag |
| | | | ggtaccaaggtggagatcaaacgaactgtggctgcaccatctgtcttcat |
| | | | cttcccgccatctgatgagcagttgaaatctggaactgcctctgttgtgt |
| | | | gcctgctgaataacttctatcccagagaggccaaagtacagtggaaggtg |
| | | | gataacgccctccaatcgggtaactcccaggagagtgtcacagagcagga |
| | | | cagcaaggacagcacctacagcctcagcagcaccctgacgctgagcaaag |
| | | | cagactacgagaaacacaaagtctacgcctgcgaagtcacccatcagggc |
| | | | ctgagctcgcccgtcacaaagagcttcaacaggggagagtgt |
| Ab-HER- | 5117 | HC CDR1 | DTYIH |
| 53 | | (Kabat) | |
| | 5118 | HC CDR2 | RIYPTNGYTRYADSVKG |
| | | (Kabat) | |
| | 5119 | HC CDR3 | WGGDGFYAMDY |
| | | (Kabat) | |
| | 5120 | HC CDR1 | GFNIKDT |
| | | (Chothia) | |
| | 5121 | HC CDR2 | YPTNGY |
| | | (Chothia) | |
| | 5122 | HC CDR3 | WGGDGFYAMDY |
| | | (Chothia) | |
| | 5110 | VH | EVQLVESGGGLVQPGGSLRLSCAASGFNIKDTYIHWVRQAPGKGLEWVAR |
| | | | IYPTNGYTRYADSVKGRFTISADTSKNTAYLQMNSLRAEDTAVYYCSRWG |
| | | | GDGFYAMDYWGQGTLVTVSS |
| | 5109 | DNA VH | gaggttcagctggtggagtctggcggtggcctggtgcagccagggggctc |
| | | | actccgtttgtcctgtgcagcttctggcttcaacattaaagacacctata |
| | | | tacactgggtgcgtcaggccccgggtaagggcctggaatgggttgcaagg |
| | | | atttatcctacgaatggttatactagatatgccgatagcgtcaagggccg |
| | | | tttcactataagcgcagacacatccaaaaacacagcctacctgcagatga |
| | | | acagcctgcgtgctgaggacactgccgtctattattgttctagatgggga |
| | | | ggggacggcttctatgctatggacTACtggggtcaaggaaccctggtcac |
| | | | cgtctcctcg |
| | 5112 | Heavy Chain | EVQLVESGGGLVQPGGSLRLSCAASGFNIKDTYIHWVRQAPGKGLEWVAR |
| | | (hIgG1) | IYPTNGYTRYADSVKGRFTISADTSKNTAYLQMNSLRAEDTAVYYCSRWG |
| | | | GDGFYAMDYWGQGTLVTVSSASTKGPSVFPLAPSSKSTSGGTAALGCLVK |
| | | | DYFPEPVTVSWNSGALTSGVHTFPAVLQSSGLYSLSSVVTVPSSSLGTQT |
| | | | YICNVNHKPSNTKVDKRVEPKSCDKTHTCPPCPAPELVGGPSVFLLPPKP |
| | | | KDTLMISRTPEVTCVVVDVSHEDPEVKFNWYVDGVEVHNAKTKPPEEQYN |
| | | | STLRVVSVLTVLHQDWLNGKEYKCKVSNKALPAPIEKTISKAKGQPREPQ |
| | | | VYTLPPSRDELTKNQVSLTCLVKGFYPSDIAVEWESNGQPENNYKTTPLV |
| | | | LDSDGSFFLYSKLTVDKSRWQQGNVFSCSVMHEALHNHYTQKSLSLSPGK |
| | 5111 | DNA Heavy | gaggttcagctggtggagtctggcggtggcctggtgcagccagggggctc |
| | | Chain | actccgtttgtcctgtgcagcttctggcttcaacattaaagacacctata |
| | | (hIgG1) | tacactgggtgcgtcaggccccgggtaagggcctggaatgggttgcaagg |
| | | | atttatcctacgaatggttatactagatatgccgatagcgtcaagggccg |
| | | | tttcactataagcgcagacacatccaaaaacacagcctacctgcagatga |
| | | | acagcctgcgtgctgaggacactgccgtctattattgttctagatgggga |
| | | | ggggacggcttctatgctatggacTACtggggtcaaggaaccctggtcac |
| | | | cgtctcctcggcgtcgaccaagggcccatcggtcttccccctggcaccct |
| | | | cctccaagagcacctctgggggcacagcggccctgggctgcctggtcaag |
| | | | gactacttccccgaacctgtgacggtctcgtggaactcaggcgccctgac |
| | | | cagcggcgtgcacaccttcccggctgtcctacagtcctcaggactctact |
| | | | ccctcagcagcgtggtgaccgtgccctccagcagcttgggcacccagacc |
| | | | tacatctgcaacgtgaatcacaagcccagcaacaccaaggtggacaagaG |
| | | | agttgagcccaaatcttgtgacaaaactcacacatgcccaccgtgcccag |
| | | | cacctgaactcGtggggggaccgtcagtcttcctcCtccccccaaaaccc |
| | | | aaggacaccctcatgatctcccggacccctgaggtcacatgcgtggtggt |
| | | | ggacgtgagccacgaagaccctgaggtcaagttcaactggtacgtggacg |
| | | | gcgtggaggtgcataatgccaagacaaagccgcCggaggagcagtacaac |
| | | | agcacgCTccgtgtggtcagcgtcctcaccgtcctgcaccaggactggct |
| | | | gaatggcaaggagtacaagtgcaaggtctccaacaaagccctcccagccc |
| | | | ccatcgagaaaaccatctccaaagccaaagggcagccccgagaaccacag |
| | | | gtgtacaccctgcccccatcccgggaTgagCtgaccaagaaccaggtcag |
| | | | cctgacctgcctggtcaaaggcttctatcccagcgacatcgccgtggagt |
| | | | gggagagcaatgggcagccggagaacaactacaagaccacgcctcTcgtg |
| | | | ctggactccgacggctccttcttcctctacagcaagctcaccgtggacaa |
| | | | gagcaggtggcagcaggggaacgtcttctcatgctccgtgatgcatgagg |
| | | | ctctgcacaaccactacacgcagaagagcctctccctgtctccgggtaaa |
| | 5123 | LC CDR 1 | RASQDVNTAVA |
| | | (Kabat) | |
| | 5124 | LC CDR2 | SASFLYS |
| | | (Kabat) | |
| | 5125 | LC CDR3 | QQHYTTPPT |
| | | (Kabat) | |
| | 5126 | LC CDR1 | RASQDVNTAVA |
| | | (Chothia) | |
| | 5127 | LC CDR2 | SASFLYS |
| | | (Chothia) | |
| | 5128 | LC CDR3 | QQHYTTPPT |
| | | (Chothia) | |
| | 5114 | VL | DIQMTQSPSSLSASVGDRVTITCRASQDVNTAVAWYQQKPGKAPKLLIYS |
| | | | ASFLYSGVPSRFSGSRSGTDFTLTISSLQPEDFATYYCQQHYTTPPTFGQ |
| | | | GTKVEIK |
| | 5113 | DNA VL | gatatccagatgacccagtccccgagctccctgtccgcctctgtgggcga |
| | | | tagggtcaccatcacctgccgtgccagtcaggatgtgaatactgctgtag |
| | | | cctggtatcaacagaaaccaggaaaagctccgaaactactgatttactcg |
| | | | gcatccttcctcTACtctggagtcccttctcgcttctctggatccagatc |
| | | | tgggacggatttcactctgaccatcagcagtctgcagccggaagacttcg |
| | | | caacttattactgtcagcaacattatactactcctcccacgttcggacag |
| | | | ggtaccaaggtggagatcaaa |
| | 5116 | Light Chain | DIQMTQSPSSLSASVGDRVTITCRASQDVNTAVAWYQQKPGKAPKLLIYS |
| | | (hIgG1) | ASFLYSGVPSRFSGSRSGTDFTLTISSLQPEDFATYYCQQHYTTPPTFGQ |
| | | | GTKVEIKRTVAAPSVFIFPPSDEQLKSGTASVVCLLNNFYPREAKVQWKV |
| | | | DNALQSGNSQESVTEQDSKDSTYSLSSTLTLSKADYEKHKVYACEVTHQG |
| | | | LSSPVTKSFNRGEC |
| | 5115 | DNA Light | gatatccagatgacccagtccccgagctccctgtccgcctctgtgggcga |
| | | Chain | tagggtcaccatcacctgccgtgccagtcaggatgtgaatactgctgtag |
| | | (hIgG1) | cctggtatcaacagaaaccaggaaaagctccgaaactactgatttactcg |
| | | | gcatccttcctcTACtctggagtcccttctcgcttctctggatccagatc |
| | | | tgggacggatttcactctgaccatcagcagtctgcagccggaagacttcg |
| | | | caacttattactgtcagcaacattatactactcctcccacgttcggacag |
| | | | ggtaccaaggtggagatcaaacgaactgtggctgcaccatctgtcttcat |
| | | | cttcccgccatctgatgagcagttgaaatctggaactgcctctgttgtgt |
| | | | gcctgctgaataacttctatcccagagaggccaaagtacagtggaaggtg |
| | | | gataacgccctccaatcgggtaactcccaggagagtgtcacagagcagga |
| | | | cagcaaggacagcacctacagcctcagcagcaccctgacgctgagcaaag |
| | | | cagactacgagaaacacaaagtctacgcctgcgaagtcacccatcagggc |
| | | | ctgagctcgcccgtcacaaagagcttcaacaggggagagtgt |
| Ab-HER- | 5293 | HC CDR1 | DTYIH |
| 57 | | (Kabat) | |
| | 5294 | HC CDR2 | RIYPTNGYTRYADSVKG |
| | | (Kabat) | |
| | 5295 | HC CDR3 | WGGDGFYAMDY |
| | | (Kabat) | |
| | 5296 | HC CDR1 | GFNIKDT |
| | | (Chothia) | |
| | 5297 | HC CDR2 | YPTNGY |
| | | (Chothia) | |
| | 5298 | HC CDR3 | WGGDGFYAMDY |
| | | (Chothia) | |
| | 5254 | VH | EVQLVESGGGLVQPGGSLRLSCAASGFNIKDTYIHWVRQAPGKGLEWVAR |
| | | | IYPTNGYTRYADSVKGRFTISADTSKNTAYLQMNSLRAEDTAVYYCSRWG |
| | | | GDGFYAMDYWGQGTLVTVSS |
| | 5253 | DNA VH | gaggttcagctggtggagtctggcggtggcctggtgcagccagggggctc |
| | | | actccgtttgtcctgtgcagcttctggcttcaacattaaagacacctata |
| | | | tacactgggtgcgtcaggccccgggtaagggcctggaatgggttgcaagg |
| | | | atttatcctacgaatggttatactagatatgccgatagcgtcaagggccg |
| | | | tttcactataagcgcagacacatccaaaaacacagcctacctgcagatga |
| | | | acagcctgcgtgctgaggacactgccgtctattattgttctagatgggga |
| | | | ggggacggcttctatgctatggacTACtggggtcaaggaaccctggtcac |
| | | | cgtctcctcg |
| | 5299 | LC CDR 1 | RASQDVNTAVA |
| | | (Kabat) | |
| | 5300 | LC CDR2 | SASFLYS |
| | | (Kabat) | |
| | 5301 | LC CDR3 | QQHYTTPPT |
| | | (Kabat) | |
| | 5302 | LC CDR1 | RASQDVNTAVA |
| | | (Chothia) | |
| | 5303 | LC CDR2 | SASFLYS |
| | | (Chothia) | |
| | 5304 | LC CDR3 | QQHYTTPPT |
| | | (Chothia) | |
| | 5256 | VL | DIQMTQSPSSLSASVGDRVTITCRASQDVNTAVAWYQQKPGKAPKLLIYS |
| | | | ASFLYSGVPSRFSGSRSGTDFTLTISSLQPEDFATYYCQQHYTTPPTFGQ |
| | | | GTKVEIK |
| | 5255 | DNA VL | gatatccagatgacccagtccccgagctccctgtccgcctctgtgggcga |
| | | | tagggtcaccatcacctgccgtgccagtcaggatgtgaatactgctgtag |
| | | | cctggtatcaacagaaaccaggaaaagctccgaaactactgatttactcg |
| | | | gcatccttcctcTACtctggagtcccttctcgcttctctggatccagatc |
| | | | tgggacggatttcactctgaccatcagcagtctgcagccggaagacttcg |
| | | | caacttattactgtcagcaacattatactactcctcccacgttcggacag |
| | | | ggtaccaaggtggagatcaaa |
| | 5351 | scFv | EVQLVESGGGLVQPGGSLRLSCAASGFNIKDTYIHWVRQAPGKGLEWVAR |
| | | | IYPTNGYTRYADSVKGRFTISADTSKNTAYLQMNSLRAEDTAVYYCSRWG |
| | | | GDGFYAMDYWGQGTLVTVSSGGGGSGGGGSGGGGSDIQMTQSPSSLSASV |
| | | | GDRVTITCRASQDVNTAVAWYQQKPGKAPKLLIYSASFLYSGVPSRFSGS |
| | | | RSGTDFTLTISSLQPEDFATYYCQQHYTTPPTFGQGTKVEIK |
| | 5352 | scFv DNA | gaggttcagctggtggagtctggcggtggcctggtgcagccagggggctc |
| | | | actccgtttgtcctgtgcagcttctggcttcaacattaaagacacctata |
| | | | tacactgggtgcgtcaggccccgggtaagggcctggaatgggttgcaagg |
| | | | atttatcctacgaatggttatactagatatgccgatagcgtcaagggccg |
| | | | tttcactataagcgcagacacatccaaaaacacagcctacctgcagatga |
| | | | acagcctgcgtgctgaggacactgccgtctattattgttctagatgggga |
| | | | ggggacggcttctatgctatggacTACtggggtcaaggaaccctggtcac |
| | | | cgtctcctcgggtggtggtggatccggaggaggaggaAGTggaggtggag |
| | | | gtTCTgatatccagatgacccagtccccgagctccctgtccgcctctgtg |
| | | | ggcgatagggtcaccatcacctgccgtgccagtcaggatgtgaatactgc |
| | | | tgtagcctggtatcaacagaaaccaggaaaagctccgaaactactgattt |
| | | | actcggcatccttcctcTACtctggagtcccttctcgcttctctggatcc |
| | | | agatctgggacggatttcactctgaccatcagcagtctgcagccggaaga |
| | | | cttcgcaacttattactgtcagcaacattatactactcctcccacgttcg |
| | | | gacagggtaccaaggtggagatcaaa |
| Ab-HER- | 5305 | HC CDR1 | DYTMD |
| 62 | | (Kabat) | |
| | 5306 | HC CDR2 | DVNPNSGGSIYNQRFKG |
| | | (Kabat) | |
| | 5307 | HC CDR3 | NLGPSFYFDYW |
| | | (Kabat) | |
| | 5258 | VH | EVQLVESGGGLVQPGGSLRLSCAASGFTFTDYTMDWVRQAPGKGLEWVAD |
| | | | VNPNSGGSIYNQRFKGRFTLSVDRSKNTLYLQMNSLRAEDTAVYYCARNL |
| | | | GPSFYFDYWGQGTLVTVSS |
| | 5257 | DNA VH | gaggttcagctggtggagtctggcggtggcctggtgcagccagggggctc |
| | | | actccgtttgtcctgtgcagcttctggcttcaCcTTCaCCgacTATACCA |
| | | | TGGATtgggtgcgtcaggccccgggtaagggcctggaatgggttgcaGAC |
| | | | GTGAATcctAATTCTggtGGTTCTATAtatAATCAGCGTTTCaagggccg |
| | | | tttcactCTGagcGTTgacCGTtccaaaaacacaCTGtacctgcagatga |
| | | | acagcctgcgtgctgaggacactgccgtctattattgtGCAagaAATCTG |
| | | | gggCCTAGCttctatTTCgacTACtggggtcaaggaaccctggtcaccgt |
| | | | ctcctcg |
| | 5308 | LC CDR 1 | KASQDVSIGVA |
| | | (Kabat) | |
| | 5309 | LC CDR2 | SASYRYT |
| | | (Kabat) | |
| | 5310 | LC CDR3 | QQYYIYPYT |
| | | (Kabat) | |
| | 5260 | VL | DIQMTQSPSSLSASVGDRVTITCKASQDVSIGVAWYQQKPGKAPKLLIYS |
| | | | ASYRYTGVPSRFSGSGSGTDFTLTISSLQPEDFATYYCQQYYTYPYTFGQ |
| | | | GTKVEIK |
| | 5259 | DNA VL | gatatccagatgacccagtccccgagctccctgtccgcctctgtgggcga |
| | | | tagggtcaccatcacctgcAAAgccagtcaggatgtgTCCATTGGGgtag |
| | | | cctggtatcaacagaaaccaggaaaagctccgaaactactgatttactcg |
| | | | gcatccTATCGCTACACGggagtcccttctcgcttctctggatccGGTtc |
| | | | tgggacggatttcactctgaccatcagcagtctgcagccggaagacttcg |
| | | | caacttattactgtcagcaaTACtatATCTATcctTACacgttcggacag |
| | | | ggtaccaaggtggagatcaaa |
| | 5349 | scFv | EVQLVESGGGLVQPGGSLRLSCAASGFTFTDYTMDWVRQAPGKGLEWVAD |
| | | | VNPNSGGSIYNQRFKGRFTLSVDRSKNTLYLQMNSLRAEDTAVYYCARNL |
| | | | GPSFYFDYWGQGTLVTVSSGGGGSGGGGSGGGGSDIQMTQSPSSLSASVG |
| | | | DRVTITCKASQDVSIGVAWYQQKPGKAPKLLIYSASYRYTGVPSRFSGSG |
| | | | SGTDFTLTISSLQPEDFATYYCQQYYTYPYTFGQGTKVEIK |
| | 5350 | scFv DNA | gaggttcagctggtggagtctggcggtggcctggtgcagccagggggctc |
| | | | actccgtttgtcctgtgcagcttctggcttcaCcTTCaCCgacTATACCA |
| | | | TGGATtgggtgcgtcaggccccgggtaagggcctggaatgggttgcaGAC |
| | | | GTGAATcctAATTCTggtGGTTCTATAtatAATCAGCGTTTCaagggccg |
| | | | tttcactCTGagcGTTgacCGTtccaaaaacacaCTGtacctgcagatga |
| | | | acagcctgcgtgctgaggacactgccgtctattattgtGCAagaAATCTG |
| | | | gggCCTAGCttctatTTCgacTACtggggtcaaggaaccctggtcaccgt |
| | | | ctcctcgggtggtggtggatccggaggaggaggaAGTggaggtggaggtT |
| | | | CTgatatccagatgacccagtccccgagctccctgtccgcctctgtgggc |
| | | | gatagggtcaccatcacctgcAAAgccagtcaggatgtgTCCATTGGGgt |
| | | | agcctggtatcaacagaaaccaggaaaagctccgaaactactgatttact |
| | | | cggcatccTATCGCTACACGggagtcccttctcgcttctctggatccGGT |
| | | | tctgggacggatttcactctgaccatcagcagtctgcagccggaagactt |
| | | | cgcaacttattactgtcagcaaTACtatATCTATcctTACacgttcggac |
| | | | agggtaccaaggtggagatcaaa |
| Ab-HER- | 5137 | HC CDR1 | DTYIH |
| 69 | | (Kabat) | |
| | 5138 | HC CDR2 | RIYPTNGYTRYDPKFQD |
| | | (Kabat) | |
| | 5139 | HC CDR3 | WGGDGFYAMDY |
| | | (Kabat) | |
| | 5140 | HC CDR1 | GFNIKDT |
| | | (Chothia) | |
| | 5141 | HC CDR2 | YPTNGY |
| | | (Chothia) | |
| | 5142 | HC CDR3 | WGGDGFYAMDY |
| | | (Chothia) | |
| | 5130 | VH | QVQLQQSGPELVKPGASLKLSCTASGFNIKDTYIHWVKQRPEQGLEWIGR |
| | | | IYPTNGYTRYDPKFQDKATITADTSSNTAYLQVSRLTSEDTAVYYCSRWG |
| | | | GDGFYAMDYWGQGASVTVSS |
| | 5129 | DNA VH | CAGGTGCAGCTGCAGCAGAGCGGCCCCGAGCTGGTGAAGCCCGGCGCCAG |
| | | | CCTGAAGCTGAGCTGCACCGCCAGCGGCTTCAACATCAAGGACACCTACA |
| | | | TCCACTGGGTGAAGCAGAGACCCGAGCAGGGCCTGGAGTGGATCGGCAGA |
| | | | ATCTACCCCACCAACGGCTACACCAGATACGACCCCAAGTTCCAGGACAA |
| | | | GGCCACCATCACCGCCGACACCAGCAGCAACACCGCCTACCTGCAGGTGA |
| | | | GCAGACTGACCAGCGAGGACACCGCCGTGTACTACTGCAGCAGATGGGGC |
| | | | GGCGACGGCTTCTACGCCATGGACTACTGGGGCCAGGGCGCCAGCGTGAC |
| | | | CGTGAGCAGC |
| | 5132 | Heavy Chain | QVQLQQSGPELVKPGASLKLSCTASGFNIKDTYIHWVKQRPEQGLEWIGR |
| | | (hIgG1) | IYPTNGYTRYDPKFQDKATITADTSSNTAYLQVSRLTSEDTAVYYCSRWG |
| | | | GDGFYAMDYWGQGASVTVSSASTKGPSVFPLAPSSKSTSGGTAALGCLVK |
| | | | DYFPEPVTVSWNSGALTSGVHTFPAVLQSSGLYSLSSVVTVPSSSLGTQT |
| | | | YICNVNHKPSNTKVDKRVEPKSCDKTHTCPPCPAPELVGGPSVFLLPPKP |
| | | | KDTLMISRTPEVTCVVVDVSHEDPEVKFNWYVDGVEVHNAKTKPPEEQYN |
| | | | STLRVVSVLTVLHQDWLNGKEYKCKVSNKALPAPIEKTISKAKGQPREPQ |
| | | | VYTLPPSRDELTKNQVSLTCLVKGFYPSDIAVEWESNGQPENNYKTTPLV |
| | | | LDSDGSFFLYSKLTVDKSRWQQGNVFSCSVMHEALHNHYTQKSLSLSPGK |
| | 5131 | DNA Heavy | CAGGTGCAGCTGCAGCAGAGCGGCCCCGAGCTGGTGAAGCCCGGCGCCAG |
| | | Chain | CCTGAAGCTGAGCTGCACCGCCAGCGGCTTCAACATCAAGGACACCTACA |
| | | (hIgG1) | TCCACTGGGTGAAGCAGAGACCCGAGCAGGGCCTGGAGTGGATCGGCAGA |
| | | | ATCTACCCCACCAACGGCTACACCAGATACGACCCCAAGTTCCAGGACAA |
| | | | GGCCACCATCACCGCCGACACCAGCAGCAACACCGCCTACCTGCAGGTGA |
| | | | GCAGACTGACCAGCGAGGACACCGCCGTGTACTACTGCAGCAGATGGGGC |
| | | | GGCGACGGCTTCTACGCCATGGACTACTGGGGCCAGGGCGCCAGCGTGAC |
| | | | CGTGAGCAGCgcgtcgaccaagggcccatcggtcttccccctggcaccct |
| | | | cctccaagagcacctctgggggcacagcggccctgggctgcctggtcaag |
| | | | gactacttccccgaacctgtgacggtctcgtggaactcaggcgccctgac |
| | | | cagcggcgtgcacaccttcccggctgtcctacagtcctcaggactctact |
| | | | ccctcagcagcgtggtgaccgtgccctccagcagcttgggcacccagacc |
| | | | tacatctgcaacgtgaatcacaagcccagcaacaccaaggtggacaagaG |
| | | | agttgagcccaaatcttgtgacaaaactcacacatgcccaccgtgcccag |
| | | | cacctgaactcGtggggggaccgtcagtcttcctcCtccccccaaaaccc |
| | | | aaggacaccctcatgatctcccggacccctgaggtcacatgcgtggtggt |
| | | | ggacgtgagccacgaagaccctgaggtcaagttcaactggtacgtggacg |
| | | | gcgtggaggtgcataatgccaagacaaagccgcCggaggagcagtacaac |
| | | | agcacgCTccgtgtggtcagcgtcctcaccgtcctgcaccaggactggct |
| | | | gaatggcaaggagtacaagtgcaaggtctccaacaaagccctcccagccc |
| | | | ccatcgagaaaaccatctccaaagccaaagggcagccccgagaaccacag |
| | | | gtgtacaccctgcccccatcccgggaTgagCtgaccaagaaccaggtcag |
| | | | cctgacctgcctggtcaaaggcttctatcccagcgacatcgccgtggagt |
| | | | gggagagcaatgggcagccggagaacaactacaagaccacgcctcTcgtg |
| | | | ctggactccgacggctccttcttcctctacagcaagctcaccgtggacaa |
| | | | gagcaggtggcagcaggggaacgtcttctcatgctccgtgatgcatgagg |
| | | | ctctgcacaaccactacacgcagaagagcctctccctgtctccgggtaaa |
| | 5143 | LC CDR 1 | KASQDVNTAVA |
| | | (Kabat) | |
| | 5144 | LC CDR2 | SASFRYT |
| | | (Kabat) | |
| | 5145 | LC CDR3 | QQHYTTPPT |
| | | (Kabat) | |
| | 5146 | LC CDR1 | KASQDVNTAVA |
| | | (Chothia) | |
| | 5147 | LC CDR2 | SASFRYT |
| | | (Chothia) | |
| | 5148 | LC CDR3 | QQHYTTPPT |
| | | (Chothia) | |
| | 5134 | VL | DIVMTQSHKFMSTSVGDRVSITCKASQDVNTAVAWYQQKPGHSPKLLIYS |
| | | | ASFRYTGVPDRFTGSRSGTDFTFTISSVQAEDLAVYYCQQHYTTPPTFGG |
| | | | GTKVEIK |
| | 5133 | DNA VL | GACATCGTGATGACCCAGAGCCACAAGTTCATGAGCACCAGCGTGGGCGA |
| | | | CAGAGTGAGCATCACCTGCAAGGCCAGCCAGGACGTGAACACCGCCGTGG |
| | | | CCTGGTACCAGCAGAAGCCCGGCCACAGCCCCAAGCTGCTGATCTACAGC |
| | | | GCCAGCTTCAGATACACCGGCGTGCCGGACAGATTCACCGGCAGCAGAAG |
| | | | CGGCACCGACTTCACCTTCACCATCAGCAGCGTGCAGGCCGAGGACCTGG |
| | | | CCGTGTACTACTGCCAGCAGCACTACACCACCCCTCCTACCTTCGGCGGC |
| | | | GGCACCAAGGTGGAGATCAAG |
| | 5136 | Light Chain | DIVMTQSHKFMSTSVGDRVSITCKASQDVNTAVAWYQQKPGHSPKLLIYS |
| | | (hIgG1) | ASFRYTGVPDRFTGSRSGTDFTFTISSVQAEDLAVYYCQQHYTTPPTFGG |
| | | | GTKVEIKRTVAAPSVFIFPPSDEQLKSGTASVVCLLNNFYPREAKVQWKV |
| | | | DNALQSGNSQESVTEQDSKDSTYSLSSTLTLSKADYEKHKVYACEVTHQG |
| | | | LSSPVTKSFNRGEC |
| | 5135 | DNA Light | GACATCGTGATGACCCAGAGCCACAAGTTCATGAGCACCAGCGTGGGCGA |
| | | Chain | CAGAGTGAGCATCACCTGCAAGGCCAGCCAGGACGTGAACACCGCCGTGG |
| | | (hIgG1) | CCTGGTACCAGCAGAAGCCCGGCCACAGCCCCAAGCTGCTGATCTACAGC |
| | | | GCCAGCTTCAGATACACCGGCGTGCCGGACAGATTCACCGGCAGCAGAAG |
| | | | CGGCACCGACTTCACCTTCACCATCAGCAGCGTGCAGGCCGAGGACCTGG |
| | | | CCGTGTACTACTGCCAGCAGCACTACACCACCCCTCCTACCTTCGGCGGC |
| | | | GGCACCAAGGTGGAGATCAAGAGAACCGTGGCCGCCCCTAGCGTGTTCAT |
| | | | CTTCCCGCCAAGCGACGAGCAGCTGAAGAGCGGCACCGCCAGCGTGGTGT |
| | | | GCCTGCTGAACAACTTCTACCCCAGAGAGGCCAAGGTGCAGTGGAAGGTG |
| | | | GACAACGCCCTGCAGAGCGGCAACAGCCAGGAGAGCGTGACCGAGCAGGA |
| | | | CAGCAAGGACAGCACCTACAGCCTGAGCAGCACCCTGACCCTGAGCAAGG |
| | | | CCGACTACGAGAAGCACAAGGTGTACGCCTGCGAGGTGACCCACCAGGGC |
| | | | CTGAGCAGCCCCGTGACCAAGAGCTTCAACAGAGGCGAGTGCt |
| AB-HER- | 5311 | HC CDR1 | GYFIN |
| 73 | | (Kabat) | |
| | 5312 | HC CDR2 | HISSSYATSTYNQKFQ |
| | | (Kabat) | |
| | 5313 | HC CDR3 | YCVRSGNY |
| | | (Kabat) | |
| | 5314 | HC CDR1 | GYSFTGY |
| | | (Chothia) | |
| | 5315 | HC CDR2 | SSSYA |
| | | (Chothia) | |
| | 5316 | HC CDR3 | YCVRSGNY |
| | | (Chothia) | |
| | 5358 | HC CDR1 | GYSFTGYFIN |
| | 5359 | HC CDR2 | HISSSYATSTYNQKEQG |
| | 5360 | HC CDR3 | SGNYEEYAMDY |
| | 5262 | VH | QVQLVQSGAEVKKPGASVKVSCKASGYSFTGYFINWVREAPGQGLEWMGH |
| | | | ISSSYATSTYNQKFQGRVTFTVDTSSSTAYMELSSLRSEDTAVYYCVRSG |
| | | | NYEEYAMDYWGQGTLVTVSS |
| | 5261 | DNA VH | CAAgttcagctggtgCAGtctggTGCAGAAGTTAAGAAGccagggGCAtc |
| | | | aGTAAAGGTGTCCtgCAAGgcttctggcTACTCTTTCACTGGGTATTTCa |
| | | | taAATtgggtgAGAGAGgccccCGGCCAGggcctggaatggATGGGCCAT |
| | | | attTCCTCCTCTTATGCAACTTCTACAtatAACCAGAAGTTTCAGggcAG |
| | | | AGTCactTTCACTGTGgacacatccAGCTCTacagcctacATGGAGCTGT |
| | | | CAagcctgAGATCTgaggacactgcagtctattattgtGTGagaAGTgga |
| | | | AACTAtGAAGAGTATgctatggacTACtggggtcaaggaaccctggtcac |
| | | | AgtctcctcA |
| | 5264 | Heavy Chain | QVQLVQSGAEVKKPGASVKVSCKASGYSFTGYFINWVREAPGQGLEWMGH |
| | | (hIgG1) | ISSSYATSTYNQKFQGRVTFTVDTSSSTAYMELSSLRSEDTAVYYCVRSG |
| | | | NYEEYAMDYWGQGTLVTVSSASTKGPSVFPLAPSSKSTSGGTAALGCLVK |
| | | | DYFPEPVTVSWNSGALTSGVHTFPAVLQSSGLYSLSSVVTVPSSSLGTQT |
| | | | YICNVNHKPSNTKVDKKVEPPKSCDKTHTCPPCPAPELLGGPSVFLFPPK |
| | | | PKDTLMISRTPEVTCVVVDVSHEDPEVKFNWYVDGVEVHNAKTKPREEQY |
| | | | NSTYRVVSVLTVLHQDWLNGKEYKCKVSNKALPAPIEKTISKAKGQPREP |
| | | | QVYTLPPSRDELTKNQVSLTCLVKGFYPSDIAVEWESNGQPENNYKTTPP |
| | | | VLDSDGSFFLYSKLTVDKSRWQQGNVFSCSVMHEALHNHYTQKSLSLSPG |
| | | | KRKRREGRGSLLTCGDVEENPGPMDMRVPAQLLGLLLLWLSGARCEVQLV |
| | | | ESGGGLVQPGGSLRLSCAASGFNIKDTYIHWVRQAPGKGLEWVARIYPTN |
| | | | GYTRYADSVKGRFTISADTSKNTAYLQMNSLRAEDTAVYYCSRWGGDGFY |
| | | | AMDYWGQGTLVTVSS |
| | 5263 | DNA Heavy | CAAgttcagctggtgCAGtctggTGCAGAAGTTAAGAAGccagggGCAtc |
| | | Chain | aGTAAAGGTGTCCtgCAAGgcttctggcTACTCTTTCACTGGGTATTTCa |
| | | (hIgG1) | taAATtgggtgAGAGAGgccccCGGCCAGggcctggaatggATGGGCCAT |
| | | | attTCCTCCTCTTATGCAACTTCTACAtatAACCAGAAGTTTCAGggcAG |
| | | | AGTCactTTCACTGTGgacacatccAGCTCTacagcctacATGGAGCTGT |
| | | | CAagcctgAGATCTgaggacactgcagtctattattgtGTGagaAGTgga |
| | | | AACTAtGAAGAGTATgctatggacTACtggggtcaaggaaccctggtcac |
| | | | AgtctcctcAgcCtcTaccaagggcccatcTgtcttccccctggcaccct |
| | | | cctccaagagcacctctgggggcacagcAgccctgggctgcctggtcaag |
| | | | gactacttcccTgaacctgtgacAgtctcTtggaactcaggGgccctgac |
| | | | cTCTggGgtgcacaccttcccAgctgtcctacagtcctcaggactctact |
| | | | ccctcTCTTCTgtggtgacAgtgccctccagcagcttgggcacccagacc |
| | | | tacatctgcaaTgtgaatcacaagcccagcaacaccaaggtggacaagaa |
| | | | agttgagcccCCCaaatcttgtgacaaaactcacacatgcccaccCtgcc |
| | | | cagcacctgaactcctggggggaccCtcagtcttcctcttccccccaaaa |
| | | | cccaaggacaccctcatgatctccAGAacccctgaggtcacatgTgtggt |
| | | | ggtggaTgtgagccaTgaagaccctgaggtcaagttcaactggtaTgtgg |
| | | | aTggGgtggaggtgcataatgccaagacaaagccCAGAgaggagcagtac |
| | | | aacagcacCtacAGAgtggtcTCAgtcctcacTgtcctgcaccaggactg |
| | | | gctgaatggcaaggagtacaagtgcaaggtctccaacaaagccctcccag |
| | | | cccccatAgagaaaaccatctccaaagccaaagggcagcccAGAgaacca |
| | | | caggtgtacaccctgcccccatccAGAgatgagctgaccaagaaccaggt |
| | | | cagcctgacctgcctggtcaaaggcttctatcccTCTgacatTgcTgtgg |
| | | | agtgggagagcaatgggcagccAgagaacaactacaagaccacCcctccA |
| | | | gtgctggactcTgatggctccttcttcctctacagcaagctcacAgtgga |
| | | | caagagcaggtggcagcaggggaaTgtcttctcatgctcTgtgatgcatg |
| | | | aggctctgcacaaccactacacTcagaagagcctctccctgtctccTggt |
| | | | aaa |
| | 5355 | LC CDR1 | RSSQTLLYSNNQKNYLA |
| | 5356 | LC CDR2 | WAFTRKS |
| | 5357 | LC CDR3 | QQYSNYPWT |
| | 5354 | VL | DIVLTQSPDSLAVSLGERATINCRSSQTLLYSNNQKNYLAWYQKKPGQPP |
| | | | KLLISWAFTRKSGVPDRFSGSGSGTDFTLTISSLQAEDVAVYYCQQYSNY |
| | | | PWTFGQGTKVEIK |
| | 5353 | DNA VL | gatatTGTACTGacccagtccccTGACtccctgGCTGTGtctCTGggGGA |
| | | | AaggGCAaccatcAACtgcAGGAGTagtcagACCCTTCTGTACTCTAATA |
| | | | ACCAGAAAAACTACCTGgcctggtatcaaAAAaaaccaggaCAGCCTccT |
| | | | aaactactgattAGTTGGgcaTTCACTAGGAAGtctggagtccctGACAG |
| | | | GttctctggatcTGGGtcTggAacAgatttcacActgaccatcagcagtc |
| | | | tgcagGCTgaagaTGTTgcaGTCtaCtactgtcagcaaTACTCAAACTAC |
| | | | cctTGGacTttTggacagggGaccaaAgtggagatcaaa |
| | 5268 | Light Chain | DIVLTQSPDSLAVSLGERATINCRSSQTLLYSNNQKNYLAWYQKKPGQPP |
| | | (hIgG1) | KLLISWAFTRKSGVPDRFSGSGSGTDETLTISSLQAEDVAVYYCQQYSNY |
| | | | PWTFGQGTKVEIKRTVAAPSVFIFPPSDEQLKSGTASVKCLLNNFYPREA |
| | | | KVQWKVDNALQSGNSQESVTEQDSKDSTYSLSSTLTLSKADYEKHKVYAC |
| | | | EVTHQGLSSPVTKSFNRGEC |
| | 5267 | DNA Light | gatatTGTACTGacccagtccccTGACtccctgGCTGTGtctCTGggGGA |
| | | Chain | AaggGCAaccatcAACtgcAGGAGTagtcagACCCTTCTGTACTCTAATA |
| | | (hIgG1) | ACCAGAAAAACTACCTGgcctggtatcaaAAAaaaccaggaCAGCCTccT |
| | | | aaactactgattAGTTGGgcaTTCACTAGGAAGtctggagtccctGACAG |
| | | | GttctctggatcTGGGtcTggAacAgatttcacActgaccatcagcagtc |
| | | | tgcagGCTgaagaTGTTgcaGTCtaCtactgtcagcaaTACTCAAACTAC |
| | | | cctTGGacTttTggacagggGaccaaAgtggagatcaaaAGGactgtCgc |
| | | | tgcaccatctgtcttcatcttcccAccatctgatgagcagttgaaatctg |
| | | | gaactgcctctgttAAGtgcctgctgaataacttctatcccagagaggcc |
| | | | aaagtacagtggaaggtggataaTgccctccaaAGTggtaactcccagga |
| | | | gagtgtcacagagcaggacagcaaggacagcacctacagcctcagcagca |
| | | | ccctgacCctgagcaaagcagactaTgagaaacacaaagtctaTgcctgT |
| | | | gaagtcacccatcagggcctgagcAGCccAgtcacaaagagcttcaacag |
| | | | gggagagtgt |
| | 5037 | HC CDR1 | DTYIH |
| | | (Kabat) | |
| | 5038 | HC CDR2 | RIYPTNGYTRYADSVKG |
| | | (Kabat) | |
| | 5039 | HC CDR3 | WGGDGFYAMDY |
| | | (Kabat) | |
| | 5040 | HC CDR1 | GFNIKDT |
| | | (Chothia) | |
| | 5041 | HC CDR2 | YPTNGY |
| | | (Chothia) | |
| | 5042 | HC CDR3 | WGGDGFYAMDY |
| | | (Chothia) | |
| | 5361 | HC CDR1 | GFNIKDTYIH |
| | 5362 | HC CDR2 | RIYPTNGYTRYADSVKG |
| | 5363 | HC CDR3 | WGGDGFYAMDY |
| | 5290 | VH | EVQLVESGGGLVQPGGSLRLSCAASGFNIKDTYIHWVRQAPGKGLEWVAR |
| | | | IYPTNGYTRYADSVKGRFTISADTSKNTAYLQMNSLRAEDTAVYYCSRWG |
| | | | GDGFYAMDYWGQGTLVTVSS |
| | 5289 | DNA VH | gaggttcagctggtggagtctggTggtggcctGgtgcagccagggggctc |
| | | | actcAGAttgtcctgtgcagcttctggcttcaacattaaagacacctata |
| | | | tacactgggtgAGAcaggccccTggAaagggcctggaatgggttgcaagg |
| | | | atttatcctacTaatggttatactagatatgcAgatagTgtcaagggcAG |
| | | | AttcactataagTgcagacacatccaaaaacacagcctacctgcagatga |
| | | | acagcctgAGAgctgaggacactgcAgtctattattgttctagatgggga |
| | | | ggggaTggcttctatgctatggacTACtggggtcaaggaaccctggtcac |
| | | | AgtctcctcT |
| | 5317 | LC CDR 1 | RASQDVNTAVA |
| | | (Kabat) | |
| | 5318 | LC CDR2 | SASFLYS |
| | | (Kabat) | |
| | 5319 | LC CDR3 | QQHYTTPPT |
| | | (Kabat) | |
| | 5320 | LC CDR1 | RASQDVNTAVA |
| | | (Chothia) | |
| | 5321 | LC CDR2 | SASFLYS |
| | | (Chothia) | |
| | 5322 | LC CDR3 | QQHYTTPPT |
| | | (Chothia) | |
| | 5266 | VL | DIQMTQSPSSLSASVGDRVTITCRASQDVNTAVAWYQQKPGKAPKLLIYS |
| | | | ASFLYSGVPSRFSGSRSGTDFTLTISSLQPEDFATYYCQQHYTTPPTFGQ |
| | | | GTKVEIK |
| | 5265 | DNA VL | gatatccagatgacccagtccccAagctccctgtcTgcctctgtgggGga |
| | | | tagggtcaccatcacctgcAGAgccagtcaggatgtgaatactgctgtag |
| | | | cctggtatcaacagaaaccaggaaaagctccCaaactactgatttactcT |
| | | | gcatccttcctcTACtctggagtcccttctAGAttctctggatccagatc |
| | | | tggCacTgaCttcactctgaccatcagTagtctgcagccTgaagacttTg |
| | | | caacttattactgtcaAcaacattatactactcctcccacCttTggacag |
| | | | ggtaccaaggtggagatcaaa |
| | 5351 | scFv | EVQLVESGGGLVQPGGSLRLSCAASGFNIKDTYIHWVRQAPGKGLEWVAR |
| | | | IYPTNGYTRYADSVKGRFTISADTSKNTAYLQMNSLRAEDTAVYYCSRWG |
| | | | GDGFYAMDYWGQGTLVTVSSGGGGSGGGGSGGGGSDIQMTQSPSSLSASV |
| | | | GDRVTITCRASQDVNTAVAWYQQKPGKAPKLLIYSASFLYSGVPSRFSGS |
| | | | RSGTDFTLTISSLQPEDFATYYCQQHYTTPPTFGQGTKVEIK |
| | 5364 | scFv DNA | gaggttcagctggtggagtctggTggtggcctGgtgcagccagggggctc |
| | | | actcAGAttgtcctgtgcagcttctggcttcaacattaaagacacctata |
| | | | tacactgggtgAGAcaggccccTggAaagggcctggaatgggttgcaagg |
| | | | atttatcctacTaatggttatactagatatgcAgatagTgtcaagggcAG |
| | | | AttcactataagTgcagacacatccaaaaacacagcctacctgcagatga |
| | | | acagcctgAGAgctgaggacactgcAgtctattattgttctagatgggga |
| | | | ggggaTggcttctatgctatggacTACtggggtcaaggaaccctggtcac |
| | | | AgtctcctcTggtggtggtggatcTggaggaggaggaAGTggaggtggag |
| | | | gtTCTgatatccagatgacccagtccccAagctccctgtcTgcctctgtg |
| | | | ggGgatagggtcaccatcacctgcAGAgccagtcaggatgtgaatactgc |
| | | | tgtagcctggtatcaacagaaaccaggaaaagctccCaaactactgattt |
| | | | actcTgcatccttcctcTACtctggagtcccttctAGAttctctggatcc |
| | | | agatctggCacTgaCttcactctgaccatcagTagtctgcagccTgaaga |
| | | | cttTgcaacttattactgtcaAcaacattatactactcctcccacCttTg |
| | | | gacagggtaccaaggtggagatcaaa |
| | 5365 | Light Chain | EVQLVESGGGLVQPGGSLRLSCAASGFNIKDTYIHWVRQAPGKGLEWVAR |
| | | | IYPTNGYTRYADSVKGRFTISADTSKNTAYLQMNSLRAEDTAVYYCSRWG |
| | | | GDGFYAMDYWGQGTLVTVSSGGGGSGGGGSGGGGSDIQMTQSPSSLSASV |
| | | | GDRVTITCRASQDVNTAVAWYQQKPGKAPKLLIYSASFLYSGVPSRFSGS |
| | | | RSGTDFTLTISSLQPEDFATYYCQQHYTTPPTFGQGTKVEIKGSDIVLTQ |
| | | | SPDSLAVSLGERATINCRSSQTLLYSNNQKNYLAWYQKKPGQPPKLLISW |
| | | | AFTRKSGVPDRFSGSGSGTDETLTISSLQAEDVAVYYCQQYSNYPWTFGQ |
| | | | GTKVEIKRTVAAPSVFIFPPSDEQLKSGTASVKCLLNNFYPREAKVQWKV |
| | | | DNALQSGNSQESVTEQDSKDSTYSLSSTLTLSKADYEKHKVYACEVTHQG |
| | | | LSSPVTKSFNRGEC |
| | 5366 | DNA Light | gaggttcagctggtggagtctggTggtggcctGgtgcagccagggggctc |
| | | Chain | actcAGAttgtcctgtgcagcttctggcttcaacattaaagacacctata |
| | | | tacactgggtgAGAcaggccccTggAaagggcctggaatgggttgcaagg |
| | | | atttatcctacTaatggttatactagatatgcAgatagTgtcaagggcAG |
| | | | AttcactataagTgcagacacatccaaaaacacagcctacctgcagatga |
| | | | acagcctgAGAgctgaggacactgcAgtctattattgttctagatgggga |
| | | | ggggaTggcttctatgctatggacTACtggggtcaaggaaccctggtcac |
| | | | AgtctcctcTggtggtggtggatcTggaggaggaggaAGTggaggtggag |
| | | | gtTCTgatatccagatgacccagtccccAagctccctgtcTgcctctgtg |
| | | | ggGgatagggtcaccatcacctgcAGAgccagtcaggatgtgaatactgc |
| | | | tgtagcctggtatcaacagaaaccaggaaaagctccCaaactactgattt |
| | | | actcTgcatccttcctcTACtctggagtcccttctAGAttctctggatcc |
| | | | agatctggCacTgaCttcactctgaccatcagTagtctgcagccTgaaga |
| | | | cttTgcaacttattactgtcaAcaacattatactactcctcccacCttTg |
| | | | gacagggtaccaaggtggagatcaaaGGCTCTgatatTGTACTGacccag |
| | | | tccccTGACtccctgGCTGTGtctCTGggGGAAaggGCAaccatcAACtg |
| | | | CAGGAGTagtcagACCCTTCTGTACTCTAATAACCAGAAAAACTACCTGg |
| | | | cctggtatcaaAAAaaaccaggaCAGCCTccTaaactactgattAGTTGG |
| | | | gcaTTCACTAGGAAGtctggagtccctGACAGGttctctggatcTGGGtc |
| | | | TggAacAgatttcacActgaccatcagcagtctgcagGCTgaagaTGTTg |
| | | | caGTCtaCtactgtcagcaaTACTCAAACTACcctTGGacTttTggacag |
| | | | ggGaccaaAgtggagatcaaaAGGactgtCgctgcaccatctgtcttcat |
| | | | cttcccAccatctgatgagcagttgaaatctggaactgcctctgttAAGt |
| | | | gcctgctgaataacttctatcccagagaggccaaagtacagtggaaggtg |
| | | | gataaTgccctccaaAGTggtaactcccaggagagtgtcacagagcagga |
| | | | cagcaaggacagcacctacagcctcagcagcaccctgacCctgagcaaag |
| | | | cagactaTgagaaacacaaagtctaTgcctgTgaagtcacccatcagggc |
| | | | ctgagcAGCccAgtcacaaagagcttcaacaggggagagtgt |
| Ab-HER- | 5281 | HC CDR1 | DTYIH |
| 75 | | (Kabat) | |
| | 5282 | HC CDR2 | RIYPTNGYTRYADSVKG |
| | | (Kabat) | |
| | 5283 | HC CDR3 | WGGDGFYAMDY |
| | | (Kabat) | |
| | 5284 | HC CDR1 | GFNIKDT |
| | | (Chothia) | |
| | 5285 | HC CDR2 | YPTNGY |
| | | (Chothia) | |
| | 5286 | HC CDR3 | WGGDGFYAMDY |
| | | (Chothia) | |
| | 5270 | VH | EVQLVESGGGLVQPGGSLRLSCAASGFNIKDTYIHWVRQAPGKGLEWVAR |
| | | | IYPTNGYTRYADSVKGRFTISADTSKNTAYLQMNSLRAEDTAVYYCSRWG |
| | | | GDGFYAMDYWGQGTLVTVSS |
| | 5269 | DNA VH | gaggttcagctggtggagtctggAggtggcctggtgcagccagggggctc |
| | | | actcAGAttgtcctgtgcagcttctggcttcaacattaaagacacctata |
| | | | tacactgggtgagacaggccccAggtaagggcctggaatgggttgcaagg |
| | | | atttatcctacCaatggttatactagatatgcTgatTCTgtcaagggcAG |
| | | | AttcactataTCTgcagacacatccaaaaacacagcctacctgcagatga |
| | | | acagcctgAGAgctgaggacactgcTgtctattattgttctagatgggga |
| | | | ggggaTggcttctatgctatggacTACtggggtcaaggaaccctggtcac |
| | | | AgtctcctcT |
| | 5272 | Heavy Chain | EVQLVESGGGLVQPGGSLRLSCAASGFNIKDTYIHWVRQAPGKGLEWVAR |
| | | (hIgG1) | IYPTNGYTRYADSVKGRFTISADTSKNTAYLQMNSLRAEDTAVYYCSRWG |
| | | | GDGFYAMDYWGQGTLVTVSSASTKGPSVFPLAPSSKSTSGGTAALGCLVK |
| | | | DYFPEPVTVSWNSGALTSGVHTFPAVLQSSGLYSLSSVVTVPSSSLGTQT |
| | | | YICNVNHKPSNTKVDKRVEPKSCDKTHTCPPCPAPELVGGPSVFLLPPKP |
| | | | KDTLMISRTPEVTCVVVDVSHEDPEVKFNWYVDGVEVHNAKTKPPEEQYN |
| | | | STLRVVSVLTVLHQDWLNGKEYKCKVSNKALPAPIEKTISKAKGQPREPQ |
| | | | VYTLPPSRDELTKNQVSLTCLVKGFYPSDIAVEWESNGQPENNYKTTPLV |
| | | | LDSDGSFFLYSKLTVDKSRWQQGNVFSCSVMHEALHNHYTQKSLSLSPGK |
| | 5271 | DNA Heavy | gaggttcagctggtggagtctggAggtggcctggtgcagccagggggctc |
| | | Chain | actcAGAttgtcctgtgcagcttctggcttcaacattaaagacacctata |
| | | (hIgG1) | tacactgggtgagacaggccccAggtaagggcctggaatgggttgcaagg |
| | | | atttatcctacCaatggttatactagatatgcTgatTCTgtcaagggcAG |
| | | | AttcactataTCTgcagacacatccaaaaacacagcctacctgcagatga |
| | | | acagcctgAGAgctgaggacactgcTgtctattattgttctagatgggga |
| | | | ggggaTggcttctatgctatggacTACtggggtcaaggaaccctggtcac |
| | | | AgtctcctcTgcCtcTaccaagggcccatcTgtcttccccctggcaccct |
| | | | cctccaagagcacctctgggggcacagcTgccctgggctgcctggtcaag |
| | | | gactacttcccTgaacctgtgacAgtctcCtggaactcaggAgccctgac |
| | | | cagTggAgtgcacaccttcccTgctgtcctacagtcctcaggactctact |
| | | | ccctcagcTCTgtggtgacAgtgccctccagcagcttgggcacccagacc |
| | | | tacatctgcaaTgtgaatcacaagcccagcaacaccaaggtggacaagaG |
| | | | agttgagcccaaatcttgtgacaaaactcacacatgcccaccTtgcccag |
| | | | cacctgaactGGtggggggaccAtcagtcttcctcCtccccccaaaaccc |
| | | | aaggacaccctcatgatctccAGAacccctgaggtcacatgTgtggtggt |
| | 5244 | DNA Heavy | ggaTgtgagccaTgaagaccctgaggtcaagttcaactggtaTgtggaTg |
| | | Chain | gAgtggaggtgcataatgccaagacaaagccCcCTgaggagcagtacaac |
| | | (hIgG1) | agcacTCTcAGAgtggtcTCTgtcctcacAgtcctgcaccaggactggct |
| | | | gaatggcaaggagtacaagtgcaaggtctccaacaaagccctcccagccc |
| | | | ccatTgagaaaaccatctccaaagccaaagggcagcccAGAgaaccacag |
| | | | gtgtacaccctgcccccatccAGAgaTgagCtgaccaagaaccaggtcag |
| | | | cctgacctgcctggtcaaaggcttctatcccTCTgacatTgcTgtggagt |
| | | | gggagagcaatgggcagccTgagaacaactacaagaccacAcctcTTgtg |
| | | | ctggactcTgaTggctccttcttcctctacagcaagctcacAgtggacaa |
| | | | gagcaggtggcagcaggggaaTgtcttctcatgcTCTgtgatgcatgagg |
| | | | ctctgcacaaccactacacCcagaagagcctctccctgtctccAggtaaa |
| | | | gaggttcagctggtggagtctggAggtggcctggtgcagccagggggctc |
| | | | actcAGAttgtcctgtgcagcttctggcttcaacattaaagacacctata |
| | | | tacactgggtgagacaggccccAggtaagggcctggaatgggttgcaagg |
| | | | atttatcctacCaatggttatactagatatgcTgatTCTgtcaagggcAG |
| | | | AttcactataTCTgcagacacatccaaaaacacagcctacctgcagatga |
| | | | acagcctgAGAgctgaggacactgcTgtctattattgttctagatgggga |
| | | | ggggaTggcttctatgctatggacTACtggggtcaaggaaccctggtcac |
| | | | AgtctcctcTgcCtcTaccaagggcccatcTgtcttccccctggcaccct |
| | | | cctccaagagcacctctgggggcacagcTgccctgggctgcctggtcaag |
| | | | gactacttcccTgaacctgtgacAgtctcCtggaactcaggAgccctgac |
| | | | cagTggAgtgcacaccttcccTgctgtcctacagtcctcaggactctact |
| | | | ccctcagcTCTgtggtgacAgtgccctccagcagcttgggcacccagacc |
| | | | tacatctgcaaTgtgaatcacaagcccagcaacaccaaggtggacaagaG |
| | | | agttgagcccaaatcttgtgacaaaactcacacatgcccaccTtgcccag |
| | | | cacctgaactGGtggggggaccAtcagtcttcctcCtccccccaaaaccc |
| | | | aaggacaccctcatgatctccAGAacccctgaggtcacatgTgtggtggt |
| | | | ggaTgtgagccaTgaagaccctgaggtcaagttcaactggtaTgtggaTg |
| | | | gAgtggaggtgcataatgccaagacaaagccCcCTgaggagcagtacaac |
| | | | agcacTCTcAGAgtggtcTCTgtcctcacAgtcctgcaccaggactggct |
| | | | gaatggcaaggagtacaagtgcaaggtctccaacaaagccctcccagccc |
| | | | ccatTgagaaaaccatctccaaagccaaagggcagcccAGAgaaccacag |
| | | | gtgtacaccctgcccccatccAGAgaTgagCtgaccaagaaccaggtcag |
| | | | cctgacctgcctggtcaaaggcttctatcccTCTgacatTgcTgtggagt |
| | | | gggagagcaatgggcagccTgagaacaactacaagaccacAcctcTTgtg |
| | | | ctggactcTgaTggctccttcttcctctacagcaagctcacAgtggacaa |
| | | | gagcagAtggcagcaggggaaTgtcttctcatgcTCTgtgatgcatgagg |
| | | | ctctgcacaaccactacacCcagaagagcctctccctgtctccAggtaaa |
| | 5287 | LC CDR 1 | RASQDVNTAVA |
| | | (Kabat) | |
| | 5288 | LC CDR2 | SASFLYS |
| | | (Kabat) | |
| | 5289 | LC CDR3 | QQHYTTPPT |
| | | (Kabat) | |
| | 5290 | LC CDR1 | RASQDVNTAVA |
| | | (Chothia) | |
| | 5291 | LC CDR2 | SASFLYS |
| | | (Chothia) | |
| | 5292 | LC CDR3 | QQHYTTPPT |
| | | (Chothia) | |
| | 5274 | VL | DIQMTQSPSSLSASVGDRVTITCRASQDVNTAVAWYQQKPGKAPKLLIYS |
| | | | ASFLYSGVPSRFSGSRSGTDFTLTISSLQPEDFATYYCQQHYTTPPTFGQ |
| | | | GTKVEIK |
| | 5273 | DNA VL | gatatccagatgacccagtccccTagctccctgtcTgcctctgtgggAga |
| | | | tagggtcaccatcacctgcAGAgccagtcaggatgtgaatactgctgtag |
| | | | cctggtatcaacagaaaccaggaaaagctccTaaactactgatttactcT |
| | | | gcatccttcctcTACtctggagtcccttctAGGttctctggatccagatc |
| | | | tgggacTgatttcactctgaccatcagcagtctgcagccAgaagacttTg |
| | | | caacttattactgtcagcaacattatactactcctcccacTttTggacag |
| | | | ggtaccaaggtggagatcaaa |
| | 5245 | DNA VL | gatatccagatgacccagtccccTagctccctgtcTgcctctgtgggAga |
| | | | tagggtcaccatcacctgTAGAgccagtcaggatgtgaatactgctgtag |
| | | | cctggtatcaacagaaaccaggaaaagctccTaaactactgatttactcT |
| | | | gcatccttcctcTACtctggagtcccttctAGGttctctggatccagatc |
| | | | tgggacTgatttcactctgaccatcagcagtctgcagccAgaagacttTg |
| | | | caacttattactgtcagcaacattatactactcctcccacTttTggacag |
| | | | ggtaccaaggtggagatcaaa |
| | 5276 | Light Chain | DIQMTQSPSSLSASVGDRVTITCRASQDVNTAVAWYQQKPGKAPKLLIYS |
| | | (hIgG1) | ASFLYSGVPSRFSGSRSGTDFTLTISSLQPEDFATYYCQQHYTTPPTFGQ |
| | | | GTKVEIKRTVAAPSVFIFPPSDEQLKSGTASVVCLLNNFYPREAKVQWKV |
| | | | DNALQSGNSQESVTEQDSKDSTYSLSSTLTLSKADYEKHKVYACEVTHQG |
| | | | LSSPVTKSFNRGEC |
| | 5275 | DNA Light | gatatccagatgacccagtccccTagctccctgtcTgcctctgtgggAga |
| | | Chain | tagggtcaccatcacctgcAGAgccagtcaggatgtgaatactgctgtag |
| | | (hIgG1) | cctggtatcaacagaaaccaggaaaagctccTaaactactgatttactcT |
| | | | gcatccttcctcTACtctggagtcccttctAGGttctctggatccagatc |
| | | | tgggacTgatttcactctgaccatcagcagtctgcagccAgaagacttTg |
| | | | caacttattactgtcagcaacattatactactcctcccacTttTggacag |
| | | | ggtaccaaggtggagatcaaaAGAactgtggctgcaccatctgtcttcat |
| | | | cttcccAccatctgatgagcagttgaaatctggaactgcctctgttgtgt |
| | | | gcctgctgaataacttctatcccagagaggccaaagtacagtggaaggtg |
| | | | gataaTgccctccaatcAggtaactcccaggagagtgtcacagagcagga |
| | | | cagcaaggacagcacctacagcctcagcagcaccctgacTctgagcaaag |
| | | | cagactaTgagaaacacaaagtctaTgcctgTgaagtcacccatcagggc |
| | | | ctgagctcTccTgtcacaaagagcttcaacaggggagagtgt |
| | 5246 | DNA Light | gatatccagatgacccagtccccTagctccctgtcTgcctctgtgggAga |
| | | Chain | tagggtcaccatcacctgTAGAgccagtcaggatgtgaatactgctgtag |
| | | (hIgG1) | cctggtatcaacagaaaccaggaaaagctccTaaactactgatttactcT |
| | | | gcatccttcctcTACtctggagtcccttctAGGttctctggatccagatc |
| | | | tgggacTgatttcactctgaccatcagcagtctgcagccAgaagacttTg |
| | | | caacttattactgtcagcaacattatactactcctcccacTttTggacag |
| | | | ggtaccaaggtggagatcaaaAGAactgtggctgcaccatctgtcttcat |
| | | | cttcccAccatctgatgagcagttgaaatctggaactgcctctgttgtgt |
| | | | gcctgctgaataacttctatcccagagaggccaaagtacagtggaaggtg |
| | | | gataaTgccctccaatcAggtaactcccaggagagtgtcacagagcagga |
| | | | cagcaaggacagcacctacagcctcagcagcaccctgacTctgagcaaag |
| | | | cagactaTgagaaacacaaagtctaTgcctgTgaagtcacccatcagggc |
| | | | ctgagctcTccTgtcacaaagagcttcaacaggggagagtgt |
| Ab-HER- | 5323 | HC CDR1 | DTYIH |
| 77 | | (Kabat) | |
| | 5324 | HC CDR2 | RIYPTNGYTRYADSVKG |
| | | (Kabat) | |
| | 5325 | HC CDR3 | WGGDGFYAMDY |
| | | (Kabat) | |
| | 5326 | HC CDR1 | GFNIKDT |
| | | (Chothia) | |
| | 5327 | HC CDR2 | YPTNGY |
| | | (Chothia) | |
| | 5238 | HC CDR3 | WGGDGFYAMDY |
| | | (Chothia) | |
| | 5329 | VH | EVQLVESGGGLVQPGGSLRLSCAASGFNIKDTYIHWVRQAPGKGLEWVAR |
| | | | IYPTNGYTRYADSVKGRFTISADTSKNTAYLQMNSLRAEDTAVYYCSRWG |
| | | | GDGFYAMDYWGQGTLVTVSS |
| | 5330 | DNA VH | GAAGTGCAGCTGGTGGAAAGCGGCGGAGGACTGGTGCAGCCTGGCGGATC |
| | | | TCTGAGACTGAGCTGTGCCGCCAGCGGCTTCAACATCAAGGACACCTACA |
| | | | TCCACTGGGTGCGCCAGGCCCCTGGCAAGGGACTGGAATGGGTGGCCAGA |
| | | | ATCTACCCCACCAACGGCTACACCAGATACGCCGACAGCGTGAAGGGCCG |
| | | | GTTCACCATCAGCGCCGACACCAGCAAGAACACCGCCTACCTGCAGATGA |
| | | | ACAGCCTGCGGGCCGAGGACACCGCCGTGTACTACTGTAGTAGATGGGGA |
| | | | GGCGACGGCTTCTACGCCATGGACTATTGGGGCCAGGGCACCCTCGTGAC |
| | | | AGTGTCTAGT |
| | 5331 | Heavy Chain | EVQLVESGGGLVQPGGSLRLSCAASGFNIKDTYIHWVRQAPGKGLEWVAR |
| | | (hIgG1) | IYPTNGYTRYADSVKGRFTISADTSKNTAYLQMNSLRAEDTAVYYCSRWG |
| | | | GDGFYAMDYWGQGTLVTVSSASTKGPSVFPLAPSSKSTSGGTAALGCLVK |
| | | | DYFPEPVTVSWNSGALTSGVHTFPAVLQSSGLYSLSSVVTVPSSSLGTQT |
| | | | YICNVNHKPSNTKVDKKVEPKSCDKTHTCPPCPAPELLGGPSVFLFPPKP |
| | | | KDTLMISRTPEVTCVVVDVSHEDPEVKFNWYVDGVEVHNAKTKPREEQYN |
| | | | STYRVVSVLTVLHQDWLNGKEYKCKVSNKALPAPIEKTISKAKGQPREPQ |
| | | | VYTLPPSRDELTKNQVSLTCLVKGFYPSDIAVEWESNGQPENNYKTTPPV |
| | | | LDSDGSFFLYSKLTVDKSRWQQGNVFSCSVMHEALHNHYTQKSLSLSPGK |
| | 5332 | DNA Heavy | GAAGTGCAGCTGGTGGAAAGCGGCGGAGGACTGGTGCAGCCTGGCGGATC |
| | | Chain | TCTGAGACTGAGCTGTGCCGCCAGCGGCTTCAACATCAAGGACACCTACA |
| | | (hIgG1) | TCCACTGGGTGCGCCAGGCCCCTGGCAAGGGACTGGAATGGGTGGCCAGA |
| | | | ATCTACCCCACCAACGGCTACACCAGATACGCCGACAGCGTGAAGGGCCG |
| | | | GTTCACCATCAGCGCCGACACCAGCAAGAACACCGCCTACCTGCAGATGA |
| | | | ACAGCCTGCGGGCCGAGGACACCGCCGTGTACTACTGTAGTAGATGGGGA |
| | | | GGCGACGGCTTCTACGCCATGGACTATTGGGGCCAGGGCACCCTCGTGAC |
| | | | AGTGTCTAGTGCGTCGACCAAGGGGCCCTCGGTCTTCCCCCTGGCACCCT |
| | | | CCTCCAAGAGCACCTCTGGGGGCACAGCGGCCCTGGGCTGCCTGGTCAAG |
| | | | GACTACTTCCCCGAACCGGTGACGGTGTCGTGGAACTCAGGCGCCCTGAC |
| | | | CAGCGGCGTGCACACCTTCCCGGCTGTCCTACAGTCCTCAGGACTCTACT |
| | | | CCCTCAGCAGCGTGGTGACCGTGCCCTCCAGCAGCTTGGGCACCCAGACC |
| | | | TACATCTGCAACGTGAATCACAAGCCCAGCAACACCAAGGTGGACAAGAA |
| | | | AGTTGAGCCCAAATCTTGTGACAAAACTCACACATGCCCACCGTGCCCAG |
| | | | CACCTGAACTCCTGGGGGGACCGTCAGTCTTCCTCTTCCCCCCAAAACCC |
| | | | AAGGACACCCTCATGATCTCCCGGACCCCTGAGGTCACATGCGTGGTGGT |
| | | | GGACGTGAGCCACGAAGACCCTGAGGTCAAGTTCAACTGGTACGTGGACG |
| | | | GCGTGGAGGTGCATAATGCCAAGACAAAGCCGCGGGAGGAGCAGTACAAC |
| | | | AGCACGTACCGTGTGGTCAGCGTCCTCACCGTCCTGCACCAGGACTGGCT |
| | | | GAATGGCAAGGAGTACAAGTGCAAGGTCTCCAACAAAGCCCTCCCAGCCC |
| | | | CCATCGAGAAAACCATCTCCAAAGCCAAAGGGCAGCCCCGAGAACCACAG |
| | | | GTGTACACCCTGCCCCCATCCCGGGATGAGCTGACCAAGAACCAGGTCAG |
| | | | CCTGACCTGCCTGGTCAAAGGCTTCTATCCCAGCGACATCGCCGTGGAGT |
| | | | GGGAGAGCAATGGGCAGCCGGAGAACAACTACAAGACCACGCCTCCCGTG |
| | | | CTGGACTCCGACGGCTCCTTCTTCCTCTACAGCAAGCTCACCGTGGACAA |
| | | | GAGCAGGTGGCAGCAGGGGAACGTCTTCTCATGCTCCGTGATGCATGAGG |
| | | | CTCTGCACAACCACTACACGCAGAAGAGCCTCTCCCTGTCTCCCGGCAAG |
| | 5333 | LC CDR 1 | RASQDVNTAVA |
| | | (Kabat) | |
| | 5334 | LC CDR2 | SASFLYS |
| | | (Kabat) | |
| | 5335 | LC CDR3 | QQHYTTPPT |
| | | (Kabat) | |
| | 5336 | LC CDR1 | RASQDVNTAVA |
| | | (Chothia) | |
| | 5337 | LC CDR2 | SASFLYS |
| | | (Chothia) | |
| | 5338 | LC CDR3 | QQHYTTPPT |
| | | (Chothia) | |
| | 5339 | VL | DIQMTQSPSSLSASVGDRVTITCRASQDVNTAVAWYQQKPGKAPKLLIYS |
| | | | ASFLYSGVPSRFSGSRSGTDFTLTISSLQPEDFATYYCQQHYTTPPTFGQ |
| | | | GTKVEIK |
| | 5340 | DNA VL | GATATCCAGATGACCCAGAGCCCCAGCAGCCTGTCTGCCAGCGTGGGCGA |
| | | | CAGAGTGACCATCACCTGTAGAGCCAGCCAGGACGTGAACACCGCCGTGG |
| | | | CCTGGTATCAGCAGAAGCCTGGCAAGGCCCCCAAGCTGCTGATCTACAGC |
| | | | GCCAGCTTCCTGTACAGCGGCGTGCCCAGCAGATTCAGCGGCAGCAGATC |
| | | | CGGCACCGACTTCACCCTGACCATCAGCTCCCTGCAGCCCGAGGACTTCG |
| | | | CCACCTACTACTGCCAGCAGCACTACACCACCCCCCCCACATTTGGCCAG |
| | | | GGCACCAAGGTGGAAATCAAG |
| | 5341 | Light Chain | DIQMTQSPSSLSASVGDRVTITCRASQDVNTAVAWYQQKPGKAPKLLIYS |
| | | (hIgG1) | ASFLYSGVPSRFSGSRSGTDFTLTISSLQPEDFATYYCQQHYTTPPTFGQ |
| | | | GTKVEIKRTVAAPSVFIFPPSDEQLKSGTASVVCLLNNFYPREAKVQWKV |
| | | | DNALQSGNSQESVTEQDSKDSTYSLSSTLTLSKADYEKHKVYACEVTHQG |
| | | | LSSPVTKSFNRGEC |
| | 5342 | DNA Light | GATATCCAGATGACCCAGAGCCCCAGCAGCCTGTCTGCCAGCGTGGGCGA |
| | | Chain | CAGAGTGACCATCACCTGTAGAGCCAGCCAGGACGTGAACACCGCCGTGG |
| | | (hIgG1) | CCTGGTATCAGCAGAAGCCTGGCAAGGCCCCCAAGCTGCTGATCTACAGC |
| | | | GCCAGCTTCCTGTACAGCGGCGTGCCCAGCAGATTCAGCGGCAGCAGATC |
| | | | CGGCACCGACTTCACCCTGACCATCAGCTCCCTGCAGCCCGAGGACTTCG |
| | | | CCACCTACTACTGCCAGCAGCACTACACCACCCCCCCCACATTTGGCCAG |
| | | | GGCACCAAGGTGGAAATCAAGCGTACGGTGGCTGCACCATCTGTCTTCAT |
| | | | CTTCCCGCCATCTGATGAGCAGTTGAAATCTGGAACTGCCTCTGTTGTGT |
| | | | GCCTGCTGAATAACTTCTACCCCAGAGAAGCCAAAGTGCAGTGGAAGGTG |
| | | | GACAACGCCCTGCAGAGCGGAAACAGCCAGGAAAGCGTGACAGAGCAGGA |
| | | | TTCCAAGGATTCCACATACAGCCTGAGCAGCACACTGACACTGTCCAAGG |
| | | | CCGACTACGAGAAGCACAAGGTGTACGCCTGCGAAGTGACACACCAGGGA |
| | | | CTGTCCTCCCCTGTGACAAAGAGCTTCAACAGAGGAGAATGC |
| Ab-HER- | 5311 | HC CDR1 | GYFIN |
| 78 | | (Kabat) | |
| | 5312 | HC CDR2 | HISSSYATSTYNQKFQ |
| | | (Kabat) | |
| | 5313 | HC CDR3 | YCVRSGNY |
| | | (Kabat) | |
| | 5314 | HC CDR1 | GYSFTGY |
| | | (Chothia) | |
| | 5315 | HC CDR2 | SSSYA |
| | | (Chothia) | |
| | 5316 | HC CDR3 | YCVRSGNY |
| | | (Chothia) | |
| | 5358 | HC CDR1 | GYSFTGYFIN |
| | 5359 | HC CDR2 | HISSSYATSTYNQKFQG |
| | 5360 | HC CDR3 | SGNYEEYAMDY |
| | 5262 | VH | QVQLVQSGAEVKKPGASVKVSCKASGYSFTGYFINWVREAPGQGLEWMGH |
| | | | ISSSYATSTYNQKFQGRVTFTVDTSSSTAYMELSSLRSEDTAVYYCVRSG |
| | | | NYEEYAMDYWGQGTLVTVSS |
| | 5261 | DNA VH | CAAgttcagctggtgCAGtctggTGCAGAAGTTAAGAAGccagggGCAtc |
| | | | aGTAAAGGTGTCCtgCAAGgcttctggcTACTCTTTCACTGGGTATTTCa |
| | | | taAATtgggtgAGAGAGgccccCGGCCAGggcctggaatggATGGGCCAT |
| | | | attTCCTCCTCTTATGCAACTTCTACAtatAACCAGAAGTTTCAGggcAG |
| | | | AGTCactTTCACTGTGgacacatccAGCTCTacagcctacATGGAGCTGT |
| | | | CAagcctgAGATCTgaggacactgcagtctattattgtGTGagaAGTgga |
| | | | AACTAtGAAGAGTATgctatggacTACtggggtcaaggaaccctggtcac |
| | | | AgtctcctcA |
| | 5376 | Heavy Chain | QVQLVQSGAEVKKPGASVKVSCKASGYSFTGYFINWVREAPGQGLEWMGH |
| | | (hIgG1) | ISSSYATSTYNQKFQGRVTFTVDTSSSTAYMELSSLRSEDTAVYYCVRSG |
| | | | NYEEYAMDYWGQGTLVTVSSASTKGPSVFPLAPSSKSTSGGTAALGCLVK |
| | | | DYFPEPVTVSWNSGALTSGVHTFPAVLQSSGLYSLSSVVTVPSSSLGTQT |
| | | | YICNVNHKPSNTKVDKRVEPKSCDKTHTCPPCPAPELVGGPSVFLLPPKP |
| | | | KDTLMISRTPEVTCVVVDVSHEDPEVKFNWYVDGVEVHNAKTKPPEEQYN |
| | | | STLRVVSVLTVLHQDWLNGKEYKCKVSNKALPAPIEKTISKAKGQPREPQ |
| | | | VYTLPPSRDELTKNQVSLTCLVKGFYPSDIAVEWESNGQPENNYKTTPLV |
| | | | LDSDGSFFLYSKLTVDKSRWQQGNVFSCSVMHEALHNHYTQKSLSLSPGK |
| | 5377 | DNA Heavy | CAAgttcagctggtgCAGtctggTGCAGAAGTTAAGAAGccagggGCAtc |
| | | Chain | aGTAAAGGTGTCCtgCAAGgcttctggcTACTCTTTCACTGGGTATTTCa |
| | | (hIgG1) | taAATtgggtgAGAGAGgccccCGGCCAGggcctggaatggATGGGCCAT |
| | | | attTCCTCCTCTTATGCAACTTCTACAtatAACCAGAAGTTTCAGggcAG |
| | | | AGTCactTTCACTGTGgacacatccAGCTCTacagcctacATGGAGCTGT |
| | | | CAagcctgAGATCTgaggacactgcagtctattattgtGTGagaAGTgga |
| | | | AACTAtGAAGAGTATgctatggacTACtggggtcaaggaaccctggtcac |
| | | | AgtctcctcAgcCtcTaccaagggcccatcTgtcttccccctggcaccct |
| | | | cctccaagagcacctctgggggcacagcTgccctgggctgcctggtcaag |
| | | | gactacttcccTgaacctgtgacAgtctcCtggaactcaggAgccctgac |
| | | | cagTggAgtgcacaccttcccTgctgtcctacagtcctcaggactctact |
| | | | ccctcagcTCTgtggtgacAgtgccctccagcagcttgggcacccagacc |
| | | | tacatctgcaaTgtgaatcacaagcccagcaacaccaaggtggacaagaG |
| | | | agttgagcccaaatcttgtgacaaaactcacacatgcccaccTtgcccag |
| | | | cacctgaactGGtggggggaccAtcagtcttcctcCtccccccaaaaccc |
| | | | aaggacaccctcatgatctccAGAacccctgaggtcacatgTgtggtggt |
| | | | ggaTgtgagccaTgaagaccctgaggtcaagttcaactggtaTgtggaTg |
| | | | gAgtggaggtgcataatgccaagacaaagccCcCTgaggagcagtacaac |
| | | | agcacTCTcAGAgtggtcTCTgtcctcacAgtcctgcaccaggactggct |
| | | | gaatggcaaggagtacaagtgcaaggtctccaacaaagccctcccagccc |
| | | | ccatTgagaaaaccatctccaaagccaaagggcagcccAGAgaaccacag |
| | | | gtgtacaccctgcccccatccAGAgaTgagCtgaccaagaaccaggtcag |
| | | | cctgacctgcctggtcaaaggcttctatcccTCTgacatTgcTgtggagt |
| | | | gggagagcaatgggcagccTgagaacaactacaagaccacAcctcTTgtg |
| | | | ctggactcTgaTggctccttcttcctctacagcaagctcacAgtggacaa |
| | | | gagcaggtggcagcaggggaaTgtcttctcatgcTCTgtgatgcatgagg |
| | | | ctctgcacaaccactacacCcagaagagcctctccctgtctccAggtaaa |
| | 5355 | LC CDR1 | RSSQTLLYSNNQKNYLA |
| | 5356 | LC CDR2 | WAFTRKS |
| | 5357 | LC CDR3 | QQYSNYPWT |
| | 5354 | VL | DIVLTQSPDSLAVSLGERATINCRSSQTLLYSNNQKNYLAWYQKKPGQPP |
| | | | KLLISWAFTRKSGVPDRFSGSGSGTDETLTISSLQAEDVAVYYCQQYSNY |
| | | | PWTFGQGTKVEIK |
| | 5353 | DNA VL | gatatTGTACTGacccagtccccTGACtccctgGCTGTGtctCTGggGGA |
| | | | AaggGCAaccatcAACtgcAGGAGTagtcagACCCTTCTGTACTCTAATA |
| | | | ACCAGAAAAACTACCTGgcctggtatcaaAAAaaaccaggaCAGCCTccT |
| | | | aaactactgattAGTTGGgcaTTCACTAGGAAGtctggagtccctGACAG |
| | | | GttctctggatcTGGGtcTggAacAgatttcacActgaccatcagcagtc |
| | | | tgcagGCTgaagaTGTTgcaGTCtaCtactgtcagcaaTACTCAAACTAC |
| | | | cctTGGacTttTggacagggGaccaaAgtggagatcaaa |
| | 5268 | Light Chain | DIVLTQSPDSLAVSLGERATINCRSSQTLLYSNNQKNYLAWYQKKPGQPP |
| | | (hIgG1) | KLLISWAFTRKSGVPDRFSGSGSGTDETLTISSLQAEDVAVYYCQQYSNY |
| | | | PWTFGQGTKVEIKRTVAAPSVFIFPPSDEQLKSGTASVKCLLNNFYPREA |
| | | | KVQWKVDNALQSGNSQESVTEQDSKDSTYSLSSTLTLSKADYEKHKVYAC |
| | | | EVTHQGLSSPVTKSFNRGEC |
| | 5267 | DNA Light | gatatTGTACTGacccagtccccTGACtccctgGCTGTGtctCTGggGGA |
| | | Chain | AaggGCAaccatcAACtgcAGGAGTagtcagACCCTTCTGTACTCTAATA |
| | | (hIgG1) | ACCAGAAAAACTACCTGgcctggtatcaaAAAaaaccaggaCAGCCTccT |
| | | | aaactactgattAGTTGGgcaTTCACTAGGAAGtctggagtccctGACAG |
| | | | GttctctggatcTGGGtcTggAacAgatttcacActgaccatcagcagtc |
| | | | tgcagGCTgaagaTGTTgcaGTCtaCtactgtcagcaaTACTCAAACTAC |
| | | | cctTGGacTttTggacagggGaccaaAgtggagatcaaaAGGactgtCgc |
| | | | tgcaccatctgtcttcatcttcccAccatctgatgagcagttgaaatctg |
| | | | gaactgcctctgttAAGtgcctgctgaataacttctatcccagagaggcc |
| | | | aaagtacagtggaaggtggataaTgccctccaaAGTggtaactcccagga |
| | | | gagtgtcacagagcaggacagcaaggacagcacctacagcctcagcagca |
| | | | ccctgacCctgagcaaagcagactaTgagaaacacaaagtctaTgcctgT |
| | | | gaagtcacccatcagggcctgagcAGCccAgtcacaaagagcttcaacag |
| | | | gggagagtgt |
| | 5037 | HC CDR1 | DTYIH |
| | | (Kabat) | |
| | 5038 | HC CDR2 | RIYPTNGYTRYADSVKG |
| | | (Kabat) | |
| | 5039 | HC CDR3 | WGGDGFYAMDY |
| | | (Kabat) | |
| | 5040 | HC CDR1 | GFNIKDT |
| | | (Chothia) | |
| | 5041 | HC CDR2 | YPTNGY |
| | | (Chothia) | |
| | 5042 | HC CDR3 | WGGDGFYAMDY |
| | | (Chothia) | |
| | 5361 | HC CDR1 | GFNIKDTYIH |
| | 5362 | HC CDR2 | RIYPTNGYTRYADSVKG |
| | 5363 | HC CDR3 | WGGDGFYAMDY |
| | 5290 | VH | EVQLVESGGGLVQPGGSLRLSCAASGFNIKDTYIHWVRQAPGKGLEWVAR |
| | | | IYPTNGYTRYADSVKGRFTISADTSKNTAYLQMNSLRAEDTAVYYCSRWG |
| | | | GDGFYAMDYWGQGTLVTVSS |
| | 5289 | DNA VH | gaggttcagctggtggagtctggTggtggcctGgtgcagccagggggctc |
| | | | actcAGAttgtcctgtgcagcttctggcttcaacattaaagacacctata |
| | | | tacactgggtgAGAcaggccccTggAaagggcctggaatgggttgcaagg |
| | | | atttatcctacTaatggttatactagatatgcAgatagTgtcaagggcAG |
| | | | AttcactataagTgcagacacatccaaaaacacagcctacctgcagatga |
| | | | acagcctgAGAgctgaggacactgcAgtctattattgttctagatgggga |
| | | | ggggaTggcttctatgctatggacTACtggggtcaaggaaccctggtcac |
| | | | AgtctcctcT |
| | 5317 | LC CDR 1 | RASQDVNTAVA |
| | | (Kabat) | |
| | 5318 | LC CDR2 | SASFLYS |
| | | (Kabat) | |
| | 5319 | LC CDR3 | QQHYTTPPT |
| | | (Kabat) | |
| | 5320 | LC CDR1 | RASQDVNTAVA |
| | | (Chothia) | |
| | 5321 | LC CDR2 | SASFLYS |
| | | (Chothia) | |
| | 5322 | LC CDR3 | QQHYTTPPT |
| | | (Chothia) | |
| | 5266 | VL | DIQMTQSPSSLSASVGDRVTITCRASQDVNTAVAWYQQKPGKAPKLLIYS |
| | | | ASFLYSGVPSRFSGSRSGTDFTLTISSLQPEDFATYYCQQHYTTPPTFGQ |
| | | | GTKVEIK |
| | 5265 | DNA VL | gatatccagatgacccagtccccAagctccctgtcTgcctctgtgggGga |
| | | | tagggtcaccatcacctgcAGAgccagtcaggatgtgaatactgctgtag |
| | | | cctggtatcaacagaaaccaggaaaagctccCaaactactgatttactcT |
| | | | gcatccttcctcTACtctggagtcccttctAGAttctctggatccagatc |
| | | | tggCacTgaCttcactctgaccatcagTagtctgcagccTgaagacttTg |
| | | | caacttattactgtcaAcaacattatactactcctcccacCttTggacag |
| | | | ggtaccaaggtggagatcaaa |
| | 5351 | scFv | EVQLVESGGGLVQPGGSLRLSCAASGFNIKDTYIHWVRQAPGKGLEWVAR |
| | | | IYPTNGYTRYADSVKGRFTISADTSKNTAYLQMNSLRAEDTAVYYCSRWG |
| | | | GDGFYAMDYWGQGTLVTVSSGGGGSGGGGSGGGGSDIQMTQSPSSLSASV |
| | | | GDRVTITCRASQDVNTAVAWYQQKPGKAPKLLIYSASFLYSGVPSRFSGS |
| | | | RSGTDFTLTISSLQPEDFATYYCQQHYTTPPTFGQGTKVEIK |
| | 5364 | scFv DNA | gaggttcagctggtggagtctggTggtggcctGgtgcagccagggggctc |
| | | | actcAGAttgtcctgtgcagcttctggcttcaacattaaagacacctata |
| | | | tacactgggtgAGAcaggccccTggAaagggcctggaatgggttgcaagg |
| | | | atttatcctacTaatggttatactagatatgcAgatagTgtcaagggcAG |
| | | | AttcactataagTgcagacacatccaaaaacacagcctacctgcagatga |
| | | | acagcctgAGAgctgaggacactgcAgtctattattgttctagatgggga |
| | | | ggggaTggcttctatgctatggacTACtggggtcaaggaaccctggtcac |
| | | | AgtctcctcTggtggtggtggatcTggaggaggaggaAGTggaggtggag |
| | | | gtTCTgatatccagatgacccagtccccAagctccctgtcTgcctctgtg |
| | | | ggGgatagggtcaccatcacctgcAGAgccagtcaggatgtgaatactgc |
| | | | tgtagcctggtatcaacagaaaccaggaaaagctccCaaactactgattt |
| | | | actcTgcatccttcctcTACtctggagtcccttctAGAttctctggatcc |
| | | | agatctggCacTgaCttcactctgaccatcagTagtctgcagccTgaaga |
| | | | cttTgcaacttattactgtcaAcaacattatactactcctcccacCttTg |
| | | | gacagggtaccaaggtggagatcaaa |
| | 5365 | Light Chain | EVQLVESGGGLVQPGGSLRLSCAASGFNIKDTYIHWVRQAPGKGLEWVAR |
| | | | IYPTNGYTRYADSVKGRFTISADTSKNTAYLQMNSLRAEDTAVYYCSRWG |
| | | | GDGFYAMDYWGQGTLVTVSSGGGGSGGGGSGGGGSDIQMTQSPSSLSASV |
| | | | GDRVTITCRASQDVNTAVAWYQQKPGKAPKLLIYSASFLYSGVPSRFSGS |
| | | | RSGTDFTLTISSLQPEDFATYYCQQHYTTPPTFGQGTKVEIKGSDIVLTQ |
| | | | SPDSLAVSLGERATINCRSSQTLLYSNNQKNYLAWYQKKPGQPPKLLISW |
| | | | AFTRKSGVPDRFSGSGSGTDETLTISSLQAEDVAVYYCQQYSNYPWTFGQ |
| | | | GTKVEIKRTVAAPSVFIFPPSDEQLKSGTASVKCLLNNFYPREAKVQWKV |
| | | | DNALQSGNSQESVTEQDSKDSTYSLSSTLTLSKADYEKHKVYACEVTHQG |
| | | | LSSPVTKSFNRGEC |
| | 5366 | DNA Light | gaggttcagctggtggagtctggTggtggcctGgtgcagccagggggctc |
| | | Chain | actcAGAttgtcctgtgcagcttctggcttcaacattaaagacacctata |
| | | | tacactgggtgAGAcaggccccTggAaagggcctggaatgggttgcaagg |
| | | | atttatcctacTaatggttatactagatatgcAgatagTgtcaagggcAG |
| | | | AttcactataagTgcagacacatccaaaaacacagcctacctgcagatga |
| | | | acagcctgAGAgctgaggacactgcAgtctattattgttctagatgggga |
| | | | ggggaTggcttctatgctatggacTACtggggtcaaggaaccctggtcac |
| | | | AgtctcctcTggtggtggtggatcTggaggaggaggaAGTggaggtggag |
| | | | gtTCTgatatccagatgacccagtccccAagctccctgtcTgcctctgtg |
| | | | ggGgatagggtcaccatcacctgcAGAgccagtcaggatgtgaatactgc |
| | | | tgtagcctggtatcaacagaaaccaggaaaagctccCaaactactgattt |
| | | | actcTgcatccttcctcTACtctggagtcccttctAGAttctctggatcc |
| | | | agatctggCacTgaCttcactctgaccatcagTagtctgcagccTgaaga |
| | | | cttTgcaacttattactgtcaAcaacattatactactcctcccacCttTg |
| | | | gacagggtaccaaggtggagatcaaaGGCTCTgatatTGTACTGacccag |
| | | | tccccTGACtccctgGCTGTGtctCTGggGGAAaggGCAaccatcAACtg |
| | | | CAGGAGTagtcagACCCTTCTGTACTCTAATAACCAGAAAAACTACCTGg |
| | | | cctggtatcaaAAAaaaccaggaCAGCCTccTaaactactgattAGTTGG |
| | | | gcaTTCACTAGGAAGtctggagtccctGACAGGttctctggatcTGGGtc |
| | | | TggAacAgatttcacActgaccatcagcagtctgcagGCTgaagaTGTTg |
| | | | caGTCtaCtactgtcagcaaTACTCAAACTACcctTGGacTttTggacag |
| | | | ggGaccaaAgtggagatcaaaAGGactgtCgctgcaccatctgtcttcat |
| | | | cttcccAccatctgatgagcagttgaaatctggaactgcctctgttAAGt |
| | | | gcctgctgaataacttctatcccagagaggccaaagtacagtggaaggtg |
| | | | gataaTgccctccaaAGTggtaactcccaggagagtgtcacagagcagga |
| | | | cagcaaggacagcacctacagcctcagcagcaccctgacCctgagcaaag |
| | | | cagactaTgagaaacacaaagtctaTgcctgTgaagtcacccatcagggc |
| | | | ctgagcAGCccAgtcacaaagagcttcaacaggggagagtgt |
| Ab-HER- | 5037 | HC CDR1 | DTYIH |
| 82 | | (Kabat) | |
| | 5038 | HC CDR2 | RIYPTNGYTRYADSVKG |
| | | (Kabat) | |
| | 5039 | HC CDR3 | WGGDGFYAMDY |
| | | (Kabat) | |
| | 5040 | HC CDR1 | GFNIKDT |
| | | (Chothia) | |
| | 5041 | HC CDR2 | YPTNGY |
| | | (Chothia) | |
| | 5042 | HC CDR3 | WGGDGFYAMDY |
| | | (Chothia) | |
| | 5361 | HC CDR1 | GFNIKDTYIH |
| | 5362 | HC CDR2 | RIYPTNGYTRYADSVKG |
| | 5363 | HC CDR3 | WGGDGFYAMDY |
| | 5361 | HC CDR1 | GFNIKDTYIH |
| | 5362 | HC CDR2 | RIYPTNGYTRYADSVKG |
| | 5363 | HC CDR3 | WGGDGFYAMDY |
| | 5001 | VH | EVQLVESGGGLVQPGGSLRLSCAASGFNIKDTYIHWVRQAPGKGLEWVAR |
| | | | IYPTNGYTRYADSVKGRFTISADTSKNTAYLQMNSLRAEDTAVYYCSRWG |
| | | | GDGFYAMDYWGQGTLVTVSS |
| | 5002 | DNA VH | gaggttcagctggtggagtctggcggtggcctggtgcagccagggggctc |
| | | | actccgtttgtcctgtgcagcttctggcttcaacattaaagacacctata |
| | | | tacactgggtgcgtcaggccccgggtaagggcctggaatgggttgcaagg |
| | | | atttatcctacgaatggttatactagatatgccgatagcgtcaagggccg |
| | | | tttcactataagcgcagacacatccaaaaacacagcctacctgcagatga |
| | | | acagcctgcgtgctgaggacactgccgtctattattgttctagatgggga |
| | | | ggggacggcttctatgctatggacTACtggggtcaaggaaccctggtcac |
| | | | cgtctcctcg |
| | 5368 | Heavy Chain | EVQLVESGGGLVQPGGSLRLSCAASGFNIKDTYIHWVRQAPGKGLEWVAR |
| | | | IYPTNGYTRYADSVKGRFTISADTSKNTAYLQMNSLRAEDTAVYYCSRWG |
| | | | GDGFYAMDYWGQGTLVTVSSASTKGPSVFPLAPSSKSTSGGTAALGCLVK |
| | | | DYFPEPVTVSWNSGALTSGVHTFPAVLQSSGLYSLSSVVTVPSSSLGTQT |
| | | | YICNVNHKPSNTKVDKRVEPKSCDKTHTCPPCPAPELVGGPSVFLLPPKP |
| | | | KDTLMISRTPEVTCVVVDVSHEDPEVKFNWYVDGVEVHNAKTKPPEEQYN |
| | | | STLRVVSVLTVLHQDWLNGKEYKCKVSNKALPAPIEKTISKAKGQPREPQ |
| | | | VYTLPPSRDELTKNQVSLTCLVKGFYPSDIAVEWESNGQPENNYKTTPLV |
| | | | LDSDGSFFLYSKLTVDKSRWQQGNVFSCSVMHEALHNHYTQKSLSLSPGK |
| | 5369 | DNA Heavy | gaggttcagctggtggagtctggcggtggcctggtgcagccagggggctc |
| | | Chain | actccgtttgtcctgtgcagcttctggcttcaacattaaagacacctata |
| | | | tacactgggtgcgtcaggccccgggtaagggcctggaatgggttgcaagg |
| | | | atttatcctacgaatggttatactagatatgccgatagcgtcaagggccg |
| | | | tttcactataagcgcagacacatccaaaaacacagcctacctgcagatga |
| | | | acagcctgcgtgctgaggacactgccgtctattattgttctagatgggga |
| | | | ggggacggcttctatgctatggacTACtggggtcaaggaaccctggtcac |
| | | | cgtctcctcggcgtcgaccaagggcccatcggtcttccccctggcaccct |
| | | | cctccaagagcacctctgggggcacagcggccctgggctgcctggtcaag |
| | | | gactacttccccgaacctgtgacggtctcgtggaactcaggcgccctgac |
| | | | cagcggcgtgcacaccttcccggctgtcctacagtcctcaggactctact |
| | | | ccctcagcagcgtggtgaccgtgccctccagcagcttgggcacccagacc |
| | | | tacatctgcaacgtgaatcacaagcccagcaacaccaaggtggacaagaG |
| | | | agttgagcccaaatcttgtgacaaaactcacacatgcccaccgtgcccag |
| | | | cacctgaactcGtggggggaccgtcagtcttcctcCtccccccaaaaccc |
| | | | aaggacaccctcatgatctcccggacccctgaggtcacatgcgtggtggt |
| | | | ggacgtgagccacgaagaccctgaggtcaagttcaactggtacgtggacg |
| | | | gcgtggaggtgcataatgccaagacaaagccgcCggaggagcagtacaac |
| | | | agcacgCTccgtgtggtcagcgtcctcaccgtcctgcaccaggactggct |
| | | | gaatggcaaggagtacaagtgcaaggtctccaacaaagccctcccagccc |
| | | | ccatcgagaaaaccatctccaaagccaaagggcagccccgagaaccacag |
| | | | gtgtacaccctgcccccatcccgggaTgagCtgaccaagaaccaggtcag |
| | | | cctgacctgcctggtcaaaggcttctatcccagcgacatcgccgtggagt |
| | | | gggagagcaatgggcagccggagaacaactacaagaccacgcctcTcgtg |
| | | | ctggactccgacggctccttcttcctctacagcaagctcaccgtggacaa |
| | | | gagcaggtggcagcaggggaacgtcttctcatgctccgtgatgcatgagg |
| | | | ctctgcacaaccactacacgcagaagagcctctccctgtctccgggtaaa |
| | 5317 | LC CDR 1 | RASQDVNTAVA |
| | | (Kabat) | |
| | 5318 | LC CDR2 | SASFLYS |
| | | (Kabat) | |
| | 5319 | LC CDR3 | QQHYTTPPT |
| | | (Kabat) | |
| | 5320 | LC CDR1 | RASQDVNTAVA |
| | | (Chothia) | |
| | 5321 | LC CDR2 | SASFLYS |
| | | (Chothia) | |
| | 5322 | LC CDR3 | QQHYTTPPT |
| | | (Chothia) | |
| | 5006 | VL | DIQMTQSPSSLSASVGDRVTITCRASQDVNTAVAWYQQKPGKAPKLLIYS |
| | | | ASFLYSGVPSRFSGSRSGTDFTLTISSLQPEDFATYYCQQHYTTPPTFGQ |
| | | | GTKVEIK |
| | 5005 | DNA VL | gatatccagatgacccagtccccgagctccctgtccgcctctgtgggcga |
| | | | tagggtcaccatcacctgccgtgccagtcaggatgtgaatactgctgtag |
| | | | cctggtatcaacagaaaccaggaaaagctccgaaactactgatttactcg |
| | | | gcatccttcctcTACtctggagtcccttctcgcttctctggatccagatc |
| | | | tgggacggatttcactctgaccatcagcagtctgcagccggaagacttcg |
| | | | caacttattactgtcagcaacattatactactcctcccacgttcggacag |
| | | | ggtaccaaggtggagatcaaa |
| | 5036 | Light Chain | DIQMTQSPSSLSASVGDRVTITCRASQDVNTAVAWYQQKPGKAPKLLIYS |
| | | (hIgG kappa) | ASFLYSGVPSRFSGSRSGTDFTLTISSLQPEDFATYYCQQHYTTPPTFGQ |
| | | | GTKVEIKRTVAAPSVFIFPPSDEQLKSGTASVVCLLNNFYPREAKVQWKV |
| | | | DNALQSGNSQESVTEQDSKDSTYSLSSTLTLSKADYEKHKVYACEVTHQG |
| | | | LSSPVTKSFNRGEC |
| | 5035 | DNA Light | gatatccagatgacccagtccccgagctccctgtccgcctctgtgggcga |
| | | Chain (hIgG | tagggtcaccatcacctgccgtgccagtcaggatgtgaatactgctgtag |
| | | kappa) | cctggtatcaacagaaaccaggaaaagctccgaaactactgatttactcg |
| | | | gcatccttcctcTACtctggagtcccttctcgcttctctggatccagatc |
| | | | tgggacggatttcactctgaccatcagcagtctgcagccggaagacttcg |
| | | | caacttattactgtcagcaacattatactactcctcccacgttcggacag |
| | | | ggtaccaaggtggagatcaaacgaactgtggctgcaccatctgtcttcat |
| | | | cttcccgccatctgatgagcagttgaaatctggaactgcctctgttgtgt |
| | | | gcctgctgaataacttctatcccagagaggccaaagtacagtggaaggtg |
| | | | gataacgccctccaatcgggtaactcccaggagagtgtcacagagcagga |
| | | | cagcaaggacagcacctacagcctcagcagcaccctgacgctgagcaaag |
| | | | cagactacgagaaacacaaagtctacgcctgcgaagtcacccatcagggc |
| | | | ctgagctcgcccgtcacaaagagcttcaacaggggagagtgt |
| | 5370 | DARPIN | GSDLGKKLLEAARAGQDDEVRILMANGADVNAHDFYGITPLHLAANFGHL |
| | | | EIVEVLLKHGADVNAFDYDNTPLHLAADAGHLEIVEVLLKYGADVNASDR |
| | | | DGHTPLHLAAREGHLEIVEVLLKNGADVNAQDKEGKTAFDISIDNGNEDL |
| | | | AEILQKL |
| | 5371 | DARPIN | GGCTCTGATCTGGGAAAAAAGCTTCTgGAGGCtGCcAGAGCtGGACAGGA |
| | | DNA | tGAtGAAGTGagaATACTGATGGCTAAtGGTGCTGATGTGAATGCCCAtG |
| | | | ATTTTTATGGAATCACTCCCTTACACTTAGCTGCCAATTTtGGGCACCTg |
| | | | GAGATTGTGGAAGTGCTCCTGAAGCATGGaGCAGATGTAAAtGCATTtGA |
| | | | TTAtGATAACACTCCACTGCACCTGGCtGCAGATGCtGGACATCTGGAGA |
| | | | TtGTGGAAGTACTGTTAAAATAtGGAGCAGAtGTGAATGCATCtGACaga |
| | | | GATGGACATACACCACTGCACCTGGCAGCTagaGAGGGACATCTTGAAAT |
| | | | TGTTGAAGTCCTGCTTAAGAAtGGTGCtGATGTCAATGCCCAGGACAAGT |
| | | | TTGGGAAGACAGCTTTTGACATTTCAATtGATAAtGGAAAtGAGGATCTG |
| | | | GCtGAAATACTTCAGAAATTG |
| | 5372 | Light Chain | GSDLGKKLLEAARAGQDDEVRILMANGADVNAHDFYGITPLHLAANFGHL |
| | | | EIVEVLLKHGADVNAFDYDNTPLHLAADAGHLEIVEVLLKYGADVNASDR |
| | | | DGHTPLHLAAREGHLEIVEVLLKNGADVNAQDKFGKTAFDISIDNGNEDL |
| | | | AEILQKLGGGGSGGGGSGGGGSDIQMTQSPSSLSASVGDRVTITCRASQD |
| | | | VNTAVAWYQQKPGKAPKLLIYSASFLYSGVPSRFSGSRSGTDETLTISSL |
| | | | QPEDFATYYCQQHYTTPPTFGQGTKVEIKRTVAAPSVFIFPPSDEQLKSG |
| | | | TASVVCLLNNFYPREAKVQWKVDNALQSGNSQESVTEQDSKDSTYSLSST |
| | | | LTLSKADYEKHKVYACEVTHQGLSSPVTKSFNRGEC |
| | 5373 | Light Chain | GGCTCTGATCTGGGAAAAAAGCTTCTgGAGGCtGCcAGAGCtGGACAGGA |
| | | DNA | tGAtGAAGTGagaATACTGATGGCTAAtGGTGCTGATGTGAATGCCCAtG |
| | | | ATTTTTATGGAATCACTCCCTTACACTTAGCTGCCAATTTtGGGCACCTg |
| | | | GAGATTGTGGAAGTGCTCCTGAAGCATGGaGCAGATGTAAAtGCATTtGA |
| | | | TTAtGATAACACTCCACTGCACCTGGCtGCAGATGCtGGACATCTGGAGA |
| | | | TtGTGGAAGTACTGTTAAAATAtGGAGCAGAtGTGAATGCATCtGACaga |
| | | | GATGGACATACACCACTGCACCTGGCAGCTagaGAGGGACATCTTGAAAT |
| | | | TGTTGAAGTCCTGCTTAAGAAtGGTGCtGATGTCAATGCCCAGGACAAGT |
| | | | TTGGGAAGACAGCTTTTGACATTTCAATtGATAAtGGAAAtGAGGATCTG |
| | | | GCtGAAATACTTCAGAAATTGggtggtggtggatctggaggaggaggaAG |
| | | | TggaggtggaggtTCTgatatccagatgacccagtccccgagctccctgt |
| | | | ccgcctctgtgggcgatagggtcaccatcacctgccgtgccagtcaggat |
| | | | gtgaatactgctgtagcctggtatcaacagaaaccaggaaaagctccgaa |
| | | | actactgatttactcggcatccttcctcTACtctggagtcccttctcgct |
| | | | tctctggatccagatctgggacggatttcactctgaccatcagcagtctg |
| | | | cagccggaagacttcgcaacttattactgtcagcaacattatactactcc |
| | | | tcccacgttcggacagggtaccaaggtggagatcaaacgaactgtggctg |
| | | | caccatctgtcttcatcttcccgccatctgatgagcagttgaaatctgga |
| | | | actgcctctgttgtgtgcctgctgaataacttctatcccagagaggccaa |
| | | | agtacagtggaaggtggataacgccctccaatcgggtaactcccaggaga |
| | | | gtgtcacagagcaggacagcaaggacagcacctacagcctcagcagcacc |
| | | | ctgacgctgagcaaagcagactacgagaaacacaaagtctacgcctgcga |
| | | | agtcacccatcagggcctgagctcgcccgtcacaaagagcttcaacaggg |
| | | | gagagtgt |

TABLE 11B
Exemplary Anti-HER2 Antibody Variants Based on HER-75 with Heavy Chain
Mutations

| | SEQ | | |
|---|---|---|---|
| Ab ID | ID NO | Description | Sequence |
| Ab-HER- | 6510 | HC CDR3 | WGGWGFYAFAL |
| 88 | | (Kabat) | |
| | 6511 | VH | EVQLVESGGGLVQPGGSLRLSCAASGFNIKDTYIHWVRQAPGKGLEWVAR |
| | | | IYPTNGYTRYADSVKGRFTISADTSKNTAYLQMNSLRAEDTAVYYCSRWG |
| | | | GWGFYAFALWGQGTLVTVSS |
| | 6512 | DNA VH | gaggttcagctggtggagtctggAggtggcctggtgcagccagggggctc |
| | | | actcAGAttgtcctgtgcagcttctggcttcaacattaaagacacctata |
| | | | tacactgggtgagacaggccccAggtaagggcctggaatgggttgcaagg |
| | | | atttatcctacCaatggttatactagatatgcTgatTCTgtcaagggcAG |
| | | | AttcactataTCTgcagacacatccaaaaacacagcctacctgcagatga |
| | | | acagcctgAGAgctgaggacactgcTgtctattattgttctagatgggga |
| | | | gggTGGggcttctatgctTTTGCCCTGtggggtcaaggaaccctggtcac |
| | | | AgtctcctcT |
| | 6513 | Heavy Chain | EVQLVESGGGLVQPGGSLRLSCAASGFNIKDTYIHWVRQAPGKGLEWVAR |
| | | (hIgG1) | IYPTNGYTRYADSVKGRFTISADTSKNTAYLQMNSLRAEDTAVYYCSRWG |
| | | | GWGFYAFALWGQGTLVTVSSASTKGPSVFPLAPSSKSTSGGTAALGCLVK |
| | | | DYFPEPVTVSWNSGALTSGVHTFPAVLQSSGLYSLSSVVTVPSSSLGTQT |
| | | | YICNVNHKPSNTKVDKRVEPKSCDKTHTCPPCPAPELVGGPSVFLLPPKP |
| | | | KDTLMISRTPEVTCVVVDVSHEDPEVKFNWYVDGVEVHNAKTKPPEEQYN |
| | | | STLRVVSVLTVLHQDWLNGKEYKCKVSNKALPAPIEKTISKAKGQPREPQ |
| | | | VYTLPPSRDELTKNQVSLTCLVKGFYPSDIAVEWESNGQPENNYKTTPLV |
| | | | LDSDGSFFLYSKLTVDKSRWQQGNVFSCSVMHEALHNHYTQKSLSLSPGK |
| | 6514 | DNA Heavy | gaggttcagctggtggagtctggAggtggcctggtgcagccagggggctc |
| | | Chain | actcAGAttgtcctgtgcagcttctggcttcaacattaaagacacctata |
| | | (hIgG1) | tacactgggtgagacaggccccAggtaagggcctggaatgggttgcaagg |
| | | | atttatcctacCaatggttatactagatatgcTgatTCTgtcaagggcAG |
| | | | AttcactataTCTgcagacacatccaaaaacacagcctacctgcagatga |
| | | | acagcctgAGAgctgaggacactgcTgtctattattgttctagatgggga |
| | | | gggTGGggcttctatgctTTTGCCCTGtggggtcaaggaaccctggtcac |
| | | | AgtctcctcTgcCtcTaccaagggcccatcTgtcttccccctggcaccct |
| | | | cctccaagagcacctctgggggcacagcTgccctgggctgcctggtcaag |
| | | | gactacttcccTgaacctgtgacAgtctcCtggaactcaggAgccctgac |
| | | | cagTggAgtgcacaccttcccTgctgtcctacagtcctcaggactctact |
| | | | ccctcagcTCTgtggtgacAgtgccctccagcagcttgggcacccagacc |
| | | | tacatctgcaaTgtgaatcacaagcccagcaacaccaaggtggacaagaG |
| | | | agttgagcccaaatcttgtgacaaaactcacacatgcccaccTtgcccag |
| | | | cacctgaactGGtggggggaccAtcagtcttcctcCtccccccaaaaccc |
| | | | aaggacaccctcatgatctccAGAacccctgaggtcacatgTgtggtggt |
| | | | ggaTgtgagccaTgaagaccctgaggtcaagttcaactggtaTgtggaTg |
| | | | gAgtggaggtgcataatgccaagacaaagccCcCTgaggagcagtacaac |
| | | | agcacTCTcAGAgtggtcTCTgtcctcacAgtcctgcaccaggactggct |
| | | | gaatggcaaggagtacaagtgcaaggtctccaacaaagccctcccagccc |
| | | | ccatTgagaaaaccatctccaaagccaaagggcagcccAGAgaaccacag |
| | | | gtgtacaccctgcccccatccAGAgaTgagCtgaccaagaaccaggtcag |
| | | | cctgacctgcctggtcaaaggcttctatcccTCTgacatTgcTgtggagt |
| | | | gggagagcaatgggcagccTgagaacaactacaagaccacAcctcTTgtg |
| | | | ctggactcTgaTggctccttcttcctctacagcaagctcacAgtggacaa |
| | | | gagcaggtggcagcaggggaaTgtcttctcatgcTCTgtgatgcatgagg |
| | | | ctctgcacaaccactacacCcagaagagcctctccctgtctccAggtaaa |
| Ab-HER- | 6515 | HC CDR3 | WGGWGFYAFAY |
| 89 | | (Kabat) | |
| | 6516 | VH | EVQLVESGGGLVQPGGSLRLSCAASGFNIKDTYIHWVRQAPGKGLEWVAR |
| | | | IYPTNGYTRYADSVKGRFTISADTSKNTAYLQMNSLRAEDTAVYYCSRWG |
| | | | GWGFYAFAYWGQGTLVTVSS |
| | 6517 | DNA VH | gaggttcagctggtggagtctggAggtggcctggtgcagccagggggctc |
| | | | actcAGAttgtcctgtgcagcttctggcttcaacattaaagacacctata |
| | | | tacactgggtgagacaggccccAggtaagggcctggaatgggttgcaagg |
| | | | atttatcctacCaatggttatactagatatgcTgatTCTgtcaagggcAG |
| | | | AttcactataTCTgcagacacatccaaaaacacagcctacctgcagatga |
| | | | acagcctgAGAgctgaggacactgcTgtctattattgttctagatgggga |
| | | | gggTGGggcttctatgctTTTGCCTACtggggtcaaggaaccctggtcac |
| | | | AgtctcctcT |
| | 6518 | Heavy Chain | EVQLVESGGGLVQPGGSLRLSCAASGFNIKDTYIHWVRQAPGKGLEWVAR |
| | | (hIgG1) | IYPTNGYTRYADSVKGRFTISADTSKNTAYLQMNSLRAEDTAVYYCSRWG |
| | | | GWGFYAFAYWGQGTLVTVSSASTKGPSVFPLAPSSKSTSGGTAALGCLVK |
| | | | DYFPEPVTVSWNSGALTSGVHTFPAVLQSSGLYSLSSVVTVPSSSLGTQT |
| | | | YICNVNHKPSNTKVDKRVEPKSCDKTHTCPPCPAPELVGGPSVFLLPPKP |
| | | | KDTLMISRTPEVTCVVVDVSHEDPEVKFNWYVDGVEVHNAKTKPPEEQYN |
| | | | STLRVVSVLTVLHQDWLNGKEYKCKVSNKALPAPIEKTISKAKGQPREPQ |
| | | | VYTLPPSRDELTKNQVSLTCLVKGFYPSDIAVEWESNGQPENNYKTTPLV |
| | | | LDSDGSFFLYSKLTVDKSRWQQGNVFSCSVMHEALHNHYTQKSLSLSPGK |
| | 6519 | DNA Heavy | gaggttcagctggtggagtctggAggtggcctggtgcagccagggggctc |
| | | Chain | actcAGAttgtcctgtgcagcttctggcttcaacattaaagacacctata |
| | | (hIgG1) | tacactgggtgagacaggccccAggtaagggcctggaatgggttgcaagg |
| | | | atttatcctacCaatggttatactagatatgcTgatTCTgtcaagggcAG |
| | | | AttcactataTCTgcagacacatccaaaaacacagcctacctgcagatga |
| | | | acagcctgAGAgctgaggacactgcTgtctattattgttctagatgggga |
| | | | gggTGGggcttctatgctTTTGCCTACtggggtcaaggaaccctggtcac |
| | | | AgtctcctcTgcCtcTaccaagggcccatcTgtcttccccctggcaccct |
| | | | cctccaagagcacctctgggggcacagcTgccctgggctgcctggtcaag |
| | | | gactacttcccTgaacctgtgacAgtctcCtggaactcaggAgccctgac |
| | | | cagTggAgtgcacaccttcccTgctgtcctacagtcctcaggactctact |
| | | | ccctcagcTCTgtggtgacAgtgccctccagcagcttgggcacccagacc |
| | | | tacatctgcaaTgtgaatcacaagcccagcaacaccaaggggacaagaG |
| | | | agttgagcccaaatcttgtgacaaaactcacacatgcccaccTtgcccag |
| | | | cacctgaactGGtggggggaccAtcagtcttcctcCtccccccaaaaccc |
| | | | aaggacaccctcatgatctccAGAacccctgaggtcacatgTgtggtggt |
| | | | ggaTgtgagccaTgaagaccctgaggtcaagttcaactggtaTgtggaTg |
| | | | gAgtggaggtgcataatgccaagacaaagccCcCTgaggagcagtacaac |
| | | | agcacTCTcAGAgtggtcTCTgtcctcacAgtcctgcaccaggactggct |
| | | | gaatggcaaggagtacaagtgcaaggtctccaacaaagccctcccagccc |
| | | | ccatTgagaaaaccatctccaaagccaaagggcagcccAGAgaaccacag |
| | | | gtgtacaccctgcccccatccAGAgaTgagCtgaccaagaaccaggtcag |
| | | | cctgacctgcctggtcaaaggcttctatcccTCTgacatTgcTgtggagt |
| | | | gggagagcaatgggcagccTgagaacaactacaagaccacAcctcTTgtg |
| | | | ctggactcTgaTggctccttcttcctctacagcaagctcacAgtggacaa |
| | | | gagcaggtggcagcaggggaaTgtcttctcatgcTCTgtgatgcatgagg |
| | | | ctctgcacaaccactacacCcagaagagcctctccctgtctccAggtaaa |
| Ab-HER- | 6520 | HC CDR3 | WGGWGFYAFDL |
| 90 | | (Kabat) | |
| | 6521 | VH | EVQLVESGGGLVQPGGSLRLSCAASGFNIKDTYIHWVRQAPGKGLEWVAR |
| | | | IYPTNGYTRYADSVKGRFTISADTSKNTAYLQMNSLRAEDTAVYYCSRWG |
| | | | GWGFYAFDLWGQGTLVTVSS |
| | 6522 | DNA VH | gaggttcagctggtggagtctggAggtggcctggtgcagccagggggctc |
| | | | actcAGAttgtcctgtgcagcttctggcttcaacattaaagacacctata |
| | | | tacactgggtgagacaggccccAggtaagggcctggaatgggttgcaagg |
| | | | atttatcctacCaatggttatactagatatgcTgatTCTgtcaagggcAG |
| | | | AttcactataTCTgcagacacatccaaaaacacagcctacctgcagatga |
| | | | acagcctgAGAgctgaggacactgcTgtctattattgttctagatgggga |
| | | | gggTGGggcttctatgctTTTGACCTGtggggtcaaggaaccctggtcac |
| | | | AgtctcctcT |
| | 6523 | Heavy Chain | EVQLVESGGGLVQPGGSLRLSCAASGFNIKDTYIHWVRQAPGKGLEWVAR |
| | | (hIgG1) | IYPTNGYTRYADSVKGRFTISADTSKNTAYLQMNSLRAEDTAVYYCSRWG |
| | | | GWGFYAFDLWGQGTLVTVSSASTKGPSVFPLAPSSKSTSGGTAALGCLVK |
| | | | DYFPEPVTVSWNSGALTSGVHTFPAVLQSSGLYSLSSVVTVPSSSLGTQT |
| | | | YICNVNHKPSNTKVDKRVEPKSCDKTHTCPPCPAPELVGGPSVFLLPPKP |
| | | | KDTLMISRTPEVTCVVVDVSHEDPEVKFNWYVDGVEVHNAKTKPPEEQYN |
| | | | STLRVVSVLTVLHQDWLNGKEYKCKVSNKALPAPIEKTISKAKGQPREPQ |
| | | | VYTLPPSRDELTKNQVSLTCLVKGFYPSDIAVEWESNGQPENNYKTTPLV |
| | | | LDSDGSFFLYSKLTVDKSRWQQGNVFSCSVMHEALHNHYTQKSLSLSPGK |
| | 6524 | DNA Heavy | gaggttcagctggtggagtctggAggtggcctggtgcagccagggggctc |
| | | Chain | actcAGAttgtcctgtgcagcttctggcttcaacattaaagacacctata |
| | | (hIgG1) | tacactgggtgagacaggccccAggtaagggcctggaatgggttgcaagg |
| | | | atttatcctacCaatggttatactagatatgcTgatTCTgtcaagggcAG |
| | | | AttcactataTCTgcagacacatccaaaaacacagcctacctgcagatga |
| | | | acagcctgAGAgctgaggacactgcTgtctattattgttctagatgggga |
| | | | gggTGGggcttctatgctTTTGACCTGtggggtcaaggaaccctggtcac |
| | | | AgtctcctcTgcCtcTaccaagggcccatcTgtcttccccctggcaccct |
| | | | cctccaagagcacctctgggggcacagcTgccctgggctgcctggtcaag |
| | | | gactacttcccTgaacctgtgacAgtctcCtggaactcaggAgccctgac |
| | | | cagTggAgtgcacaccttcccTgctgtcctacagtcctcaggactctact |
| | | | ccctcagcTCTgtggtgacAgtgccctccagcagcttgggcacccagacc |
| | | | tacatctgcaaTgtgaatcacaagcccagcaacaccaaggtggacaagaG |
| | | | agttgagcccaaatcttgtgacaaaactcacacatgcccaccTtgcccag |
| | | | cacctgaactGGtggggggaccAtcagtcttcctcCtccccccaaaaccc |
| | | | aaggacaccctcatgatctccAGAacccctgaggtcacatgTgtggtggt |
| | | | ggaTgtgagccaTgaagaccctgaggtcaagttcaactggtaTgtggaTg |
| | | | gAgtggaggtgcataatgccaagacaaagccCcCTgaggagcagtacaac |
| | | | agcacTCTcAGAgtggtcTCTgtcctcacAgtcctgcaccaggactggct |
| | | | gaatggcaaggagtacaagtgcaaggtctccaacaaagccctcccagccc |
| | | | ccatTgagaaaaccatctccaaagccaaagggcagcccAGAgaaccacag |
| | | | gtgtacaccctgcccccatccAGAgaTgagCtgaccaagaaccaggtcag |
| | | | cctgacctgcctggtcaaaggcttctatcccTCTgacatTgcTgtggagt |
| | | | gggagagcaatgggcagccTgagaacaactacaagaccacAcctcTTgtg |
| | | | ctggactcTgaTggctccttcttcctctacagcaagctcacAgtggacaa |
| | | | gagcaggtggcagcaggggaaTgtcttctcatgcTCTgtgatgcatgagg |
| | | | ctctgcacaaccactacacCcagaagagcctctccctgtctccAggtaaa |
| Ab-HER- | 6525 | HC CDR3 | WGGWGFYAMAL |
| 91 | | (Kabat) | |
| | 6526 | VH | EVQLVESGGGLVQPGGSLRLSCAASGFNIKDTYIHWVRQAPGKGLEWVAR |
| | | | IYPTNGYTRYADSVKGRFTISADTSKNTAYLQMNSLRAEDTAVYYCSRWG |
| | | | GWGFYAMALWGQGTLVTVSS |
| | 6527 | DNA VH | gaggttcagctggtggagtctggAggtggcctggtgcagccagggggctc |
| | | | actcAGAttgtcctgtgcagcttctggcttcaacattaaagacacctata |
| | | | tacactgggtgagacaggccccAggtaagggcctggaatgggttgcaagg |
| | | | atttatcctacCaatggttatactagatatgcTgatTCTgtcaagggcAG |
| | | | AttcactataTCTgcagacacatccaaaaacacagcctacctgcagatga |
| | | | acagcctgAGAgctgaggacactgcTgtctattattgttctagatgggga |
| | | | gggTGGggcttctatgctATGGCCCTGtggggtcaaggaaccctggtcac |
| | | | AgtctcctcT |
| | 6528 | Heavy Chain | EVQLVESGGGLVQPGGSLRLSCAASGFNIKDTYIHWVRQAPGKGLEWVAR |
| | | (hIgG1) | IYPTNGYTRYADSVKGRETISADTSKNTAYLQMNSLRAEDTAVYYCSRWG |
| | | | GWGFYAMALWGQGTLVTVSSASTKGPSVFPLAPSSKSTSGGTAALGCLVK |
| | | | DYFPEPVTVSWNSGALTSGVHTFPAVLQSSGLYSLSSVVTVPSSSLGTQT |
| | | | YICNVNHKPSNTKVDKRVEPKSCDKTHTCPPCPAPELVGGPSVFLLPPKP |
| | | | KDTLMISRTPEVTCVVVDVSHEDPEVKFNWYVDGVEVHNAKTKPPEEQYN |
| | | | STLRVVSVLTVLHQDWLNGKEYKCKVSNKALPAPIEKTISKAKGQPREPQ |
| | | | VYTLPPSRDELTKNQVSLTCLVKGFYPSDIAVEWESNGQPENNYKTTPLV |
| | | | LDSDGSFFLYSKLTVDKSRWQQGNVFSCSVMHEALHNHYTQKSLSLSPGK |
| | 6529 | DNA Heavy | gaggttcagctggtggagtctggAggtggcctggtgcagccagggggctc |
| | | Chain | actcAGAttgtcctgtgcagcttctggcttcaacattaaagacacctata |
| | | (hIgG1) | tacactgggtgagacaggccccAggtaagggcctggaatgggttgcaagg |
| | | | atttatcctacCaatggttatactagatatgcTgatTCTgtcaagggcAG |
| | | | AttcactataTCTgcagacacatccaaaaacacagcctacctgcagatga |
| | | | acagcctgAGAgctgaggacactgcTgtctattattgttctagatgggga |
| | | | gggTGGggcttctatgctATGGCCCTGtggggtcaaggaaccctggtcac |
| | | | AgtctcctcTgcCtcTaccaagggcccatcTgtcttccccctggcaccct |
| | | | cctccaagagcacctctgggggcacagcTgccctgggctgcctggtcaag |
| | | | gactacttcccTgaacctgtgacAgtctcCtggaactcaggAgccctgac |
| | | | cagTggAgtgcacaccttcccTgctgtcctacagtcctcaggactctact |
| | | | ccctcagcTCTgtggtgacAgtgccctccagcagcttgggcacccagacc |
| | | | tacatctgcaaTgtgaatcacaagcccagcaacaccaaggtggacaagaG |
| | | | agttgagcccaaatcttgtgacaaaactcacacatgcccaccTtgcccag |
| | | | cacctgaactGGtggggggaccAtcagtcttcctcCtccccccaaaaccc |
| | | | aaggacaccctcatgatctccAGAacccctgaggtcacatgTgtggtggt |
| | | | ggaTgtgagccaTgaagaccctgaggtcaagttcaactggtaTgtggaTg |
| | | | gAgtggaggtgcataatgccaagacaaagccCcCTgaggagcagtacaac |
| | | | agcacTCTcAGAgtggtcTCTgtcctcacAgtcctgcaccaggactggct |
| | | | gaatggcaaggagtacaagtgcaaggtctccaacaaagccctcccagccc |
| | | | ccatTgagaaaaccatctccaaagccaaagggcagcccAGAgaaccacag |
| | | | gtgtacaccctgcccccatccAGAgaTgagCtgaccaagaaccaggtcag |
| | | | cctgacctgcctggtcaaaggcttctatcccTCTgacatTgcTgtggagt |
| | | | gggagagcaatgggcagccTgagaacaactacaagaccacAcctcTTgtg |
| | | | ctggactcTgaTggctccttcttcctctacagcaagctcacAgtggacaa |
| | | | gagcaggtggcagcaggggaaTgtcttctcatgcTCTgtgatgcatgagg |
| | | | ctctgcacaaccactacacCcagaagagcctctccctgtctccAggtaaa |
| Ab-HER- | 6530 | HC CDR3 | WGGDGFYAFAL |
| 92 | | (Kabat) | |
| | 6531 | VH | EVQLVESGGGLVQPGGSLRLSCAASGFNIKDTYIHWVRQAPGKGLEWVAR |
| | | | IYPTNGYTRYADSVKGRFTISADTSKNTAYLQMNSLRAEDTAVYYCSRWG |
| | | | GDGFYAFALWGQGTLVTVSS |
| | 6532 | DNA VH | gaggttcagctggtggagtctggAggtggcctggtgcagccagggggctc |
| | | | actcAGAttgtcctgtgcagcttctggcttcaacattaaagacacctata |
| | | | tacactgggtgagacaggccccAggtaagggcctggaatgggttgcaagg |
| | | | atttatcctacCaatggttatactagatatgcTgatTCTgtcaagggcAG |
| | | | AttcactataTCTgcagacacatccaaaaacacagcctacctgcagatga |
| | | | acagcctgAGAgctgaggacactgcTgtctattattgttctagatgggga |
| | | | gggGATggcttctatgctTTTGCCCTGtggggtcaaggaaccctggtcac |
| | | | AgtctcctcT |
| | 6533 | Heavy Chain | EVQLVESGGGLVQPGGSLRLSCAASGFNIKDTYIHWVRQAPGKGLEWVAR |
| | | (hIgG1) | IYPTNGYTRYADSVKGRFTISADTSKNTAYLQMNSLRAEDTAVYYCSRWG |
| | | | GDGFYAFALWGQGTLVTVSSASTKGPSVFPLAPSSKSTSGGTAALGCLVK |
| | | | DYFPEPVTVSWNSGALTSGVHTFPAVLQSSGLYSLSSVVTVPSSSLGTQT |
| | | | YICNVNHKPSNTKVDKRVEPKSCDKTHTCPPCPAPELVGGPSVFLLPPKP |
| | | | KDTLMISRTPEVTCVVVDVSHEDPEVKFNWYVDGVEVHNAKTKPPEEQYN |
| | | | STLRVVSVLTVLHQDWLNGKEYKCKVSNKALPAPIEKTISKAKGQPREPQ |
| | | | VYTLPPSRDELTKNQVSLTCLVKGFYPSDIAVEWESNGQPENNYKTTPLV |
| | | | LDSDGSFFLYSKLTVDKSRWQQGNVFSCSVMHEALHNHYTQKSLSLSPGK |
| | 6534 | DNA Heavy | gaggttcagctggtggagtctggAggtggcctggtgcagccagggggctc |
| | | Chain | actcAGAttgtcctgtgcagcttctggcttcaacattaaagacacctata |
| | | (hIgG1) | tacactgggtgagacaggccccAggtaagggcctggaatgggttgcaagg |
| | | | atttatcctacCaatggttatactagatatgcTgatTCTgtcaagggcAG |
| | | | AttcactataTCTgcagacacatccaaaaacacagcctacctgcagatga |
| | | | acagcctgAGAgctgaggacactgcTgtctattattgttctagatgggga |
| | | | gggGATggcttctatgctTTTGCCCTGtggggtcaaggaaccctggtcac |
| | | | AgtctcctcTgcCtcTaccaagggcccatcTgtcttccccctggcaccct |
| | | | cctccaagagcacctctgggggcacagcTgccctgggctgcctggtcaag |
| | | | gactacttcccTgaacctgtgacAgtctcCtggaactcaggAgccctgac |
| | | | cagTggAgtgcacaccttcccTgctgtcctacagtcctcaggactctact |
| | | | ccctcagcTCTgtggtgacAgtgccctccagcagcttgggcacccagacc |
| | | | tacatctgcaaTgtgaatcacaagcccagcaacaccaaggtggacaagaG |
| | | | agttgagcccaaatcttgtgacaaaactcacacatgcccaccTtgcccag |
| | | | cacctgaactGGtggggggaccAtcagtcttcctcCtccccccaaaaccc |
| | | | aaggacaccctcatgatctccAGAacccctgaggtcacatgTgtggtggt |
| | | | ggaTgtgagccaTgaagaccctgaggtcaagttcaactggtaTgtggaTg |
| | | | gAgtggaggtgcataatgccaagacaaagccCcCTgaggagcagtacaac |
| | | | agcacTCTcAGAgtggtcTCTgtcctcacAgtcctgcaccaggactggct |
| | | | gaatggcaaggagtacaagtgcaaggtctccaacaaagccctcccagccc |
| | | | ccatTgagaaaaccatctccaaagccaaagggcagcccAGAgaaccacag |
| | | | gtgtacaccctgcccccatccAGAgaTgagCtgaccaagaaccaggtcag |
| | | | cctgacctgcctggtcaaaggcttctatcccTCTgacatTgcTgtggagt |
| | | | gggagagcaatgggcagccTgagaacaactacaagaccacAcctcTTgtg |
| | | | ctggactcTgaTggctccttcttcctctacagcaagctcacAgtggacaa |
| | | | gagcaggtggcagcaggggaaTgtcttctcatgcTCTgtgatgcatgagg |
| | | | ctctgcacaaccactacacCcagaagagcctctccctgtctccAggtaaa |

TABLE 11C
Exemplary Anti-HER2 Antibody Variants Based on HER-78 with Heavy Chain
Mutations

| | SEQ | | |
|---|---|---|---|
| Ab ID | ID NO | Description | Sequence |
| Ab-HER- | 6535 | HC CDR3 | WGGWGFYAFAL |
| 97 | | (Kabat) | |
| | 6536 | VH | EVQLVESGGGLVQPGGSLRLSCAASGFNIKDTYIHWVRQAPGKGLEWVAR |
| | | | IYPTNGYTRYADSVKGRFTISADTSKNTAYLQMNSLRAEDTAVYYCSRWG |
| | | | GWGFYAFALWGQGTLVTVSS |
| | 6537 | DNA VH | gaggttcagctggtggagtctggTggtggcctGgtgcagccagggggctc |
| | | | actcAGAttgtcctgtgcagcttctggcttcaacattaaagacacctata |
| | | | tacactgggtgAGAcaggccccTggAaagggcctggaatgggttgcaagg |
| | | | atttatcctacTaatggttatactagatatgcAgatagTgtcaagggcAG |
| | | | AttcactataagTgcagacacatccaaaaacacagcctacctgcagatga |
| | | | acagcctgAGAgctgaggacactgcAgtctattattgttctagatgggga |
| | | | gggTGGggcttctatgctTTTGCCCTGtggggtcaaggaaccctggtcac |
| | | | AgtctcctcT |
| Ab-HER- | 6538 | HC CDR3 | WGGWGFYAFAY |
| 98 | | (Kabat) | |
| | 6539 | VH | EVQLVESGGGLVQPGGSLRLSCAASGFNIKDTYIHWVRQAPGKGLEWVAR |
| | | | IYPTNGYTRYADSVKGRFTISADTSKNTAYLQMNSLRAEDTAVYYCSRWG |
| | | | GWGFYAFAYWGQGTLVTVSS |
| | 6540 | DNA VH | gaggttcagctggtggagtctggTggtggcctGgtgcagccagggggctc |
| | | | actcAGAttgtcctgtgcagcttctggcttcaacattaaagacacctata |
| | | | tacactgggtgAGAcaggccccTggAaagggcctggaatgggttgcaagg |
| | | | atttatcctacTaatggttatactagatatgcAgatagTgtcaagggcAG |
| | | | AttcactataagTgcagacacatccaaaaacacagcctacctgcagatga |
| | | | acagcctgAGAgctgaggacactgcAgtctattattgttctagatgggga |
| | | | gggTGGggcttctatgctTTTGCCTACtggggtcaaggaaccctggtcac |
| | | | AgtctcctcT |
| Ab-HER- | 6541 | HC CDR3 | WGGWGFYAFDL |
| 99 | | Kabat) | |
| | 6542 | VH | EVQLVESGGGLVQPGGSLRLSCAASGFNIKDTYIHWVRQAPGKGLEWVAR |
| | | | IYPTNGYTRYADSVKGRFTISADTSKNTAYLQMNSLRAEDTAVYYCSRWG |
| | | | GWGFYAFDLWGQGTLVTVSS |
| | 6543 | DNA VH | gaggttcagctggtggagtctggTggtggcctGgtgcagccagggggctc |
| | | | actcAGAttgtcctgtgcagcttctggcttcaacattaaagacacctata |
| | | | tacactgggtgAGAcaggccccTggAaagggcctggaatgggttgcaagg |
| | | | atttatcctacTaatggttatactagatatgcAgatagTgtcaagggcAG |
| | | | AttcactataagTgcagacacatccaaaaacacagcctacctgcagatga |
| | | | acagcctgAGAgctgaggacactgcAgtctattattgttctagatgggga |
| | | | gggTGGggcttctatgctTTTgacCTGtggggtcaaggaaccctggtcac |
| | | | AgtctcctcT |
| Ab-HER- | 6544 | HC CDR3 | WGGWGFYAMAL |
| 100 | | (Kabat) | |
| | 6545 | VH | EVQLVESGGGLVQPGGSLRLSCAASGFNIKDTYIHWVRQAPGKGLEWVAR |
| | | | IYPTNGYTRYADSVKGRETISADTSKNTAYLQMNSLRAEDTAVYYCSRWG |
| | | | GWGFYAMALWGQGTLVTVSS |
| | 6546 | DNA VH | gaggttcagctggtggagtctggTggtggcctGgtgcagccagggggctc |
| | | | actcAGAttgtcctgtgcagcttctggcttcaacattaaagacacctata |
| | | | tacactgggtgAGAcaggccccTggAaagggcctggaatgggttgcaagg |
| | | | atttatcctacTaatggttatactagatatgcAgatagTgtcaagggcAG |
| | | | AttcactataagTgcagacacatccaaaaacacagcctacctgcagatga |
| | | | acagcctgAGAgctgaggacactgcAgtctattattgttctagatgggga |
| | | | gggTGGggcttctatgctATGGCCCTGtggggtcaaggaaccctggtcac |
| | | | AgtctcctcT |
| Ab-HER- | 6547 | HC CDR3 | WGGDGFYAFAL |
| 101 | | (Kabat) | |
| | 6548 | VH | EVQLVESGGGLVQPGGSLRLSCAASGFNIKDTYIHWVRQAPGKGLEWVAR |
| | | | IYPTNGYTRYADSVKGRFTISADTSKNTAYLQMNSLRAEDTAVYYCSRWG |
| | | | GDGFYAFALWGQGTLVTVSS |
| | 6549 | DNA VH | gaggttcagctggtggagtctggTggtggcctGgtgcagccagggggctc |
| | | | actcAGAttgtcctgtgcagcttctggcttcaacattaaagacacctata |
| | | | tacactgggtgAGAcaggccccTggAaagggcctggaatgggttgcaagg |
| | | | atttatcctacTaatggttatactagatatgcAgatagTgtcaagggcAG |
| | | | AttcactataagTgcagacacatccaaaaacacagcctacctgcagatga |
| | | | acagcctgAGAgctgaggacactgcAgtctattattgttctagatgggga |
| | | | gggGATggcttctatgctTTTGCCCTGtggggtcaaggaaccctggtcac |
| | | | AgtctcctcT |

TABLE 12
Constant Regions of Heavy Chains and Light Chains

| SEQ | | |
|---|---|---|
| ID | | |
| NO | Description | Sequence |
| 5003 | DNA Constant | gcgtcgaccaagggcccatcggtcttccccctggcaccctcctccaagagcacctctg |
| | Region of | ggggcacagcggccctgggctgcctggtcaaggactacttccccgaacctgtgacggt |
| | Heavy Chain | ctcgtggaactcaggcgccctgaccagcggcgtgcacaccttcccggctgtcctacag |
| | (hIgG1) | tcctcaggactctactccctcagcagcgtggtgaccgtgccctccagcagcttgggca |
| | | cccagacctacatctgcaacgtgaatcacaagcccagcaacaccaaggtggacaagaa |
| | | agttgagcccCCCaaatcttgtgacaaaactcacacatgcccaccgtgcccagcacct |
| | | gaactcctggggggaccgtcagtcttcctcttccccccaaaacccaaggacaccctca |
| | | tgatctcccggacccctgaggtcacatgcgtggtggtggacgtgagccacgaagaccc |
| | | tgaggtcaagttcaactggtacgtggacggcgtggaggtgcataatgccaagacaaag |
| | | ccgcgggaggagcagtacaacagcacgtaccgtgtggtcagcgtcctcaccgtcctgc |
| | | accaggactggctgaatggcaaggagtacaagtgcaaggtctccaacaaagccctccc |
| | | agcccccatcgagaaaaccatctccaaagccaaagggcagccccgagaaccacaggtg |
| | | tacaccctgcccccatcccgggatgagctgaccaagaaccaggtcagcctgacctgcc |
| | | tggtcaaaggcttctatcccagcgacatcgccgtggagtgggagagcaatgggcagcc |
| | | ggagaacaactacaagaccacgcctcccgtgctggactccgacggctccttcttcctc |
| | | tacagcaagctcaccgtggacaagagcaggtggcagcaggggaacgtcttctcatgct |
| | | ccgtgatgcatgaggctctgcacaaccactacacgcagaagagcctctccctgtctcc |
| | | gggtaaa |
| 5004 | Constant | ASTKGPSVFPLAPSSKSTSGGTAALGCLVKDYFPEPVTVSWNSGALTSGVHTFPAVLQ |
| | Region of | SSGLYSLSSVVTVPSSSLGTQTYICNVNHKPSNTKVDKKVEPPKSCDKTHTCPPCPAP |
| | Heavy Chain | ELLGGPSVFLFPPKPKDTLMISRTPEVTCVVVDVSHEDPEVKFNWYVDGVEVHNAKTK |
| | (hIgG1) | PREEQYNSTYRVVSVLTVLHQDWLNGKEYKCKVSNKALPAPIEKTISKAKGQPREPQV |
| | | YTLPPSRDELTKNQVSLTCLVKGFYPSDIAVEWESNGQPENNYKTTPPVLDSDGSFFL |
| | | YSKLTVDKSRWQQGNVFSCSVMHEALHNHYTQKSLSLSPGK |
| 5007 | DNA Constant | cgaactgtggctgcaccatctgtcttcatcttcccgccatctgatgagcagttgaaat |
| | Region of Light | ctggaactgcctctgttgtgtgcctgctgaataacttctatcccagagaggccaaagt |
| | Chain (hIgG1 | acagtggaaggtggataacgccctccaatcgggtaactcccaggagagtgtcacagag |
| | kappa) | caggacagcaaggacagcacctacagcctcagcagcaccctgacgctgagcaaagcag |
| | | actacgagaaacacaaagtctacgcctgcgaagtcacccatcagggcctgagctcgcc |
| | | cgtcacaaagagcttcaacaggggagagtgt |
| 5008 | Constant | RTVAAPSVFIFPPSDEQLKSGTASVVCLLNNFYPREAKVQWKVDNALQSGNSQESVTE |
| | Region of Light | QDSKDSTYSLSSTLTLSKADYEKHKVYACEVTHQGLSSPVTKSFNRGEC |
| | Chain (hIgG | |
| | Kappa) | |
| 5017 | DNA Constant | gcgtcgaccaagggcccatcggtcttccccctggcaccctcctccaagagcacctctg |
| | Region of | ggggcacagcggccctgggctgcctggtcaaggactacttccccgaacctgtgacggt |
| | Heavy Chain | ctcgtggaactcaggcgccctgaccagcggcgtgcacaccttcccggctgtcctacag |
| | (hIgG1) | tcctcaggactctactccctcagcagcgtggtgaccgtgccctccagcagcttgggca |
| | | cccagacctacatctgcaacgtgaatcacaagcccagcaacaccaaggtggacaagaG |
| | | agttgagcccaaatcttgtgacaaaactcacacatgcccaccgtgcccagcacctgaa |
| | | ctcGtggggggaccgtcagtcttcctcCtccccccaaaacccaaggacaccctcatga |
| | | tctcccggacccctgaggtcacatgcgtggtggtggacgtgagccacgaagaccctga |
| | | ggtcaagttcaactggtacgtggacggcgtggaggtgcataatgccaagacaaagccg |
| | | cCggaggagcagtacaacagcacgCTccgtgtggtcagcgtcctcaccgtcctgcacc |
| | | aggactggctgaatggcaaggagtacaagtgcaaggtctccaacaaagccctcccagc |
| | | ccccatcgagaaaaccatctccaaagccaaagggcagccccgagaaccacaggtgtac |
| | | accctgcccccatcccgggaTgagCtgaccaagaaccaggtcagcctgacctgcctgg |
| | | tcaaaggcttctatcccagcgacatcgccgtggagtgggagagcaatgggcagccgga |
| | | gaacaactacaagaccacgcctcTcgtgctggactccgacggctccttcttcctctac |
| | | agcaagctcaccgtggacaagagcaggtggcagcaggggaacgtcttctcatgctccg |
| | | tgatgcatgaggctctgcacaaccactacacgcagaagagcctctccctgtctccggg |
| | | taaa |
| 5018 | Constant | ASTKGPSVFPLAPSSKSTSGGTAALGCLVKDYFPEPVTVSWNSGALTSGVHTFPAVLQ |
| | Region of | SSGLYSLSSVVTVPSSSLGTQTYICNVNHKPSNTKVDKRVEPKSCDKTHTCPPCPAPE |
| | Heavy Chain | LVGGPSVFLLPPKPKDTLMISRTPEVTCVVVDVSHEDPEVKFNWYVDGVEVHNAKTKP |
| | (hIgG1) | PEEQYNSTLRVVSVLTVLHQDWLNGKEYKCKVSNKALPAPIEKTISKAKGQPREPQVY |
| | | TLPPSRDELTKNQVSLTCLVKGFYPSDIAVEWESNGQPENNYKTTPLVLDSDGSFFLY |
| | | SKLTVDKSRWQQGNVFSCSVMHEALHNHYTQKSLSLSPGK |
| 5021 | DNA Constant | AGAACCGTGGCCGCCCCTAGCGTGTTCATCTTCCCGCCAAGCGACGAGCAGCTGAAGA |
| | Region of Light | GCGGCACCGCCAGCGTGGTGTGCCTGCTGAACAACTTCTACCCCAGAGAGGCCAAGGT |
| | Chain (hIgG1 | GCAGTGGAAGGTGGACAACGCCCTGCAGAGCGGCAACAGCCAGGAGAGCGTGACCGAG |
| | kappa) | CAGGACAGCAAGGACAGCACCTACAGCCTGAGCAGCACCCTGACCCTGAGCAAGGCCG |
| | | ACTACGAGAAGCACAAGGTGTACGCCTGCGAGGTGACCCACCAGGGCCTGAGCAGCCC |
| | | CGTGACCAAGAGCTTCAACAGAGGCGAGTGCt |
| 5022 | Constant | RTVAAPSVFIFPPSDEQLKSGTASVVCLLNNFYPREAKVQWKVDNALQSGNSQESVTE |
| | Region of Light | QDSKDSTYSLSSTLTLSKADYEKHKVYACEVTHQGLSSPVTKSFNRGEC |
| | Chain (hIgG | |
| | Kappa) | |
| 5011 | DNA Constant | gcgtcgaccaagggcccatcggtcttccccctggcaccctcctccaagagcacctctg |
| | Region of | ggggcacagcggccctgggctgcctggtcaaggactacttccccgaacctgtgacggt |
| | Heavy Chain | ctcgtggaactcaggcgccctgaccagcggcgtgcacaccttcccggctgtcctacag |
| | (hIgG1) | tcctcaggactctactccctcagcagcgtggtgaccgtgccctccagcagcttgggca |
| | | cccagacctacatctgcaacgtgaatcacaagcccagcaacaccaaggtggacaagaa |
| | | agttgagcccaaatcttgtgacaaaactcacacatgcccaccgtgcccagcacctgaa |
| | | ctcctggggggaccgtcagtcttcctcttccccccaaaacccaaggacaccctcatga |
| | | tctcccggacccctgaggtcacatgcgtggtggtggacgtgagccacgaagaccctga |
| | | ggtcaagttcaactggtacgtggacggcgtggaggtgcataatgccaagacaaagccg |
| | | cgggaggagcagtacaacagcacgtaccgtgtggtcagcgtcctcaccgtcctgcacc |
| | | aggactggctgaatggcaaggagtacaagtgcaaggtctccaacaaagccctcccagc |
| | | ccccatcgagaaaaccatctccaaagccaaagggcagccccgagaaccacaggtgtac |
| | | accctgcccccatcccgggaGgagAtgaccaagaaccaggtcagcctgacctgcctgg |
| | | tcaaaggcttctatcccagcgacatcgccgtggagtgggagagcaatgggcagccgga |
| | | gaacaactacaagaccacgcctcccgtgctggactccgacggctccttcttcctctac |
| | | agcaagctcaccgtggacaagagcaggtggcagcaggggaacgtcttctcatgctccg |
| | | tgatgcatgaggctctgcacaaccactacacgcagaagagcctctccctgtctccggg |
| | | taaa |
| 5012 | Constant | ASTKGPSVFPLAPSSKSTSGGTAALGCLVKDYFPEPVTVSWNSGALTSGVHTFPAVLQ |
| | Region of | SSGLYSLSSVVTVPSSSLGTQTYICNVNHKPSNTKVDKKVEPKSCDKTHTCPPCPAPE |
| | Heavy Chain | LLGGPSVFLFPPKPKDTLMISRTPEVTCVVVDVSHEDPEVKFNWYVDGVEVHNAKTKP |
| | (hIgG1) | REEQYNSTYRVVSVLTVLHQDWLNGKEYKCKVSNKALPAPIEKTISKAKGQPREPQVY |
| | | TLPPSREEMTKNQVSLTCLVKGFYPSDIAVEWESNGQPENNYKTTPPVLDSDGSFFLY |
| | | SKLTVDKSRWQQGNVFSCSVMHEALHNHYTQKSLSLSPGK |
| 5025 | DNA Constant | gcgtcgaccaagggcccatcggtcttccccctggcaccctcctccaagagcacctctg |
| | Region of | ggggcacagcggccctgggctgcctggtcaaggactacttccccgaacctgtgacggt |
| | Heavy Chain | ctcgtggaactcaggcgccctgaccagcggcgtgcacaccttcccggctgtcctacag |
| | (hIgG1) | tcctcaggactctactccctcagcagcgtggtgaccgtgccctccagcagcttgggca |
| | | cccagacctacatctgcaacgtgaatcacaagcccagcaacaccaaggtggacaagaa |
| | | agttgagcccCCCaaatcttgtgacaaaactcacacatgcccaccgtgcccagcacct |
| | | gaactcctggggggaccgtcagtcttcctcttccccccaaaacccaaggacaccctca |
| | | tgatctcccggacccctgaggtcacatgcgtggtggtggacgtgagccacgaagaccc |
| | | tgaggtcaagttcaactggtacgtggacggcgtggaggtgcataatgccaagacaaag |
| | | ccgcgggaggagcagtacaacagcacgtaccgtgtggtcagcgtcctcaccgtcctgc |
| | | accaggactggctgaatggcaaggagtacaagtgcaaggtctccaacaaagccctccc |
| | | agcccccatcgagaaaaccatctccaaagccaaagggcagccccgagaaccacaggtg |
| | | tacaccctgcccccatcccgggatgagctgaccaagaaccaggtcagcctgacctgcc |
| | | tggtcaaaggcttctatcccagcgacatcgccgtggagtgggagagcaatgggcagcc |
| | | ggagaacaactacaagaccacgcctcccgtgctggactccgacggctccttcttcctc |
| | | tacagcaagctcaccgtggacaagagcaggtggcagcaggggaacgtcttctcatgct |
| | | ccgtgatgcatgaggctctgcacaacCAGtacacgcagaagagcctctccctgtctcc |
| | | gggtaaa |
| 5026 | Constant | ASTKGPSVFPLAPSSKSTSGGTAALGCLVKDYFPEPVTVSWNSGALTSGVHTFPAVLQ |
| | Region of | SSGLYSLSSVVTVPSSSLGTQTYICNVNHKPSNTKVDKKVEPPKSCDKTHTCPPCPAP |
| | Heavy Chain | ELLGGPSVFLFPPKPKDTLMISRTPEVTCVVVDVSHEDPEVKFNWYVDGVEVHNAKTK |
| | (hIgG1) | PREEQYNSTYRVVSVLTVLHQDWLNGKEYKCKVSNKALPAPIEKTISKAKGQPREPQV |
| | | YTLPPSRDELTKNQVSLTCLVKGFYPSDIAVEWESNGQPENNYKTTPPVLDSDGSFFL |
| | | YSKLTVDKSRWQQGNVFSCSVMHEALHNQYTQKSLSLSPGK |
| 5029 | DNA Constant | gcgtcgaccaagggcccatcggtcttccccctggcaccctcctccaagagcacctctg |
| | Region of | ggggcacagcggccctgggctgcctggtcaaggactacttccccgaacctgtgacggt |
| | Heavy Chain | ctcgtggaactcaggcgccctgaccagcggcgtgcacaccttcccggctgtcctacag |
| | (hIgG1) | tcctcaggactctactccctcagcagcgtggtgaccgtgccctccagcagcttgggca |
| | | cccagacctacatctgcaacgtgaatcacaagcccagcaacaccaaggtggacaagaa |
| | | agttgagcccCCCaaatcttgtgacaaaactcacacatgcccaccgtgcccagcacct |
| | | gaactcctggggggaccgtcagtcttcctcttccccccaaaacccaaggacaccctca |
| | | tgGCAtcccggacccctgaggtcacatgcgtggtggtggacgtgagccacgaagaccc |
| | | tgaggtcaagttcaactggtacgtggacggcgtggaggtgcataatgccaagacaaag |
| | | ccgcgggaggagcagtacaacagcacgtaccgtgtggtcagcgtcctcaccgtcctgG |
| | | CCcaggactggctgaatggcaaggagtacaagtgcaaggtctccaacaaagccctccc |
| | | agcccccatcgagaaaaccatctccaaagccaaagggcagccccgagaaccacaggtg |
| | | tacaccctgcccccatcccgggatgagctgaccaagaaccaggtcagcctgacctgcc |
| | | tggtcaaaggcttctatcccagcgacatcgccgtggagtgggagagcaatgggcagcc |
| | | ggagaacaactacaagaccacgcctcccgtgctggactccgacggctccttcttcctc |
| | | tacagcaagctcaccgtggacaagagcaggtggcagcaggggaacgtcttctcatgct |
| | | ccgtgatgcatgaggctctgcacaacGCTtacacgcagaagagcctctccctgtctcc |
| | | gggtaaa |
| 5030 | Constant | ASTKGPSVFPLAPSSKSTSGGTAALGCLVKDYFPEPVTVSWNSGALTSGVHTFPAVLQ |
| | Region of | SSGLYSLSSVVTVPSSSLGTQTYICNVNHKPSNTKVDKKVEPPKSCDKTHTCPPCPAP |
| | Heavy Chain | ELLGGPSVFLFPPKPKDTLMASRTPEVTCVVVDVSHEDPEVKFNWYVDGVEVHNAKTK |
| | (hIgG1) | PREEQYNSTYRVVSVLTVLAQDWLNGKEYKCKVSNKALPAPIEKTISKAKGQPREPQV |
| | | YTLPPSRDELTKNQVSLTCLVKGFYPSDIAVEWESNGQPENNYKTTPPVLDSDGSFFL |
| | | YSKLTVDKSRWQQGNVFSCSVMHEALHNAYTQKSLSLSPGK |
| 5211 | DNA Constant | gcgtcgaccaagggcccatcggtcttccccctggcaccctcctccaagagcacctctg |
| | Region of | ggggcacagcggccctgggctgcctggtcaaggactacttccccgaacctgtgacggt |
| | Heavy Chain | ctcgtggaactcaggcgccctgaccagcggcgtgcacaccttcccggctgtcctacag |
| | (hIgG1) | tcctcaggactctactccctcagcagcgtggtgaccgtgccctccagcagcttgggca |
| | | cccagacctacatctgcaacgtgaatcacaagcccagcaacaccaaggtggacaagaa |
| | | agttgagcccCCCaaatcttgtgacaaaactcacacatgcccaccgtgcccagcacct |
| | | gaactcctggggggaccgtcagtcttcctcttccccccaaaacccaaggacaccctca |
| | | tgGCAtcccggacccctgaggtcacatgcgtggtggtggacgtgagccacgaagaccc |
| | | tgaggtcaagttcaactggtacgtggacggcgtggaggtgcataatgccaagacaaag |
| | | ccgcgggaggagcagtacaacagcacgtaccgtgtggtcagcgtcctcaccgtcctgG |
| | | CCcaggactggctgaatggcaaggagtacaagtgcaaggtctccaacaaagccctccc |
| | | agcccccatcgagaaaaccatctccaaagccaaagggcagccccgagaaccacaggtg |
| | | tacaccctgcccccatcccgggatgagctgaccaagaaccaggtcagcctgacctgcc |
| | | tggtcaaaggcttctatcccagcgacatcgccgtggagtgggagagcaatgggcagcc |
| | | ggagaacaactacaagaccacgcctcccgtgctggactccgacggctccttcttcctc |
| | | tacagcaagctcaccgtggacaagagcaggtggcagcaggggaacgtcttctcatgct |
| | | ccgtgatgcatgaggctctgcacaaccactacacgcagaagagcctctccctgtctcc |
| | | gggtaaa |
| 5212 | Constant | ASTKGPSVFPLAPSSKSTSGGTAALGCLVKDYFPEPVTVSWNSGALTSGVHTFPAVLQ |
| | Region of | SSGLYSLSSVVTVPSSSLGTQTYICNVNHKPSNTKVDKKVEPPKSCDKTHTCPPCPAP |
| | Heavy Chain | ELLGGPSVFLFPPKPKDTLMASRTPEVTCVVVDVSHEDPEVKFNWYVDGVEVHNAKTK |
| | (hIgG1) | PREEQYNSTYRVVSVLTVLAQDWLNGKEYKCKVSNKALPAPIEKTISKAKGQPREPQV |
| | | YTLPPSRDELTKNQVSLTCLVKGFYPSDIAVEWESNGQPENNYKTTPPVLDSDGSFFL |
| | | YSKLTVDKSRWQQGNVFSCSVMHEALHNHYTQKSLSLSPGK |
| 5213 | DNA Constant | gcgtcgaccaagggcccatcggtcttccccctggcaccctcctccaagagcacctctg |
| | Region of | ggggcacagcggccctgggctgcctggtcaaggactacttccccgaacctgtgacggt |
| | Heavy Chain | ctcgtggaactcaggcgccctgaccagcggcgtgcacaccttcccggctgtcctacag |
| | (hIgG1) | tcctcaggactctactccctcagcagcgtggtgaccgtgccctccagcagcttgggca |
| | | cccagacctacatctgcaacgtgaatcacaagcccagcaacaccaaggTggacaagaa |
| | | agttgagcccCCCaaatcttgtgacaaaactcacacatgcccaccgtgcccagcacct |
| | | gaactcctggggggaccgtcagtcttcctcttccccccaaaacccaaggacaccctca |
| | | tgGCAtcccggacccctgaggtcacatgcgtggtggtggacgtgagccacgaagaccc |
| | | tgaggtcaagttcaactggtacgtggacggcgtggaggtgcataatgccaagacaaag |
| | | ccgcgggaggagcagtacaacagcacgtaccgtgtggtcagcgtcctcaccgtcctgc |
| | | accaggactggctgaatggcaaggagtacaagtgcaaggtctccaacaaagccctccc |
| | | agcccccatcgagaaaaccatctccaaagccaaagggcagccccgagaaccacaggtg |
| | | tacaccctgcccccatcccgggatgagctgaccaagaaccaggtcagcctgacctgcc |
| | | tggtcaaaggcttctatcccagcgacatcgccgtggagtgggagagcaatgggcagcc |
| | | ggagaacaactacaagaccacgcctcccgtgctggactccgacggctccttcttcctc |
| | | tacagcaagctcaccgtggacaagagcaggtggcagcaggggaacgtcttctcatgct |
| | | ccgtgatgcatgaggctctgcacaacCAGtacacgcagaagagcctctccctgtctcc |
| | | gggtaaa |
| 5214 | Constant | ASTKGPSVFPLAPSSKSTSGGTAALGCLVKDYFPEPVTVSWNSGALTSGVHTFPAVLQ |
| | Region of | SSGLYSLSSVVTVPSSSLGTQTYICNVNHKPSNTKVDKKVEPPKSCDKTHTCPPCPAP |
| | Heavy Chain | ELLGGPSVFLFPPKPKDTLMASRTPEVTCVVVDVSHEDPEVKFNWYVDGVEVHNAKTK |
| | (hIgG1) | PREEQYNSTYRVVSVLTVLHQDWLNGKEYKCKVSNKALPAPIEKTISKAKGQPREPQV |
| | | YTLPPSRDELTKNQVSLTCLVKGFYPSDIAVEWESNGQPENNYKTTPPVLDSDGSFFL |
| | | YSKLTVDKSRWQQGNVFSCSVMHEALHNQYTQKSLSLSPGK |
| 5215 | DNA Constant | gcCtcTaccaagggcccatcTgtcttccccctggcaccctcctccaagagcacctctg |
| | Region of | ggggcacagcAgccctgggctgcctggtcaaggactacttcccTgaacctgtgacAgt |
| | Heavy Chain | ctcTtggaactcaggGgccctgaccTCTggGgtgcacaccttcccAgctgtcctacag |
| | (hIgG1) | tcctcaggactctactccctcTCTTCTgtggtgacAgtgccctccagcagcttgggca |
| | | cccagacctacatctgcaaTgtgaatcacaagcccagcaacaccaaggtggacaagaa |
| | | agttgagcccCCCaaatcttgtgacaaaactcacacatgcccaccCtgcccagcacct |
| | | gaactcctggggggaccCtcagtcttcctcttccccccaaaacccaaggacaccctca |
| | | tgatctccAGAacccctgaggtcacatgTgtggtggtggaTgtgagccaTgaagaccc |
| | | tgaggtcaagttcaactggtaTgtggaTggGgtggaggtgcataatgccaagacaaag |
| | | ccCAGAgaggagcagtacaacagcacCtacAGAgtggtcTCAgtcctcacTgtcctgc |
| | | accaggactggctgaatggcaaggagtacaagtgcaaggtctccaacaaagccctccc |
| | | agcccccatAgagaaaaccatctccaaagccaaagggcagcccAGAgaaccacaggtg |
| | | tacaccctgcccccatccAGAgatgagctgaccaagaaccaggtcagcctgacctgcc |
| | | tggtcaaaggcttctatcccTCTgacatTgcTgtggagtgggagagcaatgggcagcc |
| | | AgagaacaactacaagaccacCcctccAgtgctggactcTgatggctccttcttcctc |
| | | tacagcaagctcacAgtggacaagagcaggtggcagcaggggaaTgtcttctcatgct |
| | | cTgtgatgcatgaggctctgcacaaccactacacTcagaagagcctctccctgtctcc |
| | | Tggtaaa |
| 5216 | Constant | ASTKGPSVFPLAPSSKSTSGGTAALGCLVKDYFPEPVTVSWNSGALTSGVHTFPAVLQ |
| | Region of | SSGLYSLSSVVTVPSSSLGTQTYICNVNHKPSNTKVDKKVEPPKSCDKTHTCPPCPAP |
| | Heavy Chain | ELLGGPSVFLFPPKPKDTLMISRTPEVTCVVVDVSHEDPEVKFNWYVDGVEVHNAKTK |
| | (hIgG1) | PREEQYNSTYRVVSVLTVLHQDWLNGKEYKCKVSNKALPAPIEKTISKAKGQPREPQV |
| | | YTLPPSRDELTKNQVSLTCLVKGFYPSDIAVEWESNGQPENNYKTTPPVLDSDGSFFL |
| | | YSKLTVDKSRWQQGNVFSCSVMHEALHNHYTQKSLSLSPGK |
| 5217 | DNA Constant | AGGactgtCgctgcaccatctgtcttcatcttcccAccatctgatgagcagttgaaat |
| | Region of Light | ctggaactgcctctgttAAGtgcctgctgaataacttctatcccagagaggccaaagt |
| | Chain | acagtggaaggtggataaTgccctccaaAGTggtaactcccaggagagtgtcacagag |
| | | caggacagcaaggacagcacctacagcctcagcagcaccctgacCctgagcaaagcag |
| | | actaTgagaaacacaaagtctaTgcctgTgaagtcacccatcagggcctgagcAGCcc |
| | | Agtcacaaagagcttcaacaggggagagtgt |
| 5218 | Constant | RTVAAPSVFIFPPSDEQLKSGTASVKCLLNNFYPREAKVQWKVDNALQSGNSQESVTE |
| | Region of Light | QDSKDSTYSLSSTLTLSKADYEKHKVYACEVTHQGLSSPVTKSFNRGEC |
| | Chain | |
| 5219 | DNA Constant | gcCtcTaccaagggcccatcTgtcttccccctggcaccctcctccaagagcacctctg |
| | Region of | ggggcacagcTgccctgggctgcctggtcaaggactacttcccTgaacctgtgacAgt |
| | Heavy Chain | ctcCtggaactcaggAgccctgaccagTggAgtgcacaccttcccTgctgtcctacag |
| | (hIgG1) | tcctcaggactctactccctcagcTCTgtggtgacAgtgccctccagcagcttgggca |
| | | cccagacctacatctgcaaTgtgaatcacaagcccagcaacaccaaggtggacaagaG |
| | | agttgagcccaaatcttgtgacaaaactcacacatgcccaccTtgcccagcacctgaa |
| | | ctGGtggggggaccAtcagtcttcctcCtccccccaaaacccaaggacaccctcatga |
| | | tctccAGAacccctgaggtcacatgTgtggtggtggaTgtgagccaTgaagaccctga |
| | | ggtcaagttcaactggtaTgtggaTggAgtggaggtgcataatgccaagacaaagccC |
| | | cCTgaggagcagtacaacagcacTCTcAGAgtggtcTCTgtcctcacAgtcctgcacc |
| | | aggactggctgaatggcaaggagtacaagtgcaaggtctccaacaaagccctcccagc |
| | | ccccatTgagaaaaccatctccaaagccaaagggcagcccAGAgaaccacaggtgtac |
| | | accctgcccccatccAGAgaTgagCtgaccaagaaccaggtcagcctgacctgcctgg |
| | | tcaaaggcttctatcccTCTgacatTgcTgtggagtgggagagcaatgggcagccTga |
| | | gaacaactacaagaccacAcctcTTgtgctggactcTgaTggctccttcttcctctac |
| | | agcaagctcacAgtggacaagagcaggtggcagcaggggaaTgtcttctcatgcTCTg |
| | | tgatgcatgaggctctgcacaaccactacacCcagaagagcctctccctgtctccAgg |
| | | taaa |
| 5247 | DNA Constant | gcCtcTaccaagggcccatcTgtcttccccctggcaccctcctccaagagcacctctg |
| | Region of | ggggcacagcTgccctgggctgcctggtcaaggactacttcccTgaacctgtgacAgt |
| | Heavy Chain | ctcCtggaactcaggAgccctgaccagTggAgtgcacaccttcccTgctgtcctacag |
| | (hIgG1) | tcctcaggactctactccctcagcTCTgtggtgacAgtgccctccagcagcttgggca |
| | | cccagacctacatctgcaaTgtgaatcacaagcccagcaacaccaaggtggacaagaG |
| | | agttgagcccaaatcttgtgacaaaactcacacatgcccaccTtgcccagcacctgaa |
| | | ctGGtggggggaccAtcagtcttcctcCtccccccaaaacccaaggacaccctcatga |
| | | tctccAGAacccctgaggtcacatgTgtggtggtggaTgtgagccaTgaagaccctga |
| | | ggtcaagttcaactggtaTgtggaTggAgtggaggtgcataatgccaagacaaagccC |
| | | cCTgaggagcagtacaacagcacTCTcAGAgtggtcTCTgtcctcacAgtcctgcacc |
| | | aggactggctgaatggcaaggagtacaagtgcaaggtctccaacaaagccctcccagc |
| | | ccccatTgagaaaaccatctccaaagccaaagggcagcccAGAgaaccacaggtgtac |
| | | accctgcccccatccAGAgaTgagCtgaccaagaaccaggtcagcctgacctgcctgg |
| | | tcaaaggcttctatcccTCTgacatTgcTgtggagtgggagagcaatgggcagccTga |
| | | gaacaactacaagaccacAcctcTTgtgctggactcTgaTggctccttcttcctctac |
| | | agcaagctcacAgtggacaagagcagAtggcagcaggggaaTgtcttctcatgcTCTg |
| | | tgatgcatgaggctctgcacaaccactacacCcagaagagcctctccctgtctccAgg |
| | | taaa |
| 5220 | Constant | ASTKGPSVFPLAPSSKSTSGGTAALGCLVKDYFPEPVTVSWNSGALTSGVHTFPAVLQ |
| | Region of | SSGLYSLSSVVTVPSSSLGTQTYICNVNHKPSNTKVDKRVEPKSCDKTHTCPPCPAPE |
| | Heavy Chain | LVGGPSVFLLPPKPKDTLMISRTPEVTCVVVDVSHEDPEVKFNWYVDGVEVHNAKTKP |
| | (hIgG1) | PEEQYNSTLRVVSVLTVLHQDWLNGKEYKCKVSNKALPAPIEKTISKAKGQPREPQVY |
| | | TLPPSRDELTKNQVSLTCLVKGFYPSDIAVEWESNGQPENNYKTTPLVLDSDGSEFLY |
| | | SKLTVDKSRWQQGNVFSCSVMHEALHNHYTQKSLSLSPGK |
| 5221 | DNA Constant | AGAactgtggctgcaccatctgtcttcatcttcccAccatctgatgagcagttgaaat |
| | Region of Light | ctggaactgcctctgttgtgtgcctgctgaataacttctatcccagagaggccaaagt |
| | Chain | acagtggaaggtggataaTgccctccaatcAggtaactcccaggagagtgtcacagag |
| | | caggacagcaaggacagcacctacagcctcagcagcaccctgacTctgagcaaagcag |
| | | actaTgagaaacacaaagtctaTgcctgTgaagtcacccatcagggcctgagctcTcc |
| | | Tgtcacaaagagcttcaacaggggagagtgt |
| 5222 | Constant | RTVAAPSVFIFPPSDEQLKSGTASVVCLLNNFYPREAKVQWKVDNALQSGNSQESVTE |
| | Region of Light | QDSKDSTYSLSSTLTLSKADYEKHKVYACEVTHQGLSSPVTKSFNRGEC |
| | Chain | |
| 5277 | DNA Constant | gagcccaaatcttgtgacaaaactTACacatgcccaccgtgcccagcacctgaactcG |
| | Region of | tggggggaccgtcagtcttcctcCtccccccaaaacccaaggacaccctcatgatctc |
| | Heavy Chain | ccggacccctgaggtcacatgcgtggtggtggacgtgagccacgaagaccctgaggtc |
| | (hIgG1) | aagttcaactggtacgtggacggcgtggaggtgcataatgccaagacaaagccgcCgg |
| | | aggagcagtacaacagcacgCTccgtgtggtcagcgtcctcaccgtcctgcaccagga |
| | | ctggctgaatggcaaggagtacaagtgcaaggtctccaacaaagccctcccagccccc |
| | | atcgagaaaaccatctccaaagccaaagggcagccccgagaaccacaggtgtacaccc |
| | | tgcccccatcccgggaTgagCtgaccaagaaccaggtcagcctgacctgcctggtcaa |
| | | aggcttctatcccagcgacatcgccgtggagtgggagagcaatgggcagccggagaac |
| | | aactacaagaccacgcctcTcgtgctggactccgacggctccttcttcctctacagca |
| | | agctcaccgtggacaagagcaggtggcagcaggggaacgtcttctcatgctccgtgat |
| | | gcatgaggctctgcacaaccactacacgcagaagagcctctccctgtctccgggtaaa |
| 5278 | Constant | EPKSCDKTYTCPPCPAPELVGGPSVFLLPPKPKDTLMISRTPEVTCVVVDVSHEDPEV |
| | Region of | KFNWYVDGVEVHNAKTKPPEEQYNSTLRVVSVLTVLHQDWLNGKEYKCKVSNKALPAP |
| | Heavy Chain | IEKTISKAKGQPREPQVYTLPPSRDELTKNQVSLTCLVKGFYPSDIAVEWESNGQPEN |
| | | NYKTTPLVLDSDGSFFLYSKLTVDKSRWQQGNVESCSVMHEALHNHYTQKSLSLSPGK |
| 5279 | DNA Constant | gagcccaaatcttgtgacaaaactTACacatgcccaccgtgcccagcacctgaactcG |
| | Region of | tggggggaccgtcagtcttcctcCtccccccaaaacccaaggacaccctcatgatctc |
| | Heavy Chain | ccggacccctgaggtcacatgcgtggtggtggacgtgagccacgaagaccctgaggtc |
| | (hIgG1) | aagttcaactggtacgtggacggcgtggaggtgcataatgccaagacaaagccgcCgg |
| | | aggagcagtacaacagcacgCTccgtgtggtcagcgtcctcaccgtcctgcaccagga |
| | | ctggctgaatggcaaggagtacaagtgcaaggtctccaacaaagccctcccagccccc |
| | | atcgagaaaaccatctccaaagccaaagggcagccccgagaaccacaggtgtacaccc |
| | | tgcccccatcccgggaTgagCtgaccaagaaccaggtcagcctgacctgcctggtcaa |
| | | aggcttctatcccagcgacatcgccgtggagtgggagagcaatgggcagccggagaac |
| | | aactacaagaccacgcctcTcgtgctggactccgacggctccttcttcctctacagca |
| | | agctcaccgtggacaagagcaggtggcagcaggggaacgtcttctcatgctccgtgat |
| | | gcatgaggctctgcacaaccactacacgcagaagagcctctccctgtctccgggtaaa |
| 5280 | Constant | EPKSCDKTYTCPPCPAPELVGGPSVFLLPPKPKDTLMISRTPEVTCVVVDVSHEDPEV |
| | Region of | KFNWYVDGVEVHNAKTKPPEEQYNSTLRVVSVLTVLHQDWLNGKEYKCKVSNKALPAP |
| | Heavy Chain | IEKTISKAKGQPREPQVYTLPPSRDELTKNQVSLTCLVKGFYPSDIAVEWESNGQPEN |
| | | NYKTTPLVLDSDGSFFLYSKLTVDKSRWQQGNVFSCSVMHEALHNHYTQKSLSLSPGK |
| 5344 | DNA Constant | GCGTCGACCAAGGGGCCCTCGGTCTTCCCCCTGGCACCCTCCTCCAAGAGCACCTCTG |
| | Region of | GGGGCACAGCGGCCCTGGGCTGCCTGGTCAAGGACTACTTCCCCGAACCGGTGACGGT |
| | Heavy Chain | GTCGTGGAACTCAGGCGCCCTGACCAGCGGCGTGCACACCTTCCCGGCTGTCCTACAG |
| | | TCCTCAGGACTCTACTCCCTCAGCAGCGTGGTGACCGTGCCCTCCAGCAGCTTGGGCA |
| | | CCCAGACCTACATCTGCAACGTGAATCACAAGCCCAGCAACACCAAGGTGGACAAGAA |
| | | AGTTGAGCCCAAATCTTGTGACAAAACTCACACATGCCCACCGTGCCCAGCACCTGAA |
| | | CTCCTGGGGGGACCGTCAGTCTTCCTCTTCCCCCCAAAACCCAAGGACACCCTCATGA |
| | | TCTCCCGGACCCCTGAGGTCACATGCGTGGTGGTGGACGTGAGCCACGAAGACCCTGA |
| | | GGTCAAGTTCAACTGGTACGTGGACGGCGTGGAGGTGCATAATGCCAAGACAAAGCCG |
| | | CGGGAGGAGCAGTACAACAGCACGTACCGTGTGGTCAGCGTCCTCACCGTCCTGCACC |
| | | AGGACTGGCTGAATGGCAAGGAGTACAAGTGCAAGGTCTCCAACAAAGCCCTCCCAGC |
| | | CCCCATCGAGAAAACCATCTCCAAAGCCAAAGGGCAGCCCCGAGAACCACAGGTGTAC |
| | | ACCCTGCCCCCATCCCGGGATGAGCTGACCAAGAACCAGGTCAGCCTGACCTGCCTGG |
| | | TCAAAGGCTTCTATCCCAGCGACATCGCCGTGGAGTGGGAGAGCAATGGGCAGCCGGA |
| | | GAACAACTACAAGACCACGCCTCCCGTGCTGGACTCCGACGGCTCCTTCTTCCTCTAC |
| | | AGCAAGCTCACCGTGGACAAGAGCAGGTGGCAGCAGGGGAACGTCTTCTCATGCTCCG |
| | | TGATGCATGAGGCTCTGCACAACCACTACACGCAGAAGAGCCTCTCCCTGTCTCCCGG |
| | | CAAG |
| 5345 | Constant | ASTKGPSVFPLAPSSKSTSGGTAALGCLVKDYFPEPVTVSWNSGALTSGVHTFPAVLQ |
| | Region of | SSGLYSLSSVVTVPSSSLGTQTYICNVNHKPSNTKVDKKVEPKSCDKTHTCPPCPAPE |
| | Heavy Chain | LLGGPSVFLFPPKPKDTLMISRTPEVTCVVVDVSHEDPEVKFNWYVDGVEVHNAKTKP |
| | | REEQYNSTYRVVSVLTVLHQDWLNGKEYKCKVSNKALPAPIEKTISKAKGQPREPQVY |
| | | TLPPSRDELTKNQVSLTCLVKGFYPSDIAVEWESNGQPENNYKTTPPVLDSDGSFFLY |
| | | SKLTVDKSRWQQGNVFSCSVMHEALHNHYTQKSLSLSPGK |
| 5346 | DNA Constant | CGTACGGTGGCTGCACCATCTGTCTTCATCTTCCCGCCATCTGATGAGCAGTTGAAAT |
| | Region of Light | CTGGAACTGCCTCTGTTGTGTGCCTGCTGAATAACTTCTACCCCAGAGAAGCCAAAGT |
| | Chain | GCAGTGGAAGGTGGACAACGCCCTGCAGAGCGGAAACAGCCAGGAAAGCGTGACAGAG |
| | | CAGGATTCCAAGGATTCCACATACAGCCTGAGCAGCACACTGACACTGTCCAAGGCCG |
| | | ACTACGAGAAGCACAAGGTGTACGCCTGCGAAGTGACACACCAGGGACTGTCCTCCCC |
| | | TGTGACAAAGAGCTTCAACAGAGGAGAATGC |

### Payload Component: SH3 Derived Binding Polypeptide

[1173] In some embodiments, the nucleic acid encoding the payload, e.g., antibody molecule, comprises a nucleotide sequence encoding a Fyn SH3-derived binding polypeptide (e.g., a Fynomer sequence or Fynomer sequence region herein). Fynomers are small 7-kDa globular proteins derived from the SH3 domain of the human Fyn kinase (Fyn SH3) that can be engineered to bind with antibody-like affinity and specificity to a target of choice through mutation of two loops (RT- and src-loop) on the surface of the Fyn SH3 domain (Brack et al. (2014), Mol Cancer Ther 13(8):2030-2039). Fynomers may be used to generate multispecific FynomAbs, which are obtained by fusion of Fynomers to any of the four antibody light- or heavy-chain termini. Id.

[1174] In some embodiments, the nucleic acid encoding the payload, e.g., antibody molecule, comprises a C12 Fynomer region. The HER2-specific Fynomer C12 is a 63-amino acid polypeptide that targets an epitope in domain I of HER2. In some embodiments, the Fynomer sequence encodes the fusion of Fynomer C12 to an antibody C- or N-termini heavy or light chain. In one embodiment the nucleotide sequence encodes the fusion of Fynomer C12 to the N-terminus of the light chain of an antibody. In another embodiment, the nucleotide sequence encodes the fusion of C12 to the N-terminus of the light chain of an antibody. The anti-proliferative activity of anti-HER2 Fynomer-antibody fusions varies depending on the relative orientation of the Fynomer and the binding site of the antibody.

[1175] In some embodiments, the encoded C12 Fynomer comprises the amino acid sequence of SEQ ID NO: 5156, or an amino acid sequence with at least 70%, 75%, 80%, 85%, 90%, 95%, or 99% sequence identity thereto. In some embodiments, the nucleotide sequence encoding the C12 Fynomer comprises the nucleotide sequence of SEQ ID NO: 5155, or a nucleotide sequence with at least 70%, 75%, 80%, 85%, 90%, 95%, or 99% sequence identity thereto. In some embodiments, the Fynomer region comprises about 100-200 nucleotides in length, e.g., about 110-200 nucleotides, about 120-200 nucleotides, about 130-200 nucleotides, about 140-200 nucleotides, about 150-200 nucleotides, about 160-200 nucleotides, about 170-200 nucleotides, about 170-200 nucleotides, about 180-200 nucleotides, about 185-200 nucleotides, about 180-190 nucleotides, or about 185-190 nucleotides. In some embodiments, the Fynomer region comprises about 180 nucleotides to about 200 nucleotides in length, e.g., about 189 nucleotides.

### Payload Component: Linkers

[1176] In some embodiments, the nucleic acid encoding the payload, e.g., antibody molecule, comprises a nucleotide sequence encoding a linker. In some embodiments, the nucleic acid encoding the payload encodes two or more linkers. In some embodiments, the encoded linker comprises a linker provided in Table 13. In some embodiments, the encoded linker comprises an amino acid sequence encoded by any one of the nucleotide sequences provided in Table 13, or an amino acid sequence with at least 70%, 75%, 80%, 85%, 90%, 95%, or 99% sequence identity thereto. In some embodiments, the nucleotide sequence encoding the linker comprises any one of the nucleotide sequences provided in Table 13, or a nucleotide sequence with at least 70%, 75%, 80%, 85%, 90%, 95%, or 99% sequence identity thereto.

TABLE 13
Linkers

| Linker | | | SEQ |
|---|---|---|---|
| ID | Description | Length | ID NO |
| Linker1 | Furin | 12 | 1724 |
| Linker2 | Furin | 12 | 1725 |
| Linker3 | T2A | 54 | 1726 |
| Linker4 | F2A | 75 | 1727 |
| Linker5 | P2A | 66 | 1728 |
| Linker6 | SG4S (SEQ ID NO: 4536) | 18 | 1729 |
| Linker7 | (G4S)3 (SEQ ID NO: 4537) | 45 | 1730 |
| Linker8 | (G4S)5 (SEQ ID NO: 4538) | 75 | 1731 |
| Linker9 | IRES | 609 | 1732 |
| Linker10 | IRES-2 | 623 | 1733 |
| Linker11 | hIgG2 hinge | 54 | 1734 |
| Linker12 | hIgG3 hinge | 108 | 1735 |
| Linker13 | hIgG3-2 hinge | 153 | 1736 |
| Linker14 | hIgG3-3 hinge | 198 | 1737 |
| Linker15 | msiGG-1 hinge | 45 | 1738 |
| Linker16 | msiGG1 hinge | 18 | 1739 |
| Linker17 | HigG3 hinge | 198 | 2244 |
| Linker18 | G4S (SEQ ID NO: 4535) | 15 | 2245 |
| Linker19 | (G4S)2 (SEQ ID NO: 4539) | 30 | 2246 |
| Linker20 | (G4S)3 (SEQ ID NO: 4537) | 45 | 2247 |
| Linker21 | (G4S)4 (SEQ ID NO: 4540) | 60 | 2248 |
| Linker22 | (G4S)5 (SEQ ID NO: 4538) | 75 | 2249 |
| Linker23 | (G4S)5 (SEQ ID NO: 4538) | 75 | 2250 |
| Linker24 | (G4S)6 (SEQ ID NO: 4541) | 90 | 2251 |
| Linker25 | (G4S)8 (SEQ ID NO: 4542) | 120 | 2252 |
| Linker26 | (G4S)8 (SEQ ID NO: 4542) | 120 | 2253 |
| Linker27 | (G4S)4 (SEQ ID NO: 4540) | 60 | 2254 |
| Linker28 | (G4S)6 (SEQ ID NO: 4541) | 90 | 2259 |
| Linker 29 | G4S | 15 | 5161 |
| Linker 30 | G4S | 15 | 5162 |
| Linker 31 | GS | 6 | 5243 |
| Linker 32 | (G4S)3 | 45 | 5347 |

[1177] In some embodiments, exemplary linker sequences of any of the constructs described herein include:

Linker 29:
(SEQ ID NO: 5161)
ggaggaggaggaAGT;
Linker 30:
(SEQ ID NO: 5162)
ggaggtggaggtTCT;
Linker 31:
(SEQ ID NO: 5243)
GGCTCT;
Linker 32 (DNA):
(SEQ ID NO: 5347)
ggtggtggtggatccggaggaggaggaAGTggaggtggaggtTCT;
Linker 32 (amino acid):
(SEQ ID NO: 5348)
GGGGSGGGGSGGGGS.

[1178] In some embodiments, any of the antibody molecules described herein can have a linker, e.g. a flexible polypeptide linker, of varying lengths, connecting the variable domains (e.g., the VH and the VL) of the antigen binding domain of the antibody molecule. For example, a (Gly4-Ser)n linker, wherein n is 0, 1, 2, 3, 4, 5, 6, 7, or 8 can be used (e.g., any one of SEQ ID NOs: 1730-1731, 2245-2254, 2259, 5161-5162, 5347, or 5348). In some embodiments, the antibody molecule binds to HER2.

[1179] In some embodiments, the encoded linker comprises an enzymatic cleavage site, e.g., for intracellular and/or extracellular cleavage. In some embodiments, the linker is cleaved to separate the VH and the VL of the antigen binding domain and/or the heavy chain and light chain of the antibody molecule (e.g., an anti-HER2 antibody molecule). In some embodiments, the encoded linker comprises a furin linker or a functional variant. In some embodiments, the nucleotide sequence encoding the furin linker comprises the nucleotide sequence of SEQ ID NO: 1724, or a nucleotide sequence with at least 70%, 75%, 80%, 85%, 90%, 95%, or 99% sequence identity thereto. In some embodiments, furin cleaves proteins downstream of a basic amino acid target sequence (e.g., Arg-X-(Arg/Lys)-Arg) (e.g., as described in Thomas, G., 2002. Nature Reviews Molecular Cell Biology 3(10): 753-66; the contents of which are herein incorporated by reference in its entirety). In some embodiments, the encoded linker comprises a 2A self-cleaving peptide (e.g., a 2A peptide derived from foot-and-mouth disease virus (F2A), porcine teschovirus-1 (P2A), Thoseaasigna virus (T2A), or equine rhinitis A virus (E2A)). In some embodiments, the encoded linker comprises a T2A self-cleaving peptide linker. In some embodiments, the nucleotide sequence encoding the T2A linker comprises the nucleotide sequence of SEQ ID NO: 1726, or a nucleotide sequence with at least 70%, 75%, 80%, 85%, 90%, 95%, or 99% sequence identity thereto. In some embodiments, the nucleic acid encoding the payload encodes a furin linker and a T2A linker.

[1180] In some embodiments, the encoded linkers comprises a cathepsin, a matrix metalloproteinases or a legumain cleavage sites, such as those described e.g. by Cizeau and Macdonald in International Publication No. WO2008052322, the contents of which are herein incorporated in their entirety.

[1181] In some embodiments, the encoded linker comprises an internal ribosomal entry site (IRES) is a nucleotide sequence (>500 nucleotides) for initiation of translation in the middle of a nucleotide sequence, e.g., an mRNA sequence (Kim, J. H. et al., 2011. PLoS One 6(4): e18556; the contents of which are herein incorporated by reference in its entirety), which can be used, for example, to modulate expression of one or more transgenes. In some embodiments, the encode linker comprises a small and unbranched serine-rich peptide linker, such as those described by Huston et al. in U.S. Pat. No. 5,525,491, the contents of which are herein incorporated in their entirety. In some embodiments, polypeptides comprising a serine-rich linker has increased solubility. In some embodiments, the encoded linker comprises an artificial linker, such as those described by Whitlow and Filpula in U.S. Pat. No. 5,856,456 and Ladner et al. in U.S. Pat. No. 4,946,778, the contents of each of which are herein incorporated by their entirety.

[1182] In some embodiments, the nucleotide sequence encoding the linker comprises about 10 to about 700 nucleotides in length, e.g., about 10 to about 700 nucleotides, e.g. about 10 to about 100, e.g., about 50-200 nucleotides, about 150-300 nucleotides, about 250-400 nucleotides, about 350-500 nucleotides, about 450-600 nucleotides, about 550-700 nucleotides, about 650-700 nucleotides. In some embodiments, the nucleotide sequence encoding the linker comprises about 5 to about 20 nucleotides in length, e.g., about 12 nucleotides in length. In some embodiments, the nucleotide sequence encoding the linker comprises about 40 to about 60 nucleotides in length, e.g., about 54 nucleotides in length.

### Payload Component: Signal Sequences

[1183] In some embodiments, the nucleotide sequence comprising the transgene encoding the payload, e.g., an antibody molecule, comprises a nucleotide sequence encoding a signal sequence (e.g., a signal sequence region herein). In some embodiments, the nucleotide sequence comprising the transgene encoding the payload comprises two signal sequence regions. In some embodiments, the nucleotide sequence comprising the transgene encoding the payload comprises three or more signal sequence regions.

[1184] In some embodiments, the nucleotide sequence encoding the signal sequence is located 5′ relative to the nucleotide sequence encoding the VH and/or the heavy chain. In some embodiments, the nucleotide sequence encoding the signal sequence is located 5′ relative to the nucleotide sequence encoding the VL and/or the light chain. In some embodiments, the encoded VH, VL, heavy chain, and/or light chain of the encoded antibody molecule comprises a signal sequence at the N-terminus, wherein the signal sequence is optionally cleaved during cellular processing and/or localization of the antibody molecule.

[1185] In some embodiments, the signal sequence comprises any one of the signal sequences provided in Table 14 or a functional variant thereof. In some embodiments, the encoded signal sequence comprises an amino acid sequence encoded by any one of the nucleotide sequences provided in Table 14, or an amino acid sequence with at least 70%, 75%, 80%, 85%, 90%, 95%, or 99% sequence identity thereto. In some embodiments, the nucleotide sequence encoding the signal sequence comprises any one of the nucleotide sequences provided in Table 14, or a nucleotide sequence with at least 70%, 75%, 80%, 85%, 90%, 95%, or 99% sequence identity thereto.

TABLE 14
Signal Sequence Regions

| Sequence Region | Sequence | | |
|---|---|---|---|
| Name | Length | SEQ ID NO | Sequence |
| Signal 17 | 57 NTs | 5157 | ATGGACTGGACCTGGAGGTTCCTCTTTGTGGTGGCA |
| | | | GCAGCTACAGGTGTCCAGTCC |
| Signal 17a | 57 NTs | 5032 | ATGGACTGGACCTGGAGGTTCCTCTTTGTGGTGGCA |
| | | | GCAGCTACAGGTGTCCAGTCT |
| Signal 17 (amino | 19 amino | 5158 | MDWTWRFLFVVAAATGVQS |
| acid) | acids | | |
| Signal 18 | 66 NTs | 5159 | ATGGACATGAGGGTCCCTGCTCAGCTCCTGGGGCTC |
| | | | CTGCTGCTCTGGCTCTCAGGTGCCAGATGT |
| Signal 18 (amino | 22 amino | 5160 | MDMRVPAQLLGLLLLWLSGARC |
| acid) | acids | | |

[1186] In some embodiments, the nucleotide sequence encoding the signal sequence comprises the nucleotide sequence of SEQ ID NO: 5157, or nucleotide sequence with at least 70%, 75%, 80%, 85%, 90%, 95%, or 99% sequence identity thereto. In some embodiments, the nucleotide sequence encoding the signal sequence comprises the nucleotide sequence of SEQ ID NO: 2032, or nucleotide sequence with at least 70%, 75%, 80%, 85%, 90%, 95%, or 99% sequence identity thereto. In some embodiments, the nucleotide sequence encoding the signal sequence comprises the nucleotide sequence of SEQ ID NO: 5159, or nucleotide sequence with at least 70%, 75%, 80%, 85%, 90%, 95%, or 99% sequence identity thereto. In some embodiments, the nucleotide sequence encoding the signal sequence comprises the nucleotide sequence of SEQ ID NO: 5157 and is located 5′ relative to the nucleotide sequence encoding the VH and/or the heavy chain of the antibody molecule. In some embodiments, the nucleotide sequence encoding the signal sequence comprises the nucleotide sequence of SEQ ID NO: 5159 and is located 5′ relative to the nucleotide sequence encoding the VL and/or the light chain of the antibody molecule.

[1187] In some embodiments, the encoded signal sequence comprises the amino acid sequence of SEQ ID NO: 5158, or amino acid sequence with at least 70%, 75%, 80%, 85%, 90%, 95%, or 99% sequence identity thereto. In some embodiments, the encoded signal sequence comprises the amino acid sequence of SEQ ID NO: 5160, or amino acid sequence with at least 70%, 75%, 80%, 85%, 90%, 95%, or 99% sequence identity thereto. In some embodiments, the encoded sequence comprises the amino acid sequence of SEQ ID NO: 5158 and is located at the N-terminus of the amino acid sequence of the encoded VH and/or heavy chain of the antibody molecule. In some embodiments, the encoded sequence comprises the amino acid sequence of SEQ ID NO: 5160 and is located at the N-terminus of the amino acid sequence of the encoded VL and/or light chain of the antibody molecule.

### AAV Particles Comprising a Genetic Element Encoding an Anti-HER2 Antibody Molecule

[1188] In some embodiments, the AAV particle comprises a genetic element comprising a nucleotide sequence comprising a transgene encoding a payload comprising an anti-HER2 antibody molecule. In some embodiments, the genetic element is replicated and packaged into an AAV particle. A cell, e.g., a target cell, transduced with an AAV particle comprising an anti-HER2 antibody molecule may express the encoded antibody molecule in the cell or secrete the encoded antibody molecule.

[1189] In some embodiments, the genetic element of an AAV particle described herein comprises a nucleotide sequence, e.g., a nucleotide sequence from the 5′ ITR to the 3′ ITR, comprising any of the nucleotide sequences of HER-04, HER-05, HER-10, HER-15, HER-42, HER-43, HER-46, HER-47, HER-53, HER-57, HER-62, HER-69, HER-73, HER-75, HER-77, HER-78, HER-82, HER-88, HER-89, HER-90, HER-91, HER-92, HER-97, HER-98, HER-99, HER-100, or HER-101, e.g., as described in Table 15, or a sequence substantially identical (e.g., having at least about 70%, 75%, 80%, 85%, 90%, 92%, 95%, 97%, 98%, or 99% sequence identity) to any of the aforesaid sequences. In some embodiments, the genetic element of an AAV particle described herein comprises a nucleotide sequence, e.g., a nucleotide sequence from the 5′ ITR to the 3′ ITR, comprising any of the nucleotide sequences in Table 15, or a sequence substantially identical (e.g., having at least about 70%, 75%, 80%, 85%, 90%, 92%, 95%, 97%, 98%, or 99% sequence identity) to any of the aforesaid sequences. In some embodiments, the genetic element of an AAV particle described herein comprises a nucleotide sequence, e.g., a nucleotide sequence from the 5′ ITR to the 3′ ITR, comprising any of the nucleotide sequences of SEQ ID NO: 5163, 5170, 5164, 5165, 5166, 5185, 5186, 5167, 5168, 5187, 5188, 5619, 5189, 5190, 5343, 5374, 5375, 6500, 6501, 6502, 6503, 6504, 6505, 6506, 6507, 6508, or 6509, or a sequence substantially identical (e.g., having at least about 70%, 75%, 80%, 85%, 90%, 92%, 95%, 97%, 98%, or 99% sequence identity) to any of the aforesaid sequences.

[1190] The present disclosure also provides in some embodiments, an antibody molecule that binds to HER2 encoded by any one of SEQ ID NOs: 5163, 5170, 5164, 5165, 5166, 5185, 5186, 5167, 5168, 5187, 5188, 5619, 5189, 5190, 5343, 5374, 5375, 6500, 6501, 6502, 6503, 6504, 6505, 6506, 6507, 6508, or 6509, or a sequence substantially identical (e.g., having at least about 70%, 75%, 80%, 85%, 90%, 92%, 95%, 97%, 98%, or 99% sequence identity) to any of the aforesaid sequences.

[1191] In some embodiments, the genetic element, e.g., any of the genetic elements described in Tables 15-27 may further comprise a Kozak sequence, a stuffer sequence, and/or a filler sequence.

[1192] In some embodiments, the genetic element comprises, in the 5′ to 3′ order, a 5′ ITR, a promoter region, an optional intronic region and/or exon region, a signal sequence, an antibody heavy chain region, a linker region, a signal sequence, an antibody light chain region, a polyadenylation sequence, an optional filler sequence, and a 3′ ITR. In some embodiments, the genetic element comprises, in the 5′ to 3′ order, a 5′ ITR, a promoter region, an optional intronic region and/or exon region, a signal sequence, an antibody light chain region, a linker region, a signal sequence, an antibody heavy chain region, a polyadenylation sequence, an optional filler sequence, and a 3′ ITR.

TABLE 15
ITR to ITR Sequences of AAV particles comprising anti-HER2 antibody polynucleotide
sequences

| ITR to | | ITR to | |
|---|---|---|---|
| ITR | | ITR | |
| Construct | Length | SEQ | |
| Name | (nt) | ID NO | Sequence |
| HER-04 | 3992 | 5163 | ctgcgcgctcgctcgctcactgaggccgcccgggcaaagcccgggcgtcgggcgacctt |
| | | | tggtcgcccggcctcagtgagcgagcgagcgcgcagagagggagtggccaactccatca |
| | | | ctaggggttccttgtagttaatgattaacccgccatgctacttatctaccagggtaatg |
| | | | gggatcctctagaactatagctagtcgacattgattattgactagttattaatagtaat |
| | | | caattacggggtcattagttcatagcccatatatggagttccgcgttacataacttacg |
| | | | gtaaatggcccgcctggctgaccgcccaacgacccccgcccattgacgtcaataatgac |
| | | | gtatgttcccatagtaacgccaatagggactttccattgacgtcaatgggtggagtatt |
| | | | tacggtaaactgcccacttggcagtacatcaagtgtatcatatgccaagtacgccccct |
| | | | attgacgtcaatgacggtaaatggcccgcctggcattatgcccagtacatgaccttatg |
| | | | ggactttcctacttggcagtacatctacgtattagtcatcgctattaccatgtcgaggc |
| | | | cacgttctgcttcactctccccatctcccccccctccccacccccaattttgtatttat |
| | | | ttattttttaattattttgtgcagcgatgggggcggggggggggggcgcgcgccaggcg |
| | | | gggcggggcggggcgagggcggggcgggggcgaggcggagaggtgcggcggcagccaat |
| | | | cagagcggcgcgctccgaaagtttccttttatggcgaggcggcggcggcggcggcccta |
| | | | taaaaagcgaagcgcgcggcgggcgggagcaagcttcgtttagtgaaccgtcagatcgc |
| | | | ctggagacgccatccacgctgttttgacctccatagaagacaccgggaccgatccagcc |
| | | | tccgcggattcgaatcccggccgggaacggtgcattggaacgcggattccccgtgccaa |
| | | | gagtgacgtaagtaccgcctatagagtctataggcccacaaaaaatgctttcttctttt |
| | | | aatatacttttttgtttatcttatttctaatactttccctaatctctttctttcagggc |
| | | | aataatgatacaatgtatcatgcctctttgcaccattctaaagaataacagtgataatt |
| | | | tctgggttaaggcaatagcaatatttctgcatataaatatttctgcatataaattgtaa |
| | | | ctgatgtaagaggtttcatattgctaatagcagctacaatccagctaccattctgcttt |
| | | | tattttatggttgggataaggctggattattctgagtccaagctaggcccttttgctaa |
| | | | tcatgttcatacctcttatcttcctcccacagctcctgggcaacgtgctggtctgtgtg |
| | | | ctggcccatcactttggcaaagaattgggattcgaaccggtgccgccaccATGGACTGG |
| | | | ACCTGGAGGTTCCTCTTTGTGGTGGCAGCAGCTACAGGTGTCCAGTCCgaggttcagct |
| | | | ggtggagtctggcggtggcctggtgcagccagggggctcactccgtttgtcctgtgcag |
| | | | cttctggcttcaacattaaagacacctatatacactgggtgcgtcaggccccgggtaag |
| | | | ggcctggaatgggttgcaaggatttatcctacgaatggttatactagatatgccgatag |
| | | | cgtcaagggccgtttcactataagcgcagacacatccaaaaacacagcctacctgcaga |
| | | | tgaacagcctgcgtgctgaggacactgccgtctattattgttctagatggggaggggac |
| | | | ggcttctatgctatggacTACtggggtcaaggaaccctggtcaccgtctcctcggcgtc |
| | | | gaccaagggcccatcggtcttccccctggcaccctcctccaagagcacctctgggggca |
| | | | cagcggccctgggctgcctggtcaaggactacttccccgaacctgtgacggtctcgtgg |
| | | | aactcaggcgccctgaccagcggcgtgcacaccttcccggctgtcctacagtcctcagg |
| | | | actctactccctcagcagcgtggtgaccgtgccctccagcagcttgggcacccagacct |
| | | | acatctgcaacgtgaatcacaagcccagcaacaccaaggtggacaagaaagttgagccc |
| | | | CCCaaatcttgtgacaaaactcacacatgcccaccgtgcccagcacctgaactcctggg |
| | | | gggaccgtcagtcttcctcttccccccaaaacccaaggacaccctcatgatctcccgga |
| | | | cccctgaggtcacatgcgtggtggtggacgtgagccacgaagaccctgaggtcaagttc |
| | | | aactggtacgtggacggcgtggaggtgcataatgccaagacaaagccgcgggaggagca |
| | | | gtacaacagcacgtaccgtgtggtcagcgtcctcaccgtcctgcaccaggactggctga |
| | | | atggcaaggagtacaagtgcaaggtctccaacaaagccctcccagcccccatcgagaaa |
| | | | accatctccaaagccaaagggcagccccgagaaccacaggtgtacaccctgcccccatc |
| | | | ccgggatgagctgaccaagaaccaggtcagcctgacctgcctggtcaaaggcttctatc |
| | | | ccagcgacatcgccgtggagtgggagagcaatgggcagccggagaacaactacaagacc |
| | | | acgcctcccgtgctggactccgacggctccttcttcctctacagcaagctcaccgtgga |
| | | | caagagcaggtggcagcaggggaacgtcttctcatgctccgtgatgcatgaggctctgc |
| | | | acaaccactacacgcagaagagcctctccctgtctccgggtaaaagaaagaggcgagag |
| | | | ggcagaggaagtcttctaacatgcggtgacgtggaggagaatcccggccctATGGACAT |
| | | | GAGGGTCCCTGCTCAGCTCCTGGGGCTCCTGCTGCTCTGGCTCTCAGGTGCCAGATGTg |
| | | | atatccagatgacccagtccccgagctccctgtccgcctctgtgggcgatagggtcacc |
| | | | atcacctgccgtgccagtcaggatgtgaatactgctgtagcctggtatcaacagaaacc |
| | | | aggaaaagctccgaaactactgatttactcggcatccttcctcTACtctggagtccctt |
| | | | ctcgcttctctggatccagatctgggacggatttcactctgaccatcagcagtctgcag |
| | | | ccggaagacttcgcaacttattactgtcagcaacattatactactcctcccacgttcgg |
| | | | acagggtaccaaggtggagatcaaacgaactgtggctgcaccatctgtcttcatcttcc |
| | | | cgccatctgatgagcagttgaaatctggaactgcctctgttgtgtgcctgctgaataac |
| | | | ttctatcccagagaggccaaagtacagtggaaggtggataacgccctccaatcgggtaa |
| | | | ctcccaggagagtgtcacagagcaggacagcaaggacagcacctacagcctcagcagca |
| | | | ccctgacgctgagcaaagcagactacgagaaacacaaagtctacgcctgcgaagtcacc |
| | | | catcagggcctgagctcgcccgtcacaaagagcttcaacaggggagagtgttagtagta |
| | | | actcgaggacggggtgaactacgcctgaggatccgatctttttccctctgccaaaaatt |
| | | | atggggacatcatgaagccccttgagcatctgacttctggctaataaaggaaatttatt |
| | | | ttcattgcaatagtgtgttggaattttttgtgtctctcactcggcctaggtagataagt |
| | | | agcatggcgggttaatcattaactacaaggaacccctagtgatggagttggccactccc |
| | | | tctctgcgcgctcgctcgctcactgaggccgggcgaccaaaggtcgcccgacgcccggg |
| | | | ctttgcccgggcggcctcagtgagcgagcgagcgcgcag |
| HER-05 | 3986 | 5170 | ctgcgcgctcgctcgctcactgaggccgcccgggcaaagcccgggcgtcgggcgacctt |
| | | | tggtcgcccggcctcagtgagcgagcgagcgcgcagagagggagtggccaactccatca |
| | | | ctaggggttccttgtagttaatgattaacccgccatgctacttatctaccagggtaatg |
| | | | gggatcctctagaactatagctagtcgacattgattattgactagttattaatagtaat |
| | | | caattacggggtcattagttcatagcccatatatggagttccgcgttacataacttacg |
| | | | gtaaatggcccgcctggctgaccgcccaacgacccccgcccattgacgtcaataatgac |
| | | | gtatgttcccatagtaacgccaatagggactttccattgacgtcaatgggtggagtatt |
| | | | tacggtaaactgcccacttggcagtacatcaagtgtatcatatgccaagtacgccccct |
| | | | attgacgtcaatgacggtaaatggcccgcctggcattatgcccagtacatgaccttatg |
| | | | ggactttcctacttggcagtacatctacgtattagtcatcgctattaccatgtcgaggc |
| | | | cacgttctgcttcactctccccatctcccccccctccccacccccaattttgtatttat |
| | | | ttattttttaattattttgtgcagcgatgggggcggggggggggggcgcgcgccaggcg |
| | | | gggcggggcggggcgaggggcggggcggggcgaggcggagaggtgcggcggcagccaat |
| | | | cagagcggcgcgctccgaaagtttccttttatggcgaggcggcggcggcggcggcccta |
| | | | taaaaagcgaagcgcgcggcgggcgggagcaagcttcgtttagtgaaccgtcagatcgc |
| | | | ctggagacgccatccacgctgttttgacctccatagaagacaccgggaccgatccagcc |
| | | | tccgcggattcgaatcccggccgggaacggtgcattggaacgcggattccccgtgccaa |
| | | | gagtgacgtaagtaccgcctatagagtctataggcccacaaaaaatgctttcttctttt |
| | | | aatatacttttttgtttatcttatttctaatactttccctaatctctttctttcagggc |
| | | | aataatgatacaatgtatcatgcctctttgcaccattctaaagaataacagtgataatt |
| | | | tctgggttaaggcaatagcaatatttctgcatataaatatttctgcatataaattgtaa |
| | | | ctgatgtaagaggtttcatattgctaatagcagctacaatccagctaccattctgcttt |
| | | | tattttatggttgggataaggctggattattctgagtccaagctaggcccttttgctaa |
| | | | tcatgttcatacctcttatcttcctcccacagctcctgggcaacgtgctggtctgtgtg |
| | | | ctggcccatcactttggcaaagaattgggattcgaaccggtgccgccaccATGGACTGG |
| | | | ACCTGGAGGTTCCTCTTTGTGGTGGCAGCAGCTACAGGTGTCCAGTCCgaggttcagct |
| | | | ggtggagtctggcggtggcctggtgcagccagggggctcactccgtttgtcctgtgcag |
| | | | cttctggcttcaCcTTCaCCgacTATACCATGGATtgggtgcgtcaggccccgggtaag |
| | | | ggcctggaatgggttgcaGACGTGAATcctAATTCTggtGGTTCTATAtatAATCAGCG |
| | | | TTTCaagggccgtttcactCTGagcGTTgacCGTtccaaaaacacaCTGtacctgcaga |
| | | | tgaacagcctgcgtgctgaggacactgccgtctattattgtGCAagaAATCTGgggCCT |
| | | | AGCttctatTTCgacTACtggggtcaaggaaccctggtcaccgtctcctcggcgtcgac |
| | | | caagggcccatcggtcttccccctggcaccctcctccaagagcacctctgggggcacag |
| | | | cggccctgggctgcctggtcaaggactacttccccgaacctgtgacggtctcgtggaac |
| | | | tcaggcgccctgaccagcggcgtgcacaccttcccggctgtcctacagtcctcaggact |
| | | | ctactccctcagcagcgtggtgaccgtgccctccagcagcttgggcacccagacctaca |
| | | | tctgcaacgtgaatcacaagcccagcaacaccaaggtggacaagaaagttgagcccaaa |
| | | | tcttgtgacaaaactcacacatgcccaccgtgcccagcacctgaactcctggggggacc |
| | | | gtcagtcttcctcttccccccaaaacccaaggacaccctcatgatctcccggacccctg |
| | | | aggtcacatgcgtggtggtggacgtgagccacgaagaccctgaggtcaagttcaactgg |
| | | | tacgtggacggcgtggaggtgcataatgccaagacaaagccgcgggaggagcagtacaa |
| | | | cagcacgtaccgtgtggtcagcgtcctcaccgtcctgcaccaggactggctgaatggca |
| | | | aggagtacaagtgcaaggtctccaacaaagccctcccagcccccatcgagaaaaccatc |
| | | | tccaaagccaaagggcagccccgagaaccacaggtgtacaccctgcccccatcccggga |
| | | | GgagAtgaccaagaaccaggtcagcctgacctgcctggtcaaaggcttctatcccagcg |
| | | | acatcgccgtggagtgggagagcaatgggcagccggagaacaactacaagaccacgcct |
| | | | cccgtgctggactccgacggctccttcttcctctacagcaagctcaccgtggacaagag |
| | | | caggtggcagcaggggaacgtcttctcatgctccgtgatgcatgaggctctgcacaacc |
| | | | actacacgcagaagagcctctccctgtctccgggtaaaagaaagaggcgagagggcaga |
| | | | ggaagtcttctaacatgcggtgacgtggaggagaatcccggccctATGGACATGAGGGT |
| | | | CCCTGCTCAGCTCCTGGGGCTCCTGCTGCTCTGGCTCTCAGGTGCCAGATGTgatatcc |
| | | | agatgacccagtccccgagctccctgtccgcctctgtgggcgatagggtcaccatcacc |
| | | | tgcAAAgccagtcaggatgtgTCCATTGGGgtagcctggtatcaacagaaaccaggaaa |
| | | | agctccgaaactactgatttactcggcatccTATCGCTACACGggagtcccttctcgct |
| | | | tctctggatccGGTtctgggacggatttcactctgaccatcagcagtctgcagccggaa |
| | | | gacttcgcaacttattactgtcagcaaTACtatATCTATcctTACacgttcggacaggg |
| | | | taccaaggtggagatcaaacgaactgtggctgcaccatctgtcttcatcttcccgccat |
| | | | ctgatgagcagttgaaatctggaactgcctctgttgtgtgcctgctgaataacttctat |
| | | | cccagagaggccaaagtacagtggaaggtggataacgccctccaatcgggtaactccca |
| | | | ggagagtgtcacagagcaggacagcaaggacagcacctacagcctcagcagcaccctga |
| | | | cgctgagcaaagcagactacgagaaacacaaagtctacgcctgcgaagtcacccatcag |
| | | | ggcctgagctcgcccgtcacaaagagcttcaacaggggagagtgttagtagtaactcga |
| | | | ggacggggtgaactacgcctgaggatccgatctttttccctctgccaaaaattatgggg |
| | | | acatcatgaagccccttgagcatctgacttctggctaataaaggaaatttattttcatt |
| | | | gcaatagtgtgttggaattttttgtgtctctcactcggcctaggtagataagtagcatg |
| | | | gcgggttaatcattaactacaaggaacccctagtgatggagttggccactccctctctg |
| | | | cgcgctcgctcgctcactgaggccgggcgaccaaaggtcgcccgacgcccgggctttgc |
| | | | ccgggcggcctcagtgagcgagcgagcgcgcag |
| HER-10 | 3989 | 5164 | ctgcgcgctcgctcgctcactgaggccgcccgggcaaagcccgggcgtcgggcgacctt |
| | | | tggtcgcccggcctcagtgagcgagcgagcgcgcagagagggagtggccaactccatca |
| | | | ctaggggttccttgtagttaatgattaacccgccatgctacttatctaccagggtaatg |
| | | | gggatcctctagaactatagctagtcGACATTGATTATTGACTAGTTATTAATAGTAAT |
| | | | CAATTACGGGGTCATTAGTTCATAGCCCATATATGGAGTTCCGCGTTACATAACTTACG |
| | | | GTAAATGGCCCGCCTGGCTGACCGCCCAACGACCCCCGCCCATTGACGTCAATAATGAC |
| | | | GTATGTTCCCATAGTAACGCCAATAGGGACTTTCCATTGACGTCAATGGGTGGAGTATT |
| | | | TACGGTAAACTGCCCACTTGGCAGTACATCAAGTGTATCATATGCCAAGTACGCCCCCT |
| | | | ATTGACGTCAATGACGGTAAATGGCCCGCCTGGCATTATGCCCAGTACATGACCTTATG |
| | | | GGACTTTCCTACTTGGCAGTACATCTACGTATTAGTCATCGCTATTACCATGtcgaggc |
| | | | cacgttctgcttcactctccccatctcccccccctccccacccccaattttgtatttat |
| | | | ttattttttaattattttgtgcagcgatgggggcggggggggggggcgcgcgccaggcg |
| | | | gggcggggcggggcgaggggcggggcggggcgaggcggagaggtgcggcggcagccaat |
| | | | cagagcggcgcgctccgaaagtttccttttatggcgaggcggcggcggcggcggcccta |
| | | | taaaaagcgaagcgcgcggcgggcgggagcaagcttcgtttagtgaaccgtcagatcgc |
| | | | ctggagacgccatccacgctgttttgacctccatagaagacaccgggaccgatccagcc |
| | | | tccgcggattcgaatcccggccgggaacggtgcattggaacgcggattccccgtgccaa |
| | | | gagtgacgtaagtaccgcctatagagtctataggcccacaaaaaatgctttcttctttt |
| | | | aatatacttttttgtttatcttatttctaatactttccctaatctctttctttcagggc |
| | | | aataatgatacaatgtatcatgcctctttgcaccattctaaagaataacagtgataatt |
| | | | tctgggttaaggcaatagcaatatttctgcatataaatatttctgcatataaattgtaa |
| | | | ctgatgtaagaggtttcatattgctaatagcagctacaatccagctaccattctgcttt |
| | | | tattttatggttgggataaggctggattattctgagtccaagctaggcccttttgctaa |
| | | | tcatgttcatacctcttatcttcctcccacagctcctgggcaacgtgctggtctgtgtg |
| | | | ctggcccatcactttggcaaagaattgggattcgaaccggtgccgccaccATGGACTGG |
| | | | ACCTGGAGGTTCCTCTTTGTGGTGGCAGCAGCTACAGGTGTCCAGTCCCAGGTGCAGCT |
| | | | GCAGCAGAGCGGCCCCGAGCTGGTGAAGCCCGGCGCCAGCCTGAAGCTGAGCTGCACCG |
| | | | CCAGCGGCTTCAACATCAAGGACACCTACATCCACTGGGTGAAGCAGAGACCCGAGCAG |
| | | | GGCCTGGAGTGGATCGGCAGAATCTACCCCACCAACGGCTACACCAGATACGACCCCAA |
| | | | GTTCCAGGACAAGGCCACCATCACCGCCGACACCAGCAGCAACACCGCCTACCTGCAGG |
| | | | TGAGCAGACTGACCAGCGAGGACACCGCCGTGTACTACTGCAGCAGATGGGGCGGCGAC |
| | | | GGCTTCTACGCCATGGACTACTGGGGCCAGGGCGCCAGCGTGACCGTGAGCAGCgcgtc |
| | | | gaccaagggcccatcggtcttccccctggcaccctcctccaagagcacctctgggggca |
| | | | cagcggccctgggctgcctggtcaaggactacttccccgaacctgtgacggtctcgtgg |
| | | | aactcaggcgccctgaccagcggcgtgcacaccttcccggctgtcctacagtcctcagg |
| | | | actctactccctcagcagcgtggtgaccgtgccctccagcagcttgggcacccagacct |
| | | | acatctgcaacgtgaatcacaagcccagcaacaccaaggtggacaagaGagttgagccc |
| | | | aaatcttgtgacaaaactcacacatgcccaccgtgcccagcacctgaactcGtgggggg |
| | | | accgtcagtcttcctcCtccccccaaaacccaaggacaccctcatgatctcccggaccc |
| | | | ctgaggtcacatgcgtggtggtggacgtgagccacgaagaccctgaggtcaagttcaac |
| | | | tggtacgtggacggcgtggaggtgcataatgccaagacaaagccgcCggaggagcagta |
| | | | caacagcacgCTccgtgtggtcagcgtcctcaccgtcctgcaccaggactggctgaatg |
| | | | gcaaggagtacaagtgcaaggtctccaacaaagccctcccagcccccatcgagaaaacc |
| | | | atctccaaagccaaagggcagccccgagaaccacaggtgtacaccctgcccccatcccg |
| | | | ggaTgagCtgaccaagaaccaggtcagcctgacctgcctggtcaaaggcttctatccca |
| | | | gcgacatcgccgtggagtgggagagcaatgggcagccggagaacaactacaagaccacg |
| | | | cctcTcgtgctggactccgacggctccttcttcctctacagcaagctcaccgtggacaa |
| | | | gagcaggtggcagcaggggaacgtcttctcatgctccgtgatgcatgaggctctgcaca |
| | | | accactacacgcagaagagcctctccctgtctccgggtaaaagaaagaggcgagagggc |
| | | | agaggaagtcttctaacatgcggtgacgtggaggagaatcccggccctATGGACATGAG |
| | | | GGTCCCTGCTCAGCTCCTGGGGCTCCTGCTGCTCTGGCTCTCAGGTGCCAGATGTGACA |
| | | | TCGTGATGACCCAGAGCCACAAGTTCATGAGCACCAGCGTGGGCGACAGAGTGAGCATC |
| | | | ACCTGCAAGGCCAGCCAGGACGTGAACACCGCCGTGGCCTGGTACCAGCAGAAGCCCGG |
| | | | CCACAGCCCCAAGCTGCTGATCTACAGCGCCAGCTTCAGATACACCGGCGTGCCGGACA |
| | | | GATTCACCGGCAGCAGAAGCGGCACCGACTTCACCTTCACCATCAGCAGCGTGCAGGCC |
| | | | GAGGACCTGGCCGTGTACTACTGCCAGCAGCACTACACCACCCCTCCTACCTTCGGCGG |
| | | | CGGCACCAAGGTGGAGATCAAGAGAACCGTGGCCGCCCCTAGCGTGTTCATCTTCCCGC |
| | | | CAAGCGACGAGCAGCTGAAGAGCGGCACCGCCAGCGTGGTGTGCCTGCTGAACAACTTC |
| | | | TACCCCAGAGAGGCCAAGGTGCAGTGGAAGGTGGACAACGCCCTGCAGAGCGGCAACAG |
| | | | CCAGGAGAGCGTGACCGAGCAGGACAGCAAGGACAGCACCTACAGCCTGAGCAGCACCC |
| | | | TGACCCTGAGCAAGGCCGACTACGAGAAGCACAAGGTGTACGCCTGCGAGGTGACCCAC |
| | | | CAGGGCCTGAGCAGCCCCGTGACCAAGAGCTTCAACAGAGGCGAGTGCtagtagtaact |
| | | | cgaggacggggtgaactacgcctgaggatccgatctttttccctctgccaaaaattatg |
| | | | gggacatcatgaagccccttgagcatctgacttctggctaataaaggaaatttattttc |
| | | | attgcaatagtgtgttggaattttttgtgtctctcactcggcctaggtagataagtagc |
| | | | atggcgggttaatcattaactacaaggaacccctagtgatggagttggccactccctct |
| | | | ctgcgcgctcgctcgctcactgaggccgggcgaccaaaggtcgcccgacgcccgggctt |
| | | | tgcccgggcggcctcagtgagcgagcgagcgcgcag |
| HER-15 | 4220 | 5165 | ctgcgcgctcgctcgctcactgaggccgcccgggcaaagcccgggcgtcgggcgacctt |
| | | | tggtcgcccggcctcagtgagcgagcgagcgcgcagagagggagtggccaactccatca |
| | | | ctaggggttccttgtagttaatgattaacccgccatgctacttatctaccagggtaatg |
| | | | gggatcctctagaactatagctagtcGACATTGATTATTGACTAGTTATTAATAGTAAT |
| | | | CAATTACGGGGTCATTAGTTCATAGCCCATATATGGAGTTCCGCGTTACATAACTTACG |
| | | | GTAAATGGCCCGCCTGGCTGACCGCCCAACGACCCCCGCCCATTGACGTCAATAATGAC |
| | | | GTATGTTCCCATAGTAACGCCAATAGGGACTTTCCATTGACGTCAATGGGTGGAGTATT |
| | | | TACGGTAAACTGCCCACTTGGCAGTACATCAAGTGTATCATATGCCAAGTACGCCCCCT |
| | | | ATTGACGTCAATGACGGTAAATGGCCCGCCTGGCATTATGCCCAGTACATGACCTTATG |
| | | | GGACTTTCCTACTTGGCAGTACATCTACGTATTAGTCATCGCTATTACCATGtcgaggc |
| | | | cacgttctgcttcactctccccatctcccccccctccccacccccaattttgtatttat |
| | | | ttattttttaattattttgtgcagcgatgggggcggggggggggggcgcgcgccaggcg |
| | | | gggcggggcggggcgaggggcggggcggggcgaggcggagaggtgcggcggcagccaat |
| | | | cagagcggcgcgctccgaaagtttccttttatggcgaggcggcggcggcggcggcccta |
| | | | taaaaagcgaagcgcgcggcgggcgggagcaagcttcgtttagtgaaccgtcagatcgc |
| | | | ctggagacgccatccacgctgttttgacctccatagaagacaccgggaccgatccagcc |
| | | | tccgcggattcgaatcccggccgggaacggtgcattggaacgcggattccccgtgccaa |
| | | | gagtgacgtaagtaccgcctatagagtctataggcccacaaaaaatgctttcttctttt |
| | | | aatatacttttttgtttatcttatttctaatactttccctaatctctttctttcagggc |
| | | | aataatgatacaatgtatcatgcctctttgcaccattctaaagaataacagtgataatt |
| | | | tctgggttaaggcaatagcaatatttctgcatataaatatttctgcatataaattgtaa |
| | | | ctgatgtaagaggtttcatattgctaatagcagctacaatccagctaccattctgcttt |
| | | | tattttatggttgggataaggctggattattctgagtccaagctaggcccttttgctaa |
| | | | tcatgttcatacctcttatcttcctcccacagctcctgggcaacgtgctggtctgtgtg |
| | | | ctggcccatcactttggcaaagaattgggattcgaaccggtgccgccaccATGGACTGG |
| | | | ACCTGGAGGTTCCTCTTTGTGGTGGCAGCAGCTACAGGTGTCCAGTCCgaggttcagct |
| | | | ggtggagtctggcggtggcctggtgcagccagggggctcactccgtttgtcctgtgcag |
| | | | cttctggcttcaCcTTCaCCgacTATACCATGGATtgggtgcgtcaggccccgggtaag |
| | | | ggcctggaatgggttgcaGACGTGAATcctAATTCTggtGGTTCTATAtatAATCAGCG |
| | | | TTTCaagggccgtttcactCTGagcGTTgacCGTtccaaaaacacaCTGtacctgcaga |
| | | | tgaacagcctgcgtgctgaggacactgccgtctattattgtGCAagaAATCTGgggCCT |
| | | | AGCttctatTTCgacTACtggggtcaaggaaccctggtcaccgtctcctcggcgtcgac |
| | | | caagggcccatcggtcttccccctggcaccctcctccaagagcacctctgggggcacag |
| | | | cggccctgggctgcctggtcaaggactacttccccgaacctgtgacggtctcgtggaac |
| | | | tcaggcgccctgaccagcggcgtgcacaccttcccggctgtcctacagtcctcaggact |
| | | | ctactccctcagcagcgtggtgaccgtgccctccagcagcttgggcacccagacctaca |
| | | | tctgcaacgtgaatcacaagcccagcaacaccaaggtggacaagaaagttgagcccaaa |
| | | | tcttgtgacaaaactcacacatgcccaccgtgcccagcacctgaactcctggggggacc |
| | | | gtcagtcttcctcttccccccaaaacccaaggacaccctcatgatctcccggacccctg |
| | | | aggtcacatgcgtggtggtggacgtgagccacgaagaccctgaggtcaagttcaactgg |
| | | | tacgtggacggcgtggaggtgcataatgccaagacaaagccgcgggaggagcagtacaa |
| | | | cagcacgtaccgtgtggtcagcgtcctcaccgtcctgcaccaggactggctgaatggca |
| | | | aggagtacaagtgcaaggtctccaacaaagccctcccagcccccatcgagaaaaccatc |
| | | | tccaaagccaaagggcagccccgagaaccacaggtgtacaccctgcccccatcccggga |
| | | | GgagAtgaccaagaaccaggtcagcctgacctgcctggtcaaaggcttctatcccagcg |
| | | | acatcgccgtggagtgggagagcaatgggcagccggagaacaactacaagaccacgcct |
| | | | cccgtgctggactccgacggctccttcttcctctacagcaagctcaccgtggacaagag |
| | | | caggtggcagcaggggaacgtcttctcatgctccgtgatgcatgaggctctgcacaacc |
| | | | actacacgcagaagagcctctccctgtctccgggtaaaagaaagaggcgagagggcaga |
| | | | ggaagtcttctaacatgcggtgacgtggaggagaatcccggccctATGGACATGAGGGT |
| | | | CCCTGCTCAGCTCCTGGGGCTCCTGCTGCTCTGGCTCTCAGGTGCCAGATGTGGCGTGA |
| | | | CCCTGTTCGTGGCCCTGTACGACTACACCAGCTACAACACCAGGGACCTGAGCTTCCAC |
| | | | AAGGGCGAGAAGTTCCAGATCCTGAGGATGGAGGACGGCGTGTGGTGGGAGGCCAGGAG |
| | | | CCTGACCACCGGCGAGACCGGCTACATCCCCAGCAACTACGTGGCCCCCGTGGACAGCA |
| | | | TCCAGggtggtggtggatccggaggaggaggaAGTggaggtggaggtTCTgatatccag |
| | | | atgacccagtccccgagctccctgtccgcctctgtgggcgatagggtcaccatcacctg |
| | | | cAAAgccagtcaggatgtgTCCATTGGGgtagcctggtatcaacagaaaccaggaaaag |
| | | | ctccgaaactactgatttactcggcatccTATCGCTACACGggagtcccttctcgcttc |
| | | | tctggatccGGTtctgggacggatttcactctgaccatcagcagtctgcagccggaaga |
| | | | cttcgcaacttattactgtcagcaaTACtatATCTATcctTACacgttcggacagggta |
| | | | ccaaggtggagatcaaacgaactgtggctgcaccatctgtcttcatcttcccgccatct |
| | | | gatgagcagttgaaatctggaactgcctctgttgtgtgcctgctgaataacttctatcc |
| | | | cagagaggccaaagtacagtggaaggtggataacgccctccaatcgggtaactcccagg |
| | | | agagtgtcacagagcaggacagcaaggacagcacctacagcctcagcagcaccctgacg |
| | | | ctgagcaaagcagactacgagaaacacaaagtctacgcctgcgaagtcacccatcaggg |
| | | | cctgagctcgcccgtcacaaagagcttcaacaggggagagtgttagtagtaactcgagg |
| | | | acggggtgaactacgcctgaggatccgatctttttccctctgccaaaaattatggggac |
| | | | atcatgaagccccttgagcatctgacttctggctaataaaggaaatttattttcattgc |
| | | | aatagtgtgttggaattttttgtgtctctcactcggcctaggtagataagtagcatggc |
| | | | gggttaatcattaactacaaggaacccctagtgatggagttggccactccctctctgcg |
| | | | cgctcgctcgctcactgaggccgggcgaccaaaggtcgcccgacgcccgggctttgccc |
| | | | gggcggcctcagtgagcgagcgagcgcgcag |
| HER-42 | 3992 | 5166 | ctgcgcgctcgctcgctcactgaggccgcccgggcaaagcccgggcgtcgggcgacctt |
| | | | tggtcgcccggcctcagtgagcgagcgagcgcgcagagagggagtggccaactccatca |
| | | | ctaggggttccttgtagttaatgattaacccgccatgctacttatctaccagggtaatg |
| | | | gggatcctctagaactatagctagtcGACATTGATTATTGACTAGTTATTAATAGTAAT |
| | | | CAATTACGGGGTCATTAGTTCATAGCCCATATATGGAGTTCCGCGTTACATAACTTACG |
| | | | GTAAATGGCCCGCCTGGCTGACCGCCCAACGACCCCCGCCCATTGACGTCAATAATGAC |
| | | | GTATGTTCCCATAGTAACGCCAATAGGGACTTTCCATTGACGTCAATGGGTGGAGTATT |
| | | | TACGGTAAACTGCCCACTTGGCAGTACATCAAGTGTATCATATGCCAAGTACGCCCCCT |
| | | | ATTGACGTCAATGACGGTAAATGGCCCGCCTGGCATTATGCCCAGTACATGACCTTATG |
| | | | GGACTTTCCTACTTGGCAGTACATCTACGTATTAGTCATCGCTATTACCATGtcgaggc |
| | | | cacgttctgcttcactctccccatctcccccccctccccacccccaattttgtatttat |
| | | | ttattttttaattattttgtgcagcgatgggggcggggggggggggcgcgcgccaggcg |
| | | | gggcggggcggggcgaggggcggggcggggcgaggcggagaggtgcggcggcagccaat |
| | | | cagagcggcgcgctccgaaagtttccttttatggcgaggcggcggcggcggcggcccta |
| | | | taaaaagcgaagcgcgcggcgggcgggagcaagcttcgtttagtgaaccgtcagatcgc |
| | | | ctggagacgccatccacgctgttttgacctccatagaagacaccgggaccgatccagcc |
| | | | tccgcggattcgaatcccggccgggaacggtgcattggaacgcggattccccgtgccaa |
| | | | gagtgacgtaagtaccgcctatagagtctataggcccacaaaaaatgctttcttctttt |
| | | | aatatacttttttgtttatcttatttctaatactttccctaatctctttctttcagggc |
| | | | aataatgatacaatgtatcatgcctctttgcaccattctaaagaataacagtgataatt |
| | | | tctgggttaaggcaatagcaatatttctgcatataaatatttctgcatataaattgtaa |
| | | | ctgatgtaagaggtttcatattgctaatagcagctacaatccagctaccattctgcttt |
| | | | tattttatggttgggataaggctggattattctgagtccaagctaggcccttttgctaa |
| | | | tcatgttcatacctcttatcttcctcccacagctcctgggcaacgtgctggtctgtgtg |
| | | | ctggcccatcactttggcaaagaattgggattcgaaccggtgccgccaccATGGACTGG |
| | | | ACCTGGAGGTTCCTCTTTGTGGTGGCAGCAGCTACAGGTGTCCAGTCCgaggttcagct |
| | | | ggtggagtctggcggtggcctggtgcagccagggggctcactccgtttgtcctgtgcag |
| | | | cttctggcttcaacattaaagacacctatatacactgggtgcgtcaggccccgggtaag |
| | | | ggcctggaatgggttgcaaggatttatcctacgaatggttatactagatatgccgatag |
| | | | cgtcaagggccgtttcactataagcgcagacacatccaaaaacacagcctacctgcaga |
| | | | tgaacagcctgcgtgctgaggacactgccgtctattattgttctagatggggaggggac |
| | | | ggcttctatgctatggacTACtggggtcaaggaaccctggtcaccgtctcctcggcgtc |
| | | | gaccaagggcccatcggtcttccccctggcaccctcctccaagagcacctctgggggca |
| | | | cagcggccctgggctgcctggtcaaggactacttccccgaacctgtgacggtctcgtgg |
| | | | aactcaggcgccctgaccagcggcgtgcacaccttcccggctgtcctacagtcctcagg |
| | | | actctactccctcagcagcgtggtgaccgtgccctccagcagcttgggcacccagacct |
| | | | acatctgcaacgtgaatcacaagcccagcaacaccaaggtggacaagaaagttgagccc |
| | | | CCCaaatcttgtgacaaaactcacacatgcccaccgtgcccagcacctgaactcctggg |
| | | | gggaccgtcagtcttcctcttccccccaaaacccaaggacaccctcatgatctcccgga |
| | | | cccctgaggtcacatgcgtggtggtggacgtgagccacgaagaccctgaggtcaagttc |
| | | | aactggtacgtggacggcgtggaggtgcataatgccaagacaaagccgcgggaggagca |
| | | | gtacaacagcacgtaccgtgtggtcagcgtcctcaccgtcctgcaccaggactggctga |
| | | | atggcaaggagtacaagtgcaaggtctccaacaaagccctcccagcccccatcgagaaa |
| | | | accatctccaaagccaaagggcagccccgagaaccacaggtgtacaccctgcccccatc |
| | | | ccgggatgagctgaccaagaaccaggtcagcctgacctgcctggtcaaaggcttctatc |
| | | | ccagcgacatcgccgtggagtgggagagcaatgggcagccggagaacaactacaagacc |
| | | | acgcctcccgtgctggactccgacggctccttcttcctctacagcaagctcaccgtgga |
| | | | caagagcaggtggcagcaggggaacgtcttctcatgctccgtgatgcatgaggctctgc |
| | | | acaacCAGtacacgcagaagagcctctccctgtctccgggtaaaAgaaagaggcgagag |
| | | | ggcagaggaagtcttctaacatgcggtgacgtggaggagaatcccggccctATGGACAT |
| | | | GAGGGTCCCTGCTCAGCTCCTGGGGCTCCTGCTGCTCTGGCTCTCAGGTGCCAGATGTg |
| | | | atatccagatgacccagtccccgagctccctgtccgcctctgtgggcgatagggtcacc |
| | | | atcacctgccgtgccagtcaggatgtgaatactgctgtagcctggtatcaacagaaacc |
| | | | aggaaaagctccgaaactactgatttactcggcatccttcctcTACtctggagtccctt |
| | | | ctcgcttctctggatccagatctgggacggatttcactctgaccatcagcagtctgcag |
| | | | ccggaagacttcgcaacttattactgtcagcaacattatactactcctcccacgttcgg |
| | | | acagggtaccaaggtggagatcaaacgaactgtggctgcaccatctgtcttcatcttcc |
| | | | cgccatctgatgagcagttgaaatctggaactgcctctgttgtgtgcctgctgaataac |
| | | | ttctatcccagagaggccaaagtacagtggaaggtggataacgccctccaatcgggtaa |
| | | | ctcccaggagagtgtcacagagcaggacagcaaggacagcacctacagcctcagcagca |
| | | | ccctgacgctgagcaaagcagactacgagaaacacaaagtctacgcctgcgaagtcacc |
| | | | catcagggcctgagctcgcccgtcacaaagagcttcaacaggggagagtgttagtagta |
| | | | actcgaggacggggtgaactacgcctgaggatccgatctttttccctctgccaaaaatt |
| | | | atggggacatcatgaagccccttgagcatctgacttctggctaataaaggaaatttatt |
| | | | ttcattgcaatagtgtgttggaattttttgtgtctctcactcggcctaggtagataagt |
| | | | agcatggcgggttaatcattaactacaaggaacccctagtgatggagttggccactccc |
| | | | tctctgcgcgctcgctcgctcactgaggccgggcgaccaaaggtcgcccgacgcccggg |
| | | | ctttgcccgggcggcctcagtgagcgagcgagcgcgcag |
| HER-43 | 3992 | 5185 | ctgcgcgctcgctcgctcactgaggccgcccgggcaaagcccgggcgtcgggcgacctt |
| | | | tggtcgcccggcctcagtgagcgagcgagcgcgcagagagggagtggccaactccatca |
| | | | ctaggggttccttgtagttaatgattaacccgccatgctacttatctaccagggtaatg |
| | | | gggatcctctagaactatagctagtcgacattgattattgactagttattaatagtaat |
| | | | caattacggggtcattagttcatagcccatatatggagttccgcgttacataacttacg |
| | | | gtaaatggcccgcctggctgaccgcccaacgacccccgcccattgacgtcaataatgac |
| | | | gtatgttcccatagtaacgccaatagggactttccattgacgtcaatgggtggagtatt |
| | | | tacggtaaactgcccacttggcagtacatcaagtgtatcatatgccaagtacgccccct |
| | | | attgacgtcaatgacggtaaatggcccgcctggcattatgcccagtacatgaccttatg |
| | | | ggactttcctacttggcagtacatctacgtattagtcatcgctattaccatgtcgaggc |
| | | | cacgttctgcttcactctccccatctcccccccctccccacccccaattttgtatttat |
| | | | ttattttttaattattttgtgcagcgatgggggcggggggggggggcgcgcgccaggcg |
| | | | gggcggggcggggcgaggggcggggcggggcgaggcggagaggtgcggcggcagccaat |
| | | | cagagcggcgcgctccgaaagtttccttttatggcgaggcggcggcggcggcggcccta |
| | | | taaaaagcgaagcgcgcggcgggcgggagcaagcttcgtttagtgaaccgtcagatcgc |
| | | | ctggagacgccatccacgctgttttgacctccatagaagacaccgggaccgatccagcc |
| | | | tccgcggattcgaatcccggccgggaacggtgcattggaacgcggattccccgtgccaa |
| | | | gagtgacgtaagtaccgcctatagagtctataggcccacaaaaaatgctttcttctttt |
| | | | aatatacttttttgtttatcttatttctaatactttccctaatctctttctttcagggc |
| | | | aataatgatacaatgtatcatgcctctttgcaccattctaaagaataacagtgataatt |
| | | | tctgggttaaggcaatagcaatatttctgcatataaatatttctgcatataaattgtaa |
| | | | ctgatgtaagaggtttcatattgctaatagcagctacaatccagctaccattctgcttt |
| | | | tattttatggttgggataaggctggattattctgagtccaagctaggcccttttgctaa |
| | | | tcatgttcatacctcttatcttcctcccacagctcctgggcaacgtgctggtctgtgtg |
| | | | ctggcccatcactttggcaaagaattgggattcgaaccggtgccgccaccATGGACTGG |
| | | | ACCTGGAGGTTCCTCTTTGTGGTGGCAGCAGCTACAGGTGTCCAGTCCgaggttcagct |
| | | | ggtggagtctggcggtggcctggtgcagccagggggctcactccgtttgtcctgtgcag |
| | | | cttctggcttcaacattaaagacacctatatacactgggtgcgtcaggccccgggtaag |
| | | | ggcctggaatgggttgcaaggatttatcctacgaatggttatactagatatgccgatag |
| | | | cgtcaagggccgtttcactataagcgcagacacatccaaaaacacagcctacctgcaga |
| | | | tgaacagcctgcgtgctgaggacactgccgtctattattgttctagatggggaggggac |
| | | | ggcttctatgctatggacTACtggggtcaaggaaccctggtcaccgtctcctcggcgtc |
| | | | gaccaagggcccatcggtcttccccctggcaccctcctccaagagcacctctgggggca |
| | | | cagcggccctgggctgcctggtcaaggactacttccccgaacctgtgacggtctcgtgg |
| | | | aactcaggcgccctgaccagcggcgtgcacaccttcccggctgtcctacagtcctcagg |
| | | | actctactccctcagcagcgtggtgaccgtgccctccagcagcttgggcacccagacct |
| | | | acatctgcaacgtgaatcacaagcccagcaacaccaaggtggacaagaaagttgagccc |
| | | | CCCaaatcttgtgacaaaactcacacatgcccaccgtgcccagcacctgaactcctggg |
| | | | gggaccgtcagtcttcctcttccccccaaaacccaaggacaccctcatgGCAtcccgga |
| | | | cccctgaggtcacatgcgtggtggtggacgtgagccacgaagaccctgaggtcaagttc |
| | | | aactggtacgtggacggcgtggaggtgcataatgccaagacaaagccgcgggaggagca |
| | | | gtacaacagcacgtaccgtgtggtcagcgtcctcaccgtcctgGCCcaggactggctga |
| | | | atggcaaggagtacaagtgcaaggtctccaacaaagccctcccagcccccatcgagaaa |
| | | | accatctccaaagccaaagggcagccccgagaaccacaggtgtacaccctgcccccatc |
| | | | ccgggatgagctgaccaagaaccaggtcagcctgacctgcctggtcaaaggcttctatc |
| | | | ccagcgacatcgccgtggagtgggagagcaatgggcagccggagaacaactacaagacc |
| | | | acgcctcccgtgctggactccgacggctccttcttcctctacagcaagctcaccgtgga |
| | | | caagagcaggtggcagcaggggaacgtcttctcatgctccgtgatgcatgaggctctgc |
| | | | acaaccactacacgcagaagagcctctccctgtctccgggtaaaagaaagaggcgagag |
| | | | ggcagaggaagtcttctaacatgcggtgacgtggaggagaatcccggccctATGGACAT |
| | | | GAGGGTCCCTGCTCAGCTCCTGGGGCTCCTGCTGCTCTGGCTCTCAGGTGCCAGATGTg |
| | | | atatccagatgacccagtccccgagctccctgtccgcctctgtgggcgatagggtcacc |
| | | | atcacctgccgtgccagtcaggatgtgaatactgctgtagcctggtatcaacagaaacc |
| | | | aggaaaagctccgaaactactgatttactcggcatccttcctcTACtctggagtccctt |
| | | | ctcgcttctctggatccagatctgggacggatttcactctgaccatcagcagtctgcag |
| | | | ccggaagacttcgcaacttattactgtcagcaacattatactactcctcccacgttcgg |
| | | | acagggtaccaaggtggagatcaaacgaactgtggctgcaccatctgtcttcatcttcc |
| | | | cgccatctgatgagcagttgaaatctggaactgcctctgttgtgtgcctgctgaataac |
| | | | ttctatcccagagaggccaaagtacagtggaaggtggataacgccctccaatcgggtaa |
| | | | ctcccaggagagtgtcacagagcaggacagcaaggacagcacctacagcctcagcagca |
| | | | ccctgacgctgagcaaagcagactacgagaaacacaaagtctacgcctgcgaagtcacc |
| | | | catcagggcctgagctcgcccgtcacaaagagcttcaacaggggagagtgttagtagta |
| | | | actcgaggacggggtgaactacgcctgaggatccgatctttttccctctgccaaaaatt |
| | | | atggggacatcatgaagccccttgagcatctgacttctggctaataaaggaaatttatt |
| | | | ttcattgcaatagtgtgttggaattttttgtgtctctcactcggcctaggtagataagt |
| | | | agcatggcgggttaatcattaactacaaggaacccctagtgatggagttggccactccc |
| | | | tctctgcgcgctcgctcgctcactgaggccgggcgaccaaaggtcgcccgacgcccggg |
| | | | ctttgcccgggcggcctcagtgagcgagcgagcgcgcag |
| HER-46 | 3992 | 5186 | ctgcgcgctcgctcgctcactgaggccgcccgggcaaagcccgggcgtcgggcgacctt |
| | | | tggtcgcccggcctcagtgagcgagcgagcgcgcagagagggagtggccaactccatca |
| | | | ctaggggttccttgtagttaatgattaacccgccatgctacttatctaccagggtaatg |
| | | | gggatcctctagaactatagctagtcgacattgattattgactagttattaatagtaat |
| | | | caattacggggtcattagttcatagcccatatatggagttccgcgttacataacttacg |
| | | | gtaaatggcccgcctggctgaccgcccaacgacccccgcccattgacgtcaataatgac |
| | | | gtatgttcccatagtaacgccaatagggactttccattgacgtcaatgggtggagtatt |
| | | | tacggtaaactgcccacttggcagtacatcaagtgtatcatatgccaagtacgccccct |
| | | | attgacgtcaatgacggtaaatggcccgcctggcattatgcccagtacatgaccttatg |
| | | | ggactttcctacttggcagtacatctacgtattagtcatcgctattaccatgtcgaggc |
| | | | cacgttctgcttcactctccccatctcccccccctccccacccccaattttgtatttat |
| | | | ttattttttaattattttgtgcagcgatgggggcggggggggggggcgcgcgccaggcg |
| | | | gggcggggcggggcgaggggcggggcggggcgaggcggagaggtgcggcggcagccaat |
| | | | cagagcggcgcgctccgaaagtttccttttatggcgaggcggcggcggcggcggcccta |
| | | | taaaaagcgaagcgcgcggcgggcgggagcaagcttcgtttagtgaaccgtcagatcgc |
| | | | ctggagacgccatccacgctgttttgacctccatagaagacaccgggaccgatccagcc |
| | | | tccgcggattcgaatcccggccgggaacggtgcattggaacgcggattccccgtgccaa |
| | | | gagtgacgtaagtaccgcctatagagtctataggcccacaaaaaatgctttcttctttt |
| | | | aatatacttttttgtttatcttatttctaatactttccctaatctctttctttcagggc |
| | | | aataatgatacaatgtatcatgcctctttgcaccattctaaagaataacagtgataatt |
| | | | tctgggttaaggcaatagcaatatttctgcatataaatatttctgcatataaattgtaa |
| | | | ctgatgtaagaggtttcatattgctaatagcagctacaatccagctaccattctgcttt |
| | | | tattttatggttgggataaggctggattattctgagtccaagctaggcccttttgctaa |
| | | | tcatgttcatacctcttatcttcctcccacagctcctgggcaacgtgctggtctgtgtg |
| | | | ctggcccatcactttggcaaagaattgggattcgaaccggtgccgccaccATGGACTGG |
| | | | ACCTGGAGGTTCCTCTTTGTGGTGGCAGCAGCTACAGGTGTCCAGTCCgaggttcagct |
| | | | ggtggagtctggcggtggcctggtgcagccagggggctcactccgtttgtcctgtgcag |
| | | | cttctggcttcaacattaaagacacctatatacactgggtgcgtcaggccccgggtaag |
| | | | ggcctggaatgggttgcaaggatttatcctacgaatggttatactagatatgccgatag |
| | | | cgtcaagggccgtttcactataagcgcagacacatccaaaaacacagcctacctgcaga |
| | | | tgaacagcctgcgtgctgaggacactgccgtctattattgttctagatggggaggggac |
| | | | ggcttctatgctatggacTACtggggtcaaggaaccctggtcaccgtctcctcggcgtc |
| | | | gaccaagggcccatcggtcttccccctggcaccctcctccaagagcacctctgggggca |
| | | | cagcggccctgggctgcctggtcaaggactacttccccgaacctgtgacggtctcgtgg |
| | | | aactcaggcgccctgaccagcggcgtgcacaccttcccggctgtcctacagtcctcagg |
| | | | actctactccctcagcagcgtggtgaccgtgccctccagcagcttgggcacccagacct |
| | | | acatctgcaacgtgaatcacaagcccagcaacaccaaggtggacaagaaagttgagccc |
| | | | CCCaaatcttgtgacaaaactcacacatgcccaccgtgcccagcacctgaactcctggg |
| | | | gggaccgtcagtcttcctcttccccccaaaacccaaggacaccctcatgGCAtcccgga |
| | | | cccctgaggtcacatgcgtggtggtggacgtgagccacgaagaccctgaggtcaagttc |
| | | | aactggtacgtggacggcgtggaggtgcataatgccaagacaaagccgcgggaggagca |
| | | | gtacaacagcacgtaccgtgtggtcagcgtcctcaccgtcctgcaccaggactggctga |
| | | | atggcaaggagtacaagtgcaaggtctccaacaaagccctcccagcccccatcgagaaa |
| | | | accatctccaaagccaaagggcagccccgagaaccacaggtgtacaccctgcccccatc |
| | | | ccgggatgagctgaccaagaaccaggtcagcctgacctgcctggtcaaaggcttctatc |
| | | | ccagcgacatcgccgtggagtgggagagcaatgggcagccggagaacaactacaagacc |
| | | | acgcctcccgtgctggactccgacggctccttcttcctctacagcaagctcaccgtgga |
| | | | caagagcaggtggcagcaggggaacgtcttctcatgctccgtgatgcatgaggctctgc |
| | | | acaacCAGtacacgcagaagagcctctccctgtctccgggtaaaagaaagaggcgagag |
| | | | ggcagaggaagtcttctaacatgcggtgacgtggaggagaatcccggccctATGGACAT |
| | | | GAGGGTCCCTGCTCAGCTCCTGGGGCTCCTGCTGCTCTGGCTCTCAGGTGCCAGATGTg |
| | | | atatccagatgacccagtccccgagctccctgtccgcctctgtgggcgatagggtcacc |
| | | | atcacctgccgtgccagtcaggatgtgaatactgctgtagcctggtatcaacagaaacc |
| | | | aggaaaagctccgaaactactgatttactcggcatccttcctcTACtctggagtccctt |
| | | | ctcgcttctctggatccagatctgggacggatttcactctgaccatcagcagtctgcag |
| | | | ccggaagacttcgcaacttattactgtcagcaacattatactactcctcccacgttcgg |
| | | | acagggtaccaaggtggagatcaaacgaactgtggctgcaccatctgtcttcatcttcc |
| | | | cgccatctgatgagcagttgaaatctggaactgcctctgttgtgtgcctgctgaataac |
| | | | ttctatcccagagaggccaaagtacagtggaaggtggataacgccctccaatcgggtaa |
| | | | ctcccaggagagtgtcacagagcaggacagcaaggacagcacctacagcctcagcagca |
| | | | ccctgacgctgagcaaagcagactacgagaaacacaaagtctacgcctgcgaagtcacc |
| | | | catcagggcctgagctcgcccgtcacaaagagcttcaacaggggagagtgttagtagta |
| | | | actcgaggacggggtgaactacgcctgaggatccgatctttttccctctgccaaaaatt |
| | | | atggggacatcatgaagccccttgagcatctgacttctggctaataaaggaaatttatt |
| | | | ttcattgcaatagtgtgttggaattttttgtgtctctcactcggcctaggtagataagt |
| | | | agcatggcgggttaatcattaactacaaggaacccctagtgatggagttggccactccc |
| | | | tctctgcgcgctcgctcgctcactgaggccgggcgaccaaaggtcgcccgacgcccggg |
| | | | ctttgcccgggcggcctcagtgagcgagcgagcgcgcag |
| HER-47 | 3992 | 5167 | ctgcgcgctcgctcgctcactgaggccgcccgggcaaagcccgggcgtcgggcgacctt |
| | | | tggtcgcccggcctcagtgagcgagcgagcgcgcagagagggagtggccaactccatca |
| | | | ctaggggttccttgtagttaatgattaacccgccatgctacttatctaccagggtaatg |
| | | | gggatcctctagaactatagctagtcGACATTGATTATTGACTAGTTATTAATAGTAAT |
| | | | CAATTACGGGGTCATTAGTTCATAGCCCATATATGGAGTTCCGCGTTACATAACTTACG |
| | | | GTAAATGGCCCGCCTGGCTGACCGCCCAACGACCCCCGCCCATTGACGTCAATAATGAC |
| | | | GTATGTTCCCATAGTAACGCCAATAGGGACTTTCCATTGACGTCAATGGGTGGAGTATT |
| | | | TACGGTAAACTGCCCACTTGGCAGTACATCAAGTGTATCATATGCCAAGTACGCCCCCT |
| | | | ATTGACGTCAATGACGGTAAATGGCCCGCCTGGCATTATGCCCAGTACATGACCTTATG |
| | | | GGACTTTCCTACTTGGCAGTACATCTACGTATTAGTCATCGCTATTACCATGtcgaggc |
| | | | cacgttctgcttcactctccccatctcccccccctccccacccccaattttgtatttat |
| | | | ttattttttaattattttgtgcagcgatgggggcggggggggggggcgcgcgccaggcg |
| | | | gggcggggcggggcgaggggcggggcggggcgaggcggagaggtgcggcggcagccaat |
| | | | cagagcggcgcgctccgaaagtttccttttatggcgaggcggcggcggcggcggcccta |
| | | | taaaaagcgaagcgcgcggcgggcgggagcaagcttcgtttagtgaaccgtcagatcgc |
| | | | ctggagacgccatccacgctgttttgacctccatagaagacaccgggaccgatccagcc |
| | | | tccgcggattcgaatcccggccgggaacggtgcattggaacgcggattccccgtgccaa |
| | | | gagtgacgtaagtaccgcctatagagtctataggcccacaaaaaatgctttcttctttt |
| | | | aatatacttttttgtttatcttatttctaatactttccctaatctctttctttcagggc |
| | | | aataatgatacaatgtatcatgcctctttgcaccattctaaagaataacagtgataatt |
| | | | tctgggttaaggcaatagcaatatttctgcatataaatatttctgcatataaattgtaa |
| | | | ctgatgtaagaggtttcatattgctaatagcagctacaatccagctaccattctgcttt |
| | | | tattttatggttgggataaggctggattattctgagtccaagctaggcccttttgctaa |
| | | | tcatgttcatacctcttatcttcctcccacagctcctgggcaacgtgctggtctgtgtg |
| | | | ctggcccatcactttggcaaagaattgggattcgaaccggtgccgccaccATGGACTGG |
| | | | ACCTGGAGGTTCCTCTTTGTGGTGGCAGCAGCTACAGGTGTCCAGTCCgaggttcagct |
| | | | ggtggagtctggcggtggcctggtgcagccagggggctcactccgtttgtcctgtgcag |
| | | | cttctggcttcaacattaaagacacctatatacactgggtgcgtcaggccccgggtaag |
| | | | ggcctggaatgggttgcaaggatttatcctacgaatggttatactagatatgccgatag |
| | | | cgtcaagggccgtttcactataagcgcagacacatccaaaaacacagcctacctgcaga |
| | | | tgaacagcctgcgtgctgaggacactgccgtctattattgttctagatggggaggggac |
| | | | ggcttctatgctatggacTACtggggtcaaggaaccctggtcaccgtctcctcggcgtc |
| | | | gaccaagggcccatcggtcttccccctggcaccctcctccaagagcacctctgggggca |
| | | | cagcggccctgggctgcctggtcaaggactacttccccgaacctgtgacggtctcgtgg |
| | | | aactcaggcgccctgaccagcggcgtgcacaccttcccggctgtcctacagtcctcagg |
| | | | actctactccctcagcagcgtggtgaccgtgccctccagcagcttgggcacccagacct |
| | | | acatctgcaacgtgaatcacaagcccagcaacaccaaggtggacaagaaagttgagccc |
| | | | CCCaaatcttgtgacaaaactcacacatgcccaccgtgcccagcacctgaactcctggg |
| | | | gggaccgtcagtcttcctcttccccccaaaacccaaggacaccctcatgGCAtcccgga |
| | | | cccctgaggtcacatgcgtggtggtggacgtgagccacgaagaccctgaggtcaagttc |
| | | | aactggtacgtggacggcgtggaggtgcataatgccaagacaaagccgcgggaggagca |
| | | | gtacaacagcacgtaccgtgtggtcagcgtcctcaccgtcctgGCCcaggactggctga |
| | | | atggcaaggagtacaagtgcaaggtctccaacaaagccctcccagcccccatcgagaaa |
| | | | accatctccaaagccaaagggcagccccgagaaccacaggtgtacaccctgcccccatc |
| | | | ccgggatgagctgaccaagaaccaggtcagcctgacctgcctggtcaaaggcttctatc |
| | | | ccagcgacatcgccgtggagtgggagagcaatgggcagccggagaacaactacaagacc |
| | | | acgcctcccgtgctggactccgacggctccttcttcctctacagcaagctcaccgtgga |
| | | | caagagcaggtggcagcaggggaacgtcttctcatgctccgtgatgcatgaggctctgc |
| | | | acaacGCTtacacgcagaagagcctctccctgtctccgggtaaaAgaaagaggcgagag |
| | | | ggcagaggaagtcttctaacatgcggtgacgtggaggagaatcccggccctATGGACAT |
| | | | GAGGGTCCCTGCTCAGCTCCTGGGGCTCCTGCTGCTCTGGCTCTCAGGTGCCAGATGTg |
| | | | atatccagatgacccagtccccgagctccctgtccgcctctgtgggcgatagggtcacc |
| | | | atcacctgccgtgccagtcaggatgtgaatactgctgtagcctggtatcaacagaaacc |
| | | | aggaaaagctccgaaactactgatttactcggcatccttcctcTACtctggagtccctt |
| | | | ctcgcttctctggatccagatctgggacggatttcactctgaccatcagcagtctgcag |
| | | | ccggaagacttcgcaacttattactgtcagcaacattatactactcctcccacgttcgg |
| | | | acagggtaccaaggtggagatcaaacgaactgtggctgcaccatctgtcttcatcttcc |
| | | | cgccatctgatgagcagttgaaatctggaactgcctctgttgtgtgcctgctgaataac |
| | | | ttctatcccagagaggccaaagtacagtggaaggtggataacgccctccaatcgggtaa |
| | | | ctcccaggagagtgtcacagagcaggacagcaaggacagcacctacagcctcagcagca |
| | | | ccctgacgctgagcaaagcagactacgagaaacacaaagtctacgcctgcgaagtcacc |
| | | | catcagggcctgagctcgcccgtcacaaagagcttcaacaggggagagtgttagtagta |
| | | | actcgaggacggggtgaactacgcctgaggatccgatctttttccctctgccaaaaatt |
| | | | atggggacatcatgaagccccttgagcatctgacttctggctaataaaggaaatttatt |
| | | | ttcattgcaatagtgtgttggaattttttgtgtctctcactcggcctaggtagataagt |
| | | | agcatggcgggttaatcattaactacaaggaacccctagtgatggagttggccactccc |
| | | | tctctgcgcgctcgctcgctcactgaggccgggcgaccaaaggtcgcccgacgcccggg |
| | | | ctttgcccgggcggcctcagtgagcgagcgagcgcgcag |
| HER-53 | 3989 | 5168 | ctgcgcgctcgctcgctcactgaggccgcccgggcaaagcccgggcgtcgggcgacctt |
| | | | tggtcgcccggcctcagtgagcgagcgagcgcgcagagagggagtggccaactccatca |
| | | | ctaggggttccttgtagttaatgattaacccgccatgctacttatctaccagggtaatg |
| | | | gggatcctctagaactatagctagtcGACATTGATTATTGACTAGTTATTAATAGTAAT |
| | | | CAATTACGGGGTCATTAGTTCATAGCCCATATATGGAGTTCCGCGTTACATAACTTACG |
| | | | GTAAATGGCCCGCCTGGCTGACCGCCCAACGACCCCCGCCCATTGACGTCAATAATGAC |
| | | | GTATGTTCCCATAGTAACGCCAATAGGGACTTTCCATTGACGTCAATGGGTGGAGTATT |
| | | | TACGGTAAACTGCCCACTTGGCAGTACATCAAGTGTATCATATGCCAAGTACGCCCCCT |
| | | | ATTGACGTCAATGACGGTAAATGGCCCGCCTGGCATTATGCCCAGTACATGACCTTATG |
| | | | GGACTTTCCTACTTGGCAGTACATCTACGTATTAGTCATCGCTATTACCATGtcgaggc |
| | | | cacgttctgcttcactctccccatctcccccccctccccacccccaattttgtatttat |
| | | | ttattttttaattattttgtgcagcgatgggggcggggggggggggcgcgcgccaggcg |
| | | | gggcggggcggggcgaggggcggggcggggcgaggcggagaggtgcggcggcagccaat |
| | | | cagagcggcgcgctccgaaagtttccttttatggcgaggcggcggcggcggcggcccta |
| | | | taaaaagcgaagcgcgcggcgggcgggagcaagcttcgtttagtgaaccgtcagatcgc |
| | | | ctggagacgccatccacgctgttttgacctccatagaagacaccgggaccgatccagcc |
| | | | tccgcggattcgaatcccggccgggaacggtgcattggaacgcggattccccgtgccaa |
| | | | gagtgacgtaagtaccgcctatagagtctataggcccacaaaaaatgctttcttctttt |
| | | | aatatacttttttgtttatcttatttctaatactttccctaatctctttctttcagggc |
| | | | aataatgatacaatgtatcatgcctctttgcaccattctaaagaataacagtgataatt |
| | | | tctgggttaaggcaatagcaatatttctgcatataaatatttctgcatataaattgtaa |
| | | | ctgatgtaagaggtttcatattgctaatagcagctacaatccagctaccattctgcttt |
| | | | tattttatggttgggataaggctggattattctgagtccaagctaggcccttttgctaa |
| | | | tcatgttcatacctcttatcttcctcccacagctcctgggcaacgtgctggtctgtgtg |
| | | | ctggcccatcactttggcaaagaattgggattcgaaccggtgccgccaccATGGACTGG |
| | | | ACCTGGAGGTTCCTCTTTGTGGTGGCAGCAGCTACAGGTGTCCAGTCCgaggttcagct |
| | | | ggtggagtctggcggtggcctggtgcagccagggggctcactccgtttgtcctgtgcag |
| | | | cttctggcttcaacattaaagacacctatatacactgggtgcgtcaggccccgggtaag |
| | | | ggcctggaatgggttgcaaggatttatcctacgaatggttatactagatatgccgatag |
| | | | cgtcaagggccgtttcactataagcgcagacacatccaaaaacacagcctacctgcaga |
| | | | tgaacagcctgcgtgctgaggacactgccgtctattattgttctagatggggaggggac |
| | | | ggcttctatgctatggacTACtggggtcaaggaaccctggtcaccgtctcctcggcgtc |
| | | | gaccaagggcccatcggtcttccccctggcaccctcctccaagagcacctctgggggca |
| | | | cagcggccctgggctgcctggtcaaggactacttccccgaacctgtgacggtctcgtgg |
| | | | aactcaggcgccctgaccagcggcgtgcacaccttcccggctgtcctacagtcctcagg |
| | | | actctactccctcagcagcgtggtgaccgtgccctccagcagcttgggcacccagacct |
| | | | acatctgcaacgtgaatcacaagcccagcaacaccaaggtggacaagaGagttgagccc |
| | | | aaatcttgtgacaaaactcacacatgcccaccgtgcccagcacctgaactcGtgggggg |
| | | | accgtcagtcttcctcCtccccccaaaacccaaggacaccctcatgatctcccggaccc |
| | | | ctgaggtcacatgcgtggtggtggacgtgagccacgaagaccctgaggtcaagttcaac |
| | | | tggtacgtggacggcgtggaggtgcataatgccaagacaaagccgcCggaggagcagta |
| | | | caacagcacgCTccgtgtggtcagcgtcctcaccgtcctgcaccaggactggctgaatg |
| | | | gcaaggagtacaagtgcaaggtctccaacaaagccctcccagcccccatcgagaaaacc |
| | | | atctccaaagccaaagggcagccccgagaaccacaggtgtacaccctgcccccatcccg |
| | | | ggaTgagCtgaccaagaaccaggtcagcctgacctgcctggtcaaaggcttctatccca |
| | | | gcgacatcgccgtggagtgggagagcaatgggcagccggagaacaactacaagaccacg |
| | | | cctcTcgtgctggactccgacggctccttcttcctctacagcaagctcaccgtggacaa |
| | | | gagcaggtggcagcaggggaacgtcttctcatgctccgtgatgcatgaggctctgcaca |
| | | | accactacacgcagaagagcctctccctgtctccgggtaaaAgaaagaggcgagagggc |
| | | | agaggaagtcttctaacatgcggtgacgtggaggagaatcccggccctATGGACATGAG |
| | | | GGTCCCTGCTCAGCTCCTGGGGCTCCTGCTGCTCTGGCTCTCAGGTGCCAGATGTgata |
| | | | tccagatgacccagtccccgagctccctgtccgcctctgtgggcgatagggtcaccatc |
| | | | acctgccgtgccagtcaggatgtgaatactgctgtagcctggtatcaacagaaaccagg |
| | | | aaaagctccgaaactactgatttactcggcatccttcctcTACtctggagtcccttctc |
| | | | gcttctctggatccagatctgggacggatttcactctgaccatcagcagtctgcagccg |
| | | | gaagacttcgcaacttattactgtcagcaacattatactactcctcccacgttcggaca |
| | | | gggtaccaaggtggagatcaaacgaactgtggctgcaccatctgtcttcatcttcccgc |
| | | | catctgatgagcagttgaaatctggaactgcctctgttgtgtgcctgctgaataacttc |
| | | | tatcccagagaggccaaagtacagtggaaggtggataacgccctccaatcgggtaactc |
| | | | ccaggagagtgtcacagagcaggacagcaaggacagcacctacagcctcagcagcaccc |
| | | | tgacgctgagcaaagcagactacgagaaacacaaagtctacgcctgcgaagtcacccat |
| | | | cagggcctgagctcgcccgtcacaaagagcttcaacaggggagagtgttagtagtaact |
| | | | cgaggacggggtgaactacgcctgaggatccgatctttttccctctgccaaaaattatg |
| | | | gggacatcatgaagccccttgagcatctgacttctggctaataaaggaaatttattttc |
| | | | attgcaatagtgtgttggaattttttgtgtctctcactcggcctaggtagataagtagc |
| | | | atggcgggttaatcattaactacaaggaacccctagtgatggagttggccactccctct |
| | | | ctgcgcgctcgctcgctcactgaggccgggcgaccaaaggtcgcccgacgcccgggctt |
| | | | tgcccgggcggcctcagtgagcgagcgagcgcgcag |
| HER-57 | 3287 | 5187 | ctgcgcgctcgctcgctcactgaggccgcccgggcaaagcccgggcgtcgggcgacctt |
| | | | tggtcgcccggcctcagtgagcgagcgagcgcgcagagagggagtggccaactccatca |
| | | | ctaggggttccttgtagttaatgattaacccgccatgctacttatctaccagggtaatg |
| | | | gggatcctctagaactatagctagtcgacattgattattgactagttattaatagtaat |
| | | | caattacggggtcattagttcatagcccatatatggagttccgcgttacataacttacg |
| | | | gtaaatggcccgcctggctgaccgcccaacgacccccgcccattgacgtcaataatgac |
| | | | gtatgttcccatagtaacgccaatagggactttccattgacgtcaatgggtggagtatt |
| | | | tacggtaaactgcccacttggcagtacatcaagtgtatcatatgccaagtacgccccct |
| | | | attgacgtcaatgacggtaaatggcccgcctggcattatgcccagtacatgaccttatg |
| | | | ggactttcctacttggcagtacatctacgtattagtcatcgctattaccatgtcgaggc |
| | | | cacgttctgcttcactctccccatctcccccccctccccacccccaattttgtatttat |
| | | | ttattttttaattattttgtgcagcgatgggggcggggggggggggcgcgcgccaggcg |
| | | | gggcggggcggggcgaggggcggggcggggcgaggcggagaggtgcggcggcagccaat |
| | | | cagagcggcgcgctccgaaagtttccttttatggcgaggcggcggcggcggcggcccta |
| | | | taaaaagcgaagcgcgcggcgggcgggagcaagcttcgtttagtgaaccgtcagatcgc |
| | | | ctggagacgccatccacgctgttttgacctccatagaagacaccgggaccgatccagcc |
| | | | tccgcggattcgaatcccggccgggaacggtgcattggaacgcggattccccgtgccaa |
| | | | gagtgacgtaagtaccgcctatagagtctataggcccacaaaaaatgctttcttctttt |
| | | | aatatacttttttgtttatcttatttctaatactttccctaatctctttctttcagggc |
| | | | aataatgatacaatgtatcatgcctctttgcaccattctaaagaataacagtgataatt |
| | | | tctgggttaaggcaatagcaatatttctgcatataaatatttctgcatataaattgtaa |
| | | | ctgatgtaagaggtttcatattgctaatagcagctacaatccagctaccattctgcttt |
| | | | tattttatggttgggataaggctggattattctgagtccaagctaggcccttttgctaa |
| | | | tcatgttcatacctcttatcttcctcccacagctcctgggcaacgtgctggtctgtgtg |
| | | | ctggcccatcactttggcaaagaattgggattcgaaccggtgccgccaccATGGACTGG |
| | | | ACCTGGAGGTTCCTCTTTGTGGTGGCAGCAGCTACAGGTGTCCAGTCCgaggttcagct |
| | | | ggtggagtctggcggtggcctggtgcagccagggggctcactccgtttgtcctgtgcag |
| | | | cttctggcttcaacattaaagacacctatatacactgggtgcgtcaggccccgggtaag |
| | | | ggcctggaatgggttgcaaggatttatcctacgaatggttatactagatatgccgatag |
| | | | cgtcaagggccgtttcactataagcgcagacacatccaaaaacacagcctacctgcaga |
| | | | tgaacagcctgcgtgctgaggacactgccgtctattattgttctagatggggaggggac |
| | | | ggcttctatgctatggacTACtggggtcaaggaaccctggtcaccgtctcctcgggtgg |
| | | | tggtggatccggaggaggaggaAGTggaggtggaggtTCTgatatccagatgacccagt |
| | | | ccccgagctccctgtccgcctctgtgggcgatagggtcaccatcacctgccgtgccagt |
| | | | caggatgtgaatactgctgtagcctggtatcaacagaaaccaggaaaagctccgaaact |
| | | | actgatttactcggcatccttcctcTACtctggagtcccttctcgcttctctggatcca |
| | | | gatctgggacggatttcactctgaccatcagcagtctgcagccggaagacttcgcaact |
| | | | tattactgtcagcaacattatactactcctcccacgttcggacagggtaccaaggtgga |
| | | | gatcaaagagcccaaatcttgtgacaaaactTACacatgcccaccgtgcccagcacctg |
| | | | aactcGtggggggaccgtcagtcttcctcCtccccccaaaacccaaggacaccctcatg |
| | | | atctcccggacccctgaggtcacatgcgtggtggtggacgtgagccacgaagaccctga |
| | | | ggtcaagttcaactggtacgtggacggcgtggaggtgcataatgccaagacaaagccgc |
| | | | CggaggagcagtacaacagcacgCTccgtgtggtcagcgtcctcaccgtcctgcaccag |
| | | | gactggctgaatggcaaggagtacaagtgcaaggtctccaacaaagccctcccagcccc |
| | | | catcgagaaaaccatctccaaagccaaagggcagccccgagaaccacaggtgtacaccc |
| | | | tgcccccatcccgggaTgagCtgaccaagaaccaggtcagcctgacctgcctggtcaaa |
| | | | ggcttctatcccagcgacatcgccgtggagtgggagagcaatgggcagccggagaacaa |
| | | | ctacaagaccacgcctcTcgtgctggactccgacggctccttcttcctctacagcaagc |
| | | | tcaccgtggacaagagcaggtggcagcaggggaacgtcttctcatgctccgtgatgcat |
| | | | gaggctctgcacaaccactacacgcagaagagcctctccctgtctccgggtaaatagta |
| | | | gtaactcgaggacggggtgaactacgcctgaggatccgatctttttccctctgccaaaa |
| | | | attatggggacatcatgaagccccttgagcatctgacttctggctaataaaggaaattt |
| | | | attttcattgcaatagtgtgttggaattttttgtgtctctcactcggcctaggtagata |
| | | | agtagcatggcgggttaatcattaactacaaggaacccctagtgatggagttggccact |
| | | | ccctctctgcgcgctcgctcgctcactgaggccgggcgaccaaaggtcgcccgacgccc |
| | | | gggctttgcccgggcggcctcagtgagcgagcgagcgcgcag |
| HER-62 | 3284 | 5188 | ctgcgcgctcgctcgctcactgaggccgcccgggcaaagcccgggcgtcgggcgacctt |
| | | | tggtcgcccggcctcagtgagcgagcgagcgcgcagagagggagtggccaactccatca |
| | | | ctaggggttccttgtagttaatgattaacccgccatgctacttatctaccagggtaatg |
| | | | gggatcctctagaactatagctagtcgacattgattattgactagttattaatagtaat |
| | | | caattacggggtcattagttcatagcccatatatggagttccgcgttacataacttacg |
| | | | gtaaatggcccgcctggctgaccgcccaacgacccccgcccattgacgtcaataatgac |
| | | | gtatgttcccatagtaacgccaatagggactttccattgacgtcaatgggtggagtatt |
| | | | tacggtaaactgcccacttggcagtacatcaagtgtatcatatgccaagtacgccccct |
| | | | attgacgtcaatgacggtaaatggcccgcctggcattatgcccagtacatgaccttatg |
| | | | ggactttcctacttggcagtacatctacgtattagtcatcgctattaccatgtcgaggc |
| | | | cacgttctgcttcactctccccatctcccccccctccccacccccaattttgtatttat |
| | | | ttattttttaattattttgtgcagcgatgggggcggggggggggggcgcgcgccaggcg |
| | | | gggcggggcggggcgaggggcggggcggggcgaggcggagaggtgcggcggcagccaat |
| | | | cagagcggcgcgctccgaaagtttccttttatggcgaggcggcggcggcggcggcccta |
| | | | taaaaagcgaagcgcgcggcgggcgggagcaagcttcgtttagtgaaccgtcagatcgc |
| | | | ctggagacgccatccacgctgttttgacctccatagaagacaccgggaccgatccagcc |
| | | | tccgcggattcgaatcccggccgggaacggtgcattggaacgcggattccccgtgccaa |
| | | | gagtgacgtaagtaccgcctatagagtctataggcccacaaaaaatgctttcttctttt |
| | | | aatatacttttttgtttatcttatttctaatactttccctaatctctttctttcagggc |
| | | | aataatgatacaatgtatcatgcctctttgcaccattctaaagaataacagtgataatt |
| | | | tctgggttaaggcaatagcaatatttctgcatataaatatttctgcatataaattgtaa |
| | | | ctgatgtaagaggtttcatattgctaatagcagctacaatccagctaccattctgcttt |
| | | | tattttatggttgggataaggctggattattctgagtccaagctaggcccttttgctaa |
| | | | tcatgttcatacctcttatcttcctcccacagctcctgggcaacgtgctggtctgtgtg |
| | | | ctggcccatcactttggcaaagaattgggattcgaaccggtgccgccaccATGGACTGG |
| | | | ACCTGGAGGTTCCTCTTTGTGGTGGCAGCAGCTACAGGTGTCCAGTCCgaggttcagct |
| | | | ggtggagtctggcggtggcctggtgcagccagggggctcactccgtttgtcctgtgcag |
| | | | cttctggcttcaCcTTCaCCgacTATACCATGGATtgggtgcgtcaggccccgggtaag |
| | | | ggcctggaatgggttgcaGACGTGAATcctAATTCTggtGGTTCTATAtatAATCAGCG |
| | | | TTTCaagggccgtttcactCTGagcGTTgacCGTtccaaaaacacaCTGtacctgcaga |
| | | | tgaacagcctgcgtgctgaggacactgccgtctattattgtGCAagaAATCTGgggCCT |
| | | | AGCttctatTTCgacTACtggggtcaaggaaccctggtcaccgtctcctcgggtggtgg |
| | | | tggatccggaggaggaggaAGTggaggtggaggtTCTgatatccagatgacccagtccc |
| | | | cgagctccctgtccgcctctgtgggcgatagggtcaccatcacctgcAAAgccagtcag |
| | | | gatgtgTCCATTGGGgtagcctggtatcaacagaaaccaggaaaagctccgaaactact |
| | | | gatttactcggcatccTATCGCTACACGggagtcccttctcgcttctctggatccGGTt |
| | | | ctgggacggatttcactctgaccatcagcagtctgcagccggaagacttcgcaacttat |
| | | | tactgtcagcaaTACtatATCTATcctTACacgttcggacagggtaccaaggtggagat |
| | | | caaagagcccaaatcttgtgacaaaactTACacatgcccaccgtgcccagcacctgaac |
| | | | tcGtggggggaccgtcagtcttcctcCtccccccaaaacccaaggacaccctcatgatc |
| | | | tcccggacccctgaggtcacatgcgtggtggtggacgtgagccacgaagaccctgaggt |
| | | | caagttcaactggtacgtggacggcgtggaggtgcataatgccaagacaaagccgcCgg |
| | | | aggagcagtacaacagcacgCTccgtgtggtcagcgtcctcaccgtcctgcaccaggac |
| | | | tggctgaatggcaaggagtacaagtgcaaggtctccaacaaagccctcccagcccccat |
| | | | cgagaaaaccatctccaaagccaaagggcagccccgagaaccacaggtgtacaccctgc |
| | | | ccccatcccgggaTgagCtgaccaagaaccaggtcagcctgacctgcctggtcaaaggc |
| | | | ttctatcccagcgacatcgccgtggagtgggagagcaatgggcagccggagaacaacta |
| | | | caagaccacgcctcTcgtgctggactccgacggctccttcttcctctacagcaagctca |
| | | | ccgtggacaagagcaggtggcagcaggggaacgtcttctcatgctccgtgatgcatgag |
| | | | gctctgcacaaccactacacgcagaagagcctctccctgtctccgggtaaatagtagta |
| | | | actcgaggacggggtgaactacgcctgaggatccgatctttttccctctgccaaaaatt |
| | | | atggggacatcatgaagccccttgagcatctgacttctggctaataaaggaaatttatt |
| | | | ttcattgcaatagtgtgttggaattttttgtgtctctcactcggcctaggtagataagt |
| | | | agcatggcgggttaatcattaactacaaggaacccctagtgatggagttggccactccc |
| | | | tctctgcgcgctcgctcgctcactgaggccgggcgaccaaaggtcgcccgacgcccggg |
| | | | ctttgcccgggcggcctcagtgagcgagcgagcgcgcag |
| HER-69 | 4047 | 5169 | ctgcgcgctcgctcgctcactgaggccgcccgggcaaagcccgggcgtcgggcgacctt |
| | | | tggtcgcccggcctcagtgagcgagcgagcgcgcagagagggagtggccaactccatca |
| | | | ctaggggttccttgtagttaatgattaacccgccatgctacttatctaccagggtaatg |
| | | | gggatcctctagaactatagctagtcgacataacgcgtgatctaacatatcctggtgtg |
| | | | gagtagcggacgctgctatgacagaggctcgggggcctgagctggctctgtgagctggg |
| | | | gaggaggcagacagccaggccttgtctgcaagcagacctggcagcattgggctggccgc |
| | | | cccccagggcctcctcttcatgcccagtgaatgactcaccttggcacagacacaatgtt |
| | | | cggggtgggcacagtgcctgcttcccgccgcaccccagcccccctcaaatgccttccga |
| | | | gaagcccattgagcagggggcttgcattgcaccccagcctgacagcctggcatcttggg |
| | | | ataaaagcagcacagccccctaggggctgcccttgctgtgtggcgccaccggcggtgga |
| | | | gaacaaggctctattcagcctgtgcccaggaaaggggatcaggggatgcccaggcatgg |
| | | | acagtgggtggcagggggggagaggagggctgtctgcttcccagaagtccaaggacaca |
| | | | aatgggtgaggggagagctctccccatagctgggctgcggcccaaccccaccccctcag |
| | | | gctatgccagggggtgttgccaggggcacccgggcatcgccagtctagcccactccttc |
| | | | ataaagccctcgcatcccaggagcgagcagagccagagcaggttggagaggagacgcat |
| | | | cacctccgctgctcgcggggatcctctagaagcttcgtttagtgaaccgtcagatcgcc |
| | | | tggagacgccatccacgctgttttgacctccatagaagacaccgggaccgatccagcct |
| | | | ccgcggattcgaatcccggccgggaacggtgcattggaacgcggattccccgtgccaag |
| | | | agtgacgtaagtaccgcctatagagtctataggcccacaaaaaatgctttcttctttta |
| | | | atatacttttttgtttatcttatttctaatactttccctaatctctttctttcagggca |
| | | | ataatgatacaatgtatcatgcctctttgcaccattctaaagaataacagtgataattt |
| | | | ctgggttaaggcaatagcaatatttctgcatataaatatttctgcatataaattgtaac |
| | | | tgatgtaagaggtttcatattgctaatagcagctacaatccagctaccattctgctttt |
| | | | attttatggttgggataaggctggattattctgagtccaagctaggcccttttgctaat |
| | | | catgttcatacctcttatcttcctcccacagctcctgggcaacgtgctggtctgtgtgc |
| | | | tggcccatcactttggcaaagaattgggattcgaaccggtgccgccaccATGGACTGGA |
| | | | CCTGGAGGTTCCTCTTTGTGGTGGCAGCAGCTACAGGTGTCCAGTCCCAGGTGCAGCTG |
| | | | CAGCAGAGCGGCCCCGAGCTGGTGAAGCCCGGCGCCAGCCTGAAGCTGAGCTGCACCGC |
| | | | CAGCGGCTTCAACATCAAGGACACCTACATCCACTGGGTGAAGCAGAGACCCGAGCAGG |
| | | | GCCTGGAGTGGATCGGCAGAATCTACCCCACCAACGGCTACACCAGATACGACCCCAAG |
| | | | TTCCAGGACAAGGCCACCATCACCGCCGACACCAGCAGCAACACCGCCTACCTGCAGGT |
| | | | GAGCAGACTGACCAGCGAGGACACCGCCGTGTACTACTGCAGCAGATGGGGCGGCGACG |
| | | | GCTTCTACGCCATGGACTACTGGGGCCAGGGCGCCAGCGTGACCGTGAGCAGCgcgtcg |
| | | | accaagggcccatcggtcttccccctggcaccctcctccaagagcacctctgggggcac |
| | | | agcggccctgggctgcctggtcaaggactacttccccgaacctgtgacggtctcgtgga |
| | | | actcaggcgccctgaccagcggcgtgcacaccttcccggctgtcctacagtcctcagga |
| | | | ctctactccctcagcagcgtggtgaccgtgccctccagcagcttgggcacccagaccta |
| | | | catctgcaacgtgaatcacaagcccagcaacaccaaggtggacaagaGagttgagccca |
| | | | aatcttgtgacaaaactcacacatgcccaccgtgcccagcacctgaactcGtgggggga |
| | | | ccgtcagtcttcctcCtccccccaaaacccaaggacaccctcatgatctcccggacccc |
| | | | tgaggtcacatgcgtggtggtggacgtgagccacgaagaccctgaggtcaagttcaact |
| | | | ggtacgtggacggcgtggaggtgcataatgccaagacaaagccgcCggaggagcagtac |
| | | | aacagcacgCTccgtgtggtcagcgtcctcaccgtcctgcaccaggactggctgaatgg |
| | | | caaggagtacaagtgcaaggtctccaacaaagccctcccagcccccatcgagaaaacca |
| | | | tctccaaagccaaagggcagccccgagaaccacaggtgtacaccctgcccccatcccgg |
| | | | gaTgagCtgaccaagaaccaggtcagcctgacctgcctggtcaaaggcttctatcccag |
| | | | cgacatcgccgtggagtgggagagcaatgggcagccggagaacaactacaagaccacgc |
| | | | ctcTcgtgctggactccgacggctccttcttcctctacagcaagctcaccgtggacaag |
| | | | agcaggtggcagcaggggaacgtcttctcatgctccgtgatgcatgaggctctgcacaa |
| | | | ccactacacgcagaagagcctctccctgtctccgggtaaaagaaagaggcgagagggca |
| | | | gaggaagtcttctaacatgcggtgacgtggaggagaatcccggccctATGGACATGAGG |
| | | | GTCCCTGCTCAGCTCCTGGGGCTCCTGCTGCTCTGGCTCTCAGGTGCCAGATGTGACAT |
| | | | CGTGATGACCCAGAGCCACAAGTTCATGAGCACCAGCGTGGGCGACAGAGTGAGCATCA |
| | | | CCTGCAAGGCCAGCCAGGACGTGAACACCGCCGTGGCCTGGTACCAGCAGAAGCCCGGC |
| | | | CACAGCCCCAAGCTGCTGATCTACAGCGCCAGCTTCAGATACACCGGCGTGCCGGACAG |
| | | | ATTCACCGGCAGCAGAAGCGGCACCGACTTCACCTTCACCATCAGCAGCGTGCAGGCCG |
| | | | AGGACCTGGCCGTGTACTACTGCCAGCAGCACTACACCACCCCTCCTACCTTCGGCGGC |
| | | | GGCACCAAGGTGGAGATCAAGAGAACCGTGGCCGCCCCTAGCGTGTTCATCTTCCCGCC |
| | | | AAGCGACGAGCAGCTGAAGAGCGGCACCGCCAGCGTGGTGTGCCTGCTGAACAACTTCT |
| | | | ACCCCAGAGAGGCCAAGGTGCAGTGGAAGGTGGACAACGCCCTGCAGAGCGGCAACAGC |
| | | | CAGGAGAGCGTGACCGAGCAGGACAGCAAGGACAGCACCTACAGCCTGAGCAGCACCCT |
| | | | GACCCTGAGCAAGGCCGACTACGAGAAGCACAAGGTGTACGCCTGCGAGGTGACCCACC |
| | | | AGGGCCTGAGCAGCCCCGTGACCAAGAGCTTCAACAGAGGCGAGTGCtagtagtaactc |
| | | | gaggacggggtgaactacgcctgaggatccgatctttttccctctgccaaaaattatgg |
| | | | ggacatcatgaagccccttgagcatctgacttctggctaataaaggaaatttattttca |
| | | | ttgcaatagtgtgttggaattttttgtgtctctcactcggcctaggtagataagtagca |
| | | | tggcgggttaatcattaactacaaggaacccctagtgatggagttggccactccctctc |
| | | | tgcgcgctcgctcgctcactgaggccgggcgaccaaaggtcgcccgacgcccgggcttt |
| | | | gcccgggcggcctcagtgagcgagcgagcgcgcag |
| HER-73 | 4742 | 5189 | ctgcgcgctcgctcgctcactgaggccgcccgggcaaagcccgggcgtcgggcgacctt |
| | | | tggtcgcccggcctcagtgagcgagcgagcgcgcagagagggagtggccaactccatca |
| | | | ctaggggttccttgtagttaatgattaacccgccatgctacttatctaccagggtaatg |
| | | | gggatcctctagaactatagctagtcgacattgattattgactagttattaatagtaat |
| | | | caattacggggtcattagttcatagcccatatatggagttccgcgttacataacttacg |
| | | | gtaaatggcccgcctggctgaccgcccaacgacccccgcccattgacgtcaataatgac |
| | | | gtatgttcccatagtaacgccaatagggactttccattgacgtcaatgggtggagtatt |
| | | | tacggtaaactgcccacttggcagtacatcaagtgtatcatatgccaagtacgccccct |
| | | | attgacgtcaatgacggtaaatggcccgcctggcattatgcccagtacatgaccttatg |
| | | | ggactttcctacttggcagtacatctacgtattagtcatcgctattaccatgtcgaggc |
| | | | cacgttctgcttcactctccccatctcccccccctccccacccccaattttgtatttat |
| | | | ttattttttaattattttgtgcagcgatgggggcggggggggggggcgcgcgccaggcg |
| | | | gggcggggcggggcgaggggcggggcggggcgaggcggagaggtgcggcggcagccaat |
| | | | cagagcggcgcgctccgaaagtttccttttatggcgaggcggcggcggcggcggcccta |
| | | | taaaaagcgaagcgcgcggcgggcgggagcaagcttcgtttagtgaaccgtcagatcgc |
| | | | ctggagacgccatccacgctgttttgacctccatagaagacaccgggaccgatccagcc |
| | | | tccgcggattcgaatcccggccgggaacggtgcattggaacgcggattccccgtgccaa |
| | | | gagtgacgtaagtaccgcctatagagtctataggcccacaaaaaatgctttcttctttt |
| | | | aatatacttttttgtttatcttatttctaatactttccctaatctctttctttcagggc |
| | | | aataatgatacaatgtatcatgcctctttgcaccattctaaagaataacagtgataatt |
| | | | tctgggttaaggcaatagcaatatttctgcatataaatatttctgcatataaattgtaa |
| | | | ctgatgtaagaggtttcatattgctaatagcagctacaatccagctaccattctgcttt |
| | | | tattttatggttgggataaggctggattattctgagtccaagctaggcccttttgctaa |
| | | | tcatgttcatacctcttatcttcctcccacagctcctgggcaacgtgctggtctgtgtg |
| | | | ctggcccatcactttggcaaagaattgggattcgaaccggtgccgccaccATGGACTGG |
| | | | ACCTGGAGGTTCCTCTTTGTGGTGGCAGCAGCTACAGGTGTCCAGTCCCAAgttcagct |
| | | | ggtgCAGtctggTGCAGAAGTTAAGAAGccagggGCAtcaGTAAAGGTGTCCtgCAAGg |
| | | | cttctggcTACTCTTTCACTGGGTATTTCataAATtgggtgAGAGAGgccccCGGCCAG |
| | | | ggcctggaatggATGGGCCATattTCCTCCTCTTATGCAACTTCTACAtatAACCAGAA |
| | | | GTTTCAGggcAGAGTCactTTCACTGTGgacacatccAGCTCTacagcctacATGGAGC |
| | | | TGTCAagcctgAGATCTgaggacactgcagtctattattgtGTGagaAGTggaAACTAt |
| | | | GAAGAGTATgctatggacTACtggggtcaaggaaccctggtcacAgtctcctcAgcCtc |
| | | | TaccaagggcccatcTgtcttccccctggcaccctcctccaagagcacctctgggggca |
| | | | cagcAgccctgggctgcctggtcaaggactacttcccTgaacctgtgacAgtctcTtgg |
| | | | aactcaggGgccctgaccTCTggGgtgcacaccttcccAgctgtcctacagtcctcagg |
| | | | actctactccctcTCTTCTgtggtgacAgtgccctccagcagcttgggcacccagacct |
| | | | acatctgcaaTgtgaatcacaagcccagcaacaccaaggtggacaagaaagttgagccc |
| | | | CCCaaatcttgtgacaaaactcacacatgcccaccCtgcccagcacctgaactcctggg |
| | | | gggaccCtcagtcttcctcttccccccaaaacccaaggacaccctcatgatctccAGAa |
| | | | cccctgaggtcacatgTgtggtggtggaTgtgagccaTgaagaccctgaggtcaagttc |
| | | | aactggtaTgtggaTggGgtggaggtgcataatgccaagacaaagccCAGAgaggagca |
| | | | gtacaacagcacCtacAGAgtggtcTCAgtcctcacTgtcctgcaccaggactggctga |
| | | | atggcaaggagtacaagtgcaaggtctccaacaaagccctcccagcccccatAgagaaa |
| | | | accatctccaaagccaaagggcagcccAGAgaaccacaggtgtacaccctgcccccatc |
| | | | cAGAgatgagctgaccaagaaccaggtcagcctgacctgcctggtcaaaggcttctatc |
| | | | ccTCTgacatTgcTgtggagtgggagagcaatgggcagccAgagaacaactacaagacc |
| | | | acCcctccAgtgctggactcTgatggctccttcttcctctacagcaagctcacAgtgga |
| | | | caagagcaggtggcagcaggggaaTgtcttctcatgctcTgtgatgcatgaggctctgc |
| | | | acaaccactacacTcagaagagcctctccctgtctccTggtaaaagaaagaggAGAgag |
| | | | ggcagaggaagtcttctaacatgTggtgaTgtggaggagaatccTggccctATGGACAT |
| | | | GAGGGTCCCTGCTCAGCTCCTGGGGCTCCTGCTGCTCTGGCTCTCAGGTGCCAGATGTg |
| | | | aggttcagctggtggagtctggTggtggcctGgtgcagccagggggctcactcAGAttg |
| | | | tcctgtgcagcttctggcttcaacattaaagacacctatatacactgggtgAGAcaggc |
| | | | cccTggAaagggcctggaatgggttgcaaggatttatcctacTaatggttatactagat |
| | | | atgcAgatagTgtcaagggcAGAttcactataagTgcagacacatccaaaaacacagcc |
| | | | tacctgcagatgaacagcctgAGAgctgaggacactgcAgtctattattgttctagatg |
| | | | gggaggggaTggcttctatgctatggacTACtggggtcaaggaaccctggtcacAgtct |
| | | | cctcTggtggtggtggatcTggaggaggaggaAGTggaggtggaggtTCTgatatccag |
| | | | atgacccagtccccAagctccctgtcTgcctctgtgggGgatagggtcaccatcacctg |
| | | | cAGAgccagtcaggatgtgaatactgctgtagcctggtatcaacagaaaccaggaaaag |
| | | | ctccCaaactactgatttactcTgcatccttcctcTACtctggagtcccttctAGAttc |
| | | | tctggatccagatctggCacTgaCttcactctgaccatcagTagtctgcagccTgaaga |
| | | | cttTgcaacttattactgtcaAcaacattatactactcctcccacCttTggacagggta |
| | | | ccaaggtggagatcaaaGGCTCTgatatTGTACTGacccagtccccTGACtccctgGCT |
| | | | GTGtctCTGggGGAAaggGCAaccatcAACtgcAGGAGTagtcagACCCTTCTGTACTC |
| | | | TAATAACCAGAAAAACTACCTGgcctggtatcaaAAAaaaccaggaCAGCCTccTaaac |
| | | | tactgattAGTTGGgcaTTCACTAGGAAGtctggagtccctGACAGGttctctggatcT |
| | | | GGGtcTggAacAgatttcacActgaccatcagcagtctgcagGCTgaagaTGTTgcaGT |
| | | | CtaCtactgtcagcaaTACTCAAACTACcctTGGacTttTggacagggGaccaaAgtgg |
| | | | agatcaaaAGGactgtCgctgcaccatctgtcttcatcttcccAccatctgatgagcag |
| | | | ttgaaatctggaactgcctctgttAAGtgcctgctgaataacttctatcccagagaggc |
| | | | caaagtacagtggaaggtggataaTgccctccaaAGTggtaactcccaggagagtgtca |
| | | | cagagcaggacagcaaggacagcacctacagcctcagcagcaccctgacCctgagcaaa |
| | | | gcagactaTgagaaacacaaagtctaTgcctgTgaagtcacccatcagggcctgagcAG |
| | | | CccAgtcacaaagagcttcaacaggggagagtgttagtagtaactcgaggacggggtga |
| | | | actacgcctgaggatccgatctttttccctctgccaaaaattatggggacatcatgaag |
| | | | ccccttgagcatctgacttctggctaataaaggaaatttattttcattgcaatagtgtg |
| | | | ttggaattttttgtgtctctcactcggcctaggtagataagtagcatggcgggttaatc |
| | | | attaactacaaggaacccctagtgatggagttggccactccctctctgcgcgctcgctc |
| | | | gctcactgaggccgggcgaccaaaggtcgcccgacgcccgggctttgcccgggcggcct |
| | | | cagtgagcgagcgagcgcgcag |
| HER-75 | 3989 | 5190 | ctgcgcgctcgctcgctcactgaggccgcccgggcaaagcccgggcgtcgggcgacctt |
| | | | tggtcgcccggcctcagtgagcgagcgagcgcgcagagagggagtggccaactccatca |
| | | | ctaggggttccttgtagttaatgattaacccgccatgctacttatctaccagggtaatg |
| | | | gggatcctctagaactatagctagtcgacattgattattgactagttattaatagtaat |
| | | | caattacggggtcattagttcatagcccatatatggagttccgcgttacataacttacg |
| | | | gtaaatggcccgcctggctgaccgcccaacgacccccgcccattgacgtcaataatgac |
| | | | gtatgttcccatagtaacgccaatagggactttccattgacgtcaatgggtggagtatt |
| | | | tacggtaaactgcccacttggcagtacatcaagtgtatcatatgccaagtacgccccct |
| | | | attgacgtcaatgacggtaaatggcccgcctggcattatgcccagtacatgaccttatg |
| | | | ggactttcctacttggcagtacatctacgtattagtcatcgctattaccatgtcgaggc |
| | | | cacgttctgcttcactctccccatctcccccccctccccacccccaattttgtatttat |
| | | | ttattttttaattattttgtgcagcgatgggggcggggggggggggcgcgcgccaggcg |
| | | | gggcggggcggggcgaggggcggggcggggcgaggcggagaggtgcggcggcagccaat |
| | | | cagagcggcgcgctccgaaagtttccttttatggcgaggcggcggcggcggcggcccta |
| | | | taaaaagcgaagcgcgcggcgggcgggagcaagcttcgtttagtgaaccgtcagatcgc |
| | | | ctggagacgccatccacgctgttttgacctccatagaagacaccgggaccgatccagcc |
| | | | tccgcggattcgaatcccggccgggaacggtgcattggaacgcggattccccgtgccaa |
| | | | gagtgacgtaagtaccgcctatagagtctataggcccacaaaaaatgctttcttctttt |
| | | | aatatacttttttgtttatcttatttctaatactttccctaatctctttctttcagggc |
| | | | aataatgatacaatgtatcatgcctctttgcaccattctaaagaataacagtgataatt |
| | | | tctgggttaaggcaatagcaatatttctgcatataaatatttctgcatataaattgtaa |
| | | | ctgatgtaagaggtttcatattgctaatagcagctacaatccagctaccattctgcttt |
| | | | tattttatggttgggataaggctggattattctgagtccaagctaggcccttttgctaa |
| | | | tcatgttcatacctcttatcttcctcccacagctcctgggcaacgtgctggtctgtgtg |
| | | | ctggcccatcactttggcaaagaattgggattcgaaccggtgccgccaccATGGACTGG |
| | | | ACCTGGAGGTTCCTCTTTGTGGTGGCAGCAGCTACAGGTGTCCAGTCTgaggttcagct |
| | | | ggtggagtctggAggtggcctggtgcagccagggggctcactcAGAttgtcctgtgcag |
| | | | cttctggcttcaacattaaagacacctatatacactgggtgagacaggccccAggtaag |
| | | | ggcctggaatgggttgcaaggatttatcctacCaatggttatactagatatgcTgatTC |
| | | | TgtcaagggcAGAttcactataTCTgcagacacatccaaaaacacagcctacctgcaga |
| | | | tgaacagcctgAGAgctgaggacactgcTgtctattattgttctagatggggaggggaT |
| | | | ggcttctatgctatggacTACtggggtcaaggaaccctggtcacAgtctcctcTgcCtc |
| | | | TaccaagggcccatcTgtcttccccctggcaccctcctccaagagcacctctgggggca |
| | | | cagcTgccctgggctgcctggtcaaggactacttcccTgaacctgtgacAgtctcCtgg |
| | | | aactcaggAgccctgaccagTggAgtgcacaccttcccTgctgtcctacagtcctcagg |
| | | | actctactccctcagcTCTgtggtgacAgtgccctccagcagcttgggcacccagacct |
| | | | acatctgcaaTgtgaatcacaagcccagcaacaccaaggtggacaagaGagttgagccc |
| | | | aaatcttgtgacaaaactcacacatgcccaccTtgcccagcacctgaactGGtgggggg |
| | | | accAtcagtcttcctcCtccccccaaaacccaaggacaccctcatgatctccAGAaccc |
| | | | ctgaggtcacatgTgtggtggtggaTgtgagccaTgaagaccctgaggtcaagttcaac |
| | | | tggtaTgtggaTggAgtggaggtgcataatgccaagacaaagccCcCTgaggagcagta |
| | | | caacagcacTCTcAGAgtggtcTCTgtcctcacAgtcctgcaccaggactggctgaatg |
| | | | gcaaggagtacaagtgcaaggtctccaacaaagccctcccagcccccatTgagaaaacc |
| | | | atctccaaagccaaagggcagcccAGAgaaccacaggtgtacaccctgcccccatccAG |
| | | | AgaTgagCtgaccaagaaccaggtcagcctgacctgcctggtcaaaggcttctatcccT |
| | | | CTgacatTgcTgtggagtgggagagcaatgggcagccTgagaacaactacaagaccacA |
| | | | cctcTTgtgctggactcTgaTggctccttcttcctctacagcaagctcacAgtggacaa |
| | | | gagcaggtggcagcaggggaaTgtcttctcatgcTCTgtgatgcatgaggctctgcaca |
| | | | accactacacCcagaagagcctctccctgtctccAggtaaaagaaagaggAGAgagggc |
| | | | agaggaagtcttctaacatgTggtgaTgtggaggagaatccTggccctATGGACATGAG |
| | | | GGTCCCTGCTCAGCTCCTGGGGCTCCTGCTGCTCTGGCTCTCAGGTGCCAGATGTgata |
| | | | tccagatgacccagtccccTagctccctgtcTgcctctgtgggAgatagggtcaccatc |
| | | | acctgcAGAgccagtcaggatgtgaatactgctgtagcctggtatcaacagaaaccagg |
| | | | aaaagctccTaaactactgatttactcTgcatccttcctcTACtctggagtcccttctA |
| | | | GGttctctggatccagatctgggacTgatttcactctgaccatcagcagtctgcagccA |
| | | | gaagacttTgcaacttattactgtcagcaacattatactactcctcccacTttTggaca |
| | | | gggtaccaaggtggagatcaaaAGAactgtggctgcaccatctgtcttcatcttcccAc |
| | | | catctgatgagcagttgaaatctggaactgcctctgttgtgtgcctgctgaataacttc |
| | | | tatcccagagaggccaaagtacagtggaaggtggataaTgccctccaatcAggtaactc |
| | | | ccaggagagtgtcacagagcaggacagcaaggacagcacctacagcctcagcagcaccc |
| | | | tgacTctgagcaaagcagactaTgagaaacacaaagtctaTgcctgTgaagtcacccat |
| | | | cagggcctgagctcTccTgtcacaaagagcttcaacaggggagagtgttagtagtaact |
| | | | cgaggacggggtgaactacgcctgaggatccgatctttttccctctgccaaaaattatg |
| | | | gggacatcatgaagccccttgagcatctgacttctggctaataaaggaaatttattttc |
| | | | attgcaatagtgtgttggaattttttgtgtctctcactcggcctaggtagataagtagc |
| | | | atggcgggttaatcattaactacaaggaacccctagtgatggagttggccactccctct |
| | | | ctgcgcgctcgctcgctcactgaggccgggcgaccaaaggtcgcccgacgcccgggctt |
| | | | tgcccgggcggcctcagtgagcgagcgagcgcgcag |
| HER-77 | 3978 | 5343 | ctgcgcgctcgctcgctcactgaggccgcccgggcaaagcccgggcgtcgggcgacctt |
| | | | tggtcgcccggcctcagtgagcgagcgagcgcgcagagagggagtggccaactccatca |
| | | | ctaggggttccttgtagttaatgattaacccgccatgctacttatctaccagggtaatg |
| | | | gggatcctctagaactatagctagtcgacattgattattgactagttattaatagtaat |
| | | | caattacggggtcattagttcatagcccatatatggagttccgcgttacataacttacg |
| | | | gtaaatggcccgcctggctgaccgcccaacgacccccgcccattgacgtcaataatgac |
| | | | gtatgttcccatagtaacgccaatagggactttccattgacgtcaatgggtggagtatt |
| | | | tacggtaaactgcccacttggcagtacatcaagtgtatcatatgccaagtacgccccct |
| | | | attgacgtcaatgacggtaaatggcccgcctggcattatgcccagtacatgaccttatg |
| | | | ggactttcctacttggcagtacatctacgtattagtcatcgctattaccatgtcgaggc |
| | | | cacgttctgcttcactctccccatctcccccccctccccacccccaattttgtatttat |
| | | | ttattttttaattattttgtgcagcgatgggggcggggggggggggcgcgcgccaggcg |
| | | | gggcggggcggggcgaggggcggggcggggcgaggcggagaggtgcggcggcagccaat |
| | | | cagagcggcgcgctccgaaagtttccttttatggcgaggcggcggcggcggcggcccta |
| | | | taaaaagcgaagcgcgcggcgggcgggagcaagcttcgtttagtgaaccgtcagatcgc |
| | | | ctggagacgccatccacgctgttttgacctccatagaagacaccgggaccgatccagcc |
| | | | tccgcggattcgaatcccggccgggaacggtgcattggaacgcggattccccgtgccaa |
| | | | gagtgacgtaagtaccgcctatagagtctataggcccacaaaaaatgctttcttctttt |
| | | | aatatacttttttgtttatcttatttctaatactttccctaatctctttctttcagggc |
| | | | aataatgatacaatgtatcatgcctctttgcaccattctaaagaataacagtgataatt |
| | | | tctgggttaaggcaatagcaatatttctgcatataaatatttctgcatataaattgtaa |
| | | | ctgatgtaagaggtttcatattgctaatagcagctacaatccagctaccattctgcttt |
| | | | tattttatggttgggataaggctggattattctgagtccaagctaggcccttttgctaa |
| | | | tcatgttcatacctcttatcttcctcccacagctcctgggcaacgtgctggtctgtgtg |
| | | | ctggcccatcactttggcaaagaattgggattcgaaccggtgccgccaccATGGACTGG |
| | | | ACCTGGAGGTTCCTCTTTGTGGTGGCAGCAGCTACAGGTGTCCAGTCCGAAGTGCAGCT |
| | | | GGTGGAAAGCGGCGGAGGACTGGTGCAGCCTGGCGGATCTCTGAGACTGAGCTGTGCCG |
| | | | CCAGCGGCTTCAACATCAAGGACACCTACATCCACTGGGTGCGCCAGGCCCCTGGCAAG |
| | | | GGACTGGAATGGGTGGCCAGAATCTACCCCACCAACGGCTACACCAGATACGCCGACAG |
| | | | CGTGAAGGGCCGGTTCACCATCAGCGCCGACACCAGCAAGAACACCGCCTACCTGCAGA |
| | | | TGAACAGCCTGCGGGCCGAGGACACCGCCGTGTACTACTGTAGTAGATGGGGAGGCGAC |
| | | | GGCTTCTACGCCATGGACTATTGGGGCCAGGGCACCCTCGTGACAGTGTCTAGTGCGTC |
| | | | GACCAAGGGGCCCTCGGTCTTCCCCCTGGCACCCTCCTCCAAGAGCACCTCTGGGGGCA |
| | | | CAGCGGCCCTGGGCTGCCTGGTCAAGGACTACTTCCCCGAACCGGTGACGGTGTCGTGG |
| | | | AACTCAGGCGCCCTGACCAGCGGCGTGCACACCTTCCCGGCTGTCCTACAGTCCTCAGG |
| | | | ACTCTACTCCCTCAGCAGCGTGGTGACCGTGCCCTCCAGCAGCTTGGGCACCCAGACCT |
| | | | ACATCTGCAACGTGAATCACAAGCCCAGCAACACCAAGGTGGACAAGAAAGTTGAGCCC |
| | | | AAATCTTGTGACAAAACTCACACATGCCCACCGTGCCCAGCACCTGAACTCCTGGGGGG |
| | | | ACCGTCAGTCTTCCTCTTCCCCCCAAAACCCAAGGACACCCTCATGATCTCCCGGACCC |
| | | | CTGAGGTCACATGCGTGGTGGTGGACGTGAGCCACGAAGACCCTGAGGTCAAGTTCAAC |
| | | | TGGTACGTGGACGGCGTGGAGGTGCATAATGCCAAGACAAAGCCGCGGGAGGAGCAGTA |
| | | | CAACAGCACGTACCGTGTGGTCAGCGTCCTCACCGTCCTGCACCAGGACTGGCTGAATG |
| | | | GCAAGGAGTACAAGTGCAAGGTCTCCAACAAAGCCCTCCCAGCCCCCATCGAGAAAACC |
| | | | ATCTCCAAAGCCAAAGGGCAGCCCCGAGAACCACAGGTGTACACCCTGCCCCCATCCCG |
| | | | GGATGAGCTGACCAAGAACCAGGTCAGCCTGACCTGCCTGGTCAAAGGCTTCTATCCCA |
| | | | GCGACATCGCCGTGGAGTGGGAGAGCAATGGGCAGCCGGAGAACAACTACAAGACCACG |
| | | | CCTCCCGTGCTGGACTCCGACGGCTCCTTCTTCCTCTACAGCAAGCTCACCGTGGACAA |
| | | | GAGCAGGTGGCAGCAGGGGAACGTCTTCTCATGCTCCGTGATGCATGAGGCTCTGCACA |
| | | | ACCACTACACGCAGAAGAGCCTCTCCCTGTCTCCCGGCAAGagaaagaggcgagagggc |
| | | | agaggaagtcttctaacatgcggtgacgtggaggagaatcccggccctATGGACATGAG |
| | | | GGTCCCTGCTCAGCTCCTGGGGCTCCTGCTGCTCTGGCTCTCAGGTGCCAGATGTGATA |
| | | | TCCAGATGACCCAGAGCCCCAGCAGCCTGTCTGCCAGCGTGGGCGACAGAGTGACCATC |
| | | | ACCTGTAGAGCCAGCCAGGACGTGAACACCGCCGTGGCCTGGTATCAGCAGAAGCCTGG |
| | | | CAAGGCCCCCAAGCTGCTGATCTACAGCGCCAGCTTCCTGTACAGCGGCGTGCCCAGCA |
| | | | GATTCAGCGGCAGCAGATCCGGCACCGACTTCACCCTGACCATCAGCTCCCTGCAGCCC |
| | | | GAGGACTTCGCCACCTACTACTGCCAGCAGCACTACACCACCCCCCCCACATTTGGCCA |
| | | | GGGCACCAAGGTGGAAATCAAGCGTACGGTGGCTGCACCATCTGTCTTCATCTTCCCGC |
| | | | CATCTGATGAGCAGTTGAAATCTGGAACTGCCTCTGTTGTGTGCCTGCTGAATAACTTC |
| | | | TACCCCAGAGAAGCCAAAGTGCAGTGGAAGGTGGACAACGCCCTGCAGAGCGGAAACAG |
| | | | CCAGGAAAGCGTGACAGAGCAGGATTCCAAGGATTCCACATACAGCCTGAGCAGCACAC |
| | | | TGACACTGTCCAAGGCCGACTACGAGAAGCACAAGGTGTACGCCTGCGAAGTGACACAC |
| | | | CAGGGACTGTCCTCCCCTGTGACAAAGAGCTTCAACAGAGGAGAATGCtagtagtaact |
| | | | cgaggacggggtgaactacgcctgaggatccgatctttttccctctgccaaaaattatg |
| | | | gggacatcatgaagccccttgagcatctgacttctggctaataaaggaaatttattttc |
| | | | attgcaatagtgtgttggaattttttgtgtctctcactcggcctaggtagataagtagc |
| | | | atggcgggttaatcattaactacaaggaacccctagtgatggagttggccactccctct |
| | | | ctgcgcgctcgctcgctcactgaggccgggcgaccaaaggtcgcccgacgcccgggctt |
| | | | tgcccgggcggcctcagtgagcgagcgagcgcgcag |
| HER-78 | 4739 | 5375 | ctgcgcgctcgctcgctcactgaggccgcccgggcaaagcccgggcgtcgggcgacctt |
| | | | tggtcgcccggcctcagtgagcgagcgagcgcgcagagagggagtggccaactccatca |
| | | | ctaggggttccttgtagttaatgattaacccgccatgctacttatctaccagggtaatg |
| | | | gggatcctctagaactatagctagtcgacattgattattgactagttattaatagtaat |
| | | | caattacggggtcattagttcatagcccatatatggagttccgcgttacataacttacg |
| | | | gtaaatggcccgcctggctgaccgcccaacgacccccgcccattgacgtcaataatgac |
| | | | gtatgttcccatagtaacgccaatagggactttccattgacgtcaatgggtggagtatt |
| | | | tacggtaaactgcccacttggcagtacatcaagtgtatcatatgccaagtacgccccct |
| | | | attgacgtcaatgacggtaaatggcccgcctggcattatgcccagtacatgaccttatg |
| | | | ggactttcctacttggcagtacatctacgtattagtcatcgctattaccatgtcgaggc |
| | | | cacgttctgcttcactctccccatctcccccccctccccacccccaattttgtatttat |
| | | | ttattttttaattattttgtgcagcgatgggggcggggggggggggcgcgcgccaggcg |
| | | | gggcggggcggggcgaggggcggggcggggcgaggcggagaggtgcggcggcagccaat |
| | | | cagagcggcgcgctccgaaagtttccttttatggcgaggcggcggcggcggcggcccta |
| | | | taaaaagcgaagcgcgcggcgggcgggagcaagcttcgtttagtgaaccgtcagatcgc |
| | | | ctggagacgccatccacgctgttttgacctccatagaagacaccgggaccgatccagcc |
| | | | tccgcggattcgaatcccggccgggaacggtgcattggaacgcggattccccgtgccaa |
| | | | gagtgacgtaagtaccgcctatagagtctataggcccacaaaaaatgctttcttctttt |
| | | | aatatacttttttgtttatcttatttctaatactttccctaatctctttctttcagggc |
| | | | aataatgatacaatgtatcatgcctctttgcaccattctaaagaataacagtgataatt |
| | | | tctgggttaaggcaatagcaatatttctgcatataaatatttctgcatataaattgtaa |
| | | | ctgatgtaagaggtttcatattgctaatagcagctacaatccagctaccattctgcttt |
| | | | tattttatggttgggataaggctggattattctgagtccaagctaggcccttttgctaa |
| | | | tcatgttcatacctcttatcttcctcccacagctcctgggcaacgtgctggtctgtgtg |
| | | | ctggcccatcactttggcaaagaattgggattcgaaccggtgccgccaccATGGACTGG |
| | | | ACCTGGAGGTTCCTCTTTGTGGTGGCAGCAGCTACAGGTGTCCAGTCCCAAgttcagct |
| | | | ggtgCAGtctggTGCAGAAGTTAAGAAGccagggGCAtcaGTAAAGGTGTCCtgCAAGg |
| | | | cttctggcTACTCTTTCACTGGGTATTTCataAATtgggtgAGAGAGgccccCGGCCAG |
| | | | ggcctggaatggATGGGCCATattTCCTCCTCTTATGCAACTTCTACAtatAACCAGAA |
| | | | GTTTCAGggcAGAGTCactTTCACTGTGgacacatccAGCTCTacagcctacATGGAGC |
| | | | TGTCAagcctgAGATCTgaggacactgcagtctattattgtGTGagaAGTggaAACTAt |
| | | | GAAGAGTATgctatggacTACtggggtcaaggaaccctggtcacAgtctcctcAgcCtc |
| | | | TaccaagggcccatcTgtcttccccctggcaccctcctccaagagcacctctgggggca |
| | | | cagcTgccctgggctgcctggtcaaggactacttcccTgaacctgtgacAgtctcCtgg |
| | | | aactcaggAgccctgaccagTggAgtgcacaccttcccTgctgtcctacagtcctcagg |
| | | | actctactccctcagcTCTgtggtgacAgtgccctccagcagcttgggcacccagacct |
| | | | acatctgcaaTgtgaatcacaagcccagcaacaccaaggtggacaagaGagttgagccc |
| | | | aaatcttgtgacaaaactcacacatgcccaccTtgcccagcacctgaactGGtgggggg |
| | | | accAtcagtcttcctcCtccccccaaaacccaaggacaccctcatgatctccAGAaccc |
| | | | ctgaggtcacatgTgtggtggtggaTgtgagccaTgaagaccctgaggtcaagttcaac |
| | | | tggtaTgtggaTggAgtggaggtgcataatgccaagacaaagccCcCTgaggagcagta |
| | | | caacagcacTCTcAGAgtggtcTCTgtcctcacAgtcctgcaccaggactggctgaatg |
| | | | gcaaggagtacaagtgcaaggtctccaacaaagccctcccagcccccatTgagaaaacc |
| | | | atctccaaagccaaagggcagcccAGAgaaccacaggtgtacaccctgcccccatccAG |
| | | | AgaTgagCtgaccaagaaccaggtcagcctgacctgcctggtcaaaggcttctatcccT |
| | | | CTgacatTgcTgtggagtgggagagcaatgggcagccTgagaacaactacaagaccacA |
| | | | cctcTTgtgctggactcTgaTggctccttcttcctctacagcaagctcacAgtggacaa |
| | | | gagcaggtggcagcaggggaaTgtcttctcatgcTCTgtgatgcatgaggctctgcaca |
| | | | accactacacCcagaagagcctctccctgtctccAggtaaaagaaagaggAGAgagggc |
| | | | agaggaagtcttctaacatgTggtgaTgtggaggagaatccTggccctATGGACATGAG |
| | | | GGTCCCTGCTCAGCTCCTGGGGCTCCTGCTGCTCTGGCTCTCAGGTGCCAGATGTgagg |
| | | | ttcagctggtggagtctggTggtggcctGgtgcagccagggggctcactcAGAttgtcc |
| | | | tgtgcagcttctggcttcaacattaaagacacctatatacactgggtgAGAcaggcccc |
| | | | TggAaagggcctggaatgggttgcaaggatttatcctacTaatggttatactagatatg |
| | | | cAgatagTgtcaagggcAGAttcactataagTgcagacacatccaaaaacacagcctac |
| | | | ctgcagatgaacagcctgAGAgctgaggacactgcAgtctattattgttctagatgggg |
| | | | aggggaTggcttctatgctatggacTACtggggtcaaggaaccctggtcacAgtctcct |
| | | | cTggtggtggtggatcTggaggaggaggaAGTggaggtggaggtTCTgatatccagatg |
| | | | acccagtccccAagctccctgtcTgcctctgtgggGgatagggtcaccatcacctgcAG |
| | | | Agccagtcaggatgtgaatactgctgtagcctggtatcaacagaaaccaggaaaagctc |
| | | | cCaaactactgatttactcTgcatccttcctcTACtctggagtcccttctAGAttctct |
| | | | ggatccagatctggCacTgaCttcactctgaccatcagTagtctgcagccTgaagactt |
| | | | TgcaacttattactgtcaAcaacattatactactcctcccacCttTggacagggtacca |
| | | | aggtggagatcaaaGGCTCTgatatTGTACTGacccagtccccTGACtccctgGCTGTG |
| | | | tctCTGggGGAAaggGCAaccatcAACtgcAGGAGTagtcagACCCTTCTGTACTCTAA |
| | | | TAACCAGAAAAACTACCTGgcctggtatcaaAAAaaaccaggaCAGCCTccTaaactac |
| | | | tgattAGTTGGgcaTTCACTAGGAAGtctggagtccctGACAGGttctctggatcTGGG |
| | | | tcTggAacAgatttcacActgaccatcagcagtctgcagGCTgaagaTGTTgcaGTCta |
| | | | CtactgtcagcaaTACTCAAACTACcctTGGacTttTggacagggGaccaaAgtggaga |
| | | | tcaaaAGGactgtCgctgcaccatctgtcttcatcttcccAccatctgatgagcagttg |
| | | | aaatctggaactgcctctgttAAGtgcctgctgaataacttctatcccagagaggccaa |
| | | | agtacagtggaaggtggataaTgccctccaaAGTggtaactcccaggagagtgtcacag |
| | | | agcaggacagcaaggacagcacctacagcctcagcagcaccctgacCctgagcaaagca |
| | | | gactaTgagaaacacaaagtctaTgcctgTgaagtcacccatcagggcctgagcAGCcc |
| | | | Agtcacaaagagcttcaacaggggagagtgttagtagtaactcgaggacggggtgaact |
| | | | acgcctgaggatccgatctttttccctctgccaaaaattatggggacatcatgaagccc |
| | | | cttgagcatctgacttctggctaataaaggaaatttattttcattgcaatagtgtgttg |
| | | | gaattttttgtgtctctcactcggcctaggtagataagtagcatggcgggttaatcatt |
| | | | aactacaaggaacccctagtgatggagttggccactccctctctgcgcgctcgctcgct |
| | | | cactgaggccgggcgaccaaaggtcgcccgacgcccgggctttgcccgggcggcctcag |
| | | | tgagcgagcgagcgcgcag |
| HER-82 | 4505 | 5374 | ctgcgcgctcgctcgctcactgaggccgcccgggcaaagcccgggcgtcgggcgacctt |
| | | | tggtcgcccggcctcagtgagcgagcgagcgcgcagagagggagtggccaactccatca |
| | | | ctaggggttccttgtagttaatgattaacccgccatgctacttatctaccagggtaatg |
| | | | gggatcctctagaactatagctagtcgacattgattattgactagttattaatagtaat |
| | | | caattacggggtcattagttcatagcccatatatggagttccgcgttacataacttacg |
| | | | gtaaatggcccgcctggctgaccgcccaacgacccccgcccattgacgtcaataatgac |
| | | | gtatgttcccatagtaacgccaatagggactttccattgacgtcaatgggtggagtatt |
| | | | tacggtaaactgcccacttggcagtacatcaagtgtatcatatgccaagtacgccccct |
| | | | attgacgtcaatgacggtaaatggcccgcctggcattatgcccagtacatgaccttatg |
| | | | ggactttcctacttggcagtacatctacgtattagtcatcgctattaccatgtcgaggc |
| | | | cacgttctgcttcactctccccatctcccccccctccccacccccaattttgtatttat |
| | | | ttattttttaattattttgtgcagcgatgggggcggggggggggggcgcgcgccaggcg |
| | | | gggcggggcggggcgaggggcggggcggggcgaggcggagaggtgcggcggcagccaat |
| | | | cagagcggcgcgctccgaaagtttccttttatggcgaggcggcggcggcggcggcccta |
| | | | taaaaagcgaagcgcgcggcgggcgggagcaagcttcgtttagtgaaccgtcagatcgc |
| | | | ctggagacgccatccacgctgttttgacctccatagaagacaccgggaccgatccagcc |
| | | | tccgcggattcgaatcccggccgggaacggtgcattggaacgcggattccccgtgccaa |
| | | | gagtgacgtaagtaccgcctatagagtctataggcccacaaaaaatgctttcttctttt |
| | | | aatatacttttttgtttatcttatttctaatactttccctaatctctttctttcagggc |
| | | | aataatgatacaatgtatcatgcctctttgcaccattctaaagaataacagtgataatt |
| | | | tctgggttaaggcaatagcaatatttctgcatataaatatttctgcatataaattgtaa |
| | | | ctgatgtaagaggtttcatattgctaatagcagctacaatccagctaccattctgcttt |
| | | | tattttatggttgggataaggctggattattctgagtccaagctaggcccttttgctaa |
| | | | tcatgttcatacctcttatcttcctcccacagctcctgggcaacgtgctggtctgtgtg |
| | | | ctggcccatcactttggcaaagaattgggattcgaaccggtgccgccaccATGGACTGG |
| | | | ACCTGGAGGTTCCTCTTTGTGGTGGCAGCAGCTACAGGTGTCCAGTCCgaggttcagct |
| | | | ggtggagtctggcggtggcctggtgcagccagggggctcactccgtttgtcctgtgcag |
| | | | cttctggcttcaacattaaagacacctatatacactgggtgcgtcaggccccgggtaag |
| | | | ggcctggaatgggttgcaaggatttatcctacgaatggttatactagatatgccgatag |
| | | | cgtcaagggccgtttcactataagcgcagacacatccaaaaacacagcctacctgcaga |
| | | | tgaacagcctgcgtgctgaggacactgccgtctattattgttctagatggggaggggac |
| | | | ggcttctatgctatggacTACtggggtcaaggaaccctggtcaccgtctcctcggcgtc |
| | | | gaccaagggcccatcggtcttccccctggcaccctcctccaagagcacctctgggggca |
| | | | cagcggccctgggctgcctggtcaaggactacttccccgaacctgtgacggtctcgtgg |
| | | | aactcaggcgccctgaccagcggcgtgcacaccttcccggctgtcctacagtcctcagg |
| | | | actctactccctcagcagcgtggtgaccgtgccctccagcagcttgggcacccagacct |
| | | | acatctgcaacgtgaatcacaagcccagcaacaccaaggtggacaagaGagttgagccc |
| | | | aaatcttgtgacaaaactcacacatgcccaccgtgcccagcacctgaactcGtgggggg |
| | | | accgtcagtcttcctcCtccccccaaaacccaaggacaccctcatgatctcccggaccc |
| | | | ctgaggtcacatgcgtggtggtggacgtgagccacgaagaccctgaggtcaagttcaac |
| | | | tggtacgtggacggcgtggaggtgcataatgccaagacaaagccgcCggaggagcagta |
| | | | caacagcacgCTccgtgtggtcagcgtcctcaccgtcctgcaccaggactggctgaatg |
| | | | gcaaggagtacaagtgcaaggtctccaacaaagccctcccagcccccatcgagaaaacc |
| | | | atctccaaagccaaagggcagccccgagaaccacaggtgtacaccctgcccccatcccg |
| | | | ggaTgagCtgaccaagaaccaggtcagcctgacctgcctggtcaaaggcttctatccca |
| | | | gcgacatcgccgtggagtgggagagcaatgggcagccggagaacaactacaagaccacg |
| | | | cctcTcgtgctggactccgacggctccttcttcctctacagcaagctcaccgtggacaa |
| | | | gagcaggtggcagcaggggaacgtcttctcatgctccgtgatgcatgaggctctgcaca |
| | | | accactacacgcagaagagcctctccctgtctccgggtaaaagaaagaggcgagagggc |
| | | | agaggaagtcttctaacatgcggtgacgtggaggagaatcccggccctATGGACATGAG |
| | | | GGTCCCTGCTCAGCTCCTGGGGCTCCTGCTGCTCTGGCTCTCAGGTGCCAGATGTGGCT |
| | | | CTGATCTGGGAAAAAAGCTTCTgGAGGCtGCcAGAGCtGGACAGGAtGAtGAAGTGaga |
| | | | ATACTGATGGCTAAtGGTGCTGATGTGAATGCCCAtGATTTTTATGGAATCACTCCCTT |
| | | | ACACTTAGCTGCCAATTTtGGGCACCTgGAGATTGTGGAAGTGCTCCTGAAGCATGGaG |
| | | | CAGATGTAAAtGCATTtGATTAtGATAACACTCCACTGCACCTGGCtGCAGATGCtGGA |
| | | | CATCTGGAGATtGTGGAAGTACTGTTAAAATAtGGAGCAGAtGTGAATGCATCtGACag |
| | | | aGATGGACATACACCACTGCACCTGGCAGCTagaGAGGGACATCTTGAAATTGTTGAAG |
| | | | TCCTGCTTAAGAAtGGTGCtGATGTCAATGCCCAGGACAAGTTTGGGAAGACAGCTTTT |
| | | | GACATTTCAATtGATAAtGGAAAtGAGGATCTGGCtGAAATACTTCAGAAATTGggtgg |
| | | | tggtggatctggaggaggaggaAGTggaggtggaggtTCTgatatccagatgacccagt |
| | | | ccccgagctccctgtccgcctctgtgggcgatagggtcaccatcacctgccgtgccagt |
| | | | caggatgtgaatactgctgtagcctggtatcaacagaaaccaggaaaagctccgaaact |
| | | | actgatttactcggcatccttcctcTACtctggagtcccttctcgcttctctggatcca |
| | | | gatctgggacggatttcactctgaccatcagcagtctgcagccggaagacttcgcaact |
| | | | tattactgtcagcaacattatactactcctcccacgttcggacagggtaccaaggtgga |
| | | | gatcaaacgaactgtggctgcaccatctgtcttcatcttcccgccatctgatgagcagt |
| | | | tgaaatctggaactgcctctgttgtgtgcctgctgaataacttctatcccagagaggcc |
| | | | aaagtacagtggaaggtggataacgccctccaatcgggtaactcccaggagagtgtcac |
| | | | agagcaggacagcaaggacagcacctacagcctcagcagcaccctgacgctgagcaaag |
| | | | cagactacgagaaacacaaagtctacgcctgcgaagtcacccatcagggcctgagctcg |
| | | | cccgtcacaaagagcttcaacaggggagagtgttagtagtaactcgaggacggggtgaa |
| | | | ctacgcctgaggatccgatctttttccctctgccaaaaattatggggacatcatgaagc |
| | | | cccttgagcatctgacttctggctaataaaggaaatttattttcattgcaatagtgtgt |
| | | | tggaattttttgtgtctctcactcggcctaggtagataagtagcatggcgggttaatca |
| | | | ttaactacaaggaacccctagtgatggagttggccactccctctctgcgcgctcgctcg |
| | | | ctcactgaggccgggcgaccaaaggtcgcccgacgcccgggctttgcccgggcggcctc |
| | | | agtgagcgagcgagcgcgcag |
| HER-88 | 3989 | 6500 | ctgcgcgctcgctcgctcactgaggccgcccgggcaaagcccgggcgtcgggcgacctt |
| | | | tggtcgcccggcctcagtgagcgagcgagcgcgcagagagggagtggccaactccatca |
| | | | ctaggggttccttgtagttaatgattaacccgccatgctacttatctaccagggtaatg |
| | | | gggatcctctagaactatagctagtcgacattgattattgactagttattaatagtaat |
| | | | caattacggggtcattagttcatagcccatatatggagttccgcgttacataacttacg |
| | | | gtaaatggcccgcctggctgaccgcccaacgacccccgcccattgacgtcaataatgac |
| | | | gtatgttcccatagtaacgccaatagggactttccattgacgtcaatgggtggagtatt |
| | | | tacggtaaactgcccacttggcagtacatcaagtgtatcatatgccaagtacgccccct |
| | | | attgacgtcaatgacggtaaatggcccgcctggcattatgcccagtacatgaccttatg |
| | | | ggactttcctacttggcagtacatctacgtattagtcatcgctattaccatgtcgaggc |
| | | | cacgttctgcttcactctccccatctcccccccctccccacccccaattttgtatttat |
| | | | ttattttttaattattttgtgcagcgatgggggcggggggggggggcgcgcgccaggcg |
| | | | gggcggggcggggcgaggggcggggcggggcgaggcggagaggtgcggcggcagccaat |
| | | | cagagcggcgcgctccgaaagtttccttttatggcgaggcggcggcggcggcggcccta |
| | | | taaaaagcgaagcgcgcggcgggcgggagcaagcttcgtttagtgaaccgtcagatcgc |
| | | | ctggagacgccatccacgctgttttgacctccatagaagacaccgggaccgatccagcc |
| | | | tccgcggattcgaatcccggccgggaacggtgcattggaacgcggattccccgtgccaa |
| | | | gagtgacgtaagtaccgcctatagagtctataggcccacaaaaaatgctttcttctttt |
| | | | aatatacttttttgtttatcttatttctaatactttccctaatctctttctttcagggc |
| | | | aataatgatacaatgtatcatgcctctttgcaccattctaaagaataacagtgataatt |
| | | | tctgggttaaggcaatagcaatatttctgcatataaatatttctgcatataaattgtaa |
| | | | ctgatgtaagaggtttcatattgctaatagcagctacaatccagctaccattctgcttt |
| | | | tattttatggttgggataaggctggattattctgagtccaagctaggcccttttgctaa |
| | | | tcatgttcatacctcttatcttcctcccacagctcctgggcaacgtgctggtctgtgtg |
| | | | ctggcccatcactttggcaaagaattgggattcgaaccggtgccgccaccATGGACTGG |
| | | | ACCTGGAGGTTCCTCTTTGTGGTGGCAGCAGCTACAGGTGTCCAGTCTgaggttcagct |
| | | | ggtggagtctggAggtggcctggtgcagccagggggctcactcAGAttgtcctgtgcag |
| | | | cttctggcttcaacattaaagacacctatatacactgggtgagacaggccccAggtaag |
| | | | ggcctggaatgggttgcaaggatttatcctacCaatggttatactagatatgcTgatTC |
| | | | TgtcaagggcAGAttcactataTCTgcagacacatccaaaaacacagcctacctgcaga |
| | | | tgaacagcctgAGAgctgaggacactgcTgtctattattgttctagatggggagggTGG |
| | | | ggcttctatgctTTTGCCCTGtggggtcaaggaaccctggtcacAgtctcctcTgcCtc |
| | | | TaccaagggcccatcTgtcttccccctggcaccctcctccaagagcacctctgggggca |
| | | | cagcTgccctgggctgcctggtcaaggactacttcccTgaacctgtgacAgtctcCtgg |
| | | | aactcaggAgccctgaccagTggAgtgcacaccttcccTgctgtcctacagtcctcagg |
| | | | actctactccctcagcTCTgtggtgacAgtgccctccagcagcttgggcacccagacct |
| | | | acatctgcaaTgtgaatcacaagcccagcaacaccaaggtggacaagaGagttgagccc |
| | | | aaatcttgtgacaaaactcacacatgcccaccTtgcccagcacctgaactGGtgggggg |
| | | | accAtcagtcttcctcCtccccccaaaacccaaggacaccctcatgatctccAGAaccc |
| | | | ctgaggtcacatgTgtggtggtggaTgtgagccaTgaagaccctgaggtcaagttcaac |
| | | | tggtaTgtggaTggAgtggaggtgcataatgccaagacaaagccCcCTgaggagcagta |
| | | | caacagcacTCTcAGAgtggtcTCTgtcctcacAgtcctgcaccaggactggctgaatg |
| | | | gcaaggagtacaagtgcaaggtctccaacaaagccctcccagcccccatTgagaaaacc |
| | | | atctccaaagccaaagggcagcccAGAgaaccacaggtgtacaccctgcccccatccAG |
| | | | AgaTgagCtgaccaagaaccaggtcagcctgacctgcctggtcaaaggcttctatcccT |
| | | | CTgacatTgcTgtggagtgggagagcaatgggcagccTgagaacaactacaagaccacA |
| | | | cctcTTgtgctggactcTgaTggctccttcttcctctacagcaagctcacAgtggacaa |
| | | | gagcaggtggcagcaggggaaTgtcttctcatgcTCTgtgatgcatgaggctctgcaca |
| | | | accactacacCcagaagagcctctccctgtctccAggtaaaagaaagaggAGAgagggc |
| | | | agaggaagtcttctaacatgTggtgaTgtggaggagaatccTggccctATGGACATGAG |
| | | | GGTCCCTGCTCAGCTCCTGGGGCTCCTGCTGCTCTGGCTCTCAGGTGCCAGATGTgata |
| | | | tccagatgacccagtccccTagctccctgtcTgcctctgtgggAgatagggtcaccatc |
| | | | acctgcAGAgccagtcaggatgtgaatactgctgtagcctggtatcaacagaaaccagg |
| | | | aaaagctccTaaactactgatttactcTgcatccttcctcTACtctggagtcccttctA |
| | | | GGttctctggatccagatctgggacTgatttcactctgaccatcagcagtctgcagccA |
| | | | gaagacttTgcaacttattactgtcagcaacattatactactcctcccacTttTggaca |
| | | | gggtaccaaggtggagatcaaaAGAactgtggctgcaccatctgtcttcatcttcccAc |
| | | | catctgatgagcagttgaaatctggaactgcctctgttgtgtgcctgctgaataacttc |
| | | | tatcccagagaggccaaagtacagtggaaggtggataaTgccctccaatcAggtaactc |
| | | | ccaggagagtgtcacagagcaggacagcaaggacagcacctacagcctcagcagcaccc |
| | | | tgacTctgagcaaagcagactaTgagaaacacaaagtctaTgcctgTgaagtcacccat |
| | | | cagggcctgagctcTccTgtcacaaagagcttcaacaggggagagtgttagtagtaact |
| | | | cgaggacggggtgaactacgcctgaggatccgatctttttccctctgccaaaaattatg |
| | | | gggacatcatgaagccccttgagcatctgacttctggctaataaaggaaatttattttc |
| | | | attgcaatagtgtgttggaattttttgtgtctctcactcggcctaggtagataagtagc |
| | | | atggcgggttaatcattaactacaaggaacccctagtgatggagttggccactccctct |
| | | | ctgcgcgctcgctcgctcactgaggccgggcgaccaaaggtcgcccgacgcccgggctt |
| | | | tgcccgggggcctcagtgagcgagcgagcgcgcag |
| HER-89 | 3989 | 6501 | ctgcgcgctcgctcgctcactgaggccgcccgggcaaagcccgggcgtcgggcgacctt |
| | | | tggtcgcccggcctcagtgagcgagcgagcgcgcagagagggagtggccaactccatca |
| | | | ctaggggttccttgtagttaatgattaacccgccatgctacttatctaccagggtaatg |
| | | | gggatcctctagaactatagctagtcgacattgattattgactagttattaatagtaat |
| | | | caattacggggtcattagttcatagcccatatatggagttccgcgttacataacttacg |
| | | | gtaaatggcccgcctggctgaccgcccaacgacccccgcccattgacgtcaataatgac |
| | | | gtatgttcccatagtaacgccaatagggactttccattgacgtcaatgggtggagtatt |
| | | | tacggtaaactgcccacttggcagtacatcaagtgtatcatatgccaagtacgccccct |
| | | | attgacgtcaatgacggtaaatggcccgcctggcattatgcccagtacatgaccttatg |
| | | | ggactttcctacttggcagtacatctacgtattagtcatcgctattaccatgtcgaggc |
| | | | cacgttctgcttcactctccccatctcccccccctccccacccccaattttgtatttat |
| | | | ttattttttaattattttgtgcagcgatgggggcggggggggggggcgcgcgccaggcg |
| | | | gggcggggcggggcgaggggcggggcggggcgaggcggagaggtgcggcggcagccaat |
| | | | cagagcggcgcgctccgaaagtttccttttatggcgaggcggcggcggcggcggcccta |
| | | | taaaaagcgaagcgcgcggcgggcgggagcaagcttcgtttagtgaaccgtcagatcgc |
| | | | ctggagacgccatccacgctgttttgacctccatagaagacaccgggaccgatccagcc |
| | | | tccgcggattcgaatcccggccgggaacggtgcattggaacgcggattccccgtgccaa |
| | | | gagtgacgtaagtaccgcctatagagtctataggcccacaaaaaatgctttcttctttt |
| | | | aatatacttttttgtttatcttatttctaatactttccctaatctctttctttcagggc |
| | | | aataatgatacaatgtatcatgcctctttgcaccattctaaagaataacagtgataatt |
| | | | tctgggttaaggcaatagcaatatttctgcatataaatatttctgcatataaattgtaa |
| | | | ctgatgtaagaggtttcatattgctaatagcagctacaatccagctaccattctgcttt |
| | | | tattttatggttgggataaggctggattattctgagtccaagctaggcccttttgctaa |
| | | | tcatgttcatacctcttatcttcctcccacagctcctgggcaacgtgctggtctgtgtg |
| | | | ctggcccatcactttggcaaagaattgggattcgaaccggtgccgccaccATGGACTGG |
| | | | ACCTGGAGGTTCCTCTTTGTGGTGGCAGCAGCTACAGGTGTCCAGTCTgaggttcagct |
| | | | ggtggagtctggAggtggcctggtgcagccagggggctcactcAGAttgtcctgtgcag |
| | | | cttctggcttcaacattaaagacacctatatacactgggtgagacaggccccAggtaag |
| | | | ggcctggaatgggttgcaaggatttatcctacCaatggttatactagatatgcTgatTC |
| | | | TgtcaagggcAGAttcactataTCTgcagacacatccaaaaacacagcctacctgcaga |
| | | | tgaacagcctgAGAgctgaggacactgcTgtctattattgttctagatggggagggTGG |
| | | | ggcttctatgctTTTGCCTACtggggtcaaggaaccctggtcacAgtctcctcTgcCtc |
| | | | TaccaagggcccatcTgtcttccccctggcaccctcctccaagagcacctctgggggca |
| | | | cagcTgccctgggctgcctggtcaaggactacttcccTgaacctgtgacAgtctcCtgg |
| | | | aactcaggAgccctgaccagTggAgtgcacaccttcccTgctgtcctacagtcctcagg |
| | | | actctactccctcagcTCTgtggtgacAgtgccctccagcagcttgggcacccagacct |
| | | | acatctgcaaTgtgaatcacaagcccagcaacaccaaggtggacaagaGagttgagccc |
| | | | aaatcttgtgacaaaactcacacatgcccaccTtgcccagcacctgaactGGtgggggg |
| | | | accAtcagtcttcctcCtccccccaaaacccaaggacaccctcatgatctccAGAaccc |
| | | | ctgaggtcacatgTgtggtggtggaTgtgagccaTgaagaccctgaggtcaagttcaac |
| | | | tggtaTgtggaTggAgtggaggtgcataatgccaagacaaagccCcCTgaggagcagta |
| | | | caacagcacTCTcAGAgtggtcTCTgtcctcacAgtcctgcaccaggactggctgaatg |
| | | | gcaaggagtacaagtgcaaggtctccaacaaagccctcccagcccccatTgagaaaacc |
| | | | atctccaaagccaaagggcagcccAGAgaaccacaggtgtacaccctgcccccatccAG |
| | | | AgaTgagCtgaccaagaaccaggtcagcctgacctgcctggtcaaaggcttctatcccT |
| | | | CTgacatTgcTgtggagtgggagagcaatgggcagccTgagaacaactacaagaccacA |
| | | | cctcTTgtgctggactcTgaTggctccttcttcctctacagcaagctcacAgtggacaa |
| | | | gagcaggtggcagcaggggaaTgtcttctcatgcTCTgtgatgcatgaggctctgcaca |
| | | | accactacacCcagaagagcctctccctgtctccAggtaaaagaaagaggAGAgagggc |
| | | | agaggaagtcttctaacatgTggtgaTgtggaggagaatccTggccctATGGACATGAG |
| | | | GGTCCCTGCTCAGCTCCTGGGGCTCCTGCTGCTCTGGCTCTCAGGTGCCAGATGTgata |
| | | | tccagatgacccagtccccTagctccctgtcTgcctctgtgggAgatagggtcaccatc |
| | | | acctgcAGAgccagtcaggatgtgaatactgctgtagcctggtatcaacagaaaccagg |
| | | | aaaagctccTaaactactgatttactcTgcatccttcctcTACtctggagtcccttctA |
| | | | GGttctctggatccagatctgggacTgatttcactctgaccatcagcagtctgcagccA |
| | | | gaagacttTgcaacttattactgtcagcaacattatactactcctcccacTttTggaca |
| | | | gggtaccaaggtggagatcaaaAGAactgtggctgcaccatctgtcttcatcttcccAc |
| | | | catctgatgagcagttgaaatctggaactgcctctgttgtgtgcctgctgaataacttc |
| | | | tatcccagagaggccaaagtacagtggaaggtggataaTgccctccaatcAggtaactc |
| | | | ccaggagagtgtcacagagcaggacagcaaggacagcacctacagcctcagcagcaccc |
| | | | tgacTctgagcaaagcagactaTgagaaacacaaagtctaTgcctgTgaagtcacccat |
| | | | cagggcctgagctcTccTgtcacaaagagcttcaacaggggagagtgttagtagtaact |
| | | | cgaggacggggtgaactacgcctgaggatccgatctttttccctctgccaaaaattatg |
| | | | gggacatcatgaagccccttgagcatctgacttctggctaataaaggaaatttattttc |
| | | | attgcaatagtgtgttggaattttttgtgtctctcactcggcctaggtagataagtagc |
| | | | atggcgggttaatcattaactacaaggaacccctagtgatggagttggccactccctct |
| | | | ctgcgcgctcgctcgctcactgaggccgggcgaccaaaggtcgcccgacgcccgggctt |
| | | | tgcccgggcggcctcagtgagcgagcgagcgcgcag |
| HER-90 | 3989 | 6502 | ctgcgcgctcgctcgctcactgaggccgcccgggcaaagcccgggcgtcgggcgacctt |
| | | | tggtcgcccggcctcagtgagcgagcgagcgcgcagagagggagtggccaactccatca |
| | | | ctaggggttccttgtagttaatgattaacccgccatgctacttatctaccagggtaatg |
| | | | gggatcctctagaactatagctagtcgacattgattattgactagttattaatagtaat |
| | | | caattacggggtcattagttcatagcccatatatggagttccgcgttacataacttacg |
| | | | gtaaatggcccgcctggctgaccgcccaacgacccccgcccattgacgtcaataatgac |
| | | | gtatgttcccatagtaacgccaatagggactttccattgacgtcaatgggtggagtatt |
| | | | tacggtaaactgcccacttggcagtacatcaagtgtatcatatgccaagtacgccccct |
| | | | attgacgtcaatgacggtaaatggcccgcctggcattatgcccagtacatgaccttatg |
| | | | ggactttcctacttggcagtacatctacgtattagtcatcgctattaccatgtcgaggc |
| | | | cacgttctgcttcactctccccatctcccccccctccccacccccaattttgtatttat |
| | | | ttattttttaattattttgtgcagcgatgggggcggggggggggggcgcgcgccaggcg |
| | | | gggcggggcggggcgaggggcggggcggggcgaggcggagaggtgcggcggcagccaat |
| | | | cagagcggcgcgctccgaaagtttccttttatggcgaggcggcggcggcggcggcccta |
| | | | taaaaagcgaagcgcgcggcgggcgggagcaagcttcgtttagtgaaccgtcagatcgc |
| | | | ctggagacgccatccacgctgttttgacctccatagaagacaccgggaccgatccagcc |
| | | | tccgcggattcgaatcccggccgggaacggtgcattggaacgcggattccccgtgccaa |
| | | | gagtgacgtaagtaccgcctatagagtctataggcccacaaaaaatgctttcttctttt |
| | | | aatatacttttttgtttatcttatttctaatactttccctaatctctttctttcagggc |
| | | | aataatgatacaatgtatcatgcctctttgcaccattctaaagaataacagtgataatt |
| | | | tctgggttaaggcaatagcaatatttctgcatataaatatttctgcatataaattgtaa |
| | | | ctgatgtaagaggtttcatattgctaatagcagctacaatccagctaccattctgcttt |
| | | | tattttatggttgggataaggctggattattctgagtccaagctaggcccttttgctaa |
| | | | tcatgttcatacctcttatcttcctcccacagctcctgggcaacgtgctggtctgtgtg |
| | | | ctggcccatcactttggcaaagaattgggattcgaaccggtgccgccaccATGGACTGG |
| | | | ACCTGGAGGTTCCTCTTTGTGGTGGCAGCAGCTACAGGTGTCCAGTCTgaggttcagct |
| | | | ggtggagtctggAggtggcctggtgcagccagggggctcactcAGAttgtcctgtgcag |
| | | | cttctggcttcaacattaaagacacctatatacactgggtgagacaggccccAggtaag |
| | | | ggcctggaatgggttgcaaggatttatcctacCaatggttatactagatatgcTgatTC |
| | | | TgtcaagggcAGAttcactataTCTgcagacacatccaaaaacacagcctacctgcaga |
| | | | tgaacagcctgAGAgctgaggacactgcTgtctattattgttctagatggggagggTGG |
| | | | ggcttctatgctTTTGACCTGtggggtcaaggaaccctggtcacAgtctcctcTgcCtc |
| | | | TaccaagggcccatcTgtcttccccctggcaccctcctccaagagcacctctgggggca |
| | | | cagcTgccctgggctgcctggtcaaggactacttcccTgaacctgtgacAgtctcCtgg |
| | | | aactcaggAgccctgaccagTggAgtgcacaccttcccTgctgtcctacagtcctcagg |
| | | | actctactccctcagcTCTgtggtgacAgtgccctccagcagcttgggcacccagacct |
| | | | acatctgcaaTgtgaatcacaagcccagcaacaccaaggtggacaagaGagttgagccc |
| | | | aaatcttgtgacaaaactcacacatgcccaccTtgcccagcacctgaactGGtgggggg |
| | | | accAtcagtcttcctcCtccccccaaaacccaaggacaccctcatgatctccAGAaccc |
| | | | ctgaggtcacatgTgtggtggtggaTgtgagccaTgaagaccctgaggtcaagttcaac |
| | | | tggtaTgtggaTggAgtggaggtgcataatgccaagacaaagccCcCTgaggagcagta |
| | | | caacagcacTCTcAGAgtggtcTCTgtcctcacAgtcctgcaccaggactggctgaatg |
| | | | gcaaggagtacaagtgcaaggtctccaacaaagccctcccagcccccatTgagaaaacc |
| | | | atctccaaagccaaagggcagcccAGAgaaccacaggtgtacaccctgcccccatccAG |
| | | | AgaTgagCtgaccaagaaccaggtcagcctgacctgcctggtcaaaggcttctatcccT |
| | | | CTgacatTgcTgtggagtgggagagcaatgggcagccTgagaacaactacaagaccacA |
| | | | cctcTTgtgctggactcTgaTggctccttcttcctctacagcaagctcacAgtggacaa |
| | | | gagcaggtggcagcaggggaaTgtcttctcatgcTCTgtgatgcatgaggctctgcaca |
| | | | accactacacCcagaagagcctctccctgtctccAggtaaaagaaagaggAGAgagggc |
| | | | agaggaagtcttctaacatgTggtgaTgtggaggagaatccTggccctATGGACATGAG |
| | | | GGTCCCTGCTCAGCTCCTGGGGCTCCTGCTGCTCTGGCTCTCAGGTGCCAGATGTgata |
| | | | tccagatgacccagtccccTagctccctgtcTgcctctgtgggAgatagggtcaccatc |
| | | | acctgcAGAgccagtcaggatgtgaatactgctgtagcctggtatcaacagaaaccagg |
| | | | aaaagctccTaaactactgatttactcTgcatccttcctcTACtctggagtcccttctA |
| | | | GGttctctggatccagatctgggacTgatttcactctgaccatcagcagtctgcagccA |
| | | | gaagacttTgcaacttattactgtcagcaacattatactactcctcccacTttTggaca |
| | | | gggtaccaaggtggagatcaaaAGAactgtggctgcaccatctgtcttcatcttcccAc |
| | | | catctgatgagcagttgaaatctggaactgcctctgttgtgtgcctgctgaataacttc |
| | | | tatcccagagaggccaaagtacagtggaaggtggataaTgccctccaatcAggtaactc |
| | | | ccaggagagtgtcacagagcaggacagcaaggacagcacctacagcctcagcagcaccc |
| | | | tgacTctgagcaaagcagactaTgagaaacacaaagtctaTgcctgTgaagtcacccat |
| | | | cagggcctgagctcTccTgtcacaaagagcttcaacaggggagagtgttagtagtaact |
| | | | cgaggacggggtgaactacgcctgaggatccgatctttttccctctgccaaaaattatg |
| | | | gggacatcatgaagccccttgagcatctgacttctggctaataaaggaaatttattttc |
| | | | attgcaatagtgtgttggaattttttgtgtctctcactcggcctaggtagataagtagc |
| | | | atggcgggttaatcattaactacaaggaacccctagtgatggagttggccactccctct |
| | | | ctgcgcgctcgctcgctcactgaggccgggcgaccaaaggtcgcccgacgcccgggctt |
| | | | tgcccgggcggcctcagtgagcgagcgagcgcgcag |
| HER-91 | 3989 | 6503 | ctgcgcgctcgctcgctcactgaggccgcccgggcaaagcccgggcgtcgggcgacctt |
| | | | tggtcgcccggcctcagtgagcgagcgagcgcgcagagagggagtggccaactccatca |
| | | | ctaggggttccttgtagttaatgattaacccgccatgctacttatctaccagggtaatg |
| | | | gggatcctctagaactatagctagtcgacattgattattgactagttattaatagtaat |
| | | | caattacggggtcattagttcatagcccatatatggagttccgcgttacataacttacg |
| | | | gtaaatggcccgcctggctgaccgcccaacgacccccgcccattgacgtcaataatgac |
| | | | gtatgttcccatagtaacgccaatagggactttccattgacgtcaatgggtggagtatt |
| | | | tacggtaaactgcccacttggcagtacatcaagtgtatcatatgccaagtacgccccct |
| | | | attgacgtcaatgacggtaaatggcccgcctggcattatgcccagtacatgaccttatg |
| | | | ggactttcctacttggcagtacatctacgtattagtcatcgctattaccatgtcgaggc |
| | | | cacgttctgcttcactctccccatctcccccccctccccacccccaattttgtatttat |
| | | | ttattttttaattattttgtgcagcgatgggggcggggggggggggcgcgcgccaggcg |
| | | | gggcggggcggggcgaggggcggggcggggcgaggcggagaggtgcggcggcagccaat |
| | | | cagagcggcgcgctccgaaagtttccttttatggcgaggcggcggcggcggcggcccta |
| | | | taaaaagcgaagcgcgcggcgggcgggagcaagcttcgtttagtgaaccgtcagatcgc |
| | | | ctggagacgccatccacgctgttttgacctccatagaagacaccgggaccgatccagcc |
| | | | tccgcggattcgaatcccggccgggaacggtgcattggaacgcggattccccgtgccaa |
| | | | gagtgacgtaagtaccgcctatagagtctataggcccacaaaaaatgctttcttctttt |
| | | | aatatacttttttgtttatcttatttctaatactttccctaatctctttctttcagggc |
| | | | aataatgatacaatgtatcatgcctctttgcaccattctaaagaataacagtgataatt |
| | | | tctgggttaaggcaatagcaatatttctgcatataaatatttctgcatataaattgtaa |
| | | | ctgatgtaagaggtttcatattgctaatagcagctacaatccagctaccattctgcttt |
| | | | tattttatggttgggataaggctggattattctgagtccaagctaggcccttttgctaa |
| | | | tcatgttcatacctcttatcttcctcccacagctcctgggcaacgtgctggtctgtgtg |
| | | | ctggcccatcactttggcaaagaattgggattcgaaccggtgccgccaccATGGACTGG |
| | | | ACCTGGAGGTTCCTCTTTGTGGTGGCAGCAGCTACAGGTGTCCAGTCTgaggttcagct |
| | | | ggtggagtctggAggtggcctggtgcagccagggggctcactcAGAttgtcctgtgcag |
| | | | cttctggcttcaacattaaagacacctatatacactgggtgagacaggccccAggtaag |
| | | | ggcctggaatgggttgcaaggatttatcctacCaatggttatactagatatgcTgatTC |
| | | | TgtcaagggcAGAttcactataTCTgcagacacatccaaaaacacagcctacctgcaga |
| | | | tgaacagcctgAGAgctgaggacactgcTgtctattattgttctagatggggagggTGG |
| | | | ggcttctatgctATGGCCCTGtggggtcaaggaaccctggtcacAgtctcctcTgcCtc |
| | | | TaccaagggcccatcTgtcttccccctggcaccctcctccaagagcacctctgggggca |
| | | | cagcTgccctgggctgcctggtcaaggactacttcccTgaacctgtgacAgtctcCtgg |
| | | | aactcaggAgccctgaccagTggAgtgcacaccttcccTgctgtcctacagtcctcagg |
| | | | actctactccctcagcTCTgtggtgacAgtgccctccagcagcttgggcacccagacct |
| | | | acatctgcaaTgtgaatcacaagcccagcaacaccaaggtggacaagaGagttgagccc |
| | | | aaatcttgtgacaaaactcacacatgcccaccTtgcccagcacctgaactGGtgggggg |
| | | | accAtcagtcttcctcCtccccccaaaacccaaggacaccctcatgatctccAGAaccc |
| | | | ctgaggtcacatgTgtggtggtggaTgtgagccaTgaagaccctgaggtcaagttcaac |
| | | | tggtaTgtggaTggAgtggaggtgcataatgccaagacaaagccCcCTgaggagcagta |
| | | | caacagcacTCTcAGAgtggtcTCTgtcctcacAgtcctgcaccaggactggctgaatg |
| | | | gcaaggagtacaagtgcaaggtctccaacaaagccctcccagcccccatTgagaaaacc |
| | | | atctccaaagccaaagggcagcccAGAgaaccacaggtgtacaccctgcccccatccAG |
| | | | AgaTgagCtgaccaagaaccaggtcagcctgacctgcctggtcaaaggcttctatcccT |
| | | | CTgacatTgcTgtggagtgggagagcaatgggcagccTgagaacaactacaagaccacA |
| | | | cctcTTgtgctggactcTgaTggctccttcttcctctacagcaagctcacAgtggacaa |
| | | | gagcaggtggcagcaggggaaTgtcttctcatgcTCTgtgatgcatgaggctctgcaca |
| | | | accactacacCcagaagagcctctccctgtctccAggtaaaagaaagaggAGAgagggc |
| | | | agaggaagtcttctaacatgTggtgaTgtggaggagaatccTggccctATGGACATGAG |
| | | | GGTCCCTGCTCAGCTCCTGGGGCTCCTGCTGCTCTGGCTCTCAGGTGCCAGATGTgata |
| | | | tccagatgacccagtccccTagctccctgtcTgcctctgtgggAgatagggtcaccatc |
| | | | acctgcAGAgccagtcaggatgtgaatactgctgtagcctggtatcaacagaaaccagg |
| | | | aaaagctccTaaactactgatttactcTgcatccttcctcTACtctggagtcccttctA |
| | | | GGttctctggatccagatctgggacTgatttcactctgaccatcagcagtctgcagccA |
| | | | gaagacttTgcaacttattactgtcagcaacattatactactcctcccacTttTggaca |
| | | | gggtaccaaggtggagatcaaaAGAactgtggctgcaccatctgtcttcatcttcccAc |
| | | | catctgatgagcagttgaaatctggaactgcctctgttgtgtgcctgctgaataacttc |
| | | | tatcccagagaggccaaagtacagtggaaggtggataaTgccctccaatcAggtaactc |
| | | | ccaggagagtgtcacagagcaggacagcaaggacagcacctacagcctcagcagcaccc |
| | | | tgacTctgagcaaagcagactaTgagaaacacaaagtctaTgcctgTgaagtcacccat |
| | | | cagggcctgagctcTccTgtcacaaagagcttcaacaggggagagtgttagtagtaact |
| | | | cgaggacggggtgaactacgcctgaggatccgatctttttccctctgccaaaaattatg |
| | | | gggacatcatgaagccccttgagcatctgacttctggctaataaaggaaatttattttc |
| | | | attgcaatagtgtgttggaattttttgtgtctctcactcggcctaggtagataagtagc |
| | | | atggcgggttaatcattaactacaaggaacccctagtgatggagttggccactccctct |
| | | | ctgcgcgctcgctcgctcactgaggccgggcgaccaaaggtcgcccgacgcccgggctt |
| | | | tgcccgggcggcctcagtgagcgagcgagcgcgcag |
| HER-92 | 3989 | 6504 | ctgcgcgctcgctcgctcactgaggccgcccgggcaaagcccgggcgtcgggcgacctt |
| | | | tggtcgcccggcctcagtgagcgagcgagcgcgcagagagggagtggccaactccatca |
| | | | ctaggggttccttgtagttaatgattaacccgccatgctacttatctaccagggtaatg |
| | | | gggatcctctagaactatagctagtcgacattgattattgactagttattaatagtaat |
| | | | caattacggggtcattagttcatagcccatatatggagttccgcgttacataacttacg |
| | | | gtaaatggcccgcctggctgaccgcccaacgacccccgcccattgacgtcaataatgac |
| | | | gtatgttcccatagtaacgccaatagggactttccattgacgtcaatgggtggagtatt |
| | | | tacggtaaactgcccacttggcagtacatcaagtgtatcatatgccaagtacgccccct |
| | | | attgacgtcaatgacggtaaatggcccgcctggcattatgcccagtacatgaccttatg |
| | | | ggactttcctacttggcagtacatctacgtattagtcatcgctattaccatgtcgaggc |
| | | | cacgttctgcttcactctccccatctcccccccctccccacccccaattttgtatttat |
| | | | ttattttttaattattttgtgcagcgatgggggcggggggggggggcgcgcgccaggcg |
| | | | gggcggggcggggcgaggggcggggcggggcgaggcggagaggtgcggcggcagccaat |
| | | | cagagcggcgcgctccgaaagtttccttttatggcgaggcggcggcggcggcggcccta |
| | | | taaaaagcgaagcgcgcggcgggcgggagcaagcttcgtttagtgaaccgtcagatcgc |
| | | | ctggagacgccatccacgctgttttgacctccatagaagacaccgggaccgatccagcc |
| | | | tccgcggattcgaatcccggccgggaacggtgcattggaacgcggattccccgtgccaa |
| | | | gagtgacgtaagtaccgcctatagagtctataggcccacaaaaaatgctttcttctttt |
| | | | aatatacttttttgtttatcttatttctaatactttccctaatctctttctttcagggc |
| | | | aataatgatacaatgtatcatgcctctttgcaccattctaaagaataacagtgataatt |
| | | | tctgggttaaggcaatagcaatatttctgcatataaatatttctgcatataaattgtaa |
| | | | ctgatgtaagaggtttcatattgctaatagcagctacaatccagctaccattctgcttt |
| | | | tattttatggttgggataaggctggattattctgagtccaagctaggcccttttgctaa |
| | | | tcatgttcatacctcttatcttcctcccacagctcctgggcaacgtgctggtctgtgtg |
| | | | ctggcccatcactttggcaaagaattgggattcgaaccggtgccgccaccATGGACTGG |
| | | | ACCTGGAGGTTCCTCTTTGTGGTGGCAGCAGCTACAGGTGTCCAGTCTgaggttcagct |
| | | | ggtggagtctggAggtggcctggtgcagccagggggctcactcAGAttgtcctgtgcag |
| | | | cttctggcttcaacattaaagacacctatatacactgggtgagacaggccccAggtaag |
| | | | ggcctggaatgggttgcaaggatttatcctacCaatggttatactagatatgcTgatTC |
| | | | TgtcaagggcAGAttcactataTCTgcagacacatccaaaaacacagcctacctgcaga |
| | | | tgaacagcctgAGAgctgaggacactgcTgtctattattgttctagatggggagggGAT |
| | | | ggcttctatgctTTTGCCCTGtggggtcaaggaaccctggtcacAgtctcctcTgcCtc |
| | | | TaccaagggcccatcTgtcttccccctggcaccctcctccaagagcacctctgggggca |
| | | | cagcTgccctgggctgcctggtcaaggactacttcccTgaacctgtgacAgtctcCtgg |
| | | | aactcaggAgccctgaccagTggAgtgcacaccttcccTgctgtcctacagtcctcagg |
| | | | actctactccctcagcTCTgtggtgacAgtgccctccagcagcttgggcacccagacct |
| | | | acatctgcaaTgtgaatcacaagcccagcaacaccaaggtggacaagaGagttgagccc |
| | | | aaatcttgtgacaaaactcacacatgcccaccTtgcccagcacctgaactGGtgggggg |
| | | | accAtcagtcttcctcCtccccccaaaacccaaggacaccctcatgatctccAGAaccc |
| | | | ctgaggtcacatgTgtggtggtggaTgtgagccaTgaagaccctgaggtcaagttcaac |
| | | | tggtaTgtggaTggAgtggaggtgcataatgccaagacaaagccCcCTgaggagcagta |
| | | | caacagcacTCTcAGAgtggtcTCTgtcctcacAgtcctgcaccaggactggctgaatg |
| | | | gcaaggagtacaagtgcaaggtctccaacaaagccctcccagcccccatTgagaaaacc |
| | | | atctccaaagccaaagggcagcccAGAgaaccacaggtgtacaccctgcccccatccAG |
| | | | AgaTgagCtgaccaagaaccaggtcagcctgacctgcctggtcaaaggcttctatcccT |
| | | | CTgacatTgcTgtggagtgggagagcaatgggcagccTgagaacaactacaagaccacA |
| | | | cctcTTgtgctggactcTgaTggctccttcttcctctacagcaagctcacAgtggacaa |
| | | | gagcaggtggcagcaggggaaTgtcttctcatgcTCTgtgatgcatgaggctctgcaca |
| | | | accactacacCcagaagagcctctccctgtctccAggtaaaagaaagaggAGAgagggc |
| | | | agaggaagtcttctaacatgTggtgaTgtggaggagaatccTggccctATGGACATGAG |
| | | | GGTCCCTGCTCAGCTCCTGGGGCTCCTGCTGCTCTGGCTCTCAGGTGCCAGATGTgata |
| | | | tccagatgacccagtccccTagctccctgtcTgcctctgtgggAgatagggtcaccatc |
| | | | acctgcAGAgccagtcaggatgtgaatactgctgtagcctggtatcaacagaaaccagg |
| | | | aaaagctccTaaactactgatttactcTgcatccttcctcTACtctggagtcccttctA |
| | | | GGttctctggatccagatctgggacTgatttcactctgaccatcagcagtctgcagccA |
| | | | gaagacttTgcaacttattactgtcagcaacattatactactcctcccacTttTggaca |
| | | | gggtaccaaggtggagatcaaaAGAactgtggctgcaccatctgtcttcatcttcccAc |
| | | | catctgatgagcagttgaaatctggaactgcctctgttgtgtgcctgctgaataacttc |
| | | | tatcccagagaggccaaagtacagtggaaggtggataaTgccctccaatcAggtaactc |
| | | | ccaggagagtgtcacagagcaggacagcaaggacagcacctacagcctcagcagcaccc |
| | | | tgacTctgagcaaagcagactaTgagaaacacaaagtctaTgcctgTgaagtcacccat |
| | | | cagggcctgagctcTccTgtcacaaagagcttcaacaggggagagtgttagtagtaact |
| | | | cgaggacggggtgaactacgcctgaggatccgatctttttccctctgccaaaaattatg |
| | | | gggacatcatgaagccccttgagcatctgacttctggctaataaaggaaatttattttc |
| | | | attgcaatagtgtgttggaattttttgtgtctctcactcggcctaggtagataagtagc |
| | | | atggcgggttaatcattaactacaaggaacccctagtgatggagttggccactccctct |
| | | | ctgcgcgctcgctcgctcactgaggccgggcgaccaaaggtcgcccgacgcccgggctt |
| | | | tgcccgggcggcctcagtgagcgagcgagcgcgcag |
| HER-97 | 4739 | 6505 | ctgcgcgctcgctcgctcactgaggccgcccgggcaaagcccgggcgtcgggcgacctt |
| | | | tggtcgcccggcctcagtgagcgagcgagcgcgcagagagggagtggccaactccatca |
| | | | ctaggggttccttgtagttaatgattaacccgccatgctacttatctaccagggtaatg |
| | | | gggatcctctagaactatagctagtcgacattgattattgactagttattaatagtaat |
| | | | caattacggggtcattagttcatagcccatatatggagttccgcgttacataacttacg |
| | | | gtaaatggcccgcctggctgaccgcccaacgacccccgcccattgacgtcaataatgac |
| | | | gtatgttcccatagtaacgccaatagggactttccattgacgtcaatgggtggagtatt |
| | | | tacggtaaactgcccacttggcagtacatcaagtgtatcatatgccaagtacgccccct |
| | | | attgacgtcaatgacggtaaatggcccgcctggcattatgcccagtacatgaccttatg |
| | | | ggactttcctacttggcagtacatctacgtattagtcatcgctattaccatgtcgaggc |
| | | | cacgttctgcttcactctccccatctcccccccctccccacccccaattttgtatttat |
| | | | ttattttttaattattttgtgcagcgatgggggcggggggggggggcgcgcgccaggcg |
| | | | gggcggggcggggcgaggggcggggcggggcgaggcggagaggtgcggcggcagccaat |
| | | | cagagcggcgcgctccgaaagtttccttttatggcgaggcggcggcggcggcggcccta |
| | | | taaaaagcgaagcgcgcggcgggcgggagcaagcttcgtttagtgaaccgtcagatcgc |
| | | | ctggagacgccatccacgctgttttgacctccatagaagacaccgggaccgatccagcc |
| | | | tccgcggattcgaatcccggccgggaacggtgcattggaacgcggattccccgtgccaa |
| | | | gagtgacgtaagtaccgcctatagagtctataggcccacaaaaaatgctttcttctttt |
| | | | aatatacttttttgtttatcttatttctaatactttccctaatctctttctttcagggc |
| | | | aataatgatacaatgtatcatgcctctttgcaccattctaaagaataacagtgataatt |
| | | | tctgggttaaggcaatagcaatatttctgcatataaatatttctgcatataaattgtaa |
| | | | ctgatgtaagaggtttcatattgctaatagcagctacaatccagctaccattctgcttt |
| | | | tattttatggttgggataaggctggattattctgagtccaagctaggcccttttgctaa |
| | | | tcatgttcatacctcttatcttcctcccacagctcctgggcaacgtgctggtctgtgtg |
| | | | ctggcccatcactttggcaaagaattgggattcgaaccggtgccgccaccATGGACTGG |
| | | | ACCTGGAGGTTCCTCTTTGTGGTGGCAGCAGCTACAGGTGTCCAGTCCCAAgttcagct |
| | | | ggtgCAGtctggTGCAGAAGTTAAGAAGccagggGCAtcaGTAAAGGTGTCCtgCAAGg |
| | | | cttctggcTACTCTTTCACTGGGTATTTCataAATtgggtgAGAGAGgccccCGGCCAG |
| | | | ggcctggaatggATGGGCCATattTCCTCCTCTTATGCAACTTCTACAtatAACCAGAA |
| | | | GTTTCAGggcAGAGTCactTTCACTGTGgacacatccAGCTCTacagcctacATGGAGC |
| | | | TGTCAagcctgAGATCTgaggacactgcagtctattattgtGTGagaAGTggaAACTAt |
| | | | GAAGAGTATgctatggacTACtggggtcaaggaaccctggtcacAgtctcctcAgcCtc |
| | | | TaccaagggcccatcTgtcttccccctggcaccctcctccaagagcacctctgggggca |
| | | | cagcTgccctgggctgcctggtcaaggactacttcccTgaacctgtgacAgtctcCtgg |
| | | | aactcaggAgccctgaccagTggAgtgcacaccttcccTgctgtcctacagtcctcagg |
| | | | actctactccctcagcTCTgtggtgacAgtgccctccagcagcttgggcacccagacct |
| | | | acatctgcaaTgtgaatcacaagcccagcaacaccaaggtggacaagaGagttgagccc |
| | | | aaatcttgtgacaaaactcacacatgcccaccTtgcccagcacctgaactGGtgggggg |
| | | | accAtcagtcttcctcCtccccccaaaacccaaggacaccctcatgatctccAGAaccc |
| | | | ctgaggtcacatgTgtggtggtggaTgtgagccaTgaagaccctgaggtcaagttcaac |
| | | | tggtaTgtggaTggAgtggaggtgcataatgccaagacaaagccCcCTgaggagcagta |
| | | | caacagcacTCTcAGAgtggtcTCTgtcctcacAgtcctgcaccaggactggctgaatg |
| | | | gcaaggagtacaagtgcaaggtctccaacaaagccctcccagcccccatTgagaaaacc |
| | | | atctccaaagccaaagggcagcccAGAgaaccacaggtgtacaccctgcccccatccAG |
| | | | AgaTgagCtgaccaagaaccaggtcagcctgacctgcctggtcaaaggcttctatcccT |
| | | | CTgacatTgcTgtggagtgggagagcaatgggcagccTgagaacaactacaagaccacA |
| | | | cctcTTgtgctggactcTgaTggctccttcttcctctacagcaagctcacAgtggacaa |
| | | | gagcaggtggcagcaggggaaTgtcttctcatgcTCTgtgatgcatgaggctctgcaca |
| | | | accactacacCcagaagagcctctccctgtctccAggtaaaagaaagaggAGAgagggc |
| | | | agaggaagtcttctaacatgTggtgaTgtggaggagaatccTggccctATGGACATGAG |
| | | | GGTCCCTGCTCAGCTCCTGGGGCTCCTGCTGCTCTGGCTCTCAGGTGCCAGATGTgagg |
| | | | ttcagctggtggagtctggTggtggcctGgtgcagccagggggctcactcAGAttgtcc |
| | | | tgtgcagcttctggcttcaacattaaagacacctatatacactgggtgAGAcaggcccc |
| | | | TggAaagggcctggaatgggttgcaaggatttatcctacTaatggttatactagatatg |
| | | | cAgatagTgtcaagggcAGAttcactataagTgcagacacatccaaaaacacagcctac |
| | | | ctgcagatgaacagcctgAGAgctgaggacactgcAgtctattattgttctagatgggg |
| | | | agggTGGggcttctatgctTTTGCCCTGtggggtcaaggaaccctggtcacAgtctcct |
| | | | cTggtggtggtggatcTggaggaggaggaAGTggaggtggaggtTCTgatatccagatg |
| | | | acccagtccccAagctccctgtcTgcctctgtgggGgatagggtcaccatcacctgcAG |
| | | | Agccagtcaggatgtgaatactgctgtagcctggtatcaacagaaaccaggaaaagctc |
| | | | cCaaactactgatttactcTgcatccttcctcTACtctggagtcccttctAGAttctct |
| | | | ggatccagatctggCacTgaCttcactctgaccatcagTagtctgcagccTgaagactt |
| | | | TgcaacttattactgtcaAcaacattatactactcctcccacCttTggacagggtacca |
| | | | aggtggagatcaaaGGCTCTgatatTGTACTGacccagtccccTGACtccctgGCTGTG |
| | | | tctCTGggGGAAaggGCAaccatcAACtgcAGGAGTagtcagACCCTTCTGTACTCTAA |
| | | | TAACCAGAAAAACTACCTGgcctggtatcaaAAAaaaccaggaCAGCCTccTaaactac |
| | | | tgattAGTTGGgcaTTCACTAGGAAGtctggagtccctGACAGGttctctggatcTGGG |
| | | | tcTggAacAgatttcacActgaccatcagcagtctgcagGCTgaagaTGTTgcaGTCta |
| | | | CtactgtcagcaaTACTCAAACTACcctTGGacTttTggacagggGaccaaAgtggaga |
| | | | tcaaaAGGactgtCgctgcaccatctgtcttcatcttcccAccatctgatgagcagttg |
| | | | aaatctggaactgcctctgttAAGtgcctgctgaataacttctatcccagagaggccaa |
| | | | agtacagtggaaggtggataaTgccctccaaAGTggtaactcccaggagagtgtcacag |
| | | | agcaggacagcaaggacagcacctacagcctcagcagcaccctgacCctgagcaaagca |
| | | | gactaTgagaaacacaaagtctaTgcctgTgaagtcacccatcagggcctgagcAGCcc |
| | | | Agtcacaaagagcttcaacaggggagagtgttagtagtaactcgaggacggggtgaact |
| | | | acgcctgaggatccgatctttttccctctgccaaaaattatggggacatcatgaagccc |
| | | | cttgagcatctgacttctggctaataaaggaaatttattttcattgcaatagtgtgttg |
| | | | gaattttttgtgtctctcactcggcctaggtagataagtagcatggcgggttaatcatt |
| | | | aactacaaggaacccctagtgatggagttggccactccctctctgcgcgctcgctcgct |
| | | | cactgaggccgggcgaccaaaggtcgcccgacgcccgggctttgcccgggcggcctcag |
| | | | tgagcgagcgagcgcgcag |
| HER-98 | 4739 | 6506 | ctgcgcgctcgctcgctcactgaggccgcccgggcaaagcccgggcgtcgggcgacctt |
| | | | tggtcgcccggcctcagtgagcgagcgagcgcgcagagagggagtggccaactccatca |
| | | | ctaggggttccttgtagttaatgattaacccgccatgctacttatctaccagggtaatg |
| | | | gggatcctctagaactatagctagtcgacattgattattgactagttattaatagtaat |
| | | | caattacggggtcattagttcatagcccatatatggagttccgcgttacataacttacg |
| | | | gtaaatggcccgcctggctgaccgcccaacgacccccgcccattgacgtcaataatgac |
| | | | gtatgttcccatagtaacgccaatagggactttccattgacgtcaatgggtggagtatt |
| | | | tacggtaaactgcccacttggcagtacatcaagtgtatcatatgccaagtacgccccct |
| | | | attgacgtcaatgacggtaaatggcccgcctggcattatgcccagtacatgaccttatg |
| | | | ggactttcctacttggcagtacatctacgtattagtcatcgctattaccatgtcgaggc |
| | | | cacgttctgcttcactctccccatctcccccccctccccacccccaattttgtatttat |
| | | | ttattttttaattattttgtgcagcgatgggggcggggggggggggcgcgcgccaggcg |
| | | | gggcggggcggggcgaggggcggggcggggcgaggcggagaggtgcggcggcagccaat |
| | | | cagagcggcgcgctccgaaagtttccttttatggcgaggcggcggcggcggcggcccta |
| | | | taaaaagcgaagcgcgcggcgggcgggagcaagcttcgtttagtgaaccgtcagatcgc |
| | | | ctggagacgccatccacgctgttttgacctccatagaagacaccgggaccgatccagcc |
| | | | tccgcggattcgaatcccggccgggaacggtgcattggaacgcggattccccgtgccaa |
| | | | gagtgacgtaagtaccgcctatagagtctataggcccacaaaaaatgctttcttctttt |
| | | | aatatacttttttgtttatcttatttctaatactttccctaatctctttctttcagggc |
| | | | aataatgatacaatgtatcatgcctctttgcaccattctaaagaataacagtgataatt |
| | | | tctgggttaaggcaatagcaatatttctgcatataaatatttctgcatataaattgtaa |
| | | | ctgatgtaagaggtttcatattgctaatagcagctacaatccagctaccattctgcttt |
| | | | tattttatggttgggataaggctggattattctgagtccaagctaggcccttttgctaa |
| | | | tcatgttcatacctcttatcttcctcccacagctcctgggcaacgtgctggtctgtgtg |
| | | | ctggcccatcactttggcaaagaattgggattcgaaccggtgccgccaccATGGACTGG |
| | | | ACCTGGAGGTTCCTCTTTGTGGTGGCAGCAGCTACAGGTGTCCAGTCCCAAgttcagct |
| | | | ggtgCAGtctggTGCAGAAGTTAAGAAGccagggGCAtcaGTAAAGGTGTCCtgCAAGg |
| | | | cttctggcTACTCTTTCACTGGGTATTTCataAATtgggtgAGAGAGgccccCGGCCAG |
| | | | ggcctggaatggATGGGCCATattTCCTCCTCTTATGCAACTTCTACAtatAACCAGAA |
| | | | GTTTCAGggcAGAGTCactTTCACTGTGgacacatccAGCTCTacagcctacATGGAGC |
| | | | TGTCAagcctgAGATCTgaggacactgcagtctattattgtGTGagaAGTggaAACTAt |
| | | | GAAGAGTATgctatggacTACtggggtcaaggaaccctggtcacAgtctcctcAgcCtc |
| | | | TaccaagggcccatcTgtcttccccctggcaccctcctccaagagcacctctgggggca |
| | | | cagcTgccctgggctgcctggtcaaggactacttcccTgaacctgtgacAgtctcCtgg |
| | | | aactcaggAgccctgaccagTggAgtgcacaccttcccTgctgtcctacagtcctcagg |
| | | | actctactccctcagcTCTgtggtgacAgtgccctccagcagcttgggcacccagacct |
| | | | acatctgcaaTgtgaatcacaagcccagcaacaccaaggtggacaagaGagttgagccc |
| | | | aaatcttgtgacaaaactcacacatgcccaccTtgcccagcacctgaactGGtgggggg |
| | | | accAtcagtcttcctcCtccccccaaaacccaaggacaccctcatgatctccAGAaccc |
| | | | ctgaggtcacatgTgtggtggtggaTgtgagccaTgaagaccctgaggtcaagttcaac |
| | | | tggtaTgtggaTggAgtggaggtgcataatgccaagacaaagccCcCTgaggagcagta |
| | | | caacagcacTCTcAGAgtggtcTCTgtcctcacAgtcctgcaccaggactggctgaatg |
| | | | gcaaggagtacaagtgcaaggtctccaacaaagccctcccagcccccatTgagaaaacc |
| | | | atctccaaagccaaagggcagcccAGAgaaccacaggtgtacaccctgcccccatccAG |
| | | | AgaTgagCtgaccaagaaccaggtcagcctgacctgcctggtcaaaggcttctatcccT |
| | | | CTgacatTgcTgtggagtgggagagcaatgggcagccTgagaacaactacaagaccacA |
| | | | cctcTTgtgctggactcTgaTggctccttcttcctctacagcaagctcacAgtggacaa |
| | | | gagcaggtggcagcaggggaaTgtcttctcatgcTCTgtgatgcatgaggctctgcaca |
| | | | accactacacCcagaagagcctctccctgtctccAggtaaaagaaagaggAGAgagggc |
| | | | agaggaagtcttctaacatgTggtgaTgtggaggagaatccTggccctATGGACATGAG |
| | | | GGTCCCTGCTCAGCTCCTGGGGCTCCTGCTGCTCTGGCTCTCAGGTGCCAGATGTgagg |
| | | | ttcagctggtggagtctggTggtggcctGgtgcagccagggggctcactcAGAttgtcc |
| | | | tgtgcagcttctggcttcaacattaaagacacctatatacactgggtgAGAcaggcccc |
| | | | TggAaagggcctggaatgggttgcaaggatttatcctacTaatggttatactagatatg |
| | | | cAgatagTgtcaagggcAGAttcactataagTgcagacacatccaaaaacacagcctac |
| | | | ctgcagatgaacagcctgAGAgctgaggacactgcAgtctattattgttctagatgggg |
| | | | agggTGGggcttctatgctTTTGCCTACtggggtcaaggaaccctggtcacAgtctcct |
| | | | cTggtggtggtggatcTggaggaggaggaAGTggaggtggaggtTCTgatatccagatg |
| | | | acccagtccccAagctccctgtcTgcctctgtgggGgatagggtcaccatcacctgcAG |
| | | | Agccagtcaggatgtgaatactgctgtagcctggtatcaacagaaaccaggaaaagctc |
| | | | cCaaactactgatttactcTgcatccttcctcTACtctggagtcccttctAGAttctct |
| | | | ggatccagatctggCacTgaCttcactctgaccatcagTagtctgcagccTgaagactt |
| | | | TgcaacttattactgtcaAcaacattatactactcctcccacCttTggacagggtacca |
| | | | aggtggagatcaaaGGCTCTgatatTGTACTGacccagtccccTGACtccctgGCTGTG |
| | | | tctCTGggGGAAaggGCAaccatcAACtgcAGGAGTagtcagACCCTTCTGTACTCTAA |
| | | | TAACCAGAAAAACTACCTGgcctggtatcaaAAAaaaccaggaCAGCCTccTaaactac |
| | | | tgattAGTTGGgcaTTCACTAGGAAGtctggagtccctGACAGGttctctggatcTGGG |
| | | | tcTggAacAgatttcacActgaccatcagcagtctgcagGCTgaagaTGTTgcaGTCta |
| | | | CtactgtcagcaaTACTCAAACTACcctTGGacTttTggacagggGaccaaAgtggaga |
| | | | tcaaaAGGactgtCgctgcaccatctgtcttcatcttcccAccatctgatgagcagttg |
| | | | aaatctggaactgcctctgttAAGtgcctgctgaataacttctatcccagagaggccaa |
| | | | agtacagtggaaggtggataaTgccctccaaAGTggtaactcccaggagagtgtcacag |
| | | | agcaggacagcaaggacagcacctacagcctcagcagcaccctgacCctgagcaaagca |
| | | | gactaTgagaaacacaaagtctaTgcctgTgaagtcacccatcagggcctgagcAGCcc |
| | | | Agtcacaaagagcttcaacaggggagagtgttagtagtaactcgaggacggggtgaact |
| | | | acgcctgaggatccgatctttttccctctgccaaaaattatggggacatcatgaagccc |
| | | | cttgagcatctgacttctggctaataaaggaaatttattttcattgcaatagtgtgttg |
| | | | gaattttttgtgtctctcactcggcctaggtagataagtagcatggcgggttaatcatt |
| | | | aactacaaggaacccctagtgatggagttggccactccctctctgcgcgctcgctcgct |
| | | | cactgaggccgggcgaccaaaggtcgcccgacgcccgggctttgcccgggcggcctcag |
| | | | tgagcgagcgagcgcgcag |
| HER-99 | 4739 | 6507 | ctgcgcgctcgctcgctcactgaggccgcccgggcaaagcccgggcgtcgggcgacctt |
| | | | tggtcgcccggcctcagtgagcgagcgagcgcgcagagagggagtggccaactccatca |
| | | | ctaggggttccttgtagttaatgattaacccgccatgctacttatctaccagggtaatg |
| | | | gggatcctctagaactatagctagtcgacattgattattgactagttattaatagtaat |
| | | | caattacggggtcattagttcatagcccatatatggagttccgcgttacataacttacg |
| | | | gtaaatggcccgcctggctgaccgcccaacgacccccgcccattgacgtcaataatgac |
| | | | gtatgttcccatagtaacgccaatagggactttccattgacgtcaatgggtggagtatt |
| | | | tacggtaaactgcccacttggcagtacatcaagtgtatcatatgccaagtacgccccct |
| | | | attgacgtcaatgacggtaaatggcccgcctggcattatgcccagtacatgaccttatg |
| | | | ggactttcctacttggcagtacatctacgtattagtcatcgctattaccatgtcgaggc |
| | | | cacgttctgcttcactctccccatctcccccccctccccacccccaattttgtatttat |
| | | | ttattttttaattattttgtgcagcgatgggggcggggggggggggcgcgcgccaggcg |
| | | | gggcggggcggggcgaggggcggggcggggcgaggcggagaggtgcggcggcagccaat |
| | | | cagagcggcgcgctccgaaagtttccttttatggcgaggcggcggcggcggcggcccta |
| | | | taaaaagcgaagcgcgcggcgggcgggagcaagcttcgtttagtgaaccgtcagatcgc |
| | | | ctggagacgccatccacgctgttttgacctccatagaagacaccgggaccgatccagcc |
| | | | tccgcggattcgaatcccggccgggaacggtgcattggaacgcggattccccgtgccaa |
| | | | gagtgacgtaagtaccgcctatagagtctataggcccacaaaaaatgctttcttctttt |
| | | | aatatacttttttgtttatcttatttctaatactttccctaatctctttctttcagggc |
| | | | aataatgatacaatgtatcatgcctctttgcaccattctaaagaataacagtgataatt |
| | | | tctgggttaaggcaatagcaatatttctgcatataaatatttctgcatataaattgtaa |
| | | | ctgatgtaagaggtttcatattgctaatagcagctacaatccagctaccattctgcttt |
| | | | tattttatggttgggataaggctggattattctgagtccaagctaggcccttttgctaa |
| | | | tcatgttcatacctcttatcttcctcccacagctcctgggcaacgtgctggtctgtgtg |
| | | | ctggcccatcactttggcaaagaattgggattcgaaccggtgccgccaccATGGACTGG |
| | | | ACCTGGAGGTTCCTCTTTGTGGTGGCAGCAGCTACAGGTGTCCAGTCCCAAgttcagct |
| | | | ggtgCAGtctggTGCAGAAGTTAAGAAGccagggGCAtcaGTAAAGGTGTCCtgCAAGg |
| | | | cttctggcTACTCTTTCACTGGGTATTTCataAATtgggtgAGAGAGgccccCGGCCAG |
| | | | ggcctggaatggATGGGCCATattTCCTCCTCTTATGCAACTTCTACAtatAACCAGAA |
| | | | GTTTCAGggcAGAGTCactTTCACTGTGgacacatccAGCTCTacagcctacATGGAGC |
| | | | TGTCAagcctgAGATCTgaggacactgcagtctattattgtGTGagaAGTggaAACTAt |
| | | | GAAGAGTATgctatggacTACtggggtcaaggaaccctggtcacAgtctcctcAgcCtc |
| | | | TaccaagggcccatcTgtcttccccctggcaccctcctccaagagcacctctgggggca |
| | | | cagcTgccctgggctgcctggtcaaggactacttcccTgaacctgtgacAgtctcCtgg |
| | | | aactcaggAgccctgaccagTggAgtgcacaccttcccTgctgtcctacagtcctcagg |
| | | | actctactccctcagcTCTgtggtgacAgtgccctccagcagcttgggcacccagacct |
| | | | acatctgcaaTgtgaatcacaagcccagcaacaccaaggtggacaagaGagttgagccc |
| | | | aaatcttgtgacaaaactcacacatgcccaccTtgcccagcacctgaactGGtgggggg |
| | | | accAtcagtcttcctcCtccccccaaaacccaaggacaccctcatgatctccAGAaccc |
| | | | ctgaggtcacatgTgtggtggtggaTgtgagccaTgaagaccctgaggtcaagttcaac |
| | | | tggtaTgtggaTggAgtggaggtgcataatgccaagacaaagccCcCTgaggagcagta |
| | | | caacagcacTCTcAGAgtggtcTCTgtcctcacAgtcctgcaccaggactggctgaatg |
| | | | gcaaggagtacaagtgcaaggtctccaacaaagccctcccagcccccatTgagaaaacc |
| | | | atctccaaagccaaagggcagcccAGAgaaccacaggtgtacaccctgcccccatccAG |
| | | | AgaTgagCtgaccaagaaccaggtcagcctgacctgcctggtcaaaggcttctatcccT |
| | | | CTgacatTgcTgtggagtgggagagcaatgggcagccTgagaacaactacaagaccacA |
| | | | cctcTTgtgctggactcTgaTggctccttcttcctctacagcaagctcacAgtggacaa |
| | | | gagcaggtggcagcaggggaaTgtcttctcatgcTCTgtgatgcatgaggctctgcaca |
| | | | accactacacCcagaagagcctctccctgtctccAggtaaaagaaagaggAGAgagggc |
| | | | agaggaagtcttctaacatgTggtgaTgtggaggagaatccTggccctATGGACATGAG |
| | | | GGTCCCTGCTCAGCTCCTGGGGCTCCTGCTGCTCTGGCTCTCAGGTGCCAGATGTgagg |
| | | | ttcagctggtggagtctggTggtggcctGgtgcagccagggggctcactcAGAttgtcc |
| | | | tgtgcagcttctggcttcaacattaaagacacctatatacactgggtgAGAcaggcccc |
| | | | TggAaagggcctggaatgggttgcaaggatttatcctacTaatggttatactagatatg |
| | | | cAgatagTgtcaagggcAGAttcactataagTgcagacacatccaaaaacacagcctac |
| | | | ctgcagatgaacagcctgAGAgctgaggacactgcAgtctattattgttctagatgggg |
| | | | agggTGGggcttctatgctTTTgacCTGtggggtcaaggaaccctggtcacAgtctcct |
| | | | cTggtggtggtggatcTggaggaggaggaAGTggaggtggaggtTCTgatatccagatg |
| | | | acccagtccccAagctccctgtcTgcctctgtgggGgatagggtcaccatcacctgcAG |
| | | | Agccagtcaggatgtgaatactgctgtagcctggtatcaacagaaaccaggaaaagctc |
| | | | cCaaactactgatttactcTgcatccttcctcTACtctggagtcccttctAGAttctct |
| | | | ggatccagatctggCacTgaCttcactctgaccatcagTagtctgcagccTgaagactt |
| | | | TgcaacttattactgtcaAcaacattatactactcctcccacCttTggacagggtacca |
| | | | aggtggagatcaaaGGCTCTgatatTGTACTGacccagtccccTGACtccctgGCTGTG |
| | | | tctCTGggGGAAaggGCAaccatcAACtgcAGGAGTagtcagACCCTTCTGTACTCTAA |
| | | | TAACCAGAAAAACTACCTGgcctggtatcaaAAAaaaccaggaCAGCCTccTaaactac |
| | | | tgattAGTTGGgcaTTCACTAGGAAGtctggagtccctGACAGGttctctggatcTGGG |
| | | | tcTggAacAgatttcacActgaccatcagcagtctgcagGCTgaagaTGTTgcaGTCta |
| | | | CtactgtcagcaaTACTCAAACTACcctTGGacTttTggacagggGaccaaAgtggaga |
| | | | tcaaaAGGactgtCgctgcaccatctgtcttcatcttcccAccatctgatgagcagttg |
| | | | aaatctggaactgcctctgttAAGtgcctgctgaataacttctatcccagagaggccaa |
| | | | agtacagtggaaggtggataaTgccctccaaAGTggtaactcccaggagagtgtcacag |
| | | | agcaggacagcaaggacagcacctacagcctcagcagcaccctgacCctgagcaaagca |
| | | | gactaTgagaaacacaaagtctaTgcctgTgaagtcacccatcagggcctgagcAGCcc |
| | | | Agtcacaaagagcttcaacaggggagagtgttagtagtaactcgaggacggggtgaact |
| | | | acgcctgaggatccgatctttttccctctgccaaaaattatggggacatcatgaagccc |
| | | | cttgagcatctgacttctggctaataaaggaaatttattttcattgcaatagtgtgttg |
| | | | gaattttttgtgtctctcactcggcctaggtagataagtagcatggcgggttaatcatt |
| | | | aactacaaggaacccctagtgatggagttggccactccctctctgcgcgctcgctcgct |
| | | | cactgaggccgggcgaccaaaggtcgcccgacgcccgggctttgcccgggcggcctcag |
| | | | tgagcgagcgagcgcgcag |
| HER-100 | 4739 | 6508 | ctgcgcgctcgctcgctcactgaggccgcccgggcaaagcccgggcgtcgggcgacctt |
| | | | tggtcgcccggcctcagtgagcgagcgagcgcgcagagagggagtggccaactccatca |
| | | | ctaggggttccttgtagttaatgattaacccgccatgctacttatctaccagggtaatg |
| | | | gggatcctctagaactatagctagtcgacattgattattgactagttattaatagtaat |
| | | | caattacggggtcattagttcatagcccatatatggagttccgcgttacataacttacg |
| | | | gtaaatggcccgcctggctgaccgcccaacgacccccgcccattgacgtcaataatgac |
| | | | gtatgttcccatagtaacgccaatagggactttccattgacgtcaatgggtggagtatt |
| | | | tacggtaaactgcccacttggcagtacatcaagtgtatcatatgccaagtacgccccct |
| | | | attgacgtcaatgacggtaaatggcccgcctggcattatgcccagtacatgaccttatg |
| | | | ggactttcctacttggcagtacatctacgtattagtcatcgctattaccatgtcgaggc |
| | | | cacgttctgcttcactctccccatctcccccccctccccacccccaattttgtatttat |
| | | | ttattttttaattattttgtgcagcgatgggggcggggggggggggcgcgcgccaggcg |
| | | | gggcggggcggggcgaggggcggggcggggcgaggcggagaggtgcggcggcagccaat |
| | | | cagagcggcgcgctccgaaagtttccttttatggcgaggcggcggcggcggcggcccta |
| | | | taaaaagcgaagcgcgcggcgggcgggagcaagcttcgtttagtgaaccgtcagatcgc |
| | | | ctggagacgccatccacgctgttttgacctccatagaagacaccgggaccgatccagcc |
| | | | tccgcggattcgaatcccggccgggaacggtgcattggaacgcggattccccgtgccaa |
| | | | gagtgacgtaagtaccgcctatagagtctataggcccacaaaaaatgctttcttctttt |
| | | | aatatacttttttgtttatcttatttctaatactttccctaatctctttctttcagggc |
| | | | aataatgatacaatgtatcatgcctctttgcaccattctaaagaataacagtgataatt |
| | | | tctgggttaaggcaatagcaatatttctgcatataaatatttctgcatataaattgtaa |
| | | | ctgatgtaagaggtttcatattgctaatagcagctacaatccagctaccattctgcttt |
| | | | tattttatggttgggataaggctggattattctgagtccaagctaggcccttttgctaa |
| | | | tcatgttcatacctcttatcttcctcccacagctcctgggcaacgtgctggtctgtgtg |
| | | | ctggcccatcactttggcaaagaattgggattcgaaccggtgccgccaccATGGACTGG |
| | | | ACCTGGAGGTTCCTCTTTGTGGTGGCAGCAGCTACAGGTGTCCAGTCCCAAgttcagct |
| | | | ggtgCAGtctggTGCAGAAGTTAAGAAGccagggGCAtcaGTAAAGGTGTCCtgCAAGg |
| | | | cttctggcTACTCTTTCACTGGGTATTTCataAATtgggtgAGAGAGgccccCGGCCAG |
| | | | ggcctggaatggATGGGCCATattTCCTCCTCTTATGCAACTTCTACAtatAACCAGAA |
| | | | GTTTCAGggcAGAGTCactTTCACTGTGgacacatccAGCTCTacagcctacATGGAGC |
| | | | TGTCAagcctgAGATCTgaggacactgcagtctattattgtGTGagaAGTggaAACTAt |
| | | | GAAGAGTATgctatggacTACtggggtcaaggaaccctggtcacAgtctcctcAgcCtc |
| | | | TaccaagggcccatcTgtcttccccctggcaccctcctccaagagcacctctgggggca |
| | | | cagcTgccctgggctgcctggtcaaggactacttcccTgaacctgtgacAgtctcCtgg |
| | | | aactcaggAgccctgaccagTggAgtgcacaccttcccTgctgtcctacagtcctcagg |
| | | | actctactccctcagcTCTgtggtgacAgtgccctccagcagcttgggcacccagacct |
| | | | acatctgcaaTgtgaatcacaagcccagcaacaccaaggtggacaagaGagttgagccc |
| | | | aaatcttgtgacaaaactcacacatgcccaccTtgcccagcacctgaactGGtgggggg |
| | | | accAtcagtcttcctcCtccccccaaaacccaaggacaccctcatgatctccAGAaccc |
| | | | ctgaggtcacatgTgtggtggtggaTgtgagccaTgaagaccctgaggtcaagttcaac |
| | | | tggtaTgtggaTggAgtggaggtgcataatgccaagacaaagccCcCTgaggagcagta |
| | | | caacagcacTCTcAGAgtggtcTCTgtcctcacAgtcctgcaccaggactggctgaatg |
| | | | gcaaggagtacaagtgcaaggtctccaacaaagccctcccagcccccatTgagaaaacc |
| | | | atctccaaagccaaagggcagcccAGAgaaccacaggtgtacaccctgcccccatccAG |
| | | | AgaTgagCtgaccaagaaccaggtcagcctgacctgcctggtcaaaggcttctatcccT |
| | | | CTgacatTgcTgtggagtgggagagcaatgggcagccTgagaacaactacaagaccacA |
| | | | cctcTTgtgctggactcTgaTggctccttcttcctctacagcaagctcacAgtggacaa |
| | | | gagcaggtggcagcaggggaaTgtcttctcatgcTCTgtgatgcatgaggctctgcaca |
| | | | accactacacCcagaagagcctctccctgtctccAggtaaaagaaagaggAGAgagggc |
| | | | agaggaagtcttctaacatgTggtgaTgtggaggagaatccTggccctATGGACATGAG |
| | | | GGTCCCTGCTCAGCTCCTGGGGCTCCTGCTGCTCTGGCTCTCAGGTGCCAGATGTgagg |
| | | | ttcagctggtggagtctggTggtggcctGgtgcagccagggggctcactcAGAttgtcc |
| | | | tgtgcagcttctggcttcaacattaaagacacctatatacactgggtgAGAcaggcccc |
| | | | TggAaagggcctggaatgggttgcaaggatttatcctacTaatggttatactagatatg |
| | | | cAgatagTgtcaagggcAGAttcactataagTgcagacacatccaaaaacacagcctac |
| | | | ctgcagatgaacagcctgAGAgctgaggacactgcAgtctattattgttctagatgggg |
| | | | agggTGGggcttctatgctATGGCCCTGtggggtcaaggaaccctggtcacAgtctcct |
| | | | cTggtggtggtggatcTggaggaggaggaAGTggaggtggaggtTCTgatatccagatg |
| | | | acccagtccccAagctccctgtcTgcctctgtgggGgatagggtcaccatcacctgcAG |
| | | | Agccagtcaggatgtgaatactgctgtagcctggtatcaacagaaaccaggaaaagctc |
| | | | cCaaactactgatttactcTgcatccttcctcTACtctggagtcccttctAGAttctct |
| | | | ggatccagatctggCacTgaCttcactctgaccatcagTagtctgcagccTgaagactt |
| | | | TgcaacttattactgtcaAcaacattatactactcctcccacCttTggacagggtacca |
| | | | aggtggagatcaaaGGCTCTgatatTGTACTGacccagtccccTGACtccctgGCTGTG |
| | | | tctCTGggGGAAaggGCAaccatcAACtgcAGGAGTagtcagACCCTTCTGTACTCTAA |
| | | | TAACCAGAAAAACTACCTGgcctggtatcaaAAAaaaccaggaCAGCCTccTaaactac |
| | | | tgattAGTTGGgcaTTCACTAGGAAGtctggagtccctGACAGGttctctggatcTGGG |
| | | | tcTggAacAgatttcacActgaccatcagcagtctgcagGCTgaagaTGTTgcaGTCta |
| | | | CtactgtcagcaaTACTCAAACTACcctTGGacTttTggacagggGaccaaAgtggaga |
| | | | tcaaaAGGactgtCgctgcaccatctgtcttcatcttcccAccatctgatgagcagttg |
| | | | aaatctggaactgcctctgttAAGtgcctgctgaataacttctatcccagagaggccaa |
| | | | agtacagtggaaggtggataaTgccctccaaAGTggtaactcccaggagagtgtcacag |
| | | | agcaggacagcaaggacagcacctacagcctcagcagcaccctgacCctgagcaaagca |
| | | | gactaTgagaaacacaaagtctaTgcctgTgaagtcacccatcagggcctgagcAGCcc |
| | | | Agtcacaaagagcttcaacaggggagagtgttagtagtaactcgaggacggggtgaact |
| | | | acgcctgaggatccgatctttttccctctgccaaaaattatggggacatcatgaagccc |
| | | | cttgagcatctgacttctggctaataaaggaaatttattttcattgcaatagtgtgttg |
| | | | gaattttttgtgtctctcactcggcctaggtagataagtagcatggcgggttaatcatt |
| | | | aactacaaggaacccctagtgatggagttggccactccctctctgcgcgctcgctcgct |
| | | | cactgaggccgggcgaccaaaggtcgcccgacgcccgggctttgcccgggcggcctcag |
| | | | tgagcgagcgagcgcgcag |
| HER-101 | 4739 | 6509 | ctgcgcgctcgctcgctcactgaggccgcccgggcaaagcccgggcgtcgggcgacctt |
| | | | tggtcgcccggcctcagtgagcgagcgagcgcgcagagagggagtggccaactccatca |
| | | | ctaggggttccttgtagttaatgattaacccgccatgctacttatctaccagggtaatg |
| | | | gggatcctctagaactatagctagtcgacattgattattgactagttattaatagtaat |
| | | | caattacggggtcattagttcatagcccatatatggagttccgcgttacataacttacg |
| | | | gtaaatggcccgcctggctgaccgcccaacgacccccgcccattgacgtcaataatgac |
| | | | gtatgttcccatagtaacgccaatagggactttccattgacgtcaatgggtggagtatt |
| | | | tacggtaaactgcccacttggcagtacatcaagtgtatcatatgccaagtacgccccct |
| | | | attgacgtcaatgacggtaaatggcccgcctggcattatgcccagtacatgaccttatg |
| | | | ggactttcctacttggcagtacatctacgtattagtcatcgctattaccatgtcgaggc |
| | | | cacgttctgcttcactctccccatctcccccccctccccacccccaattttgtatttat |
| | | | ttattttttaattattttgtgcagcgatgggggcggggggggggggcgcgcgccaggcg |
| | | | gggcggggcggggcgaggggcggggcggggcgaggcggagaggtgcggcggcagccaat |
| | | | cagagcggcgcgctccgaaagtttccttttatggcgaggcggcggcggcggcggcccta |
| | | | taaaaagcgaagcgcgcggcgggcgggagcaagcttcgtttagtgaaccgtcagatcgc |
| | | | ctggagacgccatccacgctgttttgacctccatagaagacaccgggaccgatccagcc |
| | | | tccgcggattcgaatcccggccgggaacggtgcattggaacgcggattccccgtgccaa |
| | | | gagtgacgtaagtaccgcctatagagtctataggcccacaaaaaatgctttcttctttt |
| | | | aatatacttttttgtttatcttatttctaatactttccctaatctctttctttcagggc |
| | | | aataatgatacaatgtatcatgcctctttgcaccattctaaagaataacagtgataatt |
| | | | tctgggttaaggcaatagcaatatttctgcatataaatatttctgcatataaattgtaa |
| | | | ctgatgtaagaggtttcatattgctaatagcagctacaatccagctaccattctgcttt |
| | | | tattttatggttgggataaggctggattattctgagtccaagctaggcccttttgctaa |
| | | | tcatgttcatacctcttatcttcctcccacagctcctgggcaacgtgctggtctgtgtg |
| | | | ctggcccatcactttggcaaagaattgggattcgaaccggtgccgccaccATGGACTGG |
| | | | ACCTGGAGGTTCCTCTTTGTGGTGGCAGCAGCTACAGGTGTCCAGTCCCAAgttcagct |
| | | | ggtgCAGtctggTGCAGAAGTTAAGAAGccagggGCAtcaGTAAAGGTGTCCtgCAAGg |
| | | | cttctggcTACTCTTTCACTGGGTATTTCataAATtgggtgAGAGAGgccccCGGCCAG |
| | | | ggcctggaatggATGGGCCATattTCCTCCTCTTATGCAACTTCTACAtatAACCAGAA |
| | | | GTTTCAGggcAGAGTCactTTCACTGTGgacacatccAGCTCTacagcctacATGGAGC |
| | | | TGTCAagcctgAGATCTgaggacactgcagtctattattgtGTGagaAGTggaAACTAt |
| | | | GAAGAGTATgctatggacTACtggggtcaaggaaccctggtcacAgtctcctcAgcCtc |
| | | | TaccaagggcccatcTgtcttccccctggcaccctcctccaagagcacctctgggggca |
| | | | cagcTgccctgggctgcctggtcaaggactacttcccTgaacctgtgacAgtctcCtgg |
| | | | aactcaggAgccctgaccagTggAgtgcacaccttcccTgctgtcctacagtcctcagg |
| | | | actctactccctcagcTCTgtggtgacAgtgccctccagcagcttgggcacccagacct |
| | | | acatctgcaaTgtgaatcacaagcccagcaacaccaaggtggacaagaGagttgagccc |
| | | | aaatcttgtgacaaaactcacacatgcccaccTtgcccagcacctgaactGGtgggggg |
| | | | accAtcagtcttcctcCtccccccaaaacccaaggacaccctcatgatctccAGAaccc |
| | | | ctgaggtcacatgTgtggtggtggaTgtgagccaTgaagaccctgaggtcaagttcaac |
| | | | tggtaTgtggaTggAgtggaggtgcataatgccaagacaaagccCcCTgaggagcagta |
| | | | caacagcacTCTcAGAgtggtcTCTgtcctcacAgtcctgcaccaggactggctgaatg |
| | | | gcaaggagtacaagtgcaaggtctccaacaaagccctcccagcccccatTgagaaaacc |
| | | | atctccaaagccaaagggcagcccAGAgaaccacaggtgtacaccctgcccccatccAG |
| | | | AgaTgagCtgaccaagaaccaggtcagcctgacctgcctggtcaaaggcttctatcccT |
| | | | CTgacatTgcTgtggagtgggagagcaatgggcagccTgagaacaactacaagaccacA |
| | | | cctcTTgtgctggactcTgaTggctccttcttcctctacagcaagctcacAgtggacaa |
| | | | gagcaggtggcagcaggggaaTgtcttctcatgcTCTgtgatgcatgaggctctgcaca |
| | | | accactacacCcagaagagcctctccctgtctccAggtaaaagaaagaggAGAgagggc |
| | | | agaggaagtcttctaacatgTggtgaTgtggaggagaatccTggccctATGGACATGAG |
| | | | GGTCCCTGCTCAGCTCCTGGGGCTCCTGCTGCTCTGGCTCTCAGGTGCCAGATGTgagg |
| | | | ttcagctggtggagtctggTggtggcctGgtgcagccagggggctcactcAGAttgtcc |
| | | | tgtgcagcttctggcttcaacattaaagacacctatatacactgggtgAGAcaggcccc |
| | | | TggAaagggcctggaatgggttgcaaggatttatcctacTaatggttatactagatatg |
| | | | cAgatagTgtcaagggcAGAttcactataagTgcagacacatccaaaaacacagcctac |
| | | | ctgcagatgaacagcctgAGAgctgaggacactgcAgtctattattgttctagatgggg |
| | | | agggGATggcttctatgctTTTGCCCTGtggggtcaaggaaccctggtcacAgtctcct |
| | | | cTggtggtggtggatcTggaggaggaggaAGTggaggtggaggtTCTgatatccagatg |
| | | | acccagtccccAagctccctgtcTgcctctgtgggGgatagggtcaccatcacctgcAG |
| | | | Agccagtcaggatgtgaatactgctgtagcctggtatcaacagaaaccaggaaaagctc |
| | | | cCaaactactgatttactcTgcatccttcctcTACtctggagtcccttctAGAttctct |
| | | | ggatccagatctggCacTgaCttcactctgaccatcagTagtctgcagccTgaagactt |
| | | | TgcaacttattactgtcaAcaacattatactactcctcccacCttTggacagggtacca |
| | | | aggtggagatcaaaGGCTCTgatatTGTACTGacccagtccccTGACtccctgGCTGTG |
| | | | tctCTGggGGAAaggGCAaccatcAACtgcAGGAGTagtcagACCCTTCTGTACTCTAA |
| | | | TAACCAGAAAAACTACCTGgcctggtatcaaAAAaaaccaggaCAGCCTccTaaactac |
| | | | tgattAGTTGGgcaTTCACTAGGAAGtctggagtccctGACAGGttctctggatcTGGG |
| | | | tcTggAacAgatttcacActgaccatcagcagtctgcagGCTgaagaTGTTgcaGTCta |
| | | | CtactgtcagcaaTACTCAAACTACcctTGGacTttTggacagggGaccaaAgtggaga |
| | | | tcaaaAGGactgtCgctgcaccatctgtcttcatcttcccAccatctgatgagcagttg |
| | | | aaatctggaactgcctctgttAAGtgcctgctgaataacttctatcccagagaggccaa |
| | | | agtacagtggaaggtggataaTgccctccaaAGTggtaactcccaggagagtgtcacag |
| | | | agcaggacagcaaggacagcacctacagcctcagcagcaccctgacCctgagcaaagca |
| | | | gactaTgagaaacacaaagtctaTgcctgTgaagtcacccatcagggcctgagcAGCcc |
| | | | Agtcacaaagagcttcaacaggggagagtgttagtagtaactcgaggacggggtgaact |
| | | | acgcctgaggatccgatctttttccctctgccaaaaattatggggacatcatgaagccc |
| | | | cttgagcatctgacttctggctaataaaggaaatttattttcattgcaatagtgtgttg |
| | | | gaattttttgtgtctctcactcggcctaggtagataagtagcatggcgggttaatcatt |
| | | | aactacaaggaacccctagtgatggagttggccactccctctctgcgcgctcgctcgct |
| | | | cactgaggccgggcgaccaaaggtcgcccgacgcccgggctttgcccgggcggcctcag |
| | | | tgagcgagcgagcgcgcag |
| HER-102 | 3989 | 6550 | ctgcgcgctcgctcgctcactgaggccgcccgggcaaagcccgggcgtcgggcgacctt |
| | | | tggtcgcccggcctcagtgagcgagcgagcgcgcagagagggagtggccaactccatca |
| | | | ctaggggttccttgtagttaatgattaacccgccatgctacttatctaccagggtaatg |
| | | | gggatcctctagaactatagctagtcgacattgattattgactagttattaatagtaat |
| | | | caattacggggtcattagttcatagcccatatatggagttccgcgttacataacttacg |
| | | | gtaaatggcccgcctggctgaccgcccaacgacccccgcccattgacgtcaataatgac |
| | | | gtatgttcccatagtaacgccaatagggactttccattgacgtcaatgggtggagtatt |
| | | | tacggtaaactgcccacttggcagtacatcaagtgtatcatatgccaagtacgccccct |
| | | | attgacgtcaatgacggtaaatggcccgcctggcattatgcccagtacatgaccttatg |
| | | | ggactttcctacttggcagtacatctacgtattagtcatcgctattaccatgtcgaggc |
| | | | cacgttctgcttcactctccccatctcccccccctccccacccccaattttgtatttat |
| | | | ttattttttaattattttgtgcagcgatgggggcggggggggggggcgcgcgccaggcg |
| | | | gggcggggcggggcgaggggcggggcggggcgaggcggagaggtgcggcggcagccaat |
| | | | cagagcggcgcgctccgaaagtttccttttatggcgaggcggcggcggcggcggcccta |
| | | | taaaaagcgaagcgcgcggcgggcgggagcaagcttcgtttagtgaaccgtcagatcgc |
| | | | ctggagacgccatccacgctgttttgacctccatagaagacaccgggaccgatccagcc |
| | | | tccgcggattcgaatcccggccgggaacggtgcattggaacgcggattccccgtgccaa |
| | | | gagtgacgtaagtaccgcctatagagtctataggcccacaaaaaatgctttcttctttt |
| | | | aatatacttttttgtttatcttatttctaatactttccctaatctctttctttcagggc |
| | | | aataatgatacaatgtatcatgcctctttgcaccattctaaagaataacagtgataatt |
| | | | tctgggttaaggcaatagcaatatttctgcatataaatatttctgcatataaattgtaa |
| | | | ctgatgtaagaggtttcatattgctaatagcagctacaatccagctaccattctgcttt |
| | | | tattttatggttgggataaggctggattattctgagtccaagctaggcccttttgctaa |
| | | | tcatgttcatacctcttatcttcctcccacagctcctgggcaacgtgctggtctgtgtg |
| | | | ctggcccatcactttggcaaagaattgggattcgaaccggtgccgccaccATGGACTGG |
| | | | ACCTGGAGGTTCCTCTTTGTGGTGGCAGCAGCTACAGGTGTCCAGTCTgaggttcagct |
| | | | ggtggagtctggAggtggcctggtgcagccagggggctcactcAGAttgtcctgtgcag |
| | | | cttctggcttcaacattaaagacacctatatacactgggtgagacaggccccAggtaag |
| | | | ggcctggaatgggttgcaaggatttatcctacCaatggttatactagatatgcTgatTC |
| | | | TgtcaagggcAGAttcactataTCTgcagacacatccaaaaacacagcctacctgcaga |
| | | | tgaacagcctgAGAgctgaggacactgcTgtctattattgttctagatggggaggggaT |
| | | | ggcttctatgctatggacTACtggggtcaaggaaccctggtcacAgtctcctcTgcCtc |
| | | | TaccaagggcccatcTgtcttccccctggcaccctcctccaagagcacctctgggggca |
| | | | cagcTgccctgggctgcctggtcaaggactacttcccTgaacctgtgacAgtctcCtgg |
| | | | aactcaggAgccctgaccagTggAgtgcacaccttcccTgctgtcctacagtcctcagg |
| | | | actctactccctcagcTCTgtggtgacAgtgccctccagcagcttgggcacccagacct |
| | | | acatctgcaaTgtgaatcacaagcccagcaacaccaaggtggacaagaGagttgagccc |
| | | | aaatcttgtgacaaaactcacacatgcccaccTtgcccagcacctgaactGGtgggggg |
| | | | accAtcagtcttcctcCtccccccaaaacccaaggacaccctcatgatctccAGAaccc |
| | | | ctgaggtcacatgTgtggtggtggaTgtgagccaTgaagaccctgaggtcaagttcaac |
| | | | tggtaTgtggaTggAgtggaggtgcataatgccaagacaaagccCcCTgaggagcagta |
| | | | caacagcacTCTcAGAgtggtcTCTgtcctcacAgtcctgcaccaggactggctgaatg |
| | | | gcaaggagtacaagtgcaaggtctccaacaaagccctcccagcccccatTgagaaaacc |
| | | | atctccaaagccaaagggcagcccAGAgaaccacaggtgtacaccctgcccccatccAG |
| | | | AgaTgagCtgaccaagaaccaggtcagcctgacctgcctggtcaaaggcttctatcccT |
| | | | CTgacatTgcTgtggagtgggagagcaatgggcagccTgagaacaactacaagaccacA |
| | | | cctcTTgtgctggactcTgaTggctccttcttcctctacagcaagctcacAgtggacaa |
| | | | gagcagAtggcagcaggggaaTgtcttctcatgcTCTgtgatgcatgaggctctgcaca |
| | | | accactacacCcagaagagcctctccctgtctccAggtaaaagaaagaggAGAgagggc |
| | | | agaggaagtcttctaacatgTggtgaTgtggaggagaatccTggccctATGGACATGAG |
| | | | GGTCCCTGCTCAGCTCCTGGGGCTCCTGCTGCTCTGGCTCTCAGGTGCCAGATGTgata |
| | | | tccagatgacccagtccccTagctccctgtcTgcctctgtgggAgatagggtcaccatc |
| | | | acctgTAGAgccagtcaggatgtgaatactgctgtagcctggtatcaacagaaaccagg |
| | | | aaaagctccTaaactactgatttactcTgcatccttcctcTACtctggagtcccttctA |
| | | | GGttctctggatccagatctgggacTgatttcactctgaccatcagcagtctgcagccA |
| | | | gaagacttTgcaacttattactgtcagcaacattatactactcctcccacTttTggaca |
| | | | gggtaccaaggtggagatcaaaAGAactgtggctgcaccatctgtcttcatcttcccAc |
| | | | catctgatgagcagttgaaatctggaactgcctctgttgtgtgcctgctgaataacttc |
| | | | tatcccagagaggccaaagtacagtggaaggtggataaTgccctccaatcAggtaactc |
| | | | ccaggagagtgtcacagagcaggacagcaaggacagcacctacagcctcagcagcaccc |
| | | | tgacTctgagcaaagcagactaTgagaaacacaaagtctaTgcctgTgaagtcacccat |
| | | | cagggcctgagctcTccTgtcacaaagagcttcaacaggggagagtgttagtagtaact |
| | | | cgaggacggggtgaactacgcctgaggatccgatctttttccctctgccaaaaattatg |
| | | | gggacatcatgaagccccttgagcatctgacttctggctaataaaggaaatttattttc |
| | | | attgcaatagtgtgttggaattttttgtgtctctcactcggcctaggtagataagtagc |
| | | | atggcgggttaatcattaactacaaggaacccctagtgatggagttggccactccctct |
| | | | ctgcgcgctcgctcgctcactgaggccgggcgaccaaaggtcgcccgacgcccgggctt |
| | | | tgcccgggcggcctcagtgagcgagcgagcgcgcag |

[1193] In some embodiments, the genetic element of an AAV particle described herein comprises a nucleotide sequence comprising the all of the components or a combination of the components as described in Tables 15-27, or a sequence having at least 70%, 75%, 80%, 85%, 90%, 95%, or 99% sequence identity to the aforesaid sequences.

TABLE 16
Sequence Regions in ITR to ITR Sequences

| | HER-04 (SEQ ID NO: 5163) | | | HER-05 (SEQ ID NO: 5170) | | |
|---|---|---|---|---|---|---|
| Sequence | Region SEQ | Region | Position in SEQ | Region SEQ | Region | Position in SEQ |
| Regions | ID NO | length (nt) | ID NO: 5163 | ID NO | length (nt) | ID NO: 5170 |
| 5′ ITR | 2076 | 130 | 1-130 | 2076 | 130 | 1-130 |
| CB promoter | 2083 | 260 | 590-849 | 2083 | 260 | 590-849 |
| Exon | 2090 | 134 | 877-1010 | 2090 | 134 | 877-1010 |
| Intron | 2095 | 32 | 1011-1042 | 2095 | 32 | 1011-1042 |
| Intron | 2097 | 347 | 1043-1389 | 2097 | 347 | 1043-1389 |
| Exon | 2093 | 53 | 1390-1442 | 2093 | 53 | 1390-1442 |
| Signal | 5157 | 57 | 1467-1523 | 5157 | 57 | 1467-1523 |
| VH | 5002 | 360 | 1524-1883 | 5171 | 357 | 1524-1880 |
| Constant | 5003 | 993 | 1884-2876 | 5011 | 990 | 1881-2870 |
| Linker | 1724 | 12 | 2877-2888 | 1724 | 12 | 2871-2882 |
| Linker | 1726 | 54 | 2889-2942 | 1726 | 54 | 2883-2936 |
| Signal | 5159 | 66 | 2943-3008 | 5159 | 66 | 2937-3002 |
| VL | 5005 | 321 | 3009-3329 | 5175 | 321 | 3003-3323 |
| Constant | 5007 | 321 | 3330-3650 | 5007 | 321 | 3324-3644 |
| PolyA | 2122 | 127 | 3693-3819 | 2122 | 127 | 3687-3813 |
| 3′ ITR | 2078 | 130 | 3863-3992 | 2078 | 130 | 3857-3986 |

[1194] In some embodiments, the AAV particle comprises a genetic element comprising the nucleotide sequence of SEQ ID NO: 5163 (HER-04), or a nucleotide sequence substantially identical (e.g., having at least 70%, 75%, 80%, 85%, 90%, 95%, 99% or 100%, sequence identity) thereto. In some embodiments, the genetic element comprises the nucleotide sequence of SEQ ID NO: 5163, or a sequence substantially identical (e.g., having at least 70%, 75%, 80%, 85%, 90%, 95%, or 99% sequence identity) thereto. In some embodiments, the genetic element comprising the nucleotide sequence of SEQ ID NO: 5163, comprises in 5′ to 3′ order: a 5′ inverted terminal repeat (ITR) sequence region comprising the nucleotide sequence of SEQ ID NO: 2076; a CB promoter comprising the nucleotide sequence of SEQ ID NO: 2083, further comprised an ie exon 1 region (SEQ ID NO: 2090), an ie intron 1 region (SEQ ID NO: 2095), a second human beta-globin intron region (SEQ ID NO: 2097), and a human beta-globin exon region (SEQ ID NO: 2093); a heavy chain signal sequence comprising the nucleotide sequence of SEQ ID NO: 5157, a heavy chain variable region comprising the nucleotide sequence of SEQ ID NO: 5009 and a heavy chain constant region comprising the nucleotide sequence of SEQ ID NO: 5011; a furin cleavage site comprising the nucleotide sequence of SEQ ID NO: 1724; a T2A linker comprising the nucleotide sequence of SEQ ID NO: 1726; a light chain signal sequence comprising the nucleotide sequence of SEQ ID NO: 5159, a light chain variable region comprising the nucleotide sequence of SEQ ID NO: 5005 and a light chain constant region comprising the nucleotide sequence of SEQ ID NO: 5007; a rabbit globin polyadenylation sequence comprising the nucleotide sequence of SEQ ID NO: 2122; and a 3′ ITR sequence region comprising the nucleotide sequence of SEQ ID NO: 2078; or a sequence substantially identical (e.g., having at least 70%, 75%, 80%, 85%, 90%, 95%, or 99% sequence identity) to any of the aforesaid sequences. In some embodiments, disclosed herein is an antibody molecule encoded by the genetic element comprising the nucleotide sequence of SEQ ID NO: 5163 or a sequence substantially identical (e.g., having at least 70%, 75%, 80%, 85%, 90%, 95%, or 99% sequence identity) thereto.

[1195] In some embodiments, the genetic element comprising the nucleotide sequence of SEQ ID NO: 5163, or a sequence substantially identical (e.g., having at least 70%, 75%, 80%, 85%, 90%, 95%, or 99% sequence identity) thereto, encodes an antibody molecule comprising a heavy chain variable region comprising a HC CDR1 amino acid sequence of SEQ ID NO: 5036, a HC CDR2 amino acid sequence of SEQ ID NO: 5037, and an HC CDR3 amino acid sequence of SEQ ID NO: 5038; and a light chain variable region comprising an LC CDR1 amino acid sequence of SEQ ID NO: 5043, an LC CDR2 amino acid sequence of SEQ ID NO: 5044, and an LC CDR3 amino acid sequence of SEQ ID NO: 5045. In some embodiments, the genetic element comprising the nucleotide sequence of SEQ ID NO: 5163 or a sequence substantially identical (e.g., having at least 70%, 75%, 80%, 85%, 90%, 95%, or 99% sequence identity) thereto, encodes an antibody molecule comprising a heavy chain variable region comprising a HC CDR1 amino acid sequence of SEQ ID NO: 5040, a HC CDR2 amino acid sequence of SEQ ID NO: 5041, and an HC CDR3 amino acid sequence of SEQ ID NO: 5042; and a light chain variable region comprising an LC CDR1 amino acid sequence of SEQ ID NO: 5046, an LC CDR2 amino acid sequence of SEQ ID NO: 5047, and an LC CDR3 amino acid sequence of SEQ ID NO: 5048.

[1196] In some embodiments, a genetic element comprising the sequence of SEQ ID NO: 5163, or a sequence substantially identical (e.g., having at least 70%, 75%, 80%, 85%, 90%, 95%, or 99% sequence identity) thereto, encodes an antibody molecule comprising a heavy chain variable region comprising the amino acid sequence of SEQ ID NO: 5002 and/or a light chain variable region comprising the amino acid sequence of SEQ ID NO: 5006; or a sequence substantially identical (e.g., having at least 70%, 75%, 80%, 85%, 90%, 95%, or 99% sequence identity) to the any of the aforesaid sequences.

[1197] In some embodiments, a genetic element comprising the sequence of SEQ ID NO: 5163, or a sequence substantially identical (e.g., having at least 70%, 75%, 80%, 85%, 90%, 95%, or 99% sequence identity) thereto, encodes an antibody molecule comprising a heavy chain comprising the amino acid sequence of SEQ ID NO: 5034 and/or a light chain comprising the amino acid sequence of SEQ ID NO: 5036, or a sequence substantially identical (e.g., having at least 70%, 75%, 80%, 85%, 90%, 95%, or 99% sequence identity) to the aforesaid sequences.

[1198] In some embodiments, the AAV particle comprises a genetic element comprising the nucleotide sequence of SEQ ID NO: 5170 (HER-05), or a nucleotide sequence substantially identical (e.g., having at least 70%, 75%, 80%, 85%, 90%, 95%, 99% or 100%, sequence identity) thereto. In some embodiments, the genetic element comprises the nucleotide sequence of SEQ ID NO: 5170, or a sequence substantially identical (e.g., having at least 70%, 75%, 80%, 85%, 90%, 95%, or 99% sequence identity) thereto. In some embodiments, the genetic element comprising the nucleotide sequence of SEQ ID NO: 5170, comprises in 5′ to 3′ order: a 5′ inverted terminal repeat (ITR) sequence region comprising the nucleotide sequence of SEQ ID NO: 2076; a CB promoter comprising the nucleotide sequence of SEQ ID NO: 2083, further comprised an ie exon 1 region (SEQ ID NO: 2090), an ie intron 1 region (SEQ ID NO: 2095), a second human beta-globin intron region (SEQ ID NO: 2097), and a human beta-globin exon region (SEQ ID NO: 2093); a heavy chain signal sequence comprising the nucleotide sequence of SEQ ID NO: 5157, a heavy chain variable region comprising the nucleotide sequence of SEQ ID NO: 5171 and a heavy chain constant region comprising the nucleotide sequence of SEQ ID NO: 5011; a furin cleavage site comprising the nucleotide sequence of SEQ ID NO: 1724; a T2A linker comprising the nucleotide sequence of SEQ ID NO: 1726; a light chain signal sequence comprising the nucleotide sequence of SEQ ID NO: 5159, a light chain variable region comprising the nucleotide sequence of SEQ ID NO: 5175 and a light chain constant region comprising the nucleotide sequence of SEQ ID NO: 5007; a rabbit globin polyadenylation sequence comprising the nucleotide sequence of SEQ ID NO: 2122; and a 3′ ITR sequence region comprising the nucleotide sequence of SEQ ID NO: 2078; or a sequence substantially identical (e.g., having at least 70%, 75%, 80%, 85%, 90%, 95%, or 99% sequence identity) to any of the aforesaid sequences. In some embodiments, disclosed herein is an antibody molecule encoded by the genetic element comprising the nucleotide sequence of SEQ ID NO: 5170 or a sequence substantially identical (e.g., having at least 70%, 75%, 80%, 85%, 90%, 95%, or 99% sequence identity) thereto.

[1199] In some embodiments, the genetic element comprising the nucleotide sequence of SEQ ID NO: 5170, or a sequence substantially identical (e.g., having at least 70%, 75%, 80%, 85%, 90%, 95%, or 99% sequence identity) thereto, encodes an antibody molecule comprising a heavy chain variable region comprising a HC CDR1 amino acid sequence of SEQ ID NO: 5179, a HC CDR2 amino acid sequence of SEQ ID NO: 5180, and an HC CDR3 amino acid sequence of SEQ ID NO: 5181; and a light chain variable region comprising an LC CDR1 amino acid sequence of SEQ ID NO: 5182, an LC CDR2 amino acid sequence of SEQ ID NO: 5183, and an LC CDR3 amino acid sequence of SEQ ID NO: 5184.

[1200] In some embodiments, a genetic element comprising the sequence of SEQ ID NO: 5170, or a sequence substantially identical (e.g., having at least 70%, 75%, 80%, 85%, 90%, 95%, or 99% sequence identity) thereto, encodes an antibody molecule comprising a heavy chain variable region comprising the amino acid sequence of SEQ ID NO: 5172 and/or a light chain variable region comprising the amino acid sequence of SEQ ID NO: 5176; or a sequence substantially identical (e.g., having at least 70%, 75%, 80%, 85%, 90%, 95%, or 99% sequence identity) to the any of the aforesaid sequences.

[1201] In some embodiments, a genetic element comprising the sequence of SEQ ID NO: 5170, or a sequence substantially identical (e.g., having at least 70%, 75%, 80%, 85%, 90%, 95%, or 99% sequence identity) thereto, encodes an antibody molecule comprising a heavy chain comprising the amino acid sequence of SEQ ID NO: 5174 and/or a light chain comprising the amino acid sequence of SEQ ID NO: 5187, or a sequence substantially identical (e.g., having at least 70%, 75%, 80%, 85%, 90%, 95%, or 99% sequence identity) to the aforesaid sequences.

TABLE 17
Sequence Regions in ITR to ITR Sequences

| | HER-15 (SEQ ID NO: 5165) | | |
|---|---|---|---|
| Sequence | Region | Region length | Position in |
| Regions | SEQ ID NO | (nt) | SEQ ID NO: 5165 |
| 5′ ITR | 2076 | 130 | 1-130 |
| CMV(IE) | 2239 | 380 | 204-583 |
| CB promoter | 2083 | 260 | 590-849 |
| Intron | 2240 | 566 | 877-1442 |
| Signal (H5) | 5157 | 57 | 1467-1523 |
| VH | 5009 | 357 | 1524-1880 |
| Constant | 5011 | 990 | 1881-2870 |
| Linker | 1724 | 12 | 2871-2882 |
| Linker | 1726 | 54 | 2883-2936 |
| Signal | 5159 | 66 | 2937-3002 |
| C12 Fynomer | 5155 | 189 | 3003-3191 |
| Linker | 5347 | 45 | 3192-3236 |
| VL | 5013 | 321 | 3237-3557 |
| Constant | 5007 | 321 | 3558-3878 |
| PolyA | 2122 | 127 | 3921-4047 |
| 3′ ITR | 2078 | 130 | 4091-4220 |

[1202] In some embodiments, the AAV particle comprises a genetic element comprising the nucleotide sequence of SEQ ID NO: 5165 (HER-15), or a nucleotide sequence substantially identical (e.g., having at least 70%, 75%, 80%, 85%, 90%, 95%, 99% or 100%, sequence identity) thereto. In some embodiments, the genetic element comprises the nucleotide sequence of SEQ ID NO: 5165, or a nucleotide sequence substantially identical (e.g., having at least 70%, 75%, 80%, 85%, 90%, 95%, 99% or 100%, sequence identity) thereto. In some embodiments, the genetic element comprising the nucleotide sequence of SEQ ID NO: 5165, comprises in 5′ to 3′ order: a 5′ inverted terminal repeat (ITR) sequence region comprising the nucleotide sequence of SEQ ID NO: 2076; a CMV(IE) promoter region comprising the nucleotide sequence of SEQ ID NO: 2239 and a CB promoter comprising the nucleotide sequence of SEQ ID NO: 2083; an intron region comprising the nucleotide sequence of SEQ ID NO: 2240; a heavy chain signal sequence comprising the nucleotide sequence of SEQ ID NO: 5157, a heavy chain variable region comprising the nucleotide sequence of SEQ ID NO: 5009, and heavy chain constant region comprising the nucleotide sequence of SEQ ID NO: 5011; a furin cleavage site comprising the nucleotide sequence of SEQ ID NO: 1724; a T2A linker comprising the nucleotide sequence of SEQ ID NO: 1726; a light chain signal sequence comprising the nucleotide sequence of SEQ ID NO: 5159; a Fynomer comprising the nucleotide sequence of SEQ ID NO: 5155; a linker comprising the nucleotide sequence of SEQ ID NO: 5347; a light chain variable region comprising the nucleotide sequence of SEQ ID NO: 5013 and light chain constant region comprising the nucleotide sequence of SEQ ID NO: 5007; a rabbit globin polyadenylation sequence comprising the nucleotide sequence of SEQ ID NO: 2122; and a 3′ ITR sequence region comprising the nucleotide sequence of SEQ ID NO: 2078; or a nucleotide sequence substantially identical (e.g., having at least 70%, 75%, 80%, 85%, 90%, 95%, 99% or 100%, sequence identity) to any of the aforesaid sequences. In some embodiments, disclosed herein is an antibody molecule encoded by the genetic element comprising the nucleotide sequence of SEQ ID NO: 5165 or a sequence substantially identical (e.g., having at least 70%, 75%, 80%, 85%, 90%, 95%, or 99% sequence identity) thereto.

[1203] In some embodiments, the genetic element comprising the nucleotide sequence of SEQ ID NO: 5165, or a sequence substantially identical (e.g., having at least 70%, 75%, 80%, 85%, 90%, 95%, or 99% sequence identity) thereto, encodes a multispecific antibody molecule, e.g., bispecific or biparatopic, antibody molecule, comprising a first antigen binding domain that binds domain II of a HER2 antigen and a second antigen binding domain that binds domain I of a HER2 antigen. In some embodiments, the first antigen binding domain comprises a full antibody. In some embodiments, the second antigen binding domain comprises a C12 fynomer. In some embodiments, the first antigen binding domain comprises a heavy chain variable region comprising a HC CDR1 amino acid sequence of SEQ ID NO: 5149, a HC CDR2 amino acid sequence of SEQ ID NO: 5150, and an HC CDR3 amino acid sequence of SEQ ID NO: 5151; and a light chain variable region comprising an LC CDR1 amino acid sequence of SEQ ID NO: 5152, an LC CDR2 amino acid sequence of SEQ ID NO: 5153, and an LC CDR3 amino acid sequence of SEQ ID NO: 5154. In some embodiments, the second antigen binding domain comprises the amino acid sequence of SEQ ID NO: 5156, or an amino acid sequence substantially identical (e.g., having at least 70%, 75%, 80%, 85%, 90%, 95%, or 99% sequence identity) thereto.

[1204] In some embodiments, a genetic element comprising the sequence of SEQ ID NO: 5165, or a sequence substantially identical (e.g., having at least 70%, 75%, 80%, 85%, 90%, 95%, or 99% sequence identity) thereto, encodes a multispecific antibody molecule, comprising: a first chain, comprising from the N-terminus to the C-terminus, an anti-HER2 VH comprising the amino sequence comprising the amino acid sequence of SEQ ID NO: 5010, and a heavy chain constant region comprising the amino acid sequence of SEQ ID NO: 5012; and a second chain, comprising from the N-terminus to the C-terminus, a C12 fynomer comprising the amino acid sequence of SEQ ID NO: 5156, a (G4S)3 linker, an anti-HER2 VL comprising the amino acid sequence of SEQ ID NO: 5014, and a light chain constant region (CL) comprising the amino acid sequence of SEQ ID NO: 5008; or a sequence substantially identical (e.g., having at least 70%, 75%, 80%, 85%, 90%, 95%, or 99% sequence identity) to the any of the aforesaid sequences.

[1205] In some embodiments, a genetic element comprising the sequence of SEQ ID NO: 5165, or a sequence substantially identical (e.g., having at least 70%, 75%, 80%, 85%, 90%, 95%, or 99% sequence identity) to the any of the aforesaid sequences, encodes a multispecific antibody molecule, comprising a first chain comprising the amino acid sequence of SEQ ID NO: 5066; and a second chain comprising the amino acid sequence of SEQ ID NO: 5156, a (G4S)3 linker, and the amino acid sequence comprising of SEQ ID NO: 5068; or a sequence substantially identical (e.g., having at least 70%, 75%, 80%, 85%, 90%, 95%, or 99% sequence identity) to the any of the aforesaid sequences.

TABLE 18
Sequence Regions in ITR to ITR Sequences

| | HER-10 (SEQ ID NO: 5164) | | | HER-42 (SEQ ID NO: 5166) | | | HER-47 (SEQ ID NO: 5167) | | | HER-53 (SEQ ID NO: 5168) | | |
|---|---|---|---|---|---|---|---|---|---|---|---|---|
| | Region | Region | Position in | Region | Region | Position in | Region | Region | Position in | Region | Region | Position in |
| Sequence | SEQ ID | length | SEQ ID | SEQ ID | length | SEQ ID | SEQ ID | length | SEQ ID | SEQ ID | length | SEQ ID |
| Regions | NO | (nt) | NO: 5164 | NO | (nt) | NO: 5166 | NO | (nt) | NO: 5167 | NO | (nt) | NO: 5168 |
| 5′ ITR | 2076 | 130 | 1-130 | 2076 | 130 | 1-130 | 2076 | 130 | 1-130 | 2076 | 130 | 1-130 |
| CMV(IE) | 2239 | 380 | 204-583 | 2239 | 380 | 204-583 | 2239 | 380 | 204-583 | 2239 | 380 | 204-583 |
| CB promoter | 2083 | 260 | 590-849 | 2083 | 260 | 590-849 | 2083 | 260 | 590-849 | 2083 | 260 | 590-849 |
| Intron | 2240 | 566 | 877-1442 | 2240 | 566 | 877-1442 | 2240 | 566 | 877-1442 | 2240 | 566 | 877-1442 |
| Signal (H5) | 5157 | 57 | 1467-1523 | 5157 | 57 | 1467-1523 | 5157 | 57 | 1467-1523 | 5157 | 57 | 1467-1523 |
| VH | 5015 | 360 | 1524-1883 | 5070 | 360 | 1524-1883 | 5089 | 360 | 1524-1883 | 5109 | 360 | 1524-1883 |
| Constant | 5017 | 990 | 1884-2873 | 5025 | 993 | 1884-2876 | 5029 | 993 | 1884-2876 | 5017 | 990 | 1884-2873 |
| Linker | 1724 | 12 | 2874-2885 | 1724 | 12 | 2877-2888 | 1724 | 12 | 2877-2888 | 1724 | 12 | 2874-2885 |
| Linker | 1726 | 54 | 2886-2939 | 1726 | 54 | 2889-2942 | 1726 | 54 | 2889-2942 | 1726 | 54 | 2886-2939 |
| Signal | 5159 | 66 | 2940-3005 | 5159 | 66 | 2943-3008 | 5159 | 66 | 2943-3008 | 5159 | 66 | 2940-3005 |
| VL | 5019 | 321 | 3006-3326 | 5085 | 321 | 3009-3329 | 5093 | 321 | 3009-3329 | 5113 | 321 | 3006-3326 |
| Constant | 5021 | 322 | 3327-3648 | 5007 | 321 | 3330-3650 | 5007 | 321 | 3330-3650 | 5007 | 321 | 3327-3648 |
| PolyA | 2122 | 127 | 3690-3816 | 2122 | 127 | 3693-3819 | 2122 | 127 | 3693-3819 | 2122 | 127 | 3690-3816 |
| 3′ ITR | 2078 | 130 | 3860-3989 | 2078 | 130 | 3863-3992 | 2078 | 130 | 3863-3992 | 2078 | 130 | 3860-3989 |

[1206] In some embodiments, the AAV particle comprises a genetic element comprising the nucleotide sequence of SEQ ID NO: 5164 (HER-10), or a nucleotide sequence substantially identical (e.g., having at least 70%, 75%, 80%, 85%, 90%, 95%, 99% or 100%, sequence identity) thereto. In some embodiments, the genetic element comprises SEQ ID NO: 5164, or a nucleotide sequence substantially identical (e.g., having at least 70%, 75%, 80%, 85%, 90%, 95%, 99% or 100%, sequence identity) thereto. In some embodiments, the genetic element comprising the nucleotide sequence of SEQ ID NO: 5164, comprises in 5′ to 3′ order: a 5′ inverted terminal repeat (ITR) sequence region comprising the nucleotide sequence of SEQ ID NO: 2076; a CMV(IE) promoter comprising the nucleotide sequence of SEQ ID NO: 2239; a CB promoter comprising the nucleotide sequence of SEQ ID NO: 2083; a human beta-globin intron region comprising the nucleotide sequence of SEQ ID NO: 2240; a heavy chain signal sequence comprising the nucleotide sequence of SEQ ID NO: 5157, a heavy chain variable region comprising the nucleotide sequence of SEQ ID NO: 5015 and heavy chain constant region comprising the nucleotide sequence of SEQ ID NO: 5017; a furin cleavage site comprising the nucleotide sequence of SEQ ID NO: 1724; a T2A linker comprising the nucleotide sequence of SEQ ID NO: 1726; a light chain signal sequence comprising the nucleotide sequence of SEQ ID NO: 5159, a light chain variable region comprising the nucleotide sequence of SEQ ID NO: 5019 and light chain constant region comprising the nucleotide sequence of SEQ ID NO: 5021; a rabbit globin polyadenylation sequence comprising the nucleotide sequence of SEQ ID NO: 2122; and a 3′ ITR sequence region comprising the nucleotide sequence of SEQ ID NO: 2078; or a sequence substantially identical (e.g., having at least 70%, 75%, 80%, 85%, 90%, 95%, or 99% sequence identity) to any of the aforesaid sequences. In some embodiments, disclosed herein is an antibody molecule encoded by the genetic element comprising the nucleotide sequence of SEQ ID NO: 5164 or a sequence substantially identical (e.g., having at least 70%, 75%, 80%, 85%, 90%, 95%, or 99% sequence identity) thereto.

[1207] In some embodiments, a genetic element comprising the sequence of SEQ ID NO: 5164, or a sequence substantially identical (e.g., having at least 70%, 75%, 80%, 85%, 90%, 95%, or 99% sequence identity) thereto, encodes an antibody molecule comprising a heavy chain variable region comprising a HC CDR1 amino acid sequence of SEQ ID NO: 5053, a HC CDR2 amino acid sequence of SEQ ID NO: 5054, and an HC CDR3 amino acid sequence of SEQ ID NO: 5055; and a light chain variable region comprising an LC CDR1 amino acid sequence of SEQ ID NO: 5059, an LC CDR2 amino acid sequence of SEQ ID NO: 5060, and an LC CDR3 amino acid sequence of SEQ ID NO: 5061. In some embodiments, a genetic element comprising the sequence of SEQ ID NO: 5164, or a sequence substantially identical (e.g., having at least 70%, 75%, 80%, 85%, 90%, 95%, or 99% sequence identity) thereto, encodes an antibody molecule comprising a heavy chain variable region comprising a HC CDR1 amino acid sequence of SEQ ID NO: 5056, a HC CDR2 amino acid sequence of SEQ ID NO: 5057, and an HC CDR3 amino acid sequence of SEQ ID NO: 5058; and a light chain variable region comprising an LC CDR1 amino acid sequence of SEQ ID NO: 5062, an LC CDR2 amino acid sequence of SEQ ID NO: 5063, and an LC CDR3 amino acid sequence of SEQ ID NO: 5064.

[1208] In some embodiments, a genetic element comprising the sequence of SEQ ID NO: 5164, or a sequence substantially identical (e.g., having at least 70%, 75%, 80%, 85%, 90%, 95%, or 99% sequence identity) thereto, encodes an antibody molecule comprising a heavy chain variable region comprising the amino acid sequence of SEQ ID NO: 5016 and/or a light chain variable region comprising the amino acid sequence of SEQ ID NO: 5020, or a sequence substantially identical (e.g., having at least 70%, 75%, 80%, 85%, 90%, 95%, or 99% sequence identity) to the aforesaid sequences.

[1209] In some embodiments, a genetic element comprising the sequence of SEQ ID NO: 5164, or a sequence substantially identical (e.g., having at least 70%, 75%, 80%, 85%, 90%, 95%, or 99% sequence identity) thereto, encodes an antibody molecule comprising a heavy chain comprising the amino acid sequence of SEQ ID NO: 5050 and/or a light chain comprising the amino acid sequence of SEQ ID NO: 5052 or a sequence substantially identical (e.g., having at least 70%, 75%, 80%, 85%, 90%, 95%, or 99% sequence identity) to the any of the aforesaid.

[1210] In some embodiments, the AAV particle comprises a genetic element comprising the nucleotide sequence of SEQ ID NO: 5166 (HER-42), or a nucleotide sequence substantially identical (e.g., having at least 70%, 75%, 80%, 85%, 90%, 95%, 99% or 100%, sequence identity) thereto. In some embodiments, the genetic element comprises SEQ ID NO: 5166, or a nucleotide sequence substantially identical (e.g., having at least 70%, 75%, 80%, 85%, 90%, 95%, 99% or 100%, sequence identity) thereto. In some embodiments, the genetic element comprising the nucleotide sequence of SEQ ID NO: 5166, comprises in 5′ to 3′ order: a 5′ inverted terminal repeat (ITR) sequence region comprising the nucleotide sequence of SEQ ID NO: 2076; a CMV(IE) promoter comprising the nucleotide sequence of SEQ ID NO: 2239; a CB promoter comprising the nucleotide sequence of SEQ ID NO: 2083; a human beta-globin intron region comprising the nucleotide sequence of SEQ ID NO: 2240; a heavy chain signal sequence comprising the nucleotide sequence of SEQ ID NO: 5157, a heavy chain variable region comprising the nucleotide sequence of SEQ ID NO: 5070 and heavy chain constant region comprising the nucleotide sequence of SEQ ID NO: 5025; a furin cleavage site comprising the nucleotide sequence of SEQ ID NO: 1724; a T2A linker comprising the nucleotide sequence of SEQ ID NO: 1726; a light chain signal sequence comprising the nucleotide sequence of SEQ ID NO: 5159, a light chain variable region comprising the nucleotide sequence of SEQ ID NO: 5085 and light chain constant region comprising the nucleotide sequence of SEQ ID NO: 5007; a rabbit globin polyadenylation sequence comprising the nucleotide sequence of SEQ ID NO: 2122; and a 3′ ITR sequence region comprising the nucleotide sequence of SEQ ID NO: 2078; or a sequence substantially identical (e.g., having at least 70%, 75%, 80%, 85%, 90%, 95%, or 99% sequence identity) to any of the aforesaid sequences. In some embodiments, disclosed herein is an antibody molecule encoded by the genetic element comprising the nucleotide sequence of SEQ ID NO: 5166 or a sequence substantially identical (e.g., having at least 70%, 75%, 80%, 85%, 90%, 95%, or 99% sequence identity) thereto.

[1211] In some embodiments, a genetic element comprising the sequence of SEQ ID NO: 5166, or a sequence substantially identical (e.g., having at least 70%, 75%, 80%, 85%, 90%, 95%, or 99% sequence identity) thereto, encodes an antibody molecule comprising a heavy chain variable region comprising a HC CDR1 amino acid sequence of SEQ ID NO: 5071, a HC CDR2 amino acid sequence of SEQ ID NO: 5072, and an HC CDR3 amino acid sequence of SEQ ID NO: 5073; and a light chain variable region comprising an LC CDR1 amino acid sequence of SEQ ID NO: 5077, an LC CDR2 amino acid sequence of SEQ ID NO: 5078, and an LC CDR3 amino acid sequence of SEQ ID NO: 5079. In some embodiments, a genetic element comprising the sequence of SEQ ID NO: 5166, or a sequence substantially identical (e.g., having at least 70%, 75%, 80%, 85%, 90%, 95%, or 99% sequence identity) thereto, encodes an antibody molecule comprising a heavy chain variable region comprising a HC CDR1 amino acid sequence of SEQ ID NO: 5074, a HC CDR2 amino acid sequence of SEQ ID NO: 5075, and an HC CDR3 amino acid sequence of SEQ ID NO: 5076; and a light chain variable region comprising an LC CDR1 amino acid sequence of SEQ ID NO: 5080, an LC CDR2 amino acid sequence of SEQ ID NO: 5081, and an LC CDR3 amino acid sequence of SEQ ID NO: 5082.

[1212] In some embodiments, a genetic element comprising the sequence of SEQ ID NO: 5166, or a sequence substantially identical (e.g., having at least 70%, 75%, 80%, 85%, 90%, 95%, or 99% sequence identity) thereto, encodes an antibody molecule comprising a heavy chain variable region comprising the amino acid sequence of SEQ ID NO: 5069 and/or a light chain variable region comprising the amino acid sequence of SEQ ID NO: 5086, or a sequence substantially identical (e.g., having at least 70%, 75%, 80%, 85%, 90%, 95%, or 99% sequence identity) to the aforesaid sequences.

[1213] In some embodiments, a genetic element comprising the sequence of SEQ ID NO: 5166, or a sequence substantially identical (e.g., having at least 70%, 75%, 80%, 85%, 90%, 95%, or 99% sequence identity) thereto, encodes an antibody molecule comprising a heavy chain comprising the amino acid sequence of SEQ ID NO: 5084 and/or a light chain comprising the amino acid sequence of SEQ ID NO: 5088 or a sequence substantially identical (e.g., having at least 70%, 75%, 80%, 85%, 90%, 95%, or 99% sequence identity) to the any of the aforesaid.

[1214] In some embodiments, the AAV particle comprises a genetic element comprising the nucleotide sequence of SEQ ID NO: 5167 (HER-47), or a nucleotide sequence substantially identical (e.g., having at least 70%, 75%, 80%, 85%, 90%, 95%, 99% or 100%, sequence identity) thereto. In some embodiments, the genetic element comprises SEQ ID NO: 5167, or a nucleotide sequence substantially identical (e.g., having at least 70%, 75%, 80%, 85%, 90%, 95%, 99% or 100%, sequence identity) thereto. In some embodiments, the genetic element comprising the nucleotide sequence of SEQ ID NO: 5167, comprises in 5′ to 3′ order: a 5′ inverted terminal repeat (ITR) sequence region comprising the nucleotide sequence of SEQ ID NO: 2076; a CMV(IE) promoter comprising the nucleotide sequence of SEQ ID NO: 2239; a CB promoter comprising the nucleotide sequence of SEQ ID NO: 2083; a human beta-globin intron region comprising the nucleotide sequence of SEQ ID NO: 2240; a heavy chain signal sequence comprising the nucleotide sequence of SEQ ID NO: 5157, a heavy chain variable region comprising the nucleotide sequence of SEQ ID NO: 5089 and heavy chain constant region comprising the nucleotide sequence of SEQ ID NO: 5029; a furin cleavage site comprising the nucleotide sequence of SEQ ID NO: 1724; a T2A linker comprising the nucleotide sequence of SEQ ID NO: 1726; a light chain signal sequence comprising the nucleotide sequence of SEQ ID NO: 5159, a light chain variable region comprising the nucleotide sequence of SEQ ID NO: 5093 and light chain constant region comprising the nucleotide sequence of SEQ ID NO: 5007; a rabbit globin polyadenylation sequence comprising the nucleotide sequence of SEQ ID NO: 2122; and a 3′ ITR sequence region comprising the nucleotide sequence of SEQ ID NO: 2078; or a sequence substantially identical (e.g., having at least 70%, 75%, 80%, 85%, 90%, 95%, or 99% sequence identity) to any of the aforesaid sequences. In some embodiments, disclosed herein is an antibody molecule encoded by the genetic element comprising the nucleotide sequence of SEQ ID NO: 5167 or a sequence substantially identical (e.g., having at least 70%, 75%, 80%, 85%, 90%, 95%, or 99% sequence identity) thereto.

[1215] In some embodiments, a genetic element comprising the sequence of SEQ ID NO: 5167, or a sequence substantially identical (e.g., having at least 70%, 75%, 80%, 85%, 90%, 95%, or 99% sequence identity) thereto, encodes an antibody molecule comprising a heavy chain variable region comprising a HC CDR1 amino acid sequence of SEQ ID NO: 5097, a HC CDR2 amino acid sequence of SEQ ID NO: 5098, and an HC CDR3 amino acid sequence of SEQ ID NO: 5099; and a light chain variable region comprising an LC CDR1 amino acid sequence of SEQ ID NO: 5103, an LC CDR2 amino acid sequence of SEQ ID NO: 5104, and an LC CDR3 amino acid sequence of SEQ ID NO: 5105. In some embodiments, a genetic element comprising the sequence of SEQ ID NO: 5167, or a sequence substantially identical (e.g., having at least 70%, 75%, 80%, 85%, 90%, 95%, or 99% sequence identity) thereto, encodes an antibody molecule comprising a heavy chain variable region comprising a HC CDR1 amino acid sequence of SEQ ID NO: 5100, a HC CDR2 amino acid sequence of SEQ ID NO: 5101, and an HC CDR3 amino acid sequence of SEQ ID NO: 5102; and a light chain variable region comprising an LC CDR1 amino acid sequence of SEQ ID NO: 5106, an LC CDR2 amino acid sequence of SEQ ID NO: 5107, and an LC CDR3 amino acid sequence of SEQ ID NO: 5108.

[1216] In some embodiments, a genetic element comprising the sequence of SEQ ID NO: 5167, or a sequence substantially identical (e.g., having at least 70%, 75%, 80%, 85%, 90%, 95%, or 99% sequence identity) thereto, encodes an antibody molecule comprising a heavy chain variable region comprising the amino acid sequence of SEQ ID NO: 5090 and/or a light chain variable region comprising the amino acid sequence of SEQ ID NO: 5094, or a sequence substantially identical (e.g., having at least 70%, 75%, 80%, 85%, 90%, 95%, or 99% sequence identity) to the aforesaid sequences.

[1217] In some embodiments, a genetic element comprising the sequence of SEQ ID NO: 5167, or a sequence substantially identical (e.g., having at least 70%, 75%, 80%, 85%, 90%, 95%, or 99% sequence identity) thereto, encodes an antibody molecule comprising a heavy chain comprising the amino acid sequence of SEQ ID NO: 5092 and/or a light chain comprising the amino acid sequence of SEQ ID NO: 5096 or a sequence substantially identical (e.g., having at least 70%, 75%, 80%, 85%, 90%, 95%, or 99% sequence identity) to the any of the aforesaid.

[1218] In some embodiments, the AAV particle comprises a genetic element comprising the nucleotide sequence of SEQ ID NO: 5168 (HER-53), or a nucleotide sequence substantially identical (e.g., having at least 70%, 75%, 80%, 85%, 90%, 95%, 99% or 100%, sequence identity) thereto. In some embodiments, the genetic element comprises SEQ ID NO: 5168, or a nucleotide sequence substantially identical (e.g., having at least 70%, 75%, 80%, 85%, 90%, 95%, 99% or 100%, sequence identity) thereto. In some embodiments, the genetic element comprising the nucleotide sequence of SEQ ID NO: 5168, comprises in 5′ to 3′ order: a 5′ inverted terminal repeat (ITR) sequence region comprising the nucleotide sequence of SEQ ID NO: 2076; a CMV(IE) promoter comprising the nucleotide sequence of SEQ ID NO: 2239; a CB promoter comprising the nucleotide sequence of SEQ ID NO: 2083; a human beta-globin intron region comprising the nucleotide sequence of SEQ ID NO: 2240; a heavy chain signal sequence comprising the nucleotide sequence of SEQ ID NO: 5157, a heavy chain variable region comprising the nucleotide sequence of SEQ ID NO: 5109 and heavy chain constant region comprising the nucleotide sequence of SEQ ID NO: 5017; a furin cleavage site comprising the nucleotide sequence of SEQ ID NO: 1724; a T2A linker comprising the nucleotide sequence of SEQ ID NO: 1726; a light chain signal sequence comprising the nucleotide sequence of SEQ ID NO: 5159, a light chain variable region comprising the nucleotide sequence of SEQ ID NO: 5113 and light chain constant region comprising the nucleotide sequence of SEQ ID NO: 5007; a rabbit globin polyadenylation sequence comprising the nucleotide sequence of SEQ ID NO: 2122; and a 3′ ITR sequence region comprising the nucleotide sequence of SEQ ID NO: 2078; or a sequence substantially identical (e.g., having at least 70%, 75%, 80%, 85%, 90%, 95%, or 99% sequence identity) to any of the aforesaid sequences. In some embodiments, disclosed herein is an antibody molecule encoded by the genetic element comprising the nucleotide sequence of SEQ ID NO: 5168 or a sequence substantially identical (e.g., having at least 70%, 75%, 80%, 85%, 90%, 95%, or 99% sequence identity) thereto.

[1219] In some embodiments, a genetic element comprising the sequence of SEQ ID NO: 5168, or a sequence substantially identical (e.g., having at least 70%, 75%, 80%, 85%, 90%, 95%, or 99% sequence identity) thereto, encodes an antibody molecule comprising a heavy chain variable region comprising a HC CDR1 amino acid sequence of SEQ ID NO: 5117, a HC CDR2 amino acid sequence of SEQ ID NO: 5118, and an HC CDR3 amino acid sequence of SEQ ID NO: 5119; and a light chain variable region comprising an LC CDR1 amino acid sequence of SEQ ID NO: 5123, an LC CDR2 amino acid sequence of SEQ ID NO: 5124, and an LC CDR3 amino acid sequence of SEQ ID NO: 5125. In some embodiments, a genetic element comprising the sequence of SEQ ID NO: 5168, or a sequence substantially identical (e.g., having at least 70%, 75%, 80%, 85%, 90%, 95%, or 99% sequence identity) thereto, encodes an antibody molecule comprising a heavy chain variable region comprising a HC CDR1 amino acid sequence of SEQ ID NO: 5120, a HC CDR2 amino acid sequence of SEQ ID NO: 5121, and an HC CDR3 amino acid sequence of SEQ ID NO: 5122; and a light chain variable region comprising an LC CDR1 amino acid sequence of SEQ ID NO: 5126, an LC CDR2 amino acid sequence of SEQ ID NO: 5127, and an LC CDR3 amino acid sequence of SEQ ID NO: 5128.

[1220] In some embodiments, a genetic element comprising the sequence of SEQ ID NO: 5168, or a sequence substantially identical (e.g., having at least 70%, 75%, 80%, 85%, 90%, 95%, or 99% sequence identity) thereto, encodes an antibody molecule comprising a heavy chain variable region comprising the amino acid sequence of SEQ ID NO: 5110 and/or a light chain variable region comprising the amino acid sequence of SEQ ID NO: 5114, or a sequence substantially identical (e.g., having at least 70%, 75%, 80%, 85%, 90%, 95%, or 99% sequence identity) to the aforesaid sequences.

[1221] In some embodiments, a genetic element comprising the sequence of SEQ ID NO: 5168, or a sequence substantially identical (e.g., having at least 70%, 75%, 80%, 85%, 90%, 95%, or 99% sequence identity) thereto, encodes an antibody molecule comprising a heavy chain comprising the amino acid sequence of SEQ ID NO: 5112 and/or a light chain comprising the amino acid sequence of SEQ ID NO: 5116 or a sequence substantially identical (e.g., having at least 70%, 75%, 80%, 85%, 90%, 95%, or 99% sequence identity) to the any of the aforesaid.

TABLE 19
Sequence Regions in ITR to ITR Sequences

| | HER-43 (SEQ ID NO: 5185) | | | HER-46 (SEQ ID NO: 5186) | | |
|---|---|---|---|---|---|---|
| Sequence | Region SEQ | Region | Position in SEQ | Region SEQ | Region | Position in SEQ |
| Regions | ID NO | length (nt) | ID NO: 5185 | ID NO | length (nt) | ID NO: 5186 |
| 5′ ITR | 2076 | 130 | 1-130 | 2076 | 130 | 1-130 |
| CB promoter | 2083 | 260 | 590-849 | 2083 | 260 | 590-849 |
| Exon | 2090 | 134 | 877-1010 | 2090 | 134 | 877-1010 |
| Intron | 2095 | 32 | 1011-1042 | 2095 | 32 | 1011-1042 |
| Intron | 2097 | 347 | 1043-1389 | 2097 | 347 | 1043-1389 |
| Exon | 2093 | 53 | 1390-1442 | 2093 | 53 | 1390-1442 |
| Signal | 5157 | 57 | 1467-1523 | 5157 | 57 | 1467-1523 |
| VH | 5191 | 360 | 1524-1883 | 5223 | 360 | 1524-1883 |
| Constant | 5211 | 993 | 1884-2876 | 5213 | 993 | 1884-2876 |
| Linker | 1724 | 12 | 2877-2888 | 1724 | 12 | 2877-2888 |
| Linker | 1726 | 54 | 2889-2942 | 1726 | 54 | 2889-2942 |
| Signal | 5159 | 66 | 2943-3008 | 5159 | 66 | 2943-3008 |
| VI | 5195 | 321 | 3009-3329 | 5227 | 321 | 3009-3329 |
| Constant | 5007 | 321 | 3330-3650 | 5007 | 321 | 3330-3650 |
| PolyA | 2122 | 127 | 3693-3819 | 2122 | 127 | 3693-3819 |
| 3′ ITR | 2078 | 130 | 3863-3992 | 2078 | 130 | 3863-3992 |

[1222] In some embodiments, the AAV particle comprises a genetic element comprising the nucleotide sequence of SEQ ID NO: 5185 (HER-43), or a nucleotide sequence substantially identical (e.g., having at least 70%, 75%, 80%, 85%, 90%, 95%, 99% or 100%, sequence identity) thereto. In some embodiments, the genetic element comprises the nucleotide sequence of SEQ ID NO: 5185, or a nucleotide sequence substantially identical (e.g., having at least 70%, 75%, 80%, 85%, 90%, 95%, 99% or 100%, sequence identity) thereto. In some embodiments, the genetic element comprising the nucleotide sequence of SEQ ID NO: 5185, comprises in 5′ to 3′ order: a 5′ inverted terminal repeat (ITR) sequence region comprising the nucleotide sequence of SEQ ID NO: 2076; a CB promoter comprising the nucleotide sequence of SEQ ID NO: 2083; an ie1 exon 1 region comprising the nucleotide sequence of SEQ ID NO: 2090; a human beta-globin intron region comprising the nucleotide sequence of SEQ ID NO: 2095; a second human beta-globin intron region comprising the nucleotide sequence of SEQ ID NO: 2097; a human beta-globin exon region comprising the nucleotide sequence of SEQ ID NO: 2093; a heavy chain signal sequence comprising the nucleotide sequence of SEQ ID NO: 5157, a heavy chain variable region comprising the nucleotide sequence of SEQ ID NO: 5191, and heavy chain constant region comprising the nucleotide sequence of SEQ ID NO: 5211; a furin cleavage site comprising the nucleotide sequence of SEQ ID NO: 1724; a T2A linker comprising the nucleotide sequence of SEQ ID NO: 1726; a light chain signal sequence comprising the nucleotide sequence of SEQ ID NO: 5159, a light chain variable region comprising the nucleotide sequence of SEQ ID NO: 5195 and light chain constant region comprising the nucleotide sequence of SEQ ID NO: 5007; a rabbit globin polyadenylation sequence comprising the nucleotide sequence of SEQ ID NO: 2122; and a 3′ ITR sequence region comprising the nucleotide sequence of SEQ ID NO: 2078; or a nucleotide sequence substantially identical (e.g., having at least 70%, 75%, 80%, 85%, 90%, 95%, 99% or 100%, sequence identity) to any of the aforesaid sequences. In some embodiments, disclosed herein is an antibody molecule encoded by the genetic element comprising the nucleotide sequence of SEQ ID NO: 5185 or a sequence substantially identical (e.g., having at least 70%, 75%, 80%, 85%, 90%, 95%, or 99% sequence identity) thereto.

[1223] In some embodiments, a genetic element comprising the sequence of SEQ ID NO: 5185, or a sequence substantially identical (e.g., having at least 70%, 75%, 80%, 85%, 90%, 95%, or 99% sequence identity) thereto, encodes an antibody molecule comprising a heavy chain variable region comprising a HC CDR1 amino acid sequence of SEQ ID NO: 5199, a HC CDR2 amino acid sequence of SEQ ID NO: 5200, and an HC CDR3 amino acid sequence of SEQ ID NO: 5201; and a light chain variable region comprising an LC CDR1 amino acid sequence of SEQ ID NO: 5205, an LC CDR2 amino acid sequence of SEQ ID NO: 5206, and an LC CDR3 amino acid sequence of SEQ ID NO: 5207. In some embodiments, a genetic element comprising the sequence of SEQ ID NO: 5185, or a sequence substantially identical (e.g., having at least 70%, 75%, 80%, 85%, 90%, 95%, or 99% sequence identity) thereto, encodes an antibody molecule comprising a heavy chain variable region comprising a HC CDR1 amino acid sequence of SEQ ID NO: 5202, a HC CDR2 amino acid sequence of SEQ ID NO: 5203, and an HC CDR3 amino acid sequence of SEQ ID NO: 5204; and a light chain variable region comprising an LC CDR1 amino acid sequence of SEQ ID NO: 5208, an LC CDR2 amino acid sequence of SEQ ID NO: 5209, and an LC CDR3 amino acid sequence of SEQ ID NO: 5210.

[1224] In some embodiments, a genetic element comprising the sequence of SEQ ID NO: 5185, or a sequence substantially identical (e.g., having at least 70%, 75%, 80%, 85%, 90%, 95%, or 99% sequence identity) thereto, encodes an antibody molecule comprising a heavy chain variable region comprising the amino acid sequence of SEQ ID NO: 5192 and/or a light chain variable region comprising the amino acid sequence of SEQ ID NO: 5196; or a sequence substantially identical (e.g., having at least 70%, 75%, 80%, 85%, 90%, 95%, or 99% sequence identity) to the any of the aforesaid sequences.

[1225] In some embodiments, a genetic element comprising the sequence of SEQ ID NO: 5185, or a sequence substantially identical (e.g., having at least 70%, 75%, 80%, 85%, 90%, 95%, or 99% sequence identity) to the any of the aforesaid sequences, encodes an antibody molecule comprising a heavy chain comprising the amino acid sequence of SEQ ID NO: 5194 and/or a light chain comprising the amino acid sequence of SEQ ID NO: 5198; or a sequence substantially identical (e.g., having at least 70%, 75%, 80%, 85%, 90%, 95%, or 99% sequence identity) to the any of the aforesaid sequences.

[1226] In some embodiments, the AAV particle comprises a genetic element comprising the nucleotide sequence of SEQ ID NO: 5186 (HER-46), or a nucleotide sequence substantially identical (e.g., having at least 70%, 75%, 80%, 85%, 90%, 95%, 99% or 100%, sequence identity) thereto. In some embodiments, the genetic element comprises the nucleotide sequence of SEQ ID NO: 5186, or a nucleotide sequence substantially identical (e.g., having at least 70%, 75%, 80%, 85%, 90%, 95%, 99% or 100%, sequence identity) thereto. In some embodiments, the genetic element comprising the nucleotide sequence of SEQ ID NO: 5186, comprises in 5′ to 3′ order: a 5′ inverted terminal repeat (ITR) sequence region comprising the nucleotide sequence of SEQ ID NO: 2076; a CB promoter comprising the nucleotide sequence of SEQ ID NO: 2083; an ie1 exon 1 region comprising the nucleotide sequence of SEQ ID NO: 2090; a human beta-globin intron region comprising the nucleotide sequence of SEQ ID NO: 2095; a second human beta-globin intron region comprising the nucleotide sequence of SEQ ID NO: 2097; a human beta-globin exon region comprising the nucleotide sequence of SEQ ID NO: 2093; a heavy chain signal sequence comprising the nucleotide sequence of SEQ ID NO: 5157, a heavy chain variable region comprising the nucleotide sequence of SEQ ID NO: 5223, and heavy chain constant region comprising the nucleotide sequence of SEQ ID NO: 5213; a furin cleavage site comprising the nucleotide sequence of SEQ ID NO: 1724; a T2A linker comprising the nucleotide sequence of SEQ ID NO: 1726; a light chain signal sequence comprising the nucleotide sequence of SEQ ID NO: 5159, a light chain variable region comprising the nucleotide sequence of SEQ ID NO: 5227 and light chain constant region comprising the nucleotide sequence of SEQ ID NO: 5007; a rabbit globin polyadenylation sequence comprising the nucleotide sequence of SEQ ID NO: 2122; and a 3′ ITR sequence region comprising the nucleotide sequence of SEQ ID NO: 2078; or a nucleotide sequence substantially identical (e.g., having at least 70%, 75%, 80%, 85%, 90%, 95%, 99% or 100%, sequence identity) to any of the aforesaid sequences. In some embodiments, disclosed herein is an antibody molecule encoded by the genetic element comprising the nucleotide sequence of SEQ ID NO: 5186 or a sequence substantially identical (e.g., having at least 70%, 75%, 80%, 85%, 90%, 95%, or 99% sequence identity) thereto.

[1227] In some embodiments, a genetic element comprising the sequence of SEQ ID NO: 5186, or a sequence substantially identical (e.g., having at least 70%, 75%, 80%, 85%, 90%, 95%, or 99% sequence identity) thereto, encodes an antibody molecule comprising a heavy chain variable region comprising a HC CDR1 amino acid sequence of SEQ ID NO: 5231, a HC CDR2 amino acid sequence of SEQ ID NO: 5232, and an HC CDR3 amino acid sequence of SEQ ID NO: 5233; and a light chain variable region comprising an LC CDR1 amino acid sequence of SEQ ID NO: 5237, an LC CDR2 amino acid sequence of SEQ ID NO: 5238, and an LC CDR3 amino acid sequence of SEQ ID NO: 5239. In some embodiments, a genetic element comprising the sequence of SEQ ID NO: 5186, or a sequence substantially identical (e.g., having at least 70%, 75%, 80%, 85%, 90%, 95%, or 99% sequence identity) thereto, encodes an antibody molecule comprising a heavy chain variable region comprising a HC CDR1 amino acid sequence of SEQ ID NO: 5234, a HC CDR2 amino acid sequence of SEQ ID NO: 5235, and an HC CDR3 amino acid sequence of SEQ ID NO: 5236; and a light chain variable region comprising an LC CDR1 amino acid sequence of SEQ ID NO: 5240, an LC CDR2 amino acid sequence of SEQ ID NO: 5241, and an LC CDR3 amino acid sequence of SEQ ID NO: 5242.

[1228] In some embodiments, a genetic element comprising the sequence of SEQ ID NO: 5186, or a sequence substantially identical (e.g., having at least 70%, 75%, 80%, 85%, 90%, 95%, or 99% sequence identity) thereto, encodes an antibody molecule comprising a heavy chain variable region comprising the amino acid sequence of SEQ ID NO: 5224 and/or a light chain variable region comprising the amino acid sequence of SEQ ID NO: 5228; or a sequence substantially identical (e.g., having at least 70%, 75%, 80%, 85%, 90%, 95%, or 99% sequence identity) to the any of the aforesaid sequences.

[1229] In some embodiments, a genetic element comprising the sequence of SEQ ID NO: 5186, or a sequence substantially identical (e.g., having at least 70%, 75%, 80%, 85%, 90%, 95%, or 99% sequence identity) to the any of the aforesaid sequences, encodes an antibody molecule comprising a heavy chain comprising the amino acid sequence of SEQ ID NO: 5226 and/or a light chain comprising the amino acid sequence of SEQ ID NO: 5230; or a sequence substantially identical (e.g., having at least 70%, 75%, 80%, 85%, 90%, 95%, or 99% sequence identity) to the any of the aforesaid sequences.

TABLE 20
Sequence Regions in ITR to ITR Sequences

| | HER-57 (SEQ ID NO: 5187) | | |
|---|---|---|---|
| Sequence | Region | Region length | Position in |
| Regions | SEQ ID NO | (nt) | SEQ ID NO: 5187 |
| 5′ ITR | 2076 | 130 | 1-130 |
| CMV(IE) | 2239 | 380 | 204-583 |
| CB promoter | 2083 | 260 | 590-849 |
| Exon | 2090 | 134 | 877-1010 |
| Intron | 2095 | 32 | 1011-1042 |
| Intron | 2097 | 347 | 1043-1389 |
| Exon | 2093 | 53 | 1390-1442 |
| Signal (H5) | 5157 | 57 | 1467-1523 |
| VH | 5253 | 360 | 1524-1883 |
| Linker | 5347 | 45 | 1884-1928 |
| VL | 5255 | 321 | 1929-2249 |
| Constant | 5277 | 696 | 2250-2945 |
| PolyA | 2122 | 127 | 2988-3114 |
| 3′ ITR | 2078 | 130 | 3158-3287 |

[1230] In some embodiments, the AAV particle comprises a genetic element comprising the nucleotide sequence of SEQ ID NO: 5187 (HER-57), or a nucleotide sequence substantially identical (e.g., having at least 70%, 75%, 80%, 85%, 90%, 95%, 99% or 100%, sequence identity) thereto. In some embodiments, the genetic element comprises the nucleotide sequence of SEQ ID NO: 5187, or a sequence substantially identical (e.g., having at least 70%, 75%, 80%, 85%, 90%, 95%, or 99% sequence identity) thereto. In some embodiments, the genetic element comprising the nucleotide sequence of SEQ ID NO: 5187 comprises in 5′ to 3′ order: 5′ inverted terminal repeat (ITR) sequence region comprising the nucleotide sequence of SEQ ID NO: 2076; a CMV(IE) promoter comprising the nucleotide sequence of SEQ ID NO: 2239 and a CB promoter comprising the nucleotide sequence of SEQ ID NO: 2083; an ie1 exon 1 region comprising the nucleotide sequence of SEQ ID NO: 2090; a human beta-globin intron region comprising the nucleotide sequence of SEQ ID NO: 2095; a second human beta-globin intron region comprising the nucleotide sequence of SEQ ID NO: 2097; a human beta-globin exon region comprising the nucleotide sequence of SEQ ID NO: 2093; a heavy chain signal sequence comprising the nucleotide sequence of SEQ ID NO: 5157, a heavy chain variable region comprising the nucleotide sequence of SEQ ID NO: 5253, a linker region comprising the nucleotide sequence of SEQ ID NO: 5347; a light chain variable region comprising the nucleotide sequence of SEQ ID NO: 5255, and light chain constant region comprising the nucleotide sequence of SEQ ID NO:5277; a rabbit globin polyadenylation sequence comprising the nucleotide sequence of SEQ ID NO: 2122; and a 3′ ITR sequence region comprising the nucleotide sequence of SEQ ID NO: 2078; or a nucleotide sequence substantially identical (e.g., having at least 70%, 75%, 80%, 85%, 90%, 95%, 99% or 100%, sequence identity) to any of the aforesaid sequences. In some embodiments, disclosed herein is an antibody molecule encoded by the genetic element comprising the nucleotide sequence of SEQ ID NO: 5187 or a sequence substantially identical (e.g., having at least 70%, 75%, 80%, 85%, 90%, 95%, or 99% sequence identity) thereto.

[1231] In some embodiments, a genetic element comprising the sequence of SEQ ID NO: 5187, or a sequence substantially identical (e.g., having at least 70%, 75%, 80%, 85%, 90%, 95%, or 99% sequence identity) thereto, encodes an antibody molecule comprising a heavy chain variable region comprising a HC CDR1 amino acid sequence of SEQ ID NO: 5293, a HC CDR2 amino acid sequence of SEQ ID NO: 5294, and an HC CDR3 amino acid sequence of SEQ ID NO: 5295; and a light chain variable region comprising an LC CDR1 amino acid sequence of SEQ ID NO: 5299, an LC CDR2 amino acid sequence of SEQ ID NO: 5300, and an LC CDR3 amino acid sequence of SEQ ID NO: 5301. In some embodiments, a genetic element comprising the sequence of SEQ ID NO: 5187, or a sequence substantially identical (e.g., having at least 70%, 75%, 80%, 85%, 90%, 95%, or 99% sequence identity) thereto, encodes an antibody molecule comprising a heavy chain variable region comprising a HC CDR1 amino acid sequence of SEQ ID NO: 5296, a HC CDR2 amino acid sequence of SEQ ID NO: 5297, and an HC CDR3 amino acid sequence of SEQ ID NO: 5298; and a light chain variable region comprising an LC CDR1 amino acid sequence of SEQ ID NO: 5302, an LC CDR2 amino acid sequence of SEQ ID NO: 5303, and an LC CDR3 amino acid sequence of SEQ ID NO: 5304.

[1232] In some embodiments, a genetic element comprising the sequence of SEQ ID NO: 5187, or a sequence substantially identical (e.g., having at least 70%, 75%, 80%, 85%, 90%, 95%, or 99% sequence identity) thereto, encodes an antibody molecule comprising a heavy chain variable region comprising the amino acid sequence of SEQ ID NO: 5254 and/or a light chain variable region comprising the amino acid sequence of SEQ ID NO: 5256; or a sequence substantially identical (e.g., having at least 70%, 75%, 80%, 85%, 90%, 95%, or 99% sequence identity) to the any of the aforesaid sequences.

[1233] In some embodiments, a genetic element comprising the sequence of SEQ ID NO: 5187, or a sequence substantially identical (e.g., having at least 70%, 75%, 80%, 85%, 90%, 95%, or 99% sequence identity) thereto, encodes an antibody molecule comprising an scFv comprising the amino acid sequence of SEQ ID NO: 5351 and/or an Fc region comprising the amino acid sequence of SEQ ID NO: 5278; or a sequence substantially identical (e.g., having at least 70%, 75%, 80%, 85%, 90%, 95%, or 99% sequence identity) to the any of the aforesaid sequences.

TABLE 21
Sequence Regions in ITR to ITR Sequences

| | HER-69 (SEQ ID NO: 5169) | | |
|---|---|---|---|
| Sequence | Region | Region length | Position in |
| Regions | SEQ ID NO | (nt) | SEQ ID NO: 5169 |
| 5′ ITR | 2076 | 130 | 1-130 |
| GFAP Promoter | 2085 | 699 | 216-914 |
| Intron | 2240 | 566 | 935-1500 |
| Signal (H5) | 5157 | 57 | 1525-1581 |
| VH | 5129 | 360 | 1582-1941 |
| Constant | 5017 | 990 | 1942-2931 |
| Linker | 1724 | 12 | 2932-2943 |
| Linker | 1726 | 54 | 2944-2997 |
| Signal | 5159 | 66 | 2998-3063 |
| VL | 5133 | 321 | 3064-3384 |
| Constant | 5021 | 322 | 3385-3706 |
| PolyA | 2122 | 127 | 3748-3874 |
| 3′ ITR | 2078 | 130 | 3918-4047 |

[1234] In some embodiments, the AAV particle comprises a genetic element comprising SEQ ID NO: 5169 (HER-69), or a nucleotide sequence substantially identical (e.g., having at least 70%, 75%, 80%, 85%, 90%, 95%, 99% or 100%, sequence identity) thereto. In some embodiments, the genetic element comprises SEQ ID NO: 5169, or a nucleotide sequence substantially identical (e.g., having at least 70%, 75%, 80%, 85%, 90%, 95%, 99% or 100%, sequence identity) thereto. In some embodiments, the genetic element comprising the nucleotide sequence of SEQ ID NO: 5169, comprises in 5′ to 3′ order: a 5′ inverted terminal repeat (ITR) sequence region comprising the nucleotide sequence of SEQ ID NO: 2076; a GFAP promoter comprising the nucleotide sequence of SEQ ID NO: 2085; a human beta-globin intron region comprising the nucleotide sequence comprising the nucleotide sequence of SEQ ID NO: 2240; a heavy chain signal sequence comprising the nucleotide sequence of SEQ ID NO: 5157, a heavy chain variable region comprising the nucleotide sequence of SEQ ID NO: 5129, and heavy chain constant region comprising the nucleotide sequence of SEQ ID NO: 5017; a furin cleavage site comprising the nucleotide sequence of SEQ ID NO: 1724; a T2A linker comprising the nucleotide sequence of SEQ ID NO: 1726; a light chain signal sequence comprising the nucleotide sequence of SEQ ID NO: 5159, a light chain variable region comprising the nucleotide sequence of SEQ ID NO: 5133 and light chain constant region comprising the nucleotide sequence of SEQ ID NO: 5021; a rabbit globin polyadenylation sequence comprising the nucleotide sequence of SEQ ID NO: 2122; and a 3′ ITR sequence region comprising the nucleotide sequence of SEQ ID NO: 2078; or a sequence substantially identical (e.g., having at least 70%, 75%, 80%, 85%, 90%, 95%, or 99% sequence identity) to any of the aforesaid sequences. In some embodiments, disclosed herein is an antibody molecule encoded by the genetic element comprising the nucleotide sequence of SEQ ID NO: 5169 or a sequence substantially identical (e.g., having at least 70%, 75%, 80%, 85%, 90%, 95%, or 99% sequence identity) thereto.

[1235] In some embodiments, a genetic element comprising the sequence of SEQ ID NO: 5169, or a sequence substantially identical (e.g., having at least 70%, 75%, 80%, 85%, 90%, 95%, or 99% sequence identity) thereto, encodes an antibody molecule comprising a heavy chain variable region comprising a HC CDR1 amino acid sequence of SEQ ID NO: 5137, a HC CDR2 amino acid sequence of SEQ ID NO: 5138, and an HC CDR3 amino acid sequence of SEQ ID NO: 5139; and a light chain variable region comprising an LC CDR1 amino acid sequence of SEQ ID NO: 5143, an LC CDR2 amino acid sequence of SEQ ID NO: 5144, and an LC CDR3 amino acid sequence of SEQ ID NO: 5145. In some embodiments, a genetic element comprising the sequence of SEQ ID NO: 5169, or a sequence substantially identical (e.g., having at least 70%, 75%, 80%, 85%, 90%, 95%, or 99% sequence identity) thereto, encodes an antibody molecule comprising a heavy chain variable region comprising a HC CDR1 amino acid sequence of SEQ ID NO: 5140, a HC CDR2 amino acid sequence of SEQ ID NO: 5141, and an HC CDR3 amino acid sequence of SEQ ID NO: 5142; and a light chain variable region comprising an LC CDR1 amino acid sequence of SEQ ID NO: 5146, an LC CDR2 amino acid sequence of SEQ ID NO: 5147, and an LC CDR3 amino acid sequence of SEQ ID NO: 5148.

[1236] In some embodiments, a genetic element comprising the sequence of SEQ ID NO: 5169, or a sequence substantially identical (e.g., having at least 70%, 75%, 80%, 85%, 90%, 95%, or 99% sequence identity) thereto, encodes an antibody molecule comprising a heavy chain variable region comprising the amino acid sequence of SEQ ID NO: 5130 and/or a light chain variable region comprising the amino acid sequence of SEQ ID NO: 5134; or a sequence substantially identical (e.g., having at least 70%, 75%, 80%, 85%, 90%, 95%, or 99% sequence identity) to the any of the aforesaid sequences.

[1237] In some embodiments, a genetic element comprising the sequence of SEQ ID NO: 5169, or a sequence substantially identical (e.g., having at least 70%, 75%, 80%, 85%, 90%, 95%, or 99% sequence identity) thereto, encodes an antibody molecule comprising a heavy chain comprising the amino acid sequence of SEQ ID NO: 5132 and/or a light chain comprising the amino acid sequence of SEQ ID NO: 5136, or a sequence substantially identical (e.g., having at least 70%, 75%, 80%, 85%, 90%, 95%, or 99% sequence identity) to the any of the aforesaid sequences.

TABLE 22
Sequence Regions in ITR to ITR Sequences

| | HER-62 (SEQ ID NO: 5188) | | |
|---|---|---|---|
| Sequence | Region SEQ | Region | Position in SEQ |
| Regions | ID NO | length (nt) | ID NO: 5188 |
| 5′ ITR | 2076 | 130 | 1-130 |
| CB promoter | 2083 | 260 | 590-849 |
| Exon | 2090 | 134 | 877-1010 |
| Intron | 2095 | 32 | 1011-1042 |
| Intron | 2097 | 347 | 1043-1389 |
| Exon | 2093 | 53 | 1390-1442 |
| Signal (H5) | 5157 | 57 | 1467-1523 |
| VH | 5257 | 357 | 1524-1880 |
| Linker | 5347 | 15 | 1881-1925 |
| VL | 5259 | 321 | 1926-2246 |
| Constant | 5279 | 696 | 2247-2942 |
| PolyA | 2122 | 127 | 2985-3111 |
| 3′ ITR | 2078 | 130 | 3155-3284 |

[1238] In some embodiments, the AAV particle comprises a genetic element comprising the nucleotide sequence of SEQ ID NO: 5188 (HER-62), or a nucleotide sequence substantially identical (e.g., having at least 70%, 75%, 80%, 85%, 90%, 95%, 99% or 100%, sequence identity) thereto. In some embodiments, the genetic element comprises the nucleotide sequence of SEQ ID NO: 5188, or a nucleotide sequence substantially identical (e.g., having at least 70%, 75%, 80%, 85%, 90%, 95%, 99% or 100%, sequence identity) thereto. In some embodiments, the genetic element comprising the nucleotide sequence of SEQ ID NO: 5188, comprises in 5′ to 3′ order: a 5′ inverted terminal repeat (ITR) sequence region comprising the nucleotide sequence of SEQ ID NO: 2076; a CB promoter comprising the nucleotide sequence of SEQ ID NO: 2083; an ie1 exon 1 region comprising the nucleotide sequence of SEQ ID NO: 2090; a human beta-globin intron region comprising the nucleotide sequence of SEQ ID NO: 2095; a second human beta-globin intron region comprising the nucleotide sequence of SEQ ID NO: 2097; a human beta-globin exon region comprising the nucleotide sequence of SEQ ID NO: 2093; a heavy chain signal sequence comprising the nucleotide sequence of SEQ ID NO: 5157, a heavy chain variable region comprising the nucleotide sequence of SEQ ID NO: 5257, a linker region comprising the nucleotide sequence of SEQ ID NO: 5347; a light chain variable region comprising the nucleotide sequence of SEQ ID NO: 5259, and light chain constant region comprising the nucleotide sequence of SEQ ID NO: 5279; a rabbit globin polyadenylation sequence comprising the nucleotide sequence of SEQ ID NO: 2122; and a 3′ ITR sequence region comprising the nucleotide sequence of SEQ ID NO: 2078; or a nucleotide sequence substantially identical (e.g., having at least 70%, 75%, 80%, 85%, 90%, 95%, 99% or 100%, sequence identity) to any of the aforesaid sequences. In some embodiments, disclosed herein is an antibody molecule encoded by the genetic element comprising the nucleotide sequence of SEQ ID NO: 5188 or a sequence substantially identical (e.g., having at least 70%, 75%, 80%, 85%, 90%, 95%, or 99% sequence identity) thereto.

[1239] In some embodiments, a genetic element comprising the sequence of SEQ ID NO: 5188, or a sequence substantially identical (e.g., having at least 70%, 75%, 80%, 85%, 90%, 95%, or 99% sequence identity) thereto, encodes an antibody molecule comprising a heavy chain variable region comprising a HC CDR1 amino acid sequence of SEQ ID NO: 5305, a HC CDR2 amino acid sequence of SEQ ID NO: 5306, and an HC CDR3 amino acid sequence of SEQ ID NO: 5307; and a light chain variable region comprising an LC CDR1 amino acid sequence of SEQ ID NO: 5308, an LC CDR2 amino acid sequence of SEQ ID NO: 5309, and an LC CDR3 amino acid sequence of SEQ ID NO: 5310.

[1240] In some embodiments, a genetic element comprising the sequence of SEQ ID NO: 5188, or a sequence substantially identical (e.g., having at least 70%, 75%, 80%, 85%, 90%, 95%, or 99% sequence identity) thereto, encodes an antibody molecule comprising a heavy chain variable region comprising the amino acid sequence of SEQ ID NO: 5258 and/or a light chain variable region comprising the amino acid sequence of SEQ ID NO: 5260; or a sequence substantially identical (e.g., having at least 70%, 75%, 80%, 85%, 90%, 95%, or 99% sequence identity) to the any of the aforesaid sequences.

[1241] In some embodiments, a genetic element comprising the sequence of SEQ ID NO: 5188, or a sequence substantially identical (e.g., having at least 70%, 75%, 80%, 85%, 90%, 95%, or 99% sequence identity) thereto, encodes an antibody molecule comprising an scFv comprising the amino acid sequence of SEQ ID NO: 5349 and/or an Fc region comprising the amino acid sequence of SEQ ID NO: 5278; or a sequence substantially identical (e.g., having at least 70%, 75%, 80%, 85%, 90%, 95%, or 99% sequence identity) to the any of the aforesaid sequences.

TABLE 23
Sequence Regions in ITR to ITR Sequences

| | HER-73 (SEQ ID NO: 5189) | | |
|---|---|---|---|
| | Region SEQ | Region | Position in SEQ |
| Sequence Regions | ID NO | length (nt) | ID NO: 5189 |
| 5′ ITR | 2076 | 130 | 1-130 |
| CB promoter | 2083 | 260 | 590-849 |
| Exon | 2090 | 134 | 877-1010 |
| Intron | 2095 | 32 | 1011-1042 |
| Intron | 2097 | 347 | 1043-1389 |
| Exon | 2093 | 53 | 1390-1442 |
| Signal | 5157 | 57 | 1467-1523 |
| VH | 5261 | 360 | 1524-1883 |
| Constant | 5215 | 993 | 1884-2876 |
| Linker | 1724 | 12 | 2877-2888 |
| Linker | 1726 | 54 | 2889-2942 |
| Signal | 5159 | 66 | 2943-3008 |
| VH | 5289 | 360 | 3009-3368 |
| Linker | 5347 | 45 | 3369-3413 |
| VL | 5265 | 321 | 3414-3734 |
| Linker | 5243 | 6 | 3735-3740 |
| VL | 5353 | 339 | 3741-4079 |
| Constant | 5217 | 321 | 4080-4400 |
| PolyA | 2122 | 127 | 4443-4569 |
| 3′ ITR | 2078 | 130 | 4613-4742 |

[1242] In some embodiments, the AAV particle comprises a genetic element comprising the nucleotide sequence of SEQ ID NO: 5189 (HER-73), or a nucleotide sequence substantially identical (e.g., having at least 70%, 75%, 80%, 85%, 90%, 95%, 99% or 100%, sequence identity) thereto. In some embodiments, the genetic element comprises the nucleotide sequence of SEQ ID NO: 5189, or a nucleotide sequence substantially identical (e.g., having at least 70%, 75%, 80%, 85%, 90%, 95%, 99% or 100%, sequence identity) thereto. In some embodiments, the genetic element comprising the nucleotide sequence of SEQ ID NO: 5189, comprises in 5′ to 3′ order: a 5′ inverted terminal repeat (ITR) sequence region comprising the nucleotide sequence of SEQ ID NO: 2076; a CB promoter comprising the nucleotide sequence of SEQ ID NO: 2083; an ie1 exon 1 region comprising the nucleotide sequence of SEQ ID NO: 2090; a human beta-globin intron region comprising the nucleotide sequence of SEQ ID NO: 2095; a second human beta-globin intron region comprising the nucleotide sequence of SEQ ID NO: 2097; a human beta-globin exon region comprising the nucleotide sequence of SEQ ID NO: 2093; a heavy chain signal sequence comprising the nucleotide sequence of SEQ ID NO: 5157, a heavy chain variable region comprising the nucleotide sequence of SEQ ID NO: 5261, a heavy chain constant region comprising the nucleotide sequence of SEQ ID NO: 5215; a furin cleavage site comprising the nucleotide sequence of SEQ ID NO: 1724; a T2A linker comprising the nucleotide sequence of SEQ ID NO: 1726; a light chain signal sequence comprising the nucleotide sequence of SEQ ID NO: 5159; a heavy chain variable region comprising the nucleotide sequence of SEQ ID NO: 5289, a linker region comprising the nucleotide sequence of SEQ ID NO: 5347, and a light chain variable region comprising the nucleotide sequence of SEQ ID NO: 5265; a linker comprising the nucleotide sequence of SEQ ID NO: 5243; a light chain variable region comprising the nucleotide sequence of SEQ ID NO: 5353, and a light chain constant region comprising the nucleotide sequence of SEQ ID NO: 5217; a rabbit globin polyadenylation sequence comprising the nucleotide sequence of SEQ ID NO: 2122; and a 3′ ITR sequence region comprising the nucleotide sequence of SEQ ID NO: 2078; or a nucleotide sequence substantially identical (e.g., having at least 70%, 75%, 80%, 85%, 90%, 95%, 99% or 100%, sequence identity) to any of the aforesaid sequences. In some embodiments, disclosed herein is an antibody molecule encoded by the genetic element comprising the nucleotide sequence of SEQ ID NO: 5189 or a sequence substantially identical (e.g., having at least 70%, 75%, 80%, 85%, 90%, 95%, or 99% sequence identity) thereto.

[1243] In some embodiments, a genetic element comprising the sequence of SEQ ID NO: 5189, or a sequence substantially identical (e.g., having at least 70%, 75%, 80%, 85%, 90%, 95%, or 99% sequence identity) thereto, encodes a multispecific, e.g., bispecific or biparatopic, antibody molecule, comprising a first antigen binding domain that binds domain I of a HER2 antigen and a second antigen binding domain that binds domain IV of a HER2 antigen. In some embodiments, the first antigen binding domain comprises a full antibody, e.g., an IgG antibody. In some embodiments, the second antigen binding domain comprises an scFv. In some embodiments, the first antigen binding domain comprises a heavy chain variable region comprising a HC CDR1 amino acid sequence of SEQ ID NO: 5358, a HC CDR2 amino acid sequence of SEQ ID NO: 5359, and an HC CDR3 amino acid sequence of SEQ ID NO: 5360; and a light chain variable region comprising an LC CDR1 amino acid sequence of SEQ ID NO: 5355, an LC CDR2 amino acid sequence of SEQ ID NO: 5356, and an LC CDR3 amino acid sequence of SEQ ID NO: 5357. In some embodiments, the second antigen binding domain comprises a HC CDR1 amino acid sequence of SEQ ID NO: 5361, a HC CDR2 amino acid sequence of SEQ ID NO: 5362, and an HC CDR3 amino acid sequence of SEQ ID NO: 5363; and a light chain variable region comprising an LC CDR1 amino acid sequence of SEQ ID NO: 5317, an LC CDR2 amino acid sequence of SEQ ID NO: 5318, and an LC CDR3 amino acid sequence of SEQ ID NO: 5319.

[1244] In some embodiments, a genetic element comprising the sequence of SEQ ID NO: 5189, or a sequence substantially identical (e.g., having at least 70%, 75%, 80%, 85%, 90%, 95%, or 99% sequence identity) thereto, encodes a multispecific antibody molecule comprising a first chain, which comprises, from the N-terminus to the C-terminus, a first anti-HER2 VH comprising the amino acid sequence of SEQ ID NO: 5262, and a heavy chain constant region comprising the amino acid sequence of SEQ ID NO: 5216; and a second chain, which comprises from the N-terminus to the C-terminus, a second anti-HER2 VH comprising the amino sequence of 5290, a (G4S)3 linker, a first anti-HER2 VL comprising the amino acid sequence of SEQ ID NO: 5266, a (GS) linker, a second anti-HER2 VL comprising the amino acid sequence of SEQ ID NO: 5354, and a light chain constant region (CL) comprising the amino acid sequence of SEQ ID NO: 5218; or a sequence substantially identical (e.g., having at least 70%, 75%, 80%, 85%, 90%, 95%, or 99% sequence identity) to the any of the aforesaid sequences.

[1245] In some embodiments, a genetic element comprising the sequence of SEQ ID NO: 5189, or a sequence substantially identical (e.g., having at least 70%, 75%, 80%, 85%, 90%, 95%, or 99% sequence identity) thereto, encodes a multispecific antibody molecule comprising a first chain comprising a heavy chain comprising the amino acid sequence of SEQ ID NO: 5264; and a second chain comprising an scFv comprising the amino acid sequence of SEQ ID NO: 5351, fused to a light chain comprising the amino acid sequence of SEQ ID NO: 5268; or a sequence substantially identical (e.g., having at least 70%, 75%, 80%, 85%, 90%, 95%, or 99% sequence identity) to the any of the aforesaid sequences. In some embodiments, a genetic element comprising the sequence of SEQ ID NO: 5189, or a sequence substantially identical (e.g., having at least 70%, 75%, 80%, 85%, 90%, 95%, or 99% sequence identity) thereto, encodes a multispecific antibody molecule comprising a first chain comprising the amino acid sequence of SEQ ID NO: 5264, or an amino acid sequence substantially identical (e.g., having at least 70%, 75%, 80%, 85%, 90%, 95%, or 99% sequence identity) thereto; and/or a second chain comprising the amino acid sequence of SEQ ID NO: 5365, or an amino acid sequence substantially identical (e.g., having at least 70%, 75%, 80%, 85%, 90%, 95%, or 99% sequence identity) thereto.

TABLE 24
Sequence Regions in ITR to ITR Sequences

| | HER-75 (SEQ ID NO: 5190) | | |
|---|---|---|---|
| Sequence | Region SEQ | Region | Position in SEQ |
| Regions | ID NO | length (nt) | ID NO: 5190 |
| 5′ ITR | 2076 | 130 | 1-130 |
| CB promoter | 2083 | 260 | 590-849 |
| Exon | 2090 | 134 | 877-1010 |
| Intron | 2095 | 32 | 1011-1042 |
| Intron | 2097 | 347 | 1043-1389 |
| Exon | 2093 | 53 | 1390-1442 |
| Signal | 5032 | 57 | 1467-1523 |
| VH | 5269 | 360 | 1524-1883 |
| Constant | 5219 | 990 | 1884-2873 |
| Linker | 1724 | 12 | 2874-2885 |
| Linker | 1726 | 54 | 2886-2939 |
| Signal | 5159 | 66 | 2940-3005 |
| VL | 5273 | 321 | 3006-3326 |
| Constant | 5221 | 321 | 3327-3647 |
| PolyA | 2122 | 127 | 3690-3816 |
| 3′ ITR | 2078 | 130 | 3860-3989 |

[1246] In some embodiments, the AAV particle comprises a genetic element comprising the nucleotide sequence of SEQ ID NO: 5190 (HER-75), SEQ ID NO: 6500 (HER-88), SEQ ID NO: 6501 (HER-89), SEQ ID NO: 6502 (HER-90), SEQ ID NO: 6503 (HER-91), SEQ ID NO: 6504 (HER-92), or a nucleotide sequence substantially identical (e.g., having at least 70%, 75%, 80%, 85%, 90%, 95%, 99% or 100%, sequence identity) thereto. In some embodiments, the AAV particle comprises a genetic element comprising the nucleotide sequence of SEQ ID NO: 5190 (HER-75), or a nucleotide sequence substantially identical (e.g., having at least 70%, 75%, 80%, 85%, 90%, 95%, 99% or 100%, sequence identity) thereto. In some embodiments, the genetic element comprises the nucleotide sequence of SEQ ID NO: 5190, 6500, 6501, 6502, 6503, or a nucleotide sequence substantially identical (e.g., having at least 70%, 75%, 80%, 85%, 90%, 95%, 99% or 100%, sequence identity) thereto. In some embodiments, the genetic element comprising the nucleotide sequence of SEQ ID NO: 5190, 6500, 6501, 6502, 6503, comprises in 5′ to 3′ order: a 5′ inverted terminal repeat (ITR) sequence region comprising the nucleotide sequence of SEQ ID NO: 2076; a CB promoter comprising the nucleotide sequence of SEQ ID NO: 2083; an ie1 exon 1 region comprising the nucleotide sequence of SEQ ID NO: 2090; a human beta-globin intron region comprising the nucleotide sequence of SEQ ID NO: 2095; a second human beta-globin intron region comprising the nucleotide sequence of SEQ ID NO: 2097; a human beta-globin exon region comprising the nucleotide sequence of SEQ ID NO: 2093; a heavy chain signal sequence comprising the nucleotide sequence of SEQ ID NO: 5032, a heavy chain variable region comprising the nucleotide sequence of SEQ ID NO: 5269, 6512, 6517, 6522, 6527, or 6532, and heavy chain constant region comprising the nucleotide sequence of SEQ ID NO: 5219; a furin cleavage site comprising the nucleotide sequence of SEQ ID NO: 1724; a T2A linker comprising the nucleotide sequence of SEQ ID NO: 1726; a light chain signal sequence comprising the nucleotide sequence of SEQ ID NO: 5159; a light chain variable region comprising the nucleotide sequence of SEQ ID NO: 5273, and light chain constant region comprising the nucleotide sequence of SEQ ID NO: 5221; a rabbit globin polyadenylation sequence comprising the nucleotide sequence of SEQ ID NO: 2122; and a 3′ ITR sequence region comprising the nucleotide sequence of SEQ ID NO: 2078; or a nucleotide sequence substantially identical (e.g., having at least 70%, 75%, 80%, 85%, 90%, 95%, 99% or 100%, sequence identity) to any of the aforesaid sequences. In some embodiments, disclosed herein is an antibody molecule encoded by the genetic element comprising the nucleotide sequence of SEQ ID NO: 5190 or a sequence substantially identical (e.g., having at least 70%, 75%, 80%, 85%, 90%, 95%, or 99% sequence identity) thereto. In some embodiments, the nucleotide sequence encoding the heavy chain constant region comprises a modification, e.g., a substitution, at position 897 (e.g., G897A), numbered according to 5219. In some embodiments, the nucleotide sequence encoding the heavy chain constant region comprises a G to A substitution at position 897 (G897A), numbered according to 5219. In some embodiments, the nucleotide sequence encoding the light chain variable region comprises a modification at position 69 (e.g., C69T), numbered according to SEQ ID NO: 5273. In some embodiments, the nucleotide sequence encoding the light chain variable region comprises a C to T substitution at position 69 (e.g., C69T), numbered according to SEQ ID NO: 5273.

[1247] In some embodiments, a genetic element comprising the sequence of SEQ ID NO: 5190, 6500, 6501, 6502, 6503, or a sequence substantially identical (e.g., having at least 70%, 75%, 80%, 85%, 90%, 95%, or 99% sequence identity) thereto, encodes an antibody molecule comprising a heavy chain variable region comprising a HC CDR1 amino acid sequence of SEQ ID NO: 5281, a HC CDR2 amino acid sequence of SEQ ID NO: 5282, and an HC CDR3 amino acid sequence of SEQ ID NO: 5283, 6510, 6515, 6520, 6525 or 6530; and a light chain variable region comprising an LC CDR1 amino acid sequence of SEQ ID NO: 5287, an LC CDR2 amino acid sequence of SEQ ID NO: 5288, and an LC CDR3 amino acid sequence of SEQ ID NO: 5289. In some embodiments, a genetic element comprising the sequence of SEQ ID NO: 5190, or a sequence substantially identical (e.g., having at least 70%, 75%, 80%, 85%, 90%, 95%, or 99% sequence identity) thereto, encodes an antibody molecule comprising a heavy chain variable region comprising a HC CDR1 amino acid sequence of SEQ ID NO: 5284, a HC CDR2 amino acid sequence of SEQ ID NO: 5285, and an HC CDR3 amino acid sequence of SEQ ID NO: 5286; and a light chain variable region comprising an LC CDR1 amino acid sequence of SEQ ID NO: 5290, an LC CDR2 amino acid sequence of SEQ ID NO: 5291, and an LC CDR3 amino acid sequence of SEQ ID NO: 5292.

[1248] In some embodiments, a genetic element comprising the sequence of SEQ ID NO: 5190, 6500, 6501, 6502, 6503, or a sequence substantially identical (e.g., having at least 70%, 75%, 80%, 85%, 90%, 95%, or 99% sequence identity) thereto, encodes an antibody molecule comprising a heavy chain variable region comprising the amino acid sequence of SEQ ID NO: 5270, 6511, 6516, 6521, 6526 or 6531 and/or a light chain variable region comprising the amino acid sequence of SEQ ID NO: 5274; or a sequence substantially identical (e.g., having at least 70%, 75%, 80%, 85%, 90%, 95%, or 99% sequence identity) to the any of the aforesaid sequences.

[1249] In some embodiments, a genetic element comprising the sequence of SEQ ID NO: 5190, 6500, 6501, 6502, 6503, or a sequence substantially identical (e.g., having at least 70%, 75%, 80%, 85%, 90%, 95%, or 99% sequence identity) to the any of the aforesaid sequences, encodes an antibody molecule comprising a heavy chain comprising the amino acid sequence of SEQ ID NO: 5272, 6513, 6518, 6523, 6528, 6533 and/or a light chain comprising the amino acid sequence of SEQ ID NO: 5276; or a sequence substantially identical (e.g., having at least 70%, 75%, 80%, 85%, 90%, 95%, or 99% sequence identity) to the any of the aforesaid sequences.

TABLE 25
Sequence Regions in ITR to ITR Sequences

| | HER-77 (SEQ ID NO: 5343) | | |
|---|---|---|---|
| Sequence | Region SEQ | Region | Position in SEQ |
| Regions | ID NO | length (nt) | ID NO: 5343 |
| 5′ ITR | 2076 | 130 | 1-130 |
| CB promoter | 2083 | 260 | 590-849 |
| Exon | 2090 | 134 | 877-1010 |
| Intron | 2095 | 32 | 1011-1042 |
| Intron | 2097 | 347 | 1043-1389 |
| Exon | 2093 | 53 | 1390-1442 |
| Signal | 5157 | 57 | 1467-1523 |
| VH | 5330 | 360 | 1524-1883 |
| Constant | 5344 | 990 | 1884-2873 |
| Linker | 1724 | 12 | 2874-2885 |
| Linker | 1726 | 54 | 2886-2939 |
| Signal | 5159 | 66 | 2940-3005 |
| VL | 5340 | 321 | 3006-3326 |
| Constant | 5346 | 321 | 3327-3647 |
| PolyA | 2122 | 127 | 3690-3816 |
| 3′ ITR | 2078 | 130 | 3860-3989 |

[1250] In some embodiments, the AAV particle comprises a genetic element comprising the nucleotide sequence of SEQ ID NO: 5346 (HER-77), or a nucleotide sequence substantially identical (e.g., having at least 70%, 75%, 80%, 85%, 90%, 95%, 99% or 100%, sequence identity) thereto. In some embodiments, the genetic element comprises the nucleotide sequence of SEQ ID NO: 5346, or a nucleotide sequence substantially identical (e.g., having at least 70%, 75%, 80%, 85%, 90%, 95%, 99% or 100%, sequence identity) thereto. In some embodiments, the genetic element comprising the nucleotide sequence of SEQ ID NO: 5346, comprises in 5′ to 3′ order: a 5′ inverted terminal repeat (ITR) sequence region comprising the nucleotide sequence of SEQ ID NO: 2076; a CB promoter comprising the nucleotide sequence of SEQ ID NO: 2083; an ie1 exon 1 region comprising the nucleotide sequence of SEQ ID NO: 2090; a human beta-globin intron region comprising the nucleotide sequence of SEQ ID NO: 2095; a second human beta-globin intron region comprising the nucleotide sequence of SEQ ID NO: 2097; a human beta-globin exon region comprising the nucleotide sequence of SEQ ID NO: 2093; a heavy chain signal sequence comprising the nucleotide sequence of SEQ ID NO: 5157, a heavy chain variable region comprising the nucleotide sequence of SEQ ID NO: 5330, and heavy chain constant region comprising the nucleotide sequence of SEQ ID NO: 5344; a furin cleavage site comprising the nucleotide sequence of SEQ ID NO: 1724; a T2A linker comprising the nucleotide sequence of SEQ ID NO: 1726; a light chain signal sequence comprising the nucleotide sequence of SEQ ID NO: 5340; a light chain variable region comprising the nucleotide sequence of SEQ ID NO: 5346, and light chain constant region comprising the nucleotide sequence of SEQ ID NO: 5221; a rabbit globin polyadenylation sequence comprising the nucleotide sequence of SEQ ID NO: 2122; and a 3′ ITR sequence region comprising the nucleotide sequence of SEQ ID NO: 2078; or a nucleotide sequence substantially identical (e.g., having at least 70%, 75%, 80%, 85%, 90%, 95%, 99% or 100%, sequence identity) to any of the aforesaid sequences. In some embodiments, disclosed herein is an antibody molecule encoded by the genetic element comprising the nucleotide sequence of SEQ ID NO: 5343 or a sequence substantially identical (e.g., having at least 70%, 75%, 80%, 85%, 90%, 95%, or 99% sequence identity) thereto.

[1251] In some embodiments, a genetic element comprising the sequence of SEQ ID NO: 5343, or a sequence substantially identical (e.g., having at least 70%, 75%, 80%, 85%, 90%, 95%, or 99% sequence identity) thereto, encodes an antibody molecule comprising a heavy chain variable region comprising a HC CDR1 amino acid sequence of SEQ ID NO: 5281, a HC CDR2 amino acid sequence of SEQ ID NO: 5282, and an HC CDR3 amino acid sequence of SEQ ID NO: 5283; and a light chain variable region comprising an LC CDR1 amino acid sequence of SEQ ID NO: 5287, an LC CDR2 amino acid sequence of SEQ ID NO: 5288, and an LC CDR3 amino acid sequence of SEQ ID NO: 5289. In some embodiments, a genetic element comprising the sequence of SEQ ID NO: 5343, or a sequence substantially identical (e.g., having at least 70%, 75%, 80%, 85%, 90%, 95%, or 99% sequence identity) thereto, encodes an antibody molecule comprising a heavy chain variable region comprising a HC CDR1 amino acid sequence of SEQ ID NO: 5284, a HC CDR2 amino acid sequence of SEQ ID NO: 5285, and an HC CDR3 amino acid sequence of SEQ ID NO: 5286; and a light chain variable region comprising an LC CDR1 amino acid sequence of SEQ ID NO: 5290, an LC CDR2 amino acid sequence of SEQ ID NO: 5291, and an LC CDR3 amino acid sequence of SEQ ID NO: 5292.

[1252] In some embodiments, a genetic element comprising the sequence of SEQ ID NO: 5343, or a sequence substantially identical (e.g., having at least 70%, 75%, 80%, 85%, 90%, 95%, or 99% sequence identity) thereto, encodes an antibody molecule comprising a heavy chain variable region comprising the amino acid sequence of SEQ ID NO: 5329 and/or a light chain variable region comprising the amino acid sequence of SEQ ID NO: 5339; or a sequence substantially identical (e.g., having at least 70%, 75%, 80%, 85%, 90%, 95%, or 99% sequence identity) to the any of the aforesaid sequences.

[1253] In some embodiments, a genetic element comprising the sequence of SEQ ID NO: 5343, or a sequence substantially identical (e.g., having at least 70%, 75%, 80%, 85%, 90%, 95%, or 99% sequence identity) to the any of the aforesaid sequences, encodes an antibody molecule comprising a heavy chain comprising the amino acid sequence of SEQ ID NO: 5331 and/or a light chain comprising the amino acid sequence of SEQ ID NO: 5341; or a sequence substantially identical (e.g., having at least 70%, 75%, 80%, 85%, 90%, 95%, or 99% sequence identity) to the any of the aforesaid sequences.

TABLE 26
Sequence Regions in ITR to ITR Sequences

| | HER-82 (SEQ ID NO: 5374) | | |
|---|---|---|---|
| | Region SEQ | Region | Position in SEQ |
| Sequence Regions | ID NO | length (nt) | ID NO: 5374 |
| 5′ ITR | 2076 | 130 | 1-130 |
| CB promoter | 2083 | 260 | 590-849 |
| Exon | 2090 | 134 | 877-1010 |
| Intron | 2095 | 32 | 1011-1042 |
| Intron | 2097 | 347 | 1043-1389 |
| Exon | 2093 | 53 | 1390-1442 |
| Signal | 5157 | 57 | 1467-1523 |
| VH | 5002 | 360 | 1524-1883 |
| Constant | 5017 | 990 | 1884-2873 |
| Linker | 1724 | 12 | 2874-2885 |
| Linker | 1726 | 54 | 2886-2939 |
| Signal | 5159 | 66 | 2940-3005 |
| DARPIN | 5371 | 471 | 3006-3476 |
| Linker | 5347 | 45 | 3477-3521 |
| VL | 5005 | 321 | 3522-3842 |
| Constant | 5007 | 321 | 3843-4163 |
| PolyA | 2122 | 127 | 4206-4332 |
| 3′ ITR | 2078 | 130 | 4376-4505 |

[1254] In some embodiments, the AAV particle comprises a genetic element comprising the nucleotide sequence of SEQ ID NO: 5374 (HER-82), or a nucleotide sequence substantially identical (e.g., having at least 70%, 75%, 80%, 85%, 90%, 95%, 99% or 100%, sequence identity) thereto. In some embodiments, the genetic element comprises the nucleotide sequence of SEQ ID NO: 5374, or a nucleotide sequence substantially identical (e.g., having at least 70%, 75%, 80%, 85%, 90%, 95%, 99% or 100%, sequence identity) thereto. In some embodiments, the genetic element comprising the nucleotide sequence of SEQ ID NO: 5374, comprises in 5′ to 3′ order: a 5′ inverted terminal repeat (ITR) sequence region comprising the nucleotide sequence of SEQ ID NO: 2076; a CB promoter comprising the nucleotide sequence of SEQ ID NO: 2083; an ie1 exon 1 region comprising the nucleotide sequence of SEQ ID NO: 2090; a human beta-globin intron region comprising the nucleotide sequence of SEQ ID NO: 2095; a second human beta-globin intron region comprising the nucleotide sequence of SEQ ID NO: 2097; a human beta-globin exon region comprising the nucleotide sequence of SEQ ID NO: 2093; a heavy chain signal sequence comprising the nucleotide sequence of SEQ ID NO: 5157, a heavy chain variable region comprising the nucleotide sequence of SEQ ID NO: 5002, a heavy chain constant region comprising the nucleotide sequence of SEQ ID NO: 5017; a furin cleavage site comprising the nucleotide sequence of SEQ ID NO: 1724; a T2A linker comprising the nucleotide sequence of SEQ ID NO: 1726; a light chain signal sequence comprising the nucleotide sequence of SEQ ID NO: 5159; a DARPIN molecule comprising the nucleotide sequence of SEQ ID NO: 5371; a linker region comprising the nucleotide sequence of SEQ ID NO: 5347; a light chain variable region comprising the nucleotide sequence of SEQ ID NO: 5005; a light chain constant region comprising the nucleotide sequence of SEQ ID NO: 5007; a rabbit globin polyadenylation sequence comprising the nucleotide sequence of SEQ ID NO: 2122; and a 3′ ITR sequence region comprising the nucleotide sequence of SEQ ID NO: 2078; or a nucleotide sequence substantially identical (e.g., having at least 70%, 75%, 80%, 85%, 90%, 95%, 99% or 100%, sequence identity) to any of the aforesaid sequences. In some embodiments, disclosed herein is an antibody molecule encoded by the genetic element comprising the nucleotide sequence of SEQ ID NO: 5374 or a sequence substantially identical (e.g., having at least 70%, 75%, 80%, 85%, 90%, 95%, or 99% sequence identity) thereto.

[1255] In some embodiments, a genetic element comprising the sequence of SEQ ID NO: 5374, or a sequence substantially identical (e.g., having at least 70%, 75%, 80%, 85%, 90%, 95%, or 99% sequence identity) thereto, encodes a multispecific, e.g., bispecific or biparatopic, antibody molecule, comprising a first antigen binding domain that binds domain IV of a HER2 antigen and a second antigen binding domain that binds domain I of a HER2 antigen. In some embodiments, the first antigen binding domain comprises a full antibody. In some embodiments, the second antigen binding domain comprises a DARPIN molecule. In some embodiments, the first antigen binding domain comprises a heavy chain variable region comprising a HC CDR1 amino acid sequence of SEQ ID NO: 5361, a HC CDR2 amino acid sequence of SEQ ID NO: 5362, and an HC CDR3 amino acid sequence of SEQ ID NO: 5363; and a light chain variable region comprising an LC CDR1 amino acid sequence of SEQ ID NO: 5317, an LC CDR2 amino acid sequence of SEQ ID NO: 5318, and an LC CDR3 amino acid sequence of SEQ ID NO: 5319. In some embodiments, the second antigen binding domain comprises the amino acid sequence of SEQ ID NO: 5370, or an amino acid sequence substantially identical (e.g., having at least 70%, 75%, 80%, 85%, 90%, 95%, or 99% sequence identity) thereto.

[1256] In some embodiments, a genetic element comprising the sequence of SEQ ID NO: 5374, or a sequence substantially identical (e.g., having at least 70%, 75%, 80%, 85%, 90%, 95%, or 99% sequence identity) thereto, encodes a multispecific antibody molecule, comprising: a first chain, comprising from the N-terminus to the C-terminus, an anti-HER2 VH comprising the amino sequence comprising the amino acid sequence of SEQ ID NO: 5001, and a heavy chain constant region comprising the amino acid sequence of SEQ ID NO: 5018; and a second chain, comprising from the N-terminus to the C-terminus, a DARPIN molecule comprising the amino acid sequence of SEQ ID NO: 5370, a (G4S)3 linker, an anti-HER2 VL comprising the amino acid sequence of SEQ ID NO: 5006, and a light chain constant region (CL) comprising the amino acid sequence of SEQ ID NO: 5008; or a sequence substantially identical (e.g., having at least 70%, 75%, 80%, 85%, 90%, 95%, or 99% sequence identity) to the any of the aforesaid sequences.

[1257] In some embodiments, a genetic element comprising the sequence of SEQ ID NO: 5374, or a sequence substantially identical (e.g., having at least 70%, 75%, 80%, 85%, 90%, 95%, or 99% sequence identity) thereto, encodes a multispecific antibody molecule, comprising a first chain comprising the amino acid sequence of SEQ ID NO: 5368; and a second chain comprising the amino acid sequence of SEQ ID NO: 5370, a (G4S)3 linker, and the amino acid sequence comprising of SEQ ID NO: 5063; or a sequence substantially identical (e.g., having at least 70%, 75%, 80%, 85%, 90%, 95%, or 99% sequence identity) to the any of the aforesaid sequences. In some embodiments, a genetic element comprising the sequence of SEQ ID NO: 5374, or a sequence substantially identical (e.g., having at least 70%, 75%, 80%, 85%, 90%, 95%, or 99% sequence identity) thereto, encodes a multispecific antibody molecule, comprising a first chain comprising the amino acid sequence of SEQ ID NO: 5368, and a second chain comprising the amino acid sequence of SEQ ID NO: 5372; or a sequence substantially identical (e.g., having at least 70%, 75%, 80%, 85%, 90%, 95%, or 99% sequence identity) to the any of the aforesaid sequences.

TABLE 27
Sequence Regions in ITR to ITR Sequences

| | HER-78 (SEQ ID NO: 5375) | | |
|---|---|---|---|
| | Region SEQ | Region | Position in SEQ |
| Sequence Regions | ID NO | length (nt) | ID NO: 5375 |
| 5′ ITR | 2076 | 130 | 1-130 |
| CB promoter | 2083 | 260 | 590-849 |
| Exon | 2090 | 134 | 877-1010 |
| Intron | 2095 | 32 | 1011-1042 |
| Intron | 2097 | 347 | 1043-1389 |
| Exon | 2093 | 53 | 1390-1442 |
| Signal | 5157 | 57 | 1467-1523 |
| VH | 5261 | 360 | 1524-1883 |
| Constant | 5219 | 990 | 1884-2873 |
| Linker | 1724 | 12 | 2874-2885 |
| Linker | 1726 | 54 | 2886-2939 |
| Signal | 5159 | 66 | 2940-3005 |
| VH | 5289 | 360 | 3006-3365 |
| Linker | 5347 | 45 | 3366-3410 |
| VL | 5265 | 321 | 3411-3731 |
| Linker | 5243 | 6 | 3732-3737 |
| VL | 5353 | 339 | 3738-4076 |
| Constant | 5217 | 321 | 4077-4397 |
| PolyA | 2122 | 127 | 4440-4566 |
| 3′ ITR | 2078 | 130 | 4610-4739 |

[1258] In some embodiments, the AAV particle comprises a genetic element comprising the nucleotide sequence of SEQ ID NO: 5375 (HER-78), 6505 (HER-97), 6506 (HER-98), 6507 (HER-99), 6508 (HER-100), 6509 (HER-101), or a nucleotide sequence substantially identical (e.g., having at least 70%, 75%, 80%, 85%, 90%, 95%, 99% or 100%, sequence identity) thereto. In some embodiments, the genetic element comprises the nucleotide sequence of SEQ ID NO: 5375, 6505, 6506, 6507, 6508, 6509, or a nucleotide sequence substantially identical (e.g., having at least 70%, 75%, 80%, 85%, 90%, 95%, 99% or 100%, sequence identity) thereto. In some embodiments, the genetic element comprising the nucleotide sequence of SEQ ID NO: 5375, 6505, 6506, 6507, 6508, or 6509, comprises in 5′ to 3′ order: a 5′ inverted terminal repeat (ITR) sequence region comprising the nucleotide sequence of SEQ ID NO: 2076; a CB promoter comprising the nucleotide sequence of SEQ ID NO: 2083; an ie1 exon 1 region comprising the nucleotide sequence of SEQ ID NO: 2090; a human beta-globin intron region comprising the nucleotide sequence of SEQ ID NO: 2095; a second human beta-globin intron region comprising the nucleotide sequence of SEQ ID NO: 2097; a human beta-globin exon region comprising the nucleotide sequence of SEQ ID NO: 2093; a heavy chain signal sequence comprising the nucleotide sequence of SEQ ID NO: 5157, a heavy chain variable region comprising the nucleotide sequence of SEQ ID NO: 5261, a heavy chain constant region comprising the nucleotide sequence of SEQ ID NO: 5219; a furin cleavage site comprising the nucleotide sequence of SEQ ID NO: 1724; a T2A linker comprising the nucleotide sequence of SEQ ID NO: 1726; a light chain signal sequence comprising the nucleotide sequence of SEQ ID NO: 5159; a heavy chain variable region comprising the nucleotide sequence of SEQ ID NO: 5289, 6537, 6540, 6543, 6546, or 6549, a linker region comprising the nucleotide sequence of SEQ ID NO: 5347, and a light chain variable region comprising the nucleotide sequence of SEQ ID NO: 5265; a linker comprising the nucleotide sequence of SEQ ID NO: 5243; a light chain variable region comprising the nucleotide sequence of SEQ ID NO: 5353, and a light chain constant region comprising the nucleotide sequence of SEQ ID NO: 5217; a rabbit globin polyadenylation sequence comprising the nucleotide sequence of SEQ ID NO: 2122; and a 3′ ITR sequence region comprising the nucleotide sequence of SEQ ID NO: 2078; or a nucleotide sequence substantially identical (e.g., having at least 70%, 75%, 80%, 85%, 90%, 95%, 99% or 100%, sequence identity) to any of the aforesaid sequences. In some embodiments, disclosed herein is an antibody molecule encoded by the genetic element comprising the nucleotide sequence of SEQ ID NO: 5375, 6505, 6506, 6507, 6508, 6509, or a sequence substantially identical (e.g., having at least 70%, 75%, 80%, 85%, 90%, 95%, or 99% sequence identity) thereto.

[1259] In some embodiments, a genetic element comprising the sequence of SEQ ID NO: 5375, 6505, 6506, 6507, 6508, 6509, or a sequence substantially identical (e.g., having at least 70%, 75%, 80%, 85%, 90%, 95%, or 99% sequence identity) thereto, encodes a multispecific, e.g., bispecific or biparatopic, antibody molecule, comprising a first antigen binding domain that binds domain I of a HER2 antigen and a second antigen binding domain that binds domain IV of a HER2 antigen. In some embodiments, the first antigen binding domain comprises a full antibody. In some embodiments, the second antigen binding domain comprises an scFv. In some embodiments, the first antigen binding domain comprises a heavy chain variable region comprising a HC CDR1 amino acid sequence of SEQ ID NO: 5358, a HC CDR2 amino acid sequence of SEQ ID NO: 5359, and an HC CDR3 amino acid sequence of SEQ ID NO: 5360, 6535, 6538, 6541, 6544, or 6547; and a light chain variable region comprising an LC CDR1 amino acid sequence of SEQ ID NO: 5355, an LC CDR2 amino acid sequence of SEQ ID NO: 5356, and an LC CDR3 amino acid sequence of SEQ ID NO: 5357. In some embodiments, the second antigen binding domain comprises a HC CDR1 amino acid sequence of SEQ ID NO: 5361, a HC CDR2 amino acid sequence of SEQ ID NO: 5362, and an HC CDR3 amino acid sequence of SEQ ID NO: 5363; and a light chain variable region comprising an LC CDR1 amino acid sequence of SEQ ID NO: 5317, an LC CDR2 amino acid sequence of SEQ ID NO: 5318, and an LC CDR3 amino acid sequence of SEQ ID NO: 5319.

[1260] In some embodiments, a genetic element comprising the sequence of SEQ ID NO: 5375, 6505, 6506, 6507, 6508, 6509, or a sequence substantially identical (e.g., having at least 70%, 75%, 80%, 85%, 90%, 95%, or 99% sequence identity) thereto, encodes a multispecific antibody molecule comprising a first chain, which comprises, from the N-terminus to the C-terminus, a first anti-HER2 VH comprising the amino acid sequence of SEQ ID NO: 5262, and a heavy chain constant region comprising the amino acid sequence of SEQ ID NO: 5220; and a second chain, which comprises from the N-terminus to the C-terminus, a second anti-HER2 VH comprising the amino sequence of SEQ ID NO: 5290, 6536, 6539, 6542, 6545, or 6548, a (G4S)3 linker, a first anti-HER2 VL comprising the amino acid sequence of SEQ ID NO: 5266, a (GS) linker, a second anti-HER2 VL comprising the amino acid sequence of SEQ ID NO: 5354, and a light chain constant region (CL) comprising the amino acid sequence of SEQ ID NO: 5218; or a sequence substantially identical (e.g., having at least 70%, 75%, 80%, 85%, 90%, 95%, or 99% sequence identity) to the any of the aforesaid sequences.

[1261] In some embodiments, a genetic element comprising the sequence of SEQ ID NO: 5375, or a sequence substantially identical (e.g., having at least 70%, 75%, 80%, 85%, 90%, 95%, or 99% sequence identity) thereto, encodes a multispecific antibody molecule comprising a first chain comprising a heavy chain comprising the amino acid sequence of SEQ ID NO: 5376; and a second chain comprising an scFv comprising the amino acid sequence of SEQ ID NO: 5351, fused to a light chain comprising the amino acid sequence of SEQ ID NO: 5268; or a sequence substantially identical (e.g., having at least 70%, 75%, 80%, 85%, 90%, 95%, or 99% sequence identity) to the any of the aforesaid sequences. In some embodiments, a genetic element comprising the sequence of SEQ ID NO: 5375, or a sequence substantially identical (e.g., having at least 70%, 75%, 80%, 85%, 90%, 95%, or 99% sequence identity) thereto, encodes a multispecific antibody molecule comprising a first chain comprising the amino acid sequence of SEQ ID NO: 5376, or an amino acid sequence substantially identical (e.g., having at least 70%, 75%, 80%, 85%, 90%, 95%, or 99% sequence identity) thereto; and/or a second chain comprising the amino acid sequence of SEQ ID NO: 5365, or an amino acid sequence substantially identical (e.g., having at least 70%, 75%, 80%, 85%, 90%, 95%, or 99% sequence identity) thereto.

[1262] In some embodiment, the AAV particle comprises an AAV vector comprising a genetic element comprising the nucleotide sequence of any of the genetic elements described herein, e.g., as described in Tables 15-27, or a nucleotide sequence substantially identical (e.g., having at least about 70%, 75%, 80%, 85%, 90%, 92%, 95%, 97%, 98%, or 99% sequence identity). In some embodiments, the AAV vector further comprises a nucleotide sequence encoding a capsid protein, e.g., a structural protein. In some embodiments, the capsid protein comprises a VP1 polypeptide, a VP2 polypeptide, and/or a VP3 polypeptide. In some embodiments, the VP1 polypeptide, the VP2 polypeptide, and/or the VP3 polypeptide are encoded by at least one Cap gene. In some embodiments, the AAV vector further encodes a Rep protein, e.g., a non-structural protein. In some embodiments, the Rep protein comprises a Rep78 protein, a Rep68, Rep52 protein, and/or a Rep40 protein. In some embodiments, the Rep78 protein, the Rep68 protein, the Rep52 protein, and/or the Rep40 protein are encoded by at least one Rep gene.

[1263] In some embodiment, the AAV particle comprising a genetic element comprising the nucleotide sequence of any of the genetic elements described herein, e.g., as described in Tables 15-28, or a nucleotide sequence substantially identical (e.g., having at least about 70%, 75%, 80%, 85%, 90%, 92%, 95%, 97%, 98%, or 99% sequence identity) to any of the aforesaid sequences comprises, e.g., is packaged in, an AAV capsid polypeptide, e.g., an AAV capsid variant provided in any of Tables 1 or 3-5. For example, the AAV capsid polypeptide, e.g., AAV capsid variant comprises a VOY101 capsid polypeptide, a VOY9P39 capsid polypeptide, a VOY9P33 capsid polypeptide, a AAVPHP.B (PHP.B) capsid polypeptide, a AAVPHP.N (PHP.N) capsid polypeptide, an AAV1 capsid polypeptide, an AAV2 capsid polypeptide, an AAVS capsid polypeptide, an AAV9 capsid polypeptide, an AAV9 K449R capsid polypeptide, an AAVrh10 capsid polypeptide, or a functional variant thereof.

[1264] In some embodiments, the AAV particle comprising a genetic element comprising the nucleotide sequence of any of the genetic elements described herein, e.g., as described in Tables 15-27, or a nucleotide sequence substantially identical (e.g., having at least about 70%, 75%, 80%, 85%, 90%, 92%, 95%, 97%, 98%, or 99% sequence identity) to any of the aforesaid sequences comprises a VOY101 capsid polypeptide or functional variant thereof. In some embodiments, the AAV particle comprising a genetic element comprising the nucleotide sequence of any of the genetic elements described herein, e.g., as described in Tables 15-28, or a nucleotide sequence substantially identical (e.g., having at least about 70%, 75%, 80%, 85%, 90%, 92%, 95%, 97%, 98%, or 99% sequence identity) to any of the aforesaid sequences comprises an AAV capsid polypeptide, e.g., an AAV capsid variant, comprising the amino acid sequence of SEQ ID NO: 1, or an amino acid sequence substantially identical (e.g., having at least 70%, 75%, 80%, 85%, 90%, 95% or 99%) thereto. In some embodiments, the AAV particle comprising a genetic element comprising the nucleotide sequence of any of the genetic elements described herein, e.g., as described in Tables 15-28, or a nucleotide sequence substantially identical (e.g., having at least about 70%, 75%, 80%, 85%, 90%, 92%, 95%, 97%, 98%, or 99% sequence identity) to any of the aforesaid sequences comprises an AAV capsid polypeptide, e.g., an AAV capsid variant, comprising an amino acid sequence having at least one, two or three modifications, but not more than 30, 20 or 10 modifications of the amino acid sequence of SEQ ID NO: 1.

[1265] In some embodiments, the AAV particle comprising a genetic element comprising the nucleotide sequence of any of the genetic elements described herein, e.g., as described in Tables 15-28, or a nucleotide sequence substantially identical (e.g., having at least about 70%, 75%, 80%, 85%, 90%, 92%, 95%, 97%, 98%, or 99% sequence identity) to any of the aforesaid sequences comprises an AAV capsid polypeptide, e.g., an AAV capsid variant, comprising the amino acid sequence of SEQ ID NO: 138, or a sequence substantially identical (e.g., having at least about 70%, 75%, 80%, 85%, 90%, 92%, 95%, 97%, 98%, or 99% sequence identity) thereto. In some embodiments, the AAV particle comprising a genetic element comprising the nucleotide sequence of any of the genetic elements described herein, e.g., as described in Tables 15-28, or a nucleotide sequence substantially identical (e.g., having at least about 70%, 75%, 80%, 85%, 90%, 92%, 95%, 97%, 98%, or 99% sequence identity) to any of the aforesaid sequences comprises an AAV capsid polypeptide, e.g., an AAV capsid variant, comprising an amino acid sequence having at least one, two or three modifications, but not more than 30, 20 or 10 modifications of the amino acid sequence of SEQ ID NO: 138. In some embodiments, the AAV particle comprising a genetic element comprising the nucleotide sequence of any of the genetic elements described herein, e.g., as described in Tables 15-28, or a nucleotide sequence substantially identical (e.g., having at least about 70%, 75%, 80%, 85%, 90%, 92%, 95%, 97%, 98%, or 99% sequence identity) to any of the aforesaid sequences comprises an AAV capsid polypeptide, e.g., an AAV capsid variant, encoded by the nucleotide sequence of SEQ ID NO: 137, or a nucleotide sequence substantially identical (e.g., having at least 70%, 75%, 80%, 85%, 90%, 95% or 99%) thereto. In some embodiments, the capsid protein comprises an amino acid substitution at position K449, e.g., a K449R substitution, numbered according to SEQ ID NO:138. In some embodiments, the capsid protein comprises an insert comprising the amino acid sequence of TLAVPFK (SEQ ID NO: 1262), wherein the insert is present immediately subsequent to position 588, relative to a reference sequence numbered according to SEQ ID NO:138. In some embodiments, the capsid protein comprises an amino acid other than “A” at position 587 and/or an amino acid other than “Q” at position 588, numbered according to SEQ ID NO:138. In some embodiments, the capsid protein comprises the amino acid substitution of A587D and/or Q588G, numbered according to SEQ ID NO:138.

[1266] In some embodiments, the AAV particle comprising a genetic element comprising the nucleotide sequence of any of the genetic elements described herein, e.g., as described in Tables 15-28, or a nucleotide sequence substantially identical (e.g., having at least about 70%, 75%, 80%, 85%, 90%, 92%, 95%, 97%, 98%, or 99% sequence identity) to any of the aforesaid sequences comprises an AAV capsid polypeptide, e.g., an AAV capsid variant, comprising the amino acid sequence of SEQ ID NO: 12, or a sequence substantially identical (e.g., having at least about 70%, 75%, 80%, 85%, 90%, 92%, 95%, 97%, 98%, or 99% sequence identity) thereto. In some embodiments, the AAV particle comprising a genetic element comprising the nucleotide sequence of any of the genetic elements described herein, e.g., as described in Tables 15-28, or a nucleotide sequence substantially identical (e.g., having at least about 70%, 75%, 80%, 85%, 90%, 92%, 95%, 97%, 98%, or 99% sequence identity) to any of the aforesaid sequences comprises an AAV capsid polypeptide, e.g., an AAV capsid variant, comprising an amino acid sequence having at least one, two or three modifications, but not more than 30, 20 or 10 modifications of the amino acid sequence of SEQ ID NO: 12.

[1267] In some embodiments, the AAV particle comprising a genetic element comprising the nucleotide sequence of any of the genetic elements described herein, e.g., as described in Tables 15-28, or a nucleotide sequence substantially identical (e.g., having at least about 70%, 75%, 80%, 85%, 90%, 92%, 95%, 97%, 98%, or 99% sequence identity) to any of the aforesaid sequences comprises an AAV capsid polypeptide, e.g., an AAV capsid variant, comprising the amino acid sequence of SEQ ID NO: 14, or a sequence substantially identical (e.g., having at least about 70%, 75%, 80%, 85%, 90%, 92%, 95%, 97%, 98%, or 99% sequence identity) thereto. In some embodiments, the AAV particle comprising a genetic element comprising the nucleotide sequence of any of the genetic elements described herein, e.g., as described in Tables 15-28, or a nucleotide sequence substantially identical (e.g., having at least about 70%, 75%, 80%, 85%, 90%, 92%, 95%, 97%, 98%, or 99% sequence identity) to any of the aforesaid sequences comprises an AAV capsid polypeptide, e.g., an AAV capsid variant, comprising an amino acid sequence having at least one, two or three modifications, but not more than 30, 20 or 10 modifications of the amino acid sequence of SEQ ID NO: 14.

[1268] In some embodiments, the AAV particle comprising a genetic element comprising the nucleotide sequence of any of the genetic elements described herein, e.g., as described in Tables 15-28, or a nucleotide sequence substantially identical (e.g., having at least about 70%, 75%, 80%, 85%, 90%, 92%, 95%, 97%, 98%, or 99% sequence identity) to any of the aforesaid sequences comprises an AAV capsid polypeptide, e.g., an AAV capsid variant, comprising the amino acid sequence of any one of SEQ ID NOs: 3636-3647, or an amino acid sequence with at least 80% (e.g., at least about 85, 90, 95, 96, 97, 98, or 99%) sequence identity thereto.

[1269] In some embodiments, the AAV particle comprising a genetic element comprising the nucleotide sequence of any of the genetic elements described herein, e.g., as described in Tables 15-28, or a nucleotide sequence substantially identical (e.g., having at least about 70%, 75%, 80%, 85%, 90%, 92%, 95%, 97%, 98%, or 99% sequence identity) to any of the aforesaid sequences comprises an AAV capsid polypeptide, e.g., an AAV capsid variant, comprising the amino acid sequence of SEQ ID NO: 3636, or an amino acid sequence with at least 80% (e.g., at least about 85, 90, 95, 96, 97, 98, or 99%) sequence identity thereto.

[1270] In some embodiments, the AAV particle comprises a genetic element comprising a nucleotide sequence encoding one or more antibodies directed against HER2 or its ligands. Exemplary HER2 antibodies and target ligands have been described in Hudziak et al., Mol. Cell. Biol. 9(3):1165-1172 (1989); Tagliabue et al. Int. J. Cancer 47:933-937 (1991); McKenzie et al. Oncogene 4:543-548 (1989); Maier et al. Cancer Res. 51:5361-5369 (1991); Bacus et al. Molecular Carcinogenesis 3:350-362 (1990); Stancovski et al. PNAS (USA) 88:8691-8695 (1991); Bacus et al. Cancer Research 52:2580-2589 (1992); Xu et al. Int. J. Cancer 53:401-408 (1993); WO94/00136; Kasprzyk et al. Cancer Research 52:2771-2776 (1992); Hancock et al. Cancer Res. 51:4575-4580 (1991); Shawver et al. Cancer Res. 54:1367-1373 (1994); Arteaga et al. Cancer Res. 54:3758-3765 (1994); Harwerth et al. J. Biol. Chem. 267:15160-15167 (1992); U.S. Pat. No. 5,783,186; Klapper et al. Oncogene 14:2099-2109 (1997); WO 98/17797; and U.S. Pat. No. 5,783,186. In one embodiment, the payload region of the AAV particle comprises one or more nucleic acid sequences encoding one or more of the payload antibody polypeptides related to HER2 listed in Table 28 (APA1-APA236; SEQ ID NO: 6000-6235). Exemplary additional payloads related to HER2 are disclosed in Table 28. The antibody sequences for each of these antibodies are disclosed in the reference information column of Table 28, the contents of each are incorporated herein in their entirety.

TABLE 28
Additional Payload Antibodies Related to HER2

| Antibody | Target | Description | | SEQ ID |
|---|---|---|---|---|
| No. | No | No. | Reference Information | NO |
| APA1 | 1 | 1 | U.S. Pat. No. 8,802,093 SEQ ID NO: 11 | 6000 |
| APA2 | 1 | 1 | WO2013096812 SEQ ID NO: 8 | 6001 |
| APA3 | 1 | 3 | U.S. Pat. No. 5,720,954; U.S. Pat. No. 5,770,195; | 6002 |
| | | | U.S. Pat. No. 5,772,997; U.S. Pat. No. 6,165,464; | |
| | | | U.S. Pat. No. 6,387,371; U.S. Pat. No. 6,399,063 | |
| APA4 | 1 | 5 | U.S. Pat. No. 8,557,243 | 6003 |
| APA5 | 1 | 6 | U.S. Pat. No. 8,557,243 | 6004 |
| APA6 | 1 | 7 | U.S. Pat. No. 8,557,243 | 6005 |
| APA7 | 1 | 2 | U.S. Pat. No. 8,557,243 | 6006 |
| APA8 | 1 | 8 | U.S. Pat. No. 5,720,954; U.S. Pat. No. 5,770,195; | 6007 |
| | | | U.S. Pat. No. 5,772,997; U.S. Pat. No. 6,165,464; | |
| | | | U.S. Pat. No. 6,387,371; U.S. Pat. No. 6,399,063 | |
| APA9 | 1 | 9 | U.S. Pat. No. 5,720,954; U.S. Pat. No. 5,770,195; | 6008 |
| | | | U.S. Pat. No. 5,772,997; U.S. Pat. No. 6,165,464; | |
| | | | U.S. Pat. No. 6,387,371; U.S. Pat. No. 6,399.063 | |
| APA10 | 1 | 10 | U.S. Pat. No. 8,802,093 SEQ ID NO: 2 | 6009 |
| APA11 | 1 | 10 | WO2013096812 SEQ ID NO: 7 | 6010 |
| APA12 | 1 | 12 | U.S. Pat. No. 5,720,954; U.S. Pat. No. 5,770,195; | 6011 |
| | | | U.S. Pat. No. 5,772,997; U.S. Pat. No. 6,165,464; | |
| | | | U.S. Pat. No. 6,387,371; U.S. Pat. No. 6,399,063 | |
| APA13 | 1 | 12 | U.S. Pat. No. 5,720,954; U.S. Pat. No. 5,770,195; | 6012 |
| | | | U.S. Pat. No. 5,772,997; U.S. Pat. No. 6,165,464; | |
| | | | U.S. Pat. No. 6,387,371; U.S. Pat. No. 6,399,063 | |
| APA14 | 1 | 13 | U.S. Pat. No. 5,720,954; U.S. Pat. No. 5,770,195; | 6013 |
| | | | U.S. Pat. No. 5,772,997; U.S. Pat. No. 6,165,464; | |
| | | | U.S. Pat. No. 6,387,371; U.S. Pat. No. 6,399,063 | |
| APA15 | 1 | 11 | U.S. Pat. No. 8,557,243 | 6014 |
| APA16 | 1 | 14 | U.S. Pat. No. 8,557,243 | 6015 |
| APA17 | 1 | 15 | U.S. Pat. No. 8,557,243 | 6016 |
| APA18 | 1 | 16 | U.S. Pat. No. 8,557,243 | 6017 |
| APA19 | 1 | 1 | US20130089544 SEQ ID NO: 54 | 6018 |
| APA20 | 1 | 1 | US20130089544 SEQ ID NO: 56 | 6019 |
| APA21 | 1 | 1 | US20130089544 SEQ ID NO: 57 | 6020 |
| APA22 | 1 | 1 | US20130089544 SEQ ID NO: 58 | 6021 |
| APA23 | 1 | 1 | US20130089544 SEQ ID NO: 59 | 6022 |
| APA24 | 1 | 1 | US20130266564 SEQ ID NO: 10 | 6023 |
| APA25 | 1 | 1 | US20130266564 SEQ ID NO: 20 | 6024 |
| APA26 | 1 | 1 | US20130266564 SEQ ID NO: 25 | 6025 |
| APA27 | 1 | 1 | US20130266564 SEQ ID NO: 26 | 6026 |
| APA28 | 1 | 1 | US20140010814 SEQ ID NO: 25 | 6027 |
| APA29 | 1 | 1 | US20140010814 SEQ ID NO: 37 | 6028 |
| APA30 | 1 | 1 | US20140010814 SEQ ID NO: 39 | 6029 |
| APA31 | 2 | 1 | US20100136033 SEQ ID NO: 3; | 6030 |
| | | | US20110129464 SEQ ID NO: 6 | |
| APA32 | 2 | 4 | US20160053011 SEQ ID NO: 14 | 6031 |
| APA33 | 1 | 2 | US20110129464 SEQ ID NO: 2 | 6032 |
| APA34 | 1 | 2 | US20130089544 SEQ ID NO: 2 | 6033 |
| APA35 | 1 | 2 | US20130089544 SEQ ID NO: 6 | 6034 |
| APA36 | 1 | 2 | US20130089544 SEQ ID NO: 10 | 6035 |
| APA37 | 1 | 2 | US20130089544 SEQ ID NO: 14, | 6036 |
| | | | 18, 22, 34, 38 | |
| APA38 | 1 | 2 | US20130089544 SEQ ID NO: 26 | 6037 |
| APA39 | 1 | 2 | US20130089544 SEQ ID NO: 30 | 6038 |
| APA40 | 1 | 2 | US20130089544 SEQ ID NO: 42 | 6039 |
| APA41 | 1 | 2 | US20130089544 SEQ ID NO: 4 | 6040 |
| APA42 | 1 | 2 | US20130266564 SEQ ID NO: 8 | 6041 |
| APA43 | 2 | 2 | US20160089435 SEQ ID NO: 42 | 6042 |
| APA44 | 2 | 2 | US20080226659 SEQ ID NO: 1; | 6043 |
| | | | US20090226455 SEQ ID NO: 2; | |
| | | | US20100136033 SEQ ID NO: 1 | |
| APA45 | 2 | 2 | US20080226659 SEQ ID NO: 2; | 6044 |
| | | | US20090226455 SEQ ID NO: 4; | |
| | | | US20100136033 SEQ ID NO: 2; | |
| | | | US20110129464 SEQ ID NO: 4 | |
| APA46 | 2 | 2 | US20130171148 SEQ ID NO: 1 | 6045 |
| APA47 | 2 | 2 | US20130171148 SEQ ID NO: 8 | 6046 |
| APA48 | 2 | 2 | US20130171148 SEQ ID NO: 15 | 6047 |
| APA49 | 2 | 2 | US20130171148 SEQ ID NO: 22 | 6048 |
| APA50 | 2 | 2 | US20130171148 SEQ ID NO: 29 | 6049 |
| APA51 | 2 | 2 | US20130171148 SEQ ID NO: 36 | 6050 |
| APA52 | 2 | 2 | US20130171148 SEQ ID NO: 43 | 6051 |
| APA53 | 2 | 2 | US20130171148 SEQ ID NO: 45 | 6052 |
| APA54 | 2 | 2 | US20130171148 SEQ ID NO: 47 | 6053 |
| APA55 | 2 | 2 | US20130171148 SEQ ID NO: 49 | 6054 |
| APA56 | 2 | 2 | US20130171148 SEQ ID NO: 51 | 6055 |
| APA57 | 2 | 2 | US20130171148 SEQ ID NO: 53 | 6056 |
| APA58 | 2 | 2 | US20130171148 SEQ ID NO: 55 | 6057 |
| APA59 | 2 | 2 | US20130189271 SEQ ID NO: 1, | 6058 |
| | | | 85 | |
| APA60 | 2 | 2 | US20130189271 SEQ ID NO: 8 | 6059 |
| APA61 | 2 | 2 | US20130189271 SEQ ID NO: 15 | 6060 |
| APA62 | 2 | 2 | US20130189271 SEQ ID NO: 22 | 6061 |
| APA63 | 2 | 2 | US20130189271 SEQ ID NO: 35 | 6062 |
| APA64 | 2 | 2 | US20130189271 SEQ ID NO: 42 | 6063 |
| APA65 | 2 | 2 | US20130189271 SEQ ID NO: 49 | 6064 |
| APA66 | 2 | 2 | US20130189271 SEQ ID NO: 63 | 6065 |
| APA67 | 2 | 2 | US20130189271 SEQ ID NO: 70 | 6066 |
| APA68 | 2 | 2 | US20130189271 SEQ ID NO: 77, | 6067 |
| | | | 79 | |
| APA69 | 2 | 2 | US20130189271 SEQ ID NO: 81 | 6068 |
| APA70 | 2 | 2 | US20130189271 SEQ ID NO: 83 | 6069 |
| APA71 | 2 | 2 | US20130189271 SEQ ID NO: 87 | 6070 |
| APA72 | 2 | 2 | US20130189271 SEQ ID NO: 89 | 6071 |
| APA73 | 2 | 2 | US20130189271 SEQ ID NO: 91 | 6072 |
| APA74 | 2 | 2 | US20130189271 SEQ ID NO: 93 | 6073 |
| APA75 | 2 | 2 | US20130189271 SEQ ID NO: 95 | 6074 |
| APA76 | 2 | 2 | US20130189271 SEQ ID NO: 97 | 6075 |
| APA77 | 2 | 2 | US20130189271 SEQ ID NO: 99 | 6076 |
| APA78 | 2 | 2 | US20130189271 SEQ ID NO: 101 | 6077 |
| APA79 | 2 | 2 | US20130189271 SEQ ID NO: 103 | 6078 |
| APA80 | 2 | 2 | US20130189271 SEQ ID NO: 105 | 6079 |
| APA81 | 2 | 2 | US20130189271 SEQ ID NO: 29, | 6080 |
| | | | 107 | |
| APA82 | 2 | 2 | US20130189271 SEQ ID NO: 56, | 6081 |
| | | | 109 | |
| APA83 | 2 | 2 | US20130189271 SEQ ID NO: 111 | 6082 |
| APA84 | 2 | 2 | US20130189271 SEQ ID NO: 113 | 6083 |
| APA85 | 2 | 2 | US20130189271 SEQ ID NO: 115 | 6084 |
| APA86 | 2 | 2 | US20130189271 SEQ ID NO: 117 | 6085 |
| APA87 | 2 | 2 | US20130189271 SEQ ID NO: 119 | 6086 |
| APA88 | 2 | 2 | US20130189271 SEQ ID NO: 121 | 6087 |
| APA89 | 2 | 2 | US20130189271 SEQ ID NO: 123 | 6088 |
| APA90 | 2 | 2 | US20130189271 SEQ ID NO: 125 | 6089 |
| APA91 | 2 | 2 | US20140356366 SEQ ID NO: 114 | 6090 |
| APA92 | 2 | 2 | US20150322162 SEQ ID NO: 132 | 6091 |
| APA93 | 2 | 2 | US20150322162 SEQ ID NO: 133 | 6092 |
| APA94 | 2 | 2 | US20150322162 SEQ ID NO: 134 | 6093 |
| APA95 | 2 | 2 | US20150322162 SEQ ID NO: 135 | 6094 |
| APA96 | 2 | 2 | US20150322162 SEQ ID NO: 136 | 6095 |
| APA97 | 2 | 2 | US20160053011 SEQ ID NO: 8 | 6096 |
| APA98 | 2 | 2 | US20160053011 SEQ ID NO: 24 | 6097 |
| APA99 | 2 | 2 | U.S. Pat. No. 8,609,095 SEQ ID NO: 2; | 6098 |
| | | | US20160089435 SEQ ID NO: 38 | |
| APA100 | 2 | 2 | U.S. Pat. No. 8,609,095 SEQ ID NO: 10 | 6099 |
| APA101 | 2 | 2 | U.S. Pat. No. 8,609,095 SEQ ID NO: 14; | 6100 |
| | | | US20160089435 SEQ ID NO: 26 | |
| APA102 | 2 | 2 | U.S. Pat. No. 8,609,095 SEQ ID NO: 18 | 6101 |
| APA103 | 2 | 2 | U.S. Pat. No. 8,609,095 SEQ ID NO: 30 | 6102 |
| APA104 | 2 | 2 | U.S. Pat. No. 8,609,095 SEQ ID NO: 34 | 6103 |
| APA105 | 2 | 2 | U.S. Pat. No. 8,609,095 SEQ ID NO: 38 | 6104 |
| APA106 | 2 | 2 | US20140356366 SEQ ID NO: 115; | 6105 |
| | | | US20150104443 SEQ ID NO: 1 | |
| APA107 | 1 | 10 | US20130089544 SEQ ID NO: 50 | 6106 |
| APA108 | 1 | 10 | US20130089544 SEQ ID NO: 51 | 6107 |
| APA109 | 1 | 10 | US20130089544 SEQ ID NO: 52 | 6108 |
| APA110 | 1 | 10 | US20130089544 SEQ ID NO: 53 | 6109 |
| APA111 | 1 | 10 | US20130266564 SEQ ID NO: 9 | 6110 |
| APA112 | 1 | 10 | US20130266564 SEQ ID NO: 19 | 6111 |
| APA113 | 1 | 10 | US20130266564 SEQ ID NO: 21 | 6112 |
| APA114 | 1 | 10 | US20130266564 SEQ ID NO: 22 | 6113 |
| APA115 | 1 | 10 | US20130266564 SEQ ID NO: 23 | 6114 |
| APA116 | 1 | 10 | US20130266564 SEQ ID NO: 24 | 6115 |
| APA117 | 1 | 10 | US20140010814 SEQ ID NO: 17 | 6116 |
| APA118 | 2 | 10 | U.S. Pat. No. 8,609,095 SEQ ID NO: 8; | 6117 |
| | | | US20160089435 SEQ ID NO: 44 | |
| APA119 | 2 | 10 | U.S. Pat. No. 8,609,095 SEQ ID NO: 4; | 6118 |
| | | | US20160089435 SEQ ID NO: 40 | |
| APA120 | 2 | 10 | U.S. Pat. No. 8,609,095 SEQ ID NO: 12 | 6119 |
| APA121 | 2 | 10 | U.S. Pat. No. 8,609,095 SEQ ID NO: 16; | 6120 |
| | | | US20160089435 SEQ ID NO: 28 | |
| APA122 | 2 | 10 | U.S. Pat. No. 8,609,095 SEQ ID NO: 20 | 6121 |
| APA123 | 2 | 10 | U.S. Pat. No. 8,609,095 SEQ ID NO: 28; | 6122 |
| | | | US20160089435 SEQ ID NO: 36 | |
| APA124 | 2 | 10 | U.S. Pat. No. 8,609,095 SEQ ID NO: 32 | 6123 |
| APA125 | 2 | 10 | U.S. Pat. No. 8,609,095 SEQ ID NO: 36 | 6124 |
| APA126 | 2 | 10 | U.S. Pat. No. 8,609,095 SEQ ID NO: 40 | 6125 |
| APA127 | 1 | 11 | US20110129464 SEQ ID NO: 1 | 6126 |
| APA128 | 1 | 11 | US20130089544 SEQ ID NO: 8 | 6127 |
| APA129 | 1 | 11 | US20130089544 SEQ ID NO: 12 | 6128 |
| APA130 | 1 | 11 | US20130089544 SEQ ID NO: 16 | 6129 |
| APA131 | 1 | 11 | US20130089544 SEQ ID NO: 20 | 6130 |
| APA132 | 1 | 11 | US20130089544 SEQ ID NO: 24 | 6131 |
| APA133 | 1 | 11 | US20130089544 SEQ ID NO: 28, | 6132 |
| | | | 32 | |
| APA134 | 1 | 11 | US20130089544 SEQ ID NO: 36 | 6133 |
| APA135 | 1 | 11 | US20130089544 SEQ ID NO: 40 | 6134 |
| APA136 | 1 | 11 | US20130089544 SEQ ID NO: 44 | 6135 |
| APA137 | 1 | 11 | US20130266564 SEQ ID NO: 7 | 6136 |
| APA138 | 2 | 11 | US20090226455 SEQ ID NO: 1 | 6137 |
| APA139 | 2 | 11 | US20080226659 SEQ ID NO: 4; | 6138 |
| | | | US20100136033 SEQ ID NO: 4 | |
| APA140 | 2 | 11 | US20080226659 SEQ ID NO: 5; | 6139 |
| | | | US20100136033 SEQ ID NO: 5 | |
| APA141 | 2 | 11 | US20130171148 SEQ ID NO: 5 | 6140 |
| APA142 | 2 | 11 | US20130171148 SEQ ID NO: 12 | 6141 |
| APA143 | 2 | 11 | US20130171148 SEQ ID NO: 19 | 6142 |
| APA144 | 2 | 11 | US20130171148 SEQ ID NO: 26 | 6143 |
| APA145 | 2 | 11 | US20130171148 SEQ ID NO: 33 | 6144 |
| APA146 | 2 | 11 | US20130171148 SEQ ID NO: 40 | 6145 |
| APA147 | 2 | 11 | US20130171148 SEQ ID NO: 44, | 6146 |
| | | | 52, 54, 56 | |
| APA148 | 2 | 11 | US20130171148 SEQ ID NO: 46 | 6147 |
| APA149 | 2 | 11 | US20130171148 SEQ ID NO: 48, | 6148 |
| | | | 50 | |
| APA150 | 2 | 11 | US20130189271 SEQ ID NO: 5, | 6149 |
| | | | 86, 88 | |
| APA151 | 2 | 11 | US20130189271 SEQ ID NO: 12 | 6150 |
| APA152 | 2 | 11 | US20130189271 SEQ ID NO: 19 | 6151 |
| APA153 | 2 | 11 | US20130189271 SEQ ID NO: 26, | 6152 |
| | | | 94 | |
| APA154 | 2 | 11 | US20130189271 SEQ ID NO: 39 | 6153 |
| APA155 | 2 | 11 | US20130189271 SEQ ID NO: 46 | 6154 |
| APA156 | 2 | 11 | US20130189271 SEQ ID NO: 53 | 6155 |
| APA157 | 2 | 11 | US20130189271 SEQ ID NO: 67 | 6156 |
| APA158 | 2 | 11 | US20130189271 SEQ ID NO: 74 | 6157 |
| APA159 | 2 | 11 | US20130189271 SEQ ID NO: 78, | 6158 |
| | | | 80, 82 | |
| APA160 | 2 | 11 | US20130189271 SEQ ID NO: 84 | 6159 |
| APA161 | 2 | 11 | US20130189271 SEQ ID NO: 90 | 6160 |
| APA162 | 2 | 11 | US20130189271 SEQ ID NO: 92 | 6161 |
| APA163 | 2 | 11 | US20130189271 SEQ ID NO: 100, | 6162 |
| | | | 102 | |
| APA164 | 2 | 11 | US20130189271 SEQ ID NO: 104 | 6163 |
| APA165 | 2 | 11 | US20130189271 SEQ ID NO: 106 | 6164 |
| APA166 | 2 | 11 | US20130189271 SEQ ID NO: 32, | 6165 |
| | | | 108 | |
| APA167 | 2 | 11 | US20130189271 SEQ ID NO: 60, | 6166 |
| | | | 110, 112 | |
| APA168 | 2 | 11 | US20130189271 SEQ ID NO: 114 | 6167 |
| APA169 | 2 | 11 | US20130189271 SEQ ID NO: 116 | 6168 |
| APA170 | 2 | 11 | US20130189271 SEQ ID NO: 96, | 6169 |
| | | | 98, 118 | |
| APA171 | 2 | 11 | US20130189271 SEQ ID NO: 120 | 6170 |
| APA172 | 2 | 11 | US20130189271 SEQ ID NO: 122, | 6171 |
| | | | 126 | |
| APA173 | 2 | 11 | US20130189271 SEQ ID NO: 124 | 6172 |
| APA174 | 2 | 11 | US20140356366 SEQ ID NO: 117 | 6173 |
| APA175 | 2 | 11 | US20150322162 SEQ ID NO: 137 | 6174 |
| APA176 | 2 | 11 | US20150322162 SEQ ID NO: 138 | 6175 |
| APA177 | 2 | 11 | US20150322162 SEQ ID NO: 139 | 6176 |
| APA178 | 2 | 11 | US20150322162 SEQ ID NO: 140 | 6177 |
| APA179 | 2 | 11 | US20150322162 SEQ ID NO: 141 | 6178 |
| APA180 | 2 | 11 | US20160053011 SEQ ID NO: 10 | 6179 |
| APA181 | 2 | 11 | US20160053011 SEQ ID NO: 26 | 6180 |
| APA182 | 2 | 11 | US20160053011 SEQ ID NO: 247 | 6181 |
| APA183 | 2 | 11 | US20160053011 SEQ ID NO: 249 | 6182 |
| APA184 | 2 | 11 | US20160053011 SEQ ID NO: 251 | 6183 |
| APA185 | 2 | 17 | US20100136033 SEQ ID NO: 6 | 6184 |
| APA186 | 1 | 1 | US20100158926 SEQ ID NO: 2 | 6185 |
| APA187 | 1 | 1 | US20100158926 SEQ ID NO: 6 | 6186 |
| APA188 | 1 | 1 | US20100158926 SEQ ID NO: 10 | 6187 |
| APA189 | 1 | 1 | US20100158926 SEQ ID NO: 14 | 6188 |
| APA190 | 1 | 1 | US20100158926 SEQ ID NO: 26 | 6189 |
| APA191 | 1 | 1 | US20100158926 SEQ ID NO: 30 | 6190 |
| APA192 | 1 | 1 | US20100158926 SEQ ID NO: 42 | 6191 |
| APA193 | 2 | 1 | U.S. Pat. No. 9,562,110 SEQ ID NO: 3 | 6192 |
| APA194 | 4 | 1 | U.S. Pat. No. 8,907,069B2 SEQ ID NO: 7 | 6193 |
| APA195 | 4 | 1 | U.S. Pat. No. 8,907,069B2 SEQ ID NO: 8 | 6194 |
| APA196 | 2 | 2 | U.S. Pat. No. 9,150,663B2 SEQ ID NO: 16 | 6195 |
| APA197 | 2 | 2 | U.S. Pat. No. 9,150,663B2 SEQ ID NO: 18 | 6196 |
| APA198 | 2 | 2 | U.S. Pat. No. 9,150,663B2 SEQ ID NO: 20 | 6197 |
| APA199 | 2 | 2 | U.S. Pat. No. 9,150,663B2 SEQ ID NO: 22 | 6198 |
| APA200 | 2 | 2 | U.S. Pat. No. 9,155,802B2 SEQ ID NO: 26 | 6199 |
| APA201 | 2 | 2 | U.S. Pat. No. 9,527,913B2 SEQ ID NO: 6, 67 | 6200 |
| APA202 | 2 | 2 | U.S. Pat. No. 9,527,913B2 SEQ ID NO: 23 | 6201 |
| APA203 | 2 | 2 | U.S. Pat. No. 9,155,802B2 SEQ ID NO: 34 | 6202 |
| APA204 | 2 | 2 | U.S. Pat. No. 9,527,913B2 SEQ ID NO: 8, 69 | 6203 |
| APA205 | 2 | 2 | U.S. Pat. No. 9,527,913B2 SEQ ID NO: 27 | 6204 |
| APA206 | 2 | 2 | U.S. Pat. No. 9,155,802B2 SEQ ID NO: 42 | 6205 |
| APA207 | 2 | 2 | U.S. Pat. No. 9,527,913B2 SEQ ID NO: 48 | 6206 |
| APA208 | 2 | 2 | U.S. Pat. No. 9,527,913B2 SEQ ID NO: 52 | 6207 |
| APA209 | 2 | 2 | U.S. Pat. No. 9,527,913B2 SEQ ID NO: 50 | 6208 |
| APA210 | 2 | 2 | US20130017598 SEQ ID NO: 17; | 6209 |
| | | | US20110091372 SEQ ID NO: 98 | |
| APA211 | 2 | 2 | US20130017598 SEQ ID NO: 19 | 6210 |
| APA212 | 2 | 2 | US20130017598 SEQ ID NO: 25 | 6211 |
| APA213 | 3 | 2 | U.S. Pat. No. 9,150,663B2 SEQ ID NO: 26 | 6212 |
| APA214 | 3 | 2 | U.S. Pat. No. 9,150,663B2 SEQ ID NO: 24 | 6213 |
| APA215 | 2 | 10 | U.S. Pat. No. 9,155,802B2 SEQ ID NO: 28 | 6214 |
| APA216 | 2 | 10 | U.S. Pat. No. 9,527,913B2 SEQ ID NO: 25 | 6215 |
| APA217 | 2 | 10 | U.S. Pat. No. 9,155,802B2 SEQ ID NO: 36 | 6216 |
| APA218 | 2 | 10 | U.S. Pat. No. 9,527,913B2 SEQ ID NO: 29 | 6217 |
| APA219 | 2 | 10 | U.S. Pat. No. 9,155,802B2 SEQ ID NO: 44 | 6218 |
| APA220 | 4 | 10 | U.S. Pat. No. 8,907,069B2 SEQ ID NO: 9 | 6219 |
| APA221 | 2 | 11 | U.S. Pat. No. 9,150,663B2 SEQ ID NO: 17 | 6220 |
| APA222 | 2 | 11 | U.S. Pat. No. 9,150,663B2 SEQ ID NO: 19 | 6221 |
| APA223 | 2 | 11 | U.S. Pat. No. 9,150,663B2 SEQ ID NO: 21 | 6222 |
| APA224 | 2 | 11 | U.S. Pat. No. 9,150,663B2 SEQ ID NO: 23 | 6223 |
| APA225 | 2 | 11 | U.S. Pat. No. 9,527,913B2 SEQ ID NO: 7, 68 | 6224 |
| APA226 | 2 | 11 | U.S. Pat. No. 9,527,913B2 SEQ ID NO: 9, 70 | 6225 |
| APA227 | 2 | 11 | U.S. Pat. No. 9,527,913B2 SEQ ID NO: 49 | 6226 |
| APA228 | 2 | 11 | U.S. Pat. No. 9,527,913B2 SEQ ID NO: 53 | 6227 |
| APA229 | 2 | 11 | U.S. Pat. No. 9,527,913B2 SEQ ID NO: 51 | 6228 |
| APA230 | 2 | 11 | US20130017598 SEQ ID NO: 16 | 6229 |
| APA231 | 2 | 11 | US20130017598 SEQ ID NO: 18 | 6230 |
| APA232 | 2 | 11 | US20130017598 SEQ ID NO: 24 | 6231 |
| APA233 | 3 | 11 | U.S. Pat. No. 9,150,663B2 SEQ ID NO: 27 | 6232 |
| APA234 | 3 | 11 | U.S. Pat. No. 9,150,663B2 SEQ ID NO: 25 | 6233 |
| APA235 | 2 | 18 | WO2013156054; SEQ ID NO: 3 | 6234 |
| APA236 | 5 | | US20140072582 SEQ ID NO: 34 | 6235 |

[1271] In Table 28, the target number (Target No.) code is described in the following semi-colon delimited list where the target number is followed by the target (e.g., Target No. 1 with target ERBB2 is shown as Target No. 1-Target ERBB2). The targets represented by the codes in Table 28 include, but are not limited to, Target No. 1-Target ERBB2; Target No. 2-Target HER2; Target No. 3-Target HER2/CD3; Target No. 4-Target HER2/Dig; and Target No. 5-Target HER2/neu.

[1272] In Table 28, the description number (Description No.) code is described in the following semi-colon delimited list where the description number is followed by the description (e.g., Description No. 1 with description heavy chain is shown as Description No. 1-Description Heavy chain). The targets represented by the codes in Table 28 include, but are not limited to, Description No. 1-Description Heavy chain; Description No. 2-Description Heavy Chain-variable region; Description No. 3-Description Heavy chain 1; Description No. 4-Description Heavy chain constant, human IgG; Description No. 5-Description Heavy chain variable region-CDR1; Description No. 6-Description Heavy chain variable region-CDR2; Description No. 7-Description Heavy chain variable region-CDR3; Description No. 8-Description Herceptin Heavy chain variable region-CH1 (Heavy chain variable region(1-120)+CH1(121-218)); Description No. 9-Description H-GAMMA-1 (Heavy chain variable region(1-120)+CH1(121-218)+HINGE-REGION(219-233)+CH2(234-343)+CH3(344-450); Description No. 10-Description Light chain; Description No. 11-Description Light Chain-variable region; Description No. 12-Description Light chain (L-KAPPA (V-KAPPA(1-107)+C-KAPPA(108-214)); Description No. 13-Description Light chain 1, Anti-HER2; Description No. 14-Description Light chain variable region-CDR1 From U.S. Pat. No. 8,557,243; Description No. 15-Description Light chain variable region-CDR2 From U.S. Pat. No. 8,557,243; Description No. 16-Description Light chain variable region-CDR3 From U.S. Pat. No. 8,557,243; Description No. 17-Description Light chain, human subgroup; and Description No. 18-Description ScFv.

### AAV Particle Production

[1273] In some embodiments, disclosed herein is a method of making a genetic element. The method comprising providing a nucleic acid encoding a genetic element described herein and a backbone region suitable for replication of the genetic element in a cell, e.g., a bacterial cell (e.g., wherein the backbone region comprises one or both of a bacterial origin of replication and a selectable marker), and excising the genetic element from the backbone region, e.g., by cleaving the nucleic acid molecule at upstream and downstream of the genetic element. In some embodiments, the genetic element comprising a nucleic acid comprising a transgene encoding an antibody molecule (e.g., an antibody molecule that binds to HER2), will be incorporated into an AAV particle produced in a cell.

[1274] In some embodiments, disclosed herein is a method of making a recombinant AAV particle of the present disclosure, the method comprising (i) providing a host cell comprising a genetic element described herein and incubating the host cell under conditions suitable to enclose the genetic element in an AAV capsid polypeptide, e.g., an AAV capsid variant, e.g., a capsid polypeptide described herein (e.g., a capsid protein listed in Tables 1 or 3-5), thereby making the recombinant AAV particle. In some embodiments, the method comprises prior to step (i), introducing a first nucleic acid comprising the genetic element into a cell. In some embodiments, the host cell comprises a second nucleic acid encoding the capsid protein. In some embodiments, the second nucleic acid is introduced into the host cell prior to, concurrently with, or after the first nucleic acid molecule.

[1275] Methods of making AAV particles are also described in e.g., U.S. Pat. Nos. 6,204,059, 5,756,283, 6,258,595, 6,261,551, 6,270,996, 6,281,010, 6,365,394, 6,475,769, 6,482,634, 6,485,966, 6,943,019, 6,953,690, 7,022,519, 7,238,526, 7,291,498 and 7,491,508, 5,064,764, 6,194,191, 6,566,118, 8,137,948; or International Publication Nos. WO1996039530, WO1998010088, WO1999014354, WO1999015685, WO1999047691, WO2000055342, WO2000075353, and WO2001023597; Methods In Molecular Biology, ed. Richard, Humana Press, NJ (1995); O'Reilly et al., Baculovirus Expression Vectors, A Laboratory Manual, Oxford Univ. Press (1994); Samulski et al., J. Vir. 63:3822-8 (1989); Kajigaya et al., Proc. Nat'l. Acad. Sci. USA 88: 4646-50 (1991); Ruffing et al., J. Vir. 66:6922-30 (1992); Kimbauer et al., Vir., 219:37-44 (1996); Zhao et al., Vir. 272:382-93 (2000); the contents of each of which are herein incorporated by reference in their entirety. In some embodiments, the AAV particles are made using the methods described in WO2015191508, the contents of which are herein incorporated by reference in their entirety.

[1276] In some embodiments, cells commonly used for production of a recombinant AAV particle include but are not limited to 293 cells, COS cells, HeLa cells, KB cells, and other mammalian cell lines as described in U.S. Pat. Nos. 6,156,303, 5,387,484, 5,741,683, 5,691,176, and 5,688,676; U.S. patent publication No. 2002/0081721, and International Patent Publication Nos. WO 00/47757, WO 00/24916, and WO 96/17947, the contents of each of which are herein incorporated by reference in their entireties. In some embodiments, the AAV particles of the present disclosure may be produced in insect cells (e.g., Sf9 cells). In some embodiments, the AAV particles of the present disclosure may be produced in mammalian cells.

[1277] In some embodiments, the AAV particles of the present disclosure may be produced using triple transfection. In some embodiments, the AAV particles of the present disclosure may be produced by triple transfection in mammalian cells. In some embodiments, the AAV particles of the present disclosure may be produced by triple transfection in HEK293 cells.

[1278] The present disclosure provides a method for producing an AAV particle comprising the steps of: 1) co-transfecting competent bacterial cells with a bacmid vector and either a viral construct vector and/or AAV payload construct vector, e.g., a vector comprising a genetic element described herein, 2) isolating the resultant viral construct expression vector and AAV payload construct expression vector and separately transfecting viral replication cells, 3) isolating and purifying resultant payload and viral construct particles comprising viral construct expression vector or AAV payload construct expression vector, 4) co-infecting a viral replication cell with both the AAV payload and viral construct particles comprising viral construct expression vector or AAV payload construct expression vector, 5) harvesting and purifying the viral particle comprising a genetic element.

[1279] In some embodiments, the present disclosure provides a method for producing an AAV particle comprising the steps of 1) simultaneously co-transfecting mammalian cells, such as, but not limited to HEK293 cells, with a genetic element encoding an antibody molecule, a construct expressing rep and cap genes and a helper construct, 2) harvesting and purifying the AAV particle comprising the genetic element.

[1280] In some embodiments, the viral construct vector(s) used for AAV production may contain a nucleotide sequence encoding the AAV capsid proteins where the initiation codon of the AAV VP1 capsid protein is a non-ATG, e.g., a suboptimal initiation codon, allowing the expression of a modified ratio of the viral capsid proteins in the production system, to provide improved infectivity of the host cell. In a non-limiting example, a viral construct vector may contain a nucleic acid construct comprising a nucleotide sequence encoding AAV VP1, VP2, and VP3 capsid proteins, wherein the initiation codon for translation of the AAV VP1 capsid protein is CTG, TTG, or GTG, as described in U.S. Pat. No. 8,163,543, the contents of which are herein incorporated by reference in its entirety.

[1281] In some embodiments, the viral construct vector(s) used for AAV production may contain a nucleotide sequence encoding the AAV rep proteins where the initiation codon of the AAV rep protein or proteins is a non-ATG. In some embodiments, a single coding sequence is used for the Rep78 and Rep52 proteins, wherein initiation codon for translation of the Rep78 protein is a suboptimal initiation codon, selected from the group consisting of ACG, TTG, CTG, and GTG, that effects partial exon skipping upon expression in insect cells, as described in U.S. Pat. No. 8,512,981, the contents of which is herein incorporated by reference in its entirety, for example to promote less abundant expression of Rep78 as compared to Rep52, which may be advantageous in that it promotes high vector yields.

[1282] In some embodiments, the genetic element of the AAV particle optionally encodes a selectable marker. The selectable marker may comprise a cell-surface marker, such as any protein expressed on the surface of the cell including, but not limited to receptors, CD markers, lectins, integrins, or truncated versions thereof.

[1283] In some embodiments, selectable marker reporter genes are selected from those described in International Application No. WO 96/23810; Heim et al., Current Biology 2:178-182 (1996); Heim et al., Proc. Natl. Acad. Sci. USA (1995); or Heim et al., Science 373:663-664 (1995); WO 96/30540, the contents of each of which are incorporated herein by reference in their entireties).

[1284] The genetic elements encoding an anti-HER2 antibody molecule payload described herein may be useful in the fields of human disease, veterinary applications and a variety of in vivo and in vitro settings. The AAV particles of the present disclosure may be useful in the field of medicine for the treatment, prophylaxis, palliation or amelioration of diseases and/or disorders caused by HER2 over-expression. In some embodiments, the AAV particles are used for the prevention and/or treatment of a disease and/or disorder associated with over-expression of HER2. In some embodiments, the disease and/or disorder associated with HER2 over-expression includes, but is not limited to tumors, cancers, neoplastic tissue, pre-malignant and non-neoplastic or non-malignant hyperproliferative disorders. In some embodiments, the disease associated with HER2 over-expression is cancer. In some embodiments, the cancer is metastatic breast cancer (e.g., brain metastases).

[1285] The present disclosure also provides in some embodiments, a pharmaceutical composition comprising an AAV particle described herein, e.g., an AAV particle comprising a genetic element encoding an anti-HER2 antibody molecule, and a pharmaceutically acceptable excipient. The present disclosure also provides in some embodiments, a method of treating a subject in need thereof comprising administering to the subject a therapeutically effective amount of the pharmaceutical composition described herein.

[1286] In some embodiments, the pharmaceutical composition is administered to a subject intravenously, intracerebroventricularly, via intraparenchymal administration, intrathecally, via subpial administration, intramuscularly, or a combination thereof. Certain embodiments of the method provide that the subject is treated for a disease and/or disorder associated with over expression of HER2. In one aspect of the method, a symptom, e.g., a pathological feature, of the neurological disorder and/or a disease associated with over expression of HER2 is reduced, alleviated, and/or the progression of the disease and/or disorder associated with over expression of HER2 is halted, slowed, ameliorated, or reversed.

[1287] Also described herein are compositions, methods, processes, kits and devices for the design, preparation, manufacture and/or formulation of an AAV particle, e.g., an AAV particle described herein for the vectorized delivery of an antibody molecule. In some embodiments, a payload, such as but not limited to anti-HER2 antibody molecule, may be encoded by a nucleic acid comprising or contained within plasmids or vectors or recombinant adeno-associated viruses (AAVs).

[1288] The present disclosure also provides administration and/or delivery methods for encoded payloads (e.g., antibody molecules), genetic elements, AAV vectors, and viral particles, e.g., AAV particles, for the treatment and/or amelioration of diseases and/or disorders associated with over expression of HER2 (e.g., cancer).

### Cells

[1289] In some embodiments, disclosed herein is a cell comprising a genetic element and/or an AAV vector of the present disclosure.

[1290] Viral production disclosed herein describes processes and methods for producing an AAV particle that contacts a cell to deliver a payload, e.g. a genetic element comprising a transgene encoding a payload, e.g., an antibody molecule described herein.

[1291] In some embodiments, an AAV particle described herein may be produced in a cell, e.g., a viral replication cell, that comprises an insect cell.

[1292] Growing conditions for insect cells in culture, and production of heterologous products in insect cells in culture are well-known in the art, see U.S. Pat. No. 6,204,059, the contents of which are herein incorporated by reference in their entirety.

[1293] Any insect cell which allows for replication of parvovirus and which can be maintained in culture can be used in accordance with the present disclosure. Cell lines may be used from Spodoptera frugiperda, including, but not limited to the Sf9 or Sf21 cell lines, Drosophila cell lines, or mosquito cell lines, such as Aedes albopictus derived cell lines. Use of insect cells for expression of heterologous proteins is well documented, as are methods of introducing nucleic acids, such as vectors, e.g., insect-cell compatible vectors, into such cells and methods of maintaining such cells in culture. See, for example, Methods in Molecular Biology, ed. Richard, Humana Press, NJ (1995); O'Reilly et al., Baculovirus Expression Vectors, A Laboratory Manual, Oxford Univ. Press (1994); Samulski et al., J. Vir. 63:3822-8 (1989); Kajigaya et al., Proc. Nat'l. Acad. Sci. USA 88: 4646-50 (1991); Ruffing et al., J. Vir. 66:6922-30 (1992); Kimbauer et al., Vir. 219:37-44 (1996); Zhao et al., Vir. 272:382-93 (2000); and Samulski et al., U.S. Pat. No. 6,204,059, the contents of each of which is herein incorporated by reference in its entirety.

[1294] The cell, e.g., viral replication cell, may be selected from any biological organism, including a prokaryotic (e.g., bacterial) cell, and a eukaryotic cell, including for example, insect cells, yeast cells and mammalian cells. Viral replication cells may comprise mammalian cells such as A549, WEH1, 3T3, 10T1/2, BHK, MDCK, COS 1, COS 7, BSC 1, BSC 40, BMT 10, VERO. W138, HeLa, HEK293, Saos, C2C12, L cells, HT1080, HepG2 and primary fibroblast, hepatocyte and myoblast cells derived from mammals. In some embodiments, a viral replication cell comprises a cell derived from a mammalian species including, but not limited to, a human, a monkey, a mouse, a rat, a rabbit, and a hamster or a cell type, including but not limited to a fibroblast, a hepatocyte, a tumor cell, a cell line transformed cell, etc.

### Small Scale Production of AAV Particles

[1295] In some embodiments, production of an AAV particle disclosed herein describes processes and methods for producing an AAV particle that contacts a cell, e.g., a target cell, to deliver a payload, e.g. an antibody molecule and/or a genetic element comprising a nucleotide sequence comprising a transgene encoding a payload, e.g., an antibody molecule.

[1296] In some embodiments, an AAV particle of the present disclosure may be produced in a cell, e.g., a viral replication cell that comprises a mammalian cell.

[1297] In some embodiments, a viral replication cell for production of a recombinant AAV particle described herein includes, but is not limited to 293 cells, COS cells, HeLa cells, KB cells, and other mammalian cell lines as described in U.S. Pat. Nos. 6,156,303, 5,387,484, 5,741,683, 5,691,176, and 5,688,676; U.S. patent application 2002/0081721, and International Patent Applications WO 00/47757, WO 00/24916, and WO 96/17947, the contents of each of which are herein incorporated by reference in their entireties.

[1298] In some embodiments, an AAV particle is produced in a mammalian-cell wherein all three VP proteins are expressed at a stoichiometry approaching 1:1:10 (VP1:VP2:VP3). In some embodiments, the regulatory mechanisms that allow this controlled level of expression include the production of two mRNAs, one for VP1, and the other for VP2 and VP3, produced by differential splicing.

[1299] In other embodiments, an AAV particles is produced in a mammalian cell using a triple transfection method wherein a genetic element comprising a nucleotide sequence comprising a transgene encoding a payload (e.g., an antibody molecule described herein), parvoviral Rep and parvoviral Cap and a helper construct are comprised within three different constructs. In some embodiments, the triple transfection method of the three components of AAV particle production is utilized to produce small lots of virus for assays including transduction efficiency, target tissue (tropism) evaluation, and stability.

### Baculovirus

[1300] In some embodiments, the production of an AAV particle disclosed herein comprises processes and methods for producing an AAV particle that contacts a cell, e.g., a target cell, to deliver a genetic element which comprises a nucleotide sequence comprising a transgene encoding a payload (e.g., a an antibody molecule described herein).

[1301] Briefly, a viral construct vector (e.g., encoding the structural, non-structural, components of the particle) and a genetic element each incorporated by a transposon donor/acceptor system into a bacmid, also known as a baculovirus plasmid, by standard molecular biology techniques known and performed by a person skilled in the art. Transfection of a separate cell, e.g., a viral replication cell, or population of cells produces two baculoviruses, one that comprises the viral construct expression vector, and another that comprises the genetic element. The two baculoviruses may be used to infect a single viral replication cell population for production of AAV particles.

[1302] In some embodiments, a baculovirus expression vector for producing viral particles in an insect cell, including but not limited to a Spodoptera frugiperda (Sf9) cell, provides high titers of viral particle product, e.g., an AAV particle described herein. In some embodiments, a recombinant baculovirus encoding the viral construct expression vector and genetic element encoding a payload initiates an infection, e.g., a productive infection of a cell, e.g., a viral replicating cell, or population of cells. In some embodiments, an infectious baculovirus particle released from the primary infection secondarily infect at an additional cell or plurality of cells in the culture, exponentially infecting the entire cell culture population in a number of infection cycles that is a function of the initial administration multiplicity of infection, see Urabe, M. et al., J Virol. 2006 February; 80 (4):1874-85, the contents of which are herein incorporated by reference in their entirety.

[1303] In some embodiments, the production system utilizes a titerless infected-cells preservation and scale-up system. Small scale seed cultures of cells, e.g., viral producing cells are transfected with viral expression constructs encoding the structural, non-structural, components of the viral particle, e.g., an AAV particle described herein. Baculovirus-infected viral producing cells are harvested into aliquots that may be cryopreserved in liquid nitrogen; the aliquots retain viability and infectivity for infection of large scale viral producing cell culture Wasilko D J et al., Protein Expr Purif. 2009 June; 65(2):122-32, the contents of which are herein incorporated by reference in their entirety.

[1304] In some embodiments, a genetically stable baculovirus may be used as a source of the one or more of the components for producing an AAV particle of the present disclosure in invertebrate cells. In some embodiments, a defective baculovirus expression vector may be maintained episomally in insect cells. In some embodiments, the bacmid vector is engineered with replication control elements, including but not limited to promoters, enhancers, and/or cell-cycle regulated replication elements.

[1305] In some embodiments, a baculoviruses may be engineered with a (non-) selectable marker for recombination into the chitinase/cathepsin locus. In some embodiments, the chia/v-cath locus is non-essential for propagating baculovirus in tissue culture, and the V-cath (EC 3.4.22.50) is a cysteine endoprotease that is most active on Arg-Arg dipeptide containing substrates. In some embodiments, the Arg-Arg dipeptide is present in densovirus and parvovirus capsid structural proteins but infrequently occurs in dependovirus VP1.

[1306] In some embodiments, stable cells, e.g., viral replication cells, permissive for baculovirus infection are engineered with at least one stable integrated copy of any of the elements necessary for AAV replication and particle production including, but not limited to, the entire AAV genome, Rep and Cap genes, Rep genes, Cap genes, each Rep protein as a separate transcription cassette, each VP protein as a separate transcription cassette, the AAP (assembly activation protein), or at least one of the baculovirus helper genes with native or non-native promoters.

[1307] In some embodiments, any of the genetic elements, e.g., any of BA_ITR1-BA_ITR9, e.g., as described in Tables 4-5 or 17-19, is introduced into a bacmid. The bacmid may further comprise replication and transcription control elements, including but not limited to promoters, enhancers, and/or cell-cycle regulated replication elements, as well as antibiotic or other selection markers to permit cloning and/or maintenance of infectious baculovirus DNA in a suitable bacterial host, such as E. coli.

### Large-Scale Production

[1308] In some embodiments, AAV particle production may be modified to increase the scale of production. Large scale viral production methods according to the present disclosure may include any of those taught in U.S. Pat. Nos. 5,756,283, 6,258,595, 6,261,551, 6,270,996, 6,281,010, 6,365,394, 6,475,769, 6,482,634, 6,485,966, 6,943,019, 6,953,690, 7,022,519, 7,238,526, 7,291,498 and 7,491,508 or International Publication Nos. WO1996039530, WO1998010088, WO1999014354, WO1999015685, WO1999047691, WO2000055342, WO2000075353 and WO2001023597, the contents of each of which are herein incorporated by reference in their entirety. Methods of increasing viral particle, e.g., AAV particle, production scale typically comprise increasing the number of viral replication cells. In some embodiments, a viral replication cell comprises an adherent cell. To increase the scale of viral particle production by adherent viral replication cells, larger cell culture surfaces are required. In some cases, large-scale production methods comprise the use of roller bottles to increase cell culture surfaces. Other cell culture substrates with increased surface areas are known in the art. Examples of additional adherent cell culture products with increased surface areas include, but are not limited to CELLSTACK®, CELLCUBE® (Corning Corp., Corning, NY) and NUNC™ CELL FACTORY™ (Thermo Scientific, Waltham, MA.) In some cases, large-scale adherent cell surfaces may comprise from about 1,000 cm² to about 100,000 cm². In some cases, large-scale adherent cell cultures may comprise from about 10⁷ to about 10⁹ cells, from about 10⁸ to about 10¹⁰ cells, from about 10⁹ to about 10¹² cells or at least 10¹² cells. In some cases, large-scale adherent cultures may produce from about 10¹² to about 10¹², from about 10¹⁰ to about 10¹³, from about 10¹³ to about 10¹⁴, from about 10¹² to about 10¹⁵ or at least 10¹⁵ viral particles.

[1309] In some embodiments, large-scale viral production methods of the present disclosure may comprise the use of suspension cell cultures. Suspension cell culture allows for significantly increased numbers of cells. Typically, the number of adherent cells that can be grown on about 10-50 cm² of surface area can be grown in about 1 cm³ volume in suspension.

[1310] Transfection of replication cells in large-scale culture formats may be carried out according to any methods known in the art. For large-scale adherent cell cultures, transfection methods may include, but are not limited to the use of inorganic compounds (e.g. calcium phosphate), organic compounds [e.g. polyethyleneimine (PEI)] or the use of non-chemical methods (e.g. electroporation.) With cells grown in suspension, transfection methods may include, but are not limited to the use of calcium phosphate and the use of PEI. In some cases, transfection of large scale suspension cultures may be carried out according to the section entitled “Transfection Procedure” described in Feng, L. et al., 2008. Biotechnol Appl. Biochem. 50:121-32, the contents of which are herein incorporated by reference in their entirety. In some embodiments, PEI-DNA complexes may be formed for introduction of plasmids to be transfected. In some embodiments, a cell being transfected with PEI-DNA complexes may be ‘shocked’ prior to transfection, which comprises lowering cell culture temperatures to 4° C. for a period of about 1 hour. In some embodiments, a cell culture may be shocked for a period of from about 10 minutes to about 5 hours. In some embodiments, a cell culture may be shocked at a temperature of from about 0° C. to about 20° C.

[1311] In some embodiments, a transfection may include a vector for expression of an RNA effector molecule to reduce expression of nucleic acids from a genetic element and/or AAV vector. In some embodiments, such a method may enhance the production of viral particles by reducing cellular resources wasted on expressing a genetic element encoding a payload. In some embodiments, such a method may be carried according to those taught in US Publication No. US2014/0099666, the contents of which are herein incorporated by reference in their entirety.

### III. FORMULATION AND DELIVERY

### Pharmaceutical Compositions

[1312] According to the present disclosure, the AAV particle described herein may be prepared as a pharmaceutical composition. In some embodiments, the pharmaceutical composition comprises at least one active ingredients. In some embodiments, the pharmaceutical composition comprises a pharmaceutically acceptable excipient.

[1313] In some embodiments, the relative amount of the active ingredient (e.g. AAV particle), a pharmaceutically acceptable excipient, and/or any additional ingredients in a pharmaceutical composition in accordance with the present disclosure may vary, depending upon the identity, size, and/or condition of the subject being treated and further depending upon the route by which the composition is to be administered. For example, the composition may comprise between 0.1% and 99% (w/w) of the active ingredient. By way of example, the composition may comprise between 0.1% and 100%, e.g., between 0.5 and 50%, between 1-30%, between 5-80%, at least 80% (w/w) active ingredient.

[1314] In some embodiments, the pharmaceutical composition comprising an AAV particle described herein may comprise a genetic element encoding a payload, e.g., an antibody molecule. As a non-limiting example, the pharmaceutical composition may contain an AAV particle with at least 1, 2, 3, 4, 5, or more genetic elements encoding an antibody molecule. In some embodiments, the pharmaceutical composition comprises a nucleic acid encoding a transgene encoding a payload comprising an antibody molecule.

[1315] The present disclosure also provides in some embodiments, a pharmaceutical composition suitable for administration to a human and/or any other animal, e.g., to non-human animals, e.g. non-human mammals. The present disclosure also provides modification of a pharmaceutical composition suitable for administration to a human such that it is also suitable for administration to various animals. In some embodiments, a subject to which administration of the pharmaceutical compositions is contemplated include, but are not limited to, a human or a non-human primate; and/or a mammal, including cattle, pigs, horses, sheep, cats, dogs, mice, rats, birds, e.g., such as poultry, chickens, ducks, geese, and/or turkeys.

[1316] In some embodiments, the pharmaceutical composition described herein is administered to a human, e.g., a human patient, or a human subject.

### Formulations

[1317] In some embodiments, the AAV particle can be formulated using an excipient to: (1) increase stability; (2) increase cell transfection or transduction; (3) permit the sustained or delayed expression of the payload; (4) alter the biodistribution (e.g., target the viral particle to specific tissues or cell types); (5) increase the translation of encoded protein; (6) alter the release profile of encoded protein; and/or (7) allow for regulatable expression of the payload.

[1318] Formulations of the present disclosure can include, without limitation, saline, liposomes, lipid nanoparticles, polymers, peptides, proteins, cells transfected with viral vectors (e.g., for transfer or transplantation into a subject) and combinations thereof.

[1319] Formulations of the pharmaceutical compositions described herein may be prepared by any method known or hereafter developed in the art of pharmacology. In some embodiments, a pharmaceutical composition comprises an AAV particle described herein and at least one active ingredient and optionally a pharmaceutically acceptable excipient.

[1320] In general, such preparatory methods include the step of associating the active ingredient with an excipient and/or one or more other accessory ingredients. In some embodiments, an active ingredient can comprise an AAV particle carrying a payload region encoding the polypeptides or to the antibody or antibody-based composition encoded by a genetic element of by an AAV particle as described herein.

[1321] A pharmaceutical composition in accordance with the present disclosure may be prepared, packaged, and/or sold in bulk, as a single unit dose, and/or as a plurality of single unit doses. In some embodiments, a unit dose is a discrete amount of the pharmaceutical composition comprising a predetermined amount of the active ingredient. In some embodiments, the amount of the active ingredient is generally equal to the dosage of the active ingredient which would be administered to a subject and/or a convenient fraction of such a dosage such as, for example, one-half or one-third of such a dosage.

[1322] In some embodiments, an AAV particle may be formulated in phosphate buffered saline (PBS), in combination with an ethylene oxide/propylene oxide copolymer (also known as Pluronic or poloxamer). In some embodiments, an AAV particle may be formulated in PBS with 0.001% Pluronic acid (F-68) (poloxamer 188) at a pH of about 7.0. In some embodiments, an AAV particle may be formulated in PBS with 0.001% Pluronic acid (F-68) (poloxamer 188) at a pH of about 7.3. In some embodiments, an AAV particle may be formulated in PBS with 0.001% Pluronic acid (F-68) (poloxamer 188) at a pH of about 7.4. In some embodiments, an AAV particle may be formulated in a solution comprising sodium chloride, sodium phosphate and an ethylene oxide/propylene oxide copolymer. In some embodiments, an AAV particle may be formulated in a solution comprising sodium chloride, sodium phosphate dibasic, sodium phosphate monobasic and poloxamer 188/Pluronic acid (F-68).

[1323] In some embodiments, an AAV particle may be formulated in a solution comprising about 180 mM sodium chloride, about 10 mM sodium phosphate and about 0.001% poloxamer 188. In some embodiments, this formulation may be at a pH of about 7.3. In some embodiments, the concentration of sodium chloride in the final solution may be 150 mM-200 mM. As non-limiting examples, the concentration of sodium chloride in the final solution may be 150 mM, 160 mM, 170 mM, 180 mM, 190 mM or 200 mM. The concentration of sodium phosphate in the final solution may be 1 mM-50 mM. As non-limiting examples, the concentration of sodium phosphate in the final solution may be 1 mM, 2 mM, 3 mM, 4 mM, 5 mM, 6 mM, 7 mM, 8 mM, 9 mM, 10 mM, 15 mM, 20 mM, 25 mM, 30 mM, 40 mM, or 50 mM. In some embodiments, the concentration of poloxamer 188 (Pluronic acid (F-68)) may be 0.0001%-1%. As non-limiting examples, the concentration of poloxamer 188 (Pluronic acid (F-68)) may be 0.0001%, 0.0005%, 0.001%, 0.005%, 0.01%, 0.05%, 0.1%, 0.5%, or 1%. The final solution may have a pH of 6.8-7.7. Non-limiting examples for the pH of the final solution include a pH of 6.8, 6.9, 7.0, 7.1, 7.2, 7.3, 7.4, 7.5, 7.6, or 7.7.

[1324] In some embodiments, an AAV particle described herein may be formulated in a solution comprising about 1.05% sodium chloride, about 0.212% sodium phosphate dibasic, heptahydrate, about 0.025% sodium phosphate monobasic, monohydrate, and 0.001% poloxamer 188, at a pH of about 7.4. As a non-limiting example, the concentration of AAV particle in this formulated solution may be about 0.001%. The concentration of sodium chloride in the final solution may be 0.1-2.0%, with non-limiting examples of 0.1%, 0.25%, 0.5%, 0.75%, 0.95%, 0.96%, 0.97%, 0.98%, 0.99%, 1.00%, 1.01%, 1.02%, 1.03%, 1.04%, 1.05%, 1.06%, 1.07%, 1.08%, 1.09%, 1.10%, 1.25%, 1.5%, 1.75%, or 2%. In some embodiments, the concentration of sodium phosphate dibasic in the final solution may be 0.100-0.300% with non-limiting examples including 0.100%, 0.125%, 0.150%, 0.175%, 0.200%, 0.210%, 0.211%, 0.212%, 0.213%, 0.214%, 0.215%, 0.225%, 0.250%, 0.275%, 0.300%. The concentration of sodium phosphate monobasic in the final solution may be 0.010-0.050%, with non-limiting examples of 0.010%, 0.015%, 0.020%, 0.021%, 0.022%, 0.023%, 0.024%, 0.025%, 0.026%, 0.027%, 0.028%, 0.029%, 0.030%, 0.035%, 0.040%, 0.045%, or 0.050%. The concentration of poloxamer 188 (Pluronic acid (F-68)) may be 0.0001%-1%. As non-limiting examples, the concentration of poloxamer 188 (Pluronic acid (F-68)) may be 0.0001%, 0.0005%, 0.001%, 0.005%, 0.01%, 0.05%, 0.1%, 0.5%, or 1%. The final solution may have a pH of 6.8-7.7. Non-limiting examples for the pH of the final solution include a pH of 6.8, 6.9, 7.0, 7.1, 7.2, 7.3, 7.4, 7.5, 7.6, or 7.7.

[1325] In some embodiments, an AAV particle described herein may be administered with a pharmaceutically acceptable salt. Examples of pharmaceutically acceptable salts include, but are not limited to, mineral or organic acid salts of basic residues such as amines; alkali or organic salts of acidic residues such as carboxylic acids; and the like. Representative acid addition salts include acetate, acetic acid, adipate, alginate, ascorbate, aspartate, benzenesulfonate, benzene sulfonic acid, benzoate, bisulfate, borate, butyrate, camphorate, camphorsulfonate, citrate, cyclopentanepropionate, digluconate, dodecylsulfate, ethanesulfonate, fumarate, glucoheptonate, glycerophosphate, hemisulfate, heptonate, hexanoate, hydrobromide, hydrochloride, hydroiodide, 2-hydroxy-ethanesulfonate, lactobionate, lactate, laurate, lauryl sulfate, malate, maleate, malonate, methanesulfonate, 2-naphthalenesulfonate, nicotinate, nitrate, oleate, oxalate, palmitate, pamoate, pectinate, persulfate, 3-phenylpropionate, phosphate, picrate, pivalate, propionate, stearate, succinate, sulfate, tartrate, thiocyanate, toluenesulfonate, undecanoate, valerate salts, and the like. Representative alkali or alkaline earth metal salts include sodium, lithium, potassium, calcium, magnesium, and the like, as well as nontoxic ammonium, quaternary ammonium, and amine cations, including, but not limited to ammonium, tetramethylammonium, tetraethylammonium, methylamine, dimethylamine, trimethylamine, triethylamine, ethylamine, and the like. The pharmaceutically acceptable salts of the present disclosure include the conventional non-toxic salts of the parent compound formed, for example, from non-toxic inorganic or organic acids. Lists of additional suitable salts are found in Remington's Pharmaceutical Sciences, 17^{th} ed., Mack Publishing Company, Easton, Pa., 1985, p. 1418, Pharmaceutical Salts: Properties, Selection, and Use, P. H. Stahl and C. G. Wermuth (eds.), Wiley-VCH, 2008, and Berge et al., Journal of Pharmaceutical Science, 66, 1-19 (1977), each of which is incorporated herein by reference in its entirety.

[1326] Relative amounts of an active ingredient (e.g. AAV particle), a pharmaceutically acceptable excipient, and/or any additional ingredients in a pharmaceutical composition in accordance with the present disclosure may vary, depending upon the identity, size, and/or condition of the subject being treated and further depending upon the route by which the composition is to be administered. For example, the composition may comprise between 0.1% and 99% (w/w) of the active ingredient. By way of example, the composition may comprise between 0.1% and 100%, e.g., between 0.5 and 50%, between 1-30%, between 5-80%, or at least 80% (w/w) active ingredient.

[1327] In some embodiments, a formulation comprising an AAV particle described herein comprises a sufficient, e.g., effective amount, of AAV particles for expression of an antibody molecule, e.g., an antibody molecule that binds to HER2. In some embodiments, an AAV particle comprises a genetic element encoding at least 1, 2, 3, 4, or 5 antibody molecules.

[1328] The present disclosure provides, in some embodiments, an AAV particle formulated for delivery to the central nervous system (CNS). In some embodiments, an agent that crosses the brain blood barrier may be used. For example, some cell penetrating peptides that can target molecules to the brain blood barrier endothelium may be used for formulation (e.g., Mathupala, Expert Opin Ther Pat., 2009, 19, 137-140; the content of which is incorporated herein by reference in its entirety).

### Excipients and Diluents

[1329] In some embodiments, a pharmaceutically acceptable excipient may be substantially pure, e.g., having at least 90%, at least 95%, at least 96%, at least 97%, at least 98%, at least 99%, or 100% purity. In some embodiments, an excipient is approved for use for humans and for veterinary use. In some embodiments, an excipient may be approved by United States Food and Drug Administration. In some embodiments, an excipient may be of pharmaceutical grade. In some embodiments, an excipient may meet the standards of the United States Pharmacopoeia (USP), the European Pharmacopoeia (EP), the British Pharmacopoeia, and/or the International Pharmacopoeia.

[1330] In some embodiments, an excipient, as used herein, includes, but is not limited to, any and all solvents, dispersion media, diluents, or other liquid vehicles, dispersion or suspension aids, surface active agents, isotonic agents, thickening or emulsifying agents, preservatives, and the like, as suited to the particular dosage form desired. Various excipients for formulating pharmaceutical compositions and techniques for preparing the composition are known in the art (see Remington: The Science and Practice of Pharmacy, 21st Edition, A. R. Gennaro, Lippincott, Williams & Wilkins, Baltimore, MD, 2006; incorporated herein by reference in its entirety).

[1331] In some embodiments, a pharmaceutically acceptable excipient may include, for example: antiadherents, antioxidants, binders, coatings, compression aids, disintegrants, dyes (colors), emollients, emulsifiers, fillers (diluents), film formers or coatings, flavors, fragrances, glidants (flow enhancers), lubricants, preservatives, printing inks, sorbents, suspensing or dispersing agents, sweeteners, and waters of hydration. Exemplary excipients include, but are not limited to: butylated hydroxytoluene (BHT), calcium carbonate, calcium phosphate (dibasic), calcium stearate, croscarmellose, crosslinked polyvinyl pyrrolidone, citric acid, crospovidone, cysteine, ethylcellulose, gelatin, hydroxypropyl cellulose, hydroxypropyl methylcellulose, lactose, magnesium stearate, maltitol, mannitol, methionine, methylcellulose, methyl paraben, microcrystalline cellulose, polyethylene glycol, polyvinyl pyrrolidone, povidone, pregelatinized starch, propyl paraben, retinyl palmitate, shellac, silicon dioxide, sodium carboxymethyl cellulose, sodium citrate, sodium starch glycolate, sorbitol, starch (corn), stearic acid, sucrose, talc, titanium dioxide, vitamin A, vitamin E, vitamin C, and xylitol.

[1332] In some embodiments, a pharmaceutically acceptable solvent may include, for example, ethanol, water (for example, mono-, di-, and tri-hydrates), N-methylpyrrolidinone (NMP), dimethyl sulfoxide (DMSO), N,N′-dimethylformamide (DMF), N,N′-dimethylacetamide (DMAC), 1,3-dimethyl-2-imidazolidinone (DMEU), 1,3-dimethyl-3,4,5,6-tetrahydro-2-(1H)-pyrimidinone (DMPU), acetonitrile (ACN), propylene glycol, ethyl acetate, benzyl alcohol, 2-pyrrolidone, and benzyl benzoate.

[1333] In some embodiments, the exemplary diluent includes, but is not limited to, calcium carbonate, sodium carbonate, calcium phosphate, dicalcium phosphate, calcium sulfate, calcium hydrogen phosphate, sodium phosphate lactose, sucrose, cellulose, microcrystalline cellulose, kaolin, mannitol, sorbitol, inositol, sodium chloride, dry starch, cornstarch, powdered sugar, etc., and/or combinations thereof.

### Inactive Ingredients

[1334] In some embodiments, a formulation comprising an AAV particle described herein may comprise an inactive ingredient. In some embodiments, an inactive ingredient comprises an agent that does not contribute to the activity of the active ingredient of the pharmaceutical composition included in formulations.

[1335] In some embodiments, a formulation of a pharmaceutical composition comprising an AAV particle disclosed herein may include cations or anions. In some embodiments, the formulation includes a metal cation such as, but not limited to, Zn2+, Ca2+, Cu2+, Mn2+, Mg+ and combinations thereof. As a non-limiting example, a formulation may include a polymer complexed with a metal cation (See e.g., U.S. Pat. Nos. 6,265,389 and 6,555,525, each of which is herein incorporated by reference in its entirety).

### IV. ADMINISTRATION AND DOSING

### Administration

[1336] In some embodiments, an AAV particle of the present disclosure may be administered by any delivery route which results in a therapeutically effective outcome. In some embodiments, the delivery route includes, but is not limited to, enteral (into the intestine), gastroenteral, epidural (into the dura mater), oral (by way of the mouth), transdermal, intracerebral (into the cerebrum), intracerebroventricular (into the cerebral ventricles), epicutaneous (application onto the skin), intradermal (into the skin itself), subcutaneous (under the skin), nasal administration (through the nose), intravenous (into a vein), intravenous bolus, intravenous drip, intra-arterial (into an artery), intramuscular (into a muscle), intracardiac (into the heart), intraosseous infusion (into the bone marrow), intrathecal (into the spinal canal), intraparenchymal (into brain tissue), intraperitoneal (infusion or injection into the peritoneum), intravesical infusion, intravitreal (through the eye), intracavernous injection (into a pathologic cavity) intracavitary (into the base of the penis), intravaginal administration, intrauterine, extra-amniotic administration, transdermal (diffusion through the intact skin for systemic distribution), transmucosal (diffusion through a mucous membrane), transvaginal, insufflation (snorting), sublingual, sublabial, enema, eye drops (onto the conjunctiva), ear drops, auricular (in or by way of the ear), buccal (directed toward the cheek), conjunctival, cutaneous, dental (to a tooth or teeth), electro-osmosis, endocervical, endosinusial, endotracheal, extracorporeal, hemodialysis, infiltration, interstitial, intra-abdominal, intra-amniotic, intra-articular, intrabiliary, intrabronchial, intrabursal, intracartilaginous (within a cartilage), intracaudal (within the cauda equine), intracisternal (within the cisterna magna cerebellomedularis), intracorneal (within the cornea), dental intracoronal, intracoronary (within the coronary arteries), intracorporus cavernosum (within the dilatable spaces of the corporus cavernosa of the penis), intradiscal (within a disc), intraductal (within a duct of a gland), intraduodenal (within the duodenum), intradural (within or beneath the dura), intraepidermal (to the epidermis), intraesophageal (to the esophagus), intragastric (within the stomach), intragingival (within the gingivae), intraileal (within the distal portion of the small intestine), intralesional (within or introduced directly to a localized lesion), intraluminal (within a lumen of a tube), intralymphatic (within the lymph), intramedullary (within the marrow cavity of a bone), intrameningeal (within the meninges), intramyocardial (within the myocardium), intraocular (within the eye), intraovarian (within the ovary), intrapericardial (within the pericardium), intrapleural (within the pleura), intraprostatic (within the prostate gland), intrapulmonary (within the lungs or its bronchi), intrasinal (within the nasal or periorbital sinuses), intraspinal (within the vertebral column), intrasynovial (within the synovial cavity of a joint), intratendinous (within a tendon), intratesticular (within the testicle), intrathecal (within the cerebrospinal fluid at any level of the cerebrospinal axis), intrathoracic (within the thorax), intratubular (within the tubules of an organ), intratumor (within a tumor), intratympanic (within the aurus media), intravascular (within a vessel or vessels), intraventricular (within a ventricle), iontophoresis (by means of electric current where ions of soluble salts migrate into the tissues of the body), irrigation (to bathe or flush open wounds or body cavities), laryngeal (directly upon the larynx), nasogastric (through the nose and into the stomach), occlusive dressing technique (topical route administration which is then covered by a dressing which occludes the area), ophthalmic (to the external eye), oropharyngeal (directly to the mouth and pharynx), parenteral, percutaneous, periarticular, peridural, perineural, periodontal, rectal, respiratory (within the respiratory tract by inhaling orally or nasally for local or systemic effect), retrobulbar (behind the pons or behind the eyeball), soft tissue, subarachnoid, subconjunctival, submucosal, topical, transplacental (through or across the placenta), transtracheal (through the wall of the trachea), transtympanic (across or through the tympanic cavity), ureteral (to the ureter), urethral (to the urethra), vaginal, caudal block, diagnostic, nerve block, biliary perfusion, cardiac perfusion, photopheresis, and spinal.

[1337] A further aspect of the present invention relates to a method of treating a subject having or diagnosed with having cancer expressing HER2/neu, comprising administering to the subject an effective amount of a pharmaceutical composition comprising an AAV particle or vector, genetic element, or isolated nucleic acid as described herein. In some embodiments, the subject is administered an AAV particle of the present invention. In some embodiments, the subject is being treated for a disease associated with HER2/neu expression. In some embodiments, the disease associated with HER2/neu expression is a HER2/neu-positive solid tumor. In some embodiments, the HER2/neu positive tumor is metastatic. In some embodiments the HER/neu positive cancer is breast cancer, gastric cancer, gastroesophageal junction cancer, colorectal cancer, lung cancer (e.g., non-small cell lung carcinoma), pancreatic cancer, bladder cancer, salivary duct cancer, ovarian cancer (e.g., epithelial ovarian cancer), endometrial cancer, prostate cancer, bone cancer and brain cancer. In some embodiments, the HER2/neu positive cancer has metastasized to the central nervous system (CNS). In some embodiments, the HER2/neu positive cancer is breast cancer. In some embodiments, the subject is a human. In some embodiments, the subject has previously undergone surgical resection of a HER2/neu-positive solid tumor. In some embodiments, the AAV particle is administered to the subject intramuscularly, intravenously, intratumorally, intracerebrally, intrathecally, intracerebroventricularly, via intraparenchymal administration, via focused ultrasound (FUS), e.g., coupled with the intravenous administration of microbubbles (FUS-MB), or MRI-guided FUS coupled with intravenous administration, or via intra-cisterna magna injection (ICM). In some embodiments, the AAV particle is administered to the subject intravenously. In some embodiments, the AAV particle is administered to the subject intratumorally. In some embodiments, the AAV particle is administered to the subject via intra-cisterna magna injection (ICM). In some embodiments, the AAV particle is administered prior to, concurrently with, or post a surgical resection of a HER2/neu-positive solid tumor. In some embodiments, the AAV particle is administered to a site of surgical resection of a HER2/neu-positive solid tumor in the subject.

[1338] In some embodiments, the AAV particle is administered to the area around a site of surgical resection of a HER2/neu-positive solid tumor, e.g., the margins of the tumor, in the subject. In some embodiments, an AAV particle described herein may be administered to a subject via such a route that it is able to cross the blood-brain barrier, vascular barrier, or other epithelial barrier. In some embodiments, an AAV particle of the present disclosure may be administered in any suitable form, either as a liquid solution or suspension, as a solid form suitable for liquid solution or suspension in a liquid solution. In some embodiments, an AAV particle may be formulated with any appropriate and pharmaceutically acceptable excipient.

[1339] In some embodiments, an AAV particle of the present disclosure may be delivered to a subject via a single route administration. In some embodiments, an AAV particle of the present disclosure may be delivered to a subject via a multi-site route of administration. In some embodiments, a subject may be administered at 2, 3, 4, 5, or more than 5 sites.

[1340] In some embodiments, an AAV particle of the present disclosure is administered via a bolus infusion. In some embodiments, an AAV particle of the present disclosure is administered via sustained delivery over a period of minutes, hours, or days. In some embodiments, the infusion rate may be changed depending on the subject, distribution, formulation, and/or another delivery parameter. In some embodiments, an AAV particle of the present disclosure is administered using a controlled release, e.g., a release profile that conforms to a particular pattern of release to effect a therapeutic outcome. In some embodiments, an AAV particle of the present disclosure is administered using a sustained release, e.g., a release profile that conforms to a release rate over a specific period of time.

[1341] In some embodiments, an AAV particle may be delivered by more than one route of administration. As non-limiting examples of combination administrations, an AAV particle may be delivered by intrathecal and intracerebroventricular, or by intravenous and intraparenchymal administration. In some embodiments, an AAV particle may be delivered intra-tumoral and/or delivered into resection void (e.g., the space left from the removal of a tumor).

### Intravenous Administration

[1342] In some embodiments, an AAV particle described herein may be administered to a subject by systemic administration. In some embodiments, the systemic administration is intravenous administration. In another embodiment, the systemic administration is intraarterial administration. In some embodiments, an AAV particle of the present disclosure may be administered to a subject by intravenous administration. In some embodiments, the intravenous administration may be achieved by subcutaneous delivery. In some embodiments, the AAV particle is administered to the subject via focused ultrasound (FUS), e.g., coupled with the intravenous administration of microbubbles (FUS-MB) or MRI-guided FUS coupled with intravenous administration, e.g., as described in Terstappen et al. (Nat Rev Drug Discovery, https://doi.org/10.1038/s41573-021-00139-y (2021)), the contents of which are incorporated herein by reference in its entirety. In some embodiments, the AAV particle is administered to the subject intravenously. In some embodiments, the intravenous administration may be achieved by a tail vein injection (e.g., in a mouse model). In some embodiments, the intravenous administration may be achieved by retro-orbital injection.

### Administration to the CNS

[1343] In some embodiments, an AAV particle described herein may be delivered by direct injection into the brain. As a non-limiting example, the brain delivery may be by intrahippocampal administration. In some embodiments, an AAV particle of the present disclosure may be administered to a subject by intraparenchymal administration. In some embodiments, the intraparenchymal administration is to tissue of the central nervous system. In some embodiments, an AAV particle of the present disclosure may be administered to a subject by intracranial delivery (See, e.g., U.S. Pat. No. 8,119,611; the content of which is incorporated herein by reference in its entirety). In some embodiments, an AAV particle described herein may be delivered by injection into the CSF pathway. Non-limiting examples of delivery to the CSF pathway include intrathecal and intracerebroventricular administration. In some embodiments, the AAV particle is administered via intra cisterna magna (ICM).

[1344] In some embodiments, an AAV particle may be delivered to the brain by systemic delivery. As a non-limiting example, the systemic delivery may be by intravascular administration. As a non-limiting example, the systemic or intravascular administration may be intravenous.

[1345] In some embodiments, an AAV particle of the present disclosure may be delivered by an intraocular delivery route. A non-limiting example of an intraocular administration includes an intravitreal injection.

### Intramuscular Administration

[1346] In some embodiments, an AAV particle described herein may be delivered by intramuscular administration. Without wishing to be bound by theory, it is believed in some embodiments, that the multi-nucleated nature of muscle cells provides an advantage to gene transduction subsequent to AAV delivery. In some embodiments, cells of the muscle are capable of expressing recombinant proteins with the appropriate post-translational modifications. Without wishing to be bound by theory, it is believed in some embodiments, the enrichment of muscle tissue with vascular structures allows for transfer to the blood stream and whole-body delivery. Examples of intramuscular administration include systemic (e.g., intravenous), subcutaneous or directly into the muscle. In some embodiments, more than one injection is administered. In some embodiments, an AAV particle of the present disclosure may be delivered by an intramuscular delivery route. (See, e.g., U.S. Pat. No. 6,506,379; the content of which is incorporated herein by reference in its entirety). Non-limiting examples of intramuscular administration include an intravenous injection or a subcutaneous injection.

[1347] In some embodiments, an AAV particle of the present disclosure is administered to a subject and transduces the muscle of a subject. As a non-limiting example, an AAV particle is administered by intramuscular administration. In some embodiments, an AAV particle of the present disclosure may be administered to a subject by subcutaneous administration. In some embodiments, the intramuscular administration is via systemic delivery. In some embodiments, the intramuscular administration is via intravenous delivery. In some embodiments, the intramuscular administration is via direct injection to the muscle.

[1348] In some embodiments, the muscle is transduced by administration, e.g., intramuscular administration. In some embodiments, an intramuscular delivery comprises administration at one site. In some embodiments, an intramuscular delivery comprises administration at more than one site. In some embodiments, an intramuscular delivery comprises administration at two sites. In some embodiments, an intramuscular delivery comprises administration at three sites. In some embodiments, an intramuscular delivery comprises administration at four sites. In some embodiments, an intramuscular delivery comprises administration at more than four sites. In some embodiments, intramuscular delivery is combined with at least one other method of administration.

[1349] In some embodiments, an AAV particle may be administered to a subject by peripheral injections. Non-limiting examples of peripheral injections include intraperitoneal, intramuscular, intravenous, conjunctival, or joint injection. It was disclosed in the art that the peripheral administration of AAV vectors can be transported to the central nervous system, for example, to the motor neurons (e.g., U.S. Patent Publication Nos. US20100240739 and US20100130594; the content of each of which is incorporated herein by reference in their entirety).

[1350] In some embodiments, an AAV particle of the present disclosure may be administered to a subject by intraparenchymal administration. In some embodiments, the intraparenchymal administration is to muscle tissue. In some embodiments, an AAV particle of the present disclosure is delivered as described in Bright et al 2015 (Neurobiol Aging. 36(2):693-709), the contents of which are herein incorporated by reference in their entirety. In some embodiments, an AAV particle of the present disclosure is administered to the gastrocnemius muscle of a subject. In some embodiments, an AAV particle of the present disclosure is administered to the bicep femorii of the subject. In some embodiments, an AAV particles of the present disclosure is administered to the tibialis anterior muscles. In some embodiments, an AAV particle of the present disclosure is administered to the soleus muscle.

### Depot Administration

[1351] As described herein, in some embodiments, a pharmaceutical composition and/or an AAV particle of the present disclosure are formulated in depots for extended release. Generally, specific organs or tissues are targeted for administration.

[1352] In some embodiments, a pharmaceutical composition and/or an AAV particle of the present disclosure are spatially retained within or proximal to target tissues. Provided are methods of providing a pharmaceutical composition, an AAV particle, to target tissues of mammalian subjects by contacting target tissues (which comprise one or more target cells) with the pharmaceutical composition and/or the AAV particle, under conditions such that they are substantially retained in target tissues, e.g., such that at least 10, 20, 30, 40, 50, 60, 70, 80, 85, 90, 95, 96, 97, 98, 99, 99.9, 99.99 or greater than 99.99% of the composition is retained in the target tissues. In some embodiments, retention is determined by measuring the amount of pharmaceutical composition and/or AAV particle, that enter a target cell or a plurality of target cells. For example, at least 1%, 5%, 10%, 20%, 30%, 40%, 50%, 60%, 70%, 80%, 85%, 90%, 95%, 96%, 97%, 98%, 99%, 99.9%, 99.99%, or greater than 99.99% of a pharmaceutical composition and/or an AAV particle, administered to a subject are present intracellularly at a period of time following administration. For example, intramuscular injection to a subject may be performed using aqueous compositions comprising a pharmaceutical composition and/or an AAV particle of the present disclosure and a transfection reagent, and retention is determined by measuring the amount of the pharmaceutical composition and/or the AAV particle, present in the muscle cell or plurality of muscle cells.

[1353] In some embodiments, disclosed herein are methods of providing a pharmaceutical composition and/or an AAV particle of the present disclosure to a tissue of a subject, by contacting the tissue (comprising a cell, e.g., a plurality of cells) with the pharmaceutical composition and/or the AAV particle under conditions such that they are substantially retained in the tissue. In some embodiments, a pharmaceutical composition and/or AAV particle described herein comprise a sufficient amount of an active ingredient such that the effect of interest is produced in at least one cell. In some embodiments, a pharmaceutical composition and/or an AAV particle generally comprise one or more cell penetration agents. In some embodiments, the disclosure provides a naked formulations (such as without cell penetration agents or other agents), with or without pharmaceutically acceptable carriers.

### Delivery

[1354] In some embodiments, an AAV particle or a pharmaceutical composition of the present disclosure may be administered or delivered using the methods for treatment of disease described in U.S. Pat. No. 8,999,948, or International Publication No. WO2014178863, the contents of which are herein incorporated by reference in their entirety.

[1355] In some embodiments, an AAV particle or a pharmaceutical composition of the present disclosure may be administered or delivered using the methods for delivering gene therapy as described in US Application No. 20150126590, the contents of which are herein incorporated by reference in their entirety.

[1356] In some embodiments, an AAV particle or a pharmaceutical composition of the present disclosure may be administered or delivered using the methods for delivery of a CNS gene therapy as described in U.S. Pat. Nos. 6,436,708, and 8,946,152, and International Publication No. WO2015168666, the contents of which are herein incorporated by reference in their entirety.

[1357] In some embodiments, an AAV particle or a pharmaceutical composition of the present disclosure may be administered or delivered using the methods for delivering a protein using an AAV vector described in European Patent Application No. EP2678433, the contents of which are herein incorporated by reference in their entirety.

[1358] In some embodiments, an AAV particle or a pharmaceutical composition of the present disclosure may be administered or delivered using the methods for delivering DNA to the bloodstream described in U.S. Pat. No. 6,211,163, the contents of which are herein incorporated by reference in their entirety.

[1359] In some embodiments, an AAV particle or a pharmaceutical composition of the present disclosure may be administered or delivered using the methods for delivering a payload to the central nervous system described in U.S. Pat. No. 7,588,757, the contents of which are herein incorporated by reference in their entirety.

[1360] In some embodiments, an AAV particle or a pharmaceutical composition of the present disclosure may be administered or delivered using the methods for delivering a payload described in U.S. Pat. No. 8,283,151, the contents of which are herein incorporated by reference in their entirety.

[1361] In some embodiments, an AAV particle or a pharmaceutical composition of the present disclosure may be administered or delivered using the methods for delivering a payload using a glutamic acid decarboxylase (GAD) delivery vector described in International Patent Publication No. WO2001089583, the contents of which are herein incorporated by reference in their entirety.

[1362] In some embodiments, an AAV particle or a pharmaceutical composition of the present disclosure may be administered or delivered using the methods for delivering a payload to neural cells described in International Patent Publication No. WO2012057363, the contents of which are herein incorporated by reference in their entirety.

### Delivery to Cells

[1363] The present disclosure also provides a method of delivering to a cell or a tissue any of the above-described AAV particles, comprising contacting the cell or tissue with said AAV particle or contacting the cell or tissue with a formulation comprising said AAV particle, or contacting the cell or tissue with any of the described compositions, e.g., a pharmaceutical composition described herein. The method of delivering an AAV particle to a cell or tissue can be accomplished in vitro, ex vivo, or in vivo.

### Delivery to Subjects

[1364] The present disclosure also provides a method of delivering to a subject, e.g., a mammalian subject, any of the above-described AAV particles comprising administering to the subject said AAV particle, or administering to the subject a formulation comprising said AAV particle, or administering to the subject any of the described compositions, including pharmaceutical compositions.

### Dose and Regimen

[1365] The present disclosure provides methods of administering an AAV particle described herein to a subject in need thereof. A pharmaceutical, diagnostic, or prophylactic AAV particle and composition of the present disclosure may be administered to a subject using any amount and any route of administration effective for preventing, treating, managing, or diagnosing a disease, disorder and/or condition. In some embodiments, an effective amount of an AAV particle will vary from subject to subject, depending on the species, age, and general condition of the subject, the severity of the disease, the particular composition, its mode of administration, its mode of activity, and the like. The subject may be a human, a mouse, a non-human primate, a mammal, or an animal. In some embodiments, a composition in accordance with the disclosure can be formulated in unit dosage form for ease of administration and uniformity of dosage. In some embodiments, the total daily usage of a composition of the present disclosure may be decided by the attending physician within the scope of sound medical judgment. In some embodiments, a therapeutically effective, prophylactically effective, or appropriate diagnostic dose level for a subject may depend upon a variety of factors including the disorder being treated and the severity of the disorder; the activity of the specific payload employed; the specific composition employed; the age, body weight, general health, sex and diet of the patient; the time of administration, route of administration, and rate of excretion of the AAV particle employed; the duration of the treatment; drugs used in combination or coincidental with the AAV particle employed; and like factors well known in the medical arts.

[1366] In some embodiments, a pharmaceutical composition comprising an AAV particle of the present disclosure may be administered at dosage levels sufficient to deliver from about 0.0001 mg/kg to about 100 mg/kg, e.g., from about 0.001 mg/kg to about 0.05 mg/kg, from about 0.005 mg/kg to about 0.05 mg/kg, from about 0.001 mg/kg to about 0.005 mg/kg, from about 0.05 mg/kg to about 0.5 mg/kg, from about 0.01 mg/kg to about 50 mg/kg, from about 0.1 mg/kg to about 40 mg/kg, from about 0.5 mg/kg to about 30 mg/kg, from about 0.01 mg/kg to about 10 mg/kg, from about 0.1 mg/kg to about 10 mg/kg, or from about 1 mg/kg to about 25 mg/kg, of subject body weight per day, one or more times a day, to obtain the desired therapeutic, diagnostic, or prophylactic, effect. In some embodiments, the above dosing concentrations may be converted to vg or viral genomes (e.g., a genetic element as described herein) per kg or into total viral genomes administered by one of skill in the art.

[1367] In some embodiments, a pharmaceutical composition comprising an AAV particle in accordance with the present disclosure may be administered at about 10 to about 600 μl/site, 50 to about 500 μl/site, 100 to about 400 μl/site, 120 to about 300 μl/site, 140 to about 200 μl/site, about 160 μl/site. As non-limiting examples, AAV particles may be administered at 50 μl/site and/or 150 μl/site.

[1368] In some embodiments, a dosage may be delivered using multiple administrations (e.g., two, three, four, or more than four administrations). In some embodiments, when multiple administrations are used, a split dosing regimen, such as those described herein, may be used. In some embodiments, a split dose is the division of single unit dose or total daily dose into two or more doses, e.g., two or more administrations of the single unit dose. In some embodiments, a single unit dose is a dose of any therapeutic administered in one dose/at one time/single route/single point of contact, e.g., a single administration event.

[1369] In some embodiments, a dosage of an AAV particle of the present disclosure may be administered as a pulse dose or as a continuous flow. In some embodiments, a pulse dose comprises a series of single unit doses of any therapeutic administered with a set frequency over a period of time. In some embodiments, a continuous flow comprises a dose of therapeutic administered continuously for a period of time in a single route/single point of contact, e.g., a continuous administration event. In some embodiments, a total daily dose, e.g., an amount given or prescribed in 24-hour period, may be administered by any of these methods, or as a combination of these methods, or by any other methods suitable for a pharmaceutical administration.

[1370] In some embodiments, delivery of an AAV particle of the present disclosure to a subject provides neutralizing activity to a subject. In some embodiments, the neutralizing activity can be for at least 1 month, 2 months, 3 months, 4 months, 5 months, 6 months, 7 months, 8 months, 9 months, 10 months, 11 months, 1 year, 13 months, 14 months, 15 months, 16 months, 17 months, 18 months, 19 months, 20 months, 20 months, 21 months, 22 months, 23 months, 2 years, 3 years, 4 years, 5 years, 6 years, 7 years, 8 years, 9 years, 10 years or more than 10 years.

[1371] In some embodiments, delivery of an AAV particle may comprise a total dose between about 1×10⁶ VG and about 1×10¹⁶ VG. In some embodiments, delivery may comprise a total dose of about 1×10⁶, 2×10⁶, 3×10⁶, 4×10⁶, 5×10⁶, 6×10⁶, 7×10⁶, 8×10⁶, 9×10⁶, 1×10⁷, 2×10⁷, 3×10⁷, 4×10⁷, 5×10⁷, 6×10⁷, 7×10⁷, 8×10⁷, 9×10⁷, 1×10⁸, 2×10⁸, 3×10⁸, 4×10⁸, 5×10⁸, 6×10⁸, 7×10⁸, 8×10⁸, 9×10⁸, 1×10⁹, 2×10⁹, 3×10⁹, 4×10⁹, 5×10⁹, 6×10⁹, 7×10⁹, 8×10⁹, 9×10⁹, 1×10¹⁰, 1.9×10¹⁰, 2×10¹⁰, 3×10¹⁰, 3.73×10¹⁰, 4×10¹⁰, 5×10¹⁰, 6×10¹⁰, 7×10¹⁰, 8×10¹⁰, 9×10¹⁰, 1×10¹¹, 2×10¹¹, 2.5×10¹¹, 3×10¹¹, 4×10¹¹, 5×10¹¹, 6×10¹¹, 7×10¹¹, 8×10¹¹, 9×10¹¹, 1×10¹², 2×10¹², 3×10¹², 4×10¹², 5×10¹², 6×10¹², 7×10¹², 8×10¹², 9×10¹², 1×10¹³, 2×10¹³, 3×10¹³, 4×10¹³, 5×10¹³, 6×10¹³, 7×10¹³, 8×10¹³, 9×10¹³, 1×10¹⁴, 2×10¹⁴, 3×10¹⁴, 4×10¹⁴, 5×10¹⁴, 6×10¹⁴, 7×10¹⁴, 8×10¹⁴, 9×10¹⁴, 1×10⁵, 2×10¹⁵, 3×10¹⁵, 4×10¹⁵, 5×10¹⁵, 6×10¹⁵, 7×10¹⁵, 8×10¹⁵, 9×10¹⁵, or 1×10¹⁶ VG. As a non-limiting example, the total dose is 1×10¹³ VG. As another non-limiting example, the total dose is 2.1×10¹²VG.

[1372] In some embodiments, delivery of an AAV particle may comprise a composition concentration between about 1×10⁶ VG/mL and about 1×10¹⁶ VG/mL. In some embodiments, delivery may comprise a composition concentration of about 1×10⁶, 2×10⁶, 3×10⁶, 4×10⁶, 5×10⁶, 6×10⁶, 7×10⁶, 8×10⁶, 9×10⁶, 1×10⁷, 2×10⁷, 3×10⁷, 4×10⁷, 5×10⁷, 6×10⁷, 7×10⁷, 8×10⁷, 9×10⁷, 1×10⁸, 2×10⁸, 3×10⁸, 4×10⁸, 5×10⁸, 6×10⁸, 7×10⁸, 8×10⁸, 9×10⁸, 1×10⁹, 2×10⁹, 3×10⁹, 4×10⁹, 5×10⁹, 6×10⁹, 7×10⁹, 8×10⁹, 9×10⁹, 1×10¹⁰, 2×10¹⁰, 3×10¹⁰, 4×10¹⁰, 5×10¹⁰, 6×10¹⁰, 7×10¹⁰, 8×10¹⁰, 9×10¹⁰, 1×10¹¹, 2×10¹¹, 3×10¹¹, 4×10¹¹, 5×10¹¹, 6×10¹¹, 7×10¹¹, 8×10¹¹, 9×10¹¹, 1×10¹², 2×10¹², 3×10¹², 4×10¹², 5×10¹², 6×10¹², 7×10¹², 8×10¹², 9×10¹², 1×10¹³, 2×10¹³, 3×10¹³, 4×10¹³, 5×10¹³, 6×10¹³, 7×10¹³, 8×10¹³, 9×10¹³, 1×10¹⁴, 2×10¹⁴, 3×10¹⁴, 4×10¹⁴, 5×10¹⁴, 6×10¹⁴, 7×10¹⁴, 8×10¹⁴, 9×10¹⁴, 1×10⁵, 2×10¹⁵, 3×10¹⁵, 4×10¹⁵, 5×10¹⁵, 6×10¹⁵, 7×10¹⁵, 8×10¹⁵, 9×10¹⁵, or 1×10¹⁶ VG/mL. In some embodiments, the delivery comprises a composition concentration of 1×10¹³ VG/mL. In some embodiments, the delivery comprises a composition concentration of 2.1×10¹² VG/mL.

### Combinations

[1373] In some embodiments, an AAV particle described herein may be used in combination with one or more other therapeutic, prophylactic, research or diagnostic agents. In some embodiments, the agents are administered at the same time and/or are formulated for delivery together, e.g., simultaneous delivery. In some embodiments, the agents are formulated for sequential delivery. In some embodiments, compositions can be administered concurrently with, prior to, or subsequent to, one or more other desired therapeutics or medical procedures. In general, each agent will be administered at a dose and/or on a time schedule determined for that agent. In some embodiments, the present disclosure encompasses the delivery of pharmaceutical, prophylactic, research, or diagnostic compositions in combination with agents that may improve their bioavailability, reduce and/or modify their metabolism, inhibit their excretion, and/or modify their distribution within the body.

### Measurement of Expression

[1374] In some embodiments, the methods provided herein further comprise evaluating, e.g., measuring, the level of a payload, e.g., an antibody molecule, generated in a subject, e.g., in a cell or tissue of the subject. In some embodiments, the cell is a neuronal cell. In some embodiments, the cell is an endothelial cell. In some embodiments, the tissue is a central nervous system (CNS) tissue, e.g., a brain tissue. In some embodiments, the tissue is one known to show increased levels of an ErbB receptor tyrosine kinase. The ErbB receptor tyrosine kinase family includes at least four distinct members including Epidermal Growth Factor Receptor (EGFR or ErbB1), HER2 (ErbB2 or p185neu), HER3 (ErbB3) and HER4 (ErbB4 or tyro2). Amplification of HER2 is often observed in breast and ovarian cancers. Overexpression of HER2 (frequently but not uniformly due to gene amplification) has also been observed in carcinomas of the stomach, endometrium, salivary gland, lung, kidney, colon, thyroid, pancreas and bladder. In some embodiments, the tissue is a breast or ovarian tissue. In some embodiments, the tissue is a stomach tissue, endometrium tissue, salivary gland tissue, lung tissue, kidney tissue, colon tissue, thyroid tissue, pancreas tissue or bladder tissue. In some embodiments, the method further comprises a blood test, an imaging test, a CNS biopsy sample, or an aqueous cerebral spinal fluid biopsy. In some embodiments, measuring the level of antibody molecules is performed prior to, during, or subsequent to treatment with the AAV particle, e.g., plurality of AAV particles.

[1375] In some embodiments, expression of a payload encoded by a genetic element described herein may be measured using various methods known in the art such as, but not limited to immunochemistry (e.g., IHC), in situ hybridization (ISH), enzyme-linked immunosorbent assay (ELISA), affinity ELISA, ELISPOT, flow cytometry, immunocytology, immunohistochemistry, surface plasmon resonance analysis, kinetic exclusion assay, liquid chromatography-mass spectrometry (LCMS), high-performance liquid chromatography (HPLC), BCA assay, immunoelectrophoresis, Western blot, SDS-PAGE, protein immunoprecipitation, and/or PCR.

### V. METHODS AND USES OF THE COMPOSITIONS

[1376] The present disclosure provides a method of delivering an exogenous antibody molecule that binds to HER2, to a subject. In some embodiments, the method comprising administering an effective amount of a pharmaceutical composition described herein or an AAV particle, e.g., a plurality of AAV particles, comprising an AAV vector, and/or a genetic element encoding an antibody molecule (e.g., an anti-HER2 antibody) described herein. In some embodiments, the subject has, has been diagnosed with having, or is at risk of having a disease or disorder, e.g., a disease associated with over-expression of HER2 (e.g., cancer and/or metastatic cancer).

[1377] The present disclosure also provides a method of treating a disease, disorder and/or condition in a subject, comprising administering to the subject any of the AAV particles described herein or administering to the subject an effective amount of a pharmaceutical composition described herein or an AAV particle, e.g., a plurality of AAV particles, comprising an AAV vector, and/or a genetic element encoding an antibody molecule (e.g., an anti-HER2 antibody) described herein.

[1378] In some embodiments, an AAV particle of the present disclosure is administered to a subject prophylactically. In some embodiments, an AAV particle of the present disclosure is administered to a subject having, diagnosed with having, or at risk of having a disease or disorder, e.g., a disease and/or a disorder associated with over-expression of HER2 (e.g., cancer and/or metastatic cancer).

[1379] In some embodiments, an AAV particle or a plurality of AAV particles of the present disclosure are part of an active immunization strategy to protect against a disease and disorder, e.g., a disease and/or a disorder associated with over-expression of HER2 (e.g., cancer and/or metastatic cancer). In some embodiments, in an active immunization strategy, a vaccine or an AAV particle is administered to a subject to prevent a disease by activating the subject's production of antibodies.

[1380] In some embodiments, an AAV particle or a plurality of AAV particles of the present disclosure are part of a passive immunization strategy. In some embodiments, in a passive immunization strategy, antibody molecules against a particular agent or antigen are given directly to the subject.

[1381] In some embodiments, an AAV particle or a plurality of AAV particles of the present disclosure may be used for passive immunotherapy of a disease and/or a disorder associated with over-expression of HER2 (e.g., cancer and/or metastatic cancer). As a non-limiting example, an AAV particles of the present disclosure may encode an anti-HER2 antibody molecule, e.g., as described in Tables 11A-11C. In some embodiments, an AAV particle may be administered by bilateral intraparenchymal delivery directly to the hippocampus.

[1382] Without wishing to be bound by theory, it is believed in some embodiments, that administration of an AAV particle or plurality of AAV particles of the present disclosure may result in substantially higher antibody levels in a cell (e.g., a neuronal cell or an endothelial cell) or tissue (e.g., a CNS tissue) of the subject, than if anti-HER2 antibody molecule were administered by passive immunization. While not wishing to be bound by theory, it is believed in some embodiments that passive immunization is thought to generate 20-40 ng of antibody per mg of protein in the brain of a subject. In some embodiments, AAV-mediated delivery of an antibody molecule results in antibody levels 2-5× above the levels observed, e.g., measured, with passive immunization. In some embodiments, AAV-mediated delivery of an antibody molecule results in antibody levels 1.5-3× above the levels observed, e.g., measured, with passive immunization. In some embodiments, AAV-mediated delivery of an antibody molecule results in antibody levels 5-10× above the levels observed, e.g., measured, with passive immunization. In some embodiments, AAV-mediated delivery of an antibody molecule results in antibody levels 8-16× above the levels observed, e.g., measured, with passive immunization.

### Diagnostic Applications

[1383] In some embodiments, an AAV particle of the present disclosure may be used for a diagnostic purpose or as diagnostic tools for any disease and/or disorder associated with HER2 over-expression (e.g., cancer and/or metastatic cancer). As non-limiting examples, an AAV particle of the present disclosure or the antibody molecule encoded by a genetic element therein may be used as a biomarker for disease diagnosis. As a second non-limiting example, an AAV particle of the present disclosure or the antibody molecule encoded by a genetic element therein may be used for diagnostic imaging purposes, e.g., MRI, PET, CT or ultrasound.

### Preventative Applications

[1384] In some embodiments, an AAV particle of the present disclosure or an antibody molecule encoded by a genetic element therein may be used to prevent a disease or stabilize progression of a disease. In some embodiments, an AAV particle of the present disclosure is used as a prophylactic to prevent a disease or disorder. In some embodiments, an AAV particle of the present disclosure is used to halt further progression of a disease or disorder. As a non-limiting example, an AAV particle may be used in a manner similar to that of a vaccine.

### Research Applications

[1385] In some embodiments, an AAV particle of the present disclosure or an antibody molecule encoded by a genetic element therein may be used as a research tool. In some embodiments, an AAV particle may be used as in any research experiment, e.g., in vivo or in vitro experiments. In a non-limiting example, an AAV particle may be used in a cultured cell, or plurality of cultured cells. The cultured cells may be produced from any origin known to one with skill in the art, and may be as non-limiting examples, produced from a stable cell line, an animal model or a human patient or control subject. In a non-limiting example, an AAV particle may be used in in vivo experiments in an animal model (e.g., a mouse, rat, rabbit, dog, cat, non-human primate, guinea pig, ferret, c-elegans, drosophila, zebrafish, or any other animal used for research purposes, known in the art). In another non-limiting example, an AAV particle may be used in a human research experiment or a human clinical trial.

### Therapeutic Applications

[1386] The present disclosure additionally provides a method of treating a disease associated with HER2 over-expression in a subject, e.g., a human subject, comprising administering to the subject any of the AAV particles described herein or administering to the subject an effective amount of a pharmaceutical composition described herein or an AAV particle, e.g., a plurality of AAV particles, comprising an AAV vector, and/or a genetic element encoding an antibody molecule (e.g., an anti-HER2 antibody) described herein. In some embodiments, a disease associated with HER2 over-expression comprises indications involving irregular cell proliferation. In some embodiments, treatment of a disease associated with HER2 over-expression comprises prevention of said disease associated with HER2 over-expression. In some embodiments, the subject has previously been treated for HER2+ cancer.

[1387] In some embodiments, the disease associated with HER2 over-expression in a subject is a HER2-positive cancer. Current methodologies for determining of HER2 status include immunohistochemistry (IHC) to detect HER2 protein overexpression, fluorescence in situ hybridization (FISH), or chromogenic in situ hybridization to detect amplification of the HER2 gene. A “HER2 positive” cancer, cancer cell, subject or patient, as used herein, refers to a cancer, cancer cell, subject, or patient exhibiting a score of at least 2 when using a HercepTest® (DakoCytomation California Inc., Carpenteria, Calif.) or a cancer, cancer cell, subject, or patient that has been identified as such by FISH, having a centromere 17 corrected HER2 gene copy number greater than 2 (HER2 FISH/CEP17>2; FISH positive). In certain embodiments, the HER2 positive cell exhibits a score of at least 2+ or 3+ using the HercepTest® Immunohistochemistry assay.

[1388] In some instances, the HER2-positive cancer is a HER2-positive solid tumor. Additionally, or alternatively, the HER2-positive cancer may be a locally advanced or metastatic HER2-positive cancer. In some instances, the HER2-positive cancer is a HER2-positive breast cancer or a HER2-positive gastric cancer. In some embodiments, the HER2-positive cancer is selected from the group consisting of a HER2-positive gastroesophageal junction cancer, a HER2-positive colorectal cancer, a HER2-positive lung cancer (e.g., a HER2-positive non-small cell lung carcinoma), a HER2-positive pancreatic cancer, a HER2-positive colorectal cancer, a HER2-positive bladder cancer, a HER2-positive salivary duct cancer, a HER2-positive ovarian cancer (e.g., a HER2-positive epithelial ovarian cancer), or a HER2-positive endometrial cancer. In some instances, the HER2-positive cancer is prostate cancer.

[1389] In some embodiments, the HER2-positive cancer has metastasized to the central nervous system (CNS). In some instances, the metastasized HER2-cancer has formed CNS neoplasms. Examples of primary CNS cancers could be gliomas (which may include glioblastoma (also known as glioblastoma multiforme), astrocytomas, oligodendrogliomas, and ependymomas, and mixed gliomas), meningiomas, medulloblastomas, neuromas, and primary CNS lymphoma (in the brain, spinal cord, or meninges), among others. Examples of metastatic cancers include those originating in another tissue or organ, e.g., breast, lung, lymphoma, leukemia, melanoma (skin cancer), colon, kidney, prostate, or other types that metastasize to brain.

[1390] In some embodiments, the HER2-positive cancer is breast cancer. Breast cancer is known to be a heterogeneous disease. There are different subtypes that can be defined based on (i) a molecular profile of a breast cancer tumor, (ii) gene array testing, or (iii) an immunohistochemical analysis approach. In some embodiments the breast cancer is Basal or Luminal subtype. In particular, mammary ducts are bilayered structures composed of a luminal layer and a myoepithelial layer that adhere to a basement membrane. The term basal refers to certain cancers that arise from the basal layer of the stratified epithelia. Breast carcinomas of the basal subtype reside in the basal layer of the ductal epithelium of the breast as opposed to the apical or luminal layers. Such cancers have distinct cytological features and gene expression profiles such as an intermediate filament profile (cytokeratins) first observed in the basal cells of the skin.

[1391] Most breast cancers are luminal tumors. Luminal tumor cells look like the cells of breast cancers that start in the inner (luminal) cells lining the mammary ducts. Of the four subtypes of luminal cancer, luminal A tumors tend to have the best prognosis, with fairly high survival rates and fairly low recurrence rates. Luminal B breast cancers are ER+ and/or PR+, HER2+(or HER2− with high Ki67). About 6-17% of breast cancers are luminal B. Women with luminal B tumors are often diagnosed at a younger age than those with luminal A tumors. Compared to luminal A tumors, luminal B tumors also tend to have factors that lead to a poorer prognosis including: poorer tumor grade; larger tumor size; and p53 gene mutations.

[1392] In some embodiments, the breast cancer is ductal carcinoma in situ (intraductal carcinoma), lobular carcinoma in situ, invasive (or infiltrating) ductal carcinoma, invasive (or infiltrating) lobular carcinoma, inflammatory breast cancer, Paget disease of the nipple, phyllodes tumor, angiosarcoma or invasive breast carcinoma. In some embodiments, the invasive breast carcinoma is further categorized into subtypes. In some embodiments, the subtypes include adenoid cystic (or adenocystic) carcinoma, low-grade adenosquamous carcinoma, medullary carcinoma, mucinous (or colloid) carcinoma, papillary carcinoma, tubular carcinoma, metaplastic carcinoma, micropapillary carcinoma or mixed carcinoma.

[1393] In some embodiments, the breast cancer is classified according to stages or how far the tumor cells have spread within the breast tissues and to other portions of the body. There are five stages of breast cancer, Stage 0-IV. The method of treating cancer described herein may be used to treat patients with breast cancer classified as Stage 0-Stage IV.

[1394] Stage 0 breast cancer refers to non-invasive breast cancers or that there are no evidence of cancer cells or abnormal non-cancerous cells breaking out of the origin site. Stage I breast cancer refers to invasive breast cancer in which the cancer cells have invaded into surrounding tissues. Stage I is subclassified into Stage IA and IB, in which Stage IA describes tumor measures up to 2 cm with no spread of cancer cells. Stage IB describes absence of tumor in breast but have small lumps of cancer cells between 0.2 mm to 2 mm within the lymph nodes. Stage II breast cancer is further subdivided into Stage IIA and IIB. Stage IIA describes tumor between 2 cm to 5 cm in breast only, or absence of tumor in breast but with cancer between 2 mm to 2 cm in axillary lymph nodes. Stage IIB describes tumor larger than 5 cm in breast only, or tumor between 2 cm to 5 cm in breast with presence of small tumors from 0.2 mm to 2 mm in axillary lymph nodes. Stage III breast cancer is further subdivided into Stage IIIA, IIIB, and IIIC. Stage IIIA describes absence of tumor or tumor greater than 5 cm in breast with small tumors in 4-9 axillary lymph nodes or small tumors 0.2 mm-2 mm in size in axillary lymph nodes. Stage IIIB describes tumor spreading into the chest wall or skin of the breast causing swelling or ulcer and with presence of tumor in up to 9 axillary lymph nodes. Inflammatory breast cancer is also considered as Stage IIIB. Stage IIIC describes absence of tumor or tumor spreading into the chest wall or to the skin of the breast, with tumor present in 10 or more axillary lymph nodes. Stage IV breast cancer refers to invasive breast cancer that has metastasized into the lymph nodes and other portions of the body.

[1395] In some embodiments, a method of treating a disease associated with HER2 over-expression in a subject in need thereof may comprise the steps of: (1) generating and/or selecting an anti-HER2 antibody molecule; (2) producing an AAV particle comprising a genetic element that comprises a nucleic acid comprising a transgene encoding an anti-HER2 antibody molecule of (1); and (3) administering the AAV particle (or pharmaceutical composition thereof) to the subject.

[1396] In some embodiments, the methods of treating a disease associated with HER2 over-expression herein may be used as adjuvant treatment. “Adjuvant treatment” is taken to mean a therapy of a cancer patient immediately following an initial non chemotherapeutical therapy, e.g. surgery, or radiation. In general, the purpose of an adjuvant therapy is to provide a significantly smaller risk of recurrences compared without the adjuvant therapy. For example, the subjects may have surgery or radiation therapy, after which they received treatment using the methods described herein. In some embodiments, the AAV particle herein may be administered to a subject concurrently with, or post a surgical resection of a HER2/neu-positive solid tumor. The administration may occur at the site of surgical resection (e.g., into a resection void) of a HER2/neu-positive solid tumor in the subject, alternatively, the administration may occur in the area around a site of surgical resection of a HER2/neu-positive solid tumor, e.g., the margins of the tumor, in the subject. Additionally, the AAV particle herein may be administered concurrently with, or post a radiation treatment (e.g., radiotherapy) of a HER2/neu-positive solid tumor.

[1397] The present disclosure provides a method for administering to a subject in need thereof, e.g., a human subject, a therapeutically effective amount of an AAV particle or a plurality of AAV particles described herein to prevent slow, stop, or reverse disease progression.

[1398] In certain embodiments, the progression of the disease (e.g., cancer) may be assessed by Response Evaluation Criteria in Solid Tumors (RECIST 1.1) (see Thereasse P., et al. New Guidelines to Evaluate the Response to Treatment in Solid Tumors. J. of the National Cancer Institute; 2000; (92) 205-216 and Eisenhauer E. A., Therasse P., Bogaerts J., et al. New response evaluation criteria in solid tumours: Revised RECIST guideline (version 1.1). European J. Cancer; 2009; (45) 228-247). Overall responses for all possible combinations of tumor responses in target and non-target lesions with or without the appearance of new lesions are as follows:

TABLE 29
Response Evaluation Criteria in Solid Tumors (RECIST 1.1)

| | | | Overall |
|---|---|---|---|
| Target lesions | Non-target lesions | New lesions | response |
| CR | CR | No | CR |
| CR | Incomplete response/SD | No | PR |
| PR | Non-PD | No | PR |
| SD | Non-PD | No | SD |
| PD | Any | Yes or no | PD |
| Any | PD | Yes or no | PD |
| Any | Any | Yes | PD |

CR = complete response; PR = partial response; SD = stable disease; and PD = progressive disease.

[1399] With respect to the evaluation of target lesions, complete response (CR) is the disappearance of all target lesions, partial response (PR) is at least a 30% decrease in the sum of the longest diameter of target lesions, taking as reference the baseline sum longest diameter, progressive disease (PD) is at least a 20% increase in the sum of the longest diameter of target lesions, taking as reference the smallest sum longest diameter recorded since the treatment started or the appearance of one or more new lesions and stable disease (SD) is neither sufficient shrinkage to qualify for partial response nor sufficient increase to qualify for progressive disease, taking as reference the smallest sum longest diameter since the treatment started.

[1400] With respect to the evaluation of non-target lesions, complete response (CR) is the disappearance of all non-target lesions and normalization of tumor marker level; incomplete response/stable disease (SD) is the persistence of one or more non-target lesion(s) and/or the maintenance of tumor marker level above the normal limits, and progressive disease (PD) is the appearance of one or more new lesions and/or unequivocal progression of existing non-target lesions.

[1401] In some embodiments, the subject may achieve CNS progression free survival as indicated in the RANO-BM criteria (Response Assessment in Neuro-Oncology Brain Metastases).

[1402] In some embodiments, the subject being treated with the AAV particles herein has experienced metastatic HER2+ breast cancer leptomeningeal spread to the central nervous system. In some embodiments, the AAV particles are administered IV to subjects experiencing metastatic HER2+ breast cancer leptomeningeal spread to the central nervous system.

[1403] In some embodiments, the progression of the disorder and/or disease associated with HER2 over-expression is delayed. The delaying of progression means to defer, hinder, slow, retard, stabilize, and/or postpone development of the disease or disorder (e.g., a HER2-positive cancer, e.g., a HER2-positive breast cancer or a HER2-positive metastatic cancer). This delay can be of varying lengths of time, depending on the history of the disease and/or individual being treated. As is evident to one skilled in the art, a sufficient or significant delay can, in effect, encompass prevention, in that the individual does not develop the disease. For example, a late stage cancer, such as development of metastasis, may be delayed.

[1404] In some embodiments, the subject being treated for a disorder and/or disease associated with HER2 over-expression achieves a partial response. In some embodiments, the subject achieves a complete response. In some embodiments, the subject achieves progression free survival for a period of about 1 month, 2 months, 3 months. 4, months, 6 months, 7 months, 8 months, 9 months, 1 year, about 2 years, or about 3 years. In some embodiments, the subject achieves overall survival of about 1 year, about 2 years, about 3 years, about 4 years, about 5 years, 6 years, about 7 years, about 8 years, about 9 years, 10 years, about 15 years, or about 20 years.

[1405] In some embodiments, the disease associated with HER2 over-expression is a metastatic brain cancer. As another non-limiting example, disease progression may be measured by a change in the pathological features of the brain, CSF or other tissues of the subject, such as, but not limited to a decrease in the level of HER2 over-expressing cells or lesions. In some embodiments, the size of the lesion is decreased. In some embodiments, the lesions decrease in size, number, density, or a combination thereof.

[1406] In some embodiments, the method of treating a disease associated with HER2 over-expression in a subject, is used prophylactically. For prophylactic use, beneficial or desired results include results such as eliminating or reducing the risk, lessening the severity, or delaying the onset of the disease, including biochemical, histological and/or behavioral symptoms of the disease, its complications and intermediate pathological phenotypes presenting during development of the disease. For therapeutic use, beneficial or desired results include clinical results such as decreasing one or more symptoms resulting from the disease, increasing the quality of life of those suffering from the disease, decreasing the dose of other medications required to treat the disease, enhancing effect of another medication such as via targeting, delaying the progression of the disease, and/or prolonging survival. In the case of cancer or tumor, an effective amount of the drug may have the effect in reducing the number of cancer cells (e.g., HER2-positive cancer cells); reducing the tumor size; inhibiting (i.e., slow to some extent or desirably stop) cancer cell infiltration into peripheral organs; inhibit (i.e., slow to some extent and desirably stop) tumor metastasis; inhibiting to some extent tumor growth; and/or relieving to some extent one or more of the symptoms associated with the disorder.

### Combination Applications

[1407] In some embodiments, an AAV particle may be used in combination therapy with an additional therapeutic agent and/or therapy, e.g., an additional therapeutic agent and/or therapy suitable for treatment or prevention of a disease associated with HER2 over-expression. In some embodiments, the therapeutic agent may utilize a therapeutic modality known in the art, e.g., gene silencing or interference (e.g., miRNA, siRNA, RNAi, shRNA), gene editing (e.g., TALEN, CRISPR/Cas9 systems, zinc finger nucleases), and gene, protein or enzyme replacement.

[1408] In some embodiments, the administration of an AAV particle described herein further comprises administration of chemotherapeutic agent, e.g., a cytotoxic chemotherapy pharmaceutical compound. Exemplary cytotoxic chemotherapy pharmaceutical compounds include, but are not limited to, a cyclophosphamide, doxorubicin, prednisolone, an ifosamide, a methotrexate, a substituted nucleotide, a substituted nucleoside, fluorouracil, a mitomycin, adriamycin, vincristine, vindesine, taxol, cisplatin, carboplatin, etoposide, or a combination thereof.

[1409] The AAV particle may be administered in addition to any of the standard treatments of metastatic breast cancer. In some instances, for subject experiencing HER2-positive metastatic breast cancer with brain lesions, the first line treatment can include trastuzumab, pertuzumab, and/or a chemotherapeutic agent. If the subject is unresponsive or unable to be treated with the first line treatment, they may be treated with the second line therapeutics, (e.g., trastuzumab emtansine), or third line therapeutics (e.g., trastuzumab, tucatinib, capecitabine, Fam-trastuzumab deruxtecan-nxki, Lapatanib/capecitabine, Lapatanib, Margetuxumab, a chemotherapeutic agent, Neratanib/capecitabine). The AAV particles of the present invention may be used with any of the first, second, or third line therapeutics. Additionally, the AAV particles of the present invention may be administered to a subject who has been unresponsive to the prior lines of treatment. In some embodiments, the subject has experienced refractory HER2-positive cancer.

[1410] In some embodiments, the administration of the AAV particle described herein further comprises administration of a non-vectorized therapeutic antibody and/or chemotherapeutic agent. For example, the AAV particles may be administered with trastuzumab, pertuzumab, a chemotherapeutic agent, or a combination thereof. Additionally, the administration may include trastuzumab emtansine; and/or trastuzumab, tucatinib, capecitabine, Fam-trastuzumab deruxtecan-nxki, Lapatanib/capecitabine, Lapatanib, Margetuxumab, a chemotherapeutic agent, Neratanib/capecitabine, or a combination thereof.

[1411] In some embodiments, administration of an AAV particle described herein further comprises administration of an additional therapeutic agent and/or therapy suitable for treatment or prevention of a disease or disorder associated with HER2 over expression (e.g., cancer). In some embodiments, the additional therapeutic agent and/or therapy comprises a checkpoint inhibitor. In an embodiment, the checkpoint inhibitor is a biologic therapeutic or a small molecule. The checkpoint inhibitor can be a monoclonal antibody, a humanized antibody, a fully human antibody, a fusion protein or a combination thereof. The checkpoint inhibitor may inhibit a checkpoint protein selected from CTLA-4, PD-L1, PD-L2, PD1, B7-H3, B7-H4, BTLA, HVEM, TIM3, GAL9, LAG3, VISTA, KIR, 2B4, CD160, CGEN-15049, CHK 1, CHK2, A2aR, B-7 family ligands and combination thereof.

[1412] In some embodiments, any of the treatment regimens described herein include administration of a PD-1 axis binding antagonist (e.g., a PD-L1 binding antagonist, a PD-1 binding antagonist, or a PD-L2 binding antagonist). The PD-L1 binding antagonist may be an anti-PD-L1 antibody including, but not limited to MPDL3280A (atezolizumab), YW243.55.S70, MDX-1 105, and MED14736 (durvalumab), and MSB0010718C (avelumab). Antibody YW243.55. S70 is an anti-PD-L1 described in PCT Pub. No. WO 2010/077634. MDX-1 105, also known as BMS-936559, is an anti-PD-L1 antibody described in PCT Pub. No. WO 2007/005874. MED14736 (durvalumab) is an anti-PD-L1 monoclonal antibody described in PCT Pub. No. WO 2011/066389 and U.S. Pub. No. 2013/034559. Examples of anti-PD-L1 antibodies useful for the methods of this invention, and methods for making thereof are described in PCT Pub. Nos. WO 2010/077634, WO 2007/005874, and WO 2011/066389, and also in U.S. Pat. No. 8,217,149, and U.S. Pub. No. 2013/034559, which are incorporated herein by reference.

[1413] In some embodiments, the PD-1 binding antagonist is an anti-PD-1 antibody, such as an anti-PD-1 antibody selected from the group consisting of MDX-1 106 (nivolumab), MK-3475 (pembrolizumab), MEDI-0680 (AMP-514), PDR001, REGN2810, and BGB-108. MDX-1 1 06, also known as MDX-1 106-04, ONO-4538, BMS-936558, or nivolumab, is an anti-PD-1 antibody described in PCT Pub. No. WO 2006/121168. MK-3475, also known as pembrolizumab or lambrolizumab, is an anti-PD-1 antibody described in PCT Pub. No. WO 2009/114335. In other instances, the PD-1 binding antagonist is an immunoadhesin (e.g., an immunoadhesin comprising an extracellular or PD-1 binding portion of PD-L1 or PD-L2 fused to a constant region (e.g., an Fc region of an immunoglobulin sequence). In other instances, the PD-1 binding antagonist is AMP-224. AMP-224, also known as B7-DCIg, is a PD-L2-Fc fusion soluble receptor described in PCT Pub. Nos. WO 2010/027827 and WO 201 1/066342.

[1414] In other instances, the PD-L2 binding antagonist is an anti-PD-L2 antibody (e.g., a human, a humanized, or a chimeric anti-PD-L2 antibody). In some instances, the PD-L2 binding antagonist is an immunoadhesin.

[1415] In a further embodiment, an additional therapeutic agent is an antibody-drug conjugate (ADC). In one embodiment, a AAV particle described herein is co-administered with an ADC selected from an anti-CD79b antibody drug conjugate (such as anti-CD79b-MC-vc-PAB-MMAE or the anti-CD79b antibody drug conjugate described in any one of U.S. Pat. No. 8,088,378 and/or US 2014/0030280, or polatuzumab vedotin).

[1416] In some instances, the additional therapy includes an alkylating agent. In one instance, the alkylating agent is 4-[5-[bis(2-chloroethyl)amino]-1-methylbenzimidazol-2-yl]butanoic acid and salts thereof. In one instance, the alkylating agent is bendamustine.

[1417] In some instances, the additional therapy comprises a BCL-2 inhibitor. In one embodiment, the BCL-2 inhibitor is 4-(4-{[2-(4-chlorophenyl)-4,4-dimethylcyclohex-1-en-1-yl]methyl}piperazin-1-yl)-N-({3-nitro-4-[(tetrahydro-2H-pyran-4-ylmethyl)amino]phenyl}sulfonyl)-2-(1H-pyrrolo[2,3-b]pyridin-5-yloxy)benzamide and salts thereof. In one instance, the BCL-2 inhibitor is venetoclax (CAS #: 1257044-40-8).

[1418] In some instances, the additional therapy comprises a phosphoinositide 3-kinase (PI3K) inhibitor. In one instance, the PI3K inhibitor inhibits delta isoform PI3K (i.e., P1 10d). In some instances, the PI3K inhibitor is 5-Fluoro-3-phenyl-2-[(1S)-1-(7H-purin-6-ylamino)propyl]-4(3H)-quinazolinone and salts thereof. In some instances, the PI3K inhibitor is idelalisib (CAS #: 870281-82-6). In one instance, the PI3K inhibitor inhibits alpha and delta isoforms of PI3K. In some instances, the PI3K inhibitor is 2-{3-[2-(1-isopropyl-3-methyl-1H-1,2-4-triazol-5-yl)-5,6-dihydrobenzo[f]imidazo[1,2-d][1,4]oxazepin-9-yl]-1H-pyrazol-1-yl}-2-methylpropanamide and salts thereof.

[1419] In a further aspect of the invention, the additional therapy comprises a Bruton's tyrosine kinase (BTK) inhibitor. In one instance, the BTK inhibitor is 1-[(3R)-3-[4-Amino-3-(4-phenoxyphenyl)-1H-pyrazolo[3,4-d]pyrimidin-1-yl]piperidin-1-yl]prop-2-en-1-one and salts thereof. In one instance, the BTK inhibitor is ibrutinib (CAS #: 936563-96-1).

[1420] In some instances, the additional therapy comprises thalidomide or a derivative thereof. In one instance, the thalidomide or a derivative thereof is (RS)-3-(4-amino-1-oxo-1,3-dihydro-2H-isoindol-2-yl)piperidine-2,6-dione and salts thereof. In one instance, the thalidomide or a derivative thereof is lendalidomide (CAS #: 191 732-72-6).

[1421] In one instance, the additional therapeutic agent is a corticosteroid, which can be administered as a pre-treatment prior to (e.g., about 1 hour prior to) administration of the AAV particle described herein. Corticosteroid premedication can include administration of dexamethasone or methylprednisolone. Additionally or alternatively, the treatment regimens described herein may include administration of (e.g., pre-treatment with) acetaminophen, paracetamol, or diphenhydramine.

[1422] In some embodiments, an IL-6R antagonist, such as tocilizumab (ACTEMRA®/RoACTEMRA®) may be administered, e.g., if necessary to manage a cytokine release syndrome (CRS) event. In particular embodiments, an IL-6R antagonist (e.g., tocilizumab) may be administered intravenously, e.g., at a dose of 1 mg/kg to 25 mg/kg (e.g., from 5 mg/kg to 10 mg/kg, e.g., about 8 mg/kg), as necessary.

[1423] In some embodiments, in addition to the AAV particle described herein, the subject is administered supportive care, for example, pain medication for headaches, treatment for infusion-related reactions (IRRs), and prophylaxis for infusion-related reactions. Symptoms for IRRs include, for example, flushing, alterations in heart rate and blood pressure, dyspnea, bronchospasm, back pain, fever, urticaria, edema, nausea, and rashes. Exemplary treatments for an IRR include, but are not limited to acetaminophen, IV hydration, diphenhydramine, histamine₂ blockers (e.g., famotidine), and corticosteroids.

### VI. KITS AND DEVICES

### Kits

[1424] In some embodiments, the disclosure provides a kit for conveniently and/or effectively carrying out methods of the present disclosure. In some embodiments, a kit comprises a sufficient amount and/or number of components to perform multiple treatments of a subject(s) and/or to perform multiple experiments.

[1425] In some embodiments, an AAV particle described herein may be comprised in a kit. In some embodiments, a kit may further include reagents and/or instructions for creating and/or synthesizing compounds and/or compositions of the present disclosure. In some embodiments, a kit may also comprise one or more buffers. In some embodiments, a kit may comprise a component for making a protein or nucleic acid array or library and thus, may include, for example, a solid support.

[1426] In some embodiments, a kit component may be packaged either in aqueous media or in lyophilized form. In some embodiments, a container used in a kit described herein comprises a vial, test tube, flask, bottle, syringe, wherein a component may be placed, and/or suitably aliquoted. In some embodiments, a kit may comprise one or more components, e.g., labeling reagent and label may be packaged together. In some embodiments, a kit may also contain a second, a third or an additional container into which additional components may be separately placed. In some embodiments, a kit may also comprise second container for containing sterile, pharmaceutically acceptable buffers and/or other diluents. In some embodiments, various combinations of components may be comprised in one or more vials. In some embodiments, a kit of the present disclosure may also include means for containing a compound and/or composition of the present disclosure, e.g., a protein, nucleic acid, and any other reagent container in close confinement for commercial sale. Such a container may include injection or blow-molded plastic containers into which desired vials are retained.

[1427] In some embodiments, kit components are provided in one and/or more liquid solutions. In some embodiments, a liquid solution is an aqueous solutions. In some embodiments, the aqueous solution comprises a sterile aqueous solution. In some embodiments, a kit components may be provided as a dried powder. In some embodiments, when a reagent and/or a component are provided as a dry powder, such a powder may be reconstituted by the addition of suitable volumes of solvent. In some embodiments, a solvent may also be provided in another container. In some embodiments, a labeling dye is provided as a dried powder. In some embodiments, at least 10, 20, 30, 40, 50, 60, 70, 80, 90, 100, 120, 120, 130, 140, 150, 160, 170, 180, 190, 200, 300, 400, 500, 600, 700, 800, 900, 1000 micrograms of a dried dye are provided in a kit described herein. In such embodiments, a dye may then be resuspended in any suitable solvent, such as DMSO.

[1428] In some embodiments, a kits may include instructions for use the kit components as well the use of any other reagent not included in the kit. In some embodiments, the instructions may include variations that may be implemented.

### Devices

[1429] In some embodiments, an AAV particle may delivered to a subject using a device to deliver the AAV particle and a head fixation assembly. In some embodiments, the head fixation assembly may be, but is not limited to, any of the head fixation assemblies sold by MRI interventions. As a non-limiting example, the head fixation assembly may be any of the assemblies described in U.S. Pat. Nos. 8,099,150, 8,548,569, and 9,031,636 and International Patent Publication Nos. WO201108495 and WO2014014585, the contents of each of which are incorporated by reference in their entireties. In some embodiments, A head fixation assembly may be used in combination with an MRI compatible drill such as, but not limited to, the MRI compatible drills described in International Patent Publication No. WO2013181008 and US Patent Publication No. US20130325012, the contents of which are herein incorporated by reference in its entirety.

[1430] In some embodiments, an AAV particle may be delivered using a method, system and/or computer program for positioning apparatus to a target point on a subject to deliver the AAV particle. As a non-limiting example, the method, system and/or computer program may be the methods, systems and/or computer programs described in U.S. Pat. No. 8,340,743, the contents of which are herein incorporated by reference in its entirety. In some embodiments, the method may include: determining a target point in the body and a reference point, wherein the target point and the reference point define a planned trajectory line (PTL) extending through each; determining a visualization plane, wherein the PTL intersects the visualization plane at a sighting point; mounting the guide device relative to the body to move with respect to the PTL, wherein the guide device does not intersect the visualization plane; determining a point of intersection (GPP) between the guide axis and the visualization plane; and aligning the GPP with the sighting point in the visualization plane.

[1431] In some embodiments, an AAV particle may be delivered to a subject using a convention-enhanced delivery device. Non-limiting examples of targeted delivery of drugs using convection are described in US Patent Publication Nos. US20100217228, US20130035574, and US 20130035660 and International Patent Publication No. WO2013019830 and WO2008144585, the contents of each of which are herein incorporated by reference in their entireties.

[1432] In some embodiments, a subject may be imaged prior to, during and/or after delivery of an AAV particle. The imaging method may be a method known in the art and/or described herein, such as but not limited to, magnetic resonance imaging (MRI). As a non-limiting example, imaging may be used to assess therapeutic effect. As another non-limiting example, imaging may be used for assisted delivery of AAV particles. In some embodiments, an AAV particle may be delivered intraparenchymal to a subject and used for intra-operative MRI during surgery to visualize delivery.

[1433] In some embodiments, an AAV particle may be delivered using an MRI-guided device. Non-limiting examples of MRI-guided devices are described in U.S. Pat. Nos. 9,055,884, 9,042,958, 8,886,288, 8,768,433, 8,396,532, 8,369,930, 8,374,677, and 8,175,677 and US Patent Application No. US20140024927 the contents of each of which are herein incorporated by reference in their entireties. As a non-limiting example, the MRI-guided device may be able to provide data in real time such as those described in U.S. Pat. Nos. 8,886,288 and 8,768,433, the contents of each of which is herein incorporated by reference in its entirety. As another non-limiting example, the MRI-guided device or system may be used with a targeting cannula such as the systems described in U.S. Pat. Nos. 8,175,677 and 8,374,677, the contents of each of which are herein incorporated by reference in their entireties. As yet another non-limiting example, the MRI-guided device includes a trajectory guide frame for guiding an interventional device as described, for example, in U.S. Pat. No. 9,055,884 and US Patent Application No. US20140024927, the contents of each of which are herein incorporated by reference in their entireties.

[1434] In some embodiments, an AAV particle may be delivered using an MRI-compatible tip assembly. Non-limiting examples of MRI-compatible tip assemblies are described in US Patent Publication No. US20140275980, the contents of which is herein incorporated by reference in its entirety.

[1435] In some embodiments, an AAV particle may be delivered using a cannula which is MRI-compatible. Non-limiting examples of MRI-compatible cannulas include those taught in International Patent Publication No. WO2011130107, the contents of which are herein incorporated by reference in its entirety.

[1436] In some embodiments, an AAV particle may be delivered using a catheter which is MRI-compatible. Non-limiting examples of MRI-compatible catheters include those taught in International Patent Publication No. WO2012116265, U.S. Pat. No. 8,825,133 and US Patent Publication No. US20140024909, the contents of each of which are herein incorporated by reference in their entireties.

[1437] In some embodiments, an AAV particle may be delivered using a device with an elongated tubular body and a diaphragm as described in US Patent Publication Nos. US20140276582 and US20140276614, the contents of each of which are herein incorporated by reference in their entireties.

[1438] In some embodiments, an AAV particle may be delivered using an MRI compatible localization and/or guidance system such as, but not limited to, those described in US Patent Publication Nos. US20150223905 and US20150230871, the contents of each of which are herein incorporated by reference in their entireties. As a non-limiting example, the MRI compatible localization and/or guidance systems may comprise a mount adapted for fixation to a patient, a targeting cannula with a lumen configured to attach to the mount so as to be able to controllably translate in at least three dimensions, and an elongate probe configured to snugly advance via slide and retract in the targeting cannula lumen, the elongate probe comprising at least one of a stimulation or recording electrode.

[1439] In some embodiments, an AAV particle may be delivered to a subject using a trajectory frame as described in US Patent Publication Nos. US20150031982 and US20140066750 and International Patent Publication Nos. WO2015057807 and WO2014039481, the contents of each of which are herein incorporated by reference in their entireties.

[1440] In some embodiments, an AAV particle may be delivered to a subject using a gene gun.

### VII. EXAMPLES

### Example 1. Generation of Anti-HER2 Monospecific Antibody Molecules

[1441] Genetic element constructs were designed for AAV delivery of anti-HER2 antibodies. The nucleotide sequences from 5′ ITR to 3′ ITR of the genetic element constructs that comprise a transgene encoding a monospecific HER2 antibody molecule are provided as HER-04, HER-05, HER-10, HER-42, HER-43, HER-46, HER-47, HER-53, HER-57, HER-62, HER-75, HER-88, HER-89, HER-90, HER-91, and HER-92 herein, which are SEQ ID NOs: 5163, 5170, 5164, 5166, 5185, 5186, 5167, 5168, 5187, 5188, 5190, 6500, 6501, 6502, 6503, and 6504, respectively. These constructs are also summarized in Tables 15, as well as Tables 15, 18, 19, 20, 22 and 24.

[1442] Each of these genetic element constructs comprise a nucleic acid comprising a transgene encoding an antibody molecule that binds to HER2. The transgene was designed to comprise a nucleotide sequence encoding an antibody heavy chain signal sequence (SEQ ID NO:5157), a nucleotide sequence encoding an antibody heavy chain variable region (VH) (SEQ ID NO: 5002, 5171, 5015, 5070, 5191, 5223, 5089, 5109, 5253, 5257, 5261, 6512, 6517, 6522, 6527, or 6532), a nucleotide sequence encoding antibody heavy chain constant region (SEQ ID NO: 5003, 5011, 5017, 5025, 5211, 5213, 5029, or 5219), a nucleotide sequence encoding a linker region, a nucleotide sequence encoding an antibody light chain signal sequence (SEQ ID NO: 5159), a nucleotide sequence encoding an antibody light chain variable region (VL) (SEQ ID NO: 5005, 5175, 5019, 5085, 5195, 5227, 5093, 5113, 5255, 5259, or 5265), and a nucleotide sequence encoding an antibody light chain constant region (SEQ ID NO: 5007, 5021, 5277, 5279, or 5221). The linker region was a T2A linker (SEQ ID NO: 1726), which was flanked by a furin cleavage site (SEQ ID NO: 1724) at the 5′ end of the T2A linker. Alternatively, the linker region for HER-57 and HER-62 was, from 5′ to 3′, a series of G4S linkers (SEQ ID: 2245, 5161, and 5162).

[1443] The encoded antibodies of HER-04, HER-05, HER-10, HER-42, HER-43, HER-46, HER-47, HER-53, HER-57, HER-62, HER-75, HER-88, HER-89, HER-90, HER-91, and HER-92 comprise a heavy chain signal sequence (SEQ ID NO:5158), an antibody heavy chain variable region (VH) (SEQ ID NO: 5002, 5172, 5016, 5071, 5192, 5224, 5090, 5110, 5254, 5258, 5262, 6511, 6516, 6521, 6526, or 6531), an antibody heavy chain constant region (SEQ ID NO: 5004, 5012, 5018, 5026, 5212, 5214, 5030, or 5220), an antibody light chain signal sequence (SEQ ID NO: 5160), an antibody light chain variable region (VL) (SEQ ID NO: 5006, 5176, 5020, 5086, 5196, 5228, 5094, 5114, 5256, 5260, or 5266), and an antibody light chain constant region (SEQ ID NO: 5008, 5022, 5278, 5280, or 5222).

### Example 2. Codon Optimization of Sequences Encoding an Anti-HER2 Monospecific Antibody Molecule

[1444] Unmethylated CpG dinucleotide-based motifs in AAV transgenes are known to stimulate innate immune responses by binding and activating Toll-Like receptor (TLR9) signaling pathway. Anti-HER2 monospecific antibody molecule HER-53 was further codon optimized to eliminate a total of 87 dinucleotides in the transgene. The expression of the resulting codon optimized HER-75 was compared to HER-53 and HER-77 in HEK expi293 cells. Conditioned media were taken 2, 3, and 7 days post-transfection and subject to IgG quantification with a Biacore 8K system. FIGS. 1A and 1B show the comparison of the expression of the three monospecific antibody molecules in HEK cells.

[1445] HEK-Blue human TLR9 (hTLR9) cells (invivogen hkb-htlr9) overexpress hTLR9 gene. They also express a secreted embryonic alkaline phosphatase (SEAP) reporter gene under the control of an NF-kB inducible promoter. Levels of SEAP in the culture supernatant reflect the level of TLR9 induced NF-kB signaling. HEK-Blue hTLR9 cells were used to study potential immunogenicity of HER-53 and HER-75 transgenes. Briefly, HER-53 and HER-75 transgene fragments were cut and separated from their vector parts with restriction enzymes AgeI/XhoI and 1.2% agarose gel. Transgene DNA fragments were recovered from agarose gel and transfected to HEK-Blue hTLR9 cells with FuGENE HD (Promega E2311). Levels of SEAP in the conditioned media 5 days post-transfection were measured with QUANTI-Blue solution (Invivogen: rep-qbs) (FIG. 1C).

### Example 3. Generation of ITR-ITR Constructs for the Expression of Anti-HER2 Monospecific Antibody Molecules

[1446] In designing the genetic element constructs for expression of monospecific HER2 antibody molecules (HER-04, HER-05, HER-10, HER-42, HER-43, HER-46, HER-47, HER-53, HER-57, HER-62, HER-75, HER-69, HER-88, HER-89, HER-90, HER-91, and HER-92), several promoters were selected. The ubiquitous CB promoter (SEQ ID NO: 2083) was used for HER-04 (SEQ ID NO: 5163), HER-05 (SEQ ID NO: 5170), HER-43 (SEQ ID NO: 5185), HER-46 (SEQ ID NO: 5186), HER-62 (SEQ ID NO: 5188), HER-75 (SEQ ID NO: 5190), HER-88 (SEQ ID NO: 6500), HER-89 (SEQ ID NO: 6501), HER-90 (SEQ ID NO: 6502), HER-91 (SEQ ID NO: 6503), and HER-92 (SEQ ID NO: 6504). The ubiquitous CB promoter (SEQ ID NO: 2083) further comprising a CMV(IE) promoter (SEQ ID NO: 2239), was used for HER-10 (SEQ ID NO: 5164), HER-42 (SEQ ID NO:5166), HER-47 (SEQ ID NO:5167), HER-53 (SEQ ID NO: 5168), and HER-57 (SEQ ID NO: 5187). The astrocyte targeting GFAP promoter (SEQ ID NO: 2085) was used for HER-69 (SEQ ID NO: 5169).

[1447] The HER-04, HER-05, HER-43, HER-46, HER-57, HER-62, HER-75, HER-88, HER-89, HER-90, HER-91, and HER-92 genetic elements further comprised an ie exon 1 region (SEQ ID NO: 2090), an ie intron 1 region (SEQ ID NO: 2095), a second human beta-globin intron region (SEQ ID NO: 2097), and a human beta-globin exon region (SEQ ID NO: 2093). The HER-10, HER-42, HER-47, and HER-53 genetic elements comprising a CB promoter, as well as the HER-69 genetic elements comprising a GFAP promoter, further comprised human beta-globin intron region (SEQ ID NO: 2240).

[1448] The 5′ ITR (SEQ ID NO: 2076), the polyadenylation sequence (SEQ ID NO: 2122), and the 3′ ITR (SEQ ID NO: 2078) were the same across all HER-04, HER-05, HER-10, HER-42, HER-43, HER-46, HER-47, HER-53, HER-57, HER-62, HER-75, HER-69, HER-88, HER-89, HER-90, HER-91, and HER-92 genetic element constructs designed for the expression of an anti-HER2 antibody molecule.

[1449] All sixteen genetic element constructs and their component parts are summarized in Tables 15, 16, 18-22 and 24 above.

### Expression of Anti-HER2 Antibodies-Validation of Cell Lines

[1450] HER2 expression in a panel of cancer cell lines was analyzed by flow cytometry. Briefly, the cells were dissociated using StemPro Accutase (Gibco A1110501), and the pelleted cells were washed with FACS Buffer (1-2% BSA in PBS). For cell surface HER2 expression, the cells were incubated with a PE-conjugated mouse anti-HER2 antibody (BD 340879) or the appropriate isotype control antibody (BD 559320) for 30 minutes on ice in the dark. Following antibody incubation, the cells were washed twice with FACS Buffer and resuspended in cold FACS Buffer. The cells were passed through 35 μm cell strainers prior to analysis on a BD Accuri C6 flow cytometer.

[1451] HER2 expression was found to be elevated in the following cell lines compared to the negative control U87-MG (glioblastoma) cell line: BT-474 (breast), SK-BR-3 (breast), MDA-MB-361-luc (breast, brain metastasis), and SK-OV-3 (ovarian).

### Expression of Anti-HER2 Antibodies in Cancer Cells

[1452] HER2 antibody secretion by the SK-BR-3 breast cancer cell line three days post-transfection with the HER-04, HER-05, HER-10, and HER-15 genetic element constructs was quantified via an AlphaLISA assay for human IgG1. Prior to reverse transfection with Lipofectamine LTX, a 24-well plate was coated with 10 μg/mL of fibronectin (Sigma-Aldrich F1141). SK-BR-3 cells were plated at 200,000 cells/well along with 500 ng of plasmid DNA complexed with Lipofectamine LTX and PLUS Reagent. The culture medium was replaced with serum-free Opti-MEM one day post-transfection. Three days post-transfection with the HER-04, HER-05, HER-10, and HER-15 genetic element constructs, the media was collected from the cells and analyzed using the human IgG1 AlphaLISA Detection Kit (Perkin Elmer AL307) following manufacturer protocols. Briefly, 5 μL of culture supernatant was added to a white 384-well plate and incubated with AlphaLISA beads in a 50 uL final assay volume. AlphaLISA readings were taken on a PerkinElmer EnVision 2105 Multimode Plate Reader. The standard curve and data interpolation were analyzed in GraphPad Prism using a sigmoidal 4PL fit with 1/Y² data weighting. The concentration of the antibodies expressed by the SK-BR-3 breast cancer cells three days post-transfection in shown in Table 30 below.

TABLE 30
Concentration of human IgG1 by transfected
SK-BR-3 breast cancer cells

| SK-BR-3 Transfection | Human IgG1 (ng/mL) |
|---|---|
| Human IgG1 isotype control antibody | 319.5 |
| HER-04 | 537.0 |
| HER-05 | 428.0 |
| HER-10 | 377.0 |
| HER-15 | 11.0 |

### Expression of Anti-HER2 Antibodies—Western Blot

[1453] Expression of the heavy chains and light chains of HER2 antibody clones produced by the HER-04, HER-05, HER-10, and HER-15 genetic element constructs was evaluated by Western blot. SK-BR-3 cells were reverse transfected with plasmid DNA using Lipofectamine LTX and PLUS Reagent in fibronectin-coated plates. Culture supernatant was replaced with serum-free medium (Opti-MEM or Cancer Cell Line Medium XF, PromoCell C-28077) one day post-transfection. Three days post-transfection, the culture medium was concentrated using centrifugal concentrators (MilliporeSigma) or purified using Protein A agarose (Thermo Scientific 22811) prior to SDS-PAGE using a MES SDS Running Buffer (Invitrogen). Proteins were separated through 4-12% Bis-Tris gels and processed through silver staining (Thermo Scientific 24612), or transferred to nitrocellulose membranes for Western blotting with a fluorophore-conjugated goat anti-human antibody (LI-COR 925-32232) at 1:10,000 dilution. Silver stains were imaged on a Bio-Rad ChemiDoc MP Imaging System, and Western blots were imaged on a LI-COR Odyssey CLx. Secreted HER-04, HER-05, human IgG1 isotype control antibody, HER-10, and HER-15 antibodies from transfected SK-BR-3 breast cancer cells were analyzed by Western blot and silver stain to confirm that the antibodies can fully assemble, and subsequently be reduced to monomeric heavy and light chains. Cells expressing the HER-04, HER-05, and HER-10 antibodies were able to successfully produce the heavy and light chains of the encoded anti-HER2 antibody, as evidenced by bands at 50 kDA and 25 kDa, respectively. HER-15 was poorly expressed/secreted by SK-BR-3 cells.

[1454] Expression of the heavy chains and light chains of HER-10 (control), HER-53, HER-75, HER-88, HER-89, HER-90, HER-91, and HER92 genetic element constructs was evaluated by Western blot as described above. Secreted human IgG1 isotype control antibody, HER-53, HER-75, and heavy chain mutants HER-88, HER-89, HER-90, HER-91, and HER-92 from transfected SK-BR-3 breast cancer cells were analyzed by Western blot and silver stain to confirm that the antibodies can fully assemble, and subsequently be reduced to monomeric heavy and light chains. Cells expressing the antibodies were able to successfully produce the heavy and light chains of the encoded anti-HER2 antibody.

### Example 4. In Vitro Characterization of Anti-HER2 Monospecific Antibody Molecules HER2 Binding Affinity Measurement

[1455] Antibody binding to HER2 was analyzed by Biacore 8K (GE Healthcare) surface plasmon resonance instrument (SPR). All reagents used were from GE Healthcare. HBS-EP+ was used as the sample and running buffer and the interaction was measured at 25° C. A CM5 sensor chip was immobilized with anti-human IgG Fe antibody, as per protocol suggested by Human Antibody Capture kit (GE Healthcare). The Anti-HER2 antibodies were diluted to 0.5 μg/ml in HBS-EP+ and were captured by flowing for 120 sec at 10 μl/min to give a final HER2 binding response of less than 200 RU. HER2 ECD (0.625-80 nM, 2-fold dilution) was passed over the captured anti-HER2 antibody at 30 μl/min flow rate, and association and dissociation phases were recorded for 300 and 600 sec, respectively. The sensor chip was regenerated by a 30 sec injection of 3M MgCl₂ at 30 μl/min at the end of each injection cycle. The sensorgrams were fitted to 1:1 binding model (global fit) in the Biacore Insight Evaluation Software to calculate kinetic rate constants and binding affinity value. For anti-HER2 antibodies with FcRn mutations (HER-43, HER-46, and HER-47), antibodies in conditioned media were used. The conditioned media was diluted in HBS-EP+ to achieve a capture level that produced a final HER2 binding response of less than 200 RU.

[1456] The Bonding affinity data is shown in Table 31 below. Binding affinity of the vectorized antibody was found to be comparable to the recombinant antibody, suggesting that vectorization process does not affect the ability of antibody to bind to HER2. The FcRn-binding mutants (HER-43, HER-46, and HER-47) showed a slightly weaker affinity for HER2, and the bispecific antibody, Her-73 showed a stronger HER2 binding affinity.

TABLE 31
Binding affinity to HER2

| | | | |
|---|---|---|---|
| Antibody | K_{D} (nM) | kon (1/Ms) | koff (1/s) |

Recombinant (Naked) Antibody

| | | | |
|---|---|---|---|
| HER-04 | 1.5 | 1.3E+05 | 1.9E−04 |
| HER-05 | 2.7 | 8.7E+04 | 2.3E−04 |
| HER-10 | 1.2 | 1.9E+05 | 2.1E−04 |

Vectorized Antibody

| | | | |
|---|---|---|---|
| HER-04 | 1.7 | 1.3E+05 | 2.2E−04 |
| HER-05 | 2.7 | 8.1E+04 | 2.2E−04 |
| HER-10 | 1.5 | 1.7E+05 | 2.5E−04 |
| HER-15 | 0.3 | 4.3E+05 | 1.2E−04 |
| HER-53 | 1.6 | 1.1E+05 | 1.7E−04 |

FcRn binding mutants

| | | | |
|---|---|---|---|
| HER-43 | 6.2 | 1.1E+05 | 6.8E−04 |
| HER-46 | 3.5 | 1.0E+05 | 3.6E−04 |
| HER-47 | 7.8 | 1.2E+05 | 9.1E−04 |

Bispecific antibody molecule

| | | | |
|---|---|---|---|
| HER-73 | 0.2 | 1.3E+05 | 2.4E−05 |

### Heavy Chain CDR3 Mutant Binding Affinity Measurements

[1457] The antibody binding of the Heavy chain CDR3 mutants (HER-88, HER-89, HER-90, HER-91, HER-92) to HER2 was analyzed by Biacore 8K (GE Healthcare) surface plasmon resonance instrument (SPR) as described above.

TABLE 32
Binding affinity of Heavy CDR3 mutants to HER2

| | | | | | | | | Fit quality | |
|---|---|---|---|---|---|---|---|---|---|
| | HCDR3 | | | | | | | parameters | |
| | Modifications | | Kinetic parameters | | | | | Kinetics | chi2/Rmax |
| | (according to | | KD | ka | kd | KD | Rmax | Chi² | (%) (Calc. |
| Construct | Kabat) | Replicate | (nM) | (1/Ms) | (1/s) | (M) | (RU) | (RU²) | unit) |
| Her53 | D98 M100, | 1 | 1.81 | 1.03E+05 | 1.86E−04 | 1.81E−09 | 88.8 | 0.67 | 0.8% |
| | D101, Y102 | 2 | 1.96 | 1.01E+05 | 1.97E−04 | 1.96E−09 | 89.1 | 0.81 | 0.9% |
| | | Mean | 1.89 | 1.02E+05 | 1.92E−04 | 1.89E−09 | 88.95 | | |
| | | % CV | 5.6 | 1.4 | 4.1 | 5.6 | 0.2 | | |
| Her75 | D98 M100, | 1 | 1.25 | 1.23E+05 | 1.54E−04 | 1.25E−09 | 83.9 | 1.15 | 1.4% |
| | D101, Y102 | 2 | 1.43 | 1.18E+05 | 1.69E−04 | 1.43E−09 | 85.6 | 1.59 | 1.9% |
| | | Mean | 1.34 | 1.21E+05 | 1.62E−04 | 1.34E−09 | 84.75 | | |
| | | % CV | 9.5 | 2.9 | 6.6 | 9.5 | 1.4 | | |
| Her88 | D98W, M100F, | 1 | 0.87 | 1.10E+05 | 9.54E−05 | 8.69E−10 | 59.9 | 0.65 | 1.1% |
| | D101A, Y102L | 2 | 1.01 | 1.01E+05 | 1.03E−04 | 1.01E−09 | 62.9 | 0.72 | 1.1% |
| | | Mean | 0.94 | 1.06E+05 | 9.92E−05 | 9.40E−10 | 61.40 | | |
| | | % CV | 10.6 | 6.0 | 5.4 | 10.6 | 3.5 | | |
| Her89 | D98W, M100F, | 1 | 1.35 | 9.90E+04 | 1.34E−04 | 1.35E−09 | 53.7 | 0.84 | 1.6% |
| | D101A | 2 | 1.49 | 9.70E+04 | 1.45E−04 | 1.49E−09 | 53.4 | 0.73 | 1.4% |
| | | Mean | 1.42 | 9.80E+04 | 1.40E−04 | 1.42E−09 | 53.55 | | |
| | | % CV | 7.0 | 1.4 | 5.6 | 7.0 | 0.4 | | |
| Her90 | D98W, M100F, | 1 | 1.46 | 1.15E+05 | 1.68E−04 | 1.46E−09 | 57.6 | 1.00 | 1.7% |
| | Y102L | 2 | 1.58 | 1.08E+05 | 1.71E−04 | 1.58E−09 | 59.5 | 0.83 | 1.4% |
| | | Mean | 1.52 | 1.12E+05 | 1.70E−04 | 1.52E−09 | 58.55 | | |
| | | % CV | 5.6 | 4.4 | 1.3 | 5.6 | 2.3 | | |
| Her91 | D98W, D101A, | 1 | 2.18 | 1.32E+05 | 2.88E−04 | 2.18E−09 | 60.7 | 0.90 | 1.5% |
| | Y102L | 2 | 1.82 | 1.41E+05 | 2.57E−04 | 1.82E−09 | 59.9 | 0.97 | 1.6% |
| | | Mean | 2.00 | 1.37E+05 | 2.73E−04 | 2.00E−09 | 60.30 | | |
| | | % CV | 12.7 | 4.7 | 8.0 | 12.7 | 0.9 | | |
| Her92 | M100F, D101A, | 1 | 1.16 | 1.19E+05 | 1.38E−04 | 1.16E−09 | 73.2 | 1.45 | 2.0% |
| | Y102L | 2 | 1.24 | 1.11E+05 | 1.38E−04 | 1.24E−09 | 75.9 | 0.91 | 1.2% |
| | | Mean | 1.20 | 1.15E+05 | 1.38E−04 | 1.20E−09 | 74.55 | | |
| | | % CV | 4.7 | 4.9 | 0.0 | 4.7 | 2.6 | | |

### FecRn Binding Affinity Measurement

[1458] Antibody binding to the FcRn receptor at pH 6.0 and 7.4 was analyzed by Biacore 8K (GE Healthcare) surface plasmon resonance instrument (SPR). All reagents used were from GE Healthcare. For the pH 6.0 assay, PBS-P+ buffer was adjusted to pH 6.0 and supplemented with NaCl to a final concentration of 500 mM. For the pH 7.4 assay, PBS-P+ was used. Biotinylated human and mouse FcRn receptor (Acro Biosystems) were captured on a Biotin CAPture chip by injecting 1 μg/ml of FcRn for 30 sec at 10 μl/min. The Anti-HER2 antibody was injected (12-3000 nM, 3-fold dilution) over the captured FcRn in a single cycle kinetics (SCK) mode with an association and dissociation time of 60 and 120 sec, respectively. The sensor chip was regenerated according to manufacturer' instructions. Sensorgrams were fitted to steady-state affinity model for human FcRn and 1:1 model for mouse FcRn to calculate the affinity values.

[1459] At pH 6.0, HER-04 showed an affinity value of K_{D}=299 nM and 49 nM for human and mouse FcRn, respectively, while FcRn binding mutants, HER-43, HER-46, and HER-47 showed no binding to FcRn. At pH 7.4, no binding was observed for all antibodies.

### Ability of Anti-HER2 Antibodies Expressed by SK-BR-3 and Expi293 Cells to Bind HER2

[1460] The ability of the anti-HER2 antibodies expressed by SK-BR-3 and Expi293 cells transfected with the HER-10 genetic element construct to bind HER2 was assessed. SK-BR-3 cells were reverse transfected with plasmid DNA using Lipofectamine LTX and PLUS Reagent in fibronectin-coated flasks. The culture supernatant was replaced with serum-free medium (Opti-MEM) one day post-transfection. Three days post-transfection, the culture medium was concentrated using centrifugal concentrators (MilliporeSigma) and analyzed by Biacore SPR binding to Her2 ECD with data fitted to a 1:1 binding model (global fit). The binding affinity of the HER2 antibody expressed from SK-BR-3 breast cancer cells was comparable to the anti-HER2 antibody expressed from Expi293 cells, with KD values of 0.96 nM and 1.58 nM, respectively, as assessed by Biacore SPR.

### Efficacy Measurement of Constructs—Cell Proliferation Assays

### BT-474 Cell Proliferation Assays

[1461] BT-474 cells were dispensed at 625 cells/well using a Multidrop Combi Reagent Dispenser (Thermo Scientific) into white 384-well plates pre-dispensed with antibody dilutions. A two-fold serial dilution series was prepared for each antibody in sterile polypropylene 96-well plates. Assay plates were covered with Microclime Environmental Lids (Beckman Coulter 0015717) filled with 8 mL of UltraPure Distilled water (Invitrogen 10977-015) to reduce well evaporation. Cell proliferation was measured using the CellTiter-Glo 2.0 assay (Promega G9242) after four days of antibody treatment. Luminescence measurements were taken on an EnVision 2105 Multimode Plate Reader, and data were analyzed in GraphPad Prism using a variable slope (four parameters) fit with 1/Y² data weighting. Edge wells were excluded from analysis. The plots of the cell proliferation assay for the vectorized anti-HER2 antibodies HER-04, HER-05, HER-10, and HER-15 are shown in FIGS. 2A-2D, respectively. The vectorized anti-HER2 antibodies expressed by Expi293 cells performed similar to reference antibodies (Creative Biolabs) in cell growth inhibition assays with BT-474 cells. Additionally, similar cell growth inhibition was observed between the HER-53 antibody with an enhanced Fc region and HER-04 (FIG. 3, Table 33).

[1462] HER-10 performed better than HER-53 or HER-04 (FIG. 3).

TABLE 33
IC₅₀ and Eₘₐₓ HER-53, HER-04, and HER-10 in BT-474 cells

| Antibody | IC₅₀ (μg/mL) | Eₘₐₓ (%) |
|---|---|---|
| HER-53 | 0.083 | 28.7 |
| HER-04 | 0.058 | 35.1 |
| HER-10 | 0.041 | 38.0 |

### MDA-MB-361-Luc Cell Proliferation Assays

[1463] MDA-MB-361-luc cells were dispensed at 1,788 cells/well using a Multidrop Combi Reagent Dispenser (Thermo Scientific) into white 96-well plates pre-dispensed with antibody dilutions. A two-fold dilution series was prepared for each antibody in sterile polypropylene 96-well plates. Assay plates were covered with Microclime Environmental Lids (Beckman Coulter 0015717) filled with 8 mL of UltraPure Distilled water (Invitrogen 10977-015) to reduce well evaporation. Cell proliferation was measured using the CellTiter-Glo 2.0 assay (Promega G9242) after 13 days of antibody treatment. Luminescence measurements were taken on an EnVision 2105 Multimode Plate Reader, and data were analyzed in GraphPad Prism using a variable slope (four parameters) fit with 1/Y² data weighting. Edge wells were excluded from analysis. Vectorized anti-HER2 antibodies of HER-04, HER-10, and HER15 inhibited cell growth of MDA-MB-361 cells in a dose-dependent manner (FIGS. 4A-4D).

[1464] The above MDA-MB-361-luc cell proliferation assay was repeated using an expanded dose range utilizing a three-fold dilution series of each antibody. The vectorized anti-HER2 antibodies of HER-04, HER-10, HER-15, and HER-53 inhibited cell growth of MDA-MB-361-luc cells in a dose-dependent manner, while human IgG1 isotype control antibody did not (FIGS. 5A-5G, Tables 34 and 35). A similar result was found using high passage cells, p37, for the vectorized HER-10 (FIGS. 6A-6B), which inhibited cell growth of MDA-MB-361-luc cells in a dose-dependent manner.

TABLE 34
IC₅₀ and Eₘₐₓ HER-53 and HER-04 in MDA-MB-361 cells

| Antibody | IC₅₀ (μg/mL) | Eₘₐₓ (%) |
|---|---|---|
| HER-53 | 0.136 | 40.3 |
| HER-04 | 0.077 | 46.5 |

TABLE 35
IC₅₀ and Eₘₐₓ HER-53 and HER-10 in MDA-MB-361 cells

| Antibody | IC₅₀ (μg/mL) | Eₘₐₓ (%) |
|---|---|---|
| HER-53 | 0.162 | 45.5 |
| HER-10 | 0.048 | 56.5 |

### Antibody-Dependent Cellular Cytotoxicity (ADCC)

[1465] The ADCC Reporter Bioassays were run according to manufacturer protocols (Promega G7010/G9790). Briefly, BT-474 target cells were plated in white 96-well plates at 5,000 cells/well and incubated overnight at 37° C. and 5% CO₂. After overnight incubation, the media was replaced with ADCC Assay Buffer, and antibody dilutions were added in a 3-fold serial dilution series. Effector cells were immediately thawed and added to the plates for an Effector:Target cell ratio of 15:1. The plates were incubated at 37° C. and 5% CO₂ for 6 hours. The plates were then equilibrated to room temperature for 15 minutes and Bio-Glo Luciferase Assay Reagent was added. The plates were incubated for 30 minutes at room temperature, and luminescence was measured on a PerkinElmer EnVision 2105 Multimode Plate Reader. Data were analyzed on GraphPad Prism using a variable slope (four parameters) fit with 1/Y² data weighting. HER-10 contains enhancements in the Fc region that promote ADCC activity. The HER-10 ADCC activity was found to be similar to the reference antibody, and was improved over HER-04 in assays employing both the high affinity (FIG. 7A, Table 36) and low affinity variants of the FcgRIIIa receptor (FIG. 7B, Table 37). The Fe enhancements of HER-10 are further highlighted in the low affinity variant assay. HER-53 contains the same Fc region enhancements as HER-10, and ADCC activity is similar between the two antibodies. Both are improved over HER-04 in assays employing both the high affinity (FIG. 8A, Table 38) and low affinity variants of the FcgRIIIa receptor (FIG. 8B, Table 39).

TABLE 36
HER-10 and HER-04 EC₅₀ in BT-474 cells, High Affinity

| Antibody | Eₘₐₓ (ng/mL) |
|---|---|
| HER-10 | 14.8 |
| HER-04 | 42.2 |
| Reference Antibody | 12.9 |

TABLE 37
HER-10 EC₅₀ in BT-474 cells, Low Affinity

| Antibody | Eₘₐₓ (ng/mL) |
|---|---|
| HER-10 | 75.2 |
| Reference Antibody | 114.6 |

TABLE 38
HER-53, HER-10 and HER-04
EC₅₀ in BT-474 cells, High Affinity

| Antibody | Eₘₐₓ (ng/mL) |
|---|---|
| HER-53 | 14.5 |
| HER-10 | 14.8 |
| HER-04 | 52.6 |

TABLE 39
HER-53 and HER-10 EC₅₀ in BT-474 cells, Low Affinity

| Antibody | Eₘₐₓ (ng/mL) |
|---|---|
| HER-53 | 37.1 |
| HER-10 | 35.6 |

Cell Proliferation Assays with Tucatinib

[1466] BT-474 cells were dispensed at 625 cells/well using a Multidrop Combi Reagent Dispenser (Thermo Scientific) into white 384-well plates pre-dispensed with antibody serial dilutions (two-fold) of human IgG1 isotype control antibody, HER-04, HER-10, HER-53, and HER-75 or tucatinib (an antineoplastic HER2 inhibitor) serial dilutions (three-fold). Assay plates were covered with Microclime Environmental Lids (Beckman Coulter 0015717) filled with 8 mL of UltraPure Distilled water (Invitrogen 10977-015) to reduce well evaporation. Cell proliferation was measured using the CellTiter-Glo 2.0 assay (Promega G9242) after four days. Luminescence measurements were taken on an EnVision 2105 Multimode Plate Reader, and data were analyzed in GraphPad Prism using a variable slope (four parameters) fit with 1/Y² data weighting. Edge wells were excluded from analysis. Similar cell growth inhibition was observed between the HER-53 antibody with an enhanced Fc region and HER-04 (FIG. 9A). A comparison between HER-53 and HER-75 is shown in FIG. 9B (see Table 40). Again, similar cell growth inhibition was observed between the HER-53 antibody and HER-75. A similar procedure was followed for testing with SK-BR-3 cells (FIG. 9C, Table 41). Further comparisons were made between HER-08 (control), HER-53, HER-75, and HER-10 utilizing the SK-BR-3 cell line (FIG. 9D, Table 42). HER-10 performed better than HER-53 or HER-04 in BT-474 cells. Tucatinib-treated cells served as positive control for cell growth inhibition.

TABLE 40
IC₅₀ and Eₘₐₓ of HER-53, HER-75, and HER-10 in BT-474 cells

| Antibody | IC₅₀ (μg/mL) | Eₘₐₓ (%) |
|---|---|---|
| HER-53 | 0.063 | 42.8 |
| HER-75 | 0.051 | 35.6 |
| HER-10 | 0.054 | 50.5 |

TABLE 41
IC₅₀ and Eₘₐₓ of HER-53, HER-04, and HER-10 in SK-BR-3 cells

| Antibody | IC₅₀ (μg/mL) | Eₘₐₓ (%) |
|---|---|---|
| HER-53 | 0.072 | 41.6 |
| HER-04 | 0.087 | 40.7 |
| HER-10 | 0.063 | 44.6 |

TABLE 42
IC₅₀ and Eₘₐₓ of HER-53, HER-75, and HER-10 in SK-BR-3 cells

| Antibody | IC₅₀ (μg/mL) | Eₘₐₓ (%) |
|---|---|---|
| HER-53 | 0.056 | 39.1 |
| HER-75 | 0.054 | 31.8 |
| HER-10 | 0.055 | 41.0 |

### BT-474 Cell Proliferation Assays—FecRn-Binding Mutants

[1467] BT-474 cells were dispensed at 625 cells/well using a Multidrop Combi Reagent Dispenser (Thermo Scientific) into white 384-well plates pre-dispensed with antibody dilutions. A two-fold serial dilution series was prepared for each antibody (HER-04, human IgG1 isotype control antibody, HER-43, HER-46, and HER-47) in sterile polypropylene 96-well plates. Assay plates were covered with Microclime Environmental Lids (Beckman Coulter 0015717) filled with 8 mL of UltraPure Distilled water (Invitrogen 10977-015) to reduce well evaporation. Cell proliferation was measured using the CellTiter-Glo 2.0 assay (Promega G9242) after four days of antibody treatment. Luminescence measurements were taken on an EnVision 2105 Multimode Plate Reader, and data were analyzed in GraphPad Prism using a variable slope (four parameters) fit with 1/Y² data weighting. Edge wells were excluded from analysis. A similar cell growth inhibition was observed between HER-04 and engineered antibodies containing mutations that abrogate FcRn-binding (HER-43, HER-46, and HER-47) (FIGS. 10A-10B).

### SK-BR-3 and BT-474 Cell Proliferation Assays of HER-57

[1468] SK-BR-3 cells were dispensed at 625 cells/well using a Multidrop Combi Reagent Dispenser (Thermo Scientific) into white 384-well plates pre-dispensed with antibody serial dilutions (two-fold) or tucatinib serial dilutions (three-fold). Assay plates were covered with Microclime Environmental Lids (Beckman Coulter 0015717) filled with 8 mL of UltraPure Distilled water (Invitrogen 10977-015) to reduce well evaporation. Cell proliferation was measured using the CellTiter-Glo 2.0 assay (Promega G9242) after four days. Luminescence measurements were taken on an EnVision 2105 Multimode Plate Reader, and data were analyzed in GraphPad Prism using a variable slope (four parameters) fit with 1/Y² data weighting (FIG. 11). Edge wells were excluded from analysis. SK-BR-3 cells were sensitive to cell growth inhibition by the HER-57 antibody. HER-57, HER-04, and HER-10 all produced a similar cell growth inhibition, with HER-10 having a slightly larger maximal inhibition. Tucatinib-treated cells served as positive control for cell growth inhibition. A similar procedure was followed for testing with BT-474 cells. In contrast to SK-BR-3 cells, BT-474 cells were not sensitive to cell growth inhibition by HER-57.

### SK-BR-3 and BT-474 Cell Proliferation Assays of Heavy CDR3 Mutants

[1469] HER-08 (control), HER-53, HER-75, and HER-88, were analyzed by cell proliferation assays using SK-BR-3 cells, and BT-47 cells as described above. HER-53, HER-75, and HER-88 all produced cell growth inhibition in both SK-BR-3 cells (FIG. 12A and Table 43) and BT-474 cells (FIG. 12B and Table 44). Tucatinib-treated cells served as positive control for cell growth inhibition.

TABLE 43
IC₅₀ and Eₘₐₓ of HER-53, HER-75, and HER-88 in SK-BR-3 cells

| Antibody | IC₅₀ (μg/mL) | Eₘₐₓ (%) |
|---|---|---|
| HER-53 | 0.031 | 28.2 |
| HER-75 | 0.037 | 27.3 |
| HER-88 | 0.036 | 30.3 |

TABLE 44
IC₅₀ and Eₘₐₓ HER-53 and HER-88 in BT-474 cells

| Antibody | IC₅₀ (μg/mL) | Eₘₐₓ (%) |
|---|---|---|
| HER-53 | 0.081 | 32.4 |
| HER-88 | 0.048 | 41.5 |

[1470] Similar testing was done on HER-88, HER-89, HER-90, HER-91, HER-92. Cell proliferation was measured using the CellTiter-Glo 2.0 assay (Promega G9242) after five days in the BT-474 cell line. Four replicate 384-well plates with 3 wells per point were used. These data are described in Table 45. HER-75 was used as a control to see the effect the CDR3 mutations had on cell proliferation. Similar results were found for HER-75, HER-88, HER-89, HER-90, HER-91, and HER-92.

TABLE 45
Cell Proliferation with HCDR3 mutants

| | IC₅₀ (μg/mL) | | | | | |
|---|---|---|---|---|---|---|
| Antibody | Plate 1 | Plate 2 | Plate 3 | Plate 4 | Average | StDev |
| HER-75 D98, M100, D101, | 0.038 | 0.055 | 0.045 | 0.060 | 0.050 | 0.010 |
| Y102L | | | | | | |
| HER-88 D98W, M100F, D101A, | 0.049 | 0.057 | 0.053 | 0.070 | 0.057 | 0.009 |
| Y102L | | | | | | |
| HER-89 D98W, M100F, D101A | 0.056 | 0.063 | 0.056 | 0.049 | 0.056 | 0.006 |
| HER-90 D98W, M100F, Y102L | 0.058 | 0.052 | 0.069 | 0.067 | 0.062 | 0.008 |
| HER-91 D98W, D101A, Y102L | 0.050 | 0.049 | 0.056 | 0.053 | 0.052 | 0.003 |
| HER-92 M100F, D101A, Y102L | 0.038 | 0.037 | 0.037 | 0.043 | 0.038 | 0.003 |
| | Eₘₐₓ (%) | | | | | |
| Antibody | Plate 1 | Plate 2 | Plate 3 | Plate 4 | Average | StDev |
| HER-75 D98, M100, D101, | 30.6 | 33.2 | 35.0 | 33.4 | 33.1 | 1.8 |
| Y102L | | | | | | |
| HER-88 D98W, M100F, D101A, | 41.3 | 39.4 | 40.4 | 38.4 | 39.9 | 1.3 |
| Y102L | | | | | | |
| HER-89 D98W, M100F, D101A | 42.0 | 39.8 | 45.4 | 43.4 | 42.7 | 2.4 |
| HER-90 D98W, M100F, Y102L | 41.4 | 40.1 | 41.0 | 41.6 | 41.0 | 0.7 |
| HER-91 D98W, D101A, Y102L | 48.1 | 39.8 | 46.3 | 41.2 | 43.8 | 4.0 |
| HER-92 M100F, D101A, Y102L | 37.0 | 35.1 | 37.5 | 34.6 | 36.1 | 1.4 |

### Example 5. In Vivo Characterization of Anti-HER2 Monospecific Antibody Molecules Quantification In Vivo in Mouse Serum and Brain Homogenates

[1471] HER-10 vectorized in VOY9P39 capsid (5.0E11 VG/mouse) or vectorized human IgG1 isotype control antibody were prophylactically administered IV to Fox Chase SCID CB17 mice (Charles River Labs, #236) 12 days prior to xenotransplantation of MDA-MB-361-luc tumor cells in the brain. Mouse serum and brain homogenate samples were collected 30 days post-xenograft and analyzed for functional antibodies by quantifying the percentage of total human IgG1 that binds to HER2 in a custom AlphaLISA assay. To quantify HER2 binding, 10 μL of samples (1:1,000 serum dilution or 1:50 brain homogenate dilution) were added to white 384-well plates and were mixed with recombinant his-tagged HER2 ECD (R&D Systems), Protein A Alpha Donor Beads (Perkin Elmer), and Nickel Chelate AlphaLISA Acceptor Beads (Perkin Elmer) in a 40 uL final assay volume. Functional binding was interpolated from a standard curve of a reference anti-HER2 antibody. Total human IgG1 was quantified via an AlphaLISA Detection Kit (Perkin Elmer AL307) following manufacturer protocols. Briefly, for total human IgG1 detection, 5 μL of sample was added to a white 384-well plate and incubated with AlphaLISA beads in a 50 uL final assay volume. AlphaLISA readings were taken on a PerkinElmer EnVision 2105 Multimode Plate Reader. Standard curves and data interpolation were analyzed in GraphPad Prism using a sigmoidal 4PL fit with 1/Y² data weighting. The HER-10 antibodies in mouse serum were found to be ˜89% functional when quantified via a HER2-binding AlphaLISA assay and normalized against total human IgG1. The human IgG1 isotype control antibodies displayed negligible HER2 binding. Percentages of functional antibody from brain tissue homogenate could not be calculated since samples fell outside the linear range of the assay.

### Example 6. In Vivo Characterization of Vectorized Anti-HER2 Monospecific Antibody Molecules

[1472] The brain distribution of various capsids targeting the central nervous system (CNS) in mice (VOY101, VOY9P39, and VOY9P33) was studied to determine which capsid to use for vectorization of the anti-HER2 constructs. VOY9P39 and VOY9P33, are capsids created by the TRACER method as described in WO2020/072683, Nonnenmacher et al. 2019 Molecular Therapy 27(4S1):27-27, and Nonnenmacher et al. 2021 Molecular Therapy-Methods & Clinical Development 20:366-378, which are hereby incorporated by reference in their entirety.

[1473] Capsid were compared for their brain distributions after IV administration of 4e11 VG/100 uL/Mouse IV injections of CNS targeting capsids in CB17/SCID mice (BALB/C background) with CBA-Driven EGFP transgene.

[1474] Orthotopic xenografts of BT474 passage 24 cells were injected (250,000 cells/2 uL/mouse) intracranially into female Fox Chase SCID CB17 (Mutation: Icr-Prkdcscid/IcrIcoCrl) congenic immunodeficient mice from Charles River Laboratories (#3611), that were 65 days old. The injections were 2.5 mm (lateral), −1 mm (posterior) with respect to bregma, lowered −3 mm ventral and raised+0.5 mm dorsal to a final −2.5 mm ventral position. 6 days later, dilutions of VOY101 or the CNS targeting capsids VOY9P33 or VOY9P39 mediating GFP transgene expression underwent IV injection of 100 uL (4e11 VG/animal), administered through the tail veins of mice, n=5 mice per cohort. At 7 days post AAV, the respective 5 mouse cohorts were euthanized and underwent necropsy. Immunohistochemistry was performed and sagittal sections were stained for anti GFP (for AAV expression) and anti-human nucleoli (for human tumor cell identification). FIGS. 13A-13C show the brain distributions of the tested capsids. PK/PD dynamics in the serum, CSF, and brain post intravenous administration of HER-10 vectorized in VOY9P39 capsid

[1475] Orthotopic xenografts of MDA-MB-361-Luc #1 passage 33 cells grown as tumorspheres (in tumorsphere media; Sigma #C-28070) were injected (250,000 cells/2 uL/mouse) intracranially into female Fox Chase SCID CB17 (Mutation: Icr-Prkdcscid/IcrIcoCrl) congenic immunodeficient mice from Charles River Laboratories (#3611), that were 60 days old. The injections were 2.5 mm (lateral), −1 mm (posterior) with respect to bregma, lowered −3 mm ventral and raised+0.5 mm dorsal to a final −2.5 mm ventral position. 9 days later, dilutions of the AAV comprised of a CNS targeting novel capsid VOY9P39 and a genome encoding HER-10 was prepared. IV injections of 100 uL (5e11 VG/animal) were administered through the tail veins of mice, n=3 mice per cohort. At 7, 14, and 28 days post AAV, the respective 3 mouse cohorts were euthanized and underwent necropsy. AlphaLISA quantification of hIgG1 was performed on the serum, CSF and brain (contralateral to xenograft injection site) samples. ddPCR was performed on cryopulverized brain samples, contralateral to xenograft injection site. Table 46 shows the concentration of the antibodies from different locations and at varying time frames from AAV treatment. FIGS. 14A-14D show the concentration of the HER-10 antibody in the serum, CSF, brain tissue, and brain/ddPCR on days 7, 14, and 28 post AAV treatment.

TABLE 46
Antibody Concentration after treatment with HER10
(5e11 VG/mouse; N = 3) at day 9 post-xenograft

| | Day | | | | |
|---|---|---|---|---|---|
| | Post | | | Std. | Std. |
| Source | AAV | Mean | Units | Dev. | Error |
| Serum | 7 | 6.617 | (ug/ml) | 1.19 | 0.6869 |
| | 14 | 24.6 | (ug/ml) | 4.997 | 2.885 |
| | 28 | 63.86 | (ug/ml) | 42.69 | 24.64 |
| CSF | 7 | 1.182 | (ug/ml) | 0.1563 | 0.09025 |
| | 14 | 1.492 | (ug/ml) | 0.502 | 0.2898 |
| | 28 | 1.286 | (ug/ml) | 0.8529 | 0.6031 |
| Brain | 7 | 0.02724 | % total protein | 0.00548 | 0.003164 |
| | 14 | 0.03833 | % total protein | 0.003843 | 0.002219 |
| | 28 | 0.04583 | % total protein | 0.02092 | 0.01208 |
| Brain/ | 7 | 445 | vector genome/ | 142.2 | 82.08 |
| ddPCR | | | diploid cell | | |
| | 14 | 274.3 | vector genome/ | 57.06 | 32.95 |
| | | | diploid cell | | |
| | 28 | 105 | vector genome/ | 43.58 | 25.16 |
| | | | diploid cell | | |

### Prophylactic Treatment Using iv Administration of HER-10 Vectorized in VOY9P39 Capsid (5E11 VG/Mouse) of Prior to Xenograft

[1476] Dilutions of the AAV particles composed of a CNS targeting capsid VOY9P39 and a genome encoding either human IgG1 isotype control antibody) or HER-10 were prepared in a blinded manner to the study experimenters. IV injections of 100 uL (5e11 VG/animal) were administered through the tail veins of mice, n=10 mice per cohort. Twelve days later, orthotopic xenografts of MDA-MB-361-Luc #1 passage 33 cells grown as tumorspheres (in tumorsphere media; Sigma #C-28070) were injected intracranially (250,000 cells/2 uL/mouse). The mice used were female, Fox Chase SCID CB17 Mutation: Icr-Prkdcscid/IcrIcoCrl Congenic Immunodeficient from Charles River Laboratories (#3611); 88 days old. The injections were 2.5 mm (lateral), −1 mm (posterior) with respect to bregma, lowered −3 mm ventral and raised+0.5 mm dorsal to a final −2.5 mm ventral position. 7 Days later and every week after that until day 28 post xenograft, mice were imaged in an AmiHTX (Spectral Imager) for bioluminescence of the human tumor cells expression of luciferase in response to intraperitoneal luciferin injections. At day 30, the mice were euthanized and necropsies performed. Immunhistochemistry staining for H&E, anti-GFP, and anti-human nucleoli was performed. AlphaLISA quantification of hIgG1 was performed and normalized to a % total protein in the case of brain homogenate. ddPCR quantification of total vector genomes per diploid cell was performed on cryopulverized brain samples. Table 47 displays the data from the vectorized HER-10 treatment in comparison to the vectorized human IgG1 isotype control antibody.

TABLE 47
iv administration of HER-10 vectorized in VOY9P39
capsid (5e11 VG/mouse, 42 Days Post AAV, N = 9)

| Source | Treatment Type | Treatment | Mean | Units | Std. Dev. | Std. Error |
|---|---|---|---|---|---|---|
| Serum | Day 12 | Ctrl (HER08) | 39.61 | (ug/ml) | 11.94 | 3.981 |
| | Prophylactic | HER10 | 102.1 | (ug/ml) | 35.89 | 11.96 |
| Brain | | Ctrl (HER08) | 0.02035 | % total protein | 0.008788 | 0.002929 |
| | | HER10 | 0.04654 | % total protein | 0.01547 | 0.005156 |
| Brain/ | | Ctrl (HER08) | 68.29 | vector genomes/ | 19.52 | 6.506 |
| ddPCR | | | | diploid cell | | |
| | | HER10 | 75.11 | vector genomes/ | 24.92 | 8.306 |
| | | | | diploid cell | | |

[1477] Prophylactic treatment 12 days prior to xenograft with IV administration of HER-10 delivered by the CNS targeting capsid VOY9P39 (5e11 VG/mouse) demonstrated persistent and significant abrogation of tumor growth as compared to control (hIgG1) treated mice. FIGS. 15A-15D show the comparison of the control to the HER-10 in the in the serum, CSF, brain tissue, and brain ddPCR.

IV Treatment with HER-10 or HER-53 Vectorized in VOY9P39 Capsid (2.5E11 VG Mouse) on Day 2 Post-Xenograft

[1478] Orthotopic xenografts of MDA-MB-361-Luc #1 passage 33 cells grown as tumorspheres (in tumorsphere media; Sigma #C-28070) were injected (125,000 cells/2 uL/mouse) intracranially into female Fox Chase SCID CB17 (Mutation: Icr-Prkdcscid/IcrIcoCrl) congenic immunodeficient mice from Charles River Laboratories (#3611), that were 60 days old. The injections were 2.5 mm (lateral), −1 mm (posterior) with respect to bregma, lowered −3 mm ventral and raised+0.5 mm dorsal to a final −2.5 mm ventral position. Two days later, dilutions of AAV particles composed of the CNS targeting capsid VOY9P39 and a genome encoding either human IgG1 isotype control antibody, HER-10 or HER-53 were prepared in a blinded manner to the study experimenters. IV injections of 100 uL (2.5E11 vector genomes per animal) were administered through the tail veins of mice, n=5 mice per cohort. 7 Days later and every week after that until day 49 post xenograft, mice were imaged in an AmiHTX (Spectral Imager) for bioluminescence of the human tumor cells expression of luciferase in response to intraperitoneal luciferin injections. Blood collection was performed with a syringe inserted into tail vein at days 43 and 63 post AAV injections (Table 48). AlphaLISA quantification of hIgG1 was performed on the serum samples. Survival of mice was monitored with twice weekly weighing and symptoms of tumor burden (pain, hunched, ruffled fur, seizures, motor impairment, or −20% weight loss) resulted in euthanasia and removal from study. FIGS. 16A-16E show the normalized total flux, the concentration of the antibody and probability of survival for the HER-10 (FIGS. 16A-16C) and HER-53 (FIGS. 16D-16E) iv treatments.

TABLE 48
iv administration of HER-10 vectorized in VOY9P39 capsid (2.5e11
VG/mouse, Treatment Day 2 Post Xerograph, Serum Source)

| Day Post | | | | | Std. | Std. |
|---|---|---|---|---|---|---|
| AAV | Treatment | n | Mean | Units | Dev. | Error |
| 43 | Ctrl | 5 | 30.72 | (ug/ml) | 6.271 | 2.805 |
| | (HER08) | | | | | |
| 43 | HER10 | 5 | 99.64 | (ug/ml) | 30.82 | 13.78 |
| 63 | Ctrl | 4 | 39.21 | (ug/ml) | 11.73 | 5.866 |
| | (HER08) | | | | | |
| 63 | HER10 | 5 | 118.1 | (ug/ml) | 34.75 | 15.54 |
| 99 | Ctrl | 2 | 67.64 | (ug/ml) | 9.43 | 5.44 |
| | (HER08) | | | | | |
| 99 | HER10 | 5 | 162.3 | (ug/ml) | 47.1 | 14.9 |

[1479] Two days post xenograft IV treatment with HER-10 delivered by the CNS targeting AAV capsid VOY9P39 (2.5E11 vector genomes per mouse) demonstrated persistent and significant tumor growth suppression as compared to human IgG1 (Control_hIgG1) treated mice.

Intracranial Treatment with HER-10 Vectorized in VOY-101 Capsid (6e10 VG/Mouse) on Day 2 Post-Xenograft

[1480] Orthotopic xenografts of BT474 cells were injected (250,000 cells/2 uL/mouse) intracranially into female Fox Chase SCID CB17 (Mutation: Icr-Prkdcscid/IcrIcoCrl) congenic immunodeficient mice from Charles River Laboratories (#3611), that were 60 days old. The injections were 2.5 mm (lateral), −1 mm (posterior) with respect to bregma, lowered −3 mm ventral and raised+0.5 mm dorsal to a final −2.5 mm ventral position. A guide screw cannula was implanted into the injection site. Two days later, dilutions of AAV particles composed of the VOY-101 capsid and a genome encoding either HER-10 or a control (hIgG1-Ctrl) were prepared in a blinded manner to the study experimenters. An intracranial injection of 6e10 VG/animal was administered through the cannula into the striatum, n=15 mice per cohort. 7 Days after the xenograft, and twice weekly after that, mice were imaged in an IVIS for bioluminescence of the human tumor cells expression of luciferase in response to subcutaneous luciferin injections. Survival of mice was monitored with twice weekly weighing and symptoms of tumor burden (pain, hunched, ruffled fur, seizures, motor impairment, or −20% weight loss) resulted in euthanasia and removal from study. FIGS. 17A and 17B shows the normalized total flux and probability of survival, respectively, comparing the vectorized HER-10 and the control treatment.

[1481] Two days post xenograft intracranial treatment with HER10 delivered by VOY-101 (6e10 VG/mouse) demonstrates persistent and significant tumor growth suppression as compared to human IgG1 (Control_hIgG1) treated mice.

Innate Immune Response Upon Treatment with HER-10 Vectorized in AAV9P39-Capsid (2.5e11 VG/Mouse) as Evidenced by Increased in Overall CD45⁺ Cells

[1482] After Cd11b IHC staining of formalin fixed paraffin embedded sections from 28-day old orthotopic xenografts derived from transplantation of MDA-MB-361 cells into mouse brain and 2 day post treated with i.v. administration of AAV9P39-HER-10 (2.5e11 VG/mouse) evidence of innate immune cells surrounding and infiltrating the tumor was discovered (FIG. 18). To investigate this further single cell RNA sequencing was carried out on mouse immune cells (CD45+) derived from the peritumoral area from HER08-Ctrl and HER10 treated xenografts at day 28 post AAV9P39 treatment. Orthotopic xenografts of MDA-MB-361-Luc #1 passage 30 cells grown as tumorspheres (in tumorsphere media; Sigma #C-28070) were injected (250,000 cells/2 uL/mouse) intracranially into female Fox Chase SCID CB17 (Mutation: Icr-Prkdcscid/IcrIcoCrl) congenic immunodeficient mice from Charles River Laboratories (#3611), that were 62 days old. The injections were 2.5 mm (lateral), −1 mm (posterior) with respect to bregma, lowered −3 mm ventral and raised+0.5 mm dorsal to a final −2.5 mm ventral position. Two days later, dilutions of blood brain barrier penetrant novel capsid VOY9P39 mediating either HER-08 (hIgG1) or HER-10 were prepared. IV injections of 100 uL (2.5e11 VG/animal) were administered through the tail veins of mice, n=5 mice per cohort. 7 Days later mice were imaged in an AmiHTX (Spectral Imager) for bioluminescence of the human tumor cells expression of luciferase in response to intraperitoneal luciferin injections.

[1483] Two tumor bearing mice from each cohort (9P39, HER08-Ctrl vs Her10) were weighed and then injected with 10 ml/Kg of ketamine cocktail (ketamine, xylazine and acepromazine injectable drugs). After 5 minutes, and when mice were knocked out and unresponsive to toe pinch each mouse underwent trans-cardial perfusion, performed with PBS. The brains were removed and right hemi-brain area around tumor cell injection site was cut off in a brain matrice (Fisher Sci #50-195-4415) with a razor blade. The brains were minced in L15 and digested at 6C for 25 minutes in protease inhibitor (Creative Biomart #NATE-0633) and dissociated. Myelin depletion was performed (Miltenyi, #130-096-731), and then cells were stained with CD45 antibody (Miltenyi, #130-110-796) and FACS sorted for 7AAD-(viability) and CD45+(immune cells). There was 1.5× higher proportion of CD45+ cells in the HER-10 treated cohort indicating an enrichment of the innate immune response in that condition. Cells were loaded on a 10× chromium G chip and the scRNA-Seq was run and processed according to manufacturer's protocols (10× Genomics). Samples were sequenced on a NextGen500 Sequencing machine (Illumina).

[1484] The resultant FASTQ files were demultiplexed and aligned to the MM10 reference genome using CellRanger (10× Genomics). Next, the resultant data matrix of cell counts was processed using RStudio and the Seurat package with R version 4.1.1. The data was filtered to include only cells with only greater than 1000 genes per cell and less than 5000, and less than 20 percent mitochondrial gene expression. The 2 data matrix files were normalized, scaled, and integrated into one combined dataset. Clusters were generated with a resolution of 0.3 and each cluster identity was determined using a panel of cell type specific genes (Hammond et al., Immunity, 50(1):253-271 (2019); Hove et al., Nature Neuroscience 22:1021-1035 (2019); Ochocka et al., Nat Commun 12:1151 (2021); Villani et al., Science 356(6335):eaah4573 (2017), which are hereby incorporated by reference in their entirety).

[1485] Proliferating microglia (MKI67 high expressing microglia cells) were enriched by almost three-fold as a proportion of total microglia in the HER10 treated mouse brain CD45+ cells as compared to the HER08-Ctrl treatment conditions (Table 49). Moreover, natural killer cells (NK), dendritic cells (DC), and innate lymphocytic cells (ILC), were more abundant as cellular populations determined by their proportion of total mouse brain CD45⁺ cells in the HER10 cohort as compared to the HER08-Ctrl cohort (Table 50).

TABLE 49
Microglia Cell Types as a Percent of Total Microglia by Treatment

| Microglia Cluster | | | Proportion |
|---|---|---|---|
| Identity | HER08-Ctrl | HER10 | HER10/HER08 |
| aMic | 12.30 | 16.90 | 1.37 |
| pMic | 1.40 | 4.00 | 2.86 |
| hMic | 87.67 | 83.12 | 0.95 |

aMic = active microglia (Clusters 3 & 9)
pMic = proliferation microglia (Cluster 9)
hMic = homeostatic microglia (Clusters 0, & 2)

TABLE 50
Fold Change in Proportion of Cluster Cells to Total
CD45 Sorted Mouse Cell Population by Treatment

| Cluster Identity | HER10/HER08 |
|---|---|
| migDC | 30.37 |
| pDC | 21.09 |
| cDC2 | 8.16 |
| ILC2 | 5.17 |
| NK cells | 2.99 |
| dividing microglia | 1.88 |
| non class MC | 1.64 |
| Active Microglia | 0.77 |
| Microglia_1 | 0.63 |
| Microglia_2 | 0.57 |
| Macrophages | 0.52 |

Microglia;
cDC2 (conventional);
Macrophages;
NK;
ncMC (non-classical monocytes);
ILC2 (innate lymphoid cell);
pDC (plasmacytoid);
migDC (migratory);
neutrophils

[1486] An innate immune response was evident in the HER10 population as evidenced by an increased in overall CD45+ cells during FACS analysis, as well as increased proportions of active proliferating microglia, DC, NK cells, and ILC. The intriguing aspect of increased DC populations is that they mediate the interaction between the innate immune response and the adaptive immune response and therefore, perhaps our AAV mediated gene therapy may elicit an even greater therapeutic response in patients with intact immune systems rather than in our preclinical mouse models of immune incompetent mice.

### Example 7. Generation of Anti-HER2 Bispecific Antibody Molecules

[1487] Genetic element constructs were designed for AAV delivery of anti-HER2 bispecific antibodies. The nucleotide sequences from 5′ ITR to 3′ ITR of the genetic element constructs that comprise a transgene encoding a bispecific HER2 antibody molecules are provided as HER-73 (SEQ ID NO: 5190), HER-78 (SEQ ID NO: 5375), HER-97 (SEQ ID NO: 6505), HER-98 (SEQ ID NO: 6506), HER-99 (SEQ ID NO: 6507), HER-100 (SEQ ID NO: 6508), and HER-101 (SEQ ID NO: 6509) herein. These construct are also summarized in Tables 15, 23, and 27.

[1488] The genetic element construct comprises a nucleic acid comprising a transgene encoding a bispecific antibody molecule that binds to HER2. The transgene was designed to comprise a nucleotide sequence encoding an antibody heavy chain signal sequence (SEQ ID NO:5157), a nucleotide sequence encoding an antibody heavy chain variable region (VH) (SEQ ID NO: 5261), a nucleotide sequence encoding antibody heavy chain constant region (SEQ ID NO: 5215 or 5219), a nucleotide sequence encoding a linker region comprising a T2A linker (SEQ ID NO: 1726), which was flanked by a furin cleavage site (SEQ ID NO: 1724) at the 5′ end of the T2A linker, a nucleotide sequence encoding an antibody heavy chain variable region (VH) (SEQ ID NO: 5289, 6537, 6540, 6543, 6546, or 6549), a nucleotide sequence encoding an antibody light chain variable region (VL) (SEQ ID NO: 5265), and a nucleotide sequence encoding an antibody light chain constant region (SEQ ID NO: 5217).

[1489] The encoded antibody of HER-73, HER-78, HER-97, HER-98, HER-99, HER-100, and HER-101 comprise a heavy chain signal sequence (SEQ ID NO:5158), an antibody heavy chain variable region (VH) (SEQ ID NO: 5262, 6536, 6539, 6542, 6545, or 6548), an antibody heavy chain constant region (SEQ ID NO: 5216 or 5220), an antibody light chain variable region (VL) (SEQ ID NO: 5267) and an antibody light chain constant region (SEQ ID NO: 5218).

### Example 8. Generation of ITR-ITR Constructs for the Expression of Anti-HER2 Bispecific Antibody Molecules

[1490] In designing the genetic element constructs for expression of bispecific HER2 antibody molecules (HER-57, HER-62, HER-73, HER-78, HER-97, HER-98, HER-99, HER-100, and HER-101), several promoters were selected. The ubiquitous CB promoter (SEQ ID NO: 2083) was used for HER-62 (SEQ ID NO: 5188), HER-73 (SEQ ID NO: 5189), HER-78 (SEQ ID NO: 5375), HER-97 (SEQ ID NO: 6505), HER-98 (SEQ ID NO: 6506), HER-99 (SEQ ID NO: 6507), HER-100 (SEQ ID NO: 6508), and HER-101 (SEQ ID NO: 6509). The ubiquitous CB promoter (SEQ ID NO: 2083) further comprising a CMV(IE) promoter (SEQ ID NO: 2239), was used for HER-57 (SEQ ID NO: 5187). All nine bispecific HER2 antibodies further comprised an ie exon 1 region (SEQ ID NO: 2090), an ie intron 1 region (SEQ ID NO: 2095), a second human beta-globin intron region (SEQ ID NO: 2097), and a human beta-globin exon region (SEQ ID NO: 2093).

[1491] The 5′ ITR (SEQ ID NO: 2076), the polyadenylation sequence (SEQ ID NO: 2122), and the 3′ ITR (SEQ ID NO: 2078) were the same across all HER-57, HER-62, HER-73, HER-78, HER-97, HER-98, HER-99, HER-100, and HER-101 genetic element constructs designed for the expression of anti-HER2 bispecific antibody molecules.

[1492] All nine genetic element constructs and their component parts are summarized in Tables 15, 20, 22, 23 and 27 above.

### Example 9. In Vitro Characterization of Anti-HER2 Bispecific Antibody Molecules

### BT-474 and SK-BR-3 Cell Proliferation Assays of HER-73 and HER-78

[1493] SK-BR-3 cells were dispensed at 625 cells/well using a Multidrop Combi Reagent Dispenser (Thermo Scientific) into white 384-well plates pre-dispensed with antibody serial dilutions (two-fold) or tucatinib serial dilutions (three-fold). The assay plates were covered with Microclime Environmental Lids (Beckman Coulter 0015717) filled with 8 mL of UltraPure Distilled water (Invitrogen 10977-015) to reduce well evaporation. Cell proliferation was measured using the CellTiter-Glo 2.0 assay (Promega G9242) after four days. Luminescence measurements were taken on an EnVision 2105 Multimode Plate Reader, and data were analyzed in GraphPad Prism using a variable slope (four parameters) fit with 1/Y² data weighting (FIGS. 19A and 19C, Tables 51 and 52). Edge wells were excluded from analysis. The HER-73 and HER-78 antibodies had a larger effect on cell growth inhibition of BT-474 cells than did HER-10 or the ZW-25 bispecific antibody. Tucatinib-treated cells served as positive control for cell growth inhibition. Similar to BT-474 cells, SK-BR-3 cells were sensitive to HER-73 and HER-78, which had a larger effect on cell growth inhibition than did HER-10 or the ZW-25 bispecific antibody (FIGS. 19B and 19D, Tables 53 and 54).

TABLE 51
IC₅₀ and Eₘₐₓ of HER-73, ZW-25, and HER-10 in SK-BR-3 cells

| Antibody | IC₅₀ (μg/mL) | Eₘₐₓ (%) |
|---|---|---|
| HER-73 | 0.070 | 52.0 |
| ZW-25 | 0.431 | 35.0 |
| HER-10 | 0.068 | 36.6 |

TABLE 52
IC₅₀ and Eₘₐₓ of HER-73, HER-78, and HER-10 in SK-BR-3 cells

| Antibody | IC₅₀ (μg/mL) | Eₘₐₓ (%) |
|---|---|---|
| HER-73 | 0.092 | 55.5 |
| HER-78 | 0.051 | 52.8 |
| HER-10 | 0.077 | 36.8 |

TABLE 53
IC₅₀ and Eₘₐₓ of HER-73, ZW-25, and HER-10 in BT-474 cells

| Antibody | IC₅₀ (μg/mL) | Eₘₐₓ (%) |
|---|---|---|
| HER-73 | 0.039 | 51.3 |
| ZW-25 | 0.125 | 41.5 |
| HER-10 | 0.038 | 40.0 |

TABLE 54
IC₅₀ and Eₘₐₓ of HER-73, HER-78, and HER-10 in BT-474 cells

| Antibody | IC₅₀ (μg/mL) | Eₘₐₓ (%) |
|---|---|---|
| HER-73 | 0.056 | 47.5 |
| HER-78 | 0.038 | 45.1 |
| HER-10 | 0.037 | 30.1 |

### Heavy Chain CDR3 Mutant Binding Affinity Measurements for Bispecific Antibody Molecules

[1494] The antibody binding of the heavy chain CDR3 mutants in a bispecific antibody molecule (HER-97, HER-98, HER-99, HER-100, HER-101) to HER2 was analyzed by Biacore 8K (GE Healthcare) surface plasmon resonance instrument (SPR) as described above and the antibody concentration range used was 0.625 to 40 nM (Table 55).

TABLE 55
Binding affinity of Heavy CDR3 mutants in a bispecific antibody to HER2

| | | | | | | | | Fit quality | |
|---|---|---|---|---|---|---|---|---|---|
| | | | | | | | | parameters | |
| | HCDR3 | | | | | | | | chi2/ |
| | Modif. | | Kinetic parameters | | | | | Kinetics | Rmax |
| | (according | | KD | ka | kd | KD | Rmax | Chi² | (%) (Calc. |
| Construct | to Kabat) | Replicate | (nM) | (1/Ms) | (1/s) | (M) | (RU) | (RU²) | unit) |
| HER78 | D98 M100, | 1 | 0.54 | 1.38E+05 | 7.53E−05 | 5.44E−10 | 77.8 | 0.16 | 0.2% |
| | D101, Y102 | 2 | 0.57 | 1.74E+05 | 9.89E−05 | 5.70E−10 | 74.4 | 0.30 | 0.4% |
| | | Mean | 0.44 | 1.64E+05 | 7.28E−05 | 4.36E−10 | 73.85 | | |
| | | % CV | 43.5 | 8.6 | 50.8 | 43.5 | 1.1 | | |
| HER97 | D98W, M100F, | 1 | 0.21 | 1.87E+05 | 3.98E−05 | 2.13E−10 | 71.4 | 0.25 | 0.4% |
| | D101A, Y102L | 2 | 0.27 | 1.84E+05 | 4.98E−05 | 2.70E−10 | 75.1 | 0.29 | 0.4% |
| | | Mean | 0.24 | 1.86E+05 | 4.48E−05 | 2.42E−10 | 73.25 | | |
| | | % CV | 16.7 | 1.1 | 15.8 | 16.7 | 3.6 | | |
| HER98 | D98W, M100F, | 1 | 0.29 | 1.47E+05 | 4.27E−05 | 2.90E−10 | 65.6 | 0.09 | 0.1% |
| | D101A | 2 | 0.33 | 1.46E+05 | 4.82E−05 | 3.30E−10 | 67.5 | 0.11 | 0.2% |
| | | Mean | 0.31 | 1.47E+05 | 4.55E−05 | 3.10E−10 | 66.55 | | |
| | | % CV | 9.1 | 0.5 | 8.6 | 9.1 | 2.0 | | |
| HER99 | D98W, M100F, | 1 | 0.33 | 1.79E+05 | 5.83E−05 | 3.25E−10 | 57.7 | 0.16 | 0.3% |
| | Y102L | 2 | 0.36 | 1.80E+05 | 6.42E−05 | 3.57E−10 | 59.7 | 0.15 | 0.2% |
| | | Mean | 0.34 | 1.80E+05 | 6.13E−05 | 3.41E−10 | 58.70 | | |
| | | % CV | 6.6 | 0.4 | 6.8 | 6.6 | 2.4 | | |
| HER100 | D98W, D101A, | 1 | 0.36 | 1.79E+05 | 6.46E−05 | 3.61E−10 | 49.6 | 0.08 | 0.2% |
| | Y102L | 2 | 0.37 | 1.82E+05 | 6.78E−05 | 3.72E−10 | 50.3 | 0.15 | 0.3% |
| | | Mean | 0.37 | 1.81E+05 | 6.62E−05 | 3.67E−10 | 49.95 | | |
| | | % CV | 2.1 | 1.2 | 3.4 | 2.1 | 1.0 | | |
| HER101 | M100F, D101A, | 1 | 0.27 | 1.72E+05 | 4.59E−05 | 2.67E−10 | 53.6 | 0.05 | 0.1% |
| | Y102L | 2 | 0.31 | 1.66E+05 | 5.10E−05 | 3.07E−10 | 55.7 | 0.06 | 0.1% |
| | | Mean | 0.29 | 1.69E+05 | 4.85E−05 | 2.87E−10 | 54.65 | | |
| | | % CV | 9.9 | 2.5 | 7.4 | 9.9 | 2.7 | | |

### SK-BR-3 Cell Proliferation Assays of Heavy Chain CDR3 Mutant for Bispecific Antibody Molecule (HER 78)

[1495] SK-BR-3 cells were plated at 5000 cells/well into black 96-well plates with clear bottom. Next day, antibody dilutions (three-fold) were added to the plate such that the final concentration range of 0.001 to 10 μg/ml of antibody was achieved. Cell proliferation was measured using the CellTiter-Glo 2.0 assay (Promega G9242) after five days. Luminescence measurements were taken on SpectraMax M3 Reader, and data were analyzed in GraphPad Prism using a variable slope (four parameters) fit with 1/Y² data weighting. Edge wells were excluded from analysis. Inhibition of cell proliferation was observed for all HCDR3 mutants of bispecific antibody but the IC50 values were higher than HER78. HER98 showed the lowest IC50 value among the mutants. HER08 was used as an isotype control in the experiment (Table 56).

TABLE 56
IC₅₀ and Eₘₐₓ of HER-78, HER-97, HER-98, HER-99,
HER-100 and HER-101 in SK-BR-3 cells

| Construct and HCDR3 Modifications | | | |
|---|---|---|---|
| (according to Kabat) | | IC50 (μg/mL) | Emax (%) |
| HER78 | D98 M100, D101, Y102 | 0.08 | 56.45 |
| HER97 | D98W, M100F, D101A, Y102L | 0.81 | 63.23 |
| HER98 | D98W, M100F, D101A | 0.19 | 52.02 |
| HER99 | D98W, M100F, Y102L | 0.87 | 49.23 |
| HER97 | D98W, D101A, Y102L | 0.66 | 59.11 |
| HER101 | M100F, D101A, Y102L | 0.60 | 61.03 |

### Example 10. NHP High-Throughput Screen of TRACER AAV Libraries

[1496] A TRACER based method as described in WO2020072683, the contents of which are herein incorporated by reference in their entirety, was adapted for use in non-human primates (NHP), as described in WO 2021/202651, the contents of which are herein incorporated by reference in their entirety. An orthogonal evolution approach was combined with a high throughput screening by NGS in NHP as described in WO 2021/202651, the contents of which are herein incorporated by reference in their entirety. Briefly, AAV9/AAV5 starting libraries, driven by synapsin or GFAP promoters were administered to non-human primate (NHP) intravenously for in vivo AAV selection (biopanning), performed iteratively. All libraries were injected intravenously at a dose of 1e14VG per animal (approximately 3e13 VG/kg). Orthogonally, biopanning was conducted in hBMVEC cells using the same starting libraries. In the second round of biopanning in NHP, only libraries driven by the synapsin promoter were used. After a period, (e.g., 1 month) RNA was extracted from nervous tissue, e.g., brain and spinal cord. Following RNA recovery and RT-PCR amplification, a systematic NGS enrichment analysis was performed and the peptides shown in Tables 2 and 55 identified. Capsids enrichment ratio, including calculating the ratio of, e.g., P2/P1 reads and comparison to a benchmark (e.g., AAV9) was evaluated.

[1497] Candidate library enrichment data in P3 NHP brain for the peptides identified, over benchmark AAV9, are shown in Table 57. Data are provided as fold enrichment. Fifty-one variants showed greater than 10-fold enrichment over AAV9. Variants with 0.0 enrichment over AAV9 are not included in Table 55.

TABLE 57
NHP NGS AAV9 Enrichment

| | | Fold |
|---|---|---|
| Peptide | SEQ ID | enrichment |
| Sequence | NO: | over AAV9 |
| PLNGAVHLYA | 11725 | 473.7 |
| AQARDSPKGW | 11726 | 214 |
| LTNGAVRDRP | 11727 | 134.4 |
| VQAFTHDSRG | 11728 | 88.6 |
| AQAYSTDVRM | 11729 | 84.8 |
| AQAYSTDVRI | 11730 | 83.8 |
| AQAFTAAERM | 11731 | 74.9 |
| AQTHLQIGVA | 11732 | 54.6 |
| AQSNAVLSLA | 11733 | 51.6 |
| AQAYSTDERM | 11734 | 41.4 |
| AQAYSTDVRL | 11735 | 31.7 |
| AQATVSTLRM | 11736 | 31.5 |
| AQAYSTDERK | 11737 | 31.2 |
| AQAYSTDMRM | 11738 | 30.4 |
| VVNGAVLHVA | 11739 | 29.8 |
| AQAYSTDVTM | 11740 | 29.7 |
| AQAHLQIGVA | 11741 | 23 |
| FLDPAVSSKA | 11742 | 22.6 |
| AQAYVSTLRM | 11743 | 21.9 |
| AQAQTGPPLK | 11744 | 20.1 |
| EQASRLPTPG | 11745 | 20 |
| AQASVSTMRM | 11746 | 19.7 |
| TDYSAVRLGA | 11747 | 18 |
| TQAYSTDVRM | 11748 | 17.9 |
| AQALPSNERL | 11749 | 17.4 |
| AQAYSTDVRT | 11750 | 16.4 |
| AQSSLPEMVA | 11751 | 16.2 |
| AQAGEQSTRL | 11752 | 16.1 |
| AQASNDVGRA | 11753 | 15.4 |
| AQATFTASEY | 11754 | 15.3 |
| AKAHAGTIYS | 11755 | 14.9 |
| AQARTIDQCC | 11756 | 14.8 |
| AQEYNSNPKA | 11757 | 14.5 |
| AQVVDNSTHA | 11758 | 14.5 |
| AQATLSVPLK | 11759 | 14.4 |
| AQIVMNSLKA | 11760 | 12.5 |
| AQATMSQTMA | 11761 | 12.5 |
| AQALTQDERW | 11762 | 12 |
| AQAQLSTLRP | 11763 | 11.6 |
| AQVVMGISVA | 11764 | 11.4 |
| AQAYTTDVRM | 11765 | 11.4 |
| AQHIDSMRPP | 11766 | 11.3 |
| AQASTGTLRL | 11767 | 11.1 |
| AQHRALDYYA | 11768 | 11 |
| AQARESPRGL | 11769 | 10.9 |
| AQALLAGTRV | 11770 | 10.7 |
| TKIQAVPWNA | 11771 | 10.7 |
| AQASLSSTRP | 11772 | 10.6 |
| AQAMGSRSDQ | 11773 | 10.4 |
| AQAAQGTYRG | 11774 | 10.3 |
| SQENAVFSKA | 11775 | 10.3 |
| AQAYGLPKGP | 11785 | 8.4 |
| GGTLAVVSLA | 11798 | 6.9 |
| AQAYVSSVKM | 11819 | 5.2 |

[1498] A subset of the peptide variants from the NHP biopanning showed a very strong and consistent enrichment over AAV9 and PHP.B controls. Further, the peptide of SEQ ID NO: 1725 not only showed a strong enrichment over AAV9 in the brain, but also in the spinal cord, as it led to a 125.6 fold enrichment over AAV9 in the spinal cord. Following the removal of the least reliable variants, a set of 22 variants with enrichment factors ranging from 7-fold to >400-fold over AAV9 was identified. These were cross-referenced to a non-synthetic PCR-amplified library screened in parallel and 12 candidates showed reliable enrichment and high consistency in both assays. Of these, 5 candidates with the highest enrichment scores in both assays and the highest consistency across animals and tissues were retained for individual evaluation. Candidate capsids were labeled TTD-001, TTD-002, TTD-003, TTD-004 and TTD-005 as shown in Table 3 above.

[1499] After 3 rounds of screening of AAV9 peptide insertion library in NHP, many capsids outperformed their parental capsid AAV9 in penetration of the blood brain barrier (BBB). Some of the capsids comprising a peptide showed high enrichment scores and high consistency both across different brain tissue samples from the same animal and across different animals. Consistency in both NNK and NNM codons was also observed. 22 capsid variants exhibited enrichment factors ranging from 7-fold to >400-fold over AAV9 in the brain tissues. A majority of these variants also demonstrated high enrichment factors up to 125-fold over AAV9 in the spinal cord. Of these, 5 candidates with diverse inserted sequences were selected for further evaluation as individual capsids.

### Example 11. Individual Capsid Characterization

[1500] The goal of these experiments was to determine the transduction level and the spatial distribution of each of the 5 capsid candidates selected from the study described in Example 4 relative to AAV9 following intravascular infusion in NHPs (cynomolgus macaque). The 5 selected capsid candidates were TTD-001 (SEQ ID NO: 3623 and 3636, comprising SEQ ID NO: 3648), TTD-002 (SEQ ID NO: 3623, 3625, and 3637, comprising SEQ ID NO: 3649), TTD-003 (SEQ ID NO: 3626 and 3638, comprising SEQ ID NO: 3650), TTD-004 (SEQ ID NO: 3627 and 3639, comprising SEQ ID NO: 3651) and TTD-005 (SEQ ID NO: 3629 and 3641, comprising SEQ ID NO: 3652) as outlined in Table 3 above.

[1501] AAV particles were generated with each of these 5 capsids encapsulating a transgene encoding a payload fused to an HA tag (payload-HA) and driven by a full-length CMV/chicken beta actin promoter by triple transfection in HEK293T cells and formulated in a pharmaceutically acceptable solution. Each test capsid and AAV9 control were tested by intravenously providing two (2) NHP females the AAV particle formulation at a dose of 2e13 VG/kg. The in-life period was 14 days and then a battery of CNS and peripheral tissues were collected for quantification of transgene mRNA, transgene protein and viral DNA (biodistribution). Samples were also collected, fixed and paraffin embedded for immunohistochemical staining.

[1502] In a first pass screening of RNA quantification by qRT-PCR and RT-ddPCR, total RNA was extracted from 3-mm punches from various areas of the brain (cortex, striatum, hippocampus, cerebellum), spinal cord sections, liver and heart, and analyzed by qRT-PCR using a proprietary Taqman set specific for the synthetic CAG exon-exon junction. Cynomolgus TBP (TATA box-binding protein) was used as a housekeeping gene.

[1503] TRACER capsids showed an increase in RNA expression in all brain regions relative to AAV9 in at least one animal. The highest and most consistent increase in brain transduction was observed with capsids TTD-003 and TTD-004 (8- to 200-fold depending in various anatomical locations). In this initial screening TTD-001 was not assessed due to staggered animal dosing. An approximate 10- to 12-fold increase was consistently observed in whole brain slices (equivalent to an average of multiple regions), which was consistent with the values indicated in a next-generation sequencing (NGS) assay. In order to increase data robustness, droplet digital RT-PCR (ddPCR) was performed in parallel to qRT-PCR and confirmed the trends indicated by the qPCR data.

[1504] Interestingly, RNA quantification performed in the spinal cord and dorsal root ganglia indicated important differences between the capsid variants. The spinal cord transduction profile was consistent with the brain, with a strong and consistent increase with TTD-003 and TTD-004 capsids, but interestingly the DRG transduction suggested a substantial detargeting of the TTD-004 capsid, whereas the TTD-003 capsid showed a strongly increased RNA expression.

[1505] Total DNA was extracted from the same brain tissues as RNA, and biodistribution was measured by ddPCR using a Taqman set specific for the CMV promoter sequence. The RNAseP gene was used as a copy number reference. Vector genome (VG) per cell values were determined both by qPCR and ddPCR. Increased biodistribution was observed for the TTD-004 capsid in most brain regions, but surprisingly none of the other candidates showed a significant increase by comparison with AAV9. This apparent contradiction with the RNA quantification data could suggest that some capsids may present improved properties over AAV9 in post-attachment mechanisms rather than strict vector translocation in CNS parenchyma. Interestingly, DNA analysis confirmed the substantial detargeting of TTD-004 capsid from the DRG.

[1506] To further explore the behavior of capsid variant TTD-004, viral genome (VG) quantification was completed from tissues collected from heart atrium, heart ventricle, quadriceps muscle, liver (left and right) and diaphragm and compared to vector genome presence as delivered by AAV9 in the same tissues.

[1507] For TTD-003 and TTD-004 initial immunohistochemical analyses demonstrated the presence of payload-HA to a greater extent than seen with AAV9 delivery in cerebellar tissue, including in the dentate nucleus. Immunohistochemistry confirmed the de-targeting of the dorsal root ganglia for capsid variant TTD-004 as compared to TTD-003 and AAV9.

[1508] Data for each of the variants as described above were compiled as an average mRNA (fold over TBP) or DNA (VG per cell) quantification per capsid variant per tissue as shown in Table 58 below.

TABLE 58
Characterization of exemplary capsid variants

| Measure | Tissue | AAV9 | TTD-001 | TTD-002 | TTD-003 | TTD-004 | TTD-005 |
|---|---|---|---|---|---|---|---|
| mRNA | Frontal | 0.000325065 | 2.7232575 | 0.000768179 | 0.006268831 | 0.007076252 | 0.002204024 |
| | Cortex | | | | | | |
| mRNA | Sensory | 0.001486245 | 3.400055 | 0.00417739 | 0.006788644 | 0.010976612 | 0.004139604 |
| | Cortex | | | | | | |
| mRNA | Motor Cortex | 0.00063318 | 9.00819 | 0.001050247 | 0.009954825 | 0.010522399 | 0.002942249 |
| mRNA | Putamen | 0.000612759 | 3.557205 | 0.001395549 | 0.011832671 | 0.011476176 | 0.001150153 |
| mRNA | Thalamus | 0.002610992 | 2.863635 | 0.013937891 | 0.101411445 | 0.07565653 | 0.01100289 |
| mRNA | Cerebellar | 0.00133497 | 1.3439 | 0.008517779 | 0.006396677 | 0.012964181 | 0.004382119 |
| | Cortex | | | | | | |
| mRNA | Dentate | 0.001364954 | 0.963955 | — | — | — | — |
| | Nucleus | | | | | | |
| mRNA | Caudate | 0.000352281 | 1.3026 | — | 0.003259804 | 0.00634117 | — |
| mRNA | Hippocampus | 0.000311824 | 0.407015 | — | — | — | — |
| mRNA | SC-cervical | 0.012205449 | 11.877762 | 0.022004264 | 0.026994764 | 0.088316491 | 0.005773054 |
| mRNA | SC-Thoracic | 0.048833465 | 2.9974295 | 0.004360318 | 0.035118928 | 0.020543776 | 0.005629959 |
| mRNA | SC-Lumbar | 0.029887407 | 7.969603 | 0.056231995 | 0.016033388 | 0.047713563 | 0.026324154 |
| mRNA | DRG- | 0.74570895 | 9.274951 | 0.007897714 | 2.47872652 | 0.280868887 | 0.008122233 |
| | cervical | | | | | | |
| mRNA | DRG- | 0.5559061 | 5.22606 | 0.006456564 | 8.721845271 | 0.104701895 | — |
| | Thoracic | | | | | | |
| mRNA | DRG- | 1.089758 | 17.308436 | 0.008247771 | 2.271300217 | 0.426704698 | 0.119974244 |
| | Lumbar | | | | | | |
| mRNA | Lung | 0.004807149 | 0.000546842 | — | — | 0.013744781 | — |
| mRNA | Pancreas | — | — | — | — | — | — |
| mRNA | Colon | 0.017962678 | 0.005041385 | — | — | 0.183862903 | — |
| mRNA | Kidney | 0.043825993 | 0.006649157 | — | — | 0.041234576 | — |
| mRNA | Liver | 0.674478605 | 0.253188648 | — | — | 2.578654807 | — |
| mRNA | Adrenal | — | — | — | — | — | — |
| mRNA | Spleen | 0.014066875 | 0.000955981 | — | — | 0.013435626 | — |
| mRNA | Heart | 1.323389668 | 0.132477314 | — | — | 5.587929805 | — |
| mRNA | Quadriceps | 0.116623509 | — | — | — | 4.527799743 | — |
| mRNA | Diaphragm | 0.250001109 | — | — | — | 1.936435215 | — |
| DNA | Frontal | 0.07713 | 2.104843 | 0.10252 | 0.068367 | 0.380429 | 0.1257545 |
| | Cortex | | | | | | |
| DNA | Sensory | 0.093003 | 2.679886 | 0.07443 | 0.034016 | 0.2670975 | 0.132503 |
| | Cortex | | | | | | |
| DNA | Motor Cortex | 0.08796 | 4.3437625 | 0.0913085 | 0.094401 | 0.318999 | 0.1110695 |
| DNA | Putamen | 0.0581365 | 3.07904 | 0.12326 | 0.1497635 | 0.2731175 | 0.0715295 |
| DNA | Thalamus | 0.0524055 | 2.076863 | 0.0664225 | 0.090511 | 0.214999 | 0.086863 |
| DNA | Cerebellar | 0.014238 | 0.186361 | 0.0092915 | 0.009578 | 0.0356345 | 0.0128655 |
| | Cortex | | | | | | |
| DNA | Dentate | 0.025042 | 0.1861975 | 0.210238 | 0.041906 | 0.106107 | 0.055287 |
| | Nucleus | | | | | | |
| DNA | Caudate | 0.079294 | 3.9433175 | — | 0.0529005 | 0.2451035 | — |
| DNA | Hippocampus | 0.095436 | 1.760891 | 0.205433 | 0.368645 | 1.335324 | 0.432829 |
| DNA | SC-cervical | 0.0376 | 1.143863 | 0.061085 | 0.061535 | 0.07573 | 0.05885 |
| DNA | SC-Thoracic | 0.02692 | 0.933734 | 0.025955 | 0.05011 | 0.064915 | 0.0355 |
| DNA | SC-Lumbar | 0.03615 | 0.992728 | 0.019125 | 0.034175 | 0.085165 | 0.051475 |
| DNA | DRG- | 0.0765 | 0.14319 | 0.08196 | 0.13722 | 0.04115 | 0.071625 |
| | cervical | | | | | | |
| DNA | DRG- | 0.165865 | 0.172363 | 0.07202 | 0.133455 | 0.04444 | 0.03139 |
| | Thoracic | | | | | | |
| DNA | DRG- | 0.218725 | 0.385712 | 0.146115 | 0.153205 | 0.032875 | 0.12034 |
| | Lumbar | | | | | | |
| DNA | Lung | 1.085639916 | 3.72 | 0.958576278 | 0.700015423 | 1.22442329 | 0.919823152 |
| DNA | Pancreas | 0.256670617 | 20.535 | 0.320558325 | 0.240633195 | 0.067860607 | 0.004802583 |
| DNA | Colon | 0.053867646 | 3.405 | 1.179065405 | 0.348969617 | 0.116867365 | 0.015288464 |
| DNA | Kidney | 0.896656371 | 26.635 | 4.861362029 | 0.532746958 | 0.386522209 | 7.973793288 |
| DNA | Liver | 207.332334 | 217.64 | 111.910319 | 193.8349405 | 448.5980021 | 213.0317219 |
| DNA | Adrenal | 1.647725996 | 0.69 | 1.561129869 | 1.871878 | 1.269473156 | 0.847293047 |
| DNA | Spleen | 14.93815481 | 20.43565 | 51.70294001 | 22.79095714 | 6.514778227 | 45.91987284 |
| DNA | Heart | 2.012377817 | 14.49 | 0.757528914 | 1.780956673 | 3.814571986 | 0.44694144 |
| DNA | Quadriceps | 0.724278943 | 1.285 | 0.476250457 | 1.366015493 | 5.611203726 | 0.646197937 |
| DNA | Diaphragm | — | 1.06 | — | — | — | — |

[1509] When calculated as fold over AAV9 the data were as shown in Table 59 below.

TABLE 59
Characterization of exemplary capsid variants

| Measure | Tissue | AAV9 | TTD-001 | TTD-002 | TTD-003 | TTD-004 | TTD-005 |
|---|---|---|---|---|---|---|---|
| mRNA | Frontal Cortex | 1.0 | 8378 | 2.4 | 19.3 | 21.8 | 6.8 |
| mRNA | Sensory Cortex | 1.0 | 2288 | 2.8 | 4.6 | 7.4 | 2.8 |
| mRNA | Motor Cortex | 1.0 | 14227 | 1.7 | 15.7 | 16.6 | 4.6 |
| mRNA | Putamen | 1.0 | 5805 | 2.3 | 19.3 | 18.7 | 1.9 |
| mRNA | Thalamus | 1.0 | 1097 | 5.3 | 38.8 | 29.0 | 4.2 |
| mRNA | Cerebellar Cortex | 1.0 | 1007 | 6.4 | 4.8 | 9.7 | 3.3 |
| mRNA | Dentate Nucleus | 1.0 | 706 | — | — | — | — |
| mRNA | Caudate | 1.0 | 3698 | — | — | — | — |
| mRNA | Hippocampus | 1.0 | 1305 | — | — | — | — |
| mRNA | SC-cervical | 1.0 | 973 | 1.8 | 2.2 | 7.2 | 0.5 |
| mRNA | SC-Thoracic | 1.0 | 61 | 0.1 | 0.7 | 0.4 | 0.1 |
| mRNA | SC-Lumbar | 1.0 | 267 | 1.9 | 0.5 | 1.6 | 0.9 |
| mRNA | DRG-cervical | 1.0 | 12 | 0.0 | 3.3 | 0.4 | 0.0 |
| mRNA | DRG-Thoracic | 1.0 | 9 | 0.0 | 15.7 | 0.2 | — |
| mRNA | DRG-Lumbar | 1.0 | 16 | 0.0 | 2.1 | 0.4 | 0.1 |
| mRNA | Lung | 1.0 | 0.11 | — | — | 2.9 | — |
| mRNA | Pancreas | — | — | — | — | — | — |
| mRNA | Colon | 1.0 | 0.28 | — | — | 10.2 | — |
| mRNA | Kidney | 1.0 | 0.15 | — | — | 0.9 | — |
| mRNA | Liver | 1.0 | 0.38 | — | — | 3.8 | — |
| mRNA | Adrenal | — | — | — | — | — | — |
| mRNA | Spleen | 1.0 | 0.07 | — | — | 1.0 | — |
| mRNA | Heart | 1.0 | 0.10 | — | — | 4.2 | — |
| mRNA | Quadriceps | 1.0 | — | — | — | 38.8 | — |
| mRNA | Diaphragm | 1.0 | — | — | — | 7.7 | — |
| DNA | Frontal Cortex | 1.0 | 27.29 | 1.3 | 0.9 | 4.9 | 1.6 |
| DNA | Sensory Cortex | 1.0 | 28.82 | 0.8 | 0.4 | 2.9 | 1.4 |
| DNA | Motor Cortex | 1.0 | 49.38 | 1.0 | 1.1 | 3.6 | 1.3 |
| DNA | Putamen | 1.0 | 52.96 | 2.1 | 2.6 | 4.7 | 1.2 |
| DNA | Thalamus | 1.0 | 39.63 | 1.3 | 1.7 | 4.1 | 1.7 |
| DNA | Cerebellar Cortex | 1.0 | 13.09 | 0.7 | 0.7 | 2.5 | 0.9 |
| DNA | Dentate Nucleus | 1.0 | 7.44 | 8.4 | 1.7 | 4.2 | 2.2 |
| DNA | Caudate | 1.0 | 49.73 | — | 0.7 | 3.1 | — |
| DNA | Hippocampus | 1.0 | 18.45 | 2.2 | 3.9 | 14.0 | 4.5 |
| DNA | SC-cervical | 1.0 | 30.42 | 1.6 | 1.6 | 2.0 | 1.6 |
| DNA | SC-Thoracic | 1.0 | 34.69 | 1.0 | 1.9 | 2.4 | 1.3 |
| DNA | SC-Lumbar | 1.0 | 27.46 | 0.5 | 0.9 | 2.4 | 1.4 |
| DNA | DRG-cervical | 1.0 | 1.87 | 1.1 | 1.8 | 0.5 | 0.9 |
| DNA | DRG-Thoracic | 1.0 | 1.04 | 0.4 | 0.8 | 0.3 | 0.2 |
| DNA | DRG-Lumbar | 1.0 | 1.76 | 0.7 | 0.7 | 0.2 | 0.6 |
| DNA | Lung | 1.0 | 3.43 | 0.9 | 0.6 | 1.1 | 0.8 |
| DNA | Pancreas | 1.0 | 80.01 | 1.2 | 0.9 | 0.3 | 0.0 |
| DNA | Colon | 1.0 | 63.21 | 21.9 | 6.5 | 2.2 | 0.3 |
| DNA | Kidney | 1.0 | 29.70 | 5.4 | 0.6 | 0.4 | 8.9 |
| DNA | Liver | 1.0 | 1.05 | 0.5 | 0.9 | 2.2 | 1.0 |
| DNA | Adrenal | 1.0 | 0.42 | 0.9 | 1.1 | 0.8 | 0.5 |
| DNA | Spleen | 1.0 | 1.37 | 3.5 | 1.5 | 0.4 | 3.1 |
| DNA | Heart | 1.0 | 7.20 | 0.4 | 0.9 | 1.9 | 0.2 |
| DNA | Quadriceps | 1.0 | 1.77 | 0.7 | 1.9 | 7.7 | 0.9 |
| DNA | Diaphragm | — | — | — | — | — | — |

[1510] Capsid variant TTD-001 showed greater than 5,000 fold increase in payload-HA levels delivered to the brain as compared to AAV9 and measured by qRT-PCR and normalized to TBP. In all CNS tissues measured, TTD-001 showed dramatically enhanced delivery of payload-HA as compared to AAV9.

[1511] Immunohistochemistry of fixed brain tissues revealed dramatic transduction in both NHP tested by TTD-001 of the dentate nucleus, cerebellar cortex, cerebral cortex, brain stem, hippocampus, thalamus and putamen. AAV9 transduction of the dentate nucleus, cerebellar cortex, cerebral cortex, hippocampus, thalamus and putamen appeared negligible in comparison. TTD-001 therefore demonstrated broad and robust expression and distribution in the brain following intravenous administration in NHPs. In the dorsal root ganglia, both TTD-001 and AAV9 showed similar IHC patterns.

### Example 12. In Vivo Characterization of Vectorized Anti-HER2 Monospecific Antibody Molecules Comprising FcRN Modifications

[1512] The biodistribution of HER-04 (SEQ ID NO: 5163; wild-type Fc), HER-47 (SEQ ID NO: 5185; comprising the FcRN modifications: I253A, H310A, H435A, numbered according to the EU index as in Kabat), and HER-42 (SEQ ID NO: 5166; comprising the FcRN modification H435Q, numbered according to the EU index as in Kabat) vectorized in a VOY101 capsid protein (SEQ ID NO: 1) was quantified in mice to determine if FcRN modifications were able reduce serum levels of vectorized antibodies compared to the HER-04 wild-type Fc control.

[1513] CB17/SCID mice (BALB/C background; n=5) were intravenously administered the vectorized HER-004, HER-47, and HER-42 constructs with the VOY101 capsid protein at a dose of 2.5e11 VG/100 uL/injection. At weeks 1, 2 and 3 post IV injection, blood was drawn to measure serum concentrations of hIgG1 (antibody levels in the serum). At 29 days post intravenous administration of the AAV particles, the mice were sacrificed and necropsied to isolate cerebral spinal fluid (CSF), the brain, heart, and liver tissues for hIgG1 quantification (antibody levels in the CNS and peripheral tissues).

### PK/PD Dynamics in the Serum, CSF, Brain, Heart and Liver Post Intravenous Administration of the Vectorized Anti-HER2 Antibodies Comprising FcRN Modifications

[1514] AlphaLISA was used to quantify the levels of hIgG1 in the serum samples isolated at weeks 1, 2, and 3 post-treatment, and the CSF, brain, heart and liver samples isolated at 29 days post-treatment. Table 60 shows the concentration of the HER-04, HER-47, and HER-42 vectorized antibodies in the serum of the mice at weeks 1, 2, and 3 post-treatment. Table Y provides the concentration of the HER-04, HER-47, and HER-42 vectorized antibodies in the brain, heart, liver, and CSF of the mice at 29-days post-treatment.

TABLE 60
Serum levels of anti-HER2 antibodies at weeks 1,
2, and 3 post-treatment with vectorized HER-04,
HER-47 (1253A, H310A, H435A) or HER-42 (H435Q)

| | Average Serum hIgG1 | | | | | |
|---|---|---|---|---|---|---|
| | Levels (μg/ml) | | | Standard Deviation | | |
| | Week | Week | Week | Week | Week | Week |
| Antibody | 1 | 2 | 3 | 1 | 2 | 3 |
| HER-04 | 26.8 | 48.0 | 77.5 | 10.2 | 17.8 | 37.7 |
| (control; wild-type) | | | | | | |
| HER-47 | 1.2 | 2.5 | 2.5 | 0.8 | 1.9 | 2.8 |
| (I253A, H310A, H435A) | | | | | | |
| HER-42 | 38.2 | 67.7 | | 13.7 | 44.8 | |
| (H435Q) | | | | | | |

TABLE 61
Levels of anti-HER2 antibodies in the CSF, liver, heart,
and brain at 29 days post-treatment with vectorized
HER-04, HER-47 (1253A, H310A, H435A) or HER-42 (H435Q)

| | Average hIgG1 Levels (μg/ml) | | | | Standard Deviation | | | |
|---|---|---|---|---|---|---|---|---|
| Antibody | Brain | Heart | Liver | CSF | Brain | Heart | Liver | CSF |
| HER-04 | 1.7 | 1.5 | 2.9 | 0.3 | 0.60 | 0.76 | 1.54 | 0.06 |
| (control; wild-type Fc) | | | | | | | | |
| HER-47 | 1.0 | 0.0 | 0.1 | 0.4 | 0.23 | 0.04 | 0.14 | 0.43 |
| (I253A, H310A, H435A) | | | | | | | | |
| HER-42 | 3.8 | 1.8 | 0.7 | 1.4 | 3.07 | 0.92 | 0.37 | 0.35 |
| (H435Q) | | | | | | | | |

[1515] As shown in Tables 60 and 61, the serum levels of the vectorized HER-47 antibody comprising the three FcRN modifications, I253A, H310A, H435A, numbered according to the EU index as in Kabat, was markedly reduced compared to the vectorized HER-04 control with the wild-type Fc region. However, the level of the vectorized HER-47 antibody comprising the three FcRN modifications was only partially reduced in the brain, relative to the HER-04 control. These data indicated that the FcRN modifications of I253A, H310A, H435A, numbered according to the EU index as in Kabat, may be useful in reducing serum levels of vectorized anti-HER2 antibodies.

### VIII. EQUIVALENTS AND SCOPE

[1516] The disclosures of each and every patent, patent application, and publication cited herein are hereby incorporated herein by reference in their entirety. While this invention has been disclosed with reference to certain embodiments, it is apparent that further embodiments and variations of this invention may be devised by others skilled in the art without departing from the true spirit and scope of the invention. The appended claims are intended to be construed to include all such embodiments and equivalent variations.

1. An isolated nucleic acid comprising a transgene encoding an antibody molecule that binds to HER2/neu, comprising a heavy chain variable region (VH) and a light chain variable region (VL) wherein:
(a)(i) the nucleotide sequence encoding the VH comprises the nucleotide sequence of SEQ ID NO: 5269, or a nucleotide sequence with at least 90% sequence identity to the nucleotide sequence of SEQ ID NO: 5269; and (ii) the nucleotide sequence encoding the VL comprises the nucleotide sequence of SEQ ID NO: 5273 or 5245, or a nucleotide sequence with at least 90% sequence identity to the nucleotide sequence of SEQ ID NO: 5273 or 5245; or
(b)(i) the nucleotide sequence encoding the VH comprises the nucleotide sequence of SEQ ID NO: 5109, or a nucleotide sequence with at least 90% sequence identity to the nucleotide sequence of SEQ ID NO: 5109; and (ii) the nucleotide sequence encoding the VL comprises the nucleotide sequence of SEQ ID NO: 5113, or a nucleotide sequence with at least 90% sequence identity to the nucleotide sequence of SEQ ID NO: 5113.

2. The isolated nucleic acid of claim 1, wherein:
(a)(i) the encoded antibody molecule comprises a heavy chain constant region, wherein the nucleotide sequence encoding the heavy chain constant region comprises the nucleotide sequence of SEQ ID NO: 5219, or a nucleotide sequence with at least 90% sequence identity to the nucleotide sequence of SEQ ID NO: 5219; and/or (ii) the encoded antibody molecule comprises a light chain constant region, wherein the nucleotide sequence encoding the light chain constant region comprises the nucleotide sequence of SEQ ID NO: 5221, or a nucleotide sequence with at least 90% sequence identity to the nucleotide sequence of SEQ ID NO: 5221; or
(b)(i) a heavy chain constant region, wherein the nucleotide sequence encoding the heavy chain constant region comprises the nucleotide sequence of SEQ ID NO: 5017 or 5247, or a nucleotide sequence with at least 90% sequence identity to the nucleotide sequence of SEQ ID NO: 5017 or 5247; and/or (ii) a light chain constant region, wherein the nucleotide sequence encoding the light chain constant region comprises the nucleotide sequence of SEQ ID NO: 5007, or a nucleotide sequence with at least 90% sequence identity to the nucleotide sequence of SEQ ID NO: 5007.

3. The isolated nucleic acid of claim 1, wherein the encoded antibody molecule comprises:
(a)(i) a heavy chain, wherein the nucleotide sequence encoding the heavy chain comprises the nucleotide sequence of SEQ ID NO: 5271 or 5244, or a nucleotide sequence with at least 90% sequence identity to the nucleotide sequence of SEQ ID NO: 5271 or 5244; and/or (ii) a light chain, wherein the nucleotide sequence encoding the light chain comprises the nucleotide sequence of SEQ ID NO: 5275 or 5246, or a nucleotide sequence with at least 90% 95, sequence identity to the nucleotide sequence of SEQ ID NO: 5275 or 5246; or
(b)(i) a heavy chain, wherein the nucleotide sequence encoding the heavy chain comprises the nucleotide sequence of SEQ ID NO: 5111, or a nucleotide sequence with at least 90% sequence identity to the nucleotide sequence of SEQ ID NO: 5111; and/or
(ii) a light chain, wherein the nucleotide sequence encoding the light chain comprises the nucleotide sequence of SEQ ID NO: 5115, or a nucleotide sequence with at least 90% sequence identity to the nucleotide sequence of SEQ ID NO: 5115.

4. The isolated nucleic acid of claim 1, wherein the encoded antibody molecule is a full length antibody, a bispecific antibody, a Fab, a F(ab′)2, a Fv, a single chain Fv fragment (scFv), single domain antibody, or a camelid antibody.

5. The isolated nucleic acid of claim 4, which encodes an Fc region or functional variant thereof, optionally wherein the Fc region:
(i) has reduced affinity ablated, affinity for an Fc receptor compared to a reference, wherein the reference is a wild-type Fc receptor;
(ii) comprises a mutation at one, two, or all of positions I253, H310, and/or H435, numbered according to the EU index as in Kabat;
(iii) has reduced effector function compared to a reference, wherein the reference is a wild-type Fc receptor; and/or
(iv) comprises a mutation at one, two, three, four, or all of positions L235, F243, R292, Y300, and P396, numbered according to the EU index as in Kabat.

6. The isolated nucleic acid of claim 1, wherein the transgene further encodes a fynomer and/or a signal sequence.

7. (canceled)

8. The isolated nucleic acid of claim 1, wherein the transgene further encodes a signal sequence wherein:
(i) the nucleotide sequence encoding the signal sequence comprises the nucleotide sequence of SEQ ID NO: 5157, and is located 5′ relative to the nucleotide sequence encoding the VH and/or the heavy chain; and/or
(ii) the nucleotide sequence encoding the signal sequence comprises the nucleotide sequence of SEQ ID NO: 5159, and is located 5′ relative to the nucleotide sequence encoding the VL and/or the light chain.

9. The isolated nucleic acid of claim 1, wherein:
(i) the sequences of the encoded VH and VL are connected directly;
(ii) the sequences of the encoded VH and VL are connected via a linker;
(iii) the sequences of the encoded heavy chain and light chain are connected directly; or
(iv) the sequences of the encoded heavy chain and light chain are connected via a linker.

10-12. (canceled)

13. A genetic element comprising a nucleic acid positioned between two inverted terminal repeats (ITRs), wherein the nucleic acid comprises a transgene encoding a multispecific antibody molecule comprising at least two antigen binding domains for two different domains of HER2, optionally wherein (i) the first antigen binding domain binds domain I of HER2 and the second antigen binding domain that binds domain IV of HER2;
(ii) the first antigen binding domain that binds domain II of HER2 and the second antigen binding domain that binds domain IV of HER2;
(iii) the first antigen binding domain that binds domain III of HER2 and the second antigen binding domain that binds domain IV of HER2;
(iv) the first antigen binding domain that binds domain I of HER2 and the second antigen binding domain that binds domain II of HER2;
(v) the first antigen binding domain that binds domain I of HER2 and the second antigen binding domain that binds domain III of HER2; or
(vi) the first antigen binding domain that binds domain II of HER2 and the second antigen binding domain that binds domain III of HER2.

14-22. (canceled)

23. A genetic element comprising the isolated nucleic acid molecule of claim 1, and further comprising:
(i) a promoter operably linked to the transgene encoded by the isolated nucleic acid molecule;
(ii) a 5′ inverted terminal repeat (ITR) sequence;
(iii) a 3′ ITR sequence;
(iv) an enhancer;
(v) an intron;
(vi) an exon;
(vii) a nucleotide sequence encoding a miR binding site; and/or
(viii) a polyadenylation signal region.

24. (canceled)

25. The genetic element of claim 23, wherein:
(i) the promoter is a ubiquitous promoter or a tissue-specific promoter,
(ii) the promoter is a CMV promoter, a CBA promoter, an EF-1α promoter, a PGK promoter, a UBC promoter, a GUSB promoter, a GFAP promoter, or a synapsin promoter;
(iii) the 5′ ITR, the 3′ ITR, or both comprise a nucleotide sequence of any one of SEQ ID NOs: 2076-2079, or a nucleotide sequence with at least 95% sequence identity thereto;
(iv) the enhancer is a CMV immediate-early (CMVie) enhancer and/or comprises the nucleotide sequence of SEQ ID NO: 2081, or a nucleotide sequence with at least 95% sequence identity to SEQ ID NO: 2081;
(v) the intron comprises the nucleotide sequence of any one of SEQ ID NOs: 2095-2105, 2240, 2256, 2257 or 2258, or a nucleotide sequence with at least 95% identity thereto;
(vi) the exon comprises the nucleotide sequence of any one of SEQ ID NOs: 2090-2094, or a sequence with at least 95% sequence identity thereto;
(vii) the encoded miR binding site is complementary to a miRNA expressed in a cell or tissue of the DRG, liver, heart, hematopoietic system, or a combination thereof; and/or
(viii) the polyA signal region comprises the nucleotide sequence of any one of SEQ ID NOs: 2122-2124, or a nucleotide sequence with at least 95% sequence identity to any one of SEQ ID NOs: 2122-2124.

26-31. (canceled)

32. An isolated antibody molecule encoded by the nucleic acid of claim 1.

33. An isolated vector comprising the nucleic acid of claim 1.

34. (canceled)

35. An AAV particle comprising:
(i) an AAV capsid polypeptide; and
(ii) the isolated nucleic acid of claim 1.

36. The AAV particle of claim 35, wherein the AAV capsid polypeptide comprises a VOY101 capsid polypeptide, a VOY9P39 capsid polypeptide, a VOY9P33 capsid protein, a AAVPHP.B (PHP.B) capsid polypeptide, a AAVPHP.N (PHP.N) capsid polypeptide, an AAV1 capsid polypeptide, an AAV2 capsid polypeptide, an AAV5 capsid polypeptide, an AAV9 capsid polypeptide, an AAV9 K449R capsid polypeptide, an AAVrh10 capsid polypeptide, or a variant thereof.

37. A cell comprising the nucleic acid of claim 1, optionally wherein the cell is a mammalian cell, an insect cell, or a bacterial cell.

38. A method of making an AAV particle, the method comprising
(i) providing a host cell comprising the genetic element of claim 23; and
(ii) incubating the host cell under conditions suitable to enclose the genetic element in an AAV capsid polypeptide;
thereby making the isolated AAV particle.

39. A pharmaceutical composition comprising the AAV particle of claim 35.

40. A method of delivering an exogenous antibody molecule that binds to HER2/neu, to a subject comprising administering an effective amount of the AAV particle of claim 35.

41. (canceled)

42. A method of treating a subject having or diagnosed with having cancer expressing HER2/neu, comprising administering to the subject an effective amount of the AAV particle of claim 35.

43-49. (canceled)

The application's sequence listing, which the Patent Office published only in electronic form, follows.

SEQUENCE LISTING (4546 sequences)

SEQ ID NO: 1 - protein, 743 aa, synthetic construct
  REGION 1..743: note = source = /note="Description of Artificial Sequence: Synthetic polypeptide"
MAADGYLPDWLEDNLSEGIREWWALKPGAPQPKANQQHQDNARGLVLPGYKYLGPGNGLDKGEPVNAADAAALEHDKAYDQQLKAGDNPYLKYNHADAEFQERLKEDTSFGGNLGRAVFQAKKRLLEPLGLVEEAAKTAPGKKRPVEQSPQEPDSSAGIGKSGAQPAKKRLNFGQTGDTESVPDPQPIGEPPAAPSGVGSLTMASGGGAPVADNNEGADGVGSSSGNWHCDSQWLGDRVITTSTRTWALPTYNNHLYKQISNSTSGGSSNDNAYFGYSTPWGYFDFNRFHCHFSPRDWQRLINNNWGFRPKRLNFKLFNIQVKEVTDNNGVKTIANNLTSTVQVFTDSDYQLPYVLGSAHEGCLPPFPADVFMIPQYGYLTLNDGSQAVGRSSFYCLEYFPSQMLRTGNNFQFSYEFENVPFHSSYAHSQSLDRLMNPLIDQYLYYLSKTINGSGQNQQTLKFSVAGPSNMAVQGRNYIPGPSYRQQRVSTTVTQNNNSEFAWPGASSWALNGRNSLMNPGPAMASHKEGEDRFFPLSGSLIFGKQGTGRDNVDADKVMITNEEEIKTTNPVATESYGQVATNHQSDGTLAVPFKAQAQTGWVQNQGILPGMVWQDRDVYLQGPIWAKIPHTDGNFHPSPLMGGFGMKHPPPQILIKNTPVPADPPTAFNKDKLNSFITQYSTGQVSVEIEWELQKENSKRWNPEIQYTSNYYKSNNVEFAVNTEGVYSEPRPIGTRYLTRNL

SEQ ID NO: 2 - DNA, 2232 bp, synthetic construct
  misc_feature 1..2232: note = source = /note="Description of Artificial Sequence: Synthetic polynucleotide"
  source 1..2232: mol_type = other DNA
atggctgccgatggttatcttccagattggctcgaggacaaccttagtgaaggaattcgcgagtggtgggctttgaaacctggagcccctcaacccaaggcaaatcaacaacatcaagacaacgctcgaggtcttgtgcttccgggttacaaataccttggacccggcaacggactcgacaagggggagccggtcaacgcagcagacgcggcggccctcgagcacgacaaggcctacgaccagcagctcaaggccggagacaacccgtacctcaagtacaaccacgccgacgccgagttccaggagcggctcaaagaagatacgtcttttgggggcaacctcgggcgagcagtcttccaggccaaaaagaggcttcttgaacctcttggtctggttgaggaagcggctaagacggctcctggaaagaagaggcctgtagagcagtctcctcaggaaccggactcctccgcgggtattggcaaatcgggtgcacagcccgctaaaaagagactcaatttcggtcagactggcgacacagagtcagtcccagaccctcaaccaatcggagaacctcccgcagccccctcaggtgtgggatctcttacaatggcttcaggtggtggcgcaccagtggcagacaataacgaaggtgccgatggagtgggtagttcctcgggaaattggcattgcgattcccaatggctgggggacagagtcatcaccaccagcacccgaacctgggccctgcccacctacaacaatcacctctacaagcaaatctccaacagcacatctggaggatcttcaaatgacaacgcctacttcggctacagcaccccctgggggtattttgacttcaacagattccactgccacttctcaccacgtgactggcagcgactcatcaacaacaactggggattccggcctaagcgactcaacttcaagctcttcaacattcaggtcaaagaggttacggacaacaatggagtcaagaccatcgccaataaccttaccagcacggtccaggtcttcacggactcagactatcagctcccgtacgtgctcgggtcggctcacgagggctgcctcccgccgttcccagcggacgttttcatgattcctcagtacgggtatctgacgcttaatgatggaagccaggccgtgggtcgttcgtccttttactgcctggaatatttcccgtcgcaaatgctaagaacgggtaacaacttccagttcagctacgagtttgagaacgtacctttccatagcagctacgctcacagccaaagcctggaccgactaatgaatccactcatcgaccaatacttgtactatctctcaaagactattaacggttctggacagaatcaacaaacgctaaaattcagtgtggccggacccagcaacatggctgtccagggaagaaactacatacctggacccagctaccgacaacaacgtgtctcaaccactgtgactcaaaacaacaacagcgaatttgcttggcctggagcttcttcttgggctctcaatggacgtaatagcttgatgaatcctggacctgctatggccagccacaaagaaggagaggaccgtttctttcctttgtctggatctttaatttttggcaaacaaggaactggaagagacaacgtggatgcggacaaagtcatgataaccaacgaagaagaaattaaaactactaacccggtagcaacggagtcctatggacaagtggccacaaaccaccagagtgatgggactttggcggtgccttttaaggcacaggcgcagaccggctgggttcaaaaccaaggaatacttccgggtatggtttggcaggacagagatgtgtacctgcaaggacccatttgggccaaaattcctcacacggacggcaactttcacccttctccgctgatgggagggtttggaatgaagcacccgcctcctcagatcctcatcaaaaacacacctgtacctgcggatcctccaacggccttcaacaaggacaagctgaactctttcatcacccagtattctactggccaagtcagcgtggagatcgagtgggagctgcagaaggaaaacagcaagcgctggaacccggagatccagtacacttccaactattacaagtctaataatgttgaatttgctgttaatactgaaggtgtatatagtgaaccccgccccattggcaccagatacctgactcgtaatctgtaa

SEQ ID NO: 3 - DNA, 2232 bp, synthetic construct
  misc_feature 1..2232: note = source = /note="Description of Artificial Sequence: Synthetic polynucleotide"
  source 1..2232: mol_type = other DNA
atggctgccgatggttatcttccagattggctcgaggacaaccttagtgaaggaattcgcgagtggtgggctttgaaacctggagcccctcaacccaaggcaaatcaacaacatcaagacaacgctcgaggtcttgtgcttccgggttacaaataccttggacccggcaacggactcgacaagggggagccggtcaacgcagcagacgcggcggccctcgagcacgacaaggcctacgaccagcagctcaaggccggagacaacccgtacctcaagtacaaccacgccgacgccgagttccaggagcggctcaaagaagatacgtcttttgggggcaacctcgggcgagcagtcttccaggccaaaaagaggcttcttgaacctcttggtctggttgaggaagcggctaagacggctcctggaaagaagaggcctgtagagcagtctcctcaggaaccggactcctccgcgggtattggcaaatcgggtgcacagcccgctaaaaagagactcaatttcggtcagactggcgacacagagtcagtcccagaccctcaaccaatcggagaacctcccgcagccccctcaggtgtgggatctcttacaatggcttcaggtggtggcgcaccagtggcagacaataacgaaggtgccgatggagtgggtagttcctcgggaaattggcattgcgattcccaatggctgggggacagagtcatcaccaccagcacccgaacctgggccctgcccacctacaacaatcacctctacaagcaaatctccaacagcacatctggaggatcttcaaatgacaacgcctacttcggctacagcaccccctgggggtattttgacttcaacagattccactgccacttctcaccacgtgactggcagcgactcatcaacaacaactggggattccggcctaagcgactcaacttcaagctcttcaacattcaggtcaaagaggttacggacaacaatggagtcaagaccatcgccaataaccttaccagcacggtccaggtcttcacggactcagactatcagctcccgtacgtgctcgggtcggctcacgagggctgcctcccgccgttcccagcggacgttttcatgattcctcagtacgggtatctgacgcttaatgatggaagccaggccgtgggtcgttcgtccttttactgcctggaatatttcccgtcgcaaatgctaagaacgggtaacaacttccagttcagctacgagtttgagaacgtacctttccatagcagctacgctcacagccaaagcctggaccgactaatgaatccactcatcgaccaatacttgtactatctctcaaagactattaacggttctggacagaatcaacaaacgctaaaattcagtgtggccggacccagcaacatggctgtccagggaagaaactacatacctggacccagctaccgacaacaacgtgtctcaaccactgtgactcaaaacaacaacagcgaatttgcttggcctggagcttcttcttgggctctcaatggacgtaatagcttgatgaatcctggacctgctatggccagccacaaagaaggagaggaccgtttctttcctttgtctggatctttaatttttggcaaacaaggaactggaagagacaacgtggatgcggacaaagtcatgataaccaacgaagaagaaattaaaactactaacccggtagcaacggagtcctatggacaagtggccacaaaccaccagagtgcccaaactttggcggtgccttttaaggcacaggcgcagaccggctgggttcaaaaccaaggaatacttccgggtatggtttggcaggacagagatgtgtacctgcaaggacccatttgggccaaaattcctcacacggacggcaactttcacccttctccgctgatgggagggtttggaatgaagcacccgcctcctcagatcctcatcaaaaacacacctgtacctgcggatcctccaacggccttcaacaaggacaagctgaactctttcatcacccagtattctactggccaagtcagcgtggagatcgagtgggagctgcagaaggaaaacagcaagcgctggaacccggagatccagtacacttccaactattacaagtctaataatgttgaatttgctgttaatactgaaggtgtatatagtgaaccccgccccattggcaccagatacctgactcgtaatctgtaa

SEQ ID NO: 4 - protein, 743 aa, synthetic construct
  REGION 1..743: note = source = /note="Description of Artificial Sequence: Synthetic polypeptide"
MAADGYLPDWLEDNLSEGIREWWALKPGAPQPKANQQHQDNARGLVLPGYKYLGPGNGLDKGEPVNAADAAALEHDKAYDQQLKAGDNPYLKYNHADAEFQERLKEDTSFGGNLGRAVFQAKKRLLEPLGLVEEAAKTAPGKKRPVEQSPQEPDSSAGIGKSGAQPAKKRLNFGQTGDTESVPDPQPIGEPPAAPSGVGSLTMASGGGAPVADNNEGADGVGSSSGNWHCDSQWLGDRVITTSTRTWALPTYNNHLYKQISNSTSGGSSNDNAYFGYSTPWGYFDFNRFHCHFSPRDWQRLINNNWGFRPKRLNFKLFNIQVKEVTDNNGVKTIANNLTSTVQVFTDSDYQLPYVLGSAHEGCLPPFPADVFMIPQYGYLTLNDGSQAVGRSSFYCLEYFPSQMLRTGNNFQFSYEFENVPFHSSYAHSQSLDRLMNPLIDQYLYYLSRTINGSGQNQQTLKFSVAGPSNMAVQGRNYIPGPSYRQQRVSTTVTQNNNSEFAWPGASSWALNGRNSLMNPGPAMASHKEGEDRFFPLSGSLIFGKQGTGRDNVDADKVMITNEEEIKTTNPVATESYGQVATNHQSDGTLAVPFKAQAQTGWVQNQGILPGMVWQDRDVYLQGPIWAKIPHTDGNFHPSPLMGGFGMKHPPPQILIKNTPVPADPPTAFNKDKLNSFITQYSTGQVSVEIEWELQKENSKRWNPEIQYTSNYYKSNNVEFAVNTEGVYSEPRPIGTRYLTRNL

SEQ ID NO: 5 - protein, 743 aa, synthetic construct
  REGION 1..743: note = source = /note="Description of Artificial Sequence: Synthetic polypeptide"
MAADGYLPDWLEDNLSEGIREWWALKPGAPQPKANQQHQDNARGLVLPGYKYLGPGNGLDKGEPVNAADAAALEHDKAYDQQLKAGDNPYLKYNHADAEFQERLKEDTSFGGNLGRAVFQAKKRLLEPLGLVEEAAKTAPGKKRPVEQSPQEPDSSAGIGKSGAQPAKKRLNFGQTGDTESVPDPQPIGEPPAAPSGVGSLTMASGGGAPVADNNEGADGVGSSSGNWHCDSQWLGDRVITTSTRTWALPTYNNHLYKQISNSTSGGSSNDNAYFGYSTPWGYFDFNRFHCHFSPRDWQRLINNNWGFRPKRLNFKLFNIQVKEVTDNNGVKTIANNLTSTVQVFTDSDYQLPYVLGSAHEGCLPPFPADVFMIPQYGYLTLNDGSQAVGRSSFYCLEYFPSQMLRTGNNFQFSYEFENVPFHSSYAHSQSLDRLMNPLIDQYLYYLSRTINGSGQNQQTLKFSVAGPSNMAVQGRNYIPGPSYRQQRVSTTVTQNNNSEFAWPGASSWALNGRNSLMNPGPAMASHKEGEDRFFPLSGSLIFGKQGTGRDNVDADKVMITNEEEIKTTNPVATESYGQVATNHQSAQTLAVPFKAQAQTGWVQNQGILPGMVWQDRDVYLQGPIWAKIPHTDGNFHPSPLMGGFGMKHPPPQILIKNTPVPADPPTAFNKDKLNSFITQYSTGQVSVEIEWELQKENSKRWNPEIQYTSNYYKSNNVEFAVNTEGVYSEPRPIGTRYLTRNL

SEQ ID NO: 6 - DNA, 2232 bp, synthetic construct
  misc_feature 1..2232: note = source = /note="Description of Artificial Sequence: Synthetic polynucleotide"
  source 1..2232: mol_type = other DNA
atggctgccgatggttatcttccagattggctcgaggacaaccttagtgaaggaattcgcgagtggtgggctttgaaacctggagcccctcaacccaaggcaaatcaacaacatcaagacaacgctcgaggtcttgtgcttccgggttacaaataccttggacccggcaacggactcgacaagggggagccggtcaacgcagcagacgcggcggccctcgagcacgacaaggcctacgaccagcagctcaaggccggagacaacccgtacctcaagtacaaccacgccgacgccgagttccaggagcggctcaaagaagatacgtcttttgggggcaacctcgggcgagcagtcttccaggccaaaaagaggcttcttgaacctcttggtctggttgaggaagcggctaagacggctcctggaaagaagaggcctgtagagcagtctcctcaggaaccggactcctccgcgggtattggcaaatcgggtgcacagcccgctaaaaagagactcaatttcggtcagactggcgacacagagtcagtcccagaccctcaaccaatcggagaacctcccgcagccccctcaggtgtgggatctcttacaatggcttcaggtggtggcgcaccagtggcagacaataacgaaggtgccgatggagtgggtagttcctcgggaaattggcattgcgattcccaatggctgggggacagagtcatcaccaccagcacccgaacctgggccctgcccacctacaacaatcacctctacaagcaaatctccaacagcacatctggaggatcttcaaatgacaacgcctacttcggctacagcaccccctgggggtattttgacttcaacagattccactgccacttctcaccacgtgactggcagcgactcatcaacaacaactggggattccggcctaagcgactcaacttcaagctcttcaacattcaggtcaaagaggttacggacaacaatggagtcaagaccatcgccaataaccttaccagcacggtccaggtcttcacggactcagactatcagctcccgtacgtgctcgggtcggctcacgagggctgcctcccgccgttcccagcggacgttttcatgattcctcagtacgggtatctgacgcttaatgatggaagccaggccgtgggtcgttcgtccttttactgcctggaatatttcccgtcgcaaatgctaagaacgggtaacaacttccagttcagctacgagtttgagaacgtacctttccatagcagctacgctcacagccaaagcctggaccgactaatgaatccactcatcgaccaatacttgtactatctctctagaactattaacggttctggacagaatcaacaaacgctaaaattcagtgtggccggacccagcaacatggctgtccagggaagaaactacatacctggacccagctaccgacaacaacgtgtctcaaccactgtgactcaaaacaacaacagcgaatttgcttggcctggagcttcttcttgggctctcaatggacgtaatagcttgatgaatcctggacctgctatggccagccacaaagaaggagaggaccgtttctttcctttgtctggatctttaatttttggcaaacaaggtaccggcagagacaacgtggatgcggacaaagtcatgataaccaacgaagaagaaattaaaactactaacccggtagcaacggagtcctatggacaagtggccacaaaccaccagagtgcccaaactttggcggtgccttttaaggcacaggcgcagaccggttgggttcaaaaccaaggaatacttccgggtatggtttggcaggacagagatgtgtacctgcaaggacccatttgggccaaaattcctcacacggacggcaactttcacccttctccgctgatgggagggtttggaatgaagcacccgcctcctcagatcctcatcaaaaacacacctgtacctgcggatcctccaacggccttcaacaaggacaagctgaactctttcatcacccagtattctactggccaagtcagcgtggagatcgagtgggagctgcagaaggaaaacagcaagcgctggaacccggagatccagtacacttccaactattacaagtctaataatgttgaatttgctgttaatactgaaggtgtatatagtgaaccccgccccattggcaccagatacctgactcgtaatctgtaa

SEQ ID NO: 7 - protein, 736 aa, synthetic construct
  REGION 1..736: note = source = /note="Description of Artificial Sequence: Synthetic polypeptide"
MAADGYLPDWLEDNLSEGIREWWALKPGAPQPKANQQHQDNARGLVLPGYKYLGPGNGLDKGEPVNAADAAALEHDKAYDQQLKAGDNPYLKYNHADAEFQERLKEDTSFGGNLGRAVFQAKKRLLEPLGLVEEAAKTAPGKKRPVEQSPQEPDSSAGIGKSGAQPAKKRLNFGQTGDTESVPDPQPIGEPPAAPSGVGSLTMASGGGAPVADNNEGADGVGSSSGNWHCDSQWLGDRVITTSTRTWALPTYNNHLYKQISNSTSGGSSNDNAYFGYSTPWGYFDFNRFHCHFSPRDWQRLINNNWGFRPKRLNFKLFNIQVKEVTDNNGVKTIANNLTSTVQVFTDSDYQLPYVLGSAHEGCLPPFPADVFMIPQYGYLTLNDGSQAVGRSSFYCLEYFPSQMLRTGNNFQFSYEFENVPFHSSYAHSQSLDRLMNPLIDQYLYYLSRTIQSSQTPRQTLKFSVAGPSNMAVQGRNYIPGPSYRQQRVSTTVTQNNNSEFAWPGASSWALNGRNSLMNPGPAMASHKEGEDRFFPLSGSLIFGKQGTGRDNVDADKVMITNEEEIKTTNPVATESYGQVATNHQSAQAQAQTGWVQNQGILPGMVWQDRDVYLQGPIWAKIPHTDGNFHPSPLMGGFGMKHPPPQILIKNTPVPADPPTAFNKDKLNSFITQYSTGQVSVEIEWELQKENSKRWNPEIQYTSNYYKSNNVEFAVNTEGVYSEPRPIGTRYLTRNL

SEQ ID NO: 8 - protein, 743 aa, synthetic construct
  REGION 1..743: note = source = /note="Description of Artificial Sequence: Synthetic polypeptide"
MAADGYLPDWLEDNLSEGIREWWALKPGAPQPKANQQHQDNARGLVLPGYKYLGPGNGLDKGEPVNAADAAALEHDKAYDQQLKAGDNPYLKYNHADAEFQERLKEDTSFGGNLGRAVFQAKKRLLEPLGLVEEAAKTAPGKKRPVEQSPQEPDSSAGIGKSGAQPAKKRLNFGQTGDTESVPDPQPIGEPPAAPSGVGSLTMASGGGAPVADNNEGADGVGSSSGNWHCDSQWLGDRVITTSTRTWALPTYNNHLYKQISNSTSGGSSNDNAYFGYSTPWGYFDFNRFHCHFSPRDWQRLINNNWGFRPKRLNFKLFNIQVKEVTDNNGVKTIANNLTSTVQVFTDSDYQLPYVLGSAHEGCLPPFPADVFMIPQYGYLTLNDGSQAVGRSSFYCLEYFPSQMLRTGNNFQFSYEFENVPFHSSYAHSQSLDRLMNPLIDQYLYYLSRTIILGTGTSQTLKFSVAGPSNMAVQGRNYIPGPSYRQQRVSTTVTQNNNSEFAWPGASSWALNGRNSLMNPGPAMASHKEGEDRFFPLSGSLIFGKQGTGRDNVDADKVMITNEEEIKTTNPVATESYGQVATNHQSAQTRTNPEAAQAQTGWVQNQGILPGMVWQDRDVYLQGPIWAKIPHTDGNFHPSPLMGGFGMKHPPPQILIKNTPVPADPPTAFNKDKLNSFITQYSTGQVSVEIEWELQKENSKRWNPEIQYTSNYYKSNNVEFAVNTEGVYSEPRPIGTRYLTRNL

SEQ ID NO: 9 - protein, 743 aa, synthetic construct
  REGION 1..743: note = source = /note="Description of Artificial Sequence: Synthetic polypeptide"
MAADGYLPDWLEDNLSEGIREWWALKPGAPQPKANQQHQDNARGLVLPGYKYLGPGNGLDKGEPVNAADAAALEHDKAYDQQLKAGDNPYLKYNHADAEFQERLKEDTSFGGNLGRAVFQAKKRLLEPLGLVEEAAKTAPGKKRPVEQSPQEPDSSAGIGKSGAQPAKKRLNFGQTGDTESVPDPQPIGEPPAAPSGVGSLTMASGGGAPVADNNEGADGVGSSSGNWHCDSQWLGDRVITTSTRTWALPTYNNHLYKQISNSTSGGSSNDNAYFGYSTPWGYFDFNRFHCHFSPRDWQRLINNNWGFRPKRLNFKLFNIQVKEVTDNNGVKTIANNLTSTVQVFTDSDYQLPYVLGSAHEGCLPPFPADVFMIPQYGYLTLNDGSQAVGRSSFYCLEYFPSQMLRTGNNFQFSYEFENVPFHSSYAHSQSLDRLMNPLIDQYLYYLSRTIILGTGTSQTLKFSVAGPSNMAVQGRNYIPGPSYRQQRVSTTVTQNNNSEFAWPGASSWALNGRNSLMNPGPAMASHKEGEDRFFPLSGSLIFGKQGTGRDNVDADKVMITNEEEIKTTNPVATESYGQVATNHQSAQNGGTSSSAQAQTGWVQNQGILPGMVWQDRDVYLQGPIWAKIPHTDGNFHPSPLMGGFGMKHPPPQILIKNTPVPADPPTAFNKDKLNSFITQYSTGQVSVEIEWELQKENSKRWNPEIQYTSNYYKSNNVEFAVNTEGVYSEPRPIGTRYLTRNL

SEQ ID NO: 10 - protein, 743 aa, synthetic construct
  REGION 1..743: note = source = /note="Description of Artificial Sequence: Synthetic polypeptide"
MAADGYLPDWLEDNLSEGIREWWALKPGAPQPKANQQHQDNARGLVLPGYKYLGPGNGLDKGEPVNAADAAALEHDKAYDQQLKAGDNPYLKYNHADAEFQERLKEDTSFGGNLGRAVFQAKKRLLEPLGLVEEAAKTAPGKKRPVEQSPQEPDSSAGIGKSGAQPAKKRLNFGQTGDTESVPDPQPIGEPPAAPSGVGSLTMASGGGAPVADNNEGADGVGSSSGNWHCDSQWLGDRVITTSTRTWALPTYNNHLYKQISNSTSGGSSNDNAYFGYSTPWGYFDFNRFHCHFSPRDWQRLINNNWGFRPKRLNFKLFNIQVKEVTDNNGVKTIANNLTSTVQVFTDSDYQLPYVLGSAHEGCLPPFPADVFMIPQYGYLTLNDGSQAVGRSSFYCLEYFPSQMLRTGNNFQFSYEFENVPFHSSYAHSQSLDRLMNPLIDQYLYYLSRTINGSGQNQQTLKFSVAGPSNMAVQGRNYIPGPSYRQQRVSTTVTQNNNSEFAWPGASSWALNGRNSLMNPGPAMASHKEGEDRFFPLSGSLIFGKQGTGRDNVDADKVMITNEEEIKTTNPVATESYGQVATNHQSAQQAVRTSLAQAQTGWVQNQGILPGMVWQDRDVYLQGPIWAKIPHTDGNFHPSPLMGGFGMKHPPPQILIKNTPVPADPPTAFNKDKLNSFITQYSTGQVSVEIEWELQKENSKRWNPEIQYTSNYYKSNNVEFAVNTEGVYSEPRPIGTRYLTRNL

SEQ ID NO: 11 - protein, 736 aa, synthetic construct
  REGION 1..736: note = source = /note="Description of Artificial Sequence: Synthetic polypeptide"
MAADGYLPDWLEDNLSEGIREWWALKPGAPQPKANQQHQDNARGLVLPGYKYLGPGNGLDKGEPVNAADAAALEHDKAYDQQLKAGDNPYLKYNHADAEFQERLKEDTSFGGNLGRAVFQAKKRLLEPLGLVEEAAKTAPGKKRPVEQSPQEPDSSAGIGKSGAQPAKKRLNFGQTGDTESVPDPQPIGEPPAAPSGVGSLTMASGGGAPVADNNEGADGVGSSSGNWHCDSQWLGDRVITTSTRTWALPTYNNHLYKQISNSTSGGSSNDNAYFGYSTPWGYFDFNRFHCHFSPRDWQRLINNNWGFRPKRLNFKLFNIQVKEVTDNNGVKTIANNLTSTVQVFTDSDYQLPYVLGSAHEGCLPPFPADVFMIPQYGYLTLNDGSQAVGRSSFYCLEYFPSQMLRTGNNFQFSYEFENVPFHSSYAHSQSLDRLMNPLIDQYLYYLSRTINGSGQNQQTLKFSVAGPSNMAVQGRNYIPGPSYRQQRVSTTVTQNNNSEFAWPGASSWALNGRNSLMNPGPAMASHKEGEDRFFPLSGSLIFGKQGTGRDNVDADKVMITNEEEIKTTNPVATESYGQVATNHQSAQAQAQTGWVQNQGILPGMVWQDRDVYLQGPIWAKIPHTDGNFHPSPLMGGFGMKHPPPQILIKNTPVPADPPTAFNKDKLNSFITQYSTGQVSVEIEWELQKENSKRWNPEIQYTSNYYKSNNVEFAVNTEGVYSEPRPIGTRYLTRNL

SEQ ID NO: 12 - DNA, 2211 bp, synthetic construct
  misc_feature 1..2211: note = source = /note="Description of Artificial Sequence: Synthetic polynucleotide"
  source 1..2211: mol_type = other DNA
atggctgccgatggttatcttccagattggctcgaggacaacctctctgagggcattcgcgagtggtgggacttgaaacctggagccccgaagcccaaagccaaccagcaaaagcaggacgacggccggggtctggtgcttcctggctacaagtacctcggacccttcaacggactcgacaagggggagcccgtcaacgcggcggacgcagcggccctcgagcacgacaaggcctacgaccagcagctcaaagcgggtgacaatccgtacctgcggtataaccacgccgacgccgagtttcaggagcgtctgcaagaagatacgtcttttgggggcaacctcgggcgagcagtcttccaggccaagaagcgggttctcgaacctctcggtctggttgaggaaggcgctaagacggctcctggaaagaaacgtccggtagagcagtcgccacaagagccagactcctcctcgggcatcggcaagacaggccagcagcccgctaaaaagagactcaattttggtcagactggcgactcagagtcagtccccgatccacaacctctcggagaacctccagcaacccccgctgctgtgggacctactacaatggcttcaggcggtggcgcaccaatggcagacaataacgaaggcgccgacggagtgggtaatgcctcaggaaattggcattgcgattccacatggctgggcgacagagtcatcaccaccagcacccgcacctgggccttgcccacctacaataaccacctctacaagcaaatctccagtgcttcaacgggggccagcaacgacaaccactacttcggctacagcaccccctgggggtattttgatttcaacagattccactgccacttttcaccacgtgactggcagcgactcatcaacaacaattggggattccggcccaagagactcaacttcaaactcttcaacatccaagtcaaggaggtcacgacgaatgatggcgtcacaaccatcgctaataaccttaccagcacggttcaagtcttctcggactcggagtaccagcttccgtacgtcctcggctctgcgcaccagggctgcctccctccgttcccggcggacgtgttcatgattccgcaatacggctacctgacgctcaacaatggcagccaagccgtgggacgttcatccttttactgcctggaatatttcccttctcagatgctgagaacgggcaacaactttaccttcagctacacctttgaggaagtgcctttccacagcagctacgcgcacagccagagcctggaccggctgatgaatcctctcatcgaccaatacctgtattacctgaacagaactcaaaatcagtccggaagtgcccaaaacaaggacttgctgtttagccgtgggtctccagctggcatgtctgttcagcccaaaaactggctacctggaccctgttatcggcagcagcgcgtttctaaaacaaaaacagacaacaacaacagcaattttacctggactggtgcttcaaaatataacctcaatgggcgtgaatccatcatcaaccctggcactgctatggcctcacacaaagacgacgaagacaagttctttcccatgagcggtgtcatgatttttggaaaagagagcgccggagcttcaaacactgcattggacaatgtcatgattacagacgaagaggaaattaaagccactaaccctgtggccaccgaaagatttgggaccgtggcagtcaatttccagagcagcagcacagaccctgcgaccggagatgtgcatgctatgggagcattacctggcatggtgtggcaagatagagacgtgtacctgcagggtcccatttgggccaaaattcctcacacagatggacactttcacccgtctcctcttatgggcggctttggactcaagaacccgcctcctcagatcctcatcaaaaacacgcctgttcctgcgaatcctccggcggagttttcagctacaaagtttgcttcattcatcacccaatactccacaggacaagtgagtgtggaaattgaatgggagctgcagaaagaaaacagcaagcgctggaatcccgaagtgcagtacacatccaattatgcaaaatctgccaacgttgattttactgtggacaacaatggactttatactgagcctcgccccattggcacccgttaccttacccgtcccctgtaa

SEQ ID NO: 13 - protein, 736 aa, Adeno-associated virus 1
MAADGYLPDWLEDNLSEGIREWWDLKPGAPKPKANQQKQDDGRGLVLPGYKYLGPFNGLDKGEPVNAADAAALEHDKAYDQQLKAGDNPYLRYNHADAEFQERLQEDTSFGGNLGRAVFQAKKRVLEPLGLVEEGAKTAPGKKRPVEQSPQEPDSSSGIGKTGQQPAKKRLNFGQTGDSESVPDPQPLGEPPATPAAVGPTTMASGGGAPMADNNEGADGVGNASGNWHCDSTWLGDRVITTSTRTWALPTYNNHLYKQISSASTGASNDNHYFGYSTPWGYFDFNRFHCHFSPRDWQRLINNNWGFRPKRLNFKLFNIQVKEVTTNDGVTTIANNLTSTVQVFSDSEYQLPYVLGSAHQGCLPPFPADVFMIPQYGYLTLNNGSQAVGRSSFYCLEYFPSQMLRTGNNFTFSYTFEEVPFHSSYAHSQSLDRLMNPLIDQYLYYLNRTQNQSGSAQNKDLLFSRGSPAGMSVQPKNWLPGPCYRQQRVSKTKTDNNNSNFTWTGASKYNLNGRESIINPGTAMASHKDDEDKFFPMSGVMIFGKESAGASNTALDNVMITDEEEIKATNPVATERFGTVAVNFQSSSTDPATGDVHAMGALPGMVWQDRDVYLQGPIWAKIPHTDGHFHPSPLMGGFGLKNPPPQILIKNTPVPANPPAEFSATKFASFITQYSTGQVSVEIEWELQKENSKRWNPEVQYTSNYAKSANVDFTVDNNGLYTEPRPIGTRYLTRPL

SEQ ID NO: 14 - DNA, 4718 bp, Adeno-associated virus 1
  source 1..4718: mol_type = genomic DNA
ttgcccactccctctctgcgcgctcgctcgctcggtggggcctgcggaccaaaggtccgcagacggcagagctctgctctgccggccccaccgagcgagcgagcgcgcagagagggagtgggcaactccatcactaggggtaatcgcgaagcgcctcccacgctgccgcgtcagcgctgacgtaaattacgtcataggggagtggtcctgtattagctgtcacgtgagtgcttttgcgacattttgcgacaccacgtggccatttagggtatatatggccgagtgagcgagcaggatctccattttgaccgcgaaatttgaacgagcagcagccatgccgggcttctacgagatcgtgatcaaggtgccgagcgacctggacgagcacctgccgggcatttctgactcgtttgtgagctgggtggccgagaaggaatgggagctgcccccggattctgacatggatctgaatctgattgagcaggcacccctgaccgtggccgagaagctgcagcgcgacttcctggtccaatggcgccgcgtgagtaaggccccggaggccctcttctttgttcagttcgagaagggcgagtcctacttccacctccatattctggtggagaccacgggggtcaaatccatggtgctgggccgcttcctgagtcagattagggacaagctggtgcagaccatctaccgcgggatcgagccgaccctgcccaactggttcgcggtgaccaagacgcgtaatggcgccggaggggggaacaaggtggtggacgagtgctacatccccaactacctcctgcccaagactcagcccgagctgcagtgggcgtggactaacatggaggagtatataagcgcctgtttgaacctggccgagcgcaaacggctcgtggcgcagcacctgacccacgtcagccagacccaggagcagaacaaggagaatctgaaccccaattctgacgcgcctgtcatccggtcaaaaacctccgcgcgctacatggagctggtcgggtggctggtggaccggggcatcacctccgagaagcagtggatccaggaggaccaggcctcgtacatctccttcaacgccgcttccaactcgcggtcccagatcaaggccgctctggacaatgccggcaagatcatggcgctgaccaaatccgcgcccgactacctggtaggccccgctccgcccgcggacattaaaaccaaccgcatctaccgcatcctggagctgaacggctacgaacctgcctacgccggctccgtctttctcggctgggcccagaaaaggttcgggaagcgcaacaccatctggctgtttgggccggccaccacgggcaagaccaacatcgcggaagccatcgcccacgccgtgcccttctacggctgcgtcaactggaccaatgagaactttcccttcaatgattgcgtcgacaagatggtgatctggtgggaggagggcaagatgacggccaaggtcgtggagtccgccaaggccattctcggcggcagcaaggtgcgcgtggaccaaaagtgcaagtcgtccgcccagatcgaccccacccccgtgatcgtcacctccaacaccaacatgtgcgccgtgattgacgggaacagcaccaccttcgagcaccagcagccgttgcaggaccggatgttcaaatttgaactcacccgccgtctggagcatgactttggcaaggtgacaaagcaggaagtcaaagagttcttccgctgggcgcaggatcacgtgaccgaggtggcgcatgagttctacgtcagaaagggtggagccaacaaaagacccgcccccgatgacgcggataaaagcgagcccaagcgggcctgcccctcagtcgcggatccatcgacgtcagacgcggaaggagctccggtggactttgccgacaggtaccaaaacaaatgttctcgtcacgcgggcatgcttcagatgctgtttccctgcaagacatgcgagagaatgaatcagaatttcaacatttgcttcacgcacgggacgagagactgttcagagtgcttccccggcgtgtcagaatctcaaccggtcgtcagaaagaggacgtatcggaaactctgtgccattcatcatctgctggggcgggctcccgagattgcttgctcggcctgcgatctggtcaacgtggacctggatgactgtgtttctgagcaataaatgacttaaaccaggtatggctgccgatggttatcttccagattggctcgaggacaacctctctgagggcattcgcgagtggtgggacttgaaacctggagccccgaagcccaaagccaaccagcaaaagcaggacgacggccggggtctggtgcttcctggctacaagtacctcggacccttcaacggactcgacaagggggagcccgtcaacgcggcggacgcagcggccctcgagcacgacaaggcctacgaccagcagctcaaagcgggtgacaatccgtacctgcggtataaccacgccgacgccgagtttcaggagcgtctgcaagaagatacgtcttttgggggcaacctcgggcgagcagtcttccaggccaagaagcgggttctcgaacctctcggtctggttgaggaaggcgctaagacggctcctggaaagaaacgtccggtagagcagtcgccacaagagccagactcctcctcgggcatcggcaagacaggccagcagcccgctaaaaagagactcaattttggtcagactggcgactcagagtcagtccccgatccacaacctctcggagaacctccagcaacccccgctgctgtgggacctactacaatggcttcaggcggtggcgcaccaatggcagacaataacgaaggcgccgacggagtgggtaatgcctcaggaaattggcattgcgattccacatggctgggcgacagagtcatcaccaccagcacccgcacctgggccttgcccacctacaataaccacctctacaagcaaatctccagtgcttcaacgggggccagcaacgacaaccactacttcggctacagcaccccctgggggtattttgatttcaacagattccactgccacttttcaccacgtgactggcagcgactcatcaacaacaattggggattccggcccaagagactcaacttcaaactcttcaacatccaagtcaaggaggtcacgacgaatgatggcgtcacaaccatcgctaataaccttaccagcacggttcaagtcttctcggactcggagtaccagcttccgtacgtcctcggctctgcgcaccagggctgcctccctccgttcccggcggacgtgttcatgattccgcaatacggctacctgacgctcaacaatggcagccaagccgtgggacgttcatccttttactgcctggaatatttcccttctcagatgctgagaacgggcaacaactttaccttcagctacacctttgaggaagtgcctttccacagcagctacgcgcacagccagagcctggaccggctgatgaatcctctcatcgaccaatacctgtattacctgaacagaactcaaaatcagtccggaagtgcccaaaacaaggacttgctgtttagccgtgggtctccagctggcatgtctgttcagcccaaaaactggctacctggaccctgttatcggcagcagcgcgtttctaaaacaaaaacagacaacaacaacagcaattttacctggactggtgcttcaaaatataacctcaatgggcgtgaatccatcatcaaccctggcactgctatggcctcacacaaagacgacgaagacaagttctttcccatgagcggtgtcatgatttttggaaaagagagcgccggagcttcaaacactgcattggacaatgtcatgattacagacgaagaggaaattaaagccactaaccctgtggccaccgaaagatttgggaccgtggcagtcaatttccagagcagcagcacagaccctgcgaccggagatgtgcatgctatgggagcattacctggcatggtgtggcaagatagagacgtgtacctgcagggtcccatttgggccaaaattcctcacacagatggacactttcacccgtctcctcttatgggcggctttggactcaagaacccgcctcctcagatcctcatcaaaaacacgcctgttcctgcgaatcctccggcggagttttcagctacaaagtttgcttcattcatcacccaatactccacaggacaagtgagtgtggaaattgaatgggagctgcagaaagaaaacagcaagcgctggaatcccgaagtgcagtacacatccaattatgcaaaatctgccaacgttgattttactgtggacaacaatggactttatactgagcctcgccccattggcacccgttaccttacccgtcccctgtaattacgtgttaatcaataaaccggttgattcgtttcagttgaactttggtctcctgtccttcttatcttatcggttaccatggttatagcttacacattaactgcttggttgcgcttcgcgataaaagacttacgtcatcgggttacccctagtgatggagttgcccactccctctctgcgcgctcgctcgctcggtggggcctgcggaccaaaggtccgcagacggcagagctctgctctgccggccccaccgagcgagcgagcgcgcagagagggagtgggcaa

SEQ ID NO: 15 - DNA, 3131 bp, synthetic construct
  misc_feature 1..3131: note = source = /note="Description of Artificial Sequence: Synthetic polynucleotide"
  source 1..3131: mol_type = other DNA
gcggccgcgaattcgcccttggctgcgtcaactggaccaatgagaactttcccttcaatgattgcgtcgacaagatggtgatctggtgggaggagggcaagatgacggccaaggtcgtggagtccgccaaggccattctcggcggcagcaaggtgcgcgtggaccaaaagtgcaagtcgtccgcccagatcgaccccacccccgtgatcgtcacctccaacaccaacatgtgcgccgtgattgacgggaacagcaccaccttcgagcaccagcagcctctccaggaccggatgtttaagttcgaactcacccgccgtctggagcacgactttggcaaggtgacaaagcaggaagtcaaagagttcttccgctgggccagtgatcacgtgaccgaggtggcgcatgagttttacgtcagaaagggcggagccagcaaaagacccgcccccgatgacgcggataaaagcgagcccaagcgggcctgcccctcagtcgcggatccatcgacgtcagacgcggaaggagctccggtggactttgccgacaggtaccaaaacaaatgttctcgtcacgcgggcatgcttcagatgctgtttccctgcaaaacgtgcgagagaatgaatcggaatttcaacatttgcttcacacacggggtcagagactgctcagagtgtttccccggcgtgtcagaatctcaaccggtcgtcagaaagaggacgtatcggaaactccgtgcgattcatcatctgctggggcgggctcccgagattgcttgctcggcctgcgatctggtcaacgtggacctggatgactgtgtttctgagcaataaatgacttaaaccaggtatggctgccgatggttatcttccagattggctcgaggacaacctctctgagggcattcgcgagtggtgggcgctgaaacctggagccccgaagcccaaagccaaccagcaaaagcaggacgacggccggggtctggtgcttcctggctacaagtacctcggacccttcaacggactcgacaagggggagcccgtcaacgcggcggacgcagcggccctcgagcacgacaaggcttacgaccagcagctgcaggcgggtgacaatccgtacctgcggtataaccacgccgacgccgagtttcaggagcgtctgcaagaagatacgtcttttgggggcaacctcgggcgagcagtcttccaggccaagaagcgggttctcgaacctctcggtctggttgaggaaggcgctaagacggctcctggaaagaagagaccggtagagccatcaccccagcgttctccagactcctctacgggcatcggcaagaaaggccaacagcccgccagaaaaagactcaattttggtcagactggcgactcagagtcagttccagaccctcaacctctcggagaacctccagcagcgccctctggtgtgggacctaatacaatggctgcaggcggtggcgcaccaatggcagacaataacgaaggcgccgacggagtgggtagttcctcgggaaattggcattgcgattccacatggctgggcgacagagtcatcaccaccagcacccgaacctgggccctgcccacctacaacaaccacctctacaagcaaatctccaacgggacatcgggaggagccaccaacgacaacacctacttcggctacagcaccccctgggggtattttgactttaacagattccactgccacctttcaccacgtgactggcagcgactcatcaacaacaactggggattccgacccaagagactcagcttcaagctcttcaacatccaggtcaaggaggtcacgcagaatgaaggcaccaagaccatcgccaataacctcaccagcaccatccaggtgtttacggactcggagtaccagctgccgtacgttctcggctctgtccaccagggctgcctgcctccgttcccggcggacgtgttcatgattccccagtacggctacctaacactcaacaacggtagtcaggccgtgggacgctcctccttctactgcctggaatactttccttcgcagatgctgagaaccggcaacaacttccagtttacttacaccttcgaggacgtgcctttccacagcagctacgcccacagctagagcttggaccggctgatgaatcctctgattgaccagtacctgtactacttgtctcggactcaaacaacaggaggcacggcaaatacgcagactctgggcttcagccaaggtgggcctaatacaatggccaatcaggcaaagaactggctgccaggaccctgttaccgccaacaacgcgtctcaacgacaaccgggcaaaacaacaatagcaactttgcctggactgctgggaccaaataccatctgaatggaagaaattcattggctaatcctggcatcgctatggcaacacacaaagacgacgaggagcgtttttttcccagtaacgggatcctgatttttggcaaacaaaatgctgccagagacaatgcggattacagcgatgtcatgctcaccagcgaggaagaaatcaaaaccactaaccctgtggctacagaggaatacggtatcgtggcagataacttgcagcagcaaaacacggctcctcaaattggaactgtcaacagccagggggccttacccggtatggtctggcagaaccgggacgtgtacctgcagggtcccatctgggccaagattcctcacacggacggcaacttccacccgtctccgctgatgggcggctttggcctgaaacatcctccgcctcagatcctgatcaagaacacgcctgtacctgcggatcctccgaccaccttcaaccagtcaaagctgaactctttcatcacgcaatacagcaccggacaggtcagcgtggaaattgaatgggagctgcagaaggaaaacagcaagcgctggaaccccgagatccagtacacctccaactactacaaatctataagtgtggactttgctgttaatacagaaggcgtgtactctgaaccccgccccattggcacccgttacctcacccgtaatctgtaattgcctgttaatcaataaaccggttgattcgtttcagttgaactttggtctctgcgaagggcgaattc

SEQ ID NO: 16 - DNA, 255 bp, Adeno-associated virus 10
  source 1..255: mol_type = genomic DNA
ggtaattcctccggaaattggcattgcgattccacatggctgggcgacagagtcatcaccaccagcacccgaacctgggtcctgcccacctacaacaaccacatctacaagcaaatctccagcgagacaggagccaccaacgacaaccactacttcggctacagcaccccctgggggtattttgactttaacagattccactgccacttttcaccacgtgactggcagcgactcatcaacaacaactggggattc

SEQ ID NO: 17 - protein, 738 aa, Adeno-associated virus 10
MAADGYLPDWLEDNLSEGIREWWDLKPGAPKPKANQQKQDDGRGLVLPGYKYLGPFNGLDKGEPVNAADAAALEHDKAYDQQLKAGDNPYLRYNHADAEFQERLQEDTSFGGNLGRAVFQAKKRVLEPLGLVEEAAKTAPGKKRPVEPSPQRSPDSSTGIGKKGQQPAKKRLNFGQTGESESVPDPQPIGEPPAGPSGLGSGTMAAGGGAPMADNNEGADGVGSSSGNWHCDSTWLGDRVITTSTRTWALPTYNNHLYKQISNGTSGGSTNDNTYFGYSTPWGYFDFNRFHCHFSPRDWQRLINNNWGFRPKRLSFKLFNIQVKEVTQNEGTKTIANNLTSTIQVFTDSEYQLPYVLGSAHQGCLPPFPADVFMIPQYGYLTLNNGSQAVGRSSFYCLEYFPSQMLRTGNNFEFSYTFEDVPFHSSYAHSQSLDRLMNPLIDQYLYYLSRTQSTGGTQGTQQLLFSQAGPANMSAQAKNWLPGPCYRQQRVSTTLSQNNNSNFAWTGATKYHLNGRDSLVNPGVAMATHKDDEERFFPSSGVLMFGKQGAGRDNVDYSSVMLTSEEEIKTTNPVATEQYGVVADNLQQANTGPIVGNVNSQGALPGMVWQNRDVYLQGPIWAKIPHTDGNFHPSPLMGGFGLKHPPPQILIKNTPVPADPPTTFSQAKLASFITQYSTGQVSVEIEWELQKENSKRWNPEIQYTSNYYKSTNVDFAVNTEGTYSEPRPIGTRYLTRNL

SEQ ID NO: 18 - protein, 738 aa, Adeno-associated virus 10
MAADGYLPDWLEDNLSEGIREWWDLKPGAPKPKANQQKQDDGRGLVLPGYKYLGPFNGLDKGEPVNAADAAALEHDKAYDQQLKAGDNPYLRYNHADAEFQERLQEDTSFGGNLGRAVFQAKKRVLEPLGLVEEGAKTAPGKKRPVEPSPQRSPDSSTGIGKKGQQPAKKRLNFGQTGDSESVPDPQPIGEPPAGPSGLGSGTMAAGGGAPMADNNEGADGVGSSSGNWHCDSTWLGDRVITTSTRTWALPTYNNHLYKQISNGTSGGSTNDNTYFGYSTPWGYFDFNRFHCHFSPRDWQRLINNNWGFRPKRLNFKLFNIQVKEVTQNEGTKTIANNLTSTIQVFTDSEYQLPYVLGSAHQGCLPPFPADVFMIPQYGYLTLNNGSQAVGRSSFYCLEYFPSQMLRTGNNFEFSYQFEDVPFHSSYAHSQSLDRLMNPLIDQYLYYLSRTQSTGGTAGTQQLLFSQAGPNNMSAQAKNWLPGPCYRQQRVSTTLSQNNNSNFAWTGATKYHLNGRDSLVNPGVAMATHKDDEERFFPSSGVLMFGKQGAGKDNVDYSSVMLTSEEEIKTTNPVATEQYGVVADNLQQQNAAPIVGAVNSQGALPGMVWQNRDVYLQGPIWAKIPHTDGNFHPSPLMGGFGLKHPPPQILIKNTPVPADPPTTFSQAKLASFITQYSTGQVSVEIEWELQKENSKRWNPEIQYTSNYYKSTNVDFAVNTDGTYSEPRPIGTRYLTRNL

SEQ ID NO: 19 - DNA, 258 bp, Adeno-associated virus 11
  source 1..258: mol_type = genomic DNA
ggtaattcctccggaaattggcattgcgattccacatggctgggcgacagagtcatcaccaccagcacccgaacctgggccctgccaacctacaacaaccacctctacaaacaaatctccagcgcttcaacgggggccagcaacgacaaccactactttggctacagcaccccctgggggtattttgactttaacagattccactgccacttctcaccacgtgactggcagcgactcatcaacaacaactggggattc

SEQ ID NO: 20 - DNA, 255 bp, Adeno-associated virus 12
  source 1..255: mol_type = genomic DNA
ggtaattcctccggaaattggcattgcgattccacatggctgggcgaccgagtcattaccaccagcacccggacttgggccctgcccacctacaacaaccacctctacaagcaaatctccagccaatcgggtgccaccaacgacaaccactacttcggctacagcaccccttgggggtattttgatttcaacagattccactgccatttctcaccacgtgactggcagcgactcatcaacaacaactggggattc

SEQ ID NO: 21 - DNA, 2208 bp, Adeno-associated virus 2
  source 1..2208: mol_type = genomic DNA
atggctgccgatggttatcttccagattggctcgaggacactctctctgaaggaataagacagtggtggaagctcaaacctggcccaccaccaccaaagcccgcagagcggcataaggacgacagcaggggtcttgtgcttcctgggtacaagtacctcggacccttcaacggactcgacaagggagagccggtcaacgaggcagacgccgcggccctcgagcacgacaaagcctacgaccggcagctcgacagcggagacaacccgtacctcaagtacaaccacgccgacgcggagtttcaggagcgccttaaagaagatacgtcttttgggggcaacctcggacgagcagtcttccaggcgaaaaagagggttcttgaacctctgggcctggttgaggaacctgttaagacggctccgggaaaaaagaggccggtagagcactctcctgtggagccagactcctcctcgggaaccggaaaggcgggccagcagcctgcaagaaaaagattgaattttggtcagactggagacgcagactcagtacctgacccccagcctctcggacagccaccagcagccccctctggtctgggaactaatacgatggctacaggcagtggcgcaccaatggcagacaataacgagggcgccgacggagtgggtaattcctcgggaaattggcattgcgattccacatggatgggcgacagagtcatcaccaccagcacccgaacctgggccctgcccacctacaacaaccacctctacaaacaaatttccagccaatcaggagcctcgaacgacaatcactactttggctacagcaccccttgggggtattttgacttcaacagattccactgccacttttcaccacgtgactggcaaagactcatcaacaacaactggggattccgacccaagagactcaacttcaagctctttaacattcaagtcaaagaggtcacgcagaatgacggtacgacgacgattgccaataaccttaccagcacggttcaggtgtttactgactcggagtaccagctcccgtacgtcctcggctcggcgcatcaaggatgcctcccgccgttcccagcagacgtcttcatggtgccacagtatggatacctcaccctgaacaacgggagtcaggcagtaggacgctcttcattttactgcctggagtactttccttctcagatgctgcgtaccggaaacaactttaccttcagctacacttttgaggacgttcctttccacagcagctacgctcacagccagagtctggaccgtctcatgaatcctctcatcgaccagtacctgtattacttgagcagaacaaacactccaagtggaaccaccacgcagtcaaggcttcagttttctcaggccggagcgagtgacattcgggaccagtctaggaactggcttcctggaccctgttaccgccagcagcgagtatcaaagacatctgcggataacaacaacagtgaatactcgtggactggagctaccaagtaccacctcaatggcagagactctctggtgaatccgggcccggccatggcaagccacaaggacgatgaagaaaagttttttcctcagagcggggttctcatctttgggaagcaaggctcagagaaaacaaatgtggacattgaaaaggtcatgattacagacgaagaggaaatcaggacaaccaatcccgtggctacggagcagtatggttctgtatctaccaacctccagagaggcaacagacaagcagctaccgcagatgtcaacacacaaggcgttcttccaggcatggtctggcaggacagagatgtgtaccttcaggggcccatctgggcaaagattccacacacggacggacattttcacccctctcccctcatgggtggattcggacttaaacaccctcctccacagattctcatcaagaacaccccggtacctgcgaatccttcgaccaccttcagtgcggcaaagtttgcttccttcatcacacagtactccacgggacaggtcagcgtggagatcgagtgggagctgcagaaggaaaacagcaaacgctggaatcccgaaattcagtacacttccaactacaacaagtctgttaatgtggactttactgtggacactaatggcgtgtattcagagcctcgccccattggcaccagatacctgactcgtaatctgtaa

SEQ ID NO: 22 - protein, 735 aa, Adeno-associated virus 2 [sequence omitted]

SEQ ID NO: 23 - protein, 621 aa, Adeno-associated virus 2
MPGFYEIVIKVPSDLDGHLPGISDSFVNWVAEKEWELPPDSDMDLNLIEQAPLTVAEKLQRDFLTEWRRVSKAPEALFFVQFEKGESYFHMHVLVETTGVKSMVLGRFLSQIREKLIQRIYRGIEPTLPNWFAVTKTRNGAGGGNKVVDECYIPNYLLPKTQPELQWAWTNMEQYLSACLNLTERKRLVAQHLTHVSQTQEQNKENQNPNSDAPVIRSKTSARYMELVGWLVDKGITSEKQWIQEDQASYISFNAASNSRSQIKAALDNAGKIMSLTKTAPDYLVGQQPVEDISSNRIYKILELNGYDPQYAASVFLGWATKKFGKRNTIWLFGPATTGKTNIAEAIAHTVPFYGCVNWTNENFPFNDCVDKMVIWWEEGKMTAKVVESAKAILGGSKVRVDQKCKSSAQIDPTPVIVTSNTNMCAVIDGNSTTFEHQQPLQDRMFKFELTRRLDHDFGKVTKQEVKDFFRWAKDHVVEVEHEFYVKKGGAKKRPAPSDADISEPKRVRESVAQPSTSDAEASINYADRYQNKCSRHVGMNLMLFPCRQCERMNQNSNICFTHGQKDCLECFPVSESQPVSVVKKAYQKLCYIHHIMGKVPDACTACDLVNVDLDDCIFEQ

SEQ ID NO: 24 - DNA, 4675 bp, Adeno-associated virus 2
  source 1..4675: mol_type = genomic DNA
ttggccactccctctctgcgcgctcgctcgctcactgaggccgggcgaccaaaggtcgcccgacgcccgggctttgcccgggcggcctcagtgagcgagcgagcgcgcagagagggagtggccaactccatcactaggggttcctggaggggtggagtcgtgacgtgaattacgtcatagggttagggaggtcctgtattagaggtcacgtgagtgttttgcgacattttgcgacaccatgtggtcacgctgggtatttaagcccgagtgagcacgcagggtctccattttgaagcgggaggtttgaacgcgcagccgccatgccggggttttacgagattgtgattaaggtccccagcgaccttgacgggcatctgcccggcatttctgacagctttgtgaactgggtggccgagaaggaatgggagttgccgccagattctgacatggatctgaatctgattgagcaggcacccctgaccgtggccgagaagctgcagcgcgactttctgacggaatggcgccgtgtgagtaaggccccggaggcccttttctttgtgcaatttgagaagggagagagctacttccacatgcacgtgctcgtggaaaccaccggggtgaaatccatggttttgggacgtttcctgagtcagattcgcgaaaaactgattcagagaatttaccgcgggatcgagccgactttgccaaactggttcgcggtcacaaagaccagaaatggcgccggaggcgggaacaaggtggtggatgagtgctacatccccaattacttgctccccaaaacccagcctgagctccagtgggcgtggactaatatggaacagtatttaagcgcctgtttgaatctcacggagcgtaaacggttggtggcgcagcatctgacgcacgtgtcgcagacgcaggagcagaacaaagagaatcagaatcccaattctgatgcgccggtgatcagatcaaaaacttcagccaggtacatggagctggtcgggtggctcgtggacaaggggattacctcggagaagcagtggatccaggaggaccaggcctcatacatctccttcaatgcggcctccaactcgcggtcccaaatcaaggctgccttggacaatgcgggaaagattatgagcctgactaaaaccgcccccgactacctggtgggccagcagcccgtggaggacatttccagcaatcggatttataaaattttggaactaaacgggtacgatccccaatatgcggcttccgtctttctgggatgggccacgaaaaagttcggcaagaggaacaccatctggctgtttgggcctgcaactaccgggaagaccaacatcgcggaggccatagcccacactgtgcccttctacgggtgcgtaaactggaccaatgagaactttcccttcaacgactgtgtcgacaagatggtgatctggtgggaggaggggaagatgaccgccaaggtcgtggagtcggccaaagccattctcggaggaagcaaggtgcgcgtggaccagaaatgcaagtcctcggcccagatagacccgactcccgtgatcgtcacctccaacaccaacatgtgcgccgtgattgacgggaactcaacgaccttcgaacaccagcagccgttgcaagaccggatgttcaaatttgaactcacccgccgtctggatcatgactttgggaaggtcaccaagcaggaagtcaaagactttttccggtgggcaaaggatcacgtggttgaggtggagcatgaattctacgtcaaaaagggtggagccaagaaaagacccgcccccagtgacgcagatataagtgagcccaaacgggtgcgcgagtcagttgcgcagccatcgacgtcagacgcggaagcttcgatcaactacgcagacaggtaccaaaacaaatgttctcgtcacgtgggcatgaatctgatgctgtttccctgcagacaatgcgagagaatgaatcagaattcaaatatctgcttcactcacggacagaaagactgtttagagtgctttcccgtgtcagaatctcaacccgtttctgtcgtcaaaaaggcgtatcagaaactgtgctacattcatcatatcatgggaaaggtgccagacgcttgcactgcctgcgatctggtcaatgtggatttggatgactgcatctttgaacaataaatgatttaaatcaggtatggctgccgatggttatcttccagattggctcgaggacactctctctgaaggaataagacagtggtggaagctcaaacctggcccaccaccaccaaagcccgcagagcggcataaggacgacagcaggggtcttgtgcttcctgggtacaagtacctcggacccttcaacggactcgacaagggagagccggtcaacgaggcagacgccgcggccctcgagcacgtacaaagcctacgaccggcagctcgacagcggagacaacccgtacctcaagtacaaccacgccgacgcggagtttcaggagcgccttaaagaagatacgtcttttgggggcaacctcggacgagcagtcttccaggcgaaaaagagggttcttgaacctctgggcctggttgaggaacctgttaagacggctccgggaaaaaagaggccggtagagcactctcctgtggagccagactcctcctcgggaaccggaaaggcgggccagcagcctgcaagaaaaagattgaattttggtcagactggagacgcagactcagtacctgacccccagcctctcggacagccaccagcagccccctctggtctgggaactaatacgatggctacaggcagtggcgcaccaatggcagacaataacgagggcgccgacggagtgggtaattcctccggaaattggcattgcgattccacatggatgggcgacagagtcatcaccaccagcacccgaacctgggccctgcccacctacaacaaccacctctacaaacaaatttccagccaatcaggagcctcgaacgacaatcactactttggctacagcaccccttgggggtattttgacttcaacagattccactgccacttttcaccacgtgactggcaaagactcatcaacaacaactggggattccgacccaagagactcaacttcaagctctttaacattcaagtcaaagaggtcacgcagaatgacggtacgacgacgattgccaataaccttaccagcacggttcaggtgtttactgactcggagtaccagctcccgtacgtcctcggctcggcgcatcaaggatgcctcccgccgttcccagcagacgtcttcatggtgccacagtatggatacctcaccctgaacaacgggagtcaggcagtaggacgctcttcattttactgcctggagtactttccttctcagatgctgcgtaccggaaacaactttaccttcagctacacttttgaggacgttcctttccacagcagctacgctcacagccagagtctggaccgtctcatgaatcctctcatcgaccagtacctgtattacttgagcagaacaaacactccaagtggaaccaccacgcagtcaaggcttcagttttctcaggccggagcgagtgacattcgggaccagtctaggaactggcttcctggaccctgttaccgccagcagcgagtatcaaagacatctgcggataacaacaacagtgaatactcgtggactggagctaccaagtaccacctcaatggcagagactctctggtgaatccggccatggcaagccacaaggacgatgaagaaaagttttttcctcagagcggggttctcatctttgggaagcaaggctcagagaaaacaaatgtgaacattgaaaaggtcatgattacagacgaagaggaaatcggaacaaccaatcccgtggctacggagcagtatggttctgtatctaccaacctccagagaggcaacagacaagcagctaccgcagatgtcaacacacaaggcgttcttccaggcatggtctggcaggacagagatgtgtaccttcaggggcccatctgggcaaagattccacacacggacggacattttcacccctctcccctcatgggtggattcggacttaaacaccctcctccacagattctcatcaagaacaccccggtacctgcgaatccttcgaccaccttcagtgcggcaaagtttgcttccttcatcacacagtactccacgggacacggtcagcgtggagatcgagtgggagctgcagaaggaaaacagcaaacgctggaatcccgaaattcagtacacttccaactacaacaagtctgttaatcgtggacttaccgtggatactaatggcgtgtattcagagcctcgccccattggcaccagatacctgactcgtaatctgtaattgcttgttaatcaataaaccgtttaattcgtttcagttgaactttggtctctgcgtatttctttcttatctagtttccatggctacgtagataagtagcatggcgggttaatcattaactacaaggaacccctagtgatggagttggccactccctctctgcgcgctcgctcgctcactgaggccgggcgaccaaaggtcgcccgacgcccgggctttgcccgggcggcctcagtgagcgagcgagcgcgcagagagggagtggccaa

SEQ ID NO: 25 - DNA, 4679 bp, Adeno-associated virus 2
  source 1..4679: mol_type = genomic DNA
ttggccactccctctctgcgcgctcgctcgctcactgaggccgggcgaccaaaggtcgcccgacgcccgggctttgcccgggcggcctcagtgagcgagcgagcgcgcagagagggagtggccaactccatcactaggggttcctggaggggtggagtcgtgacgtgaattacgtcatagggttagggaggtcctgtattagaggtcacgtgagtgttttgcgacattttgcgacaccatgtggtcacgctgggtatttaagcccgagtgagcacgcagggtctccattttgaagcgggaggtttgaacgcgcagccgccatgccggggttttacgagattgtgattaaggtccccagcgaccttgacgggcatctgcccggcatttctgacagctttgtgaactgggtggccgagaaggaatgggagttgccgccagattctgacatggatctgaatctgattgagcaggcacccctgaccgtggccgagaagctgcagcgcgactttctgacggaatggcgccgtgtgagtaaggccccggaggcccttttctttgtgcaatttgagaagggagagagctacttccacatgcacgtgctcgtggaaaccaccggggtgaaatccatggttttgggacgtttcctgagtcagattcgcgaaaaactgattcagagaatttaccgcgggatcgagccgactttgccaaactggttcgcggtcacaaagaccagaaatggcgccggaggcgggaacaaggtggtggatgagtgctacatccccaattacttgctccccaaaacccagcctgagctccagtgggcgtggactaatatggaacagtatttaagcgcctgtttgaatctcacggagcgtaaacggttggtggcgcagcatctgacgcacgtgtcgcagacgcaggagcagaacaaagagaatcagaatcccaattctgatgcgccggtgatcagatcaaaaacttcagccaggtacatggagctggtcgggtggctcgtggacaaggggattacctcggagaagcagtggatccaggaggaccaggcctcatacatctccttcaatgcggcctccaactcgcggtcccaaatcaaggctgccttggacaatgcgggaaagattatgagcctgactaaaaccgcccccgactacctggtgggccagcagcccgtggaggacatttccagcaatcggatttataaaattttggaactaaacgggtacgatccccaatatgcggcttccgtctttctgggatgggccacgaaaaagttcggcaagaggaacaccatctggctgtttgggcctgcaactaccgggaagaccaacatcgcggaggccatagcccacactgtgcccttctacgggtgcgtaaactggaccaatgagaactttcccttcaacgactgtgtcgacaagatggtgatctggtgggaggaggggaagatgaccgccaaggtcgtggagtcggccaaagccattctcggaggaagcaaggtgcgcgtggaccagaaatgcaagtcctcggcccagatagacccgactcccgtgatcgtcacctccaacaccaacatgtgcgccgtgattgacgggaactcaacgaccttcgaacaccagcagccgttgcaagaccggatgttcaaatttgaactcacccgccgtctggatcatgactttgggaaggtcaccaagcaggaagtcaaagactttttccggtgggcaaaggatcacgtggttgaggtggagcatgaattctacgtcaaaaagggtggagccaagaaaagacccgcccccagtgacgcagatataagtgagcccaaacgggtgcgcgagtcagttgcgcagccatcgacgtcagacgcggaagcttcgatcaactacgcagacaggtaccaaaacaaatgttctcgtcacgtgggcatgaatctgatgctgtttccctgcagacaatgcgagagaatgaatcagaattcaaatatctgcttcactcacggacagaaagactgtttagagtgctttcccgtgtcagaatctcaacccgtttctgtcgtcaaaaaggcgtatcagaaactgtgctacattcatcatatcatgggaaaggtgccagacgcttgcactgcctgcgatctggtcaatgtggatttggatgactgcatctttgaacaataaatgatttaaatcaggtatggctgccgatggttatcttccagattggctcgaggacactctctctgaaggaataagacagtggtggaagctcaaacctggcccaccaccaccaaagcccgcagagcggcataaggacgacagcaggggtcttgtgcttcctgggtacaagtacctcggacccttcaacggactcgacaagggagagccggtcaacgaggcagacgccgcggccctcgagcacgacaaagcctacgaccggcagctcgacagcggagacaacccgtacctcaagtacaaccacgccgacgcggagtttcaggagcgccttaaagaagatacgtcttttgggggcaacctcggacgagcagtcttccaggcgaaaaagagggttcttgaacctctgggcctggttgaggaacctgttaagacggctccgggaaaaaagaggccggtagagcactctcctgtggagccagactcctcctcgggaaccggaaaggcgggccagcagcctgcaagaaaaagattgaattttggtcagactggagacgcagactcagtacctgacccccagcctctcggacagccaccagcagccccctctggtctgggaactaatacgatggctacaggcagtggcgcaccaatggcagacaataacgagggcgccgacggagtgggtaattcctccggaaattggcattgcgattccacatggatgggcgacagagtcatcaccaccagcacccgaacctgggccctgcccacctacaacaaccacctctacaaacaaatttccagccaatcaggagcctcgaacgacaatcactactttggctacagcaccccttgggggtattttgacttcaacagattccactgccacttttcaccacgtgactggcaaagactcatcaacaacaactggggattccgacccaagagactcaacttcaagctctttaacattcaagtcaaagaggtcacgcagaatgacggtacgacgacgattgccaataaccttaccagcacggttcaggtgtttactgactcggagtaccagctcccgtacgtcctcggctcggcgcatcaaggatgcctcccgccgttcccagcagacgtcttcatggtgccacagtatggatacctcaccctgaacaacgggagtcaggcagtaggacgctcttcattttactgcctggagtactttccttctcagatgctgcgtaccggaaacaactttaccttcagctacacttttgaggacgttcctttccacagcagctacgctcacagccagagtctggaccgtctcatgaatcctctcatcgaccagtacctgtattacttgagcagaacaaacactccaagtggaaccaccacgcagtcaaggcttcagttttctcaggccggagcgagtgacattcgggaccagtctaggaactggcttcctggaccctgttaccgccagcagcgagtatcaaagacatctgcggataacaacaacagtgaatactcgtggactggagctaccaagtaccacctcaatggcagagactctctggtgaatccgggcccggccatggcaagccacaaggacgatgaagaaaagttttttcctcagagcggggttctcatctttgggaagcaaggctcagagaaaacaaatgtggacattgaaaaggtcatgattacagacgaagaggaaatcaggacaaccaatcccgtggctacggagcagtatggttctgtatctaccaacctccagagaggcaacagacaagcagctaccgcagatgtcaacacacaaggcgttcttccaggcatggtctggcaggacagagatgtgtaccttcaggggcccatctgggcaaagattccacacacggacggacattttcacccctctcccctcatgggtggattcggacttaaacaccctcctccacagattctcatcaagaacaccccggtacctgcgaatccttcgaccaccttcagtgcggcaaagtttgcttccttcatcacacagtactccacgggacaggtcagcgtggagatcgagtgggagctgcagaaggaaaacagcaaacgctggaatcccgaaattcagtacacttccaactacaacaagtctgttaatgtggactttactgtggacactaatggcgtgtattcagagcctcgccccattggcaccagatacctgactcgtaatctgtaattgcttgttaatcaataaaccgtttaattcgtttcagttgaactttggtctctgcgtatttctttcttatctagtttccatggctacgtagataagtagcatggcgggttaatcattaactacaaggaacccctagtgatggagttggccactccctctctgcgcgctcgctcgctcactgaggccgggcgaccaaaggtcgcccgacgcccgggctttgcccgggcggcctcagtgagcgagcgagcgcgcagagagggagtggccaa

SEQ ID NO: 26 - protein, 725 aa, Adeno-associated virus-5
MAADGYLPDWLEDTLSEGIRQWWKLKPGPPPPKPAERHKDDSRGLVLPGYKYLGPFNGLDKGEPVNEADAAALEHDKAYDRQLDSGDNPYLKYNHADAEFQERLKEDTSFGGNLGRAVFQAKKRVLEPFGLVEEGAKTAPTGKRIDDHFPKRKKARTEEDSKPSTSSDAEAGPSGSQQLQIPAQPASSLGADTMSAGGGGPLGDNNQGADGVGNASGDWHCDSTWMGDRVVTKSTRTWVLPSYNNHQYREIKSGSVDGSNANAYFGYSTPWGYFDFNRFHSHWSPRDWQRLINNYWGFRPRSLRVKIFNIQVKEVTVQDSTTTIANNLTSTVQVFTDDDYQLPYVVGNGTEGCLPAFPPQVFTLPQYGYATLNRDNTENPTERSSFFCLEYFPSKMLRTGNNFEFTYNFEEVPFHSSFAPSQNLFKLANPLVDQYLYRFVSTNNTGGVQFNKNLAGRYANTYKNWFPGPMGRTQGWNLGSGVNRASVSAFATTNRMELEGASYQVPPQPNGMTNNLQGSNTYALENTMIFNSQPANPGTTATYLEGNMLITSESETQPVNRVAYNVGGQMATNNQSSTTAPTTGTYNLQEIVPGSVWMERDVYLQGPIWAKIPETGAHFHPSPAMGGFGLKHPPPMMLIKNTPVPGNITSFSDVPVSSFITQYSTGQVTVEMEWELKKENSKRWNPEIQYTNNYNDPQFVDFAPDSTGEYRTTRPIGTRYLTRPL

SEQ ID NO: 27 - protein, 644 aa, synthetic construct
  VARIANT 434: note = Any amino acid
  REGION 1..644: note = source = /note="Description of Artificial Sequence: Synthetic polypeptide"
KAYDQQLKAGDNPYLRYNHADAEFQERLQEDTSFGGNLGRAVFQAKKRVLEPLGLVETPAKTAPGKKRPVDSPDSTSGIGKKGQQPAKKRLNFGQTGDSESVPDPQPIGEPPAGPSGLGSGTMAAGGGAPMADNNEGADGVGNASGNWHCDSTWLGDRVITTSTRTWALPTYNNHLYKQISSQSAGSTNDNVYFGYSTPWGYFDFNRFHCHFSPRDWQRLINNNWGFRPKKLNFKLFNIQVKEVTTNDGVTTIANNLTSTVQVFSDSEYQLPYVLGSAHQGCLPPFPADVFMIPQYGYLTLNNGSQSVGRSSFYCLEYFPSQMLRTGNNFTFSYTFEDVPFHSSYAHSQSLDRLMNPLIDQYLYYLARTQSNAGGTAGNRELQFYQGGPTTMAEQAKNWLPGPCFRQQRVSKTLDQNNNSNFAWTGATKYHLNXRNSLVNPGVAMATHKDDEERFFPSSGVLIFGKTGAANKTTLENVLMTNEEEIRPTNPVATEEYGIVSSNLQAASTAAQTQVVNNQGALPGMVWQNRDVYLQGPIWAKIPHTDGNFHPSPLMGGFGLKHPPPQILIKNTPVPANPPEVFTPAKFASFITQYSTGQVSVEIEWELQKENSKRWNPEIQYTSNFDKQTGVDFAVDSQGVYSEP

SEQ ID NO: 28 - DNA, 1933 bp, synthetic construct
  misc_feature 1..1933: note = source = /note="Description of Artificial Sequence: Synthetic polynucleotide"
  source 1..1933: mol_type = other DNA
caaggcctacgaccagcagctcaaagcgggtgacaatccgtacctgcggtataaccacgccgacgccgagtttcaggagtgtcttcaagaagatacgtcttttgggggcaacctcgggcgagcagtcttccaggccaaaaagcgggttctcgaacctcttggtctggttgagacgccagctaagacggcacctggaaagaagcgaccggtagactcgccagactccacctcgggcatcggcaagaaaggccagcagcccgcgaaaaagagactcaactttgggcagactggcgactcagagtcagtccccgaccctcaaccaatcggagaaccaccagcaggcccctctggtctgggatctggtacaatggttgcaggcggtggcgcaccaatggctgacaataacgagggcgccgacggagtgggtaatgcctcaggaaattggcattgcgattccacatggctgggcgacagagtcatcaccaccagcacccgaacctgggccctgcccacctacaacaaccacctctacaagcaaatctccagtcagtcagcagggagcaccaacgataacgtctatttcggctacagcaccccctgggggtattttgacttcaacagattccattgccacttctcaccacgtgactggcagcgacttatcaacaacaactggggattccggcccaagaagctcaacttcaagctcttcaacatccaggtcaaggaggtcacgacgaatgacggtgtcacaaccatcgctaataaccttaccagcacggttcaggtcttttcggactcggaatatcaactgccgtacgtcctcggctccgcgcaccagggctgcctgcctccgttcccggcagacgtgttcatgattccgcagtacggatacctgactctgaacaatggcagccaatcggtaggccgttcctccttctactgcctggagtactttccttctcagatgctgagaacgggcaacaacttcacctttagctacaccttcgaggacgtgcctttccacagcagctacgcgcacagccagagtctggaccggctgatgaatcccctcatcgaccagtacctgtactacttggccagaacacagagcaacgcaggaggtactgctggcaatcgggaactgcagttttatcagggcggacctaccaccatggccgaacaagcaaagaactggctgcccggaccttgcttccggcaacagagagtatccaagacgctggatcaaaataacaacagcaactttgcctggactggtgccacaaaataccatttaaatggaagaaattcattggttaatcccggtgtcgccatggcaacccacaaggacgacgaggaacgcttctccccttcgagcggagttctaatttttggcaaaactggagcagctaataaaactacattagaaaacgtgctcatgacaaatgaagaagaaattcgtcctaccaacccggtagctaccgaggaatacgggattgtaagcagcaacttgcaggcggctagcaccgcagcccagacacaagttgttaacaaccagggagccttacctggcatggtctggcagaaccgggacgtgtacctgcaaggtcccatttgggccaagattcctcacacggacggcaactttcacccgtctcctctaatgggtggctttggactgaaacacccgcctccccagatcctgatcaaaaacacgccggtacctgctaatcctccagaagtgtttactcctgccaagtttgcttccttcatcacgcagtacagcaccgggcaagtcagcgttgagatcgagtgggagctgcagaaagagaacagcaagcgctggaacccagagattcagtacacctccaactttgacaaacagactggagtggactttgctgttgacagccagggtgtttactctgagcct

SEQ ID NO: 29 - protein, 644 aa, synthetic construct
  REGION 1..644: note = source = /note="Description of Artificial Sequence: Synthetic polypeptide"
KAYDQQLKAGDNPYLRYNHADAEFQECLQEDTSFGGNLGRAVFQAKKRVLEPLGLVETPAKTAPGKKRPVDSPDSTSGIGKKGQQPAKKRLNFGQTGDSESVPDPQPIGEPPAGPSGLGSGTMVAGGGAPMADNNEGADGVGNASGNWHCDSTWLGDRVITTSTRTWALPTYNNHLYKQISSQSAGSTNDNVYFGYSTPWGYFDFNRFHCHFSPRDWQRLINNNWGFRPKKLNFKLFNIQVKEVTTNDGVTTIANNLTSTVQVFSDSEYQLPYVLGSAHQGCLPPFPADVFMIPQYGYLTLNNGSQSVGRSSFYCLEYFPSQMLRTGNNFTFSYTFEDVPFHSSYAHSQSLDRLMNPLIDQYLYYLARTQSNAGGTAGNRELQFYQGGPTTMAEQAKNWLPGPCFRQQRVSKTLDQNNNSNFAWTGATKYHLNGRNSLVNPGVAMATHKDDEERFSPSSGVLIFGKTGAANKTTLENVLMTNEEEIRPTNPVATEEYGIVSSNLQAASTAAQTQVVNNQGALPGMVWQNRDVYLQGPIWAKIPHTDGNFHPSPLMGGFGLKHPPPQILIKNTPVPANPPEVFTPAKFASFITQYSTGQVSVEIEWELQKENSKRWNPEIQYTSNFDKQTGVDFAVDSQGVYSEP

SEQ ID NO: 30 - DNA, 1933 bp, synthetic construct
  misc_feature 1..1933: note = source = /note="Description of Artificial Sequence: Synthetic polynucleotide"
  source 1..1933: mol_type = other DNA
caaggcctacgaccagcagctcaaagcgggtgacaatccgtacctgcggtataaccacgccgacgccgagtttcaggagcgtcttcaagaagatacgtcttttgggggcaacctcgggcgagcagtcttccaggccaaaaagcgggttctcgaacctcttggtctggttgagacgccagctaagacggcacctggaaagaagcgaccggtagactcgccagactccacctcgggcatcggcaagaaaggccagcagcccgcgaaaaagagactcaactttgggcagactggcgactcagagccagtccccgaccctcaaccaatcggagaaccaccagcaggcccctctggtctgggatctggtacaatggctgcaggcggtggcgcaccaatggctgacaataacgagggcgccgacggagtgggtaatgcctcaggaaattggcattgcgattccacacggctgggcgacagagtcatcaccaccagcacccgaacctgggccctgcccacctacaacaaccacctctacaagcaaatctccagtcagtcagcagggagcaccaacgataacgtctatttcggctacagcaccccctgggggtattttgacttcaacagattccattgccacttctcaccacgtgactggcagcgacttatcaacaacaactggggattccggcccaagaagctcaacttcaagctcttcaacatccaggtcaaggaggtcacgacgaatgacggcgtcacaaccatcgctaataaccttaccagcacggttcaggtcttttcggactcggaatatcaactgccgtacgtcctcggctccgcgcaccagggctgcctgcctccgttcccggcagacgtgttcatgattccgcagtacggatacctgactctgaacaatggcagccaatcggtaggccgttcctccttctactgcctggagtactttccttctcagatgctgagaacgggcaacaacttcacctttagctacaccttcgaggacgtgcctttccacagcagctacgcgcacagccagagtctgggccggctgatgaatcccctcatcgaccagtacctgtactacttggccagaacacagagcaacgcaggaggtactgctggcaatcgggaactgcagttttatcagggcggacctaccaccatggccgaacaagcaaagaactggctgcccggaccttgcttccggcaacagagagtatccaagacgctggatcaaaataacaacagcaactttgcctggactggtgccacaaaataccatttaaatggaagaaattcattggttaatcccggtgtcgccatggcaacccacaaggacgacgaggaacgcttcttcccttcgagcggagttctaatttttggcaaaactggagcagctaataaaactacattagaaaacgtgctcatgacaaatgaagaagaaattcgtcctaccaacccggtagctaccgaggaatacgggattgtaagcagcaacttgcaggcggctagcaccgcagcccagacacaagttgttaacaaccagggagccttacctggcatggtctggcagaaccgggacgtgtacctgcaaggtcccatttgggccaagattcctcacacggacggcaactttcacccgtctcctctaatgggtggctttggactgaaacacccgcctccccagatcctgatcaaaaacacaccggtacctgctaatcctccagaagtgtttactcctgccaagtttgcttccttcatcacgcagtacagcaccgggcaagtcagcgttgagatcgaatgggagctgcagaaagagaacagcaagcgctggaacccagagattcagtacacctccaactttgacaaacagactggagtggactttgctgttgacagccagggtgtttactctgagcct

SEQ ID NO: 31 - protein, 644 aa, synthetic construct
  REGION 1..644: note = source = /note="Description of Artificial Sequence: Synthetic polypeptide"
KAYDQQLKAGDNPYLRYNHADAEFQERLQEDTSFGGNLGRAVFQAKKRVLEPLGLVETPAKTAPGKKRPVDSPDSTSGIGKKGQQPAKKRLNFGQTGDSEPVPDPQPIGEPPAGPSGLGSGTMAAGGGAPMADNNEGADGVGNASGNWHCDSTRLGDRVITTSTRTWALPTYNNHLYKQISSQSAGSTNDNVYFGYSTPWGYFDFNRFHCHFSPRDWQRLINNNWGFRPKKLNFKLFNIQVKEVTTNDGVTTIANNLTSTVQVFSDSEYQLPYVLGSAHQGCLPPFPADVFMIPQYGYLTLNNGSQSVGRSSFYCLEYFPSQMLRTGNNFTFSYTFEDVPFHSSYAHSQSLGRLMNPLIDQYLYYLARTQSNAGGTAGNRELQFYQGGPTTMAEQAKNWLPGPCFRQQRVSKTLDQNNNSNFAWTGATKYHLNGRNSLVNPGVAMATHKDDEERFFPSSGVLIFGKTGAANKTTLENVLMTNEEEIRPTNPVATEEYGIVSSNLQAASTAAQTQVVNNQGALPGMVWQNRDVYLQGPIWAKIPHTDGNFHPSPLMGGFGLKHPPPQILIKNTPVPANPPEVFTPAKFASFITQYSTGQVSVEIEWELQKENSKRWNPEIQYTSNFDKQTGVDFAVDSQGVYSEP

SEQ ID NO: 32 - DNA, 1933 bp, synthetic construct; identical to SEQ ID NO: 30
  misc_feature 1..1933: note = source = /note="Description of Artificial Sequence: Synthetic polynucleotide"
  source 1..1933: mol_type = other DNA

SEQ ID NO: 33 - protein, 644 aa, synthetic construct; identical to SEQ ID NO: 31
  REGION 1..644: note = source = /note="Description of Artificial Sequence: Synthetic polypeptide"

SEQ ID NO: 34 - DNA, 1933 bp, synthetic construct
  misc_feature 1..1933: note = source = /note="Description of Artificial Sequence: Synthetic polynucleotide"
  source 1..1933: mol_type = other DNA
caaggcctacgaccagcagctcaaagcgggtgacaatccgtacctgcggtataaccacgccgacgccgagtttcaggagcgtcttcaagaagatacgtcttttgggggcaacctcgggcgagcagtcttccaggccaaaaagcgggttctcgaacctcttggtctggttgagacgccagctaagacggcacctggaaagaagcgaccggtagactcgccagactccacctcgggcatcggcaagaaaggccagcagcccgcgaaaaagagactcaactttgggcagactggcgactcagagtcagtccccgaccctcaaccaatcggagaaccaccagcaggcccctctggtctgggatctggtacaatggctgcaggcggtggcgcaccaatggctgacaatagcgagggcgccgacggagtgggtaatgcctcaggaaattggcattgcgattccacatggctgggcgacagagtcatcaccaccagcacccgaacctgggccctgcccacctacaacaaccacctctacaagcaaatctccagtcagtcagcagggagcaccaacgataacgtctatttcggctacagcaccccctgggggtattttgacttcaacagattccattgccacttctcaccacgtgactggcagcgacttatcaacaacaactggggattccggcccaagaagctcaacttcaagctcttcaacatccaggtcaaggaggtcacgacgaatgacggtgtcacaaccatcgctaataaccttaccagcacggttcaggtcttttcggactcggaatatcaactgccgtacgtcctcggctccgcgcaccagggctgcctgcctccgttcccggcagacgtgttcatgattccgcagtacggatacctgactctgaacaatggcagccaatcggtaggccgttcctccttctactgcctggagtactttccttctcagatgctgagaacgggcaacaacttcacctttagctacaccttcgaggacgtgcctttccacagcagctacgcgcacagccagagtctggaccggctgatgaatcccctcatcgaccagtacctgtactacttggccagaacacagagcaacgcaggaggtactgctggcaatcgggaactgcagttttatcagggcggacctaccaccatggccgaacaagcaaagaactggctgcccggaccttgcttccggcaacagagagtatccaagacgctggatcaaaataacaacagcaactttgcctggactggtgccacaaaataccatttaaatggaagaaattcattggttaatcccggtgtcgccatggcaacccacaaggacgacgaggaacgcttcttcccttcgagcggagttctaatttttggcaaaactggagcagctaataaaactacattagaaaacgtgctcatgacaaatgaagaagaaattcgtcctaccaacccggtagctaccgaggaatacgggattgtaagcagcaacttgcaggcggctagcaccgcagcccagacacaagttgttaacaaccagggagccttacctggcatggtctggcagaaccgggacgtgtacctgcaaggtcccatttgggccaagattcctcacacggacggcaactttcacccgtctcctctaatgggtggctttggactgaaacacccgcctccccagatcctgatcaaaaacacaccggtacctgctaatcctccagaagtgtttactcctgccaagcttgcttccttcatcacgcagtacagcaccgggcaagtcagcgttgagatcgagtgggagctgcagaaagagaacagcaagcgctggaacccagagattcagtacacctccaactttgacaaacagactggagtggactttgctgttgacagccagggtgtttactctgagcct

SEQ ID NO: 35 - protein, 644 aa, synthetic construct
  REGION 1..644: note = source = /note="Description of Artificial Sequence: Synthetic polypeptide"
KAYDQQLKAGDNPYLRYNHADAEFQERLQEDTSFGGNLGRAVFQAKKRVLEPLGLVETPAKTAPGKKRPVDSPDSTSGIGKKGQQPAKKRLNFGQTGDSESVPDPQPIGEPPAGPSGLGSGTMAAGGGAPMADNSEGADGVGNASGNWHCDSTWLGDRVITTSTRTWALPTYNNHLYKQISSQSAGSTNDNVYFGYSTPWGYFDFNRFHCHFSPRDWQRLINNNWGFRPKKLNFKLFNIQVKEVTTNDGVTTIANNLTSTVQVFSDSEYQLPYVLGSAHQGCLPPFPADVFMIPQYGYLTLNNGSQSVGRSSFYCLEYFPSQMLRTGNNFTFSYTFEDVPFHSSYAHSQSLDRLMNPLIDQYLYYLARTQSNAGGTAGNRELQFYQGGPTTMAEQAKNWLPGPCFRQQRVSKTLDQNNNSNFAWTGATKYHLNGRNSLVNPGVAMATHKDDEERFFPSSGVLIFGKTGAANKTTLENVLMTNEEEIRPTNPVATEEYGIVSSNLQAASTAAQTQVVNNQGALPGMVWQNRDVYLQGPIWAKIPHTDGNFHPSPLMGGFGLKHPPPQILIKNTPVPANPPEVFTPAKLASFITQYSTGQVSVEIEWELQKENSKRWNPEIQYTSNFDKQTGVDFAVDSQGVYSEP

SEQ ID NO: 36 - DNA, 1933 bp, synthetic construct
  misc_feature 1..1933: note = source = /note="Description of Artificial Sequence: Synthetic polynucleotide"
  source 1..1933: mol_type = other DNA
caaggcctacgaccagcagctcaaagcgggtgacaatccgtacctgcggtataaccacgccgacgccgagtttcaggagcgtcttcaagaagatacgtcttttgggggcaacctcgggcgagcagtcttccaggccaaaaagcgggttctcgaacctcttggtctggttgagacgccagctaagacggcacctggaaagaagcgaccggtagactcgccagactccacctcgggcatcggcaagaaaggccagcagcccgcgaaaaagagactcaactttgggcagactggcgactcagagtcagtccccgaccctcaaccaatcggagaaccaccagcaggcccctctggtctgggatctggtacaatggctgcaggcggtggcgcaccaatggctgacaataacgagggcgccgacggagtgggtaatgcctcaggaaattggcattgcgattccacatggctgggcgacagagtcatcaccaccagcacccgaacctgggccctgcccacctacaacaaccacctctacaagcaaatctccagtcagtcagcagggagcaccaacgataacgtctatttcggctacagcaccccctgggggtattttgacttcaacagattccattgccacttctcaccacgtgactggcagcgacttatcaacaacaactggggattccggcccaagaagctcaacttcaagctcttcaacatccaggtcaaggaggtcacgacgaatgacggcgtcacaaccatcgctaataaccttaccagcacggttcaggtcttttcggacccggaatatcaactgccgtacgtcctcggctccgcgcaccagggctgcctgcctccgttcccggcagacgtgttcatgattccgcagtacggatacctgactctgaacaatggcagccaatcggtaggccgttcctccttctactgcctggagtactttccttctcagatgctgagaacgggcaacaacttcacctttagctacaccttcgaggacgtgcctttccacagcagctacgcgcacagccagagtctggaccggctgatgaatcccctcatcgaccagtacctgtactacttggccagaacacagagcaacgcaggaggtactgctggcaatcgggaactgcagttttatcagggcggacctaccaccatggccgaacaagcaaagaactggctgcccggaccttgcttccggcaacagagagtatccaagacgctggatcaaaataacaacagcaactttgcctggactggtgccacaaaataccatttaaatggaagaaattcattggttaatcccggtgtcgccatggcaacccacaaggacgacgaggaacgcttcttcccttcgagcggagttctaatttttggcaaaactggagcagctaataaaactacattagaaaacgtgctcatgacaaatgaagaagaaattcgtcctaccaacccggtagctaccgaggaatacgggattgtaagcagcaacttgcaggcggctagcaccgcagcccagacacaagttgttaacaaccagggagccttacctggcatggtctggcagaaccgggacgtgtacctgcaaggtcccatttgggccaagattcctcacacggacggcaactttcacccgtctcctctaatgggtggctttggactgaaacacccgcctccccagatcctgatcaaaaacacaccggtacctgctaatcctccagaagtgtttactcctgccaagattgcttccttcatcacgcagtacagcaccgggcaagtcagcgttgagatcgagtgggagctgcagaaagagaacagcaagcgctggaacccagagattcagtacacctccaactttgacaaacagactggagtggactttgctgttgacagccagggtgtttactctgagcct

SEQ ID NO: 37 - protein, 644 aa, synthetic construct
  REGION 1..644: note = source = /note="Description of Artificial Sequence: Synthetic polypeptide"
KAYDQQLKAGDNPYLRYNHADAEFQERLQEDTSFGGNLGRAVFQAKKRVLEPLGLVETPAKTAPGKKRPVDSPDSTSGIGKKGQQPAKKRLNFGQTGDSESVPDPQPIGEPPAGPSGLGSGTMAAGGGAPMADNNEGADGVGNASGNWHCDSTWLGDRVITTSTRTWALPTYNNHLYKQISSQSAGSTNDNVYFGYSTPWGYFDFNRFHCHFSPRDWQRLINNNWGFRPKKLNFKLFNIQVKEVTTNDGVTTIANNLTSTVQVFSDPEYQLPYVLGSAHQGCLPPFPADVFMIPQYGYLTLNNGSQSVGRSSFYCLEYFPSQMLRTGNNFTFSYTFEDVPFHSSYAHSQSLDRLMNPLIDQYLYYLARTQSNAGGTAGNRELQFYQGGPTTMAEQAKNWLPGPCFRQQRVSKTLDQNNNSNFAWTGATKYHLNGRNSLVNPGVAMATHKDDEERFFPSSGVLIFGKTGAANKTTLENVLMTNEEEIRPTNPVATEEYGIVSSNLQAASTAAQTQVVNNQGALPGMVWQNRDVYLQGPIWAKIPHTDGNFHPSPLMGGFGLKHPPPQILIKNTPVPANPPEVFTPAKIASFITQYSTGQVSVEIEWELQKENSKRWNPEIQYTSNFDKQTGVDFAVDSQGVYSEP

SEQ ID NO: 38 - protein, 738 aa, synthetic construct
  REGION 1..738: note = source = /note="Description of Artificial Sequence: Synthetic polypeptide"
MAADGYLPDWLEDNLSEGIREWWALKPGAPKPKANQQKQDDGRGLVLPGYKYLGPFNGLDKGEPVNAADAAALEHDKAYDQQLKAGDNPYLRYNHADAEFQERLQEDTSFGGNLGRAVFQAKKRVLEPLGLVEEGAKTAPGKKRPVEPSPQRSPDSTTGIGKKGQQPAKKRLNFGQTGDSESVPDPQPIGEPPAGPSGLGSGTMAAGGGAPMADNNEGADGVGSSSGNWHCDSTWLGDRVITTSTRTWALPTYNNHLYKQISNGTSGGSTNDNTYFGYSTPWGYFDFNRFHCHFSPRDWQRLINNNWGFRPKRLNFKLFNIQVKEVTQNEGTKTIANNLTSTIQVFTDSEYQLPYVLGSARQGCLPPFPADVFMIPQYGYLTLNNGSQAVGRSSFYCLEYFPSQMLRTGNNFEFSYQFEDVPFHSSYAHSQSLDRLMNPLIDQYLYYLSRTQSTGGTAGTQQLLFSQAGPNNMSAQAKNWLPGPCYRQQRVSTTLSQNNNSNFAWTGATKYHLNGRDSLVNPGVAMATHKDDEERFFPSSGVLMFGKQGAGKGNVDYSSVMLTSEEEIKTTNPVATEQYGVVADNLQQQNAAPIVGAVNSQGALPGMVWQNRDVYLQGPIWAKIPHTDGNFHPSPLMGGFGLKHPPPQILIKNTPVPADPPTTFSQAKLASFITQYSTGQVSVEIEWELQKENSKRWNPEIQYTSNYYKSTNVDFAVNTDGTYSEPRPIGTRYLTRNL

SEQ ID NO: 39 - DNA, 3121 bp, synthetic construct
  misc_feature 1..3121: note = source = /note="Description of Artificial Sequence: Synthetic polynucleotide"
  source 1..3121: mol_type = other DNA
gaattcgcccttctacggctgcgtcaactggaccaatgagaactttcccttcaacgactgtgtcgacaagatggtgatctggtgggaggaggggaagatgaccgccaaggtcgtggagtcggccaaagccattctcggaggaagcaaggtgcgcgtggaccagaaatgcaagtcctcggcccagatagacccgactcccgtgatcgtcacctccaacaccaacatgtgcgccgtgattgacgggaactcaacgaccttcgaacaccagcagccgttgcaagaccggatgttcaaatttgaactcacccgccgtctggatcatgactttgggaaggtcaccaagcaggaagtcaaagactttttccggtgggcaaaggatcacgtggttgaggtggagcacgaattctacgtcaaaaagggtggagccaagaaaagacccgcccccagtgacgcagatataagtgagcccaaacgggtgcgcgagtcagttgcgcagccatcgacgtcagacgcggaagcttcgatcaactacgcagacaggtaccaaaacaaatgttctcgtcacgcgggcatgaatctgatgctgtttccctgcagacaatgcgagagaatgaatcagaattcaaatatctgcttcactcacggacagaaagactgtttagagtgctttcccgtgtcagaatctcaacccgtttctgtcgtcaaaaaggcgtatcagaaactgtgctacattcatcatatcatgggaaaggtgccagacgcttgcactgcctgcgatctggtcgatgtggatttggatgactgcatctttgaacaataaatgatttaaatcaggtatggctgccgatggttatcttccagattggctcgaggacaacctctctgagggcattcgcgagtggtgggcgctgaaacctggagccccgaagcccaaagccaaccagcaaaagcaggacggcggccggggtctggtgcttcctggctacaagtacctcggacccttcaacggactcgacaagggggagcccgtcaacgcggcggacgcagcggccctcgagcacgacaaggcctacgaccagcagctcaaagcgggtgacaatccgtacctgcggtataaccacgccgacgccgagtttcaggagcgtctgcaagaagatacgtcttttgggggcaacctcgggcgagcagtcttccaggccaagaagcgggttctcgaacctctcggtctggttgaggaaggcgctaagacggctcctggaaagaagagaccggtagagccatcaccccagcgttctccagactcctctacgggcatcggcaagaaaggccagcagcccgcgaaaaagagactcaactttgggcagactggcgactcagagtcagtgcccgaccctcaaccaatcggagaaccccccgcaggcccctctggtctgggatctggtacaatggctgcaggcggtggcgctccaatggcagacaataacgaaggcgccgacggagtgggtagttcctcaggaaattggcattgcgattccacatggctgggcgactgagtcatcaccaccagcacccgaacctgggccctccccacctacaacaaccacctctacaagcaaatctccaacgggacttcgggaggaagcaccaacgacaacacctacttcggctacagcaccccctgggggtattttgactttaacagattccactgccacttctcaccacgtgactggcagcgactcatcaacaacaactggggattccggcccaagagactcaacttcaagctcttcaacatccaggtcaaggaggtcacgcagaatgaaggcaccaagaccatcgccaataaccttaccagcacgattcaggtctttacggactcggaataccagctcccgtacgtcctcggctctgcgcaccagggctgcctgcctccgttcccggcggacgtcttcatgattcctcagtacgggtacctgactctgaacaatggcagtcaggccgtgggccgttcctccttctactgcctggagtactttccttctcaaatgctgagaacgggcaacaactttgagttcagctaccagtttgaggacgtgccttttcacagcagctacgcgcacagccaaagcctggaccggctgatgaaccccctcatcgaccagtacctgtactacctgtctcggactcagtccacgggaggtaccgcaggaactcagcagttgctattttctcaggccgggcctaataacatgtcggctcaggccaaaaactggctacccgggccctgctaccggcagtaacgcgtctccacgacactgtcgcaaaataacaacagcaactttgtctggaccggtgccaccaagtatcatctgaatggcagagactctctggtagatcccggtgtcgctatggcaacccacaaggacgacgaagagcgattttttccgtccagcggagtcataatgtttgggaaacagggagctggaaaagacaacgtggactatagcagcgtcatgctaaccagtgaggaagaaattaaaaccaccaacccagtggccacagaacagtacggcgtggtggccgataacctgcaacagcaaaacgccgctcctattgtaggggccgtcaacagtcaaggagccttacctggcatggtctggcagaaccgggacgtgtacctgcagggtcctacctgggccaagattcctcacacggacggaaactttcatccctcgccgctgatgggaggctttggactgaaacacccgcctcctcagatcctgattaagaatacacctgttcccgcggatcctccaactaccttcagtcaagctaagctggcgtcgttcatcacgcagtacagcaccggacaggtcagcgtggaaattgaatgggagctgcaggaagaaaacagcaaacgctggaacccagagattcaatacacttccaactactacaaatctacaaatgtggactttgctgttaacacagatggcacttattctgagcctcgccccatcggcacccgttacctcacccgtaatctgtaattgcttgttaatcaataaaccggttgattcgtttcagttgaactttggtctctgcgaagggcgaattc

SEQ ID NO: 40 - protein, 738 aa, synthetic construct
  REGION 1..738: note = source = /note="Description of Artificial Sequence: Synthetic polypeptide"
MAADGYLPDWLEDNLSEGIREWWALKPGAPKPKANQQKQDDGRGLVLPGYKYLGPFNGLDKGEPVNAADAAALEHDKAYDQQLKAGDNPYLRYNHADAEFQERLQEDTSFGGNLGRAVFQAKKRVLEPLGLVEEGAKTAPGKKRPVEPSPQRSPDSSTGIGKKGQQPAKKRLNFGQTGDSESVPDPQPIGEPPAGPSGLGSGTMAAGGGAPMADNNEGADGVGSSSGNWHCDSTWLGDGVITTSTRTWALPTYNNHLYKQISNGTSGGSTNDNTYFGYSTPWGYFDFNRFHCHFSPRDWQRLINNNWGFRPKSLNFKLFNIQVKEVTQNEGTKTIANNLTSTIQVFTDSEYQLPYVLGSAHQGCLPPFPADVFMIPQYGYLTLNNGSQAVGRSSFYCLEYFPSQMLRTGNNFEFSYQFEDVPFHSSYAHSQSLDRLMNPLIDQYLYYLSRTQSTGGTAGTQQLLFSQAGPNNMSAQAKNWLPGPCYRQQRVSTTLSQNDNSNFAWTGATKYHLNGRDSLVNPGVAMATHKDDEERFFPSSGVLMFGKQGAGKDNVDYSSVMLTSEEEIKTTNPVATEQYGVVADNLQQQNAAPIVGAVNSQGALPGMVWQNRDVYLQGPIWAKIPHTDGNFHPSPLMGGFGLKHPPPQILIKNTPVPADPPTTFSQAKLASFITQYSTGQVSVEIEWELQKENSKRWNPEIQYTSNYYKSTNVDFAVNTDGTYSEPRPIGTRYLTRNL

SEQ ID NO: 41 - DNA, 3121 bp, synthetic construct
  misc_feature 1..3121: note = source = /note="Description of Artificial Sequence: Synthetic polynucleotide"
  source 1..3121: mol_type = other DNA
gaattcgcccttcgcgagaccaaagttcaactgaaacgaatcaaccggtttattgattaacaagcaattacagattacgggtgaggtaacgggtgccgatggggcgaggctcagaataagtgccatctgtgttaacagcaaagtccacatttgtagatttgtagtagttggaagtgtattgaatctctgggttccagcgtttgctgttttctttctgcagctcccattcaatttccacgctgacctgtccggtgctgtactgcgtgatgaacgacgccagcttagcttgactgaaggtagttggaggatccgcgggaacaggtgtattcttaatcaggatctgaggaggcgggtgtttcagtccaaagcctcccatcagcggcgagggatgaaagtttccgtccgtgtgaggaatcttggcccagataggaccctgcaggtacacgtcccggttctgccagaccatgccaggtaaggctccttgactgttgacggcccctacaataggagcggcgttttgctgttgcaggttatcggccaccacgccgtactgttctgtggccactgggttggtggttttaatttcttcctcactggttagcataacgctgctatagtccacgttgtcttttccagctccctgtttcccaaacattaagactccgctggacggaaaaaatcgctcttcgtcgtccttgtgggttgccatagcgacaccgggatttaccagagagtctctgccattcagatgatacttggtggcaccggtccaggcaaagttgctgttgtcattttgcgacagtgtcgtggagacgcgttgctgccggtagcagggcccgggtagccagtttttggcctgagccgacatgttattaggcccggcctgagaaaatagcaactgctgagttcctgcggtacctcccgtggactgagtccgagacaggtagtacaggtactggtcgatgagggggttcatcagccggtccaggctttggctgtgcgcgtagctgctgtgaaaaggcacgtcctcaaactggtagctgaactcaaagttgttgcccgttctcagcatttgagaaggaaagtactccaggcagtagaaggaggaacggcccacggcctgactgccattgttcagagtcaggtacccgtactgaggaatcatgaagacgtccgccgggaacggaggcaggcagccctggtgcgcagagccgaggacgtacgggagctggtattccgagtccgtaaagacctgaatcgtgctggtaaggttattggcgatggtcttggtgccttcattctgcgtgacctccttgacctggatgttgaagagcttgaagttgaggctcttgggccggaatccccagttgttgttgatgagtcgctgccagtcacgtggtgagaagtggcagtggaatctgttaaagtcaaaatacccccagggggtgctgtagccgaagtaggtgttgtcgttggtgcttcctcccgaagtcccgttggagatttgcttgtagaggtggttgttgtaggtggggagggcccaggttcgggtgctggtggtgatgactccgtcgcccagccatgtggaatcgcaatgccaatttcctgaggaactacccactccgtcggcgccttcgttattgtctgccattggagcgccaccgcctgcagccattgtaccagatcccagaccagaggggcctgcggggggttctccgattggttgagggtcgggcactgactctgagtcgccagtctgcccaaagttgagtctctttttcgcgggctgctggcctttcttgccgatgcccgtagaggagtctggagaacgctggggtgatggctctaccggtctcttctttccaggagccgtcttagcgccttcctcaaccagaccgagaggttcgagaacccgcttcttggcctggaagactgctcgcccgaggttgcccccaaaagacgtatcttcttgcagacgctcctgaaactcggcgtcggcgtggttataccgcaggtacggattgtcacccgctttgagctgctggtcgtaggccttgtcgtgctcgagggccgctgcgtccgccgcgttgacgggctcccccttgtcgagtccgttgaagggtccgaggtacttgtagccaggaagcaccagaccccggccgtcgtcctgcttttgctggttggctttgggcttcggggctccaggtttcagcgcccaccactcgcgaatgccctcagagaggttgtcctcgagccaatctggaagataaccatcggcagccatacctgatttaaatcatttattgttcaaagatgcagtcatccaaatccacattgaccagatcgcaggcagtgcaagcgtctggcacctttcccatgatatgatgaatgtagcacagtttctgatacgcctttttgacgacagaaacgggttgagattctgacacgggaaagcactctaaacagtctttctgtccgtgagtgaagcagatatttgaattctgattcattctctcgcattgtctgcagggaaacagcatcagattcatgcccacgtgacgagaacatttgttttggtacctgtctgcgtagttgatcgaagcttccgcgtctgacgtcgatggctgcgcaactgactcgcgcacccgtttgggctcacttatatctgcgtcactgggggcgggtcttttcttggctccaccctttttgacgtagaattcatgctccacctcaaccacgtgatcctttgcccaccggaaaaagtctttgacttcctgcttggtgaccttcccaaagtcatgatccagacggcgggtgagttcaaatttgaacatccggtcttgcaacggctgctggtgttcgaaggtcgttgagttcccgtcaatcacggcgcacatgttggtgttggaggtgacgatcacgggagtcgggtctatctgggccgaggacttgcatttctggtccacgcgcaccttgcttcctccgagaatggctttggccgactccacgaccttggcggtcatcttcccctcctcccaccagatcaccatcttgtcgacacagtcgttgaagggaaagttctcattggtccagttgacgcagccgtagaaagggcgaattc

SEQ ID NO: 42 - DNA, 2211 bp, synthetic construct
  misc_feature 1..2211: note = source = /note="Description of Artificial Sequence: Synthetic polynucleotide"
  source 1..2211: mol_type = other DNA
atggctgctgacggttatcttccagattggctcgaggacaacctttctgaaggcattcgtgagtggtgggctctgaaacctggagtccctcaacccaaagcgaaccaacaacaccaggacaaccgtcggggtcttgtgcttccgggttacaaatacctcggacccggtaacggactcgacaaaggagagccggtcaacgaggcggacgcggcagccctcgaacacgacaaagcttacgaccagcagctcaaggccggtgacaacccgtacctcaagtacaaccacgccgacgccgagtttcaggagcgtcttcaagaagatacgtcttttgggggcaaccttggcagagcagtcttccaggccaaaaagaggatccttgagcctcttggtctggttgaggaagcagctaaaacggctcctggaaagaagggggctgtagatcagtctcctcaggaaccggactcatcatctggtgttggcaaatcgggcaaacagcctgccagaaaaagactaaatttcggtcagactggagactcagagtcagtcccagaccctcaacctctcggagaaccaccagcagcccccacaagtttgggatctaatacaatggcttcaggcggtggcgcaccaatggcagacaataacgagggtgccgatggagtgggtaattcctcaggaaattggcattgcgattcccaatggctgggcgacagagtcatcaccaccagcaccagaacctgggccctgcccacttacaacaaccatctctacaagcaaatctccagccaatcaggagcttcaaacgacaaccactactttggctacagcaccccttgggggtattttgactttaacagattccactgccacttctcaccacgtgactggcagcgactcattaacaacaactggggattccggcccaagaaactcagcttcaagctcttcaacatccaagttagaggggtcacgcagaacgatggcacgacgactattgccaataaccttaccagcacggttcaagtgtttacggactcggagtatcagctcccgtacgtgctcgggtcggcgcaccaaggctgtctcccgccgtttccagcggacgtcttcatggtccctcagtatggatacctcaccctgaacaacggaagtcaagcggtgggacgctcatccttttactgcctggagtacttcccttcgcagatgctaaggactggaaataacttccaattcagctataccttcgaggatgtaccttttcacagcagctacgctcacagccagagtttggatcgcttgatgaatcctcttattgatcagtatctgtactacctgaacagaacgcaaggaacaacctctggaacaaccaaccaatcacggctgctttttagccaggctgggcctcagtctatgtctttgcaggccagaaattggctacctgggccctgctaccggcaacagagactttcaaagactgctaacgacaacaacaacagtaactttccttggacagcggccagcaaatatcatctcaatggccgcgactcgctggtgaatccaggaccagctatggccagtcacaaggacgatgaagaaaaatttttccctatgcacggcaatctaatatttggcaaagaagggacaacggcaagtaacgcagaattagataatgtaatgattacggatgaagaagagattcgtaccaccaatcctgtggcaacagagcagtatggaactgtggcaaataacttgcagagctcaaatacagctcccacgactggaactgtcaatcatcagggggccttacctggcatggtgtggcaagatcgtgacgtgtaccttcaaggacctatctgggcaaagattcctcacacggatggacactttcatccttctcctctgatgggaggctttggactgaaacatccgcctcctcaaatcatgatcaaaaatactccggtaccggcaaatcctccgacgactttcagcccggccaagtttgcttcatttatcactcagtactccactggacaggtcagcgtggaaattgagtgggagctacagaaagaaaacagcaaacgttggaatccagagattcagtacacttccaactacaacaagtctgttaatgtggactttactgtagacactaatggtgtttatagtgaacctcgccctattggaacccggtatctcacacgaaacttgtga

SEQ ID NO: 43 - protein, 736 aa, Adeno-associated virus 3
MAADGYLPDWLEDNLSEGIREWWALKPGVPQPKANQQHQDNRRGLVLPGYKYLGPGNGLDKGEPVNEADAAALEHDKAYDQQLKAGDNPYLKYNHADAEFQERLQEDTSFGGNLGRAVFQAKKRILEPLGLVEEAAKTAPGKKGAVDQSPQEPDSSSGVGKSGKQPARKRLNFGQTGDSESVPDPQPLGEPPAAPTSLGSNTMASGGGAPMADNNEGADGVGNSSGNWHCDSQWLGDRVITTSTRTWALPTYNNHLYKQISSQSGASNDNHYFGYSTPWGYFDFNRFHCHFSPRDWQRLINNNWGFRPKKLSFKLFNIQVRGVTQNDGTTTIANNLTSTVQVFTDSEYQLPYVLGSAHQGCLPPFPADVFMVPQYGYLTLNNGSQAVGRSSFYCLEYFPSQMLRTGNNFQFSYTFEDVPFHSSYAHSQSLDRLMNPLIDQYLYYLNRTQGTTSGTTNQSRLLFSQAGPQSMSLQARNWLPGPCYRQQRLSKTANDNNNSNFPWTAASKYHLNGRDSLVNPGPAMASHKDDEEKFFPMHGNLIFGKEGTTASNAELDNVMITDEEEIRTTNPVATEQYGTVANNLQSSNTAPTTGTVNHQGALPGMVWQDRDVYLQGPIWAKIPHTDGHFHPSPLMGGFGLKHPPPQIMIKNTPVPANPPTTFSPAKFASFITQYSTGQVSVEIEWELQKENSKRWNPEIQYTSNYNKSVNVDFTVDTNGVYSEPRPIGTRYLTRNL

SEQ ID NO: 44 - DNA, 4726 bp, Adeno-associated virus 3
  source 1..4726: mol_type = genomic DNA
ttggccactccctctatgcgcactcgctcgctcggtggggcctggcgaccaaaggtcgccagacggacgtgctttgcacgtccggccccaccgagcgagcgagtgcgcatagagggagtggccaactccatcactagaggtatggcagtgacgtaacgcgaagcgcgcgaagcgagaccacgcctaccagctgcgtcagcagtcaggtgacccttttgcgacagtttgcgacaccacgtggccgctgagggtatatattctcgagtgagcgaaccaggagctccattttgaccgcgaaatttgaacgagcagcagccatgccggggttctacgagattgtcctgaaggtcccgagtgacctggacgagcgcctgccgggcatttctaactcgtttgttaactgggtggccgagaaggaatgggacgtgccgccggattctgacatggatccgaatctgattgagcaggcacccctgaccgtggccgaaaagcttcagcgcgagttcctggtggagtggcgccgcgtgagtaaggccccggaggccctcttttttgtccagttcgaaaagggggagacctacttccacctgcacgtgctgattgagaccatcggggtcaaatccatggtggtcggccgctacgtgagccagattaaagagaagctggtgacccgcatctaccgcggggtcgagccgcagcttccgaactggttcgcggtgaccaaaacgcgaaatggcgccgggggcgggaacaaggtggtggacgactgctacatccccaactacctgctccccaagacccagcccgagctccagtgggcgtggactaacatggaccagtatttaagcgcctgtttgaatctcgcggagcgtaaacggctggtggcgcagcatctgacgcacgtgtcgcagacgcaggagcagaacaaagagaatcagaaccccaattctgacgcgccggtcatcaggtcaaaaacctcagccaggtacatggagctggtcgggtggctggtggaccgcgggatcacgtcagaaaagcaatggattcaggaggaccaggcctcgtacatctccttcaacgccgcctccaactcgcggtcccagatcaaggccgcgctggacaatgcctccaagatcatgagcctgacaaagacggctccggactacctggtgggcagcaacccgccggaggacattaccaaaaatcggatctaccaaatcctggagctgaacgggtacgatccgcagtacgcggcctccgtcttcctgggctgggcgcaaaagaagttcgggaagaggaacaccatctggctctttgggccggccacgacgggtaaaaccaacatcgcggaagccatcgcccacgccgtgcccttctacggctgcgtaaactggaccaatgagaactttcccttcaacgattgcgtcgacaagatggtgatctggtgggaggagggcaagatgacggccaaggtcgtggagagcgccaaggccattctgggcggaagcaaggtgcgcgtggaccaaaagtgcaagtcatcggcccagatcgaacccactcccgtgatcgtcacctccaacaccaacatgtgcgccgtgattgacgggaacagcaccaccttcgagcatcagcagccgctgcaggaccggatgtttgaatttgaacttacccgccgtttggaccatgactttgggaaggtcaccaaacaggaagtaaaggactttttccggtgggcttccgatcacgtgactgacgtggctcatgagttctacgtcagaaagggtggagctaagaaacgccccgcctccaatgacgcggatgtaagcgagccaaaacgggagtgcacgtcacttgcgcagccgacaacgtcagacgcggaagcaccggcggactacgcggacaggtaccaaaacaaatgttctcgtcacgtgggcatgaatctgatgctttttccctgtaaaacatgcgagagaatgaatcaaatttccaatgtctgttttacgcatggtcaaagagactgtggggaatgcttccctggaatgtcagaatctcaacccgtttctgtcgtcaaaaagaagacttatcagaaactgtgtccaattcatcatatcctgggaagggcacccgagattgcctgttcggcctgcgatttggccaatgtggacttggatgactgtgtttctgagcaataaatgacttaaaccaggtatggctgctgacggttatcttccagattggctcgaggacaacctttctgaaggcattcgtgagtggtgggctctgaaacctggagtccctcaacccaaagcgaaccaacaacaccaggacaaccgtcggggtcttgtgcttccgggttacaaatacctcggacccggtaacggactcgacaaaggagagccggtcaacgaggcggacgcggcagccctcgaacacgacaaagcttacgaccagcagctcaaggccggtgacaacccgtacctcaagtacaaccacgccgacgccgagtttcaggagcgtcttcaagaagatacgtcttttgggggcaaccttggcagagcagtcttccaggccaaaaagaggatccttgagcctcttggtctggttgaggaagcagctaaaacggctcctggaaagaagggggctgtagatcagtctcctcaggaaccggactcatcatctggtgttggcaaatcgggcaaacagcctgccagaaaaagactaaatttcggtcagactggagactcagagtcagtcccagaccctcaacctctcggagaaccaccagcagcccccacaagtttgggatctaatacaatggcttcaggcggtggcgcaccaatggcagacaataacgagggtgccgatggagtgggtaattcctcaggaaattggcattgcgattcccaatggctgggcgacagagtcatcaccaccagcaccagaacctgggccctgcccacttacaacaaccatctctacaagcaaatctccagccaatcaggagcttcaaacgacaaccactactttggctacagcaccccttgggggtattttgactttaacagattccactgccacttctcaccacgtgactggcagcgactcattaacaacaactggggattccggcccaagaaactcagcttcaagctcttcaacatccaagttagaggggtcacgcagaacgatggcacgacgactattgccaataaccttaccagcacggttcaagtgtttacggactcggagtatcagctcccgtacgtgctcgggtcggcgcaccaaggctgtctcccgccgtttccagcggacgtcttcatggtccctcagtatggatacctcaccctgaacaacggaagtcaagcggtgggacgctcatccttttactgcctggagtacttcccttcgcagatgctaaggactggaaataacttccaattcagctataccttcgaggatgtaccttttcacagcagctacgctcacagccagagtttggatcgcttgatgaatcctcttattgatcagtatctgtactacctgaacagaacgcaaggaacaacctctggaacaaccaaccaatcacggctgctttttagccaggctgggcctcagtctatgtctttgcaggccagaaattggctacctgggccctgctaccggcaacagagactttcaaagactgctaacgacaacaacaacagtaactttccttggacagcggccagcaaatatcatctcaatggccgcgactcgctggtgaatccaggaccagctatggccagtcacaaggacgatgaagaaaaatttttccctatgcacggcaatctaatatttggcaaagaagggacaacggcaagtaacgcagaattagataatgtaatgattacggatgaagaagagattcgtaccaccaatcctgtggcaacagagcagtatggaactgtggcaaataacttgcagagctcaaatacagctcccacgactggaactgtcaatcatcagggggccttacctggcatggtgtggcaagatcgtgacgtgtaccttcaaggacctatctgggcaaagattcctcacacggatggacactttcatccttctcctctgatgggaggctttggactgaaacatccgcctcctcaaatcatgatcaaaaatactccggtaccggcaaatcctccgacgactttcagcccggccaagtttgcttcatttatcactcagtactccactggacaggtcagcgtggaaattgagtgggagctacagaaagaaaacagcaaacgttggaatccagagattcagtacacttccaactacaacaagtctgttaatgtggactttactgtagacactaatggtgtttatagtgaacctcgccctattggaacccggtatctcacacgaaacttgtgaatcctggttaatcaataaaccgtttaattcgtttcagttgaactttggctcttgtgcacttctttatctttatcttgtttccatggctactgcgtagataagcagcggcctgcggcgcttgcgcttcgcggtttacaactgctggttaatatttaactctcgccatacctctagtgatggagttggccactccctctatgcgcactcgctcgctcggtggggcctggcgaccaaaggtcgccagacggacgtgctttgcacgtccggccccaccgagcgagcgagtgcgcatagagggagtggccaa

SEQ ID NO: 45 - protein, 737 aa, synthetic construct
  REGION 1..737: note = source = /note="Description of Artificial Sequence: Synthetic polypeptide"
MAADGYLPDWLEDNLSEGIREWWDLKPGAPKPKANQQKQDNGRGLVLPGYKYLGPFNGLDKGEPVNAADAAALEHDKAYDQQLNAGDNPYLRYNHADAEFQERLQEDTSFGGNLGRAVFQAKKRVLEPLGLVEEGAKTAPAKKRPVEPSPQRSPDSSTGIGKKGQQPARKRLNFGQTGDSESVPDPQPLGEPPAAPSSVGSGTVAAGGGAPMADNNEGADGVGNASGNWHCDSTWLGDRVITTSTRTWALPTYNNHLYEQISSETAGSTNDNTYFGYSTPWGYFDFNRFHCHFSPRDWQRLINNNWGFRPKKLRFKLFNIQVKEVTTNDGVTTIANNLTSTIQVFSDSEYQLPYVLGSAHQGCLPPFPADVFMIPQYGYLTLNNGSQSVGRSSFYCLEYFPSQMLRTGNNFEFSYSFEDVPFHSSYAHSQSLDRLMNPLIDQYLYYLARTQSDPGGTAGNRELQFYQGGPSTMAEQAKNWLPGPCFRQQRVSKTLDQNNNSNFAWTGATKYHLNGRNSLVNPGVAMATHKDDEDRFFPSSGVLIFGKTGATNKTTLENVLMTNEEEIRPTNPVATEEYGIVSSNLQAANTAAQTQVVNNQGALPGMVWQNRDVYLQGPIWAKIPHTDGNFHPSPLMGGFGLKHPPPQILIKNTPVPANPPEVFTPAKFASFITQYSTGQVSVEIEWELQKENSKRWDPEIQYTSNFEKQTGVDFAVDSQGVYSEPRPIGTRYLTRNL

SEQ ID NO: 46 - DNA, 2211 bp, synthetic construct
  misc_feature 1..2211: note = source = /note="Description of Artificial Sequence: Synthetic polynucleotide"
  source 1..2211: mol_type = other DNA
atggctgctgacggttatcttccagattggctcgaggacaacctttctgaaggcattcgtgagtggtgggctctgaaacctggagtccctcaacccaaagcgaaccaacaacaccaggacaaccgtcggggtcttgtgcttccgggttacaaatacctcggacccggtaacggactcgacaaaggagagccggtcaacgaggcggacgcggcagccctcgaacacgacaaagcttacgaccagcagctcaaggccggtgacaacccgtacctcaagtacaaccacgccgacgccgagtttcaggagcgtcttcaagaagatacgtcttttgggggcaaccttggcagagcagtcttccaggccaaaaagaggatccttgagcctcttggtctggttgaggaagcagctaaaacggctcctggaaagaagggggctgtagatcagtctcctcaggaaccggactcatcatctggtgttggcaaatcgggcaaacagcctgccagaaaaagactaaatttcggtcagactggagactcagagtcagtcccagaccctcaacctctcggagaaccaccagcagcccccacaagtttgggatctaatacaatggcttcaggcggtggcgcaccaatggcagacaataacgagggtgccgatggagtgggtaattcctcaggaaattggcattgcgattcccaatggctgggcgacagagtcatcaccaccagcaccagaacctgggccctgcccacttacaacaaccatctctacaagcaaatctccagccaatcaggagcttcaaacgacaaccactactttggctacagcaccccttgggggtattttgactttaacagattccactgccacttctcaccacgtgactggcagcgactcattaacaacaactggggattccggcccaagaaactcagcttcaagctcttcaacatccaagttagaggggtcacgcagaacgatggcacgacgactattgccaataaccttaccagcacggttcaagtgtttacggactcggagtatcagctcccgtacgtgctcgggtcggcgcaccaaggctgtctcccgccgtttccagcggacgtcttcatggtccctcagtatggatacctcaccctgaacaacggaagtcaagcggtgggacgctcatccttttactgcctggagtacttcccttcgcagatgctaaggactggaaataacttccaattcagctataccttcgaggatgtaccttttcacagcagctacgctcacagccagagtttggatcgcttgatgaatcctcttattgatcagtatctgtactacctgaacagaacgcaaggaacaacctctggaacaaccaaccaatcacggctgctttttagccaggctgggcctcagtctatgtctttgcaggccagaaattggctacctgggccctgctaccggcaacagagactttcaaagactgctaacgacaacaacaacagtaactttccttggacagcggccagcaaatatcatctcaatggccgcgactcgctggtgaatccaggaccagctatggccagtcacaaggacgatgaagaaaaatttttccctatgcacggcaatctaatatttggcaaagaagggacaacggcaagtaacgcagaattagataatgtaatgattacggatgaagaagagattcgtaccaccaatcctgtggcaacagagcagtatggaactgtggcaaataacttgcagagctcaaatacagctcccacgactggaactgtcaatcatcagggggccttacctggcatggtgtggcaagatcgtgacgtgtaccttcaaggacctatctgggcaaagattcctcacacggatggacactttcatccttctcctctgatgggaggctttggactgaaacatccgcctcctcaaatcatgatcaaaaatactccggtaccggcaaatcctccgacgactttcagcccggccaagtttgcttcatttatcactcagtactccactggacaggtcagcgtggaaattgagtgggagctacagaaagaaaacagcaaacgttggaatccagagattcagtacacttccaactacaacaagtctgttaatgtggactttactgtagacactaatggtgtttatagtgaacctcgccctattggaacccggtatctcacacgaaacttgtaa

SEQ ID NO: 47 - protein, 736 aa, synthetic construct; identical to SEQ ID NO: 43
  REGION 1..736: note = source = /note="Description of Artificial Sequence: Synthetic polypeptide"

SEQ ID NO: 48 - protein, 736 aa, Adeno-associated virus 3A; identical to SEQ ID NO: 43

SEQ ID NO: 49 - protein, 624 aa, Adeno-associated virus 3A
MPGFYEIVLKVPSDLDERLPGISNSFVNWVAEKEWDVPPDSDMDPNLIEQAPLTVAEKLQREFLVEWRRVSKAPEALFFVQFEKGETYFHLHVLIETIGVKSMVVGRYVSQIKEKLVTRIYRGVEPQLPNWFAVTKTRNGAGGGNKVVDDCYIPNYLLPKTQPELQWAWTNMDQYLSACLNLAERKRLVAQHLTHVSQTQEQNKENQNPNSDAPVIRSKTSARYMELVGWLVDRGITSEKQWIQEDQASYISFNAASNSRSQIKAALDNASKIMSLTKTAPDYLVGSNPPEDITKNRIYQILELNGYDPQYAASVFLGWAQKKFGKRNTIWLFGPATTGKTNIAEAIAHAVPFYGCVNWTNENFPFNDCVDKMVIWWEEGKMTAKVVESAKAILGGSKVRVDQKCKSSAQIEPTPVIVTSNTNMCAVIDGNSTTFEHQQPLQDRMFEFELTRRLDHDFGKVTKQEVKDFFRWASDHVTDVAHEFYVRKGGAKKRPASNDADVSEPKRECTSLAQPTTSDAEAPADYADRYQNKCSRHVGMNLMLFPCKTCERMNQISNVCFTHGQRDCGECFPGMSESQPVSVVKKKTYQKLCPIHHILGRAPEIACSACDLANVDLDDCVSEQ

SEQ ID NO: 50 - protein, 736 aa, Adeno-associated virus 3B
MAADGYLPDWLEDNLSEGIREWWALKPGVPQPKANQQHQDNRRGLVLPGYKYLGPGNGLDKGEPVNEADAAALEHDKAYDQQLKAGDNPYLKYNHADAEFQERLQEDTSFGGNLGRAVFQAKKRILEPLGLVEEAAKTAPGKKRPVDQSPQEPDSSSGVGKSGKQPARKRLNFGQTGDSESVPDPQPLGEPPAAPTSLGSNTMASGGGAPMADNNEGADGVGNSSGNWHCDSQWLGDRVITTSTRTWALPTYNNHLYKQISSQSGASNDNHYFGYSTPWGYFDFNRFHCHFSPRDWQRLINNNWGFRPKKLSFKLFNIQVKEVTQNDGTTTIANNLTSTVQVFTDSEYQLPYVLGSAHQGCLPPFPADVFMVPQYGYLTLNNGSQAVGRSSFYCLEYFPSQMLRTGNNFQFSYTFEDVPFHSSYAHSQSLDRLMNPLIDQYLYYLNRTQGTTSGTTNQSRLLFSQAGPQSMSLQARNWLPGPCYRQQRLSKTANDNNNSNFPWTAASKYHLNGRDSLVNPGPAMASHKDDEEKFFPMHGNLIFGKEGTTASNAELDNVMITDEEEIRTTNPVATEQYGTVANNLQSSNTAPTTRTVNDQGALPGMVWQDRDVYLQGPIWAKIPHTDGHFHPSPLMGGFGLKHPPPQIMIKNTPVPANPPTTFSPAKFASFITQYSTGQVSVEIEWELQKENSKRWNPEIQYTSNYNKSVNVDFTVDTNGVYSEPRPIGTRYLTRNL

SEQ ID NO: 51 - protein, 624 aa, Adeno-associated virus 3B
MPGFYEIVLKVPSDLDEHLPGISNSFVNWVAEKEWELPPDSDMDPNLIEQAPLTVAEKLQREFLVEWRRVSKAPEALFFVQFEKGETYFHLHVLIETIGVKSMVVGRYVSQIKEKLVTRIYRGVEPQLPNWFAVTKTRNGAGGGNKVVDDCYIPNYLLPKTQPELQWAWTNMDQYLSACLNLAERKRLVAQHLTHVSQTQEQNKENQNPNSDAPVIRSKTSARYMELVGWLVDRGITSEKQWIQEDQASYISFNAASNSRSQIKAALDNASKIMSLTKTAPDYLVGSNPPEDITKNRIYQILELNGYDPQYAASVFLGWAQKKFGKRNTIWLFGPATTGKTNIAEAIAHAVPFYGCVNWTNENFPFNDCVDKMVIWWEEGKMTAKVVESAKAILGGSKVRVDQKCKSSAQIEPTPVIVTSNTNMCAVIDGNSTTFEHQQPLQDRMFKFELTRRLDHDFGKVTKQEVKDFFRWASDHVTDVAHEFYVRKGGAKKRPASNDADVSEPKRQCTSLAQPTTSDAEAPADYADRYQNKCSRHVGMNLMLFPCKTCERMNQISNVCFTHGQRDCGECFPGMSESQPVSVVKKKTYQKLCPIHHILGRAPEIACSACDLANVDLDDCVSEQ

SEQ ID NO: 52 - DNA, 4722 bp, Adeno-associated virus 3B
  source 1..4722: mol_type = genomic DNA
tggccactccctctatgcgcactcgctcgctcggtggggcctggcgaccaaaggtcgccagacggacgtgctttgcacgtccggccccaccgagcgagcgagtgcgcatagagggagtggccaactccatcactagaggtatggcagtgacgtaacgcgaagcgcgcgaagcgagaccacgcctaccagctgcgtcagcagtcaggtgacccttttgcgacagtttgcgacaccacgtggccgctgagggtatatattctcgagtgagcgaaccaggagctccattttgaccgcgaaatttgaacgagcagcagccatgccggggttctacgagattgtcctgaaggtcccgagtgacctggacgagcacctgccgggcatttctaactcgtttgttaactgggtggccgagaaggaatgggagctgccgccggattctgacatggatccgaatctgattgagcaggcacccctgaccgtggccgaaaagcttcagcgcgagttcctggtggagtggcgccgcgtgagtaaggccccggaggccctcttttttgtccagttcgaaaagggggagacctacttccacctgcacgtgctgattgagaccatcggggtcaaatccatggtggtcggccgctacgtgagccagattaaagagaagctggtgacccgcatctaccgcggggtcgagccgcagcttccgaactggttcgcggtgaccaaaacgcgaaatggcgccgggggcgggaacaaggtggtggacgactgctacatccccaactacctgctccccaagacccagcccgagctccagtgggcgtggactaacatggaccagtatttaagcgcctgtttgaatctcgcggagcgtaaacggctggtggcgcagcatctgacgcacgtgtcgcagacgcaggagcagaacaaagagaatcagaaccccaattctgacgcgccggtcatcaggtcaaaaacctcagccaggtacatggagctggtcgggtggctggtggaccgcgggatcacgtcagaaaagcaatggattcaggaggaccaggcctcgtacatctccttcaacgccgcctccaactcgcggtcccagatcaaggccgcgctggacaatgcctccaagatcatgagcctgacaaagacggctccggactacctggtgggcagcaacccgccggaggacattaccaaaaatcggatctaccaaatcctggagctgaacgggtacgatccgcagtacgcggcctccgtcttcctgggctgggcgcaaaagaagttcgggaagaggaacaccatctggctctttgggccggccacgacgggtaaaaccaacatcgcggaagccatcgcccacgccgtgcccttctacggctgcgtaaactggaccaatgagaactttcccttcaacgattgcgtcgacaagatggtgatctggtgggaggagggcaagatgacggccaaggtcgtggagagcgccaaggccattctgggcggaagcaaggtgcgcgtggaccaaaagtgcaagtcatcggcccagatcgaacccactcccgtgatcgtcacctccaacaccaacatgtgcgccgtgattgacgggaacagcaccaccttcgagcatcagcagccgctgcaggaccggatgtttaaatttgaacttacccgccgtttggaccatgactttgggaaggtcaccaaacaggaagtaaaggactttttccggtgggcttccgatcacgtgactgacgtggctcatgagttctacgtcagaaagggtggagctaagaaacgccccgcctccaatgacgcggatgtaagcgagccaaaacggcagtgcacgtcacttgcgcagccgacaacgtcagacgcggaagcaccggcggactacgcggacaggtaccaaaacaaatgttctcgtcacgtgggcatgaatctgatgctttttccctgtaaaacatgcgagagaatgaatcaaatttccaatgtctgttttacgcatggtcaaagagactgtggggaatgcttccctggaatgtcagaatctcaacccgtttctgtcgtcaaaaagaagacttatcagaaactgtgtccaattcatcatatcctgggaagggcacccgagattgcctgttcggcctgcgatttggccaatgtggacttggatgactgtgtttctgagcaataaatgacttaaaccaggtatggctgctgacggttatcttccagattggctcgaggacaacctttctgaaggcattcgtgagtggtgggctctgaaacctggagtccctcaacccaaagcgaaccaacaacaccaggacaaccgtcggggtcttgtgcttccgggttacaaatacctcggacccggtaacggactcgacaaaggagagccggtcaacgaggcggacgcggcagccctcgaacacgacaaagcttacgaccagcagctcaaggccggtgacaacccgtacctcaagtacaaccacgccgacgccgagtttcaggagcgtcttcaagaagatacgtcttttgggggcaaccttggcagagcagtcttccaggccaaaaagaggatccttgagcctcttggtctggttgaggaagcagctaaaacggctcctggaaagaagaggcctgtagatcagtctcctcaggaaccggactcatcatctggtgttggcaaatcgggcaaacagcctgccagaaaaagactaaatttcggtcagactggcgactcagagtcagtcccagaccctcaacctctcggagaaccaccagcagcccccacaagtttgggatctaatacaatggcttcaggcggtggcgcaccaatggcagacaataacgagggtgccgatggagtgggtaattcctcaggaaattggcattgcgattcccaatggctgggcgacagagtcatcaccaccagcaccagaacctgggccctgcccacttacaacaaccatctctacaagcaaatctccagccaatcaggagcttcaaacgacaaccactactttggctacagcaccccttgggggtattttgactttaacagattccactgccacttctcaccacgtgactggcagcgactcattaacaacaactggggattccggcccaagaaactcagcttcaagctcttcaacatccaagttaaagaggtcacgcagaacgatggcacgacgactattgccaataaccttaccagcacggttcaagtgtttacggactcggagtatcagctcccgtacgtgctcgggtcggcgcaccaaggctgtctcccgccgtttccagcggacgtcttcatggtccctcagtatggatacctcaccctgaacaacggaagtcaagcggtgggacgctcatccttttactgcctggagtacttcccttcgcagatgctaaggactggaaataacttccaattcagctataccttcgaggatgtaccttttcacagcagctacgctcacagccagagtttggatcgcttgatgaatcctcttattgatcagtatctgtactacctgaacagaacgcaaggaacaacctctggaacaaccaaccaatcacggctgctttttagccaggctgggcctcagtctatgtctttgcaggccagaaattggctacctgggccctgctaccggcaacagagactttcaaagactgctaacgacaacaacaacagtaactttccttggacagcggccagcaaatatcatctcaatggccgcgactcgctggtgaatccaggaccagctatggccagtcacaaggacgatgaagaaaaatttttccctatgcacggcaatctaatatttggcaaagaagggacaacggcaagtaacgcagaattagataatgtaatgattacggatgaagaagagattcgtaccaccaatcctgtggcaacagagcagtatggaactgtggcaaataacttgcagagctcaaatacagctcccacgactagaactgtcaatgatcagggggccttacctggcatggtgtggcaagatcgtgacgtgtaccttcaaggacctatctgggcaaagattcctcacacggatggacactttcatccttctcctctgatgggaggctttggactgaaacatccgcctcctcaaatcatgatcaaaaatactccggtaccggcaaatcctccgacgactttcagcccggccaagtttgcttcatttatcactcagtactccactggacaggtcagcgtggaaattgagtgggagctacagaaagaaaacagcaaacgttggaatccagagattcagtacacttccaactacaacaagtctgttaatgtggactttactgtagacactaatggtgtttatagtgaacctcgccctattggaacccggtatctcacacgaaacttgtaatcctggttaatcaataaaccgtttaattcgtttcagttgaactttggctcttgtgcacttcttatcttatcttgtttccatggctactgcgtagataagcagcggcctgcggcgcttgcgcttcgcggtttacaactgctggttaatatttaactctcgccatacctctagtgatggagttggccactccctctatgcgcactcgctcgctcggtggggccggacgtgcaaagcacgtccgtctggcgacctttggtcgccaggccccaccgagcgagcgagtgcgcatagagggagtggccaa

SEQ ID NO: 53 - DNA, 1800 bp, Adeno-associated virus 4
  variation 342: note = Unknown
  source 1..1800: mol_type = genomic DNA
acggctcctggaaagaagagaccgttgattgaatccccccagcagcccgactcctccacgggtatcggcaaaaaaggcaagcagccggctaaaaagaagctcgttttcgaagacgaaactggagcaggcgacggaccccctgagggatcaacttccggagccatgtctgatgacagtgagatgcgtgcagcagctggcggagctgcagtcgagggsggacaaggtgccgatggagtgggtaatgcctcgggtgattggcattgcgattccacctggtctgagggccacgtcacgaccaccagcaccagaacctgggtcttgcccacctacaacaaccacctntacaagcgactcggagagagcctgcagtccaacacctacaacggattctccaccccctggggatactttgacttcaaccgcttccactgccacttctcaccacgtgactggcagcgactcatcaacaacaactggggcatgcgacccaaagccatgcgggtcaaaatcttcaacatccaggtcaaggaggtcacgacgtcgaacggcgagacaacggtggctaataaccttaccagcacggttcagatctttgcggactcgtcgtacgaactgccgtacgtgatggatgcgggtcaagagggcagcctgcctccttttcccaacgacgtctttatggtgccccagtacggctactgtggactggtgaccggcaacacttcgcagcaacagactgacagaaatgccttctactgcctggagtactttccttcgcagatgctgcggactggcaacaactttgaaattacgtacagttttgagaaggtgcctttccactcgatgtacgcgcacagccagagcctggaccggctgatgaaccctctcatcgaccagtacctgtggggactgcaatcgaccaccaccggaaccaccctgaatgccgggactgccaccaccaactttaccaagctgcggcctaccaacttttccaactttaaaaagaactggctgcccgggccttcaatcaagcagcagggcttctcaaagactgccaatcaaaactacaagatccctgccaccgggtcagacagtctcatcaaatacgagacgcacagcactctggacggaagatggagtgccctgacccccggacctccaatggccacggctggacctgcggacagcaagttcagcaacagccagctcatctttgcggggcctaaacagaacggcaacacggccaccgtacccgggactctgatcttcacctctgaggaggagctggcagccaccaacgccaccgatacggacatgtggggcaacctacctggcggtgaccagagcaacagcaacctgccgaccgtggacagactgacagccttgggagccgtgcctggaatggtctggcaaaacagagacatttactaccagggtcccatttgggccaagattcctcataccgatggacactttcacccctcaccgctgattggtgggtttgggctgaaacacccgcctcctcaaatttttatcaagaacaccccggtacctgcgaatcctgcaacgaccttcagctctactccggtaaactccttcattactcagtacagcactggccaggtgtcggtgcagattgactgggagatccagaaggagcggtccaaacgctggaaccccgaggtccagtttacctccaactacggacagcaaaactctctgttgtgggctcccgatgcggctgggaaatacactgagcctagggctatcggtacccgctacctcacccaccacctgtaataa

SEQ ID NO: 54 - DNA, 2208 bp, Adeno-associated virus 4
  variation 750: note = Unknown
  source 1..2208: mol_type = genomic DNA
atgactgacggttaccttccagattggctagaggacaacctctctgaaggcgttcgagagtggtgggcgctgcaacctggagcccctaaacccaaggcaaatcaacaacatcaggacaacgctcggggtcttgtgcttccgggttacaaatacctcggacccggcaacggactcgacaagggggaacccgtcaacgcagcggacgcggcagccctcgagcacgacaaggcctacgaccagcagctcaaggccggtgacaacccctacctcaagtacaaccacgccgacgcggagttccagcagcggcttcagggcgacacatcgtttgggggcaacctcggcagagcagtcttccaggccaaaaagagggttcttgaacctcttggtctggttgagcaagcgggtgagacggctcctggaaagaagagaccgttgattgaatccccccagcagcccgactcctccacgggtatcggcaaaaaaggcaagcagccggctaaaaagaagctcgttttcgaagacgaaactggagcaggcgacggaccccctgagggatcaacttccggagccatgtctgatgacagtgagatgcgtgcagcagctggcggagctgcagtcgagggsggacaaggtgccgatggagtgggtaatgcctcgggtgattggcattgcgattccacctggtctgagggccacgtcacgaccaccagcaccagaacctgggtcttgcccacctacaacaaccacctntacaagcgactcggagagagcctgcagtccaacacctacaacggattctccaccccctggggatactttgacttcaaccgcttccactgccacttctcaccacgtgactggcagcgactcatcaacaacaactggggcatgcgacccaaagccatgcgggtcaaaatcttcaacatccaggtcaaggaggtcacgacgtcgaacggcgagacaacggtggctaataaccttaccagcacggttcagatctttgcggactcgtcgtacgaactgccgtacgtgatggatgcgggtcaagagggcagcctgcctccttttcccaacgacgtctttatggtgccccagtacggctactgtggactggtgaccggcaacacttcgcagcaacagactgacagaaatgccttctactgcctggagtactttccttcgcagatgctgcggactggcaacaactttgaaattacgtacagttttgagaaggtgcctttccactcgatgtacgcgcacagccagagcctggaccggctgatgaaccctctcatcgaccagtacctgtggggactgcaatcgaccaccaccggaaccaccctgaatgccgggactgccaccaccaactttaccaagctgcggcctaccaacttttccaactttaaaaagaactggctgcccgggccttcaatcaagcagcagggcttctcaaagactgccaatcaaaactacaagatccctgccaccgggtcagacagtctcatcaaatacgagacgcacagcactctggacggaagatggagtgccctgacccccggacctccaatggccacggctggacctgcggacagcaagttcagcaacagccagctcatctttgcggggcctaaacagaacggcaacacggccaccgtacccgggactctgatcttcacctctgaggaggagctggcagccaccaacgccaccgatacggacatgtggggcaacctacctggcggtgaccagagcaacagcaacctgccgaccgtggacagactgacagccttgggagccgtgcctggaatggtctggcaaaacagagacatttactaccagggtcccatttgggccaagattcctcataccgatggacactttcacccctcaccgctgattggtgggtttgggctgaaacacccgcctcctcaaatttttatcaagaacaccccggtacctgcgaatcctgcaacgaccttcagctctactccggtaaactccttcattactcagtacagcactggccaggtgtcggtgcagattgactgggagatccagaaggagcggtccaaacgctggaaccccgaggtccagtttacctccaactacggacagcaaaactctctgttgtgggctcccgatgcggctgggaaatacactgagcctagggctatcggtacccgctacctcacccaccacctgtaataa

SEQ ID NO: 55 - DNA, 1872 bp, Adeno-associated virus 4
  source 1..1872: mol_type = genomic DNA
atgccggggttctacgagatcgtgctgaaggtgcccagcgacctggacgagcacctgcccggcatttctgactcttttgtgagctgggtggccgagaaggaatgggagctgccgccggattctgacatggacttgaatctgattgagcaggcacccctgaccgtggccgaaaagctgcaacgcgagttcctggtcgagtggcgccgcgtgagtaaggccccggaggccctcttctttgtccagttcgagaagggggacagctacttccacctgcacatcctggtggagaccgtgggcgtcaaatccatggtggtgggccgctacgtgagccagattaaagagaagctggtgacccgcatctaccgcggggtcgagccgcagcttccgaactggttcgcggtgaccaagacgcgtaatggcgccggaggcgggaacaaggtggtggacgactgctacatccccaactacctgctccccaagacccagcccgagctccagtgggcgtggactaacatggaccagtatataagcgcctgtttgaatctcgcggagcgtaaacggctggtggcgcagcatctgacgcacgtgtcgcagacgcaggagcagaacaaggaaaaccagaaccccaattctgacgcgccggtcatcaggtcaaaaacctccgccaggtacatggagctggtcgggtggctggtggaccgcgggatcacgtcagaaaagcaatggatccaggaggaccaggcgtcctacatctccttcaacgccgcctccaactcgcggtcacaaatcaaggccgcgctggacaatgcctccaaaatcatgagcctgacaaagacggctccggactacctggtgggccagaacccgccggaggacatttccagcaaccgcatctaccgaatcctcgagatgaacgggtacgatccgcagtacgcggcctccgtcttcctgggctgggcgcaaaagaagttcgggaagaggaacaccatctggctctttgggccggccacgacgggtaaaaccaacatcgcggaagccatcgcccacgccgtgcccttctacggctgcgtgaactggaccaatgagaactttccgttcaacgattgcgtcgacaagatggtgatctggtgggaggagggcaagatgacggccaaggtcgtagagagcgccaaggccatcctgggcggaagcaaggtgcgcgtggaccaaaagtgcaagtcatcggcccagatcgacccaactcccgtgatcgtcacctccaacaccaacatgtgcgcggtcatcgacggaaactcgaccaccttcgagcaccaacaaccactccaggaccggatgttcaagttcgagctcaccaagcgcctggagcacgactttggcaaggtcaccaagcaggaagtcaaagactttttccggtgggcgtcagatcacgtgaccgaggtgactcacgagttttacgtcagaaagggtggagctagaaagaggcccgcccccaatgacgcagatataagtgagcccaagcgggcctgtccgtcagttgcgcagccatcgacgtcagacgcggaagctccggtggactacgcggacaggtaccaaaacaaatgttctcgtcacgtgggtatgaatctgatgctttttccctgccggcaatgcgagagaatgaatcagaatgtggacatttgcttcacgcacggggtcatggactgtgccgagtgcttccccgtgtcagaatctcaacccgtgtctgtcgtcagaaagcggacgtatcagaaactgtgtccgattcatcacatcatggggagggcgcccgaggtggcctgctcggcctgcgaactggccaatgtggacttggatgactgtgacatggaacaataa

SEQ ID NO: 56 - DNA, 1611 bp, Adeno-associated virus 4
  source 1..1611: mol_type = genomic DNA
atgccggggttctacgagatcgtgctgaaggtgcccagcgacctggacgagcacctgcccggcatttctgactcttttgtgagctgggtggccgagaaggaatgggagctgccgccggattctgacatggacttgaatctgattgagcaggcacccctgaccgtggccgaaaagctgcaacgcgagttcctggtcgagtggcgccgcgtgagtaaggccccggaggccctcttctttgtccagttcgagaagggggacagctacttccacctgcacatcctggtggagaccgtgggcgtcaaatccatggtggtgggccgctacgtgagccagattaaagagaagctggtgacccgcatctaccgcggggtcgagccgcagcttccgaactggttcgcggtgaccaagacgcgtaatggcgccggaggcgggaacaaggtggtggacgactgctacatccccaactacctgctccccaagacccagcccgagctccagtgggcgtggactaacatggaccagtatataagcgcctgtttgaatctcgcggagcgtaaacggctggtggcgcagcatctgacgcacgtgtcgcagacgcaggagcagaacaaggaaaaccagaaccccaattctgacgcgccggtcatcaggtcaaaaacctccgccaggtacatggagctggtcgggtggctggtggaccgcgggatcacgtcagaaaagcaatggatccaggaggaccaggcgtcctacatctccttcaacgccgcctccaactcgcggtcacaaatcaaggccgcgctggacaatgcctccaaaatcatgagcctgacaaagacggctccggactacctggtgggccagaacccgccggaggacatttccagcaaccgcatctaccgaatcctcgagatgaacgggtacgatccgcagtacgcggcctccgtcttcctgggctgggcgcaaaagaagttcgggaagaggaacaccatctggctctttgggccggccacgacgggtaaaaccaacatcgcggaagccatcgcccacgccgtgcccttctacggctgcgtgaactggaccaatgagaactttccgttcaacgattgcgtcgacaagatggtgatctggtgggaggagggcaagatgacggccaaggtcgtagagagcgccaaggccatcctgggcggaagcaaggtgcgcgtggaccaaaagtgcaagtcatcggcccagatcgacccaactcccgtgatcgtcacctccaacaccaacatgtgcgcggtcatcgacggaaactcgaccaccttcgagcaccaacaaccactccaggaccggatgttcaagttcgagctcaccaagcgcctggagcacgactttggcaaggtcaccaagcaggaagtcaaagactttttccggtgggcgtcagatcacgtgaccgaggtgactcacgagttttacgtcagaaagggtggagctagaaagaggcccgcccccaatgacgcagatataagtgagcccaagcgggcctgtccgtcagttgcgcagccatcgacgtcagacgcggaagctccggtggactacgcggacagattggctagaggacaacctctctga

SEQ ID NO: 57 - DNA, 1872 bp, Adeno-associated virus 4; identical to SEQ ID NO: 55
  source 1..1872: mol_type = genomic DNA

SEQ ID NO: 58 - DNA, 1617 bp, Adeno-associated virus 4
  variation 162: note = Unknown
  source 1..1617: mol_type = genomic DNA
atgcgtgcagcagctggcggagctgcagtcgagggsggacaaggtgccgatggagtgggtaatgcctcgggtgattggcattgcgattccacctggtctgagggccacgtcacgaccaccagcaccagaacctgggtcttgcccacctacaacaaccacctntacaagcgactcggagagagcctgcagtccaacacctacaacggattctccaccccctggggatactttgacttcaaccgcttccactgccacttctcaccacgtgactggcagcgactcatcaacaacaactggggcatgcgacccaaagccatgcgggtcaaaatcttcaacatccaggtcaaggaggtcacgacgtcgaacggcgagacaacggtggctaataaccttaccagcacggttcagatctttgcggactcgtcgtacgaactgccgtacgtgatggatgcgggtcaagagggcagcctgcctccttttcccaacgacgtctttatggtgccccagtacggctactgtggactggtgaccggcaacacttcgcagcaacagactgacagaaatgccttctactgcctggagtactttccttcgcagatgctgcggactggcaacaactttgaaattacgtacagttttgagaaggtgcctttccactcgatgtacgcgcacagccagagcctggaccggctgatgaaccctctcatcgaccagtacctgtggggactgcaatcgaccaccaccggaaccaccctgaatgccgggactgccaccaccaactttaccaagctgcggcctaccaacttttccaactttaaaaagaactggctgcccgggccttcaatcaagcagcagggcttctcaaagactgccaatcaaaactacaagatccctgccaccgggtcagacagtctcatcaaatacgagacgcacagcactctggacggaagatggagtgccctgacccccggacctccaatggccacggctggacctgcggacagcaagttcagcaacagccagctcatctttgcggggcctaaacagaacggcaacacggccaccgtacccgggactctgatcttcacctctgaggaggagctggcagccaccaacgccaccgatacggacatgtggggcaacctacctggcggtgaccagagcaacagcaacctgccgaccgtggacagactgacagccttgggagccgtgcctggaatggtctggcaaaacagagacatttactaccagggtcccatttgggccaagattcctcataccgatggacactttcacccctcaccgctgattggtgggtttgggctgaaacacccgcctcctcaaatttttatcaagaacaccccggtacctgcgaatcctgcaacgaccttcagctctactccggtaaactccttcattactcagtacagcactggccaggtgtcggtgcagattgactgggagatccagaaggagcggtccaaacgctggaaccccgaggtccagtttacctccaactacggacagcaaaactctctgttgtgggctcccgatgcggctgggaaatacactgagcctagggctatcggtacccgctacctcacccaccacctgtaa

SEQ ID NO: 59 - DNA, 939 bp, Adeno-associated virus 4
  source 1..939: mol_type = genomic DNA
atggagctggtcgggtggctggtggaccgcgggatcacgtcagaaaagcaatggatccaggaggaccaggcgtcctacatctccttcaacgccgcctccaactcgcggtcacaaatcaaggccgcgctggacaatgcctccaaaatcatgagcctgacaaagacggctccggactacctggtgggccagaacccgccggaggacatttccagcaaccgcatctaccgaatcctcgagatgaacgggtacgatccgcagtacgcggcctccgtcttcctgggctgggcgcaaaagaagttcgggaagaggaacaccatctggctctttgggccggccacgacgggtaaaaccaacatcgcggaagccatcgcccacgccgtgcccttctacggctgcgtgaactggaccaatgagaactttccgttcaacgattgcgtcgacaagatggtgatctggtgggaggagggcaagatgacggccaaggtcgtagagagcgccaaggccatcctgggcggaagcaaggtgcgcgtggaccaaaagtgcaagtcatcggcccagatcgacccaactcccgtgatcgtcacctccaacaccaacatgtgcgcggtcatcgacggaaactcgaccaccttcgagcaccaacaaccactccaggaccggatgttcaagttcgagctcaccaagcgcctggagcacgactttggcaaggtcaccaagcaggaagtcaaagactttttccggtgggcgtcagatcacgtgaccgaggtgactcacgagttttacgtcagaaagggtggagctagaaagaggcccgcccccaatgacgcagatataagtgagcccaagcgggcctgtccgtcagttgcgcagccatcgacgtcagacgcggaagctccggtggactacgcggacagattggctagaggacaacctctctga

SEQ ID NO: 60 - DNA, 1197 bp, Adeno-associated virus 4
  source 1..1197: mol_type = genomic DNA
atggagctggtcgggtggctggtggaccgcgggatcacgtcagaaaagcaatggatccaggaggaccaggcgtcctacatctccttcaacgccgcctccaactcgcggtcacaaatcaaggccgcgctggacaatgcctccaaaatcatgagcctgacaaagacggctccggactacctggtgggccagaacccgccggaggacatttccagcaaccgcatctaccgaatcctcgagatgaacgggtacgatccgcagtacgcggcctccgtcttcctgggctgggcgcaaaagaagttcgggaagaggaacaccatctggctctttgggccggccacgacgggtaaaaccaacatcgcggaagccatcgcccacgccgtgcccttctacggctgcgtgaactggaccaatgagaactttccgttcaacgattgcgtcgacaagatggtgatctggtgggaggagggcaagatgacggccaaggtcgtagagagcgccaaggccatcctgggcggaagcaaggtgcgcgtggaccaaaagtgcaagtcatcggcccagatcgacccaactcccgtgatcgtcacctccaacaccaacatgtgcgcggtcatcgacggaaactcgaccaccttcgagcaccaacaaccactccaggaccggatgttcaagttcgagctcaccaagcgcctggagcacgactttggcaaggtcaccaagcaggaagtcaaagactttttccggtgggcgtcagatcacgtgaccgaggtgactcacgagttttacgtcagaaagggtggagctagaaagaggcccgcccccaatgacgcagatataagtgagcccaagcgggcctgtccgtcagttgcgcagccatcgacgtcagacgcggaagctccggtggactacgcggacaggtaccaaaacaaatgttctcgtcacgtgggtatgaatctgatgctttttccctgccggcaatgcgagagaatgaatcagaatgtggacatttgcttcacgcacggggtcatggactgtgccgagtgcttccccgtgtcagaatctcaacccgtgtctgtcgtcagaaagcggacgtatcagaaactgtgtccgattcatcacatcatggggagggcgcccgaggtggcctgctcggcctgcgaactggccaatgtggacttggatgactgtgacatggaacaa

SEQ ID NO: 61 - DNA, 245 bp, Adeno-associated virus 4
  source 1..245: mol_type = genomic DNA
ctccatcatctaggtttgcccactgacgtcaatgtgacgtcctagggttagggaggtccctgtattagcagtcacgtgagtgtcgtatttcgcggagcgtagcggagcgcataccaagctgccacgtcacagccacgtggtccgtttgcgacagtttgcgacaccatgtggtcaggagggtatataaccgcgagtgagccagcgaggagctccattttgcccgcgaattttgaacgagcagcagc

SEQ ID NO: 62 - protein, 313 aa, Adeno-associated virus 4
  VARIANT 313: note = Unknown
MELVGWLVDRGITSEKQWIQEDQASYISFNAASNSRSQIKAALDNASKIMSLTKTAPDYLVGQNPPEDISSNRIYRILEMNGYDPQYAASVFLGWAQKKFGKRNTIWLFGPATTGKTNIAEAIAHAVPFYGCVNWTNENFPFNDCVDKMVIWWEEGKMTAKVVESAKAILGGSKVRVDQKCKSSAQIDPTPVIVTSNTNMCAVIDGNSTTFEHQQPLQDRMFKFELTKRLEHDFGKVTKQEVKDFFRWASDHVTEVTHEFYVRKGGARKRPAPNDADISEPKRACPSVAQPSTSDAEAPVDYADRLARGQPLX

SEQ ID NO: 63 - protein, 399 aa, Adeno-associated virus 4
MELVGWLVDRGITSEKQWIQEDQASYISFNAASNSRSQIKAALDNASKIMSLTKTAPDYLVGQNPPEDISSNRIYRILEMNGYDPQYAASVFLGWAQKKFGKRNTIWLFGPATTGKTNIAEAIAHAVPFYGCVNWTNENFPFNDCVDKMVIWWEEGKMTAKVVESAKAILGGSKVRVDQKCKSSAQIDPTPVIVTSNTNMCAVIDGNSTTFEHQQPLQDRMFKFELTKRLEHDFGKVTKQEVKDFFRWASDHVTEVTHEFYVRKGGARKRPAPNDADISEPKRACPSVAQPSTSDAEAPVDYADRYQNKCSRHVGMNLMLFPCRQCERMNQNVDICFTHGVMDCAECFPVSESQPVSVVRKRTYQKLCPIHHIMGRAPEVACSACELANVDLDDCDMEQ

SEQ ID NO: 64 - protein, 623 aa, Adeno-associated virus 4
MPGFYEIVLKVPSDLDEHLPGISDSFVSWVAEKEWELPPDSDMDLNLIEQAPLTVAEKLQREFLVEWRRVSKAPEALFFVQFEKGDSYFHLHILVETVGVKSMVVGRYVSQIKEKLVTRIYRGVEPQLPNWFAVTKTRNGAGGGNKVVDDCYIPNYLLPKTQPELQWAWTNMDQYISACLNLAERKRLVAQHLTHVSQTQEQNKENQNPNSDAPVIRSKTSARYMELVGWLVDRGITSEKQWIQEDQASYISFNAASNSRSQIKAALDNASKIMSLTKTAPDYLVGQNPPEDISSNRIYRILEMNGYDPQYAASVFLGWAQKKFGKRNTIWLFGPATTGKTNIAEAIAHAVPFYGCVNWTNENFPFNDCVDKMVIWWEEGKMTAKVVESAKAILGGSKVRVDQKCKSSAQIDPTPVIVTSNTNMCAVIDGNSTTFEHQQPLQDRMFKFELTKRLEHDFGKVTKQEVKDFFRWASDHVTEVTHEFYVRKGGARKRPAPNDADISEPKRACPSVAQPSTSDAEAPVDYADRYQNKCSRHVGMNLMLFPCRQCERMNQNVDICFTHGVMDCAECFPVSESQPVSVVRKRTYQKLCPIHHIMGRAPEVACSACELANVDLDDCDMEQ

SEQ ID NO: 65 - protein, 537 aa, Adeno-associated virus 4
  VARIANT 537: note = Unknown
MPGFYEIVLKVPSDLDEHLPGISDSFVSWVAEKEWELPPDSDMDLNLIEQAPLTVAEKLQREFLVEWRRVSKAPEALFFVQFEKGDSYFHLHILVETVGVKSMVVGRYVSQIKEKLVTRIYRGVEPQLPNWFAVTKTRNGAGGGNKVVDDCYIPNYLLPKTQPELQWAWTNMDQYISACLNLAERKRLVAQHLTHVSQTQEQNKENQNPNSDAPVIRSKTSARYMELVGWLVDRGITSEKQWIQEDQASYISFNAASNSRSQIKAALDNASKIMSLTKTAPDYLVGQNPPEDISSNRIYRILEMNGYDPQYAASVFLGWAQKKFGKRNTIWLFGPATTGKTNIAEAIAHAVPFYGCVNWTNENFPFNDCVDKMVIWWEEGKMTAKVVESAKAILGGSKVRVDQKCKSSAQIDPTPVIVTSNTNMCAVIDGNSTTFEHQQPLQDRMFKFELTKRLEHDFGKVTKQEVKDFFRWASDHVTEVTHEFYVRKGGARKRPAPNDADISEPKRACPSVAQPSTSDAEAPVDYADRLARGQPLX

SEQ ID NO: 66 - protein, 623 aa, Adeno-associated virus 4; identical to SEQ ID NO: 64

SEQ ID NO: 67 - protein, 544 aa, Adeno-associated virus 4
MSDDSEMRAAAGGAAVEGGQGADGVGNASGDWHCDSTWSEGHVTTTSTRTWVLPTYNNHLYKRLGESLQSNTYNGFSTPWGYFDFNRFHCHFSPRDWQRLINNNWGMRPKAMRVKIFNIQVKEVTTSNGETTVANNLTSTVQIFADSSYELPYVMDAGQEGSLPPFPNDVFMVPQYGYCGLVTGNTSQQQTDRNAFYCLEYFPSQMLRTGNNFEITYSFEKVPFHSMYAHSQSLDRLMNPLIDQYLWGLQSTTTGTTLNAGTATTNFTKLRPTNFSNFKKNWLPGPSIKQQGFSKTANQNYKIPATGSDSLIKYETHSTLDGRWSALTPGPPMATAGPADSKFSNSQLIFAGPKQNGNTATVPGTLIFTSEEELAATNATDTDMWGNLPGGDQSNSNLPTVDRLTALGAVPGMVWQNRDIYYQGPIWAKIPHTDGHFHPSPLIGGFGLKHPPPQIFIKNTPVPANPATTFSSTPVNSFITQYSTGQVSVQIDWEIQKERSKRWNPEVQFTSNYGQQNSLLWAPDAAGKYTEPRAIGTRYLTHHL

SEQ ID NO: 68 - protein, 734 aa, Adeno-associated virus 4
MTDGYLPDWLEDNLSEGVREWWALQPGAPKPKANQQHQDNARGLVLPGYKYLGPGNGLDKGEPVNAADAAALEHDKAYDQQLKAGDNPYLKYNHADAEFQQRLQGDTSFGGNLGRAVFQAKKRVLEPLGLVEQAGETAPGKKRPLIESPQQPDSSTGIGKKGKQPAKKKLVFEDETGAGDGPPEGSTSGAMSDDSEMRAAAGGAAVEGGQGADGVGNASGDWHCDSTWSEGHVTTTSTRTWVLPTYNNHLYKRLGESLQSNTYNGFSTPWGYFDFNRFHCHFSPRDWQRLINNNWGMRPKAMRVKIFNIQVKEVTTSNGETTVANNLTSTVQIFADSSYELPYVMDAGQEGSLPPFPNDVFMVPQYGYCGLVTGNTSQQQTDRNAFYCLEYFPSQMLRTGNNFEITYSFEKVPFHSMYAHSQSLDRLMNPLIDQYLWGLQSTTTGTTLNAGTATTNFTKLRPTNFSNFKKNWLPGPSIKQQGFSKTANQNYKIPATGSDSLIKYETHSTLDGRWSALTPGPPMATAGPADSKFSNSQLIFAGPKQNGNTATVPGTLIFTSEEELAATNATDTDMWGNLPGGDQSNSNLPTVDRLTALGAVPGMVWQNRDIYYQGPIWAKIPHTDGHFHPSPLIGGFGLKHPPPQIFIKNTPVPANPATTFSSTPVNSFITQYSTGQVSVQIDWEIQKERSKRWNPEVQFTSNYGQQNSLLWAPDAAGKYTEPRAIGTRYLTHHL

SEQ ID NO: 69 - protein, 598 aa, Adeno-associated virus 4
TAPGKKRPLIESPQQPDSSTGIGKKGKQPAKKKLVFEDETGAGDGPPEGSTSGAMSDDSEMRAAAGGAAVEGGQGADGVGNASGDWHCDSTWSEGHVTTTSTRTWVLPTYNNHLYKRLGESLQSNTYNGFSTPWGYFDFNRFHCHFSPRDWQRLINNNWGMRPKAMRVKIFNIQVKEVTTSNGETTVANNLTSTVQIFADSSYELPYVMDAGQEGSLPPFPNDVFMVPQYGYCGLVTGNTSQQQTDRNAFYCLEYFPSQMLRTGNNFEITYSFEKVPFHSMYAHSQSLDRLMNPLIDQYLWGLQSTTTGTTLNAGTATTNFTKLRPTNFSNFKKNWLPGPSIKQQGFSKTANQNYKIPATGSDSLIKYETHSTLDGRWSALTPGPPMATAGPADSKFSNSQLIFAGPKQNGNTATVPGTLIFTSEEELAATNATDTDMWGNLPGGDQSNSNLPTVDRLTALGAVPGMVWQNRDIYYQGPIWAKIPHTDGHFHPSPLIGGFGLKHPPPQIFIKNTPVPANPATTFSSTPVNSFITQYSTGQVSVQIDWEIQKERSKRWNPEVQFTSNYGQQNSLLWAPDAAGKYTEPRAIGTRYLTHHL

SEQ ID NO: 70 - DNA, 129 bp, Adeno-associated virus 4
  source 1..129: mol_type = genomic DNA
ttggccactccctctatgcgcgctcgctcactcactcggccctgcggccagaggccggcagtctggagacctttggtgtccagggcagggccgagtgagtgagcgagcgcgcatagagggagtggccaa

SEQ ID NO: 71 - DNA, 125 bp, Adeno-associated virus 4
  source 1..125: mol_type = genomic DNA
ttggccactccctctatgcgcgctcgctcactcactcggccctggagaccaaaggtctccagactgccggcctctggccggcagggccgagtgagtgagcgagcgcgcatagagggagtggccaa

SEQ ID NO: 72 - DNA, 4768 bp, Adeno-associated virus 4
  variation 3009: note = Unknown
  source 1..4768: mol_type = genomic DNA
ttggccactccctctatgcgcgctcgctcactcactcggccctggagaccaaaggtctccagactgccggcctctggccggcagggccgagtgagtgagcgagcgcgcatagagggagtggccaactccatcatctaggtttgcccactgacgtcaatgtgacgtcctagggttagggaggtccctgtattagcagtcacgtgagtgtcgtatttcgcggagcgtagcggagcgcataccaagctgccacgtcacagccacgtggtccgtttgcgacagtttgcgacaccatgtggtcaggagggtatataaccgcgagtgagccagcgaggagctccattttgcccgcgaattttgaacgagcagcagccatgccggggttctacgagatcgtgctgaaggtgcccagcgacctggacgagcacctgcccggcatttctgactcttttgtgagctgggtggccgagaaggaatgggagctgccgccggattctgacatggacttgaatctgattgagcaggcacccctgaccgtggccgaaaagctgcaacgcgagttcctggtcgagtggcgccgcgtgagtaaggccccggaggccctcttctttgtccagttcgagaagggggacagctacttccacctgcacatcctggtggagaccgtgggcgtcaaatccatggtggtgggccgctacgtgagccagattaaagagaagctggtgacccgcatctaccgcggggtcgagccgcagcttccgaactggttcgcggtgaccaagacgcgtaatggcgccggaggcgggaacaaggtggtggacgactgctacatccccaactacctgctccccaagacccagcccgagctccagtgggcgtggactaacatggaccagtatataagcgcctgtttgaatctcgcggagcgtaaacggctggtggcgcagcatctgacgcacgtgtcgcagacgcaggagcagaacaaggaaaaccagaaccccaattctgacgcgccggtcatcaggtcaaaaacctccgccaggtacatggagctggtcgggtggctggtggaccgcgggatcacgtcagaaaagcaatggatccaggaggaccaggcgtcctacatctccttcaacgccgcctccaactcgcggtcacaaatcaaggccgcgctggacaatgcctccaaaatcatgagcctgacaaagacggctccggactacctggtgggccagaacccgccggaggacatttccagcaaccgcatctaccgaatcctcgagatgaacgggtacgatccgcagtacgcggcctccgtcttcctgggctgggcgcaaaagaagttcgggaagaggaacaccatctggctctttgggccggccacgacgggtaaaaccaacatcgcggaagccatcgcccacgccgtgcccttctacggctgcgtgaactggaccaatgagaactttccgttcaacgattgcgtcgacaagatggtgatctggtgggaggagggcaagatgacggccaaggtcgtagagagcgccaaggccatcctgggcggaagcaaggtgcgcgtggaccaaaagtgcaagtcatcggcccagatcgacccaactcccgtgatcgtcacctccaacaccaacatgtgcgcggtcatcgacggaaactcgaccaccttcgagcaccaacaaccactccaggaccggatgttcaagttcgagctcaccaagcgcctggagcacgactttggcaaggtcaccaagcaggaagtcaaagactttttccggtgggcgtcagatcacgtgaccgaggtgactcacgagttttacgtcagaaagggtggagctagaaagaggcccgcccccaatgacgcagatataagtgagcccaagcgggcctgtccgtcagttgcgcagccatcgacgtcagacgcggaagctccggtggactacgcggacaggtaccaaaacaaatgttctcgtcacgtgggtatgaatctgatgctttttccctgccggcaatgcgagagaatgaatcagaatgtggacatttgcttcacgcacggggtcatggactgtgccgagtgcttccccgtgtcagaatctcaacccgtgtctgtcgtcagaaagcggacgtatcagaaactgtgtccgattcatcacatcatggggagggcgcccgaggtggcctgctcggcctgcgaactggccaatgtggacttggatgactgtgacatggaacaataaatgactcaaaccagatatgactgacggttaccttccagattggctagaggacaacctctctgaaggcgttcgagagtggtgggcgctgcaacctggagcccctaaacccaaggcaaatcaacaacatcaggacaacgctcggggtcttgtgcttccgggttacaaatacctcggacccggcaacggactcgacaagggggaacccgtcaacgcagcggacgcggcagccctcgagcacgacaaggcctacgaccagcagctcaaggccggtgacaacccctacctcaagtacaaccacgccgacgcggagttccagcagcggcttcagggcgacacaccgtttgggggcaacctcggcagagcagtcttccaggccaaaaagagggttcttgaacctcttggtctggttgagcaagcgggtgagacggctcctggaaagaagagaccgttgattgaatccccccagcagcccgactcctccacgggtatcggcaaaaaaggcaagcagccggctaaaaagaagctcgttttcgaagacgaaactggagcaggcgacggaccccctgagggatcaacttccggagccatgtctgatgacagtgagatgcgtgcagcagctggcggagctgcagtcgagggsggacaaggtgccgatggagtgggtaatgcctcgggtgattggcattgcgattccacctggtctgagggccacgtcacgaccaccagcaccagaacctgggtcttgcccacctacaacaaccacctntacaagcgactcggagagagcctgcagtccaacacctacaacggattctccaccccctggggatactttgacttcaaccgcttccactgccacttctcaccacgtgactggcagcgactcatcaacaacaactggggcatgcgacccaaagccatgcgggtcaaaatcttcaacatccaggtcaaggaggtcacgacgtcgaacggcgagacaacggtggctaataaccttaccagcacggttcagatctttgcggactcgtcgtacgaactgccgtacgtgatggatgcgggtcaagagggcagcctgcctccttttcccaacgacgtctttatggtgccccagtacggctactgtggactggtgaccggcaacacttcgcagcaacagactgacagaaatgccttctactgcctggagtactttccttcgcagatgctgcggactggcaacaactttgaaattacgtacagttttgagaaggtgcctttccactcgatgtacgcgcacagccagagcctggaccggctgatgaaccctctcatcgaccagtacctgtggggactgcaatcgaccaccaccggaaccaccctgaatgccgggactgccaccaccaactttaccaagctgcggcctaccaacttttccaactttaaaaagaactggctgcccgggccttcaatcaagcagcagggcttctcaaagactgccaatcaaaactacaagatccctgccaccgggtcagacagtctcatcaaatacgagacgcacagcactctggacggaagatggagtgccctgacccccggacctccaatggccacggctggacctgcggacagcaagttcagcaacagccagctcatctttgcggggcctaaacagaacggcaacacggccaccgtacccgggactctgatcttcacctctgaggaggagctggcagccaccaacgccaccgatacggacatgtggggcaacctacctggcggtgaccagagcaacagcaacctgccgaccgtggacagactgacagccttgggagccgtgcctggaatggtctggcaaaacagagacatttactaccagggtcccatttgggccaagattcctcataccgatggacactttcacccctcaccgctgattggtgggtttgggctgaaacacccgcctcctcaaatttttatcaagaacaccccggtacctgcgaatcctgcaacgaccttcagctctactccggtaaactccttcattactcagtacagcactggccaggtgtcggtgcagattgactgggagatccagaaggagcggtccaaacgctggaaccccgaggtccagtttacctccaactacggacagcaaaactctctgttgtgggctcccgatgcggctgggaaatacactgagcctagggctatcggtacccgctacctcacccaccacctgtaataacctgttaatcaataaaccggtttattcgtttcagttgaactttggtctccgtgtccttcttatcttatctcgtttccatggctactgcgtacataagcagcggcctgcggcgcttgcgcttcgcggtttacaactgccggttaatcagtaacttctggcaaaccatgatgatggagttggccactccctctatgcgcgctcgctcactcactcggccctggagaccaaaggtctccagactgccggcctctggccggcagggccgagtgagtgagcgagcgcgcatagagggagtggccaa

SEQ ID NO: 73 - DNA, 3098 bp, synthetic construct
  misc_feature 1..3098: note = source = /note="Description of Artificial Sequence: Synthetic polynucleotide"
  source 1..3098: mol_type = other DNA
gaattcgccctttctacggctgcgtcaactggaccaatgagaactttcccttcaacgattgcgtcgacaagatggtgatctggtgggaggagggcaagatgacggccaaggtcgtggagtccgccaaggccattctcggcggcagcaaggtgcgcgtggaccaaaagtgcaagtcttccgcccagatcgatcccacccccgtgatcgtcacttccaacaccaacatgtgcgctgtgattgacgggaacagcaccaccttcgagcaccagcagccgttacaagaccggatgttcaaatttgaactcacccgccgtctggagcacgactttggcaaggtgacaaagcaggaagtcaaagagttcttccgctgggcgcaggatcacgtgaccgaggtggcgcatgagttctacgtcagaaagggtggagccaacaagagacccgcccccgatgacgcggataaaagcgagcccaagcgggcctgcccctcagtcgcggatccatcgacgtcagacgcggaaggagctccggtggactttgccgacaggtaccaaaacaaatgttctcgtcacgcgggcatgcttcagatgctgtttccctgcaagacatgcgagagaatgaatcagaatttcaacatttgcttcacgcacgggaccagagactgttcagaatgtttccccggcgtgtcagaatctcaaccggtcgtcagaaagaggacgtatcggaaactctgtgccattcatcatctgctggggcgggctcccgagattgcttgctcggcctgcgatctggtcaacgtggacctggatgaccgtgtttctgagcaataaatgacttaaaccaggtatggctgccgatggttatcttccagattggctcgaggacaacctctctgagggcattcgcgagtggtgggacttgaaacctggagccccgaaacccaaagccaaccagcaaaagcaggacgacggccggggtctggtgcttcctggctacaagtacctcggacccttcaacggactcgacaagggagagccggtcaacgaggcagacgccgcggccctcgagcacgacaaggcctacgacaagcagctcgagcagggggacaacccgtacctcaagtacaaccacgccgacgccgagtttcaggagcgtcttcaagaagatacgtcttttgggggcaacctcgggcgagcagtcttccaggccaagaagcgggttctcgaacctctcggtctggttgaggaaggcgctaagacggctcctggaaagaagagacccatagaatcccccgactcctccacgggcatcggcaagaaaggccagcagcccgctaaaaagaagctcaactttgggcagactggcgactcagagtcagtgcccgacccccaacctctcggagaacctcccgccgcgccctcaggtctgggatctggtacaatggctgcaggcggtggcgcaccaatggcagacaataacgaaggcgccgacggagtgggtaatgcctccggaaattggcattgcgattccacatggctgggcgacagagtcatcaccaccagcacccgcacctgggccctgcccacctacaacaaccacctctacaagcagatatcaagtcagagcggggctaccaacgacaaccacttcttcggctacagcaccccctggggctattttgacttcaacagattccactgccacttctcaccacgtgactggcagcgactcatcaacaacaactggggattccggcccagaaagctgcggttcaagttgttcaacatccaggtcaaggaggtcacgacgaacgacggcgttacgaccatcgctaataaccttaccagcacgattcaggtcttctcggactcggagtaccaactgccgtacgtcctcggctctgcgcaccagggctgcctccctccgttccctgcggacgtgttcatgattcctcagtacggatatctgactctaaacaacggcagtcagtctgtgggacgttcctccttctactgcctggagtactttccttctcagatgctgagaacgggcaataactttgaattcagctacacctttgaggaagtgcctttccacagcagctatgcgcacagccagagcctggaccggctgatgaatcccctcatcgaccagtacctgtactacctggcccggacccagagcactacggggtccacaagggagctgcagttccatcaggctgggcccaacaccatggccgagcaatcaaagaactggctgcccggaccctgttatcggcagcagagactgtcaaaaaacatagacagcaacaacaacagtaactttgcctggaccggggccactaaataccatctgaatggtagaaattcattaaccaacccgggcgtagccatggccaccaacaaggacgacgaggaccagttctttcccatcaacggagtgctggtttttggcgaaacgggggctgccaacaagacaacgctggaaaacgtgctaatgaccagcgaggaggagatcaaaaccaccaatcccgtggctacagaagaatacggtgtggtctccagcaacctgcaatcgtctacggccggaccccagacacagactgtcaacagccagggggctctgcccggcatggtctggcagaaccgggacgtgtacctgcagggtcccatctgggccaaaattcctcacacggacggcaactttcacccgtctcccctgatgggcggatttggactcaaacacccgcctcctcaaattctcatcaaaaacaccccggtacctgctaatcctccagaggtgtttactcctgccaagtttgcctcatttatcacgcagtacagcaccggccaggtcagcgtggagatcgagtgggaactgcagaaagaaaacagcaaacgctggaatccagagattcagtacacctcaaattatgccaagtctaataatgtggaatttgctgtcaacaacgaaggggtttatactgagcctcgccccattggcacccgttacctcacccgtaacctgtaattgcctgttaatcaataaaccggttaattcgtttcagttgaactttggtctctgcgaagggcgaattc

SEQ ID NO: 74 - protein, 728 aa, synthetic construct
  REGION 1..728: note = source = /note="Description of Artificial Sequence: Synthetic polypeptide"
MAADGYLPDWLEDNLSEGIREWWDLKPGAPKPKANQQKQDDGRGLVLPGYKYLGPFNGLDKGEPVNEADAAALEHDKAYDKQLEQGDNPYLKYNHADAEFQERLQEDTSFGGNLGRAVFQAKKRVLEPLGLVEEGAKTAPGKKRPIESPDSSTGIGKKGQQPAKKKLNFGQTGDSESVPDPQPLGEPPAAPSGLGSGTMAAGGGAPMADNNEGADGVGNASGNWHCDSTWLGDRVITTSTRTWALPTYNNHLYKQISSQSGATNDNHFFGYSTPWGYFDFNRFHCHFSPRDWQRLINNNWGFRPRKLRFKLFNIQVKEVTTNDGVTTIANNLTSTIQVFSDSEYQLPYVLGSAHQGCLPPFPADVFMIPQYGYLTLNNGSQSVGRSSFYCLEYFPSQMLRTGNNFEFSYTFEEVPFHSSYAHSQSLDRLMNPLIDQYLYYLARTQSTTGSTRELQFHQAGPNTMAEQSKNWLPGPCYRQQRLSKNIDSNNNSNFAWTGATKYHLNGRNSLTNPGVAMATNKDDEDQFFPINGVLVFGETGAANKTTLENVLMTSEEEIKTTNPVATEEYGVVSSNLQSSTAGPQTQTVNSQGALPGMVWQNRDVYLQGPIWAKIPHTDGNFHPSPLMGGFGLKHPPPQILIKNTPVPANPPEVFTPAKFASFITQYSTGQVSVEIEWELQKENSKRWNPEIQYTSNYAKSNNVEFAVNNEGVYTEPRPIGTRYLTRNL

SEQ ID NO: 75 - DNA, 2495 bp, synthetic construct
  misc_feature 1..2495: note = source = /note="Description of Artificial Sequence: Synthetic polynucleotide"
  source 1..2495: mol_type = other DNA
gaattcgccctttctacggctgcgtcaactagaccaatgagaactttcccttcaacgattgcgtcgacaagatggtgatctggtgggaggagggcaagatgacggccaaggtcgtggagtccgccaaggccattcatcatctgctggggcgggctcccgagattgcttgctcggcctgcgatctggtcaacgtggacctggatgactgtgtttctgagcaataaatgacttaaaccaggtatggctgccgatggttatcttccagattggctcgaggacaacctctctgagggcattcgcgagtggtgggacttgaaacctggagccccgaaacccaaagccaaccagcaaaagcaggacgacggccggggtctggtgcttcctggctacaagtacctcggacccttcaacggactcgacaagggagagccggtcaacgaggcagacgccgcggccctcgagcacgacaaggcctacgacaagcagctcgagcagggggacaacccgtacctcaagtacaaccacgccgacgccgagtttcaggagcgtcttcaagaagatacgtcttttgggggcaacctcgggcgagcagtcttccaggccaagaagcgggttctcgaacctctcggtctggttgaggaaggcgctaagacggctcctggaaagaagagacccatagaatcccccgactcctccacgggcatcggcaagaaaggccagcagcccgctaaaaagaagctcaactttgggcagactggcgactcagagtcagtgcccgaccctcaaccaatcggagaaccccccgcaggcccctctggtctgggatctggtacaatggctgcaggcggtggcgctccaatggcagacaataacgaaggcgccgacggagtgggtaatgcctccggaaattggcattgcgattccacatggctgggcgacagagtcatcaccaccagcacccgcacctgggccctgcccacctacaacaaccacctctacaagcagatatcaagtcagagcggggctaccaacgacaaccacttcttcggctacagcaccccctggggctattttgacttcaacagattccactgccacttctcaccacgtgactggcagcgactcatcaacaacaactggggattccggcccagaaagctgcggttcaagttgttcaacatccaggtcaaggaggtcacgacgaacgacggcgttacgaccatcgctaataaccttaccagcacgattcaggtcttctcggactcggagtaccaactgccgtacgtcctcggctctgcgcaccagggctgcctccctccgttccctgcggacgtgttcatgattcctcagtacggatatctgactctaaacaacggcagtcagtctgtgggacgttcctccttctactgcctggagtactttccttctcagatgctgagaacgggcaataactttgaattcagctacacctttgaggaagtgcctttccacagcagctatgcgcacagccagagcctggaccggctgatgaatcccctcatcgaccagtacctgtactacctggcccggacccagagcactacggggtccacaagggagctgcagttccatcaggctgggcccaacaccatggccgagcaatcaaagaactggctgcccggaccctgttatcggcagcagagactgtcaaaaaacatagacagcaacaacaccagtaactttgcctggaccggggccactaaataccatctgaatggtagaaattcattaaccaacccgggcgtagccatggccaccaacaaggacgacgaggaccagttctttcccatcaacggagtgctggtttttggcaaaacgggggctgccaacaagacaacgctggaaaacgtgctaatgaccagcgaggaggagatcaaaaccaccaatcccgtggctacagaacagtacggtgtggtctccagcaacctgcaatcgtctacggccggaccccagacacagactgtcaacagccagggggctctgcccggcatggtctggcagaaccgggacgtgtacctgcagggtcccatctgggccaaaattcctcacacggacggcaactttcacccgtctcccctgatgggcggatttggactcaaacacccgcctcctcaaattctcatcaaaaacaccccggtacctgctaatcctccagaggtgtttactcctgccaagtttgcctcatttatcacgcagtacagcaccggccaggtcagcgtggagatcgagtgggaactgcagaaagaaaacagcaaacgctggaatccagagattcagtacacctcaaattatgccaagtctaataatgtggaatttgctgtcaacaacgaaggggtttatactgagcctcgccccattggcacccgttacctcacccgtaacctgtaattgcctgttaatcaataaaccggttaattcgtttcagttgaactttggtctctgcgaagggcgaattc

SEQ ID NO: 76 - protein, 728 aa, synthetic construct
  REGION 1..728: note = source = /note="Description of Artificial Sequence: Synthetic polypeptide"
MAADGYLPDWLEDNLSEGIREWWDLKPGAPKPKANQQKQDDGRGLVLPGYKYLGPFNGLDKGEPVNEADAAALEHDKAYDKQLEQGDNPYLKYNHADAEFQERLQEDTSFGGNLGRAVFQAKKRVLEPLGLVEEGAKTAPGKKRPIESPDSSTGIGKKGQQPAKKKLNFGQTGDSESVPDPQPIGEPPAGPSGLGSGTMAAGGGAPMADNNEGADGVGNASGNWHCDSTWLGDRVITTSTRTWALPTYNNHLYKQISSQSGATNDNHFFGYSTPWGYFDFNRFHCHFSPRDWQRLINNNWGFRPRKLRFKLFNIQVKEVTTNDGVTTIANNLTSTIQVFSDSEYQLPYVLGSAHQGCLPPFPADVFMIPQYGYLTLNNGSQSVGRSSFYCLEYFPSQMLRTGNNFEFSYTFEEVPFHSSYAHSQSLDRLMNPLIDQYLYYLARTQSTTGSTRELQFHQAGPNTMAEQSKNWLPGPCYRQQRLSKNIDSNNTSNFAWTGATKYHLNGRNSLTNPGVAMATNKDDEDQFFPINGVLVFGKTGAANKTTLENVLMTSEEEIKTTNPVATEQYGVVSSNLQSSTAGPQTQTVNSQGALPGMVWQNRDVYLQGPIWAKIPHTDGNFHPSPLMGGFGLKHPPPQILIKNTPVPANPPEVFTPAKFASFITQYSTGQVSVEIEWELQKENSKRWNPEIQYTSNYAKSNNVEFAVNNEGVYTEPRPIGTRYLTRNL

SEQ ID NO: 77 - DNA, 2504 bp, synthetic construct
  misc_feature 1..2504: note = source = /note="Description of Artificial Sequence: Synthetic polynucleotide"
  source 1..2504: mol_type = other DNA
gaattcgccctttctacggctgcgtcaactggaccaatgagaactttcccttcaacgattgcgtcgacaagatggtgatctggtgggaggagggcaagatgacggccaaggtcgtggagtccgccaaggccattcatcatctgctggggcgggctcccgagattgcttgctcggcctgcgatctggtcaacgtggacctggatgactgtgtttctgagcaataaatgacttaaaccaggtatggctgccgatggttatcttccagattggctcgaggacaacctctctgagggcattcgcgagtggtgggacttgaaacctggagccccgaaacccaaagccaaccagcaaaagcaggacgacggccggggtctggtgcttcctggctacaagtacctcggacccttcaacggactcgacaagggagagccggtcaacgaggcagacgccgcggccctcgagcacgacaaggcctacgacaagcagctcgagcagggggacaacccgtacctcaagtacaaccacgccgacgccgagtttcaggagcgtcttcaagaagatacgtcttttgggggcaacctcgggcgagcagtcttccaggccaagaagcgggttctcgaacctctcggtctggttgaggaaggcgctaagacggctcctggaaagaagagacccatagaatcccccgactcctccacgggcatcggcaagaaaggccagcagcccgctaaaaagaagctcaactttgggcagactggcgactcagagtcagtgcccgaccctcaaccaatcggagaaccccccgcaggcccctctggtctgggatctggtacaatggctgcaggcggtggcgctccaatggcagacaataacgaaggcgccgacggagtgggtaatgcctccggaaattggcattgcgattccacatggctgggcgacagagtcatcaccaccagcacccgcacctgggccctgcccacctacaacaaccacctctacaagcagatatcaagtcagagcggggctaccaacgacaaccacttcttcggctacagcaccccctggggctattttgacttcaacagattccactgccacttctcatcacgtgactggcagcgactcatcaacaacaactggggattccggcccaagagactcaacttcaagctcttcaacatccaggtcaaggaggtcacgcagaatgaaggcaccaagaccatcgccaataaccttaccagcacgattcaggtctttacggactcggaataccggctcccgtacgtcctcggctctgcgcaccagggctgcctgcctccgttcccggcggacgtcttcatgattcctcagtacgggtacctgactctgaacaacggcagtcaggccgtgggccgttcctccttctactgcctggagtactttccttctcaaatgctgagaacgggcaacaactttgagttcagctaccagtttgaggacgtgccttttcacagcagctacgcgcacagccaaagcctggaccggctgatgaaccccctcatcgaccagtacctgtactacctgtctcggactcagtccacgggaggtaccgcaggaactcagcagttgctattttctcaggccgggcctaataacatgtcggctcaggccaaaaactggctacccgggccctgctaccggcagcaacgcgtctccacgacactgtcgcaaaataacaacagcaactttgcttggaccggtgccaccaagtatcatctgaatggcagagactctctggtaaatcccggtgtcgctatggcaacgcacaaggacgacgaagagcgattttttccatccagcggagtcttgatgtttgggaaacagggagctggaaaagacaacgtggactatagcagcgttatgctaaccagtgaggaagaaatcaaaaccaccaacccagtggccacagaacagtacggcgtggtggccgataacctgcaacagcaaaacgccgctcctattgtaggggccgtcaacagtcaaggagccttacctggcatggtctggcagaaccgggacgtgtacctgcagggtcctatctgggccaagattcctcacacggacggcaactttcatccttcgccgctgatgggaggctttggactgaaacacccgcctcctcagatcctgattaagaatacacctgttcccgcggatcctccaactaccttcagtcaagccaagccggcgtcgttcatcacgcagtacagcaccggacaggtcagcgtggaaattgaatgggagctgcagaaagagaacagcaagcgctggaacccagagattcagtatacttccaactactacaaatctacaaatgtggactttgctgtcaatactgagggtacttattcagagcctcgccccattggcacccgttacctcacccgtaacctgtaattgcctgttaatcaataaaccggttaattcgtttcagttgaactttggtctctgcgaagggcgaattc

SEQ ID NO: 78 - protein, 731 aa, synthetic construct
  REGION 1..731: note = source = /note="Description of Artificial Sequence: Synthetic polypeptide"
MAADGYLPDWLEDNLSEGIREWWDLKPGAPKPKANQQKQDDGRGLVLPGYKYLGPFNGLDKGEPVNEADAAALEHDKAYDKQLEQGDNPYLKYNHADAEFQERLQEDTSFGGNLGRAVFQAKKRVLEPLGLVEEGAKTAPGKKRPIESPDSSTGIGKKGQQPAKKKLNFGQTGDSESVPDPQPIGEPPAGPSGLGSGTMAAGGGAPMADNNEGADGVGNASGNWHCDSTWLGDRVITTSTRTWALPTYNNHLYKQISSQSGATNDNHFFGYSTPWGYFDFNRFHCHFSSRDWQRLINNNWGFRPKRLNFKLFNIQVKEVTQNEGTKTIANNLTSTIQVFTDSEYRLPYVLGSAHQGCLPPFPADVFMIPQYGYLTLNNGSQAVGRSSFYCLEYFPSQMLRTGNNFEFSYQFEDVPFHSSYAHSQSLDRLMNPLIDQYLYYLSRTQSTGGTAGTQQLLFSQAGPNNMSAQAKNWLPGPCYRQQRVSTTLSQNNNSNFAWTGATKYHLNGRDSLVNPGVAMATHKDDEERFFPSSGVLMFGKQGAGKDNVDYSSVMLTSEEEIKTTNPVATEQYGVVADNLQQQNAAPIVGAVNSQGALPGMVWQNRDVYLQGPIWAKIPHTDGNFHPSPLMGGFGLKHPPPQILIKNTPVPADPPTTFSQAKPASFITQYSTGQVSVEIEWELQKENSKRWNPEIQYTSNYYKSTNVDFAVNTEGTYSEPRPIGTRYLTRNL

SEQ ID NO: 79 - DNA, 3128 bp, synthetic construct
  misc_feature 1..3128: note = source = /note="Description of Artificial Sequence: Synthetic polynucleotide"
  source 1..3128: mol_type = other DNA
gaattcgccctttctacggctgcgtcaactggaccaatgagaactttcccttcaacgattgcgtcgacaagatggtgatctggtgggaggagggcaagatgacggccaaggtcgtggagtccgccaaggccattctcggcggcagcaaggtgcgcgtggaccaaaagtgcaagtcttccgcccagatcgatcccacccccgtgatcgtcacttccaacaccaacatgtgcgccgtgattgacgggaacagcaccaccttcgagcaccagcagccgttacaagaccggatgttcaaatttgaactcacccgccgtctggagcacgactttggcaaggtgacaaagcaggaagtcaaagagttcttccgctgggcgcaggatcacgtgaccgaggtggcgcatgagttctacgtcagaaagggtggagccaacaagagacccgcccccgatgacgcggataaaagcgagcccaagcgggcctgcccctcagtcgcggatccatcgacgtcagacgcggaaggagctccggtggactttgccgacaggtaccaaaacaaatgttctcgtcacgcgggcatgcttcagatgctgtttccctgcaagacatgcgagagaatgaatcagaatttcaacatttgcttcacgcacgggaccagagactgttcagaatgtttccccggcgtgtcagaatctcaaccggtcgtcagaaagaggacgtatcggaaactctgtgccattcatcatctgctagggcgggctcccgagattgcttgctcggcctgcgatctggtcaacgtggacctggatgactgtgtttctgagcaataaatgacttaaaccaggtatggctgccgatggttatcttccagattggctcgaggacaacctctctgagggcattcgcgagtggtgggacttgaaacctggagccccgaaacccaaagccaaccagcaaaagcaggacgacggccggggtctggtgcttcctggctacaagtacctcggacccttcaacggactcgacaagggggagcccgtcaacgcggcggacgcagcggccctcgagcacgacaaggcctacgaccagcagctcaaagcgggtgacaatccgtacctgcggtataaccacgccgacgccgagtttcaggagcgtctgcaagaagatacgtcttttgggggcaacctcgggcgagcagtcttccaggccaagaagcgggttctcgaacctctcggtctggttgaggaaggcgctaagacggctcctggaaagaagagaccggtagagccatcaccccagcgttctccagactcctctacgggcatcggcaagacaggccagcagcccgcgaaaaagagactcaactttgggcagactggcgactcagagtcagtgcccgaccctcaaccaatcggagaaccccccgcaggcccctctggtctgggatctggtacaatggctgcaggcggtggcgctccaatggcagacaataacgaaggcgccgacggagtgggtagttcctcaggaaattggcattgcgattccacatggctgggcgacagagtcatcaccaccagcacccgaacctgggccctccccacctacaacaaccacctctacaagcaaatctccaacgggacatcgggaggaagcaccaacgacaacacctacttcggctacagcaccccctgggggtattttgactttaacagattccactgccacttctcaccacgtgactggcagcgactcatcaacaacaactggggattccggcccaagagactcaacttcaagctcttcaacatccaggtcaaggaggtcacgcagaatgaaggcaccaagaccatcgccaataaccttaccagcacgattcaggtctttacggactcggaataccagctcccgtacgtcctcggctctgcgcaccagggctgcctgcctccgttcccggcggacgtcttcatgattcctcagtacgggtacctgactctgaacaacggcagtcaggccgtgggccgttcctccttctactgcctggagtactttccttctcaaatgctgagaacgggcaacaactttgagttcagctaccagtttgaggacgtgccttttcacagcagctacgcgcacagccaaagcctggaccggctgatgaaccccctcatcgaccagtacctgtactacctgtctcggactcagtccacgggaggtaccgcaggaactcagcagttgctattttctcaggccgggcctaataacatgtcggctcaggccaaaaactggctacccgggccctgctaccggcagcaacgcgtctccacgacactgtcgcaaaataacaacagcaactttgcttggaccggtgccaccaagtatcatctgaatggcagagactctctggtaaatcccggtgtcgctatggcaacgcacaaggacgacgaagagcgattttttccatccagcggagtcttgatgtttgggaaacagggagctggaaaagacaacgtggactatagcagcgttatgctaaccagtgaggaagaaatcaaaaccaccaacccagtggccacagaacagtacggcgtggtggccgataacctgcaacagcaaaacgccgctcctattgtaggggccgtcaacagtcaaggagccttacctggcatggtctggcagaaccgggacgtgtacctgcagggtcctatctgggccaagattcctcacacggacggcaactttcatccttcgccgctgatgggaggctttggactgaaacacccgcctcctcagatcctgattaagaatacacctgttcccgcggatcctccaactaccttcagtcaagccaagctggcgtcgttcatcacgcagtacagcaccggacaggtcagcgtggaaattgaatgggagctgcagaaagagaacagcaagcgctggaacccagagattcagtatacttccaactactacaaatctacaaatgtggactttgctgtcaatactgagggtacttattcagagcctcgccccattggcacccgttacctcacccgtaacctgtaattgcctgttaatcaataaaccggctaattcgtttcagttgaactttggtctctgcgaagggcgaattc

SEQ ID NO: 80 - protein, 738 aa, synthetic construct
  REGION 1..738: note = source = /note="Description of Artificial Sequence: Synthetic polypeptide"
MAADGYLPDWLEDNLSEGIREWWDLKPGAPKPKANQQKQDDGRGLVLPGYKYLGPFNGLDKGEPVNAADAAALEHDKAYDQQLKAGDNPYLRYNHADAEFQERLQEDTSFGGNLGRAVFQAKKRVLEPLGLVEEGAKTAPGKKRPVEPSPQRSPDSSTGIGKTGQQPAKKRLNFGQTGDSESVPDPQPIGEPPAGPSGLGSGTMAAGGGAPMADNNEGADGVGSSSGNWHCDSTWLGDRVITTSTRTWALPTYNNHLYKQISNGTSGGSTNDNTYFGYSTPWGYFDFNRFHCHFSPRDWQRLINNNWGFRPKRLNFKLFNIQVKEVTQNEGTKTIANNLTSTIQVFTDSEYQLPYVLGSAHQGCLPPFPADVFMIPQYGYLTLNNGSQAVGRSSFYCLEYFPSQMLRTGNNFEFSYQFEDVPFHSSYAHSQSLDRLMNPLIDQYLYYLSRTQSTGGTAGTQQLLFSQAGPNNMSAQAKNWLPGPCYRQQRVSTTLSQNNNSNFAWTGATKYHLNGRDSLVNPGVAMATHKDDEERFFPSSGVLMFGKQGAGKDNVDYSSVMLTSEEEIKTTNPVATEQYGVVADNLQQQNAAPIVGAVNSQGALPGMVWQNRDVYLQGPIWAKIPHTDGNFHPSPLMGGFGLKHPPPQILIKNTPVPADPPTTFSQAKLASFITQYSTGQVSVEIEWELQKENSKRWNPEIQYTSNYYKSTNVDFAVNTEGTYSEPRPIGTRYLTRNL

SEQ ID NO: 81 - DNA, 3084 bp, synthetic construct
  misc_feature 1..3084: note = source = /note="Description of Artificial Sequence: Synthetic polynucleotide"
  source 1..3084: mol_type = other DNA
gaattcgccctttctacggctgcatcaactggaccaatgagaactttcccttcaacgattgcgtcgacaagatggtgatctggtgggaggagggcaagatgacggccaaggtcgtggagtccgccaaggccattctcggcggcagcaaggtgcgcgtggaccaaaagtgcaagtcgtccgcccagatcgaccccacccccgtgatcgtcacctccaacaccaacatgtgcgccgtgattgacgggaacagcaccaccttcgagcaccagcagccgttgcaggaccggatgttcaagttcgaactcacccgccgtctggagcacgactttggcaaggtgaccaagcaggaagtcaaagagttcttccgctgggcgcaggatcacgtgaccgaggtggcgcatgagttctacgtcagaaagggcggagccagcaaaagacccgcccccgatgacgcggatataagcgagcccaagcgggcctgcccctcagtcgcggatccatcgacgtcagacgcggaaggagctccggtggactttgccgacaggtaccaaaacaaatgttctcgtcacgcgggcatgcttcagatgctgtttccctgcaaaacgtgcgagaaaatgaatcagaatttcaacatttgcttcacgcacggggtcagagactgctcagaatgtttccccggtgcatcagaatctcaaccggtcgtcagaaaaaaaacgtatcagaaactgtgtgccattcatcatctgctggggcgggcacccgagattgcttgctcggcctgcgatctggtcaacgtggacctggacgactgtgtttctgagcaataaatgacttaaaccaggtatggctgccgatggttatcttccagattggcttgaggacaacctctctgagggcattcgcgagtggtgggacctgaaacctggagccccgaaacccaaagccaaccagcaaaagcaggacgacggccggggtctggtgcttcctggctacaagtacctcggacccttcaacggactcgacaagggggagcccgtcaacgcggcggacgcagcggccctcgagcacgacaaggcctacgaccagcagctcaaagcgggtgacaatccgtacctgcggtataaccacgccgacgccgagtttcaggagcgtctgcaagaagatacgtcttttgggggcaacctcgggcgagcagtcttccaggccaagaagcgggttctcgaacctctcggtctggttgaggaaggcgctaagacggctcctggaaagaagagaccggtagagccatcacctcagcgttcccccgactcctccacgggcatcggcaagaaaggccaccagcccgcgagaaagagactgaactttgggcagactggcgactcggagtcagtccccgaccctcaaccaatcggagaaccaccagcaggcccctctggtctgggatctggtacaatggctgcaggcggtggcgctccaatggcagacaataacgaaggcgccgacggagtgggtagttcctcaggaaattggcattgcgattccacatggctgggcgacagagtcatcaccaccagcacccgaacctgggccctgcccacctacaacaaccatctctacaagcaaatctccaacgggacatcgggaggaagcactaacgacaacacctactttggctacagcaccccctgggggtattttgacttcaacagattccactgccacttctcaccacgtgactggcagcgactcatcaacaataactggggattccggcccaagagactcaacttcaagctcttcaacatccaggtcaaggaggtcacgcagaatgaaggcaccaagaccatcgccaataaccttaccagcacgattcaggtgtttacggactcggaataccagctcccgtacgtccccggctctgcgcaccagggctgcctccctccgttcccggcggacgtcttcatgattcctcagtacgggtatctgaccctaaacaatggcagtcaggctgtgggccgttcctccttctactgcctggaatacttcccttctcaaatgctgaggacgggcaacaactttgaattcagctacaccttcgaggacgtgcctttccacagcagctacgcgcacagccagagcctggaccggctgatgaaccctctcatcgaccagtacctgtattacttatccagaactcagtccacaggaggaactcaaggtactcagcaattgttattttctcaagccgggcccgcaaacatgtcggctcaggccaagaactggctacctggaccgtgttaccgtcagcaacgagtttccacgacactgtcgcaaaacaacaacagcaattttgcttggaccggtgccaccaagtatcacctgaatggcagagactccctggttaatcccggcgttgccatggctacccacaaggacgacgaggagcgcttcttcccgtcaagcggagttctaatgtttggcaagcagggggctggaaaagacaatgtggactacagcagcgtgatgctcaccagcgaagaagaaattaaaactactaacccagtggctacagagcagtatggtgtggtggcagacaacctgcagcagaccaacggagctcccattgtgggaactgtcaacagccagggggccttacctggtatggtctggcaaaaccgggacgtgtacctgcagggccccatctgggccaaaattcctcacacggacggcaactttcatccttcgccgctgatgggaggctttggactgaaacacccgcctcctcagatcctggtgaaaaacactcctgttcctgcggatcctccgaccaccttcagccaggccaagctggcttcttttatcacgcagtacagcaccggacaggtcagcgtggaaatcgaatgggagctgcagaaagaaaacagcaagcgctggaacccagagattcagtatacttccaactactacaaatctacaaatgtggactttgctgtcaatactgagggtacttattcagagcctcgccccattggcactcgttatctcacccgtaatctgtaattgcttgttaatcaataaaccggt

SEQ ID NO: 82 - protein, 738 aa, synthetic construct
  REGION 1..738: note = source = /note="Description of Artificial Sequence: Synthetic polypeptide"
MAADGYLPDWLEDNLSEGIREWWDLKPGAPKPKANQQKQDDGRGLVLPGYKYLGPFNGLDKGEPVNAADAAALEHDKAYDQQLKAGDNPYLRYNHADAEFQERLQEDTSFGGNLGRAVFQAKKRVLEPLGLVEEGAKTAPGKKRPVEPSPQRSPDSSTGIGKKGHQPARKRLNFGQTGDSESVPDPQPIGEPPAGPSGLGSGTMAAGGGAPMADNNEGADGVGSSSGNWHCDSTWLGDRVITTSTRTWALPTYNNHLYKQISNGTSGGSTNDNTYFGYSTPWGYFDFNRFHCHFSPRDWQRLINNNWGFRPKRLNFKLFNIQVKEVTQNEGTKTIANNLTSTIQVFTDSEYQLPYVPGSAHQGCLPPFPADVFMIPQYGYLTLNNGSQAVGRSSFYCLEYFPSQMLRTGNNFEFSYTFEDVPFHSSYAHSQSLDRLMNPLIDQYLYYLSRTQSTGGTQGTQQLLFSQAGPANMSAQAKNWLPGPCYRQQRVSTTLSQNNNSNFAWTGATKYHLNGRDSLVNPGVAMATHKDDEERFFPSSGVLMFGKQGAGKDNVDYSSVMLTSEEEIKTTNPVATEQYGVVADNLQQTNGAPIVGTVNSQGALPGMVWQNRDVYLQGPIWAKIPHTDGNFHPSPLMGGFGLKHPPPQILVKNTPVPADPPTTFSQAKLASFITQYSTGQVSVEIEWELQKENSKRWNPEIQYTSNYYKSTNVDFAVNTEGTYSEPRPIGTRYLTRNL

SEQ ID NO: 83 - DNA, 3123 bp, synthetic construct
  misc_feature 1..3123: note = source = /note="Description of Artificial Sequence: Synthetic polynucleotide"
  source 1..3123: mol_type = other DNA
gaattcgcccttggctgcgtcaactggaccaatgagaactttcccttcaacgattgcgtcgacaagatggtgatctggtgggaggagggcaagatgacggccaaggtcgtggagtccgccaaggccattctcggcggcagcaaggtgcgcgtggaccaaaagtgcaagtcgtccgcccagatcgaccccacccccgtgatcgtcacctccaacaccaacatgtgcgccgtgattgacgggaacagcaccaccttcgagcaccagcagccgttgcaggaccggatgttcaagttcgaactcacccgccgtctggagcacgactttggcaaggtgaccaagcaggaagtcaaagagttcttccgctgggcgcaggatcacgtgaccgaggtggcgcatgagttctacgtcagaaagggcggagccagcaaaagacccgcccccgatgacgcggatataagcgagcccaagcgggcctgcccctcagtcgcggatccatcgacgtcagacgcggaaggagctccggtggactttgccgacaggtaccaaaacaaatgttctcgtcacgcgggcatgctccagatgctgtttccctgcaaaacgtgcgagagaatgaatcagaatttcaacatttgcttcacgcacggggtcagagactgctcagaatgtttccccggtgcatcagaatctcaaccggtcgtcagaaaaaaaacgtatcagaaactgtgtgccattcatcatctgctggggcgggcacccgagattgcttgctcggcctgcgatctggtcaacgtggacctggacgactgtgtttctgagcaataaatgacttaaaccaggtatggctgccgatggttatcttccagattggcttgaggacaacctctctgagggcattcgcgagtggtgggacctgaaacctggagccccgaaacccaaagccaaccagcaaaagcaggacgacggccggggtctggtgcttcctggctacaagtacctcggacccttcaacggactcgacaagggggagcccgtcaacgcggcggacgcagcggccctcgagcacgacaaggcctacgaccagcagctcaaagcgggtgacaatccgtacctgcggtataaccacgccgacgccgagtttcaggagcgtctgcaagaagatacgtcttttgggggcaacctcgggcgagcagtcttccaggccaagaagcgggttctcgaacctctcggtctggttgaggaaggcgctaagacggctcctggaaagaagagaccggtagagccatcacctcagcgttcccccgactcctccacgggcatcggcaagaaaggccaccagcccgcgagaaagagactgaactttgggcagactggcgactcggagtcagtccccgaccctcaaccaatcggagaaccaccagcaggcccctctggtctgggatctggtacaatggctgcaggcggtggcgctccaatggcagacaataacgaaggcgccgacggagtgggtagttcctcaggaaattggcattgcgattccacatggctgggcgacagagtcatcaccaccagcacccgaacctgggccctgcccacctacaacaaccatctctacaagcaaatctccaacgggacatcgggaggaagcactaacgacaacacctactttggctacagcaccccctgggggtattttgacttcaacagattccactgccacttctcaccacgtgactggcagcgactcatcaacaataactggggattccggcccaagagactcaacttcaagctcttcaacatccaggtcaaggaggtcacgcagaatgaaggcaccaagaccatcgccaataaccttaccagcacgattcaggtgtttacggactcggaataccagctcccgtacgtcctcggctctgcgcaccagggctgcctccctccgttcccggcggacgtcttcatgattcctcagtacgggtatctgaccctaaacaatggcagtcaggctgtgggccgttcctccttctactgcctggaatacttcccttctcaaatgctgaggacgggcaacaactttgaattcagctacaccttcgaggacgtgcctttccacagcagctacgcgcacagccagagcctggaccggctgatgaaccctctcatcgaccagtacctgtattacttatccagaactcagtccacaggaggaactcaaggtactcagcaattgttattttctcaagccgggcccgcaaacatgtcggctcaggccaagaactggctacctggaccgtgttaccgtcagcaacgagtttccacgacactgtcgcaaaacaacaacagcaattttgcttggaccggtgccaccaagtatcacctgaatggcagagactccctggttaatcccggcgttgccatggctacccacaaggacgacgaggagcgcttcttcccgtcaagcggagttctaatgtttggcaagcagggggctggaaaagacaatgtggactacagcagcgtgatgctcaccagcgaagaagaaattaaaactactaacccagtggctacagagcagtatggtgtggtggcagacaacctgcagcagaccaacggagctcccattgtgggaactgtcaacagccagggggccttacctggtatggtctggcaaaaccgggacgtgtacctgcagggccccatctgggccaaaattcctcacacggacggcaactttcatccttcgccgctgatgggaggctttggactgaaacacccgcctcctcagatcctggtgaaaaacactcctgttcctgcggatcctccgaccaccttcagccaggccaagctggcttcttttatcacgcagtacagcaccggacaggtcagcgtggaaatcgaatgggagctgcagaaagaaaacagcaagcgctggaacccagagattcagtatacttccaactactacaaatctacaaatgtggactttgctgtcaatactgagggtacttattcagagcctcgccccattggcactcgttatctcacccgtaatctgtaattgcttgttaatcaataaaccggttaattcgtttcagttgaactttggtctctgcgaagggcgaattc

SEQ ID NO: 84 - protein, 738 aa, synthetic construct
  REGION 1..738: note = source = /note="Description of Artificial Sequence: Synthetic polypeptide"
MAADGYLPDWLEDNLSEGIREWWDLKPGAPKPKANQQKQDDGRGLVLPGYKYLGPFNGLDKGEPVNAADAAALEHDKAYDQQLKAGDNPYLRYNHADAEFQERLQEDTSFGGNLGRAVFQAKKRVLEPLGLVEEGAKTAPGKKRPVEPSPQRSPDSSTGIGKKGHQPARKRLNFGQTGDSESVPDPQPIGEPPAGPSGLGSGTMAAGGGAPMADNNEGADGVGSSSGNWHCDSTWLGDRVITTSTRTWALPTYNNHLYKQISNGTSGGSTNDNTYFGYSTPWGYFDFNRFHCHFSPRDWQRLINNNWGFRPKRLNFKLFNIQVKEVTQNEGTKTIANNLTSTIQVFTDSEYQLPYVLGSAHQGCLPPFPADVFMIPQYGYLTLNNGSQAVGRSSFYCLEYFPSQMLRTGNNFEFSYTFEDVPFHSSYAHSQSLDRLMNPLIDQYLYYLSRTQSTGGTQGTQQLLFSQAGPANMSAQAKNWLPGPCYRQQRVSTTLSQNNNSNFAWTGATKYHLNGRDSLVNPGVAMATHKDDEERFFPSSGVLMFGKQGAGKDNVDYSSVMLTSEEEIKTTNPVATEQYGVVADNLQQTNGAPIVGTVNSQGALPGMVWQNRDVYLQGPIWAKIPHTDGNFHPSPLMGGFGLKHPPPQILVKNTPVPADPPTTFSQAKLASFITQYSTGQVSVEIEWELQKENSKRWNPEIQYTSNYYKSTNVDFAVNTEGTYSEPRPIGTRYLTRNL

SEQ ID NO: 85 - DNA, 3122 bp, synthetic construct
  misc_feature 1..3122: note = source = /note="Description of Artificial Sequence: Synthetic polynucleotide"
  source 1..3122: mol_type = other DNA
gaattcgccctttctacggctgcgtcaactggaccaatgagaactttcccttcaacgattgcgtcgacaagatggtgatctggtgggaggagggcaagatgacggccaaggtcgtggagtccgccaaggccattctcggcggcagcaaggtgcgtgtggaccaaaagtgcaagtcttccgcccagatcgatcccacccccgtgatcgtcacctccaacaccaacatgtgcgccgtgattgacgggaacagcgccaccttcgagcaccagcagccgttgcaggaccggatgttcaaatttgaactcacccgccgtctggagcatgactttggcaaggtgacgaagcaggaagtcaaagagttcttccgctgggcgcaggatcacgtgaccgaggtggcgcatgagttccacgtcagaaagggtggagccaacaagagacccgcccccgatgacgcggatataagcgagcccaagcgggcctgcccctcagtcgcggatccatcgacgtcagacgcggaaggagctccggtggactttgccgacaggtaccaaaacaaatgttctcgtcacgcgggcatgcttcagatgctgtttccctgcaagacatgcgagagaatgaatcagaatttcaacatttgcttcacgcacgggaccagagactgttcagaatgtttccccggcgtgtcagaatctcaaccggtcgtcagaaagaggacgtatcggaaactctgtgcgattcatcatctgctggggcgggctcccgagattgcttgctcggcctgcgatctggtcaacgtggacctggatgactgtgtttctgagcaataaatgacttaaaccaggtatggctgccgatggttatcttccagattggctcgaggacaacctctctgagggcattcgcgagtggtgggacttgaaacctggagccccgaaacccaaagccaaccagcaaaagcaggacgacggccggggtctggtgcttcctggctacaagtacctcggacccttcaacggactcgacaagggggagcccgtcaacgcggcggacgcagcggccctcgagcacgacaaagcctacgaccagcagctcaaagcgggtgacaatccgtacctgcggtataatcacgccgacgccgagtttcaggagcgtctgcaagaagatacgtcttttgggggcaacctcgggcgagcagtcttccaggccaagaagcgggttctcgaacctctcggtctggttgaggaaggcgctaagacggctcctggaaagaagagactggtagagcagtcgccacaagagccagactcctcctcgggcatcggcaagacaggccagcagcccgctaaaaagagactcaattttggtcagactggcgactcagagtcagtccccgacccacaacctctcggagaacctccagcagccccctcaggtctgggacctaatacaatggcttcaggcggtggcgctccaatggcagacaataacgaaggcgccgacggagtgggtaattcctcgggaaattggcattgcgattccacatggctgggggacagagtcatcaccaccagcacccgaacctgggccctgcccacctacaacaaccacctctacaagcaaatctccaacggcacctcgggaggaagcaccaacgacaacacctattttggctacagcaccccctgggggtattttgacttcaacagattccactgtcacttttcaccacgtgactggcaacgactcatcaacaacaattggggattccggcccaaaagactcaacttcaagctgttcaacatccaggtcaaggaagtcacgacgaacgaaggcaccaagaccatcgccaataatctcaccagcaccgtgcaggtctttacggactcggagtaccagttaccgtacgtgctaggatccgctcaccagggatgtctgcctccgttcccggcggacgtcttcacggttcctcagtacggctatttaactttaaacaatggaagccaagccctgggacgttcctccttctactgtctggagtatttcccatcgcagatgctgagaaccggcaacaactttcagttcagctacaccttcgaggacgtgcctttccacagcagctacgcgcacagccagagcctggacaggctgatgaatcccctcatcgaccagtacctgtactacctggtcagaacgcaaacgactggaactggagggacgcagactctggcattcagccaagcgggtcctagctcaatggccaaccaggctagaaattgggtgcccggaccttgctaccggcagcagcgcgtctccacgacaaccaaccagaacaacaacagcaactttgcctggacgggagctgccaagtttaagctgaacggccgagactctctaatgaatccgggcgtggcaatggcttcccacaaggatgacgacgaccgcttcttcccttcgagcggggtcctgatttttggcaagcaaggagccgggaacgatggagtggattacagccaagtgctgattacagatgaggaagaaatcaaggctaccaaccccgtggccacagaagaatatggagcagtggccatcaacaaccaggccgccaatacgcaggcgcagaccggactcgtgcacaaccagggggtgattcccggcatggtgtggcagaatagagacgtgtacctgcagggtcccatctgggccaaaattcctcacacggacggcaactttcacccgtctcccctgatgggcggctttggactgaagcacccgcctcctcaaattctcatcaagaacacaccggttccagcggacccgccgcttaccttcaaccaggccaagctgaactctttcatcacgcagtacagcaccggacaggtcagcgtggaaatcgagtgggagctgcagaaagaaaacagcaaacgctggaatccagagattcaatacacttccaactactacaaatctacaaatgtggactttgctgtcaacacggaaggagtttatagcgagcctcgccccattggcacccgttacctcacccgcaacctgtaattacatgttaatcaataaaccggttaattcgtttcagttgaactttggtctctgcgaagggcgaattc

SEQ ID NO: 86 - protein, 736 aa, synthetic construct
  REGION 1..736: note = source = /note="Description of Artificial Sequence: Synthetic polypeptide"
MAADGYLPDWLEDNLSEGIREWWDLKPGAPKPKANQQKQDDGRGLVLPGYKYLGPFNGLDKGEPVNAADAAALEHDKAYDQQLKAGDNPYLRYNHADAEFQERLQEDTSFGGNLGRAVFQAKKRVLEPLGLVEEGAKTAPGKKRLVEQSPQEPDSSSGIGKTGQQPAKKRLNFGQTGDSESVPDPQPLGEPPAAPSGLGPNTMASGGGAPMADNNEGADGVGNSSGNWHCDSTWLGDRVITTSTRTWALPTYNNHLYKQISNGTSGGSTNDNTYFGYSTPWGYFDFNRFHCHFSPRDWQRLINNNWGFRPKRLNFKLFNIQVKEVTTNEGTKTIANNLTSTVQVFTDSEYQLPYVLGSAHQGCLPPFPADVFTVPQYGYLTLNNGSQALGRSSFYCLEYFPSQMLRTGNNFQFSYTFEDVPFHSSYAHSQSLDRLMNPLIDQYLYYLVRTQTTGTGGTQTLAFSQAGPSSMANQARNWVPGPCYRQQRVSTTTNQNNNSNFAWTGAAKFKLNGRDSLMNPGVAMASHKDDDDRFFPSSGVLIFGKQGAGNDGVDYSQVLITDEEEIKATNPVATEEYGAVAINNQAANTQAQTGLVHNQGVIPGMVWQNRDVYLQGPIWAKIPHTDGNFHPSPLMGGFGLKHPPPQILIKNTPVPADPPLTFNQAKLNSFITQYSTGQVSVEIEWELQKENSKRWNPEIQYTSNYYKSTNVDFAVNTEGVYSEPRPIGTRYLTRNL

SEQ ID NO: 87 - DNA, 3117 bp, synthetic construct
  misc_feature 1..3117: note = source = /note="Description of Artificial Sequence: Synthetic polynucleotide"
  source 1..3117: mol_type = other DNA
gaattcgcccttggctgcgtcaactggaccaatgagaactttcccttcaacgattgcgtcgacaagatggtgatctggtgggaggagggcaagatgacggccaaggtcgtggagtccgccaaggccattctcggcggcagcaaggtgcgtgtggaccaaaagtgcaagtcttccgcccagatcgatcccacccccgtgatcgtcacctccaacaccaacatgtgcgccgtgattgacgggaacagcaccaccttcgagcaccagcagccgttgcaggaccggatgttcaaatttgaactcacccgccgtctggagcatgactttggcaaggtgacgaagcaggaagtcaaagagttcttccgctgggcgcaggatcacgtgaccgaggtggcgcatgagttccacgtcagaaagggtggagccaacaagagacccgcccccgatgacgcggatataagcgagcccaagcgggcctgcccctcagtcgcggatccatcgacgtcagacgcggaaggagctccggtggactttgccgacaggtaccaaaacaaatgttctcgtcacgcgggcatgcttcagatgctgtttccctgcaagacatgcgagagaatgaatcagaatttcaacatttgcttcacgcacgggaccagagactgttcagaatgtttccccggcgtgtcagaatctcaaccggtcgtcagaaagaggacgtatcggaaactctgtgcgattcatcatctgctggggcgggctcccgagattgcttgctcggcctgcgatctggtcaacgtggacctggatgactgtgtttctgagcaataaatgacttaaaccaggtatggctgccgatggttatcttccagattggctcgaggacaacctctctgagggcattcgcgagtggtgggacttgaaacctggagccccgaaacccaaagccaaccagcaaaagcaggacgacggccggggtctggtgcttcctggctacaagtacctcggacccttcaacggactcgacaagggggagcccgtcaacgcggcggacgcagcggccctcgagcacgacaaagcctacgaccagcagctcaaagcgggtgacaatccgtacctgcggtataatcacgccgacgccgagtttcaggagcgtctgcaagaagatacgtcttttgggggcaacctcgggcgagcagtcttccaggccaagaagcgggttctcgaacctctcggtctggttgaggaaggcgctaagacggctcctggaaagaagagaccggtagagcagtcgccacaagagccagactcctcctcgggcatcggcaagacaggccagcagcccgctaaaaagagactcaattttggtcagactggcgactcagagtcagtccccgacccacaacctctcggagaacctccagcagccccctcaggtctgggacctaatacaatggcttcaggcggtggcgctccaatggcagacaataacgaaggcgccgacggagtgggtaattcctcgggaaattggcattgcgattccacatggctgggggacagagtcatcaccaccagcacccgaacctgggccctgcccacctacaacaaccacctctacaagcaaatctccaacggcacctcgggaggaagcaccaacgacaacacctattttggctacagcaccccctgggggtattttgacttcaacagattccactgtcacttttcaccacgtgactggcaacgactcatcaacaacaattggggattccggcccaaaagactcaacttcaagctgttcaacatccaggtcaaggaagtcacgacgaacgaaggcaccaagaccatcgccaataatctcaccagcaccgtgcgggtctttacggactcggagtaccagttaccgtacgtgctaggatccgctcaccagggatgtctgcctccgttcccggcggacgtcttcatggttcctcagtacggctatttaactttaaacaatggaagccaagccctgggacgttcctccttctactgtctggagtatttcccatcgcagatgctgagaaccggcaacaactttcagttcagctacaccttcgaggacgtgcctttccacagcagctacgcgcacagccagagcctggacaggctgatgaatcccctcatcgaccagtacctgtactacctggtcagaacgcaaacgactggaactggagggacgcagactctggcattcagccaagcgggtcctagctcaatggccaaccaggctagaaattgggtgcccggaccttgctaccggcagcagcgcgtctccacgacaaccaaccagagcaacaacagcaactttgcctggacgggagctgccaagtttaagctgaacggccgagactctctaatgaatccgggcgtggcaatggcttcccacaaggatgacgacgaccgcttcttcccttcgagcggggtcctgatttttggcaagcaaggagccgggaacgatggagtggattacagccaagtgctgattacagatgaggaagaaatcaaggctaccaaccccgtggccacagaagaatatggagcagtggccatcaacaaccaggccgccaatacgcaggcgcagaccggactcgtgcacaaccagggggtgattcccggcatggtgtggcagaatagagacgtgtacctgcagggtcccatctgggccaaaattcctcacacggacggcaactttcacccgtctcccctgatgggcggctttggactgaagcacccgcctcctcaaattctcatcaagaacacaccggttccagcggacccgccgcttaccttcaaccaggccaagctgaactctttcatcacgcagtacagcaccggacaggtcagcgtggaaatcgagtgggagctgcagaaagaaaacagcaaacgctggaatccagagattcaatacacttccaactactacaaatctacaaatgtggactttgctgtcaacacggaaggagtttatagcgagcctcgccccattggcacccgttacctcacccgcaacctgtaattacatgttaatcaataaaccggttaattcgtttcagttgaactttggtctctgcgaagggcgaattc

SEQ ID NO: 88 - protein, 736 aa, synthetic construct
  REGION 1..736: note = source = /note="Description of Artificial Sequence: Synthetic polypeptide"
MAADGYLPDWLEDNLSEGIREWWDLKPGAPKPKANQQKQDDGRGLVLPGYKYLGPFNGLDKGEPVNAADAAALEHDKAYDQQLKAGDNPYLRYNHADAEFQERLQEDTSFGGNLGRAVFQAKKRVLEPLGLVEEGAKTAPGKKRPVEQSPQEPDSSSGIGKTGQQPAKKRLNFGQTGDSESVPDPQPLGEPPAAPSGLGPNTMASGGGAPMADNNEGADGVGNSSGNWHCDSTWLGDRVITTSTRTWALPTYNNHLYKQISNGTSGGSTNDNTYFGYSTPWGYFDFNRFHCHFSPRDWQRLINNNWGFRPKRLNFKLFNIQVKEVTTNEGTKTIANNLTSTVRVFTDSEYQLPYVLGSAHQGCLPPFPADVFMVPQYGYLTLNNGSQALGRSSFYCLEYFPSQMLRTGNNFQFSYTFEDVPFHSSYAHSQSLDRLMNPLIDQYLYYLVRTQTTGTGGTQTLAFSQAGPSSMANQARNWVPGPCYRQQRVSTTTNQSNNSNFAWTGAAKFKLNGRDSLMNPGVAMASHKDDDDRFFPSSGVLIFGKQGAGNDGVDYSQVLITDEEEIKATNPVATEEYGAVAINNQAANTQAQTGLVHNQGVIPGMVWQNRDVYLQGPIWAKIPHTDGNFHPSPLMGGFGLKHPPPQILIKNTPVPADPPLTFNQAKLNSFITQYSTGQVSVEIEWELQKENSKRWNPEIQYTSNYYKSTNVDFAVNTEGVYSEPRPIGTRYLTRNL

SEQ ID NO: 89 - DNA, 3121 bp, synthetic construct
  misc_feature 1..3121: note = source = /note="Description of Artificial Sequence: Synthetic polynucleotide"
  source 1..3121: mol_type = other DNA
gaattcgcccttctacggctgcgtcaactggaccaatgagaactttcccttcaacgattgcgtcgacaagatggtgatctggtgggaggagggcaagatgacggccaaggtcgtggagtccgccaaggccattctcggcggcagcaaggtgcgtgtggaccaaaagtgcaagtcttccgcccagatcgatcccacccccgtgatcgtcacctccaacaccaacatgtgcgccgtgattgacgggaacagcaccaccttcgagcaccagcagccgttgcaggaccggatgttcaaatttgaactcacccgccgtctggagcatgactttggcaaggtgacgaagcaggaagtcaaagagttcttccgctgggcgcaggatcacgtgaccgaggtggcgcatgagttccacgtcagaaagggtggcgccaacaagagacccgcccccgatgacgcggatataagcgagcccaagcgggcctgcccctcagtcgcggatccatcgacgtcagacgcggaaggagctccggtggactttgccgacaggtaccaaaacaaatgttctcgtcacgcgggcatgcttcagatgctgtttccctgcaagacatgcgagagaatgaatcagaatttcaacatttgcttcacgcacgggaccagagactgttcagaatgtttccccggcgtgtcagaatctcaaccggtcgtcagaaagaggacgtatcggaaactctgtgcgattcatcatctgctggggcgggctcccgagattgcttgctcggcctgcgatctggtcaacgtggacctggatgactgtgtttctgagcaataaatgacttaaaccaggtatggctgccgatggttatcttccagattggctcgaggacaacctctctgagggcattcgcgagtggtgggacttgaaacctggagccccgaaacccaaagccaaccagcaaaagcaggacgacggccggggtctggtgcttcctggctacaagtacctcggacccttcaacggactcgacaagggggagcccgtcaacgcggcggacgcagcggccctcgagcacgacaaagcctacgaccagcagctcaaagcgggtgacaatccgtacctgcggtataatcacgccgacgccgagtttcaggagcgtctgcaagaagatacgtcctttgggggcaacctcgggcgagcagtcttccaggccaagaagcgggttctcgaacctctcggtctggttgaggaaggcgctaagacggctcctggaaagaagagaccggtagagcagtcgccacaagagccagactcctcctcgggcatcggcaagacaggccagcagcccgctaaaaagagactcaattttggtcagactggcgactcagagtcagtccccgacccacaacctctcggagaacctccagcagccccctcaggtctgggacctaatacaatggcttcaggcggtggcgctccaatggcagacaataacgaaggcgccgacggagtgggtaattcctcgggaaattggcattgcgattccacatggctgggggacagagtcatcaccaccagcacccgaacctgggccctgcccacctacaacaaccacctctacaagcaaatctccaacggcacctcgggaggaagcaccaacgacaacacctattttggctacagcaccccctgggggtattttgacttcaacagattccactgtcacttttcaccacgtgactggcaacgactcatcaacaacaattggggattccggcccaaaagactcaacttcaagctgttcaacatccaggtcaaggaagtcacgacgaacgaaggcaccaagaccatcgccaataatctcaccagcaccgtgcaggtctttacggacttggagtaccagttaccgtacgtgctaggatccgctcaccagggatgtctgcctccgttcccggcggacgtcttcatggttcctcagtacggctatttaactttaaacaatggaagccaagccctgggacgttcctccttctactgtctggagtatttcccatcgcagatgccgagaaccggcaacaactttcagttcagctacaccttcgaggacgtgcctttccacagcagctacgcgcacagccagagcctggacaggctgatgaatcccctcatcgaccagtacctgtactacctggtcagaacgcaaacgactggaactggagggacgcagactctggcattcagccaagcgggtcctagctcaatggccaaccaggctagaaattgggtgcccggaccttgctaccggcagcagcgcgtctccacgacaaccaaccagaacaacaacagcaactttgcctggacgggagctgccaagtttaagctgaacggccgagactctctaatgaatccgggcgtggcaatggcttcccacaaggatgacgacgaccgcttcttcccttcgagcggggtcctgatttttggcaagcaaggagccgggaacgatggagtggattacagccaagtgctgattacagatgaggaagaaatcaaggctaccaaccccgtggccacagaagaatatggagcagtggccatcaacaaccaggccgccaatacgcaggcgcagaccggactcgtgcacaaccagggggtgattcccggcatggtgtggcagaatagagacgtgtacctgcagggtcccatctgggccaaaattcctcacacggacggcaactttcacccgtctcccctgatgggcggctttggactgaagcacccgcctcctcaaattctcatcaagaacacaccggttccagcggacccgccgcttaccttcaaccaggccaagctgaactctttcatcacgcagtacagcaccggacaggtcagcgtggaaatcgagtgggagctgcagaaagaaaacagcaaacgctggaatccagagattcaatacacttccaactactacaaatctacaaatgtggactttgctgtcaacacggaaggagtttatagcgagcctcgccccattggcacccgttacctcacccgcaacctgtaattacatgttaatcaataaaccggttaattcgtttcagttgaactttggtctctgcgaagggcgaattc

SEQ ID NO: 90 - protein, 736 aa, synthetic construct
  REGION 1..736: note = source = /note="Description of Artificial Sequence: Synthetic polypeptide"
MAADGYLPDWLEDNLSEGIREWWDLKPGAPKPKANQQKQDDGRGLVLPGYKYLGPFNGLDKGEPVNAADAAALEHDKAYDQQLKAGDNPYLRYNHADAEFQERLQEDTSFGGNLGRAVFQAKKRVLEPLGLVEEGAKTAPGKKRPVEQSPQEPDSSSGIGKTGQQPAKKRLNFGQTGDSESVPDPQPLGEPPAAPSGLGPNTMASGGGAPMADNNEGADGVGNSSGNWHCDSTWLGDRVITTSTRTWALPTYNNHLYKQISNGTSGGSTNDNTYFGYSTPWGYFDFNRFHCHFSPRDWQRLINNNWGFRPKRLNFKLFNIQVKEVTTNEGTKTIANNLTSTVQVFTDLEYQLPYVLGSAHQGCLPPFPADVFMVPQYGYLTLNNGSQALGRSSFYCLEYFPSQMPRTGNNFQFSYTFEDVPFHSSYAHSQSLDRLMNPLIDQYLYYLVRTQTTGTGGTQTLAFSQAGPSSMANQARNWVPGPCYRQQRVSTTTNQNNNSNFAWTGAAKFKLNGRDSLMNPGVAMASHKDDDDRFFPSSGVLIFGKQGAGNDGVDYSQVLITDEEEIKATNPVATEEYGAVAINNQAANTQAQTGLVHNQGVIPGMVWQNRDVYLQGPIWAKIPHTDGNFHPSPLMGGFGLKHPPPQILIKNTPVPADPPLTFNQAKLNSFITQYSTGQVSVEIEWELQKENSKRWNPEIQYTSNYYKSTNVDFAVNTEGVYSEPRPIGTRYLTRNL

SEQ ID NO: 91 - DNA, 3122 bp, synthetic construct
  misc_feature 1..3122: note = source = /note="Description of Artificial Sequence: Synthetic polynucleotide"
  source 1..3122: mol_type = other DNA
gaattcgccctttctacggctgcgtcaactggaccaatgagaactttcccttcaacgattgcgtcgacaagatggtgatctggtgggaggagggcaagatgacggccaaggtcgtggagtccgccaaggccattctcggcggcagcaaggtgcgtgtggaccaaaagtgcaagtcttccgcccagatcgatcccacccccgtgatcgtcacctccaacaccaacatgtgcgccgtgattgacgggaacagcaccaccttcgagcaccagcagccgttgcaggaccggatgttcaaatttgaactcacccgccgtctggagcatgactttggcaaggtgacgaagcaggaagtcaaagggttcttccgctgggcgcaggatcacgtgaccgaggtggcgcatgagttccacgtgcgagcccaagcgggcctgcccctcagtcgcggatccatcgacgtcagaccagaaagggtggagccaacaagagacccgcccccgatgacgcggatataagcggaaggagctccggtggactttgccgacaggtaccaaaacaaatgttctcgtcacgcgggcatgcttcagatgctgtttccctgcaagacatgcgagagaatgaatcagaatttcaacatttgcttcacgcacgggaccagagactgttcagaatgtttccccggcgtgtcagaatctcaaccggtcgtcagaaagaggacgtatcggaaactctgtgcgattcatcatctgctggggcgggctcccgagattgcttgctcggcctgcgatctggtcaacgtggacctggatgactgtgtttctgagcaataaatgacttaaaccaggtatggctgccgatggttatcttccagattggctcgaggacaacctctctgagggcattcgcgagtggtgggacttgaaacctggagccccgaaacccaaagccaaccagcaaaagcaggacgacggccggggtctggtgcttcctggctacaagtacctcggacccttcaacggactcgacaagggggagcccgtcaacgcggcggacgcagcggccctcgagcacgacaaagcctacgaccagcagctcaaagcgggtgacaatccgtacctgcggtataatcacgccgacgccgagtttcaggagcgtctgcaagaagatacgtcttttgggggcaacctcgggcgagcagtcttccaggccaagaagcgggttctcgaacctctcggtctggttgaggaaggcgctaagacggctcctggaaagaagagaccggtagagcagtcgccacaagagccagactcctcctcgggcatcggcaagacaggccagcagcccgctaaaaagagactcaattttggtcagactggcgactcagagtcagtccccgacccacaacctctcggagaacctccagcagccccctcaggtctgggacctaatacaatggcttcaggcggtggcgctccaatggcagacaataacgaaggcgccgacggagtgggtaattcctcgggaaattggcattgcgattccacatggctgggggacagagtcatcaccaccagcacccgaacctgggccctgcccacctacaacaaccacctctacaagcaaatctccaacggcacctcgggaggaagcaccaacgacaacacctattttggctacagcaccccctgggggtattttgacttcaacagattccactgtcacttttcaccacgtgactggcaacgactcatcaacaacaattggggattccggcccaaaagactcaacttcaagctgttcaacatccaggtcaaggaagtcacgacgaacgaaggcaccaagaccatcgccaataatctcaccagcaccgtgcaggtctttacggactcggagtaccagttaccgtacgtgctaggatccgctcaccagggatgtctgcctccgttcccggcggacgtcttcatggttcctcagtacggctatttaactttaaacaatggaagccaagccctgggacgttcctccttctactgtctggagtatttcccatcgcagatgctgagaaccggcaacaactttcagttcagctacaccttcgaggacgtgcctttccacagcagctacgcgcacagccagagcctggacaggctgatgaatcccctcatcgaccagtacctgtactacctggtcagaacgcaaacgactggaactggagggacgcagactctggcattcagccaagcgggtcctagctcaatggccaaccaggctagaaattgggtgcccggaccttgctaccggcagcagcgcgtctccacgacaaccaaccagaacaacaacagcaactttgcctggacgggagctgccaagtttaagctgaacggccgagactctctaatgaatccgggcgtggcaatggcttcccacaaggatgacgacgaccgcttcttcccttcgagcggggtcctgatttttggcaagcaaggagccgggaacgatggagtggattacagccaagtgctgattacagatgaggaagaaatcaaggctaccaaccccgtggccacagaagaatatggagcagtggccatcaacaaccaggccgccaatacgcaggcgcagaccggactcgtgcacaaccagggggtgattcccggcatggtgtggcagaatagagacgtgtacctgcagggtcccatctgggccaaaattcctcacacggacggcaactttcacccgtctcccctgatgggcggctttggactgaagcacccgcctcctcaaattctcatcaagaacacaccggttccagcggacccgccgcttaccttcaaccaggccaagctgaactctttcatcacgcagtacagcaccggacaggtcagcgtggaaatcgagtgggagctgcagaaagaaaacagcaaacgctggaatccagagattcaatacacttccaactactacaaatctacaaatgtggactttgctgtcaacacggagggggtttatagcgagcctcgccccattggcacccgttacctcacccgcaacctgtaattacatgttaatcaataaaccggttaattcgtttcagttgaactttggtctctgcgaagggcgaattc

SEQ ID NO: 92 - protein, 736 aa, synthetic construct
  REGION 1..736: note = source = /note="Description of Artificial Sequence: Synthetic polypeptide"
MAADGYLPDWLEDNLSEGIREWWDLKPGAPKPKANQQKQDDGRGLVLPGYKYLGPFNGLDKGEPVNAADAAALEHDKAYDQQLKAGDNPYLRYNHADAEFQERLQEDTSFGGNLGRAVFQAKKRVLEPLGLVEEGAKTAPGKKRPVEQSPQEPDSSSGIGKTGQQPAKKRLNFGQTGDSESVPDPQPLGEPPAAPSGLGPNTMASGGGAPMADNNEGADGVGNSSGNWHCDSTWLGDRVITTSTRTWALPTYNNHLYKQISNGTSGGSTNDNTYFGYSTPWGYFDFNRFHCHFSPRDWQRLINNNWGFRPKRLNFKLFNIQVKEVTTNEGTKTIANNLTSTVQVFTDSEYQLPYVLGSAHQGCLPPFPADVFMVPQYGYLTLNNGSQALGRSSFYCLEYFPSQMLRTGNNFQFSYTFEDVPFHSSYAHSQSLDRLMNPLIDQYLYYLVRTQTTGTGGTQTLAFSQAGPSSMANQARNWVPGPCYRQQRVSTTTNQNNNSNFAWTGAAKFKLNGRDSLMNPGVAMASHKDDDDRFFPSSGVLIFGKQGAGNDGVDYSQVLITDEEEIKATNPVATEEYGAVAINNQAANTQAQTGLVHNQGVIPGMVWQNRDVYLQGPIWAKIPHTDGNFHPSPLMGGFGLKHPPPQILIKNTPVPADPPLTFNQAKLNSFITQYSTGQVSVEIEWELQKENSKRWNPEIQYTSNYYKSTNVDFAVNTEGVYSEPRPIGTRYLTRNL

SEQ ID NO: 93 - DNA, 2370 bp, synthetic construct
  misc_feature 1..2370: note = source = /note="Description of Artificial Sequence: Synthetic polynucleotide"
  source 1..2370: mol_type = other DNA
gaattcgccctttctacggctgcgtcaactggaccaatgagaactttcccttcaacgattgcgtcgacaagatggtgatctggtgggaggagggcaagatgacggccaaggtcgtggagtccgccaaggccattctcggcggcagcaaggtgcgcgtggaccaaaagtgcaagtcgtccgcccagatcgaccccacccccgtgatcgtcacctccaacaccaacatgtgcgccgtgattgacgggaacagcaccaccttcgagcaccagcagccgttgcaggaccggatgttcaagttcgaactcacccgccgtctggagcacgactttggcaaggtgaccaagcaggaagtcaaagagttcttccgctgggcgcaggatcacgtgaccgaggtggcgcatgagttctacgtcagaaagggcggagccagcaaaagacccgcccccgatgacgcggatataagcgagcccaagcgggcctgcccctcagtcgcggatccatcgacgtcagacgcggaaggagctccggtggactttgccgacaggtaccaaaacaaatgttctcgtcacgcgggcatgcttcagacgctgtttccctgcaaaacgtgcgagagaatgaatcagaatttcaacatttgcttcacgcacggggtcagagactgctcagaatgtttccccggtgcatcagaatctcaaccggtcgtcagaaaaaaaacgtatcagaaactgtgtgccattcatcatctgctggggcgggcacccgagattgcttgctcggcctgcgatctggtcaacgtggacctggacgactgtgtttctgagcaataaatgacttaaaccaggtatggctgccgatggttatcttccagattggcttgaggacaacctctctgagggcattcgcgagtggtgggacctgaaacctggagccccgaaacccaaagccaaccagcaaaagcaggacgacggccggggtctggtgcttcctggctacaagtacctcggacccttcaacggactcgacaagggggagcccgtcaacgcggcggacgcagcggccctcgagcacgacaaggcctacgaccagcagctcaaagcgggtgacaatccgtacctgcggtataaccacgccgacgccgagtttcaggagcgtctgcaagaagatacgtcttttgggggcaacctcgggcgagcagtcttccaggccaagaagcgggttctcgaacctctcggtctggttgaggaaggcgctaagacggctcctggaaagaagagaccggtagagccatcacctcagcgttcccccgactcctccacgggcatcggcaagaaaggccaccagcccgcgagaaagagactgaactttgggcagactggcgactcggagtcagtccccgaccctcaaccaatcggagaaccaccagcaggcccctctggtctgggatctggtacaatggctgcaggcggtggcgctccaatggcagacaataacgaaggcgccgacggagtgggtagttcctcaggaaattggcattgcgattccacatggctgggcgacagagtcatcaccaccagcacccgaacctgggccctgcccacctacaacaaccatctctacaagcaaatctccaacgggacatcgggaggaagcactaacgacaacacctactttggctacagcaccccctgggggtattttgacttcaacagattccactgccacttctcaccacgtgactggcagcgactcatcaacaataactggggattccggcccaagagactcaacttcaagctcttcaacatccaggtcaaggaggtcacgcagaatgaaggcaccaagaccatcgccaataaccttaccagcacgattcaggtgtttacggactcggaataccagctcccgtacgtcctcggctctgcgcaccagggctgcctccctccgttcccggcggacgtcttcatgattcctcagtacgggtatctgaccctaaacaatggcagtcaggctgtgggccgttcctccttctactgcctggaatacttcccttctcaaatgctgaggacgggcaacaactttgaattcagctacaccttcgaggacgtgcctttccacagcagctacgcgcacagccagagcctggaccggctgatgaaccctctcatcgaccagtacctgtattacttatccagaactcagtccacaggaggaactcaaggtactcagcaattgttattttctcaagccgggcccgcaaacatgtyggctcaggccaagaactggctacctggaccgtgttaccgtcagcaacgagtttccacgacactgtcgcaaaacaacaacagcaattttgctggaccggtgccacca

SEQ ID NO: 94 - protein, 738 aa, synthetic construct; identical to SEQ ID NO: 84
  REGION 1..738: note = source = /note="Description of Artificial Sequence: Synthetic polypeptide"

SEQ ID NO: 95 - DNA, 2205 bp, synthetic construct
  misc_feature 1..2205: note = source = /note="Description of Artificial Sequence: Synthetic polynucleotide"
  source 1..2205: mol_type = other DNA
atgactgacggttaccttccagattggctagaggacaacctctctgaaggcgttcgagagtggtgggcgctgcaacctggagcccctaaacccaaggcaaatcaacaacatcaggacaacgctcggggtcttgtgcttccgggttacaaatacctcggacccggcaacggactcgacaagggggaacccgtcaacgcagcggacgcggcagccctcgagcacgacaaggcctacgaccagcagctcaaggccggtgacaacccctacctcaagtacaaccacgccgacgcggagttccagcagcggcttcagggcgacacatcgtttgggggcaacctcggcagagcagtcttccaggccaaaaagagggttcttgaacctcttggtctggttgagcaagcgggtgagacggctcctggaaagaagagaccgttgattgaatccccccagcagcccgactcctccacgggtatcggcaaaaaaggcaagcagccggctaaaaagaagctcgttttcgaagacgaaactggagcaggcgacggaccccctgagggatcaacttccggagccatgtctgatgacagtgagatgcgtgcagcagctggcggagctgcagtcgagggcggacaaggtgccgatggagtgggtaatgcctcgggtgattggcattgcgattccacctggtctgagggccacgtcacgaccaccagcaccagaacctgggtcttgcccacctacaacaaccacctctacaagcgactcggagagagcctgcagtccaacacctacaacggattctccaccccctggggatactttgacttcaaccgcttccactgccacttctcaccacgtgactggcagcgactcatcaacaacaactggggcatgcgacccaaagccatgcgggtcaaaatcttcaacatccaggtcaaggaggtcacgacgtcgaacggcgagacaacggtggctaataaccttaccagcacggttcagatctttgcggactcgtcgtacgaactgccgtacgtgatggatgcgggtcaagagggcagcctgcctccttttcccaacgacgtctttatggtgccccagtacggctactgtggactggtgaccggcaacacttcgcagcaacagactgacagaaatgccttctactgcctggagtactttccttcgcagatgctgcggactggcaacaactttgaaattacgtacagttttgagaaggtgcctttccactcgatgtacgcgcacagccagagcctggaccggctgatgaaccctctcatcgaccagtacctgtggggactgcaatcgaccaccaccggaaccaccctgaatgccgggactgccaccaccaactttaccaagctgcggcctaccaacttttccaactttaaaaagaactggctgcccgggccttcaatcaagcagcagggcttctcaaagactgccaatcaaaactacaagatccctgccaccgggtcagacagtctcatcaaatacgagacgcacagcactctggacggaagatggagtgccctgacccccggacctccaatggccacggctggacctgcggacagcaagttcagcaacagccagctcatctttgcggggcctaaacagaacggcaacacggccaccgtacccgggactctgatcttcacctctgaggaggagctggcagccaccaacgccaccgatacggacatgtggggcaacctacctggcggtgaccagagcaacagcaacctgccgaccgtggacagactgacagccttgggagccgtgcctggaatggtctggcaaaacagagacatttactaccagggtcccatttgggccaagattcctcataccgatggacactttcacccctcaccgctgattggtgggtttgggctgaaacacccgcctcctcaaatttttatcaagaacaccccggtacctgcgaatcctgcaacgaccttcagctctactccggtaaactccttcattactcagtacagcactggccaggtgtcggtgcagattgactgggagatccagaaggagcggtccaaacgctggaaccccgaggtccagtttacctccaactacggacagcaaaactctctgttgtgggctcccgatgcggctgggaaatacactgagcctagggctatcggtacccgctacctcacccaccacctgtaa

SEQ ID NO: 96 - protein, 734 aa, synthetic construct; identical to SEQ ID NO: 68
  REGION 1..734: note = source = /note="Description of Artificial Sequence: Synthetic polypeptide"

SEQ ID NO: 97 - DNA, 3128 bp, synthetic construct
  misc_feature 1..3128: note = source = /note="Description of Artificial Sequence: Synthetic polynucleotide"
  source 1..3128: mol_type = other DNA
gaattcgccctttctacggctgcgtcaactggaccaatgagaactttcccttcaacgattgcgtcgacaagatgttgatctggtgggaggagggcaagatgacggccaaggtcgtggagtccgccaaggccattctcggcggcagcaaagtgcgcgtggaccaaaagtgcaagccgtccgcccagatcgaccccacccccgtgatcgtcacctccaacaccaacatgtgcgccgtgattgacgggaacagcaccaccttcgagcaccagcagccgttgcgggaccggatgttcaagtttgaactcacccgccgtctggagcacgactttggcaaggtgacaaagcaggaagtcagagagttcttccgctgggcgcaggatcacgtgaccgaggtggcgcacgagttctacgtcagaaagggtggagccaacaagagacccgcccccgatgacgcggataaaagcgagcccaagcgggcctgcccctcagtcgcggatccatcgacgtcagacgcggaaggagctccggtggactttgccgacaggtaccaaaacaaatgttctcgtcacgcgggcatgcttcagatgctgtttccctgcaaaacatgcgagagaatgaatcagaatttcaacatttgcttcacgcacgggaccagagactgttcagaatgtttccccggcgtgtcagaatctcaaccggtcgtcagaaaaaagacgtatcggaaactctgtgcgattcatcatctgctggggcgggcacccgagattgcttgctcggcctgcgatctggtcaacgtggacctagatgactgtgtttctgagcaataaatgacttaaaccaggtatggctgccgatggttatcttccagattggctcgaggacaacctctctgagggcattcgcgagtggtgggacttgaaacctggagccccgaaacccaaagccaaccagcaaaagcaggacgacggccggggtctggtgcttcctggctacaagtacctcggacccttcaacggactcgacaagggggagcccgtcaacgcggcggacgcagcggccctcgagcacgacaaggcctacgaccagcagctcaaagcgggtgacaatccgtacctgcggtataaccacgccgacgccgagtttcaggagcgtctgcaagaagatacgtcttttgggggcaacctcgggcgagcagtcttccaggccaagaagcgggttctcgaacctctcggtctggttgaggaaggcgctaagacggctcctggaaagaagagaccggtagagccatcaccccagcgttctccagactcctctacgggcatcggcaagaaaggccagcagcccgcgaaaaagagactcaactttgggcagactggcgactcagagtcagtgcccgaccctcaaccaatcggagaaccccccgcaggcccctctggtctgggatctggtacaatggctgcaggcggtggcgctccaatggcagacaataacgaaggcgccgacggagtgggtagttcctcaggaaattggcattgcgattccacatggctgggcgacagagtcatcaccaccagcacccgaacctgggccctccccacctacaacaaccacctctacaagcaaatctccaacgggacttcgggaggaagcaccaacgacaacacctacttcggctacagcaccccctgggggtattttgactttaacagattccactgccacttctcaccacgtgactggcagcgactcatcaacaacaactggggattccggcccaagagactcaacttcaagctcttcaacatccaggtcaaggaggtcacgcagaatgaaggcaccaagaccatcgccaataaccttaccagcacgattcaggtctttacggactcggaataccagctcccgtacgtcctcggctctgcgcaccagggctgcctgcctccgttcccggcggacgtcttcatgattcctcagtacgggtacctgactctgaacaatggcagtcaggccgtgggccgttcctccttctactgcctggagtactttccttctcaaatgctgagaacgggcaacaactttgagttcagctaccagtttgaggacgtgccttttcacagcagctacgcgcacagccaaagcctggaccggctgatgaaccccctcatcgaccagtacctgtactacctgtctcggactcagtccacgggaggtaccgcaggaactcagcagttgctattttctcaggccgggcctaataacatgtcggctcaggccaaaaactggctacccgggccctgctaccggcagcaacgcgtctccacgacactgtcgcaaaataacaacagcaactgtaaatcccggtgtcgctatggcaacccacaaggacgacgaagagcgattttgcctggaccggtgccaccaagtatcatctgaatggcagagactctctgttttccgtccagcggagtcttaatgtttgggaaacagggagctggaaaagacaacgtggactatagcagcgttatgctaaccagtgaggaagaaattaaaaccaccaacccagtggccacggaacagtacggcgtggtggccgataacctgcaacagcaaaacgccgctcctattgtaggggccgtcaacagtcaaggagccttacctggcatggtctggcagaaccgggacgtgtacctgcagggtcctatctgggccaagattcctcacacggacggaaactttcatccctcgccgctgatgggaggctttggactgaaacacccgcctcctcagatcctgattaagaatacacctgttcccgcggatcctccaactaccttcagtcaagctaagctggcgtcgttcatcacgcagtacagcaccggacaggtcagcgtggaaattgaatgggagctgcagaaagaaaacagcaaacgctggaacccagagattcaatacacttccaactactacaaatctacaaatgtggacttcgctgttaacacagatggcacttattctgagcctcgccccattggcacccgttacctcacccgtaatctgtaattgctcgttaatcaataaaccggttgattcgtttcagttgaactttggtctctgcgaagggcgaattc

SEQ ID NO: 98 - protein, 738 aa, synthetic construct; identical to SEQ ID NO: 18
  REGION 1..738: note = source = /note="Description of Artificial Sequence: Synthetic polypeptide"

SEQ ID NO: 99 - DNA, 3128 bp, synthetic construct
  misc_feature 1..3128: note = source = /note="Description of Artificial Sequence: Synthetic polynucleotide"
  source 1..3128: mol_type = other DNA
gaattcgccctttctacggctgcgtcaactggaccaatgagaactttcccttcaacgattgcgtcgacaagatggtgatctggtgggaggagggcaagatgacggccaaggtcgtggagtccgccaaggccattctcggcggcagcaaagtgcgcgtggaccaaaagtgcaagtcgtccgcccagatcgaccccacccccgtgatcgtcacctccaacaccaacatgtgcgccgtgattgacgggaacagcaccaccttcgagcaccagcagccgttgcaggaccggatgttcaagtttgaactcacccgccgtctggagcacgactttggcaaggtgacaaagcaggaagtcagagagttcttccgctgggcgcaggatcacgtgaccgaggtggcgcacgagttctacgtcagaaagggtggagccaacaagagacccgcccccgatgacgcggataaaagcgagcccaagcgggcctgcccctcagtcgcggatccatcgacgtcagacgcggaaggagctccggtggactttgccgacaggtaccaaaacaaatgttctcgtcacgcgggcatgcttcagatgctgtttccctgcaaaacatgcgagagaatgaatcagaatttcaacatttgcttcacgcacgggaccagagactgttcagaatgtttccccggcgtgtcagaatctcaaccggttgtcagaaaaaagacgtatcggaaactctgtgcgattcatcatctgctggggcgggcacccgagattgcttgctcggcctgcgatctggtcaacgtggacctagatgactgtgtttctgagcaataaatgacttaaaccaggtatggctgccgatggttatcttccagattggctcgaggacaacctctctgagggcattcgcgagtggtgggacttgaaacctggagccccgaaacccaaagccaaccagcaaaagcaggacgacggccggggtctggtgcttcctggctacaagtacctcggacccttcaacggactcgacaagggggagcccgtcaacgcggcggacgcagcggccctcgagcacgacaaggcctacgaccagcagctcaaagcgggtgacaatccgtacctgcggtataaccacgccgacgccgagtttcaggagcgtctgcaagaagatacgtcttttgggggcaacctcgggcgagcagtcttccaggccaagaagcgggttctcgaacctctcggtctggttgaggaaggcgctaagacggctcctggaaagaagagaccggtagagccatcaccccagcgttctccagactcctctacgggcatcggcaagaaaggccagcagcccgcgaaaaagagactcaactttgggcagactggcgactcagagtcagtgcccgaccctcaaccaatcggagaaccccccgcaggcccctctggtctgggatctggtacaatggctgcaggcggtggcgctccaatggcagacaataacgaaggcgccgacggagtgggtagttcctcaggaaattggcattgcgattccacatggctgggcgacagagtcatcaccaccagcacccgaacctgggccctccccacctacaacaaccacctctacaagcaaatctccaacgggacttcgggaggaagcaccaacgacaacacctacttcggctacagcaccccctgggggtattttgactttaacagattccactgccacttctcaccacgtgactggcagcgactcatcaacaacaactggggattccggcccaagagacccaacttcaagctcttcaacatccaggtcaaggaggtcacgcagaatgaaggcaccaagaccatcgccaataaccttaccagcacgattcaggtctttacggactcggaataccagctcccgtacgtcctcggctctgcgcaccagggctgcctgcctccgttcccggcggacgtcttcatgattcctcagtacgggtacctgactctgaacaatggcagtcaggccgtgggccgttcctccttctactgcctggagtactttccttctcaaatgctgagaacgggcaacaactttgagttcagctaccagtttgaggacgtgccttttcacagcagctacgcgcacagccaaagcctggaccggctgatgaaccccctcatcgaccagtacctgtactacctgtctcggactcagtccacgggaggtaccgcaggaactcagcagttgctattttctcaggccgggcctaataacatgtcggctcaggccaaaaactggctacccgggccctgctaccggcagcaacgcgtctccacgacactgtcgcaaaataacaacagcaactttgcctggaccggtgccaccaagtatcatctgaatggcagagactctctggtaaatcccggtgtcgctatggcaacccacaaggacgacgaagagcgattttttccgtccagcggagtcttaatgtttgggaaacagggagctggaaaagacaacgtggactatagcagcgttatgctaaccagtgaggaagaaattaaaaccaccaacccagtggccacagaacagtacggcgtggtggccgataacctgcaacagcaaaacgccgctcctattgtaggggccgtcaacagtcaaggagccttacctggcatggtctggcagaaccgggacgtgtacctgcagggtcctatctgggccaagattcctcacacggacggaaactttcatccctcgccgctgatgggaggctttggactgaaacacccgcctcctcagatcctgattaagaatacacctgttcccgcggatcctccaactaccttcagtcaagctaagctggcgtcgttcatcacgcagtacagcaccggacaggtcagcgtggaaattgaatgggagctgcagaaagaaaacagcaaacgctggaacccagagattcaatacacttccaactactacaaatctacaaatgtggactttgctgttaacacagatggcacttattctgagcctcgccccattggcacccgttacctcacccgtaatctgtaattgcttgttaatcaataaaccggttgattcgtttcagttgaactttggtctctgcgaagggcgaattc

SEQ ID NO: 100 - protein, 738 aa, synthetic construct
  REGION 1..738: note = source = /note="Description of Artificial Sequence: Synthetic polypeptide"
MAADGYLPDWLEDNLSEGIREWWDLKPGAPKPKANQQKQDDGRGLVLPGYKYLGPFNGLDKGEPVNAADAAALEHDKAYDQQLKAGDNPYLRYNHADAEFQERLQEDTSFGGNLGRAVFQAKKRVLEPLGLVEEGAKTAPGKKRPVEPSPQRSPDSSTGIGKKGQQPAKKRLNFGQTGDSESVPDPQPIGEPPAGPSGLGSGTMAAGGGAPMADNNEGADGVGSSSGNWHCDSTWLGDRVITTSTRTWALPTYNNHLYKQISNGTSGGSTNDNTYFGYSTPWGYFDFNRFHCHFSPRDWQRLINNNWGFRPKRPNFKLFNIQVKEVTQNEGTKTIANNLTSTIQVFTDSEYQLPYVLGSAHQGCLPPFPADVFMIPQYGYLTLNNGSQAVGRSSFYCLEYFPSQMLRTGNNFEFSYQFEDVPFHSSYAHSQSLDRLMNPLIDQYLYYLSRTQSTGGTAGTQQLLFSQAGPNNMSAQAKNWLPGPCYRQQRVSTTLSQNNNSNFAWTGATKYHLNGRDSLVNPGVAMATHKDDEERFFPSSGVLMFGKQGAGKDNVDYSSVMLTSEEEIKTTNPVATEQYGVVADNLQQQNAAPIVGAVNSQGALPGMVWQNRDVYLQGPIWAKIPHTDGNFHPSPLMGGFGLKHPPPQILIKNTPVPADPPTTFSQAKLASFITQYSTGQVSVEIEWELQKENSKRWNPEIQYTSNYYKSTNVDFAVNTDGTYSEPRPIGTRYLTRNL

SEQ ID NO: 101 - protein, 738 aa, synthetic construct
  REGION 1..738: note = source = /note="Description of Artificial Sequence: Synthetic polypeptide"
MAADGYLPDWLEDNLSEGIREWWDLKPGAPKPKANQQKQDDGRGLVLPGYKYLGPFNGLDKGEPVNAADAAALEHDKAYDQQLKAGDNPYLRYNHADAEFQERLQEDTSFGGNLGRAVFQAKKRVLEPLGLVEEAAKTAPGKKRPVEPSPQRSPDSSTGIGKKGQQPAKKRLNFGQTGDSESVPDPQPIGEPPAGPSGLGSGTMAAGGGAPMADNNEGADGVGSSSGNWHCDSTWLGDRVITTSTRTWALPTYNNHLYKQISNGTSGGSTNDNTYFGYSTPWGYFDFNRFHCHFSPRDWQRLINNNWGFRPKRLSFKLFNIQVKEVTQNEGTKTIANNLTSTIQVFTDSEYQLPYVLGSAHQGCLPPFPADVFMIPQYGYLTLNNGSQAVGRSSFYCLEYFPSQMLRTGNNFEFSYTFEDVPFHSSYAHSQSLDRLMNPLIDQYLYYLSRTQSTGGTQGTQQLLFSQAGPANMSAQAKNWLPGPCYRQQRVSTTLSQNNNSNFAWTGATKYHLNGRDSLVNPGVAMATHKDDEERFFPSSGVLMFGKQGAGRDNVDYSSVMLTSEEEIKTTNPVATEQYGVVADNLQQTNTGPIVGNVNSQGALPGMVWQNRDVYLQGPIWAKIPHTDGNFHPSPLMGGFGLKHPPPQILIKNTPVPADPPTTFSQAKLASFITQYSTGQVSVEIEWELQKENSKRWNPEIQYTSNYYKSTNVDFAVNTEGTYSEPRPIGTRYLTRNL

SEQ ID NO: 102 - DNA, 2172 bp, synthetic construct
  misc_feature 1..2172: note = source = /note="Description of Artificial Sequence: Synthetic polynucleotide"
  source 1..2172: mol_type = other DNA
atgtcttttgttgatcaccctccagattggttggaagaagttggtgaaggtcttcgcgagtttttgggccttgaagcgggcccaccgaaaccaaaacccaatcagcagcatcaagatcaagcccgtggtcttgtgctgcctggttataactatctcggacccggaaacggtctcgatcgaggagagcctgtcaacagggcagacgaggtcgcgcgagagcacgacatctcgtacaacgagcagcttgaggcgggagacaacccctacctcaagtacaaccacgcggacgccgagtttcaggagaagctcgccgacgacacatccttcgggggaaacctcggaaaggcagtctttcaggccaagaaaagggttctcgaaccttttggcctggttgaagagggtgctaagacggcccctaccggaaagcggatagacgaccactttccaaaaagaaagaaggctcggaccgaagaggactccaagccttccacctcgtcagacgccgaagctggacccagcggatcccagcagctgcaaatcccagcccaaccagcctcaagtttgggagctgatacaatgtctgcgggaggtggcggcccattgggcgacaataaccaaggtgccgatggagtgggcaatgcctcgggagattggcattgcgattccacgtggatgggggacagagtcgtcaccaagtccacccgaacctgggtgctgcccagctacaacaaccaccagtaccgagagatcaaaagcggctccgtcgacggaagcaacgccaacgcctactttggatacagcaccccctgggggtactttgactttaaccgcttccacagccactggagcccccgagactggcaaagactcatcaacaactactggggcttcagaccccggtccctcagagtcaaaatcttcaacattcaagtcaaagaggtcacggtgcaggactccaccaccaccatcgccaacaacctcacctccaccgtccaagtgtttacggacgacgactaccagctgccctacgtcgtcggcaacgggaccgagggatgcctgccggccttccctccgcaggtctttacgctgccgcagtacggttacgcgacgctgaaccgcgacaacacagaaaatcccaccgagaggagcagcttcttctgcctagagtactttcccagcaagatgctgagaacgggcaacaactttgagtttacctacaactttgaggaggtgcccttccactccagcttcgctcccagtcagaacctgttcaagctggccaacccgctggtggaccagtacttgtaccgcttcgtgagcacaaataacactggcggagtccagttcaacaagaacctggccgggagatacgccaacacctacaaaaactggttcccggggcccatgggccgaacccagggctggaacctgggctccggggtcaaccgcgccagtgtcagcgccttcgccacgaccaataggatggagctcgagggcgcgagttaccaggtgcccccgcagccgaacggcatgaccaacaacctccagggcagcaacacctatgccctggagaacactatgatcttcaacagccagccggcgaacccgggcaccaccgccacgtacctcgagggcaacatgctcatcaccagcgagagcgagacgcagccggtgaaccgcgtggcgtacaacgtcggcgggcagatggccaccaacaaccagagctccaccactgcccccgcgaccggcacgtacaacctccaggaaatcgtgcccggcagcgtgtggatggagagggacgtgtacctccaaggacccatctgggccaagatcccagagacgggggcgcactttcacccctctccggccatgggcggattcggactcaaacacccaccgcccatgatgctcatcaagaacacgcctgtgcccggaaatatcaccagcttctcggacgtgcccgtcagcagcttcatcacccagtacagcaccgggcaggtcaccgtggagatggagtgggagctcaagaaggaaaactccaagaggtggaacccagagatccagtacacaaacaactacaacgacccccagtttgtggactttgccccggacagcaccggggaatacagaaccaccagacctatcggaacccgataccttacccgacccctt

SEQ ID NO: 103 - protein, 720 aa, synthetic construct
  REGION 1..720: note = source = /note="Description of Artificial Sequence: Synthetic polypeptide"
MSFVDHPPDWLEEVGEGLREFLGLEAGPPKPKPNQQHQDQARGLVLPGYNYLGPGNGLDRGEPVNRADEVAREHDISYNEQLEAGDNPYLKYNHADAEFQEKLADDTSFGGNLGKAVFQAKKRVLEPFGLVEEGAKTAPTGKRIDDHFPKRKKARTEEDSKPSTSSDAEAGPSGSQQLQIPAQPASSLGADTMSAGGGGPLGDNNQGADGVGNASGDWHCDSTWMGDRVVTKSTRTWVLPSYNNHQYREIKSGSVDGSNANAYFGYSTPWGYFDFNRFHSHWSPRDWQRLINNYWGFRPRSLRVKIFNIQVKEVTVQDSTTTIANNLTSTVQVFTDDDYQLPYVVGNGTEGCLPAFPPQVFTLPQYGYATLNRDNTENPTERSSFFCLEYFPSKMLRTGNNFEFTYNFEEVPFHSSFAPSQNLFKLANPLVDQYLYRFVSTNNTGGVQFNKNLAGRYANTYKNWFPGPMGRTQGWNLGSGVNRASVSAFATTNRMELEGASYQVPPQPNGMTNNLQGSNTYALENTMIFNSQPANPGTTATYLEGNMLITSESETQPVNRVAYNVGGQMATNNQSSTTAPATGTYNLQEIVPGSVWMERDVYLQGPIWAKIPETGAHFHPSPAMGGFGLKHPPPMMLIKNTPVPGNITSFSDVPVSSFITQYSTGQVTVEMEWELKKENSKRWNPEIQYTNNYNDPQFVDFAPDSTGEYRTTRPIGTRYL

SEQ ID NO: 104 - protein, 724 aa, Adeno-associated virus 5
MSFVDHPPDWLEEVGEGLREFLGLEAGPPKPKPNQQHQDQARGLVLPGYNYLGPGNGLDRGEPVNRADEVAREHDISYNEQLEAGDNPYLKYNHADAEFQEKLADDTSFGGNLGKAVFQAKKRVLEPFGLVEEGAKTAPTGKRIDDHFPKRKKARTEEDSKPSTSSDAEAGPSGSQQLQIPAQPASSLGADTMSAGGGGPLGDNNQGADGVGNASGDWHCDSTWMGDRVVTKSTRTWVLPSYNNHQYREIKSGSVDGSNANAYFGYSTPWGYFDFNRFHSHWSPRDWQRLINNYWGFRPRSLRVKIFNIQVKEVTVQDSTTTIANNLTSTVQVFTDDDYQLPYVVGNGTEGCLPAFPPQVFTLPQYGYATLNRDNTENPTERSSFFCLEYFPSKMLRTGNNFEFTYNFEEVPFHSSFAPSQNLFKLANPLVDQYLYRFVSTNNTGGVQFNKNLAGRYANTYKNWFPGPMGRTQGWNLGSGVNRASVSAFATTNRMELEGASYQVPPQPNGMTNNLQGSNTYALENTMIFNSQPANPGTTATYLEGNMLITSESETQPVNRVAYNVGGQMATNNQSSTTAPATGTYNLQEIVPGSVWMERDVYLQGPIWAKIPETGAHFHPSPAMGGFGLKHPPPMMLIKNTPVPGNITSFSDVPVSSFITQYSTGQVTVEMEWELKKENSKRWNPEIQYTNNYNDPQFVDFAPDSTGEYRTTRPIGTRYLTRPL

SEQ ID NO: 105 - DNA, 2175 bp, synthetic construct
  misc_feature 1..2175: note = source = /note="Description of Artificial Sequence: Synthetic polynucleotide"
  source 1..2175: mol_type = other DNA
atgtcttttgttgatcaccctccagattggttggaagaagttggtgaaggtcttcgcgagtttttgggccttgaagcgggcccaccgaaaccaaaacccaatcagcagcatcaagatcaagcccgtggtcttgtgctgcctggttataactatctcggacccggaaacggtctcgatcgaggagagcctgtcaacagggcagacgaggtcgcgcgagagcacgacatctcgtacaacgagcagcttgaggcgggagacaacccctacctcaagtacaaccacgcggacgccgagtttcaggagaagctcgccgacgacacatccttcgggggaaacctcggaaaggcagtctttcaggccaagaaaagggttctcgaaccttttggcctggttgaagagggtgctaagacggcccctaccggaaagcggatagacgaccactttccaaaaagaaagaaggctcggaccgaagaggactccaagccttccacctcgtcagacgccgaagctggacccagcggatcccagcagctgcaaatcccagcccaaccagcctcaagtttgggagctgatacaatgtctgcgggaggtggcggcccattgggcgacaataaccaaggtgccgatggagtgggcaatgcctcgggagattggcattgcgattccacgtggatgggggacagagtcgtcaccaagtccacccgaacctgggtgctgcccagctacaacaaccaccagtaccgagagatcaaaagcggctccgtcgacggaagcaacgccaacgcctactttggatacagcaccccctgggggtactttgactttaaccgcttccacagccactggagcccccgagactggcaaagactcatcaacaactactggggcttcagaccccggtccctcagagtcaaaatcttcaacattcaagtcaaagaggtcacggtgcaggactccaccaccaccatcgccaacaacctcacctccaccgtccaagtgtttacggacgacgactaccagctgccctacgtcgtcggcaacgggaccgagggatgcctgccggccttccctccgcaggtctttacgctgccgcagtacggttacgcgacgctgaaccgcgacaacacagaaaatcccaccgagaggagcagcttcttctgcctagagtactttcccagcaagatgctgagaacgggcaacaactttgagtttacctacaactttgaggaggtgcccttccactccagcttcgctcccagtcagaacctgttcaagctggccaacccgctggtggaccagtacttgtaccgcttcgtgagcacaaataacactggcggagtccagttcaacaagaacctggccgggagatacgccaacacctacaaaaactggttcccggggcccatgggccgaacccagggctggaacctgggctccggggtcaaccgcgccagtgtcagcgccttcgccacgaccaataggatggagctcgagggcgcgagttaccaggtgcccccgcagccgaacggcatgaccaacaacctccagggcagcaacacctatgccctggagaacactatgatcttcaacagccagccggcgaacccgggcaccaccgccacgtacctcgagggcaacatgctcatcaccagcgagagcgagacgcagccggtgaaccgcgtggcgtacaacgtcggcgggcagatggccaccaacaaccagagctccaccactgcccccgcgaccggcacgtacaacctccaggaaatcgtgcccggcagcgtgtggatggagagggacgtgtacctccaaggacccatctgggccaagatcccagagacgggggcgcactttcacccctctccggccatgggcggattcggactcaaacacccaccgcccatgatgctcatcaagaacacgcctgtgcccggaaatatcaccagcttctcggacgtgcccgtcagcagcttcatcacccagtacagcaccgggcaggtcaccgtggagatggagtgggagctcaagaaggaaaactccaagaggtggaacccagagatccagtacacaaacaactacaacgacccccagtttgtggactttgccccggacagcaccggggaatacagaaccaccagacctatcggaacccgataccttacccgacccctttaa

SEQ ID NO: 106 - DNA, 2208 bp, synthetic construct
  misc_feature 1..2208: note = source = /note="Description of Artificial Sequence: Synthetic polynucleotide"
  source 1..2208: mol_type = other DNA
atggctgccgatggttatcttccagattggctcgaggacaacctctctgagggcattcgcgagtggtgggacttgaaacctggagccccgaaacccaaagccaaccagcaaaagcaggacgacggccggggtctggtgcttcctggctacaagtacctcggacccttcaacggactcgacaagggggagcccgtcaacgcggcggatgcagcggccctcgagcacgacaaggcctacgaccagcagctcaaagcgggtgacaatccgtacctgcggtataaccacgccgacgccgagtttcaggagcgtctgcaagaagatacgtcttttgggggcaacctcgggcgagcagtcttccaggccaagaagagggttctcgaaccttttggtctggttgaggaaggtgctaagacggctcctggaaagaaacgtccggtagagcagtcgccacaagagccagactcctcctcgggcattggcaagacaggccagcagcccgctaaaaagagactcaattttggtcagactggcgactcagagtcagtccccgacccacaacctctcggagaacctccagcaacccccgctgctgtgggacctactacaatggcttcaggcggtggcgcaccaatggcagacaataacgaaggcgccgacggagtgggtaatgcctcaggaaattggcattgcgattccacatggctgggcgacagagtcatcaccaccagcacccgaacatgggccttgcccacctataacaaccacctctacaagcaaatctccagtgcttcaacgggggccagcaacgacaaccactacttcggctacagcaccccctgggggtattttgatttcaacagattccactgccatttctcaccacgtgactggcagcgactcatcaacaacaattggggattccggcccaagagactcaacttcaagctcttcaacatccaagtcaaggaggtcacgacgaatgatggcgtcacgaccatcgctaataaccttaccagcacggttcaagtcttctcggactcggagtaccagttgccgtacgtcctcggctctgcgcaccagggctgcctccctccgttcccggcggacgtgttcatgattccgcagtacggctacctaacgctcaacaatggcagccaggcagtgggacggtcatccttttactgcctggaatatttcccatcgcagatgctgagaacgggcaataactttaccttcagctacaccttcgaggacgtgcctttccacagcagctacgcgcacagccagagcctggaccggctgatgaatcctctcatcgaccagtacctgtattacctgaacagaactcagaatcagtccggaagtgcccaaaacaaggacttgctgtttagccgggggtctccagctggcatgtctgttcagcccaaaaactggctacctggaccctgttaccggcagcagcgcgtttctaaaacaaaaacagacaacaacaacagcaactttacctggactggtgcttcaaaatataaccttaatgggcgtgaatctataatcaaccctggcactgctatggcctcacacaaagacgacaaagacaagttctttcccatgagcggtgtcatgatttttggaaaggagagcgccggagcttcaaacactgcattggacaatgtcatgatcacagacgaagaggaaatcaaagccactaaccccgtggccaccgaaagatttgggactgtggcagtcaatctccagagcagcagcacagaccctgcgaccggagatgtgcatgttatgggagccttacctggaatggtgtggcaagacagagacgtatacctgcagggtcctatttgggccaaaattcctcacacggatggacactttcacccgtctcctctcatgggcggctttggacttaagcacccgcctcctcagatcctcatcaaaaacacgcctgttcctgcgaatcctccggcagagttttcggctacaaagtttgcttcattcatcacccagtattccacaggacaagtgagcgtggagattgaatgggagctgcagaaagaaaacagcaaacgctggaatcccgaagtgcagtatacatctaactatgcaaaatctgccaacgttgatttcactgtggacaacaatggactttatactgagcctcgccccattggcacccgttacctcacccgtcccctg

SEQ ID NO: 107 - protein, 736 aa, Adeno-associated virus 6
MAADGYLPDWLEDNLSEGIREWWDLKPGAPKPKANQQKQDDGRGLVLPGYKYLGPFNGLDKGEPVNAADAAALEHDKAYDQQLKAGDNPYLRYNHADAEFQERLQEDTSFGGNLGRAVFQAKKRVLEPFGLVEEGAKTAPGKKRPVEQSPQEPDSSSGIGKTGQQPAKKRLNFGQTGDSESVPDPQPLGEPPATPAAVGPTTMASGGGAPMADNNEGADGVGNASGNWHCDSTWLGDRVITTSTRTWALPTYNNHLYKQISSASTGASNDNHYFGYSTPWGYFDFNRFHCHFSPRDWQRLINNNWGFRPKRLNFKLFNIQVKEVTTNDGVTTIANNLTSTVQVFSDSEYQLPYVLGSAHQGCLPPFPADVFMIPQYGYLTLNNGSQAVGRSSFYCLEYFPSQMLRTGNNFTFSYTFEDVPFHSSYAHSQSLDRLMNPLIDQYLYYLNRTQNQSGSAQNKDLLFSRGSPAGMSVQPKNWLPGPCYRQQRVSKTKTDNNNSNFTWTGASKYNLNGRESIINPGTAMASHKDDKDKFFPMSGVMIFGKESAGASNTALDNVMITDEEEIKATNPVATERFGTVAVNLQSSSTDPATGDVHVMGALPGMVWQDRDVYLQGPIWAKIPHTDGHFHPSPLMGGFGLKHPPPQILIKNTPVPANPPAEFSATKFASFITQYSTGQVSVEIEWELQKENSKRWNPEVQYTSNYAKSANVDFTVDNNGLYTEPRPIGTRYLTRPL

SEQ ID NO: 108 - protein, 623 aa, Adeno-associated virus 6
MPGFYEIVIKVPSDLDEHLPGISDSFVNWVAEKEWELPPDSDMDLNLIEQAPLTVAEKLQRDFLVQWRRVSKAPEALFFVQFEKGESYFHLHILVETTGVKSMVLGRFLSQIRDKLVQTIYRGIEPTLPNWFAVTKTRNGAGGGNKVVDECYIPNYLLPKTQPELQWAWTNMEEYISACLNLAERKRLVAHDLTHVSQTQEQNKENLNPNSDAPVIRSKTSARYMELVGWLVDRGITSEKQWIQEDQASYISFNAASNSRSQIKAALDNAGKIMALTKSAPDYLVGPAPPADIKTNRIYRILELNGYDPAYAGSVFLGWAQKRFGKRNTIWLFGPATTGKTNIAEAIAHAVPFYGCVNWTNENFPFNDCVDKMVIWWEEGKMTAKVVESAKAILGGSKVRVDQKCKSSAQIDPTPVIVTSNTNMCAVIDGNSTTFEHQQPLQDRMFKFELTRRLEHDFGKVTKQEVKEFFRWAQDHVTEVAHEFYVRKGGANKRPAPDDADKSEPKRACPSVADPSTSDAEGAPVDFADRYQNKCSRHAGMLQMLFPCKTCERMNQNFNICFTHGTRDCSECFPGVSESQPVVRKRTYRKLCAIHHLLGRAPEIACSACDLVNVDLDDCVSEQ

SEQ ID NO: 109 - DNA, 4683 bp, Adeno-associated virus 6
  source 1..4683: mol_type = genomic DNA
ttggccactccctctctgcgcgctcgctcgctcactgaggccgggcgaccaaaggtcgcccgacgcccgggctttgcccgggcggcctcagtgagcgagcgagcgcgcagagagggagtggccaactccatcactaggggttcctggaggggtggagtcgtgacgtgaattacgtcatagggttagggaggtcctgtattagaggtcacgtgagtgttttgcgacattttgcgacaccatgtggtcacgctgggtatttaagcccgagtgagcacgcagggtctccattttgaagcgggaggtttgaacgcgcagcgccatgccggggttttacgagattgtgattaaggtccccagcgaccttgacgagcatctgcccggcatttctgacagctttgtgaactgggtggccgagaaggaatgggagttgccgccagattctgacatggatctgaatctgattgagcaggcacccctgaccgtggccgagaagctgcagcgcgacttcctggtccagtggcgccgcgtgagtaaggccccggaggccctcttctttgttcagttcgagaagggcgagtcctacttccacctccatattctggtggagaccacgggggtcaaatccatggtgctgggccgcttcctgagtcagattagggacaagctggtgcagaccatctaccgcgggatcgagccgaccctgcccaactggttcgcggtgaccaagacgcgtaatggcgccggaggggggaacaaggtggtggacgagtgctacatccccaactacctcctgcccaagactcagcccgagctgcagtgggcgtggactaacatggaggagtatataagcgcgtgtttaaacctggccgagcgcaaacggctcgtggcgcacgacctgacccacgtcagccagacccaggagcagaacaaggagaatctgaaccccaattctgacgcgcctgtcatccggtcaaaaacctccgcacgctacatggagctggtcgggtggctggtggaccggggcatcacctccgagaagcagtggatccaggaggaccaggcctcgtacatctccttcaacgccgcctccaactcgcggtcccagatcaaggccgctctggacaatgccggcaagatcatggcgctgaccaaatccgcgcccgactacctggtaggccccgctccgcccgccgacattaaaaccaaccgcatttaccgcatcctggagctgaacggctacgaccctgcctacgccggctccgtctttctcggctgggcccagaaaaggttcggaaaacgcaacaccatctggctgtttgggccggccaccacgggcaagaccaacatcgcggaagccatcgcccacgccgtgcccttctacggctgcgtcaactggaccaatgagaactttcccttcaacgattgcgtcgacaagatggtgatctggtgggaggagggcaagatgacggccaaggtcgtggagtccgccaaggccattctcggcggcagcaaggtgcgcgtggaccaaaagtgcaagtcgtccgcccagatcgatcccacccccgtgatcgtcacctccaacaccaacatgtgcgccgtgattgacgggaacagcaccaccttcgagcaccagcagccgttgcaggaccggatgttcaaatttgaactcacccgccgtctggagcatgactttggcaaggtgacaaagcaggaagtcaaagagttcttccgctgggcgcaggatcacgtgaccgaggtggcgcatgagttctacgtcagaaagggtggagccaacaagagacccgcccccgatgacgcggataaaagcgagcccaagcgggcctgcccctcagtcgcggatccatcgacgtcagacgcggaaggagctccggtggactttgccgacaggtaccaaaacaaatgttctcgtcacgcgggcatgcttcagatgctgtttccctgcaaaacatgcgagagaatgaatcagaatttcaacatttgcttcacgcacgggaccagagactgttcagaatgtttccccggcgtgtcagaatctcaaccggtcgtcagaaagaggacgtatcggaaactctgtgccattcatcatctgctggggcgggctcccgagattgcttgctcggcctgcgatctggtcaacgtggatctggatgactgtgtttctgagcaataaatgacttaaaccaggtatggctgccgatggttatcttccagattggctcgaggacaacctctctgagggcattcgcgagtggtgggacttgaaacctggagccccgaaacccaaagccaaccagcaaaagcaggacgacggccggggtctggtgcttcctggctacaagtacctcggacccttcaacggactcgacaagggggagcccgtcaacgcggcggatgcagcggccctcgagcacgacaaggcctacgaccagcagctcaaagcgggtgacaatccgtacctgcggtataaccacgccgacgccgagtttcaggagcgtctgcaagaagatacgtcttttgggggcaacctcgggcgagcagtcttccaggccaagaagagggttctcgaaccttttggtctggttgaggaaggtgctaagacggctcctggaaagaaacgtccggtagagcagtcgccacaagagccagactcctcctcgggcattggcaagacaggccagcagcccgctaaaaagagactcaattttggtcagactggcgactcagagtcagtccccgacccacaacctctcggagaacctccagcaacccccgctgctgtgggacctactacaatggcttcaggcggtggcgcaccaatggcagacaataacgaaggcgccgacggagtgggtaatgcctcaggaaattggcattgcgattccacatggctgggcgacagagtcatcaccaccagcacccgaacatgggccttgcccacctataacaaccacctctacaagcaaatctccagtgcttcaacgggggccagcaacgacaaccactacttcggctacagcaccccctgggggtattttgatttcaacagattccactgccatttctcaccacgtgactggcagcgactcatcaacaacaattggggattccggcccaagagactcaacttcaagctcttcaacatccaagtcaaggaggtcacgacgaatgatggcgtcacgaccatcgctaataaccttaccagcacggttcaagtcttctcggactcggagtaccagttgccgtacgtcctcggctctgcgcaccagggctgcctccctccgttcccggcggacgtgttcatgattccgcagtacggctacctaacgctcaacaatggcagccaggcagtgggacggtcatccttttactgcctggaatatttcccatcgcagatgctgagaacgggcaataactttaccttcagctacaccttcgaggacgtgcctttccacagcagctacgcgcacagccagagcctggaccggctgatgaatcctctcatcgaccagtacctgtattacctgaacagaactcagaatcagtccggaagtgcccaaaacaaggacttgctgtttagccgggggtctccagctggcatgtctgttcagcccaaaaactggctacctggaccctgttaccggcagcagcgcgtttctaaaacaaaaacagacaacaacaacagcaactttacctggactggtgcttcaaaatataaccttaatgggcgtgaatctataatcaaccctggcactgctatggcctcacacaaagacgacaaagacaagttctttcccatgagcggtgtcatgatttttggaaaggagagcgccggagcttcaaacactgcattggacaatgtcatgatcacagacgaagaggaaatcaaagccactaaccccgtggccaccgaaagatttgggactgtggcagtcaatctccagagcagcagcacagaccctgcgaccggagatgtgcatgttatgggagccttacctggaatggtgtggcaagacagagacgtatacctgcagggtcctatttgggccaaaattcctcacacggatggacactttcacccgtctcctctcatgggcggctttggacttaagcacccgcctcctcagatcctcatcaaaaacacgcctgttcctgcgaatcctccggcagagttttcggctacaaagtttgcttcattcatcacccagtattccacaggacaagtgagcgtggagattgaatgggagctgcagaaagaaaacagcaaacgctggaatcccgaagtgcagtatacatctaactatgcaaaatctgccaacgttgatttcactgtggacaacaatggactttatactgagcctcgccccattggcacccgttacctcacccgtcccctgtaattgtgtgttaatcaataaaccggttaattcgtgtcagttgaactttggtctcatgtcgttattatcttatctggtcaccatagcaaccggttacacattaactgcttagttgcgcttcgcgaatacccctagtgatggagttgcccactccctctatgcgcgctcgctcgctcggtggggccggcagagcagagctctgccgtctgcggacctttggtccgcaggccccaccgagcgagcgagcgcgcatagagggagtgggcaa

SEQ ID NO: 110 - DNA, 2211 bp, synthetic construct
  misc_feature 1..2211: note = source = /note="Description of Artificial Sequence: Synthetic polynucleotide"
  source 1..2211: mol_type = other DNA
atggctgccgatggttatcttccagattggctcgaggacaacctctctgagggcattcgcgagtggtgggacttgaaacctggagccccgaaacccaaagccaaccagcaaaagcaggacgacggccggggtctggtgcttcctggctacaagtacctcggacccttcaacggactcgacaagggggagcccgtcaacgcggcggatgcagcggccctcgagcacgacaaggcctacgaccagcagctcaaagcgggtgacaatccgtacctgcggtataaccacgccgacgccgagtttcaggagcgtctgcaagaagatacgtcttttgggggcaacctcgggcgagcagtcttccaggccaagaagagggttctcgaaccttttggtctggttgaggaaggtgctaagacggctcctggaaagaaacgtccggtagagcagtcgccacaagagccagactcctcctcgggcattggcaagacaggccagcagcccgctaaaaagagactcaattttggtcagactggcgactcagagtcagtccccgacccacaacctctcggagaacctccagcaacccccgctgctgtgggacctactacaatggcttcaggcggtggcgcaccaatggcagacaataacgaaggcgccgacggagtgggtaatgcctcaggaaattggcattgcgattccacatggctgggcgacagagtcatcaccaccagcacccgaacatgggccttgcccacctataacaaccacctctacaagcaaatctccagtgcttcaacgggggccagcaacgacaaccactacttcggctacagcaccccctgggggtattttgatttcaacagattccactgccatttctcaccacgtgactggcagcgactcatcaacaacaattggggattccggcccaagagactcaacttcaagctcttcaacatccaagtcaaggaggtcacgacgaatgatggcgtcacgaccatcgctaataaccttaccagcacggttcaagtcttctcggactcggagtaccagttgccgtacgtcctcggctctgcgcaccagggctgcctccctccgttcccggcggacgtgttcatgattccgcagtacggctacctaacgctcaacaatggcagccaggcagtgggacggtcatccttttactgcctggaatatttcccatcgcagatgctgagaacgggcaataactttaccttcagctacaccttcgaggacgtgcctttccacagcagctacgcgcacagccagagcctggaccggctgatgaatcctctcatcgaccagtacctgtattacctgaacagaactcagaatcagtccggaagtgcccaaaacaaggacttgctgtttagccgggggtctccagctggcatgtctgttcagcccaaaaactggctacctggaccctgttaccggcagcagcgcgtttctaaaacaaaaacagacaacaacaacagcaactttacctggactggtgcttcaaaatataaccttaatgggcgtgaatctataatcaaccctggcactgctatggcctcacacaaagacgacaaagacaagttctttcccatgagcggtgtcatgatttttggaaaggagagcgccggagcttcaaacactgcattggacaatgtcatgatcacagacgaagaggaaatcaaagccactaaccccgtggccaccgaaagatttgggactgtggcagtcaatctccagagcagcagcacagaccctgcgaccggagatgtgcatgttatgggagccttacctggaatggtgtggcaagacagagacgtatacctgcagggtcctatttgggccaaaattcctcacacggatggacactttcacccgtctcctctcatgggcggctttggacttaagcacccgcctcctcagatcctcatcaaaaacacgcctgttcctgcgaatcctccggcagagttttcggctacaaagtttgcttcattcatcacccagtattccacaggacaagtgagcgtggagattgaatgggagctgcagaaagaaaacagcaaacgctggaatcccgaagtgcagtatacatctaactatgcaaaatctgccaacgttgatttcactgtggacaacaatggactttatactgagcctcgccccattggcacccgttacctcacccgtcccctgtaa

SEQ ID NO: 111 - protein, 736 aa, synthetic construct; identical to SEQ ID NO: 107
  REGION 1..736: note = source = /note="Description of Artificial Sequence: Synthetic polypeptide"

SEQ ID NO: 112 - protein, 736 aa, synthetic construct
  REGION 1..736: note = source = /note="Description of Artificial Sequence: Synthetic polypeptide"
MAADGYLPDWLEDNLSEGIREWWDLKPGAPKPKANQQKQDDGRGLVLPGYKYLGPFNGLDKGEPVNAADAAALEHDKAYDQQLKAGDNPYLRYNHADAEFQERLQEDTSFGGNLGRAVFQAKKRVLEPFGLVEEGAKTAPGKKRPVEQSPQEPDSSSGIGKTGQQPAKKRLNFGQTGDSESVPDPQPLGEPPATPAAVGPTTMASGGGAPMADNNEGADGVGNASGNWHCDSTWLGDRVITTSTRTWALPTYNNHLYKQISSASTGASNDNHYFGYSTPWGYFDFNRFHCHFSPRDWQRLINNNWGFRPKRLNFKLFNIQVKEVTTNDGVTTIANNLTSTVQVFSDSEYQLPYVLGSAHQGCLPPFPADVFMIPQYGYLTLNNGSQAVGRSSFYCLEYFPSQMLRTGNNFTFSYTFEDVPFHSSYAHSQSLDRLMNPLIDQYLYYLNRTQNQSGSAQNKDLLFSRGSPAGMSVQPKNWLPGPCYRQQRVSKTKTDNNNSNFTWTGASKYNLNGRESIINPGTAMASHKDDEDKFFPMSGVMIFGKESAGASNTALDNVMITDEEEIKATNPVATERFGTVAVNLQSSSTDPATGDVHVMGALPGMVWQDRDVYLQGPIWAKIPHTDGHFHPSPLMGGFGLKHPPPQILIKNTPVPANPPAEFSATKFASFITQYSTGQVSVEIEWELQKENSKRWNPEVQYTSNYAKSANVDFTVDNNGLYTEPRPIGTRYLTRPL

SEQ ID NO: 113 - protein, 736 aa, synthetic construct
  REGION 1..736: note = source = /note="Description of Artificial Sequence: Synthetic polypeptide"
MAADGYLPDWLEDNLSEGIREWWDLKPGAPKPKANQQKQDDGRGLVLPGYKYLGPFNGLDKGEPVNAADAAALEHDKAYDQQLKAGDNPYLRYNHADAEFQERLQEDTSFGGNLGRAVFQAKKRVLEPLGLVEEGAKTAPGKKRPVEQSPQEPDSSSGIGKTGQQPAKKRLNFGQTGDSESVPDPQPLGEPPATPAAVGPTTMASGGGAPMADNNEGADGVGNASGNWHCDSTWLGDRVITTSTRTWALPTYNNHLYKQISSASTGASNDNHYFGYSTPWGYFDFNRFHCHFSPRDWQRLINNNWGFRPKRLNFKLFNIQVKEVTTNDGVTTIANNLTSTVQVFSDSEYQLPYVLGSAHQGCLPPFPADVFMIPQYGYLTLNNGSQAVGRSSFYCLEYFPSQMLRTGNNFTFSYTFEDVPFHSSYAHSQSLDRLMNPLIDQYLYYLNRTQNQSGSAQNKDLLFSRGSPAGMSVQPKNWLPGPCYRQQRVSKTKTDNNNSNFTWTGASKYNLNGRESIINPGTAMASHKDDEDKFFPMSGVMIFGKESAGASNTALDNVMITDEEEIKATNPVATERFGTVAVNLQSSSTDPATGDVHVMGALPGMVWQDRDVYLQGPIWAKIPHTDGHFHPSPLMGGFGLKHPPPQILIKNTPVPANPPAEFSATKFASFITQYSTGQVSVEIEWELQKENSKRWNPEVQYTSNYAKSANVDFTVDNNGLYTEPRPIGTRYLTRPL

SEQ ID NO: 114 - protein, 736 aa, synthetic construct
  REGION 1..736: note = source = /note="Description of Artificial Sequence: Synthetic polypeptide"
MAADGYLPDWLEDNLSEGIREWWDLKPGAPKPKANQQKQDDGRGLVLPGYKYLGPFNGLDKGEPVNAADAAALEHDKAYDQQLKAGDNPYLRYNHADAEFQERLQEDTSFGGNLGRAVFQAKKRVLEPLGLVEEGAKTAPGKKRPVEQSPQEPDSSSGIGKTGQQPAKKRLNFGQTGDSESVPDPQPLGEPPATPAAVGPTTMASGGGAPMADNNEGADGVGNASGNWHCDSTWLGDRVITTSTRTWALPTYNNHLYKQISSASTGASNDNHYFGYSTPWGYFDFNRFHCHFSPRDWQRLINNNWGFRPKRLNFKLFNIQVKEVTTNDGVTTIANNLTSTVQVFSDSEYQLPYVLGSAHQGCLPPFPADVFMIPQYGYLTLNNGSQAVGRSSFYCLEYFPSQMLRTGNNFTFSYTFEDVPFHSSYAHSQSLDRLMNPLIDQYLYYLNRTQNQSGSAQNKDLLFSRGSPAGMSVQPKNWLPGPCYRQQRVSKTKTDNNNSNFTWTGASKYNLNGRESIINPGTAMASHKDDKDKFFPMSGVMIFGKESAGASNTALDNVMITDEEEIKATNPVATERFGTVAVNLQSSSTDPATGDVHVMGALPGMVWQDRDVYLQGPIWAKIPHTDGHFHPSPLMGGFGLKHPPPQILIKNTPVPANPPAEFSATKFASFITQYSTGQVSVEIEWELQKENSKRWNPEVQYTSNYAKSANVDFTVDNNGLYTEPRPIGTRYLTRPL

SEQ ID NO: 115 - DNA, 2214 bp, synthetic construct
  misc_feature 1..2214: note = source = /note="Description of Artificial Sequence: Synthetic polynucleotide"
  source 1..2214: mol_type = other DNA
atggctgccgatggttatcttccagattggctcgaggacaacctctctgagggcattcgcgagtggtgggacctgaaacctggagccccgaaacccaaagccaaccagcaaaagcaggacaacggccggggtctggtgcttcctggctacaagtacctcggacccttcaacggactcgacaagggggagcccgtcaacgcggcggacgcagcggccctcgagcacgacaaggcctacgaccagcagctcaaagcgggtgacaatccgtacctgcggtataaccacgccgacgccgagtttcaggagcgtctgcaagaagatacgtcatttgggggcaacctcgggcgagcagtcttccaggccaagaagcgggttctcgaacctctcggtctggttgaggaaggcgctaagacggctcctgcaaagaagagaccggtagagccgtcacctcagcgttcccccgactcctccacgggcatcggcaagaaaggccagcagcccgccagaaagagactcaatttcggtcagactggcgactcagagtcagtccccgaccctcaacctctcggagaacctccagcagcgccctctagtgtgggatctggtacagtggctgcaggcggtggcgcaccaatggcagacaataacgaaggtgccgacggagtgggtaatgcctcaggaaattggcattgcgattccacatggctgggcgacagagtcattaccaccagcacccgaacctgggccctgcccacctacaacaaccacctctacaagcaaatctccagtgaaactgcaggtagtaccaacgacaacacctacttcggctacagcaccccctgggggtattttgactttaacagattccactgccacttctcaccacgtgactggcagcgactcatcaacaacaactggggattccggcccaagaagctgcggttcaagctcttcaacatccaggtcaaggaggtcacgacgaatgacggcgttacgaccatcgctaataaccttaccagcacgattcaggtattctcggactcggaataccagctgccgtacgtcctcggctctgcgcaccagggctgcctgcctccgttcccggcggacgtcttcatgattcctcagtacggctacctgactctcaacaatggcagtcagtctgtgggacgttcctccttctactgcctggagtacttcccctctcagatgctgagaacgggcaacaactttgagttcagctacagcttcgaggacgtgcctttccacagcagctacgcacacagccagagcctggaccggctgatgaatcccctcatcgaccagtacttgtactacctggccagaacacagagtaacccaggaggcacagctggcaatcgggaactgcagttttaccagggcgggccttcaactatggccgaacaagccaagaattggttacctggaccttgcttccggcaacaaagagtctccaaaacgctggatcaaaacaacaacagcaactttgcttggactggtgccaccaaatatcacctgaacggcagaaactcgttggttaatcccggcgtcgccatggcaactcacaaggacgacgaggaccgctttttcccatccagcggagtcctgatttttggaaaaactggagcaactaacaaaactacattggaaaatgtgttaatgacaaatgaagaagaaattcgtcctactaatcctgtagccacggaagaatacgggatagtcagcagcaacttacaagcggctaatactgcagcccagacacaagttgtcaacaaccagggagccttacctggcatggtctggcagaaccgggacgtgtacctgcagggtcccatctgggccaagattcctcacacggatggcaactttcacccgtctcctttgatgggcggctttggacttaaacatccgcctcctcagatcctgatcaagaacactcccgttcccgctaatcctccggaggtgtttactcctgccaagtttgcttcgttcatcacacagtacagcaccggacaagtcagcgtggaaatcgagtgggagctgcagaaggaaaacagcaagcgctggaacccggagattcagtacacctccaactttgaaaagcagactggtgtggactttgccgttgacagccagggtgtttactctgagcctcgccctattggcactcgttacctcacccgtaatctgtaa

SEQ ID NO: 116 - protein, 738 aa, synthetic construct
  REGION 1..738: note = source = /note="Description of Artificial Sequence: Synthetic polypeptide"
MAADGYLPDWLEDNLSEGIREWWALKPGAPKPKANQQKQDDGRGLVLPGYKYLGPFNGLDKGEPVNAADAAALEHDKAYDQQLQAGDNPYLRYNHADAEFQERLQEDTSFGGNLGRAVFQAKKRVLEPLGLVEEGAKTAPGKKRPVEPSPQRSPDSSTGIGKKGQQPARKRLNFGQTGDSESVPDPQPLGEPPAAPSGVGPNTMAAGGGAPMADNNEGADGVGSSSGNWHCDSTWLGDRVITTSTRTWALPTYNNHLYKQISNGTSGGATNDNTYFGYSTPWGYFDFNRFHCHFSPRDWQRLINNNWGFRPKRLSFKLFNIQVKEVTQNEGTKTIANNLTSTIQVFTDSEYQLPYVLGSAHQGCLPPFPADVFMIPQYGYLTLNNGSQAVGRSSFYCLEYFPSQMLRTGNNFQFTYTFEDVPFHSSYAHSQSLDRLMNPLIDQYLYYLSRTQTTGGTANTQTLGFSQGGPNTMANQAKNWLPGPCYRQQRVSTTTGQNNNSNFAWTAGTKYHLNGRNSLANPGIAMATHKDDEERFFPSNGILIFGKQNAARDNADYSDVMLTSEEEIKTTNPVATEEYGIVADNLQQQNTAPQIGTVNSQGALPGMVWQNRDVYLQGPIWAKIPHTDGNFHPSPLMGGFGLKHPPPQILIKNTPVPADPPTTFNQSKLNSFITQYSTGQVSVEIEWELQKENSKRWNPEIQYTSNYYKSTSVDFAVNTEGVYSEPRPIGTRYLTRNL

SEQ ID NO: 117 - protein, 737 aa, Adeno-associated virus 7
MAADGYLPDWLEDNLSEGIREWWDLKPGAPKPKANQQKQDNGRGLVLPGYKYLGPFNGLDKGEPVNAADAAALEHDKAYDQQLKAGDNPYLRYNHADAEFQERLQEDTSFGGNLGRAVFQAKKRVLEPLGLVEEGAKTAPAKKRPVEPSPQRSPDSSTGIGKKGQQPARKRLNFGQTGDSESVPDPQPLGEPPAAPSSVGSGTVAAGGGAPMADNNEGADGVGNASGNWHCDSTWLGDRVITTSTRTWALPTYNNHLYKQISSETAGSTNDNTYFGYSTPWGYFDFNRFHCHFSPRDWQRLINNNWGFRPKKLRFKLFNIQVKEVTTNDGVTTIANNLTSTIQVFSDSEYQLPYVLGSAHQGCLPPFPADVFMIPQYGYLTLNNGSQSVGRSSFYCLEYFPSQMLRTGNNFEFSYSFEDVPFHSSYAHSQSLDRLMNPLIDQYLYYLARTQSNPGGTAGNRELQFYQGGPSTMAEQAKNWLPGPCFRQQRVSKTLDQNNNSNFAWTGATKYHLNGRNSLVNPGVAMATHKDDEDRFFPSSGVLIFGKTGATNKTTLENVLMTNEEEIRPTNPVATEEYGIVSSNLQAANTAAQTQVVNNQGALPGMVWQNRDVYLQGPIWAKIPHTDGNFHPSPLMGGFGLKHPPPQILIKNTPVPANPPEVFTPAKFASFITQYSTGQVSVEIEWELQKENSKRWNPEIQYTSNFEKQTGVDFAVDSQGVYSEPRPIGTRYLTRNL

SEQ ID NO: 118 - protein, 623 aa, Adeno-associated virus 7
MPGFYEIVIKVPSDLDEHLPGISDSFVNWVAEKEWELPPDSDMDLNLIEQAPLTVAEKLQRDFLVQWRRVSKAPEALFFVQFEKGESYFHLHVLVETTGVKSMVLGRFLSQIREKLVQTIYRGVEPTLPNWFAVTKTRNGAGGGNKVVDECYIPNYLLPKTQPELQWAWTNMEEYISACLNLAERKRLVAQHLTHVSQTQEQNKENLNPNSDAPVIRSKTSARYMELVGWLVDRGITSEKQWIQEDQASYISFNAASNSRSQIKAALDNAGKIMALTKSAPDYLVGPSLPADIKTNRIYRILELNGYDPAYAGSVFLGWAQKKFGKRNTIWLFGPATTGKTNIAEAIAHAVPFYGCVNWTNENFPFNDCVDKMVIWWEEGKMTAKVVESAKAILGGSKVRVDQKCKSSAQIDPTPVIVTSNTNMCAVIDGNSTTFEHQQPLQDRMFKFELTRRLEHDFGKVTKQEVKEFFRWASDHVTEVAHEFYVRKGGASKRPAPDDADISEPKRACPSVADPSTSDAEGAPVDFADRYQNKCSRHAGMIQMLFPCKTCERMNQNFNICFTHGVRDCLECFPGVSESQPVVRKKTYRKLCAIHHLLGRAPEIACSACDLVNVDLDDCVSEQ

SEQ ID NO: 119 - DNA, 4721 bp, Adeno-associated virus 7
  source 1..4721: mol_type = genomic DNA
ttggccactccctctatgcgcgctcgctcgctcggtggggcctgcggaccaaaggtccgcagacggcagagctctgctctgccggccccaccgagcgagcgagcgcgcatagagggagtggccaactccatcactaggggtaccgcgaagcgcctcccacgctgccgcgtcagcgctgacgtaaatcacgtcataggggagtggtcctgtattagctgtcacgtgagtgcttttgcgacattttgcgacaccacgtggccatttgaggtatatatggccgagtgagcgagcaggatctccattttgaccgcgaaatttgaacgagcagcagccatgccgggtttctacgagatcgtgatcaaggtgccgagcgacctggacgagcacctgccgggcatttctgactcgtttgtgaactgggtggccgagaaggaatgggagctgcccccggattctgacatggatctgaatctgatcgagcaggcacccctgaccgtggccgagaagctgcagcgcgacttcctggtccaatggcgccgcgtgagtaaggccccggaggccctgttctttgttcagttcgagaagggcgagagctacttccaccttcacgttctggtggagaccacgggggtcaagtccatggtgctaggccgcttcctgagtcagattcgggagaagctggtccagaccatctaccgcggggtcgagcccacgctgcccaactggttcgcggtgaccaagacgcgtaatggcgccggcggggggaacaaggtggtggacgagtgctacatccccaactacctcctgcccaagacccagcccgagctgcagtgggcgtggactaacatggaggagtatataagcgcgtgtttgaacctggccgaacgcaaacggctcgtggcgcagcacctgacccacgtcagccagacgcaggagcagaacaaggagaatctgaaccccaattctgacgcgcccgtgatcaggtcaaaaacctccgcgcgctacatggagctggtcgggtggctggtggaccggggcatcacctccgagaagcagtggatccaggaggaccaggcctcgtacatctccttcaacgccgcctccaactcgcggtcccagatcaaggccgcgctggacaatgccggcaagatcatggcgctgaccaaatccgcgcccgactacctggtggggccctcgctgcccgcggacattaaaaccaaccgcatctaccgcatcctggagctgaacgggtacgatcctgcctacgccggctccgtctttctcggctgggcccagaaaaagttcgggaagcgcaacaccatctggctgtttgggcccgccaccaccggcaagaccaacattgcggaagccatcgcccacgccgtgcccttctacggctgcgtcaactggaccaatgagaactttcccttcaacgattgcgtcgacaagatggtgatctggtgggaggagggcaagatgacggccaaggtcgtggagtccgccaaggccattctcggcggcagcaaggtgcgcgtggaccaaaagtgcaagtcgtccgcccagatcgaccccacccccgtgatcgtcacctccaacaccaacatgtgcgccgtgattgacgggaacagcaccaccttcgagcaccagcagccgttgcaggaccggatgttcaaatttgaactcacccgccgtctggagcacgactttggcaaggtgacgaagcaggaagtcaaagagttcttccgctgggccagtgatcacgtgaccgaggtggcgcatgagttctacgtcagaaagggcggagccagcaaaagacccgcccccgatgacgcggatataagcgagcccaagcgggcctgcccctcagtcgcggatccatcgacgtcagacgcggaaggagctccggtggactttgccgacaggtaccaaaacaaatgttctcgtcacgcgggcatgattcagatgctgtttccctgcaaaacgtgcgagagaatgaatcagaatttcaacatttgcttcacacacggggtcagagactgtttagagtgtttccccggcgtgtcagaatctcaaccggtcgtcagaaaaaagacgtatcggaaactctgcgcgattcatcatctgctggggcgggcgcccgagattgcttgctcggcctgcgacctggtcaacgtggacctggacgactgcgtttctgagcaataaatgacttaaaccaggtatggctgccgatggttatcttccagattggctcgaggacaacctctctgagggcattcgcgagtggtgggacctgaaacctggagccccgaaacccaaagccaaccagcaaaagcaggacaacggccggggtctggtgcttcctggctacaagtacctcggacccttcaacggactcgacaagggggagcccgtcaacgcggcggacgcagcggccctcgagcacgacaaggcctacgaccagcagctcaaagcgggtgacaatccgtacctgcggtataaccacgccgacgccgagtttcaggagcgtctgcaagaagatacgtcatttgggggcaacctcgggcgagcagtcttccaggccaagaagcgggttctcgaacctctcggtctggttgaggaaggcgctaagacggctcctgcaaagaagagaccggtagagccgtcacctcagcgttcccccgactcctccacgggcatcggcaagaaaggccagcagcccgccagaaagagactcaatttcggtcagactggcgactcagagtcagtccccgaccctcaacctctcggagaacctccagcagcgccctctagtgtgggatctggtacagtggctgcaggcggtggcgcaccaatggcagacaataacgaaggtgccgacggagtgggtaatgcctcaggaaattggcattgcgattccacatggctgggcgacagagtcattaccaccagcacccgaacctgggccctgcccacctacaacaaccacctctacaagcaaatctccagtgaaactgcaggtagtaccaacgacaacacctacttcggctacagcaccccctgggggtattttgactttaacagattccactgccacttctcaccacgtgactggcagcgactcatcaacaacaactggggattccggcccaagaagctgcggttcaagctcttcaacatccaggtcaaggaggtcacgacgaatgacggcgttacgaccatcgctaataaccttaccagcacgattcaggtattctcggactcggaataccagctgccgtacgtcctcggctctgcgcaccagggctgcctgcctccgttcccggcggacgtcttcatgattcctcagtacggctacctgactctcaacaatggcagtcagtctgtgggacgttcctccttctactgcctggagtacttcccctctcagatgctgagaacgggcaacaactttgagttcagctacagcttcgaggacgtgcctttccacagcagctacgcacacagccagagcctggaccggctgatgaatcccctcatcgaccagtacttgtactacctggccagaacacagagtaacccaggaggcacagctggcaatcgggaactgcagttttaccagggcgggccttcaactatggccgaacaagccaagaattggttacctggaccttgcttccggcaacaaagagtctccaaaacgctggatcaaaacaacaacagcaactttgcttggactggtgccaccaaatatcacctgaacggcagaaactcgttggttaatcccggcgtcgccatggcaactcacaaggacgacgaggaccgctttttcccatccagcggagtcctgatttttggaaaaactggagcaactaacaaaactacattggaaaatgtgttaatgacaaatgaagaagaaattcgtcctactaatcctgtagccacggaagaatacgggatagtcagcagcaacttacaagcggctaatactgcagcccagacacaagttgtcaacaaccagggagccttacctggcatggtctggcagaaccgggacgtgtacctgcagggtcccatctgggccaagattcctcacacggatggcaactttcacccgtctcctttgatgggcggctttggacttaaacatccgcctcctcagatcctgatcaagaacactcccgttcccgctaatcctccggaggtgtttactcctgccaagtttgcttcgttcatcacacagtacagcaccggacaagtcagcgtggaaatcgagtgggagctgcagaaggaaaacagcaagcgctggaacccggagattcagtacacctccaactttgaaaagcagactggtgtggactttgccgttgacagccagggtgtttactctgagcctcgccctattggcactcgttacctcacccgtaatctgtaattgcatgttaatcaataaaccggttgattcgtttcagttgaactttggtctcctgtgcttcttatcttatcggtttccatagcaactggttacacattaactgcttgggtgcgcttcacgataagaacactgacgtcaccgcggtacccctagtgatggagttggccactccctctatgcgcgctcgctcgctcggtggggcctgcggaccaaaggtccgcagacggcagagctctgctctgccggccccaccgagcgagcgagcgcgcatagagggagtggccaa

SEQ ID NO: 120 - DNA, 2214 bp, synthetic construct; identical to SEQ ID NO: 115
  misc_feature 1..2214: note = source = /note="Description of Artificial Sequence: Synthetic polynucleotide"
  source 1..2214: mol_type = other DNA

SEQ ID NO: 121 - protein, 737 aa, synthetic construct; identical to SEQ ID NO: 117
  REGION 1..737: note = source = /note="Description of Artificial Sequence: Synthetic polypeptide"

SEQ ID NO: 122 - DNA, 2217 bp, synthetic construct
  misc_feature 1..2217: note = source = /note="Description of Artificial Sequence: Synthetic polynucleotide"
  source 1..2217: mol_type = other DNA
atggctgccgatggttatcttccagattggctcgaggacaacctctctgagggcattcgcgagtggtgggcgctgaaacctggagccccgaagcccaaagccaaccagcaaaagcaggacgacggccggggtctggtgcttcctggctacaagtacctcggacccttcaacggactcgacaagggggagcccgtcaacgcggcggacgcagcggccctcgagcacgacaaggcctacgaccagcagctgcaggcgggtgacaatccgtacctgcggtataaccacgccgacgccgagtttcaggagcgtctgcaagaagatacgtcttttgggggcaacctcgggcgagcagtcttccaggccaagaagcgggttctcgaacctctcggtctggttgaggaaggcgctaagacggctcctggaaagaagagaccggtagagccatcaccccagcgttctccagactcctctacgggcatcggcaagaaaggccaacagcccgccagaaaaagactcaattttggtcagactggcgactcagagtcagttccagaccctcaacctctcggagaacctccagcagcgccctctggtgtgggacctaatacaatggctgcaggcggtggcgcaccaatggcagacaataacgaaggcgccgacggagtgggtagttcctcgggaaattggcattgcgattccacatggctgggcgacagagtcatcaccaccagcacccgaacctgggccctgcccacctacaacaaccacctctacaagcaaatctccaacgggacatcgggaggagccaccaacgacaacacctacttcggctacagcaccccctgggggtattttgactttaacagattccactgccacttttcaccacgtgactggcagcgactcatcaacaacaactggggattccggcccaagagactcagcttcaagctcttcaacatccaggtcaaggaggtcacgcagaatgaaggcaccaagaccatcgccaataacctcaccagcaccatccaggtgtttacggactcggagtaccagctgccgtacgttctcggctctgcccaccagggctgcctgcctccgttcccggcggacgtgttcatgattccccagtacggctacctaacactcaacaacggtagtcaggccgtgggacgctcctccttctactgcctggaatactttccttcgcagatgctgagaaccggcaacaacttccagtttacttacaccttcgaggacgtgcctttccacagcagctacgcccacagccagagcttggaccggctgatgaatcctctgattgaccagtacctgtactacttgtctcggactcaaacaacaggaggcacggcaaatacgcagactctgggcttcagccaaggtgggcctaatacaatggccaatcaggcaaagaactggctgccaggaccctgttaccgccaacaacgcgtctcaacgacaaccgggcaaaacaacaatagcaactttgcctggactgctgggaccaaataccatctgaatggaagaaattcattggctaatcctggcatcgctatggcaacacacaaagacgacgaggagcgtttttttcccagtaacgggatcctgatttttggcaaacaaaatgctgccagagacaatgcggattacagcgatgtcatgctcaccagcgaggaagaaatcaaaaccactaaccctgtggctacagaggaatacggtatcgtggcagataacttgcagcagcaaaacacggctcctcaaattggaactgtcaacagccagggggccttacccggtatggtctggcagaaccgggacgtgtacctgcagggtcccatctgggccaagattcctcacacggacggcaacttccacccgtctccgctgatgggcggctttggcctgaaacatcctccgcctcagatcctgatcaagaacacgcctgtacctgcggatcctccgaccaccttcaaccagtcaaagctgaactctttcatcacgcaatacagcaccggacaggtcagcgtggaaattgaatgggagctgcagaaggaaaacagcaagcgctggaaccccgagatccagtacacctccaactactacaaatctacaagtgtggactttgctgttaatacagaaggcgtgtactctgaaccccgccccattggcacccgttacctcacccgtaatctgtaa

SEQ ID NO: 123 - DNA, 2213 bp, Adeno-associated virus 8
  source 1..2213: mol_type = genomic DNA
atggctgccgatggttatcttccagattggctcgaggacaacctctctgagggcattcgcgagtggtgggcgctgaaacctggagccccgaagcccaaagccaaccagcaaaagcaggacgacggccggggtctggtgcttcctggctacaagtacctcggacccttcaacggactcgacaagggggagcccgtcaacgcggcggacgcagcggccctcgagcacgacaaggcctacgaccagcagctgcaggcgggtgacaatccgtacctgcggtataaccacgccgacgccgagtttcaggagcgtctgcaagaagatacgtcttttgggggcaacctcgggcgagcagtcttccaggccaagaagcgggttctcgaacctctcggtctggttgaggaaggcgctaagacggctcctggaaagaagagaccggtagagccatcaccccagcgttctccagactcctctacgggcatcggcaagaaaggccaacagcccgccagaaaaagactcaattttggtcagactggcgactcagagtcagttccagaccctcaacctctcggagaacctccagcagcgccctctggtgtgggacctaatacaatggctgcaggcggtggcgcaccaatggcagacaataacgaaggcgccgacggagtgggtagttcctcgggaaattggcattgcgattccacatggctgggcgacagagtcatcaccaccagcacccgaacctgggccctgcccacctacaacaaccacctctacaagcaaatctccaacgggacatcgggaggagccaccaacgacaacacctacttcggctacagcaccccctgggggtattttgactttaacagattccactgccacttttcaccacgtgactggcagcgactcatcaacaacaactggggattccggcccaagagactcagcttcaagctcttcaacatccaggtcaaggaggtcacgcagaatgaaggcaccaagaccatcgccaataacctcaccagcaccatccaggtgtttacggactcggagtaccagctgccgtacgttctcggctctgcccaccagggctgcctgcctccgttcccggcggacgtgttcatgattccccagtacggctacctaacactcaacaacggtagtcaggccgtgggacgctcctccttctactgcctggaatactttccttcgcagatgctgagaaccggcaacaacttccagtttacttacaccttcgaggacgtgcctttccacagcagctacgcccacagccagagcttggaccggctgatgaatcctctgattgaccagtacctgtactacttgtctcggactcaaacaacaggaggcacggcaaatacgcagactctgggcttcagccaaggtgggcctaatacaatggccaatcaggcaaagaactggctgccaggaccctgttaccgccaacaacgcgtctcaacgacaaccgggcaaaacaacaatagcaactttgcctggactgctgggaccaaataccatctgaatggaagaaattcattggctaatcctggcatcgctatggcaacacacaaagacgacgaggagcgtttttttcccagtaacgggatcctgatttttggcaaacaaaatgctgccagagacaatgcggattacagcgatgtcatgctcaccagcgaggaagaaatcaaaaccactaaccctgtggctacagaggaatacggtatcgtggcagataacttgcagcagcaaaacacggctcctcaaattggaactgtcaacagccagggggccttacccggtatggtctggcagaaccgggacgtgtacctgcagggtcccatctgggccaagattcctcacacggacggcaacttccacccgtctccgctgatgggcggctttggcctgaaacatcctccgcctcagatcctgatcaagaacacgcctgtacctgcggatcctccgaccaccttcaaccagtcaaagctgaactctttcatcacgcaatacagcaccggacaggtcagcgtggaaattgaatgggagctgcagaaggaaaacagcaagcgctggaaccccgagatccagtacacctccaactactacaaatctacaagtgtggactttgctgtaatacagaaggcgtgtactctgaaccccgccccattggcacccgttacctcacccgtaatctg

SEQ ID NO: 124 - DNA, 4393 bp, Adeno-associated virus 8
  source 1..4393: mol_type = genomic DNA
cagagagggagtggccaactccatcactaggggtagcgcgaagcgcctcccacgctgccgcgtcagcgctgacgtaaattacgtcataggggagtggtcctgtattagctgtcacgtgagtgcttttgcggcattttgcgacaccacgtggccatttgaggtatatatggccgagtgagcgagcaggatctccattttgaccgcgaaatttgaacgagcagcagccatgccgggcttctacgagatcgtgatcaaggtgccgagcgacctggacgagcacctgccgggcatttctgactcgtttgtgaactgggtggccgagaaggaatgggagctgcccccggattctgacatggatcggaatctgatcgagcaggcacccctgaccgtggccgagaagctgcagcgcgacttcctggtccaatggcgccgcgtgagtaaggccccggaggccctcttctttgttcagttcgagaagggcgagagctactttcacctgcacgttctggtcgagaccacgggggtcaagtccatggtgctaggccgcttcctgagtcagattcgggaaaagcttggtccagaccatctacccgcggggtcgagccccaccttgcccaactggttcgcggtgaccaaagacgcggtaatggcgccggcgggggggaacaaggtggtggacgagtgctacatccccaactacctcctgcccaagactcagcccgagctgcagtgggcgtggactaacatggaggagtatataagcgcgtgcttgaacctggccgagcgcaaacggctcgtggcgcagcacctgacccacgtcagccagacgcaggagcagaacaaggagaatctgaaccccaattctgacgcgcccgtgatcaggtcaaaaacctccgcgcgctatatggagctggtcgggtggctggtggaccggggcatcacctccgagaagcagtggatccaggaggaccaggcctcgtacatctccttcaacgccgcctccaactcgcggtcccagatcaaggccgcgctggacaatgccggcaagatcatggcgctgaccaaatccgcgcccgactacctggtggggccctcgctgcccgcggacattacccagaaccgcatctaccgcatcctcgctctcaacggctacgaccctgcctacgccggctccgtctttctcggctgggctcagaaaaagttcgggaaacgcaacaccatctggctgtttggacccgccaccaccggcaagaccaacattgcggaagccatcgcccacgccgtgcccttctacggctgcgtcaactggaccaatgagaactttcccttcaatgattgcgtcgacaagatggtgatctggtgggaggagggcaagatgacggccaaggtcgtggagtccgccaaggccattctcggcggcagcaaggtgcgcgtggaccaaaagtgcaagtcgtccgcccagatcgaccccacccccgtgatcgtcacctccaacaccaacatgtgcgccgtgattgacgggaacagcaccaccttcgagcaccagcagcctctccaggaccggatgtttaagttcgaactcacccgccgtctggagcacgactttggcaaggtgacaaagcaggaagtcaaagagttcttccgctgggccagtgatcacgtgaccgaggtggcgcatgagttttacgtcagaaagggcggagccagcaaaagacccgcccccgatgacgcggataaaagcgagcccaagcgggcctgcccctcagtcgcggatccatcgacgtcagacgcggaaggagctccggtggactttgccgacaggtaccaaaacaaatgttctcgtcacgcgggcatgcttcagatgctgtttccctgcaaaacgtgcgagagaatgaatcagaatttcaacatttgcttcacacacggggtcagagactgctcagagtgtttccccggcgtgtcagaatctcaaccggtcgtcagaaagaggacgtatcggaaactctgtgcgattcatcatctgctggggcgggctcccgagattgcttgctcggcctgcgatctggtcaacgtggacctggatgactgtgtttctgagcaataaatgacttaaaccaggtatggctgccgatggttatcttccagattggctcgaggacaacctctctgagggcattcgcgagtggtgggcgctgaaacctggagccccgaagcccaaagccaaccagcaaaagcaggacgacggccggggtctggtgcttcctggctacaagtacctcggacccttcaacggactcgacaagggggagcccgtcaacgcggcggacgcagcggccctcgagcacgacaaggcctacgaccagcagctgcaggcgggtgacaatccgtacctgcggtataaccacgccgacgccgagtttcaggagcgtctgcaagaagatacgtcttttgggggcaacctcgggcgagcagtcttccaggccaagaagcgggttctcgaacctctcggtctggttgaggaaggcgctaagacggctcctggaaagaagagaccggtagagccatcaccccagcgttctccagactcctctacgggcatcggcaagaaaggccaacagcccgccagaaaaagactcaattttggtcagactggcgactcagagtcagttccagaccctcaacctctcggagaacctccagcagcgccctctggtgtgggacctaatacaatggctgcaggcggtggcgcaccaatggcagacaataacgaaggcgccgacggagtgggtagttcctcgggaaattggcattgcgattccacatggctgggcgacagagtcatcaccaccagcacccgaacctgggccctgcccacctacaacaaccacctctacaagcaaatctccaacgggacatcgggaggagccaccaacgacaacacctacttcggctacagcaccccctgggggtattttgactttaacagattccactgccacttttcaccacgtgactggcagcgactcatcaacaacaactggggattccggcccaagagactcagcttcaagctcttcaacatccaggtcaaggaggtcacgcagaatgaaggcaccaagaccatcgccaataacctcaccagcaccatccaggtgtttacggactcggagtaccagctgccgtacgttctcggctctgcccaccagggctgcctgcctccgttcccggcggacgtgttcatgattccccagtacggctacctaacactcaacaacggtagtcaggccgtgggacgctcctccttctactgcctggaatactttccttcgcagatgctgagaaccggcaacaacttccagtttacttacaccttcgaggacgtgcctttccacagcagctacgcccacagccagagcttggaccggctgatgaatcctctgattgaccagtacctgtactacttgtctcggactcaaacaacaggaggcacggcaaatacgcagactctgggcttcagccaaggtgggcctaatacaatggccaatcaggcaaagaactggctgccaggaccctgttaccgccaacaacgcgtctcaacgacaaccgggcaaaacaacaatagcaactttgcctggactgctgggaccaaataccatctgaatggaagaaattcattggctaatcctggcatcgctatggcaacacacaaagacgacgaggagcgtttttttcccagtaacgggatcctgatttttggcaaacaaaatgctgccagagacaatgcggattacagcgatgtcatgctcaccagcgaggaagaaatcaaaaccactaaccctgtggctacagaggaatacggtatcgtggcagataacttgcagcagcaaaacacggctcctcaaattggaactgtcaacagccagggggccttacccggtatggtctggcagaaccgggacgtgtacctgcagggtcccatctgggccaagattcctcacacggacggcaacttccacccgtctccgctgatgggcggctttggcctgaaacatcctccgcctcagatcctgatcaagaacacgcctgtacctgcggatcctccgaccaccttcaaccagtcaaagctgaactctttcatcacgcaatacagcaccggacaggtcagcgtggaaattgaatgggagctgcagaaggaaaacagcaagcgctggaaccccgagatccagtacacctccaactactacaaatctacaagtgtggactttgctgttaatacagaaggcgtgtactctgaaccccgccccattggcacccgttacctcacccgtaatctgtaattgcctgttaatcaataaaccggttgattcgtttcagttgaactttggtctctgcg

SEQ ID NO: 125 - protein, 738 aa, Adeno-associated virus 8; identical to SEQ ID NO: 116

SEQ ID NO: 126 - protein, 737 aa, Adeno-associated virus 8
MAADGYLPDWLEDNLSEGIREWWALKPGAPKPKANQQKQDDGRGLVLPGYKYLGPFNGLDKGEPVNAADAAALEHDKAYDQQLQAGDNPYLRYNHADAEFQERLQEDTSFGGNLGRAVFQAKKRVLEPLGLVEEGAKTAPGKKRPVEPSPQRSPDSSTGIGKKGQQPARKRLNFGQTGDSESVPDPQPLGEPPAAPSGVGPNTMAAGGGAPMADNNEGADGVGSSSGNWHCDSTWLGDRVITTSTRTWALPTYNNHLYKQISNGTSGGATNDNTYFGYSTPWGYFDFNRFHCHFSPRDWQRLINNNWGFRPKRLSFKLFNIQVKEVTQNEGTKTIANNLTSTIQVFTDSEYQLPYVLGSAHQGCLPPFPADVFMIPQYGYLTLNNGSQAVGRSSFYCLEYFPSQMLRTGNNFQFTYTFEDVPFHSSYAHSQSLDRLMNPLIDQYLYYLSRTQTTGGTANTQTLGFSQGGPNTMANQAKNWLPGPCYRQQRVSTTTGQNNNSNFAWTAGTKYHLNGRNSLANPGIAMATHKDDEERFFPSNGILIFGKQNAARDNADYSDVMLTSEEEIKTTNPVATEEYGIVADNLQQQNTAPQIGTVNSQGALPGMVWQNRDVYLQGPIWAKIPHTDGNFHPSPLMGGFGLKHPPPQILIKNTPVPADPPTTFNQSKLNSFITQYSTGQVSVEIEWELQKENSKRWNPEIQYTSNYYKSTSVDFAVIQKACTLNPAPLAPVTSPVI

SEQ ID NO: 127 - DNA, 2217 bp, synthetic construct; identical to SEQ ID NO: 122
  misc_feature 1..2217: note = source = /note="Description of Artificial Sequence: Synthetic polynucleotide"
  source 1..2217: mol_type = other DNA

SEQ ID NO: 128 - DNA, 2214 bp, synthetic construct
  misc_feature 1..2214: note = source = /note="Description of Artificial Sequence: Synthetic polynucleotide"
  source 1..2214: mol_type = other DNA
atggctgccgatggttatcttccagattggctcgaggacaacctctctgagggcattcgcgagtggtgggcgctgaaacctggagccccgaagcccaaagccaaccagcaaaagcaggacgacggccggggtctggtgcttcctggctacaagtacctcggacccttcaacggactcgacaagggggagcccgtcaacgcggcggacgcagcggccctcgagcacgacaaggcctacgaccagcagctgcaggcgggtgacaatccgtacctgcggtataaccacgccgacgccgagtttcaggagcgtctgcaagaagatacgtcttttgggggcaacctcgggcgagcagtcttccaggccaagaagcgggttctcgaacctctcggtctggttgaggaaggcgctaagacggctcctggaaagaagagaccggtagagccatcaccccagcgttctccagactcctctacgggcatcggcaagaaaggccaacagcccgccagaaaaagactcaattttggtcagactggcgactcagagtcagttccagaccctcaacctctcggagaacctccagcagcgccctctggtgtgggacctaatacaatggctgcaggcggtggcgcaccaatggcagacaataacgaaggcgccgacggagtgggtagttcctcgggaaattggcattgcgattccacatggctgggcgacagagtcatcaccaccagcacccgaacctgggccctgcccacctacaacaaccacctctacaagcaaatctccaacgggacatcgggaggagccaccaacgacaacacctacttcggctacagcaccccctgggggtattttgactttaacagattccactgccacttttcaccacgtgactggcagcgactcatcaacaacaactggggattccggcccaagagactcagcttcaagctcttcaacatccaggtcaaggaggtcacgcagaatgaaggcaccaagaccatcgccaataacctcaccagcaccatccaggtgtttacggactcggagtaccagctgccgtacgttctcggctctgcccaccagggctgcctgcctccgttcccggcggacgtgttcatgattccccagtacggctacctaacactcaacaacggtagtcaggccgtgggacgctcctccttctactgcctggaatactttccttcgcagatgctgagaaccggcaacaacttccagtttacttacaccttcgaggacgtgcctttccacagcagctacgcccacagccagagcttggaccggctgatgaatcctctgattgaccagtacctgtactacttgtctcggactcaaacaacaggaggcacggcaaatacgcagactctgggcttcagccaaggtgggcctaatacaatggccaatcaggcaaagaactggctgccaggaccctgttaccgccaacaacgcgtctcaacgacaaccgggcaaaacaacaatagcaactttgcctggactgctgggaccaaataccatctgaatggaagaaattcattggctaatcctggcatcgctatggcaacacacaaagacgacgaggagcgtttttttcccagtaacgggatcctgatttttggcaaacaaaatgctgccagagacaatgcggattacagcgatgtcatgctcaccagcgaggaagaaatcaaaaccactaaccctgtggctacagaggaatacggtatcgtggcagataacttgcctgagcggacggcgatgagtcttccgggaactgtcaacagccagggggccttacccggtatggtctggcagaaccgggacgtgtacctgcagggtcccatctgggccaagattcctcacacggacggcaacttccacccgtctccgctgatgggcggctttggcctgaaacatcctccgcctcagatcctgatcaagaacacgcctgtacctgcggatcctccgaccaccttcaaccagtcaaagctgaactctttcatcacgcaatacagcaccggacaggtcagcgtggaaattgaatgggagctgcagaaggaaaacagcaagcgctggaaccccgagatccagtacacctccaactactacaaatctacaagtgtggactttgctgttaatacagaaggcgtgtactctgaaccccgccccattggcacccgttacctcacccgtaatctg

SEQ ID NO: 129 - protein, 738 aa, synthetic construct
  REGION 1..738: note = source = /note="Description of Artificial Sequence: Synthetic polypeptide"
MAADGYLPDWLEDNLSEGIREWWALKPGAPKPKANQQKQDDGRGLVLPGYKYLGPFNGLDKGEPVNAADAAALEHDKAYDQQLQAGDNPYLRYNHADAEFQERLQEDTSFGGNLGRAVFQAKKRVLEPLGLVEEGAKTAPGKKRPVEPSPQRSPDSSTGIGKKGQQPARKRLNFGQTGDSESVPDPQPLGEPPAAPSGVGPNTMAAGGGAPMADNNEGADGVGSSSGNWHCDSTWLGDRVITTSTRTWALPTYNNHLYKQISNGTSGGATNDNTYFGYSTPWGYFDFNRFHCHFSPRDWQRLINNNWGFRPKRLSFKLFNIQVKEVTQNEGTKTIANNLTSTIQVFTDSEYQLPYVLGSAHQGCLPPFPADVFMIPQYGYLTLNNGSQAVGRSSFYCLEYFPSQMLRTGNNFQFTYTFEDVPFHSSYAHSQSLDRLMNPLIDQYLYYLSRTQTTGGTANTQTLGFSQGGPNTMANQAKNWLPGPCYRQQRVSTTTGQNNNSNFAWTAGTKYHLNGRNSLANPGIAMATHKDDEERFFPSNGILIFGKQNAARDNADYSDVMLTSEEEIKTTNPVATEEYGIVADNLPERTAMSLPGTVNSQGALPGMVWQNRDVYLQGPIWAKIPHTDGNFHPSPLMGGFGLKHPPPQILIKNTPVPADPPTTFNQSKLNSFITQYSTGQVSVEIEWELQKENSKRWNPEIQYTSNYYKSTSVDFAVNTEGVYSEPRPIGTRYLTRNL

SEQ ID NO: 130 - DNA, 2214 bp, synthetic construct
  misc_feature 1..2214: note = source = /note="Description of Artificial Sequence: Synthetic polynucleotide"
  source 1..2214: mol_type = other DNA
atggctgccgatggttatcttccagattggctcgaggacaacctctctgagggcattcgcgagtggtgggcgctgaaacctggagccccgaagcccaaagccaaccagcaaaagcaggacgacggccggggtctggtgcttcctggctacaagtacctcggacccttcaacggactcgacaagggggagcccgtcaacgcggcggacgcagcggccctcgagcacgacaaggcctacgaccagcagctgcaggcgggtgacaatccgtacctgcggtataaccacgccgacgccgagtttcaggagcgtctgcaagaagatacgtcttttgggggcaacctcgggcgagcagtcttccaggccaagaagcgggttctcgaacctctcggtctggttgaggaaggcgctaagacggctcctggaaagaagagaccggtagagccatcaccccagcgttctccagactcctctacgggcatcggcaagaaaggccaacagcccgccagaaaaagactcaattttggtcagactggcgactcagagtcagttccagaccctcaacctctcggagaacctccagcagcgccctctggtgtgggacctaatacaatggctgcaggcggtggcgcaccaatggcagacaataacgaaggcgccgacggagtgggtagttcctcgggaaattggcattgcgattccacatggctgggcgacagagtcatcaccaccagcacccgaacctgggccctgcccacctacaacaaccacctctacaagcaaatctccaacgggacatcgggaggagccaccaacgacaacacctacttcggctacagcaccccctgggggtattttgactttaacagattccactgccacttttcaccacgtgactggcagcgactcatcaacaacaactggggattccggcccaagagactcagcttcaagctcttcaacatccaggtcaaggaggtcacgcagaatgaaggcaccaagaccatcgccaataacctcaccagcaccatccaggtgtttacggactcggagtaccagctgccgtacgttctcggctctgcccaccagggctgcctgcctccgttcccggcggacgtgttcatgattccccagtacggctacctaacactcaacaacggtagtcaggccgtgggacgctcctccttctactgcctggaatactttccttcgcagatgctgagaaccggcaacaacttccagtttacttacaccttcgaggacgtgcctttccacagcagctacgcccacagccagagcttggaccggctgatgaatcctctgattgaccagtacctgtactacttgtctcggactcaaacaacaggaggcacggcaaatacgcagactctgggcttcagccaaggtgggcctaatacaatggccaatcaggcaaagaactggctgccaggaccctgttaccgccaacaacgcgtctcaacgacaaccgggcaaaacaacaatagcaactttgcctggactgctgggaccaaataccatctgaatggaagaaattcattggctaatcctggcatcgctatggcaacacacaaagacgacgaggagcgtttttttcccagtaacgggatcctgatttttggcaaacaaaatgctgccagagacaatgcggattacagcgatgtcatgctcaccagcgaggaagaaatcaaaaccactaaccctgtggctacagaggaatacggtatcgtggcagataacttgagttttagtcgtgcggttctttgtgatggaactgtcaacagccagggggccttacccggtatggtctggcagaaccgggacgtgtacctgcagggtcccatctgggccaagattcctcacacggacggcaacttccacccgtctccgctgatgggcggctttggcctgaaacatcctccgcctcagatcctgatcaagaacacgcctgtacctgcggatcctccgaccaccttcaaccagtcaaagctgaactctttcatcacgcaatacagcaccggacaggtcagcgtggaaattgaatgggagctgcagaaggaaaacagcaagcgctggaaccccgagatccagtacacctccaactactacaaatctacaagtgtggactttgctgttaatacagaaggcgtgtactctgaaccccgccccattggcacccgttacctcacccgtaatctg

SEQ ID NO: 131 - protein, 738 aa, synthetic construct
  REGION 1..738: note = source = /note="Description of Artificial Sequence: Synthetic polypeptide"
MAADGYLPDWLEDNLSEGIREWWALKPGAPKPKANQQKQDDGRGLVLPGYKYLGPFNGLDKGEPVNAADAAALEHDKAYDQQLQAGDNPYLRYNHADAEFQERLQEDTSFGGNLGRAVFQAKKRVLEPLGLVEEGAKTAPGKKRPVEPSPQRSPDSSTGIGKKGQQPARKRLNFGQTGDSESVPDPQPLGEPPAAPSGVGPNTMAAGGGAPMADNNEGADGVGSSSGNWHCDSTWLGDRVITTSTRTWALPTYNNHLYKQISNGTSGGATNDNTYFGYSTPWGYFDFNRFHCHFSPRDWQRLINNNWGFRPKRLSFKLFNIQVKEVTQNEGTKTIANNLTSTIQVFTDSEYQLPYVLGSAHQGCLPPFPADVFMIPQYGYLTLNNGSQAVGRSSFYCLEYFPSQMLRTGNNFQFTYTFEDVPFHSSYAHSQSLDRLMNPLIDQYLYYLSRTQTTGGTANTQTLGFSQGGPNTMANQAKNWLPGPCYRQQRVSTTTGQNNNSNFAWTAGTKYHLNGRNSLANPGIAMATHKDDEERFFPSNGILIFGKQNAARDNADYSDVMLTSEEEIKTTNPVATEEYGIVADNLSFSRAVLCDGTVNSQGALPGMVWQNRDVYLQGPIWAKIPHTDGNFHPSPLMGGFGLKHPPPQILIKNTPVPADPPTTFNQSKLNSFITQYSTGQVSVEIEWELQKENSKRWNPEIQYTSNYYKSTSVDFAVNTEGVYSEPRPIGTRYLTRNL

SEQ ID NO: 132 - DNA, 4385 bp, Adeno-associated virus 9
  source 1..4385: mol_type = genomic DNA
cagagagggagtggccaactccatcactaggggtaatcgcgaagcgcctcccacgctgccgcgtcagcgctgacgtagattacgtcataggggagtggtcctgtattagctgtcacgtgagtgcttttgcgacattttgcgacaccacatggccatttgaggtatatatggccgagtgagcgagcaggatctccattttgaccgcgaaatttgaacgagcagcagccatgccgggcttctacgagattgtgatcaaggtgccgagcgacctggacgagcacctgccgggcatttctgactcttttgtgaactgggtggccgagaaggaatgggagctgcccccggattctgacatggatcggaatctgatcgagcaggcacccctgaccgtggccgagaagctgcagcgcgacttcctggtccaatggcgccgcgtgagtaaggccccggaggccctcttctttgttcagttcgagaagggcgagagctactttcacctgcacgttctggtcgagaccacgggggtcaagtccatggtgctaggccgcttcctgagtcagattcgggagaagctggtccagaccatctaccgcgggatcgagccgaccctgcccaactggttcgcggtgaccaagacgcgtaatggcgccggcggggggaacaaggtggtggacgagtgctacatccccaactacctcctgcccaagactcagcccgagctgcagtgggcgtggactaacatggaggagtatataagcgcgtgcttgaacctggccgagcgcaaacggctcgtggcgcagcacctgacccacgtcagccagacgcaggagcagaacaaggagaatctgaaccccaattctgacgcgcccgtgatcaggtcaaaaacctccgcgcgctacatggagctggtcgggtggctggtggaccggggcatcacctccgagaagcagtggatccaggaggaccaggcctcgtacatctccttcaacgccgcctccaactcgcggtcccagatcaaggccgcgctggacaatgccggcaagatcatggcgctgaccaaatccgcgcccgactacctggtaggcccttcacttccggtggacattacgcagaaccgcatctaccgcatcctgcagctcaacggctacgaccctgcctacgccggctccgtctttctcggctgggcacaaaagaagttcgggaaacgcaacaccatctggctgtttgggccggccaccacgggaaagaccaacatcgcagaagccattgcccacgccgtgcccttctacggctgcgtcaactggaccaatgagaactttcccttcaacgattgcgtcgacaagatggtgatctggtgggaggagggcaagatgacggccaaggtcgtggagtccgccaaggccattctcggcggcagcaaggtgcgcgtggaccaaaagtgcaagtcgtccgcccagatcgaccccactcccgtgatcgtcacctccaacaccaacatgtgcgccgtgattgacgggaacagcaccaccttcgagcaccagcagcctctccaggaccggatgtttaagttcgaactcacccgccgtctggagcacgactttggcaaggtgacaaagcaggaagtcaaagagttcttccgctgggccagtgatcacgtgaccgaggtggcgcatgagttttacgtcagaaagggcggagccagcaaaagacccgcccccgatgacgcggataaaagcgagcccaagcgggcctgcccctcagtcgcggatccatcgacgtcagacgcggaaggagctccggtggactttgccgacaggtaccaaaacaaatgttctcgtcacgcgggcatgcttcagatgctgcttccctgcaaaacgtgcgagagaatgaatcagaatttcaacatttgcttcacacacggggtcagagactgctcagagtgtttccccggcgtgtcagaatctcaaccggtcgtcagaaagaggacgtatcggaaactctgtgcgattcatcatctgctggggcgggctcccgagattgcttgctcggcctgcgatctggtcaacgtggacctggatgactgtgtttctgagcaataaatgacttaaaccaggtatggctgccgatggttatcttccagattggctcgaggacaacctctctgagggcattcgcgagtggtgggcgctgaaacctggagccccgaagcccaaagccaaccagcaaaagcaggacgacggccggggtctggtgcttcctggctacaagtacctcggacccttcaacggactcgacaagggggagcccgtcaacgcggcggacgcagcggccctcgagcacggcaaggcctacgaccagcagctgcaggcgggtgacaatccgtacctgcggtataaccacgccgacgccgagtttcaggagcgtctgcaagaagatacgtcttttgggggcaacctcgggcgagcagtcttccaggccaagaagcgggttctcgaacctctcggtctggttgaggaaggcgctaagacggctcctggaaagaagagaccggtagagccatcaccccagcgttctccagactcctctacgggcatcggcaagaaaggccaacagcccgccagaaaaagactcaattttggtcagactggcgactcagagtcagttccagaccctcaacctctcggagaacctccagcagcgccctctggtgtgggacctaatacaatggctgcaggcggtggcgcaccaatggcagacaataacgaaggcgccgacggagtgggtaattcctcgggaaattggcattgcgattccacatggctgggggacagagtcatcaccaccagcacccgaacctgggcattgcccacctacaacaaccacctctacaagcaaatctccaatggaacatcgggaggaagcaccaacgacaacacctactttggctacagcaccccctgggggtattttgacttcaacagattccactgccacttctcaccacgtgactggcagcgactcatcaacaacaactggggattccggccaaagagactcaacttcaagctgttcaacatccaggtcaaggaggttacgacgaacgaaggcaccaagaccatcgccaataaccttaccagcaccgtccaggtctttacggactcggagtaccagctaccgtacgtcctaggctctgcccaccaaggatgcctgccaccgtttcctgcagacgtcttcatggttcctcagtacggctacctgacgctcaacaatggaagtcaagcgttaggacgttcttctttctactgtctggaatacttcccttctcagatgctgagaaccggcaacaactttcagttcagctacactttcgaggacgtgcctttccacagcagctacgcacacagccagagtctagatcgactgatgaaccccctcatcgaccagtacctatactacctggtcagaacacagacaactggaactgggggaactcaaactttggcattcagccaagcaggccctagctcaatggccaatcaggctagaaactgggtacccgggccttgctaccgtcagcagcgcgtctccacaaccaccaaccaaaataacaacagcaactttgcgtggacgggagctgctaaattcaagctgaacgggagagactcgctaatgaatcctggcgtggctatggcatcgcacaaagacgacgaggaccgcttctttccatcaagtggcgttctcatatttggcaagcaaggagccgggaacgatggagtcgactacagccaggtgctgattacagatgaggaagaaattaaagccaccaaccctgtagccacagaggaatacggagcagtggccatcaacaaccaggccgctaacacgcaggcgcaaactggacttgtgcataaccagggagttattcctggtatggtctggcagaaccgggacgtgtacctgcagggccctatttgggctaaaatacctcacacagatggcaactttcacccgtctcctctgatgggtggatttggactgaaacacccacctccacagattctaattaaaaatacaccagtgccggcagatcctcctcttaccttcaatcaagccaagctgaactctttcatcacgcagtacagcacgggacaagtcagcgtggaaatcgagtgggagctgcagaaagaaaacagcaagcgctggaatccagagatccagtatacttcaaactactacaaatctacaaatgtggactttgctgtcaataccaaaggtgtttactctgagcctcgccccattggtactcgttacctcacccgtaatttgtaattgcctgttaatcaataaaccggttaattcgtttcagttgaactttggtctctgcg

SEQ ID NO: 133 - DNA, 4382 bp, Adeno-associated virus 9
  source 1..4382: mol_type = genomic DNA
cagagagggagtggccaactccatcactaggggtaatcgcgaagcgcctcccacgctgccgcgtcagcgctgacgtagattacgtcataggggagtggtcctgtattagctgtcacgtgagtgcttttgcgacattttgcgacaccacatggccatttgaggtatatatggccgagtgagcgagcaggatctccattttgaccgcgaaatttgaacgagcagcagccatgccgggcttctacgagattgtgatcaaggtgccgagcgacctggacgagcacctgccgggcatttctgactcttttgtgaactgggtggccgagaaggaatgggagctgcccccggattctgacatggatcggaatctgatcgagcaggcacccctgaccgtggccgagaagctgtagcgcgacttcctggtccaatggcgccgcgtgagtaaggccccggaggccctcttctttgttcagttcgagaagggcgagagctactttcacctgcacgttctggtcgagaccacgggggtcaagtccatggtgctaggccgcttcctgagtcagattcgggagaagctggtccagaccatctaccgcgggatcgagccgaccctgcccaactggttcgcggtgaccaagacgcgtaatggcgccggcggggggaacaaggtggtggacgagtgctacatccccaactacctcctgcccaagactcagcccgagctgcagtgggcgtggactaacatggaggagtatataagcgcgtgcttgaacctggccgagcgcaaacggctcgtggcgcagcacctgacccacgtcagccagacgcaggagcagaacaaggagaatctgaaccccaattctgacgcgcccgtgatcaggtcaaaaacctccgcgcgctacatggagctggtcgggtggctggtggaccggggcatcacctccgagaagcagtggatccaggaggaccaggcctcgtacatctccttcaacgccgcctccaactcgcggtcccagatcaaggccgcgctggacaatgccggcaagatcatggcgctgaccaaatccgcgcccgactacctggtaggcccttcacttccggtggacattacgcagaaccgcatctaccgcatcctgcagctcaacggctacgaccctgcctacgccggctccgtctttctcggctgggcacaaaagaagttcgggaaacgcaacaccatctggctgtttgggccggccaccacgggaaagaccaacatcgcagaagccattgcccacgccgtgcccttctacggctgcgtcaactggaccaatgagaactttcccttcaacgattgcgtcgacaagatggtgatctggtgggaggagggcaagatgacggccaaggtcgtggagtccgccaaggccattctcggcggcagcaaggtgcgcgtggaccaaaagtgcaagtcgtccgcccagatcgaccccactcccgtgatcgtcacctccaacaccaacatgtgcgccgtgattgacgggaacagcaccaccttcgagcaccagcagcctctccaggaccggatgtttaagttcgaactcacccgccgtctggagcacgactttggcaaggtgacaaagcaggaagtcaaagagttcttccgctgggccagtgatcacgtgaccgaggtggcgcatgagttttacgtcagaaagggcggagccagcaaaagacccgcccccgatgacgcggataaaagcgagcccaagcgggcctgcccctcagtcgcggatccatcgacgtcagacgcggaaggagctccggtggactttgccgacaggtaccaaaacaaatgttctcgtcacgcgggcatgcttcagatgctgcttccctgcaaaacgtgcgagagaatgaatcagaatttcaacatttgcttcacacacggggtcagagactgctcagagtgtttccccggcgtgtcagaatctcaaccggtcgtcagaaagaggacgtatcggaaactctgtgcgattcatcatctgctggggcgggctcccgagattgcttgctcggcctgcgatctggtcaacgtggacctggatgactgtgtttctgagcaataaatgacttaaaccaggtatggctgccgatggttatcttccagattggctcgaggacaacctctctgagggcattcgcgagtggtgggacctgaaacctggagccccgaaacccaaagccaaccagcaaaagcaggacgacggccggggtctggtgcttcctggctacaagtacctcggacccttcaacggactcgacaagggggagcccgtcaacgcggcggacgcagcggccctcgagcacgacaaggcctacgaccagcagctcaaagcgggtgacaatccgtacctgcggtataaccacgccgacgccgagtttcaggagcgtctgcaagaagatacgtcttttgggggcaacctcgggcgagcagtcttccaggccaagaagcgggttctcgaacctctcggtctggttgaggaaggcgctaagacggctcctggaaagaagagaccggtagagcagtcaccccaagaaccagactcatcctcgggcatcggcaaatcaggccagcagcccgctaaaaagagactcaattttggtcagactggcgactcagagtcagtccccgacccacaacctctcggagaacctccagaagccccctcaggtctgggacctaatacaatggcttcaggcggtggcgctccaatggcagacaataacgaaggcgccgacggagtgggtaattcctcgggaaattggcattgcgattccacatggctgggggacagagtcatcaccaccagcacccgaacctgggcattgcccacctacaacaaccacctctacaagcaaatctccaatggaacatcgggaggaagcaccaacgacaacacctactttggctacagcaccccctgggggtattttgacttcaacagattccactgccacttctcaccacgtgactggcagcgactcatcaacaacaactggggattccggccaaagagactcaacttcaagctgttcaacatccaggtcaaggaggttacgacgaacgaaggcaccaagaccatcgccaataaccttaccagcaccgtccaggtctttacggactcggagtaccagctaccgtacgtcctaggctctgcccaccaaggatgcctgccaccgtttcctgcagacgtcttcatggttcctcagtacggctacctgacgctcaacaatggaagtcaagcgttaggacgttcttctttctactgtctggaatacttcccttctcagatgctgagaaccggcaacaactttcagttcagctacactttcgaggacgtgcctttccacagcagctacgcacacagccagagtctagatcgactgatgaaccccctcatcgaccagtacctatactacctggtcagaacacagacaactggaactgggggaactcaaactttggcattcagccaagcaggccctagctcaatggccaatcaggctagaaactgggtacccgggccttgctaccgtcagcagcgcgtctccacaaccaccaaccaaaataacaacagcaactttgcgtggacgggagctgctaaattcaagctgaacgggagagactcgctaatgaatcctggcgtggctatggcatcgcacaaagacgacgaggaccgcttctttccatcaagtggcgttctcatatttggcaagcaaggagccgggaacgatggagtcgactacagccaggtgctgattacagatgaggaagaaattaaagccaccaaccctgtagccacagaggaatacggagcagtggccatcaacaaccaggccgctaacacgcaggcgcaaactggacttgtgcataaccagggagttattcctggtatggtctggcagaaccgggacgtgtacctgcagggccctatttgggctaaaatacctcacacagatggcaactttcacccgtctcctctgatgggtggatttggactgaaacacccacctccacagattctaattaaaaatacaccagtgccggcagatcctcctcttaccttcaatcaagccaagctgaactctttcatcacgcagtacagcacgggacaagtcagcgtggaaatcgagtgggagctgcagaaagaaaacagcaagcgctggaatccagagatccagtatacttcaaactactacaaatctacaaatgtggactttgctgtcaataccgaaggtgtttactctgagcctcgccccattggtactcgttacctcacccgtaatttgtaattgcctgttaatcaataaaccggttaattcgtttcagttgaactttggtctctgcg

SEQ ID NO: 134 - protein, 736 aa, Adeno-associated virus 9
MAADGYLPDWLEDNLSEGIREWWALKPGAPQPKANQQHQDNARGLVLPGYKYLGPGNGLDKGEPVNAADAAALEHDKAYDQQLKAGDNPYLKYNHADAEFQERLKEDTSFGGNLGRAVFQAKKRLLEPLGLVEEAAKTAPGKKRPVEQSPQEPDSSAGIGKSGAQPAKKRLNFGQTGDTESVPDPQPIGEPPAAPSGVGSLTMASGGGAPVADNNEGADGVGSSSGNWHCDSQWLGDRVITTSTRTWALPTYNNHLYKQISNSTSGGSSNDNAYFGYSTPWGYFDFNRFHCHFSPRDWQRLINNNWGFRPKRLNFKLFNIQVKEVTDNNGVKTIANNLTSTVQVFTDSDYQLPYVLGSAHEGCLPPFPADVFMIPQYGYLTLNDGSQAVGRSSFYCLEYFPSQMLRTGNNFQFSYEFENVPFHSSYAHSQSLDRLMNPLIDQYLYYLSKTINGSGQNQQTLKFSVAGPSNMAVQGRNYIPGPSYRQQRVSTTVTQNNNSEFAWPGASSWALNGRNSLMNPGPAMASHKEGEDRFFPLSGSLIFGKQGTGRDNVDADKVMITNEEEIKTTNPVATESYGQVATNHQSAQAQAQTGWVQNQGILPGMVWQDRDVYLQGPIWAKIPHTDGNFHPSPLMGGFGMKHPPPQILIKNTPVPADPPTAFNKDKLNSFITQYSTGQVSVEIEWELQKENSKRWNPEIQYTSNYYKSNNVEFAVNTEGVYSEPRPIGTRYLTRNL

SEQ ID NO: 135 - protein, 736 aa, Adeno-associated virus 9
MAADGYLPDWLEDNLSEGIREWWDLKPGAPKPKANQQKQDDGRGLVLPGYKYLGPFNGLDKGEPVNAADAAALEHDKAYDQQLKAGDNPYLRYNHADAEFQERLQEDTSFGGNLGRAVFQAKKRVLEPLGLVEEGAKTAPGKKRPVEQSPQEPDSSSGIGKSGQQPAKKRLNFGQTGDSESVPDPQPLGEPPEAPSGLGPNTMASGGGAPMADNNEGADGVGNSSGNWHCDSTWLGDRVITTSTRTWALPTYNNHLYKQISNGTSGGSTNDNTYFGYSTPWGYFDFNRFHCHFSPRDWQRLINNNWGFRPKRLNFKLFNIQVKEVTTNEGTKTIANNLTSTVQVFTDSEYQLPYVLGSAHQGCLPPFPADVFMVPQYGYLTLNNGSQALGRSSFYCLEYFPSQMLRTGNNFQFSYTFEDVPFHSSYAHSQSLDRLMNPLIDQYLYYLVRTQTTGTGGTQTLAFSQAGPSSMANQARNWVPGPCYRQQRVSTTTNQNNNSNFAWTGAAKFKLNGRDSLMNPGVAMASHKDDEDRFFPSSGVLIFGKQGAGNDGVDYSQVLITDEEEIKATNPVATEEYGAVAINNQAANTQAQTGLVHNQGVIPGMVWQNRDVYLQGPIWAKIPHTDGNFHPSPLMGGFGLKHPPPQILIKNTPVPADPPLTFNQAKLNSFITQYSTGQVSVEIEWELQKENSKRWNPEIQYTSNYYKSTNVDFAVNTEGVYSEPRPIGTRYLTRNL

SEQ ID NO: 136 - protein, 623 aa, Adeno-associated virus 9
MPGFYEIVIKVPSDLDEHLPGISDSFVNWVAEKEWELPPDSDMDRNLIEQAPLTVAEKLQRDFLVQWRRVSKAPEALFFVQFEKGESYFHLHVLVETTGVKSMVLGRFLSQIREKLVQTIYRGIEPTLPNWFAVTKTRNGAGGGNKVVDECYIPNYLLPKTQPELQWAWTNMEEYISACLNLAERKRLVAQHLTHVSQTQEQNKENLNPNSDAPVIRSKTSARYMELVGWLVDRGITSEKQWIQEDQASYISFNAASNSRSQIKAALDNAGKIMALTKSAPDYLVGPSLPVDITQNRIYRILQLNGYDPAYAGSVFLGWAQKKFGKRNTIWLFGPATTGKTNIAEAIAHAVPFYGCVNWTNENFPFNDCVDKMVIWWEEGKMTAKVVESAKAILGGSKVRVDQKCKSSAQIDPTPVIVTSNTNMCAVIDGNSTTFEHQQPLQDRMFKFELTRRLEHDFGKVTKQEVKEFFRWASDHVTEVAHEFYVRKGGASKRPAPDDADKSEPKRACPSVADPSTSDAEGAPVDFADRYQNKCSRHAGMLQMLLPCKTCERMNQNFNICFTHGVRDCSECFPGVSESQPVVRKRTYRKLCAIHHLLGRAPEIACSACDLVNVDLDDCVSEQ

SEQ ID NO: 137 - DNA, 2211 bp, synthetic construct
  misc_feature 1..2211: note = source = /note="Description of Artificial Sequence: Synthetic polynucleotide"
  source 1..2211: mol_type = other DNA
atggctgccgatggttatcttccagattggctcgaggacaaccttagtgaaggaattcgcgagtggtgggctttgaaacctggagcccctcaacccaaggcaaatcaacaacatcaagacaacgctcgaggtcttgtgcttccgggttacaaataccttggacccggcaacggactcgacaagggggagccggtcaacgcagcagacgcggcggccctcgagcacgacaaggcctacgaccagcagctcaaggccggagacaacccgtacctcaagtacaaccacgccgacgccgagttccaggagcggctcaaagaagatacgtcttttgggggcaacctcgggcgagcagtcttccaggccaaaaagaggcttcttgaacctcttggtctggttgaggaagcggctaagacggctcctggaaagaagaggcctgtagagcagtctcctcaggaaccggactcctccgcgggtattggcaaatcgggtgcacagcccgctaaaaagagactcaatttcggtcagactggcgacacagagtcagtcccagaccctcaaccaatcggagaacctcccgcagccccctcaggtgtgggatctcttacaatggcttcaggtggtggcgcaccagtggcagacaataacgaaggtgccgatggagtgggtagttcctcgggaaattggcattgcgattcccaatggctgggggacagagtcatcaccaccagcacccgaacctgggccctgcccacctacaacaatcacctctacaagcaaatctccaacagcacatctggaggatcttcaaatgacaacgcctacttcggctacagcaccccctgggggtattttgacttcaacagattccactgccacttctcaccacgtgactggcagcgactcatcaacaacaactggggattccggcctaagcgactcaacttcaagctcttcaacattcaggtcaaagaggttacggacaacaatggagtcaagaccatcgccaataaccttaccagcacggtccaggtcttcacggactcagactatcagctcccgtacgtgctcgggtcggctcacgagggctgcctcccgccgttcccagcggacgttttcatgattcctcagtacgggtatctgacgcttaatgatggaagccaggccgtgggtcgttcgtccttttactgcctggaatatttcccgtcgcaaatgctaagaacgggtaacaacttccagttcagctacgagtttgagaacgtacctttccatagcagctacgctcacagccaaagcctggaccgactaatgaatccactcatcgaccaatacttgtactatctctcaaagactattaacggttctggacagaatcaacaaacgctaaaattcagtgtggccggacccagcaacatggctgtccagggaagaaactacatacctggacccagctaccgacaacaacgtgtctcaaccactgtgactcaaaacaacaacagcgaatttgcttggcctggagcttcttcttgggctctcaatggacgtaatagcttgatgaatcctggacctgctatggccagccacaaagaaggagaggaccgtttctttcctttgtctggatctttaatttttggcaaacaaggaactggaagagacaacgtggatgcggacaaagtcatgataaccaacgaagaagaaattaaaactactaacccggtagcaacggagtcctatggacaagtggccacaaaccaccagagtgcccaagcacaggcgcagaccggctgggttcaaaaccaaggaatacttccgggtatggtttggcaggacagagatgtgtacctgcaaggacccatttgggccaaaattcctcacacggacggcaactttcacccttctccgctgatgggagggtttggaatgaagcacccgcctcctcagatcctcatcaaaaacacacctgtacctgcggatcctccaacggccttcaacaaggacaagctgaactctttcatcacccagtattctactggccaagtcagcgtggagatcgagtgggagctgcagaaggaaaacagcaagcgctggaacccggagatccagtacacttccaactattacaagtctaataatgttgaatttgctgttaatactgaaggtgtatatagtgaaccccgccccattggcaccagatacctgactcgtaatctgtaa

SEQ ID NO: 138 - protein, 736 aa, synthetic construct; identical to SEQ ID NO: 134
  REGION 1..736: note = source = /note="Description of Artificial Sequence: Synthetic polypeptide"

SEQ ID NO: 139 - DNA, 2460 bp, synthetic construct
  misc_feature 1..2460: note = source = /note="Description of Artificial Sequence: Synthetic polynucleotide"
  source 1..2460: mol_type = other DNA
ggtaattcctccggaaattggcattgcgattccacatggctgggcgaccgagtcattaccaccagcacccggacttgggccctgcccacctacaacaaccacctctacaagcaaatctccagccaatcgggtgccaccaacgacaaccactacttcggctacagcaccccttgggggtattttgatttcaacagattccactgccatttctcaccacgtgactggcagcgactcatcaacaacaactggggattcatggctgccgatggttatcttccagattggctcgaggacactctctctgaaggaatcagacagtggtggaagctcaaacctggcccaccaccgccgaaacctaaccaacaacaccgggacgacagtaggggtcttgtgcttcctgggtacaagtacctcggacccttcaacggactcgacaaaggagagccggtcaacgaggcagacgccgcggccctcgagcacgacaaagcctacgaccaccagctcaagcaaggggacaacccgtacctcaaatacaaccacgcggacgctgaatttcaggagcgtcttcaagaagatacgtctttcgggggcaacctcgggcgagcagtcttccaggccaaaaagagggtactcgagcctcttggtctggttgaggaagctgttaagacggctcctggaaaaaagagacctatagagcagtctcctgcagaaccggactcttcctcgggcatcggcaaatcaggccagcagcccgctaagaaaagactcaattttggtcagactggcgacacagagtcagtcccagaccctcaaccaatcggagaaccccccgcagccccctctggtgtgggatctaatacaatggcttcaggcggtggggcaccaatggcagacaataacgaaggcgccgacggagtgggtaattcctcgggaaattggcattgcgattccacatggatgggcgacagagttatcaccaccagcacaagaacctgggccctccccacctacaataatcacctctacaagcaaatctccagcgaatcgggagccaccaacgacaaccactacttcggctacagcaccccctgggggtattttgactttaacagattccactgtcacttctcaccacgtgactggcagcgactcatcaacaacaactggggatttagacccaagaaactcaatttcaagctcttcaacatccaagtcaaggaggtcacgcagaatgatggaaccacgaccatcgccaataaccttaccagcacggtgcaggtcttcacagactctgagtaccagctgccctacgtcctcggttcggctcaccagggctgccttccgccgttcccagcagacgtcttcatgattcctcagtacggctacttgactctgaacaatggcagccaagcggtaggacgttcttcattctactgtctagagtattttccctctcagatgctgaggacgggaaacaacttcaccttcagctacacttttgaagacgtgcctttccacagcagctacgcgcacagccagagtctggatcggctgatgaatcctctcattgaccagtacctgtattacctgagcaaaactcagggtacaagtggaacaacgcagcaatcgagactgcagttcagccaagctgggcctagctccatggctcagcaggccaaaaactggctaccgggacccagctaccgacagcagcgaatgtctaagacggctaatgacaacaacaacagtgaatttgcttggactgcagccaccaaatattacctgaatggaagaaattctctggtcaatcccgggcccccaatggccagtcacaaggacgatgaggaaaagtatttccccatgcacggaaatctcatctttggaaaacaaggcacaggaactaccaatgtggacattgaatcagtgcttattacagacgaagaagaaatcagaacaactaatcctgtggctacagaacaatacggacaggttgccaccaaccatcagagtcagaacaccacagcttcctatggaagtgtggacagccagggaatcttacctggaatggtgtggcaggaccgcgatgtctatcttcaaggtcccatttgggccaaaactcctcacacggacggacactttcatccttctccgctcatgggaggctttggactgaaacaccctcctccccagatcctgatcaaaaacacacctgtgccagcgaatcccgcgaccactttcactcctggaaagtttgcttcgttcattacccagtattccaccggacaggtcagcgtggaaatagagtgggagctgcagaaagaaaacagcaaacgctggaacccagaaattcagtacacctccaactacaacaagtcggtgaatgtggagtttaccgtggacgcaaacggtgtttattctgaaccccgccctattggcactcgttaccttacccggaacttg

SEQ ID NO: 140 - DNA, 3123 bp, synthetic construct
  misc_feature 1..3123: note = source = /note="Description of Artificial Sequence: Synthetic polynucleotide"
  source 1..3123: mol_type = other DNA
gaattcgccctttctacggctgcgtcaactggaccaatgaaaactttcccttcaacgattgcgtcgacaagatggtgatctggtgggaggagggaaagatgaccgccaaggtcgtggaatctgccaaagccattctgggtggaggcaaggttcgtgtggaccagaaatgcaagtcttcggcccagatcgacccgactccggtgattgtcacctctaacaccaacatgtgcgccgtgattgacggaaactcgaccaccttcgagcaccagcagccgttgcaagaccggatgttcaaatttgaacttacccgccgtttggatcatgactttgggaaggtcaccaagcaggaagtcaaagactttttccggtgggctcaagatcacgtgactgaggtggagcatgagttctacgtcaaaaagggtggagccaagaaaaggcccgcccccgatgatgtatatataaatgagcccaagcgggcgcgcgagtcagttgcgcagccatcgacgtcagacgcggaagcttcgataaactacgcggacaggtaccaaaacaaatgttctcgtcacgtgggcatgaatctgatgctgtttccctgtcgacaatgcgaaagaatgaatcagaattcaaatatctgcttcacacacgggcaaaaagactgtttggaatgctttcccgtgtcagaatctcaacccgtttctgtcgtcagaaaaacgtatcagaaactttgttacattcatcatatcatgggaaaagtaccagacgcctgcactgcctgcgacctggtaaatgtggacttggatgactgtatttctgagcaataaatgacttaaatcaggtatggctgctgacggttatcttccagattggctcgaggacactctctctgaaggaatcagacagtggtggaagctcaaacctggcccaccaccgccgaaacctaaccaacaacaccgggacgacagtaggggtcttgtgcttcctgggtacaagtacctcggacccttcaacggactcgacaaaggagagccggtcaacgaggcagacgccgcggccctcgagcacgacaaagcctacgaccaccagctcaagcaaggggacaacccgtacctcaaatacaaccacgcggacgctgaatttcaggagcgtcttcaagaagatacgtctttcgggggcaacctcgggcgagcagtcttccaggccaaaaagagggtactcgagcctcttggtctggttgaggaagctgttaagacggctcctggaaaaaagagacctatagagcagtctcctgcagaaccggactcttcctcgggcatcggcaaatcaggccagcagcccgctaagaaaagactcaattttggtcagactggcgacacagagtcagtcccaggccctcaaccaatcggagaaccccccgcagccccctctggtgtgggatctaatacaatggcttcaggcggtggggcaccaatggcagacaataacgaaggcgccgacggagtgggtaattcctcgggaaattggcattgcgattccacatggatgggcgacagagttatcaccaccagcacaagaacctgggccctccccacctacaataatcacctctacaagcaaatctccagcgaatcgggagccaccaacgacaaccactacttcggctacagcaccccctgggggtattttgactttaacagattccactgtcacttctcaccacgtgactggcagcgactcatcaacaacaactggggatttagacccaagaaactcaatttcaagctcttcaacatccaagtcaaggaggtcacgcagaatgatggaaccacgaccatcgccaataaccttaccagcgcggtgcaggtcttcacagactctgagtaccagctgccctacgtcctcggttcggctcaccagggctgccttccgccgttcccagcagacgtcttcatgattcctcagtacggctacttgactctgaacaatggcagccaagcggtaggacgttcttcattctactgtctagagtattttccctctcagatgctgaggacgggaaacaacttcaccttcagctacacttttgaagacgtgcctttccacagcagctacgcgcacagccagagtctggatcggctgatgaatcctctcattgaccagtacctgtattacctgagcaaaactcagggtacaagtggaacaacgcagcaatcgagactgcagttcagccaagctgggcctagctccatggctcagcaggccaaaaactggctaccgggacccagctaccgacagcagcgaatgtctaagacggctaatgacaacaacaacagtgaatttgcttggactgcagccaccaaatattacctgaatggaagaaattctctggtcaatcccgggcccccagtggccagtcacaaggacgatgaggaaaagtatttccccatgcacggaaatctcatctttggaaaacaaggcacaggaactaccaatgtggacattgaatcagtgcttattacagacgaagaagaaatcagaacaactaatcctgtggctacagaacaatacggacaggttgccaccaaccatcagagtcagaacaccacagcttcctatggaagtgtggacagccagggaatcttacctggaatggtgtggcaggaccgcgatgtctatcttcaaggtcccatttgggccaaaactcctcacacggacggacactttcatccttctccgctcatgggaggctttggactgaaacaccctcctccccagatcctgatcaaaaacacacctgtgccagcgaatcccgcgaccactttcactcctggaaagtttgcttcgttcattacccagtattccacctgacaggtcagcgtggaaatagagtgggagctgcagaaagaaaacagcaaacgctggaacccagaaattcagtacacctccaactacaacaagtcggtgaatgtggagtttaccgtggacgcaaacggtgtttattctgaaccccgccctattggcactcgttaccttacccggaacttgtaatttcctgttaatgaataagccgatttatgcgtttcagttgaactttggtctctgcgaagggcgaattcgtttaaacct

SEQ ID NO: 141 - protein, 735 aa, synthetic construct
  REGION 1..735: note = source = /note="Description of Artificial Sequence: Synthetic polypeptide"
MAADGYLPDWLEDTLSEGIRQWWKLKPGPPPPKPNQQHRDDSRGLVLPGYKYLGPFNGLDKGEPVNEADAAALEHDKAYDHQLKQGDNPYLKYNHADAEFQERLQEDTSFGGNLGRAVFQAKKRVLEPLGLVEEAVKTAPGKKRPIEQSPAEPDSSSGIGKSGQQPAKKRLNFGQTGDTESVPGPQPIGEPPAAPSGVGSNTMASGGGAPMADNNEGADGVGNSSGNWHCDSTWMGDRVITTSTRTWALPTYNNHLYKQISSESGATNDNHYFGYSTPWGYFDFNRFHCHFSPRDWQRLINNNWGFRPKKLNFKLFNIQVKEVTQNDGTTTIANNLTSAVQVFTDSEYQLPYVLGSAHQGCLPPFPADVFMIPQYGYLTLNNGSQAVGRSSFYCLEYFPSQMLRTGNNFTFSYTFEDVPFHSSYAHSQSLDRLMNPLIDQYLYYLSKTQGTSGTTQQSRLQFSQAGPSSMAQQAKNWLPGPSYRQQRMSKTANDNNNSEFAWTAATKYYLNGRNSLVNPGPPVASHKDDEEKYFPMHGNLIFGKQGTGTTNVDIESVLITDEEEIRTTNPVATEQYGQVATNHQSQNTTASYGSVDSQGILPGMVWQDRDVYLQGPIWAKTPHTDGHFHPSPLMGGFGLKHPPPQILIKNTPVPANPATTFTPGKFASFITQYSTGQVSVEIEWELQKENSKRWNPEIQYTSNYNKSVNVEFTVDANGVYSEPRPIGTRYLTRNL

SEQ ID NO: 142 - DNA, 3123 bp, synthetic construct
  misc_feature 1..3123: note = source = /note="Description of Artificial Sequence: Synthetic polynucleotide"
  source 1..3123: mol_type = other DNA
gaattcgccctttctacggctgcgtcaactggaccaatgaaaactttcccttcaacgattgcgtcgacaagatggtgatctggtgggaggagggaaagatgaccgccaaggtcgtggaatctgccaaagccattctgggtggaagcaaggttcgtgtggaccagaaatgcaagtcttcggcccagatcgacccgactccggtgattgtcacctctaacaccaacatgtgcgccgtgattgacggaaactcgaccaccttcgagcaccagcagccgttgcaagaccggatgttcaaatttgaacttacccgccgtttggatcatgactttgggaaggtcaccaagcaggaagtcaaagactttttccggtgggctcaagatcacgtgactgaggtggagcatgagttctacgtcaaaaagggtggagccaagaaaaggcccgcccccgatgatgtatatataaatgagcccaagcgggcgcgcgagtcagttgcgcagccatcgacgtcagacgcggaagcttcgataaactacgcgggcaggtaccaaaacaaatgttctcgtcacgtgggcatgaatctgatgctgtttccctgtcgacaatgcgaaagaatgaatcagaattcaaatatctgcttcacacacgggcaaaaagactgtttggaatgctttcccgtgtcagaatctcaacccgtttctgtcgtcagaaaaacgtatcagaaactttgttacattcatcatatcatgggaaaagaaccagacgcctgcactgcctgcgacctggtaaatgtggacttggatgactgtatttctgagcaataaatgacttaaatcaggtatggctgctgacggttatcttccagattggctcgaggacactctctctgaaggaatcagacagtggtggaagctcaaacctggcccaccaccgccgaaacctaaccaacaacaccgggacgacagtaggggtcttgtgcttcctgggtacaagtacctcggacccttcaacggactcgacaaaggagagccggtcaacgaggcagacgccgcggccctcgagcacgacaaagcctacgaccaccagctcaagcaaggggacaacccgtacctcaaatacaaccacgcggacgctgaatttcaggagcgtcttcaagaagatacgtctttcgggggcaacctcgggcgagcagtcttccaggccaaaaagagggtactcgagcctcttggtctggttgaggaagctgttaagacggctcctggaaaaaagagacctatagagcagtctcctgcagaaccggactcttcctcgggcatcggcgaatcaggccagcagcccgctaagaaaagactcaattttggtcagactggcgacacagagtcagtcccagaccctcaaccaatcggagaaccccccgcagccccctctggtgtgggatctaatacaatggcttcaggcggtggggcaccaatggcagacgataacgaaggcgccgacggagtgggtaattcctcgggaaattggcattgcgattccacatggatgggcgacagagttatcaccaccagcacaagaacctgggccctccccacctacaataatcacctctacaagcaaatctccagcgaatcgggagccaccaacgacaaccactacttcggctacagcaccccctgggggtattttgactttaacagattccactgtcacttctcaccacgtgactggcagcgactcatcaacaacaactggggatttagacccaagaaactcaatttcaagctcttcaacatccaagtcaaggaggtcacgcagaatgatggaaccacgaccatcgccaataaccttaccagcacggtgcaggtcttcacagactctgagtaccagctgccctacgtcctcggttcggctcaccagggctgccttccgccgttcccagcagacgtcttcatgattcctcagtacggctacttgactctgaacaatggcagccaagcggtaggacgttcttcattctactgtctagagtattttccctctcagatgctgaggacgggaaacaacttcaccttcagctacacttttgaagacgtgcctttccacagcagctacgcgcacagccagagtctggatcggctgatgaatcctctcattgaccagtacctgtattacctgagcaaaactcagggtacaagtggaacaacgcagcaatcgagactgcagttcagccaagctgggcctagctccatggctcagcaggccaaaaactggctaccgggacccagctaccgacagcagcgaatgtctaagacggctaatgacaacaacaacagtgaatttgcttggactgcagccaccaaatattacctgaatggaagaaattctctggtcaatcccgggcccccaatggccagtcacaaggacgatgaggaaaagtatttccccatgcacggaaatctcatctttggaaaacaaggcacaggaactaccaatgtggacattgaatcagtgcttattacagacgaagaagaaatcagaacaactaatcctgtggctacagaacaatacggacaggttgccaccaaccatcagagtcaggacaccacagcttcctatggaagtgtggacagccagggaatcttacctggaatggtgtggcaggaccgcgatgtctatcttcaaggtcccatttgggccaaaactcctcacacggacggacactttcatccttctccgctcatgggaggctttggactgaaacaccctcctccccagatcctgatcaaaaacacacctgtgccagcgaatcccgcgaccactttcactcctggaaagtttgcttcgttcattacccagtattccaccggacaggtcagcgtggaaatagagtgggagctgcagaaagaaaacagcaaacgctggaacccagaaattcagtacacctccaactacaacaagtcggtgaatgtggagtttaccgtggacgcaaacggtgtttattctgaaccccgccctattggcactcgttaccttacccggaacttgtaatttcctgttaatgaataaaccgatttatgcgtttcagttgaactttggtctctgcgaagggcgaattcgcggccgcta

SEQ ID NO: 143 - protein, 735 aa, synthetic construct
  REGION 1..735: note = source = /note="Description of Artificial Sequence: Synthetic polypeptide"
MAADGYLPDWLEDTLSEGIRQWWKLKPGPPPPKPNQQHRDDSRGLVLPGYKYLGPFNGLDKGEPVNEADAAALEHDKAYDHQLKQGDNPYLKYNHADAEFQERLQEDTSFGGNLGRAVFQAKKRVLEPLGLVEEAVKTAPGKKRPIEQSPAEPDSSSGIGESGQQPAKKRLNFGQTGDTESVPDPQPIGEPPAAPSGVGSNTMASGGGAPMADDNEGADGVGNSSGNWHCDSTWMGDRVITTSTRTWALPTYNNHLYKQISSESGATNDNHYFGYSTPWGYFDFNRFHCHFSPRDWQRLINNNWGFRPKKLNFKLFNIQVKEVTQNDGTTTIANNLTSTVQVFTDSEYQLPYVLGSAHQGCLPPFPADVFMIPQYGYLTLNNGSQAVGRSSFYCLEYFPSQMLRTGNNFTFSYTFEDVPFHSSYAHSQSLDRLMNPLIDQYLYYLSKTQGTSGTTQQSRLQFSQAGPSSMAQQAKNWLPGPSYRQQRMSKTANDNNNSEFAWTAATKYYLNGRNSLVNPGPPMASHKDDEEKYFPMHGNLIFGKQGTGTTNVDIESVLITDEEEIRTTNPVATEQYGQVATNHQSQDTTASYGSVDSQGILPGMVWQDRDVYLQGPIWAKTPHTDGHFHPSPLMGGFGLKHPPPQILIKNTPVPANPATTFTPGKFASFITQYSTGQVSVEIEWELQKENSKRWNPEIQYTSNYNKSVNVEFTVDANGVYSEPRPIGTRYLTRNL

SEQ ID NO: 144 - DNA, 3113 bp, synthetic construct
  misc_feature 1..3113: note = source = /note="Description of Artificial Sequence: Synthetic polynucleotide"
  source 1..3113: mol_type = other DNA
gaattcgccctttctacggctgcgtcaactggaccaatgaaaactttcccttcaacgattgcgtcgacaagatggtgatctggtgggaggagggaaagatgaccgccaaggtcgtggaatctgccaaagccattctgggtggaagcaaggttcgtgtggaccagaaatgcaagtcttcggcccagatcgacccgactccggtgattgtcacctctaacaccaacatgtgcgccgtgattgacggaaactcgaccaccttcgagcaccagcagccgttgcaagaccggatgttcaaatttgaacttacccgccgtttggatcatgactttgggaaggtcaccaagcaggaagtcaaagactttttccggtgggctcaagatcacgtgactgaggtggagcatgagttctacgtcaaaaagggtggagccaagaaaaggcccgcccccgatgatgtatatataaatgagcccaagcgggcgcgcgagtcagttgcgcagccatcgacgtcagacgcggaagcttcgataaactacgcggacaggtaccaaaacaaatgttctcgtcacgtgggcatgaatctgatgctgtttccctgtcgacaatgcgaaagaatgaatcagaattcaaatatctgcttcacacacgggcaaaaagactgtttggaatgctttcccgtgtcagaatctcaacccgttcctgtcgtcagaaaaacgtatcagaaactttgttacattcatcatatcatgggaaaagtaccagacgcctgcactgcctgcgacctggtaaatgtggacttggatgactgtatttctgagcaataaatgacttaaatcaggtatggctgctgacggttatcttccagattggctcgaggacactctctctgaaggaatcagacagtggtggaagctcaaacctggcccaccaccgccgaaacctaaccaacaacaccgggacgacagtaggggtcttgtgcttcctgggtacaagtacctcggacccttcaacggactcgacaaaggagagccggtcaacgaggcagacgccgcggccctcgagcacgacaaagcctacgaccaccagctcaagcaaggggacaacccgtacctcaaatacaaccacgcggacgctgaatttcaggagcgtcttcaagaagatacgtctttcgggggcaacctcgggcgagcagtcttccaggccaaaaagagggtactcgagcctcttggtctggttgaggaagctgttaagacggctcctggaaaaaagagacctatagagcagtctcctgcagaaccggactcttcctcgggcatcggcaaatcaggccagcagcccgctaagaaaagactcaattttggtcagactggcgacacagagtcagtcccagaccctcaaccaatcggagaaccccccgcagccccctctggtgtgggatctaatacaatggcttcaggcggtggggcaccaatggcagacaataacgaaggcgccgacggagtgggtaattcctcgggaaattggcattgcgattccacatggatgggcgacagagttatcaccaccagcacaagaacctgggccctccccacctacaataatcacctctacaagcaaatctccagcgaatcgggagccaccaacgacaaccactacttcggctacagcaccccctgggggtattttgactttaacagattccactgtcacttctcaccacgtgactggcagcgactcatcaataacaactggggatttagacccaagaaactcaatttcaagctcttcaacatccaagtcaaggaggtcacgcagaatgatggaaccacgaccatcgccaataaccttaccagcacggtgcaggtcttcacagactctgagtaccagctgccctacgtcctcggttcggctcaccagggctgccttccgccgttcccagcagacgtcttcatgattcctcagtacggctacttgactctgaacaatggcagccaagcggtaggacgttcttcattctactgtctagagtattttccctctcagatgctgaggacgggaaacaacttcaccttcagctacacttttgaagacgtgcctttccacagcagctacgcgcacagccagagtctggatcggctgatgaatcctctcattgaccagtacctgtattacctgagcaaaactcagggtacaagtggaacaacgcagcaatcgagactgcagttcaaccaagctgggcctagctccatggctcagcaggccaaaaactggctaccgggacccagctaccgacagcagcgaatgtctaagacggctaatgacaacaacaacagtgaatttgcttggactgcagccaccaaatattacccgaatggaagaaattctctggtcaatcccgggcccccaatggccagtcacaaggacgatgaggaaaagtatttccccatgcacggaaatctcatctttggaaaacaaggcacaggaactaccaatgtggacattgaatcagtgcttattacagacgaagaagaaatcagaacgactaatcctgtggctacagaacaatacggacaggttgccaccaaccgtcagagtcagaacaccacagcttcctatggaagtgtggacagccagggaatcttacctggaatggtgtggcaggaccgcgatgtctatcttcaaggtcccatttgggccaaaactcctcacacggacggacactttcatccttctccgctcatgggaggctttggactgaaacaccctcctccccagatcctgatcaaaaacacacctgtgccagcgaatcccgcgaccactttcactcctggaaagtttgcttcgttcattacccagtattccaccggacaggtcagcgtggaaatagagtgggagctgcagaaagaaaacagcaaacgctggaacccggaaattcagtacacctccaactacaacaagtcggtgaatgtggagtttaccgtggacgcaaacggtgtttattctgaaccccgccctattggcactcgttaccttacccggaacttgtaatttcctgttaatgaataaaccgatttatgcgtttcagttgaactttggtctctgcgaagggcgaattc

SEQ ID NO: 145 - protein, 735 aa, synthetic construct
  REGION 1..735: note = source = /note="Description of Artificial Sequence: Synthetic polypeptide"
MAADGYLPDWLEDTLSEGIRQWWKLKPGPPPPKPNQQHRDDSRGLVLPGYKYLGPFNGLDKGEPVNEADAAALEHDKAYDHQLKQGDNPYLKYNHADAEFQERLQEDTSFGGNLGRAVFQAKKRVLEPLGLVEEAVKTAPGKKRPIEQSPAEPDSSSGIGKSGQQPAKKRLNFGQTGDTESVPDPQPIGEPPAAPSGVGSNTMASGGGAPMADNNEGADGVGNSSGNWHCDSTWMGDRVITTSTRTWALPTYNNHLYKQISSESGATNDNHYFGYSTPWGYFDFNRFHCHFSPRDWQRLINNNWGFRPKKLNFKLFNIQVKEVTQNDGTTTIANNLTSTVQVFTDSEYQLPYVLGSAHQGCLPPFPADVFMIPQYGYLTLNNGSQAVGRSSFYCLEYFPSQMLRTGNNFTFSYTFEDVPFHSSYAHSQSLDRLMNPLIDQYLYYLSKTQGTSGTTQQSRLQFNQAGPSSMAQQAKNWLPGPSYRQQRMSKTANDNNNSEFAWTAATKYYPNGRNSLVNPGPPMASHKDDEEKYFPMHGNLIFGKQGTGTTNVDIESVLITDEEEIRTTNPVATEQYGQVATNRQSQNTTASYGSVDSQGILPGMVWQDRDVYLQGPIWAKTPHTDGHFHPSPLMGGFGLKHPPPQILIKNTPVPANPATTFTPGKFASFITQYSTGQVSVEIEWELQKENSKRWNPEIQYTSNYNKSVNVEFTVDANGVYSEPRPIGTRYLTRNL

SEQ ID NO: 146 - DNA, 3122 bp, synthetic construct
  misc_feature 1..3122: note = source = /note="Description of Artificial Sequence: Synthetic polynucleotide"
  source 1..3122: mol_type = other DNA
agcggccgcgaattcgccctttctacggctgcgtcaactggaccaatgaaaactttcccttcaacgattgcgtcgacaagatggtgatctggtgggaggagggaaagatgaccgccaaggtcgtggaatctgccaaagccattctgggtggaagcaaggttcgtgtggaccagaaatgcaggtcttcggcccagatcgacccgactccggtgattgtcacctctaacaccaacatgtgcgccgtgattgacggaaactcgaccaccttcgagcaccagcagccgttgcaagaccggatgttcaaatttgaacttacccgccgtttggatcatgactttgggaaggtcaccaagcaggaagtcaaagactttttccggtgggctcaagatcacgtgactgaggtggagcatgagttctacgtcaaaaagggtggagccaagaaaaggcccgcccccgatgatgtatatataaatgagcccaagcgggcgcgcgagtcagttgcgcagccatcgacgtcagacgcggaagcttcgataaactacgcggacaggtaccaaaacaaatgttctcgtcacgtgggcatgaatctgatgctgtttccctgtcgacaatgcgaaagaatgaatcagaattcaaatatctgcttcacacacgggcaaaaagactgtttggaatgctttcccgtgtcagaatctcaacccgtttctgtcgtcagaaaaacgtatcagaaactttgttacattcatcatatcatgggaaaagtaccagacgcctgcactgcctgcgacctggtaaatgtggacttggatgactgtatttctgagcaataaatgacttaaatcaggtatggctgctgacggttatcttccagattggctcgaggacactctctctgaaggaatcagacagtggtggaagctcaaacctggcccaccaccgccgaaacctaaccaacaacaccgggacgacagtaggggtcttgtgcttcctgggtacaagtacctcggacccttcaacggactcgacaaaggagagccggtcaacgaggcagacgccgcggccctcgagcacgacaaagcctacgaccaccagctcaagcaaggggacaacccgtacctcaaatacaaccacgcggacgctgaatttcaggagcgtcttcaagaagatacgtctttcgggggcaacctcgggcgagcagtcttccaggccaaaaagagggtactcgagcctcttggtctggttgaggaagctgttaagacggctcctggaaaaaagagacctatagagcagtctcctgcagaaccggactcttcctcgggcatcggcaaatcaggccagcagcccgctaagaaaagactcaattttggtcagactggcgacacagagtcagtcccagaccctcaaccaatcggagaaccccccgcagccccctctggtgtgggatctaatacaatggcttcaggcggtggggcaccaatggcagacaataacgaaggcgccgacggagtgggtaattcctcgggaaattggcattgcgattccacatggatgggcgacagagttatcaccaccagcacaagaacctgggccctccccacctacaataatcgcctctacaagcaaatctccagcgaatcgggagccaccaacgacaaccactacttcggctacagcaccccctgggggtattttgactttaacagattccactgtcacttctcaccacgtgactggcagcgactcatcaacaacaactggggatttagacccaagaaactcaatttcaagctcttcaacatccaagtcaaggaggtcacgcagaatgatggaaccacgaccatcgccaataaccttaccagcacggtgcaggtcttcacagactctgagtaccagctgccctacgtcctcggttcggctcaccagggctgccttccgccgttcccagcagacgtcttcatgattcctcagtacggctacttgactctgaacaatggcagccaagcggtaggacgttcttcattctactgtctagagtattttccctctcagatgctgaggacgggaaacaacttcaccttcagctacacttttgaagacgtgcctttccacagcagctacgcgcacagccagagtctggatcggctgatgaatcctctcattgaccagtacctgtattacctgagcaaaactcagggtacaagtggaacaacgcagcaatcgagactgcagttcagccaagctgggcctagctccatggctcagcaggccaaaaactggctaccgggacccagctaccgacagcagcgaatgtctaagacggctaatgacaacaacaacagtgaatttgcttggactgcagccaccaaatattacctgaatggaagaaattctctggtcaatcccgggcccccaatggccagtcacaaggacgatgaggaaaagtatttccccatgcacggaaatctcatctttggaaaacaaggcacaggaactaccaatgtggacattgaatcagtgcttattacagacgaagaagaaatcagaacaactaatcctgtggctacagaacaatacggacaggttgccaccaaccatcagagtcagaacaccacagcttcctatggaagtgtggacagccagggaatcttacctggaatggtgtggcaggaccgcgatgtctatcttcaaggtcccatttgggccaaaactcctcacacggacggacactttcatccttctccgctcatgggaggctttggactgaaacaccctcctccccagatcctgatcaaaaacacacctgtgccagcgaatcccgcgaccactttcactcctggaaagtttgcttcgttcattacccagtattccaccggacaggtcagcgtggaaatagagtgggagctgcagaaagaaaacagcaaacgctggaacccagaaattcagtacacctccaactacaacaagtcggtgaatgtggagtttaccgtggacgcaaacggtgtttattctgaaccccgccctattggcactcgttaccttacccggaacttgtaatttcctgttaatgaataaaccgatttatgcgtttcagttgaactttggtctctgcgaagggcgaattc

SEQ ID NO: 147 - protein, 735 aa, synthetic construct
  REGION 1..735: note = source = /note="Description of Artificial Sequence: Synthetic polypeptide"
MAADGYLPDWLEDTLSEGIRQWWKLKPGPPPPKPNQQHRDDSRGLVLPGYKYLGPFNGLDKGEPVNEADAAALEHDKAYDHQLKQGDNPYLKYNHADAEFQERLQEDTSFGGNLGRAVFQAKKRVLEPLGLVEEAVKTAPGKKRPIEQSPAEPDSSSGIGKSGQQPAKKRLNFGQTGDTESVPDPQPIGEPPAAPSGVGSNTMASGGGAPMADNNEGADGVGNSSGNWHCDSTWMGDRVITTSTRTWALPTYNNRLYKQISSESGATNDNHYFGYSTPWGYFDFNRFHCHFSPRDWQRLINNNWGFRPKKLNFKLFNIQVKEVTQNDGTTTIANNLTSTVQVFTDSEYQLPYVLGSAHQGCLPPFPADVFMIPQYGYLTLNNGSQAVGRSSFYCLEYFPSQMLRTGNNFTFSYTFEDVPFHSSYAHSQSLDRLMNPLIDQYLYYLSKTQGTSGTTQQSRLQFSQAGPSSMAQQAKNWLPGPSYRQQRMSKTANDNNNSEFAWTAATKYYLNGRNSLVNPGPPMASHKDDEEKYFPMHGNLIFGKQGTGTTNVDIESVLITDEEEIRTTNPVATEQYGQVATNHQSQNTTASYGSVDSQGILPGMVWQDRDVYLQGPIWAKTPHTDGHFHPSPLMGGFGLKHPPPQILIKNTPVPANPATTFTPGKFASFITQYSTGQVSVEIEWELQKENSKRWNPEIQYTSNYNKSVNVEFTVDANGVYSEPRPIGTRYLTRNL

SEQ ID NO: 148 - DNA, 3121 bp, synthetic construct
  misc_feature 1..3121: note = source = /note="Description of Artificial Sequence: Synthetic polynucleotide"
  source 1..3121: mol_type = other DNA
gaattcgcccttcgcagagaccaaagttcaactgaaacgaatcaaccggtttattgattaacaagcaattacagattacgggtgaggtaacgggtgccgatggggcgaggctcagaataagtgccatctgtgttaacagcaaagtccacatttgtagatttgtagtagttggaagtgtattgaatctctgggttccagcgtttgctgttttctttctgcagctcccattcaatttccacgctgacctgtccggtgctgtactgcgtgatgaacgacgccagcttagcttgactgaaggtagttggaggatccgcgggaacaggtgtattcttaatcaggatctgaggaggcgggtgtttcagtccaaagccccccatcagcggcgagggatgaaagtttccgtccgtgtgaggaatcttggcccagataggaccctgcaggtacacgtcccggttctgccagaccatgccaggtaaggctccttgactgttgacggcccctacaataggagcggcgttttgctgttgcaggttatcggccaccacgccgtactgttctgtggccactgggttggtggttttaatttcttcctcactggttagcataacgctgctatagtccacgttgccttttccagctccctgtttcccaaacattaagactccgctggacggaaaaaatcgctcttcgtcgtccttgtgggttgccatagcgacaccgggatttaccagagagtctctgccattcagatgatacttggtggcaccggtccaggcaaagttgctgttgttattttgcgacagtgtcgtggagacgcgttgctgccggtagcagggcccgggtagccagtttttggcctgagccgacatgttattaggcccggcctgagaaaatagcaactgctgagttcctgcggtacctcccgtggactgagtccgagacaggtagtacaggtactggtcgatgagggggttcatcagccggtccaggctttggctgtgcgcgtagctgctgtgaaaaggcacgtcctcaaactggtagctgaactcaaagttgttgcccgttctcagcatttgagaaggaaagtactccaggcagtagaaggaggaacggcccacggcctgactgccattgttcagagtcaggtacccgtactgaggaatcatgaagacgtccgccgggaacggaggcaggcagccctggcgcgcagagccgaggacgtacgggagctggtattccgagtccgtaaagacctgaatcgtgctggtaaggttattggcgatggtcttggtgccttcattctgcgtgacctccttgacctggatgttgaagagcttgaagttgagtctcttgggccggaatccccagttgttgttgatgagtcgctgccagtcacgtggtgagaagtggcagtggaatctgttaaagtcaaaatacccccagggggtgctgtagccgaagtaggtgttgtcgttggtgcttcctcccgaagtcccgttggagatttgcttgtagaggtggttgttgtaggtggggagggcccaggttcgggtgctggtggtgatgactctgtcgcccagccatgtggaatcgcaatgccaatttcctgaggaactacccactccgtcggcgccttcgttattgtctgccattggagcgccaccgcctgcagccattgtaccagatcccagaccagaggggcctgcggggggttctccgattggttgagggtcgggcactgactctgagtcgccagtctgcccaaagttgagtctctttttcgcgggctgctggcctttcttgccgatgcccgtagtggagtctggagaacgctggggtgatggctctaccggtctcttctttccaggagccgtcttagcgccttcctcaaccagaccgagaggttcgagaacccgcttcttggcctggaagactgctcgtccgaggttgcccccaaaagacgtatcttcttgcagacgctcctgaaactcggcgtcggcgtggttataccgcaggtacggattgtcacccgctttgagctgctggtcgtaggccttgtcgtgctcgagggccgctgcgtccgccgcgttgacgggctcccccttgtcgagtccgttgaagggtccgaggtacttgtagccaggaagcaccagaccccggccgtcgtcctgcttttgctggttggctttgggcttcggggctccaggtttcagcgcccaccactcgcgaatgccctcagagaggttgtcctcgagccaatctggaagataaccatcggcagccatacctgatctaaatcatttattgttcaaagatgcagtcatccaaatccacattgaccagatcgcaggcagtgcaagcgtctggcacctttcccatgatatgatgaatgtagcacagtttctgatacgcctttttgacgacagaaacgggttgagattctgacacgggaaagcactctaaacagtctttctgtccgtgagtgaagcagatatttgaattctgattcattctctcgcattgtctgcagggaaacagcatcagattcatgcccacgtgacgagaacatttgttttggtacctgtccgcgtagttgatcgaagcttccgcgtctgacgtcgatggctgcgcaactgactcgcgcacccgtttgggctcacttatatctgcgtcactgggggcgggtcttttcttggctccaccctttttgacgtagaattcatgctccacctcaaccacgtgatcctttgcccaccggaaaaagtctttgacttcctgcttggtgaccttcccaaagtcatgatccagacggcgggtgagttcaaatttgaacatccggtcttgcaacggctgctggtgttcgaaggtcgttgagttcccgtcaatcacggcgcacatgttggtgttggaggtgacgatcacgggagtcgggtctatctgggccgaggacttgcatttctggtccacgcgcaccttgcttcctccgagaatggctttggccgactccacgaccttggcggtcatcttcccctcctcccaccagatcaccatcttgtcgacacagtcgttgaagggaaagttctcattggtccagttgacgcagccgtagaagggcgaattc

SEQ ID NO: 149 - protein, 733 aa, synthetic construct
  REGION 1..733: note = source = /note="Description of Artificial Sequence: Synthetic polypeptide"
MAADGYLPDWLEDNLSEGIREWWDLKPGAPKLKANQQKQDDGRGLVLPGYKYLGPFHGLDKGEPVNAADAAALEHDKAYDQQLKAGDNPYLRYNHADAEFQERLQEDTSFGGNLGRAVFQAKKRVLEPLGLVEEGAKTAPGKKRPLESPQEPDSSSGIGKKGKQPAKKRLNFEEDTGAGDGPPEGSDTSAMSSDIEMRAAPGGNAVDAGQGSDGVGNASGDWHCDSTWSEGKVTTTSTRTWVLPTYNNHLYLRLGTTSNSNTYNGFSTPWGYFDFNRFHCHFSPRDWQRLINNNWGLRPKAMRVKIFNIQVKEVTTSNGETTVANNLTSTVQIFADSSYELPYVMDAGQEGSLPPFPNDVFMVPQYGYCGIVTGENQNQTDRNAFYCLEYFPSQMLRTGNNFEMAYNFEKVPFHSMYAHSQSLDRLMNPLLDQYLWHLQSTTSGETLNQGNAATTFGKIRSGDFAFYRKNWLPGPCVKQQRFSKTASQNYKIPASGGNALLKYDTHYTLNNRWSNIAPGPPMATAGPSDGDFSNAQLIFPGPSVTGNTTTSANNLLFTSEGEIAATNPRDTDMFGQIADNNQNATTAPITGNVTAMGVLPGMVWQNRDIYYQGPIWAKIPHADGHFHPSPLIGGFGLKHPPPQIFIKNTPVPANPATTFTAARVDSFITQYSTGQVAVQIEWEIEKERSKRRNPEVQFTSNYGNQSSMLWAPDTTGKYTEPRVIGSRYLTNHL

SEQ ID NO: 150 - protein, 735 aa, synthetic construct
  REGION 1..735: note = source = /note="Description of Artificial Sequence: Synthetic polypeptide"
MAADGYLPDWLEDTLSEGIRQWWKLKPGPPPPKPNQQHRDDSRGLVLPGYKYLGPFNGLDKGEPVNEADAAALEHDKAYDHQLKQGDNPYLKYNHADAEFQERLQEDTSFGGNLGRAVFQAKKRVLEPLGLVEEAVKTAPGKKRPIEQSPAEPDSSSGIGKSGQQPAKKRLNFGQTGDTESVPDPQPIGEPPAAPSGVGSNTMASGGGAPMADNNEGADGVGNSSGNWHCDSTWMGDRVITTSTRTWALPTYNNHLYKQISSESGATNDNHYFGYSTPWGYFDFNRFHCHFSPRDWQRLINNNWGFRPKKLNFKLFNIQVKEVTQNDGTTTIANNLTSTVQVFTDSEYQLPYVLGSAHQGCLPPFPADVFMIPQYGYLTLNNGSQAVGRSSFYCLEYFPSQMLRTGNNFTFSYTFEDVPFHSSYAHSQSLDRLMNPLIDQYLYYLSKTQGTSGTTQQSRLQFSQAGPSSMAQQAKNWLPGPSYRQQRMSKTANDNNNSEFAWTAATKYYLNGRNSLVNPGPPMASHKDDEEKYFPMHGNLIFGKQGTGTTNVDIESVLITDEEEIRTTNPVATEQYGQVATNHQSQNTTASYGSVDSQGILPGMVWQDRDVYLQGPIWAKIPHTDGHFHPSPLMGGFGLKHPPPQILIKNTPVPANPATTFTPGKFASFITQYSTGQVSVEIEWELQKENSKRWNPEIQYTSNYNKSVNVEFTVDANGVYSEPRPIGTRYLTRNL

SEQ ID NO: 151 - DNA, 3127 bp, synthetic construct
  misc_feature 1..3127: note = source = /note="Description of Artificial Sequence: Synthetic polynucleotide"
  source 1..3127: mol_type = other DNA
gcggccgcgaattcgcccttcgcagagaccaaagttcaactgaaacgaatcaaccggtttattgattaacatgcaattacagattacgggtgaggtaacgagtgccaatagggcgaggctcagagtaaacaccctggctgtcaacggcaaagtccacaccagtctgcttttcaaagttggaggtgtactgaatctccgggtcccagcgcttgctgttttccttctgcagctcccactcgatttccacgctgacttgtccggtgctgtactgtgtgatgaacgaagcaaacttggcaggagtaaacacctccggaggattagcgggaacgggagtgttcttgatcaggatctgaggaggcggatgtttaagtccaaagccgcccatcaaaggagacgggtgaaagttgccatccgtgtgaggaatcttggcccagatgggaccctgcaggtacacgtcccggttctgccagaccatgccaggtaaggctccctggttgttgacaacttgtgtctgggctgcagtattagccgcttgtaagttgctgctgactatcccgtattcttccgtggctacaggattagtaggacgaatttcttcttcatttgtcattaacacattttccaatgtagttttgttagttgctccagtttttccaaaaatcaggactccgctggatgggaaaaagcggtcctcgtcgtccttgtgagttgccatggcgacgccgggattaaccaacgagtttctgccgttcaggtgatatttggtggcaccagtccaagcaaagttgctgttgttgttttgatccagcgttttggagaccctttgttgccggaagcagggtccaggtaaccaattcttggcttgttcggccatagttgaaggcccgccctggtaaaactgcagttcccgattgccagctgtgcctcctgggtcactctgtgttctggccaggtagtacaagtactggtcgatgaggggattcatcagccggtccaggctctggctgtgtgcgtagctgctgtggaaaggcacgtcctcgaagctgtagctgaactcaaagttgttgcccgttctcagcatctgagaggggaagtactccaggcagtagaaggaggaacgtcccacagactgactgccattgttgagagtcaggtagccgtactgaggaatcatgaagacgtccgccgggaacggaggcaggcagccctggtgcgcagagccgaggacgtacggcagctggtattccgagtccgagaatacctgaatcgtgctggtaaggttattagcgatggtcgtaacgccgtcattcgtcgtgacctccttgacctggatgttgaagagcttgaaccgcagcttcttgggccggaatccccagttgttgttgatgagtcgctgccagtcacgtggtgagaagtggcagtggaatctgttaaagtcaaaatacccccagggggtgctgtagccgaagtaggtgttgtcgttggtactacctgcagtttcactggagatttgctcgtagaggtggttgttgtaggtgggcagggcccaggttcgggtgctggtggtaatgactctgtcgcccagccatgtggaatcgcaatgccaatttcctgaggcattacccactccgtcggcaccttcgttattgtctgccattggtgcgccaccgcctgcagccactgtaccagatcccacactagagggcgctgctggaggttctccgagaggttgagggtcggggactgactctgagtcgccagtctgaccgaaattgagtctctttctggcgggctgctggcccttcttgccgatgcccgtggaggagtcgggggaacgctgaggtgacggctctaccggtctcttctttgcaggagccgtcttagcgccttcctcaaccagaccgagaggttcgagaacccgcttcttggcctggaagactgctcgcccgaggttgcccccaaatgacgtatcttcttgcagacgctcctgaaactcggcgtcggcgtggttataccgcaggtacgggttgtcacccgcattgagctgctggtcgtaggccttgtcgtgctcgagggccgctgcgtccgccgcgttgacgggctcccccttgtcgagtccgttgaagggtccgaggtacttgtagccaggaagcaccagaccccggccgttgtcctgcttttgctggttggctttgggtttcggggctccaggtttcaggtcccaccactcgcgaatgccctcagagaggttgtcctcgagccaatctggaagataaccatcggcagccatacctgatttaaatcatttattgttcaaagatgcagtcatccaaatccacattgaccagatcgcaggcagtgcaagcgtctggcacctttcccatgatatgatgaatgtagcacagtttctgatacgcctttttgacgacagaaacgggtttagattctgacacgggaaagcactctaaacagtctttctgtccgtgagtgaagcagatatttgaattctgattcattctctcgcattgtctgcagggaaacagcatcagattcatgcccacgtgacgagaacatttgttttggtacctgtctgcgtagttgatcgaagcttccgcgtctgacgtcgatggctgcgcaactgactcgcgcacccgtttgggctcacttatatctgcgtcactgggggcgggtcttttcttggctccaccctttttgacgtagaattcatgctccacctcaaccacgtaatcctttgcccaccggaaaaagtctttgacttcctgcttggtgaccttcccaaagtcatgatccagacggcgggtgagttcaaatttgaacatccggtcttgcaacggctgctggtgttcgaaggtcgttgagttcccgtcgatcacggcgcacatgttggtgttggagatgacgatcgcgggagtcgggtctatctgggccgaggacttgcatttctggtccacgcgcaccttgcttcctccgagaatggctttggccgactccacgaccttggcggtcatcttcccctcctcccaccagatcaccatcttgtcgacacagtcgttgaagggaaagttctcattggtccagttgacgcagccgtagaaagggcgaattc

SEQ ID NO: 152 - protein, 728 aa, synthetic construct
  REGION 1..728: note = source = /note="Description of Artificial Sequence: Synthetic polypeptide"
MAADGYLPDWLEDNLSEGIREWWDLKPGAPKPKANQQKQDDGRGLVLPGYKYLRPFNGLDKGEPVNEADAAALEHDKAYDKQLEQGDNPYLKYNHADAEFQERLQEDTSFGGNLGRAVFQAKKRVLEPLGLVEEVAKTAPGKKRPIESPDSSTGIGKKGQQPAKKKLNFGQTGDSESVPDPQPLGEPPAAPSGLGSGTMAAGGGAPMADNNEGADGVGNASGNWHCDSTWLGDRVITTSTRTWALPTYNNHLYKQISSQSGATNDNHFFSYSTPWGYFDFNRFHCHFSPRDWQRLINNNWGFRPRKLRFKLFNIQVKEVTTNDGVTTIANNLTSTIQVFSDSEYQLPYVLGSAHQGCLPPFPADVFMIPQYGYLTLNNGSQSVGRSSFYCLEYFPSQMLRTGNNFEFSYTFEEVPFHSSYVHSQSLDRLMNPLIDQYLYYLARTQSTTGSTRELQFHQAGPNTMAEQSKNWLPGPCYRQQRLSKNIDSNNNSNFAWTGATKYHLNGRNSLTNPGVAMATNKDDEDQFFPINGVLVFGKTGAANKTTLENVLMTSEEEIKTTNPVATEEYGVVSSNLQSSTAGPQTQTVNSQGALPGMVWQNRDVCLQGPIWAKIPHTDGNFHPSPLMGGFGLKHPPPQILIKNTPVPANPPEVFTPAKFASFITQYSTGQVSVEIEWELQKENSKRWNPEIQYTSNYAKSNNVEFAVNNEGVYTEPRPIGTRYLTRNL

SEQ ID NO: 153 - DNA, 3106 bp, synthetic construct
  misc_feature 1..3106: note = source = /note="Description of Artificial Sequence: Synthetic polynucleotide"
  source 1..3106: mol_type = other DNA
gcggccgcgaattcgcccttcgcagagaccaaagttcaactgaaacgaatcaaccggtttattgattaacaagtaattacaggttacgggtgaggtaacgggtgccaatggggcgaggctcagtataaaccccttcgttgttgacagcaaattccacattattagacttggcataatttgaggtgtactgaatctctggattccagcgtttgctgttttctttctgcagttcccactcgatctccacgctgacctggccggtgctgtactgcgtgataaatgaggcaaacttggcaggagtaaacacctctggaggattagcaggtaccggggtgtttttgatgagaatttgaggaggcgggtgtttgagtccaaatccgcccatcaggggagacgggtgaaagttgccgtccgtgtgaggaattttggcccagatgggaccctgcaggcacacgtcccggttctgccagaccatgccgggcagagccccctggctgttgacagtctgtgtctggggtccggccgtagacgattgcaggttgctggagaccacaccgtattcttctgtagccacgggattggtggttttgatctcctcctcgctggtcattagcacgttttccagcgttgtcttgttggcagcccccgttttgccaaaaaccagcactccgttgatgggaaagaactggtcctcgtcgtccttgttggtggccatggctacgcccgggttggttaatgaatttctaccattcagatggtatttagtggccccggtccaggcaaagttactgttgttgttgctgtctatgttttttgacagtctctgctgccgataacagggtccgggcagccagttctttgattgctcggccatggtgttgggcccagcctgatggaactgcagctcccttgtggaccccgtagtgctctgggtccgggccaggtagtacaggtactggtcgatgaggggattcatcagccggtctaggctctggctgtgcacatagctgctgtggaaaggcacttcctcaaaggtgtagctgaattcaaagttattgcccgttctcagcatctgagaaggaaagtactccaggcagtagaaggaggaacgtcccacagactgactgccgttgtttagagtcagatatccgtactgaggaatcatgaacacgtccgcagggaacggagggaggcagccctggtgcgcagagccgaggacgtacggcagttggtactccgagtccgagaagacctgaatcgtgctggtaaggttattagcgatggtcgtaacgccgtcgttcgtcgtgacctccttgacctggatgttgaacaacttgaaccgcagctttctgggccggaatccccagttgttgttgatgagtcgctgccagtcacgtggtgagaagtggcagtggaatctgttgaagtcaaaatagccccagggggtgctgtagctgaagaagtggttgtcgttggtagccccgctctgacttgatatctgcttgtagaggtggttgttgtaggtgggcagggcccaggtgcgggtgctggtggtgatgactctgtcgcccagccatgtggaatcgcaatgccaatttccggaggcattacccactccgtcggcgccttcgttattgtctgccattggtgcgccaccgcctgcagccattgtaccagatcccagacctgagggcgcggcgggaggttctccgagaggttgggggtcgggcactgactctgagtcgccagtctgcccaaagttgagcttctttttagcgggctgctggcctttcttgccgatgcccgtggaggagtcgggggattctatgggtctcttctttccaggagccgtcttagcgacttcctcaaccagaccgagaggttcgagaacccgcttcttggcctggaagactgctcgcccgaggttgcccccaaaagacgtatcttcttgaagacgctcctgaaactcggcgtcggcgtggttgtacttgaggtacgggttgtccccctgctcgagctgcttgtcgtaggccttgtcgtgctcgagggccgcggcgtctgcctcgttgaccggctctcccttgtcgagtccgttgaagggtctgaggtacttgtagccaggaagcaccagaccccggccgtcgtcctgcttttgctggttggctttgggtttcggggctccaggtttcaagtcccaccactcgcgaatgccctcagagaggttgtcctcgagccaatctggaagataaccatcggcagccatacctggtttaagtcatttattgctcagaaacacagtcatccaggtccacgttgaccagatcgcaggccgagcaagcaatctcgggagcccgccccagcagatgatgaatggcacagagtttccgatacgtcctctttctgacgaccggttgagattctgacacgccggggaaacattctgaacagtctctggtcccgtgcgtgaagcaaatgttgaaattctgattcactctctcgcatgtcttgcagggaaacagcatctgaagcatgcccgcgtgacgagaacatttgttttggtacctgtcggcaaagtccaccggagctccttccgcgtctgacgtcgatggattcgcgactgaggggcaggcccgcttgggctcgcttttatccgcgtcatcgggggcgggtctcttgttggccccaccctttctgacgtagaacccatgcgccacctcggtcacgtgatcctgcgcccagcggaagaaccttttgacttcctgctttgtcaccttgccaaagttatgctccagacggcgggtgggttcaaatttgaacatccggtcctgcaacggctgctggtgctcgaaggtggcgctgttcccgtcaatcacggcgcacatgttggtgttggaggtgacggtcacgggggtggggtcgatctgggcggacgacttgcacttttggtccacgcgcaccttgctgccgccgagaatggccttggcggactccacgaccttggccgtcatcttgccctcctcccaccagatcaccatcttgtcggcgcaatcgttgaagggaaagttctcattggtccagttgacgcagccgtagaaagggcgaattc

SEQ ID NO: 154 - protein, 728 aa, synthetic construct
  REGION 1..728: note = source = /note="Description of Artificial Sequence: Synthetic polypeptide"
MAADGYLPDWLEDNLSEGIREWWDLKPGAPKPKANQQKQDDGRGLVLPGYKYLGPFNGLDKGEPVNEADAAALEHDKAYDKQLEQGDNPYLKYNHADAEFQERLQEDTSFGGNLGRAVFQAKKRVLEPLGLVEEGAKTASGKKRPIESPDSSTGIGKKGQQPAKKKLNFGQTGDSESVPDPQPLGEPPAAPSGLGSGTMAAGGGAPMADNNEGADGVGNASGNWHCDSTWLGDRVITTSTRTWALPTYNNHLYKQISSQSGATNDNHFFGYSTPWGYFDFNRFHCHFSPRDWQRLINNNWGFRPRKLRFKLFNIQVKEVTTNDGVTTIANNLTSTIQVFSDSEYQLPYVLGSAHQGCLPPFPADVFMIPQYGYLTLNNGSQSVGRSSFCCLEYFPSQMLRTGNNFEFSYTFEEVPFHSSYAHSQSLDRLMNPLIDQYLYYLARTQSTTGSTRELQFHQAGPNTVAEQSKNWLPGPCYRQQRLSKNIDSNNNSNFAWTGATKYHLNGRNSLTNPGVAMATNKDDEDQFLPINGVLVFGKTGAANKTTLENVLMTSEEEIKTTNPVATEEYGVVSSNLQSSTAGPRTQTVNSQGALPGMVWQNRDVYLQGPIWAEIPHTDGNFHPSPLMGGFGLKHPPPQILIKNTPVPANPPEVFTPAKFASFITQYSTGQVSVEIEWELQKENSKRWNPEIQYTSNYAKSNNVEFAVNNEGVYTEPRPIGTRYLTRNL

SEQ ID NO: 155 - DNA, 3102 bp, synthetic construct
  misc_feature 1..3102: note = source = /note="Description of Artificial Sequence: Synthetic polynucleotide"
  source 1..3102: mol_type = other DNA
gcggccgcgaattcgcccttcgcagagaccaaagttcaactgaaacgaatcaaccggtttattgattaacaagtaattacaggttacgggtgaggtaacgggtgccaatggggcgaggctcagtataaaccccttcgttgttgacagcaaattccacattattagacttggcataatttgaggtgtactgaatctctggattccagcgtttgctgttttctttctgcagttcccactcgatctccacgctgacctggccggtgctgtactgcgtgataaatgaggcaaacttggcaggagtaaacacctctggaggattagcaggtaccggggtgtttttgatgagaatttgaggaggcgggtgtttgagtccaaatccgcccatcaggggagacgggtgaaagttgccgtccgtgtgaggaatttcggcccagatgggaccctgcaggtacacgtcccggttctgccagaccatgccgggcagagccccctggctgttgacagtctgtgtccggggtccggccgtagacgattgcaggttgctggagaccacaccgtattcttctgtagccacgggattggtggttttgatctcctcctcgctggtcattagcacgttttccagcgttgtcttgttggcagcccccgttttgccaaaaaccagcactccgttgatgggaaggaactggtcctcgtcgtccttgttggtggccatggctacgcccgggttggttaatgaatttctaccattcagatggtatttagtggccccggtccaggcaaagttactgttgttgttgctgtctatgttttttgacagtctctgctgccgataacagggtccgggcagccagttctttgattgctcggccacggtgttgggcccagcctgatggaactgcagctcccttgtggaccccgtagtgctctgggtccgggccaggtagtacaggtactggtcgatgaggggattcatcagccggtccaggctctggctgtgcgcatagctgctgtggaaaggcacttcctcaaaggtgtagctgaattcaaagttattgcccgttctcagcatctgagaaggaaagtactccaggcagcagaaggaggaacgtcccacagactgactgccgttgtttagagtcagatatccgtactgaggaatcatgaacacgtccgcagggaacggagggaggcagccctggtgcgcagagccgaggacgtacggcagttggtactccgagtccgagaagacctgaatcgtgctggtaaggttattagcgatggtcgtaacgccgtcgttcgtcgtgacctccttgacctggatgttgaacaacttgaaccgcagctttctgggccggaatccccagttgttgttgatgagtcgctgccagtcacgtggtgagaagtggcagtggaatctgttgaagtcaaaatagccccagggggtgctgtagccgaagaagtggttgtcgttggtagccccgctctgacttgatatctgcttgtagaggtggttgttgtaggtgggcagggcccaggtgcgggtgctggtggtgatgactctgtcgcccagccatgtggaatcgcaatgccaatttccggaggcattacccactccgtcggcgccttcgttattgtctgccattggtgcgccaccgcctgcagccattgtaccagatcccagacctgagggcgcggcgggaggttctccgagaggttgggggtcgggcactgactctgagtcgccagtctgcccaaagttgagcttctttttagcgggctgctggcctttcttgccgatgcccgtggaggagtcgggggattctatgggtctcttctttccggaagccgtcttagcgccttcctcaaccagaccgagaggttcgagaacccgcttcttggcctggaagactgctcgcccgaggttgcccccaaaagacgtatcttcttgaagacgctcctgaaactcggcgtcggcgtggttgtacttgaggtacgggttgtccccctgctcgagctgcttgtcgtaggccttgtcgtgctcgagggccgcggcgtctgcctcgttgaccggctctcccttgtcgagtccgttgaagggtccgaggtacttgtagccaggaagcaccagaccccggccgtcgtcctgcttttgctggttggctttgggtttcggggctccaggtttcaagtcccaccactcgcgaatgccctcagagaggttgtcctcgagccaatctggaagataaccatcggcagccatacctggtttaagtcatttattgctcagaaacacagtcatccaggtccacgttgaccagatcgcaggccgagcaagcaatctcgggagcccgccccagcagatgatgaatggcacagagtttccgatacgtcctctttctgacgaccggttgagattctgacacgccggggaaacattctgaacagtctctggtcccgtgcgtgaagcaaatgttgaaattctgattcattctctcgcatgtcttgcagggaaacagcatctgaagcatgcccgcgtgacgagaacatttgttttggtacctgtcggcaaagtccaccggagctccttccgcgtctgacgtcgatggatccgcgactgaggggcaagcccgcttgggctcgcttttatccgcgtcatcgggggcgggtctcttgttggctccaccctttctgacgtagaactcatgcgccacctcggtcacgtgatcctgcgcccagcggaagaactctttgacttcctgctttgtcaccttgccaaagtcatgctccagacggcgggtgagttcaaatttgaacatccggtcttgtaacggctgctggtgctcgaaggtggtgctgttcccgtcaatcacggcgcacatgttggtgttggaagtgacgatcacgggggtgggatcgatctgggcggacgacttgcacttttggtccacgcgcaccttgctgccgccgagaatggccttggcggactccacgaccttggccgtcatcttgccctcctcccaccagatcaccatcttgtcgacgcaatcgttgaagggaaagttctcattggtccagttgacgcagccgaagggcgaattc

SEQ ID NO: 156 - protein, 728 aa, synthetic construct
  REGION 1..728: note = source = /note="Description of Artificial Sequence: Synthetic polypeptide"
MAADGYLPDWLEDNLSEGIREWWDLKPGAPKPKANQQKQDDGRGLVLPGYRYLGPFNGLDKGEPVNEADAAALEHDKAYDKQLEQGDNPYLKYNHADAEFQERLQEDTSFGGNLGRAVFQAKKRVLEPLGLVEEGAKTAPGKKRPIESPDSSTGIGKNGQPPAKKKLNFGQTGDSESVPDPQPLGEPPAAPSGLGSGTMAAGGGAPMADNNEGADGVGNASGNWHCDSTWLGDRVITTSTRTWALPTYNNHLYKQISSQSGATNDNHFFGYSTPWGYFDFNRFHCHFSPRDWQRLINNNWGFRPRKLRFKLFNIQVKEVTTNDGVTTIANNLTSTIQVFSDSEYQLPYVLGSAHQGCLPPFPADVFMIPQYGYLTLNNGSQSVGRSSFYCLEYFPSQMLRTGNNFEFSYTFEEVPFHSSYAHSQSLDRLMNPLIDQYLYYLARTQSTTGSTRELQFHQAGPNTMAEQSKNWLPGPCYRQQRLSKNIDSNNNSNFAWTGATKYHLNGRNSLTNPGVAMATNKDDEDQFFPINGVLVFGKTGAANKTTLENVLMTSEEEIKTTNPVATEEYGVVSSNLQSSTAGPQTQTVNSQGALPGMVWQNRDVYLQGPIWAKIPHTDGNFHPSPLMGGFGLKHPPPQILIKNTPVPANPPEVFTPAKFASFITQYSTGQVSVEIEWELQKENSKRWNPEIQYTSNYAKSNNVEFAVNNEGVYTEPRPIGTRYLTRNL

SEQ ID NO: 157 - protein, 728 aa, synthetic construct
  REGION 1..728: note = source = /note="Description of Artificial Sequence: Synthetic polypeptide"
MAADGYLPDWLEGNLSEGIREWWDLKPGAPKPKANQQKQDDGRGLVLPGYRYLGPFNGLDKGEPVNEADAAALEHDKAYDKQLEQGDNPYLKYNHADAEFQERLQEDTSFGGNLGRAVFQAKKRVLEPLGLVEEGAKTAPGKKRPIESPDSSTGIGKNGQPPAKKKLNFGQTGDSESVPDPQPLGEPPAAPSGLGSGTMAAGGGAPMADNNEGADGVGNASGNWHCDSTWLGDRVITTSTRTWALPTYNNHLYKQISSQSGATNDNHFFGYSTPWGYFDFNRFHCHFSPRDWQRLINNNWGFRPRKLRFKLFNIQVKEVTTNDGVTTIANNLTSTIQVFSDSEYQLPYVLGSAHQGCLPPFPADVFMIPQYGYLTLNNGSQSVGRSSFYCLEYFPSQMLRTGDNFEFSYTFEEVPFHSSYAHSQSLDRLMNPLIDQYLYYLARTQSTTGSTRELQFHQAGPNTMAEQSKNWLPGPCYRQQRLSKNIDSNNNSNFAWTGATKYHLNGRNSLTNPGVAMATNKDDEDQFFPINGVLVFGKTGAANKTTLENVLMTSEEEIKTTNPVATEEYGVVSSNLQSSTAGPQTQTVNSQGALPGMVWQNRDVYLQGPIWAKIPHTDGNFHPSPLMGGFGLKHPPPQILIKNTPVPANPPEVFTPAKFASFITQYSTGQVSVEIEWELQKENSKRWNPEIQYTSNYAKSNNVEFAVNNEGVYTEPRPIGTRYLTRNL

SEQ ID NO: 158 - DNA, 3106 bp, synthetic construct
  misc_feature 1..3106: note = source = /note="Description of Artificial Sequence: Synthetic polynucleotide"
  source 1..3106: mol_type = other DNA
gcggccgcgaattcgcccttcgcagagaccaaagttcaactgaaacgaatcagccggtttattgattaacaagtaattacaggttacgggtgaggtaacgggtgccaatggggcgaggctcagtataaaccccttcgttgttgacagcaaattccacattattagacttggcataatttgaggtgtactgaatctctggattccagcgtttgctgttttctttctgcagttcccactcgatctccacgctgacctggccggtgctgtactgcgtgataaatgaggcaaacttggcaggagtaaacacctctggaggattagcaggtaccggggtgtttttgatgagaatttgaggaggcgggtgtttgagtccaaatccgcccatcaggggagacgggtgaaagttgccgtccgtgtgaggaattttggcccagatgggaccctgcaggtacacgtcccggttctgccagaccatgccgggcagagccccctggctgttgacagtctgtgtctggggtccggccgtagacgattgcaggttgctggagaccacaccgtattcttctgtagccacgggattggtggttttgatctcctcctcgctggtcattagcacgttttccagcgttgtcttgttggcagcccccgttttgccaaaaaccagcactccgttgatgggaaagaactggtcctcgtcgtccttgttggtggccatggctacgcccgggttggttaatgaatttctaccattcagatggtatttagtggccccggtccaggcaaagttactgttgttgttgctgtctatgttttttgacagtctctgctgccgataacagggtccgggcagccagttctttgattgctcggccatggtgttgggcccagcctgatggaactgcagctcccttgtggaccccgtagtgctctgggtccgggccaggtagtacaggtactggtcgatgaggggattcatcagccggtccaggctctggctgtgcgcatagctgctgtggaaaggcacttcctcaaaggtgtagctgaattcaaagttatcgcccgttctcagcatctgagaaggaaagtactccaggcagtagaaggaggaacgtcccacagactgactgccgttgtttagagtcagatatccgtactgaggaatcatgaacacgtccgcagggaacggagggaggcagccctggtgcgcagagccgaggacgtacggcagttggtactccgagtccgagaagacctgaatcgtgctggtaaggttattagcgatggtcgtaacgccgtcgttcgtcgtgacctccttgacctggatgttgaacaacttgaaccgcagctttctgggccggaatccccagttgttgttgatgagtcgctgccagtcacgtggtgagaagtggcagtggaatctgttgaagtcaaaatagccccagggggtgctgtagccgaagaagtggttgtcgttggtagccccgctctgacttgatatctgcttgtagaggtggttgttgtaggtgggcagggcccaggtgcgggtgctggtggtgatgactctgtcgcccagccatgtggaatcgcaatgccaatttccggaggcattacccactccgtcggcgccttcgttattgtctgccattggtgcgccaccgcctgcagccattgtaccagatcccagacctgagggcgcggcgggaggttctccgagaggttgggggtcgggcactgactctgagtcgccagtctgcccaaagttgagcttctttttagcgggcggctggccgttcttgccgatgcccgtggaggagtcgggggattctatgggtctcttctttccaggagccgtcttagcgccttcctcaaccagaccgagaggttcgagaacccgcttcttggcctggaagactgctcgcccgaggttgcccccaaaagacgtatcttcttgaagacgctcctgaaactcggcgtcggcgtggttgtacttgaggtacgggttgtccccctgctcgagctgcttgtcgtaggccttgtcgtgctcgagggccgcggcgtctgcctcgttgaccggctctcccttgtcgagtccgttgaagggtccgaggtacctgtagccaggaagcaccagaccccggccgtcgtcctgcttttgctggttggctttgggtttcggggctccaggtttcaagtcccaccactcgcgaatgccctcagagaggttgccctcgagccaatctggaagataaccatcggcagccatacctggtttaagtcatttattgctcagaaacacagtcatccaggtccacgttggccagatcgcaggccgagcaagcaatctcgggagcccgccccagcagatgatgaatggcacagagtttccgatacgtcctctttctgacgaccggttgagattctgacacgccggggaaacattctgaacagtctctggtcccgtgcgtgaagcaaatgttgaaattctgattcattctctcgcatgtcttgcaggggaacagcatctgaagcatgcccgcgtgacgagaacatttgttttggtacctgtcggcaaagtccaccggagctccttccgcgtctgacgtcgatggatccgcgactgaggggcaggcccgcttgggctcgcttttatccgcgtcatcgggggcgggtctcttgttggctccaccctttctgacgtagaactcatacgccacctcggtcacgtgatcctgcgcccagcggaagaactctttgacttcctgctttgtcaccttgccaaagtcatgctccagacggcgggtgagttcaaatttgaacatccggtcttgtaacggctgctggtgctcgaaggtggtgctgttcccgtcaatcacggcgcacatgttggtgttggaagtgacgatcacgggggtgggatcgatctgggcggacgacttgcacttttggtccacgcgcaccttgctgccgccgagaatggccttggcggactccacgaccttggccgtcatcctgccctcctcccaccagatcaccatcttgtcgacgcaatcgttgaagggaaagttctcattggtccagttgacgcagccgtagaaagggcgaattc

SEQ ID NO: 159 - protein, 728 aa, synthetic construct
  REGION 1..728: note = source = /note="Description of Artificial Sequence: Synthetic polypeptide"
MAADGYLPDWLEDNLSEGIREWWDLKPGAPKPKANQQKQDDGRGLVLPGYKYLGPFNGLDKGEPVNEADAAALEHDKAYDKQLEQGDNPYLKYNHADAEFQERLQEDTSFGGNLGRAVFQAKKRVLEPLGLVEEGAKTAPGKKRPIESPDSSTGIGKKGQQPAKKKLNFGQTGDSESVPDPQPLGEPPAAPSGLGSGTMAAGGGAPMADNNEGADGVGNASGNWHCDSTWLGDRVITTSTRTWALPTYNNHLYKQISSQSGATNDNHFFGYSTPWGYFDFNRFHCHFSPRDWQRLINNNWGFRPRKLRFKLFNIQVKEVTTNDGVTTIANNLTSTIQVFSDSEYQLPYVLGSAHQGCLPPFPADVFMIPQYGYLTLNNGSQSMGRSSFYCLEYFPSQMLRTGNNFEFSYTFEEVPFHSSYAHSQSLDRLMNPLIDQYLYYLARTQSTTGSTRELQFHQAGPNTMAEQSKNWLPGPCYRQQRLSKNIDSNNNSNFAWTGATKYHLNGRNSLTNPGVAMATNKDDEGQFFPINGVLVFGKTGAANKTTLENVLMTSEEEIKTTNPVATEEYGVVSSNLQSSTAGPQTQTVNSQGALPGMVWQNRDVYLQGPIWAKIPHTDGNFHPSPLMGGFGLKHPPPQILIKNTPVPANPPGVFTPALFASFITQYSTGQVSVEIEWELQKENSKRWNPEIQYTSNYAKSNNVEFAVNNEGVYTEPRPIGTRYLTRNL

SEQ ID NO: 160 - DNA, 3098 bp, synthetic construct
  misc_feature 1..3098: note = source = /note="Description of Artificial Sequence: Synthetic polynucleotide"
  source 1..3098: mol_type = other DNA
gaattcgcccttcgcagagaccaaagttcaactgaaacgaatcaaccggtttattgattaacaagtaattacaggttacgggtgaggtaacgggtgccaatggggcgaggctcagtataaaccccttcgttgttgacagcaaattccacattattagacttggcataatttgaggtgtactgaatctctggattccagcgtttgctgttttctttctgcagttcccactcgatctccacgctgacctggccggtgctgtactgcgtgataaatgaggcaaactaggcaggagtaaacacccctggaggattagcaggtaccggggtgtttttgatgagaatttgaggaggcgggtgtttgagtccaaatccgcccatcaggggagacgggtgaaagttgccgtccgtgtgaggaattttggcccagatgggaccctgcaggtacacgtcccggttctgccagaccatgccgggcagagccccctggctgttgacagtctgtgtctggggtccggccgtagacgattgcaggttgctggagaccacaccgtattcttctgtagccacgggattggtggttttgatctcctcctcgctggtcattagcacgttttccagcgttgtcttgttggcagcccccgttttgccaaaaaccagcactccgttgatgggaaagaactggccctcgtcgtccttgttggtggccatggctacgcccgggttggttaatgaatttctaccattcagatggtatttagtggccccggtccaggcaaagttactgttgttgttgctgtctatgttttttgacagtctctgctgccgataacagggtccgggcagccagttctttgattgctcggccatggtgttgggcccagcctgatggaactgcagctcccttgtggaccccgtagtgctctgggtccgggccaggtagtacaggtactggtcgatgaggggattcatcagccggtccaggctctggctgtgcgcatagctgctgtggaaaggcacttcctcaaaggtgtagctgaattcaaagttattgcccgttctcagcatctgagaaggaaagtactccaggcagtagaaggaggaacgtcccatagactgactgccgttgtttagagtcagatatccgtactgaggaatcatgaacacgtccgcagggaacggagggaggcagccctggtgcgcagagccgaggacgtacggcagttggtactccgagtccgagaagacctgaatcgtgctggtaaggttattagcgatggtcgtaacgccgtcgttcgtcgtgacctccttgacctggatgttgaacaacttgaaccgcagctttctgggccggaatccccagttgttgttgatgagtcgctgccagtcacgtggtgagaagtggcagtggaatctgttgaagtcaaaatagccccagggggtgctgtagccgaagaagtggttgtcgttggtagccccgctctgacttgatatctgcttgtagaggtggttgttgtaggtgggcagggcccaggtgcgggtgctggtggtgatgactctgtcgcccagccatgtggaatcgcaatgccaatttccggaggcattacccactccgtcggcgccttcgttattgtctgccattggtgcgccaccgcctgcagccattgtaccagatcccagacctgagggcgcggcgggaggttctccgagaggttgggggtcgggcactgactctgagtcgccagtctgcccaaagttgagcttctttttagcgggctgctggcctttcttgccgatgcccgtggaggagtcgggggattctatgggtctcttctttccaggagccgtcttagcgccttcctcaaccagaccgagaggttcgagaacccgcttcttggcctggaagactgctcgcccgaggttgcccccaaaagacgtatcttcttgaagacgctcctgaaactcagcgtcggcgtggttgtacttgaggtacgggttgtccccctgctcgagctgcttgtcgtaggccttgtcgtgctcgagggccgcggcgtctgcctcgttgaccggctctcccttgtcgagtccgttgaagggtccgaggtacttgtagccaggaagcaccagaccccggccgtcgtcctgcttttgctggttggctttgggtttcggggctccaggtttcaagtcccaccactcgcgaatgccctcagagaggttgtcctcgagccaatctggaagataaccatcggcagccatacctggtttaagtcatttattgctcagaaacacagtcatccaggtccacgttgaccagatcgcaggccgagcaagcaatctcgggagcccgccccagcagatgatgaatggcacagagtttccgatacgtcctctttctgacgaccggttgagattctgacacgccggggaaacattctgaacagtctctggtcccgtgcgtgaagcaaatgttgaaattctgattcattctctcgcatgtcttgcagggaaacagcatctgaagcatgcccgcgtgacgagaacatttgttttggtacctgtcggcaaagtccaccggagctccttccgcgtctgacgtcgatggatccgcgactgaggggcaggcccgcttgggctcgcttttatccgcgtcatcgggggcgggcctcttgttggctccaccctttctgacgtagaactcatgcgccacctcggtcacgtgatcctgcgcccagcggaagaactctttgacttcctgctttgtcaccttgccaaagtcctgctccagacggcgggtgagttcaaatttgaacatccggtcttgtaacggctgctggtgctcgaaggtggtgctgttcccgtcaatcacggcgcacatgttggtgttggaagtgacgatcacgggggtgggatcgatctgggcggacgacttgcacttttggtccacgcgcaccttgctgccgccgagaatggccttggcggactccacgaccttggccgtcatcttgccctcctcccaccagatcaccatcttgtcgacgcaatcgttgaagggaaagttctcattggtccagttgacgcagccgtagaaagggcgaattc

SEQ ID NO: 161 - DNA, 2187 bp, synthetic construct
  misc_feature 1..2187: note = source = /note="Description of Artificial Sequence: Synthetic polynucleotide"
  source 1..2187: mol_type = other DNA
atggctgccgatggttatcttccagattggctcgagggcaacctctctgagggcattcgcgagtggtgggacttgaaacctggagccccgaaacccaaagccaaccagcaaaagcaggacgacggccggggtctggtgcttcctggctacaggtacctcggacccttcaacggactcgacaagggagagccggtcaacgaggcagacgccgcggccctcgagcacgacaaggcctacgacaagcagctcgagcagggggacaacccgtacctcaagtacaaccacgccgacgccgagtttcaggagcgtcttcaagaagatacgtcttttgggggcaacctcgggcgagcagtcttccaggccaagaagcgggttctcgaacctctcggtctggttgaggaaggcgctaagacggctcctggaaagaagagacccatagaatcccccgactcctccacgggcatcggcaagaacggccagccgcccgctaaaaagaagctcaactttgggcagactggcgactcagagtcagtgcccgacccccaacctctcggagaacctcccgccgcgccctcaggtctgggatctggtacaatggctgcaggcggtggcgcaccaatggcagacaataacgaaggcgccgacggagtgggtaatgcctccggaaattggcattgcgattccacatggctgggcgacagagtcatcaccaccagcacccgcacctgggccctgcccacctacaacaaccacctctacaagcagatatcaagtcagagcggggctaccaacgacaaccacttcttcggctacagcaccccctggggctattttgacttcaacagattccactgccacttctcaccacgtgactggcagcgactcatcaacaacaactggggattccggcccagaaagctgcggttcaagttgttcaacatccaggtcaaggaggtcacgacgaacgacggcgttacgaccatcgctaataaccttaccagcacgattcaggtcttctcggactcggagtaccaactgccgtacgtcctcggctctgcgcaccagggctgcctccctccgttccctgcggacgtgttcatgattcctcagtacggatatctgactctaaacaacggcagtcagtctgtgggacgttcctccttctactgcctggagtactttccttctcagatgctgagaacgggcgataactttgaattcagctacacctttgaggaagtgcctttccacagcagctatgcgcacagccagagcctggaccggctgatgaatcccctcatcgaccagtacctgtactacctggcccggacccagagcactacggggtccacaagggagctgcagttccatcaggctgggcccaacaccatggccgagcaatcaaagaactggctgcccggaccctgttatcggcagcagagactgtcaaaaaacatagacagcaacaacaacagtaactttgcctggaccggggccactaaataccatctgaatggtagaaattcattaaccaacccgggcgtagccatggccaccaacaaggacgacgaggaccagttctttcccatcaacggagtgctggtttttggcaaaacgggggctgccaacaagacaacgctggaaaacgtgctaatgaccagcgaggaggagatcaaaaccaccaatcccgtggctacagaagaatacggtgtggtctccagcaacctgcaatcgtctacggccggaccccagacacagactgtcaacagccagggggctctgcccggcatggtctggcagaaccgggacgtgtacctgcagggtcccatctgggccaaaattcctcacacggacggcaactttcacccgtctcccctgatgggcggatttggactcaaacacccgcctcctcaaattctcatcaaaaacaccccggtacctgctaatcctccagaggtgtttactcctgccaagtttgcctcatttatcacgcagtacagcaccggccaggtcagcgtggagatcgagtgggaactgcagaaagaaaacagcaaacgctggaatccagagattcagtacacctcaaattatgccaagtctaataatgtggaatttgctgtcaacaacgaaggggtttatactgagcctcgccccattggcacccgttacctcacccgtaacctgtaa

SEQ ID NO: 162 - protein, 728 aa, synthetic construct; identical to SEQ ID NO: 157
  REGION 1..728: note = source = /note="Description of Artificial Sequence: Synthetic polypeptide"

SEQ ID NO: 163 - protein, 728 aa, synthetic construct
  REGION 1..728: note = source = /note="Description of Artificial Sequence: Synthetic polypeptide"
MAADGYLPDWLEDNLSEGIREWWDLKPGAPKPKANQQKQDDGRGLVLPGYRYLGPFNGLDKGEPVNEADAAALEHDKAYDKQLEQGDNPYLKYNHADAEFQERLQEDTSFGGNLGRAVFQAKKRVLEPLGLVEEGAKTAPGKKRPIESPDSSTGIGKNGQPPAKKKLNFGQTGDSESVPDPQPLGEPPAAPSGLGSGTMAAGGGAPMADNNEGADGVGNASGNWHCDSTWLGDRVITTSTRTWALPTYNNHLYKQISSQSGATNDNHFFGYSTPWGYFDFNRFHCHFSPRDWQRLINNNWGFRPRKLRFKLFNIQVKEVTTNDGVTTIANNLTSTIQVFSDSEYQLPYVLGSAHQGCLPPFPADVFMIPQYGYLTLNNGSQSVGRSSFYCLEYFPSQMLRTGDNFEFSYTFEEVPFHSSYAHSQSLDRLMNPLIDQYLYYLARTQSTTGSTRELQFHQAGPNTMAEQSKNWLPGPCYRQQRLSKNIDSNNNSNFAWTGATKYHLNGRNSLTNPGVAMATNKDDEDQFFPINGVLVFGKTGAANKTTLENVLMTSEEEIKTTNPVATEEYGVVSSNLQSSTAGPQTQTVNSQGALPGMVWQNRDVYLQGPIWAKIPHTDGNFHPSPLMGGFGLKHPPPQILIKNTPVPANPPEVFTPAKFASFITQYSTGQVSVEIEWELQKENSKRWNPEIQYTSNYAKSNNVEFAVNNEGVYTEPRPIGTRYLTRNL

SEQ ID NO: 164 - protein, 728 aa, synthetic construct; identical to SEQ ID NO: 156
  REGION 1..728: note = source = /note="Description of Artificial Sequence: Synthetic polypeptide"

SEQ ID NO: 165 - protein, 728 aa, synthetic construct
  REGION 1..728: note = source = /note="Description of Artificial Sequence: Synthetic polypeptide"
MAADGYLPDWLEDNLSEGIREWWDLKPGAPKPKANQQKQDDGRGLVLPGYKYLGPFNGLDKGEPVNEADAAALEHDKAYDKQLEQGDNPYLKYNHADAEFQERLQEDTSFGGNLGRAVFQAKKRVLEPLGLVEEGAKTAPGKKRPIESPDSSTGIGKNGQPPAKKKLNFGQTGDSESVPDPQPLGEPPAAPSGLGSGTMAAGGGAPMADNNEGADGVGNASGNWHCDSTWLGDRVITTSTRTWALPTYNNHLYKQISSQSGATNDNHFFGYSTPWGYFDFNRFHCHFSPRDWQRLINNNWGFRPRKLRFKLFNIQVKEVTTNDGVTTIANNLTSTIQVFSDSEYQLPYVLGSAHQGCLPPFPADVFMIPQYGYLTLNNGSQSVGRSSFYCLEYFPSQMLRTGNNFEFSYTFEEVPFHSSYAHSQSLDRLMNPLIDQYLYYLARTQSTTGSTRELQFHQAGPNTMAEQSKNWLPGPCYRQQRLSKNIDSNNNSNFAWTGATKYHLNGRNSLTNPGVAMATNKDDEDQFFPINGVLVFGKTGAANKTTLENVLMTSEEEIKTTNPVATEEYGVVSSNLQSSTAGPQTQTVNSQGALPGMVWQNRDVYLQGPIWAKIPHTDGNFHPSPLMGGFGLKHPPPQILIKNTPVPANPPEVFTPAKFASFITQYSTGQVSVEIEWELQKENSKRWNPEIQYTSNYAKSNNVEFAVNNEGVYTEPRPIGTRYLTRNL

SEQ ID NO: 166 - protein, 728 aa, synthetic construct
  REGION 1..728: note = source = /note="Description of Artificial Sequence: Synthetic polypeptide"
MAADGYLPDWLEDNLSEGIREWWDLKPGAPKPKANQQKQDDGRGLVLPGYKYLGPFNGLDKGEPVNEADAAALEHDKAYDKQLEQGDNPYLKYNHADAEFQERLQEDTSFGGNLGRAVFQAKKRVLEPLGLVEEGAKTAPGKKRPIESPDSSTGIGKKGQQPAKKKLNFGQTGDSESVPDPQPLGEPPAAPSGLGSGTMAAGGGAPMADNNEGADGVGNASGNWHCDSTWLGDRVITTSTRTWALPTYNNHLYKQISSQSGATNDNHFFGYSTPWGYFDFNRFHCHFSPRDWQRLINNNWGFRPRKLRFKLFNIQVKEVTTNDGVTTIANNLTSTIQVFSDSEYQLPYVLGSAHQGCLPPFPADVFMIPQYGYLTLNNGSQSVGRSSFYCLEYFPSQMLRTGNNFEFSYTFEEVPFHSSYAHSQSLDRLMNPLIDQYLYYLARTQSTTGSTRELQFHQAGPNTMAEQSKNWLPGPCYRQQRLSKNIDSNNNSNFAWTGATKYHLNGRNSLTNPGVAMATNKDDEDQFFPINGVLVFGKTGAANKTTLENVLMTSEEEIKTTNPVATEEYGVVSSNLQSSTAGPQTQTVNSQGALPGMVWQNRDVYLQGPIWAKIPHTDGNFHPSPLMGGFGLKHPPPQILIKNTPVPANPPEVFTPAKFASFITQYSTGQVSVEIEWELQKENSKRWNPEIQYTSNYAKSNNVEFAVNNEGVYTEPRPIGTRYLTRNL

SEQ ID NO: 167 - DNA, 2215 bp, synthetic construct
  misc_feature 1..2215: note = source = /note="Description of Artificial Sequence: Synthetic polynucleotide"
  source 1..2215: mol_type = other DNA
atggctgccgatggttatcttccagattggctcgaggacactctctctgaaggaataagacagtggtggaagctcaaacctggcccaccaccaccaaagcccgcagagcggcataaggacgacagcaggggtcttgtgcttcctgggtacaagtacctcggacccttcaacggactcgacaagggagagccggtcaacgaggcagacgccgcggccctcgagcacgacaaagcctacgaccggcagctcgacagcggagacaacccgtacctcaagtacaaccacgccgacgccgagttccaggagcggctcaaagaagatacgtcttttgggggcaacctcgggcgagcagtcttccaggccaaaaagaggcttcttgaacctcttggtctggttgaggaagcggctaagacggctcctggaaagaagaggcctgtagagcactctcctgtggagccagactcctcctcgggaaccggaaaggcgggccagcagcctgcaagaaaaagattgaattttggtcagactggagacgcagactcagtcccagaccctcaaccaatcggagaacctcccgcagccccctcaggtgtgggatctcttacaatggctgcaggcggtggcgcaccaatggcagacaataacgagggcgccgacggagtgggtaattcctcgggaaattggcattgcgattccacatggatgggcgacagagtcatcaccaccagcacccgaacctgggccctgcccacctacaacaaccacctctacaagcaaatctccaacagcacatctggaggatcttcaaatgacaacgcctacttcggctacagcaccccctgggggtattttgactttaacagattccactgccacttttcaccacgtgactggcagcgactcatcaacaacaactggggattccggcccaagagactcagcttcaagctcttcaacatccaggtcaaggaggtcacgcagaatgaaggcaccaagaccatcgccaataacctcaccagcaccatccaggtgtttacggactcggagtaccagctgccgtacgttctcggctctgcccaccagggctgcctgcctccgttcccggcggacgtgttcatgattccccagtacggctacctaacactcaacaacggtagtcaggccgtgggacgctcctccttctactgcctggaatactttccttcgcagatgctgagaaccggcaacaacttccagtttacttacaccttcgaggacgtgcctttccacagcagctacgcccacagccagagcttggaccggctgatgaatcctctgattgaccagtacctgtactacttgtctcggactcaaacaacaggaggcacgacaaatacgcagactctgggcttcagccaaggtgggcctaatacaatggccaatcaggcaaagaactggctgccaggaccctgttaccgccagcagcgagtatcaaagacatctgcggataacaacaacagtgaatactcgtggactggagctaccaagtaccacctcaatggcagagactctctggtgaatccgggcccggccatggcaagccacaaggacgatgaagaaaagtttttttcctcagagcggggttctcatctttgggaagcaaggctcagagaaaacaaatgtggacattgaaaaggtcatgattacagacgaagaggaaatcaggacaaccaatcccgtggctacggagcagtatggttctgtatctaccaacctccagagaggcaacagacaagcagctaccgcagatgtcaacacacaaggcgttcttccaggcatggtctggcaggacagagatgtgtaccttcaggggcccatctgggcaaagattccacacacggacggacattttcacccctctcccctcatgggtggattcggacttaaacaccctccgcctcagatcctgatcaagaacacgcctgtacctgcggatcctccgaccaccttcaaccagtcaaagctgaactctttcatcacccagtattctactggccaagtcagcgtggagatcgagtgggagctgcagaaggaaaacagcaagcgctggaaccccgagatccagtacacctccaactactacaaatctacaagtgtggactttgctgttaatacagaaggcgtgtactctgaaccccgccccattggcacccgttacctcacccgtaatctgtaa

SEQ ID NO: 168 - protein, 737 aa, synthetic construct
  REGION 1..737: note = source = /note="Description of Artificial Sequence: Synthetic polypeptide"
MAADGYLPDWLEDTLSEGIRQWWKLKPGPPPPKPAERHKDDSRGLVLPGYKYLGPFNGLDKGEPVNEADAAALEHDKAYDRQLDSGDNPYLKYNHADAEFQERLKEDTSFGGNLGRAVFQAKKRLLEPLGLVEEAAKTAPGKKRPVEHSPVEPDSSSGTGKAGQQPARKRLNFGQTGDADSVPDPQPIGEPPAAPSGVGSLTMAAGGGAPMADNNEGADGVGNSSGNWHCDSTWMGDRVITTSTRTWALPTYNNHLYKQISNSTSGGSSNDNAYFGYSTPWGYFDFNRFHCHFSPRDWQRLINNNWGFRPKRLSFKLFNIQVKEVTQNEGTKTIANNLTSTIQVFTDSEYQLPYVLGSAHQGCLPPFPADVFMIPQYGYLTLNNGSQAVGRSSFYCLEYFPSQMLKTGNNFQFTYTFEDVPFHSSYAHSQSLDRLMNPLIDQYLYYLSRTQTTGGTTNTQTLGFSQGGPNTMANQAKNWLPGPCYRQQRVSKTSADNNNSEYSWTGATKYHLNGRDSLVNPGPAMASHKDDEEKFFPQSGVLIFGKQGSEKTNVDIEKVMITDEEEIRTTNPVATEQYGSVSTNLQRGNRQAATADVNTQGVLPGMVWQDRDVYLQGPIWAKIPHTDGHFHPSPLMGGFGLKHPPPQILIKNTPVPADPPTTFNQSKLNSFITQYSTGQVSVEIEWELQKENSKRWNPEIQYTSNYYKSTSVDFAVNTEGVYSEPRPIGTRYLTRNL

SEQ ID NO: 169 - protein, 737 aa, synthetic construct
  REGION 1..737: note = source = /note="Description of Artificial Sequence: Synthetic polypeptide"
MAADGYLPDWLEDTLSEGIRQWWKLKPGPPPPKPAERHKDDSRGLVLPGYKYLGPFNGLDKGEPVNEADAAALEHDKAYDRQLDSGDNPYLKYNHADAEFQERLKEDTSFGGNLGRAVFQAKKRLLEPLGLVEEAAKTAPGKKRPVEHSPVEPDSSSGTGKAGQQPARKRLNFGQTGDADSVPDPQPIGEPPAAPSGVGSLTMAAGGGAPMADNNEGADGVGNSSGNWHCDSTWMGDRVITTSTRTWALPTYNNHLYKQISNSTSGGSSNDNAYFGYSTPWGYFDFNRFHCHFSPRDWQRLINNNWGFRPKRLSFKLFNIQVKEVTQNEGTKTIANNLTSTIQVFTDSEYQLPYVLGSAHQGCLPPFPADVFMIPQYGYLTLNNGSQAVGRSSFYCLEYFPSQMLKTGNNFQFTYTFEDVPFHSSYAHSQSLDRLMNPLIDQYLYYLSRTQTTGGTTNTQTLGFSQGGPNTMANQAKNWLPGPCYRQQRVSKTSADNNNSEYSWTGATKYHLNGRDSLVNPGPAMASHKDDEEKFFPQSGVLIFGKQGSEKTNVDIEKVMITDEEEIRTTNPVATEQYGSVSTNLQQGNTQAATADVNTQGVLPGMVWQDRDVYLQGPIWAKIPHTDGHFHPSPLMGGFGLKHPPPQILIKNTPVPADPPTTFNQSKLNSFITQYSTGQVSVEIEWELQKENSKRWNPEIQYTSNYYKSTSVDFAVNTEGVYSEPRPIGTRYLTRNL

SEQ ID NO: 170 - protein, 737 aa, synthetic construct
  REGION 1..737: note = source = /note="Description of Artificial Sequence: Synthetic polypeptide"
MAADGYLPDWLEDTLSEGIRQWWKLKPGPPPPKPAERHKDDSRGLVLPGYKYLGPFNGLDKGEPVNEADAAALEHDKAYDRQLDSGDNPYLKYNHADAEFQERLKEDTSFGGNLGRAVFQAKKRLLEPLGLVEEAAKTAPGKKRPVEHSPVEPDSSSGTGKAGQQPARKRLNFGQTGDADSVPDPQPIGEPPAAPSGVGSLTMAAGGGAPMADNNEGADGVGNSSGNWHCDSTWMGDRVITTSTRTWALPTYNNHLYKQISNSTSGGSSNDNAYFGYSTPWGYFDFNRFHCHFSPRDWQRLINNNWGFRPKRLSFKLFNIQVKEVTQNEGTKTIANNLTSTIQVFTDSEYQLPYVLGSAHQGCLPPFPADVFMIPQYGYLTLNNGSQAVGRSSFYCLEYFPSQMLRTGNNFQFTYTFEDVPFHSSYAHSQSLDRLMNPLIDQYLYYLSRTQTTGGTTNTQTLGFSQGGPNTMANQAKNWLPGPCYRQQRVSKTSADNNNSEYSWTGATKYHLNGRDSLVNPGPAMASHKDDEEKFFPQSGVLIFGKQGSEKTNVDIEKVMITDEEEIRTTNPVATEQYGSVSTNLQQGNTQAATADVNTQGVLPGMVWQDRDVYLQGPIWAKIPHTDGHFHPSPLMGGFGLKHPPPQILIKNTPVPADPPTTFNQSKLNSFITQYSTGQVSVEIEWELQKENSKRWNPEIQYTSNYYKSTSVDFAVNTEGVYSEPRPIGTRYLTRNL

SEQ ID NO: 171 - protein, 729 aa, synthetic construct
  REGION 1..729: note = source = /note="Description of Artificial Sequence: Synthetic polypeptide"
MAADGYLPDWLEDNLSEGIREWWDLKPGAPKPKANQQKQDDGRGLVLPGYKYLGPFNGLDKGEPVNAADAAALEHDKAYDQQLKAGDNPYLRYNHADAEFQERLQEDTSFGGNLGRAVFQAKKRVLEPLGLVEEGAKTAPGKKRPIDSPDSSTGIGKKGQQPAKKKLNFGQTGDSESVPDPQPLGEPPAAPSSVGSGTMAAGGGAPTADNNEGADGVGNASGNWHCDSTWLGDRVITTSTRTWALPTYNNHLYKQISSSSSGATNDNHYFGYSTPWGYFDFNRFHCHFSPRDWQRLINNNWGFRPKKLRFKLFNIQVKEVTTNDGVTTIANNLTSTVQVFSDSEYQLPYVLGSAHQGCLPPFPADVFMIPQYGYLTLNNGSQSVGRSSFYCLEYFPSQMLRTGNNFEFSYSFEDVPFHSSYAHSQSLDRLMNPLIDQYLYYLARTQSTTGSTRELQFHQAGPNTMAEQSKNWLPGPCYRQQRLSKNLDFNNNSNFAWTAATKYHLNGRNSLTNPGIPMATNKDDEDQFFPINGVLVFGKTGAANKTTLENVLMTSEEEIKTTNPVATEEYGVVSSNLQSSTAGPQSQTINSQGALPGMVWQNRDVYLQGPIWAKIPHTDGNFHPSPLMGGFGLEHPPPQILIKNTPVPANPPEVFTPAKFASFITQYSTGQVSVEIEWELQKENSKRWNPEIQYTSNYAKSNNVEFAVNPDGVYTEPRPIGTRYLTRNL

SEQ ID NO: 172 - DNA, 3075 bp, synthetic construct
  misc_feature 1..3075: note = source = /note="Description of Artificial Sequence: Synthetic polynucleotide"
  source 1..3075: mol_type = other DNA
tgagaactttcctttcaacgattgcgtcggacaagatggtgatctggtgggaggaggggaagatgaccgccaaggtcgtggagtcggccaaagccattcttggaggaagcaaggtgcgtgtggaccagaaatgcaagtcctcggcccagatagacccgactcccgtgatcgtcacctccaacaccaacatgtgcgccgtgattgacgggaactcaacgaccttcgagcaccagcagccgttgcaagaccggatgttcaaatttgaacttacccgccgtctggatcatgactttggaaaggtcaccaagcaggaagtgaaagactttttccggtgggcaaaggatcacgtggttgaggtggagcatgaattctacgtcaaaaagggtggagctaagaaaagacccgcccccagtgacgcagatataagtgagcccaaacgggcgcgcgagtcagttgcgcagccatcaacgtcagacgcggaagcttcgatcaactacgcggacaggtaccaaaaacaaatgttctcgtcacgtgggcatgaatctgatgctgtttccctgcagacaatgcgagagaatgaatcagaattcaaatatctgcttcactcacggacagaaagactgtttagagtgctttcccgtgtcagaatctcaacccgtttctgtcgtcaaaaaggcgtatcagaaactgtgctacattcatcatatcatgggaaaggtgccagacgcttgcactgcctgcgatctggtcaatgtggatttggatgactgcatctctgaacaataaatgatttaaatcaggtatggctgccgatggttatcctccagattggctcgaggacactctctctgaagggataagacagtggtggaagctcaaacctggcccaccaccaccaaagcccgcagagcggcataaggacgacagcaggggtcttgtgcttcctgggtacaagtacctcggacccttcaacggactcgacaagggggagccggtcaacgaggcagacgccgcggccctcgagcacgacaaggcctacgaccggcagctcgacagcggagacaacccgtacctcaagtacaaccacgccgacgcagagtttcaggagcgccttaaagaagatacgtcttttgggggcaacctcggacgagcagtcttccaggcgaaaaagagggttcttgaacctctgggcctggttgaggaacctgttaagacggctccgggaaaaaagaggccggtagagcactctcctgtggagccagactcctcctcgggaaccggaaaagcgggccagcggcctgcaagaaaaagattaaattttggtcagactggagacgcagactccgtacctgacccccagcctctcggacagccaccagcagccccctctggtctgggatctactacaatggctacaggcagtggcgcaccaatggcagacaataacgagggtgccgatggagtgggtaattcctcaggaaattggcattgcgattcccaatggctgggcgacagagtcatcaccaccagcacccgaacctgggccctgcccacatacaacaaccacctctacaagcaaatctccagccaatcaggagccagcaacgacaaccactactttggctacagcaccccctgggggtattttgacttcaacagattccactgccacttttcaccacgtgactggcaaagactcatcaacaacaactggggattccggcccaaaagactcaacttcaagctctttaatattcaagtcaaagaggtcacgcagaatgacggtacgacgacgattgccaataaccttaccagcacggttcaggtgtttactgactcggagtaccagctcccgtacgtcctgggctcggcgcatcaaggatgcctcccgccgtttccagcggacgtcttcatggtcccacagtatggatacctcaccctgaacaacgggagtcaggcggtaggacgctcttccttttactgcctggagtactttccttctcagatgctgcgtactggaaacaactttcagttcagctacacttttgaagacgtgcctttccacagcagctacgctcacagccagagtctggatcggctgatgaatcctctgatcgaccagtacctgtattatctgaacaagacacaaacaaatagtggaactcttcagcagtctcggctactgtttagccaagctggaccaaccaacatgtctcttcaagctaaaaactggctgcctggaccttgctacagacagcagcgtctgtcaaaacaggcaaacgacaacaacaacagcaactttccctggactgcagctacaaagtatcatctaaatggccgggactcgttggttaatccaggaccagctatggccagtcacaaggatgacgaagaaaagtttttccccatgcatggaaccctgatatttggtaaacaaggaacaaatgccaacgacgcggatttggaaaatgtcatgattacagatgaagaagaaatcagggccaccaatcccgtggctacggagcagtacgggactgtgtcaaataatttgcaaaactcaaacactggtccaactactggaactgtcaatcgccaaggagcgttacctggtatggtgtggcaggatcgagacgtgtacctgcagggacccatttgggccaagattcctcacaccgatggacactttcatccttctccactgatgggaggttttggactcaaacacccgcctcctcagatcatgatcaaaaacactcccgttccagccaatcctcccacaaacttcagttctgccaagtttgcttctttcatcacacagtattccacgggacaggtcagcgtggagatcgagtgggagctgcagaaggagaacagcaaacgctggaatcccgaaattcagtacacttccaactacaacaagtctgttaatgtggactttactgtggacactaatggtgtgtattcagagcctcgccccattggcaccagatacctgactcgtaatctgtaattgcttgttaatcaataaaccgtttaattcgtttcagttgaactttggtctctgcgaagggcgaa

SEQ ID NO: 173 - DNA, 3142 bp, synthetic construct
  misc_feature 1..3142: note = source = /note="Description of Artificial Sequence: Synthetic polynucleotide"
  source 1..3142: mol_type = other DNA
aaaacgacgggccagtgattgtaatacgactcactatagggcgaaattgaaattagcggccgcgaattcgcctttcgcagagaccaaagttcaactgaaacgaattaaacggtttattgattaacaagcaattacagattacgagtcaggtatctggtgccaatggggcgaggctctgaatacacaccattagtgtccacagtaaagtccacattaacagacttgttgtagttggaagtgtactgaatttcgggattccagcgtttgctgttctccttctgcagctcccactcgatctccacgctgacctgtcccgtggaatactgtgtgatgaaagaagcaaacttggcagaactgaagtttgtgggaggattggctggaacgggagtgtttttgatcatgatctgaggaggcgggtgtttgagtccaaaacctcccatcagtggagaaggatgaaagtgtccatcggtgtgaggaatcttggcccaaatgggtccctgcaggtacacgtctcgatcctgccacaccataccaggtaacgctccttggtgattgacagttccagtagttggaccagtgtttgagttttgcaaattatttgacacagtcccgtactgctccgtagccacgggattggtggccctgatttcttcttcatctgtaatcatgacattttccaaatccgcgtcgttggcatttgttccttgtttaccaaatatcagggttccatgcatggggaaaaacttttcttcgtcatccttgtgactggccatagctggtcctggattaaccaacgagtcccggccatttagatgatactttgtagctgcagtccagggaaagttgctgttgttgttgtcgtttgcctgttttgacagacgctgctgtctgtagcaaggtccaggcagccagtttttagcttgaagagacatgttggttggtccagcttggctaaacagtagccgagactgctgaagagttccactatttgtttgtgtcttgttcagataatacaggtactggtcgatcagaggattcatcagccgatccagactctggctgtgagcgtagctgctgtggaaaggcacgtcttcaaaagtgtagctgaactgaaagttgtttccagtacgcagcatctgagaaggaaagtactccaggcagtaaaaggaagagcgtcctaccgcctgactcccgttgttcagggtgaggtatccatactgtgggaccatgaagacgtccgctggaaacggcgggaggcatccttgatgcgccgagcccaggacgtacgggagctggtactccgagtcagtaaacacctgaaccgtgctggtaaggttattggcaatcgtcgtcgtaccgtcattctgcgtgacctctttgacttgaatattaaagagcttgaagttgagtcttttgggccggaatccccggttgttgttgacgagtctttgccagtcacgtggtgaaaagtggcagtggaatctgttgaagtcaaaatacccccagggggtgctgtagccaaagtagtggttgtcgttgctggctcctgattggctggagatttgcttgtagaggtggttgttgtatgtgggcagggcccaggttcgggtgctggtggtgatgactctgtcgcccagccattgggaatcgcaatgccaatttcctgaggaattacccactccatcggcaccctcgttattgtctgccattggtgcgccactgcctgtagccattgtagtagatcccagaccagagggggctgctggtggctgtccgagaggctgggggtcaggtacggagtctgcgtctccagtctgaccaaaatttaatctttttcttgcaggctgctggcccgcttttccggttcccgaggaggagtctggctccacaggagagtgctctaccggcctcttttttcccggagccgtcttaacaggctcctcaaccaggcccagaggttcaagaaccctctttttcgcctggaagactgctcgtccgaggttgcccccaaaagacgtatcttctttaaggcgctcctgaaactctgcgtcggcgtggttgtacttgaggtacgggttgtctccgctgtcgagctgccggtcgtaggccttgtcgtgctcgagggccgcggcgtctgcctcgttgaccggctcccccttgtcgagtccgttgaagggtccgaggtacttgtacccaggaagcacaagacccctgctgtcgtccttatgccgctctgcgggctttggtggtggtgggccaggtttgagcttccaccactgtcttattccttcagagagagtgtcctcgagccaatctggaagataaccatcggcagccatacctgatttaaatcatttattgttcagagatgcagtcatccaaatccacattgaccagatcgcaggcagtgcaagcgtctggcacctttcccatgatatgatgaatgtagcacagtttctgatacgcctttttgacgacagaaacgggttgagattctgacacgggaaagcactctaaacagtctttctgtccgtgagtgaagcagatatttgaattctgattcattctctcgcattgtctgcagggaaacagcatcagattcatgcccacgtgacgagaacatttgttttggtacctgtccgcgtagttgatcgaagcttccgcgtctgacgtcgatggctgcgcaactgactcgcgcgcccgtttgggctcacttatatctgcgtcactgggggcgggtcttttcttagctccaccctttttgacgtagaattcatgctccacctcaaccacgtgatcctttgcccaccggaaaaagtctttcacttcctgcttggtgacctttccaaagtcatgatccagacggcgggtaagttcaaatttgaacatccggtcttgcaacggctgctggtgctcgaaggtcgttgagttcccgtcaatcacggcgcacatgttggtgttggaggtgacgatcacgggagtcgggtctatctgggccgaggacttgcatttctggtccacacgcaccttgcttcctccaagaatggctttggccgactccacgaccttggcggtcatcttcccctcctcccaccagatcaccatcttgtcgacgcaatggtaaaaggaaagttctcattgg

SEQ ID NO: 174 - protein, 735 aa, Adeno-associated virus-2
MAADGYLPDWLEDTLSEGIRQWWKLKPGPPPPKPAERHKDDSRGLVLPGYKYLGPFNGLDKGEPVNEADAAALEHDKAYDRQLDSGDNPYLKYNHADAEFQERLKEDTSFGGNLGRAVFQAKKRVLEPLGLVEEPVKTAPGKKRPVEHSPVEPDSSSGTGKAGQQPARKRLNFGQTGDADSVPDPQPLGEPPATPAAVGPTTMASGGGAPMADNNEGADGVGNASGNWHCDSTWLGDRVITTSTRTWALPTYNNHLYKQISSASTGASNDNHYFGYSTPWGYFDFNRFHCHFSPRDWQRLINNNWGFRPKRLNFKLFNIQVKEVTQNDGTTTIANNLTSTVQVFTDSEYQLPYVLGSAHQGCLPPFPADVFMIPQYGYLTLNNGSQAVGRSSFYCLEYFPSQMLRTGNNFTFSYTFEDVPFHSSYAHSQSLDRLMNPLIDQYLYYLNRTQNQSGSAQDKALLFSRGSPAGMSVQPKNWLPGPCYRQQRVSKTKTDNNNSNFTWTGASKYNLNGRESIINPGTAMASHKDDKDKFFPMSGVMIFGKESAGASNTALDNVMITDEEEIKATNPVATERFGTVAVNFQSSSTDPATGDVHVMGALPGMVWQDRDVYLQGPIWAKIPHTDGHFHPSPLMGGFGLKHPPPQILIKNTPVPANPPAEFSATKFASFITQYSTGQVSVEIEWELQKENSKRWNPEVQYTSNYAKSANVDFTVDNNGLYTEPRPIGTRYLTRP

SEQ ID NO: 175 - protein, 740 aa, Adeno-associated virus-2
MAADGYLPDWLEDTLSEGIRQWWKLKPGPPPPKPAERHKDDSRGLVLPGYKYLGPFNGLDKGEPVNAADAAALEHDKAYDRQLDSGDNPYLKYNHADAEFQERLKEDTSFGGNLGRAVFQAKKRVLEPLGLVEEPVKTAPGKKRPVEHSPVEPDSSSGTGKAGQQPARKRLNFGQTGDADSVPDPQPLGQPPAAPSGLGTNTMATGSGAPMADNNEGADGVGNSSGNWHCDSTWMGDRVITTSTRTWALPTYNNHLYKQISSQSGASNDNHYFGYSTPWGYFDFNRFHCHFSPRDWQRLINNNWGFRPKRLNFKLFNIQVKEVTQNDGTTTIANNLTSTVQVFTDSEYQLPYVLGSAHQGCLPPFPADVFMVPQYGYLTLNNGSQAVGRSSFYCLEYFPSQMLRTGNNFTFSYTFEDVPFHSSYAHSQSLDRLMNPLIDQYLYYLSRTNTPSGTTTQSGLQFSQAGASDIRDQSRNWLPGPCYRQQRVSKTSADNNNSEYSWTGATKYHLNGRDSLVNPGPAMASHKDDEEKFFPQSGVLIFGKQGSEKTNVDIEKVMITDEEEIRTTNPVATEQYGSVSTNLQRGNRQAATADVNTQGVLPGMVWQDRDVYLQGPIWAKIPHTDGHFHPSPLMGGFGLKHPPPQILIKNTPVPANPSTTFSAAKFASFITQYSTGQVSVEIEWELQKENSKRWNPEIQYTSNYNKSVNVDFTVDTNGVYSEPRPIGTRYLTRNLLLAAA

SEQ ID NO: 176 - protein, 734 aa, Adeno-associated virus-2
MAADGYLPDWLEDTLSEGIRQWWKLKPGPPPPKPAERHKDDSRGLVLPGYKYLGPFNGLDKGEPVNEADAAALEHDKAYDRQLDSGDNPYLKYNHADAEFQERLKEDTSFGGNLGRAVFQAKKRVLEPLGLVEEPVKTAPGKKRPVEHSPVEPDSSSGTGKAGQQPARKRLNFGQTGDADSVPDPQPLGQPPAAPSGLGTNTMATGSGAPMADNNEGADGVGNSSGNWHCDSTWMGDRVITTSTRTWALPTYNNHLYKQISSQSGASNDNHYFGYSTPWGYFDFNRFHCHFSPRDWQRLINNNWGFRPKRLNFKLFNIQVKEVTQNDGTTTIANNLTSTVQVFTDSEYQLPYVLGSAHQGCLPPFPADVFMVPQYGYLTLNNGSQAVGRSSFYCLEYFPSQMLRTGNNFTFSYTFEDVPFHSSYAHSQSLDRLMNPLIDQYLYYLSRTNTPSGTTTQSGLQFSQAGASDIRDQSRNWLPGPCYRQQRVSKTSADNNNSEYSWTGATMYHLNGRDSLVNPGPAMASHKDDEEKFFPQSGVLIFGKQGSEKTNVDIEKVMITDEEEIRTTNPVATEQYGSVSTNLQRGNRQAATADVNTQGVLPGMVWQDRDVYLQGPIWAKIPHTDGHFHPSPLMGGFGLKHPPPQILIKNTPVPANPSTTFSAAKFASFITQYSTGQVSVEIEWELQKENSKRWNPEIQYTSNYNKSINVDFTVDTNGVYSEPRPIGTRYLTRN

SEQ ID NO: 177 - protein, 734 aa, Adeno-associated virus-2
MAADGYLPDWLEDTLSEGIRQWWKLKPGPPPPKPAERHKDDSRGLVLPGYKYLGPFNGLDKGEPVNEADAAALEHDKAYDRQLDSGDNPYLKYNHADAEFQERLKEDTSFGGNLGRAVFQAKKRVLEPLGLVEEPVKTAPGKKRPVEHSPVEPDSSSGTGKAGQQPARKRLNFGQTGDADSVPDPQPLGQPPAAPSGLGTNTMATGSGAPMADNNEGADGVGNSSGNWHCDSTWMGDRVITTSTRTWALPTYNNHLYKQISSQSGASNDNHYFGYSTPWGYFDFNRFHCHFSPRDWQRLINNNWGFRPKRLNFKLFNIQVKEVTQNDGTTTIANNLTSTVQVFTDSEYQLPYVLGSAHQGCLPPFPADVFMVPQYGYLTLNNGSQAVGRSSFYCLEYFPSQMLRTGNNFTFSYTFEDVPFHSSYAHSQSLDRLMNPLIDQYLYYLSRTNTPSGTTTQSGLQFSQAGASDIRDQSRNWLPGPCYRQQRVSKTSADNNNSEYSWTGATKYHLNGRDSLVNPGPAMASHKDDEEKFFPQSGVLIFGKQGSEKTNVDIEKVMITDEEEIRTTNPVATEQYGSVSTNLQRGNRQAATADVNTQGVLPGMVWQDRDVYLQGPIWAKIPHTDGHFHPSPLMGGFGLKHPPPQILIKNTPVPANPSTTFSEAKFASFITQYSTGQVSVEIEWELQKENSKRWNPEIQYTSNYNKSVNVDFTVDTNGVYSEPRPIGTRYLTRN

SEQ ID NO: 178 - protein, 739 aa, Adeno-associated virus-2
MAADGYLPDWLEDTLSEGIRQWWKLKPGPPPPKPAERHKDDSRGLVLPGYKYLGPFNGLDKGEPVNEADAAALEHDKAYDRQLDSGDNPYLKYNHADAEFQERLKEDTSFGGNLGRAVFQAKKRVLEPLGLVEEPVKTAPGKKRPVEHSPVEPDSSSGTGKAGQQPARKRLNFGQTGDADSVPDPQPLGQPPAAPSGLGTNTMATGSGAPMADNNEGADGVGNSSGNWHCDSTWMGDRVITTSTRTWALPTYNNHLYKQISSQSGASNDNHYFGYSTPWGYFDFNRFHCHFSPRDWQRLINNNWGFRPKRLNFKLFNIQVKEVTQNDGTTTIANNLTSTVQVFTDSEYQLPYVLGSAHQGCLPPFPADVFMVPQYGYLTLNNGSQAVGRSSFYCLEYFPSQMLRTGNNFTFSYTFEDVPFHSSYAHSQSLDRLMNPLIDQYLYYLSRTNTPSGTTTQSGLQFSQAGASDIRDQSRNWLPGPCYRQQRVSKTSADNNNSEYSWTGATKYHLNGRDSLVNPGPAMASHKDDEEKFFPQSGVLIFGKQGSEKTNVDIEKVMITDEEEIRTTNPVATEQYGSVSTNLQRGNRQAATADVNTQGVLPGMVWQDRDVYLQGPIWAKIPHTDGHFHPSPLMGGFGLKHPPPQILIKNTPVPANPSTTFSAAKFASFITQYSTGQVSVEIEWELQKENSKRWNPEIQYTSNYNKSVNVDFTVDTNGVYSEPRPIGTRYLTRNLLLAA

SEQ ID NO: 179 - protein, 725 aa, Adeno-associated virus-2
MAADGYLPDWLEDTLSEGIRQWWKLKPGPPPPKPAERHKDDSRGLVLPGYKYLGPFNGLDKGEPVNEADAAALEHDKAYDRQLDSGDNPYLKYNHADAEFQERLKEDTSFGGNLGRAVFQAKKRVLEPLGLVEEPVKTAPGKKRPVEHSPVEPDSSSGTGKAGQQPARKRLNFGQTGDADSVPDPQPLGQPPAAPSGLGTNTMATGSGAPMADNNEGADGVGNSSGNWHCDSTWMGDRVITTSTRTWALPTYNNHLYKQISSQSGASNDNHYFGYSTPWGYFDFNRFHCHFSPRDWQRLINNNWGFRPKRLNFKLFNIQVKEVTQNDGTTTIANNLTSTVQVFTDSEYQLPYVLGSAHQGCLPPFPADVFMVPQYGYLTLNNGSQAVGRSSFYCLEYFPSQMLRTGNNFTFSYTFEDVPFHSSYAHSQSLDRLMNPLIDQYLYYLSRTNTPSGTTTQSGLQFSQAGASDIRDQSRNWLPGPCYRQQRVSKTSADNNNSEYSWTGATKYHLNGRDSLVNPGPAMASHKDDEEKFFPQSGVLIFGKQGSEKTNVDIEKVMITDEEEIRTTNPVATEQYGSVSTNLQRGNRQAATADVNTQGVLPGMVWQDRDVYLQGPIWAKIPHTDGHFHPSPLMGGFGLKHPPPQILIKNTPVPANPSTTFSAAKFASFITQYSTGQVSVEIEWELQKENSKRWNPEIQYTSNYNKSVNVDFTVDTNGVYSEPRP

SEQ ID NO: 180 - protein, 707 aa, Adeno-associated virus-2
MAADGYLPDWLEDTLSEGIRQWWKLKPGPPPPKPAERHKDDSRGLVLPGYKYLGPFNGLDKGEPVNEADAAALEHDKAYDRQLDSGDNPYLKYNHADAEFQERLKEDTSFGGNLGRAVFQAKKRVLEPLGLVEEPVKTAPGKKRPVEHSPVEPDSSSGTGKAGQQPARKRLNFGQTGDADSVPDPQPLGQPPAAPSGLGTNTMATGSGAPMADNNEGADGVGNSSGNWHCDSTWMGDRVITTSTRTWALPTYNNHLYKQISSQSGASNDNHYFGYSTPWGYFDFNRFHCHFSPRDWQRLINNNWGFRPKRLNFKLFNIQVKEVTQNDGTTTIANNLTSTVQVFTDSEYQLPYVLGSAHQGCLPPFPADVFMVPQYGYLTLNNGSQAVGRSSFYCLEYFPSQMLRTGNNFTFSYTFEDVPFHSSYAHSQSLDRLMNPLIDQYLYYLSRTNTPSGTTTQSGLQFSQAGASDIRDQSRNWLPGPCYRQQRVSKTSADNNNSEYSWTGATKYHLNGRDSLVNPGPAMASHKDDEEKFFPQSGVLIFGKQGSEKTNVDIEKVMITDEEEIRTTNPVATEQYGSCIYQPPERQQTSSYRRCQHTRRSSRHGLAGQRCVPSGAHLGKDSTHGRTFSPLSPHGWIRTTPSSTDSHQEHPGTCESFDHLQCGKVCFLHHTVLHGTGQRGDRVRAAEGKQQTLESRNSVHFQLQQVC

SEQ ID NO: 181 - protein, 739 aa, Adeno-associated virus-2; identical to SEQ ID NO: 178

SEQ ID NO: 182 - protein, 737 aa, Adeno-associated virus-2
MASDGYLPDWLEDNLSEGIREWWDLKPGAPKPKANQQKQDDGRGLVLPGYKYLGPFNGLDKGEPVNAADAAALEHDKAYDQQLKAGDNPYLRYNHADAEFQERLQEDTSFGGNLGRAVFQAKKRVLEPFGLVEEGAKTAPGKKRPVEQSPQEPDSSSGIGKTGQQPAKKRLNFGQTGDSESVPDPQPLGEPPATPAAVGPTTMASGGGAPMADNNEGADGVGNASGNWHCDSTWLGDRVITTSTRTWALPTYNNHLYKQISSASTGASNDNHYFGYSTPWGYFDFNRFHCHFSPRDWQRLINNNWGFRPKRLNFKLFNIQVKEVTTNDGTTTIANNLTSTVQVFTDSEYQLPYVLGSAHQGCLPPFPADVFMVPQYGYLTLNNGSQAVGRSSFYCLEYFPSQMLRTGNNFTFSYTFEDVPFHSSYAHSQSLDRLMNPLIDQYLYYLSRTNTPSGTTTQSGLQFSQAGASDIRDQSRNWLPGPCYRQQRVSKTSADNNNSEYSWTGATKYHLNGRDSLVNPGPAMASHKDDEEKFFPQSGVLIFGKQGSEKTNVDIEKVMITDEEEIRTTNPVATEQYGSVSTNLQRGNRQAATADVNTQGVLPGMVWQDRDVYLQGPIWAKIPHTDGHFHPSPLMGGFGLKHHPPQILIKNTPVPANPSTTFSAAKFASFITQYSTGQVSVEIEWELQKENSKRWNPEIQYTSNYNKSVNVDFTVDTNGVYSEPRPIGTRYLTRNLL

SEQ ID NO: 183 - protein, 741 aa, Adeno-associated virus-2
MAADGYLPDWLEDTLSEGIREWWALKPGAPKPKANQQKQDDGRGLVLPGYKYLGPFNGLDKGEPVNEADAAALEHDKAYDQQLQAGDNPYLRYNHADAEFQERLQEDTSFGGNLGRAVFQAKKRVLEPLGLVEEPVKTAPGKKRPVEHSPVEPDSSSGTGKSGQQPARKRLNFGQTGDADSVPDPQPLGQPPAAPSGLGTNTMATGSGAPMADNNEGADGVGNSSGNWHCDSTWMGDRVITTSTRTWALPTYNNHLYKQISSQSGASNDNHYFGYSTPWGYFDFNRFHCHFSPRDWQRLINNNWGFRPKRLNFKLFNIQVKEVTQNDGTTTIANNLTSTVQVFTDSEYQLPYVLGSAHQGCLPPFPADVFMVPQYGYLTLNNGSQAVGRSSFYCLEYFPSQMLRTGNNFTFSYTFEDVPFHSSYAHSQSLDRLMNPLIDQYLYYLSRTNTPSGTTTQSGLQFSQAGASDIRDQSRNWLPGPCYRQQRVSKTSADNNNSEYSWTGATKYHLNGRDSLVNPGPAMASHKDDEEKFFPQSGVLIFGKQGSEKTNVDIEKVMITDEEEIRTTNPVATEQYGSVSTNLQRGNLANHNNTTNARQAATADVNTQGVLPGMVWQDRDVYLQGPIWAKIPHTDGHFHPSPLMGGFGLKHPPPQILIKNTPVPANPSTTFSAAKFASFITQYSTGQVSVEIEWELQKENSKRWNPEIQYTSNYNKSINVDFTVDTNGVYSEPRPIGTRYL

SEQ ID NO: 184 - protein, 730 aa, Adeno-associated virus-2
MASDGYLPDWLEDNLSEGIREWWDLKPGAPKPKANQQKQDDGRGLVLPGYKYLGPFNGLDKGEPVNAADAAALEHDKAYDQQLKAGDNPYLRYNHADAEFQERLQEDTSFGGNLGRAVFQAKKRVLEPFGLVEEGAKTAPGKKRPVEQSPQEPDSSSGIGKTGQQPAKKRLNFGQTGDSESVPDPQPLGEPPATPAAVGPTTMASGGGAPMADNNEGADGVGNASGNWHCDSTWLGDRVITTSTRTWALPTYNNHLYKQISSASTGASNDNHYFGYSTPWGYFDFNRFHCHFSPRDWQRLINNNWGFRPKRLNFKLFNIQVKEVTTNDGVTTIANNLTSTVQVFSDSEYQLPYVLGSAHQGCLPPFPADVFMIPQYGYLTLNNGSQAVGRSSFYCLEYFPSQMLRTGNNFTFSYTFEDVPFHSSYAHSQSLDRLMNPLIDQYLYYLNRTQNQSGSAQNNDLLFSRGSPAGMSVQPKNWLPGPCYRQQRVSKTKTDNNNSNFTWTGASKYNLNGRESIINPGTAMASHKDDKDKFFPMSGVMIFGKESAGASNTALDNVMITDEEEIKATNPVATERFGTVAVNLQSSSTDPATGDVHVMGALPGMVWQDRDVYLQGPIWAKIPHTDGHFHPSPLMGGFGLKNPPPQILIKNTPVPANPPAEFSATKFASFITQYSTGQVSVEIEWELQKENSKRWNPEVQYTSNYAKSANVDFTVDNNGLYTEPRPIGTR

SEQ ID NO: 185 - protein, 735 aa, Adeno-associated virus-2
  VARIANT 239: note = Any amino acid
MASDGYLPDWLEDNLSEGIREWWDLKPGAPKPKANQQKQDDGRGLVLPGYKYLGPFNGLDKGEPVNAADAAALEHDKAYDQQLKAGDNPYLRYNHADAEFQERLQEDTSFGGNLGRAVFQAKKRVLEPFGLVEEGAKTAPGKKRPVEQSPQEPDSSSGIGKTGQQPAKKRLNFGQTGDSESVPDPQPLGEPPATPAAVGPTTMASGGGAPMADNNEGADGVGNASGNWHCDSTWLGDRXITTSTRTWALPTYNNHLYKQISSASTGASNDNHYFGYSTPWGYFDFNRFHCHFSPRDWQRLINNNWGFRPKRLNFKLFNIQVKEVTTNDGVTTIANNLTSTVQVFSDSEYQLPYVLGSAHQGCLPPFPADVFMIPQYGYLTLNNGSQAVGRSSFYCLEYFPSQMLRTGNNFTFSYTFEDVPFHSSYAHSQSLDRLMNPLIDQYLYYLNRTQNQSGSAQNNDLLFSRGSPAGMSVQPKNWLPGPCYRQQRVSKTKTDNNNSNFTWTGASKYNLNGRESIINPGTAMASHKDDKDKFFPMSGVMIFGKESAGASNTALDNVMITDEEEIKATNPVATERFGTVAVNLQSSSTDPATGDVHVMGALPGMVWQDRDVYLQGPIWAKIPHTDGHFHPSPLMGGFGLKNPPPQILIKNTPVPANPPAEFSATKFASFITQYSTGQVSVEIEWELQKENSKRWNPEVQYTSNYAKSANVDFTVDNNGLYTEPRPIGTRYLTRP

SEQ ID NO: 186 - protein, 733 aa, Adeno-associated virus-2
MASDGYLPDWLEDNLSEGIREWWDLKPGAPKPKANQQKQDDGRGLVLPGYKYLGPFNGLDKGEPVNAADAAALEHDKAYDQQLKAGDNPYLRYNHADAEFQERLQEDTSFGGNLGRAVFLAKKRVLEPFGLVEEGAKTAPGKKRPVEQSPQEPDSSSGIGKTGQQPAKKRLNFGQTGDSESVPDPQPLGEPPATPAAVGPTTMASGGGAPMADNNEGADGVGNASGNWHCDSTWLGDRVITTSTRTWALPTYNNHLYKQISSASTGASNDNHYFGYSTPWGYFDFNRFHCHFSPRDWQRLINNNWGFRPKRLNFKLFNIQVKEVTTNDGVTTIANNLTSTVQVFSDSEYQLPYVLGSAHQGCLPPFPADVFMIPQYGYLTLNNGSQAVGRSSFYCLEYFPSQMLRTGNNFTFSYTFEDVPFHSSYAHSQSLDRLMNPLIDQYLYYLNRTQNQSGSAQNNDLLFSRGSPAGMSVQPKNWLPGPCYRQQRVSKTKTDNNNSNFTWTGASKYNLNGRESIINPGTAMASHKDDKDKFFPMSGVMIFGKESAGASNTALDNVMITDEEEIKATNPVATERFGTVAVNLQSSSTDPATGDVHVMGALPGMVWQDRDVYLQGPIWAKIPHTDGHFHPSPLMGGFGLKNPPPQILIKNTPVPANPPAEFSATKFASFITQYSTGQVSVEIEWELQKENSKRWNPEVQYTSNYAKSANVDFTVDNNGLYTEPRPIGTRYLT

SEQ ID NO: 187 - protein, 734 aa, Adeno-associated virus-2
MAADGYLPDWLEDTLSEGIRQWWKLKPGPPPPKPAERHKDDSRGLVLPGCKYLGPFNGLDKGEPVNEADAAALEHDKAYDRQLDSGDNPYLKYNHADAEFQERLKEDTSFGGNLGRAVFQAKKRVLEPLGLVEEPVKTAPGKKRPVEHSPVEPDSSSGTGKAGQQPARKRLNFGQTGDADSVPDPQPLGQPPAAPSGLGTNTMATGSGAPMADNNEGADGVGNSSGNWHCDSTWMGDRVITTSTRTWALPTYNNHLYKQISSQSGASNDNHYFGYSTPWGYFDFNRFHCHFSPRDWQRLINNNWGFRPKRLNFKLFNIQVKEVTQNDGTTTIANNLTSTVQVFSDSEYQLPYVLGSAHQGCLPPFPADVFMIPQYGYLTLNNGSQAVGRSSFYCLEYFPSQMLRTGNNFTFNYTFEDVPFHSSYAHSQSLDRLMNPLIDQYLYYLNRTQNQSGSAQNNDLLFSRGSPAGMSVQPKNWLPGPCYRQQRVSKTKTDNNNSNFTWTGASKYNLNGRESIINPGTAMASHKDDKDKFFPMSGVMIFGKESAGASNTALDNVMITDEEEIKATNPVATERFGTVAVNLQSSSTDPATGDVHVMGALPGMVWQDRDVYLQGPIWAKIPHTDGHFHPSPLMGGFGLKNPPPQILIKNTPVPANPPAEFSATKFASFITQYSTGQVSVEIEWELQKENSKRWNPEVQYTSNYAKSANVDFTVDNNGLYTEPRPIGTRYLTRP

SEQ ID NO: 188 - protein, 734 aa, Adeno-associated virus-2
MAADGYLPDWLEDTLSEGIRQWWKLKPGPPPPKPAERHKDDSRGLVLPGYKYLGPFNGLDKGEPVNEADAAALEHDKAYDRQLDSGDNPYLKYNHADAEFQERLKEDTSFGGNLGRAVFQAKKRVLEPLGLVEEPVKTAPGKKRPVEHSPVEPDSSSGTGKAGQQPARKRLNFGQTGDADSVPDPQPLGQPPAAPSGLGTNTMATGSGAPMADNNEGADGVGNSSGNWHCDSTWMGDRVITTSTRTWALSTYNNHLYKQISSQSGASNDNHYFGYSTPWGYFDFNRFHCHFSPRDWQRLINNNWGFRPKRLNFKLFNIQVKEVTQNDGTTTIANNLTSTVQVFTDSEYQLPYVLGSAHQGCLPPFPADVFMVPQYGYLTLNNGSQAVGRSSFYCLEYFPSQMLRTGNNFTFSYTFEDVPFHSSYAHSQSLDRLMNPLIDQYLYYLSRTNTPSGTTTQSRLQFSQAGASDIRDQSRNWLPGPCYRQQRVSKTSADNNNSEYSWTGATKYHLNGRDSLVNPGPAMASHKDDEEKFFPQSGVLIFGKQGSEKTNVDIEKVMITDEEEIRTTNPVATEQYGSVSTNLQRGNRQAATADVNTQGVLPGMVWQDRDVYLQGPIWAKIPHTDGHFHPSPLMGGFGLKHPPPQILIKNTPVPANPSTTFSAAKFASFITQYSTGQVSVEIEWELQKENSKRWNPEIQYTSNYNKSINVDFTVDTNGVYSEPRPIGTRYLTRN

SEQ ID NO: 189 - protein, 738 aa, Adeno-associated virus-2
MAADGYLPDWLEDTLSEGIRQWWKLKPGPPPPKPAERHKDDSRGLVLPGYKYLGPFNGLDKGEPVNEADAAALEHDKAYDRQLDGGDNPYLKYNHADAEFQERLKEDTSFGGNLGRAVFQAKKRVLEPLGLVEEPVKTAPGKKRPVEHSPVEPDSSSGTGKAGQQPARKRLNFGQTGDADSVPDPQPLGQPPAAPSGLGTNTMATGSGAPMADNNEGADGVGNSSGNWHCDSTWMGDRVITTSTRTWALPTYNNHLYKQISSQSGASNDNHYFGYSTPWGYFDFNRFHCHFSPRDWQRLINNNWGFRPKRLNFKLFNIQVKEVTQNDGTTTIANNLTSTVQVFTDSEYQLPYVLGSAHQGCLPPFPADVFMVPQYGYLTLNNGSQAVGRSSFYCLEYFPSQMLRTGNNFTFSYTFEDVPFHSSYAHSQSLDRLMNPLIDQYLYYLSRTNTPSGTTTQSGLQFSQAGASDIRDQSRNWLPGPCYRQQRVSKTSADNNNSEYSWTGATKYHLNGRDSLVNPGPAMASHKDDEEKFFPQSGVLIFGKQGSEKTNVDIEKVMITDEEEIRTTNPVATEQYGSVSTNLQRGNRQAATADVNTQGVLPGMVWQDRDVYLQGPIWAKIPHTDGHFHPSPLMGGFGLKHPPPQILIKNTPVPANPSTTFSAAKFASFITQYSTGQVSVEIEWELQKENSKRWNPEIQYTSNYNKSVNVDFTVDTNGVYSEPRPIGTRYLTRNLLRP

SEQ ID NO: 190 - DNA, 2208 bp, synthetic construct
  misc_feature 1..2208: note = source = /note="Description of Artificial Sequence: Synthetic polynucleotide"
  source 1..2208: mol_type = other DNA
atggctgccgatggttatcttccagattggctcgaggacactctctctgaaggaataagacagtggtggaagctcaaacctggcccaccaccaccaaagcccgcagagcggcataaggacgacagcaggggtcttgtgcttcctgggtacaagtacctcggacccttcaacggactcgacaagggggagccggtcaacgaggcagacgccgcggccctcgagcacgacaaggcctacgaccggcagctcgacagcggagacaacccgtacctcaagtacaaccacgccgacgcagagtttcaggagcgccttaaagaagatacgtcttttgggggcaacctcggacgagcagtcttccaggcgaaaaagagggttcttgaacctctgggcctggttgaggaacctgttaagacggctccgggaaaaaagaggccggtagagcactctcctgtggagccagactcctcctcgggaaccggaaaagcgggccagcagcctgcaagaaaaagattaaattttggtcagactggagacgcagactccgtacctgacccccagcctctcggacagccaccagcagccccctctggtctgggatctactacaatggctacaggcagtggcgcaccaatggcagacaataacgagggtgccgatggagtgggtaattcctcaggaaattggcattgcgattcccaatggctgggcgacagagtcatcaccaccagcacccgaacctgggccctgcccacatacaacaaccacctctacaagcaaatctccagccaatcaggagccagcaacgacaaccactactttggctacagcaccccctgggggtattttgacttcaacagattccactgccacttttcaccacgtgactggcaaagactcatcaacaacaactggggattccggcccaaaagactcaacttcaagctctttaatattcaagtcaaagaggtcacgcagaatggcggtacgacgacgattgccaataaccttaccagcacggttcaggtgtttactgactcggagtaccagctcccgtacgtcctgggctcggcgcatcaaggatgcctcccgccgtttccagcggacgtcttcatggtcccacagtatggatacctcaccctgaacaacgggagtcaggcggtaggacgctcttccttttactgcctggagtactttccttctcagatgctgcgtactggaaacaactttcagttcagctacacttttgaagacgtgcctttccacagcagctacgctcacagccagagtctggatcggctgatgaatcctctgatcgaccagtacctgtattatctgaacaagacacaaacaaatagtggaactcttcagcagtctcggctactgtttagccaagctggaccaaccaacatgtctcttcaagctaaaaactggctgcctggaccttgctacagacagcagcgtctgtcaaaacaggcaaacggcaacaacaacagcaactttccctggactgcagctacaaagtatcatctaaatggccgggactcgttggttaatccaggaccagctatggccagtcacaaggatgacgaagaaaagtttttccccatgcatggaaccctgatatttggtaaacaaggaacaaatgccaacgacgcggatttggaaaatgtcatgattacagatgaagaagaaatcagggccaccaatcccgtggctacggagcagtacgggactgtgtcaaataatttgcaaaactcaaacactggtccaactactggaactgtcaatcaccaaggagcgttacctggtatggtgtggcaggatcgagacgtgtacctgcagggacccatttgggccaagattcctcacaccgatggacactttcatccttctccactgacgggaggttttggactcaaacacccgcctcctcagatcatgatcaaaaacactcccgttccagccaatcctcccacaaacttcagttctgccaagtttgcttctttcatcacacagtattccacgggacaggtcagcgtggagatcgagtgggagctgcagaaggagaacagcaaacgctggaatcccgaaattcagtacacttccaactacaacaagtctgttaatgtggactttactgtggacactaatggtgtgtattcagagcctcgccccattggcaccagatacctgactcgtaatctgtaa

SEQ ID NO: 191 - protein, 735 aa, synthetic construct
  REGION 1..735: note = source = /note="Description of Artificial Sequence: Synthetic polypeptide"
MAADGYLPDWLEDTLSEGIRQWWKLKPGPPPPKPAERHKDDSRGLVLPGYKYLGPFNGLDKGEPVNEADAAALEHDKAYDRQLDSGDNPYLKYNHADAEFQERLKEDTSFGGNLGRAVFQAKKRVLEPLGLVEEPVKTAPGKKRPVEHSPVEPDSSSGTGKAGQQPARKRLNFGQTGDADSVPDPQPLGQPPAAPSGLGSTTMATGSGAPMADNNEGADGVGNSSGNWHCDSQWLGDRVITTSTRTWALPTYNNHLYKQISSQSGASNDNHYFGYSTPWGYFDFNRFHCHFSPRDWQRLINNNWGFRPKRLNFKLFNIQVKEVTQNGGTTTIANNLTSTVQVFTDSEYQLPYVLGSAHQGCLPPFPADVFMVPQYGYLTLNNGSQAVGRSSFYCLEYFPSQMLRTGNNFQFSYTFEDVPFHSSYAHSQSLDRLMNPLIDQYLYYLNKTQTNSGTLQQSRLLFSQAGPTNMSLQAKNWLPGPCYRQQRLSKQANGNNNSNFPWTAATKYHLNGRDSLVNPGPAMASHKDDEEKFFPMHGTLIFGKQGTNANDADLENVMITDEEEIRATNPVATEQYGTVSNNLQNSNTGPTTGTVNHQGALPGMVWQDRDVYLQGPIWAKIPHTDGHFHPSPLTGGFGLKHPPPQIMIKNTPVPANPPTNFSSAKFASFITQYSTGQVSVEIEWELQKENSKRWNPEIQYTSNYNKSVNVDFTVDTNGVYSEPRPIGTRYLTRNL

SEQ ID NO: 192 - DNA, 2208 bp, synthetic construct
  misc_feature 1..2208: note = source = /note="Description of Artificial Sequence: Synthetic polynucleotide"
  source 1..2208: mol_type = other DNA
atggctgccgatggttatcttccagattggctcgaggacactctctctgaaggaataagacagtggtggaagctcaaacctggcccaccaccaccaaagctcgcagagcggcatcaggacgacagcaggggtcttgtgcttcctgggtacaagtacctcggacccttcaacggactcgacaaaggagagccggtcaacgaggcagacgccgcggccctcgagcacgacaaggcctacgaccggcagctcgacagcggagacaacccgtacctcaagtacaaccacgccgacgcggagtttcaggagcgtcttaaagaagatacgtcttttgggggcaacctcggacgagcagtcttccaggcgaaaaagagggttcttgaacctctgggcctggttgaggaacctgttaagacggctccgggaaaaaagaggccggtagagcactctcctgtggagccagactcctcctcgggaaccggaaaggcgggccatcagcctgcgagaaagagattgaattttggtcagactggagacgcagactccgtacctgacccccagcctctcggacagccaccagcagcccccacaagtctgggatctactacaatggctacaggcagtggcgcaccaatggcagacaataacgagggtgccgatggagtgggtaattcctcaggaaattggcattgcgattcccaatggctgggcgacagagtcatcaccaccagcacccgaacctgggccctgcccacctacaacaaccacctctacaagcaaatctccagccaatcaggagcctcgaacgacaaccactactttggctacagcaccccctgggggtattttgacttcaacagattccactgtcacttctccccacgtgattggcaaagactcatcaacaacaactggggattccgacccaagagactcaacttcaagctctttaacattcaagtcaaagaggtcacgcagaatgacggtacgacgacgattgccaataaccttaccagcacggttcaggtgtttactgactcggagtaccagctcccgtacgtcctcggctcggcgcatcaaggatgcctcccgccgtttccagcggacgtcttcacggtcccacagtatggatacctcaccctgaacaacgggagtcaggcggtaggacgctcttccttttactgcctggagtactttccttctcagatgctgcgtactggaaacaaccttaccttcagctacacctttgaggacgttcctttccacagcagctacgctcacagccagagtttggaccggctgatgaatcctctgatcgaccagtatctatattatctgaacaggacacaatcaaatagtggaactcttcagcagtctaggctactgtttagccaagctggacccaccagcatgtctcttcaagctaaaaactggctgcctggaccttgctacagacagcagcgtctttcaaagcaggcaaacgacaacaacaacagcaactttccctggactgcggctacaaagtatcatctaaatggccgggactcgttggttaatccaggaccagctatggccagccacaaagacgatgaagaaaagtttttccccatgcatggaaccctgatatttggtaaacaaggaacaaatgctaacgacgcggatttggagcatgttatgattacagatgaagaagaaatcaggaccaccaatcctgtggctacagagcagtacggaaacgtgtcaaataatttgcaaaactcaaatactggtccaactacagaaaatgtcaatcaccagggagcgttacctggtatggtgtggcaggatcgagacgtgtacctgcagggacccatttgggccaagattcctcacaccgacggacactttcacccttctccactgatgggaggttttggactcaaacacccgcctcctcaaatcatgatcaaaaacactcccgttccagccaatcctcccacaaactacagttctgccaagtttgcttctttcatcacacagtattccacgggccaggtcagcgtggagattgagtgggagctgcggaaggagaacagcaaacgctggaaccccgagatccagtatacttccaactacaacaaatctgttaatgtggactttactgtggacactaatggtgtgtattcagagcctcgccccattggcaccagatacctgactcgtaatctgtaa

SEQ ID NO: 193 - protein, 735 aa, synthetic construct
  REGION 1..735: note = source = /note="Description of Artificial Sequence: Synthetic polypeptide"
MAADGYLPDWLEDTLSEGIRQWWKLKPGPPPPKLAERHQDDSRGLVLPGYKYLGPFNGLDKGEPVNEADAAALEHDKAYDRQLDSGDNPYLKYNHADAEFQERLKEDTSFGGNLGRAVFQAKKRVLEPLGLVEEPVKTAPGKKRPVEHSPVEPDSSSGTGKAGHQPARKRLNFGQTGDADSVPDPQPLGQPPAAPTSLGSTTMATGSGAPMADNNEGADGVGNSSGNWHCDSQWLGDRVITTSTRTWALPTYNNHLYKQISSQSGASNDNHYFGYSTPWGYFDFNRFHCHFSPRDWQRLINNNWGFRPKRLNFKLFNIQVKEVTQNDGTTTIANNLTSTVQVFTDSEYQLPYVLGSAHQGCLPPFPADVFTVPQYGYLTLNNGSQAVGRSSFYCLEYFPSQMLRTGNNLTFSYTFEDVPFHSSYAHSQSLDRLMNPLIDQYLYYLNRTQSNSGTLQQSRLLFSQAGPTSMSLQAKNWLPGPCYRQQRLSKQANDNNNSNFPWTAATKYHLNGRDSLVNPGPAMASHKDDEEKFFPMHGTLIFGKQGTNANDADLEHVMITDEEEIRTTNPVATEQYGNVSNNLQNSNTGPTTENVNHQGALPGMVWQDRDVYLQGPIWAKIPHTDGHFHPSPLMGGFGLKHPPPQIMIKNTPVPANPPTNYSSAKFASFITQYSTGQVSVEIEWELRKENSKRWNPEIQYTSNYNKSVNVDFTVDTNGVYSEPRPIGTRYLTRNL

SEQ ID NO: 194 - DNA, 2208 bp, synthetic construct
  misc_feature 1..2208: note = source = /note="Description of Artificial Sequence: Synthetic polynucleotide"
  source 1..2208: mol_type = other DNA
atggctgccgatggttatcttccagattggctcgaggacactctctctgaaggaataagacagtggtggaagctcaaacctggcccaccaccaccaaagcccgcagagcggcatcaggacgacagcaggggtcttgtgcttcctgggtacaagtacctcggacccttcaacggactcgacaaaggagagccggtcaacgaggcagacgccgcggccctcgagcacgacaaggcctacgaccggcagctcgacagcggagacaacccgtacctcaagtacaaccacgccgacgcggagtttcaggagcgtcttaaagaagatacgtcttttgggggcaacctcggacgagcagtcttccaggcgaaaaagagggttcttgaacctctgggcctggttgaggaacctgttaagacggctccgggaaaaaagaggccggtagagcactctcctgtggagccagactcctcctcgggaaccggaaaagcgggccatcagcctgcgagaaagagattgaattttggtcagactggagacgcagactccgtacctgacccccagcctctcggacagccaccagcagcccccacaagtttgggatctactacaatggctacaggcagtggcgcaccaatggcagacaataacgagggtgccgatggagtgggtaattcctcaggaaattggcattgcgattcccaatggctgggcgacagagtcatcaccaccagcacccgaacctgggccctgcccacctacaacaaccacctctacaagcaaatctccagccaatcaggagcctcgaacgacaaccactactttggctacagcaccccctgggggtattttgacttcaacagattccactgtcacttctccccacgtgattggcaaagactcatcaacaacaactggggattccgacccaagagactcaacttcaagctctttaacattcaagtcaaggaggtcacgcagaatgacggtacgacgacgattgccaataaccttaccagcacggttcaggtgtttactgactcggagtaccagctcccgtacgtcctcggctcggcgcatcaaggatgcctcccgccgtttccagcggacgtcttcatggtcccacagtatggatacctcaccctgaacaacgggagtcaggcggtaggacgctcttccttttactgcctggagtactttccttctcagatgctgcgtactggaaacaactttaccttcagctacacctttgaggacgttcctttccacagcagctacgctcacagccagagtttggaccggctgatgaatcctctgatcgaccagtatctatattatctgaacaggacacaatcaaatagtggaactcttcagcagtctaggctactgtttagccaagctggacccaccagcatgtctcttcaagctaaaaactggctgcctggaccttgctacagacagcagcgtctttcaaagcaggcaaacgacaacaacaacagcaactttccctggactgcggctacaaagtatcgtctaaatggccgggactcgttggttaatccaggaccagctatggccagccacaaagacgatgaagaaaagtttttccccatgcatggaaccctgatatttggtaaacaaggaacaaatgctaacgacgcggatttggagcatgttatgattacagatgaagaagaaatcaggaccaccaatcctgtggctacagagcagtacggaaacgtgtcaaataatttgcaaaactcaaatactggtccaactacagaaaatgtcaatcaccagggagcgttacctggtatggtgtggcaggatcgagacgtgtacctgcagggacccatttgggccaagattcctcacaccgacggacactttcacccttctccactgatgggaggttttggactcaaacacccgcctcctcaaatcatgatcaaaaacactcccgttccagccaatcctcccacaaacttcagttctgccaagtttgcttctttcatcacacagtattccacgggccaggtcagcgtggagattgagtgggagctgcagaaggagaacagcaaacgctggaaccccgagatccagtatacttccaactacaacaaatctgttaatgtggactttactgtggacactaatggtgtgtattcagagcctcgccccattggcaccagatacctgactcgtaatctgtaa

SEQ ID NO: 195 - protein, 735 aa, synthetic construct
  REGION 1..735: note = source = /note="Description of Artificial Sequence: Synthetic polypeptide"
MAADGYLPDWLEDTLSEGIRQWWKLKPGPPPPKPAERHQDDSRGLVLPGYKYLGPFNGLDKGEPVNEADAAALEHDKAYDRQLDSGDNPYLKYNHADAEFQERLKEDTSFGGNLGRAVFQAKKRVLEPLGLVEEPVKTAPGKKRPVEHSPVEPDSSSGTGKAGHQPARKRLNFGQTGDADSVPDPQPLGQPPAAPTSLGSTTMATGSGAPMADNNEGADGVGNSSGNWHCDSQWLGDRVITTSTRTWALPTYNNHLYKQISSQSGASNDNHYFGYSTPWGYFDFNRFHCHFSPRDWQRLINNNWGFRPKRLNFKLFNIQVKEVTQNDGTTTIANNLTSTVQVFTDSEYQLPYVLGSAHQGCLPPFPADVFMVPQYGYLTLNNGSQAVGRSSFYCLEYFPSQMLRTGNNFTFSYTFEDVPFHSSYAHSQSLDRLMNPLIDQYLYYLNRTQSNSGTLQQSRLLFSQAGPTSMSLQAKNWLPGPCYRQQRLSKQANDNNNSNFPWTAATKYRLNGRDSLVNPGPAMASHKDDEEKFFPMHGTLIFGKQGTNANDADLEHVMITDEEEIRTTNPVATEQYGNVSNNLQNSNTGPTTENVNHQGALPGMVWQDRDVYLQGPIWAKIPHTDGHFHPSPLMGGFGLKHPPPQIMIKNTPVPANPPTNFSSAKFASFITQYSTGQVSVEIEWELQKENSKRWNPEIQYTSNYNKSVNVDFTVDTNGVYSEPRPIGTRYLTRNL

SEQ ID NO: 196 - DNA, 2208 bp, synthetic construct
  misc_feature 1..2208: note = source = /note="Description of Artificial Sequence: Synthetic polynucleotide"
  source 1..2208: mol_type = other DNA
atggctgccgatggttatcttccagattggctcgaggacactctctctgaaggaataagacagtggtggaagctcaaacctggcccaccaccaccaaagcccgcagagcggcatcaggacgacagcaggggtcttgtgcttcctgggtacaagtacctcggacccttcaacggactcgacaaaggagagccggtcaacgaggcagacgccgcggccctcgagcacgacaaggcctacgaccggcagctcgacagcggagacaacccgtacctcaagtacaaccacgccgacgcggagtttcaggagcgtcttaaagaagatacgtcttttgggggcaacctcggacgagcagtcttccaggcgaaaaagagggttcttgaacctctgggcctggttgaggaacctgttaagacggctccgggaaaaaagaggccggtagagcactctcctgtggagccagactcctcctcgggaaccggaaaagcgggccatcagcctgcgagaaagagattgaattttggtcagactggagacgcagactccgtacctgacccccagcctctcggacagccaccagcagcccccacaagtttgggatctactacaatggctacaggcagtggcgcaccaatggcagacaataacgagggtgccgatggagtgggtaattcctcaggaaattggcattgcgattcccaatggctgggcgacagagtcatcaccaccagcacccgaacctgggccctgcccacctacaacaaccacctctacaagcaaatctccagccaatcaggagcctcgaacgacaaccactactttggctacagcaccccctgggggtattttgacttcaacagattccactgtcacttctccccacgtgattggcaaagactcatcaacaacaactggggattccgacccaagagactcaacttcaagctctttaacattcaagtcaaagaggtcacgcagaatgacggtacgacgacgattgccaataaccttaccagcacggttcaggtgtttactgactcggagtaccagctcccgtacgtcctcggctcggcgcatcaaggatgcctcccgccgtttccagcggacgtcttcatggtcccacagtatggatacctcaccctgaacaacgggagtcaggcggtaggacgcccttccttttactgcctggagtactttccttctcagatgctgcgtactggaaacaactttaccttcagctacacctttgaggacgttcctttccacagcagctacgctcacagccagagtttggaccggctgatgaatcctctgatcgaccagtatctatattatctgaacaggacacaatcaaatagtggaactcttcagcagtctaggctactgtttagccaagctggacccaccagcatgtctcttcaagctaaaaactggctgcctggaccttgctacagacagcagcgtctttcaaagcaggcaaacgacaacaacaacagcaactttccctggactgcggctacaaagtatcatctaaatggccgggactcgttggttaatccaggaccagctatggccagccacaaagacgatgaagaaaagtttttccccatgcatgggaccctgatatttggtaaacaaggaacaaatgctaacgacgcggatttggagcatgttatgattacagatgaagaagaaatcaggaccaccaatcctgtggctacagagcagtacggaaacgtgtcaaataatttgcaaaactcaaatactggtccaactacagaaaatgtcaatcaccagggagcgttacctggtatggtgtggcaggatcgagacgtgtacctgcagggacccatttgggccaagattcctcacaccgacggacactttcacccttctccactgatgggaggttttggactcaaacacccgcctcctcaaatcatgatcaaaaacactcccgttccagccaatcctcccacaaacttcagttctgccaagtttgcttctttcatcacacagtattccacgggccaggtcagcgtggagattgagtgggagctgcagaaggagaacagcaaacgctggaaccccgagatccagtatacttccaactacaacaaatctgttaatgtggactttactgtggacactaatggtgtgtattcagagcctcgccccattggcaccagatacctgactcgtaatctgtaa

SEQ ID NO: 197 - protein, 735 aa, synthetic construct
  REGION 1..735: note = source = /note="Description of Artificial Sequence: Synthetic polypeptide"
MAADGYLPDWLEDTLSEGIRQWWKLKPGPPPPKPAERHQDDSRGLVLPGYKYLGPFNGLDKGEPVNEADAAALEHDKAYDRQLDSGDNPYLKYNHADAEFQERLKEDTSFGGNLGRAVFQAKKRVLEPLGLVEEPVKTAPGKKRPVEHSPVEPDSSSGTGKAGHQPARKRLNFGQTGDADSVPDPQPLGQPPAAPTSLGSTTMATGSGAPMADNNEGADGVGNSSGNWHCDSQWLGDRVITTSTRTWALPTYNNHLYKQISSQSGASNDNHYFGYSTPWGYFDFNRFHCHFSPRDWQRLINNNWGFRPKRLNFKLFNIQVKEVTQNDGTTTIANNLTSTVQVFTDSEYQLPYVLGSAHQGCLPPFPADVFMVPQYGYLTLNNGSQAVGRPSFYCLEYFPSQMLRTGNNFTFSYTFEDVPFHSSYAHSQSLDRLMNPLIDQYLYYLNRTQSNSGTLQQSRLLFSQAGPTSMSLQAKNWLPGPCYRQQRLSKQANDNNNSNFPWTAATKYHLNGRDSLVNPGPAMASHKDDEEKFFPMHGTLIFGKQGTNANDADLEHVMITDEEEIRTTNPVATEQYGNVSNNLQNSNTGPTTENVNHQGALPGMVWQDRDVYLQGPIWAKIPHTDGHFHPSPLMGGFGLKHPPPQIMIKNTPVPANPPTNFSSAKFASFITQYSTGQVSVEIEWELQKENSKRWNPEIQYTSNYNKSVNVDFTVDTNGVYSEPRPIGTRYLTRNL

SEQ ID NO: 198 - DNA, 2208 bp, synthetic construct
  misc_feature 1..2208: note = source = /note="Description of Artificial Sequence: Synthetic polynucleotide"
  source 1..2208: mol_type = other DNA
atggctgccgatggttatcttccagattggctcgaggacactctctctgaaggaataagacagtggtggaagctcaaacctggcccaccaccaccaaagcccgcagagcggcataaggacgacagcaggggtcttgtgcttcctgggtacaagtacctcggacccttcaacggactcgacaagggagagccggtcaacgaggcagacgccgcggccctcgagcacgacaaggcctacgaccggcagctcgacagcggagacaacccgtacctcaagtacaaccacgccgacgcggagtttcaggagcgccttaaagaagatacgtcttttgggggcaacctcggacgagcagtcttccaggcaaaaaagagggttcttgaacctctgggcctggttgaggagcctgttaaaacggctccgggaaaaaagaggccggtagagcactctcctgcggagccagactcctcctcgggaaccggaaaagcgggccagcagcctgcaagaaaaagattgaatttcggtcagactggagacgcagactccgtacctgacccccagcctctcggacagccaccagcagccccctctggtctgggaactaatacgatggcttcaggcagtggcgcaccaatggcagacaataacgagggcgccgacggagtgggtaattcctcgggaaattggcattgcgattccacatggatgggcgacagagtcatcaccaccagcacccgaacttgggccctgcccacctacaacaaccatctctacaagcaaatctccagccaatcaggagccagcaacgacaaccactactttggctacagcaccccttgggggtattttgacttcaacagattccactgccacttttcaccacgtgactggcaaagactcatcaacaacaactggggattccggcccaagagactcaacttcaagctctttaacattcaagtcaaagaggtcacgcagaatgacggtacgacgacgattgccaataaccttaccagcacggttcaggtgtttactgactcggagtaccagctcccgtacgtcctcggctcggcgcatcaaggatgcctcccgccgttcccagcagacgtcttcatggtgccacagtatggatacctcaccctgaacaacgggagtcaggcagtaggacgctcttcattttactgcctggagtactttccttctcagatgctgcgtaccggaaacaactttaccttcagctacacctttgaggacgttcctttccacagcagctacgctcacagccagagtttggaccgtctcatgaatcctctcatcgaccagtacctgtattacttgagcagaacaaacactccaagcggaaccaccacgcagtccaggcttcagttttctcaggccggagcaagtgacattcgggaccagtctaggaactggcttcctggaccctgttaccgccagcagcgagtatcaaagacatctgcggataacaacaacagtgaatactcgtggactggagctaccaagtaccacctcaatggcagagactctctggtgaatccgggcccggccatggccagccacaaggacgatgaagaaaagttttttcctcagagcggggttctcatctttgggaagcaaggctcagagaaaacaaatgtggacattgaaaaggtcatgattacagacgaagaggaaatcaggaccaccaatcccgtggctacggagcagtatggttctgtatctaccaacctgcagggcggcaacacacaagcagctaccgcagatgtcaacacacaaggcgttcttccaggcatggtctggcaggacagagacgtgtacctgcaggggcccatctgggcaaagattccacacacggacggacattttcacccctctcccctcatgggcggattcggacttaaacaccctcctccacagattctcatcaagaacaccccggtacctgcgaatccttcgaccaccttcagtgcggcaaagtttgcttctttcatcacacagtattccacggggcaggtcagcgtggagatcgagtgggagctgcagaaggagaacagcaaacgctggaatcccgagatccagtacacttccaactacaacaaatctgttaatgtggactttactgttgacactaatggcgtgtattcagagcctcgccccattggcaccagatacctgactcgtaatctgtaa

SEQ ID NO: 199 - protein, 735 aa, synthetic construct
  REGION 1..735: note = source = /note="Description of Artificial Sequence: Synthetic polypeptide"
MAADGYLPDWLEDTLSEGIRQWWKLKPGPPPPKPAERHKDDSRGLVLPGYKYLGPFNGLDKGEPVNEADAAALEHDKAYDRQLDSGDNPYLKYNHADAEFQERLKEDTSFGGNLGRAVFQAKKRVLEPLGLVEEPVKTAPGKKRPVEHSPAEPDSSSGTGKAGQQPARKRLNFGQTGDADSVPDPQPLGQPPAAPSGLGTNTMASGSGAPMADNNEGADGVGNSSGNWHCDSTWMGDRVITTSTRTWALPTYNNHLYKQISSQSGASNDNHYFGYSTPWGYFDFNRFHCHFSPRDWQRLINNNWGFRPKRLNFKLFNIQVKEVTQNDGTTTIANNLTSTVQVFTDSEYQLPYVLGSAHQGCLPPFPADVFMVPQYGYLTLNNGSQAVGRSSFYCLEYFPSQMLRTGNNFTFSYTFEDVPFHSSYAHSQSLDRLMNPLIDQYLYYLSRTNTPSGTTTQSRLQFSQAGASDIRDQSRNWLPGPCYRQQRVSKTSADNNNSEYSWTGATKYHLNGRDSLVNPGPAMASHKDDEEKFFPQSGVLIFGKQGSEKTNVDIEKVMITDEEEIRTTNPVATEQYGSVSTNLQGGNTQAATADVNTQGVLPGMVWQDRDVYLQGPIWAKIPHTDGHFHPSPLMGGFGLKHPPPQILIKNTPVPANPSTTFSAAKFASFITQYSTGQVSVEIEWELQKENSKRWNPEIQYTSNYNKSVNVDFTVDTNGVYSEPRPIGTRYLTRNL

SEQ ID NO: 200 - DNA, 3161 bp, synthetic construct
  misc_feature 1..3161: note = source = /note="Description of Artificial Sequence: Synthetic polynucleotide"
  source 1..3161: mol_type = other DNA
gattgaatttagcggccgcgaattcgcccttgctgcgtcaactggaccaatgagaactttccattcaatgattgcgtcgacaagatggtgatctggtgggaggagggaaagatgaccgccaaggtcatggagtcggccaaagccattctcggaggaagcaaggtgcgcgtggaccagaaatgtaagtcctcggcccagatagacccgactcccgtgattgtcacctccaacaccaacatgtgcgccgtgattgacgggaactcaacgaccttcgagcaccagcagccgttgcaagaccggatgttcaaatttgaactcacccgccgtctggatcatgactttgggaaggtcaccaagcaggaagtcaaagactttttccggtgggcaaaggatcacgtggttgaggtggagcatgaattctacgtcaaaaagggtggagccaagaaaagacccgcccccagtgacgcagatataagtgagcccaaacgggcgcgcgggtcagttgcgcagccatcgacgtcagacgcggaagcttcgatcaactacgcggacaggtaccaaaacaaatgttctcgtcacgtgggcatgaatctgatgctgtttccctgcagacaatgcgagagaatgaatcaaaattcaaatatctgcttcactcacggacagaaggactgtttagagtgctttcccgtgtcagaatctcaacccgtttctgtcgtcaaaaaggcgtatcagaaactttgctacattcatcatatcatgggaaaggtgccagacgcttgcactgcctgcgatctggtcaatgtggatttggatgactgcatctctgaacaataaatgatttaaatcaggtatggctgccgatggttatcttccagattggctcaaggacactctctctgaaggaataagacagtggtggaagctcaaacctggcccaccaccaccaaagcccgcagagcggcataaggacgacagcgggggtcttgtgcttcctgggtacaagtacctcggacccttcaacggactcgacaagggagagccggtcaacgaggcagacgccgcggccctcgagtacgacaaggcctacgaccggcagctcgacagcggagacaacccgtacctcaagtacaaccacgccgacgcggagtttcaggagcgccttaaagaagatacgtcttttgggggcaacctcggacgagcagtcttccaggcgaaaaagagggttcttgaacctctgggcctggttgaggaacctgttaagacggctccgggaaaaaagaggccggtagagcactctcctgtggagccagactcctcctcgggaacaggaaaagcgggccagcagcctgcgagaaagagattgaattttggtcagactggagacgcagactccgtacctgacccccagcctctcggacagccaccagcagccccctctggtctgggaactaatacgatggctacaggcagtggcgcaccaatggcagacaataacgagggcgccgacggagtgggtaattcctcgggaagttggcattgcgattccacatggatgggcgacagagtcatcaccaccagcacccgaacctgggctctgcccacctacaacaaccatctgtacaagcagatctccagccaatcaggagccagcaacgacaaccactactttggctacagcaccccttgggggtattttgacttcaacagattccactgccacttttcaccacgtgactggcaaagactcatcaacaacaactggggattccggcccaagagactcaacttcaagctctttaacattcaagtcaaggaggtcacgcagaatgacggtacgacgacgattgccaataaccttaccagcacggttcaggtgtttactgactcggagtaccagctcccgtacgtccccggctcggcgcatcaaggatgcctcccgccgttcccagcagacgtcttcatggtgccacagtatggatacctcaccctgaacaacgggagtcaggcagtaggacgctcttcattttactgcctggagtactttccttctcagatgcttcgtaccggaaacaactttaccttcagctacacctttgaggatgttcctttccacagcagctacgctcacagccagagtttggaccgtctcatgaatcctctcatcgaccagtacctgtattacttgagcagaacaaacactccaagcggaaccaccacgcagtccaggcttcagttttctcaggccggagcaagtgacattcgggaccagtctaggaactggcttcctggaccctgttaccgccagcagcgagtatcaaagacagctgcggacaacaacaacagtgaatactcgtggactggagctaccaagtaccacctcaatggcagagactctctggtgaatccgggcccggccatggccagccacaaggacgatgaagaaaagttttttcctcaaagcggggttctcatctttgggaagcaaggctcagagaaaacaaatgtggacattgaaaaggtcatgattacagacgaagaggaaatcagaaccaccaatcccgtggccacggagcagtatggttctgtatctaccaacctccagagcggcaacacacaagcagctactgcagatgtcaacacacaaggcgttcttccaggcatggtctggcaggacagagacgtgcacctgcaggggcctatctgggcaaagattccacacacggacggacattttcacccctctcccctcatgggcggatttggacttaaacaccctcctccacagattctcatcaagaacaccccggtacctgcaaatccttcgaccaccttcagtgcggcaaagtttgcttccttcatcacacagtattccacagggcaggtcagcgtggagatcgagtgggagctgcagaaggagaacagcaaacgctggaaccccgagatccagtacacttccaactacaacaaatctgttaatgtggactttactgtggacactaatggtgtgtattcagagcctcgccccattggcaccagatacctgactcgtaatctgtaattgcttgttaatcaataaaccgtttaattcgtttcagttgaactttggtctctgcgaagggcgaattcgtttaaaccctgcaggactagtccctttagtgagg

SEQ ID NO: 201 - DNA, 3162 bp, synthetic construct
  misc_feature 1..3162: note = source = /note="Description of Artificial Sequence: Synthetic polynucleotide"
  source 1..3162: mol_type = other DNA
gaattgaatttagcggccgcgaattcgcccttcgcagagaccaaagttcaactgaaacgaattaaacggtttattgattaacaagcaattacagattacgagtcaggtatctggtgccaatggggcgaggctctgaatacacgccattagtgtccacagtaaagtccacattaacagacttgttgtagttggaagtgtactgaatttcgggattccagcgtttgctgttttccttctgcagctcccactcgatctccacgctgacctgtcccgtggagtactgtgtgatgaaggaagcaaactttgccgcactgaaggtggtcgaaggattcgcaggtaccggggtgttcttgatgagaatctgtggaggagggtgtttaagtccgaatccacccatgaggggagaggggtgaaaatgtccgtccgtgtgtggaatctttgcccagatgggcccctgaaggtacacatctctgtcctgccagaccatgcctggaagaacgccttgtgtgttgacatctgcggtagctgcttgtctgttgcctctctggaggttggtagatacagaaccgtactgctccgtagccacgggattggttgtcctgatttcctcttcgtctgtaatcatgaccttttcaatgtccacatttgttttctctgagccttgcttcccaaagatgagaaccccgctctgaggaaaaaacttttcttcattgtccttgtggcttgccatggccgggcccggattcaccagagagtctctgccattgaggtggtacttggtagctccagtccacgagtattcactgttgttgttatccgcagatgtctttgatactcgctgctggcggtaacagggtccaggaagccagttcctagactggtcccgaatgtcactcgctccggcctgagaaaactgaagccttgactgcgtggtggttccacttggagtgtttgttgtgctcaagtaatacaggtactggtcgatgagaggattcatgagacggtccagactctggctgtgagcgtagccgctgtggaaaggaacgtcctcaaaagtgtagctgaaggtaaagttgtttccggtacgcagcatctgagaaggaaagtactccaggcagtaaaatgaagagcgtcctactgcctgactcccgttgttcagggtgaggtatccatactgtggcaccatgaagacgtctgctgggaacggcgggaggcatccttgatgcgccgagccgaggacgtacgggagctggtactccgagtcagtaaacacctgaaccgtgctggtaaggttattggcaatcgtcgtcgtaccgtcattctgcgtgacctctttgacttgaatgttaaagagcttgaagttgagtctcttgggtcggaatccccagttgttgttgatgagtctttgccagtcacgtggtgaaaagtggcagtggaatctgttgaagtcaaaatacccccaaggggtgctgtagccaaagtagtgattgtcgttcgaggctcctgattggctggaaatttgtttgtagaggtggttgttgtaggtgggcagggcccaggttcgggtgctggtggtgatgactctgtcgcccatccatgtggaatcgcaatgccaatttcccgaggaattacccactccgtcggcgccctcgttattgtctgccattggtgcgccactgcctgtagccatcgtattagttcccagaccagagggggctgctggtggctgtccgagaggctgggggtcaggtactgagtctgcgtctccagtctgaccaaaattcaatctttttcttgcaggctgctggcccgcctttccggttcccgaggaggagtctggctccacaggagagtgctctaccggcctcttttttcctggagccgtcttgacaggttccccaaccaggcccagaggttcaagaaccctctttttcgcctggaagactgctcgtccgaggttgcccccaaaagacgtatcttctttaaggcgctcctgaaactccgcgtcggcgtggttgtacttgaggtacgggttgtctccgctgtcgagctgccggtcgtaggctttgtcgtgctcgagggccgcggcgtctgcctcgttgaccggctctcccttgtcgagtccgttgaagggtccgaggtacttgtacccaggaagcacaagacccctgctgtcgtccttatgccgctctgcgggctttggtggtggtgggccaggtttgagcttccaccactgtcttattccttcagagagagtgtcctcgagccaatctggaagataaccatcggcagccatacctgatttaaatcatttattgttcaaagatgcagtcatccaaatccacattgaccagatcgcaggcagtgcaagcgtctggcacctttcccatgatatgatgaatgtagcacagtttctgatacgcctttttgacgacagaaacgggttgagattctgacacgggaaagcactctaaacagtctttctgtccgtgagtgaagcagatatttgaattctgattcattctctcgcattgtctgcagggaaacagcatcagattcatgcccacgtgacgagaacatttgttttggtacctgtctgcgtagttgatcgaagcttccgcgtctgacgtcgatggctgcgcaactgactcgcgcacccgtttgggctcacttatatctgcgtcactgggggcgggtcttttcttggctccaccctttttgacgtagaattcatgctccacctcaaccacgtgatcctttgcccaccggaaaaagtctttgacttcctgcttggtgaccttcccaaagtcatgatccagacggcgggtgagttcaaatttgaacatccggtcttgcaacggctgctggtgttcgaaggtcgttgagttcccgtcaatcacggcgcacatgttggtgttggaggtgacgatcacgggagtcgggtctatctgggccgaggacttgcatttctggtccacgcgcaccttgcttcctccgagaatggctttggccgactccacgaccttggcggtcatcttcccctcctcccaccagatcaccatcttgtcgacacagtcgttgaagggaaagttctcattggtccagttgacgcagcaagggcgaattcgtttaaacctgcaggactagtccctttagtgaggg

SEQ ID NO: 202 - DNA, 3164 bp, synthetic construct
  misc_feature 1..3164: note = source = /note="Description of Artificial Sequence: Synthetic polynucleotide"
  source 1..3164: mol_type = other DNA
gcgaattgaatttagcggccgcgaattcgcccttcgcagagaccaaagttcaactgaaacgaattaaacggtttattgattaacaagcaattacaaattacgagtcaggtatctggtgccaatggggcgaggctctgaatacacgccattagtgtccacagtaaagtccacattaacagacttgttgtagttggaagtgtactgaatttcgggattccagcgtttgctgttttccttctgcagctcccactcgatctccacgctgacctgtcccgtggagtactgtgtgatgaaggaagcaaactttgccgcactgaaggtggtcgaaggattcgcaggtaccggggtgttcttgatgagaatctgtggaggagggtgtttaggtccgaatccacccatgaggggagaggggtgaaaatgtccgtccgtgtgtggaatctttgcccagatgggcccctgaaggtacacatctctgtcctgccagaccatgcctggaagaacgccttgtgtgttgacatctgcggtagctgcttgtctgttgcctctctggaggttggtagatacagaaccatactgctccgtagccacgggattggttgtcctgatttcctcttcgtctgtaatcatgaccttttcaatgtccacatttgttttctctgagccttgcttcccaaagatgagaaccccgctctgaggaaaaaacttttcttcattgtccttgtggcttgccatggccgggcccggattcaccagagagtctctgccattgaggtggtacttggtagctccagtccacgagtattcactgttgttgttatccgcagatgtctttgatactcgctgctggcggtaacagggtccaggaagccagttcctagactggtcccgaatgtcactcgctccggcctgagaaaactgaagccttgactgcgtggtggttccacttggagtgtttgttgtgctcaagtaatacaggtactggtcgatgagaggattcatgagacggtccagactctggctgtgagcgtagctgctgtggaaaggaacgtcctcaaaagtgtagctgaaggtaaagttgtttccggtacgcagcatctgagaaggaaagtactccgggcagtaaaatgaagagcgtcctactgcctgactcccgttgctcagggtgaggtatccatactgtggcaccatgaagacgtctgctgggaacggcgggaggcatccttgatgcgccgagccgaggacgtacgggagctggtactccgagtcagtaaacacctgaaccgtgctggtaaggttattggcaatcgtcgtcgtaccgtcattctgcgtgacctctttgacttgaatgttaaagagcttgaagttgagtctcttgggtcggaatccccagttgttgttgatgagtctttgccagtcacgtggtgaaaagtggcagtggaatctgttgaagtcaaaatacccccaaggggtgctgtagccaaagtagtgattgtcgttcgaggctcctgattggctggaaatttgtctgtagaggtggttgttgtaggtgggcagggcccaggttcgggtgctggtggtgatgactctgtcgcccatccatgtggaatcgcaatgccgatttcccgaggaattacccactccgtcggcgccctcgttattgtctgccattggtgcgccactgcctgtagccatcgtattagttcccagaccagagggggctgctggtggctgtccgagaggctgggggtcaggtactgagtctgcgtctccagtctgaccaaaattcaatctttttcttgcaggctgctggcccgcctttccggttcccgaggaggagtctggctccacaggagagtgctctaccggcctcttttttcccggagccgtcttaacaggttccccaaccaggcccagaggttcaagaaccctctttttcgcctggaagactgctcgtccgaggttgcccccaaaagacgtatcttctttaaggcgctcctgaaactccgcgtcggcgtggttgtacttgaggtacgggttgtctccgctgtcgagctgccggtcgtaggctttgtcgtgctcgagggccgcggcgtctgcctcgttgaccggctctcccttgtcgagtccgttgaagggtccgaggtacttgtacccaggaagcacaagacccctgctgtcgtccttatgccgctctgcgggctttggtggtggtgggccaggtttgagcttccaccactgtcttattccttcagagagagtgtcctcgagccaatctggaagataaccatcggcagccatacctgatttaaatcatttattgttcaaagatgcagtcatccaaatccacattgaccagatcgcaggcagtgcaagcgtctggcacctttcccatgatatgatgaatgtagcacagtttctgatacgcctttttgacgacagaaacgggttgagattctgacacgggaaagcactctaaacagtctttctgtccgtgagtgaagcagatatttgaattctgattcattctctcgcattgtctgcagggaaacagcatcagattcatgcccacgtgacgagaacatttgttttggtacctgtctgcgtagttgatcgaagcttccgcgtctgacgtcgatggctgcgcaactgactcgcgcacccgtttgggcccacttatatctgcgtcactgggggcgggtcttttcttggctccaccctttttgacgtagaattcatgctccacctcaaccacgtgatcctttgcccaccggaaaaagtctttgacttcctgcttggtgaccttcccaaagtcatgatccagacggcgggtgagttcaaatttgaacatccggtcttgcaacggctgctggtgttcgaaggtcgttgagttcccgtcaatcacggcgcacatgttggtgttggaggtgacgatcacgggagtcgggtctatctgggccgaggacttgcatttctggtccacgcgcaccttgcttcctccgagaatggctttggccgactccacgaccttggcggtcatcttcccctcctcccaccagatcaccatcttgtcgacacagtcgttgaagggaaagttctcattggtccagttgacgcagcaagggcgaattcgtttaaacctgcaggactagtccctttagtgaggg

SEQ ID NO: 203 - DNA, 3163 bp, synthetic construct
  misc_feature 1..3163: note = source = /note="Description of Artificial Sequence: Synthetic polynucleotide"
  source 1..3163: mol_type = other DNA
accctcactaaagggactagtcctgcaggtttaaacgaattcgcccttgctgcgtcaactggagcaatgagaactttcccttcaacgactgtgtcgacaagatggtgatttggtgggaggaggggaagatgaccgccaaggtcgtggagtcggccaaagccattctcggaggaagcaaggtgcgcgtggaccagaaatgcaagtcctcggcccagatagatccgactcccgtgatcgtcacctccaacaccaacatgtgcgccgtgattgacgggaactcaacgaccttcgaacaccagcagccgttgcaagaccggatgttcaaatttgaactcacccgccgtctggatcatgactttgggaaggtcaccaagcaggaagtcaaagactttttccggtgggcaaaggatcacgtggttgaggtggagcatggattctacgtcaaaaagggtggagccaagaaaagacccgcccctagtgacgcagatataagtgagcccaaacgggtgcgcgagtcagttgcgcagccatcgacgtcggacgcggaagcttcgatcaactacgcggacaggtaccaaaacaaatgttctcgtcacgtgggcatgaatctgatgctgtttccctgcagacaatgcgagagaatgaatcaaaattcaaatatctgcttcactcacggacagaaagactgtttagagtgctttcccgtgtcagaatctcaacctgtttctgtcgtcaaaaaggcgtatcagaaactgcgctacattcatcatatcatgggaaaggtgccagacgcttgcactgcctgcgatctggtcaatgtggatttggatgactgcatctctgaacaataaatgatttaaatcaggtatggctgccgatggttatcttccagattggctcgaggacactctctctgaaggaataagacagtggtggaagctcaaacctggcccaccaccaccaaagcccgcagagcggcataaggacgacagcaggggtcttgtgcttcctgggtacaagtacctcggacccttcaacggactcgacaagggagagccggtcaacgaggcagacgccgcggccctcgagcacgacaaggcctacgaccggcagctcgacagcggagacaacccgtacctcaagtacaaccacgccgacgcggagtttcaggagcgtcttaaagaagatacgtcttttgggggcaacctcggacgagcagtcttccaggcgaaaaagagggttcttgaacctctgggcctggttgaggaacctgttaagacggctccgggaaaaaagaggccggtagagcactctcctgcggagccagactcctcctcgggaaccggaaaagcgggccagcagcctgcaagaaaaagactgaatttcggtcagactggagacgcagactccgtacctgacccccagcctctcggacagccaccagcagcccccacaagtttgggatctactacaatggctacaggcagtggcgcaccaatggcagacaataacgagggtgccgatggagtgggtaattcctcaggaaattggcattgcgattcccaatggctgggcgacagagtcatcaccaccagcacccgaacctgggccctgcccacctacaacaaccacctttacaagcaaatctccagccaatcaggagcctcaaacgacaaccactactttggctacagcaccccctgggggtattttgacttcaacagattccactgccacttttcaccacgtgactggcaaagactcatcaacaacaactggggattccgacccaagagactcaacttcaagctctttaacattcaagtcaaagaggtcacgcagaatgacggtacgacgacgattgccaataaccttaccagcacggttcaggtgtttactgactcggagtaccagctcccgtacgtcctcggctcggcgcatcaaggatgcctcccgccgtttccagcggacgtcttcatggtcccacagtatggatacctcaccctgaacaacgggagtcaggcggtaggacgctcttccttttactgcctggagtgctttccttctcagatgctgcgtactggaaacaactttcagttcagctacacttttgaagacgtgcctttccacagcagctacgctcacagccagagtttggatcggctgatgaatcctctgatcgaccagtacctgtattatctaaacagaacacaaacagctagtggaactcagcagtctcggctactgtttagccaagctggacccacaagcatgtctcttcaagctaaaaactggctgcctggaccgtgttatcgccagcagcgtttgtcaaagcaggcaaacgacaacaacaacagcaactttccctggactggagctaccaagtaccacctcaatggcagagactctttggtgaacccgggcccggccatggccagccacaaggacgatgaagaaaagtttttccccatgcatggaaccctaatatttggtaaagaaggaacaaatgctaccaacgcggaattggaaaatgtcatgattacagatgaagaggaaatcaggaccaccaatcccgtggctacagagcagtacggatatgtgtcaaataatttgcaaaactcaaatactgctgcaagtactgaaactgtgaatcaccaaggagcattacctggtatggtgtggcaggatcgagacgtgtacctgcagggacccatttgggccaagattcctcacaccgatggacactttcatccttctccactgatgggaggttttggactcaaacacccgcctcctcagattatgatcaaaaacactcccgttccagccaatcctcccacaaacttcagttctgccaagtttgcttccttcatcacacagtattccacgggacaggtcagcgtggagatcgagtgggagctgcagaaggagaacagcaaacgctggaatcccgaaattcagtacacttccaactacaacaaatctgttaatgtggactttactgtggacactaatggtgtgtattcagagcctcgccccattggcaccagatacctgactcgtaatctgtaattgcttgttaatcaataaaccgtttaattcgtttcagttgaactttggtctctgcgaagggcgaattcgcggccgctaaattcaattcgcc

SEQ ID NO: 204 - protein, 735 aa, synthetic construct
  REGION 1..735: note = source = /note="Description of Artificial Sequence: Synthetic polypeptide"
MAADGYLPDWLEDTLSEGIRQWWKLKPGPPPPKPAERHKDDSRGLVLPGYKYLGPFNGLYKGEPVDEADAAALEHDKAYDRQLDSGDNPYLKYNHADAEFQERLKEDTSFGGNLGRAVFQAKKRVLEPLGLVGEPVKTAPGKKRPVEHSPVEPDSSSGTGKAGNQPARKRLNFGQTGDADSVPDPQPLGQPPAAPSGLGSTTMATGSGAPVADNNEGADGVGNSSGNWHCDSQWLGDRVITTSTRTWALPTYNNHLYKQISSQSGASNDNHYFGYSTPWGYFDFNRFHCHFSPRDRQRLINNNWGFRPKRLNFKLFNIQVKEVTQNDGTTTIANNLTSTVQVFTDSGYQLPYVLGLAHQGCLPPFPADVFMVPQYGYLTLNNGSQAVGRSSFYCLEYFPSQMLRTGNNFQFSYTFEDVPFHSSYAHSQSLDRLMNPLIDQYLYYLNKTQSNSGTLQQSRLLFSQAGPTSMSLQAKNWLPGPCYRQQRLSKQANDNNNSNFPWTAATKYHLNGRDSLVNPGPAMASHKDDEEKFFPMHGTLIFGKQGTNANDADLDNVMITDEEEIRTTNPVATEQYGYVSNNLQNSNTGPTTGTVNHQGALPGMVWQDRDVYLQGPIWAKIPHTDGHFHPSPLMGGFGLKHPPPQIMIKNTPVPANPPTNFSSAKFASFITQYSTGQVSVEIEWELQKEDSKRWNPEIQYTSNYNKPVNVDFTVDTNGVYSEPRPIGTRYLTRNL

SEQ ID NO: 205 - DNA, 2208 bp, synthetic construct
  misc_feature 1..2208: note = source = /note="Description of Artificial Sequence: Synthetic polynucleotide"
  source 1..2208: mol_type = other DNA
atggctgccgatggttatcttccagattggctcgaggacactctctctgaaggaataagacagtggtggaagctcaaacctggcccaccaccaccaaagcccgcagagcggcataaggacgacagcaggggtcttgtgcttcctgggtacaagtacctcggacccttcaacggactctacaagggagagccggtcgacgaggcagacgccgcggccctcgagcacgacaaggcctacgaccggcagctcgacagcggagacaacccgtacctcaagtacaaccacgccgacgcggagtttcaggagcgccttaaagaagatacgtcttttgggggcaacctcggacgagcagtcttccaggccaaaaagagggttcttgaacctctgggcttggttggggagcctgttaaaacggctccgggaaaaaagaggccggtagagcactctcctgtggagccagactcctcctcgggaaccggaaaagcgggcaaccagcctgcaagaaaaagattgaattttggtcagactggagacgcagactccgtacctgacccccagcctctcggacagccaccagcagccccctctggtctgggatctactacaatggctacaggcagtggcgcaccagtggcagacaataacgagggtgccgatggagtgggtaattcctcaggaaattggcattgcgattcccaatggctgggcgacagagtcatcaccaccagcacccgaacctgggctctgcccacctacaataaccacctctacaagcaaatctccagccaatcaggagcctcaaacgacaaccactactttggctacagcaccccctgggggtattttgacttcaacagattccactgccacttttcaccacgtgaccggcaaagactcatcaacaacaactggggattccgaccaaaaagactcaacttcaagctctttaacattcaagtcaaagaggtcacgcagaatgacggtacgacgacgattgccaataaccttaccagcacggttcaggtgtttactgactcggggtaccagctcccgtacgtcctcggcttggcgcatcaaggatgcctcccgccgttcccagcagacgtcttcatggtgccacagtatggatacctcaccctgaacaacgggagtcaggcggtaggacgctcttccttttactgcctggagtactttccttctcagatgctgcgtactggaaacaactttcagttcagctacacctttgaagacgttcctttccacagcagctacgctcacagccagagtctggatcggctgatgaatcctctgatcgaccagtacctgtattatctgaacaagacacaatcaaatagtggaactcttcagcagtctcggctactgtttagccaagctggacccaccagcatgtctcttcaagctaaaaactggctgcctggaccttgctacagacagcagcgtctgtcaaagcaggcaaacgacaacaacaacagcaactttccctggactgcggctacaaagtatcatctaaatggccgggactcgttggttaatccaggaccagctatggccagccacaaagacgatgaagaaaagtttttccccatgcatggaaccctgatatttggtaaacaaggaacaaatgctaacgacgcggatttggacaatgtcatgattacagatgaagaagaaatccgcaccaccaatcccgtggctacggagcagtacggatatgtgtcaaataatttgcaaaactcaaatactggtccaactactggaactgtcaatcaccaaggagcgttacctggtatggtgtggcaggatcgagacgtgtacctgcagggacccatttgggccaagattcctcacaccgatggacactttcatccttctccacttatgggaggttttggactcaaacacccacctcctcagatcatgattaaaaacactcccgttccagccaatcctcccacaaacttcagttctgccaagtttgcttctttcatcacacagtattccacgggacaagtcagcgtggagatcgagtgggagctgcagaaggaggacagcaaacgctggaaccccgagatccagtacacttccaactataacaaacctgttaatgtggactttactgtggacactaatggtgtgtattcagagcctcgccccattggcaccagatacctgactcgtaatctgtaa

SEQ ID NO: 206 - DNA, 3161 bp, synthetic construct
  misc_feature 1..3161: note = source = /note="Description of Artificial Sequence: Synthetic polynucleotide"
  source 1..3161: mol_type = other DNA
cgaattgatttagcggccgcgaattcgcccttcgcagagaccaaagttcaactgaaacgaattaaacggtttattgattaacaagcaattacagattacgagtcaggtatctggtgccaatggggcgaggctctgaatacacaccattagtgtccacagtaaagtccacattaacagatttgttgtagttggaagtgtactggatctcgggattccagcgtttgctgttctccttctgtagctcccactcgatctccacgctgacccgccccgtggaatactgtgtgatgaaggaagcaaactttgccgcactgaaggtggtcgaaggattcgcaggtaccggggtgtttttgatgagaatctgtggaggagggtgtttaagtccgaatccgcccatgaggggagaggggtgaaaatgtccgtccgtgtgcggaatctttgcccagataggcccctgcaggtacacgtctctgtcctgccagaccatgcctggaagaacgccttgtgtgttgacatctgcagtagatgcttgtgtgttgccgctctggaggttggtagatacagaaccatactgctccgtggccacgggattggtggttctgatttcctcttcgtctgtaatcatgaccttttcaatgtccacatttgttttctctgatccttgttttccaaagatgagaaccccgctctgaggaaaaaacttttcttcatcgtccttgtggctggccattgccgggcccggattcaccagagagtctctgccattgaggtggtacttggtagctccaatccacgagtattcactgttgttgttgtccgcagatgtctttgatactcgctgctggcggtaacagggtccaggaagccagttcctagactgatcccgaatgtcactcgctccggcctgagaaaactgaagcctggactgcgtggtggttccgcttggagtgtttgttctgctcaagtaatacaggtactggtcgatgagaggattcatgagacggtccaaactctggctgtgagcgtagctgctgtggaaaggaacatcctcaaaggtgtagctgaaggtaaagttgtttccggtacgcagcatctgagaagggaagtactccaggcagtaaaatgaagagcgtcctactgcctgactcccgttgttcagggtgaggtatccatactgtggcaccatgaagacgtctgctgggaacggcgggaggcatccttgatgcgccgagccgaggacgtacgggagctggtactccgagtcagtaaacacctgaaccgtgctggtaaggttattggcaatcgtcgtcgtaccatcattctgcgtgacctctctgacttgaatgttaaagagcttgaagttgagtctcttgggccggaatccccagttgttgttgatgagtctttgccagtcacgtggtgaaaagtggcagtggaatctgttgaagtcaaaatacccccaaggggtgctgtagccaaagtagtggttgtcgttgctggctcctgattggctggaaatctgcttgtacagatggttgttgtaggtgggcagagcccaggttcgggtgctggtggtgatgactctgtcgcccatccatgtggaatcgcaatgccaatttcccgaggaattacccactccgtcggcgccatcgttattgtctgccattggtgcgccactgcctgtagccatcgtattagttcccagaccagagggggctgctggtggctgtccgagaggctgggggtcaggtacggagtctgcgtctccagtctgaccgaaattcaatctctttcttgcaggctggttgcccgcttttccggttcccgaggaggagtctggctccacaggagagtgctctaccggcctcttttttcccggagccgtcttaacaggctcctcaaccaggcccagaggttcaagaaccctcttttttgcctggaagactgctcgtccgaggttgcccccaaaagacgtatcttctttaaggcgctcctgaaactccgcgtcggcgtggtcgtacttgaggtacgggttgtctccgctgtcgagctgccggtcgtaggccttgtcgtgctcgagggccgcggcgtctgcctcgttgaccggctctcccttgtcgagtccgttgaagggtccgaggtacttgtacccaggaagcacaagacccctgctgtcgtccttatgccgctctgcgggctttggtggtggtgggccaggtttgagcttccaccactgtcttattccttcagagagagtgtcctcgagccaatctggaagataaccatcggcagccatacctgatttaaatcatttattgttcagagatgcagtcatccaaatccacattgaccagatcgcaggcagtgcaagcgtctggcacctttcccatgatatgatgaatgtagcaaagtttctgatacgcctttttgacgacagaaacgggttgagattctgacacgggaaagcactctaaacagtctttctgtccgtgagtgaagcagatatttgaattctgattcattctctcgcattgtctgcagggaaacagcatcagattcatgcccacgtgacgagaacatttgttttggtacctgtccgcgtagttgatcgaagcttccgcgtctgacgtcgatggctgcgcaactgactcgcgcgcccgtttgggctcacttatatctgcgtcactgggggcgggtcttttcttggctccaccctttttgacgtagaattcatgctccacctcaaccacgtgatcctttgcccaccggaaaaagtctttcacttcctgcttggtgaccttcccaaagtcatgatccagacggcgggttagttcaaatttgaacatccggtcttgcaacggctgctggtgttcgaaggtcgttgagttcccgtcaatcacggcgcacatgttggtgttggaggtggcgatcacgggagtcgggtctatctgggccgaggacttgcacttttggtccacgcgcaccttgcttcctccgagaatggcttcggccgattccacgaccttggcggtcatctttccctcctcccaccagatcaccatcttgtcgacacagtcgttgaagggaaagttctcattggtccagttgacgcagcaagggcgaattcgtttaaacctgcaggaactagtcccttagtgagg

SEQ ID NO: 207 - protein, 735 aa, synthetic construct
  REGION 1..735: note = source = /note="Description of Artificial Sequence: Synthetic polypeptide"
MAADGYLPDWLEDTLSEGIRQWWKLKPGPPPPKPAERHKDDSRGLVLPGYKYLGPFNGLYKGEPVNEADAAALEHDKAYDRQLDSGDNPYLKYNHAGAEFQERLKEDTSFGGNLGRAVFQAKKRVLEPLGLVEEPVKTAPGKKRPVEHSPVEPDSSSGTGKAGNQPARKRLNFGQTGDADSVPDPQPLGQPPAAPSGLGSTTMATGSGAPVADNNEGADGVGNSSGNWHCDSQWLGDRVITTSTRTWALPTYNNHLYKQISSQSGASNDNHYFGYSTPWGYFDFNRFHCHFSPRDWQRLINNNWGFRPKRLNFKLFNIQVKEVTQNDGTTTIANNLTSTVQVFTDSEYQLPYVLGSAHQGCLPPFPADVFMVPQYGYLTLNNGSQAVGRSSFYCLEYFPSQMLRTGNNFQFSYTFEDVPFHSSYAHSQSLDRLMNPLIDQYLYYLNKTQSNSGTLQQSRLLFSQAGPTSMSLQAKNWLPGPCYRQQRLSKQANDNNNSNFPWTAATKYHLNGRDSLVNPGPAMASHKDDEEKFFPMHGTLIFGKQGTNANDADLDNVMITDEEEIRTTNPVATEQYGYVSNNLQDSNTGPTTGTVNHQGALPGMVWQDRDVYLQGPIWAKIPHTDGHFHPSPLMGGFGLKHPPPQIMIKNTPVPANPPTNFSSAKFASFITQYSTGQVSVEIEWELQKENSKRWNPEIQYTSNYNKSVNVDFTVDTNGVYSEPRPIGTRYLTRNL

SEQ ID NO: 208 - DNA, 2208 bp, synthetic construct
  misc_feature 1..2208: note = source = /note="Description of Artificial Sequence: Synthetic polynucleotide"
  source 1..2208: mol_type = other DNA
atggctgccgatggttatcttccagattggctcgaggacactctctctgaaggaataagacagtggtggaagctcaaacctggcccaccaccgccaaagcccgcagagcggcataaggacgacagcaggggtcttgtgcttcctgggtacaagtacctcggacccttcaacggactctacaagggagagccggtcaacgaggcagacgccgcggccctcgagcacgacaaggcctacgaccggcagctcgacagcggagacaacccgtacctcaagtacaaccacgccggcgcggagtttcaggagcgccttaaagaagatacgtcttttgggggcaacctcggacgagcagtcttccaggccaaaaagagggttcttgaacctctgggcttggttgaggagcctgttaaaacggctccgggaaaaaagaggccggtagagcactctcctgtggagccagactcctcctcgggaaccggaaaagcgggcaaccagcctgcaagaaaaagattgaattttggtcagactggagacgcagactccgtacctgacccccagcctctcggacagccaccagcagccccctctggtctgggatctactacaatggctacaggcagtggcgcaccagtggcagacaataacgagggtgccgatggagtgggtaattcctcaggaaattggcattgcgattcccaatggctgggcgacagagtcatcaccaccagcacccgaacctgggctctgcccacctacaacaaccacctctacaagcaaatctccagccaatcaggagcctcaaacgacaaccactactttggctacagcaccccctgggggtattttgacttcaacagattccactgccacttttcaccacgtgactggcaaagactcatcaacaacaactggggattccgaccaaagagactcaacttcaagctctttaacattcaagtcaaagaggtcacgcagaatgacggtacgacgacgattgccaataaccttaccagcacggttcaggtgtttactgactcggagtaccagctcccgtacgtcctcggctcggcgcatcaaggatgcctcccgccgttcccagcagacgtcttcatggtgccacagtatggatacctcaccctgaacaacgggagtcaggcggtaggacgctcttccttttactgcctggagtactttccttctcagatgctgcgtactggaaacaactttcagttcagctacacctttgaagacgttcctttccacagcagctacgctcacagccagagtctggatcggctgatgaatcctctgatcgaccagtacctgtattatctgaacaagacacaatcaaatagtggaacccttcagcagtctcggctactgtttagccaagctggacccaccagcatgtctcttcaagctaaaaactggctgcctggaccttgctacagacagcagcgtctgtcaaagcaggcaaacgacaacaacaacagcaactttccctggactgcggctacaaagtatcatctaaatggccgggactcgttggttaatccaggaccagctatggccagccacaaagacgatgaagaaaagtttttccccatgcatggaaccctgatatttggtaaacaaggaacaaatgctaacgacgcggatttggacaatgtcatgattacagatgaagaagaaatccgcaccaccaatcccgtggctacggagcagtacggatatgtgtcaaataatttgcaagactcaaatactggtccaactactggaactgtcaatcaccaaggagcgttacctggtatggtgtggcaggatcgagacgtgtacctgcagggacccatttgggccaagattcctcacaccgatggacactttcatccttctccacttatgggaggttttggactcaaacacccacctcctcagatcatgattaaaaacactcccgttccagccaatcctcccacaaacttcagttctgccaagtttgcttctttcatcacacagtattccacgggacaagtcagcgtagagatcgagtgggagctgcagaaggagaacagcaaacgctggaaccccgagatccagtacacttccaactataacaaatctgttaatgtggactttactgtggacactaatggtgtgtattcagagcctcgccccattggcaccagatacctgactcgtaatctgtaa

SEQ ID NO: 209 - protein, 738 aa, synthetic construct
  REGION 1..738: note = source = /note="Description of Artificial Sequence: Synthetic polypeptide"
MAADGYLPDWLEDNLSEGIREWWDLKPGAPKPKANQQKQDDGRGLVLPGCKYLGPFNGLDKGEPVNAADAAALEHDKAYDQQLKAGDNPYLRYNHADAEFQERLQEDTSFGGNLGRAVFQAKKRVLEPLGLVEEGAKTAPGKKRPVEPSPQRSPDSSTGIGKTGQQPAKKRLNFGQTGDSESVPDPQPIGEPPAGPSGLGSGTMAAGGGAPMADNNEGADGVGSSSGNWHCDSTWLGDRVITTSTRTWALPTYNNHLYKQISNGTSGGSTNDNTYFGYSTPWGYFDFNRFHCHFSPRDWQRLINNNWGFRPKRLNFKLFNIQVKEVTQNEGTKTIANNLTSTIQVFTDSEYQLPYVLGSAHQGCPPPFPADVFMIPQYGYLTLNNGSQAVGRSSFYCLEYFPSQMRRTGNNFEFSYQFEDVPFHSSYAHSQSLDRLMNPLIDQYLYYLSRTQSTGGTAGTQQLLFSQAGPNNMSAQAKNWLPGPCYRQQRVSTTLSQNNNSNFAWTGATKYHLNGRDSLVNPGVAMATHKDDEERFFPSSGVLMFGKQGAGKDNVDYSSVMLTSEEEIKTTNPVATEQYGVVADNLQQQNAAPIVGAVNSQGALPGMVWQNRDVYLQGPIWAKIPHTDGNFHPSPLMGGFGLKHPPPQILIKNTPVPADPPTTFSQAKLASFITQYSTGQVSVEIEWELQKENSKRWNPEIQYTSNYNKSVNVDFTVDTNGVYSEPRPIGTRYLTRNL

SEQ ID NO: 210 - DNA, 2217 bp, synthetic construct
  misc_feature 1..2217: note = source = /note="Description of Artificial Sequence: Synthetic polynucleotide"
  source 1..2217: mol_type = other DNA
atggctgccgatggttatcttccagattggctcgaggacaacctctctgagggcattcgcgagtggtgggacttgaaacctggagccccgaaacccaaagccaaccagcaaaagcaggacgacggccggggtctggtgcttcctggctgcaagtacctcggacccttcaacggactcgacaagggggagcccgtcaacgcggcggacgcagcggccctcgagcacgacaaggcctacgaccagcagctcaaagcgggtgacaatccgtacctgcggtataaccacgccgacgccgagtttcaggagcgtctgcaagaagatacgtcttttgggggcaacctcgggcgagcagtcttccaggccaagaagcgggttctcgaacctctcggtctggttgaggaaggcgctaagacggctcctggaaagaagagaccggtagagccatcaccccagcgttctccagactcctctacgggcatcggcaagacaggccagcagcccgcgaaaaagagactcaactttgggcagactggcgactcagagtcagtgcccgaccctcaaccaatcggagaaccccccgcaggcccctctggtctgggatctggtacaatggctgcaggcggtggcgctccaatggcagacaataacgaaggcgccgacggagtgggtagttcctcaggaaattggcattgcgattccacatggctgggcgacagagtcatcaccaccagcacccgaacctgggccctccccacctacaacaaccacctctacaagcaaatctccaacgggacatcgggaggaagcaccaacgacaacacctacttcggctacagcaccccctgggggtattttgactttaacagattccactgccacttctcaccacgtgactggcagcgactcatcaacaacaactggggattccggcccaagagactcaacttcaagctcttcaacatccaggtcaaggaggtcacgcagaatgaaggcaccaagaccatcgccaataaccttaccagcacgattcaggtctttacggactcggaataccagctcccgtacgtcctcggctctgcgcaccagggctgcccgcctccgttcccggcggacgtcttcatgattcctcagtacgggtacctgactctgaacaacggcagtcaggccgtgggccgttcctccttctactgcctggagtactttccttctcaaatgcggagaacgggcaacaactttgagttcagctaccagtttgaggacgtgccttttcacagcagctacgcgcatagccaaagcctggaccggctgatgaaccccctcatcgaccagtacctgtactacctgtctcggactcagtccacgggaggtaccgcaggaactcagcagttgctattttctcaggccgggcctaataacatgtcggctcaggccaaaaactggctacccgggccctgctaccggcagcaacgcgtctccacgacactgtcgcaaaataacaacagcaactttgcttggaccggtgccaccaagtatcatctgaatggcagagactctctggtaaatcccggtgtcgctatggcaacgcacaaggacgacgaagagcgattttttccatccagcggagtcttgatgtttgggaaacagggagctggaaaagacaacgtggactatagcagcgttatgctaaccagtgaggaagaaatcaaaaccaccaacccagtggccacagaacagtacggcgtggtggccgataacctgcaacagcaaaacgccgctcctattgtaggggccgtcaacagtcaaggagccttacctggcatggtctggcagaaccgggacgtgtacctgcagggtcctatctgggccaagattcctcacacggacggcaactttcatccttcgccgctgatgggaggctttggactgaaacacccgcctcctcagatcctgattaagaatacacctgttcccgcggatcctccaactaccttcagtcaagccaagctggcgtcgttcatcacgcagtacagcaccggacaggtcagcgtggaaattgaatgggagctgcagaaagagaacagcaagcgctggaacccagagattcagtatacttccaactataacaaatctgttaatgtggactttactgtggacactaatggtgtgtattcagagcctcgccccattggcaccagatacctgactcgtaatctgtaa

SEQ ID NO: 211 - DNA, 3167 bp, synthetic construct
  misc_feature 1..3167: note = source = /note="Description of Artificial Sequence: Synthetic polynucleotide"
  source 1..3167: mol_type = other DNA
attgaatttagcggccgcgaattcgcccttcgcagagaccaaagttcaactgaaacgaattaaacggtttattgattaacaagcaattacagattacgagtcaggtacctggtgccaatggggcgaggctctgaatacacaccattagtgtccacagtaaagtccacattaacagatttgttgtagttggaagtgtactgaatctcgggattccagcgtttgctgttctccttctgcagctcccactcgatctccacgctgacctgccccgtggagtactgtgtaatgaaggaagcaaactttgccgcactgaaggtagtcgaaggattcgcaggtaccggggtgttcttgatgagaatctgcgggggagggtgtttaagtccgaatccgcccatgaggggagaggggtgaaaatgtccgtccgtgtgtggaatctttgcccagatgggcccctgcaggtacacgtctctgtcctgccacaccatgcctggaagaacgccttgtgtgttgacatctgaggtagctgcttgtgtgttgccgctctggaggttggtagatacagaaccatactgctccgtagccacgggattggtggtcctgatttcctcttcgtctgtaatcatgaccttttcaatgtccacattagtttttcccgagtcttgttttccaaagatgagaaccccgctctgaggaaaaaacttttcttcatcgtccttgtggctggccatggccgggcccggattcaccagagagtctcttccattaaggtggtacttggtagctccagtccacgagtattcactgttgttgttatccgcagatgtctttgatactcgctgctggcggtaacagggtccaggaagccagttcctagactggtcccgaatgtcacttgctccggcctgagaaaactgaagccttgactgcgtggtggttccgcttggagtgtttgttctgctcaagtaatacaggtactggtcgatgagaggattcatgagacggtccaaactctggctgtgggcgtagctgctgtggaaaggaacgtcctcaaaggtgtagctgaaggtaaagttgtttccggtacgcagcatctgagaaggaaagtactccaggcagtaaaatgaagagcgtcctactgcctgactcccgttgttcagggtgaggtatccatactgtggcaccatgaagacgtctgctgggaacggcgggaggcatccttgatgcgccgagccgaggacgtacgggagctggtactccgagtcagtaaacacctgaaccgtgctggtaaggttattggcaatcgtcgtcgtaccgtcattctgcgtgacctccttgacttgaatgttaaagagcttgaagttgagtcttttgggccggaatccccaattgttgttgatgagtctttgccagtcacgtggcgaaaagtggcagtggaatctgttgaagtcaaaatacccccaaggggtgctgtagccaaagtagtggttgtcgtttgaggctcctgattggctggaaatctgcttgtagaggtggttgttgtaggtgggcagagcccaggtgcgggtgctggtggtgatgactctgtcgcccatccatgtggaatcgcaatgccaatttcccgaggaattacccactccgtcggcgccctcgttattgtctgccattggtgcgccactgcctgtagccatcgtattagttcccagaccagagggggctgctggtggctgtccgagaggctgggggtcaggtacggagtctgcgtctccagtctgaccgaaattcaatctctttcttgcaggctgctggcccgcttttccggttcccgaggaggagtctggctccgcaggagagtgctctaccggcctcttttttcccggagccgtcttaacaggttcctcaaccaggcccagaggttcaagaaccctctttttcgcctggaagactgctcgtccgaggttgcccccaaaagacgtatcttctttaagacgctcctggaactccgcgtcggcgtggttgtacttggggtacgggttgtctccgctgtcgagctgccggtcgtaggccttgtcgtgctcgagggccgcggcgtctgcctcgttgaccggctctcccttgtcgagtccgttgaagggtccaaggtacttgtacccaggaagcacaagacccctgctgtcgtccttatgccgctctgcgggctttggtggtggtgggccaggtttgagcttccaccactgtcttattccttcagagagagtgtcctcgagccaatctggaagataaccatcggcagccatacctgatttaaatcatttattgttcagagatgcagtcatccaaatccacattgaccagatcgcaagcagtgcaagcgtctggcacctttcccatgatatgatgaatgtagcacagtttctgatacgcctttttgacgacagaaacgggttgagattctgacacgggaaagcactctaaacagtctttctgtccgtgagtgaagcagatatttgaattctgattcattctctcgcattgtctgcagggaaacagcatcagattcatgcccacgtgacgagaacatttgttttggtacctgtccgcgtagttgattgaagcttccgcgtctgacgtcgatggctgcgcaactgactcgcgcgcccgtttgggctcacttatatctgcgtcactgggggcgggtctttttttggctccaccctttttgacgtagaattcatgctctacctcaaccacgtgatcctttgcccaccggaaaaagtctttgacttcctgcttggtgaccttcccaaagtcatgatccagacggcgggtgagttcaaatttgaacatccggtcttgcaacggctgctggtgttcgaaggtcgttgagttcccgtcaatcactgcgcacatgttggtgttggaggtgacaatcacgggagtcgggtctatctgggccgaggacttgcatttctggtccacgcgcaccttgcttcctccgagaatggctttggccgactccacgaccttggcggtcatcttcccctcctcccaccagatcaccatcttgtcgacgcaatcattgaaaggaaagttctcattggtccagttgacgcagccgtagaaagggcgaattcgtttaaacctgcaggactagtccctttagtgagggt

SEQ ID NO: 212 - DNA, 3161 bp, synthetic construct
  misc_feature 1..3161: note = source = /note="Description of Artificial Sequence: Synthetic polynucleotide"
  source 1..3161: mol_type = other DNA
aattgaatttagcggccgcgaattcgcccttcgcagagaccaaagttcaactgaaacgaattaaacggtttattgattaacaagcaattacagattacgagtcaggtatctggtgccaatggggcgaggctctgaatacacaccattagtgtccacagtaaagtccacattaacagatttgttgtagttggaagtgtactgaatctcgggattccagcgtttgctgttctccttctgcagctcccactcgatctccacgctgacctgccccgtggagtactgtgtaatgaaggaagcaaactttgccgcactgaaggtagtcgaaggattcgcaggtaccggggtgttcttgatgagaatctgcgggggagggtgtttaagtccgaatccgcccatgaggggagaggggtgaaaatgtccgtccgtgtgtggaatctttgcccagatgggcccctgcaggtacacgtctctgtcctgccacaccatgcctggaagaacgccttgtgtgttgacatctgaggtagctgcttgtgtgttgccgctctggaggttggtagatacagaaccatactgctccgtagccacgggattggtggtcctgatttcctcttcgtctgtaatcatgaccttttcaatgtccacattagtttttcccgagtcttgttttccaaagatgagaaccccgctctgaggaaaaaacttttcttcatcgtccttgtggctggccatggccgggcccggattcaccagagagtctcttccattaaggtggtacttggtagctccagtccacgagtattcactgttgttgttatccgcagatgtctttgatactcgctgctggcggtaacagggtccaggaagccagttcctagactggtcccgaatgtcacttgctccggcctgagaaaactgaagccttgactgcgtggtggttccgcttggagtgtttgttctgctcaagtaatacaggtactggtcgacgagaggattcatgagacggtccaaactctggctgtgggcgtagctgctgtggaaaggaacgtcctcaaaggtgtagctgaaggtaaagttgtttccggtacgcagcatctgagaaggaaagtactccaggcagtaaaatgaagagcgtcctactgcctgactcccgttgttcagggtgaggtatccatactgtggcaccatgaagacgtctgctgggaacggcgggaggcatccttgatgcgccgagccgaggacgtacgggagctggtactccgagtcagtaaacacctgaaccgtgctggtaaggttattggcaatcgtcgtcgtaccgtcattctgcgtgacctccttgacttgaatgttaaagagcttgaagttgagtcttttgggccgggatccccaattgttgttgatgagtctttgccagtcacgtggcgaaaagtggcagtggaatctgttgaagtcaaaatacccccaaggggtgctgtagccaaagtagtggttgtcgtttgaggctcctgattggctggaaatctgcctgtagaggtggttgttgtaggtgggcagagcccaggtgcgggtgctggtggtgatgactctgtcgcccatccatgtggaatcgcaatgccaatttcccgaggaattacccactccgtcggcgccctcgttattgtctgccattggtgcgccactgcctgtagccatcgtattagttcccagaccagagggggctgctggtggctgtccgagaggctgggggtcaggtacggagtctgcgtctccagtctgaccgaaattcaatctccttcttgcaggctgctggcccgcttttccggttcccgaggaggagtctggctccgcaagagagtgctctaccggcctcttttttcccggagccgtcttaacaggttcctcaaccaggcccagaggttcaagaaccctctttttcgcctggaagactgctcgtccgaggttgcccccaaaagacgtatcttctttaagacgctcctggaactccgcgtcggcgtggttgtacttgaggtacgggttgtctccgccgtcgagctgccggtcgtaggccttgtcgtgctcgagggccgcggcgtctgcctcgttgaccggctctcccttgtcgagtccgttgaagggtccaaggtacttgtacccaggaagcacaagacccctgctgtcgtccttatgccgctctgcgggctttggtggtggtgggccaggtttgagcttccaccactgtcttattccttcagagagagtgtcctcgagccaatctggaagataaccatcggcagccatacctgatttaaatcatttattgttcagagatgcagtcatccaaatccacattgaccagatcgcaagcagtgcaagcgtctggcacctttcccatgatatgatgaatgtagcacagtttctgatacgcctttttgacgacagaaacgggttgagattctgacacgggaaagcactctaaacagtctttctgtccgtgagtgaagcagatatttgaattctgattcattctctcgcattgtctgcagggaaacagcatcagattcatgcccacgtgacgagaacatttgttttggtacctgtccgcgtagttgattgaagcttccgcgtctgacgtcgatggctgcgcaactgactcgcgcgcccgtttgggctcacttatatctgcgtcactgggggcgggtctttttttggctccaccctttttgacgtagaattcatgctctacctcaaccacgtgatcctttgcccaccggaaaaagtctttgacttcctgcttggtgaccttcccaaagtcatgatccagacggcgggtgagttcaaatttgaacatccggtcttgcaacggctgctggtgttcgaaggtcgttgagttcccgtcaatcactgcgcacatgttggtgttggaggtgacaatcacgggagtcgggtctatctgggccgaggacttgcatttctggtccacgcgcaccttgcttcctccgagaatggctttggccgactccacgaccttggcggtcatcttcccctcctcccaccagatcaccatcttgtcgacgcaatcattgaaaggaaagttctcattggtccagttgacgcagcaagggcgaattcgtttaaacctgcaggactagtccctttagtgaggg

SEQ ID NO: 213 - DNA, 3172 bp, synthetic construct
  misc_feature 1..3172: note = source = /note="Description of Artificial Sequence: Synthetic polynucleotide"
  source 1..3172: mol_type = other DNA
gattgaatttagcggccgcgaattcgcccttgctgcgtcaactggaccaatgagaactttcccttcaacgattgcgtcgacaagatggtgatctggtgggaggagggcaagatgaccgccaaggtcgtggagtccgccaaggccattctgggtggaagcaaggtgcgcgtggaccaaaagtgcaagtcatcggcccagatcgaccccacgcccgtgatcgtcacctccaacaccaacatgtgcgccgtgatcgacgggaacagcaccaccttcgagcaccagcagcccctgcaggaccgcatgttcaagttcgagctcacccgccgtctggagcacgactttggcaaggtgaccaagcaggaagtcaaagagttcttccgctgggctcaggatcacgtgactgaggtggcgcatgagttctacgtcagaaagggcggagccaccaaaagacccgcccccagtgacgcggatataagcgagcccaagcgggcctgcccctcagttgcggagccatcgacgtcagacgcggaagcaccggtggactttgcggacaggtaccaaaacaaatgttctcgtcacgcgggcatgcttcagatgctgtttccctgcaagacatgcgagagaatgaatcagaatttcaacgtctgcttcacgcacggggtcagagactgctcagagtgcttccccggcgcgtcggaatctcaacccgtcgtcagaaaaaagacgtatcagaaactgtgcgcgattcatcatctgctggggcgggcacccgagattgcgtgttcggcctgcgatctcgtcaacgtggacttggatgactgtgtttctgagcaataaatgacttaaaccaggtatggctgctgacggttatcttccagattggctcgaggacaacctctctgagggcattcgcgagtggtgggacctgaaacctggagcccccaagcccaaggccaaccagcagaagcaggacgacggccggggtctggtgcttcctggctacaagtacctcggacccttcaacggactcgacaagggggagcccgtcaacgcggcggacgcagcggccctcgagcacgacaaggcctacgaccagcagctcaaagcgggtgacaatccgtacctgcggtataaccacgccgacgccgagtttcaggagcgtctgcaagaagatacgtcttttgggggcaacctcgggcgagcagtcttccaggccaagaagcgggttctcgaacctctcggtctggttgaggaagctgctaagacggctcctggaaagaagagaccggtagaaccgtcacctcagcgttcccccgactcctccgcgggcatcggcaagaaaggccagcagcccgctaaaaagagactgaactttggtcagactggcgactcagagtcagtccccgaccctcaaccaatcggagaaccaccagcaggcccctctggtctgggatctggtacaatggctgcaggcggtggcgctccaatggcagacaataacgaaggcgccgacggagtgggtagttcctcaggaaattggcattgcgattccacatggctgggcgacagagtcatcaccaccagcacccgaacctgggccctgcccacctacaacaaccacctctacaagcaaatatccaatgggacatcgggaggaagcaccaacgacaacacctacttcggctacagcaccccctgggggtattttgacttcaacagattccactgccacttctcaccacgtgactggcagcgactcatcaacaacaactggggattccggccaaaaagactcagcttcaagctcttcaacatccaggtcaaggaggtcacgcagaatgaaggcaccgagaccatcgccaataaccttaccagcacgattcaggtatttacggactcggaataccagctgccgtacgtcctcggctccgcgcaccagggctgcctgcctccgttcccggcggacgtcttcatgattccccagtacggctaccttacactgaacaatggaagtcaagccgtaggccgttcctccttctactgcctggaatattttccatctcaaatgctgcgaactggaaacaattttgaattcagctacaccttcgaggacgtgcctttccacagcagctgcgcacacagccagagctcggaccgactgatgaatcctctcatcgaccagtacctgtactacttatccagaactcggtccacaggaggaactcaaggtacccagcaattgttattttctcaagctgggcctgcaaacatgtcggctcaggctaagaactggctacctggaccttgctaccggcagcagcgagtctctacgacactgtcgcaaaacaacaacagcaactttgcttggactggtgccaccaaatatcacctgaacggaagagactctttggtaaatcccggtgtcgccatggcaacccacaaggacgacgaggaacgcttcttcccgtcgagtggagtcctgatgtttggaaaacagggtgctggaagagacaatgtggactacagcagcgttatgctaaccagcgaagaagaaattaaaaccactaaccctgtagccacagaacaatacggtgtggtggctgacaacttgcagcaaaccaatacagggcctattgtgggaaatgtcaacagccaaggagccttacctggcatggtctggcagaaccgagacgtgtacctgcagggtcccatctgggccaagattcctcacacggacggcaacttccacccttcaccgctaatgggaggatttggactgaagcacccacctcctcagatcctgatcaagaacacgccggtacctgcggatcctccaacaacgttcagccaggcgaaattggcttccttcattacgcagtacagcaccggacaggtcagcgtggaaatcgagtgggagctgcagaaggagaacagcaaacgctggaacccagagattcagtacacttcaaactactacaaatctacaaatgtggactttgctgtcaatacagagggaacttattctgagcctcgccccattggtactcgttacctcacccgtaatctgtaattgctggttaatcaataaaccgtttgattcgtttcagttgaactttggtctctgcgaagggcgaattcgtttaaacctgcaggactagtccctttagtgagg

SEQ ID NO: 214 - DNA, 3172 bp, synthetic construct
  misc_feature 1..3172: note = source = /note="Description of Artificial Sequence: Synthetic polynucleotide"
  source 1..3172: mol_type = other DNA
gattgaatttagcggccgcgaattcgcccttgctgcgtcaactggaccaatgagaactttcccttcaacgattgcgtcgacaagatggtgatctggtgggaggagggcaagatgaccgccaaggtcgtggagtccgccaaggccattctgggtggaagcaaggtgcgcgtggaccaaaagtgcaagtcatcggcccagatcgaccccacgcccgtgatcgtcacctccaacaccaacatgtgcgccgtgatcggcgggaacagcaccaccttcgagcaccagcagcccctgcaggaccgcatgttcaagttcgagctcacccgccgtctggagcacgactttggcaaggtgaccaagcaggaagtcaaagagttcttccgctgggctcaggatcacgtgactgaggtggcgcatgagttctacgtcagaaagggcggagccaccaaaagacccgcccccagtgacgcggatataagcgagcccaagcgggcctgcccctcagttgcggagccatcgacgtcagacgcggaagcaccggtggactttgcggacaggtaccaaaacaaatgttctcgtcacgcgggcatgcttcagatgctgtttccctgcaagacatgcgagagaatgaatcagaatttcaacgtctgcttcacgcacggggtcagagactgctcagagtgcctccccggcgcgtcagaatctcaacccgtcgtcagaaaaaagacgtatcagaaactgtgcgcgattcatcatctgctggggcgggcacccgagattgcgtgttcggcctgcgatctcgtcaacgtggacttggatgactgtgtttctgagcaataaatgacttaaaccaggtatggctgctgacggttatcttccagattggctcgaggacaacctctctgagggcattcgcgagtggtgggacctgaaacctggagcccccaagcccaaggccaaccagcagaagcaggacgacggccggggtctggtgcttcttggctacaagtacctcggacccttcaacggactcgacaagggggagcccgtcaatgcggcggacgcagcggccctcgagcacgacaaggcctacgaccagcagctcaaagcgggtgacaatccgtacctgcggtataaccacgccgacgccgagtttcaggagcgtctgcaagaagatacgtcttttgggggcaacctcgggcgagcagtcttccaggccaagaagcgggttctcgaacctctcggtctggttgaggaagctgctaagacggctcctggaaagaagagaccggtagaaccgtcacctcagcgttcccccgactcctccacgggcatcggcaagaaaggccagcagcccgctaaaaagagactgaactttggtcagactggcgactcagagtcagtccccgaccctcaaccaatcggagaaccaccagcaggcccctctggtctgggatctggtacaatggctgcaggcggtggcgctccaatggcagacaataacgaaggcgccgacggagtgggtagttcctcaggaaattggcattgcgattccacatggctgggcgacagagtcatcaccaccagcacccgaacctgggccctgcccacctacaacaaccacctctacaagcaaatatccaatgggacatcgggaggaagcaccaacgacaacacctacttcggctacagcaccccctgggggtattttgacttcaacagattccactgccacttctcaccacgtgactggcagcgactcatcaacaacaactggggattccggccaaaaagactcagcttcaagctcttcaacatccaggtcaaggaggtcacgcagaatgaaggcaccaagaccatcgccaataaccttaccagcacgattcaggtatttacggactcggaataccagctgccgtacgtcctcggctccgcgcaccagggctgcctgcctccgttcccggcggacgtcttcatgattccccagtacggctaccttacactgaacaatggaagtcaagccgtaggccgttcctccttctactgcctggaatattttccatctcaaatgctgcgaactggaaacaattttgaattcagctacaccttcgaggacgtgcctttccacagcggctacgcacacagccagagcttggaccgactgatgaatcctctcatcgaccagtacctgtactacttatccagaactcagtccacaggaggaactcaaggtacccagcaattgttattttctcaagctgggcctgcaaacatgtcggctcaggctaagaactggctacctggaccttgctaccggcagcagcgagtctctacgacactgtcgcaaaacaacaacagcaactttgcttggactggtgccaccaaatatcacctgaacggaagagactctttggtaaatcccggtgtcgccatggcaacccacaaggacgacgaggaacgcttcttcccgtcgagtggagtcctgatgtttggaaaacagggtgctggaagagacaatgtggactacagcagcgttatgctaaccagcgaagaagaaattaaaaccactaaccctgtagccacagaacaatacggtgtggtggctgacaacttgcagcaaaccaatacagggcctattgtgggaaatgtcaacagccaaggagccttacctggcatggtctggcagaaccgagacgtgtacctgcagggtcccatctgggccaagattcctcacacggacggcaacttccacccttcaccgctaatgggaggatttggactgaagcacccacctcctcagatcctgatcaagaacacgccggtacctgcggatcctccaacgacgttcagccaggcgaaattggcttccttcattacgcagtacagcaccggacaggtcagcgtggaaatcgagtgggagctgcagaaggagaacagcaaacgctggaacccagagattcagtacacttcaaactactacaaatctacaaatgtggactttgctgtcaatacagagggaacttattctgagcctcgccccattggtactcgttacctcacccgtaatctgtaattgctggttaatcaataaaccgtttgattcgtttcagttgaactttggtctctgcgaagggcgaattcgtttaaacctgcaggactagtccctttagtgagg

SEQ ID NO: 215 - DNA, 2208 bp, synthetic construct
  misc_feature 1..2208: note = source = /note="Description of Artificial Sequence: Synthetic polynucleotide"
  source 1..2208: mol_type = other DNA
atggctgccgatggttatcttccagattggctcgaggacactctctctgaaggaataagacagtggtggaagctcaaacctggcccaccaccaccaaagcccgcagagcggcataaggacgacagcaggggtcttgtgcttcctgggtacaagtacctcggacccttcaacggactcgacaagggagagccggtcaacgaggcagacgccgcggccctcgagcacgacaaggcctacgaccggcagctcgaaagcggagacaacccgtacctcaagtacaaccacgccgacgcggagtttcaggagcgtcttaaagaagatacgtcttttgggggcaacctcggacgagcagtcttccaggcgaaaaagagggttcttgaacctctgggcctggttgaggagcctgttaaaacggctccgggaaaaaagaggccggtagagcactctcctgtggagccagactcctcctcgggaaccggaaaagcgggccagcagcctgcgagaaaaagattgaattttggtcagactggagacgcagactccgtacctgacccccagcctctcggacagccaccagcagccccctctggtctgggatctactacaatggcttcaggcagtggcgcaccagtggcagacaataacgagggtgccgatggagtgggtaattcctcaggaaattggcattgcgattcccaatggctgggcgacagagtcatcaccaccagcacccgaacctgggccctgcccacctacaacaaccacctctacaagcaaatctccagccaatcaggagcctcaaacgacaaccactactttggctacagcaccccctgggggtattttgacttcaacagattccactgccacttttcaccacgtgactggcaaagactcatcaacaacagctggggattccgacccaaaagactcaacttcaagctctttaacattcaagtcaaagaggtcacgcagaatgacggtacgacgacgattgccaataaccttaccagcacggttcaagtgtttaccgactcggagtaccagctcccgtacgtcctcggctcggcgcatcaaggatgcctcccgccgttcccagcagacgtctttatggtcccacagtatggatacctcaccctgaacaacgggagtcaggcggtaggacgctcttccttttactgcctggagtactttccttctcagatgctgcgtactggaaacaactttcagttcagctacacctttgaagacgttcccttccacagcagctacgctcacagccagagtctggatcggctgctgaatcctctgatcgaccagtacctatattatctgaacaagacacaatcaaatagtggaactcttcagcagtctcggctactgtttagccaagctggacccaccagcatgtctcttcaagctaaaaactggctgcctggaccttgctacagacagcagcgtctgtcaaagcaggcaaacgacaacaacaacagcaactttccctggactgcggctacaaagtatcatctaaatggccgggactcgttggttaatccaggaccagctatggccagccacaaagacgatgaagaaaagtttttccccatgcatggaaccctgatatttggtaaacaaggaacaaatgctaacgacgcggatttggacaatgtcatgattacagatgaagaagaaatccgcaccaccaatcccgtggctacggagcagtacggatatgtgtcaaataatttgcaaaactcaaatactggtccaactactggaactgtcaatcaccaaggagcgttacctggtatggtgtggcaggatcgagacgtgtacctgcagggacccatttgggccaagattcctcacacggacgggcactttcatccttctccactaatgggaggttttgggctcaaacacccgcctcctcagatcatgatcaaaaacactcccgttccagccaatcctcctacaaacttcagttcttccaagtttgcttctttcatcacacagtattccacggggcaggtcagcgtggagatcgagtgggagctgcagaaggagaacagcaaacgctggaatcccgaaattcagtatacttccaactacaacaaatctgttaatgtggactttactgtggacactaatggtgtgtattcagagcctcgccccattggcaccagatacccgactcgtaatctgtaa

SEQ ID NO: 216 - protein, 735 aa, synthetic construct
  REGION 1..735: note = source = /note="Description of Artificial Sequence: Synthetic polypeptide"
MAADGYLPDWLEDTLSEGIRQWWKLKPGPPPPKPAERHKDDSRGLVLPGYKYLGPFNGLDKGEPVNEADAAALEHDKAYDRQLESGDNPYLKYNHADAEFQERLKEDTSFGGNLGRAVFQAKKRVLEPLGLVEEPVKTAPGKKRPVEHSPVEPDSSSGTGKAGQQPARKRLNFGQTGDADSVPDPQPLGQPPAAPSGLGSTTMASGSGAPVADNNEGADGVGNSSGNWHCDSQWLGDRVITTSTRTWALPTYNNHLYKQISSQSGASNDNHYFGYSTPWGYFDFNRFHCHFSPRDWQRLINNSWGFRPKRLNFKLFNIQVKEVTQNDGTTTIANNLTSTVQVFTDSEYQLPYVLGSAHQGCLPPFPADVFMVPQYGYLTLNNGSQAVGRSSFYCLEYFPSQMLRTGNNFQFSYTFEDVPFHSSYAHSQSLDRLLNPLIDQYLYYLNKTQSNSGTLQQSRLLFSQAGPTSMSLQAKNWLPGPCYRQQRLSKQANDNNNSNFPWTAATKYHLNGRDSLVNPGPAMASHKDDEEKFFPMHGTLIFGKQGTNANDADLDNVMITDEEEIRTTNPVATEQYGYVSNNLQNSNTGPTTGTVNHQGALPGMVWQDRDVYLQGPIWAKIPHTDGHFHPSPLMGGFGLKHPPPQIMIKNTPVPANPPTNFSSSKFASFITQYSTGQVSVEIEWELQKENSKRWNPEIQYTSNYNKSVNVDFTVDTNGVYSEPRPIGTRYPTRNL

SEQ ID NO: 217 - DNA, 2208 bp, synthetic construct
  misc_feature 1..2208: note = source = /note="Description of Artificial Sequence: Synthetic polynucleotide"
  source 1..2208: mol_type = other DNA
atggctgccgatggttatcttccagattggctcgaggacactctctctgaaggaataagacagtggtggaagctcaaacctggcccaccaccaccaaagcccgcagagcggcataaggacgacagcaggggtcttgtgcttcctgggtacaagtacctcggacccttcaacggactcgacaagggagagccggtcaacgaggcagacgccgcggccctcgagcacgacaaggcctacgaccggcagctcgacagcggagacaacccgtacctcaagtacaaccacgccgacgcggagtttcaggagcgtcttaaagaagatacgtcttttgggggcaacctcggacgagcagtcttccaggccaaaaagaggattcttgaacctctgggcctggttgaggaacctgttaagacggctccgggagaaaagaggccggtagagcactctcctgcggagccagactcctcctcgggaaccggaaaagcgggccagcagcctgcaagaaagagattgaattttggccagactggagacgcagactcagtacctgacccccagcctctcggacagccaccagcagccccctctggtctgggaactaatacgatggcttcaggcagtggcgcaccaatggcagacaataacgagggcgccgacggagtgggtaattcctcgggaaattggtattgcgattccacatggatgggcgacagagtcatcaccaccagcacccgcacctgggccctgcccacctacaacaaccatctgtacaagcaaatctccagccagtctggagccagcaacgacaaccactactttggctacagcaccccctgggggtattttgacttcaacagattccactgccacttctccccacgtgactggcaaagactcatcaacaacaactggggattccggcccaagagactcagcttcaagctctttaacattcaagtcaaagaggtcacgcagaatgacggtacgacgacgattgccaataaccttaccagcacggttcaggtgtttactgactcggagtaccagctcccgtacgtcctcggctcggcgcatcaaggatgcctcccgccgttcccagcagacgtcttcatggtgccacagtatggatacctcaccctgaacaacggcagtcaggcggtaggacgctcttccttttactgcctggagtactttccttctcagatgcttcgtaccggaaacaactttaccttcagctacacctttgaagacgttcctttccatagcagctacgctcacagccaaagtctggaccgtctcatgaatcctctcatcgaccagtacctgtattacttgagcagaacaaacactccaagcggaaccaccacgatgtccaggcttcagttttctcaggccggagcaagtgacattcgggaccagtctagaaactggcttcctggaccctgttaccgccagcagcgagtatcaaagacagctgcggacaacaacaacagtgattactcgtggactggagctaccaagtaccacctcaatggaagagactctctggtgaatccgggcccagctatggccagccacaaggacgatgaagaaaaatattttcctcagagcggggttctcatctttggaaaacaagactcgggaaaaactaatgtggacattgaaaaggttatgattacagacgaagaggaaatcaggaccaccaatcccgtggctacggagcagtatggttctgtatctaccaacctccagagcggcaacacacaagcagctacctcagatgtcaacacacaaggcgttcttccaggcatggtctggcaggacagagacgtgtacctgcaggggcccatctgggcaaagattccacacacggacggacattttcacccctctcccctcgtgggcggattcggacttaaacaccctcctccacaaattctcatcaagaacaccccggtacctgcgaatccttcgaccactttcagtgcggcaaagtttgcttccttcatcacacagtactccacggggcaggtcagcgtggagatcgagtgggagctgcagaaggagaacagcaaacgctggaatcccgaaattcagtacacttccaactacaacaaatctgttaatgtggactttactgtggacactaatggtgtgtattcagagcctcgccccattggcaccagatacctgactcgtaatctgtaa

SEQ ID NO: 218 - protein, 735 aa, synthetic construct
  REGION 1..735: note = source = /note="Description of Artificial Sequence: Synthetic polypeptide"
MAADGYLPDWLEDTLSEGIRQWWKLKPGPPPPKPAERHKDDSRGLVLPGYKYLGPFNGLDKGEPVNEADAAALEHDKAYDRQLDSGDNPYLKYNHADAEFQERLKEDTSFGGNLGRAVFQAKKRILEPLGLVEEPVKTAPGEKRPVEHSPAEPDSSSGTGKAGQQPARKRLNFGQTGDADSVPDPQPLGQPPAAPSGLGTNTMASGSGAPMADNNEGADGVGNSSGNWYCDSTWMGDRVITTSTRTWALPTYNNHLYKQISSQSGASNDNHYFGYSTPWGYFDFNRFHCHFSPRDWQRLINNNWGFRPKRLSFKLFNIQVKEVTQNDGTTTIANNLTSTVQVFTDSEYQLPYVLGSAHQGCLPPFPADVFMVPQYGYLTLNNGSQAVGRSSFYCLEYFPSQMLRTGNNFTFSYTFEDVPFHSSYAHSQSLDRLMNPLIDQYLYYLSRTNTPSGTTTMSRLQFSQAGASDIRDQSRNWLPGPCYRQQRVSKTAADNNNSDYSWTGATKYHLNGRDSLVNPGPAMASHKDDEEKYFPQSGVLIFGKQDSGKTNVDIEKVMITDEEEIRTTNPVATEQYGSVSTNLQSGNTQAATSDVNTQGVLPGMVWQDRDVYLQGPIWAKIPHTDGHFHPSPLVGGFGLKHPPPQILIKNTPVPANPSTTFSAAKFASFITQYSTGQVSVEIEWELQKENSKRWNPEIQYTSNYNKSVNVDFTVDTNGVYSEPRPIGTRYLTRNL

SEQ ID NO: 219 - DNA, 2209 bp, synthetic construct
  misc_feature 1..2209: note = source = /note="Description of Artificial Sequence: Synthetic polynucleotide"
  source 1..2209: mol_type = other DNA
atggctgccgatggttatcctccagattggctcgaggacactctctctgaagggataagacagtggtggaagctcaaacctggcccaccaccaccaaagcccgcagagcggcataaggacgacagcaggggtcttgtgcttcctgggtacaagtacctcggacccttcaacggactcgacaagggggagccggtcaacgaggcagacgccgcggccctcgagcacgacaaggcctacgaccggcagctcgacagcggagacaacccgtacctcaagtacaaccacgccgacgcagagtttcaggagcgccttaaagaagatacgtcttttgggggcaacctcggacgagcagtcttccaggcgaaaaagagggttcttgaacctctgggcctggttgaggaacctgttaagacggctccgggaaaaaagaggccggtagagcactctcctgtggagccagactcctcctcgggaaccggaaaagcgggccagcggcctgcaagaaaaagattaaattttggtcagactggagacgcagactccgtacctgacccccagcctctcggacagccaccagcagccccctctggtctgggatctactacaatggctacaggcagtggcgcaccaatggcagacaataacgagggtgccgatggagtgggtaattcctcaggaaattggcattgcgattcccaatggctgggcgacagagtcatcaccaccagcacccgaacctgggccctgcccacatacaacaaccacctctacaagcaaatctccagccaatcaggagccagcaacgacaaccactactttggctacagcaccccctgggggtattttgacttcaacagattccactgccacttttcaccacgtgactggcaaagactcatcaacaacaactggggattccggcccaaaagactcaacttcaagctctttaatattcaagtcaaagaggtcacgcagaatgacggtacgacgacgattgccaataaccttaccagcacggttcaggtgtttactgactcggagtaccagctcccgtacgtcctgggctcggcgcatcaaggatgcctcccgccgtttccagcggacgtcttcatggtcccacagtatggatacctcaccctgaacaacgggagtcaggcggtaggacgctcttccttttactgcctggagtactttccttctcagatgctgcgtactggaaacaactttcagttcagctacacttttgaagacgtgcctttccacagcagctacgctcacagccagagtctggatcggctgatgaatcctctgatcgaccagtacctgtattatctgaacaagacacaaacaaatagtggaactcttcagcagtctcggctactgtttagccaagctggaccaaccaacatgtctcttcaagctaaaaactggctgcctggaccttgctacagacagcagcgtctgtcaaaacaggcaaacgacaacaacaacagcaactttccctggactgcagctacaaagtatcatctaaatggccgggactcgttggttaatccaggaccagctatggccagtcacaaggatgacgaagaaaagtttttccccatgcatggaaccctgatatttggtaaacaaggaacaaatgccaacgacgcggatttggaaaatgtcatgattacagatgaagaagaaatcagggccaccaatcccgtggctacggagcagtacgggactgtgtcaaataatttgcaaaactcaaacactggtccaactactggaactgtcaatcgccaaggagcgttacctggtatggtgtggcaggatcgagacgtgtacctgcagggacccatttgggccaagattcctcacaccgatggacactttcatccttctccactgatgggaggttttggactcaaacacccgcctcctcagatcatgatcaaaaacactcccgttccagccaatcctcccacaaacttcagttctgccaagtttgcttctttcatcacacagtattccacgggacaggtcagcgtggagatcgagtgggagctgcagaaggagaacagcaaacgctggaatcccgaaattcagtacacttccaactacaacaagtctgttaatgtggactttactgtggacactaatggtgtgtattcagagcctcgccccattggcaccagatacctgactcgtaatctgtaat

SEQ ID NO: 220 - protein, 735 aa, synthetic construct
  REGION 1..735: note = source = /note="Description of Artificial Sequence: Synthetic polypeptide"
MAADGYPPDWLEDTLSEGIRQWWKLKPGPPPPKPAERHKDDSRGLVLPGYKYLGPFNGLDKGEPVNEADAAALEHDKAYDRQLDSGDNPYLKYNHADAEFQERLKEDTSFGGNLGRAVFQAKKRVLEPLGLVEEPVKTAPGKKRPVEHSPVEPDSSSGTGKAGQRPARKRLNFGQTGDADSVPDPQPLGQPPAAPSGLGSTTMATGSGAPMADNNEGADGVGNSSGNWHCDSQWLGDRVITTSTRTWALPTYNNHLYKQISSQSGASNDNHYFGYSTPWGYFDFNRFHCHFSPRDWQRLINNNWGFRPKRLNFKLFNIQVKEVTQNDGTTTIANNLTSTVQVFTDSEYQLPYVLGSAHQGCLPPFPADVFMVPQYGYLTLNNGSQAVGRSSFYCLEYFPSQMLRTGNNFQFSYTFEDVPFHSSYAHSQSLDRLMNPLIDQYLYYLNKTQTNSGTLQQSRLLFSQAGPTNMSLQAKNWLPGPCYRQQRLSKQANDNNNSNFPWTAATKYHLNGRDSLVNPGPAMASHKDDEEKFFPMHGTLIFGKQGTNANDADLENVMITDEEEIRATNPVATEQYGTVSNNLQNSNTGPTTGTVNRQGALPGMVWQDRDVYLQGPIWAKIPHTDGHFHPSPLMGGFGLKHPPPQIMIKNTPVPANPPTNFSSAKFASFITQYSTGQVSVEIEWELQKENSKRWNPEIQYTSNYNKSVNVDFTVDTNGVYSEPRPIGTRYLTRNL

SEQ ID NO: 221 - DNA, 2208 bp, synthetic construct
  misc_feature 1..2208: note = source = /note="Description of Artificial Sequence: Synthetic polynucleotide"
  source 1..2208: mol_type = other DNA
atggctgccgatggttatcttccagattggctcgaggacactctctctgaaggaataagacagtggtggaagctcaaacctggcccaccaccaccaaagcccgcagagcggcataaggacgacagcaggggtcttgtgcttcctgggtacaggtacctcggacccttcaacggactcgacaagggagagccggtcaacgaggcagacgccgcggccctcgagcacgacaaggcctacgaccggcagctcgacagcggagacaacccgtacctcaagtacaaccacgtcgacgcggagtttcaggagcgtcttaaagaagatacgtcttttgggggcaacctcggacgagcagtcttccaggccaaaaagaggattcttgaacctctgggcctggttgaggaacctgttaaggcggctccgggagaaaagaggccggtagagcactctcctgcggagccagactcctcctcgggaaccggaaaagcgggccagcagcctgcaagaaagagattgaattttggtcagactggagacgcagactcagtacctgacccccagcctctcggacagccaccagcagccccctctggtctgggaactaatacgatggcttcaggcagtggcgcaccaatggcagacaataacgagggcgccgacggagtgggtaattcctcgggaaattggcattgcgattccacatggatgggcgacagagtcatcaccaccagcacccgcacctgggccctgcccacctacaacaaccatctgtacaagcaaatctccagccagtctggagccagcaacgacaaccactactttggctacagcaccccctgggggcattttgacttcaacagattccactgccacttctccccacgtgactggcaaagactcatcaacaacaactggggattccggcccaagagactcagcttcaagctctttaacattcaagtcaaagaggtcacgcagaatgacggtacgacgacgattgccaataaccttaccagcacggttcaggtgtttactgactcggagtaccagctcccgtacgtcctcggctcggcgcatcaaggatgcctcccgccgttcccagcagacgtcttcatggtgccacagtatggatacctcaccctgaacaacggcagtcaggcggtaggacgctcttccttttactgcctggagtactttccttctcagatgcttcgtaccggaaacaactttaccttcagctacacctttgaagacgttcctttccatagcagctacgctcacagccaaagtctggaccgtctcatgaatcctctcatcgaccagtacctgtattacttgagcagaacaaacactccaagcggaaccaccacgatgtccaggcttcagttttctcaggccggagcaagtgacattcgggaccagtctagaaactggcttcctggaccctgttaccgccagcagcgagtatcaaagacagctgcggacaacaacaacagtgattactcgtggactggagctaccaagtaccacctcaatggaagagactctctggtgaatccgggcccagctatggccagccacaaggacgatgaagaaaaatattttcctcagagcggggttctcatctttggaaaacaagactcgggaaaaactaatgtggacattgaaaaggttatgattacagacgaagaggaaatcaggaccaccaatcccgtggctacggagcagtatggttctgtatctaccaacctccagagcggcaacacacaagcagctacctcagatgtcaacacacaaggcgttcttccaggcatggtctggcaggacagagacgtgtacctgcaggggcccatctgggcaaagattccacacacggacggacattttcacccctctccccccatgggcggattcggacttaaacaccctcctccacaaattctcatcaagaacaccccggtacctgcgaatccttcgaccactttcagtgcggcaaagtttgcttccttcatcacacagtactccacggggcaggtcagcgtggagatcgagtgggagctgcagaaggagaacagcaaacgctggaatcccgaaattcagtacacttccaactacaacaaatctgttaatgtggactttactgtggacactaatggtgtgtattcagagcctcgccccattggcgccagatacctgactcgtaatctgtaa

SEQ ID NO: 222 - protein, 735 aa, synthetic construct
  REGION 1..735: note = source = /note="Description of Artificial Sequence: Synthetic polypeptide"
MAADGYLPDWLEDTLSEGIRQWWKLKPGPPPPKPAERHKDDSRGLVLPGYRYLGPFNGLDKGEPVNEADAAALEHDKAYDRQLDSGDNPYLKYNHVDAEFQERLKEDTSFGGNLGRAVFQAKKRILEPLGLVEEPVKAAPGEKRPVEHSPAEPDSSSGTGKAGQQPARKRLNFGQTGDADSVPDPQPLGQPPAAPSGLGTNTMASGSGAPMADNNEGADGVGNSSGNWHCDSTWMGDRVITTSTRTWALPTYNNHLYKQISSQSGASNDNHYFGYSTPWGHFDFNRFHCHFSPRDWQRLINNNWGFRPKRLSFKLFNIQVKEVTQNDGTTTIANNLTSTVQVFTDSEYQLPYVLGSAHQGCLPPFPADVFMVPQYGYLTLNNGSQAVGRSSFYCLEYFPSQMLRTGNNFTFSYTFEDVPFHSSYAHSQSLDRLMNPLIDQYLYYLSRTNTPSGTTTMSRLQFSQAGASDIRDQSRNWLPGPCYRQQRVSKTAADNNNSDYSWTGATKYHLNGRDSLVNPGPAMASHKDDEEKYFPQSGVLIFGKQDSGKTNVDIEKVMITDEEEIRTTNPVATEQYGSVSTNLQSGNTQAATSDVNTQGVLPGMVWQDRDVYLQGPIWAKIPHTDGHFHPSPPMGGFGLKHPPPQILIKNTPVPANPSTTFSAAKFASFITQYSTGQVSVEIEWELQKENSKRWNPEIQYTSNYNKSVNVDFTVDTNGVYSEPRPIGARYLTRNL

SEQ ID NO: 223 - DNA, 2208 bp, synthetic construct
  misc_feature 1..2208: note = source = /note="Description of Artificial Sequence: Synthetic polynucleotide"
  source 1..2208: mol_type = other DNA
atggctgccgatggttatcttccagattggctcgaggacaccctctctgaaggaataagacagtggtggaagctcaaacctggcccaccaccaccaaagcccgcagagcggcataaggacgacagcaggggtcttgtgcttcctgggtacaagtacctcggacccttcaacggactcgacaagggagagccggtcaacgaggcagacgccgcggccctcgagcacgacaaggcctacgaccggcagctcgacagcggagataacccgtacctcaagtacaaccacgccgacgcggagtttcaggagcgccttaaagaggatacgtcttttgggggcaacctcggacgagcagtcttccaggccaaaaagaggattcttgaacctctgggcctggttgaggaacctgttaagacggctccgggaaaaaagaggccggtagagcactctcctgcggagccagactcctcctcgggaaccggaaaagcgggccagcagcctgcaagaaagagattgaattttggtcagactggagacgcagactcagtacctgacccccggcctctcggacagccaccagcagccccctctggtctgggaactaatacgatggcttcaggcagtggcgcaccaatggcagacaataacgagggcgccgacggagtgggtaattcctcgggaaattggcattgcgattccacatggatgggcgacagagtcatcaccaccagcacccgcacctgggccctgcccacctacaacaaccatctgtacaagcaaatctccagccagtctggagccagcaacgacaaccactactttggctacagcaccccctgggggtattttgacttcaacagattccactgccacttctccccacgtgactggcaaagactcatcaacaacaactggggattccggcccaagagactcagcttcaagctctttaacattcaagtcaaagaggtcacgcagaatgacggtacgacgacgattgccaataaccttaccagcacggttcaggtgtttactgactcggagtaccagctcccgtacgtcctcggctcggcgcatcaaggatgcctcccgccgttcccagcagacgtcttcatggtgccacagtatggatacctcaccctgaacaacggcagtcaggcggtaggacgctcttccttttactgcctggagtactttccttctcagatgcttcgtaccggaaacaactttaccttcagctacacctttgaagacgttcctttccatagcagctacgctcacagccaaagtctggaccgtctcatgaatcctctcatcgaccagtacctgtattacttgagcagaacaaacactccaagcggaaccaccacgatgtccaggcttcagttttctcaggccggagcaagtgacattcgggaccagtctagaaactggcttcctggaccctgttaccgccagcagcgagtatcaaagacagctgcggacaacaacaacagtgattactcgtggactggagctaccaagtaccacctcaatggaagagactctctggtgaatccgggcccagctatggccagccacaaggacgatgaagaaaaatattttcctcagagcggggttctcatctttggaaaacaagactcgggaaaaactaatgtggacattgaaaaggttatgattacagacgaagaggaaatcaggaccaccaatcccgtggctacggagcagtatggttctgtatctaccaacctccagagcggcaacacacaagcagctacctcagatgtcaacacacaaggcgttcttccaggcatggtctggcaggacagagacgtgtacctgcaggggcccatctgggcaaagattccacacacggacggacattttcacccctctcccctcatgggcggattcggacttaaacaccctcctccacaaattctcatcaagaacaccccggtacctgcgaatccttcgaccactttcagtgcggcaaagtttgcttccttcatcacacagtactccacggggcaggtcagcgtggagatcgagtgggagctgcagaaggagaacagcaaacgctggaatcccgaaattcagtacacttccaactacaacaaatctgttaatgtggactttactgtggacactaatggtgtgtattcagagcctcgccccattggcaccagatacctgactcgtaatctgtaa

SEQ ID NO: 224 - protein, 735 aa, synthetic construct
  REGION 1..735: note = source = /note="Description of Artificial Sequence: Synthetic polypeptide"
MAADGYLPDWLEDTLSEGIRQWWKLKPGPPPPKPAERHKDDSRGLVLPGYKYLGPFNGLDKGEPVNEADAAALEHDKAYDRQLDSGDNPYLKYNHADAEFQERLKEDTSFGGNLGRAVFQAKKRILEPLGLVEEPVKTAPGKKRPVEHSPAEPDSSSGTGKAGQQPARKRLNFGQTGDADSVPDPRPLGQPPAAPSGLGTNTMASGSGAPMADNNEGADGVGNSSGNWHCDSTWMGDRVITTSTRTWALPTYNNHLYKQISSQSGASNDNHYFGYSTPWGYFDFNRFHCHFSPRDWQRLINNNWGFRPKRLSFKLFNIQVKEVTQNDGTTTIANNLTSTVQVFTDSEYQLPYVLGSAHQGCLPPFPADVFMVPQYGYLTLNNGSQAVGRSSFYCLEYFPSQMLRTGNNFTFSYTFEDVPFHSSYAHSQSLDRLMNPLIDQYLYYLSRTNTPSGTTTMSRLQFSQAGASDIRDQSRNWLPGPCYRQQRVSKTAADNNNSDYSWTGATKYHLNGRDSLVNPGPAMASHKDDEEKYFPQSGVLIFGKQDSGKTNVDIEKVMITDEEEIRTTNPVATEQYGSVSTNLQSGNTQAATSDVNTQGVLPGMVWQDRDVYLQGPIWAKIPHTDGHFHPSPLMGGFGLKHPPPQILIKNTPVPANPSTTFSAAKFASFITQYSTGQVSVEIEWELQKENSKRWNPEIQYTSNYNKSVNVDFTVDTNGVYSEPRPIGTRYLTRNL

SEQ ID NO: 225 - DNA, 2208 bp, synthetic construct
  misc_feature 1..2208: note = source = /note="Description of Artificial Sequence: Synthetic polynucleotide"
  source 1..2208: mol_type = other DNA
atggctgccgatggttatcttccagattggctcgaggacactctctctgaaggaataagacagtggtggaagctcaaacctggcccaccaccaccaaagcccgcagagcggcataaggacgacagcaggggtcttgtgcttcctgggtacaagtacctcggacccttcaacggactcgacaagggagagccggtcaacgaggcagacgccgcggccctcgagcacgacaaggcctacgaccggcagctcgacagcggagacaacccgtacctcaagtacaaccacgccgacgcggagtttcaggagcgccttaaaggagatacgtcttttgggggcaacctcggacgagcagtcttccaggccaaaaagaggattcttgaacctctgggcctggttgaggaacctgttaagacggctccgggaaaaaagaggccggtagagcactctcctgcggagccagactcctcctcgggaaccggaaaagcgggccagcagcctgcaagaaagagattgaattttggtcagactggagacgcagactcagtacctgacccccagcctctcggacagccaccagcagccccctctggtctgggaactaatacgatggcttcaggcagtggcgcaccaatggcagacaataacgagggcgccgacggagtgggtaattcctcgggaaattggcattgcgattccacatggatgggcggcagagtcatcaccaccagcacccgcacctgggccctgcccacctacaacaaccatctgtacaagcaaatctccagccagtctggagccagcaacgacaaccactactttggctacagcaccccctgggggtattttgacttcaacagattccactgccacttctccccacgtgactggcaaagactcatcaacaacaactggggattccggcccaagagactcagcttcaagctctttaacattcaagtcaaagaggtcacgcagaatgacggtacgacgacgattgccaataaccttaccagcacggttcaggtgtttactgactcggagtaccagctcccgtacgtcctcggctcggcgcatcaaggatgcctcccgccgttcccagcagacgtcttcatggtgccacagtatggatacctcaccctgaacaacggcagtcaggcggtaggacgctcttccttttactgcctggagtactttccttctcagacgcttcgtaccggaaacaactttaccttcagctacacctttgaagacgttcctttccatagcagctacgctcacagccaaagtctggaccgtctcatgaatcctctcatcgaccagtacctgtattacttgagcagaacaaacactccaagcggaaccaccacgatgtccaggcttcagttttctcaggccggagcaagtgacattcgggaccagtctagaaactggcttcctggaccctgttaccgccagcagcgagtatcaaagacagctgcggacaacaacaacagtgattactcgtggactggagctaccaagtaccacctcaatggaagagactctctggtgaatccgggcccagctatggccagccacaaggacgatgaagaaaaatattttcctcagagcggggttctcatctttggaaaacaagactcgggaaaaactaatgtggacattgaaaaggttatgattacagacgaagaggaaatcaggaccaccaatcccgtggctacggagcagtatggttctgtatctaccaacctccagagcggcaacacacaagcagctacctcagatgtcaacacacaaggcgttcttccaggcatggtctggcaggacagagacgtgtacctgcaggggcccatctgggcaaagattccacacacggacggacattttcacccctctcccctcatgggcggattcggacttaaacaccctcctccacaaattctcatcaagaacaccccggtacctgcgaatccttcgaccactttcagtgcggcaaagtttgcttccttcatcacacagtactccacggggcaggtcagcgtggagatcgagtgggagctgcagaaggagaacagcaaacgctggaatcccgaaattcagtacacttccaactacaacaaatctgttaatgtggactttactgtggacactaatggtgtgtattcagagcctcgccccattggcaccagatacctgactcgtaatctgtaa

SEQ ID NO: 226 - protein, 735 aa, synthetic construct
  REGION 1..735: note = source = /note="Description of Artificial Sequence: Synthetic polypeptide"
MAADGYLPDWLEDTLSEGIRQWWKLKPGPPPPKPAERHKDDSRGLVLPGYKYLGPFNGLDKGEPVNEADAAALEHDKAYDRQLDSGDNPYLKYNHADAEFQERLKGDTSFGGNLGRAVFQAKKRILEPLGLVEEPVKTAPGKKRPVEHSPAEPDSSSGTGKAGQQPARKRLNFGQTGDADSVPDPQPLGQPPAAPSGLGTNTMASGSGAPMADNNEGADGVGNSSGNWHCDSTWMGGRVITTSTRTWALPTYNNHLYKQISSQSGASNDNHYFGYSTPWGYFDFNRFHCHFSPRDWQRLINNNWGFRPKRLSFKLFNIQVKEVTQNDGTTTIANNLTSTVQVFTDSEYQLPYVLGSAHQGCLPPFPADVFMVPQYGYLTLNNGSQAVGRSSFYCLEYFPSQTLRTGNNFTFSYTFEDVPFHSSYAHSQSLDRLMNPLIDQYLYYLSRTNTPSGTTTMSRLQFSQAGASDIRDQSRNWLPGPCYRQQRVSKTAADNNNSDYSWTGATKYHLNGRDSLVNPGPAMASHKDDEEKYFPQSGVLIFGKQDSGKTNVDIEKVMITDEEEIRTTNPVATEQYGSVSTNLQSGNTQAATSDVNTQGVLPGMVWQDRDVYLQGPIWAKIPHTDGHFHPSPLMGGFGLKHPPPQILIKNTPVPANPSTTFSAAKFASFITQYSTGQVSVEIEWELQKENSKRWNPEIQYTSNYNKSVNVDFTVDTNGVYSEPRPIGTRYLTRNL

SEQ ID NO: 227 - DNA, 2208 bp, synthetic construct
  misc_feature 1..2208: note = source = /note="Description of Artificial Sequence: Synthetic polynucleotide"
  source 1..2208: mol_type = other DNA
atggctgccgatggttatcttccagattggctcgaggacactctctctgaaggaataagacagtggtggaagctcaaacctggcccaccaccaccaaagcccgcagagcggcataaggacgacagcaggggtcttgtgcttcctgggtacaagtacctcggacccttcaacggactcgacaagggagagccggtcaacgaggcagacgccgcggccctcgagcacgacaaggcctacgaccggcagctcgacagcggagacaacccgtacctcaagtacaaccacgccgacgcggagtttcaggagcgtcttaaagaagatacgtcttttgggggcaacctcggacgagcagtcttccaggccaaaaagaggattcttgaacctctgggcctggttgaggaacctgttaagacggctccgggaaaaaagaggccggtagagcactctcctgcggagccagactcctcctcgggaaccggaaaagcgggccagcagcctgcaagaaagagattgaattttggtcagactggagacgcagactcagtacctgacccccagcctctcggacagccaccagcagccccctctggtctgggaactaatacgatggcttcaggcagtggcgcaccaatggcagacaataacgagggcgccgacggagtgggtaattcctcgggaaattggcattgcgattccacatggatgggcgacagagtcatcaccaccagcacccgcacctgggccctgcccacctgcaacaaccatctgtacaagcaaatctccagccagtctggagccagcaacgacaaccactactttggctacagcaccccctgggggtattttgacttcaacagattccactgccacttctccccacgtgactggcaaagactcatcaacaacaactggggattccggcccaagagactcagcttcaagctctttaacattcaagtcaaagaggtcacgcagaatgacggtacgacgacgattgccaataaccttaccagcacggttcaggtgtttactgactcggagtaccagctcccgtacgtcctcggctcggcgcatcaaggatgcctcccgccgttcccagcagacgtcttcatggtgccacagtatggatacctcaccctgaacaacggcagtcaggcggtaggacgctcttccttttactgcctggagtattttccttctcagatgcttcgtaccggaaacaactttaccttcagctacacctttgaagacgttcctttccatagcagctacgctcacagccaaagtctggaccgtctcatgaatcctctcatcgaccagtacctgtattacttgagcagaacaaacactccaagcggaaccaccacgatgtccaggcttcagttttctcaggccggagcaagtgacattcgggaccagtctagaaactggcttcctggaccctgttaccgccagcagcgagtatcaaagacagctgcggacaacaacaacagtgattactcgtggactggagctaccaagtaccacctcaatggaagagactctctggtgaatccgggcccagctatggccagccacaaggacgatgaagaaaaatattttcctcagagcggggttctcatctttggaaaacaagactcgggaaaaactaatgtggacattgaaaaggttatgattacagacgaagaggaaatcaggaccaccaatcccgtggctacggagcagtatggttctgtatctacctacctccagagcggcaacacacaagcagctacctcagatgtcaacacacaaggcgttcttccaggcatggtctggcaggacagagacgtgtacctgcgggggcccatctgggcaaagattccacacacggacggacattttcacccctctcccctcatgggcggatttggacttaaacaccctcctccacaaattctcatcaagaacaccccggtacctgcgaatccttcgaccactttcagtgcggcaaagtttgcttccttcatcacacagtactccacggggcaggtcagcgtggagatcgagtgggagctgcagaaggagaacagcaaacgctggaatcccgaaattcagtacacttccaactacaacaaatctgttaatgtggactttactgtggacactaatggtgtgtattcagagcctcgccccattggcaccagatacctgactcgtaatctgtaa

SEQ ID NO: 228 - protein, 735 aa, synthetic construct
  REGION 1..735: note = source = /note="Description of Artificial Sequence: Synthetic polypeptide"
MAADGYLPDWLEDTLSEGIRQWWKLKPGPPPPKPAERHKDDSRGLVLPGYKYLGPFNGLDKGEPVNEADAAALEHDKAYDRQLDSGDNPYLKYNHADAEFQERLKEDTSFGGNLGRAVFQAKKRILEPLGLVEEPVKTAPGKKRPVEHSPAEPDSSSGTGKAGQQPARKRLNFGQTGDADSVPDPQPLGQPPAAPSGLGTNTMASGSGAPMADNNEGADGVGNSSGNWHCDSTWMGDRVITTSTRTWALPTCNNHLYKQISSQSGASNDNHYFGYSTPWGYFDFNRFHCHFSPRDWQRLINNNWGFRPKRLSFKLFNIQVKEVTQNDGTTTIANNLTSTVQVFTDSEYQLPYVLGSAHQGCLPPFPADVFMVPQYGYLTLNNGSQAVGRSSFYCLEYFPSQMLRTGNNFTFSYTFEDVPFHSSYAHSQSLDRLMNPLIDQYLYYLSRTNTPSGTTTMSRLQFSQAGASDIRDQSRNWLPGPCYRQQRVSKTAADNNNSDYSWTGATKYHLNGRDSLVNPGPAMASHKDDEEKYFPQSGVLIFGKQDSGKTNVDIEKVMITDEEEIRTTNPVATEQYGSVSTYLQSGNTQAATSDVNTQGVLPGMVWQDRDVYLRGPIWAKIPHTDGHFHPSPLMGGFGLKHPPPQILIKNTPVPANPSTTFSAAKFASFITQYSTGQVSVEIEWELQKENSKRWNPEIQYTSNYNKSVNVDFTVDTNGVYSEPRPIGTRYLTRNL

SEQ ID NO: 229 - DNA, 2208 bp, synthetic construct; identical to SEQ ID NO: 223
  misc_feature 1..2208: note = source = /note="Description of Artificial Sequence: Synthetic polynucleotide"
  source 1..2208: mol_type = other DNA

SEQ ID NO: 230 - protein, 735 aa, synthetic construct; identical to SEQ ID NO: 224
  REGION 1..735: note = source = /note="Description of Artificial Sequence: Synthetic polypeptide"

SEQ ID NO: 231 - DNA, 2208 bp, synthetic construct
  misc_feature 1..2208: note = source = /note="Description of Artificial Sequence: Synthetic polynucleotide"
  source 1..2208: mol_type = other DNA
atggctgccgatggttatcttccagattggctcgaggacactctctctgaaggaataagacagtggtggaagctcaaacctggcccaccaccaccaaagcccgcagagcggcataaggacggcagcaggggtcttgtgcttcctgggtacaagtacctcggacccttcaacggactcgacaagggagagccggtcaacgaggcagacgccgcggccctcgagcacgacaaggcctacgaccggcagctcaacagcggagacaacccgtacctcaagtacaaccacgccgacgcggagtttcaggagcgccttaaagaagatacgtcttttgggggcaacctcggacgagcagtcttccaggcaaaaaagagggttcttgaacctctgggcctggttgaggagcctgttaaaacggctccgggaaaaaagagaccggtagagcactctcctgcggagccagactcctcctcgggaaccggaaaagcgggccagcagcctgcaagaaagagattgaattttggtcagactggagacgcagactccgtacctgacccccagcctctcggacagccaccagcagccccctctggtctgggatctactacaatggctacaggcagtggcgcaccaatggcagacaataacgagggtgccgatggagtgggtaattcctcaggaaattggcattgcgattcccaatggctgggcgacagagtcatcaccacaagcactcgaacctgggccctgcccacctacaacaaccacctctacaagcaaatctccagccaatcaggagcctcaaacgacaaccactattttggctacagcaccccttgggggtattttgacttcaacagattccactgccacttttcaccacgtgactggcaaagactcatcaacaacaactggggattccgacccaagagactcaacttcaagctctttaacattcaagtcaaagaggtcacgcagaatgacggtacgacgacgattgccaataaccttaccagcacggttcaggtgtttactgactcggagtaccagctcccgtacgtcctcggctcggcgcatcaaggatgcctcccgccgttcccagcggacgtcttcatggtcccacagtatggatacctcaccctgaacaacgggagtcaggcggtaggacgctctcccttttactgcctggagtactttccttctcagatgctgcgtactggaaacaactttcagttcagctacacttttgaagacgtgcctttccacagcagctacgctcacagccagagtctggatcggctgatgaatcctctgatcgaccagtacctgtattatctgaacaagacacaaacaaatagtggaactcttcagcagtctcggctactgtttagccaagctggacccaccaacatgtctcttcaagctaaaaactggctgcctggaccttgctacagacagcagcgtctgtcaaagcaggcaaacgacaacaacaacagcaactttccctggactgcagctacaaagtatcatctaaatggccgggactcgttggttaatccaggaccagctatggccagtcacaaggatgacgaagaaaagtttttccccatgcatggaaccctgatatttggtaaacaaggaacaaatgccaacgacgcggatttggaaaatgtcatgattacagatgaagaagaaatcaggaccaccaatcccgtggctacggagcagtacgggactgtgtcaaataatttgcaaaactcaaacactggtccaactactggaactgtcaatcaccaaggagcgttacctggtatggtgtggcaggatcgagatgtgtaccttcagggacccatttgggccaagattcctcacaccgatggacactttcatccttctccactgatgggaggttttggactcaaacacccgcctcctcagattatgatcaaaaacactcccgttccagccaatcctcctacaaacttcagttctgccaagtttgcttctttcatcacacagtattccacggggcaggtcagcgtggagatcgagtgggagctgcagaaggagaacagcaaacgctggaatcccgaaattcagtacacttccaactacaacaaatctgttaatgtggactttactgtggacaataatggcgtgtactcagagcctcgccccattggcaccagatacctgactcgtaatctgtaa

SEQ ID NO: 232 - protein, 735 aa, synthetic construct
  REGION 1..735: note = source = /note="Description of Artificial Sequence: Synthetic polypeptide"
MAADGYLPDWLEDTLSEGIRQWWKLKPGPPPPKPAERHKDGSRGLVLPGYKYLGPFNGLDKGEPVNEADAAALEHDKAYDRQLNSGDNPYLKYNHADAEFQERLKEDTSFGGNLGRAVFQAKKRVLEPLGLVEEPVKTAPGKKRPVEHSPAEPDSSSGTGKAGQQPARKRLNFGQTGDADSVPDPQPLGQPPAAPSGLGSTTMATGSGAPMADNNEGADGVGNSSGNWHCDSQWLGDRVITTSTRTWALPTYNNHLYKQISSQSGASNDNHYFGYSTPWGYFDFNRFHCHFSPRDWQRLINNNWGFRPKRLNFKLFNIQVKEVTQNDGTTTIANNLTSTVQVFTDSEYQLPYVLGSAHQGCLPPFPADVFMVPQYGYLTLNNGSQAVGRSPFYCLEYFPSQMLRTGNNFQFSYTFEDVPFHSSYAHSQSLDRLMNPLIDQYLYYLNKTQTNSGTLQQSRLLFSQAGPTNMSLQAKNWLPGPCYRQQRLSKQANDNNNSNFPWTAATKYHLNGRDSLVNPGPAMASHKDDEEKFFPMHGTLIFGKQGTNANDADLENVMITDEEEIRTTNPVATEQYGTVSNNLQNSNTGPTTGTVNHQGALPGMVWQDRDVYLQGPIWAKIPHTDGHFHPSPLMGGFGLKHPPPQIMIKNTPVPANPPTNFSSAKFASFITQYSTGQVSVEIEWELQKENSKRWNPEIQYTSNYNKSVNVDFTVDNNGVYSEPRPIGTRYLTRNL

SEQ ID NO: 233 - DNA, 2208 bp, synthetic construct
  misc_feature 1..2208: note = source = /note="Description of Artificial Sequence: Synthetic polynucleotide"
  source 1..2208: mol_type = other DNA
atggctgccgatggttatcttccagattggctcgaggacactctctctgaaggaataagacagtggtggaagctcaaacctggcccaccaccaccaaagcccgcagagcggcataaggacgacagcaggggtcttgtgcttcctgggtacaagtacctcggacccttcaacggactcgacaagggagagccggtcaacgaggcagacgccgcggccctcgagcacgacaaggcctacgaccggcagctcgacagcggagacaacccgtacctcaagtacaaccacgccgacgcggagtttcaggagcgtcttaaagaagatacgtcttttgggggcaacctcggacgagcagtcttccaggccaaaaagaggattcttgaacctctgggcctggttgaggaacctgttaagacggctccgggaaaaaagaggccggtagagcactctcctgcggagccagactcctcctcgggaaccggaaaagcgggccagcagcctgcaagaaagagattgaattttggtcagactggagacgcagactcagtacctgacccccagcctctcggacagccaccagcagccccctctggtctgggaactaatacgatggcttcaggcagtggcgcaccaatggcagacaataacgagggcgccgacggagtgggtaattcctcgggaaattggcattgcgattccacatggatgggcgacagagtcatcaccaccagcacccgcacctgggccctgcccacctacaacaaccatctgtacaagcaaatctccagccagtctggagccagcaacgacaaccactactttggctacagcaccccctgggggtattttgacttcaacagattccactgccacttctccccacgtgactggcaaagactcatcaacaacaactggggattccggcccaagagactcagcttcaagctctttaacattcaagtcaaagaggtcacgcagaatgacggtacgacgacgattgccaataaccttaccagcacggttcaggtgtttactgactcggagtaccagctcccgtacgtcctcggctcggcgcatcaaggatgcctcccgccgttcccagcagacgtcttcatggtgccacagtatggatacctcaccctgaacaacggcagtcaggcggtaggacgctcttccttttactgcctggagtactttccttctcagatgcttcgtaccggaaacaactttaccttcagctacacctttgaagacgttcctttccatagcagctacgctcacagccaaagtctggaccgtctcatgaatcctctcatcgaccagtacctgtattacttgagcagaacaaacactccaagcggaaccaccacgatgtccaggcttcagttttctcaggccggagcaagtgacattcgggaccagtctagaaactggcttcctggaccctgttaccgccagcagcgagtatcaaagacagctgcggacaacaacaacagtgattactcgtggactggagctaccaagtaccacctcaatggaagagactctctggtgaatccgggcccagctatggccagccacaaggacgatgaagaaaaatattttcctcagagcggggttctcatctttggaaaacaagactcgggaaaaactaatgtggacattgaaaaggttatgattacagacgaagaggaaatcaggaccaccaatcccgtggctacggagcagtatggttctgtatctaccaacctccagagcggcaacacacaagcagctacctcagatgtcaacacacaaggcgttcttccaggcatggtctggcaggacagagacgtgtacctgcaggggcccatctgggcaaagattccacacacggacggacattttcacccctctcccctcatgggcggattcggacttaaacaccctcctccacaaattctcatcaagaacaccccggtacctgcgaatccttcgaccactttcagtgcggcaaagtttgcttccttcatcacacagtactccacggggcaggtcagcgtggagatcgagtgggagctgcagaaggagaacagcaaacgctggaatcccgaaattcagtacacttccaactacaacaaatctgttaatgtggactttactgtggacactaatggtgtgtattcagagcctcgccccattggcaccagatacctgactcgtaatctgtaa

SEQ ID NO: 234 - protein, 735 aa, synthetic construct
  REGION 1..735: note = source = /note="Description of Artificial Sequence: Synthetic polypeptide"
MAADGYLPDWLEDTLSEGIRQWWKLKPGPPPPKPAERHKDDSRGLVLPGYKYLGPFNGLDKGEPVNEADAAALEHDKAYDRQLDSGDNPYLKYNHADAEFQERLKEDTSFGGNLGRAVFQAKKRILEPLGLVEEPVKTAPGKKRPVEHSPAEPDSSSGTGKAGQQPARKRLNFGQTGDADSVPDPQPLGQPPAAPSGLGTNTMASGSGAPMADNNEGADGVGNSSGNWHCDSTWMGDRVITTSTRTWALPTYNNHLYKQISSQSGASNDNHYFGYSTPWGYFDFNRFHCHFSPRDWQRLINNNWGFRPKRLSFKLFNIQVKEVTQNDGTTTIANNLTSTVQVFTDSEYQLPYVLGSAHQGCLPPFPADVFMVPQYGYLTLNNGSQAVGRSSFYCLEYFPSQMLRTGNNFTFSYTFEDVPFHSSYAHSQSLDRLMNPLIDQYLYYLSRTNTPSGTTTMSRLQFSQAGASDIRDQSRNWLPGPCYRQQRVSKTAADNNNSDYSWTGATKYHLNGRDSLVNPGPAMASHKDDEEKYFPQSGVLIFGKQDSGKTNVDIEKVMITDEEEIRTTNPVATEQYGSVSTNLQSGNTQAATSDVNTQGVLPGMVWQDRDVYLQGPIWAKIPHTDGHFHPSPLMGGFGLKHPPPQILIKNTPVPANPSTTFSAAKFASFITQYSTGQVSVEIEWELQKENSKRWNPEIQYTSNYNKSVNVDFTVDTNGVYSEPRPIGTRYLTRNL

SEQ ID NO: 235 - DNA, 2208 bp, synthetic construct
  misc_feature 1..2208: note = source = /note="Description of Artificial Sequence: Synthetic polynucleotide"
  source 1..2208: mol_type = other DNA
atggctgccgatggttatcttccagattggctcgaggacactctctctgaaggaataagacagtggtggaagctcaaacctggcccaccaccaccaaagcccgcagagcggcataaggacgacagcaggggtcttgtgcttcctgggtacaagtacctcggacccttcaacggactcgacaagggagagccggtcaacgaggcagacgccgcggccctcgagcacgacaaggcctacgaccggcagctcgacagcggagacaacccgtacctcaagtacaaccacgccgacgcggagtttcaggagcgtcttaaagaagatacgtcttttgggggcaacctcggacgagcagtcttccaggccaaaaagaggattcttgaacctctgggcctggttgaggaacctgttaagacggctccgggaaaaaagaggccggtagagcactctcctgcggagccagactcctcctcgggaaccggaaaagcgggccagcagcctgcaagaaagagattgaattttggtcagactggagacgcagactcagtacctgacccccagcctctcggacagccaccagcagccccctctggtctgggaactaatacgatggcttcaggcagtggcgcaccaatggcagacaataacgagggcgccgacggagtgggtaattcctcgggaaattggcattgcgattccacatggatgggcgacagagtcatcaccaccagcacccgcacctgggccctgcccacctacaacaaccatctgtacaagcaaatctccagccagtctggagccagcaacgacaaccactactttggctacagcaccccctgggggtatttcgacttcaacagattccactgccacttctccccacgtgactggcaaagactcatcaacaacaactggggattccggcccaagagactcagcttcaagctctttaacattcaagtcaaagaggtcacgcagaatgacggtacgacgacgattgccaataaccttaccagcacggttcaggtgtttactgactcggggtaccagctcccgtacgtcctcggctcggcgcatcaaggatgccttccgccgttcccagcagacgtcttcatggtgccacagtatggatacctcaccctgaacaacggcagtcaggcggtaggacgctcttccttttactgcctggagtactttccttctcagatgcttcgtaccggaaacaactttaccttcagctacacctttgaagacgttcctttccatagcagctacgctcacggccaaagtctggaccgtctcatgaatcctctcatcgaccagtacctgtattacttgagcagaacaaacactccaagcggaaccaccacgatgtccaggcttcagttttctcaggccggagcaagtgacgttcgggaccagtctagaaactggcttcctggaccctgttaccgccagcagcgagtatcaaagacagctgcggacaacaacaacagtgattactcgtggactggagctaccaagtaccacctcaatggaagagactctctggtgaatccgggcccagctatggccagccacaaggacgatgaagaaaaatattttcctcagagcggggttctcgtctttggaaaacaagactcgggaaaaactaatgtggacattgaaaaggttatgattacagacgaagaggaaatcaggaccaccaatcccgcggctacggagcagtatggttctgtatctaccaacctccagagcggcaacacacaagcagctacctcagatgtcaacacacaaggcgttcttccaggcatggtctggcaggacagagacgtgtacctgcaggggcccatctgggcaaagattccacacacggacggacattttcacccctctcccctcatgggcggattcggacttaaacaccctcctccacaaattctcatcaagaacaccccggtacctgcgaatccttcgaccactttcagtgcggcaaagtttgtttccttcatcacacagtactccacggggcaggtcagcgtggagatcgagtgggagctgcagaaggagaacagcaaacgctggaatcccgaaattcagtacacttccaactacaacaaatctgttaatgtggactttactgtggacactaatggtgtgtattcagagcctcgccccattggcaccagatacctgactcgtaatctgtaa

SEQ ID NO: 236 - protein, 735 aa, synthetic construct
  REGION 1..735: note = source = /note="Description of Artificial Sequence: Synthetic polypeptide"
MAADGYLPDWLEDTLSEGIRQWWKLKPGPPPPKPAERHKDDSRGLVLPGYKYLGPFNGLDKGEPVNEADAAALEHDKAYDRQLDSGDNPYLKYNHADAEFQERLKEDTSFGGNLGRAVFQAKKRILEPLGLVEEPVKTAPGKKRPVEHSPAEPDSSSGTGKAGQQPARKRLNFGQTGDADSVPDPQPLGQPPAAPSGLGTNTMASGSGAPMADNNEGADGVGNSSGNWHCDSTWMGDRVITTSTRTWALPTYNNHLYKQISSQSGASNDNHYFGYSTPWGYFDFNRFHCHFSPRDWQRLINNNWGFRPKRLSFKLFNIQVKEVTQNDGTTTIANNLTSTVQVFTDSGYQLPYVLGSAHQGCLPPFPADVFMVPQYGYLTLNNGSQAVGRSSFYCLEYFPSQMLRTGNNFTFSYTFEDVPFHSSYAHGQSLDRLMNPLIDQYLYYLSRTNTPSGTTTMSRLQFSQAGASDVRDQSRNWLPGPCYRQQRVSKTAADNNNSDYSWTGATKYHLNGRDSLVNPGPAMASHKDDEEKYFPQSGVLVFGKQDSGKTNVDIEKVMITDEEEIRTTNPAATEQYGSVSTNLQSGNTQAATSDVNTQGVLPGMVWQDRDVYLQGPIWAKIPHTDGHFHPSPLMGGFGLKHPPPQILIKNTPVPANPSTTFSAAKFVSFITQYSTGQVSVEIEWELQKENSKRWNPEIQYTSNYNKSVNVDFTVDTNGVYSEPRPIGTRYLTRNL

SEQ ID NO: 237 - DNA, 2208 bp, synthetic construct
  misc_feature 1..2208: note = source = /note="Description of Artificial Sequence: Synthetic polynucleotide"
  source 1..2208: mol_type = other DNA
atggctgccgatggttatcttccagattggctcgaggacactctctctgaaggaataagacagtggtggaaactcaaacctggcccaccaccaccaaagcccgcagagcggcataaggacgacagcaggggtcttgtgcttcctgggtacaagtacctcggacccttcaacggactcgacaagggagagccggtcaacgaggcagacgccgcggccctcgagcacgacaaggcctacgaccggcagctcgacagcggagacaacccgtacctcaagtacaaccacgccgacgcggagtttcaggagcgccttaaagaagatacgtcttttgggggcaacctcggacgagcagtcttccaggcaaaaaagagggttctggaacctctgagcctggttgaggagcctgttaagacggctccgggaaaaaagaggccggtagagcactctcccgcagagccagattcctcctccggaactggaaagtcgggcaaccagcctgcaagaaagagattgaatttcggtcagactggagactcagactccgtacctgacccccagcctctcggacagccaccagcagccccctctggtctgggaactaatacgatggctacaggcagtggcgcaccaatggcagacaataacgagggcgccgacggagtgggtaattcctcgggaaattggcattgcgattccacatggatgggcgacagagtcatcaccaccagcacccgaacctgggccctgcccacctacaacaaccatctgtacaagcaaatatccagccagtctggagccagcaacgacaatcactactttggctacagcaccccctgggggtattttgacttcaacagattccactgccacttttcaccacgtgactggcaaagactcatcaacaacaactggggattccgacccaagagactcaacttcaagctctttaacattcaagtcaaagaggtcacgcagaatgacggtacgacgacgattgccaataaccttaccagcacggttcaggtgtttactgactcggagtaccagctcccgtacgtcctcggctcggcgcatcaaggatgcctcccgccgttcccagcagacgtcttcatggtgccacagtatggatacctcaccctgaacaacgggagtcaggcagtaggacgctcttcattttactgcctagagtactttccttctcagatgctgcgtaccggaaacaactttaccttcagctacacctttgaggacgttcctttccacagcagctacgctcacagccagagtttggaccgtctcatgaatcctctcatcgaccagtacctgtattacttgagcagaacaaacactccaagcggaaccaccacgcagtccaggcttcagttttctcaggccggagcgagtgacattcaggaccagtctaggaactggcttcctggaccctgttaccgtcagcagcgagtatcaaagacatctgcggataacaacaacagtgaatactcgtggactggagctaccaagtaccacctcaatggcagagactctctggtgaatccgggcccggccatggccagccacaaagacgatgaagaaaagttttttcctcagagcggggttcttatctttgggaagcaaggctcagagaaaacaaatgtggatattgaaaaggtcatgattacagacgaagaggaaatcaggaccaccaatcccgtggctacggagcagtatggttctgtatctaccaacctccagagcggcaacacacaagcagctaccgcagatgtcaacacacaaggcgttcttccaggcatggtcgggcaagacagagacgtgtacctgcaggggcctacttgggcaaagattccacacacggacggacattttcacccctctcccctcatgggcggatttggacttaaacaccctcctccacagattctcatcaagaacaccccggtacctgcgaatccttcgaccaccttcagtgcggcaaagtttgcttccttcattacacagtactccacggggcaggtcagcgtggagatcgagtgggagctgcagaaggagaacagcaaacgctggaatcccgagatccagtacacttccaactacaacaagtctgttaatgtggactttactgtggacactaatggcgtgtattcagagcctcgccccattggcaccagatacctgactcgtaatctgtaa

SEQ ID NO: 238 - protein, 735 aa, synthetic construct
  REGION 1..735: note = source = /note="Description of Artificial Sequence: Synthetic polypeptide"
MAADGYLPDWLEDTLSEGIRQWWKLKPGPPPPKPAERHKDDSRGLVLPGYKYLGPFNGLDKGEPVNEADAAALEHDKAYDRQLDSGDNPYLKYNHADAEFQERLKEDTSFGGNLGRAVFQAKKRVLEPLSLVEEPVKTAPGKKRPVEHSPAEPDSSSGTGKSGNQPARKRLNFGQTGDSDSVPDPQPLGQPPAAPSGLGTNTMATGSGAPMADNNEGADGVGNSSGNWHCDSTWMGDRVITTSTRTWALPTYNNHLYKQISSQSGASNDNHYFGYSTPWGYFDFNRFHCHFSPRDWQRLINNNWGFRPKRLNFKLFNIQVKEVTQNDGTTTIANNLTSTVQVFTDSEYQLPYVLGSAHQGCLPPFPADVFMVPQYGYLTLNNGSQAVGRSSFYCLEYFPSQMLRTGNNFTFSYTFEDVPFHSSYAHSQSLDRLMNPLIDQYLYYLSRTNTPSGTTTQSRLQFSQAGASDIQDQSRNWLPGPCYRQQRVSKTSADNNNSEYSWTGATKYHLNGRDSLVNPGPAMASHKDDEEKFFPQSGVLIFGKQGSEKTNVDIEKVMITDEEEIRTTNPVATEQYGSVSTNLQSGNTQAATADVNTQGVLPGMVGQDRDVYLQGPTWAKIPHTDGHFHPSPLMGGFGLKHPPPQILIKNTPVPANPSTTFSAAKFASFITQYSTGQVSVEIEWELQKENSKRWNPEIQYTSNYNKSVNVDFTVDTNGVYSEPRPIGTRYLTRNL

SEQ ID NO: 239 - DNA, 2208 bp, synthetic construct
  misc_feature 1..2208: note = source = /note="Description of Artificial Sequence: Synthetic polynucleotide"
  source 1..2208: mol_type = other DNA
atggctgccgatggttatcttccagattggctcgaggacactctctctgaaggaataagacagtggtggaagctcaaacctggcccaccaccaccaaagcccgcagagcggcataaggacgacagcaggggtcttgtgcttcctgggtacaagtacctcggacccttcaacggactcgacaagggagagccggtcaacgaggcagacgccgcggccctcgagcacgacaaggcctacgaccggcagctcgacagcggagacaacccgtacctcaagtacaaccacgccgacgcagagtttcaggagcgccttaaagaagatacgtcttttgggggcaacctcggacgagcagtcttccaggcaaaaaagagggttctggaacctctgggcctggttgaggagcctgttaagacggctccgggaaaaaagaggccggtagagcactctcctgcagagccagattcctcctccggaactggaaagtcgggcaaccagcctgcaagaaagagattgaatttcggtcagactggagactcagactccgtacctgacccccagcctctcggacagccaccagcagccccctctggtctgggaactaatacgatggctacaggcagtggcgcaccaatggcagacaataacgagggcgccgacggagtgggtaattcctcgggaaattggcattgcgattccacatggatgggcgacagagtcatcaccaccagcacccgaacctgggccctgcccacctacaacaaccatctgtacaagcaaatatccagccagtctggagccagcaacgacaatcactactttggctacagcaccccctgggggtattttgacttcaacagattccactgccacttttcaccacgtgactggcaaagactcatcaacaacaactggggattccgacccaagagactcaacttcaagctctttaacattcaagtcaaagaggtcacgcagaatgacggtacgacgacgattgccaataaccttaccagcacggttcaggtgtttactgactcggagtaccagctcccgtacgtcctcggctcggcgcatcaaggatgcctcccgccgttcccagcagacgtcttcatggtgccacagtatggatacctcaccctgaacaacgggagtcaggcagtaggacgctcttcattttactgcctagggtactttccttctcagatgctgcgtaccggaaacaactttaccttcagctacacctttgaggacgttcctttccacagcagctacgctcacagccagagtttggaccgtctcatgaatcctctcatcgaccagtacctgtattacttgagcagaacaaacactccaagcggaaccaccacgcagtccaggcttcagttttctcaggccggagcgagtgacattcgggaccagtctaggaactggcttcctggaccctgttaccgtcagcagcgagtatcaaagacatctgcggataacaacaacagtgaatactcgtggactggagctaccaagtaccacctcaatggcagagactctctggtgaatccgggcccggccatggccagccacaaagacgatgaagaaaagttttttcctcagagcggggttcttatctttgggaagcaaggcccagagaaaacaaatgtggatattgaaaaggtcatgattacagacgaagaggaaatcaggaccaccaatcccgtggctacggagcagtatggttctgtatctaccaacctccagagcggcaacacacaagcagctaccgcagatgtcaacacacaaggcgttcttccaggcatggtctggcaagacagagacgtgtacctgcaggggcctatttgggcaaagattccacacacggacggacattttcacccctctcccctcatgggcggatttggacttaaacaccctcctccacagattctcatcaagaacaccccggtacctgcgaatccttcgaccaccttcagtgcggcaaagtttgcttccttcattacacagtactccacggggcaggtcagcgtggagatcgagtgggagctgcagaaggagaacagcaaacgctggaatcccgagatccagtacacttccaactacaacaagtctgttaatgtggactttactgtggacactaatggcgtgtattcagagcctcgccccattggcaccagatacctgactcgtaatctgtaa

SEQ ID NO: 240 - protein, 735 aa, synthetic construct
  REGION 1..735: note = source = /note="Description of Artificial Sequence: Synthetic polypeptide"
MAADGYLPDWLEDTLSEGIRQWWKLKPGPPPPKPAERHKDDSRGLVLPGYKYLGPFNGLDKGEPVNEADAAALEHDKAYDRQLDSGDNPYLKYNHADAEFQERLKEDTSFGGNLGRAVFQAKKRVLEPLGLVEEPVKTAPGKKRPVEHSPAEPDSSSGTGKSGNQPARKRLNFGQTGDSDSVPDPQPLGQPPAAPSGLGTNTMATGSGAPMADNNEGADGVGNSSGNWHCDSTWMGDRVITTSTRTWALPTYNNHLYKQISSQSGASNDNHYFGYSTPWGYFDFNRFHCHFSPRDWQRLINNNWGFRPKRLNFKLFNIQVKEVTQNDGTTTIANNLTSTVQVFTDSEYQLPYVLGSAHQGCLPPFPADVFMVPQYGYLTLNNGSQAVGRSSFYCLGYFPSQMLRTGNNFTFSYTFEDVPFHSSYAHSQSLDRLMNPLIDQYLYYLSRTNTPSGTTTQSRLQFSQAGASDIRDQSRNWLPGPCYRQQRVSKTSADNNNSEYSWTGATKYHLNGRDSLVNPGPAMASHKDDEEKFFPQSGVLIFGKQGPEKTNVDIEKVMITDEEEIRTTNPVATEQYGSVSTNLQSGNTQAATADVNTQGVLPGMVWQDRDVYLQGPIWAKIPHTDGHFHPSPLMGGFGLKHPPPQILIKNTPVPANPSTTFSAAKFASFITQYSTGQVSVEIEWELQKENSKRWNPEIQYTSNYNKSVNVDFTVDTNGVYSEPRPIGTRYLTRNL

SEQ ID NO: 241 - protein, 735 aa, synthetic construct
  REGION 1..735: note = source = /note="Description of Artificial Sequence: Synthetic polypeptide"
MAADGYLPDWLEDTLSEGIRQWWKLKPGPPPPKPAERHKDDSRGLVLPGYKYLGPFNGLDKGEPVNEADAAALEHDKAYDRQLDSGDNPYLKYNHADAEFQERLKEDTSFGGNLGRAVFQAKKRVLEPLGLVEEPVKTAPGKKRPVEHSPAEPDSSSGTGKSGNQPARKRLNFGQTGDSDSVPDPQPLGQPPAAPSGLGTNTMATGSGAPMADNNEGADGVGNSSGNWHCDSTWMGDRVITTSTRTWALPTYNNHLYKQISSQSGASNDNHYFGYSTPWGYFDFNRFHCHFSPRDWQRLINNNWGFRPKRLNFKLFNIQVKEVTQNDGTTTIANNLTSTVQVFTDSEYQLPYVLGSAHQGCLPPFPADVFMVPQYGYLTLNNGSQAVGRSSFYCLEYFPSQMLRTGNNFTFSYTFEDVPFHSSYAHSQSLDRLMNPLIDQYLYYLSRTNTPSGTTTQSRLQFSQAGASDIRDQSRNWLPGPCYRQQRVSKTSADNNNSEYSWTGATKYHLNGRDSLVNPGPAMASHKDDEEKFFPQSGVLIFGKQGPEKTNVDIEKVMITDEEEIRTTNPVATEQYGSVSTNLQSGNTQAATADVNTQGVLPGMVWQDRDVYLQGPIWAKIPHTDGHFHPSPLMGGFGLKHPPPQILIKNTPVPANPSTTFSAAKFASFITQYSTGQVSVEIEWELQKENSKRWNPEIQYTSNYNKSVNVDFTVDTNGVYSEPRPIGTRYLTRNL

SEQ ID NO: 242 - protein, 735 aa, synthetic construct; identical to SEQ ID NO: 241
  REGION 1..735: note = source = /note="Description of Artificial Sequence: Synthetic polypeptide"

SEQ ID NO: 243 - DNA, 2211 bp, synthetic construct
  misc_feature 1..2211: note = source = /note="Description of Artificial Sequence: Synthetic polynucleotide"
  source 1..2211: mol_type = other DNA
atggctgccgatggttatcttccagattggctcgaggacactctctctgaaggaataagacagtggtggaagctcaaacctggcccaccaccaccaaagcccgcagagcggcataaggacgacagcaggggtcttgtgcttcctgggtacaagtacctcggacccttcaacggactcgacaagggggagccggtcaacgaggcagacgccgcggccctcgagcacgacaaggcctacgaccggcagctcgacagcggagacaacccgtacctcaagtacaaccacgccgacgcagagtttcaggagcgccttaaagaagatacgtcttttgggggcaacctcggacgagcagtcttccaggcgaaaaagagggttcttgaacctctgcggcctggtttgaggaaacctgttaagacggctccgggaaaaaagaggccggtagagcactctcctgtggagccagactcctcctcgggaaccggaaaagcgggccagcagcctgcaagaaaaagattaaattttggtcagactggagacgcagactccgtacctgacccccagcctctcggacagccaccagcagccccctctggtctgggatctactacaatggctacaggcagtggcgcaccaatggcagacaataacgagggtgccgatggagtgggtaattcctcaggaaattggcattgcgattcccaatggctggacgacagagtcatcgccaccagcacccgaacctgggccctgcccacatacaacaaccacctctacaagcaaatctccagccaatcaggagcctgcaacgacaaccactactttggctacagcaccccctgggggtattttgacttcaacagattccactgccacttttcaccacgtgactggcaaagactcatcaacagcaactggggattccggcccaaaagactcaacttcaagctctttaatattcaagtcaaagaggtcacgcagaatgacggtacgacgacgattgccaataaccttaccagcacggttcaggtgtttactgactcggagtaccagctcccgtacgtcccgggctcggcgcatcaaggatgcctcccgccgtttccagcggacgtcttcatggtcccacagtatggatacctcaccctgaacaacgggagtcaggcggtaggacgctcttccttttactgcctggagtactttccttctcagatgctgcgtactggaaacaactttcagttcagctacacttttgaagacgtgcctttccacagcagctacgctcactgccagagtctggatcggctgatgaatcctctgatcgaccagtacctgtattatctgaacaagacacaaacaaatagtggaactcttcagcagtctcggctactgtttagccaagctggaccaaccaacatgtctcttcaagctaaaaactggctgcctggaccttgctacagacagcagcgtctgtcaaaacaggcaaacgacaataacaactgcaactttccctggactgcagctacaaagtatcatctaaatggccgggactcgttggttaatccaggaccagctatggccagtcacaaggatgacgaagaaaagtttttccccatgcatggaaccctgatatttggtaaacaaggaacaaatgccaacgacgcggatttggaaaatgtcatgattacagatgaagaagaaatcaggcccaccaatcccgtggctacggagcagtacgggactgtgtcaaataatttgcaaaactcaaacactggtccaactacaggaactgtcaatcaccaaggagcgttacctggtatggtgtggcaggatcgagacgtgtacctgcagggacccatttgggccaagattcctcacaccgatggacactttcatccttctccactgatgggaggttttggactcaaacacccgcctcctcagatcatgatcaaaagcactcccgttccagccaatcctcccacaaacttcagttctgccaagtttgcttcttccatcacacagtattccacgggacaggtcagcgtggagatcgagtgggagctgcagaaggagaacagcaaacgctggaatcccgaaattcagtacacttccaactacaacaagtctgttaatgtggactttactgtggacactaatggtgtgtattcagagcctcgccccattggcaccagatacctgactcgtaatctgtaa

SEQ ID NO: 244 - protein, 736 aa, synthetic construct
  REGION 1..736: note = source = /note="Description of Artificial Sequence: Synthetic polypeptide"
MAADGYLPDWLEDTLSEGIRQWWKLKPGPPPPKPAERHKDDSRGLVLPGYKYLGPFNGLDKGEPVNEADAAALEHDKAYDRQLDSGDNPYLKYNHADAEFQERLKEDTSFGGNLGRAVFQAKKRVLEPLRPGLRKPVKTAPGKKRPVEHSPVEPDSSSGTGKAGQQPARKRLNFGQTGDADSVPDPQPLGQPPAAPSGLGSTTMATGSGAPMADNNEGADGVGNSSGNWHCDSQWLDDRVIATSTRTWALPTYNNHLYKQISSQSGACNDNHYFGYSTPWGYFDFNRFHCHFSPRDWQRLINSNWGFRPKRLNFKLFNIQVKEVTQNDGTTTIANNLTSTVQVFTDSEYQLPYVPGSAHQGCLPPFPADVFMVPQYGYLTLNNGSQAVGRSSFYCLEYFPSQMLRTGNNFQFSYTFEDVPFHSSYAHCQSLDRLMNPLIDQYLYYLNKTQTNSGTLQQSRLLFSQAGPTNMSLQAKNWLPGPCYRQQRLSKQANDNNNCNFPWTAATKYHLNGRDSLVNPGPAMASHKDDEEKFFPMHGTLIFGKQGTNANDADLENVMITDEEEIRPTNPVATEQYGTVSNNLQNSNTGPTTGTVNHQGALPGMVWQDRDVYLQGPIWAKIPHTDGHFHPSPLMGGFGLKHPPPQIMIKSTPVPANPPTNFSSAKFASSITQYSTGQVSVEIEWELQKENSKRWNPEIQYTSNYNKSVNVDFTVDTNGVYSEPRPIGTRYLTRNL

SEQ ID NO: 245 - DNA, 2208 bp, synthetic construct
  misc_feature 1..2208: note = source = /note="Description of Artificial Sequence: Synthetic polynucleotide"
  source 1..2208: mol_type = other DNA
atggctgccgatggttatcttccagattggctcgaggacactctctctgaaggaataagacagtggtggaagctcaaacctggcccaccaccaccaaagcccgcagagcggcataaggacgacagcaggggtcttgtgcttcctgggtacaagtacctcggacccttcaacggactcgacaagggagagccggtcaacgaggcagacgccgcggccctcgagcacgacaaggcctacgaccggcagctcgacagcggagacaacccgtacctcaagtacaaccacgccgacgcggagtttcaggagcgccttaaagaggatacgtcttttgggggcaacctcggacgagcagtcttccaggcaaaaaagagggttctggaacctctgggcctggttgaggagcctgttaagacggctccgggaaaaaagaggccggtagagcactctcctgcagagccagattcctcctccggaactggaaagtcgggcaaccagcctgcaagaaagagattgaatttcggtcagactggagactcagactccgtacctgacccccagcctctcggacagccaccagcagccccctctggtctgggaactaatacgatggctacaggcagtggcgcaccaatggcagacaataacgagggcgccgacggagtgggtaattcctcgggaaattggcattgcgattccacatggatgggcgacagagtcatcaccaccagcacccgaacctgggccctgcccacctacaacaaccatctgtacaagcaaatatccagccagtctggagccagcaacgacaatcactactttggctacagcaccccctgggggtattttgacttcaacagattccactgccacttttcaccacgtgactggcaaagactcatcaacaacaactggggattccgacccaagagactcaacttcaagctctttaacattcaagtcaaagaggtcacgcagaatgacggtacgacgacgattgccaataaccttaccagcacggttcaggtgtttactgactcggagtaccagctcccgtacgtcctcggctcggcgcatcaaggatgcctcccgccgttcccagcagacgtcttcatggtgccacagtatggatacctcaccctgaacaacgggagtcaggcagtaggacgctcttcattttactgcctagagtactttccttctcagatgctgcgtaccggaaacagctttaccttcagctacacctttgaggacgttcctttccacagcagctacgctcacagccagagtttggaccgtctcatgaatcctctcatcgaccagtacctgtattacttgagcagaacaaacactccaagcggaaccaccacgcagtccaggcttcagttttctcaggccggagcgagtgacattcgggaccagtctaggaactggcttcctggaccctgttaccgtcagcagcgagtatcaaagacatctgcggataacaacaacagtgaatactcgtggactggagctaccaagtaccacctcaatggcagagactctctggtgaatccgggcccggccatggccagccacaaagacgatgaagaaaagttctttcctcagagcggggttcttatctttgggaagcaaggctcagagaaaacaaatgtggatattgaaaaggtcatgattacagacgaagaggaaatcaggaccaccaatcccgtggctacggagcagtatggttctgtatctaccaacctccagagcggcaacacacaagcagctaccgcagatgtcaacacacaaggcgttcttccaggcatggtctggcaagacagagacgtgtacctgcaggggcctatttgggcaaagattccacacacggacggacattttcacccctctcccctcatgggcggatttggacttaaacaccctcctccacagattctcatcaagaacaccccggtacctgcgaatccttcgaccaccttcagtgcggcaaagtttgcttccttcattacacagtactccacggggcaggtcagcgtggagatcgagtgggagctgcagaaggagaacagcaaacgctggaatcccgagatccagtacacttccaactacaacaagtctgttaatgtggactttactgtggacactaatggcgtgtattcagagcctcgccccattggcaccagatacctgactcgtaatctgtaa

SEQ ID NO: 246 - protein, 735 aa, synthetic construct
  REGION 1..735: note = source = /note="Description of Artificial Sequence: Synthetic polypeptide"
MAADGYLPDWLEDTLSEGIRQWWKLKPGPPPPKPAERHKDDSRGLVLPGYKYLGPFNGLDKGEPVNEADAAALEHDKAYDRQLDSGDNPYLKYNHADAEFQERLKEDTSFGGNLGRAVFQAKKRVLEPLGLVEEPVKTAPGKKRPVEHSPAEPDSSSGTGKSGNQPARKRLNFGQTGDSDSVPDPQPLGQPPAAPSGLGTNTMATGSGAPMADNNEGADGVGNSSGNWHCDSTWMGDRVITTSTRTWALPTYNNHLYKQISSQSGASNDNHYFGYSTPWGYFDFNRFHCHFSPRDWQRLINNNWGFRPKRLNFKLFNIQVKEVTQNDGTTTIANNLTSTVQVFTDSEYQLPYVLGSAHQGCLPPFPADVFMVPQYGYLTLNNGSQAVGRSSFYCLEYFPSQMLRTGNSFTFSYTFEDVPFHSSYAHSQSLDRLMNPLIDQYLYYLSRTNTPSGTTTQSRLQFSQAGASDIRDQSRNWLPGPCYRQQRVSKTSADNNNSEYSWTGATKYHLNGRDSLVNPGPAMASHKDDEEKFFPQSGVLIFGKQGSEKTNVDIEKVMITDEEEIRTTNPVATEQYGSVSTNLQSGNTQAATADVNTQGVLPGMVWQDRDVYLQGPIWAKIPHTDGHFHPSPLMGGFGLKHPPPQILIKNTPVPANPSTTFSAAKFASFITQYSTGQVSVEIEWELQKENSKRWNPEIQYTSNYNKSVNVDFTVDTNGVYSEPRPIGTRYLTRNL

SEQ ID NO: 247 - DNA, 2211 bp, synthetic construct; identical to SEQ ID NO: 137
  misc_feature 1..2211: note = source = /note="Description of Artificial Sequence: Synthetic polynucleotide"
  source 1..2211: mol_type = other DNA

SEQ ID NO: 248 - protein, 736 aa, synthetic construct
  REGION 1..736: note = source = /note="Description of Artificial Sequence: Synthetic polypeptide"
MAADGYLPDWLEDTLSEGIRQWWKLKPGPPPPKPAERHKDDSRGLVLPGYKYLGPGNGLDKGEPVNAADAAALEHDKAYDQQLKAGDNPYLKYNHADAEFQERLKEDTSFGGNLGRAVFQAKKRLLEPLGLVEEAAKTAPGKKRPVEQSPQEPDSSAGIGKSGSQPAKKKLNFGQTGDTESVPDPQPIGEPPAAPSGVGSLTMASGGGAPVADNNEGADGVGSSSGNWHCDSQWLGDRVITTSTRTWALPTYNNHLYKQISNSTSGGSSNDNAYFGYSTPWGYFDFNRFHCHFSPRDWQRLINNNWGFRPKRLNFKLFNIQVKEVTDNNGVKTIANNLTSTVQVFTDSDYQLPYVLGSAHEGCLPPFPADVFMIPQYGYLTLNDGGQAVGRSSFYCLEYFPSQMLRTGNNFQFSYEFENVPFHSSYAHSQSLDRLMNPLIDQYLYYLSKTINGSGQNQQTLKFSVAGPSNMAVQGRNYIPGPSYRQQRVSTTVTQNNNSEFAWPGASSWALNGRNSLMNPGPAMASHKEGEDRFFPLSGSLIFGKQGTGRDNVDADKVMITNEEEIKTTNPVATESYGQVATNHQSAQAQAQTGWVQNQGILPGMVWQDRDVYLQGPIWAKIPHTDGNFHPSPLMGGFGMKHPPPQILIKNTPVPADPPTAFNKDKLNSFITQYSTGQVSVEIEWELQKENSKRWNPEIQYTSNYYKSNNVEFAVSTEGVYSEPRPIGTRYLTRNL

SEQ ID NO: 249 - DNA, 2211 bp, synthetic construct
  misc_feature 1..2211: note = source = /note="Description of Artificial Sequence: Synthetic polynucleotide"
  source 1..2211: mol_type = other DNA
atggctgccgatggttatcttccagattggctcgaggacactctctctgaaggaataagacagtggtggaagctcaaacctggcccaccaccaccaaagcccgcagagcggcataaggacgacagcaggggtcttgtgcttcctgggtacaagtacctcggacccggcaacggactcgacaagggggagccggtcaacgcagcagacgcggcggccctcgagcacgacaaggcctacgaccagcagctcaaggccggagacaacccgtacctcaagtacaaccacgccgacgccgagttccaggagcggctcaaagaagatacgtcttttgggggcaacctcgggcgagcagtcttccaggccaaaaagaggcttcttgaacctcttggtctggttgaggaagcggctaagacggctcctggaaagaagaggcctgtagagcagtctcctcaggaaccggactcctccgcgggtattggcaaatcgggttcacagcccgctaaaaagaaactcaatttcggtcagactggcgacacagagtcagtccccgaccctcaaccaatcggagaacctcccgcagccccctcaggtgtgggatctcttacaatggcttcaggtggtggcgcaccagtggcagacaataacgaaggtgccgatggagtgggtagttcctcgggaaattggcattgcgattcccaatggctgggggacagagtcatcaccaccagcacccgaacctgggccctgcccacctacaacaatcacctctacaagcaaatctccaacagcacatctggaggatcttcaaatgacaacgcctacttcggctacagcaccccctgggggtattttgacttcaacagattccactgccacttctcaccacgtgactggcagcgactcatcaacaacaactggggattccggcctaagcgactcaacttcaagctcttcaacattcaggtcaaagaggttacggacaacaatggagtcaagaccatcgccaataaccttaccagcacggtccaggtcttcacggactcagactatcagctcccgtacgtgctcgggtcggctcacgagggctgcctcccgccgttcccagcggacgttttcatgattcctcagtacgggtatctgacgcttaatgatgggagccaggccgtgggtcgttcgtccttttactgcctggaatatttcccgtcgcaaatgctaagaacgggtaacaacttccagttcagctacgagtttgagaacgtacctttccatagcagctacgctcacagccaaagcctggaccgactaatgaatccactcatcgaccaatacttgtactatctctcaaagactattaacggttctggacagaatcaacaaacgctaaaattcagcgtggccggacccagcaacatggctgtccagggaagaaactacatacctggacccagctaccgacaacaacgtgtctcaaccactgtgactcaaaacaacaacagcgaatttgcttggcctggagcttcttcttgggctctcaatggacgtaatagcttgatgaatcctggacctgctatggccagccacaaagaaggagaggaccgtttctttcctttgtctggatctttaatttttggcaaacaaggaactggaagagacaacgtggatgcggacaaagtcatgataaccaacgaagaagaaattaaaactactaacccggtagcaacggagtcctatggacaagtggccacaaaccaccagagtgcccaagcacaggcgcagaccggctgggttcaaaaccaaggaatacttccgggtatggtttggcaggacagagatgtgtacctgcaaggacccatttgggccaaaattcctcacacggacggcaactttcacccttctccgctaatgggagggtttggaatgaagcacccgcctcctcagatcctcatcaaaaacacacctgtacctgcggatcctccaacggctttcaataaggacaagctgaactctttcatcacccagtattctactggccaagtcagcgtggagattgagtgggagctgcagaaggaaaacagcaagcgctggaacccggagatccagtacacttccaactattacaagtctaataatgttgaatttgctgttaatactgaaggtgtatatagtgaaccccgccccattggcaccagatacctgactcgtaatctgtaa

SEQ ID NO: 250 - protein, 736 aa, synthetic construct
  REGION 1..736: note = source = /note="Description of Artificial Sequence: Synthetic polypeptide"
MAADGYLPDWLEDTLSEGIRQWWKLKPGPPPPKPAERHKDDSRGLVLPGYKYLGPGNGLDKGEPVNAADAAALEHDKAYDQQLKAGDNPYLKYNHADAEFQERLKEDTSFGGNLGRAVFQAKKRLLEPLGLVEEAAKTAPGKKRPVEQSPQEPDSSAGIGKSGSQPAKKKLNFGQTGDTESVPDPQPIGEPPAAPSGVGSLTMASGGGAPVADNNEGADGVGSSSGNWHCDSQWLGDRVITTSTRTWALPTYNNHLYKQISNSTSGGSSNDNAYFGYSTPWGYFDFNRFHCHFSPRDWQRLINNNWGFRPKRLNFKLFNIQVKEVTDNNGVKTIANNLTSTVQVFTDSDYQLPYVLGSAHEGCLPPFPADVFMIPQYGYLTLNDGSQAVGRSSFYCLEYFPSQMLRTGNNFQFSYEFENVPFHSSYAHSQSLDRLMNPLIDQYLYYLSKTINGSGQNQQTLKFSVAGPSNMAVQGRNYIPGPSYRQQRVSTTVTQNNNSEFAWPGASSWALNGRNSLMNPGPAMASHKEGEDRFFPLSGSLIFGKQGTGRDNVDADKVMITNEEEIKTTNPVATESYGQVATNHQSAQAQAQTGWVQNQGILPGMVWQDRDVYLQGPIWAKIPHTDGNFHPSPLMGGFGMKHPPPQILIKNTPVPADPPTAFNKDKLNSFITQYSTGQVSVEIEWELQKENSKRWNPEIQYTSNYYKSNNVEFAVNTEGVYSEPRPIGTRYLTRNL

SEQ ID NO: 251 - DNA, 2208 bp, synthetic construct
  misc_feature 1..2208: note = source = /note="Description of Artificial Sequence: Synthetic polynucleotide"
  source 1..2208: mol_type = other DNA
atggctgccgatggttatcttccagattggctcgaggacactctctctgaaggaataagacagcggtggaagctcaaacctggcccaccaccaccagagcccgcagagcggcataaggacgacagcaggggtcttgtgcttcctgggtacaagtacctcggacccttcaacggactcgacaagggagagccggtcaacgaggcagacgccgcggccctcgagcacgacaaagcctacgaccggcagctcgacagcggagacaacccgtacctcaagtacaaccacgccgacgcggagtttcaggagcgccttaaagaagatacgtcttttgggggcaacctcggacgagcagtcttccaggcgaaaaagagggtacttgaacctctgggcctggttgaggaacctgttaagacggctccgggaaaaaagaggccggtagagcactctcctgtggagccagactcctcctcgggaaccggaaaggcgggccagcagcctgcaagaaaaagattgaattttggtcagactggagacgcagactcagtacctgacccccagcctctcggacagccaccagcagccccctctggtctgggaactaatacgatggctacaggcagtggcgcaccaatggcagacaataacgagggcgccgacggagtgggtaattcctcgggaaattggcattgcgattccacatggatgggcgacagagtcatcaccaccagcacccgaacctgggccctgcccacctacaacaaccacctctacaaacaaatttccagccaatcaggagcctcgaacgacaatcactactttggctacagcaccccttgggggtattttgacttcaacagattccactgccacttttcaccacgtgactggcaaagactcatcaacaacaactggggattccgacccaagagactcaacttcaagctctttaacattcaagtcaaagaggtcacgcagaatgacggtacgacgacgattgccaataaccttaccggcacggttcaggtgtttactgactcggagtaccagctcccgtacgtcctcggctcggcgcatcaaggatgcctcccgccgttcccagcagacgtcttcatggtgccacagtatggatacctcaccctgaacaacgggagtcaggcagtaggacgctcttcattttactgcctggagtactttccttctcagatgctgcgtaccggaaacaactttaccttcagctacacttttgaggacgttcctttccacagcagctacgctcacagccagagtctgggccgtctcatgaatcctctcatcgaccagtacctgtattacttgagcagaacaaacactccaagtggaaccaccacgcagtcaaggcttcagttttctcaggccggagcgagtgacattcgggaccagtctaggaactggcttcctggaccctgttaccgccagcagcgagtatcaaagacatctgcggataacaacaacagtgaatactcgtggactggagctaccaagtaccacctcaatggcagagactctctggtgaatccgggcccggccatggcaagccacaaggacgatgaagaaaagttttttcctcagagcggggttctcatctttgggaagcaaggctcagagaaaacaaatgtggacattgaaaaggtcatgattacagacgaagaggaaatcaggacaaccaatcccgtggctacggagcagtatggttctgtatctaccaacctccagagaggcaacagacaagcagctaccgcagatgtcaacacacaaggcgttcttccaggcatggtctggcaggacagagatgtgtaccttcaggggcccatctgggcaaagattccacacacggacggacattttcacccctctcccctcatgggtggattcggacttaaacaccctcctccacagattctcatcaagaacaccccggtacctgcgaatccttcgaccaccttcagtgcggcaaagtttgcttccttcatcacacagtactccacgggacaggtcagcgtggagatcgagtgggagctgcagaaggaaaacagcaaacgctggaatcccgaaattcagtacacttccaactacaacaagtctgttaatgtggactttactgtggacactaatggcgtgtattcagagcctcgccccattggcaccagatacctgactcgtaatctgtaa

SEQ ID NO: 252 - protein, 735 aa, synthetic construct
  REGION 1..735: note = source = /note="Description of Artificial Sequence: Synthetic polypeptide"
MAADGYLPDWLEDTLSEGIRQRWKLKPGPPPPEPAERHKDDSRGLVLPGYKYLGPFNGLDKGEPVNEADAAALEHDKAYDRQLDSGDNPYLKYNHADAEFQERLKEDTSFGGNLGRAVFQAKKRVLEPLGLVEEPVKTAPGKKRPVEHSPVEPDSSSGTGKAGQQPARKRLNFGQTGDADSVPDPQPLGQPPAAPSGLGTNTMATGSGAPMADNNEGADGVGNSSGNWHCDSTWMGDRVITTSTRTWALPTYNNHLYKQISSQSGASNDNHYFGYSTPWGYFDFNRFHCHFSPRDWQRLINNNWGFRPKRLNFKLFNIQVKEVTQNDGTTTIANNLTGTVQVFTDSEYQLPYVLGSAHQGCLPPFPADVFMVPQYGYLTLNNGSQAVGRSSFYCLEYFPSQMLRTGNNFTFSYTFEDVPFHSSYAHSQSLGRLMNPLIDQYLYYLSRTNTPSGTTTQSRLQFSQAGASDIRDQSRNWLPGPCYRQQRVSKTSADNNNSEYSWTGATKYHLNGRDSLVNPGPAMASHKDDEEKFFPQSGVLIFGKQGSEKTNVDIEKVMITDEEEIRTTNPVATEQYGSVSTNLQRGNRQAATADVNTQGVLPGMVWQDRDVYLQGPIWAKIPHTDGHFHPSPLMGGFGLKHPPPQILIKNTPVPANPSTTFSAAKFASFITQYSTGQVSVEIEWELQKENSKRWNPEIQYTSNYNKSVNVDFTVDTNGVYSEPRPIGTRYLTRNL

SEQ ID NO: 253 - DNA, 2208 bp, synthetic construct
  misc_feature 1..2208: note = source = /note="Description of Artificial Sequence: Synthetic polynucleotide"
  source 1..2208: mol_type = other DNA
atggctgccgatggttatcttccagattggctcgaggacactctctctgaaggaataagacagcggtggaagctcaaacctggcccaccaccaccagagcccgcagagcggcataaggacgacagcaggggtcttgtgcttcctgggtacaagtacctcggacccttcaacggactcgacaagggagagccggtcaacgaggcagacgccgcggccctcgagcacgacaaagcctacgaccggcagctcgacagcggagacaacccgtacctcaagtacaaccacgccgacgcggagtttcaggagcgccttaaagaagatacgtcctttgggggcaacctcggacgagcagtcttccaggcgaaaaagagggtacttgaacctctgggcctggttgaggaacctgttaagacggctccgggaaaaaagaggccggtagagcactctcctgtggagccagactcctcctcgggaaccggaaaggcgggccagcagcctgcaagaaaaagattgaattttggtcagactggagacgcagactcagtacctgacccccagcctctcggacagccaccagcagccccctctggtctgggaactaatacgatggctacaggcagtggcgcaccaatggcagacaataacgagggcgccgacggagtgggtaattcctcgggaaattggcattgcgattccacatggatgggcgacagagtcatcaccaccagcacccgaacctgggccctgcccacctacaacaaccacctctacaaacaaatttccagccaatcaggagcctcgaacgacaatcactactttggctacagcaccccttgggggtattttgacttcaacagattccactgccacttttcaccacgtgactggcaaagactcatcaacaacaactggggattccgacccaagagactcaacttcaagctctttaacattcaagtcaaagaggtcacgcagaatgacggtacgacgacgattgccaataaccttaccagcacggttcaggtgtttactgactcggagtaccagctcccgtacgtcctcggctcggcgcatcaaggatgcctcccgccgttcccagcagacgtcttcatggtgccacagtatggatacctcaccctgaacaacgagagtcaggcagtaggacgctcttcattttactgcctggagtactttccttctcagatgctgcgtaccggaaacaactttaccttcagctacacttttgaggacgttcctttccacagcagctacgctcacagccagagtctgggccgtctcatgaatcctctcatcgaccagtacctgtattacttgagcagaacaaacactccaagtggaaccaccacgcagtcaaggcttcagttttctcaggccggagcgagtgacattcgggaccagtctaggaactggcttcctggaccctgttaccgccagcagcgagtatcaaagacatctgcggataacaacaacagtgaatactcgtggactggagctaccaagtaccacctcaatggcagagactctctggtgaatccgggcccggccatggcaagccacaaggacgatgaagaaaagttttttcctcagagcggggttctcatctttgggaagcaaggctcagagaaaacaaatgtggacattgaaaaggtcatgattacagacgaagaggaaatcaggacaaccaatcccgtggctacggagcagtatggttctgtatctaccaacctccagagaggcaacagacaagcagctaccgcagatgtcaacacacaaggcgttcttccaggcatggtctggcaggacagagatgtgtaccttcaggggcccatctgggcaaagattccacacacggacggacattttcacccctctcccctcatgggtggattcggacttaaacaccctcctccacagattctcatcaagaacaccccggtacctgcgaatccttcgaccaccttcagtgcggcaaagtttgcttccttcatcacacagtactccacgggacaggtcagcgtggagatcgagtgggagctgcagaaggaaaacagcaaacgctggaatcccgaaattcagtacacttccaactacaacaagtctgttaatgtggactttactgtggacactaatggcgtgtattcagagcctcgccccattggcaccagatacctgactcgtaatctgtaa

SEQ ID NO: 254 - protein, 735 aa, synthetic construct
  REGION 1..735: note = source = /note="Description of Artificial Sequence: Synthetic polypeptide"
MAADGYLPDWLEDTLSEGIRQRWKLKPGPPPPEPAERHKDDSRGLVLPGYKYLGPFNGLDKGEPVNEADAAALEHDKAYDRQLDSGDNPYLKYNHADAEFQERLKEDTSFGGNLGRAVFQAKKRVLEPLGLVEEPVKTAPGKKRPVEHSPVEPDSSSGTGKAGQQPARKRLNFGQTGDADSVPDPQPLGQPPAAPSGLGTNTMATGSGAPMADNNEGADGVGNSSGNWHCDSTWMGDRVITTSTRTWALPTYNNHLYKQISSQSGASNDNHYFGYSTPWGYFDFNRFHCHFSPRDWQRLINNNWGFRPKRLNFKLFNIQVKEVTQNDGTTTIANNLTSTVQVFTDSEYQLPYVLGSAHQGCLPPFPADVFMVPQYGYLTLNNESQAVGRSSFYCLEYFPSQMLRTGNNFTFSYTFEDVPFHSSYAHSQSLGRLMNPLIDQYLYYLSRTNTPSGTTTQSRLQFSQAGASDIRDQSRNWLPGPCYRQQRVSKTSADNNNSEYSWTGATKYHLNGRDSLVNPGPAMASHKDDEEKFFPQSGVLIFGKQGSEKTNVDIEKVMITDEEEIRTTNPVATEQYGSVSTNLQRGNRQAATADVNTQGVLPGMVWQDRDVYLQGPIWAKIPHTDGHFHPSPLMGGFGLKHPPPQILIKNTPVPANPSTTFSAAKFASFITQYSTGQVSVEIEWELQKENSKRWNPEIQYTSNYNKSVNVDFTVDTNGVYSEPRPIGTRYLTRNL

SEQ ID NO: 255 - DNA, 2208 bp, synthetic construct
  misc_feature 1..2208: note = source = /note="Description of Artificial Sequence: Synthetic polynucleotide"
  source 1..2208: mol_type = other DNA
atggctgccgatggttatcttccagattggctcgaggacactctctctgaaggaataagacagcggtggaagctcaaacctggcccaccaccaccagagcccgcagagcggcataaggacgacagcaggggtcttgtgcttcctgggtacaagtacctcggacccttcaacggactcgacaagggagagccggtcaacgaggcagacgccgcggccctcgagcacgacaaagcctacgaccggcagctcgacagcggagacaacccgtacctcaagtacaaccacgccgacgcggagtttcaggagcgccttaaagaagatacgtcttttgggggcaacctcggacgagcagtcttccaggcgaaaaagagggtacttgaacctctgggcctggttgaggaacctgttaagacggctccgggaaaaaagaggccggtagagcactctcctgtggagccagactcctcctcgggaaccggaaaggcgggccagcagcctgcaagaaaaagattgaattttggtcagactggagacgcagactcagtacctgacccccagcctctcggacagccaccagcagccccctctggtctgggaactaatacgatggctacaggcagtggcgcaccaatggcagacaataacgagggcgccgacggagtgggtaattcctcgggaaattggcattgcgattccacatggatgggcgacagagtcatcaccaccagcacccgaacctgggccctgcccacctacaacaaccacctctacaaacaaatttccagccaatcaggagcctcgaacgacaatcactactttggctacagcaccccttgggggtattttgacttcaacagattccactgccacttttcaccacgtgactggcaaagactcatcaacaacaactggggattccgacccaagagactcaacttcaagctctttaacattcaagtcaaagaggtcacgcagaatgacggtacgacgacgattgccaataaccttaccagcacggttcaggtgtttactgactcggagtaccagctcccgtacgtcctcggctcggcgcatcaaggatgcctcccgccgttcccagcagacgtcttcatggtaccacagtatggatacctcaccctgaacaacgggagtcaggcagtaggacgctcttcattttactgcctggagtactttccttctcagatgctgcgtaccggaaacaactttaccttcagctacacttttgaggacgttcctttccacagcagctacgctcacagccagagtctgggccgtctcatgaatcctctcatcgaccagtacctgtattacttgagcagaacaaacactccaagtggaaccaccacgcagtcaaggcttcagttttctcaggccggagcgagtgacattcgggaccagtctaggaactggcttcctggaccctgttaccgccagcagcgagtatcaaagacatctgcggataacaacaacagtgaatactcgtggactggagctaccaagtaccacctcaatggcagagactctctggtgaatccgggcccggccatggcaagccacaaggacgatgaagaaaagttttttcctcagagcggggttctcatctttgggaagcaaggctcagagaaaacaaatgtggacattgaaaaggtcatgattacagacgaagaggaaatcaggacaaccaatcccgtggctacggagcagtatggttctgtatctaccaacctccagagaggcaacagacaagcagctaccgcagatgtcaacacacaaggcgttcttccaggcatggtctggcaggacagagatgtgtaccttcaggggcccatctgggcaaagattccacacacggacggacattttcacccctctcccctcatgggtggattcggacttaaacaccctcctccacagattctcatcaagaacaccccggtacctgcgaatccttcgaccaccttcagtgcggcaaagtttgcttccttcatcacacagtactccacgggacaggtcagcgtggagatcgagtgggagctgcagaaggaaaacagcaaacgctggaatcccgaaattcagtacacttccaactacaacaagtctgttaatgtggactttactgtggacactaatggcgtgtattcagagcctcgccccattggcaccagatacctgactcgtaatctgtaa

SEQ ID NO: 256 - protein, 735 aa, synthetic construct
  REGION 1..735: note = source = /note="Description of Artificial Sequence: Synthetic polypeptide"
MAADGYLPDWLEDTLSEGIRQRWKLKPGPPPPEPAERHKDDSRGLVLPGYKYLGPFNGLDKGEPVNEADAAALEHDKAYDRQLDSGDNPYLKYNHADAEFQERLKEDTSFGGNLGRAVFQAKKRVLEPLGLVEEPVKTAPGKKRPVEHSPVEPDSSSGTGKAGQQPARKRLNFGQTGDADSVPDPQPLGQPPAAPSGLGTNTMATGSGAPMADNNEGADGVGNSSGNWHCDSTWMGDRVITTSTRTWALPTYNNHLYKQISSQSGASNDNHYFGYSTPWGYFDFNRFHCHFSPRDWQRLINNNWGFRPKRLNFKLFNIQVKEVTQNDGTTTIANNLTSTVQVFTDSEYQLPYVLGSAHQGCLPPFPADVFMVPQYGYLTLNNGSQAVGRSSFYCLEYFPSQMLRTGNNFTFSYTFEDVPFHSSYAHSQSLGRLMNPLIDQYLYYLSRTNTPSGTTTQSRLQFSQAGASDIRDQSRNWLPGPCYRQQRVSKTSADNNNSEYSWTGATKYHLNGRDSLVNPGPAMASHKDDEEKFFPQSGVLIFGKQGSEKTNVDIEKVMITDEEEIRTTNPVATEQYGSVSTNLQRGNRQAATADVNTQGVLPGMVWQDRDVYLQGPIWAKIPHTDGHFHPSPLMGGFGLKHPPPQILIKNTPVPANPSTTFSAAKFASFITQYSTGQVSVEIEWELQKENSKRWNPEIQYTSNYNKSVNVDFTVDTNGVYSEPRPIGTRYLTRNL

SEQ ID NO: 257 - DNA, 2208 bp, synthetic construct
  misc_feature 1..2208: note = source = /note="Description of Artificial Sequence: Synthetic polynucleotide"
  source 1..2208: mol_type = other DNA
atggctgccgatggttatcttccagattggctcgaggacactctctctgaaggaataagacagcggtggaagctcaaacctggcccaccaccaccagagcccgcagagcggcataaggacgacagcaggggtcttgtgcttcctgggtacaagtacctcggacccttcaacggactcgacaagggagagccggtcaacgaggcagacgccgcggccctcgagcacgacaaagcctacgaccggcagctcgacagcggagacaacccgtacctcaagtacaaccacgccgacgcggagtttcaggagcgccttaaagaagatacgtcttttgggggcaacctcggacgagcagtcttccaggcgaaaaagagggtactcgaacctctgggcctggttgaggaacctgttaagacggctccgggaaaaaagaggccggtagagcactctcctgtggagccagactcctcctcgggaaccggaaaggcgggccagcagcctgcaagaaaaagattgaattttggtcagactggagacgcagactcagtacctgacccccagcctctcggacagccaccagcagccccctctggtctgggaactaatacgatggctacaggcagtggcgcaccaatggcagacaataacgagggcgccgacggagtgggtaattcctcgggaaattggcattgcgattccacatggatgggcgacagagtcatcaccaccagcacccgaacctgggccctgcccacctacaacaaccacctctacaaacaaatttccagccaatcaggagcctcgaacgacaatcactactttggctacagcaccccttgggggtattttgacttcaacagattccactgccacttttcaccacgtgactggcaaagactcatcaacaacaactggggattccgacccaagagactcaacttcaagctctttaacattcaagtcaaagaggtcacgcagaatgacggtacgacgacgattgccaataaccttaccagcacggttcaggtgtttactgactcggagtaccagctcccgtacgtcctcggctcggcgcatcaaggatgcctcccgccgttcccagcagacgtcttcatggtgccacagtatggatacctcaccctgaacaacgggagtcaggcagcaggacgctcttcattttactgcctggagtactttccttctcagatgctgcgtaccggaaacaactttaccttcagctacacttttgaggacgttcctttccacagcagctacgctcacagccagagtctgggccgtctcatgaatcctctcatcgaccagtacctgtattacttgagcagaacaaacactccaagtggaaccaccacgcagtcaaggcttcagttttctcaggccggagcgagtgacattcgggaccagtctaggaactggcttcctggaccctgttaccgccagcagcgagtatcaaagacatctgcggataacaacaacagtgaatactcgtggactggagctaccaagtaccacctcaatggcagagactctctggtgaatccgggcccggccatggcaagccacaaggacgatgaagaaaagttttttcctcagagcggggttctcatctttgggaagcaaggctcagagaaaacaaatgtggacattgaaaaggtcatgattacagacgaagaggaaatcaggacaaccaatcccgtggctacggagcagtatggttctgtatctaccaacctccagagaggcaacagacaagcagctaccgcagatgtcaacacacaaggcgttcttccaggcatggtctggcaggacagagatgtgtaccttcaggggcccatctgggcaaagattccacacacggacggacattttcacccctctcccctcatgggtggattcggacttaaacaccctcctccacagattctcatcaagaacaccccggtacctgcgaatccttcgaccaccttcagtgcggcaaagtttgcttccttcatcacacagtactccacgggacaggtcagcgtggagatcgagtgggagctgcagaaggaaaacagcaaacgctggaatcccgaaattcagtacacttccaactacaacaagtccgttaatgtggactttactgtggacactaatggcgtgtattcagagcctcgccccattggcaccagatacctgactcgtaatctgtaa

SEQ ID NO: 258 - protein, 735 aa, synthetic construct
  REGION 1..735: note = source = /note="Description of Artificial Sequence: Synthetic polypeptide"
MAADGYLPDWLEDTLSEGIRQRWKLKPGPPPPEPAERHKDDSRGLVLPGYKYLGPFNGLDKGEPVNEADAAALEHDKAYDRQLDSGDNPYLKYNHADAEFQERLKEDTSFGGNLGRAVFQAKKRVLEPLGLVEEPVKTAPGKKRPVEHSPVEPDSSSGTGKAGQQPARKRLNFGQTGDADSVPDPQPLGQPPAAPSGLGTNTMATGSGAPMADNNEGADGVGNSSGNWHCDSTWMGDRVITTSTRTWALPTYNNHLYKQISSQSGASNDNHYFGYSTPWGYFDFNRFHCHFSPRDWQRLINNNWGFRPKRLNFKLFNIQVKEVTQNDGTTTIANNLTSTVQVFTDSEYQLPYVLGSAHQGCLPPFPADVFMVPQYGYLTLNNGSQAAGRSSFYCLEYFPSQMLRTGNNFTFSYTFEDVPFHSSYAHSQSLGRLMNPLIDQYLYYLSRTNTPSGTTTQSRLQFSQAGASDIRDQSRNWLPGPCYRQQRVSKTSADNNNSEYSWTGATKYHLNGRDSLVNPGPAMASHKDDEEKFFPQSGVLIFGKQGSEKTNVDIEKVMITDEEEIRTTNPVATEQYGSVSTNLQRGNRQAATADVNTQGVLPGMVWQDRDVYLQGPIWAKIPHTDGHFHPSPLMGGFGLKHPPPQILIKNTPVPANPSTTFSAAKFASFITQYSTGQVSVEIEWELQKENSKRWNPEIQYTSNYNKSVNVDFTVDTNGVYSEPRPIGTRYLTRNL

SEQ ID NO: 259 - protein, 738 aa, synthetic construct; identical to SEQ ID NO: 101
  REGION 1..738: note = source = /note="Description of Artificial Sequence: Synthetic polypeptide"

SEQ ID NO: 260 - DNA, 2217 bp, synthetic construct
  misc_feature 1..2217: note = source = /note="Description of Artificial Sequence: Synthetic polynucleotide"
  source 1..2217: mol_type = other DNA
atggctgctgacggttatcttccagattggctcgaggacaacctctctgagggcattcgcgagtggtgggacctgaaacctggagcccccaagcccaaggccaaccagcagaagcaggacgacggccggggtctggtgcttcctggctacaagtacctcggacccttcaacggactcgacaagggggagcccgtcaacgcggcggacgcagcggccctcgagcacgacaaggcctacgaccagcagctcaaagcgggtgacaatccgtacctgcggtataaccacgccgacgccgagtttcaggagcgtctgcaagaagatacgtcttttgggggcaacctcgggcgagcagtcttccaggccaagaagcgggttctcgaacctctcggtctggttgaggaagctgctaagacggctcctggaaagaagagaccggtagaaccgtcacctcagcgttcccccgactcctccacgggcatcggcaagaaaggccagcagcccgctaaaaagagactgaactttggtcagactggcgactcagagtcagtccccgaccctcaaccaatcggagaaccaccagcaggcccctctggtctgggatctggtacaatggctgcaggcggtggcgctccaatggcagacaataacgaaggcgccgacggagtgggtagttcctcaggaaattggcattgcgattccacatggctgggcgacagagtcatcaccaccagcacccgaacctgggccctgcccacctacaacaaccacctctacaagcaaatatccaatgggacatcgggaggaagcaccaacgacaacacctacttcggctacagcaccccctgggggtattttgacttcaacagattccactgccacttctcaccacgtgactggcagcgactcatcaacaacaactggggattccggccaaaaagactcagcttcaagctcttcaacatccaggtcaaggaggtcacgcagaatgaaggcaccaagaccatcgccaataaccttaccagcacgattcaggtatttacggactcggaataccagctgccgtacgtcctcggctccgcgcaccagggctgcctgcctccgttcccggcggacgtcttcatgattccccagtacggctaccttacactgaacaatggaagtcaagccgtaggccgttcctccttctactgcctggaatattttccatctcaaatgctgcgaactggaaacaattttgaattcagctacaccttcgaggacgtgcctttccacagcagctacgcacacagccagagcttggaccgactgatgaatcctctcatcgaccagtacctgtactacttatccagaactcagtccacaggaggaactcaaggtacccagcaattgttattttctcaagctgggcctgcaaacatgtcggctcaggctaagaactggctacctggaccttgctaccggcagcagcgagtctctacgacactgtcgcaaaacaacaacagcaactttgcttggactggtgccaccaaatatcacctgaacggaagagactctttggtaaatcccggtgtcgccatggcaacccacaaggacgacgaggaacgcttcttcccgtcgagtggagtcctgatgttcggaaaacagggtgctggaagagacaatgtggactacagcagcgttatgctaaccagcgaagaagaaattaaaaccactaaccccgtagccacagaacaatacggtgtggtggctgacaacttgcagcaaaccaatacagggcctattgtgggaaatgtcaacagccaaggagccttacctggcatggtctggcagaaccgagacgtgtacctgcagggtcccatctgggccaagattcctcacacggacggcaacttccacccttcaccgctaatgggaggatttggactgaagcacccacctcctcagatcctgatcaagaacacgccggtacctgcggatcctccaacaacgttcagccaggcgaaattggcttccttcattacgcagtacagcaccggacaggtcagcgtggaaatcgagtgggagctgcagaaggagaacagcaaacgctggaacccagagattcagtacacttcaaactactacaaatctacaaatgtggactttgctgtcaatacagagggaacttattctgagcctcgccccattggtactcgttacctcacccgtaatctgtaa

SEQ ID NO: 261 - protein, 738 aa, synthetic construct
  REGION 1..738: note = source = /note="Description of Artificial Sequence: Synthetic polypeptide"
MAADGYLPDWLEDNLSEGIREWWDLKPGAPKPKANQQKQDDGRGLVLPGYKYLGPFNGLDKGEPVNAADAAALEHDKAYDQQLKAGDNPYLRYNHADAEFQERLQEDTSFGGNLGRAVFQAKKRVLEPLGLVEEAAKTAPGKKRPVEPSPQRSPDSSTGIGKKGQQPAKKRLNFGQTGDSESVPDPQPIGEPPAGPSGLGSGTMAAGGGAPMADNNEGADGVGSSSGNWHCDSTWLGDRVITTSTRTWALPTYNNHLYKQISNGTSGGSTNDNTYFGYSTPWGYFDFNRFHCHFSPRDWQRLINNNWGFRPKRLSFKLFNIQVKEVTQNEGTKTIANNLTSTIQVFTDSEYQLPYVLGSAHQGCLPPFPADVFMIPQYGYLTLNNGSQAVGRSSFYCLEYFPSQMLRTGNNFEFSYTFEDVPFHSSYAHSQSLDRLMNPLIDQYLYYLSRTQSTGGTQGTQQLLFSQAGPANMSAQAKNWLPGPCYRQQRVSTTLSQNNNSNFAWTGATKYHLNGRDSLVNPGVAMATHKDDEERFFPSSGVLMFGKQGAGRDNVDYSSVMLTSEEEIKTTNPVATEQYGVVADNLQQTNTGPIVGNVNSQGALPGMVWQNRDVYLQGPIWAKIPHTDGNCHPSPLMGGFGLKHPPPQILIKNTPVPADPPTTFSQAKLASFITQYSTGQVSVEIEWELQKENSKRWNPEIQYTSNYYKSTNVDFAVNTEGTYSEPRPIGTRYLTRNL

SEQ ID NO: 262 - protein, 738 aa, synthetic construct
  REGION 1..738: note = source = /note="Description of Artificial Sequence: Synthetic polypeptide"
MAADGYLPDWLEDNLSEGIREWWDLKPGAPKPKANQQKQDDGRGLVLPGYKYLGPFNGLDKGEPVNAADAAALEHDKAYDQQLKAGDNPYLRYNHADAEFQERLQEDTSFGGNLGRAVFQAKKRVLEPLGLVEEGAKTAPGKKRPVEPSPQRSPDSSTGIGKKGQQPARKRLNFGRTGDSESVPDPQPIGEPPAAPSSVGSGTMAAGGGAPMADNNEGADGVGSSSGNWHCDSTWLGDRVITTSTRTWALPTYNNHLYKQISNGTSGGSTNDNTYFGYSTPWGYLDFNRFHCHFSPRDWQRLINNNWGFRPKRLSFKLFNIQVKEVTQNEGTKTIANNLASTIQVFTDSEYQPPYVLGSAHQGCLPPFPADVFMIPQYGYLTLNNGSQAVGRSSFYCLEYFPSQMLRTGNNFSFSYTFEDVPFHSSYAHSQSLDRLMNPLIDQYLYYLSRTQSTGGTAGTQQLLFSRAGPSNMSAQARNWLPGPCYRQQRVSTTLSQNNNSNFAWTGATKYHLNGRDSLVNPGVAMATNKDDEDRFFPSSGILMFGKQGAGKDNVDYSNVMLTSEEEIKTTNPVATEQYGVVADNLQQQNTAPTVGAVNSQGALPGMVWQNRDVYLQGPIWAKIPHTDGNFHPSPLMGGFGLKHPPPQILIKNTPVPADPPTAFNQAKLNSFIAQYSTGQVSVEIEWELQKENSKRWNPEIQYTSNYYKSTNADFAVNTEGVYSEPRPIGTRYLTRNL

SEQ ID NO: 263 - DNA, 2217 bp, synthetic construct
  misc_feature 1..2217: note = source = /note="Description of Artificial Sequence: Synthetic polynucleotide"
  source 1..2217: mol_type = other DNA
atggctgccgatggttatcttccagattggctcgaggacaacctctctgagggcattcgcgagtggtgggacctgaaacctggagccccgaaacccaaagccaaccagcaaaagcaggacgacggccggggtctggtgcttcctggctacaagtacctcggacccttcaacggactcgacaagggggagcccgtcaacgcggcggacgcagcggccctcgagcacgacaaggcctacgaccagcagctcaaagcgggtgacaatccgtacctgcggtataatcacgccgacgccgagtttcaggagcgtctgcaagaagatacgtcttttgggggcaacctcgggcgagcagtcttccaggccaagaagcgggttctcgaacctctcggtctggttgaggaaggcgctaagacggctcctggaaagaagagaccggtagagccgtcaccacagcgttcccccgactcctccacgggcatcggcaagaaaggccagcagcccgccagaaagagactcaatttcggtcggactggcgactcagagtcagtccccgaccctcaacctatcggagaacctccagcagcgccctctagtgtgggatctggtacaatggctgcaggcggtggcgcaccaatggcagacaataacgaaggtgccgacggagtgggtagttcctcgggaaattggcattgcgattccacatggctgggcgacagagttatcaccaccagcacccgaacctgggccctgcccacctacaacaaccacctctacaagcaaatctccaacgggacctcgggaggcagcaccaacgacaacacctactttggctacagcaccccctgggggtatcttgactttaacagattccactgccacttctcaccacgtgactggcagcgactcatcaacaacaactggggattccggcccaagagactcagcttcaagctcttcaacatccaggtcaaagaggtcacgcagaatgaaggcaccaagaccatcgccaataacctcgccagcaccatccaggtgtttacggactcggaataccagccgccgtacgtcctcggctctgcccaccagggctgcctgcctccgttcccggcggacgtcttcatgattcctcagtacggctacctgactctcaacaacggtagtcaggccgtgggacgttcctccttctactgcctggagtacttcccctctcagatgctgagaacgggcaacaacttttccttcagctacactttcgaggacgtgcctttccacagcagctacgcgcacagccagagtttggacaggctgatgaatcctctcatcgaccagtacctgtactacctgtcaagaacccagtctacgggaggcacagcgggaacccagcagttgctgttttctcgggccgggcctagcaacatgtcggctcaggccagaaactggctgcctggaccctgctacagacagcagcgcgtctccacgacactgtcgcaaaacaacaacagcaactttgcctggactggtgccaccaagtatcatctgaacggcagagactctctggtgaatccgggcgtcgccatggcaaccaacaaggacgacgaggaccgcttcttcccatccagcggcatcctcatgtttggcaagcagggagctggaaaagacaacgtggactatagcaacgtgatgctaaccagcgaggaagaaatcaagaccaccaaccccgtggccacagaacagtatggcgtggtggctgataacctacagcagcaaaacaccgctcctactgtgggggccgtcaacagccagggagccttacctggcatggtctggcagaaccgggacgtgtacctgcagggtcctatttgggccaagattcctcacacagatggcaactttcacccgtctcctttaatgggcggctttggacttaaacatccgcctcctcagatcctcatcaaaaacactcctgttcctgcggatcctccaacagcgttcaaccaggccaagctgaattctttcatcgcgcagtacagcaccggacaagtcagcgtggagatcgagtgggagctgcagaaggagaacagcaagcgctggaacccagagattcagtatacttccaactactacaaatctacaaatgcggactttgctgttaatactgagggtgtttactctgagcctcgccccattggcactcgttacctcacccgtaatctgtaa

SEQ ID NO: 264 - DNA, 2208 bp, synthetic construct
  misc_feature 1..2208: note = source = /note="Description of Artificial Sequence: Synthetic polynucleotide"
  source 1..2208: mol_type = other DNA
atggctgccgatggttatcttccagattggctcgaggacactctctctgaaggaataagacagtggtggaagctcaaacctggcccaccaccaccaaagcccgcagagcggcataaggacgacagcaggggtcttgtgcttcctgggtacaagtacctcggacccttcaacggactcgacaagggggagccggtcaacgaggcagacgccgcggccctcgagcacgacaaggcctacgaccggcagctcgacagcggagacaacccgtacctcaagtacaaccacgccgacgcagagtttcaggagcgccttaaagaagatacgtcttttgggggcaacctcggacgagcagtcttccaggcgaaaaagagggttcttgaacctctgggcctggttgaggagcctgttaagacggctccgggaaaaaagaggccggtagagcactctcctgtggagccagactcctcctcgggaaccggaaaagcgggccagcagcctgcaagaaaaagattaaattttggtcagactggagacgcagactccgtacctgacccccagcctctcggacagccaccagcagccccctctggtctgggatctactacaatggctacaggcagtggcgcaccaatggcagacaataacgagggtgccgatggagtgggtaattcctcaggaaattggcattgcgattcccaatggctgggcgacagagtcatcaccaccagcacccgaacctgggccctgcccacatacaacaaccacctctacaagcaaatctccagccaatcaggagccagcaacgacaaccactactttggctacagcaccccctgggggtattttgacttcaacagattccactgccacttttcaccacgtgactggcaaagactcgtcaacaacaaccggggattccggcccaaaagactcaacttcaagctctttaatattcaagtcaaagaggtcacgcagaatgacggtacgacgacgattgccaataaccttaccagcacggttcaggtgtttactgactcggagtaccagctcccgtacgtcctgggctcggcgcatcaaggatgcctcccgccgtttccagcggacgtcttcatggtcccacagtatggatacctcaccctgaacaacgggagtcaggcggtaggacgctcttccttttactgcctggagtactttccttctcagatgctgcgtactggaaacaactttcagttcagctacacttttgaagacgtgcctttccacagcagctacgctcacagccagagtctggatcggctgatgaatcctctgatcgaccagtacctgtattatctgaacaagacacaaacaaatagtggaactcttcagcagtctcggctactgtttagccaagctggaccaaccaacatgtctcttcaagctaaaaactggctgcctggaccttgctacagacagcagcgtctgtcaaaacaggcaaacgacaacaacaacagcaactttccctggactgcagctacaaagtatcatctaaatggccgggactcgttggttaatccaggaccagctatggccagtcacaaggatgacgaagaaaagtttttccccatgcatggaaccctgatatttggtaaacaaggaacaaatgccaacgacgcggatttggaaaatgtcatgattacagatgaagaagaaatcagggccaccaatcccgtggctacggagcagtacgggactgtgtcaaataatttgcaaaactcaaacactggtccaactactggaactgtcaatcaccaaggagcgttacctggtatggtgtggcaggatcgagacgtgtacctgcagggacccatttgggccaagattcctcacaccgatggacactttcatccttctccactgatgggaggttttggactcaaacacccgcctcctcagatcatgatcaaaaacactcccgttccagccaatcctcccacaaacttcagttctgccaagtttgcttctttcatcacacagtattccacgggacaggtcagcgtggagatcgagtgggagctgcagaaggagaacagcaaacgctggaatcccgaaattcagtacacttccaactacaacaagtctgttaatgtggactttactgtggacactaatggtgtgtattcagagcctcgccccattggcaccagatacctgactcgtaatctgtaa

SEQ ID NO: 265 - protein, 735 aa, synthetic construct
  REGION 1..735: note = source = /note="Description of Artificial Sequence: Synthetic polypeptide"
MAADGYLPDWLEDTLSEGIRQWWKLKPGPPPPKPAERHKDDSRGLVLPGYKYLGPFNGLDKGEPVNEADAAALEHDKAYDRQLDSGDNPYLKYNHADAEFQERLKEDTSFGGNLGRAVFQAKKRVLEPLGLVEEPVKTAPGKKRPVEHSPVEPDSSSGTGKAGQQPARKRLNFGQTGDADSVPDPQPLGQPPAAPSGLGSTTMATGSGAPMADNNEGADGVGNSSGNWHCDSQWLGDRVITTSTRTWALPTYNNHLYKQISSQSGASNDNHYFGYSTPWGYFDFNRFHCHFSPRDWQRLVNNNRGFRPKRLNFKLFNIQVKEVTQNDGTTTIANNLTSTVQVFTDSEYQLPYVLGSAHQGCLPPFPADVFMVPQYGYLTLNNGSQAVGRSSFYCLEYFPSQMLRTGNNFQFSYTFEDVPFHSSYAHSQSLDRLMNPLIDQYLYYLNKTQTNSGTLQQSRLLFSQAGPTNMSLQAKNWLPGPCYRQQRLSKQANDNNNSNFPWTAATKYHLNGRDSLVNPGPAMASHKDDEEKFFPMHGTLIFGKQGTNANDADLENVMITDEEEIRATNPVATEQYGTVSNNLQNSNTGPTTGTVNHQGALPGMVWQDRDVYLQGPIWAKIPHTDGHFHPSPLMGGFGLKHPPPQIMIKNTPVPANPPTNFSSAKFASFITQYSTGQVSVEIEWELQKENSKRWNPEIQYTSNYNKSVNVDFTVDTNGVYSEPRPIGTRYLTRNL

SEQ ID NO: 266 - protein, 738 aa, synthetic construct
  REGION 1..738: note = source = /note="Description of Artificial Sequence: Synthetic polypeptide"
MAADGYLPDWLEDNLSEGIREWWDLKPGAPKPKANQQKQDDGRGLVLPGYKYLGPFNGLDKGEPVNAADAAALEHDKAYDQQLKAGDNPYLRYNHADAEFQERLQEDTSFGGNLGRAVFQAKKRVLEPLGLVEEAAKTAPGKKRPVEPSPQRSPDSSTGIGKKGQQPAKKRLSFGQTGDSESVPDPQPIGEPPAGPSGLGSGTMAAGGGAPMADNNEGADGVGSSSGNWHCDSTWLGDRVITTSTRTWALPTYNNHLYKQISNGTSGGSTNDNTYFGYSTPWGYFDFNRFHCHFSPRDWQRLINNNWGFRPKRLSFKLFNIQVKEVTQNEGTKTIANNLTSTIQVFTDSEYQLPYVLGSAHQGCLPPFPADVFMIPQYGYLTLNNGSQAVGRSSFYCLEYFPSQMLRTGNNSEFSYTFEDVPFHSSYAHSQSLDRLMNPLIDQYLYYLSRTQSTGGTQGTQQLLFSQAGPANMSAQAKNWLPGPCYRQQRVSTTLSQNNNSNFAWTGATKYHLNGRDSLVNPGVAMATHKDDEERFFPSSGVLMFGKQGAGRDNVDYSSVMLTSEEEIKTTNPVATEQYGVVADNLQQTNTGPIVGNVNSQGALPGMVWQNRDVYLQGPIWAKIPHTDGNFHPSPLMGGFGLKHPPPQILIKNTPVPADPPTTFSQAKLASFITQYSTGQVSVEIEWELQKENSKRWNPEIQYTSNYYKSTNVDFAVNTEGTYSEPRPIGTRYLTRNL

SEQ ID NO: 267 - DNA, 2217 bp, synthetic construct
  misc_feature 1..2217: note = source = /note="Description of Artificial Sequence: Synthetic polynucleotide"
  source 1..2217: mol_type = other DNA
atggctgctgacggttatcttccagattggctcgaggacaacctctctgagggcattcgcgagtggtgggacctgaaacctggagcccccaagcccaaggccaaccagcagaagcaggacgacggccggggtctggtgcttcctggctacaagtacctcggacccttcaacggactcgacaagggggagcccgtcaacgcggcggacgcagcggccctcgagcacgacaaggcctacgaccagcagctcaaagcgggtgacaatccgtacctgcggtataaccacgccgacgccgagtttcaggagcgtctgcaagaagatacgtcttttgggggcaacctcgggcgagcagtcttccaggccaagaagcgggttctcgaacctctcggtctggttgaggaagctgctaagacggctcctggaaagaagagaccggtagaaccgtcacctcagcgttcccccgactcctccacgggcatcggcaagaaaggccagcagcccgctaaaaagagactgagctttggtcagactggcgactcagagtcagtccccgaccctcaaccaatcggagaaccaccagcaggcccctctggtctgggatctggtacaatggctgcaggcggtggcgctccaatggcagacaataacgaaggcgccgacggagtgggtagttcctcaggaaattggcattgcgattccacatggctgggcgacagagtcatcaccaccagcacccgaacctgggccctgcccacctacaacaaccacctctacaagcaaatatccaatgggacatcgggaggaagcaccaacgacaacacctacttcggctacagcaccccctgggggtattttgacttcaacagattccactgccacttctcaccacgtgactggcagcgactcatcaacaacaactggggattccggccaaaaagactcagcttcaagctcttcaacatccaggtcaaggaggtcacgcagaatgaaggcaccaagaccatcgccaataaccttaccagcacgattcaggtatttacggactcggaataccagctgccgtacgtcctcggctccgcgcaccagggctgcctgcctccgttcccggcggacgtcttcatgattccccagtacggctaccttacactgaacaatggaagtcaagccgtaggccgttcctccttctactgcctggaatattttccatctcaaatgctgcgaactggaaacaattctgaattcagctacaccttcgaggacgtgcctttccacagcagctacgcacacagccagagcttggaccgactgatgaatcctctcatcgaccagtacctgtactacttatccagaactcagtccacaggaggaactcaaggtacccagcaattgttattttctcaagctgggcctgcaaacatgtcggctcaggctaagaactggctacctggaccttgctaccggcagcagcgagtctctacgacactgtcgcaaaacaacaacagcaactttgcttggactggtgccaccaaatatcacctgaacggaagagactctttggtaaatcccggtgtcgccatggcaacccacaaggacgacgaggaacgcttcttcccgtcgagtggagtcctgatgtttggaaaacagggtgctggaagagacaatgtggactacagcagcgttatgctaaccagcgaagaagaaattaaaaccactaaccctgtagccacagaacaatacggtgtggtggctgacaacttgcagcaaaccaatacagggcctattgtgggaaatgtcaacagccaaggagccttacctggcatggtctggcagaaccgagacgtgtacctgcagggtcccatctgggccaagattcctcacacggacggcaacttccacccttcaccgctaatgggaggatttggactgaagcacccacctcctcagatcctgatcaagaacacgccggtacctgcggatcctccaacaacgttcagccaggcgaaattggcttccttcattacgcagtacagcaccggacaggtcagcgtggaaatcgagtgggagctgcagaaggagaacagcaaacgctggaacccagagattcagtacacttcaaactactacaaatctacaaatgtggactttgctgtcaatacagagggaacttattctgagcctcgccccattggtactcgttacctcacccgtaatctgtaa

SEQ ID NO: 268 - protein, 738 aa, synthetic construct
  REGION 1..738: note = source = /note="Description of Artificial Sequence: Synthetic polypeptide"
MAADGYLPDWLEDNLSEGIREWWDLKPGAPKPKANQQKQDDGRGLVLPGYKYLGPFNGLDKGEPVNAADAAALEHDKAYDQQLKAGDNPYLRYNHADAEFQERLQEDTSFGGNLGRAVFQAKKRVLEPLGPVEEAAKTAPGKKRPVEPPPQRSPDSSTGIGKKGQQPAKKRLNFGQTGDSESVPDPQPIGEPPAGPSGLGSGTMAAGGGAPMADNNEGADGVGSSSGNWHCDSTWLGDRVITTSTRTWALPTYNNHLYKQISNGTSGGSTNDNTYFGYSTPWGYFDFNRFHCHFSPRDWQRLINNNWGFRPKRLSFKLFNIQVKEVTQNEGTKTVANNLTSTIQVFTDSEYQLPYVLGSAHQGCLPPFPADVFMIPQYGYLTLNNGSQAVGRSSFYCLEYFPSQMLRTGNNFEFSYTFEDVPFHSSYAHSQSLDRLMNPLIDQYLYYLSRTQSTGGTQGTQQLLFSQAGPANMSAQAKNWLPGPCYRQQRVSTTLSQNNNSNFAWTGATKYHLNGRDSLVNPGVAMATHKDDEERFFPSSGVLMFGKQGAGRDNVDYSSVMLTSEEEIKTTNPVATEQYGVVADNLQQTNTGPIVGNVNSQGALPGMVWQNRDVYLQGPIWAKIPHTDGNFHPSPLMGGFGLKHPPPQILIKNTPVPADPPTTFSQAKLASFITQYSTGQVSVEIEWELQKENSKRWNPEIQYTSNYYKSTNVDFAVNTEGTYSEPRPIGTRYLTRNL

SEQ ID NO: 269 - DNA, 2217 bp, synthetic construct
  misc_feature 1..2217: note = source = /note="Description of Artificial Sequence: Synthetic polynucleotide"
  source 1..2217: mol_type = other DNA
atggctgctgacggttatcttccagattggctcgaggacaacctctctgagggcattcgcgagtggtgggacctgaaacctggagcccccaagcccaaggccaaccagcagaagcaggacgacggccggggtctggtgcttcctggctacaagtacctcggacccttcaacggactcgacaagggggagcccgtcaacgcggcggacgcagcggccctcgagcacgacaaggcctacgaccagcagctcaaagcgggtgacaatccgtacctgcggtataaccacgccgacgccgagtttcaggagcgtctacaagaagatacgtcttttgggggcaacctcgggcgagcagtcttccaggccaagaagcgggttctcgaacctctcggtccggttgaggaagctgctaagacggctcctggaaagaagagaccggtagaaccgccacctcagcgttcccccgactcctccacgggcatcggcaagaaaggccagcagcccgctaaaaagagactgaactttggtcagactggcgactcagagtcagtccccgaccctcaaccaatcggagaaccaccagcaggcccctctggtctgggatctggtacaatggctgcaggcggtggcgctccaatggcagacaataacgaaggcgccgacggagtgggtagttcctcaggaaattggcattgcgattccacatggctgggcgacagagtcatcaccaccagcacccgaacctgggccctgcccacctacaacaaccacctctacaagcaaatatccaatgggacatcgggaggaagcaccaacgacaacacctacttcggctacagcaccccctgggggtattttgacttcaacagattccactgccacttctcaccacgtgactggcagcgactcatcaacaacaactggggattccggccaaaaagactcagcttcaagctcttcaacatccaggtcaaggaggtcacgcagaatgaaggcaccaagaccgtcgccaataaccttaccagcacgattcaggtatttacggactcggaataccagctgccgtacgtcctcggctccgcgcaccagggctgcctgcctccgttcccggcggacgtcttcatgattccccagtacggctaccttacactgaacaatggaagtcaagccgtaggccgttcctccttctactgcctggaatattttccatctcaaatgctgcgaactggaaacaattttgaattcagctacaccttcgaggacgtgcctttccacagcagctacgcacacagccagagcttggaccgactgatgaatcctctcatcgaccagtacctgtactacttatccagaactcagtccacaggaggaactcaaggtacccagcaattgttattttctcaagctgggcctgcaaacatgtcggctcaggctaagaactggctacctggaccttgctaccggcagcagcgagtctctacgacactgtcgcaaaacaacaacagcaactttgcttggactggtgccaccaaatatcacctgaacggaagagactctttggtaaatcccggtgtcgccatggcaacccacaaggacgacgaggaacgcttcttcccgtcgagtggagtcctgatgtttggaaaacagggtgctggaagagacaatgtggactacagcagcgttatgctaaccagcgaagaagaaattaaaaccactaaccctgtagccacagaacaatacggtgtggtggctgacaacttgcagcaaaccaatacagggcctattgtgggaaatgtcaacagccaaggagccttacctggcatggtctggcagaaccgagacgtgtacctgcagggtcccatctgggccaagattcctcacacggacggcaacttccacccttcaccgctaatgggaggatttggactgaagcacccacctcctcagatcctgatcaagaacacgccggtacctgcggatcctccaacaacgttcagccaggcgaaattggcttccttcattacgcagtacagcaccggacaggtcagcgtggaaatcgagtgggagctgcagaaggagaacagcaaacgttggaacccagagattcagtacacttcaaactactacaaatctacaaatgtggactttgctgtcaatacagagggaacttattctgagcctcgccccattggtactcgttacctcacccgtaatctgtaa

SEQ ID NO: 270 - protein, 738 aa, synthetic construct
  REGION 1..738: note = source = /note="Description of Artificial Sequence: Synthetic polypeptide"
MAADGYLPDWLEDNLSEGIREWWDLKPGAPKPKANQQKQDDGRGLVLPGYKYLGPFNGLDKGEPVNAADAAALEHDKAYDQQLKAGDNPYLRYNHADAEFQERLQEDTSFGGNLGRAVFQAKKRVLEPLGLVEEAAKTAPGKKRPVEPSPQRSPDSSTGIGKKGQQPAKKRLNFGQTGDSESVPDPQPIGEPPAGPSGLGSGTMAAGGGAPMADNNEGADGVGSSSGNWHCDSTWLGDRVITTSTRTWALPTYNNHLYKQISNGTSGGSTNDNTYFGYSTPWGYFDFNRFHCHFSPRDWQRLINNNWGFRPKRLSFKLFNIQVKEVTQNEGTKTIANNLTSTIQVFTDSEYQLPYVLGSAHQGCLPPFPADVFMIPQYGYLTLNNGSQAVGRSSFYCLEYFPSQMLRTGNNFEFSYTFEDVPFHSSYAHSQSLDRLMNPLIDQYLYYLSRTQSTGGTQGTQQLLFSQAGPANMSAQAKNWLPGPCYRQQRVSTTLSQSNNSNFAWTGATKYHLNGRDSLVNPGVAMATHKDDEERFFPSSGVLMFGKQGAGRDNVDYSSVMLTSEEEIKTTNPVATEQYGVVADNLQQTNTGPIVGNVNSQGALPGMVWQNRDVYLQGPIWAKIPHTDGNFHPSPLMGGLGLKHPPPQILIKNTPVPADPPTTFSQAKLASFITQYSTGQVSVEIEWELQKENSKRWNPEIQYTSNYYKSTNVDFAVNTEGTYSEPRPIGTRYLTRNL

SEQ ID NO: 271 - DNA, 2217 bp, synthetic construct
  misc_feature 1..2217: note = source = /note="Description of Artificial Sequence: Synthetic polynucleotide"
  source 1..2217: mol_type = other DNA
atggctgctgacggttatcttccagattggctcgaggacaacctctctgagggcattcgcgagtggtgggacctgaaacctggagcccccaagcccaaggccaaccagcagaagcaggacgacggccggggtctggtgcttcctggctacaagtacctcggacccttcaacggactcgacaagggggagcccgtcaacgcggcggacgcagcggccctcgagcacgacaaggcctacgaccagcagctcaaagcgggtgacaatccgtacctgcggtataaccacgccgacgccgagtttcaggagcgtctgcaagaagatacgtcttttgggggcaacctcgggcgagcagtcttccaggccaagaagcgggttctcgaacctctcggtctggttgaggaagcggctaagacggctcctggaaagaagagaccggtagaaccgtcacctcagcgttcccccgactcctccacgggcatcggcaagaaaggccagcagcccgctaaaaagagactgaactttggtcagactggcgactcagagtcagtccccgaccctcaaccaatcggagaaccaccagcaggcccctctggtctgggatctggtacaatggctgcaggcggtggcgctccaatggcagacaataacgaaggcgccgacggagtgggtagttcctcaggaaattggcattgcgattccacatggctgggcgacagagtcatcaccaccagcacccgaacctgggccctgcccacctacaacaaccacctctacaagcaaatatccaatgggacatcgggaggaagcaccaacgacaacacctacttcggctacagcaccccctgggggtattttgacttcaacagattccactgccacttctcaccacgtgactggcagcgactcatcaacaacaactggggattccggccaaaaagactcagcttcaagctcttcaacatccaggtcaaggaggtcacgcagaatgaaggcaccaagaccatcgccaataaccttaccagcacgattcaggtatttacggactcggaataccagctgccgtacgtcctcggctccgcgcaccagggctgcctgcctccgttcccggcggacgtcttcatgattccccagtacggctaccttacactgaacaatggaagtcaagccgtaggccgttcctccttctactgcctggaatattttccatctcaaatgctgcgaactggaaacaattttgaattcagctacaccttcgaggacgtgcctttccacagcagctacgcacacagccagagcttggaccgactgatgaatcctctcatcgaccagtacctgtactacttatccagaactcagtccacaggaggaactcaaggtacccagcaattgttattttctcaagctgggcctgcaaacatgtcggctcaggctaagaactggctacctggaccttgctaccggcagcagcgagtctctacgacactgtcgcaaagcaacaacagcaactttgcttggactggtgccaccaaatatcacctgaacggaagagactctttggtaaatcccggtgtcgccatggcaacccacaaggacgacgaggaacgcttcttcccgtcgagtggagtcctgatgtttggaaaacagggtgctggaagagacaatgtggactacagcagcgttatgctaaccagcgaagaagaaattaaaaccactaaccctgtagccacagaacaatacggtgtggtggctgacaacttgcagcaaaccaatacagggcctattgtgggaaatgtcaacagccaaggagccttacctggcatggtctggcagaaccgagacgtgtacctgcagggtcccatctgggccaagattcctcacacggacggcaacttccacccttcaccgctaatgggaggacttggactgaagcacccacctcctcagatcctgatcaagaacacgccggtacctgcggatcctccaacaacgttcagccaggcgaaattggcttccttcattacgcagtacagcaccggacaggtcagcgtggaaatcgagtgggagctgcagaaggagaacagcaaacgctggaacccagagattcagtacacttcaaactactacaaatctacaaatgtggactttgctgtcaatacagagggaacttattctgagcctcgccccattggtactcgttacctcacccgtaatctgtaa

SEQ ID NO: 272 - protein, 737 aa, synthetic construct
  REGION 1..737: note = source = /note="Description of Artificial Sequence: Synthetic polypeptide"
MAADGYLPDWLEDNLSEGIREWWDLKPGAPKPKANQQKQDDGRGLVLPGYKYLGPFNGLDKGEPVNAADAAALEHDKAYDQQLKAGDNPYPRYNHADAEFQERLQEDTPFGGNLGRAVFQAKKRVLEPLGLVEEAAKTAPGKKRPVEPSPQRSPDSSTGIGKKGQQPAKKRLNFGQTGDSESVPDPQPIGEPPAGPSGLGSGTMAAGGGAPMADNNEGADGVGNASGNWHCDSTWLGDRVITTSTRTWALPTYNNHLYKQISSASTGASNDNHYFGYSTPWGYFDFNRFHCHFSPRDWQRLINNNWGFRPKRLNFKLFNIQVKEVTTNDGVTTIANNLTSTVQVFSDSEYQLPYVLGSAHQGCLPPFPADVFMIPQYGYLTLNNGSQAVGRSSFYCLEYFPSQMLRTGNNFTFSYTFEEVPLHSSYAHSQSLDRLMNPLIVQYLYYLNRTQNQSGSAQNKDLLFSRGSPAGMSVQPKNWLPGPCYRQQRVSKTKTDNNNSNFTWTGASKYNLNGRESIINPGTAMASHKDDEDKFFPMSGVMIFGKESAGASNTALDNVMITDEEEIKATNPVATERFGTVAVNFQSSSTDPATGDVHAMGALPGMVWQDRDVYLQGPIWAKIPHTDGHFHPSPLMGGFGLKNPPPQILIKNTPVPANPPAEFSATKFASFITQYSTGQVSVEIEWELQKENSKRWNPEVQYTSNYAKSASVDFTVDNNGLYTEPRPIGTRYLTRPL

SEQ ID NO: 273 - protein, 737 aa, synthetic construct
  REGION 1..737: note = source = /note="Description of Artificial Sequence: Synthetic polypeptide"
MAADGYLPDWLEDNLSEGIREWWDLKPGAPKPKANQQKQDDGRGLVLPGYKYLGPFNGLDKGEPVNAADAAALEHDKAYDQQLKAGDNPYPRYNHADAEFQERLQEDTSFGGNLGRAVFQAKKRVLEPLGLVEEAAKTAPGKKRPVEPSPQRSPDSSTGIGKKGQQPAKKRLNFGQTGDSESVPDPQPIGEPPAGPSGLGSGTMAAGGGAPMADNNEGADGVGNASGNWHCDSTWLGDRVITTSTRTWALPTYNNHLYKQISSASTGASNDNHYFGYSTPWGYFDFNRFHCHFSPRDWQRLINNNWGFRPKRLNFKLFNIQVKEVTTNDGVTTIANNLTSTVQVFSDSEYQLPYVLGSAHQGCLPPFPADVFMIPQYGYLTLNNGSQAVGRSSFYCLEYFPSQMLRTGNNFTFSYTFEEVPLHSSYAHSQSLDRLMNPLIDQYLYYLNRTQNQSGSAQNKDLLFSRGSPAGMSVQPKNWLPGPCYRQQRVSKTKTDNNNSNFTWTGASKYNLNGRESIINPGTAMASHKDDEDKFFPMSGVMIFGKESAGASNTALDNVMITDEEEIKATNPVATERFGTVAVNFQSSSTDPATGDVHAMGALPGMVWQDRDVYLQGPIWAKIPHTDGHFHPSPLMGGFGLKNPPPQILIKNTPVPANPPAEFSATKFASFITQYSTGQVSVEIEWELQKENSKRWNPEVQYTSNYAKSASVDFTVDNNGLYTEPRPIGTRYLTRPL

SEQ ID NO: 274 - DNA, 2214 bp, synthetic construct
  misc_feature 1..2214: note = source = /note="Description of Artificial Sequence: Synthetic polynucleotide"
  source 1..2214: mol_type = other DNA
atggctgctgacggttatcttccagattggctcgaggacaacctctctgagggcattcgcgagtggtgggacctgaaacctggagcccccaagcccaaggccaaccagcagaagcaggacgacggccggggtctggtgcttcctggctacaagtacctcggacccttcaacggactcgacaagggggagcccgtcaacgcggcggacgcagcggccctcgagcacgacaaggcctacgaccagcagctcaaagcgggtgacaatccgtacccgcggtataaccacgccgacgccgagtttcaggagcgtctgcaagaagatacgccttttgggggcaacctcgggcgagcagtcttccaggccaagaagcgggttctcgaacctctcggtctggttgaggaagctgctaagacggctcctggaaagaagagaccggtagaaccgtcacctcagcgttcccccgactcctccacgggcatcggcaagaaaggccagcagcccgctaaaaagagactgaactttggtcagactggcgactcagagtcagtccccgaccctcaaccaatcggagaaccaccagcaggcccctctggtctgggatctggtacaatggctgcaggcggtggcgctccaatggcagacaataacgaaggcgccgacggagtgggtaatgcctcaggaaattggcattgcgattccacatggctgggcgacagagtcatcaccaccagcacccgcacctgggccttgcccacctacaataaccacctctacaagcaaatctccagtgcttcaacgggggccagcaacgacaaccactacttcggctacagcaccccctgggggtattttgatttcaacagattccactgccacttttcaccacgtgactggcagcgactcatcaacaacaattggggattccggcccaagagactcaacttcaaactcttcaacatccaagtcaaggaggtcacgacgaatgatggcgtcacaaccatcgctaataaccttaccagcacggttcaagtcttctcggactcggagtaccagcttccgtacgtcctcggctctgcgcaccagggctgcctccctccgttcccggcggacgtgttcatgattccgcaatacggctacctgacgctcaacaatggcagccaagccgtgggacgttcatccttttactgcctggaatatttcccttctcagatgctgagaacgggcaacaactttaccttcagctacacctttgaggaagtgcctctccacagcagctacgcgcacagccagagcctggaccggctgatgaatcctctcatcgtccaatacctgtattacctgaacagaactcaaaatcagtccggaagtgcccaaaacaaggacttgctgttcagccgtgggtctccagctggcatgtctgttcagcccaaaaactggctacctggaccctgttatcggcagcagcgcgtttctaaaacaaaaacagacaacaacaacagcaattttacctggactggtgcttcaaaatataacctcaatgggcgtgaatccatcatcaaccctggcactgctatggcctcacacaaagacgacgaagacaagttctttcccatgagcggtgtcatgatttttggaaaagagagcgccggagcttcaaacactgcattggacaatgtcatgattacagacgaagaggaaattaaagccactaaccctgtggccaccgaaagatttgggaccgtggcagtcaatttccagagcagcagcacagaccctgcgaccggagatgtgcatgctatgggagcattacctggcatggtgtggcaagatagagacgtgtacctgcagggtcccatttgggccaaaattcctcacacagatggacactttcacccgtctcctcttatgggcggctttggactcaagaacccgcctcctcagatcctcatcaaaaacacgcctgttcctgcgaatcctccggcggagttttcagctacaaagtttgcttcattcatcacccaatactccacaggacaagtgagtgtggaaattgaatgggagctgcagaaagaaaacagcaagcgctggaatcccgaagtgcagtacacatccaattatgcaaaatctgccagcgttgattttactgtggacaacaatggactttatactgagcctcgccccattggcacccgttaccttacccgtcccctgtaa

SEQ ID NO: 275 - protein, 736 aa, synthetic construct
  REGION 1..736: note = source = /note="Description of Artificial Sequence: Synthetic polypeptide"
MAADGYLPDWLEDTLSEGIRQWWKLRPGPPPPKPAERHKDDSRGLVLPGYKYLGPFNGLDKGEPVNEADAAALEHDKAYDRQLDSGDNPYLKYNHADAEFQERLKEDTSFGGNLGRAVFQAKKRVLEPLGLVEEGAETAPGKKRPVEQSPQGPDSSSGIGKTGQQPAKKRLNFGQTGDSESVPDPQPLGEPPATPAAVGPTTMASGGGAPMADNNEGADGVGNASGNWHCDSTWLGDRVITTSTRTWALPTYNNHLYKQISSASTGASNDNHYFGYSTPWGYFDFNRFHCHFSPRDWQRLINNNWGFRPKRLNFKLFNIQVKEVTTNDGVTTIANNLTSTVQVFSDSEYQLPYVLGSAHQGCLPPFPADVFMIPQYGYLTLNNGSQAVGRSSFYCLEYFPSQMLRTGNNFTFSYTFEEVPFHSSYAHSQSLDRLMNPLIDQYLYYPNRTQNQSGSAQNKDLLFSRGSPAGMSVQPKNWLPGPCYRQQRVSKTKTDNNNSNFTWTGASKYNLNGRESIINPGTAMASHKDDEDKFFPMSGVMIFGKESAGASNTALDNVMITDEEEIKATNPVATERFGTVAVNFQSSSTDPATGDVHAMGALPGMVWQGRDVYLQGPIWAKIPHTDGHFHPSPLMGGFGLKNPPPQILIKNTPVPANPPAEFSATKFASFITQYSTGQVSVEIEWELQKENSKRWNPEVQYTSNYAKSANVDFTVDNNGLYTEPRPIGTRYLTRPL

SEQ ID NO: 276 - DNA, 2211 bp, synthetic construct
  misc_feature 1..2211: note = source = /note="Description of Artificial Sequence: Synthetic polynucleotide"
  source 1..2211: mol_type = other DNA
atggctgccgatggttatcttccagattggctcgaggacactctctctgaaggaataagacagtggtggaagctcagacctggcccaccaccaccaaagcccgcagagcggcataaggacgacagcaggggtcttgtgcttcctgggtacaagtacctcggacccttcaacggactcgacaagggagagccggtcaacgaggcagacgccgcggccctcgagcacgacaaagcctacgaccggcagctcgacagcggagacaacccgtacctcaagtacaaccacgccgacgcggagtttcaggagcgccttaaagaagatacgtcttttgggggcaacctcgggcgagcagtcttccaggccaagaagcgggttctcgaacctctcggtctggttgaggaaggcgctgagacggctcctggaaagaaacgtccggtagagcagtcgccacaagggccagactcctcctcgggcatcggcaagacaggccagcagcccgctaaaaagagactcaattttggtcagactggcgactcagagtcagtccccgatccacaacctctcggagaacctccagcaacccccgctgctgtgggacctactacaatggcttcaggcggtggcgcaccaatggcagacaataacgaaggcgccgacggagtgggtaatgcctcaggaaattggcattgcgattccacatggctgggcgacagagtcatcaccaccagcacccgcacctgggccttgcccacctacaataaccacctctacaagcaaatctccagtgcttcaacgggggccagcaacgacaaccactacttcggctacagcaccccctgggggtattttgatttcaacagattccactgccacttttcaccacgtgactggcagcgactcatcaacaacaattggggattccggcccaagagactcaacttcaaactcttcaacatccaagtcaaggaggtcacgacgaatgatggcgtcacaaccatcgctaataaccttaccagcacggttcaagtcttctcggactcggagtaccagcttccgtacgtcctcggctctgcgcaccagggctgcctccctccgttcccggcggacgtgttcatgattccgcaatacggctacctgacgctcaacaatggcagccaagccgtgggacgttcatccttttactgcctggaatatttcccttctcagatgctgagaacgggcaacaactttaccttcagctacacctttgaggaagtgcctttccacagcagctacgcgcacagccagagcctggaccggctgatgaatcctctcatcgaccaatacctgtattacccgaacagaactcaaaatcagtccggaagtgcccaaaacaaggacttgctgtttagccgtgggtctccagctggcatgtctgttcagcccaaaaactggctacctggaccctgttatcggcagcagcgcgtttctaaaacaaaaacagacaacaacaacagcaattttacctggactggtgcttcaaaatataacctcaatgggcgtgaatccatcatcaaccctggcactgctatggcctcacacaaagacgacgaagacaagttctttcccatgagcggtgtcatgatttttggaaaagagagcgccggagcttcaaacactgcattggacaatgtcatgattacagacgaagaggaaattaaagccactaaccctgtggccaccgaaagatttgggaccgtggcagtcaatttccagagcagcagcacagaccctgcgaccggagatgtgcatgctatgggagcattacctggcatggtgtggcaaggtagagacgtgtacctgcagggtcccatttgggccaaaattcctcacacagatggacactttcacccgtctcctcttatgggcggctttggactcaagaacccgcctcctcagatcctcatcaaaaacacgcctgttcctgcgaatcctccggcggagttttcagctacaaagtttgcttcattcatcacccaatactccacaggacaagtgagtgtggaaattgaatgggagctgcagaaagaaaacagcaagcgctggaatcccgaagtgcagtacacatccaattatgcaaaatctgccaacgttgattttactgtggacaacaatggactttatactgagcctcgccccattggcacccgttaccttacccgtcccctgtaa

SEQ ID NO: 277 - protein, 736 aa, synthetic construct
  REGION 1..736: note = source = /note="Description of Artificial Sequence: Synthetic polypeptide"
MAADGYLPDWLEDTLSEGIRQWWKLRPGPPPPKPAERHKDDSRGLVLPGYKYLGPFNGLDKGEPVNEADAAALEHDKAYDRQLDSGDNPYLKYNHADAEFQERLKEDTSFGGNLGRAVFQAKKRVLEPLGLVEEGAKTAPGKKRPVEQSPQGPDSSSGIGKTGQQPAKKRLNFGQTGDSESVPDPQPLGEPPATPAAVGPTTMASGGGAPMADNNEGADGVGNASGNWHCDSTWLGDRVITTSTRTWALPTYNNHLYKQISSASTGASNDNHYFGYSTPWGYFDFNRFHCHFSPRDWQRLINNNWGFRPKRLNFKLFNIQVKEVTTNDGVTTIANNLTSTVQVFSDSEYQLPYVLGSAHQGCLPPFPADVFMIPQYGYLTLNNGSQAVGRSSFYCLEYFPSQMLRTGNNFTFSYTFEEVPFHSSYAHSQSLDRLMNPLIDQYLYYPNRTQNQSGSAQNKDLLFSRGSPAGMSVQPKNWLPGPCYRQQRVSKTKTDNNNSNFTWTGASKYNLNGRESIINPGTAMASHKDDEDKFFPMSGVMIFGKESAGASNTALDNVMITDEEEIKATNPVATERFGTVAVNFQSSSTDPATGDVHAMGALPGMVWQGRDVYLQGPIWAKIPHTDGHFHPSPLMGGFGLKNPPPQILIKNTPVPANPPAEFSATKFASFITQYSTGQVSVEIEWELQKENSKRWNPEVQYTSNYAKSANVDFTVDNNGLYTEPRPIGTRYLTRPL

SEQ ID NO: 278 - protein, 736 aa, synthetic construct
  REGION 1..736: note = source = /note="Description of Artificial Sequence: Synthetic polypeptide"
MAADGYLPDWLEDTLSEGIRQWWKLRPGPPPPKPAERHKDDSRGLVLPGYKYLGPFNGLDKGEPVNEADAAALEHDKAYDRQLDSGDNPYLKYNHADAEFQERLKEDTSFGGNLGRAVFQAKKRVLEPLGLVEEGAKTAPGKKRPVEQSPQGPDSSSGIGKTGQQPAKKRLNFGQTGDSESVPDPQPLGEPPATPAAVGPTTMASGGGAPMADNNEGADGVGNASGNWHCDSTWLGDRVITTSTRTWALPTYNNHLYKQISSASTGASNDNHYFGYSTPWGYFDFNRFHCHFSPRDWQRLINNNWGFRPKRLNFKLFNIQVKEVTTNDGVTTIANNLTSTVQVFSDSEYQLPYVLGSAHQGCLPPFPADVFMIPQYGYLTLNNGSQAVGRSSFYCLEYFPSQMLRTGNNFTFSYTFEEVPFHSSYAHSQSLDRLMNPLIDQYLYYLNRTQNQSGSAQNKDLLFSRGSPAGMSVQPKNWLPGPCYRQQRVSKTKTDNNNSNFTWTGASKYNLNGRESIINPGTAMASHKDDEDKFFPMSGVMIFGKESAGASNTALDNVMITDEEEIKATNPVATERFGTVAVNFQSSSTDPATGDVHAMGALPGMVWQGRDVYLQGPIWAKIPHTDGHFHPSPLMGGFGLKNPPPQILIKNTPVPANPPAEFSATKFASFITQYSTGQVSVEIEWELQKENSKRWNPEVQYTSNYAKSANVDFTVDNNGLYTEPRPIGTRYLTRPL

SEQ ID NO: 279 - protein, 736 aa, synthetic construct
  REGION 1..736: note = source = /note="Description of Artificial Sequence: Synthetic polypeptide"
MAADGYLPDWLEDTLSEGIRQWWKLRPGPPPPKPAERHKDDSRGLVLPGYKYLGPFNGLDKGEPVNEADAAALEHDKAYDRQLDSGDNPYLKYNHADAEFQERLKEDTSFGGNLGRAVFQAKKRVLEPLGLVEEGAKTAPGKKRPVEQSPQGPDSSSGIGKTGQQPAKKRLNFGQTGDSESVPDPQPLGEPPATPAAVGPTTMASGGGAPMADNNEGADGVGNASGNWHCDSTWLGDRVITTSTRTWALPTYNNHLYKQISSASTGASNDNHYFGYSTPWGYFDFNRFHCHFSPRDWQRLINNNWGFRPKRLNFKLFNIQVKEVTTNDGVTTIANNLTSTVQVFSDSEYQLPYVLGSAHQGCLPPFPADVFMIPQYGYLTLNNGSQAVGRSSFYCLEYFPSQMLRTGNNFTFSYTFEEVPFHSSYAHSQSLDRLMNPLIDQYLYYLNRTQNQSGSAQNKDLLFSRGSPAGMSVQPKNWLPGPCYRQQRVSKTKTDNNNSNFTWTGASKYNLNGRESIINPGTAMASHKDDEDKFFPMSGVMIFGKESAGASNTALDNVMITDEEEIKATNPVATERFGTVAVNFQSSSTDPATGDVHAMGALPGMVWQDRDVYLQGPIWAKIPHTDGHFHPSPLMGGFGLKNPPPQILIKNTPVPANPPAEFSATKFASFITQYSTGQVSVEIEWELQKENSKRWNPEVQYTSNYAKSANVDFTVDNNGLYTEPRPIGTRYLTRPL

SEQ ID NO: 280 - DNA, 2208 bp, synthetic construct
  misc_feature 1..2208: note = source = /note="Description of Artificial Sequence: Synthetic polynucleotide"
  source 1..2208: mol_type = other DNA
atggctgccgatggctatcttccagattggctcgaggacactctctctgaaggaataagacagtggtggaagctcaaacctggcccaccaccaccaaagcccgcagagcggcatagggacgacagcaggggtcttgtgcttcctgggtacaagtacctcggacccttcaacggactcgacaagggagagccggtcaacgaggcagacgccgcggccctcgagcacgacaaagcctacgaccggcagctcgacagcggagacaacccgtacctcaagtacaaccacgccgacgcggagtttcaggagcgccttaaagaagatacgtcttttgggggcaacctcggacgagcagtcttccaggcgaaaaagagggttcttgaacctctgggcctggttgaggaacctgttaagacggctccgggaaaaaagaggccggtagagcactctcctgtggagccagactcctcctcgggaaccggaaaggcgggccagcagcctgcaagaaaaagattgaattttggtcagactggagacgcagactcagtacctgacccccagcctctcggacagccaccagcagccccctctggtctgggaactaatacgatggctacaggcagtggcgcaccaatggcagacaataacgagggcgccgacggagtgggtaattcctcgggaaattggcattgcgattccacatggatgggcgacagagtcatcaccaccagcacccgaacctgggccctgcccacctacaacaaccacctctacaaacaaatttccagccaatcaggagcctcgaacgacaatcactactttggctacagcaccccttgggggtattttgacttcaacagattccactgccacttttcaccacgtgactggcaaagactcatcaacaacaactggggattccgacccaagagactcaacttcaagctctttaacattcaagtcaaagaggtcacgcagaatgacggtacgacgacgattgccaataaccttaccagcacggttcaggtgtttactgactcggggtaccagctcccgtacgtcctcggctcggcgcatcaaggatgcctcccgccgttcccagcagacgtcttcatggtgccacagtatggataccccaccctgaacaacgggagtcaggcagtaggacgctcttcattttactgcctggagtactttccttctcagatgctgcgtaccggaaacaactttaccttcagctacacttttgaggacgttcctttccacagcagctacgctcacagccagagtctggaccgtctcatgaatcctctcatcgaccagtacctgtattacttgagcacaacaaacactccaagtggaaccaccacgcagtcaaggcttcagttttctcaggccggagcgagtgacattcgggaccagtctaggaactggcttcctggaccctgttaccgccagcagcgagtatcaaagacatctgcggataacaacaacagtgaatactcgtggactggagctaccaagtaccacctcaatggcagagactctctggtgaatccgggcccggccgtggcaagccacaaggacgatgaagaaaagttttttcctcagagcggggttctcatctttgggaagcaaggctcagagaaaacaaatgtggacattgaaaaggtcatgattacagacgaagaggaaatcaggacaaccaatcccgtggctacggagcagtatggttctgtatctaccaacctccagagaggcaacagacaagcagctaccgcagatgtcaacacacaaggcgttcttccaggcatggtctggcaggacagagatgtgtaccttcaggggcccatctgggcaaagattccacacacggacggacattttcacccctctcccctcatgggtggattcggacttaaacaccctcctccacagattctcatcaagaacaccccggtacctgcgaatccttcgaccaccttcagtgcggcaaagtttgcttccttcatcacacagtactccacgggacaggtcagcgtggagatcgagtgggagctgcagaaggaaaacagcaaacgctggaatcccgaaattcagtacacttccaactacaacaagtctgttaatgtggactttactgtggacactaatggcgtgtattcagagcctcgccccattggcaccagatacctgactcgtaatctgtaa

SEQ ID NO: 281 - protein, 735 aa, synthetic construct
  REGION 1..735: note = source = /note="Description of Artificial Sequence: Synthetic polypeptide"
MAADGYLPDWLEDTLSEGIRQWWKLKPGPPPPKPAERHRDDSRGLVLPGYKYLGPFNGLDKGEPVNEADAAALEHDKAYDRQLDSGDNPYLKYNHADAEFQERLKEDTSFGGNLGRAVFQAKKRVLEPLGLVEEPVKTAPGKKRPVEHSPVEPDSSSGTGKAGQQPARKRLNFGQTGDADSVPDPQPLGQPPAAPSGLGTNTMATGSGAPMADNNEGADGVGNSSGNWHCDSTWMGDRVITTSTRTWALPTYNNHLYKQISSQSGASNDNHYFGYSTPWGYFDFNRFHCHFSPRDWQRLINNNWGFRPKRLNFKLFNIQVKEVTQNDGTTTIANNLTSTVQVFTDSGYQLPYVLGSAHQGCLPPFPADVFMVPQYGYPTLNNGSQAVGRSSFYCLEYFPSQMLRTGNNFTFSYTFEDVPFHSSYAHSQSLDRLMNPLIDQYLYYLSTTNTPSGTTTQSRLQFSQAGASDIRDQSRNWLPGPCYRQQRVSKTSADNNNSEYSWTGATKYHLNGRDSLVNPGPAVASHKDDEEKFFPQSGVLIFGKQGSEKTNVDIEKVMITDEEEIRTTNPVATEQYGSVSTNLQRGNRQAATADVNTQGVLPGMVWQDRDVYLQGPIWAKIPHTDGHFHPSPLMGGFGLKHPPPQILIKNTPVPANPSTTFSAAKFASFITQYSTGQVSVEIEWELQKENSKRWNPEIQYTSNYNKSVNVDFTVDTNGVYSEPRPIGTRYLTRNL

SEQ ID NO: 282 - DNA, 2211 bp, synthetic construct
  misc_feature 1..2211: note = source = /note="Description of Artificial Sequence: Synthetic polynucleotide"
  source 1..2211: mol_type = other DNA
atggctgccgacggttatcttccagattggctcgaggacactctctctgaaggaataagacagtggtggaagctcaaacctggcccaccaccaccaaagcccgcagagcggcataaggacgacagcaggggtcttgtgcttcctgggtacaagtacctcggacccttcaacggactcgacaagggagagccggtcaacgaggcagacgccgcggccctcgagcacgacaaagcctacgaccggcagctcgacagcggagacaacccgtacctcaagtacaaccacgccgacgcggagtttcaggagcgccttaaagaagatacgtcttttgggggcaacctcgggcgggcagtcttccaggccaagaagcgggttctcgaacctctcggtctggttgaggaaggcgctaagacggctcctggaaagaaacgtccggtagagcagtcgccacaagagccagactccccctcgggcatcggcaagacaggccagcagcccgctaaaaagagactcaattttggtcagactggcgactcagagtcagtccccgatccacaacctctcggagaacctccagcaacccccgctgctgtgggacctactacaatggcttcaggcggtggcgcaccaatggcagacaataacgaaggcgccgacggagtgggtaatgcctcaggaaattggcactgcgattccacatggctgggcgacagagtcatcaccaccagcacccgcacctgggccttgcccacctacaataaccacctctacaagcaaatctccagtgcttcaacgggggccagcaacgacaaccactacttcggctacagcaccccctgggggtattttgatttcaacagattccactgccacttttcaccacgtgactggcagcgactcatcaacaacaattggggattccggcccaagagactcaacttcaaactcttcaacatccaagtcaaggaggtcacgacgaatgatggcgtcacaaccatcgctaataaccttaccagcacggttcaagtcttctcggactcggagtaccagcttccgtacgtcctcggctctgcgcaccagggccgcctccctccgttcccggcggacgtgttcatgattccgcaatacggctacctgacgctcaacaatggcagccaagccgtgggacgttcatcctcttactgcctggaatatttcccttctcagatgctgagaacgggcaacaactttaccttcagctacacctttgaggaagtgcctctccacagcagctgcgcgcacagccagagcctggaccggctgatgaatcctctcatcgaccaatacctgtattacctgaacagaactcaaaatcagtccggaagtgcccaaaacagggacttgctgttcagccgtgggtctccagctggcatgtctgttcagcccaaaaactggctacctggaccctgttatcggcagcagcgcgtttctaaaacaaaaacagacaacaacaacagcaattttacctggactggtgcttcaaaatataacctcaatgggcgtgaatccatcatcaaccctggcactgctatggcctcacacaaagacgacgaagacaagttctttcccatgagcggtgtcatgatttttggaaaagagagcgccggagcttcaaacactgcattggacaatgtcatgattacagacgaagaggaaattaaagccactaaccctgtggccaccgaaagatttgggaccgtggcagtcaatttccagagcagcagcacagaccctgcgaccggagatgtgcatgctatgggagcattacctggcatggtgtggcaagatagagacgtgtacctgcagggtcccatttgggccaaaattcctcacacagatggacactttcacccgtctcctcttatgggcggctttggactcaagaacccgcctcctcagatcctcatcaaaaacacgcctgttcctgcgaatcctccggcggagttttcagctacaaagtttgcttcattcatcacccaatactccgcaggacaagtgagtgtggaaattgaatgggagctgcagaaagaaaacagcaagcgctggaatcccgaagtgcagtacacatccaattatgcaaaatctgccaacgttgattttactgtggacaacaatggactttatactgagcctcgccccattggcacccgttaccttacccgtcccctgtaa

SEQ ID NO: 283 - protein, 736 aa, synthetic construct
  REGION 1..736: note = source = /note="Description of Artificial Sequence: Synthetic polypeptide"
MAADGYLPDWLEDTLSEGIRQWWKLKPGPPPPKPAERHKDDSRGLVLPGYKYLGPFNGLDKGEPVNEADAAALEHDKAYDRQLDSGDNPYLKYNHADAEFQERLKEDTSFGGNLGRAVFQAKKRVLEPLGLVEEGAKTAPGKKRPVEQSPQEPDSPSGIGKTGQQPAKKRLNFGQTGDSESVPDPQPLGEPPATPAAVGPTTMASGGGAPMADNNEGADGVGNASGNWHCDSTWLGDRVITTSTRTWALPTYNNHLYKQISSASTGASNDNHYFGYSTPWGYFDFNRFHCHFSPRDWQRLINNNWGFRPKRLNFKLFNIQVKEVTTNDGVTTIANNLTSTVQVFSDSEYQLPYVLGSAHQGRLPPFPADVFMIPQYGYLTLNNGSQAVGRSSSYCLEYFPSQMLRTGNNFTFSYTFEEVPLHSSCAHSQSLDRLMNPLIDQYLYYLNRTQNQSGSAQNRDLLFSRGSPAGMSVQPKNWLPGPCYRQQRVSKTKTDNNNSNFTWTGASKYNLNGRESIINPGTAMASHKDDEDKFFPMSGVMIFGKESAGASNTALDNVMITDEEEIKATNPVATERFGTVAVNFQSSSTDPATGDVHAMGALPGMVWQDRDVYLQGPIWAKIPHTDGHFHPSPLMGGFGLKNPPPQILIKNTPVPANPPAEFSATKFASFITQYSAGQVSVEIEWELQKENSKRWNPEVQYTSNYAKSANVDFTVDNNGLYTEPRPIGTRYLTRPL

SEQ ID NO: 284 - protein, 736 aa, synthetic construct
  REGION 1..736: note = source = /note="Description of Artificial Sequence: Synthetic polypeptide"
MAADGYLPDWLEDTLSEGIRQWWKLKPGPPPPKPAERHKDDSRGLVLPGYKYLGPFNGLDKGEPVNEADAAALEHDKAYDRQLDSGDNPYLKYNHADAEFQERLKEDTSFGGNLGRAVFQAKKRVLEPLGLVEEGAKTAPGKKRPVEQSPQEPDSSSGIGKTGQQPAKKRLNFGQTGDSESVPDPQPLGEPPATPAAVGPTTMASGGGAPMADNNEGADGVGNASGNWHCDSTWLGDRVITTSTRTWALPTYNNHLYKQISSASTGASNDNHYFGYSTPWGYFDFNRFHCHFSPRDWQRLINNNWGFRPKRLNFKLFNIQVKEVTTNDGVTTIANNLTSTVQVFSDSEYQLPYVLGSAHQGCLPPFPADVFMIPQYGYLTLNNGSQAVGRSSFYCLEYFPSQMLRTGNNFTFSYTFEEVPLHSSCAHSQSLDRLMNPLIDQYLYYLNRTQNQSGSAQNRDLLFSRGSPAGMSVQPKNWLPGPCYRQQRVSKTKTDNNNSNFTWTGASKYNLNGRESIINPGTAMASHKDDEDKFFPMSGVMIFGKESAGASNTALDNVMITDEEEIKATNPVATERFGTVAVNFQSSSTDPATGDVHAMGALPGMVWQDRDVYLQGPIWAKIPHTDGHFHPSPLMGGFGLKNPPPQILIKNTPVPANPPAEFSATKFASFITQYSTGQVSVEIEWELQKENSKRWNPEVQYTSNYAKSANVDFTVDNNGLYTEPRPIGTRYLTRPL

SEQ ID NO: 285 - DNA, 2208 bp, synthetic construct
  misc_feature 1..2208: note = source = /note="Description of Artificial Sequence: Synthetic polynucleotide"
  source 1..2208: mol_type = other DNA
atggctgccgatggctatcttccagattggctcgaggacactctctctgaaggaataagacagtggtggaagctcaaacctggcccaccaccaccaaagcccgcagagcggcatagggacgacagcaggggtcttgtgcttcctgggtacaagtacctcggacccttcaacggactcgacaagggagagccggtcaacgaggcagacgccgcggccctcgagcacgacaaagcctacgaccggcagctcgacagcggagacaacccgtacctcaagtacaaccacgccgacgcggagtttcaggagcgccttaaagaagatacgtcttttgggggcaacctcggacgagcagtcttccaggcgaaaaagagggttcttgaacctctgggcctggttggggaacctgttaagacggctccgggaaaaaagaggccggtagagcactctcctgtggagccagactcctcctcgggaaccggaaaggcgggccagcagcctgcaagaaaaagattgaattttggtcagactggagacgcagactcagtacctgacccccagcctctcggacagccaccagcagccccctctggtctgggaactaatacgatggctacaggcagtggcgcaccaatggcagacaataacgagggcgccgacggagtgggtaattcctcgggaaattggcattgcgattccacatggatgggcgacagagtcatcaccaccagcacccgaacctgggccctgcccacctacaacaaccacctctacaaacaaatttccagccaatcaggagcctcgaacgacagtcactactttggctacagcaccccttgggggtattttgacttcaacagattccactgccacttttcaccacgtgactggcaaagactcatcaacaacaactggggattccgacccaagagactcaacttcaagctctttaacattcaagtcaaagaggtcacgcagaatgacggtacgacgacgattgccaataaccttaccagcacggttcaggtgtttactgactcggagtaccagctcccgtacgtcctcggctcggcgcatcaaggatgcctcccgccgttcccagcagacgtcttcatggtgccacagtatggatacctcaccctgaacaacgggagtcaggcagtaggacgctcttcattttactgcctggagtactttccttctcagatgctgcgtaccggaaacaactttaccttcagctacacttttgaggacgttcctttccacagcagctacgctcacagccagagtctggaccgtctcatgaatcctctcatcgaccagtacctgtattacttgagcacaacaaacactccaagtggaaccaccacgcagtcaaggctccagttttctcaggccggagcgagtgacattcgggaccagtctaggaactggcttcctggaccctgttaccgccagcagcgagtatcaaagacatctgcggataacaacaacagtgaatactcgtggactggagctaccaagtaccacctcaatggcagagactctctggtgaatccgggcccggccatggcaagccacaaggacaatgaagaaaagttttttcctcagagcggggttctcatctttgggaagcaaggctcagagaaaacaaatgtggacattgaaaaggtcatgattacagacgaagaggaaatcaggacaaccaatcccgtggctacggagcagtatggttctgtatctaccaacctccagagaggcaacagacaagcagctaccgcagatgtcaacacacaaggcgttcttccaggcatggtctggcaggacagagatgtgtaccttcaggggcccatctgggcaaagattccacacacggacggacattttcacccctctcccctcatgggtggattcggacttaaacaccctcctccacagattctcatcaagaacaccccggtacctgcgaatccttcgaccaccttcagtgcggcaaagtttgcttccttcatcacacagtactccacgggacaggtcagcgtggagatcgagtgggagctgcagaaggaaaacagcaaacgctggaatcccgaaattcagtacacttccaactacaacaagtctgttaatgtggactttactgtggacactaatggcgtgtattcagagcctcgccccattggcaccagatacctgactcgtaatctgtaa

SEQ ID NO: 286 - protein, 735 aa, synthetic construct
  REGION 1..735: note = source = /note="Description of Artificial Sequence: Synthetic polypeptide"
MAADGYLPDWLEDTLSEGIRQWWKLKPGPPPPKPAERHRDDSRGLVLPGYKYLGPFNGLDKGEPVNEADAAALEHDKAYDRQLDSGDNPYLKYNHADAEFQERLKEDTSFGGNLGRAVFQAKKRVLEPLGLVGEPVKTAPGKKRPVEHSPVEPDSSSGTGKAGQQPARKRLNFGQTGDADSVPDPQPLGQPPAAPSGLGTNTMATGSGAPMADNNEGADGVGNSSGNWHCDSTWMGDRVITTSTRTWALPTYNNHLYKQISSQSGASNDSHYFGYSTPWGYFDFNRFHCHFSPRDWQRLINNNWGFRPKRLNFKLFNIQVKEVTQNDGTTTIANNLTSTVQVFTDSEYQLPYVLGSAHQGCLPPFPADVFMVPQYGYLTLNNGSQAVGRSSFYCLEYFPSQMLRTGNNFTFSYTFEDVPFHSSYAHSQSLDRLMNPLIDQYLYYLSTTNTPSGTTTQSRLQFSQAGASDIRDQSRNWLPGPCYRQQRVSKTSADNNNSEYSWTGATKYHLNGRDSLVNPGPAMASHKDNEEKFFPQSGVLIFGKQGSEKTNVDIEKVMITDEEEIRTTNPVATEQYGSVSTNLQRGNRQAATADVNTQGVLPGMVWQDRDVYLQGPIWAKIPHTDGHFHPSPLMGGFGLKHPPPQILIKNTPVPANPSTTFSAAKFASFITQYSTGQVSVEIEWELQKENSKRWNPEIQYTSNYNKSVNVDFTVDTNGVYSEPRPIGTRYLTRNL

SEQ ID NO: 287 - protein, 737 aa, synthetic construct
  REGION 1..737: note = source = /note="Description of Artificial Sequence: Synthetic polypeptide"
RMAADGYLPDWLEDNLSEGIREWWDLKPGAPKPKANQQKQDDGRGLVLPGYKYLGPFNGLDKGEPVNAADAAALEHDKAYDQQLKAGDNPYLRYNHADAEFQERLQEDTSFGGNLGRAVFQAKKRVLEPLGLVEEGAKTAPGKKRPVEQSPQEPDSSSGIGKTGQQPAKKRLNFGQTGDSESVPDPQPLGEPPATPAAVGPTTMASGGGAPMADNNEGADGVGNASGNWHCDSTWLGDRVITTSTRTWALPTYNNHLYKQISSTSTGASNDNHYFGYGTPWGYFDFNRFHCHFSPRDWQRLINNNWGFRPKRLNFKLFNIQVEEVTTNDGVTTIANNLTSTVQVFSDSEYQLPYVLGSAHQGCLPPFPADVFMIPQYGYLTLNNGSQAVGRSSFYCLEYFPSQMLRTGNNFTFSYTFEEVPFHSSYAHSQSLDRLMNPLIDQYLYYLNRTQNQSGSAQNKDLLFSRGSPAGMSVQPKNWLPGPCYRQQRVSKTKTDNNNSNFTWTGASKYNLNGRESIINPGTAVASHKDDEDKFFPMSGVMIFGKESAGASSTALDNVMITDEEEIKATNPVATERFGTVAVNFQSSSTDPATGDVHAMGALPGMVWQDRDVYLQGPIWAKIPHTDGHFHPSPLMGGFGLKNPPPQILIKNTPVPANPPAEFSATKFASFITQYSTGQVSVEIEWELQKENSKRWNPEVQYTSNYAKSANVDFTVDNNGLYTEPRPIGTRYLTRPL

SEQ ID NO: 288 - protein, 736 aa, synthetic construct
  REGION 1..736: note = source = /note="Description of Artificial Sequence: Synthetic polypeptide"
MAADGYLPDWLEDNLSEGIREWWDLKPGAPKPKANQQKQDDGRGLVLPGYKYLGPFNGLDKGEPVNAADAAALEHDKAYDQQLKAGDNPYLRYNHADAEFQERLQEDTSFGGNLGRAVFQAKKRVLEPLGLVEEGAKTAPGKKRPVEQSPQEPDSSSGIGKTGQQPAKKRLNFGQTGDSESVPDPQPLGEPPATPAAVGPTTMASGGGAPMADNNEGADGVGNASGNWHCDSTWLGDRVITTSTRTWALPTYNNHLYKQISSTSTGASNDNHYFGYGTPWGYFDFNRFHCHFSPRDWQRLINNNWGFRPKRLNFKLFNIQVEEVTTNDGVTTIANNLTSTVQVFSDSEYQLPYVLGSAHQGCLPPFPADVFMIPQYGYLTLNNGSQAVGRSSFYCLEYFPSQMLRTGNNFTFSYTFEEVPFHSSYAHSQSLDRLMNPLIDQYLYYLNRTQNQSGSAQNKDLLFSRGSPAGMSVQPKNWLPGPCYRQQRVSKTKTDNNNSNFTWTGASKYNLNGRESIINPGTAVASHKDDEDKFFPMSGVMIFGKESAGASSTALDNVMITDEEEIKATNPVATERFGTVAVNFQSSSTDPATGDVHAMGALPGMVWQDRDVYLQGPIWAKIPHTDGHFHPSPLMGGFGLKNPPPQILIKNTPVPANPPAEFSATKFASFITQYSTGQVSVEIEWELQKENSKRWNPEVQYTSNYAKSANVDFTVDNNGLYTEPRPIGTRYLTRPL

SEQ ID NO: 289 - DNA, 2211 bp, synthetic construct
  misc_feature 1..2211: note = source = /note="Description of Artificial Sequence: Synthetic polynucleotide"
  source 1..2211: mol_type = other DNA
atggctgccgatggttatcttccagattggctcgaggacaacctctctgagggcattcgcgagtggtgggacttgaaacctggagccccgaagcccaaagccaaccagcaaaagcaggacgacggccggggtctggtgcttcctggctacaagtacctcggacccttcaacggactcgacaagggggagcccgtcaacgcggcggacgcagcggccctcgagcacgacaaggcctacgaccagcagctcaaagcgggtgacaatccgtacctgcggtataaccacgccgacgccgagtttcaggagcgtctgcaagaagatacgtcttttgggggcaacctcgggcgagcagtcttccaggccaagaagcgggttctcgaacctctcggtctggttgaggaaggcgctaagacggctcctggaaagaaacgtccggtagagcagtcgccacaagagccagactcctcctcgggcatcggcaagacaggccagcagcccgctaaaaagagactcaattttggccagactggcgactcagagtcagtccccgatccacaacctctcggagaacctccagcaacccccgctgctgtgggacctactacaatggcttcaggcggtggcgcaccaatggcagacaataacgaaggcgccgacggagtgggtaatgcctcaggaaattggcattgcgattccacatggctgggcgacagagtcatcaccaccagcacccgcacctgggccttgcccacctacaataaccacctctacaagcaaatctccagtacttcaacgggggccagcaacgacaaccactacttcggctacggcaccccctgggggtattttgatttcaacagattccactgccacttttcaccacgtgactggcagcgactcatcaacaacaattggggattccggcccaagagactcaacttcaaactcttcaacatccaagtcgaggaggtcacgacgaatgatggcgtcacaaccatcgctaataaccttaccagcacggttcaagtcttctcggactcggagtaccagcttccgtacgtcctcggctctgcgcaccagggctgcctccctccgttcccggcggacgtgttcatgattccgcaatacggctacctgacgctcaacaatggcagccaagccgtgggacgttcatccttttactgcctggaatatttcccttctcagatgctgagaacgggcaacaactttaccttcagctacacctttgaggaagtgcctttccacagcagctacgcgcacagccagagcctggaccggctgatgaatcctctcatcgaccaatacctgtattacctgaacagaacacaaaatcagtccggaagtgcccaaaacaaggacttgctgtttagccgtgggtctccagctggcatgtctgttcagcccaaaaactggctacctggaccctgttatcggcagcagcgcgtttctaaaacaaaaacagacaacaacaacagcaattttacctggactggtgcttcaaaatataacctcaatgggcgtgaatccatcatcaaccctggcaccgctgtggcctcacacaaagacgacgaagacaagttctttcccatgagcggtgtcatgatttttggaaaagagagcgccggagcttcaagcactgcattggacaatgtcatgattacagacgaagaggaaattaaagccactaaccctgtggccaccgaaagatttgggaccgtggcagtcaatttccagagcagcagcacagaccctgcgaccggagatgtgcatgctatgggagcattacctggcatggtgtggcaagatagagacgtgtacctgcagggtcccatttgggccaaaattcctcacacagatggacactttcacccgtctcctcttatgggcggctttggactcaagaacccgcctcctcagatcctcatcaaaaacacgcctgttcctgcgaatcctccggcggagttttcagctacaaagtttgcttcattcatcacccaatactccacaggacaagtgagtgtggaaattgaatgggagctgcagaaagaaaacagcaagcgctggaatcccgaagtgcagtacacatccaattatgcaaaatctgccaacgttgattttactgtggacaacaatggactttatactgagcctcgccccattggcacccgttaccttacccgtcccctgtaa

SEQ ID NO: 290 - protein, 737 aa, synthetic construct
  REGION 1..737: note = source = /note="Description of Artificial Sequence: Synthetic polypeptide"
RMAADGYLPDWLEDNLSEGIREWWDLKPGAPKPKANQQKQDDGRGLVLPGYKYLGPFNGLDKGEPVNAADAAALEHDKAYDQQLKAGDNPYLRYNHADAEFQERLQEDTSFGGNLGRAVFQAKKRVLEPLGLVEEGAKTAPGKKRPVEQSPQEPDSSSGIGKTGQQPAKKRLNFGQTGDSESVPDPQPLGEPPATPAAVGPTTMASGGGAPMADNNEGADGVGNASGNWHCDSTWLGDRVITTSTRTWALPTYNNHLYKQISSTSTGASNDNHYFGYSTPWGYFDFNRFHCHFSPRDWQRLINNNWGFRPKRLNFKLFNIQVEEVTTNDGVTTIANNLTSTVQVFSDSEYQLPYVLGSAHQGCLPPFPADVFMIPQYGYLTLNNGSQAVGRSSFYCLEYFPSQMLRTGNNFTFSYTFEEVPFHSSYAHSQSLDRLMNPLIDQYLYYLNRTQNQSGSAQNKDLLFSRGSPAGMSVQPKNWLPGPCYRQQRVSKTKTDNNNSNFTWTGASKYNLNGRESIINPGTAVASHKDDEDKFFPMSGVMIFGKESAGASSTALDNVMITDEEEIKATNPVATERFGTVAVNFQSSSTDPATGDVHAMGALPGMVWQDRDVYLQGPIWAKIPHTDGHFHPSPLMGGFGLKNPPPQILIKNTPVPANPPAEFSATKFASFITQYSTGQVSVEIEWELQKENSKRWNPEVQYTSNYAKSANVDFTVDNNGLYTEPRPIGTRYLTRPL

SEQ ID NO: 291 - protein, 737 aa, synthetic construct
  REGION 1..737: note = source = /note="Description of Artificial Sequence: Synthetic polypeptide"
RMAADGYLPDWLEDNLSEGIREWWDLKPGAPKPKANQQKQDDGRGLVLPGYKYLGPFNGLDKGEPVNAADAAALEHDKAYDQQLKAGDNPYLRYNHADAEFQERLQEDTSFGGNLGRAVFQAKKRVLEPLGLVEEGAKTAPGKKRPVEQSPQEPDSSSGIGKTGQQPAKKRLNFGQTGDSESVPDPQPLGEPPATPAAVGPTTMASGGGAPMADNNEGADGVGNASGNWHCDSTWLGDRVITTSTRTWALPTYNNHLYKQISSTSTGASNDNHYFGYSTPWGYFDFNRFHCHFSPRDWQRLINNNWGFRPKRLNFKLFNIQVKEVTTNDGVTTIANNLTSTVQVFSDSEYQLPYVLGSAHQGCLPPFPADVFMIPQYGYLTLNNGSQAVGRSSFYCLEYFPSQMLRTGNNFTFSYTFEEVPFHSSYAHSQSLDRLMNPLIDQYLYYLNRTQNQSGSAQNKDLLFSRGSPAGMSVQPKNWLPGPCYRQQRVSKTKTDNNNSNFTWTGASKYNLNGRESIINPGTAVASHKDDEDKFFPMSGVMIFGKESAGASSTALDNVMITDEEEIKATNPVATERFGTVAVNFQSSSTDPATGDVHAMGALPGMVWQDRDVYLQGPIWAKIPHTDGHFHPSPLMGGFGLKNPPPQILIKNTPVPANPPAEFSATKFASFITQYSTGQVSVEIEWELQKENSKRWNPEVQYTSNYAKSANVDFTVDNNGLYTEPRPIGTRYLTRPL

SEQ ID NO: 292 - protein, 737 aa, synthetic construct
  REGION 1..737: note = source = /note="Description of Artificial Sequence: Synthetic polypeptide"
RMAADGYLPDWLEDNLSEGIREWWDLKPGAPKPKANQQKQDDGRGLVLPGYKYLGPFNGLDKGEPVNAADAAALEHDKAYDQQLKAGDNPYLRYNHADAEFQERLQEDTSFGGNLGRAVFQAKKRVLEPLGLVEEGAKTAPGKKRPVEQSPQEPDSSSGIGKTGQQPAKKRLNFGQTGDSESVPDPQPLGEPPATPAAVGPTTMASGGGAPMADNNEGADGVGNASGNWHCDSTWLGDRVITTSTRTWALPTYNNHLYKQISSTSTGASNDNHYFGYSTPWGYFDFNRFHCHFSPRDWQRLINNNWGFRPKRLNFKLFNIQVKEVTTNDGVTTIANNLTSTVQVFSDSEYQLPYVLGSAHQGCLPPFPADVFMIPQYGYLTLNNGSQAVGRSSFYCLEYFPSQMLRTGNNFTFSYTFEEVPFHSSYAHSQSLDRLMNPLIDQYLYYLNRTQNQSGSAQNKDLLFSRGSPAGMSVQPKNWLPGPCYRQQRVSKTKTDNNNSNFTWTGASKYNLNGRESIINPGTAVASHKDDEDKFFPMSGVMIFGKESAGANSTALDNVMITDEEEIKATNPVATERFGTVAVNFQSSSTDPATGDVHAMGALPGMVWQDRDVYLQGPIWAKIPHTDGHFHPSPLMGGFGLKNPPPQILIKNTPVPANPPAEFSATKFASFITQYSTGQVSVEIEWELQKENSKRWNPEVQYTSNYAKSANVDFTVDNNGLYTEPRPIGTRYLTRPL

SEQ ID NO: 293 - DNA, 2208 bp, synthetic construct
  misc_feature 1..2208: note = source = /note="Description of Artificial Sequence: Synthetic polynucleotide"
  source 1..2208: mol_type = other DNA
atggctgccgatggttatcttccagattggctcaaggacactctctctgaaggaataagacagtggtggaagctcaaacctggcccaccaccaccaaagcccgcagagcggcataaggacgacagcgggggtcttgtgcttcctgggtacaagtacctcggacccttcaacggactcgacaagggagagccggtcaacgaggcagacgccgcggccctcgagtacgacaaggcctacgaccggcagctcgacagcggagacaacccgtacctcaagtacaaccacgccgacgcggagtttcaggagcgccttaaagaagatacgtcttttgggggcaacctcggacgagcagtcttccaggcgaaaaagagggttcttgaacctctgggcctggttgaggaacctgttaagacggctccgggaaaaaagaggccggtagagcactctcctgtggagccagactcctcctcgggaacaggaaaagcgggccagcagcctgcgagaaagagattgaattttggtcagactggagacgcagactccgtacctgacccccagcctctcggacagccaccagcagccccctctggtctgggaactaatacgatggctacaggcagtggcgcaccaatggcagacaataacgagggcgccgacggagtgggtaattcctcgggaagttggcattgcgattccacatggatgggcgacagagtcatcaccaccagcacccgaacctgggctctgcccacctacaacaaccatctgtacaagcagatctccagccaatcaggagccagcaacgacaaccactactttggctacagcaccccttgggggtattttgacttcaacagattccactgccacttttcaccacgtgactggcaaagactcatcaacaacaactggggattccggcccaagagactcaacttcaagctctttaacattcaagtcaaggaggtcacgcagaatgacggtacgacgacgattgccaataaccttaccagcacggttcaggtgtttactgactcggagtaccagctcccgtacgtccccggctcggcgcatcaaggatgcctcccgccgttcccagcagacgtcttcatggtgccacagtatggatacctcaccctgaacaacgggagtcaggcagtaggacgctcttcattttactgcctggagtactttccttctcagatgcttcgtaccggaaacaactttaccttcagctacacctttgaggatgttcctttccacagcagctacgctcacagccagagtttggaccgtctcatgaatcctctcatcgaccagtacctgtattacttgagcagaacaaacactccaagcggaaccaccacgcagtccaggcttcagttttctcaggccggagcaagtgacattcgggaccagtctaggaactggcttcctggaccctgttaccgccagcagcgagtatcaaagacagctgcggacaacaacaacagtgaatactcgtggactggagctaccaagtaccacctcaatggcagagactctctggtgaatccgggcccggccatggccagccacaaggacgatgaagaaaagttttttcctcaaagcggggttctcatctttgggaagcaaggctcagagaaaacaaatgtggacattgaaaaggtcatgattacagacgaagaggaaatcagaaccaccaatcccgtggccacggagcagtatggttctgtatctaccaacctccagagcggcaacacacaagcagctactgcagatgtcaacacacaaggcgttcttccaggcatggtctggcaggacagagacgtgcacctgcaggggcctatctgggcaaagattccacacacggacggacattttcacccctctcccctcatgggcggatttggacttaaacaccctcctccacagattctcatcaagaacaccccggtacctgcaaatccttcgaccaccttcagtgcggcaaagtttgcttccttcatcacacagtattccacagggcaggtcagcgtggagatcgagtgggagctgcagaaggagaacagcaaacgctggaaccccgagatccagtacacttccaactacaacaaatctgttaatgtggactttactgtggacactaatggtgtgtattcagagcctcgccccattggcaccagatacctgactcgtaatctgtaa

SEQ ID NO: 294 - protein, 735 aa, synthetic construct
  REGION 1..735: note = source = /note="Description of Artificial Sequence: Synthetic polypeptide"
MAADGYLPDWLKDTLSEGIRQWWKLKPGPPPPKPAERHKDDSGGLVLPGYKYLGPFNGLDKGEPVNEADAAALEYDKAYDRQLDSGDNPYLKYNHADAEFQERLKEDTSFGGNLGRAVFQAKKRVLEPLGLVEEPVKTAPGKKRPVEHSPVEPDSSSGTGKAGQQPARKRLNFGQTGDADSVPDPQPLGQPPAAPSGLGTNTMATGSGAPMADNNEGADGVGNSSGSWHCDSTWMGDRVITTSTRTWALPTYNNHLYKQISSQSGASNDNHYFGYSTPWGYFDFNRFHCHFSPRDWQRLINNNWGFRPKRLNFKLFNIQVKEVTQNDGTTTIANNLTSTVQVFTDSEYQLPYVPGSAHQGCLPPFPADVFMVPQYGYLTLNNGSQAVGRSSFYCLEYFPSQMLRTGNNFTFSYTFEDVPFHSSYAHSQSLDRLMNPLIDQYLYYLSRTNTPSGTTTQSRLQFSQAGASDIRDQSRNWLPGPCYRQQRVSKTAADNNNSEYSWTGATKYHLNGRDSLVNPGPAMASHKDDEEKFFPQSGVLIFGKQGSEKTNVDIEKVMITDEEEIRTTNPVATEQYGSVSTNLQSGNTQAATADVNTQGVLPGMVWQDRDVHLQGPIWAKIPHTDGHFHPSPLMGGFGLKHPPPQILIKNTPVPANPSTTFSAAKFASFITQYSTGQVSVEIEWELQKENSKRWNPEIQYTSNYNKSVNVDFTVDTNGVYSEPRPIGTRYLTRNL

SEQ ID NO: 295 - DNA, 2208 bp, synthetic construct
  misc_feature 1..2208: note = source = /note="Description of Artificial Sequence: Synthetic polynucleotide"
  source 1..2208: mol_type = other DNA
atggctgccgatggttatcttccagattggctcgaggacactctctctgaaggaataagacagtggtggaagctcaaacctggcccaccaccaccaaagcccgcagagcggcataaggacgacagcaggggtcttgtgcttcctgggtacaagtacctcggacccttcaacggactcgacaagggggagccggtcaacgaggcagacgccgcggccctcgagcacgacaaggcctacgaccggcagctcgacagcggagacaacccgtacctcaagtacaaccacgccgacgcagagtttcaggagcgccttaaagaagatacgtcttttgggggcaacctcggacgagcagtcttccaggcgaaaaagagggttcttgaacctctgggcctggttgaggaacctgttaagacggctccgggaaaaaagaggccggtagagcactctcctgtggagccagactcctcctcgggaaccggaaaagcgggccagcagcctgcaagaaaaagattaaattttggtcagactggagacgcagactccgtacctgacccccagcctctcggacagccaccagcagccccctctggtctgggatctactacaatggctacaggcagtggcgcaccaatggcagacaataacgagggtgccgatggagtgggtaattcctcaggaaattggcattgcgattcccaatggctgggcgacagagtcatcaccaccagcacccgaacctgggccctgcccacatacaacaaccacctctacaagcaaatctccagccaatcaggagccagcaacgacaaccactactttggctacagcaccccctgggggtattttgacttcaacagattccactgccacttttcaccacgtgactggcaaagactcatcaacaacaactggggattccggcccaaaagactcaacttcaagctctttaatattcaagtcaaagaggtcacgcagaatgacggtacgacgacgattgccaataaccttaccagcacggttcaggtgtttactgactcggagtaccagctcccgtacgtcctgggctcggcgcatcaaggatgcctcccgccgtttccagcggacgtcttcatggtcccacagtatggatacctcaccctgaacaacgggagtcaggcggtaggacgctcttccttttactgcctggagtactttccttctcagatgctgcgtactggaaacaactttcagttcagctacacttttgaagacgtgcctttccacagcagctacgctcacagccagagtctggatcggctgatgaatcctctgatcgaccagtacctgtattatctgaacaagacacaaacaaatagtggaactcttcagcagtctcggctactgtttagccaagctggaccaaccaacatgtctcttcaagctaaaaactggctgcctggaccttgctacagacagcagcgtctgtcaaaacaggcaaacgacaacaacaacagcaactttccctggactgcagctacaaagtatcatctaaatggccgggactcgttggttaatccaggaccagctatggccagtcgcaaggatgacgaagaaaagtttttccccatgcatggaaccctgatatttggtaaacaaggaacaaatgccaacgacgcggatttggaaaatgtcatgattacagatgaagaagaaatcagggccaccaatcccgtggctacggagcagtacgggactgtgtcaaataatttgcaaaactcaaacactggtccaactactggaactgtcaatcaccaaggagcgttacctggtatggtgtggcaggatcgagacgtgtacctgcagggacccatttgggccaagattcctcacaccgatggacactttcatccttctccactgatgggaggttttggactcaaacacccgcctcctcagatcatgatcaaaaacactcccgttccagccaatcctcccacaaacttcagttctgccaagtttgcttctttcatcacacagtattccacgggacaggtcagcgtggagatcgagtgggagctgcagaaggagaacagcaaacgctggaatcccgaaattcagtacacttccaactacaacaagtctgttaatgtggactttactgtggacactaatggtgtgtattcagagcctcgccccattggcaccagatacctgactcgtaatctgtaa

SEQ ID NO: 296 - protein, 735 aa, synthetic construct
  REGION 1..735: note = source = /note="Description of Artificial Sequence: Synthetic polypeptide"
MAADGYLPDWLEDTLSEGIRQWWKLKPGPPPPKPAERHKDDSRGLVLPGYKYLGPFNGLDKGEPVNEADAAALEHDKAYDRQLDSGDNPYLKYNHADAEFQERLKEDTSFGGNLGRAVFQAKKRVLEPLGLVEEPVKTAPGKKRPVEHSPVEPDSSSGTGKAGQQPARKRLNFGQTGDADSVPDPQPLGQPPAAPSGLGSTTMATGSGAPMADNNEGADGVGNSSGNWHCDSQWLGDRVITTSTRTWALPTYNNHLYKQISSQSGASNDNHYFGYSTPWGYFDFNRFHCHFSPRDWQRLINNNWGFRPKRLNFKLFNIQVKEVTQNDGTTTIANNLTSTVQVFTDSEYQLPYVLGSAHQGCLPPFPADVFMVPQYGYLTLNNGSQAVGRSSFYCLEYFPSQMLRTGNNFQFSYTFEDVPFHSSYAHSQSLDRLMNPLIDQYLYYLNKTQTNSGTLQQSRLLFSQAGPTNMSLQAKNWLPGPCYRQQRLSKQANDNNNSNFPWTAATKYHLNGRDSLVNPGPAMASRKDDEEKFFPMHGTLIFGKQGTNANDADLENVMITDEEEIRATNPVATEQYGTVSNNLQNSNTGPTTGTVNHQGALPGMVWQDRDVYLQGPIWAKIPHTDGHFHPSPLMGGFGLKHPPPQIMIKNTPVPANPPTNFSSAKFASFITQYSTGQVSVEIEWELQKENSKRWNPEIQYTSNYNKSVNVDFTVDTNGVYSEPRPIGTRYLTRNL

SEQ ID NO: 297 - DNA, 2208 bp, synthetic construct
  misc_feature 1..2208: note = source = /note="Description of Artificial Sequence: Synthetic polynucleotide"
  source 1..2208: mol_type = other DNA
atggctgccgatggttatcttccagattggctcgaggacactctctctgaaggaataagacagtggtggaagctcaaacctggcccaccaccaccaaagcccgcagagcggcataaggacgacagcaggggtcttgtgcttcctgggtacaagtacctcggacccttcaacggactcgacaagggagagccggtcaacgaggcagacgccgcggccctcgagcacgacaaagcctacgaccggcagctcgacagcggagacaacccgtacctcaagtacaaccacgccgacgcggagtttcaggagcgccttaaagaagatacgtcttttgggggcaacctcggacgagcagtcttccaggcgaaaaagagggttcttgaacctctgggcctggttggggaacctgtcaagacggctccaggaaaaaagaggccggtagagcactctcctgtggagccagactcctcctcgggaaccggaaaggcgggccagcagcctgcaagaaaaagattgaattttggtcagactggagacgcagactcagtacctgacccccagcctctcggacagccaccagcagccccctctggtctgggaactaatacgatggctacaggcagtggcgcaccaatggcagacaataacgagggcgccgacggagtgggtaattcctcgggaaattggcattgcgattccacatggatgggcgacagagtcatcaccaccagcacccgaacctgggccctgcccacctacaacaaccacctctacaaacaaatttccagccaatcaggagcctcgaacgacaatcactactttggctacagcaccccttgggggtattttgacttcaacagattccactgccacttttcaccacgtgactggcaaagactcatcaacaacaactggggattccgacccaagagactcaacttcaagctctttaacattcaagtcaaagaggtcacgcagaatgacggtacgacgacgattgccaataaccttaccagcacggttcaggtgtttactgactcggagtaccagctcccgtacgtcctcggctcggcgcatcaaggatgcctcccgccgttcccagcagacgtcttcatggtgccacagtatggatacctcaccctgaacaacgggagtcaggcagtaggacgctcttcattttactgcctggagtactttccttctcagatgctgcgtaccggaaacaactttaccttcagctacacttttgaggacgttcctttccacagcggctacgctcacagccagagtctggaccgtctcatgaatcctctcatcgaccagtacctgtattacttgagcacaacaaacactccaagtggaaccaccacgcagtcaaggcttcagttttctcaggccggagcgagtgacattcgggaccagtctaggaactggcttcctggaccctgttaccgccagcagcgagtatcaaagacatctgcggataacaacaacagtgaatactcgtggactggagctaccaagtaccacctcaatggcagagactctctggtgaatccgggcccggccatggcaagccacaaggacaatgaagaaaagttttttcctcagagcggggttctcatctttgggaagcaaggctcagagaaaacaaatgtggacattgaaaaggtcatgattacagacgaagaggaaatcaggacaaccaatcccgtggctacggagcagtacggttctgtatctaccaacctccagagaggcaacagacaagcagctaccgcagatgtcaacacacaaggcgttcttccaggcatggtctggcaggacagagatgtgtaccttcaggggcccatctgggcaaagattccacacacggacggacattttcacccctctcccctcatgggtggattcggacttaaacaccctcctccacagattctcatcaagaacaccccggtacctgcgaatccttcgaccaccttcagtgcggcaaagtttgcttccttcatcacacagtactccacgggacaggtcagcgtggagatcgagtgggagctgcagaaggaaaacagcaaacgctggaatcccgaaattcagtacacttccaactacaacaagtctgttaatgtggactttactgtggacactaatggcgtgtattcagagcctcgccccattggcaccagatacctgactcgtaatctgtaa

SEQ ID NO: 298 - protein, 735 aa, synthetic construct
  REGION 1..735: note = source = /note="Description of Artificial Sequence: Synthetic polypeptide"
MAADGYLPDWLEDTLSEGIRQWWKLKPGPPPPKPAERHKDDSRGLVLPGYKYLGPFNGLDKGEPVNEADAAALEHDKAYDRQLDSGDNPYLKYNHADAEFQERLKEDTSFGGNLGRAVFQAKKRVLEPLGLVGEPVKTAPGKKRPVEHSPVEPDSSSGTGKAGQQPARKRLNFGQTGDADSVPDPQPLGQPPAAPSGLGTNTMATGSGAPMADNNEGADGVGNSSGNWHCDSTWMGDRVITTSTRTWALPTYNNHLYKQISSQSGASNDNHYFGYSTPWGYFDFNRFHCHFSPRDWQRLINNNWGFRPKRLNFKLFNIQVKEVTQNDGTTTIANNLTSTVQVFTDSEYQLPYVLGSAHQGCLPPFPADVFMVPQYGYLTLNNGSQAVGRSSFYCLEYFPSQMLRTGNNFTFSYTFEDVPFHSGYAHSQSLDRLMNPLIDQYLYYLSTTNTPSGTTTQSRLQFSQAGASDIRDQSRNWLPGPCYRQQRVSKTSADNNNSEYSWTGATKYHLNGRDSLVNPGPAMASHKDNEEKFFPQSGVLIFGKQGSEKTNVDIEKVMITDEEEIRTTNPVATEQYGSVSTNLQRGNRQAATADVNTQGVLPGMVWQDRDVYLQGPIWAKIPHTDGHFHPSPLMGGFGLKHPPPQILIKNTPVPANPSTTFSAAKFASFITQYSTGQVSVEIEWELQKENSKRWNPEIQYTSNYNKSVNVDFTVDTNGVYSEPRPIGTRYLTRNL

SEQ ID NO: 299 - DNA, 2208 bp, synthetic construct
  misc_feature 1..2208: note = source = /note="Description of Artificial Sequence: Synthetic polynucleotide"
  source 1..2208: mol_type = other DNA
atggctgccgatggttatcttccagattggctcgaggacactctctctgaaggaataagacagtggtggaagctcaaacctggcccaccaccaccaaagcccgcagagcggcataaggacgacagcaggggtcttgtgcttcctgggtacaagtacctcggacccttcaacggactcgacaagggagagccggtcaacgaggcagacgccgcggccctcgagcacgacaaagcctacgaccggcagctcgacagcggagacaacccgtacctcaagtacaaccacgccgacgcggagtttcaggagcgccttaaagaagatacgtcttttgggggcaacctcggacgagcagtcttccaggcgaaaaagagggttcttgaacctctgggcctggttggggaacctgttaagacggctccgggaaaaaagaggccggtagagcactctcctgtggagccagactcctcctcgggaaccggaaaggcgggccagcagcctgcaagaaaaagattgaattttggtcagactggagacgcagactcagtacctgacccccagcctctcggacagccaccagcagccccctctggtctgggaactaatacgatggctacaggcagtggcgcaccaatggcagacaataacgagggcgccgacggagtgggtaattcctcgggaaatcggcattgcgattccacatggatgggcgacagagtcatcaccaccagcacccgaacctgggccctgcccacctacaacaaccacctctacagacaaatttccagccaatcaggagcctcgaacgacaatcactactttggctacagcaccccttgggggtattttgacttcaacagattccactgccacttttcaccacgtgactggcaaagactcatcaacaacaactggggattccgacccaagagactcaacttcaagctctttaacattcaagtcaaagaggtcacgcagaatgacggtacgacgacgattgccaataaccttaccagcacggttcaggtgtttactgactcggagtaccagctcccgtacgtcctcggctcggcgcatcaaggatgcctcccgccgttcccagcagacgtcttcatggtgccacagtatggatacctcaccctgagcaacgggagtcaggcagtaggacgctcttcattttactgcccggagtactttccttctcagatgctgcgtaccggaaacaactttaccttcagctacacttttgaggacgttcctttccacagcagctacgctcacagccagagtctggaccgtctcatgaatcctctcatcgaccagtacctgtattacttgagcacaacaaacactccaagtggaaccaccacgcagtcaaggcttcagttttctcaggccggagcgagtgacattcgggaccagtctaggaactggcttcctggaccctgttaccgccagcagcgagtatcaaagacatctgcggataacaacaacagtgaatactcgtggactggagctaccaagtaccacctcaatggcagagactctctggtgaatccgggcccggccatggcaagccacaaggacaatgaagaaaagttttttcctcagagcggggttctcatctttgggaagcaaggctcagagaaaacaaatgtggacattgaaaaggtcatgattacagacgaagaggaaatcaggacaaccaatcccgtggctacggagcagtatggttctgtatctaccaacctccagagaggcaacagacaagcagctaccgcagatgtcaacacacaaggcgttcttccaggcatggtctggcaggacagagatgtgtaccttcaggggcccatctgggcaaagattccacacacggacggacattttcacccctctcccctcatgggtggattcggacctaaacaccctcctccacagattctcatcaagaacaccccggtacctgcgaatccttcgaccaccttcagtgcggcaaagtttgcttccttcatcacacagtactccacgggacaggtcagcgtggagatcgagtgggagctgcagaaggaaaacagcaaacgctggaatcccgaaattcagtacacttccaactacaacaagtctgttaatgtggactttactgtggacactaatggcgtgtattcagagcctcgccccattggcaccagatacctgactcgtaatttgtaa

SEQ ID NO: 300 - protein, 735 aa, synthetic construct
  REGION 1..735: note = source = /note="Description of Artificial Sequence: Synthetic polypeptide"
MAADGYLPDWLEDTLSEGIRQWWKLKPGPPPPKPAERHKDDSRGLVLPGYKYLGPFNGLDKGEPVNEADAAALEHDKAYDRQLDSGDNPYLKYNHADAEFQERLKEDTSFGGNLGRAVFQAKKRVLEPLGLVGEPVKTAPGKKRPVEHSPVEPDSSSGTGKAGQQPARKRLNFGQTGDADSVPDPQPLGQPPAAPSGLGTNTMATGSGAPMADNNEGADGVGNSSGNRHCDSTWMGDRVITTSTRTWALPTYNNHLYRQISSQSGASNDNHYFGYSTPWGYFDFNRFHCHFSPRDWQRLINNNWGFRPKRLNFKLFNIQVKEVTQNDGTTTIANNLTSTVQVFTDSEYQLPYVLGSAHQGCLPPFPADVFMVPQYGYLTLSNGSQAVGRSSFYCPEYFPSQMLRTGNNFTFSYTFEDVPFHSSYAHSQSLDRLMNPLIDQYLYYLSTTNTPSGTTTQSRLQFSQAGASDIRDQSRNWLPGPCYRQQRVSKTSADNNNSEYSWTGATKYHLNGRDSLVNPGPAMASHKDNEEKFFPQSGVLIFGKQGSEKTNVDIEKVMITDEEEIRTTNPVATEQYGSVSTNLQRGNRQAATADVNTQGVLPGMVWQDRDVYLQGPIWAKIPHTDGHFHPSPLMGGFGPKHPPPQILIKNTPVPANPSTTFSAAKFASFITQYSTGQVSVEIEWELQKENSKRWNPEIQYTSNYNKSVNVDFTVDTNGVYSEPRPIGTRYLTRNL

SEQ ID NO: 301 - DNA, 2205 bp, synthetic construct
  misc_feature 1..2205: note = source = /note="Description of Artificial Sequence: Synthetic polynucleotide"
  source 1..2205: mol_type = other DNA
atggctgccgatggttatcttccagattggctcgaggacactctctctgaaggaataagacagtggtggaagctcaaacctggcccaccaccaccaaagcccgcagagcggcataaggacgacagcaggggtcttgtgcttcctgggtacaagtacctcggacccttcaacggactcgacaagggagagccggtcaacgaggcagacgccgcggccctcgagcacgacaaggcctacgaccggcagctcgacagcggagacaacccgtacctcaagtacaaccacgccgacgcggagtttcaggagcgtcttaaagaagatacgtcttttgggggcaacctcggacgagcagtcttccaggcgaaaaagagggttcttgaacctctgggcctggttgaggaacctgttaagacggctccgggaaaaaagaggccggtagagcactctcctgcggagccagactcctcctcgggaaccggaaaagcgggccagcagcctgcaagaaaaagactgaatttcggtcagactggagacgcagactccgtacctgacccccagcctctcagacagccaccagcagcccccacaagtttgggatctactacaatggctacaggcagtggcgcaccaatggcagacaataacgagggtgccgatggagtgggtaattcctcaggaaattggcattgcgattcccaatggctgggcgacagagtcatcaccaccagcacccgaacctgggccctgcccacctacaacaaccacctttacaagcaaatctccagccaatcaggagcctcaaacgacaaccactactttggctacagcaccccctgggggtattttgacttcaacagattccactgccacttttcaccacgtgactggcaaagactcatcaacaacaactggggattccgacccaagagactcaacttcaagctctttaacattcaagtcaaagaggtcacgcagaatgacggtacgacgacgattgccaataaccttaccagcacggttcaggtgtttactgactcggagtaccagctcccgtacgtcctcggctcggcgcatcaaggatgcctcccgccgtttccagcggacgtcttcatggtcccacagtatggatacctcaccctgaacaacgggagtcaggcggtaggacgctcttccttttactgcctggagtactttccttctcagatgctgcgtactggaaacaactttcagttcagctacacttttgaagacgtgcctttccacagcagctacgctcacagccagagtttggatcggctgatgaatcctctgatcgaccagtacctgtattatctaaacagaacacaaacagctagtggaactcagcagtctcggctactgtttagccaagctggacccacaagcatgtctcttcaagctaaaaactggctgcctggaccgtgttatcgccagcagcgtttgtcaaagcaggcaaacgacaacaacaacagcaactttccctggactggagctaccaagtactacctcaatggcagagactctttggtgaacccgggcccggccatggccagccacaaggacgatgaagaaaagtttttccccatgcatggaaccctaatatttggtaaagaaggaacaaatgctaccaacgcggaattggaaaatgtcatgattacagatgaagaggaaatcaggaccaccaatcccgtggctacagagcagtacggatatgtgtcaaataatttgcaaaactcaaatactgctgcaagtactgaaactgtgaatcaccaaggagcattacctggtatggtgtggcaggatcgagacgtgtacctgcagggacccatttgggccaagattcctcacaccgatggacactttcatccttctccactgatgggaggttttggactcaaacacccgcctcctcagattatgatcaaaaacactcccgttccagccaatcctcccacaaacttcagttctgccaagtttgcttccttcatcacacagtattccacgggacaggtcagcgtggagatcgagtgggagctgcagaaggagaacagcaaacgctggaatcccgaaattcagtacacttccaactacaacaaatctgttaatgtggactttactgtggacactaatggtgtgtattcagagcctcgccccattggcaccagatacctgactcgtaatctgtaa

SEQ ID NO: 302 - protein, 734 aa, synthetic construct
  REGION 1..734: note = source = /note="Description of Artificial Sequence: Synthetic polypeptide"
MAADGYLPDWLEDTLSEGIRQWWKLKPGPPPPKPAERHKDDSRGLVLPGYKYLGPFNGLDKGEPVNEADAAALEHDKAYDRQLDSGDNPYLKYNHADAEFQERLKEDTSFGGNLGRAVFQAKKRVLEPLGLVEEPVKTAPGKKRPVEHSPAEPDSSSGTGKAGQQPARKRLNFGQTGDADSVPDPQPLRQPPAAPTSLGSTTMATGSGAPMADNNEGADGVGNSSGNWHCDSQWLGDRVITTSTRTWALPTYNNHLYKQISSQSGASNDNHYFGYSTPWGYFDFNRFHCHFSPRDWQRLINNNWGFRPKRLNFKLFNIQVKEVTQNDGTTTIANNLTSTVQVFTDSEYQLPYVLGSAHQGCLPPFPADVFMVPQYGYLTLNNGSQAVGRSSFYCLEYFPSQMLRTGNNFQFSYTFEDVPFHSSYAHSQSLDRLMNPLIDQYLYYLNRTQTASGTQQSRLLFSQAGPTSMSLQAKNWLPGPCYRQQRLSKQANDNNNSNFPWTGATKYYLNGRDSLVNPGPAMASHKDDEEKFFPMHGTLIFGKEGTNATNAELENVMITDEEEIRTTNPVATEQYGYVSNNLQNSNTAASTETVNHQGALPGMVWQDRDVYLQGPIWAKIPHTDGHFHPSPLMGGFGLKHPPPQIMIKNTPVPANPPTNFSSAKFASFITQYSTGQVSVEIEWELQKENSKRWNPEIQYTSNYNKSVNVDFTVDTNGVYSEPRPIGTRYLTRNL

SEQ ID NO: 303 - DNA, 3160 bp, synthetic construct
  misc_feature 1..3160: note = source = /note="Description of Artificial Sequence: Synthetic polynucleotide"
  source 1..3160: mol_type = other DNA
acccttcactaaagggactagtcctgcaggtttaaacgaattcgcccttgctgcgtcaactggaccaatgagaactttcccttcaacgactgtgtcgacaagatggtgatttggtgggaggaggggaagatgaccgccaaggtcgtggagtcggccaaagccattctcggaggaagcaaggtgcgcgtggaccagaaatgcaagtcctcggcccagatagatccgactcccgtgatcgtcacctccaacaccaacatgtgcgccgtgattgacgggaactcaacgaccttcgaacaccagcagccgttgcaagaccggatgttcaaatttgaactcacccgccgtctggatcatgactttgggaaggtcaccaagcgggaagtcaaagactttttccggtgggcaaaggatcacgtggttgaggtggagcatgaattctacgtcaaaaagggtggagccaagaaaagacccgcccctagtgacgcagatataagtgagcccaaacgggtgcgcgagtcagttgcgcagccatcgacgtcagacgcggaagcttcgatcaactacgcggacaggtaccaaaacaaatgttctcgtcacgtgggcatgaatctgatgctgtttccctgcagacaatgcgagagaatgaatcaaaattcaaatatctgcttcactcacggacagaaagactgtttagagtgctttcccgtgtcagaatctcaacctgtttctgtcgtcaaaaaggcgtatcagaaactgtgctacattcatcatatcatgggaaaggtgccagacgcttgcactgcctgcgatctggtcaatgtggatttggatgactgcatctctgaacaataaatgatttaaatcaggtatggctgccgatggttatcttccagattggctcgaggacactctctctgaaggaataagacagtggtggaagctcaaacctggcccaccaccaccaaagcccgcagagcggcataaggacgacagcaggggtcttgtgcttcctgggtacaagtacctcggacccttcaacggactcgacaagggagagccggtcaacgaggcagacgccgcggccctcgagcacgacaaggcctacgaccggcagctcgacagcggagacaacccgtacctcaagtacaaccacgccgacgcggagtttcaggagcgtcttaaagaagatacgtcttttgggggcaacctcggacgagcagtcttccaggcgaaaaagagggttcttgaacctctgggcctggttgaggaacctgttaagacggctccgggaaaaaagaggccggtagagcactctcctgcggagccagactcctcctcgggaaccggaaaagcgggccagcagcctgcaagaaaaagactgaatttcggtcagactggagacgcagactccgtacctgacccccagcctctcagacagccaccagcagcccccacaagtttgggatctactacaatggctacaggcagtggcgcaccaatggcagacaataacgagggtgccgatggagtgggtaattcctcaggaaattggcattgcgattcccaatggctgggcgacagagtcatcaccaccagcacccgaacctgggccctgcccacctacaacaaccacctttacaagcaaatctccagccaatcaggagcctcaaacgacaaccactactttggctacagcaccccctgggggtattttgacttcaacagattccactgccacttttcaccacgtgactggcaaagactcatcaacaacaactggggattccgacccaagagactcaacttcaagctctttaacattcaagtcaaagaggtcacgcagaatgacggtacgacgacgattgccaataaccttaccagcacggttcaggtgtttactgactcggagtaccagctcccgtacgtcctcggctcggcgcatcaaggatgcctcccgccgtttccagcggacgtcttcatggtcccacagtatggatacctcaccctgaacaacgggagtcaggcggtaggacgctcttccttttactgcctggagtactttccttctcagatgctgcgtactggaaacaactttcagttcagctacacttttgaagacgtgcctttccacagcagctacgctcacagccagagtttggatcggctgatgaatcctctgatcgaccagtacctgtattatctaaacagaacacaaacagctagtggaactcagcagtctcggctactgtttagccaagctggacccacaagcatgtctcttcaagctaaaaactggctgcctggaccgtgttatcgccagcagcgtttgtcaaagcaggcaaacgacaacaacaacagcaactttccctggactggagctaccaagtactacctcaatggcagagactctttggtgaacccgggcccggccatggccagccacaaggacgatgaagaaaagtttttccccatgcatggaaccctaatatttggtaaagaaggaacaaatgctaccaacgcggaattggaaaatgtcatgattacagatgaagaggaaatcaggaccaccaatcccgtggctacagagcagtacggatatgtgtcaaataatttgcaaaactcaaatactgctgcaagtactgaaactgtgaatcaccaaggagcattacctggtatggtgtggcaggatcgagacgtgtacctgcagggacccatttgggccaagattcctcacaccgatggacactttcatccttctccactgatgggaggttttggactcaaacacccgcctcctcagattatgatcaaaaacactcccgttccagccaatcctcccacaaacttcagttctgccaagtttgcttccttcatcacacagtattccacgggacaggtcagcgtggagatcgagtgggagctgcagaaggagaacagcaaacgctggaatcccgaaattcagtacacttccaactacaacaaatctgttaatgtggactttactgtggacactaatggtgtgtattcagagcctcgccccattggcaccagatacctgactcgtaatctgtaattgcttgttaatcaataaaccgtttaattcgtttcagttgaactttggtctctgcgaagggcgaattcgcggccgctaaatcaatcg

SEQ ID NO: 304 - protein, 734 aa, synthetic construct
  REGION 1..734: note = source = /note="Description of Artificial Sequence: Synthetic polypeptide"
MAADGYLPDWLEDTLSEGIRQWWKLKPGPPPPKPAERHKDDSRGLVLPGYKYLGPFNGLDKGEPVNEADAAALEHDKAYDRQLDSGDNPYLKYNHADAEFQERLKEDTSFGGNLGRAVFQAKKRVLEPLGLVEEPVKTAPGKKRPVEHSPAEPDSSSGTGKAGQQPARKRLNFGQTGDADSVPDPQPLGQPPAAPTSLGSTTMATGSGAPMADNNEGADGVGNSSGNWHCDSQWLGDRVITTSTRTWALPTYNNHLYKQISSQSGASNDNHYFGYSTPWGYFDFNRFHCRFSPRDWQRLINNNWGFRPKRLNFKLFNIQVKEVTQNDGTTTIANNLTSTVQVFTDSEYQLPYVLGSAHQGCLPPFPADVFMVPQYGYLTLNNGSQAVGRSSFYCLEYFPSQMLRTGNNFQFSYTFEDVPFHSSYAHSQGLDRLMNPLIDQYLYYLNRTQTASGTQQSRLLFSQAGPTSMSLQAKNWLPGPCYRQQRLSKQANDNNNSNFPWTGATKYHLNGGDSLVNPGPAMASHKDDEEKFFPMHGTLIFGKEGTNATNAELENVMITDEEEIRTTNPVATEQYGYVSNNLQNSNTAASTETVNHQGALPGMVWQDRDVYLRGPIWAKIPHADGHFHPSPLMGGFGLKHPPPQIMIKNTPVPANPPTNFSSAKFASFITQYSTGQVSVEIEWELQKENSKRWNPEIQYTSNYNKSVNVDFTVDTNGVYSEPRPIGTRYLTRNL

SEQ ID NO: 305 - DNA, 3157 bp, synthetic construct
  misc_feature 1..3157: note = source = /note="Description of Artificial Sequence: Synthetic polynucleotide"
  source 1..3157: mol_type = other DNA
ctcactaagggactagtcctgcaggtttaaacgaattcgcccttgctgcgtcaactggaccaatgagaactttcccttcaacgactgtgtcgacaagatggtgatttggtgggaggaggggaagatgaccgccaaggtcgtggagtcggccaaagccactctcggaggaagcaaggtgcgcgtggaccagaaacgcaagtcctcggcccagatagatccgactcccgtgatcgtcacctccaacaccaacatgtgcgccgtgattgacgggaactcaacgaccttcgaacaccagcagccgttgcaagaccgaatgttcaaatttgaactcacccgccgtctggatcatgacttcgggaaggtcaccaagcaggaagtcaaagactttttccggtgggcaaaggatcacgtggttgaggtggagcatgaattctacgtcaaaaagggtggagccaagaaaagacccgcccctagtgacgcagatataagtgagcccaaacgggtgcgcgagtcagttgcgcagccatcgacgtcagacgcggaagcttcgatcaactacgcggacaggtaccaaaacaaatgttctcgtcacgtgggcatgaatctgatgctgtttccctgcagacaatgcgagagaatgaatcaaaattcaaatatctgcttcactcacggacagaaagactgtttagagtgctttcccgtgtcagaatctcaacctgtttctgtcgtcaaaaaggcgtatcagaaactgtgctacattcatcatatcatgggaaaggtgccagacgcttgcactgcctgcgatctggtcaatgtggatttggatgactgcatctctgaacaataaatgatttaaatcaggtatggctgccgatggttatcttccagattggctcgaggacactctctctgaaggaataagacagtggtggaagctcaaacctggcccaccaccaccaaagcccgcagagcggcataaggacgacagcaggggtcttgtgcttcctgggtacaagtacctcggacccttcaacggactcgacaagggagagccggtcaacgaggcagacgccgcggctctcgagcacgacaaggcctacgaccggcagctcgacagcggagacaacccgtacctcaagtacaaccacgccgacgcggagtttcaggagcgtcttaaagaagatacgtcttttgggggcaacctcggacgagcagtcttccaggcgaaaaagagggttcttgaacctctgggcctggttgaggaacctgttaagacggctccgggaaaaaagaggccggtagagcactctcctgcggagccagactcctcctcgggaaccggaaaagcgggccagcagcctgcaagaaaaagactgaatttcggtcagactggagacgcagactccgtacctgacccccagcctctcggacagccaccagcagcccccacaagtttgggatctactacaatggctacaggcagtggcgcaccaatggcagacaataacgagggtgccgatggagtgggtaattcctcaggaaattggcattgcgattcccaatggctgggcgacagagtcatcaccaccagcacccgaacctgggccctgcccacctacaacaaccacctttacaagcaaatctccagccaatcaggagcctcaaacgacaaccactactttggctacagcaccccctgggggtattttgacttcaacagattccactgccgcttttcaccacgtgactggcaaagactcatcaacaacaactggggattccgacccaagagactcaacttcaagctctttaacattcaagtcaaagaggtcacgcagaatgacggtacgacgacgattgccaataaccttaccagcacggttcaggtgtttactgactcggagtaccagctcccgtacgtcctcggctcggcgcatcaaggatgcctcccgccgtttccagcggacgtcttcatggtcccacagtatggatacctcaccctgaacaacgggagtcaggcggtaggacgctcttccttttactgcctggagtactttccttctcagatgctgcgtactggaaacaactttcagttcagctacacttttgaagacgtgcctttccacagcagctacgctcacagccagggtttggatcggctgatgaatcctctgatcgaccagtacctgtattatctaaacagaacacaaacagctagtggaactcagcagtctcggctactgtttagccaagctggacccacaagcatgtctcttcaagctaaaaactggctgcctggaccgtgttatcgccagcagcgtttgtcaaagcaggcaaacgacaacaacaacagcaactttccctggactggagctaccaagtaccacctcaatggcggagactctttggtgaacccgggcccggccatggccagccacaaggacgatgaagaaaagtttttccccatgcatggaaccctaatatttggtaaagaaggaacaaatgctaccaacgcggaattggaaaatgtcatgattacagatgaagaggaaatcaggaccaccaatcccgtggctacagagcagtacggatatgtgtcaaataatttgcaaaactcaaatactgctgcaagtactgaaactgtgaatcaccaaggagcattacctggtatggtgtggcaggatcgagacgtgtacctgcggggacccatttgggccaagattcctcacgccgatggacactttcatccttctccactgatgggaggttttggactcaaacacccgcctcctcagattatgatcaaaaacactcccgttccagccaatcctcccacaaacttcagttctgccaagtttgcttccttcatcacacagtattccacgggacaggtcagcgtggagatcgagtgggagctgcagaaggagaacagcaaacgctggaatcccgaaattcagtacacttccaactacaacaaatctgttaatgtggactttactgtggacactaatggtgtgtattcagagcctcgccccattggcaccagatacctgactcgtaatctgtaattgcttgttaatcaataaaccgtttaattcgtttcagttgaactttggtctctgcgaagggcgaattcgcggccgctaaattcaattcg

SEQ ID NO: 306 - protein, 734 aa, synthetic construct
  REGION 1..734: note = source = /note="Description of Artificial Sequence: Synthetic polypeptide"
MAADGYLPDWLEDTLSEGIRQWWKLKPGPPPPKPAERHKDDSRGLVLPGYKYLGPFNGLDKGEPVNEADAAALEHDKAYDRQLDSGDNPYLKYNHADAEFQERLKEDTSFGGNLGRAVFQAKKRVLEPLGLVEEPVKTAPGKKRPVEHSPAEPDSSSGTGKAGQQPARKRLNFGQTGDADSVPDPQPLGQPPAAPTSLGSTTMATGSGAPMADNNEGADGVGNSSGNWHCDSQWLGDRVITTSTRTWALPTYNNHLYKQISSQSGASNDNHYFGYSTPWGYFDFNRFHCHFSPRDWQRLINNNWGFRPKRLNFKLFNIQVKEVTQNDGTTTIANNLTSTVQVFTDSEYQLPYVLGSAHQGCLPPFPADVFMVPQYGYLTLNNGSQAVGRSSFYCLECFPSQMLRTGNNFQFSYTFEDVPFHSSYAHSQSLDRLMNPLIDQYLYYLNRTQTASGTQQSRLLFSQAGPTSMSLQAKNWLPGPCYRQQRLSKQANDNNNSNFPWTGATKYHLNGRDSLVNPGPAMASHKDDEEKFFPMHGTLIFGKEGTNATNAELENVMITDEEEIRTTNPVATEQYGYVSNNLQNSNTAASTETVNHQGALPGMVWQDRDVYLQGPIWAKIPHTDGHFHPSPLMGGFGLKHPPPQIMIKNTPVPANPPTNFSSAKFASFITQYSTGQVSVEIEWELQKENSKRWNPEIQYTSNYNKSVNVDFTVDTNGVYSEPRPIGTRYLTRNL

SEQ ID NO: 307 - DNA, 2208 bp, synthetic construct
  misc_feature 1..2208: note = source = /note="Description of Artificial Sequence: Synthetic polynucleotide"
  source 1..2208: mol_type = other DNA
atggctgccgatggttatcttccagattggctcgaggacactctctctgaaggaataagacagtggtggaagctcaaacctggcccaccaccaccaaagcccgcagagcggcataaggacgacagcaggggtcttgtgcttcctggatacaagtacctcggacccttcaacggactcgacaagggagagccggtcaacgaggcagacgccgcggccctcgagcacgacaaggcctacgaccggcagctcgacagcggagacaacccgtacctcaagtacaaccacgccgacgcggagtttcaggagcgccttaaagaagatacgtcttttgggggcaacctcggacgagcagtcttccaggcgaaaaagagggttcttgaacctctgggcctggttgaggaacctgttaagacggctccgggaaaaaagaggccggtagagcactctcctgtggagccagactcctcctcgggaaccggaaaagcgggcaaccagcctgcaagaaaaagattgaatttcggtcagactggagacgcagactccgtacctgacccccagcctctcggacagccaccagcatccccctctggtctgggaactaatacgatggctacaggcagtggcgcaccaatggcagacaataacgagggcgccgacggagtgggtaattcctcgggaaattggcattgcgattccacatggatgggcgacagagtcgtcaccaccagcacccgcacctgggccctgcccacctacaacaaccacctctacaagcagatttccagccaatcaggagccagcaacgacaaccactactttggctacagcaccccttgggggtattttgacttcaacagattccactgccacttttcgccacgcgactggcagagactcatcaacaacaactggggattccggcccaaaagactcaacttcaagctgtttaacattcaagtcaaggaggtcacgcagaatgacggtacgacgacgattgccaataaccttaccagcacggttcaggtgtttactgacttggagtaccagctcccgtacgtcctcggctcggcgcatcaaggatgcctcccgccgttcccagcagacgtcttcatggtgccacagtatggatacctcaccctgaacaacgggagtcaggcggtaggacgctcttccttttactgcctggagtactttccttctcagatgcttcgcaccggaaacaactttaccttcagctacacttttgaagacgttcctttccacagcagctacgctcacagtcaaagtctggaccgtctcatgaatcctctcatcgaccagtacctgtattacttgagcagaacaaacactccaagcggaaccactacgcagtccaggcttcagttttctcaggccggagcgagtgacattcgggaccagtctaggaactggcttcctggaccctgttaccgccagcagcgagtatcaaagacagctgcggataacaacaacagtgaatactcgtggactggagctaccaagtaccacctcaatggcagagactctctggtgaatccgggcccggccatggccagccacaaggacgatgaagaaaagttttttcctcaaagcggggttctcatctttgggaagcaaggctcagagaaaacaaatgtggacattgaaaaggtcatgattacagacgaagaggaaatcaggaccaccaatcccgtggctacggagcagtatggttctgtatctaccaacctccagagcggcaacacacaagcagctacctcagatgtcaacacacaaggcgttcttccaggcatggtctggcaggacagagacgtgtacctgcaggggcccatctgggcaaaaattccacacacggacggacattttcacccctctcccctcatgggcggatttggacttaaacaccctcctccacagattctcattaagaataccccggtacctgcgaatccttcgaccaccttcagcgcggcaaagtttgcttccttcatcacacagtattccacggggcaggtcagcgtggagatcgagtgggagctgcagaaggagaacagcaaacgctggaatcccgaaattcagtacacttccaactacaacaaatctgttaatgtggactttactgtggacactaatggggtgtattcagagcctcgccctattggcaccagatacctgactcgtaatctgtaa

SEQ ID NO: 308 - DNA, 3159 bp, synthetic construct
  misc_feature 1..3159: note = source = /note="Description of Artificial Sequence: Synthetic polynucleotide"
  source 1..3159: mol_type = other DNA
gattgatttagcggccgcgaattcgcccttgctgcgtcaactggaccaatgagaactttcccttcaacgattgcgtcgacaagatggtgatctggtgggaggagggaaagatgaccgccaaggtcgtggagtcggccaaagccattctcggaggaagcaaggtgcgtgtggaccaaaagtgcaagtcttcggcccagatcgacccgactcccgtgatcgtcacctccaacaccaacatgtgcgccgtgattgatggaaactcaacgaccttcgagcaccagcagccgttgcaagaccggatgttcaaatttgaacttacccgccgtctggatcatgactttggaaaggtcaccaagcaggaagtgaaagactttttccggtgggcaaaggatcacgtggttgaggtggagcatgagttctacgtcaaaaagggtggagccaaaaaaagacccgcccccagtgacgcagatataagtgagcccaaacgggcgcgcgagtcagttgcgcagccatcgacgtcagacgcggaagcttcgatcaactacgcggacaggtaccaaaacaaatgttctcgtcacgtgggcatgaatctgatgctgtttccctgcagacaatgcgagagaatgaatcagaattcaaatatctgcttcactcacggacagaaagactgtccatagtgctttcccgtgtcagaatctcaacccgtttctgtcgtcaaaaaggcgtatcagaaactgtgctacattcatcacatcatgggaaaggtgccagacgcttgcactgcttgcgacctggtcaatgtggatttggatgactgcatctctgaacaataaatgatttaaatcaggtatggctgccgatggttatcttccagattggctcgaggacactctctctgaaggaataagacagtggtggaagctcaaacctggcccaccaccaccaaagcccgcagagcggcataaggacgacagcaggggtcttgtgcttcctggatacaagtacctcggacccttcaacggactcgacaagggagagccggtcaacgaggcagacgccgcggccctcgagcacgacaaggcctacgaccggcagctcgacagcggagacaacccgtacctcaagtacaaccacgccgacgcggagtttcaggagcgccttaaagaagatacgtcttttgggggcaacctcggacgagcagtcttccaggcgaaaaagagggttcttgaacctctgggcctggttgaggaacctgttaagacggctccgggaaaaaagaggccggtagagcactctcctgtggagccagactcctcctcgggaaccggaaaagcgggcaaccagcctgcaagaaaaagattgaatttcggtcagactggagacgcagactccgtacctgacccccagcctctcggacagccaccagcatccccctctggtctgggaactaatacgatggctacaggcagtggcgcaccaatggcagacaataacgagggcgccgacggagtgggtaattcctcgggaaattggcattgcgattccacatggatgggcgacagagtcgtcaccaccagcacccgcacctgggccctgcccacctacaacaaccacctctacaagcagatttccagccaatcaggagccagcaacgacaaccactactttggctacagcaccccttgggggtattttgacttcaacagattccactgccacttttcgccacgcgactggcagagactcatcaacaacaactggggattccggcccaaaagactcaacttcaagctgtttaacattcaagtcaaggaggtcacgcagaatgacggtacgacgacgattgccaataaccttaccagcacggttcaggtgtttactgacttggagtaccagctcccgtacgtcctcggctcggcgcatcaaggatgcctcccgccgttcccagcagacgtcttcatggtgccacagtatggatacctcaccctgaacaacgggagtcaggcggtaggacgctcttccttttactgcctggagtactttccttctcagatgcttcgcaccggaaacaactttaccttcagctacacttttgaagacgttcctttccacagcagctacgctcacagtcaaagtctggaccgtctcatgaatcctctcatcgaccagtacctgtattacttgagcagaacaaacactccaagcggaaccactacgcagtccaggcttcagttttctcaggccggagcgagtgacattcgggaccagtctaggaactggcttcctggaccctgttaccgccagcagcgagtatcaaagacagctgcggataacaacaacagtgaatactcgtggactggagctaccaagtaccacctcaatggcagagactctctggtgaatccgggcccggccatggccagccacaaggacgatgaagaaaagttttttcctcaaagcggggttctcatctttgggaagcaaggctcagagaaaacaaatgtggacattgaaaaggtcatgattacagacgaagaggaaatcaggaccaccaatcccgtggctacggagcagtatggttctgtatctaccaacctccagagcggcaacacacaagcagctacctcagatgtcaacacacaaggcgttcttccaggcatggtctggcaggacagagacgtgtacctgcaggggcccatctgggcaaaaattccacacacggacggacattttcacccctctcccctcatgggcggatttggacttaaacaccctcctccacagattctcattaagaataccccggtacctgcgaatccttcgaccaccttcagcgcggcaaagtttgcttccttcatcacacagtattccacggggcaggtcagcgtggagatcgagtgggagctgcagaaggagaacagcaaacgctggaatcccgaaattcagtacacttccaactacaacaaatctgttaatgtggactttactgtggacactaatggggtgtattcagagcctcgccctattggcaccagatacctgactcgtaatctgtaattgcttgttaatcaataaaccgtttaattcgtttcagttgaactttggtctctgcgaagggcgaattcgtttaaacctgcaggactagtccctttagtgagg

SEQ ID NO: 309 - protein, 735 aa, synthetic construct
  REGION 1..735: note = source = /note="Description of Artificial Sequence: Synthetic polypeptide"
MAADGYLPDWLEDTLSEGIRQWWKLKPGPPPPKPAERHKDDSRGLVLPGYKYLGPFNGLDKGEPVNEADAAALEHDKAYDRQLDSGDNPYLKYNHADAEFQERLKEDTSFGGNLGRAVFQAKKRVLEPLGLVEEPVKTAPGKKRPVEHSPVEPDSSSGTGKAGNQPARKRLNFGQTGDADSVPDPQPLGQPPASPSGLGTNTMATGSGAPMADNNEGADGVGNSSGNWHCDSTWMGDRVVTTSTRTWALPTYNNHLYKQISSQSGASNDNHYFGYSTPWGYFDFNRFHCHFSPRDWQRLINNNWGFRPKRLNFKLFNIQVKEVTQNDGTTTIANNLTSTVQVFTDLEYQLPYVLGSAHQGCLPPFPADVFMVPQYGYLTLNNGSQAVGRSSFYCLEYFPSQMLRTGNNFTFSYTFEDVPFHSSYAHSQSLDRLMNPLIDQYLYYLSRTNTPSGTTTQSRLQFSQAGASDIRDQSRNWLPGPCYRQQRVSKTAADNNNSEYSWTGATKYHLNGRDSLVNPGPAMASHKDDEEKFFPQSGVLIFGKQGSEKTNVDIEKVMITDEEEIRTTNPVATEQYGSVSTNLQSGNTQAATSDVNTQGVLPGMVWQDRDVYLQGPIWAKIPHTDGHFHPSPLMGGFGLKHPPPQILIKNTPVPANPSTTFSAAKFASFITQYSTGQVSVEIEWELQKENSKRWNPEIQYTSNYNKSVNVDFTVDTNGVYSEPRPIGTRYLTRNL

SEQ ID NO: 310 - DNA, 2205 bp, synthetic construct
  misc_feature 1..2205: note = source = /note="Description of Artificial Sequence: Synthetic polynucleotide"
  source 1..2205: mol_type = other DNA
atggctgccgatggttatcttccagattggctcgaggacactctctctgaaggaataagacagtggtggaagctcaaacctggcccaccaccaaagcccgcagagcggcataaggacgacagcaggggtcttgtgcttcctggatacaagtacctcggacccttcaacggactcgacaagggagagccggtcaacgaggcagacgccgcggccctcgagcacgacaaggcctacgaccggcagctcgacagcggagacaacccgtacctcaagtacaaccacgccgacgcggagtttcaggagcgccttaaagaagatacgtcttttgggggcaacctcggacgagcagtcttccaggcgaaaaagagggttcttgaacctctgggcctggttgaggaacctgttaagacggctccgggaaaaaagaggcccgtagagcactctcctgtggagccagactcctcctcgggaaccggaaaagcgggcaaccagcctgcaagaaaaagattgaatttcggtcagactggagacgcagactccgtacctgacccccagcctctcggacagccaccagcagccccctctggtctgggaactaatacgatggctacaggcagtggcgcaccaatggcagacaataacgagggcgccgacggagtgggtaattcctcgggagattggcattgcgattccacatggatgggcgacagagtcatcaccaccagcacccgcacctgggccctgcccacctacaacaaccacctctacaagcagatttccagccaatcaggagccagcaatgacaaccactactttggctacagcaccccttgggggtattttgacttcaacagattccactgccacttttcgccacgcgactggcagagactcatcaacaacaactggggattccggcccaaaagactcaacctcaagctgtttaacattcaagtcaaggaggtcacgcagaatgacggtacgacgacgattgccaataaccttaccagcacggttcaggtgtttactgacttggagtaccagctcccgtacgtcctcggctcggcgcatcaaggatgcctcccgccgttcccagcagacgtcttcatggtgccacagtatggatacctcaccctgaacaacgggagtcaggcggtaggacgctcttccttttactgcctggagtactttccttctcagatgcttcgtaccggaaacaactttaccttcagctacacttttgaagacgttcctttccacagcagctacgctcacagtcaaagtctggaccgtctcatgaatcctctcatcgaccagtacctgtattacttgagcagaacaaacactccaagcggaaccactacgcagtccaggcttcagttttctcaggccggagcgagtgacattcgggaccagtctaggaactggcttcctggaccctgttaccgccagcagcgagtatcaaagacagctgcggataacaacaacggtgaatactcgtggactggagctaccaagtaccacctcaatggcagagactctctggtgaatccgggcccggccatggccagccacaaggacgatgaagaaaagttttttcctcaaagcggggttctcatctttgggaagcaaggctcagagaaaacaaatgtggacattgaaaaggtcatgattacagacgaagaggaaatcaggaccaccaatcccgtggctacggagcagtatggttctgtatctaccaacctccagagcggcaacacacgagcagctacctcagatgtcaacacacaaggcgttcttccaggcatggtctggcaggacagagacgtgtacctgcaggggcccatctgggcaaaaattccacacacggacggacattttcacccctctcccctcatgggcggatttggacttaaacaccctcctccacagattctcattaagaataccccggtacctgcgaatccttcgaccaccttcagcgcggcaaagtttgcttccttcatcacacagtattccacggggcaggtcagcgtggagatcgagtgggagctgcagaaggagaacagcaaacgctggaatcccgaaattcagtacacttccaactacaacaaatctgttaatgtggactttactgtggacactaatggggtgtattcagagcctcgccctattggcaccagatacctgactcgtaatctgtaa

SEQ ID NO: 311 - DNA, 3156 bp, synthetic construct
  misc_feature 1..3156: note = source = /note="Description of Artificial Sequence: Synthetic polynucleotide"
  source 1..3156: mol_type = other DNA
cgattgaatttagcggccgcgaattcgcccttgctgcgtcaacggaccaatgagaactttcccttcaacgattgcgtcgacaagatggtgatctggtgggaggagggaaagatgaccgccaaggtcgtggagtcggccaaagccattctcggaggaagcaaggtgcgtgtggaccaaaagtgcaagtcttcggcccagatcgacccgactcccgtgatcgtcacctccaacaccaacatgtgcgccgtgattgatggaaactcaacgaccttcgagcaccagcagccgttgcaagaccggatgttcaaatttgaacttacccgccgtctggatcatgactttggaaaggtcaccaagcaggaagtgaaagactttttccggtgggcaaaggatcacgtggttgaggtggagcatgagttctacgtcaaaaagggtggagccaaaaaaagacccgcccccagtgacgcagatataagtgagcccaaacgggcgcgcgagtcagttgcgcagccatcgacgtcagacgcggaagcttcgatcaactacgcggacaggtaccaaaacaaatgttctcgtcacgtgggcatgaatctgatgctgtttccctgcagacaatgcgagcgaatgaatcagaattcaaatatctgcttcactcacggacagaaagactgtttagagtgctttcccgtgtcagaatctcaacccgtttctgtcgtcaaaaaggcgtatcagaaactgtgctacattcatcacatcatgggaaaggtgccagacgcttgcactgcttgcgacctggtcaatgtggatttggatgactgcatctctgaacaataaatgatttaaatcaggtatggctgccgatggttatcttccagattggctcgaggacactctctctgaaggaataagacagtggtggaagctcaaacctggcccaccaccaaagcccgcagagcggcataaggacgacagcaggggtcttgtgcttcctggatacaagtacctcggacccttcaacggactcgacaagggagagccggtcaacgaggcagacgccgcggccctcgagcacgacaaggcctacgaccggcagctcgacagcggagacaacccgtacctcaagtacaaccacgccgacgcggagtttcaggagcgccttaaagaagatacgtcttttgggggcaacctcggacgagcagtcttccaggcgaaaaagagggttcttgaacctctgggcctggttgaggaacctgttaagacggctccgggaaaaaagaggcccgtagagcactctcctgtggagccagactcctcctcgggaaccggaaaagcgggcaaccagcctgcaagaaaaagattgaatttcggtcagactggagacgcagactccgtacctgacccccagcctctcggacagccaccagcagccccctctggtctgggaactaatacgatggctacaggcagtggcgcaccaatggcagacaataacgagggcgccgacggagtgggtaattcctcgggagattggcattgcgattccacatggatgggcgacagagtcatcaccaccagcacccgcacctgggccctgcccacctacaacaaccacctctacaagcagatttccagccaatcaggagccagcaatgacaaccactactttggctacagcaccccttgggggtattttgacttcaacagattccactgccacttttcgccacgcgactggcagagactcatcaacaacaactggggattccggcccaaaagactcaacctcaagctgtttaacattcaagtcaaggaggtcacgcagaatgacggtacgacgacgattgccaataaccttaccagcacggttcaggtgtttactgacttggagtaccagctcccgtacgtcctcggctcggcgcatcaaggatgcctcccgccgttcccagcagacgtcttcatggtgccacagtatggatacctcaccctgaacaacgggagtcaggcggtaggacgctcttccttttactgcctggagtactttccttctcagatgcttcgtaccggaaacaactttaccttcagctacacttttgaagacgttcctttccacagcagctacgctcacagtcaaagtctggaccgtctcatgaatcctctcatcgaccagtacctgtattacttgagcagaacaaacactccaagcggaaccactacgcagtccaggcttcagttttctcaggccggagcgagtgacattcgggaccagtctaggaactggcttcctggaccctgttaccgccagcagcgagtatcaaagacagctgcggataacaacaacggtgaatactcgtggactggagctaccaagtaccacctcaatggcagagactctctggtgaatccgggcccggccatggccagccacaaggacgatgaagaaaagttttttcctcaaagcggggttctcatctttgggaagcaaggctcagagaaaacaaatgtggacattgaaaaggtcatgattacagacgaagaggaaatcaggaccaccaatcccgtggctacggagcagtatggttctgtatctaccaacctccagagcggcaacacacgagcagctacctcagatgtcaacacacaaggcgttcttccaggcatggtctggcaggacagagacgtgtacctgcaggggcccatctgggcaaaaattccacacacggacggacattttcacccctctcccctcatgggcggatttggacttaaacaccctcctccacagattctcattaagaataccccggtacctgcgaatccttcgaccaccttcagcgcggcaaagtttgcttccttcatcacacagtattccacggggcaggtcagcgtggagatcgagtgggagctgcagaaggagaacagcaaacgctggaatcccgaaattcagtacacttccaactacaacaaatctgttaatgtggactttactgtggacactaatggggtgtattcagagcctcgccctattggcaccagatacctgactcgtaatctgtaattgcttgttaatcaataaaccgtttaattcgtttcagttgaactttggtctctgcgaagggcgaattcgtttaaacctgcaggactagtccctttagtgag

SEQ ID NO: 312 - protein, 734 aa, synthetic construct
  REGION 1..734: note = source = /note="Description of Artificial Sequence: Synthetic polypeptide"
MAADGYLPDWLEDTLSEGIRQWWKLKPGPPPKPAERHKDDSRGLVLPGYKYLGPFNGLDKGEPVNEADAAALEHDKAYDRQLDSGDNPYLKYNHADAEFQERLKEDTSFGGNLGRAVFQAKKRVLEPLGLVEEPVKTAPGKKRPVEHSPVEPDSSSGTGKAGNQPARKRLNFGQTGDADSVPDPQPLGQPPAAPSGLGTNTMATGSGAPMADNNEGADGVGNSSGDWHCDSTWMGDRVITTSTRTWALPTYNNHLYKQISSQSGASNDNHYFGYSTPWGYFDFNRFHCHFSPRDWQRLINNNWGFRPKRLNLKLFNIQVKEVTQNDGTTTIANNLTSTVQVFTDLEYQLPYVLGSAHQGCLPPFPADVFMVPQYGYLTLNNGSQAVGRSSFYCLEYFPSQMLRTGNNFTFSYTFEDVPFHSSYAHSQSLDRLMNPLIDQYLYYLSRTNTPSGTTTQSRLQFSQAGASDIRDQSRNWLPGPCYRQQRVSKTAADNNNGEYSWTGATKYHLNGRDSLVNPGPAMASHKDDEEKFFPQSGVLIFGKQGSEKTNVDIEKVMITDEEEIRTTNPVATEQYGSVSTNLQSGNTRAATSDVNTQGVLPGMVWQDRDVYLQGPIWAKIPHTDGHFHPSPLMGGFGLKHPPPQILIKNTPVPANPSTTFSAAKFASFITQYSTGQVSVEIEWELQKENSKRWNPEIQYTSNYNKSVNVDFTVDTNGVYSEPRPIGTRYLTRNL

SEQ ID NO: 313 - DNA, 2208 bp, synthetic construct
  misc_feature 1..2208: note = source = /note="Description of Artificial Sequence: Synthetic polynucleotide"
  source 1..2208: mol_type = other DNA
atggctgccgatggttatcttccagattggctcgaggacactctctctgaaggaataagacagtggtggaagctcaaacctggcccaccaccaccaaagcccgcagagcggcataaggacgacagcaggggtcttgtgcttcctgggtacaagtacctcggacccttcaacggactcgacaagggagagccggtcaacgaggcagacgccgcggccctcgagcacgacaaggcctacgaccggcagctcgacagcggagacaacccgtacctcaagtacgaccacgccgacgcggagtttcaggagcgccttaaagaagatacgtcttttgggggcaacctcggacgagcagtcttccaggcaaaaaagagggttcttgaacctctgggcctggttgaggagcctgttaagacggctccgggaaaaaagaggccggtagagcactctcctgtggagccagactcctcctcgggaaccggaaaagcgggcaaccagcctgcaagaaagagattgaatttcggtcagactggagacgcagactccgtacctgacccccagcctctcggacagccaccagcagccccctctggtctgggaactaatacgatggctacaggcagtggcgcaccaatggcagacaataacgatggcgccgacggagtgggtaattcctcgggaaattggcattgcgattccacatggatgggcgacagagtcatcaccaccagcacccgaacctgggctctgcccacctacaacaaccatctgtacaagcagatttccagccaatcaggagccagcaacgacaaccactactttggctacagcaccccttgggggtattttgacttcaacagattccactgccacttttcaccacgtgactggcaaagactcatcaacaacaactggggattccggcccaagagactcaacttcaagctctttaacattcaagtcagagaggtcacgcagaatgatggtacgacgacgattgccaataaccttaccagcacggttcaggtgtttactgactcggagtaccagctcccgtacgtcctcggctcggcgcatcaaggatgcctcccgccgttcccagcagacgtcttcatggtgccacagtatggatacctcaccctgaacaacgggagtcaggcagtaggacgctcttcattttactgcctggagtacttcccttctcagatgctgcgtaccggaaacaactttaccttcagctacacctttgaggatgttcctttccacagcagctacgctcacagccagagtttggaccgtctcatgaatcctctcatcgaccagtacctgtattacttgagcagaacaaacactccaagcggaaccaccacgcagtccaggcttcagttttctcaggccggagcgagtgacattcgggatcagtctaggaactggcttcctggaccctgttaccgccagcagcgagtatcaaagacatctgcggacaacaacaacagtgaatactcgtggattggagctaccaagtaccacctcaatggcagagactctctggtgaatccgggcccggcaatggccagccacaaggacgatgaagaaaagttttttcctcagagcggggttctcatctttggaaaacaaggatcagagaaaacaaatgtggacattgaaaaggtcatgattacagacgaagaggaaatcagaaccaccaatcccgtggccacggagcagtatggttctgtatctaccaacctccagagcggcaacacacaagcatctactgcagatgtcaacacacaaggcgttcttccaggcatggtctggcaggacagagacgtgtacctgcaggggcctatctgggcaaagattccgcacacggacggacattttcacccctctcccctcatgggcggattcggacttaaacaccctcctccacagattctcatcaaaaacaccccggtacctgcgaatccttcgaccaccttcagtgcggcaaagtttgcttccttcatcacacagtattccacggggcgggtcagcgtggagatcgagtgggagctacagaaggagaacagcaaacgctggaatcccgagatccagtacacttccaactacaacaaatctgttaatgtggactttactgtggacactaatggtgtgtattcagagcctcgccccattggcaccagatacctgactcgtaatctgtaa

SEQ ID NO: 314 - protein, 735 aa, synthetic construct
  REGION 1..735: note = source = /note="Description of Artificial Sequence: Synthetic polypeptide"
MAADGYLPDWLEDTLSEGIRQWWKLKPGPPPPKPAERHKDDSRGLVLPGYKYLGPFNGLDKGEPVNEADAAALEHDKAYDRQLDSGDNPYLKYDHADAEFQERLKEDTSFGGNLGRAVFQAKKRVLEPLGLVEEPVKTAPGKKRPVEHSPVEPDSSSGTGKAGNQPARKRLNFGQTGDADSVPDPQPLGQPPAAPSGLGTNTMATGSGAPMADNNDGADGVGNSSGNWHCDSTWMGDRVITTSTRTWALPTYNNHLYKQISSQSGASNDNHYFGYSTPWGYFDFNRFHCHFSPRDWQRLINNNWGFRPKRLNFKLFNIQVREVTQNDGTTTIANNLTSTVQVFTDSEYQLPYVLGSAHQGCLPPFPADVFMVPQYGYLTLNNGSQAVGRSSFYCLEYFPSQMLRTGNNFTFSYTFEDVPFHSSYAHSQSLDRLMNPLIDQYLYYLSRTNTPSGTTTQSRLQFSQAGASDIRDQSRNWLPGPCYRQQRVSKTSADNNNSEYSWIGATKYHLNGRDSLVNPGPAMASHKDDEEKFFPQSGVLIFGKQGSEKTNVDIEKVMITDEEEIRTTNPVATEQYGSVSTNLQSGNTQASTADVNTQGVLPGMVWQDRDVYLQGPIWAKIPHTDGHFHPSPLMGGFGLKHPPPQILIKNTPVPANPSTTFSAAKFASFITQYSTGRVSVEIEWELQKENSKRWNPEIQYTSNYNKSVNVDFTVDTNGVYSEPRPIGTRYLTRNL

SEQ ID NO: 315 - DNA, 2217 bp, synthetic construct
  misc_feature 1..2217: note = source = /note="Description of Artificial Sequence: Synthetic polynucleotide"
  source 1..2217: mol_type = other DNA
atggctgccgatggttatcttccagattggctcgaggacaacctctctgagggcattcgcgagtggtgggacttgaaacctggagccccgaaacccaaagccaaccagcaaaagcaggacgacggccggggtctggtgcttcctggctacaagtacctcggacccttcaacggactcgacaagggggagcccgtcaacgcggcggacgcagcggccctcgagcacgacaaggcctacgaccagcagctcaaagcgggtgacaatccgtacctgcggtataaccacgccgacgccgagtttcaggagcgtctgcaagaagatacgtcttttgggggcaacctcgggcgagcagtcttccaggccaagaagcgggttctcgaacctctcggtctggttgaggaaggcgctaagacggctcctggaaagaagagaccggtagagccatcaccccagcgttctccagactcctctacgggcatcggcaagacaggccagcagcccgcgaaaaagagactcaactttgggcagactggcgactcagagtcagtgcccgaccctcaaccaatcggagaaccccccgcaggcccctctggtctgggatctggtacaatggctgcaggcggtggcgctccaatggcagacaataacgaaggcgccgacggagtgggtagttcctcaggaaattggcattgcgattccgcatggctgggcgacagagtcatcaccaccagcacccgaccctgggccctccccacctacaacaaccacctctacaagcaaatctccaacgggacatcgggaggaagcaccaacgacaacacctacttcggctacagcaccccctgggggtattttgactttaacagattccactgccacttctcaccacgtgactggcagcgactcatcaacaacaactggggattccggcccaagagactcaacttcaagctcttcaacatccaggtcaaggaggtcacgcagaatgaaggcaccaagaccatcgccaataaccttaccagcacgattcaggtctttacggactcggaataccagctcccgtacgtcctcggctctgcgcaccagggctgcccgcctccgttcccggcggacgtcttcatgattcctcagtacgggtacctgactctgaacaacggcagtcaggccgtgggccgttcctccttctactgcctggagtactttccttctcaaatgcggagaacgggcaacaactttgagttcagctaccagtttgaggacgtgccttttcacagcagctacgcgcatagccaaagcctggaccggctgatgaaccccctcatcgaccagtacctgtactacctgtctcggactcagtccacgggaggtaccgcaggaactcagcagttgctattttctcaggccgggcctaataacatgtcggctcaggccaaaaactggctacccgggccctgctaccggcagcaacgcgtctccacgacactgtcgcaaaataacaacagcaactttgcttggaccggtgccaccaagtatcatctgaatggcagagactctctggtaaatcccggtgtcgctatggcaacgcacaaggacgacgaagagcgattttttccatccagcggagtcttgatgtttgggaaacagggagctggaaaagacaacgtggactatagcagcgttatgctaaccagtgaggaagaaatcaaaaccaccaacccagtggccacagaacagtacggcgtggtggccgataacctgcaacagcaaaacgccgctcctattgtaggggccgtcaacagtcaaggagccttacctggcatggtctggcagaaccgggacgtgtacctgcagggtcctatctgggccaagattcctcacacggacggcaactttcatccttcgccgctgatgggaggctttggactgaaacacccgcctcctcagatcctgattaagaatacacctgttcccgcggatcctccaactaccttcagtcaagccaagctggcgtcgttcatcacgcagtacagcaccggacaggtcagcgtggaaattgaatgggagctgcagaaagagaacagcaagcgctggaacccagagattcagtatacttccaactactacaaatctacaaatgtggactttgctgtcaatactgagggtacttattcagagcctcgccccattggcacccgttacctcacccgtaacctgtaa

SEQ ID NO: 316 - protein, 738 aa, synthetic construct
  REGION 1..738: note = source = /note="Description of Artificial Sequence: Synthetic polypeptide"
MAADGYLPDWLEDNLSEGIREWWDLKPGAPKPKANQQKQDDGRGLVLPGYKYLGPFNGLDKGEPVNAADAAALEHDKAYDQQLKAGDNPYLRYNHADAEFQERLQEDTSFGGNLGRAVFQAKKRVLEPLGLVEEGAKTAPGKKRPVEPSPQRSPDSSTGIGKTGQQPAKKRLNFGQTGDSESVPDPQPIGEPPAGPSGLGSGTMAAGGGAPMADNNEGADGVGSSSGNWHCDSAWLGDRVITTSTRPWALPTYNNHLYKQISNGTSGGSTNDNTYFGYSTPWGYFDFNRFHCHFSPRDWQRLINNNWGFRPKRLNFKLFNIQVKEVTQNEGTKTIANNLTSTIQVFTDSEYQLPYVLGSAHQGCPPPFPADVFMIPQYGYLTLNNGSQAVGRSSFYCLEYFPSQMRRTGNNFEFSYQFEDVPFHSSYAHSQSLDRLMNPLIDQYLYYLSRTQSTGGTAGTQQLLFSQAGPNNMSAQAKNWLPGPCYRQQRVSTTLSQNNNSNFAWTGATKYHLNGRDSLVNPGVAMATHKDDEERFFPSSGVLMFGKQGAGKDNVDYSSVMLTSEEEIKTTNPVATEQYGVVADNLQQQNAAPIVGAVNSQGALPGMVWQNRDVYLQGPIWAKIPHTDGNFHPSPLMGGFGLKHPPPQILIKNTPVPADPPTTFSQAKLASFITQYSTGQVSVEIEWELQKENSKRWNPEIQYTSNYYKSTNVDFAVNTEGTYSEPRPIGTRYLTRNL

SEQ ID NO: 317 - protein, 735 aa, synthetic construct
  REGION 1..735: note = source = /note="Description of Artificial Sequence: Synthetic polypeptide"
MAADGYLPDWLEDTLSEGIRQWWKLKPGPPPPKPAERHKDDSRGLVLPGYKYLGPFNGLDKGEPVNEADAAALEHDKAYDRQLDSGDNPYLKYNHADAEFQERLKEDTSFGGNLGRAVFQAKKRVLEPLGLVEEPVKTAPGKKRPVEHSPVEPDSSSGTGKAGQQPARKRLNFGQTGDADSVPDPQPLGQPPAAPSGLGSTTMATGSGAPMADNNEGADGVGNSSGNWHCDSQWLGDRVITTSTRTWALPTYNNHLYKQISSQSGASNDNHYFGYSTPWGYFDFNRFHCHFSPRDWQRLINNNWGFRPKRLNFKLFNIQVKEVTQNDGTTTIANNLTSTVQVFTDSEYQLPYVLGSAHQGCLPPFPADVFMVPQYGYLTLNNGSQAVGRSSFYCLEYFPSQMLRTGNNFQFSYTFEDVPFHSSYAHSQSLDRLMNPLVDQYLYYLNKTQTNSGTLQQSRLLFSQAGPTNMSLQAKNWLPGPCYRQQRLSKQANDNNNSNFPWTAATKYHLNGRDSLVNPGPAMASHKDDEEKFFPMHGTLIFGKQGTNANDADLENVMITDEEEIRTTNPVATEQYGTVSNNLQNSNTGPTTGTVNHQGALPGMVWQDRDVYLQGPIWAKIPHTDGHFHPSPLMGGFGLKHPPPQIMIKNTPVPANPPTNFSSAKFASFITQYSTGQVSVEIEWELQKENSKRWNPEIQYTSNYNKSVNVDFTVDTNGVYSEPRPIGTRYLTRNL

SEQ ID NO: 318 - DNA, 3158 bp, synthetic construct
  misc_feature 1..3158: note = source = /note="Description of Artificial Sequence: Synthetic polynucleotide"
  source 1..3158: mol_type = other DNA
gattgaatttagcggccgcgaattcgcccttgctgcgtcaactggaccaatgagaactttcctttcaatgattgcgtcgacaagatggtgatctggtgggaggagggaaagatgaccgccaaggtcgtggagtcggccaaagccattctcggaggaagcaaggtgcgcgcggaccagaaatgcaagtcctcggcccagatagacccgactcccgtgattgtcacctccaacaccaacatgtgcgccgtgattgacgggaactcaacgaccttcgaacaccagcagccgttgcaagaccggatgttcaaatttgaactcacccgccgtctggatcatgactttgggaaggtcaccaagcaggaagtcaaagactttttccggtgggcaaaggatcacgtggttgaggtggagcatgaattctacgtcaaaaagggtggagctaagaaaagacccgcccccagtgacgcagatataagtgagcccaaacgggcgcgcgagtcagttgcgcagccatcgacgtcagacgcggaagcttcgatcaactacgcgggcaggtaccaaaacaaatgttctcgtcacgtgggcatgaatctgatgctgtttccctgcagacaatgcgagagaatgaatcagaattcaaatatctgcttcactcacggacagaaagactgtttagagtgctttcccgtgtcagaatctcaacccgtttctgtcgtcaaaaaggcgtatcagaaactttgctacattcatcatatcatgggaaaggtgccagacgcttgcactgcctgcgatctggtcaatgtggatttggatgactgcatctctgaacaataaatgatttaaatcaggtatggctgccgatggttatcttccagattggctcgaggacactctctctgaaggaataagacagtggtggaagctcaaacctggcccaccaccaccaaagcccgcagagcggcataaggacgacagcaggggtcttgtgcttcctgggtacaagtacctcggacccttcaacggactcgacaagggggagccggtcaacgaggcagacgccgcggccctcgagcacgacaaggcctacgaccggcagctcgacagcggagacaacccgtacctcaagtacaaccacgccgacgcggagtttcaggagcgccttaaagaagatacgtcttttgggggcaacctcggacgagcagtcttccaggcaaaaaagagggttcttgaacctctgggcctggttgaggaacctgttaaaacggctccgggaaaaaagaggccggtagagcactctcctgtggagccagactcctcctcgggaaccggaaaagcgggccagcagcctgcaagaaaaagattgaatttcggtcagactggagacgcagactccgtacctgacccccagcctctcggacagccaccagcagccccctctggtctgggatctactacaatggctacaggcagtggcgcaccaatggcagacaataacgagggtgccgatggagtgggtaattcctcgggaaattggcattgcgattcccaatggctgggcgacagagtcatcaccaccagcacccgcacctgggccctgcccacctacaacaaccacctctacaagcaaatctccagccaatcaggagcctcaaacgacaaccactactttggctacagcaccccctgggggtattttgacttcaacagattccactgccacttttcaccacgtgactggcaaagactcatcaacaacaactggggattccgacccaagagactcaacttcaagctctttaacattcaagtcaaagaggtcacgcagaatgacggtacgacgacgattgccaataaccttaccagcacggttcaggtgtttactgactcggagtaccagctcccgtacgtcctcggctcggcgcatcaaggatgcctcccgccgtttccagcggacgtcttcatggtcccacagtatggatacctcaccctgaacaacgggagtcaggcagtaggacgctcttcattttactgcctggagtactttccttctcagatgctgcgtaccggaaacaactttcaattcagctacacttttgaagacgtgcctttccacagcagctacgctcacagccagagtctggatcggctgatgaatcctctggtcgaccagtacctgtattatctgaacaagacacaaacaaatagtggaactcttcagcagtctcggctactgtttagccaagctggacccaccaacatgtctcttcaagctaaaaactggctgcctggaccttgctacagacagcagcgtctgtcaaagcaggcaaacgacaacaacaacagcaactttccctggactgcagctacaaagtatcatctaaatggccgggactcgttggttaatccaggaccagctatggccagtcacaaggatgacgaagaaaagtttttccccatgcatggaacccttatatttggtaaacaaggaacaaatgccaacgacgcggatttggaaaatgtcatgattacagatgaagaagaaatcaggaccaccaatcccgtggctacggagcagtacggaactgtatcaaataatttgcaaaactcaaacactggtccaactactggaactgtcaatcaccaaggagcgttacctggtatggtgtggcaggatcgagacgtgtacctgcagggacccatttgggccaagattcctcacaccgatggacactttcatccttctccactgatgggaggttttggactcaaacacccacctcctcaaatcatgatcaaaaacactcccgttccagccaatcctcccacaaacttcagttctgccaagtttgcttctttcatcacacagtattccacggggcaggtcagcgtggagatcgagtgggagctgcagaaggagaacagcaaacgctggaatcccgaaattcagtacacttccaactacaacaaatctgttaatgtggactttactgtggacactaatggtgtgtattcagagcctcgccccattggcaccagatacctgactcgtaatctgtaattgcttgttaatcaataaaccgtttaattcgtttcagttgaactttggtctctgcgaagggcgaattcgtttaaacctgcaggactagtccctttagtga

SEQ ID NO: 319 - protein, 735 aa, synthetic construct
  REGION 1..735: note = source = /note="Description of Artificial Sequence: Synthetic polypeptide"
MAADGYLPDWLEDTLSEGIRQWWKLKPGPPPPKPAERHKDDSRGLVLPGYKYLGPFNGLDKGEPVNEADAAALEHDKAYDRQLDSGDNPYLKYNHADAEFQERLKEDTSFGGNLGRAVFQAKKRVLEPLGLVEEPVKTAPGKKRPVEHPPVEPDSSSGTGKAGQQPARKRLNFGQTGDADSVPDPQPLGQPPAAPSGLGSTTMATGSGAPMADNNEGADGVGNSSGNWHCDSQWLGDRVITTSTRTWALPTYNNHLYKQISSQSGASNDNHYFGYSTPWGYFDFNRFHCHFSPRDWQRLINNNWGFRPKRLNFKLFNIQVKEVTQNDGTTTIANNLTSTVQVFTDSEYQLPYVLGSAHQGCLPPFPADVFMVPQYGYLTLNNGSQAVGRSSFYCLEYFPSQMLRTGNNFQFSYTFEDVPFHSSYAHSQSLDRLMNPLIDQYLYYLNKTQTNSGTLQQSRLLFSQAGPTNMSLQAKNRLPGPCYRQQRLSKQANDNNNSNFPWTAATKYHLNGRDSLVNPGPAMASHKDDEEKFFPMHGTLIFGKQGTNANDADLENVMITDEEEIRTTNPVATEQYGTVSNNLQNSNTGPTTGTVNHQGALPGMVWQDRDVYLQGPIWAKIPHTDGHFHPSPLVGGFGLKHPPPQIMIKNTPVPANPPTNFSSAKFASFITQYSTGQVSVEIEWELQKENSKRWNPEIQYTSNYNKSVNVDFTVDTNGVYSEPRPIGTRYLTRNL

SEQ ID NO: 320 - DNA, 3159 bp, synthetic construct
  misc_feature 1..3159: note = source = /note="Description of Artificial Sequence: Synthetic polynucleotide"
  source 1..3159: mol_type = other DNA
gattgaatttagcggccgcgaattcgcccttgctgcgtcaactggaccaatgagaactttcctttcaatgattgcgtcgacaagatggtgatctggtgggaggagggaaagatgaccgccaaggtcgtggagtcggccaaagccattctcggaggaagcaaggtgcgcgtggaccagaaatgcaagtcctcggcccagatagacccgactcccgtgattgtcacctccaacaccgacatgtgcgccgtgattgacgggaactcaacgaccttcgaacaccagcagccgttgcaagaccggatgttcaaatttgaactcacccgccgtctggatcatgactttgggaaggtcaccaagcaggaagtcaaagactttttccggtgggcaaaggatcacgtggttgaggtggagcatgaattctacgtcaaaaagggtggagctaagaaaagacccgcccccagtgacgcagatataagtgagcccaaacgggcgcgcgagtcagttgcgcagccatcgacgtcagacgcggaagcttcgatcaactacgcggacaggtaccaaaacaaatgttctcgtcacgtgggcatgaatctgatgctgtttccctgcagacaatgcgagagaatgaatcagaattcaaatatctgcttcactcacggacagaaagactgtttagagtgctttcccgtgtcagaatctcaacccgtttctgtcgtcaaaaaggcgtatcagaaactttgctacattcatcatatcatgggaaaggtgccagacgcttgcactgcctgcgatctggtcaatgtggatttggatgactgcatctctgaacaataaatgatttaaatcaggtatggctgccgatggttatcttccagattggctcgaggacactctctctgaaggaataagacagtggtggaagctcaaacctggcccaccaccaccaaagcccgcagagcggcataaggacgacagcaggggtcttgtgcttcctgggtacaagtacctcggacccttcaacggactcgacaagggggagccggtcaacgaggcagacgccgcggccctcgagcacgacaaggcctacgaccggcagctcgacagcggagacaacccgtacctcaagtacaaccacgccgacgcggagtttcaggagcgccttaaagaagatacgtcttttgggggcaacctcggacgagcagtcttccaggcaaaaaagagggttcttgaacctctgggcctggttgaggaacctgttaaaacggctccgggaaaaaagaggccggtagagcaccctcctgtggagccagactcctcctcgggaaccggaaaagcgggccagcagcctgcaagaaaaagattgaatttcggtcagactggagacgcagactccgtacctgacccccagcctctcggacagccaccagcagccccctctggtctgggatctactacaatggctacaggcagtggcgcaccaatggcagacaataacgagggtgccgatggagtgggtaattcctcgggaaattggcattgcgattcccaatggctgggcgacagagtcatcaccaccagcacccgcacctgggccctgcccacctacaacaaccacctctacaagcaaatctccagccaatcaggagcctcaaacgacaaccactactttggctacagcaccccctgggggtattttgacttcaacagattccactgccacttttcaccacgtgactggcaaagactcatcaacaacaactggggattccgacccaagagactcaacttcaagctctttaacattcaagtcaaagaggtcacgcagaatgacggtacgacgacgattgccaataaccttaccagcacggttcaggtgtttactgactcggagtaccagctcccgtacgtcctcggctcggcgcatcaaggatgcctcccgccgtttccagcggacgtcttcatggtcccacagtatggatacctcaccctgaacaacgggagtcaggcagtaggacgctcttcattttactgcctggagtactttccttctcagatgctgcgtaccggaaacaactttcagttcagctacacttttgaagacgtgcctttccacagcagctacgctcacagccagagtctggatcggctgatgaatcctctgatcgaccagtacctgtattatctgaacaagacacaaacaaatagtggaactcttcagcagtctcggctactgtttagccaagctggacccaccaacatgtctcttcaagctaaaaaccggctgcctggaccttgctacagacagcagcgtctgtcaaagcaggcaaacgacaacaacaacagcaactttccctggaccgcagctacaaagtatcatctaaatggccgggactcgttggttaatccaggaccagctatggccagtcacaaggatgacgaagaaaagtttttccccatgcatggaacccttatatttggtaaacaaggaacaaatgccaacgacgcggatttggaaaatgtcatgattacagatgaagaagaaatcaggaccaccaatcccgtggctacggagcagtacggaactgtatcaaataatttgcaaaactcaaacactggtccaactactggaactgtcaatcaccaaggagcgttacctggtatggtgtggcaggatcgagacgtgtacctgcagggacccatttgggccaagattcctcacaccgatggacactttcatccttctccactggtgggaggttttggactcaaacacccacctcctcaaatcatgatcaaaaacactcccgttccagccaatcctcccacaaacttcagttctgccaagtttgcttctttcatcacacagtattccacggggcaggtcagcgtggagatcgagtgggagctgcagaaggagaacagcaaacgctggaatcccgaaattcagtacacttccaactacaacaaatctgttaatgtggactttactgtggacactaatggtgtgtattcagagcctcgccccattggcaccagatacctgactcgtaatctgtaattgcttgttaatcaataaaccgtttaattcgtttcagttgaactttggtctctgcgaagggcgaattcgtttaaacctgcaggactagtccctttagtgag

SEQ ID NO: 321 - DNA, 2208 bp, synthetic construct
  misc_feature 1..2208: note = source = /note="Description of Artificial Sequence: Synthetic polynucleotide"
  source 1..2208: mol_type = other DNA
atggctgccgatggttatcttccagattggctcgaggacactctctctgaaggaataagacagtggtggaagctcaaacctggcccaccaccaccaaagcccgcagagcggcataaggacgacagcaggggtcttgtgcttcctgggtacaagtaccttggacccttcaacggactcgacaagggagagccggtcaacgaggcagacgccgcggccctcgagcacgacaaggcctacgaccggcagctcgacagcggagacaacccgtaccccaagtacaaccacgccgacgcggagttccaggagcgtcttaaagaagatacgtcttttgggggcaacctcggacgagcagtcttccaggcgaaaaagagggttcttgaacctctgggcctggttgaggaacctgttaagacggctccgggaaaaaagaggccggtagagcactctcctgcggagccagactcctcctcgggaaccggaaaagcgggccagcagcctgcaagaaagagattgaatttcggtcagactggagacgcagactccgtacctgacccccagcctctcggacagccaccagcagccccctctggtctgggaactaatacgatggctacaggcagtggcgcaccaatggcagacaataacgagggcgccgacggagtgggtaattcctcgggaaattggcattgcgattccacatggatgggcgacagagtcatcaccaccagcacccgcacctgggctctgcccacctacaacaaccacctctacaagcagatttccagccaatcaggagcctcaaacgacaaccactactttggctacagcaccccttgggggtattttgacttcaacagattccactgccacttttcgccacgtgactggcaaagactcatcaacaacaattggggattccggcccaaaagactcaacttcaagctctttaacattcaagtcaaggaggtcacgcagaatgacggtacgacgacgattgccaataaccttaccagcacggttcaggtgtttactgactcggagtaccagctcccgtacgtcctcggctcggcgcatcaaggatgcctcccgccgttcccagcagacgtcttcatggtgccacagtatggatacctcaccctgaacaacgggagtcaggcagtaggacgctcttcattttactgcctggagtactttccttctcagatgctgcgtaccggaaacaactttaccttcagctacacctttgaggacgttcctttccacagcagctacgcccacagccagagtttggaccgtctcatgaatcctctcatcgaccagtacctgtattacttgagcagaacaaacactccaagcggaaccaccacgcagtcaaggcttcagttttctcaggccggagcaagtgacattcgggaccagtctaggaactggcttcctggaccctgttaccgccagcagcgagtatcaaagacatctgcggataacaacaacagtgaatactcgtggactggagctaccaagtaccaccttaatggaagagactctctggtgaatccgggcccggccatggccagccacaaggacgatgaagaaaagttttttcctcagagcggggttctcatctttggaaaacaagactcgggaaaaactaatgtggacattgaaaaggtcatgattacagacgaagaggaaatcaggaccaccaatcccgtggctacggagcagtatggttctgtatctaccaacctccagagcggcaacacacaagcagctacctcagatgtcaacacacaaggcgttcttccaggcatggtgtggcaggacagagacgtgtacctgcaggggcccatctgggcaaagattccacacacggacggacattttcacccctctcccctcatgggcggattcggacttaaacaccctcccccgcagattctcatcaagaacaccccggtacctgcgaatccttcgactaccttcagtgcggcaaagtttgcttccttcattacacagtactccacggggcaggtcagcgtggagatcgagtgggagctgcagaaggagaacagcaaacgctggaatcccgagattcagtacacttccaactacaacaaatctgttaatgtggactttactgtggacactaatggtgtgtattcagagcctcgccccattggcaccaggtacctgactcgtaatctgtaa

SEQ ID NO: 322 - protein, 735 aa, synthetic construct
  REGION 1..735: note = source = /note="Description of Artificial Sequence: Synthetic polypeptide"
MAADGYLPDWLEDTLSEGIRQWWKLKPGPPPPKPAERHKDDSRGLVLPGYKYLGPFNGLDKGEPVNEADAAALEHDKAYDRQLDSGDNPYPKYNHADAEFQERLKEDTSFGGNLGRAVFQAKKRVLEPLGLVEEPVKTAPGKKRPVEHSPAEPDSSSGTGKAGQQPARKRLNFGQTGDADSVPDPQPLGQPPAAPSGLGTNTMATGSGAPMADNNEGADGVGNSSGNWHCDSTWMGDRVITTSTRTWALPTYNNHLYKQISSQSGASNDNHYFGYSTPWGYFDFNRFHCHFSPRDWQRLINNNWGFRPKRLNFKLFNIQVKEVTQNDGTTTIANNLTSTVQVFTDSEYQLPYVLGSAHQGCLPPFPADVFMVPQYGYLTLNNGSQAVGRSSFYCLEYFPSQMLRTGNNFTFSYTFEDVPFHSSYAHSQSLDRLMNPLIDQYLYYLSRTNTPSGTTTQSRLQFSQAGASDIRDQSRNWLPGPCYRQQRVSKTSADNNNSEYSWTGATKYHLNGRDSLVNPGPAMASHKDDEEKFFPQSGVLIFGKQDSGKTNVDIEKVMITDEEEIRTTNPVATEQYGSVSTNLQSGNTQAATSDVNTQGVLPGMVWQDRDVYLQGPIWAKIPHTDGHFHPSPLMGGFGLKHPPPQILIKNTPVPANPSTTFSAAKFASFITQYSTGQVSVEIEWELQKENSKRWNPEIQYTSNYNKSVNVDFTVDTNGVYSEPRPIGTRYLTRNL

SEQ ID NO: 323 - DNA, 2208 bp, synthetic construct
  misc_feature 1..2208: note = source = /note="Description of Artificial Sequence: Synthetic polynucleotide"
  source 1..2208: mol_type = other DNA
atggctgccgatggttatcttccagattggctcgaggacactctctctgaaggaataagacagtggtggaagctcaaacctggcccaccaccaccaaagcccgcagagcggcataaggacgacagcaggggtcttgtgcttcctgggtacaagtaccttggacccttcaacggactcgacaagggagagccggtcaacgaggcagacgccgcggccctcgagcacgacaaggcctacgaccggcagctcgacggcggagacaacccgtacctcaagtacaaccacgccgacgcggagttccaggagcgtcttaaagaagatacgtcttttgggggcaacctcggacgagcagtcttccaggcgaaaaagagggttcttgaacctctgggcctggttgaggaacctgttaagacggctccgggaaaaaagaggccggtagagcactctcttgcggagccagactcctcctcgggaaccggaaaagcgggccagcagcctgcaagaaggagattgaatttcggtcagactggagacgcagactccgtacctgacccccagcctctcggacagccaccagcagccccctctggtctgggaactaatacgatggctacaggcagtggcgcaccaatggcagacaataacgagggcgccgacggagtgggtaattcctcgggaaattggcattgcgattccacatggatgggcgacagagtcatcaccaccagcacccgcacctgggctctgcccacctacaacaaccacctctacaggcagatttccagccaatcaggagcctcaaacgacaaccactactttggctacagcaccccttgggggtattttgacttcaacagattccactgccacttttcgccacgtgactggcaaagactcatcaacaacaattggggatcccggcccaaaagactcaacttcaagctctttaacattcaagtcaaggaggtcacgcagaatgacggtacgacgacgattgccaataaccttaccagcacggttcaggtgtttactgactcggagtaccagctcccgtacgtcctcggctcggcgcatcaaggatgcctcccgccgttcccagcagacgtcttcatggtgccacagtatggatacctcaccctgaacaacgggagtcaggcagtaggacgctcttcattttactgcctggagtactttccttctcagatgctgcgtaccggaaacaactttaccttcagctacacctttgaggacgttcctttccacagcagctacgcccacagccagagtttggaccgtctcatgaatcctctcgtcgaccagtacctgtattacttgagcagaacaaacactccaagcggaaccaccacgcagtcaaggcttcagttttctcaggccggagcaagtgacattcgggaccagtctaggaactggcttcctggaccctgttaccgccagcagcgagtatcaaagacatctgcggataacaacaacagtgaatactcgtggactggagctaccaagtaccaccttaatggaagagactctctggtgaatccgggcccggccatggccagccacaaggacgatgaagaaaagttttttcctcagagcggggttctcatctttggaaaacaagactcgggaaaaactaatgtggacattgaaaaggtcatgattacagacgaagaggaaatcaggaccaccaatcccgtggctacggagcagtatggttctgtatctaccaacctccagagcggcaacacacaagcagctacctcagatgtcaacacacaaggcgttcttccaggcatggtgtggcaggacagagacgtgtacctgcaggggcccatctgggcaaagattccacacacggacggacattttcacccctctcccctcatgggcggattcggacttaaacaccctcccccgcagattctcatcaagaacaccccggtacctgcgaatccttcgactaccttcagtgcggcaaagtttgcttccttcattacacagtactccacggggcaggtcagcgtggagatcgagtgggagctgcagaaggagaacagcaaacgctggaatcccgagattcagtacacttccaactacaacaaatctgttaatgtggactttactgtggacactaatggtgtgtattcagagcctcgccccattggcaccagatacctgactcgtaatctgtaa

SEQ ID NO: 324 - protein, 735 aa, synthetic construct
  REGION 1..735: note = source = /note="Description of Artificial Sequence: Synthetic polypeptide"
MAADGYLPDWLEDTLSEGIRQWWKLKPGPPPPKPAERHKDDSRGLVLPGYKYLGPFNGLDKGEPVNEADAAALEHDKAYDRQLDGGDNPYLKYNHADAEFQERLKEDTSFGGNLGRAVFQAKKRVLEPLGLVEEPVKTAPGKKRPVEHSLAEPDSSSGTGKAGQQPARRRLNFGQTGDADSVPDPQPLGQPPAAPSGLGTNTMATGSGAPMADNNEGADGVGNSSGNWHCDSTWMGDRVITTSTRTWALPTYNNHLYRQISSQSGASNDNHYFGYSTPWGYFDFNRFHCHFSPRDWQRLINNNWGSRPKRLNFKLFNIQVKEVTQNDGTTTIANNLTSTVQVFTDSEYQLPYVLGSAHQGCLPPFPADVFMVPQYGYLTLNNGSQAVGRSSFYCLEYFPSQMLRTGNNFTFSYTFEDVPFHSSYAHSQSLDRLMNPLVDQYLYYLSRTNTPSGTTTQSRLQFSQAGASDIRDQSRNWLPGPCYRQQRVSKTSADNNNSEYSWTGATKYHLNGRDSLVNPGPAMASHKDDEEKFFPQSGVLIFGKQDSGKTNVDIEKVMITDEEEIRTTNPVATEQYGSVSTNLQSGNTQAATSDVNTQGVLPGMVWQDRDVYLQGPIWAKIPHTDGHFHPSPLMGGFGLKHPPPQILIKNTPVPANPSTTFSAAKFASFITQYSTGQVSVEIEWELQKENSKRWNPEIQYTSNYNKSVNVDFTVDTNGVYSEPRPIGTRYLTRNL

SEQ ID NO: 325 - protein, 738 aa, synthetic construct
  REGION 1..738: note = source = /note="Description of Artificial Sequence: Synthetic polypeptide"
MAADGYLPDWLEDNLSEGIREWWDLKPGAPKPKANQQKQDDGRGLVLPGYKYLGPFNGLDKGEPVNAADAAALEHDKAYDQQLKAGDNPYLRYNHADAEFQERLQEDTSFGGNLGRAVFQAKKRVLEPLGLVEEAAKTAPGKKRPVEPSPQRSPDSSAGIGKKGQQPAKKRLNFGQTGDSESVPDPQPIGEPPAGPSGLGSGTMAAGGGAPMADNNEGADGVGSSSGNWHCDSTWLGDRVITTSTRTWALPTYNNHLYKQISNGTSGGSTNDNTYFGYSTPWGYFDFNRFHCHFSPRDWQRLINNNWGFRPKRLSFKLFNIQVKEVTQNEGTETIANNLTSTIQVFTDSEYQLPYVLGSAHQGCLPPFPADVFMIPQYGYLTLNNGSQAVGRSSFYCLEYFPSQMLRTGNNFEFSYTFEDVPFHSSCAHSQSSDRLMNPLIDQYLYYLSRTRSTGGTQGTQQLLFSQAGPANMSAQAKNWLPGPCYRQQRVSTTLSQNNNSNFAWTGATKYHLNGRDSLVNPGVAMATHKDDEERFFPSSGVLMFGKQGAGRDNVDYSSVMLTSEEEIKTTNPVATEQYGVVADNLQQTNTGPIVGNVNSQGALPGMVWQNRDVYLQGPIWAKIPHTDGNFHPSPLMGGFGLKHPPPQILIKNTPVPADPPTTFSQAKLASFITQYSTGQVSVEIEWELQKENSKRWNPEIQYTSNYYKSTNVDFAVNTEGTYSEPRPIGTRYLTRNL

SEQ ID NO: 326 - DNA, 2217 bp, synthetic construct
  misc_feature 1..2217: note = source = /note="Description of Artificial Sequence: Synthetic polynucleotide"
  source 1..2217: mol_type = other DNA
atggctgctgacggttatcttccagattggctcgaggacaacctctctgagggcattcgcgagtggtgggacctgaaacctggagcccccaagcccaaggccaaccagcagaagcaggacgacggccggggtctggtgcttcttggctacaagtacctcggacccttcaacggactcgacaagggggagcccgtcaatgcggcggacgcagcggccctcgagcacgacaaggcctacgaccagcagctcaaagcgggtgacaatccgtacctgcggtataaccacgccgacgccgagtttcaggagcgtctgcaagaagatacgtcttttgggggcaacctcgggcgagcagtcttccaggccaagaagcgggttctcgaacctctcggtctggttgaggaagctgctaagacggctcctggaaagaagagaccggtagaaccgtcacctcagcgttcccccgactcctccacgggcatcggcaagaaaggccagcagcccgctaaaaagagactgaactttggtcagactggcgactcagagtcagtccccgaccctcaaccaatcggagaaccaccagcaggcccctctggtctgggatctggtacaatggctgcaggcggtggcgctccaatggcagacaataacgaaggcgccgacggagtgggtagttcctcaggaaattggcattgcgattccacatggctgggcgacagagtcatcaccaccagcacccgaacctgggccctgcccacctacaacaaccacctctacaagcaaatatccaatgggacatcgggaggaagcaccaacgacaacacctacttcggctacagcaccccctgggggtattttgacttcaacagattccactgccacttctcaccacgtgactggcagcgactcatcaacaacaactggggattccggccaaaaagactcagcttcaagctcttcaacatccaggtcaaggaggtcacgcagaatgaaggcaccaagaccatcgccaataaccttaccagcacgattcaggtatttacggactcggaataccagctgccgtacgtcctcggctccgcgcaccagggctgcctgcctccgttcccggcggacgtcttcatgattccccagtacggctaccttacactgaacaatggaagtcaagccgtaggccgttcctccttctactgcctggaatattttccatctcaaatgctgcgaactggaaacaattttgaattcagctacaccttcgaggacgtgcctttccacagcggctacgcacacagccagagcttggaccgactgatgaatcctctcatcgaccagtacctgtactacttatccagaactcagtccacaggaggaactcaaggtacccagcaattgttattttctcaagctgggcctgcaaacatgtcggctcaggctaagaactggctacctggaccttgctaccggcagcagcgagtctctacgacactgtcgcaaaacaacaacagcaactttgcttggactggtgccaccaaatatcacctgaacggaagagactctttggtaaatcccggtgtcgccatggcaacccacaaggacgacgaggaacgcttcttcccgtcgagtggagtcctgatgtttggaaaacagggtgctggaagagacaatgtggactacagcagcgttatgctaaccagcgaagaagaaattaaaaccactaaccctgtagccacagaacaatacggtgtggtggctgacaacttgcagcaaaccaatacagggcctattgtgggaaatgtcaacagccaaggagccttacctggcatggtctggcagaaccgagacgtgtacctgcagggtcccatctgggccaagattcctcacacggacggcaacttccacccttcaccgctaatgggaggatttggactgaagcacccacctcctcagatcctgatcaagaacacgccggtacctgcggatcctccaacgacgttcagccaggcgaaattggcttccttcattacgcagtacagcaccggacaggtcagcgtggaaatcgagtgggagctgcagaaggagaacagcaaacgctggaacccagagattcagtacacttcaaactactacaaatctacaaatgtggactttgctgtcaatacagagggaacttattctgagcctcgccccattggtactcgttacctcacccgtaatctgtaa

SEQ ID NO: 327 - protein, 738 aa, synthetic construct
  REGION 1..738: note = source = /note="Description of Artificial Sequence: Synthetic polypeptide"
MAADGYLPDWLEDNLSEGIREWWDLKPGAPKPKANQQKQDDGRGLVLLGYKYLGPFNGLDKGEPVNAADAAALEHDKAYDQQLKAGDNPYLRYNHADAEFQERLQEDTSFGGNLGRAVFQAKKRVLEPLGLVEEAAKTAPGKKRPVEPSPQRSPDSSTGIGKKGQQPAKKRLNFGQTGDSESVPDPQPIGEPPAGPSGLGSGTMAAGGGAPMADNNEGADGVGSSSGNWHCDSTWLGDRVITTSTRTWALPTYNNHLYKQISNGTSGGSTNDNTYFGYSTPWGYFDFNRFHCHFSPRDWQRLINNNWGFRPKRLSFKLFNIQVKEVTQNEGTKTIANNLTSTIQVFTDSEYQLPYVLGSAHQGCLPPFPADVFMIPQYGYLTLNNGSQAVGRSSFYCLEYFPSQMLRTGNNFEFSYTFEDVPFHSGYAHSQSLDRLMNPLIDQYLYYLSRTQSTGGTQGTQQLLFSQAGPANMSAQAKNWLPGPCYRQQRVSTTLSQNNNSNFAWTGATKYHLNGRDSLVNPGVAMATHKDDEERFFPSSGVLMFGKQGAGRDNVDYSSVMLTSEEEIKTTNPVATEQYGVVADNLQQTNTGPIVGNVNSQGALPGMVWQNRDVYLQGPIWAKIPHTDGNFHPSPLMGGFGLKHPPPQILIKNTPVPADPPTTFSQAKLASFITQYSTGQVSVEIEWELQKENSKRWNPEIQYTSNYYKSTNVDFAVNTEGTYSEPRPIGTRYLTRNL

SEQ ID NO: 328 - protein, 735 aa, synthetic construct
  REGION 1..735: note = source = /note="Description of Artificial Sequence: Synthetic polypeptide"
MAADGYLPDWLEDTLSEGIRQWWKLKPGPPPPKPAERHKDDSRGLVLPGYKYLGPFNGLDKGEPVNEADAAALEHDKAYDRQLDSGDNPYLKYNHADAEFQERLKEDTSFGGNLGRAVFQAKKRVLEPLGLVEPPVKTAPGKKRPVEHSPAEPDSSSGTGKAGQQPARKRLNFGQTGDADSVPDPQPLGQPPAAPSGLGSTTMATGSGAPMADNNEGADGVGNSSGNWHCDSQWLGDRVITTSTRTWALPTYNNHLYKQISSQSGASNDNHYFGYSTPWGYFDFNRFHCHFSPRDWQRLINNNWGFRPKRLNFKLFNIQVKEVTQNDGTTTIANNLTSTVQVFTDSEYQLPYVLGSAHQGCLPPFPADVFMVPQYGYLTLNNGSQAVGRSSFYCLEYFPSQMLRTGNNFQFSYTFEDVPFHSSYAHSQSLDRLMNPLIDQYLYYLNKTQSNSGTLQQSRLLFSQAGPTSMSLQAKNWLPGPCYRQQRLSKQANDNNNSNFPWTAATKYHLNGRDSLVNPGPAMASHKDDEEKFFPMHGTLIFGKQGTNANDADLDNVMITDEEEIRTTNPVATEQYGYVSNNLQNSNTGPTTGTVNHQGALPGMVWQDRDVYLQGPIWAKIPHTDGHFHPSPLMGGFGLKHPPPQIMIKNTPVPANPPTNFSSAKFASFITQYSTGQVSVEIEWELQKENSKRWNPEIQYTSNYNKSVNVDFTVDTNGVYSEPRPIGTRYLTRNL

SEQ ID NO: 329 - protein, 735 aa, synthetic construct
  REGION 1..735: note = source = /note="Description of Artificial Sequence: Synthetic polypeptide"
MAADGYLPDWLEDTLSEGIRQWWKLKPGPPPPKPAERHKDDSRGLVLPGYKYLGPFNGLDKGEPVNEADAAALEHDKAYDRQLDSGDNPYLKYNHADAEFQERLKEDTSFGGNLGRAVFQAKKRVLEPLGLVEGPVKTAPGKKRPVEHSPAEPDSSSGTGKAGQQPARKRLNFGQTGDADSVPDPQPLGQPPAAPSGLGSTTMATGSGAPMADNNEGADGVGNSSGNWHCDSQWLGDRVITTSTRTWALPTYNNHLYKQISSQSGASNDNHYFGYSTPWGYFDFNRFHCHFSPRDWQRLINNNWGFRPKRLNFKLFNIQVKEVTQNDGTTTIANNLTSTVQVFTDSEYQLPYVLGSAHQGCLPPFPADVFMVPQYGYLTLNNGSQAVGRSSFYCLEYFPSQMLRTGNNFQFSYTFEDVPFHSSYAHSQSLDRLMNPLIDQYLYYLNKTQSNSGTLQQSRLLFSQAGPTSMSLQAKNWLPGPCYRQQRLSKQANDNNNSNFPWTAATKYHLNGRDSLVNPGPAMASHKDDEEKFFPMHGTLIFGKQGTNANDADLDNVMITDEEEIRTTNPVATEQYGYVSNNLQNSNTGPTTGTVNHQGALPGMVWQDRDVYLQGPIWAKIPHTDGHFHPSPLMGGFGLKHPPPQIMIKNTPVPANPPTNFSSAKFASFITQYSTGQVSVEIEWELQKENSKRWNPEIQYTSNYNKSVNVDFTVDTNGVYSEPRPIGTRYLTRNL

SEQ ID NO: 330 - DNA, 2208 bp, synthetic construct
  misc_feature 1..2208: note = source = /note="Description of Artificial Sequence: Synthetic polynucleotide"
  source 1..2208: mol_type = other DNA
atggctgccgatggttatcttccagattggctcgaggacactctctctgaaggaataagacagtggtggaagctcaaacctggcccaccaccaccaaagcccgcagagcggcataaggacgacagcaggggtcttgtgcttcctgggtacaagtacctcggacccttcaacggactcgacaagggggagccggtcaacgaggcagacgccgcggccctcgagcacgacaaggcctacgaccggcagctcgacagcggagacaacccgtacctcaagtacaaccacgccgacgcggagtttcaggagcgtcttaaagaagatacgtcttttgggggcaacctcggacgagcagtcttccaggcgaaaaagagggttcttgaacctctgggcctggttgagggacctgttaagacggctccgggaaaaaagaggccggtagagcactctcctgcggagccagactcctcctcgggaaccggaaaagcgggccagcagcctgcaagaaaaagattgaattttggtcagactggagacgcagactccgtacctgacccccagcctctcggacagccaccagcagccccctctggtttgggatctactacaatggctacaggcagtggcgcaccaatggcagacaataacgagggtgccgatggagtgggtaattcctcaggaaattggcattgcgattcccaatggctgggcgacagagtcatcaccaccagcacccgaacctgggccctgcccacctacaacaaccacctctacaagcaaatctcaagccaatcaggagcctcaaacgacaaccactactttggctacagcaccccttgggggtattttgacttcaacagattccactgccacttttcaccacgtgactggcaaagactcatcaacaacaactggggattccgacccaagagactcaacttcaagctctttaacattcaagtcaaagaggtcacgcagaatgacggtacgacgacgattgccaataaccttaccagcacggttcaggtgtttactgactcggagtaccagctcccgtacgtcctcgggtcggcgcatcaaggatgcctcccgccgtttccagcggacgtcttcatggtcccacagtatggatacctcaccctgaacaacgggagtcaggcggtaggacgctcttccttttactgcctggagtactttccttctcagatgcttcgtactggaaacaactttcagttcagctacacctttgaagacgttcctttccacagcagctacgctcacagccagagtctggatcggctgatgaatcctctgatcgaccagtacctgtattatctgaacaaaacacaatcaaatagtggaactcttcagcagtctcggctactgtttagtcaagctggacccaccagcatgtctcttcaagctaaaaactggctacctggaccttgctacagacagcagcgtctgtcaaagcaggcaaacgacaacaacaacagcaactttccctggactgcggctacaaagtatcacctaaatggccgggactcgttggttaatccaggaccagctatggccagtcacaaagacgatgaagaaaagtttttccccatgcatggaaccctgatatttggtaaacaaggaacaaatgctaacgacgcggatttggacaatgtcatgattacagatgaagaagaaatccgcaccaccaatcccgtggctacggagcagtacggatatgtgtcaaataatttgcaaaactcaaatactggtccaactactggaactgtcaatcaccaaggagcgttacctggcatggtgtggcaggatcgagacgtgtacctgcagggacccatttgggccaagattcctcacaccgatggacactttcatccttctccactgatgggaggttttgggctcaaacacccgcctcctcagatcatgatcaaaaacactcccgttccagccaatcctcccacaaacttcagttctgccaagtttgcttctttcatcacacagtattccacggggcaggtcagcgtggagatcgagtgggagctgcagaaagagaacagcaaacgctggaatcccgaaattcagtacacttccaactacaacaaatctgttaatgtggactttactgtggacactaatggcgtgtattcagagcctcgccccattggcaccagatacctgactcgtaatctgtaa

SEQ ID NO: 331 - DNA, 2211 bp, synthetic construct; identical to SEQ ID NO: 12
  misc_feature 1..2211: note = source = /note="Description of Artificial Sequence: Synthetic polynucleotide"
  source 1..2211: mol_type = other DNA

SEQ ID NO: 332 - DNA, 2208 bp, synthetic construct
  misc_feature 1..2208: note = source = /note="Description of Artificial Sequence: Synthetic polynucleotide"
  source 1..2208: mol_type = other DNA
atggctgccgatggttatcttccagattggctcgaggacactctctctgaaggaacaagacagtggtggaagctcaaacctggcccaccaccaccaaagcccgcagagcggcataaggacgacagcaggggtcttgtgcttcctgggtacaagtacctcggacccttcaacggactcgacaagggggagccggtcaacgaggcagacgccgcggccctcgagcacgacaaggcctacgaccggcagctcgacagcggagacaacccgtacctcaagtacaaccacgccgacgcggagtttcaggagcgtcttaaagaagatacgtcttttgggggcaacctcggacgagcagtcttccaggcgaaaaagagggttcttgaacctctgggcctggttgaggaacctgttaagacggctccgggaaaaaagaggccggtagagcactctcctgcggagccagactcctcctcgggaaccggaaaagcgggccagcagcctgcaagaaaaagattgaattttggtcagactggagacgcagactccgtacctgacccccagcctctcggacagccaccagcagccccctctggtttgggatctactacaatggctacaggcagtggcgcaccaatggcagacaataacgagggtgccgatggagtgggtaattcctcaggaaattggcattgcgattcccaatggctgggcgacagagtcatcaccaccagcacccgaacctgggccctgcccacctacaacaaccacctctacaagcaaatctcaagccaatcaggagcctcaaacgacaaccactactttggctacagcaccccttgggggtattttgacttcaacagattccactgccacttttcaccacgtgactggcaaagactcatcaacaacaactggggattccgacccaagagactcaacttcaagctctttaacattcaagtcaaagaggtcacgcagaatgacggtacgacgacgattgccaataaccttaccagcacggttcaggtgtttactgactcggagtaccagctcccgtacgtcctcgggtcggcgcatcaaggatgcctcccgccgtttccagcggacgtcttcatggtcccacagtatggatacctcaccctgaacaacgggagtcaggcggtaggacgctcttccttttactgcctggagtactttccttctcagatgcttcgtactggaaacaactttcagttcagctacacctttgaagacgttcctttccacagcagctacgctcacagccagagtctggatcggctgatgaatcctctgatcgaccagtacctgtattatctgaacaaaacacaatcaaatagtggaactcttcagcagtctcggctactgtttagtcaagctggacccaccagcatgtctcttcaagctaaaaactggctacctggaccttgctacagacagcagcgtctgtcaaagcaggcaaacgacaacaacaacagcaactttccctggactgcggctacaaagtaccacctaaatggccgggactcgttggttaatccaggaccagctatggccagtcacaaagacgatgaagaaaagtttttccccatgcatggaaccctgatatttggtaaacaaggaacaaatgctaacgacgcggatttggacaatgtcatgattacagatgaagaagaaatccgcaccaccaatcccgtggctacggagcagtacggatatgtgtcaaataatttgcaaaactcaaatactggtccaactactggaactgtcaatcaccaaggagcgttacctggcatggtgtggcaggatcgagacgtgtacctgcagggacccatttgggccaagattcctcacaccgatggacactttcatccttctccactgatgggaggttttgggctcaaacacccgcctcctcagatcatgatcaaaaacactcccgttccagccaatcctcccacaaacttcagttctgccaagtttgcttctttcatcacacagtattccacggggcaggtcagcgtggagatcgagtgggagctgcagaaagagaacagcaaacgctggaatcccgaaattcagtacacttccaactacaacaaatctgttaatgtggactttactgtggacactaatggcgtgtattcagagcctcgccccattggcaccagatacctgactcgtaatctgtaa

SEQ ID NO: 333 - DNA, 2217 bp, synthetic construct
  misc_feature 1..2217: note = source = /note="Description of Artificial Sequence: Synthetic polynucleotide"
  source 1..2217: mol_type = other DNA
atggctgctgacggttatcttccagattggctcgaggacaacctctctgagggcattcgcgagtggtgggacctgaaacctggagcccccaagcccaaggccaaccagcagaagcaggacgacggccggggtctggtgcttcctggctacaagtacctcggacccttcaacggactcgacaagggggagcccgtcaacgcggcggacgcagcggccctcgagcacgacaaggcctacgaccagcagctcaaagcgggtgacaatccgtacctgcggtataaccacgccgacgccgagtttcaggagcgtctgcaagaagatacgtcttttgggggcaacctcgggcgagcagtcttccaggccaagaagcgggttctcgaacctctcggtctggttgaggaagctgctaagacggctcctggaaagaagagaccggtagaaccgtcacctcagcgttcccccgactcctccacgggcatcggcaagaaaggccagcagcccgctaaaaagagactgaactttggtcagactggcgactcagagtcagtccccgaccctcaaccaatcggagaaccacctgcaggcccctctggtctgggatctggtacaatggctgcaggcggtggcgctccaatggcagacaataacgaaggcgccgacggagtgggtagttcctcaggaaattggcattgcgattccacatggctgggcgacagagtcatcaccaccagcacccgaacctgggccctgcccacctacaacaaccacctctacaagcaaatatccaatgggacatcgggagggagcaccaacgacaacacctacttcggctacagcaccccctgggggtattttgacttcaacagattccactgccacttctcaccacgtgactggcagcgactcatcaacaacaactggggattccggccaaaaagactcagcttcaagctcttcaacatccaggtcaaggaggtcacgcagaatgaaggcaccaagaccatcgccaataaccttaccagcacgattcaggtatttacggactcggaataccagctgccgtacgtcctcggctccgcgcaccagggctgcctgcctccgttcccggcggacgtcttcatgattccccagtacggctaccttacactgaacaatggaagtcaagccgtaggccgttcctccttctactgcctggaatattttccatctcaaatgctgcgaactggaaacaattttgaattcagctacaccttcgaggacgtgcctttccacagcagctacgcacacagccagagcttggaccgactgatgaatcctctcatcgaccagtacctgtactacttatccagaactcagtccacaggaggaactcaaggtacccagcaattgttattttctcaagctgggcctgcaaacatgtcggctcaggctaagaactggctacctggaccttgctaccggcagcagcgagtctctacgacactgtcgcaaaacaacaacagcaactttgcttggactggtgccaccaaatatcacctgaacggaagagactctttggtaaatcccggtgtcgccatggcaacccacaaggacgacgaggaacgcttcttcccgtcgagtggagtcctgatgtttggaaaacagggtgctggaagagacaatgtggactacagcagcgttatgctaaccagcgaagaagaaattaaaaccactaaccctgtagccacagaacaatacggtgtggtggctgacaacttgcagcaaaccaatacagggcctattgtgggaaatgtcaacagccaaggagccttacctggcatggtctggcagaaccgagacgtgtacctgcagggtcccatctgggccaagattcctcacacggacggcaactgccacccttcaccgctaatgggaggatttggactgaagcacccacctcctcagatcctgatcaagaacacgccggtacctgcggatcctccaacaacgttcagccaggcgaaattggcttccttcattacgcagtacagcaccggacaggtcagcgtggaaatcgagtgggagctgcagaaggagaacagcaaacgctggaacccagagattcagtacacttcaaactactacaaatctacaaatgtggactttgctgtcaatacagagggaacttattctgagcctcgccccattggtactcgttacctcacccgtaatctgtaa

SEQ ID NO: 334 - protein, 735 aa, synthetic construct
  REGION 1..735: note = source = /note="Description of Artificial Sequence: Synthetic polypeptide"
MAADGYLPDWLEDTLSEGTRQWWKLKPGPPPPKPAERHKDDSRGLVLPGYKYLGPFNGLDKGEPVNEADAAALEHDKAYDRQLDSGDNPYLKYNHADAEFQERLKEDTSFGGNLGRAVFQAKKRVLEPLGLVEEPVKTAPGKKRPVEHSPAEPDSSSGTGKAGQQPARKRLNFGQTGDADSVPDPQPLGQPPAAPSGLGSTTMATGSGAPMADNNEGADGVGNSSGNWHCDSQWLGDRVITTSTRTWALPTYNNHLYKQISSQSGASNDNHYFGYSTPWGYFDFNRFHCHFSPRDWQRLINNNWGFRPKRLNFKLFNIQVKEVTQNDGTTTIANNLTSTVQVFTDSEYQLPYVLGSAHQGCLPPFPADVFMVPQYGYLTLNNGSQAVGRSSFYCLEYFPSQMLRTGNNFQFSYTFEDVPFHSSYAHSQSLDRLMNPLIDQYLYYLNKTQSNSGTLQQSRLLFSQAGPTSMSLQAKNWLPGPCYRQQRLSKQANDNNNSNFPWTAATKYHLNGRDSLVNPGPAMASHKDDEEKFFPMHGTLIFGKQGTNANDADLDNVMITDEEEIRTTNPVATEQYGYVSNNLQNSNTGPTTGTVNHQGALPGMVWQDRDVYLQGPIWAKIPHTDGHFHPSPLMGGFGLKHPPPQIMIKNTPVPANPPTNFSSAKFASFITQYSTGQVSVEIEWELQKENSKRWNPEIQYTSNYNKSVNVDFTVDTNGVYSEPRPIGTRYLTRNL

SEQ ID NO: 335 - DNA, 2208 bp, synthetic construct
  misc_feature 1..2208: note = source = /note="Description of Artificial Sequence: Synthetic polynucleotide"
  source 1..2208: mol_type = other DNA
atggctgccgatggttatcttccagattggctcgaggacactctctctgaaggaataagacagtggtggaagctcaaacctggcccaccaccaccaaagcccgcagagcggcatcaggacaacagcaggggtcttgtgcttcctgggtacaagtacctcggaccctccaacggactcgacaaaggagagccggtcaacgaggcagacgccgcggccctcgagcacgacaaggcctacgaccggcagctcgacagcggagacaacccgtacctcaagtacaaccacgccgacgcggagtttcaggagcgtcttaaagaagatacgtcttttgggggcaacctcggacgagcagtcttccaggcgaaaaagagggttcttgaacctctgggcctggttgaggaacctgttaagacggctccgggaaaaaagaggccggtagagcactctcctgtggagccagactcctcctcgggaaccggaaaagcgggccatcagcctgcgagaaagagattgaattttggtcagactggagacgcagactccgtacctgacccccagcctctcggacagccaccagcagcccccacaagtttgggatctactacaatggctacaggcagtggcgcaccaatggcagacaataacgagggtgccgatggagtgggtaattcctcaggaaattggcattgcgattcccaatggctgggcgacagagtcatcaccaccagcacccgaacctgggccctgcccacctacaacaaccacctctacaagcaaatctccagccaatcaggagcctcgaacgacaaccactactttggctgcagcaccccctgggggtattttgacttcaacagattccactgtcacttctccccacgtgattggcaaagactcatcaacaacaactggggattccgacccaagagactcaacttcaagctctttaacattcaagtcaaagaggtcacgcagaatgacggtacgacgacgattgccaataaccttaccagcacggttcaggtgtttactgactcggagtacccgctcccgtacgtcctcggctcggcgcatcaaggatgcctcccgccgtttccagcggacgtcttcatggtcccacagtatggatacctcaccctgaacaacgggagtcaggcggtaggacgctcttccttttactgcctggagtactttccttctcagatgctgcgtaccggaaacaactttaccttcagctacacctttgaggacgttcctttccacagcagctacgctcacagccagagtttggaccggctgatgaatcctctgatcgaccagtatctatattatctgaacaggacacaatcaaatagtggaactcttcagcagtctaggctactgtttagccaagctggacccaccagcatgtctcttcaagctaaaaactggctgcctggaccttgctacagacagcagcgtctttcaaagcaggcaaacgacaacaacaacagcaactttccctggactgcggctacaaagtatcatctaaatggccgggactcgttggttaatccaggaccagctatggccagccacaaagacgatgaagaaaagtttttccccatgcatggaaccctgatatttggtaaacaaggaacaaatgctaacgacgcggatttggagcatgttatgattacagatgaagaagaaatcaggaccaccaatcctgtggctacagagcagtacggaaacgtgtcaaataatttgcaaaactcaaatactggtccaactacagaaaatgtcaatcaccagggagcgttacctggtatggtgtggcaggatcgagacgtgtacctgcagggacccatttgggccaagattcctcacaccgacggacactttcacccttctccactgatgggaggttttggactcaaacacccgcctcctcaaatcatgatcaaaaacactcccgttccagccaatcctcccacaaacttcagttctgccaagtttgcttctttcatcacacagtattccacgggccaggtcagcgtggagattgagtgggagctgcagaaggagaacagcaaacgctggaaccccgagatccagtatacttccaactacaacaaatctgttaatgtggactttactgtggacactaatggtgtgtattcagagccttgccccattggcaccagatacctgactcgtaatctgtaa

SEQ ID NO: 336 - protein, 735 aa, synthetic construct
  REGION 1..735: note = source = /note="Description of Artificial Sequence: Synthetic polypeptide"
MAADGYLPDWLEDTLSEGIRQWWKLKPGPPPPKPAERHQDNSRGLVLPGYKYLGPSNGLDKGEPVNEADAAALEHDKAYDRQLDSGDNPYLKYNHADAEFQERLKEDTSFGGNLGRAVFQAKKRVLEPLGLVEEPVKTAPGKKRPVEHSPVEPDSSSGTGKAGHQPARKRLNFGQTGDADSVPDPQPLGQPPAAPTSLGSTTMATGSGAPMADNNEGADGVGNSSGNWHCDSQWLGDRVITTSTRTWALPTYNNHLYKQISSQSGASNDNHYFGCSTPWGYFDFNRFHCHFSPRDWQRLINNNWGFRPKRLNFKLFNIQVKEVTQNDGTTTIANNLTSTVQVFTDSEYPLPYVLGSAHQGCLPPFPADVFMVPQYGYLTLNNGSQAVGRSSFYCLEYFPSQMLRTGNNFTFSYTFEDVPFHSSYAHSQSLDRLMNPLIDQYLYYLNRTQSNSGTLQQSRLLFSQAGPTSMSLQAKNWLPGPCYRQQRLSKQANDNNNSNFPWTAATKYHLNGRDSLVNPGPAMASHKDDEEKFFPMHGTLIFGKQGTNANDADLEHVMITDEEEIRTTNPVATEQYGNVSNNLQNSNTGPTTENVNHQGALPGMVWQDRDVYLQGPIWAKIPHTDGHFHPSPLMGGFGLKHPPPQIMIKNTPVPANPPTNFSSAKFASFITQYSTGQVSVEIEWELQKENSKRWNPEIQYTSNYNKSVNVDFTVDTNGVYSEPCPIGTRYLTRNL

SEQ ID NO: 337 - DNA, 2214 bp, synthetic construct
  misc_feature 1..2214: note = source = /note="Description of Artificial Sequence: Synthetic polynucleotide"
  source 1..2214: mol_type = other DNA
atggctgccgatggttatcttccagattggctcgaggacaaccttagtgaaggaattcgcgagtggtgggctttgaaacctggagcccctcaacccaaggcaaatcaacaacatcaagacaacgctcgaggtcttgtgcttccgggttacaaataccttggacccggcaacggactcgacaagggggagccggtcaacgcagcagacgcggcggccctcgagcacgacaaggcctacgaccagcagctgcaggcgggtgacaatccgtacctgcggtataaccacgccgacgccgagtttcaggagcgtctgcaagaagatacgtcttttgggggcaaccttggcagagcagtcttccaggccaaaaagaggatccttgagcctcttggtctggttgaggaagcagctaaaacggctcctggaaagaagaggcctgtagatcagtctcctcaggaaccggactcatcatctggtgttggcaaatcgggcaaacagcctgccagaaaaagactaaatttcggtcagactggcgactcagagtcagtcccagaccctcaacctctcggagaaccaccagcagcccccacaagtttgggatctaatacaatggcttcaggcggtggcgcaccaatggcagacaataacgagggtgccgatggggtgggtagttcctcgggaaattggcattgcgattcccaatggctgggggacagagtcatcaccaccagcacccgaacctgggccctgcccacctacaacaatcacctctacaagcaaatctccaacgggacatcgggaggagccaccaacgacaacacctacttcggctacagcaccccctgggggtattttgactttaacagattccactgccacttttcaccacgtgactggcagcgactcatcaacaacaactggggattccggcccaagagactcagcttcaagctcttcaacatccaggtcaaggaggtcacgcagaatgaaggcaccaagaccatcgccaataacctcaccagcaccatccaggtgtttacggactcggagtaccagctgccgtacgttctcggctctgcgcaccagggctgcctccctccgttcccggcggacgtgttcatgattccgcaatacggctacctgacgctcaacaatggcagccaagccgtgggacgttcatccttttactgcctggaatatttcccttctcagatgctgagaacgggcaacaactttaccttcagctacacctttgaggaagtgcctttccacagcagctacgcgcacagccagagcttggaccggctgatgaatcctctgattgaccagtacctgtactacttgtctcggactcaaacaacaggaggcacggcaaatacgcagactctgggcttcagccaaggtgggcctaatacaatggccaatcaggcaaagaactggctgccaggaccctgttaccgccaacaacgcgtctcaacgacaaccgggcaaaacaacaatagcaactttgcctggactgctgggaccaaataccatctgaatggaagaaattcattggctaatcctggcatcgctatggcaacacacaaagacgacgaggagcgtttttttcccagtaacgggatcctgatttttggcaaacaaaatgctgccagagacaatgcggattacagcgatgtcatgctcaccagcgaggaagaaatcaaaaccactaaccctgtggctacagaggaatacggtatcgtggcagataacttgcagcagcaaaacacggctcctcaaattggaactgtcaacagccagggggccttacccggtatggtctggcagaaccgggacgtgtacctgcagggtcccatctgggccaagattcctcacacggacggcaacttccacccgtctccgctgatgggcggctttggcctgaaacatcctccgcctcagatcctgatcaagaacacgcctgtacctgcggatcctccgaccaccttcaaccagtcaaagctgaactctttcatcacgcaatacagcaccggacaggtcagcgtggagatcgagtgggagctgcagaaggaaaacagcaagcgctggaacccggagatccagtacacttccaactattacaagtctaataatgttgaatttgctgttaatactgaaggtgtatatagtgaaccccgccccattggcaccagatacctgactcgtaatctgtaa

SEQ ID NO: 338 - protein, 737 aa, synthetic construct
  REGION 1..737: note = source = /note="Description of Artificial Sequence: Synthetic polypeptide"
MAADGYLPDWLEDNLSEGIREWWALKPGAPQPKANQQHQDNARGLVLPGYKYLGPGNGLDKGEPVNAADAAALEHDKAYDQQLQAGDNPYLRYNHADAEFQERLQEDTSFGGNLGRAVFQAKKRILEPLGLVEEAAKTAPGKKRPVDQSPQEPDSSSGVGKSGKQPARKRLNFGQTGDSESVPDPQPLGEPPAAPTSLGSNTMASGGGAPMADNNEGADGVGSSSGNWHCDSQWLGDRVITTSTRTWALPTYNNHLYKQISNGTSGGATNDNTYFGYSTPWGYFDFNRFHCHFSPRDWQRLINNNWGFRPKRLSFKLFNIQVKEVTQNEGTKTIANNLTSTIQVFTDSEYQLPYVLGSAHQGCLPPFPADVFMIPQYGYLTLNNGSQAVGRSSFYCLEYFPSQMLRTGNNFTFSYTFEEVPFHSSYAHSQSLDRLMNPLIDQYLYYLSRTQTTGGTANTQTLGFSQGGPNTMANQAKNWLPGPCYRQQRVSTTTGQNNNSNFAWTAGTKYHLNGRNSLANPGIAMATHKDDEERFFPSNGILIFGKQNAARDNADYSDVMLTSEEEIKTTNPVATEEYGIVADNLQQQNTAPQIGTVNSQGALPGMVWQNRDVYLQGPIWAKIPHTDGNFHPSPLMGGFGLKHPPPQILIKNTPVPADPPTTFNQSKLNSFITQYSTGQVSVEIEWELQKENSKRWNPEIQYTSNYYKSNNVEFAVNTEGVYSEPRPIGTRYLTRNL

SEQ ID NO: 339 - DNA, 2211 bp, synthetic construct
  misc_feature 1..2211: note = source = /note="Description of Artificial Sequence: Synthetic polynucleotide"
  source 1..2211: mol_type = other DNA
atggctgccgatggttatcttccagattggctcgaggacaacctctctgagggcattcgcgagtggtgggacttgaaacctggagccccgaagcccaaagccaaccagcaaaagcaggacgacggccggggtctggtgcttcctggctacaagtacctcggacccttcaacggactcgacaagggggagcccgtcaacgcggcggacgcagcggccctcgagcacgacaaggcctacgaccagcagctcaaagcgggtgacaatccgtacctgcggtataaccacgccgacgccgagtttcaggagcgtctgcaagaagatacgtcttttgggggcaacctcgggcgagcagtcttccaggccaagaagcgggttctcgaacctctcggtctggttgaggaaggcgctaagacggctcctggaaagaaacgtccggtagagcagtcgccacaagagccagactcctcctcgggcatcggcaagacaggccagcagcccgctaaaaagagactcaattttggtcagactggcgactcagagtcagtccccgacccacaacctctcggagaacctccagcaacccccgctgctgtgggacctactacaatggcttcaggcggtggcgcaccaatggcagacaataacgaaggcgccgacggagtgggtaatgcctcaggaaattggcattgcgattccacatggctgggcgacagagtcatcaccaccagcacccgaacatgggccttgcccacctataacaaccacctctacaagcaaatctccagtgcttcaacgggggccagcaacgacaaccactacttcggctacagcaccccctgggggtattttgatttcaacagattccactgccatttctcaccacgtgactggcagcgactcatcaacaacaattggggattccggcccaagagactcaacttcaagctcttcaacatccaagtcaaggaggtcacgacgaatgatggcgtcacgaccatcgctaataaccttaccagcacggttcaagtcttctcggactcggagtaccagctgccgtacgttctcggctctgcccaccagggctgcctgcctccgttcccggcggacgtgttcatgattccccagtacggctacctaacactcaacaacggtagtcaggccgtgggacgctcctccttctactgcctggaatactttccttcgcagatgctgagaaccggcaacaacttccagtttacttacaccttcgaggacgtgcctttccacagcagctacgcccacagccagagcttggaccggctgatgaatcctctgattgaccagtacctgtactacttgtctcggactcaaacaacaggaggcacggcaaatacgcagactctgggcttcagccaaggtgggcctaatacaatggccaatcaggcaaagaactggctgccaggaccctgttaccgccaacaacgcgtctcaacgacaaccgggcaaaacaacaatagcaattttacctggactggtgcttcaaaatataacctcaatgggcgtgaatccatcatcaaccctggcactgctatggcctcacacaaagacgacgaagacaagttctttcccatgagcggtgtcatgatttttggaaaagagagcgccggagcttcaaacactgcattggacaatgtcatgattacagacgaagaggaaattaaagccactaaccctgtggccaccgaaagatttgggaccgtggcagtcaatttccagagcagcagcacagaccctgcgaccggagatgtgcatgctatgggagcattacctggcatggtgtggcaagatagagacgtgtacctgcagggtcccatttgggccaaaattcctcacacagatggacactttcacccgtctcctcttatgggcggctttggactcaagaacccgcctcctcagatcctcatcaaaaacacgcctgttcctgcgaatcctccggcggagttttcagctacaaagtttgcttcattcatcacccaatactccacaggacaagtgagtgtggaaattgaatgggagctgcagaaagaaaacagcaagcgctggaatcccgaagtgcagtacacatccaattatgcaaaatctgccaacgttgattttactgtggacaacaatggactttatactgagcctcgccccattggcacccgttacctcacccgtcccctgtaa

SEQ ID NO: 340 - protein, 736 aa, synthetic construct
  REGION 1..736: note = source = /note="Description of Artificial Sequence: Synthetic polypeptide"
MAADGYLPDWLEDNLSEGIREWWDLKPGAPKPKANQQKQDDGRGLVLPGYKYLGPFNGLDKGEPVNAADAAALEHDKAYDQQLKAGDNPYLRYNHADAEFQERLQEDTSFGGNLGRAVFQAKKRVLEPLGLVEEGAKTAPGKKRPVEQSPQEPDSSSGIGKTGQQPAKKRLNFGQTGDSESVPDPQPLGEPPATPAAVGPTTMASGGGAPMADNNEGADGVGNASGNWHCDSTWLGDRVITTSTRTWALPTYNNHLYKQISSASTGASNDNHYFGYSTPWGYFDFNRFHCHFSPRDWQRLINNNWGFRPKRLNFKLFNIQVKEVTTNDGVTTIANNLTSTVQVFSDSEYQLPYVLGSAHQGCLPPFPADVFMIPQYGYLTLNNGSQAVGRSSFYCLEYFPSQMLRTGNNFQFTYTFEDVPFHSSYAHSQSLDRLMNPLIDQYLYYLSRTQTTGGTANTQTLGFSQGGPNTMANQAKNWLPGPCYRQQRVSTTTGQNNNSNFTWTGASKYNLNGRESIINPGTAMASHKDDEDKFFPMSGVMIFGKESAGASNTALDNVMITDEEEIKATNPVATERFGTVAVNFQSSSTDPATGDVHAMGALPGMVWQDRDVYLQGPIWAKIPHTDGHFHPSPLMGGFGLKNPPPQILIKNTPVPANPPAEFSATKFASFITQYSTGQVSVEIEWELQKENSKRWNPEVQYTSNYAKSANVDFTVDNNGLYTEPRPIGTRYLTRPL

SEQ ID NO: 341 - DNA, 2211 bp, synthetic construct
  misc_feature 1..2211: note = source = /note="Description of Artificial Sequence: Synthetic polynucleotide"
  source 1..2211: mol_type = other DNA
atggctgctgacggttatcttccagattggctcgaggacaacctttctgaaggcattcgagagtggtgggcgctgcaacctggagcccctaaacccaaggcaaatcaacaacatcaggacaacgctcggggtcttgtgcttccgggttacaaatacctcggacccggcaacggactcgacaagggggaacccgtcaacgcagcggacgcggcagccctcgagcacgacaaggcctacgaccagcagctcaaggccggtgacaacccctacctcaagtacaaccacgccgacgccgagttccaggagcggctcaaagaagatacgtcttttgggggcaacctcgggcgagcagtcttccaggccaaaaagaggcttcttgaacctcttggtctggttgaggaagcggctaagacggctcctggaaagaagaggcctgtagatcagtctcctcaggaaccggactcatcatctggtgttggcaaatcgggcaaacagcctgccagaaaaagactaaatttcggtcagactggcgactcagagtcagtcccagaccctcaacctctcggagaaccaccagcagcccccacaagtttgggatctaatacaatggcttcaggcggtggcgcaccaatggcagacaataacgagggtgccgatggagtgggtaattcctcaggaaattggcattgcgattcccaatggctgggcgacagagtcatcaccaccagcaccagaacctgggccctgcccacttacaacaaccatctctacaagcaaatctccagccaatcaggagcttcaaacgacaaccactactttggctacagcaccccttgggggtattttgactttaacagattccactgccacttctcaccacgtgactggcagcgactcattaacaacaactggggattccggcccaagaaactcagcttcaagctcttcaacatccaagttaaagaggtcacgcagaacgatggcacgacgactattgccaataaccttaccagcacggttcaagtgtttacggactcggagtatcagctcccgtacgtgctcgggtcggcgcaccaaggctgtctcccgccgtttccagcggacgtcttcatggtccctcagtatggatacctcaccctgaacaacggaagtcaagcggtgggacgctcatccttttactgcctggagtacttcccttcgcagatgctaaggactggaaataacttccaattcagctataccttcgaggatgtaccttttcacagcagctacgctcacagccagagtttggatcgcttgatgaatcctcttattgatcagtatctgtactacctgaacagaacgcaaggaacaacctctggaacaaccaaccaatcacggctgctttttagccaggctgggcctcagtctatgtctttgcaggccagaaattggctacctgggccctgctaccggcaacagagactttcaaagactgctaacgacaacaacaacagtaactttccttggacagcggccagcaaatatcatctcaatggccgcgactcgctggtgaatccaggaccagctatggccagtcacaaggacgatgaagaaaaatttttccctatgcacggcaatctaatatttggcaaagaagggacaacggcaagtaacgcagaattagataatgtaatgattacggatgaagaagagattcgtaccaccaatcctgtggcaacagagcagtatggaactgtggcaaataacttgcagagctcaaatacagctcccacgactagaactgtcaatgatcagggggccttacctggcatggtgtggcaagatcgtgacgtgtaccttcaaggacctatctgggcaaagattcctcacacggatggacactttcatccttctcctctgatgggaggctttggactgaaacatccgcctcctcaaatcatgatcaaaaatactccggtaccggcaaatcctccgacgactttcagcccggccaagtttgcttcatttatcactcagtactccactggacaggtcagcgtggaaattgagtgggagctacagaaagaaaacagcaaacgttggaatccagagattcagtacacttccaactacaacaagtctgttaatgtggactttactgtagacactaatggtgtttatagtgaacctcgccccattggcacccgttaccttacccgtcccctgtaa

SEQ ID NO: 342 - protein, 736 aa, synthetic construct
  REGION 1..736: note = source = /note="Description of Artificial Sequence: Synthetic polypeptide"
MAADGYLPDWLEDNLSEGIREWWALQPGAPKPKANQQHQDNARGLVLPGYKYLGPGNGLDKGEPVNAADAAALEHDKAYDQQLKAGDNPYLKYNHADAEFQERLKEDTSFGGNLGRAVFQAKKRLLEPLGLVEEAAKTAPGKKRPVDQSPQEPDSSSGVGKSGKQPARKRLNFGQTGDSESVPDPQPLGEPPAAPTSLGSNTMASGGGAPMADNNEGADGVGNSSGNWHCDSQWLGDRVITTSTRTWALPTYNNHLYKQISSQSGASNDNHYFGYSTPWGYFDFNRFHCHFSPRDWQRLINNNWGFRPKKLSFKLFNIQVKEVTQNDGTTTIANNLTSTVQVFTDSEYQLPYVLGSAHQGCLPPFPADVFMVPQYGYLTLNNGSQAVGRSSFYCLEYFPSQMLRTGNNFQFSYTFEDVPFHSSYAHSQSLDRLMNPLIDQYLYYLNRTQGTTSGTTNQSRLLFSQAGPQSMSLQARNWLPGPCYRQQRLSKTANDNNNSNFPWTAASKYHLNGRDSLVNPGPAMASHKDDEEKFFPMHGNLIFGKEGTTASNAELDNVMITDEEEIRTTNPVATEQYGTVANNLQSSNTAPTTRTVNDQGALPGMVWQDRDVYLQGPIWAKIPHTDGHFHPSPLMGGFGLKHPPPQIMIKNTPVPANPPTTFSPAKFASFITQYSTGQVSVEIEWELQKENSKRWNPEIQYTSNYNKSVNVDFTVDTNGVYSEPRPIGTRYLTRPL

SEQ ID NO: 343 - DNA, 2211 bp, synthetic construct
  misc_feature 1..2211: note = source = /note="Description of Artificial Sequence: Synthetic polynucleotide"
  source 1..2211: mol_type = other DNA
atggctgccgatggttatcttccagattggctcgaggacaaccttagtgaaggaattcgcgagtggtgggctttgaaacctggagcccctcaacccaaggcaaatcaacaacatcaagacaacgctcgaggtcttgtgcttccgggttacaaataccttggacccggcaacggactcgacaagggggagccggtcaacgcagcagacgcggcggccctcgagcacgacaaggcctacgaccagcagctcaaggccggagacaacccgtacctcaagtacaaccacgccgacgccgagttccaggagcggctcaaagaagatacgtcttttgggggcaacctcgggcgagcagtcttccaggccaaaaagaggcttcttgaacctcttggtctggttgaggaagcggctaagacggctcctggaaagaagagaccggtagagccatcaccccagcgttctccagactcctctacgggcatcggcaagaaaggccaacagcccgctaaaaagagactcaattttggtcagactggcgactcagagtcagtccccgacccacaacctctcggagaacctccagcaacccccgctgctgtgggacctactacaatggcttcaggcggtggcgcaccaatggcagacaataacgagggtgccgatggagtgggtaattcctcaggaaattggcattgcgattcccaatggctgggcgacagagtcatcaccaccagcaccagaacctgggccctgcccacttacaacaaccatctctacaagcaaatctccagccaatcaggagcttcaaacgacaaccactactttggctacagcaccccttgggggtattttgactttaacagattccactgccacttttcaccacgtgactggcaaagactcatcaacaacaactggggattccgacccaagagactcaacttcaagctcttcaacatccaagtcaaggaggtcacgacgaatgatggcgtcacgaccatcgctaataaccttaccagcacggttcaagtcttctcggactcggagtaccagttgccgtacgtcctcggctctgcgcaccagggctgcctccctccgttcccggcggacgtgttcatgattccgcagtacggctacctaacgctcaacaatggcagccaagccgtgggacgttcatccttttactgcctggaatatttcccttctcagatgctgagaacgggcaacaactttaccttcagctacacttttgaggacgttcctttccacagcagctacgctcacagccagagtctggaccgtctcatgaatcctctcatcgaccagtacctgtattacttgagcagaacaaacactccaagtggaaccaccacgcagtcaaggcttcagttttctcaggccggagcgagtgacattcgggaccagtctaggaactggcttcctggaccctgttaccgccagcagcgcgtttctaaaacaaaaacagacaacaacaacagcaattttacctggactggtgcttcaaaatataaccttaatgggcgtgaatctataatcaaccctggcactgctatggcctcacacaaagacgacgaagacaagttctttcccatgagcggtgtcatgatttttggaaaagagagcgccggagcttcaaacactgcattggacaatgtcatgattacagacgaagaggaaattaaagccactaaccctgtggccaccgaaagatttgggaccgtggcagtcaatttccagagcagcagcacagaccctgcgaccggagatgtgcatgttatgggagccttacctggaatggtgtggcaagacagagacgtatacctgcagggtcctatttgggccaaaattcctcacacggatggacactttcacccgtctcctcttatgggcggctttggactcaagaacccgcctcctcagatcctcatcaaaaacacgcctgttcctgcgaatcctccggcggagttttcagctacaaagtttgcttcattcatcacccaatactccacaggacaagtgagtgtggaaattgaatgggagctgcagaaagaaaacagcaagcgctggaatcccgaagtgcagtacacatccaattatgcaaaatctgccaacgttgattttactgtggacaacaatggactttatactgagcctcgccccattggcacccgttaccttacccgtcccctgtaa

SEQ ID NO: 344 - protein, 736 aa, synthetic construct
  REGION 1..736: note = source = /note="Description of Artificial Sequence: Synthetic polypeptide"
MAADGYLPDWLEDNLSEGIREWWALKPGAPQPKANQQHQDNARGLVLPGYKYLGPGNGLDKGEPVNAADAAALEHDKAYDQQLKAGDNPYLKYNHADAEFQERLKEDTSFGGNLGRAVFQAKKRLLEPLGLVEEAAKTAPGKKRPVEPSPQRSPDSSTGIGKKGQQPAKKRLNFGQTGDSESVPDPQPLGEPPATPAAVGPTTMASGGGAPMADNNEGADGVGNSSGNWHCDSQWLGDRVITTSTRTWALPTYNNHLYKQISSQSGASNDNHYFGYSTPWGYFDFNRFHCHFSPRDWQRLINNNWGFRPKRLNFKLFNIQVKEVTTNDGVTTIANNLTSTVQVFSDSEYQLPYVLGSAHQGCLPPFPADVFMIPQYGYLTLNNGSQAVGRSSFYCLEYFPSQMLRTGNNFTFSYTFEDVPFHSSYAHSQSLDRLMNPLIDQYLYYLSRTNTPSGTTTQSRLQFSQAGASDIRDQSRNWLPGPCYRQQRVSKTKTDNNNSNFTWTGASKYNLNGRESIINPGTAMASHKDDEDKFFPMSGVMIFGKESAGASNTALDNVMITDEEEIKATNPVATERFGTVAVNFQSSSTDPATGDVHVMGALPGMVWQDRDVYLQGPIWAKIPHTDGHFHPSPLMGGFGLKNPPPQILIKNTPVPANPPAEFSATKFASFITQYSTGQVSVEIEWELQKENSKRWNPEVQYTSNYAKSANVDFTVDNNGLYTEPRPIGTRYLTRPL

SEQ ID NO: 345 - DNA, 2211 bp, synthetic construct
  misc_feature 1..2211: note = source = /note="Description of Artificial Sequence: Synthetic polynucleotide"
  source 1..2211: mol_type = other DNA
atggctgccgatggttatcttccagattggctcgaggacaacctctctgagggcattcgcgagtggtgggacttgaaacctggagcccctaaacccaaggcaaatcaacaacatcaggacaacgctcgaggtcttgtgcttccgggttacaaataccttggacccggcaacggactcgacaagggggagccggtcaacgcagcagacgcggcggccctcgagcacgacaaggcctacgaccagcagctcaaggccggagacaacccgtacctcaagtacaaccacgccgacgccgagttccaggagcggctcaaagaagatacgtcttttgggggcaacctcgggcgagcagtcttccaggccaaaaagaggcttcttgaacctcttggtctggttgaggaagcggctaagacggctcctggaaagaagagaccggtagagccatcaccccagcgttctccagactcctctacgggcatcggcaagaaaggccaacagcccgctaaaaagagactcaattttggtcagactggcgactcagagtcagtccccgacccacaacctctcggagaacctccagcaacccccgctgctgtgggacctactacaatggcttcaggcggtggcgcaccaatggcagacaataacgagggtgccgatggagtgggtaattcctcaggaaattggcattgcgattcccaatggctgggcgacagagtcatcaccaccagcaccagaacctgggccctgcccacttacaacaaccatctctacaagcaaatctccagccaatcaggagcttcaaacgacaaccactactttggctacagcaccccttgggggtattttgactttaacagattccactgccacttttcaccacgtgactggcaaagactcatcaacaacaactggggattccgacccaagagactcaacttcaagctcttcaacatccaagtcaaggaggtcacgacgaatgatggcgtcacgaccatcgctaataaccttaccagcacggttcaagtcttctcggactcggagtaccagttgccgtacgtcctcggctctgcgcaccagggctgcctccctccgttcccggcggacgtgttcatgattccgcagtacggctacctaacgctcaacaatggcagccaagccgtgggacgttcatccttttactgcctggaatatttcccttctcagatgctgagaacgggcaacaactttaccttcagctacacttttgaggacgttcctttccacagcagctacgctcacagccagagtctggaccgtctcatgaatcccctcatcgaccagtacctgtattacttgagcagaacaaacactccaagtggaaccaccacgcagtcaaggcttcagttttctcaggccggagcgagtgacattcgggaccagtctaggaactggcttcctggaccctgttaccggcagcagcgcgtttctaaaacaaaaacagacaacaacaacagcaactttacctggactggtgcttcaaaatataaccttaatgggcgtgaatctataatcaaccctggcactgctatggcctcacacaaagacgacgaagacaagttctttcccatgagcggtgtcatgatttttggaaaggagagcgccggagcttcaaacactgcattggacaatgtcatgatcacagacgaagaggaaatcaaagccactaaccccgtggccaccgaaagatttgggactgtggcagtcaatctccagagcagcagcacagaccctgcgaccggagatgtgcatgttatgggagccttacctggaatggtgtggcaagacagagacgtgtacctgcagggtcctatttgggccaaaattcctcacacggatggacactttcacccgtctcctctcatgggcggctttggacttaagcacccgcctcctcagatcctcatcaaaaacacgcctgttcctgcgaatcctccggcagagttttcggctacaaagtttgcttcattcatcacccagtattccacaggacaagtgagtgtggaaattgaatgggagctgcagaaagaaaacagcaagcgctggaatcccgaagtgcagtacacatccaattatgcaaaatctgccaacgttgattttactgtggacaacaatggactttatactgagcctcgccccattggcacccgttacctcacccgtcccctgtaa

SEQ ID NO: 346 - protein, 736 aa, synthetic construct
  REGION 1..736: note = source = /note="Description of Artificial Sequence: Synthetic polypeptide"
MAADGYLPDWLEDNLSEGIREWWDLKPGAPKPKANQQHQDNARGLVLPGYKYLGPGNGLDKGEPVNAADAAALEHDKAYDQQLKAGDNPYLKYNHADAEFQERLKEDTSFGGNLGRAVFQAKKRLLEPLGLVEEAAKTAPGKKRPVEPSPQRSPDSSTGIGKKGQQPAKKRLNFGQTGDSESVPDPQPLGEPPATPAAVGPTTMASGGGAPMADNNEGADGVGNSSGNWHCDSQWLGDRVITTSTRTWALPTYNNHLYKQISSQSGASNDNHYFGYSTPWGYFDFNRFHCHFSPRDWQRLINNNWGFRPKRLNFKLFNIQVKEVTTNDGVTTIANNLTSTVQVFSDSEYQLPYVLGSAHQGCLPPFPADVFMIPQYGYLTLNNGSQAVGRSSFYCLEYFPSQMLRTGNNFTFSYTFEDVPFHSSYAHSQSLDRLMNPLIDQYLYYLSRTNTPSGTTTQSRLQFSQAGASDIRDQSRNWLPGPCYRQQRVSKTKTDNNNSNFTWTGASKYNLNGRESIINPGTAMASHKDDEDKFFPMSGVMIFGKESAGASNTALDNVMITDEEEIKATNPVATERFGTVAVNLQSSSTDPATGDVHVMGALPGMVWQDRDVYLQGPIWAKIPHTDGHFHPSPLMGGFGLKHPPPQILIKNTPVPANPPAEFSATKFASFITQYSTGQVSVEIEWELQKENSKRWNPEVQYTSNYAKSANVDFTVDNNGLYTEPRPIGTRYLTRPL

SEQ ID NO: 347 - DNA, 2214 bp, synthetic construct
  misc_feature 1..2214: note = source = /note="Description of Artificial Sequence: Synthetic polynucleotide"
  source 1..2214: mol_type = other DNA
atggctgccgatggttatcttccagattggctcgaggacaaccttagtgaaggaattcgcgagtggtgggctttgaaacctggagcccctcaacccaaggcaaatcaacaacatcaagacaacgctcgaggtcttgtgcttccgggttacaaataccttggacccggcaacggactcgacaagggggagccggtcaacgcagcagacgcggcggccctcgagcacgacaaggcctacgaccagcagctgcaggcgggtgacaatccgtacctgcggtataaccacgccgacgccgagtttcaggagcgtctgcaagaagatacgtcttttgggggcaaccttggcagagcagtcttccaggccaaaaagaggatccttgagcctcttggtctggttgaggaagcagctaaaacggctcctggaaagaagaggcctgtagatcagtctcctcaggaaccggactcatcatctggtgttggcaaatcgggcaaacagcctgccagaaaaagactaaatttcggtcagactggcgactcagagtcagtcccagaccctcaacctctcggagaaccaccagcagcccccacaagtttgggatctaatacaatggcttcaggcggtggcgcaccaatggcagacaataacgagggtgccgatggggtgggtagttcctcgggaaattggcattgcgattcccaatgactgggggacagagtcatcaccaccagcacccgaacctgggccctgcccacctacaacaatcacctctacaagcaaatctccaacgggacatcgggaggagccaccaacgacaacacctacttcggctacagcaccccctgggggtattttgactttaacagattccactgccacttttcaccacgtgactggcagcgactcatcaacaacaactggggattccggcccaagagactcagcttcaagctcttcaacatccaggtcaaggaggtcacgcagaatgaaggcaccaagaccatcgccaataacctcaccagcaccatccaggtgtttacggactcggagtaccagctgccgtacgttctcggctctgcgcaccagggctgcctccctccgttcccggcggacgtgttcatgattccgcaatacggctacctgacgctcaacaatggcagccaagccgtgggacgttcatccttttactgcctggaatatttcccttctcagatgctgagaacgggcaacaactttaccttcagctacacctttgaggaagtgcctttccacagcagctacgcgcacagccagagcttggaccggctgatgaatcctctgattgaccagtacctgtactacttgtctcggactcaaacaacaggaggcacggcaaatacgcagactctgggcttcagccaaggtgggcctaatacaatggccaatcaggcaaagaactggctgccaggaccctgttaccgccaacaacgcgtctcaacgacaaccgggcaaaacaacaatagcaactttgcctggactgctgggaccaaataccatctgaatggaagaaattcattggctaatcctggcatcgctatggcaacacacaaagacgacgaggagcgtttttttcccagtaacgggatcctgatttttggcaaacaaaatgctgccagagacaatgcggattacagcgatgtcatgctcaccagcgaggaagaaatcaaaaccactaaccctgtggctacagaggaatacggtatcgtggcagataacttgcagcagcaaaacacggctcctcaaattggaactgtcaacagccagggggccttacccggtatggtctggcagaaccgggacgtgtacctgcagggtcccatctgggccaagattcctcacacggacggcaacttccacccgtctccgctgatgggcggctttggcctgaaacatcctccgcctcagatcctgatcaagaacacgcctgtacctgcggatcctccgaccaccttcaaccagtcaaagctgaactctttcatcacgcaatacagcaccggacaggtcagcgtggagatcgagtgggagctgcagaaggaaaacagcaagcgctggaacccggagatccagtacacttccaactattacaagtctaataatgttgaatttgctgttaatactgaaggtgtatatagtgaaccccgccccattggcaccagatacctgactcgtaatctgtaa

SEQ ID NO: 348 - protein, 736 aa, synthetic construct
  REGION 1..736: note = source = /note="Description of Artificial Sequence: Synthetic polypeptide"
MAADGYLPDWLEDNLSEGIREWWALKPGAPQPKANQQHQDNARGLVLPGYKYLGPGNGLDKGEPVNAADAAALEHDKAYDQQLQAGDNPYLRYNHADAEFQERLQEDTSFGGNLGRAVFQAKKRILEPLGLVEEAAKTAPGKKRPVDQSPQEPDSSSGVGKSGKQPARKRLNFGQTGDSESVPDPQPLGEPPAAPTSLGSNTMASGGGAPMADNNEGADGVGSSSGNWHCDSQLGDRVITTSTRTWALPTYNNHLYKQISNGTSGGATNDNTYFGYSTPWGYFDFNRFHCHFSPRDWQRLINNNWGFRPKRLSFKLFNIQVKEVTQNEGTKTIANNLTSTIQVFTDSEYQLPYVLGSAHQGCLPPFPADVFMIPQYGYLTLNNGSQAVGRSSFYCLEYFPSQMLRTGNNFTFSYTFEEVPFHSSYAHSQSLDRLMNPLIDQYLYYLSRTQTTGGTANTQTLGFSQGGPNTMANQAKNWLPGPCYRQQRVSTTTGQNNNSNFAWTAGTKYHLNGRNSLANPGIAMATHKDDEERFFPSNGILIFGKQNAARDNADYSDVMLTSEEEIKTTNPVATEEYGIVADNLQQQNTAPQIGTVNSQGALPGMVWQNRDVYLQGPIWAKIPHTDGNFHPSPLMGGFGLKHPPPQILIKNTPVPADPPTTFNQSKLNSFITQYSTGQVSVEIEWELQKENSKRWNPEIQYTSNYYKSNNVEFAVNTEGVYSEPRPIGTRYLTRNL

SEQ ID NO: 349 - DNA, 2214 bp, synthetic construct
  misc_feature 1..2214: note = source = /note="Description of Artificial Sequence: Synthetic polynucleotide"
  source 1..2214: mol_type = other DNA
atggctgccgatggttatcttccagattggctcgaggacaaccttagtgaaggaattcgcgagtggtgggctttgaaacctggagcccctcaacccaaggcaaatcaacaacatcaagacaacgctcgaggtcttgtgcttccgggttacaaataccttggacccggcaacggactcgacaagggggagccggtcaacgcagcagacgcggcggccctcgagcacgacaaggcctacgaccagcagctgcaggcgggtgacaatccgtacctgcggtataaccacgccgacgccgagtttcaggagcgtctgcaagaagatacgtcttttgggggcaaccttggcagagcagtcttccaggccaaaaagaggatccttgagcctcttggtctggttgaggaagcagctaaaacggctcctggaaagaagaggcctgtagatcagtctcctcaggaaccggactcatcatctggtgttggcaaatcgggcaaacagcctgccagaaaaagactaaatttcggtcagactggcgactcagagtcagtcccagaccctcaacctctcggagaaccaccagcagcccccacaagtttgggatctaatacaatggcttcaggcggtggcgcaccaatggcagacaataacgagggtgccgatggggtgggtagttcctcgggaaattggcattgcgattcccaatggctgggggacagagtcatcaccaccagcacccgaacctgggccctgcccacctacaacaatcacctctacaagcaaatctccaacgggacatcgggaggagccaccaacgacaacacctacttcggctacagcaccccctgggggtattttgactttaacagattccactgccacttttcaccacgtgactggcagcgactcatcaacaacaactggggattccggcccaagagactcagcttcaagctcttcaacatccaggtcaaggaggtcacgcagaatgaaggcaccaagaccatcgccaataacctcaccagcaccatccaggtgtttacggactcggagtaccagctgccgtacgttctcggctctgcgcaccagggctgcctccctccgttcccggcggacgtgttcatgattccgcaatacggctacctgacgctcaacaatggcagccaagccgtgggacgttcatccttttactgcctggaatatttcccttctcagatgctgagaacgggcaacaactttaccttcagctacacctttgaggaagtgccttttcacagcagctacgcgcacagccagagcttggaccggctgatgaatcctctgattgaccagtacctgtactacttgtctcggactcaaacaacaggaggcacggcaaatacgcagactctgggcttcagccaaggtgggcctaatacaatggccaatcaggcaaagaactggctgccaggaccctgttaccgccaacaacgcgtctcaacgacaaccgggcaaaacaacaatagcaactttgcctggactgctgggaccaaataccatctgaatggaagaaattcattggctaatcctggcatcgctatggcaacacacaaagacgacgaggagcgtttttttcccagtaacgggatcctgatttttggcaaacaaaatgctgccagagacaatgcggattacagcgatgtcatgctcaccagcgaggaagaaatcaaaaccactaaccctgtggctacagaggaatacggtatcgtggcagataacttgcagcagcaaaacacggctcctcaaattggaactgtcaacagccagggggccttacccggtatggtctggcagaaccgggacgtgtacctgcagggtcccatctgggccaagattcctcacacggacggcaacttccacccgtctccgctgatgggcggctttggcctgaaacatcctccgcctcagatcctgatcaagaacacgcctgtacctgcggatcctccgaccaccttcaaccagtcaaagctgaactctttcatcacgcaatacagcaccggacaggtcagcgtggagatcgagtgggagctgcagaaggaaaacagcaagcgctggaacccggagatccagtacacttccaactattacaagtctaataatgttgaatttgctgttaatactgaaggtgtatatagtgaaccccgccccattggcaccagatacctgactcgtaatctgtaa

SEQ ID NO: 350 - protein, 737 aa, synthetic construct; identical to SEQ ID NO: 338
  REGION 1..737: note = source = /note="Description of Artificial Sequence: Synthetic polypeptide"

SEQ ID NO: 351 - DNA, 2211 bp, synthetic construct
  misc_feature 1..2211: note = source = /note="Description of Artificial Sequence: Synthetic polynucleotide"
  source 1..2211: mol_type = other DNA
atggctgccgatggttatcttccagattggctcgaggacaacctctctgagggcattcgcgagtggtgggacttgaaacctggagcccctaaacccaaggcaaatcaacaacatcaggacaacgctcgaggtcttgtgcttccgggttacaaataccttggacccggcaacggactcgacaagggggagccggtcaacgcagcagacgcggcggccctcgagcacgacaaggcctacgaccagcagctcaaggccggagacaacccgtacctcaagtacaaccacgccgacgccgagttccaggagcggctcaaagaagatacgtcttttgggggcaacctcgggcgagcagtcttccaggccaaaaagaggcttcttgaacctcttggtctggttgaggaagcggctaagacggctcctggaaagaagagaccggtagagccatcaccccagcgttctccagactcctctacgggcatcggcaagaaaggccaacagcccgctaaaaagagactcaattttggtcagactggcgactcagagtcagtccccgacccacaacctctcggagaacctccagcaacccccgctgctgtgggacctactacaatggcttcaggcggtggcgcaccaatggcagacaataacgagggtgccgatggagtgggtaattcctcaggaaattggcattgcgattcccaatggctgggcgacagagtcatcaccaccagcaccagaacctgggccctgcccacttacaacaaccatctctacaagcaaatctccagccaatcaggagcttcaaacgacaaccactactttggctacagcaccccttgggggtattttgactttaacagattccactgccacttttcaccacgtgactggcaaagactcatcaacaacaactggggattccgacccaagagactcaacttcaagctcttcaacatccaagtcaaggaggtcacgacgaatgatggcgtcacgaccatcgctaataaccttaccagcacggttcaagtcttctcggactcggagtaccagttgccgtacgtcctcggctctgcgcaccagggctgcctccctccgttcccggcggacgtgttcatgattccgcagtacggctacctaacgctcaacaatggcagccaagccgtgggacgttcatccttttactgcctggaatatttcccttctcagatgctgagaacgggcaacaactttaccttcagctacacttttgaggacgttcctttccacagcagctacgctcacagccagagtctggaccgtctcatgaatcctctcatcgaccagtacctgtattacttgagcagaacaaacactccaagtggaaccaccacgcagtcaaggcttcagttttctcaggccggagcgagtgacattcgggaccagtctaggaactggcttcctggaccctgttaccgccagcagcgcgtttctaaaacaaaaacagacaacaacaacagcaattttacctggactggtgcttcaaaatataaccttaatgggcgtgaatctataatcaaccctggcactgctatggcctcacacaaagacgacgaagacaagttctttcccatgagcggtgtcatgatttttggaaaagagagcgccggagcttcaaacactgcattggacaatgtcatgattacagacgaagaggaaattaaagccactaaccctgtggccaccgaaagatttgggaccgtggcagtcaatttccagagcagcagcacagaccctgcgaccggagatgtgcatgctatgggagcattacctggcatggtgtggcaagatagagacgtgtacctgcagggtcccatttgggccaaaattcctcacacagatggacactttcacccgtctcctcttatgggcggctttggactcaagaacccgcctcctcagatcctcatcaaaaacacgcctgttcctgcgaatcctccggcggagttttcagctacaaagtttgcttcattcatcacccaatactccacaggacaagtgagtgtggaaattgaatgggagctgcagaaagaaaacagcaagcgctggaatcccgaagtgcagtacacatccaattatgcaaaatctgccaacgttgattttactgtggacaacaatggactttatactgagcctcgccccattggcacccgttaccttacccgtcccctgtaa

SEQ ID NO: 352 - protein, 736 aa, synthetic construct
  REGION 1..736: note = source = /note="Description of Artificial Sequence: Synthetic polypeptide"
MAADGYLPDWLEDNLSEGIREWWDLKPGAPKPKANQQHQDNARGLVLPGYKYLGPGNGLDKGEPVNAADAAALEHDKAYDQQLKAGDNPYLKYNHADAEFQERLKEDTSFGGNLGRAVFQAKKRLLEPLGLVEEAAKTAPGKKRPVEPSPQRSPDSSTGIGKKGQQPAKKRLNFGQTGDSESVPDPQPLGEPPATPAAVGPTTMASGGGAPMADNNEGADGVGNSSGNWHCDSQWLGDRVITTSTRTWALPTYNNHLYKQISSQSGASNDNHYFGYSTPWGYFDFNRFHCHFSPRDWQRLINNNWGFRPKRLNFKLFNIQVKEVTTNDGVTTIANNLTSTVQVFSDSEYQLPYVLGSAHQGCLPPFPADVFMIPQYGYLTLNNGSQAVGRSSFYCLEYFPSQMLRTGNNFTFSYTFEDVPFHSSYAHSQSLDRLMNPLIDQYLYYLSRTNTPSGTTTQSRLQFSQAGASDIRDQSRNWLPGPCYRQQRVSKTKTDNNNSNFTWTGASKYNLNGRESIINPGTAMASHKDDEDKFFPMSGVMIFGKESAGASNTALDNVMITDEEEIKATNPVATERFGTVAVNFQSSSTDPATGDVHAMGALPGMVWQDRDVYLQGPIWAKIPHTDGHFHPSPLMGGFGLKNPPPQILIKNTPVPANPPAEFSATKFASFITQYSTGQVSVEIEWELQKENSKRWNPEVQYTSNYAKSANVDFTVDNNGLYTEPRPIGTRYLTRPL

SEQ ID NO: 353 - DNA, 2211 bp, synthetic construct
  misc_feature 1..2211: note = source = /note="Description of Artificial Sequence: Synthetic polynucleotide"
  source 1..2211: mol_type = other DNA
atggctgccgatggttatcttccagattggctcgaggacaaccttagtgaaggaattcgcgagtggtgggcgctgaaacctggagccccgaagcccaaagccaaccagcaaaagcaggacgacggccggggtctggtgcttccgggttacaaatacctcggacccggtaacggactcgacaaaggagagccggtcaacgaggcggacgcggcagccctcgagcacgacaaggcctacgaccagcagctcaaagcgggtgacaatccgtacctgcggtataaccacgccgacgccgagtttcaggagcgtctgcaagaagatacgtcttttgggggcaacctcgggcgagcagtcttccaggccaagaagcgggttctcgaacctctcggtctggttgaggaaggcgctaagacggctcccggaaagaaacgtccggtagagcagtcgccacaagagccagactcctctacgggcatcggcaagaaaggccaacagcccgccagaaaaagactcaatttcggtcagactggcgactcagagtcagttccagaccctcaacctctcggagaacctccagcagcgccctctggtgtgggacctactacaatggcttcaggcggtggcgcaccaatggcagacaataacgaaggcgccgacggagtgggtaatgcctcaggaaattggcattgcgattccacatggctgggcgacagagtcatcaccaccagcacccgaacatgggccttgcccacctataacaaccacctctacaagcaaatctccagtgcttcaacgggggccagcaacgacaacacctacttcggctacagcaccccctgggggtattttgatttcaacagattccactgccatttctcaccacgtgactggcagcgactcatcaacaacaattggggattccggcccaagagactcaacttcaaactcttcaacatccaagtcaaggaggtcacgacgaatgatggcgtcacgaccatcgctaataaccttaccagcacggttcaagtcttctcggactcggagtaccagttgccgtacgtcctcggctctgcgcaccagggctgcctccctccgttcccggcggacgtgttcatgattccgcagtacggctacctaacgctcaacaatggcagccaggcagtgggacggtcatccttttactgcctggaatatttcccatcgcagatgctgagaacgggcaataactttaccttcagctacaccttcgaggacgtgcctttccacagcagctacgcgcacagccagagcctggaccggctgatgaatcctctcatcgaccagtacctgtattacctgaacagaactcagaatcagtccggaagtgcccaaaacaaggacttgctgtttagccgggggtctccagctggcatgtctgttcagcccaaaaactggctacctggaccctgttatcggcagcagcgcgtttctaaaacaaaaacagacaacaacaacagcaattttacctggactggtgcttcaaaatataacctcaatgggcgtgaatccatcatcaaccctggcactgctatggcctcacacaaagacgacgaagacaagttctttcccatgagcggtgtcatgatttttggaaaagagagcgccggagcttcaaacactgcattggacaatgtcatgattacagacgaagaggaaattaaagccactaaccctgtggccaccgaaagatttgggaccgtggcagtcaatttccagagcagcagcacagaccctgcgaccggagatgtgcatgttatgggagccttacctggaatggtgtggcaagacagagacgtatacctgcagggtcctatttgggccaaaattcctcacacagatggacactttcacccgtctcctcttatgggcggctttggactcaagaacccgcctcctcagatcctcatcaaaaacacgcctgttcctgcgaatcctccggcagagttttcggctacaaagtttgcttcattcatcacccagtattccacaggacaagtgagcgtggagattgaatgggagctgcagaaagaaaacagcaaacgctggaatcccgaagtgcagtatacatctaactatgcaaaatctgccaacgttgatttcactgtggacaacaatggactttatactgagcctcgccccattggcacccgttacctcacccgtcccctgtaa

SEQ ID NO: 354 - protein, 736 aa, synthetic construct
  REGION 1..736: note = source = /note="Description of Artificial Sequence: Synthetic polypeptide"
MAADGYLPDWLEDNLSEGIREWWALKPGAPKPKANQQKQDDGRGLVLPGYKYLGPGNGLDKGEPVNEADAAALEHDKAYDQQLKAGDNPYLRYNHADAEFQERLQEDTSFGGNLGRAVFQAKKRVLEPLGLVEEGAKTAPGKKRPVEQSPQEPDSSTGIGKKGQQPARKRLNFGQTGDSESVPDPQPLGEPPAAPSGVGPTTMASGGGAPMADNNEGADGVGNASGNWHCDSTWLGDRVITTSTRTWALPTYNNHLYKQISSASTGASNDNTYFGYSTPWGYFDFNRFHCHFSPRDWQRLINNNWGFRPKRLNFKLFNIQVKEVTTNDGVTTIANNLTSTVQVFSDSEYQLPYVLGSAHQGCLPPFPADVFMIPQYGYLTLNNGSQAVGRSSFYCLEYFPSQMLRTGNNFTFSYTFEDVPFHSSYAHSQSLDRLMNPLIDQYLYYLNRTQNQSGSAQNKDLLFSRGSPAGMSVQPKNWLPGPCYRQQRVSKTKTDNNNSNFTWTGASKYNLNGRESIINPGTAMASHKDDEDKFFPMSGVMIFGKESAGASNTALDNVMITDEEEIKATNPVATERFGTVAVNFQSSSTDPATGDVHVMGALPGMVWQDRDVYLQGPIWAKIPHTDGHFHPSPLMGGFGLKNPPPQILIKNTPVPANPPAEFSATKFASFITQYSTGQVSVEIEWELQKENSKRWNPEVQYTSNYAKSANVDFTVDNNGLYTEPRPIGTRYLTRPL

SEQ ID NO: 355 - DNA, 2205 bp, synthetic construct
  misc_feature 1..2205: note = source = /note="Description of Artificial Sequence: Synthetic polynucleotide"
  source 1..2205: mol_type = other DNA
atggctgctgacggttatcttccagattggctcgaggacaacctttctgaaggcattcgtgagtggtgggctctgaaacctggagtccctcaacccaaagcgaaccaacaacaccaggacaaccgtcggggtcttgtgcttccgggttacaaatacctcggacccggtaacggactcgacaaaggagagccggtcaacgaggcggacgcggcagccctcgaacacgacaaggcctacgaccagcagctcaaggccggagacaacccgtacctcaagtacaaccacgccgacgccgagttccaggagcggctcaaagaagatacgtcttttgggggcaacctcgggcgagcagtcttccaggccaaaaagaggcttcttgaacctcttggtctggttgaggaagcggctaagacggctcctggaaagaagaggcctgtagagcagtctcctcaggaaccggactcctccgcgggtattggcaaatcgggtgcacagcccgctaaaaagagactcaatttcggtcagactggcgacacagagtcagtcccagaccctcaaccaatcggagaacctcccgcagccccctcaggtgtgggatctcttacaatggcttcaggtggtggcgcaccagtggcagacaataacgaaggtgccgatggagtgggtagttcctcgggaaattggcattgcgattcccaatggctgggggacagagtcatcaccaccagcacccgaacctgggccctgcccacctacaacaaccacctctacaaacaaatttccagccaatcaggagcctcgaacgacaatcactactttggctacagcaccccttgggggtattttgacttcaacagattccactgccacttttcaccacgtgactggcagcgactcatcaacaacaactggggattccggcccaagagactcagcttcaagctcttcaacatccaggtcaaagaggttacggacaacaatggagtcaagaccatcgccaataaccttaccagcacggtccaggtcttcacggactcagactatcagctcccgtacgtgctcgggtcggctcacgagggctgcctcccgccgttcccagcggacgttttcatgattcctcagtacgggtatctgacgcttaatgatggaagccaggccgtgggtcgttcgtccttttactgcctggaatatttcccgtcgcaaatgctaagaacgggtaacaacttccagttcagctacgagtttgagaacgtacctttccatagcagctacgctcacagccaaagcctggaccgactaatgaatccactcatcgaccaatacttgtactatctctcaaagactattaacggttctggacagaatcaacaaacgctaaaattcagtgtggccggacccagcaacatggctgtccagggaagaaactacatacctggacccagctaccgacaacaacgtgtctcaaccactgtgactcaaaacaacaacagcgaatttgcttggcctggagcttcttcttgggctctcaatggacgtaatagcttgatgaatcctggacctgctatggccagccacaaagaaggagaggaccgtttctttcctttgtctggatctttaatttttggcaaacaaggaactggaagagacaacgtggatgcggacaaagtcatgataaccaacgaagaagaaattaaaactactaacccggtagcaacggagtcctatggacaagtggccacaaaccaccagagtgcccaagcacaggcgcagaccggctgggttcaaaaccaaggaatacttccgggtatggtttggcaggacagagatgtgtacctgcaaggacccatctgggccaagattcctcacacggacggcaacttccacccgtctccgctgatgggcggctttggcctgaaacatcctccgcctcagatcctgatcaagaacacgcctgtacctgcggatcctccgaccaccttcaaccagtcaaagctgaactctttcatcacgcaatacagcaccggacaggtcagcgtggaaattgaatgggagctgcagaaggaaaacagcaagcgctggaatcccgaagtgcagtatacatctaactatgcaaaatctgccaacgttgatttcactgtggacaacaatggactttatactgagcctcgccccattggcacccgttacctcacccgtcccctgtaa

SEQ ID NO: 356 - protein, 734 aa, synthetic construct
  REGION 1..734: note = source = /note="Description of Artificial Sequence: Synthetic polypeptide"
MAADGYLPDWLEDNLSEGIREWWALKPGVPQPKANQQHQDNRRGLVLPGYKYLGPGNGLDKGEPVNEADAAALEHDKAYDQQLKAGDNPYLKYNHADAEFQERLKEDTSFGGNLGRAVFQAKKRLLEPLGLVEEAAKTAPGKKRPVEQSPQEPDSSAGIGKSGAQPAKKRLNFGQTGDTESVPDPQPIGEPPAAPSGVGSLTMASGGGAPVADNNEGADGVGSSSGNWHCDSQWLGDRVITTSTRTWALPTYNNHLYKQISSQSGASNDNHYFGYSTPWGYFDFNRFHCHFSPRDWQRLINNNWGFRPKRLSFKLFNIQVKEVTDNNGVKTIANNLTSTVQVFTDSDYQLPYVLGSAHEGCLPPFPADVFMIPQYGYLTLNDGSQAVGRSSFYCLEYFPSQMLRTGNNFQFSYEFENVPFHSSYAHSQSLDRLMNPLIDQYLYYLSKTINGSGQNQQTLKFSVAGPSNMAVQGRNYIPGPSYRQQRVSTTVTQNNNSEFAWPGASSWALNGRNSLMNPGPAMASHKEGEDRFFPLSGSLIFGKQGTGRDNVDADKVMITNEEEIKTTNPVATESYGQVATNHQSAQAQAQTGWVQNQGILPGMVWQDRDVYLQGPIWAKIPHTDGNFHPSPLMGGFGLKHPPPQILIKNTPVPADPPTTFNQSKLNSFITQYSTGQVSVEIEWELQKENSKRWNPEVQYTSNYAKSANVDFTVDNNGLYTEPRPIGTRYLTRPL

SEQ ID NO: 357 - DNA, 2211 bp, synthetic construct
  misc_feature 1..2211: note = source = /note="Description of Artificial Sequence: Synthetic polynucleotide"
  source 1..2211: mol_type = other DNA
atggctgccgatggttatcttccagattggctcgaggacaacctctctgagggcattcgcgagtggtgggcgctgaaacctggagccccgaagcccaaagccaaccagcaaaagcaggacgacggccggggtctggtgcttcctggctacaagtacctcggacccttcaacggactcgacaagggggagcccgtcaacgcggcggacgcagcggccctcgagcacgacaaggcctacgaccagcagctgcaggcgggtgacaatccgtacctgcggtataaccacgccgacgccgagtttcaggagcgtctgcaagaagatacgtcttttgggggcaacctcgggcgagcagtcttccaggccaagaagtgggttctcgaacctctcggtctggttgaggaaggcgctaagacggctcctggaaagaaacgtccggtagagcagtcgccacaagagccagactcctcctcgggcatcggcaagacaggccagcagcccgctaaaaagagactcaattttggtcagactggcgactcagagtcagtccccgacccacaacctctcggagaacctccagcaacccccgctgctgtgggacctactacaatggcttcaggcggtggcgcaccaatggcagacaataacgaaggcgccgacggagtgggtaatgcctcaggaaattggcattgcgattccacatggctgggcgacagagtcatcaccaccagcacccgcacctgggccttgcccacctacaataaccacctctacaagcaaatctccagtgcttcaacgggggccagcaacgacaaccactacttcggctacagcaccccctgggggtattttgatttcaacagattccactgccatttctcaccacgtgactggcagcgactcatcaacaacaattggggattccggcccaagagactcaacttcaagctcttcaacatccaagtcaaggaggtcacgacgaatgatggcgtcacaaccatcgctaataaccttaccagcacggttcaagtcttctcggactcggagtaccagcttccgtacgtcctcggctctgcgcaccagggctgcctccctccgttcccggcggacgtgttcatgattccgcaatacggctacctgacgctcaacaatggcagccaagccgtgggacgttcatccttttactgcctggaatatttcccttctcagatgctgagaacgggcaacaactttaccttcagctacacctttgaggaagtgcctttccacagcagctacgcgcacagccagagcctggaccggctgatgaatcctctcatcgaccaatacctgtattacctgaacagaactcaaaatcagtccggaagtgcccaaaacaaggacttgctgtttagccgtgggtctccagctggcatgtctgttcagcccaaaaactggctacctggaccctgttatcggcagcagcgcgtttctaaaacaaaaacagacaacaacaacagcaattttacctggactggtgcttcaaaatataacctcaatgggcgtgaatccatcatcaaccctggcactgctatggcctcacacaaagacgacgaagacaagttctttcccatgagcggtgtcatgatttttggaaaggagagcgccggagcttcaaacactgcattggacaatgtcatgatcaccgacgaagaggaaatcaaagccactaaccccgtggccaccgaaagatttgggactgtggcagtcaatctccagagcagcagcacagaccctgcgaccggagatgtgcatgttatgggagccttacctggcatggtgtggcaagatagagacgtgtacctgcagggtcccatttgggccaaaattcctcacacagatggacactttcacccgtctcctcttatgggcggctttggactcaagaacccgcctcctcagatcctcatcaaaaacacgcctgttcctgcgaatcctccggcggagttttcagctacaaagtttgcttcattcatcacccaatactccacaggacaagtgagtgtggaaattgaatgggagctgcagaaagaaaacagcaagcgctggaatcccgaagtgcagtacacatccaattatgcaaaatctgccaacgttgattttactgtggacaacaatggactttatactgagcctcgccccattggcacccgttacctcacccgtcccctgtaa

SEQ ID NO: 358 - protein, 736 aa, synthetic construct
  REGION 1..736: note = source = /note="Description of Artificial Sequence: Synthetic polypeptide"
MAADGYLPDWLEDNLSEGIREWWALKPGAPKPKANQQKQDDGRGLVLPGYKYLGPFNGLDKGEPVNAADAAALEHDKAYDQQLQAGDNPYLRYNHADAEFQERLQEDTSFGGNLGRAVFQAKKWVLEPLGLVEEGAKTAPGKKRPVEQSPQEPDSSSGIGKTGQQPAKKRLNFGQTGDSESVPDPQPLGEPPATPAAVGPTTMASGGGAPMADNNEGADGVGNASGNWHCDSTWLGDRVITTSTRTWALPTYNNHLYKQISSASTGASNDNHYFGYSTPWGYFDFNRFHCHFSPRDWQRLINNNWGFRPKRLNFKLFNIQVKEVTTNDGVTTIANNLTSTVQVFSDSEYQLPYVLGSAHQGCLPPFPADVFMIPQYGYLTLNNGSQAVGRSSFYCLEYFPSQMLRTGNNFTFSYTFEEVPFHSSYAHSQSLDRLMNPLIDQYLYYLNRTQNQSGSAQNKDLLFSRGSPAGMSVQPKNWLPGPCYRQQRVSKTKTDNNNSNFTWTGASKYNLNGRESIINPGTAMASHKDDEDKFFPMSGVMIFGKESAGASNTALDNVMITDEEEIKATNPVATERFGTVAVNLQSSSTDPATGDVHVMGALPGMVWQDRDVYLQGPIWAKIPHTDGHFHPSPLMGGFGLKNPPPQILIKNTPVPANPPAEFSATKFASFITQYSTGQVSVEIEWELQKENSKRWNPEVQYTSNYAKSANVDFTVDNNGLYTEPRPIGTRYLTRPL

SEQ ID NO: 359 - DNA, 2214 bp, synthetic construct
  misc_feature 1..2214: note = source = /note="Description of Artificial Sequence: Synthetic polynucleotide"
  source 1..2214: mol_type = other DNA
atggctgccgatggttatcttccagattggctcgaggacaaccttagtgaaggaattcgcgagtggtgggctttgaaacctggagcccctcaacccaaggcaaatcaacaacatcaagacaacgctcgaggtcttgtgcttccgggttacaaataccttggacccggcaacggactcgacaagggggagccggtcaacgcagcagacgcggcggccctcgagcacgacaaggcctacgaccagcagctgcaggcgggtgacaatccgtacctgcggtataaccacgccgacgccgagtttcaggagcgtctgcaagaagatacgtcttttgggggcaaccttggcagagcagtcttccaggccaaaaagaggatccttgagcctcttggtctggttgaggaagcagctaaaacggctcctggaaagaagaggcctgtagatcagtctcctcaggaaccggactcatcatctggtgttggcaaatcgggcaaacagcctgccagaaaaagactaaatttcggtcagactggcgactcagagtcagtcccagaccctcaacctctcggagaaccaccagcagcccccacaagtttgggatctaatacaatggcttcaggcggtggcgcaccaatggcagacaataacgagggtgccgatggggtgggtagttcctcgggaaattggcattgcgattcccaatggctgggggacagagtcatcaccaccagcacccgaacctgggccctgcccacctacaacaatcacctctacaagcaaatctccaacgggacatcgggaggagccaccaacgacaacacctacttcggctacagcaccccctgggggtattttgactttaacagattccactgccacttttcaccacgtgactggcagcgactcatcaacaacaactggggattccggcccaagagactcagcttcaagctcttcaacatccaggtcaaggaggtcacgcagaatgaaggcaccaagaccatcgccaataacctcaccagcaccatccaggtgtttacggactcggagtaccagctgccgtacgttctcggctcggcgcaccagggctgcctccctccgttcccggcggacgtcttcatggtgccacagtatggatacctgacgctcaacaatggcagccaagccgtgggacgttcatccttttactgcctggaatatttcccttctcagatgctgagaacgggcaacaactttaccttcagctacacctttgaggaagtgcctttccacagcagctacgcgcacagccagagcttggaccggctgatgaatcctctgattgaccagtacctgtactacttgtctcggactcaaacaacaggaggcacggcaaatacgcagactctgggcttcagccaaggtgggcctaatacaatggccaatcaggcaaagaactggctgccaggaccctgttaccgccaacaacgcgtctcaacgacaaccgggcaaaacaacaatagcaactttgcctggactgctgggaccaaataccatctgaatggaagaaattcattggctaatcctggcatcgctatggcaacacacaaagacgacgaggagcgtttttttcccagtaacgggatcctgatttttggcaaacaaaatgctgccagagacaatgcggattacagcgatgtcatgctcaccagcgaggaagaaatcaaaaccactaaccctgtggctacagaggaatacggtatcgtggcagataacttgcagcagcaaaacacggctcctcaaattggaactgtcaacagccagggggacttacccggtatggtctggcagaaccgggacgtgtacctgcagggtcccatctgggccaagattcctcacacggacggcaacttccacccgtctccgctgatgggcggctttggcctgaaacatcctccgcctcagatcctgatcaagaacacgcctgtacctgcggatcctccgaccaccttcaaccagtcaaagctgaactctttcatcacgcaatacagcaccggacaggtcagcgtggagatcgagtgggagctgcagaaggaaaacagcaagcgctggaacccggagatccagtacacttccaactattacaagtctaataatgttgaatttgctgttaatactgaaggtgtatatagtgaaccccgccccattggcaccagatacctgactcgtaatctgtaa

SEQ ID NO: 360 - protein, 737 aa, synthetic construct
  REGION 1..737: note = source = /note="Description of Artificial Sequence: Synthetic polypeptide"
MAADGYLPDWLEDNLSEGIREWWALKPGAPQPKANQQHQDNARGLVLPGYKYLGPGNGLDKGEPVNAADAAALEHDKAYDQQLQAGDNPYLRYNHADAEFQERLQEDTSFGGNLGRAVFQAKKRILEPLGLVEEAAKTAPGKKRPVDQSPQEPDSSSGVGKSGKQPARKRLNFGQTGDSESVPDPQPLGEPPAAPTSLGSNTMASGGGAPMADNNEGADGVGSSSGNWHCDSQWLGDRVITTSTRTWALPTYNNHLYKQISNGTSGGATNDNTYFGYSTPWGYFDFNRFHCHFSPRDWQRLINNNWGFRPKRLSFKLFNIQVKEVTQNEGTKTIANNLTSTIQVFTDSEYQLPYVLGSAHQGCLPPFPADVFMVPQYGYLTLNNGSQAVGRSSFYCLEYFPSQMLRTGNNFTFSYTFEEVPFHSSYAHSQSLDRLMNPLIDQYLYYLSRTQTTGGTANTQTLGFSQGGPNTMANQAKNWLPGPCYRQQRVSTTTGQNNNSNFAWTAGTKYHLNGRNSLANPGIAMATHKDDEERFFPSNGILIFGKQNAARDNADYSDVMLTSEEEIKTTNPVATEEYGIVADNLQQQNTAPQIGTVNSQGDLPGMVWQNRDVYLQGPIWAKIPHTDGNFHPSPLMGGFGLKHPPPQILIKNTPVPADPPTTFNQSKLNSFITQYSTGQVSVEIEWELQKENSKRWNPEIQYTSNYYKSNNVEFAVNTEGVYSEPRPIGTRYLTRNL

SEQ ID NO: 361 - DNA, 2205 bp, synthetic construct
  misc_feature 1..2205: note = source = /note="Description of Artificial Sequence: Synthetic polynucleotide"
  source 1..2205: mol_type = other DNA
atggctgctgacggttatcttccagattggctcgaggacaacctttctgaaggcattcgtgagtggtgggctctgaaacctggagtccctcaacccaaagcgaaccaacaacaccaggacaactgtcggggtcttgtgcttccgggttacaaatacctcggacccggtaacggactcgacaaaggagagccggtcaacgaggcggacgcggcagccctcgaacacgacaaggcctacgaccagcagctcaaggccggagacaacccgtacctcaagtacaaccacgccgacgccgagttccaggagcggctcaaagaagatacgtcttttgggggcaacctcgggcgagcagtcttccagaccaaaaagaggcttcttgaacctcttggtctggttgaggaagcggctaagacggctcctggaaagaagaggcctgtagagcagtctcctcaggaaccggactcctccgcgggtattggcaaatcgggtgcacagcccgctaaaaagagactcaatttcggtcagactggcgacacagagtcagtcccagaccctcaaccaatcggagaacctcccgcagccccctcaggtgtgggatctcttacaatggcttcaggtggtggcgcaccagtggcagacaataacgaaggtgccgatggagtgggtagttcctcgggaaattggcattgcgattcccaatggctgggggacagagtcatcaccaccagcacccgaacctgggccctgcccacctacaacaaccacctctacaaacaaatttccagccaatcaggagcctcgaacgacaatcactactttggctacagcaccccttgggggtattttgacttcaacagattccactgccacttttcaccacgtgactggcagcgactcatcaacaacaactggggattccggcccaagagactcagcttcaagctcttcaacatccaggtcaaagaggttacggacaacaatggagtcaagaccatcgccaataaccttaccagcacggtccaggtcttcacggactcagactatcagctcccgtacgtgctcgggtcggctcacgagggctgcctcccgccgttcccagcggacgttttcatgattcctcagtacgggtatctgacgcttaatgatggaagccaggccgtgggtcgttcgtccttttactgcctggaatatttcccgtcgcaaatgctaagaacgggtaacaacttccagttcagctacgagtttgagaacgtacctttccatagcagctacgctcacagccaaagcctggaccgactaatgaatccactcatcgaccaatacttgtactatctctcaaagactattaacggttctggacagaatcaacaaacgctaaaattcagtgtggccggacccagcaacatggctgtccagggaagaaactacatacctggacccagctaccgacaacaacgtgtctcaaccactgtgactcaaaacaacaacagcgaatttgcttggcctggagcttcttcttgggctctcaatggacgtaatagcttgatgaatcctggacctgctatggccagccacaaagaaggagaggaccgtttctttcctttgtctggatctttaatttttggcaaacaaggaactggaagagacaacgtggatgcggacaaagtcatgataaccaacgaagaagaaattaaaactactaacccggtagcaacggagtcctatggacaagtggccacaaaccaccagagtgcccaagcacaggcgcagaccggctgggttcaaaaccaaggaatacttccgggtatggtttggcaggacagagatgtgtacctgcaaggacccatctgggccaagattcctcacacggacggcaacttccacccgtctccgctgatgggcggctttggcctgaaacatcctccgcctcagatcctgatcaagaacacgcctgttcctgcgaatcctccggcggagttttcagctacaaagtttgcttcattcatcacccagtactccacaggacaagtgagtgtggaaattgaatgggagctgcagaaagaaaacagcaagcgctggaatcccgaagtgcagtacacatccaattatgcaaaatctgccaacgttgattttactgtggacaacaatggactttatactgagcctcgccccattggcacccgttaccttaccaaacctctgtaa

SEQ ID NO: 362 - protein, 734 aa, synthetic construct
  REGION 1..734: note = source = /note="Description of Artificial Sequence: Synthetic polypeptide"
MAADGYLPDWLEDNLSEGIREWWALKPGVPQPKANQQHQDNCRGLVLPGYKYLGPGNGLDKGEPVNEADAAALEHDKAYDQQLKAGDNPYLKYNHADAEFQERLKEDTSFGGNLGRAVFQTKKRLLEPLGLVEEAAKTAPGKKRPVEQSPQEPDSSAGIGKSGAQPAKKRLNFGQTGDTESVPDPQPIGEPPAAPSGVGSLTMASGGGAPVADNNEGADGVGSSSGNWHCDSQWLGDRVITTSTRTWALPTYNNHLYKQISSQSGASNDNHYFGYSTPWGYFDFNRFHCHFSPRDWQRLINNNWGFRPKRLSFKLFNIQVKEVTDNNGVKTIANNLTSTVQVFTDSDYQLPYVLGSAHEGCLPPFPADVFMIPQYGYLTLNDGSQAVGRSSFYCLEYFPSQMLRTGNNFQFSYEFENVPFHSSYAHSQSLDRLMNPLIDQYLYYLSKTINGSGQNQQTLKFSVAGPSNMAVQGRNYIPGPSYRQQRVSTTVTQNNNSEFAWPGASSWALNGRNSLMNPGPAMASHKEGEDRFFPLSGSLIFGKQGTGRDNVDADKVMITNEEEIKTTNPVATESYGQVATNHQSAQAQAQTGWVQNQGILPGMVWQDRDVYLQGPIWAKIPHTDGNFHPSPLMGGFGLKHPPPQILIKNTPVPANPPAEFSATKFASFITQYSTGQVSVEIEWELQKENSKRWNPEVQYTSNYAKSANVDFTVDNNGLYTEPRPIGTRYLTKPL

SEQ ID NO: 363 - DNA, 2211 bp, synthetic construct
  misc_feature 1..2211: note = source = /note="Description of Artificial Sequence: Synthetic polynucleotide"
  source 1..2211: mol_type = other DNA
atggctgccgatggttatcttccagattggctcgaggacaacctctctgagggcattcgcgagtggtgggacttgaaacctggagcccctaaacccaaggcaaatcaacaacatcaggacaacgctcgaggtcttgtgcttccgggttacaaataccttggacccggcaacggactcgacaagggggagccggtcaacgcagcagacgcggcggccctcgagcacgacaaggcctacgaccagcagctcaaggccggagacaacccgtacctcaagtacaaccacgccgacgccgagttccaggagcggctcaaagaagatacgtcttttgggggcaacctcgggcgagcagtcttccaggccaaaaagaggcttcttgaacctcttggtctggttgaggaagcggctaagacggctcctggaaagaagagaccggtagagccatcaccccagcgttctccagactcctctacgggcatcggcaagaaaggccaacagcccgctaaaaagagactcaattttggtcagactggcgactcagagtcagtccccgacccacaacctctcggagaacctccagcaacccccgctgctgtgggacctactacaatggcttcaggcggtggcgcaccaatggcagacaataacgagggtgccgatggagtgggtaattcctcaggaaattggcattgcgattcccaatggctgggcgacagagtcatcaccaccagcaccagaacctgggccctgcccacttacaacaaccatctctacaagcaaatctccagccaatcaggagcttcaaacgacaaccactactttggctacagcaccccttgggggtattttgactttaacagattccactgccacttttcaccacgtgactggcaaagactcatcaacaacaactggggattccgacccaagagactcaacttcaagctcttcaacatccaagtcaaggaggtcacgacgaatgatggcgtcacgaccatcgctaataaccttaccagcacggttcaagtcttctcggactcggagtaccagttgccgtacgtcctcggctctgcgcaccagggctgcctccctccgttcccggcggacgtgttcatgattccgcagtacggctacctaacgctcaacaatggcagccaagccgtgggacgttcatccttttactgcctggaatatttcccttctcagatgctgagaacgggcaacaactttaccttcagctacacttttgaggacgttcctttccacagcagctacgctcacagccagagtctggaccgtctcatgaatcctctcatcgaccagtacctgtattacttgagcagaacaaacactccaagtggaaccaccacgcagtcaaggcttcagttttctcaggccggagcgagtgacattcgggaccagtctaggaactggcttcctggaccctgttaccgccagcagcgcgtttctaaaacaaaaacagacaacaacaacagcaattttacctggactggtgcttcaaaatataaccttaatgggcgtgaatctataatcaaccctggcactgctatggcctcacacaaagacgacgaagacaagttctttcccatgagcggtgtcatgatttttggaaaagagagcgccggagcttcaaacactgcattggacaatgtcatgatcacagacgaagaggaaatcaaagccactaaccccgtggccaccgaaagatttgggactgtggcagtcaatctccagagcagcagcacagaccctgcgaccggagatgtgcatgttatgggagcattacctggcatggtgtggcaagatagagacgtgtacctgcagggtcccatttgggccaaaattcctcacacagatggacactttcacccgtctcctcttatgggcggctttggactcaagaacccgcctcctcagatcctcatcaaaaacacgcctgttcctgcgaatcctccggcggagttttcagctacaaagtttgcttcattcatcacccaatactccacaggacaagtgagtgtggaaattgaatgggagctgcagaaagaaaacagcaagcgctggaatcccgaagtgcagtacacatccaattatgcaaaatctgccaacgttgattttactgtggacaacaatggactttatactgagcctcgccccattggcacccgttaccttacccgtcccctgtaa

SEQ ID NO: 364 - protein, 736 aa, synthetic construct
  REGION 1..736: note = source = /note="Description of Artificial Sequence: Synthetic polypeptide"
MAADGYLPDWLEDNLSEGIREWWDLKPGAPKPKANQQHQDNARGLVLPGYKYLGPGNGLDKGEPVNAADAAALEHDKAYDQQLKAGDNPYLKYNHADAEFQERLKEDTSFGGNLGRAVFQAKKRLLEPLGLVEEAAKTAPGKKRPVEPSPQRSPDSSTGIGKKGQQPAKKRLNFGQTGDSESVPDPQPLGEPPATPAAVGPTTMASGGGAPMADNNEGADGVGNSSGNWHCDSQWLGDRVITTSTRTWALPTYNNHLYKQISSQSGASNDNHYFGYSTPWGYFDFNRFHCHFSPRDWQRLINNNWGFRPKRLNFKLFNIQVKEVTTNDGVTTIANNLTSTVQVFSDSEYQLPYVLGSAHQGCLPPFPADVFMIPQYGYLTLNNGSQAVGRSSFYCLEYFPSQMLRTGNNFTFSYTFEDVPFHSSYAHSQSLDRLMNPLIDQYLYYLSRTNTPSGTTTQSRLQFSQAGASDIRDQSRNWLPGPCYRQQRVSKTKTDNNNSNFTWTGASKYNLNGRESIINPGTAMASHKDDEDKFFPMSGVMIFGKESAGASNTALDNVMITDEEEIKATNPVATERFGTVAVNLQSSSTDPATGDVHVMGALPGMVWQDRDVYLQGPIWAKIPHTDGHFHPSPLMGGFGLKNPPPQILIKNTPVPANPPAEFSATKFASFITQYSTGQVSVEIEWELQKENSKRWNPEVQYTSNYAKSANVDFTVDNNGLYTEPRPIGTRYLTRPL

SEQ ID NO: 365 - DNA, 2214 bp, synthetic construct; identical to SEQ ID NO: 337
  misc_feature 1..2214: note = source = /note="Description of Artificial Sequence: Synthetic polynucleotide"
  source 1..2214: mol_type = other DNA

SEQ ID NO: 366 - protein, 737 aa, synthetic construct; identical to SEQ ID NO: 338
  REGION 1..737: note = source = /note="Description of Artificial Sequence: Synthetic polypeptide"

SEQ ID NO: 367 - DNA, 2205 bp, synthetic construct
  misc_feature 1..2205: note = source = /note="Description of Artificial Sequence: Synthetic polynucleotide"
  source 1..2205: mol_type = other DNA
atggctgctgacggttatcttccagattggctcgaggacaacctttctgaaggcattcgtgagtggtgggctctgaaacctggagtccctcaacccaaagcgaaccaacaacaccaggacaaccgtcggggtcttgtgcttccgggttacaaatacctcggacccggtaacggactcgacaaaggagagccggtcaacgaggcggacgcggcagccctcgaacacgacaaggcctacgaccagcagctcaaggccggagacaacccgtacctcaagtacaaccacgccgacgccgagttccaggagcggctcaaagaagatacgtcttttgggggcaacctcgggcgagcagtcttccaggccaaaaagaggcttcttgaacctcttggtctggttgaggaagcggctaagacggctcctggaaagaagaggcctgtagagcagtctcctcaggaaccggactcctccgcgggtattggcaaatcgggtgcacagcccgctaaaaagagactcaatttcggtcagactggcgacacagagtcagtcccagaccctcaaccaatcggagaacctcccgcagccccctcaggtgtgggatctcttacaatggcttcaggtggtggcgcaccagtggcagacaataacgaaggtgccgatggagtgggtagttcctcgggaaattggcattgcgattcccaatggctgggggacagagtcatcaccaccagcacccgaacctgggccctgcccacctacaacaaccacctctacaaacaaatttccagccaatcaggagcctcgaacgacaatcactactttggctacagcaccccttgggggtattttgacttcaacagattccactgccacttttcaccacgtgactggcagcgactcatcaacaacaactggggattccggcccaagagactcagcttcaagctcttcaacatccaggtcaaagaggttacggacaacaatggagtcaagaccatcgccaataaccttaccagcacggtccaggtcttcacggactcagactatcagctcccgtacgtgctcgggtcggctcacgagggctgcctcccgccgttcccagcggacgttttcatgattcctcagtacgggtatctgacgcttaatgatggaagccaggccgtgggtcgttcgtccttttactgcctggaatatttcccgtcgcaaatgctaagaacgggtaacaacttccagttcagctacgagtttgagaacgtacctttccatagcagctacgctcacagccaaagcctggaccgactaatgaatccactcatcgaccaatacttgtactatctctcaaagactattaacggttctggacagaatcaacaaacgctaaaattcagtgtggccggacccagcaacatggctgtccagggaagaaactacatacctggacccagctaccgacaacaacgtgtctcaaccactgtgactcaaaacaacaacagcgaatttgcttggcctggagcttcttcttgggctctcaatggacgtaatagcttgatgaatcctggacctgctatggccagccacaaagaaggagaggaccgtttctttcctttgtctggatctttaatttttggcaaacaaggaactggaagagacaacgtggatgcggacaaagtcatgataaccaacgaagaagaaattaaaactactaacccggtagcaacggagtcctatggacaagtggccacaaaccaccagagtgcccaagcacaggcgcagaccggctgggttcaaaaccaaggaatacttccgggtatggtttggcaggacagagatgtgtacctgcaaggacccatttgggccaaaattcctcacacggacggcaactttcacccttctccgctgatgggagggtttggaatgaaacacccgcctcctcagatcctcatcaaaaacacacctgtacctgcggatcctccaacggccttcaacaaggacaagctgaactctttcatcacccagtattctactggccaagtcagcgtggagatcgagtgggagctgcagaaggaaaacagcaagcgctggaaccccgagatccagtacacctccaactactacaaatctacaagtgtggactttgctgttaatacagaaggcgtgtactctgaaccccgccccattggcacccgttacctcacccgtaatctgtaa

SEQ ID NO: 368 - protein, 734 aa, synthetic construct
  REGION 1..734: note = source = /note="Description of Artificial Sequence: Synthetic polypeptide"
MAADGYLPDWLEDNLSEGIREWWALKPGVPQPKANQQHQDNRRGLVLPGYKYLGPGNGLDKGEPVNEADAAALEHDKAYDQQLKAGDNPYLKYNHADAEFQERLKEDTSFGGNLGRAVFQAKKRLLEPLGLVEEAAKTAPGKKRPVEQSPQEPDSSAGIGKSGAQPAKKRLNFGQTGDTESVPDPQPIGEPPAAPSGVGSLTMASGGGAPVADNNEGADGVGSSSGNWHCDSQWLGDRVITTSTRTWALPTYNNHLYKQISSQSGASNDNHYFGYSTPWGYFDFNRFHCHFSPRDWQRLINNNWGFRPKRLSFKLFNIQVKEVTDNNGVKTIANNLTSTVQVFTDSDYQLPYVLGSAHEGCLPPFPADVFMIPQYGYLTLNDGSQAVGRSSFYCLEYFPSQMLRTGNNFQFSYEFENVPFHSSYAHSQSLDRLMNPLIDQYLYYLSKTINGSGQNQQTLKFSVAGPSNMAVQGRNYIPGPSYRQQRVSTTVTQNNNSEFAWPGASSWALNGRNSLMNPGPAMASHKEGEDRFFPLSGSLIFGKQGTGRDNVDADKVMITNEEEIKTTNPVATESYGQVATNHQSAQAQAQTGWVQNQGILPGMVWQDRDVYLQGPIWAKIPHTDGNFHPSPLMGGFGMKHPPPQILIKNTPVPADPPTAFNKDKLNSFITQYSTGQVSVEIEWELQKENSKRWNPEIQYTSNYYKSTSVDFAVNTEGVYSEPRPIGTRYLTRNL

SEQ ID NO: 369 - DNA, 2217 bp, synthetic construct
  misc_feature 1..2217: note = source = /note="Description of Artificial Sequence: Synthetic polynucleotide"
  source 1..2217: mol_type = other DNA
atggctgccgatggttatcttccagattggctcgaggacaacctctctgagggcattcgcgagtggtgggcgctgaaacctggagccccgaagcccaaagccaaccagcaaaagcaggacgacggccggggtctggtgcttcctggctacaagtacctcggacccttcaacggactcgacaagggggagcccgtcaacgcggcggacgcagcggccctcgagcacgacaaggcctacgaccagcagctgcaggcgggtgacaatccgtacctgcggtataaccacgccgacgccgagtttcaggagcgtctgcaagaagatacgtcttttgggggcaacctcgggcgagcagtcttccaggccaagaagcgggttctcgaacctctcggtctggttgaggaaggcgctaagacggctcctggaaagaagagaccggtagagccatcaccccagcgttctccagactcctctacgggcatcggcaagaaaggccaacagcccgccagaaaaagactcaattttggtcagactggcgactcagagtcagttccagaccctcaacctctcggagaacctccagcagcgccctctggtgtgggacctaatacaatggctgcaggcggtggcgcaccaatggcagacaataacgaaggcgccgacggagtgggtagttcctcgggaaattggcattgcgattccacatggctgggcgacagagtcatcaccaccagcacccgaacctgggccctgcccacctacaacaaccacctctacaagcaaatctccaacgggacatcgggaggagccaccaacgacaacacctacttcggctacagcaccccctgggggtattttgactttaacagattccactgccacttttcaccacgtgactggcagcgactcatcaacaacaactggggattccggcccaagagactcagcttcaagctcttcaacatccaggtcaaggaggtcacgcagaatgaaggcaccaagaccatcgccaataacctcaccagcaccatccaggtgtttacggactcggagtaccagctgccgtacgttctcggctctgcccaccagggctgcctgcctccgttcccggcggacgtgttcatgattccccagtacggctacctaacactcaacaacggtagtcaggccgtgggacgctcctccttctactgcctggaatactttccttcgcagatgctgagaaccggcaacaacttccagtttacttacaccttcgaggacgtgcctttccacagcagctacgcccacagccagagcttggaccggctgatgaatcctctgattgaccagtacctgtactacttgtctcggactcaaacaacaggaggcacggcaaatacgcagactctgggcttcagccaaggtgggcctaatacaatggccaatcaggcaaagaactggctgccaggaccctgttaccgccaacaacgcgtctcaacgacaaccgggcaaaacaacaatagcaactttgcctggactgctgggaccaaataccatctgaatggaagaaattcattggctaatcctggcatcgctatggcaacacacaaagacgacgaggagcgtttttttcccagtaacgggatcctgatttttggcaaacaaaatgctgccagagacaatgcggattacagcgatgtcatgctcaccagcgaggaagaaatcaaaaccactaaccctgtggctacagaggaatacggtatcgtggcagataacttgcagcagcaaaacacggctcctcaaattggaactgtcaacagccagggggccttacccggtatggtctggcagaaccgggacgtgtacctgcagggtcccatctgggccaagattcctcacacggacggcaacttccacccctctcccctcatgggtggattcggacttaaacatcctccgcctcagatcctgatcaagaacacgcctgtacctgcggatcctccgaccaccttcaaccagtcaaagctgaactctttcatcacgcaatacagcaccggacaggtcagcgtggaaattgaatgggagctgcagaaggaaaacagcaagcgctggaaccccgagatccagtacacctccaactactacaaatctacaagtgtggactttgctgttaatacagaaggcgtgtactctgaaccccgccccattggcacccgttacctcacccgtaatctgtaa

SEQ ID NO: 370 - protein, 738 aa, synthetic construct; identical to SEQ ID NO: 116
  REGION 1..738: note = source = /note="Description of Artificial Sequence: Synthetic polypeptide"

SEQ ID NO: 371 - DNA, 2211 bp, synthetic construct
  misc_feature 1..2211: note = source = /note="Description of Artificial Sequence: Synthetic polynucleotide"
  source 1..2211: mol_type = other DNA
atggctgctgacggttatcttccagattggctcgaggacaacctttctgaaggcattcgagagtggtgggcgctgcaacctggagcccctaaacccaaggcaaatcaacaacatcaggacaacgctcggggtcttgtgcttccgggttacaaatacctcggacccggcaacggactcgacaagggggaacccgtcaacgcagcggacgcggcagccctcgagcacgacaaggcctacgaccagcagctcaaggccggtgacaacccctacctcaagtacaaccacgccgacgccgagttccaggagcggctcaaagaagatacgtcttttgggggcaacctcgggcgagcagtcttccaggccaaaaagaggcttcttgaacctcttggtctggttgaggaagcggctaagacggctcctggaaagaagaggcctgtagatcagtctcctcaggaaccggactcatcatctggtgttggcaaatcgggcaaacagcctgccagaaaaagactaaatttcggtcagactggcgactcagagtcagtcccagaccctcaacctctcggagaaccaccagcagcccccacaagtttgggatctaatacaatggcttcaggcggtggcgcaccaatggcagacaataacgagggtgccgatggagtgggtaattcctcaggaaattggcattgcgattcccaatggctgggcgacagagtcatcaccaccagcaccagaacctgggccctgcccacttacaacaaccatctctacaagcaaatctccagccaatcaggagcttcaaacgacaaccactactttggctacagcaccccttgggggtattttgactttaacagattccactgccacttctcaccacgtgactggcagcgactcattaacaacaactggggattccggcccaagaaactcagcttcaagctcttcaacatccaagttaaagaggtcacgcagaacgatggcacgacgactattgccaataaccttaccagcacggttcaggtgtttacggactcggagtatcagctcccgtacgtgctcgggtcggcgcaccaaggctgtctcccgccgtttccagcggacgtcttcatggtccctcagtatggatacctcaccctgaacaacggaagtcaagcggtgggacgctcatccttttactgcctggagtacttcccttcgcagatgctaaggactggaaataacttccaattcagctataccttcgaggatgtaccttttcacagcagctacgctcacagccagagtttggatcgcttgatgaatcctcttattgatcagtatctgtactacctgaacagaacgcaaggaacaacctctggaacaaccaaccaatcacggctgctttttagccaggctgggcctcagtctatgtctttgcaggccagaaattggctacctgggccctgctaccggcaacagagactttcaaagactgctaacgacaacaacaacagtaactttccttggacagcggccagcaaatatcatctcaatggccgcgactcgctggtgaatccaggaccagctatggccagtcacaaggacgatgaagaaaaatttttccctatgcacggcaatctaatatttggcaaagaagggacaacggcaagtaacgcagaattagataatgtaatgattacggatgaagaagagattcgtaccaccaatcctgtggcaacagagcagtatggaactgtggcaaataacttgcagagctcaaatacagctcccacgactagaactgtcaatgatcagggggccttacctggcatggtgtggcaagatcgtgacgtgtaccttcaaggacctatctgggcaaagattcctcacacggatggacactttcatccttctcctctgatgggaggctttggactgaaacatccgcctcctcaaatcatgatcaaaaatactccggtaccggcaaatcctccgacgactttcagcccggccaagtttgcttcatttatcactcagtactccactggacaggtcagcgtggaaattgagtgggagctacagaaagaaaacagcaaacgttggaatccagagattcagtacacttccaactacaacaagtctgttaatgtggactttactgtagacactaatggtgtttatagtgaacctcgccccattggcacccgttaccttacccgtcccctgtaa

SEQ ID NO: 372 - protein, 736 aa, synthetic construct; identical to SEQ ID NO: 342
  REGION 1..736: note = source = /note="Description of Artificial Sequence: Synthetic polypeptide"

SEQ ID NO: 373 - DNA, 2211 bp, synthetic construct; identical to SEQ ID NO: 341
  misc_feature 1..2211: note = source = /note="Description of Artificial Sequence: Synthetic polynucleotide"
  source 1..2211: mol_type = other DNA

SEQ ID NO: 374 - protein, 736 aa, synthetic construct; identical to SEQ ID NO: 342
  REGION 1..736: note = source = /note="Description of Artificial Sequence: Synthetic polypeptide"

SEQ ID NO: 375 - DNA, 2211 bp, synthetic construct
  misc_feature 1..2211: note = source = /note="Description of Artificial Sequence: Synthetic polynucleotide"
  source 1..2211: mol_type = other DNA
atggctgctgacggttatcttccagattggctcgaggacaacctttctgaaggcattcgtgagtggtgggctctgaaacctggagtccctcaacccaaagcgaaccaacaacaccaggacaaccgtcggggtcttgtgcttccgggttacaaatacctcggacccggtaacggactcgacaaaggagagcccgtcaacgcggcggatgcagcggccctcgagcacgacaaggcctacgaccagcagctcaaagcgggtgacaatccgtacctgcggtataaccacgccgacgccgagtttcaggagcgtctgcaagaagatacgtcttttgggggcaacctcgggcgagcagtcttccaggccaagaagagggttctcgaaccttttggtctggttgaggaaggtgctaagacggctcctggaaagaaacgtccggtagagcagtcgccacaagagccagactcctcctcgggcatcggcaagacaggccagcagcccgctaaaaagagactcaattttggtcagactggcgactcagagtcagtccccgacccacaacctctcggagaacctccagcaacccccgctgctgtgggacctactacaatggcttcaggcggtggcgcaccaatggcagacaataacgaaggcgccgacggagtgggtaatgcctcaggaaattggcattgcgattccacatggctgggcgacagagtcatcaccaccagcacccgcacctgggccttgcccacctacaataaccacctctacaagcaaatctccagtgcttcaacgggggccagcaacgacaaccactacttcggctacagcaccccctgggggtattttgatttcaacagattccactgccatttctcaccacgtgactggcagcgactcatcaacaacaattggggattccggcccaagagactcaacttcaagctcttcaacatccaagtcaaggaggtcacgacgaatgatggcgtcacgaccatcgctaataaccttaccagcacggttcaagtcttctcggactcggagtaccagcttccgtacgtcctcggctctgcgcaccagggctgcctccctccgttcccggcggacgtgttcatgattccgcaatacggctacctgacgctcaacaatggcagccaagccgtgggacgttcatccttttactgcctggaatatttcccttctcagatgctgagaacgggcaacaactttaccttcagctacacctttgaggaagtgcctttccacagcagctacgcgcacagccagagcctggaccggctgatgaatcctctcatcgaccaatacctgtattacctgaacagaactcaaaatcagtccggaagtgcccaaaacaaggacttgctgtttagccgtgggtctccagctggcatgtctgttcagcccaaaaactggctacctggaccctgttatcggcagcagcgcgtttctaaaacaaaaacagacaacaacaacagcaattttacctggactggtgcttcaaaatataacctcaatgggcgtgaatccatcatcaaccctggcactgctatggcctcacacaaagacgacgaagacaagttctttcccatgagcggtgtcatgatttttggaaaagagagcgccggagcttcaaacactgcattggacaatgtcatgattacagacgaagaggaaattaaagccactaaccctgtggccaccgaaagatttgggaccgtggcagtcaatttccagagcagcagcacagaccctgcgaccggagatgtgcatgttatgggagccttacctggaatggtgtggcaagacagagacgtatacctgcagggtcctatttgggccaaaattcctcacacggatggacactttcacccgtctcctctcatgggcggctttggacttaagcacccgcctcctcagatcctcatcaaaaacacgcctgttcctgcgaatcctccggcagagttttcggctacaaagtttgcttcattcatcacccagtattccacaggacaagtgagcgtggagattgaatgggagctgcagaaagaaaacagcaaacgctggaatcccgaagtgcagtatacatctaactatgcaaaatctgccaacgttgatttcactgtggacaacaatggactttatactgagcctcgccccattggcacccgttacctcacccgtcccctgtaa

SEQ ID NO: 376 - protein, 736 aa, synthetic construct
  REGION 1..736: note = source = /note="Description of Artificial Sequence: Synthetic polypeptide"
MAADGYLPDWLEDNLSEGIREWWALKPGVPQPKANQQHQDNRRGLVLPGYKYLGPGNGLDKGEPVNAADAAALEHDKAYDQQLKAGDNPYLRYNHADAEFQERLQEDTSFGGNLGRAVFQAKKRVLEPFGLVEEGAKTAPGKKRPVEQSPQEPDSSSGIGKTGQQPAKKRLNFGQTGDSESVPDPQPLGEPPATPAAVGPTTMASGGGAPMADNNEGADGVGNASGNWHCDSTWLGDRVITTSTRTWALPTYNNHLYKQISSASTGASNDNHYFGYSTPWGYFDFNRFHCHFSPRDWQRLINNNWGFRPKRLNFKLFNIQVKEVTTNDGVTTIANNLTSTVQVFSDSEYQLPYVLGSAHQGCLPPFPADVFMIPQYGYLTLNNGSQAVGRSSFYCLEYFPSQMLRTGNNFTFSYTFEEVPFHSSYAHSQSLDRLMNPLIDQYLYYLNRTQNQSGSAQNKDLLFSRGSPAGMSVQPKNWLPGPCYRQQRVSKTKTDNNNSNFTWTGASKYNLNGRESIINPGTAMASHKDDEDKFFPMSGVMIFGKESAGASNTALDNVMITDEEEIKATNPVATERFGTVAVNFQSSSTDPATGDVHVMGALPGMVWQDRDVYLQGPIWAKIPHTDGHFHPSPLMGGFGLKHPPPQILIKNTPVPANPPAEFSATKFASFITQYSTGQVSVEIEWELQKENSKRWNPEVQYTSNYAKSANVDFTVDNNGLYTEPRPIGTRYLTRPL

SEQ ID NO: 377 - DNA, 2217 bp, synthetic construct
  misc_feature 1..2217: note = source = /note="Description of Artificial Sequence: Synthetic polynucleotide"
  source 1..2217: mol_type = other DNA
atggctgccgatggttatcttccagattggctcgaggacaacctctctgagggcattcgcgagtggtgggacttgaaacctggagccccgaaacccaaagccaaccagcaaaagcaggacgacggccggggtctggtgcttcctggctacaagtacctcggacccttcaacggactcgacaagggggagcccgtcaacgcggcggatgcaacggccctcgagcacgacaaggcctacgaccagcagctgcaggcgggtgacaatccgtacctgcggtataaccacgccgacgccgagtttcaggagcgtctgcaagaagatacgtcttttgggggcaacctcgggcgagcagtcttccaggccaagaagcgggttctcgaacctctcggtctggttgaggaaggcgctaagacggctcctggaaagaagagaccggtagagccatcaccccagcgttctccagactcctctacgggcatcggcaagaaaggccaacagcccgccagaaaaagactcaattttggtcagactggcgactcagagtcagttccagaccctcaacctctcggagaaccaccagcagcccccacaagtttgggatctaatacaatggcttcaggcggtggcgcaccaatggcagacaataacgagggtgccgatggagtgggtaattcctcaggaaattggcattgcgattcccaatggctgggcgacagagtcatcaccaccagcacccgcacctgggccttgcccacctacaataaccacctctacaagcaaatctccagtgcttcaacgggggccagcaacgacaaccactacttcggctacagcaccccctgggggtattttgactttaaccgcttccactgccacttctcgccaagagactggcaaagactcatcaacaacaattggggattccggcccaagagactcaacttcaaactcttcaacatccaagtcaaggaggtcacgacgaatgatggcgtcacgaccatcgccaataacctcaccagcaccatccaggtgtttacggactcggagtaccagctgccgtacgttctcggctctgcccaccagggctgcctgcctccgttcccggcggacgtgttcatgattccccagtatggatacctcaccctgaacaacggaagtcaagcggtgggacgctcatccttttactgcctggagtacttcccttcgcagatgctaaggactggaaataacttccaattcagctataccttcgaggatgtaccttttcacagcagctacgctcacagccagagtttggatcgcttgatgaatcctcttattgatcagtatctgtactacctgaacagaacgcaaggaacaacctctggaacaaccaaccaatcacggctgctttttagccaggctgggcctcagtctatgtctttgcaggccagaaattggctacctgggccctgctaccggcaacagagactttcaaagactgctaacgacaacaacaacagtaactttccttggacagcagccagcaaatatcatctcaatggccgcgactcgctggtgaatccaggaccagctatggccagtcacaaggacgatgaagaaaaatttttccctatgcacggcaatctaatatttggcaaagaagggacaacggcaagtaacgcagaattagataatgtaatgattacggatgaagaagagattcgtaccaccaatcctgtggcaacagagcagtatggaactgtggcaaataacttgcagagctcaaatacagctcccacgactagaactgtcaatgatcagggggccttacctggcatggtgtggcaagatcgtgacgtgtaccttcaggggcccatctgggcaaagattccacacacggacggacattttcacccctctcccctcatgggtggattcggacttaaacaccctcctccgcagattctcatcaagaacaccccggtacctgcgaatccttcgaccaccttcagtgcggcaaagtttgcttccttcatcacacagtactccacgggacaggtcagcgtggagatcgagtgggagctgcagaaggaaaacagcaagcgctggaacccggagatccagtacacttccaactattacaagtctaataatgttgaatttgctgttaatactgaaggtgtatatagtgaaccccgccccattggcaccagatacctgactcgtaatctgtaa

SEQ ID NO: 378 - protein, 738 aa, synthetic construct
  REGION 1..738: note = source = /note="Description of Artificial Sequence: Synthetic polypeptide"
MAADGYLPDWLEDNLSEGIREWWDLKPGAPKPKANQQKQDDGRGLVLPGYKYLGPFNGLDKGEPVNAADATALEHDKAYDQQLQAGDNPYLRYNHADAEFQERLQEDTSFGGNLGRAVFQAKKRVLEPLGLVEEGAKTAPGKKRPVEPSPQRSPDSSTGIGKKGQQPARKRLNFGQTGDSESVPDPQPLGEPPAAPTSLGSNTMASGGGAPMADNNEGADGVGNSSGNWHCDSQWLGDRVITTSTRTWALPTYNNHLYKQISSASTGASNDNHYFGYSTPWGYFDFNRFHCHFSPRDWQRLINNNWGFRPKRLNFKLFNIQVKEVTTNDGVTTIANNLTSTIQVFTDSEYQLPYVLGSAHQGCLPPFPADVFMIPQYGYLTLNNGSQAVGRSSFYCLEYFPSQMLRTGNNFQFSYTFEDVPFHSSYAHSQSLDRLMNPLIDQYLYYLNRTQGTTSGTTNQSRLLFSQAGPQSMSLQARNWLPGPCYRQQRLSKTANDNNNSNFPWTAASKYHLNGRDSLVNPGPAMASHKDDEEKFFPMHGNLIFGKEGTTASNAELDNVMITDEEEIRTTNPVATEQYGTVANNLQSSNTAPTTRTVNDQGALPGMVWQDRDVYLQGPIWAKIPHTDGHFHPSPLMGGFGLKHPPPQILIKNTPVPANPSTTFSAAKFASFITQYSTGQVSVEIEWELQKENSKRWNPEIQYTSNYYKSNNVEFAVNTEGVYSEPRPIGTRYLTRNL

SEQ ID NO: 379 - DNA, 2208 bp, synthetic construct
  misc_feature 1..2208: note = source = /note="Description of Artificial Sequence: Synthetic polynucleotide"
  source 1..2208: mol_type = other DNA
atggctgccgatggttatcttccagattggctcgaggacaaccttagtgaaggaattcgcgagtggtgggacttgaaacctggagccccgaagcccaaagccaaccagcaaaagcaggacgacggccggggtctggtgcttcctggctacaagtacctcggacccttcaacggactcgacaagggggagcccgtcaacgcggcggacgcagcggccctcgagcacgacaaggcctacgaccagcagctcaaagcgggtgacaatccgtacctgcggtataaccacgccgacgccgagtttcaggagcgtctgcaagaagatacgtcttttgggggcaacctcgggcgagcagtcttccaggccaagaagcgggttctcgaacctctcggtctggttgaggaaggtgctaagacggctcctggaaagaaacgtccggtagagcagtcgccacaagagccagactcctcctcgggcattggcaagacaggccagcagcccgctaaaaagagactcaattttggtcagactggcgactcagagtcagtccccgacccacaacctctcggagaacctccagcaacccccgctgctgtgggacctactacaatggcttcaggcggtggcgcaccaatggcagacaataacgaaggcgccgacggagtgggtaatgcctcaggaaattggcattgcgattccacatggctgggcgacagagtcatcaccaccagcacccgaacctgggccctgcccacctacaacaaccacctctacaaacaaatttccagccaatcaggagcctcgaacgacaatcactactttggctacagcaccccttgggggtattttgatttcaacagattccactgccacttttcaccacgtgactggcagcgactcatcaacaacaattggggattccggcccaagagactcagcttcaagctcttcaacatccaggtcaaggaggtcacgcagaatgaaggcaccaagaccatcgccaataaccttaccagcacggttcaagtgtttacggactcggagtatcagctcccgtacgtgctcggctcggcgcatcaaggatgcctcccgccgttcccagcagacgtcttcatggtgccacagtatggatacctcaccctgaacaacgggagtcaggcagtaggacgctcttcattttactgcctggagtactttccttctcagatgctgcgtaccggaaacaactttaccttcagctacacttttgaggacgttcctttccacagcagctacgctcacagccagagtctggaccgtctcatgaatcctctgattgaccagtacctgtattacttgagcagaacaaacactccaagtggaaccaccacgcagtcaaggcttcagttttctcaggccggagcgagtgacattcgggaccagtctaggaactggcttcctggaccctgttaccgccagcagcgagtatcaaagacatctgcggataacaacaacagtgaatactcgtggactggagctaccaagtaccacctcaatggcagagactctctggtgaatccgggcccggccatggcaagccacaaggactatgaagaaaagttttttcctcagagcggggttctcatctttgggaagcaaggctcagagaaaacaaatgtggacattgaaaaggtcatgattacagacgaagaggaaatcaggacaaccaatcccgtggctacggagcagtatggttctgtatctaccaacctccagagaggcaacagacaagcagctaccgcagatgtcaacacacaaggcgttcttccaggcatggtctggcaggacagagatgtgtaccttcaggggcccatctgggcaaagattccacacacggacggacattttcacccgtctccgctgatgggcggctttggcctgaaacatcctccgcctcagatcctgatcaagaacacgcctgtacctgcggatcctccgaccaccttcaaccagtcaaagctgaactctttcatcactcagtattctactggccaagtcagcgtggagatcgagtgggagctgcagaaggaaaacagcaagcgctggaaccccgagatccagtacacctccaactactacaaatctacaagtgtggactttgctgttaatacagaaggcgtgtactctgaaccccgccccattggcacccgttacctcacccgtaatctgtaa

SEQ ID NO: 380 - protein, 735 aa, synthetic construct
  REGION 1..735: note = source = /note="Description of Artificial Sequence: Synthetic polypeptide"
MAADGYLPDWLEDNLSEGIREWWDLKPGAPKPKANQQKQDDGRGLVLPGYKYLGPFNGLDKGEPVNAADAAALEHDKAYDQQLKAGDNPYLRYNHADAEFQERLQEDTSFGGNLGRAVFQAKKRVLEPLGLVEEGAKTAPGKKRPVEQSPQEPDSSSGIGKTGQQPAKKRLNFGQTGDSESVPDPQPLGEPPATPAAVGPTTMASGGGAPMADNNEGADGVGNASGNWHCDSTWLGDRVITTSTRTWALPTYNNHLYKQISSQSGASNDNHYFGYSTPWGYFDFNRFHCHFSPRDWQRLINNNWGFRPKRLSFKLFNIQVKEVTQNEGTKTIANNLTSTVQVFTDSEYQLPYVLGSAHQGCLPPFPADVFMVPQYGYLTLNNGSQAVGRSSFYCLEYFPSQMLRTGNNFTFSYTFEDVPFHSSYAHSQSLDRLMNPLIDQYLYYLSRTNTPSGTTTQSRLQFSQAGASDIRDQSRNWLPGPCYRQQRVSKTSADNNNSEYSWTGATKYHLNGRDSLVNPGPAMASHKDYEEKFFPQSGVLIFGKQGSEKTNVDIEKVMITDEEEIRTTNPVATEQYGSVSTNLQRGNRQAATADVNTQGVLPGMVWQDRDVYLQGPIWAKIPHTDGHFHPSPLMGGFGLKHPPPQILIKNTPVPADPPTTFNQSKLNSFITQYSTGQVSVEIEWELQKENSKRWNPEIQYTSNYYKSTSVDFAVNTEGVYSEPRPIGTRYLTRNL

SEQ ID NO: 381 - DNA, 2214 bp, synthetic construct
  misc_feature 1..2214: note = source = /note="Description of Artificial Sequence: Synthetic polynucleotide"
  source 1..2214: mol_type = other DNA
atggctgccgatggttatcttccagattggctcgaggacaacctctctgagggcattcgcgagtggtgggacttgaaacctggagccccgaaacccaaagccaaccagcaaaagcaggacgacggccggggtctggtgcttcctggctacaagtacctcggacccttcaacggactcgacaagggggagcccgtcaacgcggcggatgcagcggccctcgagcacgacaaggcctacgaccagcagctcaaagcgggtgacaatccgtacctgcggtataaccacgccgacgccgagtttcaggagcgtctgcaagaagatacgtcttttgggggcaacctcgggcgagcagtcttccaggccaagaagagggttctcgaaccttttggtctggttgaggaaggtgctaagacggctcctggaaagaaacgtccggtagagcagtcgccacaagagccagactcctcctcgggcattggcaagacaggccagcagcctgcaagaaaaagattgaattttggtcagactggagacgcagactcagtacctgacccccagcctctcggacagccaccagcagccccctctggtctgggaactaatacgatggctacaggcagtggcgcaccaatggcagacaataacgagggcgccgacggagtgggtaattcctcgggaaattggcattgcgattcccaatggctgggggacagagtcatcaccaccagcacccgaacctgggccctgcccacctacaacaatcacctctacaagcaaatctccaacagcacatctggaggatcttcaaatgacaacgcctacttcggctacagcaccccctgggggtattttgatttcaacagattccactgccatttctcaccacgtgactggcagcgactcatcaacaacaattggggattccggcccaagagactcaacttcaagctcttcaacatccaggtcaaggaggtcacgcagaatgaaggcaccaagaccatcgccaataacctcaccagcaccatccaggtgtttacggactcggagtaccagctgccgtacgttctcggctctgcccaccagggctgcctgcctccgttcccggcggacgtgttcatgattccccagtacggctacctaacactcaacaacggtagtcaggccgtgggacgctcctccttctactgcctggaatactttccttcgcagatgctgagaaccggcaacaacttccagtttacttacaccttcgaggacgtgcctttccacagcagctacgcccacagccagagcttggaccggctgatgaatcctctgattgaccagtacctgtactacttgtctcggactcaaacaacaggaggcacgacaaatacgcagactctgggcttcagccaaggtgggcctaatacaatggccaatcaggcaaagaactggctgccaggaccctgttaccgccagcagcgagtatcaaagacatttgcggataacaacaacagtgaatactcgtggactggagctaccaagtaccacctcaatggcagagactctctggtgaatccgggcccggccatggcaagccacaaggacgatgaagaaaagttttttcctcagagcggggttctcatctttgggaagcaaggctcagagaaaacaaatgtggacattgaaaaggtcatgattacagacgaagaggaaatcaggacaaccaatcccgtggctacggagcagtatggttctgtatctaccaacctccagagaggcaacagacaagcagctaccgcagatgtcaacacacaaggcgttcttccaggcatggtctggcaggacagagatgtgtaccttcaggggcccatctgggcaaagattccacacacggacggacattttcacccctctcccctcatgggtggattcggacttaaacaccctccgcctcagatcctgatcaagaacacgcctgtacccgcggatcctccgaccaccttcaaccagtcaaagctgaactctttcatcacccagtattctactggccaagtcagcgtggagatcgagtgggagctgcagaaggaaaacagcaagcgctggaaccccgagatccagtacacctccaactactacaaatctacaagtgtggactttgctgttaatacagaaggcgtgtactctgaaccccgccccattggcacccgttacctcacccgtaatctgtaa

SEQ ID NO: 382 - protein, 737 aa, synthetic construct
  REGION 1..737: note = source = /note="Description of Artificial Sequence: Synthetic polypeptide"
MAADGYLPDWLEDNLSEGIREWWDLKPGAPKPKANQQKQDDGRGLVLPGYKYLGPFNGLDKGEPVNAADAAALEHDKAYDQQLKAGDNPYLRYNHADAEFQERLQEDTSFGGNLGRAVFQAKKRVLEPFGLVEEGAKTAPGKKRPVEQSPQEPDSSSGIGKTGQQPARKRLNFGQTGDADSVPDPQPLGQPPAAPSGLGTNTMATGSGAPMADNNEGADGVGNSSGNWHCDSQWLGDRVITTSTRTWALPTYNNHLYKQISNSTSGGSSNDNAYFGYSTPWGYFDFNRFHCHFSPRDWQRLINNNWGFRPKRLNFKLFNIQVKEVTQNEGTKTIANNLTSTIQVFTDSEYQLPYVLGSAHQGCLPPFPADVFMIPQYGYLTLNNGSQAVGRSSFYCLEYFPSQMLRTGNNFQFTYTFEDVPFHSSYAHSQSLDRLMNPLIDQYLYYLSRTQTTGGTTNTQTLGFSQGGPNTMANQAKNWLPGPCYRQQRVSKTFADNNNSEYSWTGATKYHLNGRDSLVNPGPAMASHKDDEEKFFPQSGVLIFGKQGSEKTNVDIEKVMITDEEEIRTTNPVATEQYGSVSTNLQRGNRQAATADVNTQGVLPGMVWQDRDVYLQGPIWAKIPHTDGHFHPSPLMGGFGLKHPPPQILIKNTPVPADPPTTFNQSKLNSFITQYSTGQVSVEIEWELQKENSKRWNPEIQYTSNYYKSTSVDFAVNTEGVYSEPRPIGTRYLTRNL

SEQ ID NO: 383 - DNA, 2217 bp, synthetic construct
  misc_feature 1..2217: note = source = /note="Description of Artificial Sequence: Synthetic polynucleotide"
  source 1..2217: mol_type = other DNA
atggctgccgatggttatcttccagattggctcgaggacactctctctgaaggaataagacagtggtgggcgctgaaacctggagccccgaagcccaaagccaaccagcaaaagcaggacgacggccggggtctggtgcttcctggctacaagtacctcggacccttcaacggactcgacaagggggagcccgtcaacgcggcggatgcagcggccctcgagcacgacaaggcctacgaccagcagctcaaagcgggtgacaatccgtacctgcggtataaccacgccgacgccgagtttcaggagcgtctgcaagaagatacgtcttttgggggcaacctcgggcgagcagtcttccaggccaagaagcgggttctcgaacctctcggtctggttgaggaaggcgctaagacggctcctggaaagaagagaccggtagagccatcaccccagcgttctccagactcctctacgggcatcggcaagaaaggccaacagcccgccagaaaaagactcaattttggtcagactggcgactcagagtcagttccagaccctcaacctctcggagaaccaccagcagcccccacaagtttgggatctaatacaatggcttcaggcggtggcgcaccaatggcagacaataacgagggtgccgatggagtgggtaattcctcaggaaattggcattgcgattcccaatggctgggcgacagagtcatcaccaccagcacccgcacctgggccttgcccacctacaataaccacctctacaagcaaatctccagtgcttcaacgggggccagcaacgacaaccactacttcggctacagcaccccctgggggtattttgactttaaccgcttccactgccacttctcgccaagagactggcaaagactcatcaacaacaattggggattccggcccaagagactcaacttcaaactcttcaacatccaagtcaaggaggtcacgacgaatgatggcgtcacgaccatcgccaataacctcaccagcaccatccaggtgtttacggactcggagtaccagctgccgtacgttctcggctctgcccaccagggctgcctgcctccgttcccggcggacgtgttcatgattccccagtatggatacctcaccctgaacaacggaagtcaagcggtgggacgctcatccttttactgcctggagtacttcccttcgcagatgctaaggactggaaataacttccaattcagctataccttcgaggatgtaccttttcacagcagctacgctcacagccagagtttggatcgcttgatgaatcctcttattgatcagtatctgtactacctgaacagaacgcaaggaacaacctctggaacaaccaaccaatcacggctgctttttagccaggctgggcctcagtctatgtctttgcaggccagaaattggctacctgggccctgctaccggcaacagagactttcaaagactgctaacgacaacaacaacagtaactttccttggacagcagccagcaaatatcatctcaatggccgcgactcgctggtgaatccaggaccagctatggccagtcacaaggacgatgaagaaaaatttttccctatgcacggcaatctaatatttggcaaagaagggacaacggcaagtaacgcagaattagataatgtaatgattacggatgaagaagagattcgtaccaccaatcctgtggcaacagagcagtatggaactgtggcaaataacttgcagagctcaaatacagctcccacgactagaactgtcaatgatcagggggccttacctggcatggtgtggcaagatcgtgacgtgtaccttcaggggcccatctgggcaaagattccacacacggacggacattttcacccctctcccctcatgggtggattcggacttaaacaccctcctccgcagattctcatcaagaacaccccggtacctgcgaatccttcgaccaccttcagtgcggcaaagtttgcttccttcatcacacagtactccacgggacaggtcagcgtggagatcgagtgggagctgcagaaggaaaacagcaagcgctggaacccggagatccagtacacttccaactattacaagtctaataatgttgaatttgctgttaatactgaaggtgtatatagtgaaccccgccccattggcaccagatacctgactcgtaatctgtaa

SEQ ID NO: 384 - protein, 738 aa, synthetic construct
  REGION 1..738: note = source = /note="Description of Artificial Sequence: Synthetic polypeptide"
MAADGYLPDWLEDTLSEGIRQWWALKPGAPKPKANQQKQDDGRGLVLPGYKYLGPFNGLDKGEPVNAADAAALEHDKAYDQQLKAGDNPYLRYNHADAEFQERLQEDTSFGGNLGRAVFQAKKRVLEPLGLVEEGAKTAPGKKRPVEPSPQRSPDSSTGIGKKGQQPARKRLNFGQTGDSESVPDPQPLGEPPAAPTSLGSNTMASGGGAPMADNNEGADGVGNSSGNWHCDSQWLGDRVITTSTRTWALPTYNNHLYKQISSASTGASNDNHYFGYSTPWGYFDFNRFHCHFSPRDWQRLINNNWGFRPKRLNFKLFNIQVKEVTTNDGVTTIANNLTSTIQVFTDSEYQLPYVLGSAHQGCLPPFPADVFMIPQYGYLTLNNGSQAVGRSSFYCLEYFPSQMLRTGNNFQFSYTFEDVPFHSSYAHSQSLDRLMNPLIDQYLYYLNRTQGTTSGTTNQSRLLFSQAGPQSMSLQARNWLPGPCYRQQRLSKTANDNNNSNFPWTAASKYHLNGRDSLVNPGPAMASHKDDEEKFFPMHGNLIFGKEGTTASNAELDNVMITDEEEIRTTNPVATEQYGTVANNLQSSNTAPTTRTVNDQGALPGMVWQDRDVYLQGPIWAKIPHTDGHFHPSPLMGGFGLKHPPPQILIKNTPVPANPSTTFSAAKFASFITQYSTGQVSVEIEWELQKENSKRWNPEIQYTSNYYKSNNVEFAVNTEGVYSEPRPIGTRYLTRNL

SEQ ID NO: 385 - DNA, 2208 bp, synthetic construct; identical to SEQ ID NO: 21
  misc_feature 1..2208: note = source = /note="Description of Artificial Sequence: Synthetic polynucleotide"
  source 1..2208: mol_type = other DNA

SEQ ID NO: 386 - protein, 735 aa, synthetic construct [sequence omitted]

SEQ ID NO: 387 - DNA, 2208 bp, synthetic construct
  misc_feature 1..2208: note = source = /note="Description of Artificial Sequence: Synthetic polynucleotide"
  source 1..2208: mol_type = other DNA
atggctgccgatggttatcttccagattggctcgaggacaacctctctgagggcattcgcgagtggtgggcgctgaaacctggagccccgaagcccaaagccaaccagcaaaagcaggacgacggccggggtctggtgcttcctggctacaagtacctcggacccttcaacggactcgacaagggggagcccgtcaacgcggcggacgccgcggccctcgagcacgacaaggcctacgaccagcagctgcaggcgggtgacaatccgtacctgcggtataaccacgccgacgccgagtttcaggagcgtctgcaagaagatacgtcttttgggggcaacctcgggcgagcagtcttccaggccaaaaagaggcttcttgaacctcttggtctggttgaggaagcagctaaaacggctcctggaaagaagaggcctgtagagcagtctcctcaggaaccggactcctccgcgggtattggcaaatcgggtgcacagcccgccaaaaagagactcaatttcggtcagactggcgactcagagtcagtcccagaccctcaacctctcggagaaccaccagcagcccccacaagtttgggatctaatacaatggcttcaggcggtggcgcaccaatggcagacaataacgaaggcgccgacggagtgggtaatgcctcaggaaattggcattgcgattccacatggctgggcgacagagtcatcaccaccagcacccgcacctgggccttgcccacctacagcaaccatctctacaagcaaatctccagccaatcaggagcttcaaacgacaacgactactttggctacagcaccccttgggggtattttgatttcaacagattccactgccacttttcaccacgtgactggcaaagactcatcaacaacaactggggattccgacccaagagactcaacttcaagctctttaacattcaagtcaaagaggtcacgcagaatgacggtacgacgacgattgccaataaccttaccagcacggttcaggtgtttactgactcggagtaccagctcccgtacgtcctcggctcggcgcatcaaggatgcctcccgccgttcccagcagacgtcttcatggtgccacagtatggatacctcaccctgaacaacgggagtcaggcagtaggacgctcttcattttactgcctggagtactttccttctcagatgctgcgtaccggaaacaactttaccttcagctacacttttgaggacgttcctttccacagcagctacgctcacagccagagtctggaccgtctcatgaatcctctcatcgaccagtacctgtattacttgagcagaacaaacactccaagtggaaccaccacgcagtcaaggcttcagttttctcaggccggagcgagtgacattcgggaccagtctaggaactggcttcctggaccctgttaccgccagcagcgagtatcaaagacatctgaggataacaacaacagtgaatactcgtggactggagctaccaagtaccacctcaatggcagagactctctggtgaatccgggcccggccatggcaagccacaaggacgatgaagaaaagttttttcctcagagcggggttctcatctttgggaagcaaggctcagagaaaacaaatgtggacattgaaaaggtcatgattacagacgaagaggaaatcaggacaaccaatcccgtggctacggagcagtatggttctgtatctaccaacctccagagaggcaacagacaagcagctaccgcagatgtcaacacacaaggcgttcttccaggcatggtctggcaggacagagatgtgtaccttcaggggcccatctgggcaaagattccacacacggacggacattttcacccctctcccctcatgggtggattcggacttaaacaccctcctccacagattctcatcaagaacaccccggtacctgcgaatccttcgaccaccttcagtgcggcaaagtttgcttccttcatcacacagtactccacgggacaggtcagcgtggagatcgagtgggagctgcagaaggaaaacagcaaacgctggaatcccgaaattcagtacacttccaactacaacaagtctgttaatgtggactttactgtggacactaatggcgtgtattcagagcctcgccccattggcaccagatacctgactcgtaatctgtaa

SEQ ID NO: 388 - protein, 735 aa, synthetic construct
  REGION 1..735: note = source = /note="Description of Artificial Sequence: Synthetic polypeptide"
MAADGYLPDWLEDNLSEGIREWWALKPGAPKPKANQQKQDDGRGLVLPGYKYLGPFNGLDKGEPVNAADAAALEHDKAYDQQLQAGDNPYLRYNHADAEFQERLQEDTSFGGNLGRAVFQAKKRLLEPLGLVEEAAKTAPGKKRPVEQSPQEPDSSAGIGKSGAQPAKKRLNFGQTGDSESVPDPQPLGEPPAAPTSLGSNTMASGGGAPMADNNEGADGVGNASGNWHCDSTWLGDRVITTSTRTWALPTYSNHLYKQISSQSGASNDNDYFGYSTPWGYFDFNRFHCHFSPRDWQRLINNNWGFRPKRLNFKLFNIQVKEVTQNDGTTTIANNLTSTVQVFTDSEYQLPYVLGSAHQGCLPPFPADVFMVPQYGYLTLNNGSQAVGRSSFYCLEYFPSQMLRTGNNFTFSYTFEDVPFHSSYAHSQSLDRLMNPLIDQYLYYLSRTNTPSGTTTQSRLQFSQAGASDIRDQSRNWLPGPCYRQQRVSKTSEDNNNSEYSWTGATKYHLNGRDSLVNPGPAMASHKDDEEKFFPQSGVLIFGKQGSEKTNVDIEKVMITDEEEIRTTNPVATEQYGSVSTNLQRGNRQAATADVNTQGVLPGMVWQDRDVYLQGPIWAKIPHTDGHFHPSPLMGGFGLKHPPPQILIKNTPVPANPSTTFSAAKFASFITQYSTGQVSVEIEWELQKENSKRWNPEIQYTSNYNKSVNVDFTVDTNGVYSEPRPIGTRYLTRNL

SEQ ID NO: 389 - DNA, 2208 bp, synthetic construct
  misc_feature 1..2208: note = source = /note="Description of Artificial Sequence: Synthetic polynucleotide"
  source 1..2208: mol_type = other DNA
atggctgccgatggttatcttccagattggctcgaggacaacctctctgagggcattcgcgagtggtgggcgctgaaacctggagccccgaagcccaaagccaaccagcaaaagcaggacgacggccggggtctggtgcttcctggctacaagtacctcggacccttcaacggactcgacaagggggagcccgtcaacgcggcggacgcagcggccctcgagcacgacaaggcctacgaccagcagctgcaggcgggtgacaatccgtacctgcggtataaccacgccgacgccgagttccaggagcgtctgcaagaagatacgtcttttgggggcaacctcgggcgagcagtcttccaggccaagaagagggttctcgaaccttttggtctggttgaggaaggtgctaagacggctcctggaaagaaacgtccggtagagcagtcgccacaagagccagactcctcctcgggcattggcaagacaggccagcagcccgctaaaaagagactcaattttggtcagactggcgactcagagtcagtcccagaccctcaacctctcggagaaccaccagcagcccccacaagtttgggatctaatacaatggcttcaggcggtggcgcaccaatggcagacaataacgagggcgccgacggagtgggtaattcctcgggaaattggcattgcgattccacatggatgggcgacagagtcatcaccaccagcacccgaacctgggccctgcccacctacaacaaccacctctacaaacaaatttccagccaatcaggagcttcaaacgacaaccactactttggctacagcaccccttgggggtattttgactttaacagattccactgccacttttcaccacgtgactggcagcgactcattaacaacaactggggattccggcccaagaaactcaacttcaagctctttaacatccaggtcaaggaggtcacgcagaatgaaggcaccaagaccatcgccaataacctcaccagcaccatccaggtgtttacggactcggagtaccagctgccgtacgttctcggctctgcccaccagggctgcctgcctccgttcccggcggacgtgttcatgattccccagtacggctacctaacactcaacaacggtagtcaggccgtgggacgctcctccttctactgcctggaatactttccttcgcagatgctgagaaccggcaacaacttccagtttacttacaccttcgaggacgtgcctttccacagcagctacgcccacagccagagcttggaccggctgatgaatcctctgattgaccagtacctgtattacttgtctcggactcaaacaacaggaggcacgacaaatacgcagactctgggcttcagccaaggtgggcctaatacaatggccaatcaggcaaagaactggctgcctggaccctgttaccgccagcagcgagtatcaaagacatctgcggataacaacaacagtgaatactcgtggactggagctaccaagtaccacctcaatggcagagactctctggtgaatccgggcccggccatggcaagccacaaggacgatgaagaaaagttttttcctcagagcggggttctcatctttgggaagcaaggctcagagaaaacaaatgtggacattgaaaaggttatgattacagacgaagaggaaatcaggacaaccaatcccgtggctacggagcagtatggttctgtatctaccaacctccagagaggcaacagacaagcagctaccgcagatgtcaacacacagggcgttcttccaggcatggtctggcaggacagagatgtgtaccttcagggtcccatttgggccaaaattcctcacacagatggacactttcacccgtcccctcttatgggcggctttggactcaagaacccgcctcctcagatcctcatcaaaaacacgcctgttcctgcgaatcctccggcagagttttcagctacaaagtttgcttcattcatcacccaatactccacaggacaagtgagtgtggaaattgaatgggagctgcagaaagaaaacagcaagcgctggaatcccgaagtgcagtacacatccaattatgcaaaatctgccaacgttgattttactgtggacactaatggcgtgtattcagagcctcgccccattggcaccagatacctcacccgtaatctgtaa

SEQ ID NO: 390 - protein, 735 aa, synthetic construct
  REGION 1..735: note = source = /note="Description of Artificial Sequence: Synthetic polypeptide"
MAADGYLPDWLEDNLSEGIREWWALKPGAPKPKANQQKQDDGRGLVLPGYKYLGPFNGLDKGEPVNAADAAALEHDKAYDQQLQAGDNPYLRYNHADAEFQERLQEDTSFGGNLGRAVFQAKKRVLEPFGLVEEGAKTAPGKKRPVEQSPQEPDSSSGIGKTGQQPAKKRLNFGQTGDSESVPDPQPLGEPPAAPTSLGSNTMASGGGAPMADNNEGADGVGNSSGNWHCDSTWMGDRVITTSTRTWALPTYNNHLYKQISSQSGASNDNHYFGYSTPWGYFDFNRFHCHFSPRDWQRLINNNWGFRPKKLNFKLFNIQVKEVTQNEGTKTIANNLTSTIQVFTDSEYQLPYVLGSAHQGCLPPFPADVFMIPQYGYLTLNNGSQAVGRSSFYCLEYFPSQMLRTGNNFQFTYTFEDVPFHSSYAHSQSLDRLMNPLIDQYLYYLSRTQTTGGTTNTQTLGFSQGGPNTMANQAKNWLPGPCYRQQRVSKTSADNNNSEYSWTGATKYHLNGRDSLVNPGPAMASHKDDEEKFFPQSGVLIFGKQGSEKTNVDIEKVMITDEEEIRTTNPVATEQYGSVSTNLQRGNRQAATADVNTQGVLPGMVWQDRDVYLQGPIWAKIPHTDGHFHPSPLMGGFGLKNPPPQILIKNTPVPANPPAEFSATKFASFITQYSTGQVSVEIEWELQKENSKRWNPEVQYTSNYAKSANVDFTVDTNGVYSEPRPIGTRYLTRNL

SEQ ID NO: 391 - DNA, 2214 bp, synthetic construct; identical to SEQ ID NO: 381
  misc_feature 1..2214: note = source = /note="Description of Artificial Sequence: Synthetic polynucleotide"
  source 1..2214: mol_type = other DNA

SEQ ID NO: 392 - protein, 737 aa, synthetic construct; identical to SEQ ID NO: 382
  REGION 1..737: note = source = /note="Description of Artificial Sequence: Synthetic polypeptide"

SEQ ID NO: 393 - DNA, 2196 bp, synthetic construct
  misc_feature 1..2196: note = source = /note="Description of Artificial Sequence: Synthetic polynucleotide"
  source 1..2196: mol_type = other DNA
atggctgctgacggttatcttccagattggctcgaggacaacctctctgagggcattcgcgagtggtgggcgctgaaacctggagccccgcaacccaaagccaaccagcaaaagcaggacgacggccggggtctggtgcttcctggctacaagtacctcggacccttcaacggactcgacaagggggagcccgtcaacgaggcggacgccgcggccctcgagcacgacaaggcctacgaccagcagctcaaagcgggtgacaatccgtacctgcggtataatcacgccgacgccgagtttcaagagcgtctgcaagaagatacgtcctttgggggcaacctcgggcgagcagtcttccaggccaaaaagagggtactcgagcctctgggtctggttgaggaaggcgctaagacggctcctggaaagaagcggccagtagaaccggactccagctcgggcatcggcaagtcaggccagcagcccgcgaaaaagagactgaattttgggcagactggcgactcagagtcagtgcctgacccccaacctctctcagaaccacccgcaggtccctctggtctgggatctggtacaatggctgctggcggtggcgctccaatggcagacaataacgaaggcgccgacggagtgggtaatgtctcaggaaattggcattgcgattccacatggctgggcgaccgagtcatcaccaccagcactcggacctgggccctccccacctacaacaaccacctctacaagcaaatctccaacgggacctcgggaggcagcagcaacgacaacacctactttggctacagcaccccctgggggtattttgactttaacagattccactgccacttttcaccacgtgactggcagcgactcatcaacaacaactgggggttccggcccaagaagctcaacttcaagctcttcaacatccaggtcaaggaggtcacccagaatgaaggcaccaagaccatcgccaataacctcaccagcacggtgcaggtctttacggactcggagtaccagctcccgtacgtgctcggctctgcccaccagggctgcctgcctccgttcccggcggacgtgttcatgattccgcagtacgggtacctgacgctgaacaacgggagccaggccgtggggcgatcctccttctactgcctggagtactttccctcgcagatgctgagaacgggcaacaactttaccttcagctacaccttcgaggacgtgcccttccacagcagctacgcgcacagccagagcctggaccggctgatgaacccgctgattgaccagtacctgtactacctgtctcggactcagaccaacgggaccaatgccacgcagactctgttgtttgctcaggccgggcctcagaacatgtcggctcaggccaagaactggctgcctggtccttgctatcggcagcagcgcgtctctacgacagtgtcgcaaaacaacaacagcaactttacctggaccggggcgaccaagtaccacctgaacggccgagactccctggtgagccccggtgtcgccatggcaacgcacaaggacgacgaggagcgcttcttcccgagcagcggggtcctgatgtttggcaagcagggcgctggaaaggacaatgtcgagtacaccaacgtgatgctcaccagcgaggaggagatcaagaccaccaaccctgtggccacggagcagtacggcgtggtggctgacaatctgcagcagaccaactcagctcccattgtgggggcagtcaacagccagggggccttacccggtatggtctggcagaaccgggacgtgtacctgcagggtcccatctgggccaagatcccgcatacggacggcaactttcacccgtctcctctcatgggcggctttggactgaaacacccgcctccccagatcctgatcaaaaacacgccggtacctgcggatcccccggtgaactttacggacgctaagctggcgagtttcatcacgcagtacagcaccgggcaggtcagcgtggagattgagtgggagctgcagaaggagaacagcaagcgctggaatcccgagattcagtacacttccaattattataaatcagctaatgtggactttgccgtcaatgcagatggtgtatatagtgaaccccgccccattggcactcgttacctcacccgtaatctgtaa

SEQ ID NO: 394 - protein, 731 aa, synthetic construct
  REGION 1..731: note = source = /note="Description of Artificial Sequence: Synthetic polypeptide"
MAADGYLPDWLEDNLSEGIREWWALKPGAPQPKANQQKQDDGRGLVLPGYKYLGPFNGLDKGEPVNEADAAALEHDKAYDQQLKAGDNPYLRYNHADAEFQERLQEDTSFGGNLGRAVFQAKKRVLEPLGLVEEGAKTAPGKKRPVEPDSSSGIGKSGQQPAKKRLNFGQTGDSESVPDPQPLSEPPAGPSGLGSGTMAAGGGAPMADNNEGADGVGNVSGNWHCDSTWLGDRVITTSTRTWALPTYNNHLYKQISNGTSGGSSNDNTYFGYSTPWGYFDFNRFHCHFSPRDWQRLINNNWGFRPKKLNFKLFNIQVKEVTQNEGTKTIANNLTSTVQVFTDSEYQLPYVLGSAHQGCLPPFPADVFMIPQYGYLTLNNGSQAVGRSSFYCLEYFPSQMLRTGNNFTFSYTFEDVPFHSSYAHSQSLDRLMNPLIDQYLYYLSRTQTNGTNATQTLLFAQAGPQNMSAQAKNWLPGPCYRQQRVSTTVSQNNNSNFTWTGATKYHLNGRDSLVSPGVAMATHKDDEERFFPSSGVLMFGKQGAGKDNVEYTNVMLTSEEEIKTTNPVATEQYGVVADNLQQTNSAPIVGAVNSQGALPGMVWQNRDVYLQGPIWAKIPHTDGNFHPSPLMGGFGLKHPPPQILIKNTPVPADPPVNFTDAKLASFITQYSTGQVSVEIEWELQKENSKRWNPEIQYTSNYYKSANVDFAVNADGVYSEPRPIGTRYLTRNL

SEQ ID NO: 395 - DNA, 2196 bp, synthetic construct
  misc_feature 1..2196: note = source = /note="Description of Artificial Sequence: Synthetic polynucleotide"
  source 1..2196: mol_type = other DNA
atggctgctgacggttatcttccagattggctcgaggacaacctctctgagggcattcgcgagtggtgggcgctgaaacctggagccccgcaacccaaagccaaccagcaaaagcaggacgacggccggggtctggtgcttcctggctacaagtacctcggacccttcaacggactcgacaagggggagcccgtcaacgaggcggacgccgcggccctcgagcacgacaaggcctacgaccagcagctcaaagcgggtgacaatccgtacctgcggtataatcacgccgacgccgagtttcaagagcgtctgcaagaagatacgtcctttgggggcaacctcgggcgagcagtcttccaggccaaaaagagggtactcgagcctctgggtctggttgaggaaggcgctaagacggctcctggaaagaagcggccagtagaaccggactccagctcgggcatcggcaagtcaggccggcagcccgcgaaaaagagactgaattttgggcagactggcgactcagagtcagtgcctgacccccaacctctctcagaaccacccgcaggtccctctggtctgggatctggtacaatggctgcaggcggtggcgctccaatggcagacaataacgaaggcgccgacggagtgggtaatgcctcaggaaattggcattgcgattccacatggctgggcgaccgagtcatcaccaccagcactcggacctgggccctccccacctacaacaaccacctctacaagcaaatctccaacgggacctcgggaggcagcagcaacgacaacacctactttggctacagcaccccctgggggtattttgactttaacagattccactgccacttttcaccacgtgactggcagcgactcatcaacaacaactggggattccggcccaagaggctcaacttcaagctcttcaacatccaggtcaaggaggtcacccagaatgaaggcaccaagaccatcgccaataacctcaccagcacggtgcaggtctttacggactcgaagtaccagctcccgtacgtgctcggctctgcccaccagggctgcctgcctccgttcccggcggacgtgttcatgattccgcagtacgggtacctgacgctgaacaacgggagccaggccgtggggcgatcctccttctactgcctggagtactttccctcgcagatgctgagaacgggcaacaactttaccttcagctacaccttcgaggacgtgcccttccacagcagctacgcgcacagccagagcctggaccggctgatgaacccgctgattgaccagtacctgtactacctgtctcggactcagaccaacgggaccaatgccacgcagactctgttgtttgctcaggccgggcctcagaacatgtcggctcaggccaagaactggctgcctggtccttgctatcggcagcagcgcgtctctacgacagtgtcgcaaaacaacaacagcaactttacctggaccggggcgaccaagtaccacctgaacggccgagactccctggtgaaccccggtgtcgccatggcaacgcacaaggacgacgaggagcgcttcttcccgagcagcggggtcctgatgtttggcaagcagggcgctggaaaggacaatgtcgagtacaccaacgtgatgctcaccagcgaggaggagatcaagaccaccaaccctgtggccacggagcagtacggtgtggtggctgacaatctgcagcagaccaactcggctcccattgtgggggcagtcaacagccagggggccttacccggtatggtctggcagaaccgggacgtgtacctgcagggtcccatctgggccaagatcccgcatacggacggcaactttcacccgtctcctctcatgggcggctttggactgaaacacccgcctccccagatcctgatcaaaaacacgccggtacctgcggatcccccggtgaactttacggacgctaagctggcgagtttcatcacgcagtacagcaccgggcaggtcagcgtggagattgagtgggagctgcagaaggagaacagcaagcgctggaatcccgagattcagtacacttccaattattataaatcagctaatgtggactttgccgtcaatgcagatggtgtatatagtgaaccccgccccattggcactcgttacctcacccgtaatctgtaa

SEQ ID NO: 396 - protein, 731 aa, synthetic construct
  REGION 1..731: note = source = /note="Description of Artificial Sequence: Synthetic polypeptide"
MAADGYLPDWLEDNLSEGIREWWALKPGAPQPKANQQKQDDGRGLVLPGYKYLGPFNGLDKGEPVNEADAAALEHDKAYDQQLKAGDNPYLRYNHADAEFQERLQEDTSFGGNLGRAVFQAKKRVLEPLGLVEEGAKTAPGKKRPVEPDSSSGIGKSGRQPAKKRLNFGQTGDSESVPDPQPLSEPPAGPSGLGSGTMAAGGGAPMADNNEGADGVGNASGNWHCDSTWLGDRVITTSTRTWALPTYNNHLYKQISNGTSGGSSNDNTYFGYSTPWGYFDFNRFHCHFSPRDWQRLINNNWGFRPKRLNFKLFNIQVKEVTQNEGTKTIANNLTSTVQVFTDSKYQLPYVLGSAHQGCLPPFPADVFMIPQYGYLTLNNGSQAVGRSSFYCLEYFPSQMLRTGNNFTFSYTFEDVPFHSSYAHSQSLDRLMNPLIDQYLYYLSRTQTNGTNATQTLLFAQAGPQNMSAQAKNWLPGPCYRQQRVSTTVSQNNNSNFTWTGATKYHLNGRDSLVNPGVAMATHKDDEERFFPSSGVLMFGKQGAGKDNVEYTNVMLTSEEEIKTTNPVATEQYGVVADNLQQTNSAPIVGAVNSQGALPGMVWQNRDVYLQGPIWAKIPHTDGNFHPSPLMGGFGLKHPPPQILIKNTPVPADPPVNFTDAKLASFITQYSTGQVSVEIEWELQKENSKRWNPEIQYTSNYYKSANVDFAVNADGVYSEPRPIGTRYLTRNL

SEQ ID NO: 397 - DNA, 2196 bp, synthetic construct
  misc_feature 1..2196: note = source = /note="Description of Artificial Sequence: Synthetic polynucleotide"
  source 1..2196: mol_type = other DNA
atggctgctgacggttatcttccagattggctcgaggacaacctctctgagggcattcgcgagtggtgggcgctgaaacctggagccccgcaacccaaagccaaccagcaaaagcaggacgacggccggggtctggtgcttcctggctacaagtacctcggacccttcaacggactcgacaagggggagcccgtcaacgaggcggacgccgcggccctcgagcacgacaaggcctacgaccagcagctcaaagcgggtgacaatccgtacctgcggtataatcacgccgacgccgagtttcaagagcgtctgcaagaagatacgtcctttgggggcaacctcgggcgagcagtcttccaggccaaaaagagggtactcgagcctctgggtctggttgaggaaggcgctaagacggctcctggaaagaagcggccagtagaaccggactccagctcgggcatcggcaagtcaggccagcagcccgcgaaaaagagactgaattttgggccgactggcgactcagagtcagtgcctgacccccaacctctctcagaaccacctgcaggtccctctggtctgggatctggtacaatggctgcaggcggtggcgctccaatggcagacaataacgaaggcgccgacggagtgggtaatgtctcaggaaattggcattgcgattccacatggctgggcgaccgagtcatcaccaccagcactcggacctgggccctccccacctacaacaaccacctctacaagcaaatctccaacgggacctcgggaggcagcagcaacgacaacacctactttggctacagcaccccctgggggtattttgactttaacagattccactgccacttttcaccacgcgactggcagcgactcatcaacaacaactggggattccggcccaagaagctcaacttcaagctcttcaacatccaggtcaaggaggtcacccagaatgaaggcaccaagaccaccgccaataacctcaccagcacggtgcaggtctttacggactcggagtaccagctcccgtacgtgctcggctctgcccaccagggctgcctgcctccgttcccggcggacgtgttcatgattccgcagtacgggtacctgacgctgaacaacgggagccaggccgtggggcgatcctccttctactgcctggagtactttccctcgcagatgctgagaacgggcaacaactttaccttcagctacaccttcgaggacgtgcccttccacagcagctacgcgcacagccagagcctggaccggctgatgaacccgctgattgaccagtacctgtactacctgtctcggactcagaccaacgggaccaatgccacgcagactctgttgtttgctcaggccgggcctcagaacatgtcggctcaggccaagaactggctgcctggtccttgctatcggcagcagcgcgtctctacggcagtgtcgcaaaacaacaacagcaactttacctggaccggggcgaccaagtaccacctgaacggccgagactccctggtgaaccccggtgtcgccatggcaacgcacaaggacgacgaggagcgcttcttcccgagcagcggggtcctgatgtttggcaagcagggcgctggaaaggacaatgtcgagtacaccaacgtgatgctcaccagcgaggaggagatcaagaccaccaaccctgtggccacggagcagtacggtgtggtggctgacaatctgcagcagaccaactcggctcccattgtgggggcagtcaacagccagggggccttacccggtatggtctggcagaaccgggacgtgtacctgcagggtcccatctgggccaagatcccgcatacggacggcaactttcacccgtctcctctcatgggcggctttggactgaaacacccgcctccccagatcctgatcaaaaacacgccggtacctgcggatcccccggtgaactttacggacgctaagctggcgagtttcatcacgcagtacagcaccgggcaggtcagcgtggagattgagtgggagctgcagaaggagaacagcaagcgctggaatcccgagattcagtacacttccaattattataaatcagctaatgtggactttgccgtcaatgcagatggtgtatatagcgaaccccgccccattggcactcgttacctcacccgtaatctgtaa

SEQ ID NO: 398 - protein, 731 aa, synthetic construct
  REGION 1..731: note = source = /note="Description of Artificial Sequence: Synthetic polypeptide"
MAADGYLPDWLEDNLSEGIREWWALKPGAPQPKANQQKQDDGRGLVLPGYKYLGPFNGLDKGEPVNEADAAALEHDKAYDQQLKAGDNPYLRYNHADAEFQERLQEDTSFGGNLGRAVFQAKKRVLEPLGLVEEGAKTAPGKKRPVEPDSSSGIGKSGQQPAKKRLNFGPTGDSESVPDPQPLSEPPAGPSGLGSGTMAAGGGAPMADNNEGADGVGNVSGNWHCDSTWLGDRVITTSTRTWALPTYNNHLYKQISNGTSGGSSNDNTYFGYSTPWGYFDFNRFHCHFSPRDWQRLINNNWGFRPKKLNFKLFNIQVKEVTQNEGTKTTANNLTSTVQVFTDSEYQLPYVLGSAHQGCLPPFPADVFMIPQYGYLTLNNGSQAVGRSSFYCLEYFPSQMLRTGNNFTFSYTFEDVPFHSSYAHSQSLDRLMNPLIDQYLYYLSRTQTNGTNATQTLLFAQAGPQNMSAQAKNWLPGPCYRQQRVSTAVSQNNNSNFTWTGATKYHLNGRDSLVNPGVAMATHKDDEERFFPSSGVLMFGKQGAGKDNVEYTNVMLTSEEEIKTTNPVATEQYGVVADNLQQTNSAPIVGAVNSQGALPGMVWQNRDVYLQGPIWAKIPHTDGNFHPSPLMGGFGLKHPPPQILIKNTPVPADPPVNFTDAKLASFITQYSTGQVSVEIEWELQKENSKRWNPEIQYTSNYYKSANVDFAVNADGVYSEPRPIGTRYLTRNL

SEQ ID NO: 399 - DNA, 4404 bp, synthetic construct
  misc_feature 1..4404: note = source = /note="Description of Artificial Sequence: Synthetic polynucleotide"
  source 1..4404: mol_type = other DNA
atggctgccgatggttatcttccagattggctcgagggcaacctctctgagggcattcgcgagtggtgggacttgaaacctggagccccgaaacccaaagccaaccagcaaaagcaggacgacggccggggtctggtgcttcctggctacaggtacctcggacccttcaacggactcgacaagggagagccggtcaacgaggcagacgccgcggccctcgagcacgacaaggcctacgacaagcagctcgagcagggggacaacccgtacctcaagtacaaccacgccgacgccgagtttcaggagcgtcttcaagaagatacgtcttttgggggcaacctcgggcgagcagtcttccaggccaagaagcgggttctcgaacctctcggtctggttgaggaaggcgctaagacggctcctggaaagaagagacccatagaatcccccgactcctccacgggcatcggcaagaacggccagccgcccgctaaaaagaagctcaactttgggcagactggcgactcagagtcagtgcccgacccccaacctctcggagaacctcccgccgcgccctcaggtctgggatctggtacaatggctgcaggcggtggcgcaccaatggcagacaataacgaaggcgccgacggagtgggtaatgcctccggaaattggcattgcgattccacatggctgggcgacagagtcatcaccaccagcacccgcacctgggccctgcccacctacaacaaccacctctacaagcagatatcaagtcagagcggggctaccaacgacaaccacttcttcggctacagcaccccctggggctattttgacttcaacagattccactgccacttctcaccacgtgactggcagcgactcatcaacaacaactggggattccggcccagaaagctgcggttcaagttgttcaacatccaggtcaaggaggtcacgacgaacgacggcgttacgaccatcgctaataaccttaccagcacgattcaggtcttctcggactcggagtaccaactgccgtacgtcctcggctctgcgcaccagggctgcctccctccgttccctgcggacgtgttcatgattcctcagtacggatatctgactctaaacaacggcagtcagtctgtgggacgttcctccttctactgcctggagtactttccttctcagatgctgagaacgggcgataactttgaattcagctacacctttgaggaagtgcctttccacagcagctatgcgcacagccagagcctggaccggctgatgaatcccctcatcgaccagtacctgtactacctggcccggacccagagcactacggggtccacaagggagctgcagttccatcaggctgggcccaacaccatggccgagcaatcaaagaactggctgcccggaccctgttatcggcagcagagactgtcaaaaaacatagacagcaacaacaacagtaactttgcctggaccggggccactaaataccatctgaatggtagaaattcattaaccaacccgggcgtagccatggccaccaacaaggacgacgaggaccagttctttcccatcaacggagtgctggtttttggcaaaacgggggctgccaacaagacaacgctggaaaacgtgctaatgaccagcgaggaggagatcaaaaccaccaatcccgtggctacagaagaatacggtgtggtctccagcaacctgcaatcgtctacggccggaccccagacacagactgtcaacagccagggggctctgcccggcatggtctggcagaaccgggacgtgtacctgcagggtcccatctgggccaaaattcctcacacggacggcaactttcacccgtctcccctgatgggcggatttggactcaaacacccgcctcctcaaattctcatcaaaaacaccccggtacctgctaatcctccagaggtgtttactcctgccaagtttgcctcatttatcacgcagtacagcaccggccaggtcagcgtggagatcgagtgggaactgcagaaagaaaacagcaaacgctggaatccagagattcagtacacctcaaattatgccaagtctaataatgtggaatttgctgtcaacaacgaaggggtttatactgagcctcgccccattggcacccgttacctcacccgtaacctgtaaatggctgccgatggttatcttccagattggctcgaggacaacctctctgagggcattcgcgagtggtgggacttgaaacctggagccccgaaacccaaagccaaccagcaaaagcaggacgacggccggggtctggtgcttcctggctacaagtacctcggacccttcaacggactcgacaagggggagcccgtcaacgcggcggacgcagcggccctcgagcacgacaaggcctacgaccagcagctcaaagcgggtgacaatccgtacctgcggtataaccacgccgacgccgagtttcaggagcgtctgcaagaagatacgtcttttgggggcaacctcgggcgagcagtcttccaggccaagaagcgggttctcgaacctctcggtctggttgaggaaggcgctaagacggctcctggaaagaagagaccggtagagccatcaccccagcgttctccagactcctctacgggcatcggcaagaaaggccagcagcccgcgaaaaagagactcaactttgggcagactggcgactcagagtcagtgcccgaccctcaaccaatcggagaaccccccgcaggcccctctggtctgggatctggtacaatggctgcaggcggtggcgctccaatggcagacaataacgaaggcgccgacggagtgggtagttcctcaggaaattggcattgcgattccacatggctgggcgacagagtcatcaccaccagcacccgaacctgggccctccccacctacaacaaccacctctacaagcaaatctccaacgggacttcgggaggaagcaccaacgacaacacctacttcggctacagcaccccctgggggtattttgactttaacagattccactgccacttctcaccacgtgactggcagcgactcatcaacaacaactggggattccggcccaagagactcaacttcaagctcttcaacatccaggtcaaggaggtcacgcagaatgaaggcaccaagaccatcgccaataaccttaccagcacgattcaggtctttacggactcggaataccagctcccgtacgtcctcggctctgcgcaccagggctgcctgcctccgttcccggcggacgtcttcatgattcctcagtacgggtacctgactctgaacaatggcagtcaggccgtgggccgttcctccttctactgcctggagtactttccttctcaaatgctgagaacgggcaacaactttgagttcagctaccagtttgaggacgtgccttttcacagcagctacgcgcacagccaaagcctggaccggctgatgaaccccctcatcgaccagtacctgtactacctgtctcggactcagtccacgggaggtaccgcaggaactcagcagttgctattttctcaggccgggcctaataacatgtcggctcaggccaaaaactggctacccgggccctgctaccggcagcaacgcgtctccacgacactgtcgcaaaataacaacagcaactttgcctggaccggtgccaccaagtatcatctgaatggcagagactctctggtaaatcccggtgtcgctatggcaacccacaaggacgacgaagagcgattttttccgtccagcggagtcttaatgtttgggaaacagggagctggaaaagacaacgtggactatagcagcgttatgctaaccagtgaggaagaaattaaaaccaccaacccagtggccacagaacagtacggcgtggtggccgataacctgcaacagcaaaacgccgctcctattgtaggggccgtcaacagtcaaggagccttacctggcatggtctggcagaaccgggacgtgtacctgcagggtcctatctgggccaagattcctcacacggacggaaactttcatccctcgccgctgatgggaggctttggactgaaacacccgcctcctcagatcctgattaagaatacacctgttcccgcggatcctccaactaccttcagtcaagctaagctggcgtcgttcatcacgcagtacagcaccggacaggtcagcgtggaaattgaatgggagctgcagaaagaaaacagcaaacgctggaacccagagattcaatacacttccaactactacaaatctacaaatgtggactttgctgttaacacagatggcacttattctgagcctcgccccatcggcacccgttacctcacccgtaatctgtaa

SEQ ID NO: 400 - protein, 738 aa, synthetic construct; identical to SEQ ID NO: 18
  REGION 1..738: note = source = /note="Description of Artificial Sequence: Synthetic polypeptide"

SEQ ID NO: 401 - DNA, 3129 bp, synthetic construct
  misc_feature 1..3129: note = source = /note="Description of Artificial Sequence: Synthetic polynucleotide"
  source 1..3129: mol_type = other DNA
gaattcgccctttctacggctgcgtcaactggaccaatgagaactttcccttcaacgattgcgtcgacaagatggtgatctggtgggaggagggcaagatgacggccaaggtcgtggagtccgccaaggccattctcggcggcagcaaagtgcgcgtggaccaaaagtgcaagtcgtccgcccagatcgaccccacccccgtgatcgtcacctccaacaccaacatgtgcgccgtgattgacgggaacagcaccaccttcgagcaccagcagccgttgcaggaccggatgttcaagtttgaactcacccgccgtctggagcacgactttggcaaggtgacaaagcaggaagtcagagagttcttccgctgggcgcaggatcacgtgaccgaggtggcgcacgagttctacgtcagaaagggtggagccaacaagagacccgcccccgatgacgcggataaaagcgagcccaagcgggcctgcccctcagtcgcggatccatcgacgtcagacgcggaaggagctccggtggactttgccgacaggtaccaaaacaaatgttctcgtcacgcgggcatgcttcagatgctgtttccctgcaaaacatgcgagagaatgaatcagaatttcaacatttgcttcacgcacgggaccagagactgttcagaatgtttccccggcgtgtcagaatctcaaccggtcgtcagaaaaaagacgtatcggaaactctgtgcgattcatcatctgctgggggcgggcacccgagattgcttgctcggcctgcgatctggtcaacgtggacctagatgactgtgtttctgagcaataaatgacttaaaccaggtatggctgccgatggttatcttccagattggctcgaggacaacctctctgagggcattcgcgagtggtgggacttgaaacctggagccccgaaacccaaagccaaccagcaaaagcaggacgacggccggggtctggtgcttcctggctacaagtacctcggacccttcaacggactcgacaagggggagcccgtcaacgcggcggacgcagcggccctcgagcacgacaaggcctacgaccagcagctcaaagcgggtgacaatccgtacctgcggtataaccacgccgacgccgagtttcaggagcgtctgcaagaagatacgtcttttgggggcaacctcgggcgagcagtcttccaggccaagaagcgggttctcgaacctctcggtctggttgaggaaggcgctaagacggctcctggaaagaagagaccggtagagccatcaccccagcgttctccagactcctctacgggcatcggcaagaaaggccagcagcccgcgaaaaagagactcaactttgggcagactggcgactcagagtcagtgcccgaccctcaaccaatcggagaaccccccgcaggcccctctggtctgggatctggtacaatggctgcaggcggtggcgctccaatggcagacaataacgaaggcgccgacggagtgggtagttcctcaggaaattggcattgcgattccacatggctgggcgacagagtcatcaccaccagcacccgaacctgggccctccccacctacaacaaccacctctacaagcaaatctccaacgggacttcgggaggaagcaccaacgacaacacctacttcggctacagcaccccctgggggtattttgactttaacagattccactgccacttctcaccacgtgactggcagcgactcatcaacaacaactggggattccggcccaagagactcaacttcaagctcttcaacatccaggtcaaggaggtcacgcagaatgaaggcaccaagaccatcgccaataaccttaccagcacgattcaggtctttacggactcggaataccagctcccgtacgtcctcggctctgcgcaccagggctgcctgcctccgttcccggcggacgtcttcatgattcctcagtacgggtacctgactctgaacaatggcagtcaggccgtgggccgttcctccttctactgcctggagtactttccttctcaaatgctgagaacgggcaacaactttgagttcagctaccagtttgaggacgtgccttttcacagcagctacgcgcacagccaaagcctggaccggctgatgaaccccctcatcgaccagtacctgtactacctgtctcggactcagtccacgggaggtaccgcaggaactcagcagttgctattttctcaggccgggcctaataacatgtcggctcaggccaaaaactggctacccgggccctgctaccggcagcaacgcgtctccacgacactgtcgcaaaataacaacagcaactttgcctggaccggtgccaccaagtatcatctgaatggcagagactctctggtaaatcccggtgtcgctatggcaacccacaaggacgacgaagagcgattttttccgtccagcggagtcttaatgtttgggaaacagggagctggaaaagacaacgtggactatagcagcgttatgctaaccagtgaggaagaaattaaaaccaccaacccagtggccacagaacagtacggcgtggtggccgataacctgcaacagcaaaacgccgctcctattgtaggggccgtcaacagtcaaggagccttacctggcatggtctggcagaaccgggacgtgtacctgcagggtcctatctgggccaagattcctcacacggacggaaactttcatccctcgccgctgatgggaggctttggactgaaacacccgcctcctcagatcctgattaagaatacacctgttcccgcggatcctccaactaccttcagtcaagctaagctggcgtcgttcatcacgcagtacagcaccggacaggtcagcgtggaaattgaatgggagctgcagaaagaaaacagcaaacgctggaacccagagattcaatacacttccaactactacaaatctacaaatgtggactttgctgttaacacagatggcacttattctgagcctcgccccatcggcacccgttacctcacccgtaatctgtaattgcttgttaatcaataaaccggttgattcgtttcagttgaactttggtctctgcgaagggcgaattc

SEQ ID NO: 402 - protein, 738 aa, synthetic construct; identical to SEQ ID NO: 18
  REGION 1..738: note = source = /note="Description of Artificial Sequence: Synthetic polypeptide"

SEQ ID NO: 403 - protein, 733 aa, synthetic construct
  REGION 1..733: note = source = /note="Description of Artificial Sequence: Synthetic polypeptide"
MAADGYLPDWLEDNLSEGIREWWDLRPGAPKPKANQQKQDDGRGLVLPGYKYLGPFNGLDKGEPVNEADAAALEHDKAYDKQLEQGDNPYLKYNHADAEFQERLQEDTSFGGNLGRAVFQAKKRVLEPLGLVEEGAKTAPGKKRPIESPDSSTGIGKKGQQPAKKRLNFGQTGDSESVPDPQPIGEPPAGPSGLGSGTMAAGGGAPMADNNEGADGVGSSSGNWHCDSTWLGDRVITTSTRTWALPTYNNHLYKQISNGTSGGSTNDNTYFGYSTPWGYFDFNRFHCHFSPRDWQRLINNNWGFRPKRLNFKLFNIQVKEVTQNEGTKTIANNLTSTIQVFTDSEYQLPYVLGSAHQGCLPPFPADVFMIPQYGYLTLNNGSQAVGRSSFYCLEYFPSQMLRTGNNFEFSYQFEDVPFHSSYAHSQSLDRLMNPLIDQYLYYLSRTQSTGGTAGTQQLLFSQAGPNNMSAQAKNWLPGPCYRQQRVSTTVSQNNNSNFAWTGATKYHLNGRDSLVNPGVAMATHKGDEERFFPSSGVLMFGKQGAGKDNVDYSSVMLTSEEEIKTTNPVATEQYGVVADNLQQQNAAPIVGAVNSQGALPGMVWQNRDVYLQGPIWAKIPHTDGNFHPSPLMGGFGLKHPPPQILIKNTPVPADPPTTFSQAKLASFITQYSTGQVSVEIEWELQKENSKRWNPEIQYTSNYYKSTNVDFAVNTEGTYSEPRPIGTRYLTRNL

SEQ ID NO: 404 - DNA, 2501 bp, synthetic construct
  misc_feature 1..2501: note = source = /note="Description of Artificial Sequence: Synthetic polynucleotide"
  source 1..2501: mol_type = other DNA
gaattcgcccttggctgcgtcaactggaccaatgagaactttcccttcaacgattgcgtcgacaagatggtgatctggtgggaggagggcaagatgacggccaaggtcgtggagtccgccaaggccattcatcatctgctggggcgggctcccgagattgcttgctcggcctgcgatctggtcaacgtggacctggatgactgtgtttctgagcaataaatgacttaaaccaggtatggctgccgatggttatcttccagattggctcgaggacaacctctctgagggcattcgcgagtggtgggacttgagacctggagccccgaaacccaaagccaaccagcaaaagcaggacgacggccggggtctggtgcttcctggctacaagtacctcggacccttcaacggactcgacaagggagagccggtcaacgaggcagacgccgcggccctcgagcacgacaaggcctacgacaagcagctcgagcagggggacaacccgtacctcaagtacaaccacgccgacgccgagtttcaggagcgtcttcaagaagatacgtcttttgggggcaacctcgggcgagcagtcttccaggccaagaagcgggttctcgaacctctcggtctggttgaggaaggcgctaagacggctcctggaaagaagagacccatagaatcccccgactcctccacgggcatcggcaagaaaggccagcagcccgctaaaaagagactcaactttgggcagactggcgactcagagtcagtgcccgaccctcaaccaatcggagaaccccccgcaggcccctctggtctgggatctggcacaatggctgcaggcggtggcgctccaatggcagacaataacgaaggcgccgacggagtgggtagttcctcaggaaattggcattgcgattccacatggctgggcgacagagtcatcaccaccagcacccgaacctgggccctccccacctacaacaaccacctctacaagcaaatctccaacgggacatcgggaggaagcaccaacgacaacacctacttcggctacagcaccccctgggggtattttgactttaacagattccactgccacttctcaccacgtgactggcagcgactcatcaacaacaactggggattccggcccaagagactcaacttcaagctcttcaacatccaggtcaaggaggtcacgcagaatgaaggcaccaagaccatcgccaataaccttaccagcacgattcaggtctttacggactcggaataccagctcccgtacgtcctcggctctgcgcaccagggctgcctgcctccgttcccggcggacgtcttcatgattcctcagtacgggtacctgactctgaacaacggcagtcaggccgtgggccgttcctccttctactgcctggagtactttccttctcaaatgctgagaacgggcaacaactttgagttcagctaccagtttgaggacgtgccttttcacagcagctatgcgcacagccaaagcctggaccggctgatgaaccccctcatcgaccagtacctgtactacctgtctcggactcagtccacgggaggtaccgcaggaactcagcagttgctattttctcaggccgggcctaataacatgtcggctcaggccaaaaactggctacccgggccctgctaccggcagcaacgcgtctccacgacagtgtcgcaaaataacaacagcaactttgcttggaccggtgccaccaagtatcatctgaatggcagagactctctggtaaatcccggtgtcgctatggcaacgcacaagggcgacgaagagcgattttttccatccagcggagtcttgatgtttgggaaacagggagctggaaaagacaacgtagactatagcagcgttatgctaaccagtgaggaagaaatcaaaaccaccaacccagtggccacagaacagtacggcgtggtggccgataacctgcaacagcaaaacgccgctcctattgtaggggccgtcaacagtcaaggagccttacctggcatggtctggcagaaccgggacgtgtacctgcagggtcctatctgggccaagattcctcacacggacggcaactttcatccttcgccgctgatgggaggctttggactgaaacacccgcctcctcagatcctgattaagaatacacctgttcccgcggatcctccaactaccttcagtcaagccaagctggcgtcgttcatcacgcagtacagcaccggacaggtcagcgtggaaattgaatgggagctgcagaaagagaacagcaagcgctggaacccagagattcagtatacttccaactactacaaatctacaaatgtggactttgctgtcaatactgagggtacttattcagagcctcgccccattggcacccgttacctcacccgtaacctgtaattgcctgttaatcaataaaccggttgattcgtttcagttgaactttggtctcaagggcgaattc

SEQ ID NO: 405 - DNA, 2187 bp, synthetic construct
  misc_feature 1..2187: note = source = /note="Description of Artificial Sequence: Synthetic polynucleotide"
  source 1..2187: mol_type = other DNA
atggctgccgatggttatcttccagattggctcgaggacaacctctctgagggcattcgcgagtggtgggacttgaaacctggagccccgaaacccaaagccaaccagcaaaagcaggacgacggccggggtctggtgcttcctggctacaagtacctcggacccttcaacggactcgacaagggagagccggtcaacgaggcagacgccgcggccctcgagcacgacaaggcctacgacaagcagctcgagcagggggacaacccgtacctcaagtacaaccacgccgacgccgagtttcaggagcgtcttcaagaagatacgtcttttgggggcaacctcgggcgagcagtcttccaggccaagaagcgggttctcgaacctctcggtctggttgaggaaggcgctaagacggctcctggaaagaagagacccatagaatcccccgactcctccacgggcatcggcaagaaaggccagcagcccgctaaaaagaagctcaactttgggcagactggcgactcagagtcagtgcccgacccccaacctctcggagaacctcccgccgcgccctcaggtctgggatctggtacaatggctgcaggcggtggcgcaccaatggcagacaataacgaaggcgccgacggagtgggtaatgcctccggaaattggcattgcgattccacatggctgggcgacagagtcatcaccaccagcacccgcacctgggccctgcccacctacaacaaccacctctacaagcagatatcaagtcagagcggggctaccaacgacaaccacttcttcggctacagcaccccctggggctattttgacttcaacagattccactgccacttctcaccacgtgactggcagcgactcatcaacaacaactggggattccggcccagaaagctgcggttcaagttgttcaacatccaggtcaaggaggtcacgacgaacgacggcgttacgaccatcgctaataaccttaccagcacgattcaggtcttctcggactcggagtaccaactgccgtacgtcctcggctctgcgcaccagggctgcctccctccgttccctgcggacgtgttcatgattcctcagtacggatatctgactctaaacaacggcagtcagtctgtgggacgttcctccttctactgcctggagtactttccttctcagatgctgagaacgggcaataactttgaattcagctacacctttgaggaagtgcctttccacagcagctatgcgcacagccagagcctggaccggctgatgaatcccctcatcgaccagtacctgtactacctggcccggacccagagcactacggggtccacaagggagctgcagttccatcaggctgggcccaacaccatggccgagcaatcaaagaactggctgcccggaccctgttatcggcagcagagactgtcaaaaaacatagacagcaacaacaacagtaactttgcctggaccggggccactaaataccatctgaatggtagaaattcattaaccaacccgggcgtagccatggccaccaacaaggacgacgaggaccagttctttcccatcaacggagtgctggtttttggcgaaacgggggctgccaacaagacaacgctggaaaacgtgctaatgaccagcgaggaggagatcaaaaccaccaatcccgtggctacagaagaatacggtgtggtctccagcaacctgcaatcgtctacggccggaccccagacacagactgtcaacagccagggggctctgcccggcatggtctggcagaaccgggacgtgtacctgcagggtcccatctgggccaaaattcctcacacggacggcaactttcacccgtctcccctgatgggcggatttggactcaaacacccgcctcctcaaattctcatcaaaaacaccccggtacctgctaatcctccagaggtgtttactcctgccaagtttgcctcatttatcacgcagtacagcaccggccaggtcagcgtggagatcgagtgggaactgcagaaagaaaacagcaaacgctggaatccagagattcagtacacctcaaattatgccaagtctaataatgtggaatttgctgtcaacaacgaaggggtttatactgagcctcgccccattggcacccgttacctcacccgtaacctgtaa

SEQ ID NO: 406 - protein, 728 aa, synthetic construct; identical to SEQ ID NO: 74
  REGION 1..728: note = source = /note="Description of Artificial Sequence: Synthetic polypeptide"

SEQ ID NO: 407 - protein, 728 aa, synthetic construct; identical to SEQ ID NO: 166
  REGION 1..728: note = source = /note="Description of Artificial Sequence: Synthetic polypeptide"

SEQ ID NO: 408 - protein, 728 aa, synthetic construct; identical to SEQ ID NO: 166
  REGION 1..728: note = source = /note="Description of Artificial Sequence: Synthetic polypeptide"

SEQ ID NO: 409 - protein, 733 aa, synthetic construct
  REGION 1..733: note = source = /note="Description of Artificial Sequence: Synthetic polypeptide"
MAADGHLPDWLEDNLSEGIREWWDLKPGAPKPKANQQKQDDGRGLVLPGYKYLGPFNGLDKGEPVNAADAAALEHDKAYDQQLKAGDNPYLRYNHADAEFQERLQEDTSFGGNLGRAVFQAKKRVLEPLGLVEEGAKTAPGKKRPIESPDSSTGIGKKGQQPAKKKLNFGQTGDSESVPDPQPIGEPPAGPSGLGSGTMAAGGGAPMADNNEGADGVGSSSGNWHCDSTWLGDRVITTSTRTWALPTYNNHLYKQISNGTSGGSTNDNTYFGYSTPWGYFDFNRFHCHFSPRDWQRLINNSWGFRPKRLNFKLFNIQVKEVTQNEGTKTIANNLTSTIQVFTDSEYQLPYVLGSAHQGCLPPFPADVFMIPQYGYLTLNNGSQAVGRSSFYCLEYFPSQMLRTGNNFEFSYQFEDVPFHSSYAHSQSLDRLMNPLIDQYLYYLSRTQSTGGTAGTQQLLFSQAGPNNMSAQAKNWLPGPCYRQQRVSTTLSQNNNSNFAWTGATKYHLNGRDSLVNPGVAMATHKDDEERFFPSSGVLMFGKQGAGKDNVDYSSVMLTSEEEIKTTNPVATEQYGVVADNLQQQNAAPIVGAVNSQGALPGMVWQNRDVYLQGPIWAKIPHTDGNFHPSPLMGGFGLKHPPPQILIKNTPVPADPPTTFSQAKLASFITQYSTGQVSVEIEWELQKENSKRWNPEIQYTSNYYKSTNVDFAVNTEGTYSEPRPIGTRYLTRNL

SEQ ID NO: 410 - DNA, 3113 bp, synthetic construct
  misc_feature 1..3113: note = source = /note="Description of Artificial Sequence: Synthetic polynucleotide"
  source 1..3113: mol_type = other DNA
gaattcgccctttctacggctgcgtcaactggaccaatgagaactttcccttcaacgattgcgtcgacaagatggtgatctggtgggaggagggcaagatgacggccaaggtcgtggagtccgccaaggccattctcggcggcagcaaggtgcgcgtggaccaaaagtgcaagtcgtccgcccagatcgatcccacccccgtgatcgtcacttccaacaccaacatgtgcgccgtgattgacgggaacagcaccaccttcgagcaccagcagccgttacaagaccggatgttcaaatttgaactcacccgccgtctggagcatgactttggcaaggtgacaaagcaggaagtcaaagagttcttccgctgggcgcaggatcacgtgaccgaggtggcgcatgagttctacgtcagaaagggtggagccaacaagagacccgcccccgatgacgcggataaaagcgagcccaagcgggcctgcccctcagtcgcggatccatcgacgtcagacgcggaaggagctccggtggactttgccgacaggtaccaaaacaaatgttctcgtcacgcgggcatgcttcagatgctgcttccctgcaagacatgcgagagaatgaatcagaatttcagcatttgcttcacgcacgggaccagagactgttcagaatgtttccccggcgtgtcagaatctcaaccggtcgtcagaaagaggacgtatcggaaactctgtgccattcatcatctgctggggcgggctcccgagattgcttgctcggcctgcgatctggtcaacgtggacctggatgactgtgtttctgagcaataaatgacttaaaccaggtatggctgccgatggtcatcttccagattggctcgaggacaacctctctgagggcattcgcgagtggtgggacttgaaacctggagccccgaaacccaaagccaaccagcaaaagcaggacgacggccggggtctggtgcttcctggctacaagtacctcggacccttcaacggactcgacaagggggagcccgtcaacgcggcggacgcagcggccctcgagcacgacaaggcctacgaccagcagctcaaagcgggtgacaatccgtacctgcggtataaccacgccgacgccgagtttcaggagcgtcttcaagaagatacgtcttttgggggcaacctcgggcgagcagtcttccaggccaagaagcgggttctcgaacctctcggtctggttgaggaaggcgctaagacggctcctggaaagaagagacccatagaatcccccgactcctccacgggcatcggcaagaaaggccagcagcccgctaaaaagaagctcaactttgggcagactggcgactcagagtcagtgcccgaccctcaaccaatcggagaaccccccgcaggcccctctggtctgggatctggtacaatggctgcaggcggtggcgctccaatggcagacaataacgaaggcgccgacggagtgggtagttcctcaggaaattggcattgcgattccacatagctgggcgacagagtcatcaccaccagcacccgaacctgggccctccccacctacaacaaccacctctacaagcaaatctccaacgggacatcgggaggaagcaccaacgacaacacctacttcggctacagcaccccctgggggtattttgactttaacagattccactgccacttctcaccacgtgactggcagcgactcatcaacaacagctggggattccggcccaagagactcaacttcaagctcttcaacatccaggtcaaggaggtcacgcagaatgaaggcaccaagaccatcgccaataaccttaccagcacgattcaggtctttacggactcggaataccagctcccgtacgtcctcggctctgcgcaccagggctgcctgcctccgttcccggcggacgtcttcatgattcctcagtacgggtacctgactctgaacaacggcagtcaggccgtgggccgttcctccttctactgcctggagtactttccttctcaaatgctgagaacgggcaacaactttgagttcagctaccagtttgaggacgtgccttttcacagcagctacgcgcacagccaaagcctggaccggctgatgaaccccctcatcgaccagtacctgtactacctgtctcggactcagtccacgggaggtaccgcaggaactcagcagttgctattttctcaggccgggcctaataacatgtcggctcaggccaaaaactggctacccgggccctgctaccggcagcaacgcgtctccacgacactgtcgcaaaataacaacagcaactttgcttggaccggtgccaccaagtatcatctgaatggcagagactctctggtaaatcccggtgtcgctatggcaacgcacaaggacgacgaagagcgattttttccatccagcggagtcttgatgtttgggaaacagggagctggaaaagacaacgtggactatagcagcgttatgctaaccagtgaggaagaaatcaaaaccaccaacccagtggccacagaacagtacggcgtggtggccgataacctgcaacagcaaaacgccgctcctattgtaggggccgtcaacagtcaaggagccttacctggcatggtctggcagaaccgggacgtgtacctgcagggtcctatctgggccaagattcctcacacggacggcaactttcatccttcgccgctgatgggaggctttggactgaaacacccgcctcctcagatcctgattaagaatacacctgttcccgcggatcctccaactaccttcagtcaagccaagctggcgtcgttcatcacgcagtacagcaccggacaggtcagcgtggaaattgaatgggagctgcagaaagagaacagcaagcgctggaacccagagattcagtatacttccaactactacaaatctacaaatgtggactttgctgtcaatactgagggtacttattcagagcctcgccccattggcacccgttacctcacccgtaacctgtaattgcctgttaatcaataaaccggttaattcgtttcagttgaactttggtctctgcgaagggcgaattc

SEQ ID NO: 411 - protein, 731 aa, synthetic construct
  REGION 1..731: note = source = /note="Description of Artificial Sequence: Synthetic polypeptide"
MAADGYLPDWLEDNLSEGIREWWDLKPGAPKPKANQQKQDDGRGLVLPGYKYLGPFNGLDKGEPVNEADAAALEHDKAYDKQLEQGDNPYLKYNHADAEFQERLQEDTSFGGNLGRAVFRAKKRVLEPLGLVEEGAKTAPGKKRPIESPDSSTGIGKKGQQPAKKKLNFGQTGDSESVPDPQPLGEPPAAPSGLGSGTMAAGGGAPMADNNEGADGVGNASGNWHCDSTWLGDRVITTSTRTWALPTYNNHLYKQISSQSGATNDNHFFGYSTPWGYFDFNRFHCHFSPRDWQRLINNNRGFRPRKLRFKLFNIQVKEVTTNDGVTTIANNLTSTIQVFSDSEYQLPYVLGSAHQGCLPPFPADVFMIPQYGYLTLNNGSQSVGRSSFYCLEYFPSQMLRTGNNFEFSYQFEDVPFHSSYAHSQSLDRLMNPLIDQYLYYLSRTQSTGGTAGTQQLLFSQAGPNNMSAQAKNWLPGPCYRQQRVSTTLSQNNNSNFAWTGATKYHLNGRDSLVNPGVAMATHKDDEERFFPSSGVLMFGKQGAGKDNVDYSSVMLTSEEEIKTTNPVATEQYGVVADNLQQQNAAPIVGAVNSQGALPGMAWQNRDVYLQGPIWAKIPHTDGNFHPSPLMGGFGLKHPPPQILIKNTPVPADPPTTFSQAKLASFITQYSTGQVSVEIEWELQKENSKRWNPEIQYTSNYYKSTNVDFAVNTEGTYSEPRPIGTRYLTRNL

SEQ ID NO: 412 - DNA, 3106 bp, synthetic construct
  misc_feature 1..3106: note = source = /note="Description of Artificial Sequence: Synthetic polynucleotide"
  source 1..3106: mol_type = other DNA
gaattcgcccttctacggctgcgtcaactggaccaatgagaactttcccttcaacgattgcgtcgacaagatggtgatctggtgggaggagggcaagatgacggccaaggtcgtggagtccgccaaggccattctcggcggcagcaaggtgcgcgtggaccaaaagtgcaagtcgtccgcccagatcgaccccacccccgtgatcgtcacctccaacaccaacatgtgcgccgtgattgacgggaacagcaccaccttcgagcaccagcagccgttgcaggaccggatgttcaaatttgaactcacccgccgtctggagcatgactttggcaaggcgacaaagcaggaagtcaaagagttcttccgctgggcgcaggatcacgtgaccgaggtggcgcatgagttctacgtcagaaagggtggagccaacaagagacccgcccccgatgacgcggataaaagcgagcccaagcgggcccgcccctcagtcgcggatccatcgacgtcagacgcggaaggagctccggtggactttgccgacaggtaccaaaacaaatgttctcgtcacgcgggcatgcttcagatgctgtttccctgcaaaacatgcgagagaatgaatcagaatttcaacatttgcttcacgcacgggaccagagactgttcagaatgtttccccggcgtgtcagaatctcaaccggtcgtcagaaagaggacgtatcggaaactctgtgccattcatcatctgctggggcgggctcccgagattgcttgctcggcctgcgatctggtcaacgtggacctggatgactgtgtttctgagcaataaatgacttaaaccaggtatggctgccgatggttatcttccagattggctcgaggacaacctctctgagggcattcgcgagtggtgggacttgaaacctggagccccgaaacccaaagccaaccagcaaaagcaggacgacggccggggtctggtgcttcctggctacaagtacctcggacccttcaacggactcgacaagggagagccggtcaacgaggcagacgccgcggccctcgagcacgacaaggcctacgacaagcagctcgagcagggggacaacccgtacctcaagtacaaccacgccgacgccgagtttcaggagcgtcttcaagaagatacgtcttttgggggcaacctcgggcgagcagtcttccgggccaagaagcgggttctcgaacctctcggtctggttgaggaaggcgctaagacggctcctggaaagaagagacccatagaatcccccgactcctccacgggcatcggcaagaaaggccagcagcccgctaaaaagaagctcaactttgggcagactggcgactcagagtcagtgcccgacccccaacctctcggagaacctcccgccgcgccctcaggtctgggatctggtacaatggctgcaggcggtggcgcaccaatggcagacaataacgaaggcgccgacggagtgggtaatgcctccggaaattggcattgcgattccacatggctgggcgacagagtcatcaccaccagcacccgcacctgggccctgcccacctacaacaaccacctctacaagcagatatcaagtcagagcggggctaccaacgacaaccacttcttcggctacagcaccccctggggctattttgacttcaacagattccactgccacttctcaccacgtgactggcagcgactcatcaacaacaaccggggattccggcccagaaagctgcggttcaagttgttcaacatccaggtcaaggaggtcacgacgaacgacggcgttacgaccatcgctaataaccttaccagcacgattcaggtcttctcggactcggagtaccaactgccgtacgtcctcggctctgcgcaccagggctgcctccctccgttccctgcggacgtgttcatgattcctcagtacggatatctgactctaaacaacggcagtcagtctgtgggacgttcctccttctactgcctggagtactttccttctcagatgctgagaacgggcaataactttgaattcagctaccagtttgaggacgtgccctttcacagcagctacgcgcacagccaaagcctggaccggctgatgaaccccctcatcgaccagtacctgtactacctgtctcggactcagtccacgggaggtaccgcaggaactcagcagttgctattttctcaggccgggcctaataacatgtcggctcaggccaaaaactggctacccgggccctgctaccggcagcaacgcgtctccacgacactgtcgcaaaataacaacagcaactttgcttggaccggtgccaccaagtatcatctgaatggcagagactctctggtaaatcccggtgtcgctatggcaacgcacaaggacgacgaagagcgattttttccatccagcggagtcttgatgtttgggaaacagggagctggaaaagacaacgtggactatagcagcgttatgctaaccagtgaggaagaaatcaaaaccaccaacccagtggccacagaacagtacggcgtggtggccgataacctgcaacagcaaaacgccgctcctattgtaggggccgtcaacagtcaaggagccttacctggcatggcctggcagaaccgggacgtgtacctgcagggtcctatctgggccaagattcctcacacggacggcaactttcatccttcgccgctgatgggaggctttggactgaaacacccgcctcctcagatcctgattaagaatacacctgttcccgcggatcctccaactaccttcagtcaagccaagctggcgtcgttcatcacgcagtacagcaccggacaggtcagcgtggaaattgaatgggagctgcagaaagagaacagcaagcgctggaacccagagattcagtatacttccaactactacaaatctacaaatgtggactttgctgtcaatactgagggtacttattcagagcctcgccccattggcacccgttacctcacccgtaacctgtaattgcctgttaatcaataaaccggttaattcgtttcagttgaactttggtctctgcgaagggcgaattc

SEQ ID NO: 413 - protein, 738 aa, synthetic construct
  REGION 1..738: note = source = /note="Description of Artificial Sequence: Synthetic polypeptide"
MAADGYLPDWLEDNLSEGIREWWDLKPGAPKPKANQQKQDDGRGLVLPGYKYLGPFNGLDKGEPVNEADAAALEHDKAYDKQLEQGDNPYLKYNHADAEFQERLQEDTSFGGNLGRAVFQAKKRVLEPLGLVEEGAKTAPGKKRPVEPSPQRSPDSSTGIGKTGQQPAKKRLNFGQTGDSESVPDPQPIGEPPAGPSGLGSGTMAAGGGAPMADNNEGADGVGSSSGNWHCDSTWLGDRVITTSTRTWALPTYNNHLYKQISNGTSGGSTNDNTYFGYSTPWGYFDFNRFHCHFSPRDWQRLINNNWGFRPKRLNFKLFNIQVKEVTQNEGTKTIANNLTSTIQVFTDSEYQLPYVLGSAHQGCLPPFPADVFMIPQYGYLTLNNGSQAVGRSSFYCLEYFPSQMLRTGNNFEFSYQFEDVPFHSSYAHSQSLDRLMNPLIDQYLYYLSRTQSTGGTAGTQQLLFSQAGPNNMSAQAKNWLPGPCYRQQRVSTTLSQNNNSNFAWTGATKYHLNGRDSLVNPGVAMATHKDDEERFFPSSGVLMFGKQGAGKDNVDYSSVMLTSEEEIKTTNPVATEQYGVVADNLQQQNAAPIVGAVNSQGALPGMVWQNRDVYLQGPIWAKIPHTDGNFHPSPLMGGFGLKHPPPQILIKNTPVPADPPTTFSQAKLASFITQYSTGQVSVEIEWELQKENSKRWNPEIQYTSNYYKSTNVDFAVNTEGTYSEPRPIGTRYLTRNL

SEQ ID NO: 414 - DNA, 3197 bp, synthetic construct
  misc_feature 1..3197: note = source = /note="Description of Artificial Sequence: Synthetic polynucleotide"
  source 1..3197: mol_type = other DNA
gaattcgccctttctacggctgcgtcaactggaccaatgagaactttcccttcaacgattgcgtcgacaagatggtgatctggtgggaggagggcaagatgacggccaaggtcgtggagtccgccaaggccattctcggcggcagcaaggtgcgcgtggaccaaaagtgcaagtcgtccgcccagatcgaccccacccccgtgatcgtcacctccaacaccaacatgtgcgccgtgattgacgggaacagcaccaccttcgagcaccagcagccgttacaagaccggatgttcaaatttgaactcacccgccgtctggagcacgactttggcaaggtgacaaagcaggaagtcaaagagttcttccgctgggcgcaggatcacgtgaccgaggtggcgcatgagttctacgtcagaaagggtggagccaacaagagacccgcccccgatgacgcggataaaagcgagcccaagcgggcctgcccctcagtcgcggatccatcgacgtcagacgcggaaggagctccggtggactttgccgacaggtaccaaaacaaatgttctcgtcacgcgggcatgcttcagatgctgtttccctgcaagacatgcgagagaatgaatcagaatttcaacatttgcttcacgcacgggaccagagactgttcagaatgtttccccggcgtgtcagaatctcaaccggtcgtcagaaagaggacgtatcggaaactctgtgccattcatcatctgctggggcgggctcccgagattgcttgctcggcctgcgatctggtcaacgtggacctggatgactgtgtttctgagcaataaatgacttaaaccaggtatggctgccgatggttatcttccagattggctcgaggacaacctctctgagggcattcgcgagtggtgggacttgaaacctggagccccgaaacccaaagccaaccagcaaaagcaggacgacggccggggtctggtgcttcctggctacaagtacctcggacccttcaacggactcgacaagggagagccggtcaacgaggcagacgccgcggccctcgagcacgacaaggcctacgacaagcagctcgagcagggggacaacccgtacctcaagtacaaccacgccgacgccgagtttcaggagcgtcttcaagaagatacgtcttttgggggcaacctcgggcgagcagtcttccaggccaagaagcgggttctcgaacctctcggtctggttgaggaaggcgctaagacggctcctggaaagaagagaccggtagagccatcaccccagcgttctccagactcctctacgggcatcggcaagacaggccagcagcccgcgaaaaagagactcaactttgggcagactggcgactcagagtcagtgcccgaccctcaaccaatcggagaaccccccgcaggcccctctggtctgggatctggtacaatggctgcaggcggtggcgctccaatggcagacaataacgaaggcgccgacggagtgggtagttcctcaggaaattggcattgcgattccacatggctgggcgacagagtcatcaccaccagcacccgaacctgggccctccccacctacaacaaccacctctacaagcaaatctccaacgggacatcgggaggaagcaccaacgacaacacctacttcggctacagcaccccctgggggtattttgactttaacagattccactgccacttctcaccacgtgactggcagcgactcatcaacaacaactggggattccggcccaagagactcaacttcaagctcttcaacatccaggtcaaggaggtcacgcagaatgaaggcaccaagaccatcgccaataaccttaccagcacgattcaggtctttacggactcggaataccagctcccgtacgtcctcggctctgcgcaccagggctgcctgcctccgttcccggcggacgtcttcatgattcctcagtacgggtacctgactctgaacaacggcagtcaggccgtgggccgttcctccttctactgcctggagtactttccttctcaaatgctgagaacgggcaacaactttgagttcagctaccagtttgaggacgtgccttttcacagcagctacgcgcacagccaaagcctggaccggctgatgaaccccctcatcgaccagtacctgtactacctgtctcggactcagtccacgggaggtaccgcaggaactcagcagttgctattttctcaggccgggcctaataacatgtcggctcaggccaaaaactggctacccgggccctgctaccggcagcaacgcgtctccacgacactgtcgcaaaataacaacagcaactttgcttggaccggtgccaccaagtatcatctgaatggcagagactctctggtaaatcccggtgtcgctatggcaacgcacaaggacgacgaagagcgattttttccatccagcggagtcttgatgtttgggaaacagggagctggaaaagacaacgtggactatagcagcgttatgctaaccagtgaggaagaaatcaaaaccaccaacccagtggccacagaacagtacggcgtggtggccgataacctgcaacagcaaaacgccgctcctattgtaggggccgtcaacagtcaaggagccttacctggcatggtctggcagaaccgggacgtgtacctgcagggtcctatctgggccaagattcctcacacggacggcaactttcatccttcgccgctgatgggaggctttggactgaaacacccgcctcctcagatcctgattaagaatacacctgttcccgcggatcctccaactaccttcagtcaagccaagctggcgtcgttcatcacgcagtacagcaccggacaggtcagcgtggaaattgaatgggagctgcagaaagagaacagcaagcgctggaacccagagattcagtatacttccaactactacaaatctacaaatgtggactttgctgtcaatactgagggtacttattcagagcctcgccccattggcacccgttacctcacccgtaacctgtaattgcctgttaatcaataaaccggttaattcgtttcagttgaactttggtctctgcgaagggcgaattcgtttaaacctgcaggactagtccctttagtgagggttaattctgagcttggcgtaatcatgggtcatag

SEQ ID NO: 415 - protein, 735 aa, synthetic construct
  REGION 1..735: note = source = /note="Description of Artificial Sequence: Synthetic polypeptide"
MAADGYLPDWLEDNLSEGIREWWDLKPGAPKPKANQQKQDDGRGLVLPGYKYLGPFNGLDKGEPVNEADAAALEHDKAYDKQLEQGDNPYLKYNHADAEFQERLQEDTSFGGNLGRAVFQAKKRVLEPLGLVEEGAKTAPGKKRPVEPSPQRSPDSSTGIGKTGQQPAKKRLNFGQTGDSESVPDPQPIGEPPAGPSGLGSGTMAAGGGAPMADNNEGADGVGSSSGNWHCDSTWLGDRVITTSTRTWALPTYNNHLYKQISNGTSGGSTNDNTYFGYSTPWGYFDFNRFHCHFSPRDWQRLINNNWGFRPRKLRFKLFNIQVKEVTTDDGVTTIANNLTSTIQVFSDSEYQLPYVLGSAHQGCLPPFPADVFMIPQYGYLTLNNGSQSVGRSSFYCLEYFPSQMLRTGNNFEFSYTFEEVPFHSSYAHSQSLDRLMNPLIDQYLYYLARTQSTTGSTRELQFHQAGPNTMAEQSKNWLPGPCYRQQRLSKNIDSNNNSNFAWTGATKYHLNGRNSLTNPGVAMATNKDDEDQFFPINGVLVFGKTGAANKTTLENVLMTSEEEIKTTNPVATEEYGVVSSNLQSSTAGPQTQTVNSQGALPGMVWQNRDVYLQGPIWAKIPHTDGNFHPSPLMDGFGLKHPPPQILIKNTPVPANPPEVFTPAKFASFITQYSTGQVSVEIEWELQKENSKRWNPEIQYTSNYAKSNNVEFAVNNEGVYTEPRPIGTRYLTRNL

SEQ ID NO: 416 - DNA, 3276 bp, synthetic construct
  misc_feature 1..3276: note = source = /note="Description of Artificial Sequence: Synthetic polynucleotide"
  source 1..3276: mol_type = other DNA
gaattcgcccttcgcagagaccaaagttcaactgaaacgaattaaccggtttattgattaacaggcaattacaggttacgggtgaggtaacgggtgccaatggggcgaggctcagtataaaccccttcgttgttgacagcaaattccacattattagacttggcataatttgaggtgtactgaatctctggattccagcgtttgctgttttctttctgcagttcccactcgatctccacgctgacctggccggtgctgtactgcgtgataaatgaggcaaacttggcaggagtaaacacctctggaggattagcaggtaccggggtgtttttgatgagaatttgaggaggcgggtgtttgagtccaaatccgtccatcaggggagacgggtgaaagttgccgtccgtgtgaggaattttggcccagatgggaccctgcaggtacacgtcccggttctgccagaccatgccgggcagagccccctggctgttgacagtctgtgtctggggtccggccgtagacgattgcaggttgctggagaccacaccgtattcttctgtagccacgggattggtggttttgatctcctcctcgctggtcattagcacgttttccagcgttgtcttgttggcagcccccgttttgccaaaaaccagcactccgttgatgggaaagaactggtcctcgtcgtccttgttggtggccatggctacgcccgggttggttaatgaatttctaccattcagatggtatttagtggccccggtccaggcaaagttactgttgttgttgctgtctatgttttttgacagtctctgctgccgataacagggtccgggcagccagttctttgattgctcggccatggtgttgggcccagcctgatggaactgcagctcccttgtggaccccgtagtgctctgggtccgggccaggtagtacaggtactggtcgatgaggggattcatcagccggtccaggctctggctatgcgcatagctgctgtggaaaggcacttcctcaaaggtgtagctgaattcaaagttattgcccgttctcagcatctgagaaggaaagtactccaggcagtagaaggaggaacgtcccacagactgactgccgttgtttagagtcagatatccgtactgaggaatcatgaacacgtccgcagggaacggagggaggcagccctggtgcgcagagccgaggacgtacggcagttggtactccgagtccgagaagacctgaatcgtgctggtaaggttattagcgatggtcgtaacgccgtcgtccgtcgtgacctccttgacctggatgttgaacaacttgaaccgcagctttctgggccggaatccccagttgttgttgatgagtcgctgccagtcacgtggtgagaagtggcagtggaatctgttaaagtcaaaatacccccagggggtgctgtagccgaagtaggtgttgtcgttggtgcttcctcccgatgtcccgttggagatttgcttgtagaggtggttgttgtaggtggggagggcccaggttcgggtgctggtggtgatgactctgtcgcccagccatgtggaatcgcaatgccaatttcctgaggaactacccactccgtcggcgccttcgttattgtctgccattggagcgccaccgcctgcagccattgtaccagatcccagaccagaggggcctgcggggggttctccgattggttgagggtcgggcactgactctgagtcgccagtctgcccaaagttgagtctctttttcgcgggctgctggcctgtcttgccgatgcccgtagaggagtctggagaacgctggggtgatggctctaccggtctcttctttccaggagccgtcttagcgccttcctcaaccagaccgagaggttcgagaacccgcttcttggcctggaagactgctcgcccgaggttgcccccaaaagacgtatcttcttgaagacgctcctgaaactcggcgtcggcgtggttgtacttgaggtacgggttgtccccctgctcgagctgcttgtcgtaggccttgtcgtgctcgagggccgcggcgtctgcctcgttgaccggctctcccttgtcgagtccgttgaagggtccgaggtacttgtagccaggaagcaccagaccccggccgtcgtcctgcttttgctggttggctttgggtttcggggctccaggtttcaagtcccaccactcgcgaatgccctcagagaggttgtcctcgagccaatctggaagataaccatcggcagccatacctggtttaagtcatttattgctcagaaacacagtcatccaggtccacgttgaccagatcgcaggccgagcaagcaatctcgggagcccgccccagcagatgatgaatggcacagagtttccgatacgtcctctttctgacgaccggttgagattctgacacgccggggaaacattctgaacagtctctggtcccgtgcgtgaagcaaatgttgaaattctgattcattctctcgcatgtcttgcagggaaacagcatctgaagcatgcccgcgtgacgagaacacttgttttggtacctgtcggcaaagtccaccggagctccttccgcgtctgacgtcgatggatgcaaaatgtcgcaaaagcactcacgtgacagctaatacaggaccactcccctatgacgtgatttacgtcagcgctatgcccgcgtgacgagaacatttgttttggtacctgtcggcaaagtccaccggagctccttccgcgtctgacgtcgatggatccgcgactgaggggcaggcccgcttgggctcgcttttatccgcgtcatcgggggcgggtctcttgttggctccaccctttctgacgtagaactcatgcgccacctcggtcacgtgatcctgcgcccagcggaagaactctttgacttcctgctttgtcaccttgccaaagtcatgctccagacggcgggtgagttcaaatttgaacatccggtcctgcaacggctgctggtgctcgaaggtggtgctgttcccgtcaatcacggcgcacatgttggtgttggaagtgacgatcacgggggtgggatcgatctgggcggaagacttgcacttttggtccacgcgcaccttgctgccgccgagaatggccttggcggactccacgaccttggccgtcatcttgccctcctcccaccagatcaccatcttgtcgacgcaatcgttgaagggaaagttctcattggtccagttgacgcagccgtagaaagggcgaattc

SEQ ID NO: 417 - protein, 738 aa, synthetic construct; identical to SEQ ID NO: 82
  REGION 1..738: note = source = /note="Description of Artificial Sequence: Synthetic polypeptide"

SEQ ID NO: 418 - protein, 738 aa, synthetic construct
  REGION 1..738: note = source = /note="Description of Artificial Sequence: Synthetic polypeptide"
MAADGYLPDWLEDNLSEGIREWWDLKPGAPKPKANQQKQDDGRGLVLPGYKYLGPFNGLDKGEPVNAADAAALEHDKAYDQQLKAGDNPYLRYNHADAEFQERLQEDTSFGGNLGRAVFQAKKRVLEPLGLVEEGAKTAPGKKRPVEPSPQRSPDSSTGIGKKGHQPARKRLNFGQTGDSESVPDPQPIGEPPAGPSGLGSGTMAAGGGAPMADNNEGADGVGSSSGNWHCDSTWLGDRVITTSTRTWALPTYNNHLYKQISNGTSGGSTNDNTYFGYSTPWGYFDFNRFHCHFSPRDWQRLINNNWGFRPKRLNFKLFNIQVKEVTQNEGTKTIANNLTSTIQVFTDSEYQLPYVPGSAHQGCLPPFPADVFMIPQYGYLTLNNGSQAVGRSSFYCLEYFPSQMLRTGNNFEFSYTFEDVPFHSSYAHSQSLDRLMNPLIDQYLYYLSRTQSTGGTQGTQQLLFSQAGPANMSAQAKNWLPGPCYRQQRVSTTLSQNNNSNFAWTGATKYHLNGRDSLVNPGVAMATHKDDEERFFPSSGVLMFGKQGAGKDNVDYSSVMLTSEEEIKTTNPVATEQYGVVADNLQQTNGAPIVGTVNSQGALPGMVWQNRDVYLQGPIWAKIPHTDGNFHPSPLMGGFGLKHPPPQILIKNTPVPADPPTTFSQAKLASFITQYSTGQVSVEIEWELQKENSKRWNPEIQYTSNYYKSTNVDFAVNTEGTYSEPRPIGTRYLTRNL

SEQ ID NO: 419 - protein, 738 aa, synthetic construct; identical to SEQ ID NO: 80
  REGION 1..738: note = source = /note="Description of Artificial Sequence: Synthetic polypeptide"

SEQ ID NO: 420 - protein, 728 aa, synthetic construct
  REGION 1..728: note = source = /note="Description of Artificial Sequence: Synthetic polypeptide"
MAADGYLPDWLEDNLSEGIREWWDLKPGAPKPKANQQKQDDGRGLVLPGYKYLGPFNGLDKGEPVNEADAAALEHDKAYDKQLEQGDNPYLKYNHADAEFQERLQEDTSFGGNLGRAVFQAKKRVLEPLGLVEEGAKTAPGKKRPIESPDSSTGIGRKGQQPAKKKLNFGQTGDSESVPDPQPIGEPPAGPSGLGSGTMAAGGGAPMADNNEGADGVGNASGNWHCDSTWLGDRVITTSTRTWALPTYNNHLYKQISSQSGATNDNHFFGYSTPWGYFDFNRFHCHFSPRDWQRLINNNWGFRPRKLRFKLFNIQVKEVTTNDGVTTIANNLTSTIQVFSDSEYQLPYVLGSAHQGCLPPFPADVFMIPQYGYLTLNNGSQSVGRSSFYCLEYFPSQMLRTGNNFEFSYTFEEVPFHSSYAHSQSLDRLMNPLIDQYLYYLARTQSTTGSTRELQFHQAGPNTMAEQSKNWLPGPCYRQQRLSKNIDSNNNSNFAWTGATKYHLNGRNSLTNPGVAMATNKDDEDQFFPINGVLVFGKTGAANKTTLENVLMTSEEEIKTTNPVATEEYGVVSSNLQSSTAGPQTQTVNSQGALPGMVWQNRDVYLQGPIWAKIPHTDGNFHPSPLMGGFGLKHPPPQILIKNTPVPANPPEVFTPAKFASFITQYSTGQVSVEIEWELQKENSKRWNPEIQYTSNYAKSNNVEFAVNNEGVYTEPRPIGTRYLTRNL

SEQ ID NO: 421 - DNA, 2489 bp, synthetic construct
  misc_feature 1..2489: note = source = /note="Description of Artificial Sequence: Synthetic polynucleotide"
  source 1..2489: mol_type = other DNA
gaattcgccctttctacggctgcgtcaactggaccaatgagaactttcccttcaacgattgcgtcgacaagatggtgatctggtgggaggagggcaagatgacggccaaggtcgtgaagtccgccaaggccattcatcatctgctggggcgggctcccgagattgcttgctcggcctgcgatctggtcaacgtggacctggatgactgtgtttctgagcaataaatgacttaaaccaggtatggctgccgatggttatcttccagattggctcgaggacaacctctctgagggcattcgcgagtggtgggacttgaaacctggagccccgaaacccaaagccaaccagcaaaagcaggacgacggccggggtctggtgcttcctggctacaagtacctcggacccttcaacggactcgacaagggagagccggtcaacgaggcagacgccgcggccctcgagcacgacaaggcctacgacaagcagctcgagcagggggacaacccgtacctcaagtacaaccacgccgacgccgagtttcaggagcgtcttcaagaagatacgtcttttgggggcaacctcgggcgagcagtcttccaggccaagaagcgggttctcgaacctctcggtctggttgaggaaggcgctaagacggctcctggaaagaagagacccatagaatcccccgactcctccacgggcatcggcaggaaaggccagcagcccgctaaaaagaagctcaactttgggcagactggcgactcagagtcagtgcccgaccctcaaccaatcggagaaccccccgcaggcccctctggtctgggatctggtacaatggctgcaggcggtggcgctccaatggcagacaataacgaaggcgccgacggagtgggtaatgcctccggaaattggcattgcgattccacatggctgggcgacagagtcatcaccaccagcacccgcacctgggccctgcccacctacaacaaccacctctacaagcagatatcaagtcagagcggggctaccaacgacaaccacttcttcggctacagcaccccctggggctattttgacttcaacagattccactgccacttctcaccacgtgactggcagcgactcatcaacaacaactggggattccggcccagaaagctgcggttcaagttgttcaacatccaggtcaaggaggtcacgacgaacgacggcgttacgaccatcgccaataaccttaccagcacgattcaggtcttctcggactcggagtaccaactgccgtacgtcctcggctctgcgcaccagggctgcctccctccgttccctgcggacgtgttcatgattcctcagtacggatatctgactctaaacaacggcagtcagtctgtgggacgttcctccttctactgcctggagtactttccttctcagatgctgagaacgggcaataactttgaattcagctacacctttgaggaagtgcctttccacagcagctatgcgcacagccagagcctggaccggctgatgaatcccctcatcgaccagtacctgtactacctggcccggacccagagcactacggggtccacaagggagctgcagttccatcaggctgggcccaacaccatggccgagcaatcaaagaactggctgcccggaccctgttatcggcagcagagactgtcaaaaaacatagacagcaacaacaacagtaactttgcctggaccggggccactaaataccatctgaatggtagaaattcattaaccaacccgggcgtagccatggccaccaacaaggacgacgaggaccagttctttcccatcaacggagtgctggtttttggcaaaacgggggctgccaacaagacaacgctggaaaacgtgctaatgaccagcgaggaggagatcaaaaccaccaatcccgtggctacagaagaatacggtgtggtctccagcaacctgcaatcgtctacggccggaccccagacacagactgtcaacagccagggggctctgcccggcatggtctggcagaaccgggacgtgtacctgcagggtcccatctgggccaaaattcctcacacggacggcaactttcacccgtctcccctgatgggcggatttggactcaaacacccgcctcctcaaattctcatcaaaaacaccccggtacctgctaatcctccagaggtgtttactcctgccaagtttgcctcatttatcacgcagtacagcaccggccaggtcagcgtggagatcgagtgggaactgcagaaagaaaacagcaaacgctggaatccagagattcagtacacctcaaattatgccaagtctaataatgtggaatttgctgtcaacaacgaaggggtttatactgagcctcgccccattggcacccgttacctcacccgtaacctgtaattgcctgttaatcaataaaccggttaattcgtttcagttgaactttggtcaagggcgaattc

SEQ ID NO: 422 - protein, 728 aa, synthetic construct
  REGION 1..728: note = source = /note="Description of Artificial Sequence: Synthetic polypeptide"
MAADGYLPDWLEDNLSEGIREWWDLKPGAPKPKANQQKQDDGRGLVLPGYKYLGPFNGLDKGEPVNAADAAALEHDKAYDQQLKAGDNPYLRYNHADAEFQERLQEDTSFGGNLGRAVFQAKKRVLEPLGLVEEGAKTAPGKKRPIESPDSSTGIGKKGQQPAKKKLNFGQTGDSESVPDPQPIGEPPAGPSGLGSGTMAAGGGAPMADNNEGADGVGNASGNWHCDSTWLGDRVITTSTRTWALPTYNNHLYKQISSQSGATNDNHFFGYSTPWGYFDFNRFHCHFSPRDWQRLINNNWGFRPRKLRFKLFNIQVKEVTTNDGVTTIANNLTSTIQVFSDSEYQLPYVLGSAHQGCLPPFPADVFMIPQYGYLTLNNGSQSVGRSSFYCLEYFPSQMLRTGNNFEFSYTFEEVPFHSSYAHSQSLDRLMNPLIDQYLYYLARTQSTTGSTRELQFHQAGPNTMAEQSKNWLPGPCYRRQRLSKDIDSNNNSNFAWTGATKYHLNGRNSLTNPGVAMATNKDDEDQFFPINGVLVFGKTGAANKTTLENVLMTSEEEIKTTNPVATEEYGVVSSNLQSSTAGPQTQTVNSQGALPGMVWQNRDVYLQGPIWAKIPHTDGNFHPSPLMGGFGLKHPPPQILIKNTPVPANPPEVFTPAKFASFITQYSTGQVSVEIEWELQKENSKRWNPEIQYTSNYAKSNNVEFAVNNEGVYTEPRPIGTRYLTRNL

SEQ ID NO: 423 - DNA, 3098 bp, synthetic construct
  misc_feature 1..3098: note = source = /note="Description of Artificial Sequence: Synthetic polynucleotide"
  source 1..3098: mol_type = other DNA
gaattcgccctttctacggctgcgtcaactggaccaatgagaactttcccttcaacgattgcgtcgacaagatggtgatctggtgggaggagggcaagatgacggccaaggtcgtggagtccgccaaggccattctcggcggcagcaaggtgcgcgtggaccaaaagtgcaagtcttccgcccagatcgatcccacccccgtgatcgtcacttccaacaccaacatgtgcgccgtgattgacgggaacagcaccaccttcgagcaccagcagccgttacaagaccggatgttcaaatttgaactcacccgccgtctggagcacgactttggcaaggtgacaaagcaggaagtcaaagagttcttccgctgggcgcaggatcacgtgaccgaggtggcgcatgagttctacgtcagaaagggtggagccaacaagagacccgcccccgatgacgcggataaaagcgagcccaagcgggcctgcccctcagtcgcggatccatcgacgtcagacgcggaaggagctccggtggactttgccgacaggtaccaaaacaaatgttctcgtcacgcgggcatgcttcagatgctgtttccctgcaagacatgcgagagaatgaatcagaatttcaacatttgcttcacgcacgggaccggagactgttcagaatgtttccccggcgtgtcagaatctcaaccggtcgtcagaaagaggacgtatcggaaactctgtgccattcatcatctgctggggcgggctcccgagattgcttgctcggcctgcgatctggtcaacgtggacctggatgactgtgtttctgagcaataaatgacttaaaccaggtatggctgccgatggttatcttccagattggctcgaggacaacctctctgagggcattcgcgagtggtgggacttgaaacctggagccccgaaacccaaagccaaccagcaaaagcaggacgacggccggggtctggtgcttcctggctacaagtacctcggacccttcaacggactcgacaagggagagccggtcaacgcggcggacgcagcggccctcgagcacgacaaggcctacgaccagcagctcaaagcgggtgacaatccgtacctgcggtataaccacgccgacgccgagtttcaggagcgtcttcaagaagatacgtcttttgggggcaacctcgggcgagcagtcttccaggccaagaagcgggttctcgaacctctcggtctggttgaggaaggcgctaagacggctcctggaaagaagagacccatagaatcccccgactcctccacgggcatcggcaagaaaggccagcagcccgctaaaaagaagctcaactttgggcagactggcgactcagagtcagtgcccgaccctcaaccaatcggagaaccccccgcaggcccctctggtctgggatctggtacaatggctgcaggcggtggcgctccaatggcagacaataacgaaggcgccgacggagtgggtaatgcctccggaaattggcattgcgattccacatggctgggcgacagagtcatcaccaccagcacccgcacctgggccctgcccacctacaacaaccacctctacaagcagatatcaagtcagagcggggctaccaacgacaaccacttcttcggctacagcaccccctggggctattttgacttcaacagattccactgccacttctcaccacgtgactggcagcgactcatcaacaacaactggggattccggcccagaaagctgcggttcaagttgttcaacatccaggtcaaggaggtcacgacgaacgacggcgttacgaccatcgctaataaccttaccagcacgattcaggtcttctcggactcggagtaccaactgccgtacgtcctcggctctgcgcaccagggctgcctccctccgttccctgcggacgtgttcatgattcctcagtacggatatctgactctaaacaacggcagtcagtctgtgggacgttcctccttctactgcctggagtactttccttctcagatgctgagaacgggcaataactttgaattcagctacacctttgaggaagtgcctttccacagcagctatgcgcacagccagagcctggaccggctgatgaatcccctcatcgaccagtacctgtactacctggcccggacccagagcactacggggtccacaagggagctgcagttccatcaggctgggcccaacaccatggccgagcaatcaaagaactggctgcccggaccctgttatcggcggcagagactgtcaaaagacatagacagcaacaacaacagtaactttgcctggaccggggccactaaataccatctgaatggtagaaattcattaaccaacccgggcgtagccatggccaccaacaaggacgacgaggaccagttctttcccatcaacggagtgctggtttttggcaaaacgggggctgccaacaagacaacgctggaaaacgtgctaatgaccagcgaggaggagatcaaaaccaccaatcccgtggctacagaagaatacggtgtggtctccagcaacctgcaatcgtctacggccggaccccagacacagactgtcaacagccagggggctctgcccggcatggtctggcagaaccgggacgtgtacctgcagggtcccatctgggccaaaattcctcacacggacggcaactttcacccgtctcccctgatgggcggatttggactcaaacacccgcctcctcaaattctcatcaaaaacaccccggtacctgctaatcctccagaggtgtttactcctgccaagtttgcctcatttatcacgcagtacagcaccggccaggtcagcgtggagatcgagtgggaactgcagaaagagaacagcaaacgctggaatccagagattcagtacacctcaaattatgccaagtctaataatgtggaatttgctgtcaacaacgaaggggtttatactgagcctcgccccattggcacccgttacctcacccgtaacctgtaattacttgttaatcaataaaccggttgattcgtttcagttgaactttggtctctgcgaagggcgaattc

SEQ ID NO: 424 - protein, 685 aa, synthetic construct
  REGION 1..685: note = source = /note="Description of Artificial Sequence: Synthetic polypeptide"
MAADGYLPDWLEDNLSEGIREWWDLKPGAPKPKANQQKQDDGRGLVLPGYKYLGPFNGLDKGEPVNEADAAALEHDKAYDKQLEQGDNPYLKYNHADAEFQERLQEDTSFGGNLGRAVFQAKKRVLEPLGLVEEGAKTAPGKKRPVEPSPQRSPDSSTGIGKTGQQPAKKRLNFGQTGDSESVPDPQPIGEPPAGPSGLGSGTMAAGGGAPMADNNEGADGVGSSSGNWHCDSTWLGDRVITTSTRTWALPTYNNHLYKQISNGTSGGSTNDNTYFGYSTPWGYFDFNRFHCHFSPRDWQRLINNNWGFRPKRLNFKLFNIQVKEVTQNEGTKTIANNLTSTIQVFTDSEYQLPYVLGSAHQGCLPPFPADVFMIPQYGYLTLNNGSQAVGRSSFYCLEYFPSQMLRTGNNFEFSYQFEDVPFHSSYAHSQSLDRLTNPLIDQYLYYLARTQSTTGSTRGLQFHQAGPNTMAEQSKNWLPGPCYRQQRLSKNIDSNNNSNFAWTGATKYHLNGRNSLTNPGVAMATNKDDEDQFFPINGVLVFGKTGAANKTTLENVLMTSEEEIKTTNPVATEEYGVVSSNLQSSTAGPQTQTVNSQGALPGMVWQNRDVYLQGPIWAKIPHTDGNFHPSPLMGGFGLKHPPPQILIKYTSNYYKSTNVDFAVNTEGTYSEPRPIGTRYLTRNL

SEQ ID NO: 425 - DNA, 2969 bp, synthetic construct
  misc_feature 1..2969: note = source = /note="Description of Artificial Sequence: Synthetic polynucleotide"
  source 1..2969: mol_type = other DNA
gaattcgccctttctacggctgcgtcaactggaccaatgagaactttcccttcaacgattgcgtcgacaagatggtgatctggtgggaggagggcaagatgacggccaaggtcgtggagtccgccaaggccattctcggcggcagcaaggtgcgcgtggaccaaaagtgcaagtcgtccgcccagatcgaccccacccccgtgatcgtcacctccaacaccaacatgtgcgccgtgattgacgggaacagcaccaccttcgagcaccagcagccgttacaagaccggatgttcaaatttgaactcacccgccgtctggagcacgactttggcaaggtgacaaagcaggaagtcaaagagttcttccgctgggcgcaggatcacgtgaccgaggtggcgcatgagttctacgtcagaaagggtggagccaacaagagacccgcccccgatgacgcggataaaagcgagcccaagcgggcctgcccctcagtcgcggatccatcgacgtcagacgcggaaggagctccggtggactttgccgacaggtaccaaaacaaatgttctcgtcacgcgggcatgcttcagatgctgtttccctgcaagacatgcgagagaatgaatcagaatttcaacatttgcttcacgcacgggaccagagactgttcagaatgtttccccggcgtgtcagaatctcaaccggtcgtcagaaagaggacgtatcggaaactctgtgccattcatcatctgctggggcgggctcccgagattgcttgctcggcctgcgatctggtcaacgtggacctggatgactgtgtttctgagcaataaatgacttaaaccaggtatggctgccgatggttatcttccagattggctcgaggacaacctctctgagggcatccgcgagtggtgggacttgaaacctggagccccgaaacccaaagccaaccagcaaaagcaggacgacggccggggtctggtgcttcctggctacaagtacctcggacccttcaacggactcgacaagggagagccggtcaacgaggcagacgccgcggccctcgagcacgacaaggcctacgacaagcagctcgagcagggggacaacccgtacctcaagtacaaccacgccgacgccgagtttcaggagcgtcttcaagaagatacgtcttttgggggcaacctcgggcgagcagtcttccaggccaagaagcgggttctcgaacctctcggtctggttgaggaaggcgctaagacggctcctggaaagaagagaccggtagagccatcaccccagcgttctccagactcctctacgggcatcggcaagacaggccagcagcccgcgaaaaagagactcaactttgggcagactggcgactcagagtcagtgcccgaccctcaaccaatcggagaaccccccgcaggcccctctggtctgggatctggtacaatggctgcaggcggtggcgctccaatggcagacaataacgaaggcgccgacggagtgggtagttcctcaggaaattggcattgcgattccacatggctgggcgacagagtcatcaccaccagcacccgaacctgggccctccccacctacaacaaccacctctacaagcaaatctccaacgggacatcgggaggaagcaccaacgacaacacctacttcggctacagcaccccctgggggtattttgactttaacagattccactgccacttctcaccacgtgactggcagcgactcatcaacaacaactggggattccggcccaagagactcaacttcaagctcttcaacatccaggtcaaggaggtcacgcagaatgaaggcaccaagaccatcgccaataaccttaccagcacgattcaggtctttacggactcggaataccagctcccgtacgtcctcggctctgcgcaccagggctgcctgcctccgttcccggcggacgtcttcatgattcctcagtacgggtacctgactctgaacaacggcagtcaggccgtgggccgttcctccttctactgcctggagtactttccttctcaaatgctgagaacgggcaacaactttgagttcagctaccagtttgaggacgtgccttttcacagcagctacgcgcacagccaaagcctggaccggctgacgaaccccctcatcgaccagtacctgtactacctggcccggacccagagcactacggggtccacaagggggctgcagttccatcaggctgggcccaacaccatggccgagcaatcaaagaactggctgcccggaccctgttatcggcagcagagactgtcaaaaaacatagacagcaacaacaacagtaactttgcctggaccggggccactaaataccatctgaatggtagaaattcattaaccaacccgggcgtagccatggccaccaacaaggacgacgaggaccagttctttcccatcaacggagtgctggtttttggcaaaacgggggctgccaacaagacaacgctggaaaacgtgctaatgaccagcgaggaggagatcaaaaccaccaatcccgtggctacagaagaatacggtgtggtctccagcaacctgcaatcgtctacggccggaccccagacacagactgtcaacagccagggggctctgcccggcatggtctggcagaaccgggacgtgtacctgcagggtcccatctgggccaaaattcctcacacggacggcaactttcacccgtctcccctgatgggcggatttggactcaaacacccgcctcctcaaattctcatcaagtatacttccaactactacaaatctacaaatgtggactttgctgtcaatactgagggtacttattcagagcctcgccccattggcacccgttacctcacccgtaacctgtaattgcctgttaatcaataaaccggttaattcgtttcagttgaactttggtctctgcgaagggcgaattc

SEQ ID NO: 426 - protein, 733 aa, synthetic construct
  REGION 1..733: note = source = /note="Description of Artificial Sequence: Synthetic polypeptide"
MAADGYLPDWLEDNLSEGIREWWDLKPGAPKPKANQQKQDDGRGLVLPGYKYLGPFNGLDKGEPVNAADAAALEHDKAYDQQLKAGDNPYLRYNHADAEFQERLQEDTSFGGNLGRAVFQAKKRVLEPLGLVEEGAKTAPGKKRPIESPDSSTGIGKKGQQPAKKKLNFGQTGDSESVPDPQPIGEPPAGPSGLGSGTMAAGGGAPMADNNEGADGVGSSSGNWHCDSTWLGDRVITTSTRTWALPTYNNHLYKQISNGTSGGSTNDNTYFGYSTPWGYFDFNRFHCHFSPRDWQRLINNNWGFRPKRLNFKLFNIQVKEVTQNEGTKTIANNLTSTIQVFTDSEYQLPYVLGSAHQGCLPPFPADVFMIPQYGYLTLNNGSQAVGRSSFYCLEYFPSQMLRTGNNFEFSYQFEDVPFHSSYAHSQSLDRLMNPLIDQYLYYLSRTQSTGGTAGTQQLLFSQAGPNNMSAQAKNWLPGPCYRQQRVSTTVSQNNNSNFAWTGATKYHLNGRDSLVNPGVAMATHKGDEERFFPSSGVLMFGKQGAGKDNVDYSSVMLTSEEEIKTTNPVATEQYGVVADNLQQQNAAPIVGAVNSQGALPGMVWQNRDVYLQGPIWAKIPHTDGNFHPSPLMGGFGLKHPPPQILIKNTPVPADPPTTFSQAKLASFITQYSTGQVSVEIEWELQKENSKRWNPEIQYTSNYYKSTNVDFAVNTEGTYSEPRPIGTRYLTRSL

SEQ ID NO: 427 - DNA, 3113 bp, synthetic construct
  misc_feature 1..3113: note = source = /note="Description of Artificial Sequence: Synthetic polynucleotide"
  source 1..3113: mol_type = other DNA
gaattcgccctttctacggctgcgtcaactggaccaatgagaactttcccttcaacgattgcgtcgacaagatggtgatctggtgggaggagggcaagatgacggccaaggtcgtggagtccgccaaggccattctcggcggcagcaaggtgcgcgtggaccaaaagtgcaagtcgtccgcccagatcgatcccacccccgtgatcgtcacttccaacaccaacatgtgcgccgtgattgacgggaacagcaccaccttcgagcaccagcagccgttacaagaccggatgttcaaatttgaactcacccgccgtctggagcatgactttggcaaggtgacaaagcaggaagtcaaagagttcttccgctgggcgcaggatcacgtgaccgaggtggcgcatgagttctacgtcagaaagggtggagccaacaagagacccgcccccgatgacgcggataaaagcgagcccaagcgggcctgcccctcagtcgcggatccatcgacgtcagacgcggaaggagctccggtggactttgccgacaggtaccaaaacaaatgttctcgtcacgcgggcatgcttcagatgctgtttccctgcaagacatgcgagagaatgaatcagaatttcaacatttgcttcacgcacgggaccagagactgttcagaatgtttccccggcgtgtcagaatctcaaccggtcgtcagaaagaggacgtatcggaaactctgtgccattcatcatctgctggggcgggctcccgagattgcttgctcggcctgcgatctggtcaacgtggacctggatgactgtgtttctgagcaataaatgacttaaaccaggtatggctgccgatggttatcttccagattggctcgaggacaacctctctgagggcattcgcgagtggtgggacttgaaacctggagccccgaaacccaaagccaaccagcaaaagcaggacgacggccggggtctggtgcttcctggctacaagtacctcggacccttcaacggactcgacaagggggagcccgtcaacgcggcggacgcagcggccctcgagcacgacaaggcctacgaccagcagctcaaagcgggtgacaatccgtacctgcggtataaccacgccgacgccgagtttcaggagcgtcttcaagaagatacgtcttttgggggcaacctcgggcgagcagtcttccaggccaagaagcgggttctcgaacctctcggtctggttgaggaaggcgctaagacggctcctggaaagaagagacccatagaatcccccgactcctccacgggcatcggcaagaaaggccagcagcccgctaaaaagaagctcaactttgggcagactggcgactcagagtcagtgcccgaccctcaaccaatcggagaaccccccgcaggcccctctggtctgggatctggtacaatggctgcaggcggtggcgctccaatggcagacaataacgaaggcgccgacggagtgggtagttcctcaggaaattggcattgcgattccacatggctgggcgacagagtcatcaccaccagcacccgaacctgggccctccccacctacaacaaccacctctacaagcaaatctccaacgggacatcgggaggaagcaccaacgacaacacctacttcggctacagcaccccctgggggtattttgactttaacagattccactgccacttctcaccacgtgactggcagcgactcatcaacaacaactggggattccggcccaagagactcaacttcaagctcttcaacatccaggtcaaggaggtcacgcagaatgaaggcaccaagaccatcgccaataaccttaccagcacgattcaggtctttacggactcggaataccagctcccgtacgtcctcggctctgcgcaccagggctgcctgcctccgttcccggcggacgtcttcatgattcctcagtacgggtacctgactctgaacaacggcagtcaggccgtgggccgttcctccttctactgcctggagtactttccttctcaaatgctgagaacgggcaacaactttgagttcagctaccagtttgaggacgtgccttttcacagcagctatgcgcacagccaaagcctggaccggctgatgaaccccctcatcgaccagtacctgtactacctgtctcggactcagtccacgggaggtaccgcaggaactcagcagttgctattttctcaggccgggcctaataacatgtcggctcaggccaaaaactggctacccgggccctgctaccggcagcaacgcgtctccacgacagtgtcgcaaaataacaacagcaactttgcttggaccggtgccaccaagtatcatctgaatggcagagactctctggtaaatcccggtgtcgctatggcaacgcacaagggcgacgaagagcgattttttccatccagcggagtcttgatgtttgggaaacagggagctggaaaagacaacgtggactatagcagcgttatgctaaccagtgaggaagaaatcaaaaccaccaacccagtggccacagaacagtacggcgtggtggccgataacctgcaacagcaaaacgccgctcctattgtaggggccgtcaacagtcaaggagccttacctggcatggtctggcagaaccgggacgtgtacctgcagggtcctatctgggccaagattcctcacacggacggcaactttcatccttcgccgctgatgggaggctttggactgaaacacccgcctcctcagatcctgattaagaatacacctgttcccgcggatcctccaactaccttcagtcaagccaagctggcgtcgttcatcacgcagtacagcaccggacaggtcagcgtggaaattgaatgggagctgcagaaagagaacagcaagcgctggaacccagagattcagtatacttccaactactacaaatctacaaatgtggactttgctgtcaatactgagggtacttattcagagcctcgccccattggcacccgttacctcacccgtagcctgtaattgcctgttaatcaataaaccggttgattcgtttcagttgaactttggtctctgcgaagggcgaattc

SEQ ID NO: 428 - protein, 738 aa, synthetic construct
  REGION 1..738: note = source = /note="Description of Artificial Sequence: Synthetic polypeptide"
MAADGYLPDWLEDNLSEGIREWWDLKPGAPKPKANQQKQDDGRGLVLPGYKYLGPFNGLDKGEPVNAADAAALEHDKAYDQQLKAGDNPYLRYNHADAEFQERLQEDTSFGGNLGRAVFQAKKRVLEPLGLVEEGAKTAPGKKRPVEPSPQRSPDSSTGIGKTGQQPAKKRLNFGQTGDSESVPDPQPIGEPPAGPSGLGSGTMAAGGGAPMADNNEGADGVGSSSGNWHCDSTWLGDRVITTSTRTWALPTYNNHLYKQISNGTSGGSTNDNTYFGYSTPWGYFDFNRFHCHFSPRDWQRLINNNWGFRPKRLNFKLFNIQVKEVTQNEGTKTIANNLTSTIQVFTDSEYQLPYVLGSAHQGCPPPFPADVFMIPQYGYLTLNNGSQAVGRSSFYCLEYFPSQMRRTGNNFEFSYQFEDVPFHSSYAHSQSLDRLMNPLIDQYLYYLSRTQSTGGTAGTQQLLFSQAGPNNMSAQAKNWLPGPCYRQQRVSTTLSQNNNSNFAWTGATKYHLNGRDSLVNPGVAMATHKDDEERFFPSSGVLMFGKQGAGKDNVDYSSVMLTSEEEIKTTNPVATEQYGVVADNLQQQNAAPIVGAVNSQGALPGMVWQNRDVYLQGPIWAKIPHTDGNFHPSPLMGGFGLKHPPPQILIKNTPVPADPPTTFSQAKLASFITQYSTGQVSVEIEWELQKENSKRWNPEIQYTSNYYKSTNVDFAVNTEGTYSEPRPIGTRYLTRNL

SEQ ID NO: 429 - DNA, 3128 bp, synthetic construct
  misc_feature 1..3128: note = source = /note="Description of Artificial Sequence: Synthetic polynucleotide"
  source 1..3128: mol_type = other DNA
gaattcgccctttctacggctgcgtcaactggaccaatgagaactttcccttcaacgattgcgtcgacaagatggtgatctggtgggaggagggcaagatgacggccaaggtcgtggagtccgccaaggccattctcggcggcagcaaggtgcgcgtggaccaaaagtgcaagtcgtccgcccagatcgaccccacccccgtgatcgtcacctccaacaccaacatgtgcgccgtgattgacgggaacagcaccaccttcgagcaccagcagccgttgcaggaccggatgttcaaatttgaactcacccgccgtctggagcatgactttggcaaggtgacaaagcaggaagtcaaagagttcttccgctgggcgcaggatcacgtgaccgaggtggcgcatgagttctacgtcagaaagggtggagccaacaagagacccgcccccgatgacgcggataaaagcgagcccaagcgggcctgcccctcagtcgcggatccatcgacgtcagacgcggaaggagctccggtggactttgccgacaggtaccaaaacaaatgttctcgtcacgcgggcatgcttcagatgctgtttccctgcaagacatgcgagagaatgaatcagaatttcaacatttgcttcacgcgcgggaccagagactgttcagaatgtttcccgggcgtgtcagaatctcaaccggtcgtcagaaagaggacgtatcggaaactctgtgccattcatcatctgctggggcgggctcccgagattgcttgctcggcctgcgatctggtcaacgtggacctggatgactgtgtttctgagcaataaatgacttaaaccaggtatggctgccgatggttatcttccagattggctcgaggacaacctctctgagggcattcgcgagtggtgggacttgaaacctggagccccgaaacccaaagccaaccagcaaaagcaggacgacggccggggtctggtgcttcctggctacaagtacctcggacccttcaacggactcgacaagggggagcccgtcaacgcggcggacgcagcggccctcgagcacgacaaggcctacgaccagcagctcaaagcgggtgacaatccgtacctgcggtataaccacgccgacgccgagtttcaggagcgtctgcaagaagatacgtcttttgggggcaacctcgggcgagcagtcttccaggccaagaagcgggttctcgaacctctcggtctggttgaggaaggcgctaagacggctcctggaaagaagagaccggtagagccatcaccccagcgttctccagactcctctacgggcatcggcaagacaggccagcagcccgcgaaaaagagactcaactttgggcagactggcgactcagagtcagtgcccgaccctcaaccaatcggagaaccccccgcaggcccctctggtctgggatctggtacaatggctgcaggcggtggcgctccaatggcagacaataacgaaggcgccgacggagtgggtagttcctcaggaaattggcattgcgattccacatggctgggcgacagagtcatcaccaccagcacccgaacctgggccctccccacctacaacaaccacctctacaagcaaatctccaacgggacatcgggaggaagcaccaacgacaacacctacttcggctacagcaccccctgggggtattttgactttaacagattccactgccacttctcaccacgtgactggcagcgactcatcaacaacaactggggattccggcccaagagactcaacttcaagctcttcaacatccaggtcaaggaggtcacgcagaatgaaggcaccaagaccatcgccaataaccttaccagcacgattcaggtctttacggactcggaataccagctcccgtacgtcctcggctctgcgcaccagggctgcccgcctccgttcccggcggacgtcttcatgattcctcagtacgggtacctgactctgaacaacggcagtcaggccgtgggccgttcctccttctactgcctggagtactttccttctcaaatgcggagaacgggcaacaactttgagttcagctaccagtttgaggacgtgccttttcacagcagctacgcgcatagccaaagcctggaccggctgatgaaccccctcatcgaccagtacctgtactacctgtctcggactcagtccacgggaggtaccgcaggaactcagcagttgctattttctcaggccgggcctaataacatgtcggctcaggccaaaaactggctacccgggccctgctaccggcagcaacgcgtctccacgacactgtcgcaaaataacaacagcaactttgcttggaccggtgccaccaagtatcatctgaatggcagagactctctggtaaatcccggtgtcgctatggcaacgcacaaggacgacgaagagcgattttttccatccagcggagtcttgatgtttgggaaacagggagctggaaaagacaacgtggactatagcagcgttatgctaaccagtgaggaagaaatcaaaaccaccaacccagtggccacagaacagtacggcgtggtggccgataacctgcaacagcaaaacgccgctcctattgtaggggccgtcaacagtcaaggagccttacctggcatggtctggcagaaccgggacgtgtacctgcagggtcctatctgggccaagattcctcacacggacggcaactttcatccttcgccgctgatgggaggctttggactgaaacacccgcctcctcagatcctgattaagaatacacctgttcccgcggatcctccaactaccttcagtcaagccaagctggcgtcgttcatcacgcagtacagcaccggacaggtcagcgtggaaattgaatgggagctgcagaaagagaacagcaagcgctggaacccagagattcagtatacttccaactactacaaatctacaaatgtggactttgctgtcaatactgagggtacttattcagagcctcgccccattggcacccgttacctcacccgtaacctgtaattgcctgttaatcaataaaccggttaattcgtttcagttgaactttggtctctgcgaagggcgaattc

SEQ ID NO: 430 - protein, 738 aa, synthetic construct; identical to SEQ ID NO: 418
  REGION 1..738: note = source = /note="Description of Artificial Sequence: Synthetic polypeptide"

SEQ ID NO: 431 - DNA, 1933 bp, synthetic construct
  variation 1302: note = a, c, t, or g
  misc_feature 1..1933: note = source = /note="Description of Artificial Sequence: Synthetic polynucleotide"
  source 1..1933: mol_type = other DNA
caaggcctacgaccagcagctcaaagcgggtgacaatccgtacctgcggtataaccacgccgacgccgagtttcaggagcgtcttcaagaagatacgtcttttgggggcaacctcgggcgagcagtcttccaggccaaaaagcgggttctcgaacctcttggtctggttgagacgccagctaagacggcacctggaaagaagcgaccggtagactcgccagactccacctcgggcatcggcaagaaaggccagcagcccgcgaaaaagagactcaactttgggcagactggcgactcagagtcagtccccgaccctcaaccaatcggagaaccaccagcaggcccctctggtctgggatctggtacaatggctgcaggcggtggcgcaccaatggctgacaataacgagggcgccgacggagtgggtaatgcctcaggaaattggcattgcgattccacatggctgggcgacagagtcatcaccaccagcacccgaacctgggccctgcccacctacaacaaccacctctacaagcaaatctccagtcagtcagcagggagcaccaacgataacgtctatttcggctacagcaccccctgggggtattttgacttcaacagattccattgccacttctcaccacgtgactggcagcgacttatcaacaacaactggggattccggcccaagaagctcaacttcaagctcttcaacatccaggtcaaggaggtcacgacgaatgacggtgtcacaaccatcgctaataaccttaccagcacggttcaggtcttttcggactcggaatatcaactgccgtacgtcctcggctccgcgcaccagggctgcctgcctccgttcccggcagacgtgttcatgattccgcagtacggatacctgactctgaacaatggcagccaatcggtaggccgttcctccttctactgcctggagtactttccttctcagatgctgagaacgggcaacaacttcacctttagctacaccttcgaggacgtgcctttccacagcagctacgcgcacagccagagtctggaccggctgatgaatcccctcatcgaccagtacctgtactacttggccagaacacagagcaacgcaggaggtactgctggcaatcgggaactgcagttttatcagggcggacctaccaccatggccgaacaagcaaagaactggctgcccggaccttgcttccggcaacagagagtatccaagacgctggatcaaaataacaacagcaactttgcctggactggtgccacaaaataccatttaaatgnaagaaattcattggttaatcccggtgtcgccatggcaacccacaaggacgacgaggaacgcttcttcccttcgagcggagttctaatttttggcaaaactggagcagctaataaaactacattagaaaacgtgctcatgacaaatgaagaagaaattcgtcctaccaacccggtagctaccgaggaatacgggattgtaagcagcaacttgcaggcggctagcaccgcagcccagacacaagttgttaacaaccagggagccttacctggcatggtctggcagaaccgggacgtgtacctgcaaggtcccatttgggccaagattcctcacacggacggcaactttcacccgtctcctctaatgggtggctttggactgaaacacccgcctccccagatcctgatcaaaaacacaccggtacctgctaatcctccagaagtgtttactcctgccaagtttgcttccttcatcacgcagtacagcaccgggcaagtcagcgttgagatcgagtgggagctgcagaaagagaacagcaagcgctggaacccagagattcagtacacctccaactttgacaaacagactggagtggactttgctgttgacagccagggtgtttactctgagcct

SEQ ID NO: 432 - protein, 733 aa, synthetic construct
  REGION 1..733: note = source = /note="Description of Artificial Sequence: Synthetic polypeptide"
MAADGYLPDWLEDNLSEGIREWWDLKPGAPKPKANQQKQDDGRGLVLPGYKYLGPFNGLDKGEPVNAADAAALEHDKAYDQQLKAGDNPYLRYNHADAEFQERLQEDTSFGGNLGRAVFQAKKRVLEPLGLVEEGAKTAPGKKRPLESPQEPDSSSGIGKKGKQPAKKRLNFEEDTGAGDGPPEGSDTSAMSSDIEMRAAPGGNAVDAGQGSDGVGNASGDWHCDSTWSEGKVTTTSTRTWVLPTYNNHLYLRLGTTSNSNTYNGFSTPWGYFDFNRFHCHFSPRDWQRLINNNWGLRPKAMRVKIFNIQVKEVTTSNGETTVANNLTSTVQIFADSSYELPYVMDAGQEGSLSPFPNDVFMVPQYGYCGIVTGENQNQTDRNAFYCLEYFPSQMLRTGNNFEMAYNFGKVPFHSMYAYSQSPDRLMNPLLDQYLWHLQSTTSGETLNQGNAATTFGKIRSGDFAFYRKNWLPGPCVKQQRLSKTASQNYKIPASGGNALLKYDTHYTLNNRWSNIAPGPPMATAGPSDGDFSNAQLIFPGPSVTGNTTTSANNLLFTSEEEIAATNPRDTDMFGQIADNNQNATTAPITGNVTAMGVLPGMVWQNRDIYYQGPIWAKIPHADGHFHPSPLIGGFGLKHPPPQIFIKNTPVPANPATTFTAARVDSFITQYSTGQVAVQIEWEIEKERSKRWNPEVQFTSNYGNQSSMLWAPDTTGKYTEPRVIGSRYLTNHL

SEQ ID NO: 433 - DNA, 3105 bp, synthetic construct
  misc_feature 1..3105: note = source = /note="Description of Artificial Sequence: Synthetic polynucleotide"
  source 1..3105: mol_type = other DNA
gaattcgcccttgctgcgtcaactggaccaatgagaactttcccttcaacgattgcgtcgacaagatggtgatctggtgggaggagggcaagatgaccgccaaggtcgtggagtccgccaaggccattctgggcggaagcaaggtgcgcgtggaccaaaagtgcaagtcatcggcccagatcgaccccacgcccgtgatcgtcacctccaacaccaacatgtgcgccgtgatcgacgggaacagcaccaccttcgagcaccagcagccgctgcaggaccgcatgttcaagttcgagctcacccgccgtctggagcacgactttggcaaggtgaccaagcaggaagtcaaagagttcttccgctgggctcaggatcacgtgactgaggtggcgcatgagttctacgtcagaaagggcggagccaccaaaagacccgcccccagtgacgcggatataagcgagcccaagcgggcctgcccctcagttgcggagccatcgacgtcagacgcggaagcaccggtggactttgcggacaggtaccaaaacaaatgttctcgtcacgcgggcatgcttcagatgctgtttccctgcaagacatgcgagagaatgaatcagaatttcaacgtctgcttcacgcacggggtcagagactgctcagagtgcttccccggcgcgtcagaatctcaacccgtcgtcagaaaaaagacgtatcagaaactgtgcgcgattcatcatctgctggggcgggcacccgagattgcgtgttcggcccgcgatctcgtcaacgtggacttggatgactgtgtttctgagcaataaatgacttaaaccaggtatggctgctgacggttatcttccagattggctcgaggacaacctctctgagggcattcgcgagtggtgggacctgaaacctggagcccccaagcccaaggccaaccagcagaagcaggacgacggccggggtctggtgcttcctggctacaagtacctcggacccttcaacggactcgacaagggggagcccgtcaacgcggcggacgcagcggccctcgagcacgacaaggcctacgaccagcagctcaaagcgggtgacaatccgtacctgcggtataaccacgccgacgccgagtttcaggagcgtctgcaagaagatacgtcttttgggggcaacctcgggcgagcagtcttccaggccaagaagagggtactcgaacctctgggcctggttgaagaaggtgctaagacggctcctggaaagaagagaccgttagagtcaccacaagagcccgactcctcctcaggaatcggcaaaaaaggcaaacaaccagccaaaaagagactcaactttgaagaggacactggagccggagacggaccccctgaaggatcagataccagcgccatgtcttcagacattgaaatgcgtgcagcaccgggcggaaatgctgtcgatgcgggacaaggttccgatggagtgggtaatgcctcgggtgattggcattgcgattccacctggtctgagggcaaggtcacaacaacctcgaccagaacctgggtcttgcccacctacaacaaccacttgtacctgcggctcggaacaacatcaaacagcaacacctacaacggattctccaccccctggggatactttgactttaacagattccactgtcacttctcaccacgtgactggcaaagactcatcaacaacaactggggactacgaccaaaagccatgcgcgttaaaatcttcaatatccaagttaaggaggtcacaacgtcgaacggcgagactacggtcgctaataaccttaccagcacggttcagatatttgcggactcgtcgtatgagctcccgtacgtgatggacgctggacaagagggaagtctgtctcctttccccaatgacgtcttcatggtgcctcaatatggctactgtggcattgtgactggcgaaaatcagaaccagacggacagaaatgctttctactgcctggagtattttccttcacaaatgctgagaactggcaataactttgaaatggcttacaactttgggaaggtgccgttccactcaatgtatgcttacagccagagcccggacagactgatgaatcccctcctggaccagtacctgtggcacttacagtcgaccacctctggagagactctgaatcaaggcaatgcagcaaccacatttggaaaaatcaggagtggagactttgccttttacagaaagaactggctgcctgggccttgtgttaaacagcagagactctcaaaaactgccagtcaaaattacaagattcctgccagcgggggcaacgctctgttaaagtatgacacccactataccttaaacaaccgctggagcaacatagcgcctggacctccaatggcaacagctggaccttcagatggggacttcagcaacgcccagctcatcttccctggaccatcagtcaccggaaacacaacaacctcagcaaacaatctgttgtttacatcagaagaagaaattgctgccaccaacccaagagacacggacatgtttggtcagattgctgacaataatcagaatgctacaactgctcccataaccggcaacgtgactgctatgggagtgcttcctggcatggtgtggcaaaacagagacatttactaccaagggccaatttgggccaagatcccacacgcggacggacattttcatccttcaccgctaattggcggttttggactgaaacatccgcctccccagatatttatcaaaaacacccccgtacctgccaatcctgcgacaaccttcactgcagccagagtggactctttcatcacacaatacagcaccggccaggtcgctgttcagattgaatgggaaatcgaaaaggaacgctccaaacgctggaatcctgaagtgcagtttacttcaaactatgggaaccagtcttctatgttgtgggctcccgatacaactgggaagtatacagagccgcgggttattggctctcgttatttgactaatcatttgtaactgcctagttaatcaataaaccgtgtgattcgtttcagttgaactttggtctctgcgaagggcgaattc

SEQ ID NO: 434 - protein, 733 aa, synthetic construct
  REGION 1..733: note = source = /note="Description of Artificial Sequence: Synthetic polypeptide"
MAADGYLPDWLEDNLSEGIREWWDLKPGAPKPKANQQKQDDGRGLVLPGYKYLGPFNGLDKGEPVNAADAAALEHDKAYDQQLKAGDNPYLRYNHADAEFQERLQEDTSFGGNLGRAVFQAKKRVLEPLGLVEEGAKTAPGKKRPLESPQEPDSSSGIGKKGKQPAKKRLNFEEDTGAGDGPPEGSDTSAMSSDIEMRAAPGGNAVDAGQGSDGVGNASGDWHCDSTWSEGKVTTTSTRTWVLPTYNNHLYLRLGTTSNSNTYNGFSTPWGYFDFNRFHCHFSPRDWQRLINNNWGLRPKAMRVKIFNIQVKEVTTSNGETTVANNLTSTVQIFADSSYELPYVMDAGQEGSLPPFPNDVFMVPQYGYCGIVTGENQNQTDRNAFYCLEYFPSQMLRTGNNFEMAYNFEKVPFHSMYAHSQSLDRLMNPLLDQYLWHLQSTTSGETLNQGNAATTFGKIRSGDFAFYRKNWLPGPCVKQQRFSKTASQNYKIPASGGNALLKYDTHYTLNNRWSNIAPGPPMATAGPSDGDFSNAQLIFPGPSVTGNTTTSANNLLFTSEEEIAATNPRDTDMFGQIADNNQNATTAPITGNVTAMGVLPGMVWQNRDIYYQGPIWAKIPHADGHFHPSPLIGGFGLKHPPPQIFIKNTPVPANPATTFTAARVDSFITQYSTGQVAVQIEWEIEKERSKRWNPEVQFTSNYGNQSSMLWAPDTTGKYTEPRVIGSRYLTNHL

SEQ ID NO: 435 - DNA, 3105 bp, synthetic construct
  misc_feature 1..3105: note = source = /note="Description of Artificial Sequence: Synthetic polynucleotide"
  source 1..3105: mol_type = other DNA
gaattcgcccttgctgcgtcaactggaccaatgagaactttcccttcaacgattgcgtcgacaagatggtgatctggtgggaggagggcaagatgaccgccaaggtcgtggagtccgccaaggccattctgggcggaagcaaggtgcgcgtggaccaaaagtgcaagtcatcggcccagatcgaccccacgcccgtgatcgtcacctccaacaccaacatgtgcgccgtgatcgacgggaacagcaccaccttcgagcaccagcagccgctgcaggaccgcatgttcaagttcgagctcacccgccgtctggagcacgactttggcaaggtgaccaagcaggaagtcaaagagttcttccgctgggctcaggatcacgtgactgaggtggcgcatgagttctacgtcagaaagggcggagccaccaaaagacccgcccccagtgacgcggatataagcgagcccaagcgggcctgcccctcagttgcggagccatcgacgtcagacgcggaagcaccggtggactttgcggacaggtaccaaaacaaatgttctcgtcacgcgggcatgcttcagatgctgtttccctgcaagacatgcgagagaatgaatcagaatttcaacgtctgcttcacgcacggggtcagagactgctcagagtgcttccccggcgcgtcagaatctcaacccgtcgtcagaaaaaagacgtatcagaaactgtgcgcgattcatcatctgctggggcgggcacccgagattgcgtgttcggcctgcgatctcgtcaacgtggacttggatgactgtgtttctgagcaataaatgacttaaaccaggtatggctgctgacggttatcttccagattggctcgaggacaacctctctgagggcattcgcgagtggtgggacctgaaacctggagcccccaagctcaaggccaaccagcagaagcaggacgacggccggggtctggtgcttcctggctacaagtacctcggacccttccacggactcgacaagggggagcccgtcaacgcggcggacgcagcggccctcgagcacgacaaggcctacgaccagcagctcaaagcgggtgacaatccgtacctgcggtataaccacgccgacgccgagtttcaggagcgtctgcaagaagatacgtcttttgggggcaacctcgggcgagcagtcttccaggccaagaagagggtactcgaaccactgggcctggttgaagaaggtgctaagacggctcctggaaagaagagaccgttagagtcaccacaagagcccgactcctcctcaggaatcggcaaaaaaggcaaacaaccagccaaaaagagactcaactttgaagaggacactggagccggagacggaccccctgaaggatcagataccagcgccatgtcttcagacattgaaatgcgtgcagcaccgggcggaaatgctgtcgatgcgggacaaggttccgatggagtgggtaatgcctcgggtgattggcattgcgattccacctggtctgagggcaaggtcacaacaacctcgaccagaacctgggtcttgcccacctacaacaaccacttgtacctgcggctcggaacaacatcaaacagcaacacctacaacggattctccaccccctggggatactttgactttaacagattccactgtcacttctcaccacgtgactggcaaagactcatcaacaacaactggggactacgaccaaaagccatgcgcgttaaaatcttcaatatccaagttaaggaggtcacaacgtcgaacggcgagactacggtcgctaataaccttaccagcacggttcagatatttgcggactcgtcgtatgagctcccgtacgtgatggacgctggacaagagggaagtctgcctcctttccccaatgacgtcttcatggtgcctcaatatggctactgtggcattgtgactggcgaaaatcagaaccagacggacagaaatgctttctactgcctggagtattttccttcacaaatgctgagaactggcaataactttgaaatggcttacaactttgagaaggtgccgttccactcaatgtatgctcacagccagagcctggacagactgatgaatcccctcctggaccagtacctgtggcacttacagtcgaccacctctggagagactctgaatcaaggcaatgcagcaaccacatttggaaaaatcaggagtggagactttgccttttacagaaagaactggctgcctgggccttgtgttaaacagcagagattctcaaaaactgccagtcaaaattacaagattcctgccagcgggggcaacgctctgttaaagtatgacacccactataccttaaacaaccgctggagcaacatagcgcctggacctccaatggcaacagctggaccttcagatggggacttcagcaacgcccagctcatcttccctggaccatcagtcaccggaaacacaacaacctcagcaaacaatctgttgtttacatcagaaggagaaattgctgccaccaacccaagagacacggacatgtttggtcagattgctgacaataatcagaatgctacaactgctcccataaccggcaacgtgactgctatgggagtgcttcctggcatggtgtggcaaaacagagacatttactaccaagggccaatttgggccaagatcccacacgcggacggacattttcatccttcaccgctaattggcggttttggactgaaacatccgcctccccagatatttatcaaaaacacccccgtacctgccaatcctgcgacaaccttcactgcagccagagtggactctttcatcacacaatacagcaccggccaggtcgctgttcagattgaatgggaaatcgaaaaggaacgctccaaacgccggaatcctgaagtgcagtttacttcaaactatgggaaccagtcttctatgttgtgggctcccgatacaactgggaagtatacagagccgcgggttattggctctcgttatttgactaatcatttgtaactgcctagttaatcaataaaccgtgtgattcgtttcagttgaactttggtctctgcgaagggcgaattc

SEQ ID NO: 436 - protein, 733 aa, synthetic construct
  REGION 1..733: note = source = /note="Description of Artificial Sequence: Synthetic polypeptide"
MAADGYLPDWLEDNLSEGIREWWDLKPGAPKPKANQQKQDDGRGLVLPGYEYLGPFNGLDKGEPVNAADAAALEHDKAYDQQLKAGDNPYLRYNHADAEFQERLQEDTSFGGNLGRAVFQAKKRVLEPLGLVEEGAKTAPGKKRPLESPQEPDSSSGIGKKGKQPAKKRLNFEEDTGAGDGPPEGSDTSAMSSDIEMRAAPGGNAVDAGQGSDGVGNASGDWHCDSTWSEGKVTTTSTRTWVLPTYNNHLYLRLGTTSNSNTYNGFSTPWGYFDFNRFHCHFSPRDWQRLINNNWGLRPKAMRVKIFNIQVKEVTTSNGETTVANNLTSTVQIFADSSYELPYVMDAGQEGSLPPFPNDVFMVPQYGYCGIVTGENQNQTDRNAFYCLEYFPSQMLRTGNNFETAYNFEKVPFHSMYAHSQSLDGLMNPLLDQYLWHLQSTTSGETLNQGNAATTFGKIRSGDFAFYRKNWLPGPCVKQQRFSKTASQNYKIPASGGNALLKYDTHYTLNNRWSNIAPGPPMATAGPSDGDFSNAQLIFPGPSVTGNTTTSANNLLFTSEEEIAATNPRDTDMFGQIADNNQNATTAPITGNVTAMGVLPGMVWQNRDIYYQGPIWAKIPHADGHFHPSPLIGGFGLKHPPPQIFIKNTPVPAYPATTFTAARVDSFITQYSTGQVAVQIEWEIEKERSKRWNPEVQFTSNCGNQSSMLWAPDTTGKYTEPRVIGSRYLTNHL

SEQ ID NO: 437 - DNA, 3105 bp, synthetic construct
  misc_feature 1..3105: note = source = /note="Description of Artificial Sequence: Synthetic polynucleotide"
  source 1..3105: mol_type = other DNA
gaattcgcccttcgcagagaccaaagttcaactgaaacgaatcacacggtttattgattaactaggcagttacaaatgattagtcaaataacgagagccaataacccgcggctctgtatacttcccagttgtatcgggagcccacaacatagaagactggttcccacagtttgaagtaaactgcacttcaggattccagcgtttggagcgttccttttcgatttcccattcaatctgaacagcgacctggccggtgctgtattgtgtgatgaaagagtccactctggctgcagtgaaggttgtcgcaggataggcaggtacgggggtgtttttgataaatatctggggaggcggatgtttcagtccaaaaccgccaattagcggtgaaggatgaaaatgtccgtccgcgtgtgggatcttggcccaaattggcccttggtagtaaatgtctctgttttgccacaccatgccaggaagcactcccatagcagtcacgttgccggttatgggagcagttgtagcattctgattattgtcagcaatctgaccaaacatgtccgtgtctcttgggttggtggcagcaatttcttcttctgatgtaaacaacagattgtttgctgaggttgttgtgtttccggtgactgatggtccagggaagatgagctgggcgttgctgaagtccccatctgaaggtccagctgttgccattggaggtccaggcgctatgttgctccagcggttgtttaaggtatagtgggtgtcatactttaacagagcgttgcccccgctggcaggaatcttgtaattttgactggcagtttttgagaatctctgctgtttaacacaaggcccaggcagccagttctttctgtaaaaggcaaagtctccactcctgatttttccaaatgtggttgctgcattgccttgattcagagtctctccagaggtggtcgactgtaagtgccacaggtactggtccaggaggggattcatcagtccgtccaggctctggctgtgagcatacattgagtggaacggcaccttctcaaagttgtaagccgtttcaaagttattgccagttctcagcatttgtgaaggaaaatactccaggcagtagaaagcatttctgtccgtctggttctgattttcgccagtcacaatgccacagtagccatattgaggcaccatgaagacgtcattggggaaaggaggcagacttccctcttgtccagcgtccatcacgtacgggagctcatacgacgagtccgcaaatatctgaaccgtgctggtaaggttattagcgaccgtagtctcgccgttcgacgttgtgacctccttaacttggatattgaagattttaacgcgcatggcttttggtcgtagtccccagttgttgttgatgagtctttgccagtcacgtggtgagaagtgacagtggaatctgttaaagtcaaagtatccccagggggtggagaatccgttgtaggtgttgctgtttgatgttgttccgagccgcaggtacaagtggttgttgtaggtgggcaagacccaggttctggtcgaggttgttgtgaccttgccctcagaccaggtggaatcgcaatgccaatcacccgaggcattacccactccatcggaaccttgtcccgcatcgacagcatttccgcccggtgctgcacgcatttcaatgtctgaagacatggcgctggtatctgatccttcagggggtccgtctccggctccagtgtcctcttcaaagttgagtctctttttggctggttgtttgccttttttgccgattcctgaggaggagtcgggctcttgtggtgactctaacggtctcttctttccaggagccgtcttagcaccttcttcaaccaggcccagaggttcgagtaccctcttcttggcctggaagactgctcgcccgaggttgcccccaaaagacgtatcttcttgcagacgctcctgaaactcggcgtcggcgtggttataccgcaggtacggattgtcacccgctttgagctgctggtcgtaggccttgtcgtgctcgagggccgctgcgtccgccgcgttgacgggctcccccttgtcgagtccgttgaagggtccgaggtactcgtagccaggaagcaccagaccccggccgtcgtcctgcttctgctggttggccttgggcttgggggctccaggtttcaggtcccaccactcgcgaatgccctcagagaggttgtcctcgagccaatctggaagataaccgtcagcagccatacctggtttaagtcatttattgctcagaaacacagtcatccaagtccacgttgacgagatcgcaggccgaacacgcaatctcgggtgcccgccccagcagatgatgaatcgcgcacagtttctgatacgtcttttttctgacgacgggttgagattctgacgcgccggggaagcactctgagcagtctctgaccccgtgcgtgaagcagacgttgaaattctgattcattctctcgcatgtcttgcagggaaacagcatctgaagcatgcccgcgtgacgagaacatttgttttggtacctgtccgcaaggtccaccggtgcttccgcgtctgacgtcgatggctccgcaactgaggggcaggcccgcttgggctcgcttatatccgcgtcactgggggcgggtcttttggtggctccgccctttctgacgtagaactcatgcgccacctcagtcacgtgatcctgagcccagcggaagaactctttgacttcctgcttggtcaccttgccaaagtcgtgctccagacggcgggtgagctcgaacttgaacatgcggtcctgcagcggctgctggtgctcgaaggtggtgctgttcccgtcgatcacggcgcacatgttggtgttggaggtgacgatcacgggcgtggggtcgatctgggccgatgacttgcacttttggtccacgcgcaccttgcttccgcccagaatggccttggcggactccacgaccttggcggtcatcttgccctcctcccaccagatcaccatcttgtcgacgcaatcgttgaagggaaagttctcattggtccagttgacgcagcaagggcgaattc

SEQ ID NO: 438 - protein, 729 aa, synthetic construct
  REGION 1..729: note = source = /note="Description of Artificial Sequence: Synthetic polypeptide"
MAADGYLPDWLEDNLSEGIREWWDLKPGAPKPKANQQKQDDGRGLVLPGYKYLGPFNGLDKGEPVNAADAAALEHDKAYDQQLKAGDNPYLRYNHADAEFQERLQEDTSFGGNLGRAVFQAKKRVLEPLGLVEEGAKTAPGKKRPIDSPDSSTGIGKKGQQPAKKKLNFGQTGDSESVPDPQPLGEPPAAPSSVGSGTMAAGGGAPMADNNEGADGVGNASGNWHCDSTWLGDRVITTSTRTWALPTYNNHLYKQISSSSSGATNDNHYFGYSTPWGYFDFNRFHCHFSPRDWQRLINNNWGFRPKKLRFKLFNIQVKEVTTNDGVTTIANNLTSTVQVFSDSEYQLPYVLGSAHQGCLPPFPADVFMIPQYGYLTLNNGSQSVGRSSFYCLEYFPSQMLRTGNNFEFSYSFEDVPFHSSYAHSQSLDRLMNPLIDQYLYYLARTQSTTGSTRELQFHQAGPNTMAEQSKNWLPGPCYRQQGLSKNLDFNNNSNFAWTAATKYHLNGRNSLTNPGIPMATNKDDEDQFFPINGVLVFGKTGAANKTTLENVLMTSEEEIKTTNPVATEEYGVVSSNLQPSTAGPQSQTINSQGALPGMVWQNRDVYLQGPIWAKIPHTDGNFHPSPLMGGFGLKHPPPQILIKNTPVPANPPEVFTPAKFASFITQYSTGQVSVEIEWELQKENSKRWNPEIQYTSNYAKSNNVEFAVNPDGVYTEPRPIGTRYLPRNL

SEQ ID NO: 439 - DNA, 3094 bp, synthetic construct
  misc_feature 1..3094: note = source = /note="Description of Artificial Sequence: Synthetic polynucleotide"
  source 1..3094: mol_type = other DNA
gaattcgcccttgctgcgtcaactggaccaagagaactttcccttcaacgattgcgtcgacaagatggtgatctggtgggaggagggcaagatgacggccaaggtcgtggagtccgccaaagccattctgggcggaagcaaggtgcgcgtcgaccaaaagtgcaagtcctcggcccagatcgatcccacccccgtgatcgtcacctccaacaccaacatgtgcgccgtgatcgacgggaacagcaccaccttcgagcaccagcagccgttgcaggaccggatgttcaaatttgaactcacccgccgtctggaacacgactttggcaaggtgaccaagcaggaagtcaaagagttcttccgctgggctagtgatcacgtgactgaggtgacgcatgagttctacgtcagaaagggcggagccagcaaaagacccgcccccgatgacgcggatataagcgagcccaagcgggcctgtccctcagtcacggacccatcgacgtcagacgcggaaggagctccggtggactttgccgacaggtaccaaaacaaatgttctcgtcacgcgggcatgcttcagatgctgtttccctgcaaaacgtgcgagagaatgaatcagaatttcaacatttgcttcacgcacggggtcagagactgtttagaatgtttccccggcgtgtcagaatctcaaccggtcgtcagaaaaaagacgtatcggaagctgtgtgcgattcatcatctgctggggcgggcacccgagattgcttgctcggcctgcgacctggtcaacgtggacctggacgactgtgtttctgagcaataaatgacttaaaccgggtatggctgccgatggttatcttccagattggctcgaggacaacctctctgagggcattcgcgagtggtgggacctgaaacctggagccccgaaacccaaagccaaccagcaaaagcaggacgacggccggggtctggtgcttcctggctacaagtacctcggacccttcaacggactcgacaagggggagcccgtcaacgcggcggacgcagcggccctcgagcacgacaaggcctacgaccagcagctcaaagcgggtgacaatccgtacctgcggtataaccacgccgacgccgagtttcaggagcgtctgcaagaagatacgtcatttgggggcaacctcgggcgagcagtcttccaggccaagaagcgggttctcgaacctctcggtctggttgaggaaggcgctaagacggctcctggaaagaagagacccatagactctccagactcctccacgggcatcggcaaaaaaggccagcagcccgctaaaaagaagctcaattttggtcagactggcgactcagagtcagtccccgaccctcaacctcttggagaacctccagcagcgccctctagtgtgggatctggtacaatggctgcaggcggtggcgcaccaatggcagacaataacgaaggtgccgacggagtgggtaatgcctcaggaaattggcattgcgattccacatggctgggcgacagagtcatcaccaccagcaccagaacctgggccctccccacctacaacaaccacctctacaagcaaatctccagcagcagctcaggagccaccaatgacaaccactacttcggctacagcaccccctgggggtattttgactttaacagattccactgccacttctcaccacgtgactggcagcgactcatcaacaacaactggggattccggcccaagaagctgcggttcaagctcttcaacatccaggtcaaggaggtcacaacgaatgacggcgtcacgaccatcgctaataaccttaccagcacggttcaggtcttctcggactcggaataccagctgccgtacgtcctcggctctgcgcaccagggctgcctgcctccgttcccggcggacgtcttcatgattcctcagtacggctacctgactctgaacaacggcagccaatcggtgggccgttcctccttctactgcctggaatatttcccctctcaaatgctgagaacgggcaacaactttgagttcagttacagcttcgaggacgtgcctttccacagcagctacgcgcacagccagagcctagaccggctgatgaaccctctcatcgaccagtacctgtactacctggcccggacccagagcaccacgggttccaccagggaactgcaatttcatcaagctgggcccaatactatggccgagcagtcaaagaactggctgcctggaccctgctataggcaacagggactgtcaaagaacttggactttaacaacaacagcaattttgcctggactgctgccactaaatatcatctgaatggcagaaactctttgaccaatcctggcattcccatggcaaccaacaaggatgatgaggaccagttctttcccatcaacggggtactggtttttggcaagacgggagctgccaacaaaactacgctggaaaacgttctgatgaccagcgaggaggagatcaagaccactaaccctgtggctacagaagaatacggtgtggtctccagcaacctgcagccgtctacagccgggcctcaatcacagactatcaacagccagggagcactgcctggcatggtctggcagaaccgggacgtgtatctgcagggtcccatctgggccaaaattcctcacacggatggcaactttcacccgtctcctctgatgggcggttttggactcaaacacccgcctccacagatcctgatcaaaaacacacctgtacctgctaatcctccggaggtgtttactcctgccaagtttgcctccttcatcacgcagtacagcaccggacaagtcagcgtggaaatcgagtgggagctgcagaaagaaaacagcaagcgctggaacccagaaattcagtatacttccaattatgccaagtctaataatgttgaatttgctgtgaaccctgatggtgtttatactgagcctcgccccattggcactcgttacctcccccgtaatctgtaattgcttgttaatcaataaaccggttgattcgtttcagttgaactttggtctctgcgaagggcgaattc

SEQ ID NO: 440 - protein, 1458 aa, synthetic construct
  REGION 1..1458: note = source = /note="Description of Artificial Sequence: Synthetic polypeptide"
MAADGYLPDWLEDNLSEGIREWWDLKPGAPKPKANQQKQDDGRGLVLPGYKYLGPFNGLDKGEPVNAADAAALEHDKAYDQQLKAGDNPYLRYNHADAEFQERLQEDTSFGGNLGRAVFQAKKRVLEPLGLVEEGAKTAPGKKRPIDSPDSSTGIGKKGQQPAKKKLNFGQTGDSESVPDPQPLGEPPAAPSSVGSGTMAAGGGAPTADNNEGADGVGNASGNWHCDSTWLGDRVITTSTRTWALPTYNNHLYKQISSSSSGATNDNHYFGYSTPWGYFDFNRFHCHFSPRDWQRLINNNWGFRPKKLRFKLFNIQVKEVTTNDGVTTIANNLTSTVQVFSDSEYQLPYVLGSAHQGCLPPFPADVFMIPQYGYLTLNNGSQSVGRSSFYCLEYFPSQMLRTGNNFEFSYSFEDVPFHSSYAHSQSLDRLMNPLIDQYLYYLARTQSTTGSTRELQFHQAGPNTMAEQSKNWLPGPCYRQQRLSKNLDFNNNSNFAWTAATKYHLNGRNSLTNPGIPMATNKDDEDQFFPINGVLVFGKTGAANKTTLENVLMTSEEEIKTTNPVATEEYGVVSSNLQSSTAGPQSQTINSQGALPGMVWQNRDVYLQGPIWAKIPHTDGNFHPSPLMGGFGLEHPPPQILIKNTPVPANPPEVFTPAKFASFITQYSTGQVSVEIEWELQKENSKRWNPEIQYTSNYAKSNNVEFAVNPDGVYTEPRPIGTRYLTRNLMAADGYLPDWLEDNLSEGIREWWDLKPGAPKPKANQQKQDDGRGLVLPGYKYLGPFNGLDKGEPVNAADAAALEHDKAYDQQLKAGDNPYLRYNHADAEFQERLQEDTSFGGNLGRAVFQAKKRVLEPLGLVEEGAKTAPGKKRPIGSPDSSTGIGKKGQQPAKKKLNFGQTGDSESVPDPQPLGEPPAAPSSVGSGTMAAGGGAPMADNNEGADGVGNASGNWHCDSTWLGDRVITTSTRTWALPTYNNHLYKQISSSSSGATNDNHYFGYSTPWGYFDFNRFHCHFSPRDWQRLINNNWGFRPKKLRFKLLNIQVKEVTTNDGVTTIANNLTSTVQVFSDSEYQLPYVLGSAHQGCLPPFPADVFMIPQYGYLTLDNGSQSVGRSSFYCLEYFPSQMLRTGNNFEFSYSFEDVPFHSSYAHSQSLDRLMNPLIDQYLYYLARTQSTTGSTRELQFHQAGPNTMAEQSKNWLPGPCYRQQRLSKNLDFNNNSNFAWTAATKYHLNGRNSLTNPGIPMATNKDDEDQFFPINGVLVFGKTGAANKTTLENVLMTSEEEIKTTNPVATEEYGVVSSNLQSSTAGPQSQTINSQGALPGMVWQNRDVYLQGPIWAKIPHTDGNFHPSPLMGGFGLKHPPPQILIKNTPVPANPPEVFTPAKFASFITQYSTGQVSVEIEWELQKENSKRWNPEIQYTSNYAKSNNVEFAVNPDGVYTEPRPIGTRYLTRNL

SEQ ID NO: 441 - DNA, 3095 bp, synthetic construct
  misc_feature 1..3095: note = source = /note="Description of Artificial Sequence: Synthetic polynucleotide"
  source 1..3095: mol_type = other DNA
gaattcgcccttcgcagagaccaaagttcaactgaaacgaatcaaccggtttattgattaacaagcaattacagattacgggtgaggtaacgagtgccaatggggcgaggctcagtataaacaccatcagggttcacagcaaattcaacattattagacttggcataattggaagtatactgaatttctgggttccagcgcttgctgttttctttctgcagctcccactcgatttccacgctgacttgtccggtgctgtactgcgtgatgaaggaggcaaacttggcaggagtaaacacctccggaggattagcaggtacaggtgtgtttttgatcaggatctgtggaggcgggtgtttgagtccaaaaccgcccatcagaggagacgggtgaaagttgccatccgtgtgaggaattttggcccagatgggaccctgcagatacacgtcccggttctgccagaccatgccaggcagtgctccctggctgttgatagtctgtgattgaggcccggctgtagacgactgcaggttgctggagaccacaccgtattcttctgtagccacagggttagtggtcttgatctcctcctcgctggtcatcagaacgttttccagcgtagttttgttggcagctcccgtcttgccaaaaaccagtaccccgttgatgggaaagaactggtcctcatcatccttgttggttgccatgggaatgccaggattggtcaaagagtttctgccattcagatgatatttagtggcagcagtccaggcaaaattgctgttgttgttaaagtccaagttctttgacagtctctgttgcctatagcagggtccaggcagccagttctttgactgctcggccatagtattgggcccagcttgatgaaattgcagttccctggtggaacccgtggtgctctgggtccgggccaggtagtacaggtactggtcgatgagagggttcatcagccggtctaggctctggctgtgcgcgtagctgctgtggaaaggcacgtcctcgaagctgtaactgaactcaaagttgttgcccgttctcagcatttgagaggggaaatattccaggcagtagaaggaggaacggcccaccgattggctgccgttgtccagagtcaggtagccgtactgaggaatcatgaagacgtccgccgggaacggaggcaggcagccctggtgcgcagagccgaggacgtacggcagctggtattccgagtccgagaagacctgaaccgtgctggtaaggttattagcgatggtcgtgacgccgtcattcgttgtgacctccttgacctggatgttgaggagcttgaaccgcagcttcttgggccggaatccccagttgttgttgatgagtcgctgccagtcacgtggtgagaagtggcagtggaatctgttaaagtcaaaatacccccagggggtgctgtagccgaagtagtggttgtcattggtggctcctgagctgctgctggagatttgcttgtagaggtggttgttgtaggtggggagggcccaggttctggtgctggtggtgatgactctgtcgcccagccatgtggaatcgcaatgccaatttcctgaggcattacccactccgtcggcaccttcgttattgtctgccattggtgcgccaccgcctgcagccattgtaccagatcccacactagagggcgctgctggaggttctccaagaggttgagggtcggggactgactctgagtcgccagtctgaccaaaattgagcttctttttagcgggctgctggccttttttgccgatgcccgtggaggagtctggagagcctatgggtctcttctttccaggagccgtcttagcgccttcctcaaccagaccgagaggttcgagaacccgcttcttggcctggaagactgctcgcccgaggttgcccccaaatgacgtatcttcttgcagacgctcctgaaactcggcgtcggcgtggttataccgcaggtacggattgtcacccgctttgagctgctggtcgtaggccttgtcgtgctcgagggccgctgcgtccgccgcgttgacgggctcccccttgtcgagtccgttgaagggtccgaggtacttgtagccaggaagcaccagaccccggccgtcgtcctgcttttgctggttggctttgggtttcggggctccaggtttcaggtcccaccactcgcgaatgccctcagagaggttgtcctcgagccaatctggaagataaccatcggcagccatacctggtttaagtcatttattgctcagaaacacagtcgtccaggtccacgttgaccaggtcgcaggccgagcaagcaatctcgggtgcccgccccagcagatgatgaatcgcacacagcttccgatacgtcttttttctgacgaccggttgagattctgacacgccggggaaacattctaaacagtctctgaccccgtgcgtgaagcaaatgttgaaattctgattcattctctcgcacgttttgcagggaaacagcacctgaagcatgcccgcgtgacgagaacatttgttttggtacctgtcggcaaagtccaccggagctccttccgcgtctgacgtcgatgggtccgtgactgagggacgggcccgcttgggctcgcttatatccgcgtcatcgggggcgggtcttttgctggctccgccctttctgacgtagaactcatgcgtcacctcagtcacgtgatcactagcccagcggaagaactctttgacttcctgctttgtcaccttgccaaagtcgtgttccagacggcgggtgagttcaaatttgaacatccggtcctgcaacggttgctggtgctcgaaggtggtgctgttcccgtcgatcacggcgcacatgttggtgttggaggtgacgatcacgggggtgggatcgatctgggcggacgacttgcacttttggtccacgcgcaccttgctgccgccgagaatggccttggcggactccacgaccttggccgtcatcttgccctcctcccaccagatcaccatcttgtcgacgcaatcgttgaagggaaagttctcattggtccagttgacgcagcaagggcgaattc

SEQ ID NO: 442 - DNA, 3095 bp, synthetic construct
  misc_feature 1..3095: note = source = /note="Description of Artificial Sequence: Synthetic polynucleotide"
  source 1..3095: mol_type = other DNA
gaattcgcccttcgcagagaccaaagttcaactgaaacgaatcaaccggtttattgattaacaagcaattacagattacgggtgaggtaacgagtgccaatggggcgaggctcagtataaacaccatcagggttcacagcaaattcaacattattagacttggcataattggaagtatactgaatttctgggttccagcgcttgctgttttctttctgcagctcccactcgatttccacgctgacttgtccggtgctgtactgcgtgatgaaggaggcaaacttggcaggagtaaacacctccggaggattagcaggtacaggtgtgtttttgatcaggatctgtggaggcgggtgttcgagtccaaaaccgcccatcagaggagacgggtgaaagttgccatccgtgtgaggaattttggcccagatgggaccctgcagatacacgtcccggttctgccagaccatgccaggcagtgctccctggctgttgatagtctgtgattgaggcccggctgtagacgactgcaggttgctggagaccacaccgtattcttctgtagccacagggttagtggtcttgatctcctcctcgctggtcatcagaacgttttccagcgtagttttgttggcagctcccgtcttgccaaaaaccagtaccccgttgatgggaaagaactggtcctcatcatccttgttggttgccatgggaatgccaggattggtcaaagagtttctgccattcagatgatatttagtggcagcagtccaggcaaaattgctgttgttgttaaagtccaagttctttgacagtctctgttgcctatagcagggtccaggcagccagttctttgactgctcggccatagtattgggcccagcttgatgaaattgcagttccctggtggaacccgtggtgctctgggtccgggccaggtagtacaggtactggtcgatgagagggttcatcagccggtctaggctctggctgtgcgcgtagctgctgtggaaaggcacgtcctcgaagctgtaactgaactcaaagttgttgcccgttctcagcatttgagaggggaaatattccaggcagtagaaggaggaacggcccaccgattggctgccgttgttcagagtcaggtagccgtactgaggaatcatgaagacgtccgccgggaacggaggcaggcagccctggtgcgcagagccgaggacgtacggcagctggtattccgagtccgagaagacctgaaccgtgctggtaaggttattagcgatggtcgtgacgccgtcattcgttgtgacctccttgacctggatgttgaagagcttgaaccgcagcttcttgggccggaatccccagttgttgttgatgagtcgctgccagtcacgtggtgagaagtggcagtggaatctgttaaagtcaaaatacccccagggggtgctgtagccgaagtagtggttgtcattggtggctcctgagctgctgctggagatttgcttgtagaggtggttgttgtaggtggggagggcccaggttctggtgctggtggtgatgactctgtcgcccagccatgtggaatcgcaatgccaatttcctgaggcattacccactccgtcggcaccttcgttattgtctgccgttggtgcgccaccgcctgcagccattgtaccagatcccacactagagggcgctgctggaggttctccaagaggttgagggtcggggactgactctgagtcgccagtctgaccaaaattgagcttctttttagcgggctgctggccttttttgccgatgcccgtggaggagtctggagagtctatgggtctcttctttccaggagccgtcttagcgccttcctcaaccagaccgagaggttcgagaacccgcttcttggcctggaagactgctcgcccgaggttgcccccaaatgacgtatcttcttgcaggcgctcctgaaactcggcgtcggcgtggttataccgcaggtacggattgtcacccgctttgagctgctggtcgtaggccttgtcgtgctcgagggccgctgcgtccgccgcgttgacgggctcccccttgtcgagtccgttgaagggtccgaggtacttgtagccaggaagcaccagaccccggccgtcgtcctgcttttgctggttggctttgggtttcggggctccaggtttcaggtcccaccactcgcgaatgccctcagagaggttgtcctcgagccaatctggaagataaccatcggcagccatacctggtttaagccatttattgctcagaaacacagtcgtccaggtccacgttgaccaggtcgcaggccgagcaggcaatctcgggtgcccgccccagcagatgatgaatcgcacacagcttccgatacgtcttttttctgacgaccggttgagattctgacacgccggggaaacattctaaacagtctctgaccccgtgcgtgaagcaaatgttgaaattctgattcattctctcgcacgttttgcagggaaacagcatctgaagcatgcccgcgtggcgagaacatttgttttggtacctgtcggcaaagtccaccggagctccttccgcgtctgacgtcgatgggtccgtgactgagggacaggcccgcttgggctcgcttatatccgcgtcatcgggggcgggtcttttgctggctccgccctttctgacgtagaactcatgcgtcacctcagtcacgtgatcactagcccagcggaagaactctttgacttcctgctttgtcaccttgccaaagtcgtgttccagacggcgggtgagttcaaatttgaacatccggtcctgcaacggctgctggtgctcgaaggtggtgctgttcccgtcgatcacggcgcgcatgttggtgttggaggtgacgatcacgggggtgggatcgatctgggcggacgacttgcacttttggtccacgcgcaccttgctgccgccgagaatggccttggcggactccacgaccttggccgtcatcttgccctcctcccaccagatcaccatcttgtcgacgcaatcgttgaagggaaagttctcattggtccagttgacgcagcaagggcgaattc

SEQ ID NO: 443 - protein, 729 aa, synthetic construct; identical to SEQ ID NO: 171
  REGION 1..729: note = source = /note="Description of Artificial Sequence: Synthetic polypeptide"

SEQ ID NO: 444 - protein, 729 aa, synthetic construct
  REGION 1..729: note = source = /note="Description of Artificial Sequence: Synthetic polypeptide"
MAADGYLPDWLEDNLSEGIREWWDLKPGAPKPKANQQKQDDGRGLVLPGYKYLGPFNGLDKGEPVNAADAAALEHDKAYDQQLKAGDNPYLRYNHADAEFQERLQEDTSFGGNLGRAVFQAKKRVLEPLGLVEEGAKTAPGKKRPIDSPDSSTGIGKKGQQPAKKKLNFGQTGDSESVPDPQPLGEPPAAPSSVGSGTMAAGGGAPTADNNEGADGVGNASGNWHCDSTWLGDRVITTSTRTWALPTYNNHLYKQISSSSSGATNDNHYFGYSTPWGYFDFNRFHCHFSPRDWQRLINNNWGFRPKKLRFKLFNIQVKEVTTNDGVTTIANNLTSTVQVFSDSEYQLPYVLGSAHQGCLPPFPADVFMIPQYGYLTLNNGSQSVGRSSFYCLEYFPSQMLRTGNNFEFSYSFEDVPFHSSYAHSQSLDRLMNPLIDQYLYYLARTQSTTGSTRELQFHQAGPNTMAEQSKNWLPGPCYRQQRLSKNLDFNNNSNFAWTAATKYHLNGRNSLTNPGIPMATNKDDEDQFFPINGVLVFGKTGAANKTTLENVLMTSEEEIKTTNPVATEEYGVVSSNLQSSTAGPQSQTINSQGALPGMVWQNRDVYLQGPIWAKIPHTDGNFHPSPLMGGFGLKHPPPQILIKNTPVPANPPEVFTPAKFASFITQYSTGQVSVEIEWELQKENSKRWNPEIQYTSNYAKSNNVEFAVNPDGVYTEPRPIGTRYLTRNL

SEQ ID NO: 445 - protein, 729 aa, synthetic construct
  REGION 1..729: note = source = /note="Description of Artificial Sequence: Synthetic polypeptide"
MAADGYLPDWLEDNLSEGIREWWDLKPGAPKPKANQQKQDDGRGLVLPGYKYLGPFNGLDKGEPVNAADAAALEHDKAYDQQLKAGDNPYLRYNHADAEFQERLQEDTSFGGNLGRAVFQAKKRVLEPLGLVEEGAKTAPGKKRPIDSPDSSTGIGKKGQQPAKKKLNFGQTGDSESVPDPQPLGEPPAAPSSVGSGTMAAGGGAPMADNNEGADGVGNASGNWHCDSTWLGDRVITTSTRTWALPTYNNHLYKQISSSSSGATNDNHYFGYSTPWGYFDFNRFHCHFSPRDWQRLINNNWGFRPKKLRFKLFNIQVKEVTTNDGVTTIANNLTSTVQVFSDSEYQLPYVLGSAHQGCLPPFPADVFMIPQYGYLTLNNGSQSVGRSSFYCLEYFPSQMLRTGNNFEFSYSFEDVPFHSSYAHSQSLDRLMNPLIDQYLYYLARTQSTTGSTRELQFHQAGPNTMAEQSKNWLPGPCYRQQRLSKNLDFNNNSNFAWTAATKYHLNGRNSLTNPGIPMATNKDDEDQFFPINGVLVFGKTGAANKTTLENVLMTSEEEIKTTNPVATEEYGVVSSNLQSSTAGPQSQTINSQGALPGMVWQNRDVYLQGPIWAKIPHTDGNFHPSPLMGGFGLKHPPPQILIKNTPVPANPPEVFTPAKFASFITQYSTGQVSVEIEWELQKENSKRWNPEIQYTSNYAKSNNVEFAVNPDGVYTEPRPIGTRYLTRNL

SEQ ID NO: 446 - DNA, 2217 bp, synthetic construct
  misc_feature 1..2217: note = source = /note="Description of Artificial Sequence: Synthetic polynucleotide"
  source 1..2217: mol_type = other DNA
atggctgctgacggttatcttccagattggctcgaggacaacctctctgagggcattcgcgagtggtgggacctgaaacctggagcccccaagcccaaggccaaccagcagaagcaggacgacggccggggtctggtgcttcctggctacaagtacctcggacccttcaacggactcgacaagggggagcccgtcaacgcggcggacgcagcggccctcgagcacgacaaggcctacgaccagcagctcaaagcgggtgacaatccgtacctgcggtataaccacgccgacgccgagtttcaggagcgtctacaagaagatacgtcttttgggggcaacctcgggcgagcagtcttccaggccaagaagcgggttctcgaacctctcggtctggttgaggaagctgctaagacggctcctggaaagaagagaccggtagaaccgtcacctcagcgttcccccgactcctccacgggcatcggcaagaaaggccagcggcccgctaaaaagagactgaactttggtcagactggcgactcagagtcagtccccgaccctcaaccaatcggagaaccaccagcaggcccctctggtctgggatctggtacaatggctgcaggcggtggcgctccaatggcagacaataacgaaggcgccgacggagtgggtagttcctcaggaaattggcattgcgattccacatggctgggcgacagagtcatcaccaccagcacccgaacctgggccctgcccacctacaacaaccacctctacaagcaaatatccaatgggacatcgggaggaagcaccaacgacaacacctacttcggctacagcaccccctgggggtattttgacttcaacagattccactgccacttctcaccacgtgactggcagcgactcatcaacaacaactggggattccggccaaaaagactcagcttcaagcccttcaacatccaggtcaaggaggtcacgcagaatgaaggcaccaagaccatcgccaataaccttaccagcacgattcaggtatttacggactcggaataccagctgccgtacgtcctcggctccgcgcaccagggctgcctgcctccgttcccggcggacgtcttcatgattccccagtacggctaccttacactgaacaatggaagtcaagccgtaggccgttcctccttctactgcctggaatattttccatctcaaatgctgcgaactggaaacaattttgaattcagctacaccttcgaggacgtgcctttccacagcagctacgcacacagccagagcttggaccgactgatgaatcctctcatcgaccagtacctgcactacttatccagaactcagtccacaggaggaactcaaggtacccagcaattgttattttctcaagctgggcctgcaaacatgtcggctcaggctaagaactggctacctggaccttgctaccggcagcagcgagtctctacgacactgtcgcaaaacaacaacagcaactttgcttggactggtgccaccaaatatcacctgaacggaagagactctttggtaaatcccggtgtcgccatggcaacccacaaggacgacgaggaacgcttcttcccgtcgagtggagtcctgatgtttggaaaacagggtgctggaagagacaatgtggactacagcagcgttatgctaaccagcgaagaagaaattaaaaccactaaccctgtagccacagaacaatacggtgtggtggctgacaacttgcagcaaaccaatacagggcctattgtgggaaatgtcaacagccaaggagccttacctggcatggtctggcagaaccgagacgtgtacctgcagggtcccatctgggccaagattcctcacacggacggcaacttccacccttcaccgctaatgggaggatttggactgaagcacccacctcctcagatcctgatcaagaacacgccggtacctgcggatcctccaacaacgttcagccaggcgaaattggcttccttcattacgcagtacagcaccggacaggtcagcgtggaaatcgagtgggagctgcagaaggagaacagcaaacgctggaacccagagattcagtacacttcaaactactacaaatctacaaatgtggactttgctgtcaatacagagggaacttattctgagcctcgccccattggtactcgctacctcacccgtaatctgtaa

SEQ ID NO: 447 - protein, 738 aa, synthetic construct
  REGION 1..738: note = source = /note="Description of Artificial Sequence: Synthetic polypeptide"
MAADGYLPDWLEDNLSEGIREWWDLKPGAPKPKANQQKQDDGRGLVLPGYKYLGPFNGLDKGEPVNAADAAALEHDKAYDQQLKAGDNPYLRYNHADAEFQERLQEDTSFGGNLGRAVFQAKKRVLEPLGLVEEAAKTAPGKKRPVEPSPQRSPDSSTGIGKKGQRPAKKRLNFGQTGDSESVPDPQPIGEPPAGPSGLGSGTMAAGGGAPMADNNEGADGVGSSSGNWHCDSTWLGDRVITTSTRTWALPTYNNHLYKQISNGTSGGSTNDNTYFGYSTPWGYFDFNRFHCHFSPRDWQRLINNNWGFRPKRLSFKPFNIQVKEVTQNEGTKTIANNLTSTIQVFTDSEYQLPYVLGSAHQGCLPPFPADVFMIPQYGYLTLNNGSQAVGRSSFYCLEYFPSQMLRTGNNFEFSYTFEDVPFHSSYAHSQSLDRLMNPLIDQYLHYLSRTQSTGGTQGTQQLLFSQAGPANMSAQAKNWLPGPCYRQQRVSTTLSQNNNSNFAWTGATKYHLNGRDSLVNPGVAMATHKDDEERFFPSSGVLMFGKQGAGRDNVDYSSVMLTSEEEIKTTNPVATEQYGVVADNLQQTNTGPIVGNVNSQGALPGMVWQNRDVYLQGPIWAKIPHTDGNFHPSPLMGGFGLKHPPPQILIKNTPVPADPPTTFSQAKLASFITQYSTGQVSVEIEWELQKENSKRWNPEIQYTSNYYKSTNVDFAVNTEGTYSEPRPIGTRYLTRNL

SEQ ID NO: 448 - DNA, 2217 bp, synthetic construct
  misc_feature 1..2217: note = source = /note="Description of Artificial Sequence: Synthetic polynucleotide"
  source 1..2217: mol_type = other DNA
atggctgctgacggttatcttccagattggctcgaggacaacctctctgagggcattcgcgagtggtgggacctgaaacctggagcccccaagcccaaggccaaccagcagaagcaggacgacggccggggtctggtgcttcctggctacaagtacctcggacccttcaacggactcgacaagggggagcccgtcaacgcggcggacgcagcggccctcgagcacgacaaggcctacgaccagcagctcaaagcgggtgacaatccgtacctgcggtataaccacgccgacgccgagtttcaggagcgtctgcaagaagatacgtcttttgggggcaacctcgggcgagcagtcttccaggccaagaagcgggttctcgaacctctcggtctggttgaggaagctgctaagacggctcctggaaagaagagaccggtagaaccgtcacctcagcgttcccccgactcctccacgggcatcggcaagaaaggccagcagcccgctaaaaagagactgaactttggtcagactggcgactcagagtcagtccccgaccctcaaccaatcggagaaccaccagcaggcccctctggtctgggatctggtacaatggctgcaggcggtggcgctccaatggcagacaataacgaaggcgccgacggagtgggtagttcctcaggaaattggcattgcgattccacatggctgggcgacagagtcatcaccaccagcacccgaacctgggccctgcccacctacaacaaccacctctacaagcaaatatccaatgggacatcgggaggaagcaccaacgacaacacctacttcggctacagcaccccctgggggtattttgacttcaacagattccactgccacttctcaccacgtgactggcagcgactcatcaacaacaactggggattccggccaaaaagactcagcttcaagctcttcaacatccaggtcaaggaggtcacgcagaatgaaggcaccaagaccatcgccaataaccttaccagcacgattcaggtatttacggactcggaataccagctgccgtacgtcctcggctccgcgcaccagggctgcctgcctccgttcccggcggacgtcttcatgattccccagtacggctaccttacactgaacaatggaagtcaagccgtaggccgttcctccttctactgcctggaatattttccatctcaaatgctgcgaactggaaacaattttgaattcagctacaccttcgaggacgtgcctttccacagcagctacgcacacagccagagcttggaccgactgatgaatcctctcatcgaccagtacctgtactacttatccagaactcagtccacaggaggaactcaaggtacccagcaattgttattttctcaagctgggcctgcaaacatgtcggctcaggctaagaactggctacctggaccttgctaccggcagcagcgagtctctacgacactgtcgcaaaacaacaacagcaactttgcttggactggtgccaccaaatatcacctgaacggaagagactctttggtaaatcccggtgtcgccatggcaacccacaaggacgacgaggaacgcttcttcccgtcgagtggagtcctgatgtttggaaaacagggtgctggaagagacaatgtggactacagcagcgttatgctaaccagcgaagaagaaattaaaaccactaaccctgtagccacagaacaatacggtgtggtggctgataacttgcagcaaaccaatacggggcctattgtgggaaatgtcaacagccaaggagccttacctggcatggtctggcagaaccgagacgtgtacctgcagggtcccatctgggccaagattcctcacacggacggcaacttccacccttcaccgctaatgggaggatttggactgaagcacccacctcctcagatcctgatcaagaacacgccggtacctgcggatcctccaacaacgttcagccaggcgaaattggcttccttcattacgcagtacagcaccggacaggtcagcgtggaaatcgagtgggagctgcagaaggagaacagcaaacgctggaacccagagattcagtacacttcaaactactacaaatctacaaatgtggactttgctgtcaatacagagggaacttattctgagcctcgccccattggtactcgttacctcacccgtaatctgtaa

SEQ ID NO: 449 - protein, 738 aa, synthetic construct; identical to SEQ ID NO: 101
  REGION 1..738: note = source = /note="Description of Artificial Sequence: Synthetic polypeptide"

SEQ ID NO: 450 - protein, 738 aa, synthetic construct
  REGION 1..738: note = source = /note="Description of Artificial Sequence: Synthetic polypeptide"
MAADGYLPDWLEDNLSEGIREWWDLKPGAPKPKANQQKQDDGRGLVLPGYKYLGPFNGLDKGEPVNAADAAALEHDKAYDQQLKAGDNPYLRYNHADAEFQERLQEDTSFGGNLGRAVFQAKKRVLEPLGLVEEAAKTAPGKKRPVEPSPQRSPDSSTGIGKKGQQPAKKRLNFGQTGDSESVPDPQPIGEPPAGPSGLGSGTMAAGGGAPMADNNEGADGVGSSSGNWHCDSTWLGDRVITTSTRTWALPTYNNHLYKQISNGTSGGSTNDNTYFGYSTPWGYFDFNRFHCHFSPRDWQRLINNNWGFRPKRLSFKLFNIQVKEVTQDEGTKTIANNLTSTIQVFTDSEYQLPYVLGSAHQGCLPPFPADVFMIPQYGYLTLNNGSQAVGRSSFYCLEYFPSQMLRTGNNFEFSYTFEDVPFHSSYAHSQSLDRLMNPLIDQYLYYLSRTQSTGGTQGTQQLLFSQAGPANMSARAKNWLPGPCYRQQRVSTTLSQNNNSNFAWTGATKYHLNGRDSLVNPGVAMATHKDDEERFFPSSGVLMFGKQGAGRDNVDYSSVMLTSEEEIKTTNPVATEQYGVVADNLQQANTGPIVGNVNSQGALPGMVWQNRDVYLQGPIWAKIPHTDGNFHPSPLMGGFGLKHPPPQILIKNTPVPADPPTTFSQAKLASFITQYSTGQVSVEIEWELQKENSKRWNPEIQYTSNYYKSTNVDFAVNSEGTYSEPRPIGTRYLTRNL

SEQ ID NO: 451 - DNA, 2217 bp, synthetic construct
  misc_feature 1..2217: note = source = /note="Description of Artificial Sequence: Synthetic polynucleotide"
  source 1..2217: mol_type = other DNA
atggctgctgacggttatcttccagattggctcgaggacaacctctctgagggcattcgcgagtggtgggacctgaaacctggagcccccaagcccaaggccaaccagcagaagcaggacgacggccggggtctggtgcttcctggctacaagtacctcggacccttcaacggactcgacaagggggagcccgtcaacgcggcggacgcagcggccctcgagcacgacaaggcctacgaccagcagctcaaagcgggtgacaatccgtacctgcggtataaccacgccgacgccgagtttcaggagcgtctgcaagaagatacgtcttttgggggcaacctcgggcgagcagtcttccaggccaagaagcgggttctcgaacctctcggtctggttgaggaagctgctaagacggctcctggaaagaagagaccggtagaaccgtcacctcagcgttcccccgactcctccacgggcatcggcaagaaaggccagcagcccgctaaaaagagactgaactttggtcagactggcgactcagagtcagtccccgaccctcaaccaatcggagaaccaccagcaggcccctctggtctgggatctggtacaatggctgcaggcggtggcgctccaatggcagacaataacgaaggcgccgacggagtgggtagttcctcaggaaattggcattgcgattccacatggctgggcgacagagtcatcaccaccagcacccgaacctgggccctgcccacctacaacaaccacctctacaagcaaatatccaatgggacatcgggaggaagcaccaacgacaacacctacttcggctacagcaccccctgggggtattttgacttcaacagattccactgccacttctcaccacgtgactggcagcgactcatcaacaacaactggggattccggccaaaaagactcagcttcaagctcttcaacatccaggtcaaggaggtcacgcaggatgaaggcaccaagaccatcgccaataaccttaccagcacgattcaggtatttacggactcggaataccagctgccgtacgtcctcggctccgcgcaccagggctgcctgcctccgttcccggcggacgtcttcatgattccccagtacggctaccttacactgaacaatggaagtcaagccgtaggccgttcctccttctactgcctggaatattttccatctcaaatgctgcgaactggaaacaattttgaattcagctacaccttcgaggacgtgcctttccacagcagctacgcacacagccagagcttggaccgactgatgaatcctctcatcgaccagtacctgtactacttatccagaactcagtccacaggaggaactcaaggtacccagcaattgttattttctcaagctgggcctgcaaacatgtcggctcgggctaagaactggctacctggaccttgctaccggcagcagcgagtctctacgacactgtcgcaaaacaacaacagcaactttgcttggactggtgccaccaaatatcacctgaacggaagagactctttggtaaatcccggtgttgctatggcaacgcataaggacgacgaggaacgtttctttccatcgagcggagtcctgatgtttggaaaacagggtgctggaagagacaatgtggactatagcagcgttatgctaaccagcgaggaagaaattaaaaccactaaccctgtagccacagaacaatacggtgtggtggctgacaacttgcagcaagccaatacagggcctattgtgggaaatgtcaacagccaaggagccttacctggcatggtctggcagaaccgagacgtgtacctgcagggtcccatctgggccaaaattcctcacacggacggcaattttcacccgtctcctctgatgggcggctttggactgaagcacccacctccccagatcctgatcaagaatacgccggtacctgcggatcctccaacgacgttcagccaggcaaaattggcttccttcatcacgcagtacagcaccggccaggtcagcgtggagatcgagtgggagctgcagaaggagaacagcaagcgatggaacccagaaattcagtacacttccaactactacaaatctacaaatgtggactttgctgtcaattctgagggtacatattcagagcctcgccccattggtactcgttatctgacacgtaatctgtaa

SEQ ID NO: 452 - DNA, 2211 bp, synthetic construct
  misc_feature 1..2211: note = source = /note="Description of Artificial Sequence: Synthetic polynucleotide"
  source 1..2211: mol_type = other DNA
atggctgccgatggttatcttccagattggctcgaggacaacctctctgagggcattcgcgagtggtgggacttgaaacctggagccccgaaacccaaagccaaccagcaaaagcaggacgacggccggggcctggtgcttcctggctacaagtacctcggacccttcaacggactcgacaagggggagcccgtcaacgcggcggacgcagcggccctcgagcacgacaaggcctacgaccagcagctcgaagcgggtgacaatccgtacctgcggtataaccacgccgacgccgagtttcaggagcgtctgcaagaagatacgtcttttgggggcaacctcgggcgagcagtcttccaggccaagaagcgggttctcgaacctctcggtctggttgaggaaggcgctaagacggctcctggaaagaagagaccagtagagcagtcaccccaagaaccagactcctcctcgggcatcggcaagaaaggccaacagcccgccagaaaaagactcaattttggccagactggcgactcagagtcagttccagaccctcaacctctcggagaacctccagcagcgccctctggtgtgggacctaatacaatggctgcaggcggtggcgcaccaatggcagacaataacgaaggcgccgacggagtgggtagttcctcgggaaattggcattgcgattccacatggctgggcgacagagtcatcaccaccagcacccgaacctgggccctgcccacctacaacaaccacctctacaagcaaatctccaacgggacatcgggaggagccaccaacgacaacacctacttcggctacagcaccccctgggggtattttgactttaacagattccactgccacttttcaccacgtgactggcagcgactcatcaacaacaactggggattccggcccaagagactcagcttcaagctcttcaacatccaggtcaaggaggtcacgcagaatgaaggcaccaagaccatcgccaataacctcaccagcaccatccaggtgtttacggactcggagtaccagctgccgtacgttctcggctctgcccaccagggctgcctgcctccgttcccggcggacgtgttcatgattccccagtacggctacctaacactcaacaacggtagtcaggccgtgggacgctcctccttctactgcctggaatactttccttcgcagatgctgagaaccggcaacaacttccagtttacttacaccttcgaggacgtgcctttccacagcagctacgcccacagccagagcttggaccggctgatgaatcctctgattgaccagtacctgtactacttgtctcggactcaaacaacaggaggcacggcaaatacgcagactctgggcttcagccaaggtgggcctaatacaatggccaatcaggcaaagaactggctgccaggaccctgttaccgccaacaacgcgtctcaacgacaaccgggcaaaacaacaatagcaactttgcctggactgctgggaccaaataccatctgaatggaagaaattcattggctaatcctggcatcgctatggcaacacacaaagacgacgaggagcgttttttcccagtaacgggatcctgtttttggcaacaaaatgctgccagagacaatgcggattacagcgatgtcatgctcaccagcgaggaagaaatcaaaaccactaaccctgtggctacagaggaatacggtatcgtggcagataacttgcagcagcaaaacacggctcctcaaattggaactgtcaacagccagggggccttacccggtatggtctggcagaaccgggacgtgtacctgcagggtcccatctgggccaagattcctcacacggacggcaacttccacccgtctccgctgatgggcggctttggcctgaaacatcctccgcctcagatcctgatcaagaacacgcctgtacctgcggatcctccgaccaccttcaaccagtcaaagctgaactctttcatcacgcaatacagcaccggacaggtcagcgtggaaattgaatgggagctacagaaggaaaacagcaagcgctggaaccccgagatccagtacacctccaactactacaaatctacaagtgtggactttgctgttaatacagaaggcgtgtactctgaaccccgccccattggcacccgttacctcacccgtaatctgtaa

SEQ ID NO: 453 - protein, 736 aa, synthetic construct
  REGION 1..736: note = source = /note="Description of Artificial Sequence: Synthetic polypeptide"
MAADGYLPDWLEDNLSEGIREWWDLKPGAPKPKANQQKQDDGRGLVLPGYKYLGPFNGLDKGEPVNAADAAALEHDKAYDQQLEAGDNPYLRYNHADAEFQERLQEDTSFGGNLGRAVFQAKKRVLEPLGLVEEGAKTAPGKKRPVEQSPQEPDSSSGIGKKGQQPARKRLNFGQTGDSESVPDPQPLGEPPAAPSGVGPNTMAAGGGAPMADNNEGADGVGSSSGNWHCDSTWLGDRVITTSTRTWALPTYNNHLYKQISNGTSGGATNDNTYFGYSTPWGYFDFNRFHCHFSPRDWQRLINNNWGFRPKRLSFKLFNIQVKEVTQNEGTKTIANNLTSTIQVFTDSEYQLPYVLGSAHQGCLPPFPADVFMIPQYGYLTLNNGSQAVGRSSFYCLEYFPSQMLRTGNNFQFTYTFEDVPFHSSYAHSQSLDRLMNPLIDQYLYYLSRTQTTGGTANTQTLGFSQGGPNTMANQAKNWLPGPCYRQQRVSTTTGQNNNSNFAWTAGTKYHLNGRNSLANPGIAMATHKDDEERFFPVTGSCFWQQNAARDNADYSDVMLTSEEEIKTTNPVATEEYGIVADNLQQQNTAPQIGTVNSQGALPGMVWQNRDVYLQGPIWAKIPHTDGNFHPSPLMGGFGLKHPPPQILIKNTPVPADPPTTFNQSKLNSFITQYSTGQVSVEIEWELQKENSKRWNPEIQYTSNYYKSTSVDFAVNTEGVYSEPRPIGTRYLTRNL

SEQ ID NO: 454 - DNA, 2214 bp, synthetic construct
  misc_feature 1..2214: note = source = /note="Description of Artificial Sequence: Synthetic polynucleotide"
  source 1..2214: mol_type = other DNA
atggctgctgacggttatcttccagattggctcgaggacaacctctctgagggcattcgcgagtggtgggacctgaaacctggagcccccaagcccaaggccaaccagcagaagcaggacgacggccggggtctggtgcttcctggctacaagtacctcggacccttcaacggactcgacaagggggagcccgtcagcgcggcggacgcagcggccctcgagcacgacaaggcctgcgaccagcggctcaaagcgggtgacaatccgtacctgcggtataaccacgccgacgccgagtttcaggagcgtctgcaagaagatacgtcttttgggggcaacctcgggcgagcagtcttccaggccaagaagcgggttctcgaacctctcggtctggttgaggaagctgctaagacggctcctggaaagaagggaccggtagaaccgtcacctcagcgttcccccgactcctccacgggcatcggcaagaaaggccagcagcccgctagaaagagactgaactttgggcagactggcgactcagagtcagtccccgaccctcaaccaatcggagaaccaccagcaggcccctctggtctgggatctggtacaatggctgcaggcggtggcgcaccaatggctgacaataacgagggcgccgacggagtgggtaatgcctcaggaaattggcattgcgattccacatggctgggcgacagagtcatcaccaccagcacccgaacctgggctttgcccacctacaacaatcacctctacaagcaaatctccagtcagtcagcaggtagcaccaacgacaacgtctacttcggctacagcaccccctgggggtattttgacttcaacagattccactgtcacttctcaccacgtgactggcagcggctcatcaacaacaactggggattccggcccaagaagctcaacttcaagctgttcaacatccaggtcaaggaggtcacaacgaatgacggcgtcacgaccatcgccaataaccttaccagcacggttcaggtcttttcggactcggaataccagctgccctacgtcctcggctccgcacaccagggctgcctgcctccgttcccggcggacgtcttcatgattccccagtacggctacctgactctgaacaatggcagccaatcggtgggtcgttcctctttctactgcctggaatatttcccttctcaaatgctgagaacgggcaacaacttcaccttcagctacaccttcgaggacgttcccttccacagcagctacgcacacagccagagcctggaccggctgatgaatcctcttatcgaccagtacctgtattacctggccagaacacagagcaacgcaggaggcacagctggcaatcgggaactgcagttttatcagggcgggcctaccaccatggccgaacaagccaaaaactggctgcctggaccttgcttccggcaacaaagagtctccaagacgctggatcaaaacaacaacagcaactttgcttggactggtgccaccaaataccatctaaatggaagaaattcattggttaatcccggtgtcgccatggcaacccacaaggacgacgaggaacgcttcttcccttcgagcggagtcctgatttttggaaaaactggagcagctaataagactacactggaaaatgtgttaatgacaaatgaagaggaaattcgtcctaccaacccggtagccaccgaggaatacgggactgttagcagcaacctgcaggcggctaacactgcagcccagacacaagttgtcaacaaccagggagccttacctggtatggtctggcagaaccgggacgtgtacctgcagggtcccatctgggccaagattcctcacacggacggcaactttcacccgtctccgctgatgggcggctttggactgaagcatccgcctcctcagatcctgatcaaaaacactcctgttcctgctaatcccccggaggtgtttacgcctgccaagtttgcttctttcatcacacagtacagcaccggccaggtcagcgtggagatcgagtgggagctgcagaaggagaacagcaagcgctggaacccagagattcagtatacctccaattttgacgaacagactggtgtggactttgccgttgacagccagggtgtttattctgagcctcgccccattggtactcgttacctcacccgtaatctgtaa

SEQ ID NO: 455 - protein, 737 aa, synthetic construct
  REGION 1..737: note = source = /note="Description of Artificial Sequence: Synthetic polypeptide"
MAADGYLPDWLEDNLSEGIREWWDLKPGAPKPKANQQKQDDGRGLVLPGYKYLGPFNGLDKGEPVSAADAAALEHDKACDQRLKAGDNPYLRYNHADAEFQERLQEDTSFGGNLGRAVFQAKKRVLEPLGLVEEAAKTAPGKKGPVEPSPQRSPDSSTGIGKKGQQPARKRLNFGQTGDSESVPDPQPIGEPPAGPSGLGSGTMAAGGGAPMADNNEGADGVGNASGNWHCDSTWLGDRVITTSTRTWALPTYNNHLYKQISSQSAGSTNDNVYFGYSTPWGYFDFNRFHCHFSPRDWQRLINNNWGFRPKKLNFKLFNIQVKEVTTNDGVTTIANNLTSTVQVFSDSEYQLPYVLGSAHQGCLPPFPADVFMIPQYGYLTLNNGSQSVGRSSFYCLEYFPSQMLRTGNNFTFSYTFEDVPFHSSYAHSQSLDRLMNPLIDQYLYYLARTQSNAGGTAGNRELQFYQGGPTTMAEQAKNWLPGPCFRQQRVSKTLDQNNNSNFAWTGATKYHLNGRNSLVNPGVAMATHKDDEERFFPSSGVLIFGKTGAANKTTLENVLMTNEEEIRPTNPVATEEYGTVSSNLQAANTAAQTQVVNNQGALPGMVWQNRDVYLQGPIWAKIPHTDGNFHPSPLMGGFGLKHPPPQILIKNTPVPANPPEVFTPAKFASFITQYSTGQVSVEIEWELQKENSKRWNPEIQYTSNFDEQTGVDFAVDSQGVYSEPRPIGTRYLTRNL

SEQ ID NO: 456 - DNA, 2214 bp, synthetic construct
  misc_feature 1..2214: note = source = /note="Description of Artificial Sequence: Synthetic polynucleotide"
  source 1..2214: mol_type = other DNA
atggctgccgatggttatcttccagattggctcgaggacaacctctctgagggcattcgcgagtggtgggacctgaaacctggagccccgaaacccaaagccaaccagcaaaagcaggacgacggccggggtctggtgcttcctggctacaagtacctcggacccttcaacggactcgacaagggggagcccgtcaacgcggcggacgcagcggccctcgagcacgacaaggcctacgaccagcagctcaaagcgggtgacaatccgtacctgcggtataaccacgccgacgccgagtttcaggagcgtctgcaagaagatacgtcttttgggggcaacctcgggcgagcagtcttccaggccaagaagcgggttctcgaacctctcggtctggttgaggaagctgctaagacggctcctggaaagaagagaccggtagaaccgtcacctcagcgttcccccgactcctccacgggcatcggcaagaaaggccagcagcccgctagaaagagactgaactttgggcagactggcgactcagagtcagtccccgaccctcaaccaatcggagaaccaccagcaggcccctctggtctgggatctggtacaatggctgcaggcggtggcgctccaatggcagacaataacgaaggcgccgacggagtgggtaatgcctcaggaaattggcattgcgattccacatggctgggcgacagagtcatcaccaccagcacccgaacctgggctttgcccacctacaacaaccacctctacaagcaaatctccagtcagtcagcaggtagcaccaacgacaacgtctacttcggctacagcaccccctgggggtattttgacttcaacagattccactgtcacttctcaccacgtgactggcagcggctcatcaacaacaactggggattccggcccaagaagctcaacttcaagctgttcaacatccaggtcaaggaggtcacaacgaatgacggcgtcacgaccatcgccaataaccttaccagcacggttcaggtcttttcggactcggaataccagctgccctacgtcctcggctccgcacaccagggctgcctgcctccgttcccggcggacgtcttcatgattcctcagtacggctacctgactctcaacaacggtagtcaggccgtgggacgttcctccttctactgcctggagtacttcccctctcagatgctgagaacgggcaacaacttttccttcagctacactttcgaggacgtgcctttccacagcagctacgcgcacagccagagtttggacaggctgatgaatcctctcatcgaccagtacctgtactacctgtcaagaacccagtctacgggaggcacagcgggaacccagcagttgctgttttctcaggccgggcctagcaacatgtcgactcaggccagaaactggctgcctggaccctgctacagacagcagcgcgtctccacgacactgtcgcaaaacaacaacagcaactttgcctggactggtgccaccaagtatcatctgaacggcagagactctctggtgaatccgggcgtcgccatggcaaccaacaaggacgacgaggaccgcttcttcccatccagcggcatcctcatgtttggcaagcagggagctggaaaagacaacgtggactatagcaacgtgatgctaaccagcgaggaagaaatcaagaccaccaaccccgtggccacagaacagtatggcgtggtggctgataacctacagcagcaaaacaccgctcctattgtgggggccgtcaacagccagggagccttacctggcatggtctggcagaaccgggacgtgtacctgcagggtcctatttgggccaagattcctcacacagatggcaactttcacccgtctcctttaatgggcggctttggacttaaacatccgcctcctcagatccttatcaaaaacactcctgttcctgcggatcctccaacagcgttcaaccaggccaagctgaattctttcatcacgcagtacagcaccggacaagtcagcgtggagatcgagtgggagctgcagaaggagaacagcaagcgctggaacccagagattcagtatacttccaactactacaaatctacaaatgtggactttgctgttaatactgagggtgcttactctgagcctcgccccattggcactcgttacctcacccgtaatctgtaa

SEQ ID NO: 457 - protein, 737 aa, synthetic construct
  REGION 1..737: note = source = /note="Description of Artificial Sequence: Synthetic polypeptide"
MAADGYLPDWLEDNLSEGIREWWDLKPGAPKPKANQQKQDDGRGLVLPGYKYLGPFNGLDKGEPVNAADAAALEHDKAYDQQLKAGDNPYLRYNHADAEFQERLQEDTSFGGNLGRAVFQAKKRVLEPLGLVEEAAKTAPGKKRPVEPSPQRSPDSSTGIGKKGQQPARKRLNFGQTGDSESVPDPQPIGEPPAGPSGLGSGTMAAGGGAPMADNNEGADGVGNASGNWHCDSTWLGDRVITTSTRTWALPTYNNHLYKQISSQSAGSTNDNVYFGYSTPWGYFDFNRFHCHFSPRDWQRLINNNWGFRPKKLNFKLFNIQVKEVTTNDGVTTIANNLTSTVQVFSDSEYQLPYVLGSAHQGCLPPFPADVFMIPQYGYLTLNNGSQAVGRSSFYCLEYFPSQMLRTGNNFSFSYTFEDVPFHSSYAHSQSLDRLMNPLIDQYLYYLSRTQSTGGTAGTQQLLFSQAGPSNMSTQARNWLPGPCYRQQRVSTTLSQNNNSNFAWTGATKYHLNGRDSLVNPGVAMATNKDDEDRFFPSSGILMFGKQGAGKDNVDYSNVMLTSEEEIKTTNPVATEQYGVVADNLQQQNTAPIVGAVNSQGALPGMVWQNRDVYLQGPIWAKIPHTDGNFHPSPLMGGFGLKHPPPQILIKNTPVPADPPTAFNQAKLNSFITQYSTGQVSVEIEWELQKENSKRWNPEIQYTSNYYKSTNVDFAVNTEGAYSEPRPIGTRYLTRNL

SEQ ID NO: 458 - DNA, 2217 bp, synthetic construct
  misc_feature 1..2217: note = source = /note="Description of Artificial Sequence: Synthetic polynucleotide"
  source 1..2217: mol_type = other DNA
atggctgccgatggttatcttccagattggctcgaggacaacctctctgagggcattcgcgagtggtgggacctgaaacctggagccccgaaacccaaagccaaccagcaaaagcaggacgacggccggggtctggtgcttcctggctacaagtacctcggacccttcaacggactcgacaagggggagcccgtcaacgcggcggacgcagcggccctcgagcacgacaaggcctacgaccagcagctcaaagcgggtgacaatccgtacctgcggtataatcacgccgacgccgagtttcaggagcgtctgcaagaagatacgtcttttgggggcaacctcgggcgagcagtcttccaggccaagaagcgggttctcgaacctctcggtctggttgaggaaggcgctaagacggctcctggaaagaagagaccggtagagccgtcaccacagcgttcccccgactcctccacgggcatcggcaagaaaggccagcagcccgccagaaagagactcaatttcggtcagactggcgactcagagtcagtccccgaccctcaacctatcggagaacctccagcagcgccctctagtgtgggatctggtacaatggctgcaggcggtggcgcaccaatggcagacaataacgaaggtgccgacggagtgggtagttcctcgggaaattggcattgcgattccacatggctgggcgacagagtcatcaccaccagcacccgaacctgggccctgcccacctacaacaaccacctctacaagcaaatctccaacgggacctcgggaggcagcaccaacgacaacacctactttggctacagcaccccctgggggtattttgactttaacagattccactgccacttctcaccacgtgactggcagcgactcatcaacaacaactggggattccggcccaagagactcagcttcaagctcttcaacatccaggtcaaagaggtcacgcagaatgaaggcaccaagaccatcgccaataacctcaccagcaccatccaggtgtttacggactcggaataccagctgccgtacgtcctcggctctgcccaccagggctgcctgcctccgttcccggcggacgtcttcatgattcctcagtacggctacctgactctcaacaacggtagtcaggccgtgggacgttcctccttctactgcctggagtacttcccctctcagatgctgagaacgggcaacaacttttccttcagctacactttcgaggacgtgcctttccacagcagctacgcgcacagccagagtttggacaggctgatgaatcctctcatcgaccagtacctgtactacctgtcaagaacccagtctacgggaggcacagcgggaacccagcagttgctgttttctcaggccgggcctagcaacatgtcggctcaggccagaaactggctgcctggaccctgctacagacagcagcgcgtctccacgacactgtcgcaaaacaacaacagcaactttgcctggactggtgccaccaagtatcatctgaacggcagagactctctggtgaatccgggcgtcgccatggcaaccaacaaggacgacgaggaccgcttcttcccatccagcggcatcctcatgtttggcaagcagggagctggaaaagacaacgtggactatagcaacgtgatgctaaccagcgaggaagaaatcaaggccaccaaccccgtggccacagaacagtatggcgtggtggctgataacctacagcagcaaaacaccgctcctattgtgggggccgtcaacagccagggagccttacctggcatggtctggcagaaccgggacgtgtacctgcagggtcctatttgggccaagattcctcacacagatggcaactttcacccgtctcctttaatgggcggctttggacttaaacatccgcctcctcagatcctcatcaaaaacactcctgttcctgcggatcctccaacagcgttcaaccaggccaagctgaattctttcatcacgcagtacagcaccggacaagtcagcgtggagatcgagtgggagctgcagaaggagaacagcaagcgctggaacccagagattcagtatacttccaactactacaaatctacaaatgtggactttgctgttaatactgagggtgtttactctgagcctcgccccattggcactcgttacctcacccgtaatctgtaa

SEQ ID NO: 459 - protein, 738 aa, synthetic construct
  REGION 1..738: note = source = /note="Description of Artificial Sequence: Synthetic polypeptide"
MAADGYLPDWLEDNLSEGIREWWDLKPGAPKPKANQQKQDDGRGLVLPGYKYLGPFNGLDKGEPVNAADAAALEHDKAYDQQLKAGDNPYLRYNHADAEFQERLQEDTSFGGNLGRAVFQAKKRVLEPLGLVEEGAKTAPGKKRPVEPSPQRSPDSSTGIGKKGQQPARKRLNFGQTGDSESVPDPQPIGEPPAAPSSVGSGTMAAGGGAPMADNNEGADGVGSSSGNWHCDSTWLGDRVITTSTRTWALPTYNNHLYKQISNGTSGGSTNDNTYFGYSTPWGYFDFNRFHCHFSPRDWQRLINNNWGFRPKRLSFKLFNIQVKEVTQNEGTKTIANNLTSTIQVFTDSEYQLPYVLGSAHQGCLPPFPADVFMIPQYGYLTLNNGSQAVGRSSFYCLEYFPSQMLRTGNNFSFSYTFEDVPFHSSYAHSQSLDRLMNPLIDQYLYYLSRTQSTGGTAGTQQLLFSQAGPSNMSAQARNWLPGPCYRQQRVSTTLSQNNNSNFAWTGATKYHLNGRDSLVNPGVAMATNKDDEDRFFPSSGILMFGKQGAGKDNVDYSNVMLTSEEEIKATNPVATEQYGVVADNLQQQNTAPIVGAVNSQGALPGMVWQNRDVYLQGPIWAKIPHTDGNFHPSPLMGGFGLKHPPPQILIKNTPVPADPPTAFNQAKLNSFITQYSTGQVSVEIEWELQKENSKRWNPEIQYTSNYYKSTNVDFAVNTEGVYSEPRPIGTRYLTRNL

SEQ ID NO: 460 - DNA, 2217 bp, synthetic construct
  misc_feature 1..2217: note = source = /note="Description of Artificial Sequence: Synthetic polynucleotide"
  source 1..2217: mol_type = other DNA
atggctgccgatggttatcttccagattggctcgaggacaacctctctgagggcattcgcgagtggtgggacctgaaacctggagccccgaaacccaaagccaaccagcaaaagcaggacgacggccggggtctggtgcttcctggctacaagcacctcggacccttcaacggactcgacaagggggagcccgtcaacgcggcggacgcagcggccctcgagcacgacaaggcctacgaccagcagctcaaagcgggtgacaatccgtacctgcggtataatcacgctgacgccgagtttcaggagcgtctgcaagaagatacgtcttttgggggcaacctcgggcgagcagtcttccaggccaagaagcgggttctcgaacctctcggtctggttgaggaaggcgctaagacggctcctggaaagaagagaccggtagagccgtcaccacagcgttcccccgactcctccacgggcatcggcaagaaaggccagcagcccgccagaaagagactcaatttcggtcagactggcgactcagagtcagtccccgaccctcaacctatcggagaacctccagcagcgccctctagtgtgggatctggtacaatggctgcaggcggtggcgcaccaatggcagacaataacgaaggtgccgacggagtgggtagttcctcgggaaattggcattgcgattccacatggctgggcgacagagtcatcaccaccagcacccgaacctgggccctgcccacctacaacaaccacctctacaagcaaatctccaacgggacctcgggaggcagcaccaacgacaacacctactttggctacagcaccccctgggggtattttgactttaacagattccactgccacttctcaccacgtgactggcagcgactcatcaacaacaactggggattccggcccaagagactcagcttcaagctcttcaacatccaggtcaaagaggtcacgcagaatgaaggcaccaagaccatcgccaataaccttaccagcacggttcaggtcttttcggactcggaataccagctgccctacgtcctcggctccgcacaccagggctgcctgcctccgttcccggcggacgtcttcatgattccccagtacggctacctgactctgaacaatggcagccaatcggtgggtcgttcctctttctactgcctggaatatttcccttctcaaatgctgagaacgggcaacaacttcaccttcagctacaccttcgaggacgttcccttccacagcagctacgcacacagccagagcctggaccggctgatgaatcctcttatcgaccagtacctgtattacctggccagaacacagagcaacgcaggaggcacagctggcaatcgggaactgcagttttatcagggcgggcctaccaccatggccgaacaagccaaaaactggctgcctggaccttgcttccggcaacaaagagtctccaagacgctggatcaaaacaacaacagcaactttgcttggactggtgccaccaaataccatctaaatggaagaaattcattggttaatcccggtgtcgccatggcaacccacaaggacgacgaggaacgcttcttcccttcgagcggagtcctgatttttggaaaaactggagcagctaataagactacactggaaaatgtgttaatgacaaatgaagaggaaattcgtcctaccaacccggtagccaccgaggaatacgggactgttagcagcaacctgcaggcggctaacactgcagcccagacacaagttgtcaacaaccagggagccttacctggtatggtctggcagaaccgggacgtgtacctgcagggtcccatctgggccaagattcctcacacggacggcaactttcacccgtctccgctgatgggcggctttggactgaagcatccgcctcctcagatcctgatcaaaaacactcctgttcctgctaatcccccggaggtgtttacgcctgccaagtttgcttctttcatcacacagtacagcaccggccaggtcagcgtggagatcgagtgggagctgcagaaggagaacagcaagcgctggaacccagagattcagtatacctccaattttgacaaacagactggtgtggactttgccgttgacagccagggtgtttattctgagcctcgccccattggtactcgttacctcacccgtaatctgtaa

SEQ ID NO: 461 - protein, 738 aa, synthetic construct
  REGION 1..738: note = source = /note="Description of Artificial Sequence: Synthetic polypeptide"
MAADGYLPDWLEDNLSEGIREWWDLKPGAPKPKANQQKQDDGRGLVLPGYKHLGPFNGLDKGEPVNAADAAALEHDKAYDQQLKAGDNPYLRYNHADAEFQERLQEDTSFGGNLGRAVFQAKKRVLEPLGLVEEGAKTAPGKKRPVEPSPQRSPDSSTGIGKKGQQPARKRLNFGQTGDSESVPDPQPIGEPPAAPSSVGSGTMAAGGGAPMADNNEGADGVGSSSGNWHCDSTWLGDRVITTSTRTWALPTYNNHLYKQISNGTSGGSTNDNTYFGYSTPWGYFDFNRFHCHFSPRDWQRLINNNWGFRPKRLSFKLFNIQVKEVTQNEGTKTIANNLTSTVQVFSDSEYQLPYVLGSAHQGCLPPFPADVFMIPQYGYLTLNNGSQSVGRSSFYCLEYFPSQMLRTGNNFTFSYTFEDVPFHSSYAHSQSLDRLMNPLIDQYLYYLARTQSNAGGTAGNRELQFYQGGPTTMAEQAKNWLPGPCFRQQRVSKTLDQNNNSNFAWTGATKYHLNGRNSLVNPGVAMATHKDDEERFFPSSGVLIFGKTGAANKTTLENVLMTNEEEIRPTNPVATEEYGTVSSNLQAANTAAQTQVVNNQGALPGMVWQNRDVYLQGPIWAKIPHTDGNFHPSPLMGGFGLKHPPPQILIKNTPVPANPPEVFTPAKFASFITQYSTGQVSVEIEWELQKENSKRWNPEIQYTSNFDKQTGVDFAVDSQGVYSEPRPIGTRYLTRNL

SEQ ID NO: 462 - protein, 737 aa, synthetic construct
  REGION 1..737: note = source = /note="Description of Artificial Sequence: Synthetic polypeptide"
MAADGYLPDWLEDNLSEGIREWWDLKPGAPKPKANQQKQDDGRGLVLPGYKYLGPFNGLDKGEPVNAADAAALEHDKAYDQQLKAGDNPYLRYNHADAEFQERLQEDTSFGGNLGRAVFQAKKRVLEPLGLVEEAAKTAPGKKRPVEPSPQRSPDSSTGIGKKGQQPARKRLNFGQTGDSESVPDPQPIGEPPAGPSGLGSGTMAAGGGAPMADNNKGADGVGNASGNWHCDSTWLGDRVITTSTRTWALPTYNNHLYKQISSQSAGSTNDNVYFGYSTPWGYFDFNRFHCHFSPRDWQRLINSNWGFRPKKLNFKLFNIQVKEVTTNDGVTTIANNLTSTVQVFSDSEYQLPYVLGSAHQGCLPPFPADVFMIPQYGYLTLNNGSQSVGRSSFYCLEYFPSQMLRTGNNFTFSYTFEDVPFHSSYAHSQSLDRLMNPLIDQYLYYLARTQSNAGGTAGNRELQFYQGGPTTMAEQAKNWLPGPCFRQQRVSKTLDQNNNSNFAWTGATKYHLNGRNSLVNPGVAMATHKDDEERFFPSSGVLIFGKTGAANKTTLENVLMTNEEEIRPTNPVATEEYGTVSSNLQAANTAAQTQVVNNQGALPGMVWQNRDVYLQGPIWAKIPHTDGNFHPSPLMGGFGLKHPPPQILIKNTPVPANPPEVFTPAKFASFITQYSTGQVSVEIEWELQKENSKRWNPEIQYTSNFDKQTGVDFAVDSQGVYSEPRPIGTRYLTRNL

SEQ ID NO: 463 - protein, 737 aa, synthetic construct
  REGION 1..737: note = source = /note="Description of Artificial Sequence: Synthetic polypeptide"
MAADGYLPDWLEDNLSEGIREWWDLKPGAPKPKANQQKQDDGRGLVLPGYKYLGPFNGLDKGEPVNAADAAALEHDKAYDQQLKAGDNPYLRYNHADAEFQERLQEDTSFGGNLGRAVFQAKKRVLEPLGLVEEAAKTAPGKKRPVEPSPQRSPDSSTGIGKKGQQPARKRLNFGQTGDSESVPDPQPIGEPPAGPSGLGSGTMAAGGGAPMADNNEGADGVGNASGNWHCDSTWLGDRVITTSTRTWALPTYNNHLYKQISSQSAGSTNDNVYFGYSTPWGYFDFNRFHCHFSPRDWQRLINSNWGFRPKKLNFKLFNIQVKEVTTNDGVTTIANNLTSTVQVFSDSEYQLPYVLGSAHQGCLPPFPADVFMIPQYGYLTLNNGSQSVGRSSFYCLEYFPSQMLRTGNNFTFSYTFEDVPFHSSYAHSQSLDRLMNPLIDQYLYYLARTQSNAGGTAGNRELQFYQGGPTTMAEQAKNWLPGPCFRQQRVSKTLDQNNNSNFAWTGATKYHLNGRNSLVNPGVAMATHKDDEERFFPSSGVLIFGKTGAANKTTLENVLMTNEEEIRPTNPVATEEYGTVSSNLQAANTAAQTQVVNNQGALPGMVWQNRDVYLQGPIWAKIPHTDGNFHPSPLMGGFGLKHPPPQILIKNTPVPANPPEVFTPAKFASFITQYSTGQVSVEIEWELQKENSKRWNPEIQYTSNFDKQTGVDFAVDSQGVYSEPRPIGTRYLTRNL

SEQ ID NO: 464 - protein, 737 aa, synthetic construct
  REGION 1..737: note = source = /note="Description of Artificial Sequence: Synthetic polypeptide"
MAADGYLPDWLEDNLSEGIREWWDLKPGAPKPKANQQKQDDGRGLVLPGYKYLGPFNGLDKGEPVNAADAAALEHDKAYDQQLKAGDNPYLRYNHADAEFQERLQEDTSFGGNLGRAVFQAKKRVLEPLGLVEEAAKTAPGKKRPVEPSPQRSPDSSTGIGKKGQQPARKRLNFGQTGDSESVPDPQPIGEPPAGPSGLGSGTMAAGGGAPMADNNEGADGVGNASGNWHCDSTWLGDRVITTSTRTWALPTYNNHLYKQISSQSAGSTNDNVYFGYSTPWGYFDFNRFHCHFSPRDWQRLINNNWGFRPKKLNFKLFNIQVKEVTTNDGVTTIANNLTSTVQVFSDSEYQLPYVLGSAHQGCLPPFPADVFMIPQYGYLTLNNGSQSVGRSSFYCLEYFPSQMLRTGNNFTFSYTFEDVPFHSSYAHSQSLDRLMNPLIDQYLYYLARTQSNAGGTAGNRELQFYQGGPTTMAEQAKNWLPGPCFRQQRVSKTLDQNNNSNFAWTGATKYHLNGRNSLVNPGVAMATHKDDEERFFPSSGVLIFGKTGAANKTTLENVLMTNEEEIRPTNPVATEEYGTVSSNLQAANTAAQTQVVNNQGALPGMVWQNRDVYLQGPIWAKIPHTDGNFHPSPLMGGFGLKHPPPQILIKNTPVPANPPEVFTPAKFASFITQYSTGQVSVEIEWELQKENSKRWNPEIQYTSNFDKQTGVDFAVDSQGVYSEPRPIGTRYLTRNL

SEQ ID NO: 465 - protein, 737 aa, synthetic construct
  REGION 1..737: note = source = /note="Description of Artificial Sequence: Synthetic polypeptide"
MAADGYLPDWLEDNLSEGIREWWDLKPGAPKPKANQQKQDDGRGLVLPGYKYLGPFNGLDKGEPVNAADAAALEHDKAYDQQLKAGDNPYLRYNHADAEFQERLQEDTSFGGNLGRAVFQAKKRVLEPLGLVEEAAKTAPGKKRPVEPSPQRSPDSSTGIGKKGQQPARKRLNFGQTGDSESVPDPQPIGEPPAGPSGLGSGTMAAGGGAPMADNNKGADGVGNASGNWHCDSTWLGDRVITTSTRTWALPTYNNHLYKQISSQSAGSTNDNVYFGYSTPWGYFDFNRFHCHFSPRDWQRLINNNWGFRPKKLNFKLFNIQVKEVTTNDGVTTIANNLTSTVQVFSDSEYQLPYVLGSAHQGCLPPFPADVFMIPQYGYLTLNNGSQSVGRSSFYCLEYFPSQMLRTGNNFTFSYTFEDVPFHSSYAHSQSLDRLMNPLIDQYLYYLARTQSNAGGTAGNRELQFYQGGPTTMAEQAKNWLPGPCFRQQRVSKTLDQNNNSNFAWTGATKYHLNGRNSLVNPGVAMATHKDDEERFFPSSGVLIFGKTGAANKTTLENVLMTNEEEIRPTNPVATEEYGTVSSNLQAANTAAQTQVVNNQGALPGMVWQNRDVYLQGPIWAKIPHTDGNFHPSPLMGGFGLKHPPPQILIKNTPVPANPPEVFTPAKFASFITQYSTGQVSVEIEWELQKENSKRWNPEIQYTSNFDKQTGVDFAVDSQGVYSEPRPIGTRYLTRNL

SEQ ID NO: 466 - DNA, 2214 bp, synthetic construct
  misc_feature 1..2214: note = source = /note="Description of Artificial Sequence: Synthetic polynucleotide"
  source 1..2214: mol_type = other DNA
atggctgctgacggttatcttccagattggctcgaggacaacctctctgagggcattcgcgagtggtgggacctgaaacctggagcccccaagcccaaggccaaccagcagaagcaggacgacggccggggtctggtgcttcctggctacaagtacctcggacccttcaacggactcgacaagggggagcccgtcaacgcggcggacgcagcggccctcgagcacgacaaggcctacgaccagcagctcaaagcgggtgacaatccgtacctgcggtataaccacgccgacgccgagtttcaggagcgtctgcaagaagatacgtcttttgggggcaacctcgggcgagcagtcttccaggccaagaagcgggttctcgaacctctcggtctggttgaggaagctgctaagacggctcctggaaagaagagaccggtagaaccgtcacctcagcgttcccccgactcctccacgggcatcggcaagaaaggccagcagcccgctagaaagagactgaactttgggcagactggcgactcagagtcagtccccgaccctcaaccaatcggagaaccaccagcaggcccctctggtctgggatctggtacaatggctgcaggcggtggcgcaccaatggctgacaataacaagggcgccgacggagtgggtaatgcctcaggaaattggcattgcgattccacatggctgggcgacagagtcatcaccaccagcacccgaacctgggctttgcccacctacaacaaccacctctacaagcaaatctccagtcagtcagcaggtagcaccaacgacaacgtctacttcggctacagcaccccctgggggtattttgacttcaacagattccactgtcacttctcaccacgtgactggcagcggctcatcaacagcaactggggattccggcccaagaagctcaacttcaagctgttcaacatccaggtcaaggaggtcacaacgaatgacggcgtcacgaccatcgccaataaccttaccagcacggttcaggtcttttcggactcggaataccagctgccctacgtcctcggctccgcacaccagggctgcctgcctccgttcccggcggacgtcttcatgattccccagtacggctacctgactctgaacaatggcagccaatcggtgggtcgttcctctttctactgcctggaatatttcccttctcaaatgctgagaacgggcaacaacttcaccttcagctacaccttcgaggacgttcccttccacagcagctacgcacacagccagagcctggaccggctgatgaatcctcttatcgaccagtacctgtattacctggccagaacacagagcaacgcaggaggcacagctggcaatcgggaactgcagttttatcagggcgggcctaccaccatggccgaacaagccaaaaactggctgcctggaccttgcttccggcaacaaagagtctccaagacgctggatcaaaacaacaacagcaactttgcttggactggtgccaccaaataccatctaaatggaagaaattcattggttaatcccggtgtcgccatggcaacccacaaggacgacgaggaacgcttcttcccttcgagcggagtcctgatttttggaaaaactggagcagctaataagactacactggaaaatgtgttaatgacaaatgaagaggaaattcgtcctaccaacccggtagccaccgaggaatacgggactgttagcagcaacctgcaggcggctaacactgcagcccagacacaagttgtcaacaaccagggagccttacctggtatggtctggcagaaccgggacgtgtacctgcagggtcccatctgggccaagattcctcacacggacggcaactttcacccgtctccgctgatgggcggctttggactgaagcatccgcctcctcagatcctgatcaaaaacactcctgttcctgctaatcccccggaggtgtttacgcctgccaagtttgcttctttcatcacacagtacagcaccggccaggtcagcgtggagatcgagtgggagctgcagaaggagaacagcaagcgctggaacccagagattcagtatacctccaattttgacaaacagactggtgtggactttgccgttgacagccagggtgtttattctgagcctcgccccattggtactcgttacctcacccgtaatctgtaa

SEQ ID NO: 467 - DNA, 2217 bp, synthetic construct
  misc_feature 1..2217: note = source = /note="Description of Artificial Sequence: Synthetic polynucleotide"
  source 1..2217: mol_type = other DNA
atggctgccgatggttatcttccagattggctcgaggacaacctctctgagggcattcgcgagtggtgggacctgaaacctggagccccgaaacccaaagccaaccagcaaaagcaggacgacggccggggtctggtgcttcctggctacaagtacctcggacccttcaacggactcgacaagggggagcccgtcaacgcggcggacgcagcggccctcgagcacgacaaggcctacgaccagcagctcaaagcgggtgacaatccgcacctgcggtataatcacgccgacgccgagtttcaggagcgtctgcaagaagatacgtcttttgggggcaacctcgggcgagcagtcttccaggccaagaagcgggttctcgaacctctcggtctggttgaggaaggcgctaagacggctcctggaaagaagagaccggtagagccgtcaccacagcgttcccccgactcctccacgggcatcggcaagaaaggccagcagcccgccagaaagagactcaatttcggtcagactggcgactcagagtcagtccccgaccctcaacttatcggagaacctccagcagcgccctctagtgtgggatctggtacaatggctgcaggcggtggcgcaccaatggcagacaataacgaaggtgccgacggagtgggtagttcctcgggaaattggcattgcgattccacatggctgggcgacagagtcatcaccaccagcacccgaacctgggccctgcccacctacaacaaccacctctacaagcaaatctccaacgggacctcgggaggcagcaccaacgacaacacctactttggctacagcaccccctgggggtattttgactttaacagattccactgccacttctcaccacgtgactggcagcgactcatcaacaacaactggggattccggcccaagagactcagcttcaagctcttcaacatccaggtcaaagaggtcacgcagaatgaaggcaccaagaccatcgccaataacctcaccagcaccatccaggtgtttacggactcggagtaccagctgccgtacgtcctcggctctgcccaccagggctgcctgcctccgttcccggcggacgtcttcatgattcctcagtacggcaacctgactctcaacaacggtagtcaggccgtgggacgttcctccttctactgcctggagtacttcccctctcagatgctgagaacgggcaacaacttttccttcagctacactttcgaggacgtgcctttccacagcagctacgcgcacagccagagtttggacaggctgatgaatcctctcatcgaccagtacctgtactacctgtcaagaacccagtctacgggaggcacagcgggaacccagcagttgctgttttctcaggccgggcctagcaacatgtcggctcaggccagaaactggctgcctggaccctgctacagacagcagcgcgtctccacgacactgtcgcaaaacaacaacagcaactttgcctggactggtgccaccaagtatcatctgaacggcagagactctctggtgaatccgggcgtcgccatggcaaccaacaaggacgacgaggaccgcttcttcccatccagcggcatcctcatgtttggcaagcagggagctggaaaagacaacatgggctatagcaacgtgatgctaaccagcgaggaagaaatcaagaccaccaaccccgtggccacagaacagtatggcgtggtggctgataacctacagcagcaaaacaccgctcctattgtgggggccgtcaacagccagggagccttacctggcatggtctggcagaaccgggacgtgtacctgcagggtcctatttgggccaagattcctcacacagatggcaactttcacccgtctcctttaatgggcggctttggacttaaacatccgcctcctcagatcctcatcaaaaacactcctgttcctgcggatcctccaacagcgttcaaccaggccaagctgaattctttcatcacgcagtacggcaccggacaagtcagcgtggagatcgagtgggagctgcagaaggagaacagcaagcgctggaacccagagattcagtatacttccaactactacaaatctacaaatgtggactttgctgttaatactgagggtgtttactctgagcctcgccccattggcactcgttacctcacccgtaatctgtaa

SEQ ID NO: 468 - protein, 738 aa, synthetic construct
  REGION 1..738: note = source = /note="Description of Artificial Sequence: Synthetic polypeptide"
MAADGYLPDWLEDNLSEGIREWWDLKPGAPKPKANQQKQDDGRGLVLPGYKYLGPFNGLDKGEPVNAADAAALEHDKAYDQQLKAGDNPHLRYNHADAEFQERLQEDTSFGGNLGRAVFQAKKRVLEPLGLVEEGAKTAPGKKRPVEPSPQRSPDSSTGIGKKGQQPARKRLNFGQTGDSESVPDPQLIGEPPAAPSSVGSGTMAAGGGAPMADNNEGADGVGSSSGNWHCDSTWLGDRVITTSTRTWALPTYNNHLYKQISNGTSGGSTNDNTYFGYSTPWGYFDFNRFHCHFSPRDWQRLINNNWGFRPKRLSFKLFNIQVKEVTQNEGTKTIANNLTSTIQVFTDSEYQLPYVLGSAHQGCLPPFPADVFMIPQYGNLTLNNGSQAVGRSSFYCLEYFPSQMLRTGNNFSFSYTFEDVPFHSSYAHSQSLDRLMNPLIDQYLYYLSRTQSTGGTAGTQQLLFSQAGPSNMSAQARNWLPGPCYRQQRVSTTLSQNNNSNFAWTGATKYHLNGRDSLVNPGVAMATNKDDEDRFFPSSGILMFGKQGAGKDNMGYSNVMLTSEEEIKTTNPVATEQYGVVADNLQQQNTAPIVGAVNSQGALPGMVWQNRDVYLQGPIWAKIPHTDGNFHPSPLMGGFGLKHPPPQILIKNTPVPADPPTAFNQAKLNSFITQYGTGQVSVEIEWELQKENSKRWNPEIQYTSNYYKSTNVDFAVNTEGVYSEPRPIGTRYLTRNL

SEQ ID NO: 469 - DNA, 2217 bp, synthetic construct
  misc_feature 1..2217: note = source = /note="Description of Artificial Sequence: Synthetic polynucleotide"
  source 1..2217: mol_type = other DNA
atggctgccgatggttatcttccagattggctcgaggacaacctctctgagggcattcgcgagtggtgggacctgaaacctggagccccgaaacccaaagccaaccagcaaaagcaggacgacggccggggtctggtgcttcctggctacaagtacctcggacccttcaacggactcgacaagggggagcccgtcaacgcggcggacgcagcggccctcgagcacgacaaggcctacgaccagcagctcaaagcgggtgacaatccgtacctgcggtataatcacgccgacgccgagtttcaggagcgtctgcaagaagatacgtcttttgggggcaacctcgggcgagcagtcttccaggccaagaagcgggttctcgaacctctcggtctggttgaggaaggcgctaagacggctcctggaaagaagagaccggtagagccgtcaccacagcgttcccccgactcctccacgggcatcggcaagaaaggccagcagcccgccggaaagagactcaatttcggtcagactggcgactcagagtcagtccccgaccctcaacctatcggagaacctccagcagcgccctctagtgtgggatctggtacaatggctgcaggcggtggcgcaccaatggcagacaataacgaaggtgccgacggagtgggtagttcctcgggaaattggcattgcgattccacatggctgggcgacagagtcatcaccaccagcacccgaacctgggccctgcccacctacaacaaccacctctacaagcaaatctccaacgggacctcgggaggcagcaccaacgacaacacctactttggctacagcaccccctgggggtattttgactttaacagattccactgccacttctcaccacgtgactggcagcgactcatcaacaacaactggggattccggcccaagagactcagcttcaagctcttcaacatccaggtcaaagaggtcacgcagaatgaaggcaccaagaccatcgccaataacctcaccagcaccatccaggtgtttacggactcggaataccagctgccgtacgtcctcggctctgcccaccagggctgcctgcctccgttcccggcggacgtcttcatgattcctcagtacggctacctgactctcaacaacggtagtcaggccgtgggacgttcctccttctactgcctggagtacttcccctctcagatgctgagaacgggcaacaacttttccttcagctacactttcgaggacgtgcctttccacagcagctacgcgcacagccagagtttggacaggctgatgaatcctctcgtcgaccagtacctgtactacctgtcaagaacccagtctacgggaggcacagcgggaacccagcagttgctgttttctcaggccgggcctagcaacatgtcggctcaggccagaaactggctgcctggaccctgctacagacagcagcgcgtctccacgacactgtcgcaaaacaacaacagcaactttgcctggactggtgccaccaagtatcatctgaacggcagagactctctggtgaatccgggcgtcgccatggcaaccaacaaggacgacgaggaccgcttcttcccatccagcggcatcctcatgtttggcaagcagggagctggaaaagacaacgtggactatagcaacgtgatgctaaccagcgaggaagaaatcaagaccaccaaccccgtggccacagaacagtatggcgtggtggctgataacctacagcagcaaaacaccgctcctattgtgggggccgtcaacagccagggagccttacctggcatggtctggcagaaccgggacgtgtacctgcagggtcctatttgggccaagattcctcacacagatggcaactttcacccgtctcctttaatgggcggctttggacttaaacatccgcctcctcagatcctcatcaaaaacactcctgttcctgcggatcctccaacagcgttcaaccaggccaagctgaattctttcatcacgcagtacagcaccggacaagtcagcgtggagatcgagtgggagctgcagaaggagaacagcaagcgctggagcccagagattcagtatacttccaactactacaaatctacaaatgtggactttgctgttaatactgagggtgtttactctgagcctcgccccattggcactcgttacctcacccgtaatctgtaa

SEQ ID NO: 470 - protein, 738 aa, synthetic construct
  REGION 1..738: note = source = /note="Description of Artificial Sequence: Synthetic polypeptide"
MAADGYLPDWLEDNLSEGIREWWDLKPGAPKPKANQQKQDDGRGLVLPGYKYLGPFNGLDKGEPVNAADAAALEHDKAYDQQLKAGDNPYLRYNHADAEFQERLQEDTSFGGNLGRAVFQAKKRVLEPLGLVEEGAKTAPGKKRPVEPSPQRSPDSSTGIGKKGQQPAGKRLNFGQTGDSESVPDPQPIGEPPAAPSSVGSGTMAAGGGAPMADNNEGADGVGSSSGNWHCDSTWLGDRVITTSTRTWALPTYNNHLYKQISNGTSGGSTNDNTYFGYSTPWGYFDFNRFHCHFSPRDWQRLINNNWGFRPKRLSFKLFNIQVKEVTQNEGTKTIANNLTSTIQVFTDSEYQLPYVLGSAHQGCLPPFPADVFMIPQYGYLTLNNGSQAVGRSSFYCLEYFPSQMLRTGNNFSFSYTFEDVPFHSSYAHSQSLDRLMNPLVDQYLYYLSRTQSTGGTAGTQQLLFSQAGPSNMSAQARNWLPGPCYRQQRVSTTLSQNNNSNFAWTGATKYHLNGRDSLVNPGVAMATNKDDEDRFFPSSGILMFGKQGAGKDNVDYSNVMLTSEEEIKTTNPVATEQYGVVADNLQQQNTAPIVGAVNSQGALPGMVWQNRDVYLQGPIWAKIPHTDGNFHPSPLMGGFGLKHPPPQILIKNTPVPADPPTAFNQAKLNSFITQYSTGQVSVEIEWELQKENSKRWSPEIQYTSNYYKSTNVDFAVNTEGVYSEPRPIGTRYLTRNL

SEQ ID NO: 471 - DNA, 2217 bp, synthetic construct
  misc_feature 1..2217: note = source = /note="Description of Artificial Sequence: Synthetic polynucleotide"
  source 1..2217: mol_type = other DNA
atggttgccgatggttatcttccagattggctcgaggacaacctctctgagggcattcgcgagtggtgggacctgaaacctggagccccgaaacccaaagccaaccagcaaaagcagggcgacggccggggtctggtgcttcctggctacaagtacctcggacccttcaacggactcgacaagggggagcccgtcaacgcggcggacgcagcggccctcgagcacgacaaggcctacgaccagcagcttaaagcgggtgacaatccgtacctgcggtataatcacgccgacgccgagcttcaggagcgtctgcaagaagatacgtcttttgggggcaacctcgggcgagcagtcttccaggccaagaagcgggttctcgaacctctcggtctggttgaggaaggcgctaagacggctcctggaaagaagagaccggtagagccgtcaccacagcgttcccccgactcctccacgggcatcggcaagaaaggccagcagcccgccagaaagagactcaatttcggtcagactggcgactcagagtcagtccccgaccctcaacctatcggagaacctccagcagcgccctctagtgtgggatctggtacaatggctgcaggcggtggcgcgccaatggcagacaataacgaaggtgccgacggagtgggtagttcctcgggaaattggcattgcgattccacatggctgggcgacagagtcatcaccaccagcacccgaacctgggccctgcccacctacaacaaccacctctacaagcaaatctccaacgggacctcgggaggcagcaccaacgacaacacctactttggctacagcaccccctgggggtattttgactttaacagattccactgccacttctcaccacgtgactggcagcgactcatcaacaacaactggggattccggcccaagagactcagcttcaagctcttcaacatccaggtcaaagaggtcacgcagaatgaaggcaccaagaccatcgccaataacctcaccagcaccatccaggtgtttacggactcggaataccagctgccgtacgtcctcggctctgcccaccagggctgccagcctccgttcccggcggacgtcttcatgattcctcagtacggctacctgactctcaacaacggtagtcaggccgtgggacgttcctccttctactgcctggagtacttcccctctcagatgctgagaacgggcaacaacttttccttcagctacactttcgaggacgtgcctttccacagcagctacgcgcacagccagagtttggacaggctgatgaatcctctcatcgaccagtacctgtactacctgtcaagaacccagtctacgggaggcacagcgggaacccagcagttgctgttttctcaggccgggcctagcaacatgtcggctcaggccagaaactggctgcctggaccctgctacagacagcagcgcgtctccacgacactgtcgcaaaacaacaacagcaactttgcctggactggtgccaccaagtatcatctgaacggcagagactctctggtgaatccgggcgtcgccatggcaaccaacaaggacgacgaggaccgcttcttcccatccagcggcatcctcatgtttggcaagcagggagctggaaaagacaacgtggactatagcaacgtgatgctaaccagcgaggaagaaatcaagaccaccaaccccgtggccacagaacagtatggcgtggtggctgataacctacagcagcaaaacaccgctcctattgtgggggccgtcaacagccagggagccttacctggcatggtctggcagaaccgggacgtgtacctgcagggtcctatttgggccaagattcctcacacagatggcaactttcacccgtctcctttaatgggcggctttggacttaaacatccgcctcctcagatcctcatcaaaaacactcctgttcctgcggatcctccaacagcgttcaaccaggccaagctgaattctttcatcacgcagtacagcaccggacaagtcagcgtggagatcgagtgggagccgcagaaggagaacagcaagcgctggaacccagagattcagtatacttccaactactacaaatctacaaatgtggactttgctgttaatactgagggtgtttactctgagcctcgccccattggcactcgttacctcacccgtaatctgtaa

SEQ ID NO: 472 - protein, 738 aa, synthetic construct
  REGION 1..738: note = source = /note="Description of Artificial Sequence: Synthetic polypeptide"
MVADGYLPDWLEDNLSEGIREWWDLKPGAPKPKANQQKQGDGRGLVLPGYKYLGPFNGLDKGEPVNAADAAALEHDKAYDQQLKAGDNPYLRYNHADAELQERLQEDTSFGGNLGRAVFQAKKRVLEPLGLVEEGAKTAPGKKRPVEPSPQRSPDSSTGIGKKGQQPARKRLNFGQTGDSESVPDPQPIGEPPAAPSSVGSGTMAAGGGAPMADNNEGADGVGSSSGNWHCDSTWLGDRVITTSTRTWALPTYNNHLYKQISNGTSGGSTNDNTYFGYSTPWGYFDFNRFHCHFSPRDWQRLINNNWGFRPKRLSFKLFNIQVKEVTQNEGTKTIANNLTSTIQVFTDSEYQLPYVLGSAHQGCQPPFPADVFMIPQYGYLTLNNGSQAVGRSSFYCLEYFPSQMLRTGNNFSFSYTFEDVPFHSSYAHSQSLDRLMNPLIDQYLYYLSRTQSTGGTAGTQQLLFSQAGPSNMSAQARNWLPGPCYRQQRVSTTLSQNNNSNFAWTGATKYHLNGRDSLVNPGVAMATNKDDEDRFFPSSGILMFGKQGAGKDNVDYSNVMLTSEEEIKTTNPVATEQYGVVADNLQQQNTAPIVGAVNSQGALPGMVWQNRDVYLQGPIWAKIPHTDGNFHPSPLMGGFGLKHPPPQILIKNTPVPADPPTAFNQAKLNSFITQYSTGQVSVEIEWEPQKENSKRWNPEIQYTSNYYKSTNVDFAVNTEGVYSEPRPIGTRYLTRNL

SEQ ID NO: 473 - DNA, 2217 bp, synthetic construct
  misc_feature 1..2217: note = source = /note="Description of Artificial Sequence: Synthetic polynucleotide"
  source 1..2217: mol_type = other DNA
atggctgccgatggttatcttccagattggctcgaggacaacctctctgagggcattcgcgagtggtgggacctgaaacctggagccccgaaacccaaagccaaccagcaaaagcaggacgacggccggggtctggtgcttcctggctacaagtacctcggacccttcaacggactcgacaagggggagcccgtcaacgcggcggacgcagcggccctcgagcacgacaaggcctacgaccagcagctcaaagcgggtgacaatccgtacctgcggtataatcacgccgacgccgagtttcaggagcgtctgcaagaagatacgtcttttgggggcaacctcgggcgagcagtcttccaggccaagaagcgggttctcgaacctctcggtctggttgaggaaggcgctaagacggctcctggaaagaagagaccggtagagccgtcaccacagcgttcccccgactcctccacgggcatcggcaagaaaggccagcagcccgccagaaagagactcaatttcggtcagactggcgactcagagtcagtccccgaccctcaacctatcggagaacctccagcagcgccctctagtgtgggatctggtacaatggctgcaggcggtggcgcaccaatggcagacaataacgaaggtgccgacggagtgggtagttcctcgggaaattggcattgcgattccacatggctgggcgacagagtcatcaccaccagcacccgaacctgggccctgcccacctacaacaaccacctctacaagcaaatctccaacgggacctcgggaggcagcaccaacgacaacacctactttggctacagcaccccctgggggtattttgactttaacagattccactgccacttctcaccacgtgactggcagcgactcatcaacaacaactggggattccggcccaagagactcagcttcaagctcttcaacatccaggtcaaagaggtcacgcagaatgaaggcaccaagaccatcgccaatagcctcaccagcaccatccaggtgtttacggactcggaataccagctgccgtacgtcctcggctctgcccaccagggctgcctgcctccgttcccggcggacgtcttcatgattcctcagtacggctacctgactcccaacaacggtagtcaggccgtgggacgttcctccttctactgcctggagtacttcccctctcagatgctgagaacgggcaacaacttttccttcagctacactttcgaggacgtgcctttccacagcagctacgcgcacagccagagtttggacaggctgatgaatcctctcatcgaccagtacctgtactacctgtcaagaacccagtctacgggaggcacagcgggaacccagcagttgctgtcttctcaggccgggcctagcaacatgtcggctcaggccagaaactggctgcctggaccctgctacagacagcagcgcgtctccacgacactgtcgcaaaacaacaacagcaactttgcctggactggtgccaccaagtatcatctgaacggcagagactctctggtgaatccgggcgtcgccatggcaaccaacaaggacgacgaggaccgcttcttcccatccagcggcatcctcatgtttggcaagcagggagctggaaaagacaacgtggactatagcaacgtgatgctaaccagcgaggaagaaatcaagaccaccaaccccgtggccacagaacagtatggcgtggtggctgataacctacagcagcaaaacaccgctcctattgtgggggccgtcaacagccagggagccttacctggcatggtctggcagaaccgggacgtgtacttgcagggtcctatttgggccaagattcctcacacagatggcaactttcacccgtctcctttaatgggcggctttggacttaaacatccgcctcctcagatcctcatcaaaaacactcctgttcctgcggatcctccaacagcgttcaaccaggccaagctgaattctttcatcacgcagtacagcaccggacaagtcagcgtggagatcgagtgggagctgcagaaggagaacagcaagcgctggaacccagagattcagtatacttccaactactacaaatctacaaatgtggactttgctgttaatactgagggtgtttactctgagcctcgccccattggcactcgttacctcacccgtaatctgtaa

SEQ ID NO: 474 - protein, 738 aa, synthetic construct
  REGION 1..738: note = source = /note="Description of Artificial Sequence: Synthetic polypeptide"
MAADGYLPDWLEDNLSEGIREWWDLKPGAPKPKANQQKQDDGRGLVLPGYKYLGPFNGLDKGEPVNAADAAALEHDKAYDQQLKAGDNPYLRYNHADAEFQERLQEDTSFGGNLGRAVFQAKKRVLEPLGLVEEGAKTAPGKKRPVEPSPQRSPDSSTGIGKKGQQPARKRLNFGQTGDSESVPDPQPIGEPPAAPSSVGSGTMAAGGGAPMADNNEGADGVGSSSGNWHCDSTWLGDRVITTSTRTWALPTYNNHLYKQISNGTSGGSTNDNTYFGYSTPWGYFDFNRFHCHFSPRDWQRLINNNWGFRPKRLSFKLFNIQVKEVTQNEGTKTIANSLTSTIQVFTDSEYQLPYVLGSAHQGCLPPFPADVFMIPQYGYLTPNNGSQAVGRSSFYCLEYFPSQMLRTGNNFSFSYTFEDVPFHSSYAHSQSLDRLMNPLIDQYLYYLSRTQSTGGTAGTQQLLSSQAGPSNMSAQARNWLPGPCYRQQRVSTTLSQNNNSNFAWTGATKYHLNGRDSLVNPGVAMATNKDDEDRFFPSSGILMFGKQGAGKDNVDYSNVMLTSEEEIKTTNPVATEQYGVVADNLQQQNTAPIVGAVNSQGALPGMVWQNRDVYLQGPIWAKIPHTDGNFHPSPLMGGFGLKHPPPQILIKNTPVPADPPTAFNQAKLNSFITQYSTGQVSVEIEWELQKENSKRWNPEIQYTSNYYKSTNVDFAVNTEGVYSEPRPIGTRYLTRNL

SEQ ID NO: 475 - protein, 738 aa, synthetic construct
  REGION 1..738: note = source = /note="Description of Artificial Sequence: Synthetic polypeptide"
MAADGYLPDWLEDNLSEGIREWWDLKPGAPKPKANQQKQDDGRGLVLPGYKYLGPFNGLDKGEPVNAADAAALEHDKAYDQQLKAGDNPYLRYNHADAEFQERLQEDTSFGGNLGRAVFQAKKRVLEPLGLVEEGAKTAPGKKRPVEPSPQRSPDSSTGIGKKGQQPARKRLNFGQTGDSESVPDPQPIGEPPAAPSSVGSGTMAAGGGAPMADNNEGADGVGSSSGNWHCDSTWLGDRVITTSTRTWALPTYNNHLYKQISNGTSGGSTNDNTYFGYSTPWGYFDFNRFHCHFSPRDWQRLINNNWGFRPKRLSFKLFNIQVKEVTQNEGTKTIANNLTSTIQVFTDSEYQLPYVLGSAHQGCLPPFPADVFMIPQYGYLTLNNGSQAVGRSSFYCLEYFPSQMLRTGNNFSFSYTFEDVPFHSSYVHSQSLDRLMNPLIDQYLYYLSRTQSTGGTAGTQQLLFSQAGPSNMSAQARNWLPGPCYRQQRVSTTLSQNNNSNFAWTGATKYHLNGRDSLVNSGVAMATNKDDEDRFFPSSGILMFGKQGAGKDNVDYSNVMLTSEEEIKTTNPVATEQYGVVADNLQQQNTAPIVGAVNSQGALPGMVWQNRDVYLQGPIWAKIPHTDGNFHPSPLMGGFGLKHPPPQILIKNTPVPADPPTAFNQAKLNSFITQYSTGQVSVEIEWELQKENSKRWNPEIQYTSNYYKSTNVDFAVNTEGVYSEPRPIGTRYPTRNL

SEQ ID NO: 476 - DNA, 2217 bp, synthetic construct
  misc_feature 1..2217: note = source = /note="Description of Artificial Sequence: Synthetic polynucleotide"
  source 1..2217: mol_type = other DNA
atggctgccgatggttatcttccagattggctcgaggacaacctctctgagggcattcgcgagtggtgggacctgaaacctggagccccgaaacccaaagccaaccagcaaaagcaggacgacggccggggtctggtgcttcctggctacaagtacctcggacccttcaacggactcgacaagggggagcccgtcaacgcggcggacgcagcggccctcgagcacgacaaggcctacgaccagcagctcaaagcgggtgacaatccgtacctgcggtataatcacgccgacgccgagtttcaggagcgtctgcaagaagatacgtcttttgggggcaacctcgggcgagcagtcttccaggccaagaagcgggttctcgaacctctcggtctggttgaggaaggcgctaagacggctcctggaaagaagagaccggtagagccgtcaccacagcgttcccccgactcctccacgggcatcggcaagaaaggccagcagcccgccagaaagagactcaatttcggtcagactggcgactcagagtcagtccccgaccctcaacctatcggagaacctccagcagcgccctctagtgtgggatctggtacaatggctgcaggcggtggcgcaccaatggcagacaataacgaaggtgccgacggagtgggtagttcctcgggaaattggcattgcgattccacatggctgggcgacagagtcatcaccaccagcacccgaacctgggccctgcccacctacaacaaccacctctacaagcaaatctccaacgggacctcgggaggcagcaccaacgacaacacctactttggctacagcaccccctgggggtattttgactttaacagattccactgccacttctcaccacgtgactggcagcgactcatcaacaacaactggggattccggcccaagagactcagcttcaagctcttcaacatccaggtcaaagaggtcacgcagaatgaaggcaccaagaccatcgccaataacctcaccagcaccatccaggtgtttacggactcggaataccagctgccgtacgtcctcggctctgcccaccagggctgcctgcctccgttcccggcggacgtcttcatgattcctcagtacggctacctgactctcaacaacggtagtcaggccgtgggacgttcctccttctactgcctggagtacttcccctctcagatgctgagaacgggcaacaacttttccttcagctacactttcgaggacgtgcctttccacagcagctacgtgcacagccagagtttggacaggctgatgaatcctctcatcgaccagtacctgtactacctgtcaagaacccagtctacgggaggcacagcgggaacccagcagttgctgttttctcaggccgggcctagcaacatgtcggctcaggccagaaactggctgcctggaccctgctacagacagcagcgcgtctccacgacactgtcgcaaaacaacaacagcaactttgcctggactggtgccaccaagtatcatctgaacggcagagactctctggtgaattcgggcgtcgccatggcaaccaacaaggacgacgaggaccgcttcttcccatccagcggcatcctcatgtttggcaagcagggagctggaaaagacaacgtggactatagcaacgtgatgctaaccagcgaggaagaaatcaagaccaccaaccccgtggccacagaacagtatggcgtggtggctgataacctacagcagcaaaacaccgctcctattgtgggggccgtcaacagccagggagccttacctggcatggtctggcagaaccgggacgtgtacctgcagggtcctatttgggccaagattcctcacacagatggcaactttcacccgtctcctttaatgggcggctttggacttaaacatccgcctcctcagatcctcatcaaaaacactcctgttcctgcggatcctccaacagcgttcaaccaggccaagctgaattctttcatcacgcagtacagcaccggacaagtcagcgtggagatcgagtgggagctgcagaaggagaacagcaagcgctggaacccagagattcagtatacttccaactactacaaatctacaaatgtggactttgctgttaatactgagggtgtttactctgagcctcgccccattggcactcgttaccccacccgtaatctgtaa

SEQ ID NO: 477 - protein, 734 aa, synthetic construct; identical to SEQ ID NO: 302
  REGION 1..734: note = source = /note="Description of Artificial Sequence: Synthetic polypeptide"

SEQ ID NO: 478 - DNA, 2214 bp, synthetic construct
  misc_feature 1..2214: note = source = /note="Description of Artificial Sequence: Synthetic polynucleotide"
  source 1..2214: mol_type = other DNA
atggctgctgacggttatcttccagattggctcgaggacaacctctctgagggcattcgcgagtggtgggacctgaaacctggagccccgaaacccaaagccaaccagcagaagcaggacgacggccggggtctggtgcttcctggctacaagtacctcggacccttcaacggactcgacaagggggagcccgtcaacgcggcggacgcagcggccctcgagcacgacaaggcctacgaccagcagctcaaagcgggtgacaatccgtacctgcggtataaccacgccgacgccgagtttcaggagcgtctgcaagaagatacgtcttttgggggcaacctcgggcgagcagtcttccaggccaagaagcgggttctcgaacctctcggtctggttgaggaagctgctaagacggctcctggaaagaagagaccggtagaaccgtcacctcagcgttcccccgactcctccacgggcatcggcaagaaaggccagcagcccgctagaaagagactgaactttgggcagactggcgactcagagtcagtccccgaccctcaacctctcggagaaccaccagcaggcccctctggtctgggatctggtacaatggctgcaggcggtggcgctccaatggcagacaataacgaaggcgccgacggagtgggtaatgcctcaggaaattggcattgcgattccacatggctgggcgacagagtcatcaccaccagcacccgaacctgggctttgcccacctacaacaaccacctctacaagcaaatctccagtcagtcagcaggtagcaccaacgacaacgtctacttcggctacagcaccccctgggggtattttgacttcaacagattccactgtcacttctcaccacgtgactggcagcgactcatcaacaacaactggggattccggcccaagaagctcaacttcaagctcttcaacatccaagtcaaggaggtcacgacgaatgacggcgtcacgaccatcgctaataaccttaccagcacggttcaggtcttttcggactcggagtaccagctgccgtacgtcctcggctctgcccaccagggctgcctgcctccgttcccggcggacgtcttcatgattcctcagtacggctacctgactctgaacaatggcagccaatcggtgggacgttcatccttctactgcctggaatacttcccttctcaggtgctgagaacgggtaacaacttcaccttcagttacaccttcgaggacgtgcctttccacagcagctacgcgcacagccagagcctagaccggctgatgaatcccctcatcgaccagtacctgtattacctggctagaacacagagtaacccaggaggcacatctggcaatcgggaactgcagttttaccagggcgggccttccaccatggccgaacaagccaagaactggttacctggaccttgcttccggcaacaaagagtttccaaaacactggatcaaaacaacaacagcaactttgcttggactggtgccaccaaatatcacctgaacggcagaaactcattggtgaatcctggtgtcgccatggcaactcacaaggacgacgaggaccgctttttcccatccagcggagtcctgatttttggaaaaactggagcaaccaacaagactacattggaaaacgtgttaatgacaaatgaagaagaaattcgtcctactaatcctgtggccacagaagaatacgggatagtcagcagcaatttacaagcggccaatactgcagcccagacacaagttgtcaacaaccagggagccttacctggcatggtctggcagaaccgggacgtgtacctgcagggtcccatctgggccaaaattcctcacacagacggcaactttcacccgtctccgctgatgggcggctttggactgaagcatccgcctcctcagatcctgatcaaaaacactcctgttcctgctaatcccccggaggtgtttacgcctgccaagtttgcttctttcatcacacagtacagcaccggccaggtcagcgtggagatcgagtgggagctgcagaaggagaacagcaagcgctggaacccagagattcagtatacctccaattttgacaaacagactggtgtggactttgccgttgacagccagggtgtttattctgagcctcgccccattggtactcgttacctcacccgtaatctgtaa

SEQ ID NO: 479 - protein, 737 aa, synthetic construct
  REGION 1..737: note = source = /note="Description of Artificial Sequence: Synthetic polypeptide"
MAADGYLPDWLEDNLSEGIREWWDLKPGAPKPKANQQKQDDGRGLVLPGYKYLGPFNGLDKGEPVNAADAAALEHDKAYDQQLKAGDNPYLRYNHADAEFQERLQEDTSFGGNLGRAVFQAKKRVLEPLGLVEEAAKTAPGKKRPVEPSPQRSPDSSTGIGKKGQQPARKRLNFGQTGDSESVPDPQPLGEPPAGPSGLGSGTMAAGGGAPMADNNEGADGVGNASGNWHCDSTWLGDRVITTSTRTWALPTYNNHLYKQISSQSAGSTNDNVYFGYSTPWGYFDFNRFHCHFSPRDWQRLINNNWGFRPKKLNFKLFNIQVKEVTTNDGVTTIANNLTSTVQVFSDSEYQLPYVLGSAHQGCLPPFPADVFMIPQYGYLTLNNGSQSVGRSSFYCLEYFPSQVLRTGNNFTFSYTFEDVPFHSSYAHSQSLDRLMNPLIDQYLYYLARTQSNPGGTSGNRELQFYQGGPSTMAEQAKNWLPGPCFRQQRVSKTLDQNNNSNFAWTGATKYHLNGRNSLVNPGVAMATHKDDEDRFFPSSGVLIFGKTGATNKTTLENVLMTNEEEIRPTNPVATEEYGIVSSNLQAANTAAQTQVVNNQGALPGMVWQNRDVYLQGPIWAKIPHTDGNFHPSPLMGGFGLKHPPPQILIKNTPVPANPPEVFTPAKFASFITQYSTGQVSVEIEWELQKENSKRWNPEIQYTSNFDKQTGVDFAVDSQGVYSEPRPIGTRYLTRNL

SEQ ID NO: 480 - DNA, 2214 bp, synthetic construct
  misc_feature 1..2214: note = source = /note="Description of Artificial Sequence: Synthetic polynucleotide"
  source 1..2214: mol_type = other DNA
atggctgccgatggttatcttccagattggctcgaggacaacctctctgagggcattcgcgagtggtgggacctgaaacctggagccccgaaacccaaagccaaccagcaaaagcaggacgacggccggggtctggtgcttcctggctacaagtacctcggacccttcaacggactcgacaagggggagcccgtcaacgcggcggacgcagcggccctcgagcacgacaaggcctacgaccagcagctcaaagcgggtgacaatccgtacctgcggtataatcacgccgacgccgagtttcaggagcgtctgcaagaagatacgtcttttgggggcaacctcgggcgagcagtcttccaggccaagaagcgggttctcgaacctctcggtctggttgaggaaggcgctaagacggctcctggaaagaagagaccggtagagccgtcaccacagcgttcccccgactcctccacgggcatcggcaagaaaggccagcagcccgccagaaagagactcaatttcggtcagactggcgactcagagtcagtccccgaccctcaacctatcggagaacctccagcagcgccctctagtgtgggatctggtacaatggctgcaggcggtggcgcaccaatggcagacaataacgaaggtgccgacggagtgggtagttcctcgggaaattggcattgcgattccacacggctgggcgacagagtcatcaccaccagcacccggacctgggctttgcccacctacaacaaccacctctacaagcaaatctccagtcagtcagcaggtagcaccaacgacaacgtctacttcggctacagcaccccctgggggtattttgacttcaacagattccactgtcacttctcaccacgtgactggcagcggctcatcaacaacaactggggattccggcccaagaagctcaacttcaagctgttcaacatccaggtcaaggaggtcacaacgaatgacggcgtcacgaccatcgccaataaccttaccagcacggttcaggtcttttcggactcggaataccagctgccctacgtcctcggctccgcacaccagggctgcctgcctccgttcccggcggacgtcttcatgattccccagtacggctacctgactctgaacaatggcagccaatcggtgggtcgttcctctttctactgcctggaatatttcccttctcaaatgctgagaacgggcaacaacttcaccttcagctacaccttcgaggacgttcccttccacagcagctacgcacacagccagagcctggaccggctgatgaatcctcttatcgaccagtacctgtattacctggccagaacacagagcaacgcaggaggcacagctggcaatcgggaactgcagttttatcagggcgggcctaccaccatggccgaacaagccaaaaactggctgcctggaccttgcttccggcaacgaagagtctccaagacgctggatcaaaacaacaacagcaactttgcttggactggtgccaccaaataccatctaaatggaagaaattcattggttaatcccggtgtcgccatggcaacccacaaggacgacgaggaacgcttcttcccttcgagcggagtcctgatttttggaaaaactggagcagctaataagactacactggaaaatgtgttaatgacaaatgaagaggaaattcgtcctaccaacccggtagccaccgaggaatacgggactgttagcagcaacctgcaggcggctaacactgcagcccagacacaagttgtcaacaaccagggagccttacctggtatggtctggcagaaccgggacgtgtacctgcagggtcccatctgggccaagattcctcacacggacggcaactttcacccgtctccgctgatgggcggctttggactgaagcatccgcctcctcagatcctgatcaaaaacactcctgttcctgctaatcccccggaggtgtttacgcctgccaagtttgcttctttcatcacacagtacagcaccggccaggtcagcgtggagatcgagtgggagctgcagaaggagaacagcaagcgctggaacccagagattcagtatacctccaattttgacaaacagactggtgtggactttgccgttgacagccagggtgtttattctgagcctcgccccattggtactcgttacctcacccgtaatctgtaa

SEQ ID NO: 481 - protein, 737 aa, synthetic construct
  REGION 1..737: note = source = /note="Description of Artificial Sequence: Synthetic polypeptide"
MAADGYLPDWLEDNLSEGIREWWDLKPGAPKPKANQQKQDDGRGLVLPGYKYLGPFNGLDKGEPVNAADAAALEHDKAYDQQLKAGDNPYLRYNHADAEFQERLQEDTSFGGNLGRAVFQAKKRVLEPLGLVEEGAKTAPGKKRPVEPSPQRSPDSSTGIGKKGQQPARKRLNFGQTGDSESVPDPQPIGEPPAAPSSVGSGTMAAGGGAPMADNNEGADGVGSSSGNWHCDSTRLGDRVITTSTRTWALPTYNNHLYKQISSQSAGSTNDNVYFGYSTPWGYFDFNRFHCHFSPRDWQRLINNNWGFRPKKLNFKLFNIQVKEVTTNDGVTTIANNLTSTVQVFSDSEYQLPYVLGSAHQGCLPPFPADVFMIPQYGYLTLNNGSQSVGRSSFYCLEYFPSQMLRTGNNFTFSYTFEDVPFHSSYAHSQSLDRLMNPLIDQYLYYLARTQSNAGGTAGNRELQFYQGGPTTMAEQAKNWLPGPCFRQRRVSKTLDQNNNSNFAWTGATKYHLNGRNSLVNPGVAMATHKDDEERFFPSSGVLIFGKTGAANKTTLENVLMTNEEEIRPTNPVATEEYGTVSSNLQAANTAAQTQVVNNQGALPGMVWQNRDVYLQGPIWAKIPHTDGNFHPSPLMGGFGLKHPPPQILIKNTPVPANPPEVFTPAKFASFITQYSTGQVSVEIEWELQKENSKRWNPEIQYTSNFDKQTGVDFAVDSQGVYSEPRPIGTRYLTRNL

SEQ ID NO: 482 - DNA, 2208 bp, synthetic construct
  misc_feature 1..2208: note = source = /note="Description of Artificial Sequence: Synthetic polynucleotide"
  source 1..2208: mol_type = other DNA
atggctgccgatggttatcttccagattggctcgaggacactctctctgaaggaataagacagtggtggaagctcaaacctggcccaccaccaccaaagcccgcagagcggcataaggacgacagcaggggtcttgtgcttcctgggtacaagtacctcggacccttcaacggactcgacaagggggagccggtcaacgaggcagacgccgcggccctcgagcacgacaaggcctacgaccggcagctcgacagcggagacaacccgtacctcaagtacaaccacgccgacgcggagtttcaggagcgtcttaaagaagatacgtcttttgggggcaacctcggacgagcagtcttccaggcgaaaaagagggttcttgaacctctgggcctggttgaggaacctgttaagacggctccgggaaaaaagaggccggtagagcactctcctgcggagccagactcctcctcgggaaccggaaaagcgggccagcagcctgcaagaaaaagattgaattttggtcagactggagacgcagactccgtacctgacccccagcctctcggacagccaccagcagccccctctggtttgggatctactacaatggctacaggcagtggcgcaccaatggcagacaataacgagggtgccgatggagtgggtaattcttcaggaaattggcattgcgattcccaatggctgggcgacagagtcatcaccaccagcacccgaacctgggcccagcccacctacaacaaccacctctacaagcaaatctcaagccaatcaggagcctcaaacgacaaccactactttggctacagcaccccttgggggtattttgacttcaacagattccactgccacttttcaccacgtgactggcaaagactcatcaacaacaactggggattccgacccaagagactcaacttcaagctctttaacattcaagtcaaagaggtcacgcagaatgacggtacgacgacgattgccaataaccttaccagcacggttcaggtgtttactgactcggagtaccagctcccgtacgtcctcgggtcggcgcatcaaggatgcctcccgccgtttccagcggacgtcttcatggtcccacagtatggatacctcaccctgaacaacgggagtcaggcggtaggacgctcttccttttactgcctggagtactttccttctcagatgcttcgtactggaaacaactttcagttcagctacacctttgaagacgttcctttccacagcagctacgctcacagccagagtctggatcggctgatgaatcctctgatcgaccagtacctgtattatctgaacaaaacacaatcaaatagtggagctcttcagcagtctcggctactgtttagtcaagctggacccaccagcatgtctcttcaagctaaaaactggctacctggaccttgctacagacagcagcgtctgtcaaagcaggcaaacgacaacaacaacagcaactttccctggactgcggctacaaagtaccacctaaatggccgggactcgttggttaatccaggaccagctatggccagtcacaaagacgatgaagaaaagtttttccccatgcatggaaccctgatatttggtaaacaaggaacaaatgctaacgacgcggatttggacaatgtcatgattacagatgaagaagaaatccgcaccaccaatcccgtggctacggagcagtacggatatgtgtcaaataatttgcaaaactcaaatactggtccaactactggaactgtcaatcaccgaggagcgttacctggcatggtgtggcaggatcgagacgtgtacctgcagggacccatttgggccaagattcctcacaccgatggacactttcatccttctccactgatgggaggttttgggctcaaacacccgcctcctcagatcatgatcaaaaacactcccgttccagccaatcctcccacaaacttcagttctgccaagtttgcttctttcatcacacagtattccacggggcaggtcagcgtggagatcgagtgggagctgcagaaagagaacagcaaacgctggaatcccgaaattcagtacacttccaactacaacaaatctgttaatgtggactttactgtggacactaatggcgtgtattcagagcctcgccccattggcaccagatacctgactcgtaatctgtaa

SEQ ID NO: 483 - protein, 735 aa, synthetic construct
  REGION 1..735: note = source = /note="Description of Artificial Sequence: Synthetic polypeptide"
MAADGYLPDWLEDTLSEGIRQWWKLKPGPPPPKPAERHKDDSRGLVLPGYKYLGPFNGLDKGEPVNEADAAALEHDKAYDRQLDSGDNPYLKYNHADAEFQERLKEDTSFGGNLGRAVFQAKKRVLEPLGLVEEPVKTAPGKKRPVEHSPAEPDSSSGTGKAGQQPARKRLNFGQTGDADSVPDPQPLGQPPAAPSGLGSTTMATGSGAPMADNNEGADGVGNSSGNWHCDSQWLGDRVITTSTRTWAQPTYNNHLYKQISSQSGASNDNHYFGYSTPWGYFDFNRFHCHFSPRDWQRLINNNWGFRPKRLNFKLFNIQVKEVTQNDGTTTIANNLTSTVQVFTDSEYQLPYVLGSAHQGCLPPFPADVFMVPQYGYLTLNNGSQAVGRSSFYCLEYFPSQMLRTGNNFQFSYTFEDVPFHSSYAHSQSLDRLMNPLIDQYLYYLNKTQSNSGALQQSRLLFSQAGPTSMSLQAKNWLPGPCYRQQRLSKQANDNNNSNFPWTAATKYHLNGRDSLVNPGPAMASHKDDEEKFFPMHGTLIFGKQGTNANDADLDNVMITDEEEIRTTNPVATEQYGYVSNNLQNSNTGPTTGTVNHRGALPGMVWQDRDVYLQGPIWAKIPHTDGHFHPSPLMGGFGLKHPPPQIMIKNTPVPANPPTNFSSAKFASFITQYSTGQVSVEIEWELQKENSKRWNPEIQYTSNYNKSVNVDFTVDTNGVYSEPRPIGTRYLTRNL

SEQ ID NO: 484 - DNA, 2217 bp, synthetic construct
  misc_feature 1..2217: note = source = /note="Description of Artificial Sequence: Synthetic polynucleotide"
  source 1..2217: mol_type = other DNA
atggctgccgatggttatcttccagattggctcgaggacaacctctctgagggcattcgcgagtggtgggcgctgaaacctggagccccgaagcccaaagccaaccagcaaaagcaggacgacggccggggtctggtgcttcctggctacaagtacctcggacccttcaacggactcgacaagggggagcccgtcaacgcggcggacgcagcggccctcgagcacgacaaggcctacgaccagcagctgcaggcgggtgacaatccgtacctgcggtataatcacgccgacgccgagtttcaggagcgtctgcaagaagatacgtcttttgggggcaacctcgggcgagcagtcttccaggccaagaagcgggttctcgaacctctcggtctggttgaggaaggcgctaagacggctcctggaaagaagagaccggtagagccgtcaccacagcgttcccccgactcctccacgggcatcggcaagaaaggccagcagcccgccagaaagagactcaatttcggtcagactggcgactcagagtcagtccccgaccctcaacctatcggagaacctccagcagcgccctctagtgtgggatctggtacaatggctgcaggcggtggcgcgccaatggcagacaataacgaaggtgccgacggagtgggtagttcctcgggaaattggcattgcgattccacatggctgggcgacagagtcatcaccaccagcacccgaacctgggccctgcccacctacaacaaccacctctacaagcaaacctccaacgggacctcgggaggcagcaccaacgacaacacctactttggctacagcaccccctgggggtattttgactttaacagattccactgccacttctcaccacgtgactggcagcgactcatcaacaacaactggggattccggcccaagagactcagcttcaagctcttcaacatccaggtcaaagaggtcacgcagaatgaaggcaccaagaccatcgccaataacctcaccagcaccatccaggtgtttacggactcggaataccagctgccgtacgtcctcggctctgcccaccagggctgcctgcctccgttcccggcggacgtcttcatgattcctcagtacggctacctgactctcaacaacggtagtcaggccgtgggacgttcctccttctactgcctggagtacttcccctctcagatgctgagaacgggcaacaacttttccttcagctacactttcgaggacgtgcctttccacagcagctacgcgcacagccagagtttggacaggctgatgaatcctctcatcgaccagtacctgtactacctgtcaagaacccagtctacgggaggcacagcgggaacccagcagttgctgttttctcaggccgggcctagcaacatgtcggctcaggccagaaactggctgcctggaccctgctacagacagcagcgcgtctccacgacactgtcgcaaaacaacaacagcaactttgcctggactggtgccaccaagtatcatctgaacggcagagactctctggtgaatccgggcgtcgccatggcaaccaacaaggacgacgaggaccgcttcttcccatccagcggcatcctcatgtttggcaagcagggagctggaaaagacaacgtggactatagcaacgtgatgctaaccagcgaggaagaaatcaagaccaccaaccccgtggccacagaacagtatggcgtggtggctgataacctacagcagcaaaacaccgctcctattgtgggggccgtcaacagccagggagccttacctggcatggtctggcagaaccgggacgtgtacctgcagggtcctatttgggccaagattcctcacacagatggcaactttcacccgtctcctttaatgggcggctttggacttaaacatccgcctcctcagatcctcatcaaaaacactcctgttcctgcggatcctccaacagcgttcaaccaggccaagctgaattctttcatcacgcagtacagcaccggacaagtcagcgcggagatcgagtgggagctgcagaaggagaacagcaagcgctggaacccagagattcagtatacttccaactactacaaatctacaaatgtggactttgctgttaatactgagggtgtttactctgagcctcgccccattggcactcgttacctcacccgtaatctgtaa

SEQ ID NO: 485 - protein, 738 aa, synthetic construct
  REGION 1..738: note = source = /note="Description of Artificial Sequence: Synthetic polypeptide"
MAADGYLPDWLEDNLSEGIREWWALKPGAPKPKANQQKQDDGRGLVLPGYKYLGPFNGLDKGEPVNAADAAALEHDKAYDQQLQAGDNPYLRYNHADAEFQERLQEDTSFGGNLGRAVFQAKKRVLEPLGLVEEGAKTAPGKKRPVEPSPQRSPDSSTGIGKKGQQPARKRLNFGQTGDSESVPDPQPIGEPPAAPSSVGSGTMAAGGGAPMADNNEGADGVGSSSGNWHCDSTWLGDRVITTSTRTWALPTYNNHLYKQTSNGTSGGSTNDNTYFGYSTPWGYFDFNRFHCHFSPRDWQRLINNNWGFRPKRLSFKLFNIQVKEVTQNEGTKTIANNLTSTIQVFTDSEYQLPYVLGSAHQGCLPPFPADVFMIPQYGYLTLNNGSQAVGRSSFYCLEYFPSQMLRTGNNFSFSYTFEDVPFHSSYAHSQSLDRLMNPLIDQYLYYLSRTQSTGGTAGTQQLLFSQAGPSNMSAQARNWLPGPCYRQQRVSTTLSQNNNSNFAWTGATKYHLNGRDSLVNPGVAMATNKDDEDRFFPSSGILMFGKQGAGKDNVDYSNVMLTSEEEIKTTNPVATEQYGVVADNLQQQNTAPIVGAVNSQGALPGMVWQNRDVYLQGPIWAKIPHTDGNFHPSPLMGGFGLKHPPPQILIKNTPVPADPPTAFNQAKLNSFITQYSTGQVSAEIEWELQKENSKRWNPEIQYTSNYYKSTNVDFAVNTEGVYSEPRPIGTRYLTRNL

SEQ ID NO: 486 - DNA, 2217 bp, synthetic construct
  misc_feature 1..2217: note = source = /note="Description of Artificial Sequence: Synthetic polynucleotide"
  source 1..2217: mol_type = other DNA
atggctgctgacggttatcttccagattggctcgaggacaacctctctgagggcattcgcgagtggtgggacctgaaacctggagcccccaagcccaaggccaaccagcagaagcaggacgacggccggggtctggtgcttcctggctacaagtacctcggacccttcaacggactcgacaagggggagcccgtcaacgcggcggacgcagcggccctcgagcacgacaaggcctacgaccagcagctcaaagcgggtgacaatccgtacctgcggtataatcacgccgacgccgagtttcaggagcgtctgcaagaagatacgtcttttgggggcaacctcgggcgagcagtcttccaggccaagaagcgggttctcgaacctctcggtctggttgaggaagctgctaagacggctcctggaaagaagagaccggtagaaccgtcacctcagcgttcccccgactcctccacgggcatcggcaagaaaggccagcagcccgctagaaagagactgaactttgggcagactggcgactcagagtcagtccccgaccctcaaccaatcggagaacctccagcagcgccctctagtgtgggatctggtacaatggccgcaggcggtggcgcaccaatggcagacaataacgaaggtgccgacggagtgggtagttcctcgggaaattggcattgcgattccacatggctgggcgacagagtcatcaccaccagcacccgaacctgggccctgcccacctacaacaaccacctctacaagcaaatctccaacgggacctcgggaggcagcaccaacgacaacacctactttggctacagcaccccctgggggtattttgactttaacagattccactgccacttctcaccacgtgactggcagcgactcatcaacaacaactggggattccggcccaagagactcagcttcaagctcttcaacatccaggtcaaagaggtcacgcagaatgaaggcaccaagaccatcgccaataacctcaccagcaccatccaggtgtttacggactcggaataccagctgccgtacgtcctcggctctgcccaccagggctgcctgcctccgttcccggcggacgtcttcatgattcctcagtacggctacctgactctcaacaacggtagtcaggccgtgggacgttcctccttctactgcctggagtacttcccctctcagatgctgagaacgggcaacaacttttccttcagctacactttcgaggacgtgcctttccacagcagctacgcgcacagccagagtttggacaggctgatgaatcctctcatcgaccagtacctgtactacctgtcaagaacccagtctacgggaggcacagcgggaacccagcagctgctgttttctcaggccgggcctagcaacatgtcggctcaggccagaaactggctgcctggaccctgctacagacagcagcgcgtctccacgacactgtcgcaaaacaacaacagcaactttgcctggactggtgccaccaagtatcatctgaacggcagagactctctggtgaatccgggcgtcgccatggcaaccaacaaggacgacgaggaccgcttcttcccatccagcggcatcctcatgtttggcaagcagggagctggaaaagacaacgtggactatagcaacgtgatgctaaccagcgaggaagaaatcaagaccaccaaccccgtggccacagaacagtatggcgtggtggctgataacctacagcagcaaaacaccgctcctattgtgggggccgtcaacagccagggagccttacctggcatggtctggcagaaccgggacgtgtacctgcagggtcctatttgggccaagattcctcacacagatggcaactttcacccgtctcctttaatgggcggctttggacttaaacatccgcctcctcagatcctcatcaaaagcactcctgttcctgcggatcctccaacagcgttcaaccaggccaagctgaattctttcatcacgcagtacagcaccggacaagtcagcgtggagatcgagtgggagctgcagaaggagaacagcaagtgctggaacccagagattcagtatacttccaactactacaaatctacaaatgtggactttgctgttaatactgagggtgtttactctgagcctcgccccattggcactcgttacctcacccgtaatctgtaa

SEQ ID NO: 487 - protein, 738 aa, synthetic construct
  REGION 1..738: note = source = /note="Description of Artificial Sequence: Synthetic polypeptide"
MAADGYLPDWLEDNLSEGIREWWDLKPGAPKPKANQQKQDDGRGLVLPGYKYLGPFNGLDKGEPVNAADAAALEHDKAYDQQLKAGDNPYLRYNHADAEFQERLQEDTSFGGNLGRAVFQAKKRVLEPLGLVEEAAKTAPGKKRPVEPSPQRSPDSSTGIGKKGQQPARKRLNFGQTGDSESVPDPQPIGEPPAAPSSVGSGTMAAGGGAPMADNNEGADGVGSSSGNWHCDSTWLGDRVITTSTRTWALPTYNNHLYKQISNGTSGGSTNDNTYFGYSTPWGYFDFNRFHCHFSPRDWQRLINNNWGFRPKRLSFKLFNIQVKEVTQNEGTKTIANNLTSTIQVFTDSEYQLPYVLGSAHQGCLPPFPADVFMIPQYGYLTLNNGSQAVGRSSFYCLEYFPSQMLRTGNNFSFSYTFEDVPFHSSYAHSQSLDRLMNPLIDQYLYYLSRTQSTGGTAGTQQLLFSQAGPSNMSAQARNWLPGPCYRQQRVSTTLSQNNNSNFAWTGATKYHLNGRDSLVNPGVAMATNKDDEDRFFPSSGILMFGKQGAGKDNVDYSNVMLTSEEEIKTTNPVATEQYGVVADNLQQQNTAPIVGAVNSQGALPGMVWQNRDVYLQGPIWAKIPHTDGNFHPSPLMGGFGLKHPPPQILIKSTPVPADPPTAFNQAKLNSFITQYSTGQVSVEIEWELQKENSKCWNPEIQYTSNYYKSTNVDFAVNTEGVYSEPRPIGTRYLTRNL

SEQ ID NO: 488 - protein, 738 aa, synthetic construct
  REGION 1..738: note = source = /note="Description of Artificial Sequence: Synthetic polypeptide"
MAADGYLPDWLEDNLSEGIREWWDLKPGAPKPKANQQKQDDGRGLVLPGYKYLGPFNGLDKGEPVNAADAAALEHDKAYDQQLKAGDNPYLRYNHADAEFQERLQEDTSFGGNLGRAVFQAKKRVLEPLGLVEEAAKTAPGKKRPVEPSPQRSPDSSTGIGKKGQQPARKRLNFGQTGDSESVPDPQPIGEPPAAPSSVGSGTMAAGGGAPMADNNEGADGVGSSSGNWHCDSTWLGDRVITTSTRTWALPTYNNHLYKQISNGTSGGSTNDNTYFGYSTPWGYFDFNRFHCHFSPRDWQRLINNNWGFRPKRLSFKLFNIQVKEVTQNEGTKTIANNLTSTIQVFTDSEYQLPYVLGSAHQGCLPPFPADVFMIPQYGYLTLNNGSQAVGRSSFYCLEYFPSQMLRTGNNFSFSYTFEDVPFHSSYAHSQSLDRLMNPLIDQYLYYLSRTQSTGGTAGTQQLLFSQAGPSNMSAQARNWLPGPCYRQQRVSTTLSQNNNSNFAWTGATKYHLNGRDSLVNPGVAMATNKDDEDRFFPSSGILMFGKQGAGKDNVDYSNVMLTSEEEIKTTNPVATEQYGVVADNLQQQNTAPIVGAVNSQGALPGMVWQNRDVYLQGPIWAKIPHTDGNFHPSPLMGGFGLKHPPPQILIKSTPVPADPPTAFNQAKLNSFITQYSTGQVSVEIEWELQKENSKRWNPEIQYTSNYYKSTNVDFAVNTEGVYSEPRPIGTRYLTRNL

SEQ ID NO: 489 - DNA, 2217 bp, synthetic construct
  misc_feature 1..2217: note = source = /note="Description of Artificial Sequence: Synthetic polynucleotide"
  source 1..2217: mol_type = other DNA
atggctgctgacggttatcttccagattggctcgaggacaacctctctgagggcattcgcgagtggtgggacctgaaacctggagcccccaagcccaaggccaaccagcagaagcaggacgacggccggggtctggtgcttcctggctacaagtacctcggacccttcaacggactcgacaagggggagcccgtcaacgcggcggacgcagcggccctcgagcacgacaaggcctacgaccagcagctcaaagcgggtgacaatccgtacctgcggtataaccacgccgacgccgagtttcaggagcgtctgcaagaagatacgtcttttgggggcaacctcgggcgagcagtcttccaggccaagaagcgggttctcgaacctctcggtctggttgaggaagctgctaagacggctcctggaaagaagagaccggtagaaccgtcacctcagcgttcccccgactcctccacgggcatcggcaagaaaggccagcagcccgctagaaagagactgaactttgggcagactggcgactcagagtcagtccccgaccctcaaccaatcggagaaccaccagcaggcccctctggtctgggatctggtacaatggctgcaggcggtggcgcaccaatggctgacaataacgagggcgccgacggagtgggtaatgcctcaggaaattggcattgcgattccacatggctgggcgacagagtcatcaccaccagcacccgaacctgggctttgcccacctacaacaaccacctctacaagcaaatctccagtcagtcagcaggtagcaccaacgacaacgtctacttcggctacagcaccccctgggggtattttgacttcaacagattccactgtcacttctcaccacgtgactggcagcggctcatcaacaacaactggggattccggcccaagaagctcaacttcaagctgttcaacatccaggtcaaggaggtcacaacgaatgacggcgtcacgaccatcgccaataaccctaccagcacggttcaggtcttttcggactcggaataccagctgccctacgtcctcggctccgcacaccagggctgcctgcctccgttcccggcggacgtcttcatgattccccagtacggctacctgactctgaacaatggcagccaatcggtgggtcgttcctctttctactgcctggaatatttcccttctcaaatgctgagaacgggcaacaacttcaccttcagctacaccttcgaggacgttcccttccacagcagctacgcacacagccagagcctggaccggctgatgaatcctcttatcgaccagtacctgtattacctggccagaacacagagcaacgcaggaggcacagctggcaatcgggaactgcagttttatcagggcgggcctaccaccatggccgaacaagccaaaaactggctgcctggaccctgctacagacagcagcgcgtctccacgacactgtcgcaaaacaacaacagcaactttgcctggactggtgccaccaagtatcatctgaacggcagagactctctggtgaatccgggcgtcgccatggcaaccaacaaggacgacgaggaccgcttcttcccatccagcggcatcctcatgtttggcaagcagggagctggaaaagacaacgtggactatagcaacgtgatgctaaccagcgaggaagaaatcaagaccaccaaccccgtggccacagaacagtatggcgtggtggctgataacctacagcagcaaaacaccgctcctattgtgggggccgtcaacagccagggagccttacctggcatggtctggcagaaccgggacgtgtacctgcagggtcctatttgggccaagattcctcacacagatggcaactttcacccgtctcctttaatgggcggctttggacttaaacatccgcctcctcagatcctcatcaaaaacactcctgttcctgcggatcctccaacagcgttcaaccaggccaagctgaattctttcatcacgcagtacagcaccggacaagtcagcgtggagatcgagtgggagctgcagaaggagaacagcaagcgctggaacccagagattcagtatacttccaactactacaaatctacaaatgtggactttgctgttaatactgagggtgtttactctgagcctcgccccattggcactcgttacctcacccgtaatctgtaa

SEQ ID NO: 490 - protein, 738 aa, synthetic construct
  REGION 1..738: note = source = /note="Description of Artificial Sequence: Synthetic polypeptide"
MAADGYLPDWLEDNLSEGIREWWDLKPGAPKPKANQQKQDDGRGLVLPGYKYLGPFNGLDKGEPVNAADAAALEHDKAYDQQLKAGDNPYLRYNHADAEFQERLQEDTSFGGNLGRAVFQAKKRVLEPLGLVEEAAKTAPGKKRPVEPSPQRSPDSSTGIGKKGQQPARKRLNFGQTGDSESVPDPQPIGEPPAGPSGLGSGTMAAGGGAPMADNNEGADGVGNASGNWHCDSTWLGDRVITTSTRTWALPTYNNHLYKQISSQSAGSTNDNVYFGYSTPWGYFDFNRFHCHFSPRDWQRLINNNWGFRPKKLNFKLFNIQVKEVTTNDGVTTIANNPTSTVQVFSDSEYQLPYVLGSAHQGCLPPFPADVFMIPQYGYLTLNNGSQSVGRSSFYCLEYFPSQMLRTGNNFTFSYTFEDVPFHSSYAHSQSLDRLMNPLIDQYLYYLARTQSNAGGTAGNRELQFYQGGPTTMAEQAKNWLPGPCYRQQRVSTTLSQNNNSNFAWTGATKYHLNGRDSLVNPGVAMATNKDDEDRFFPSSGILMFGKQGAGKDNVDYSNVMLTSEEEIKTTNPVATEQYGVVADNLQQQNTAPIVGAVNSQGALPGMVWQNRDVYLQGPIWAKIPHTDGNFHPSPLMGGFGLKHPPPQILIKNTPVPADPPTAFNQAKLNSFITQYSTGQVSVEIEWELQKENSKRWNPEIQYTSNYYKSTNVDFAVNTEGVYSEPRPIGTRYLTRNL

SEQ ID NO: 491 - DNA, 2208 bp, synthetic construct
  misc_feature 1..2208: note = source = /note="Description of Artificial Sequence: Synthetic polynucleotide"
  source 1..2208: mol_type = other DNA
atggctgccgatggttatcttccagattggctcgaggacaacctctctgagggcattcacgagtggtgggacccgaaacctggagccccgaaacccaaagccaaccagcaaaagcaggacgacggccggggtctggtgcttcctggctacaagtacctcggacccttcaacggactcgacaagggggagcccgtcaacgcggcggacgcagcggccctcgagcacgacaaggcctacgaccagcagctcaaagcgggtgacaatccgtacctgcggtataatcacgccgacgccgagtttcaggagcgtctgcaagaagatacgtcttttgggggcaacctcgggcgagcagtcttccaggccaagaagcgggttctcgaacctctcggtctggttgaggaaggcgctaagacggctcctggaaagaagagaccggtagagccgtcaccacagcgttcccccgactcctccacgggcatcggcaagaaaggccagcagcccgccagaaagagactcaatttcggtcagactggcgactcagagtcagtccccgaccctcaacctatcggagaacctccagcagcgccctctagtgtgggatctggtacaatggctgcaggcggtggcgcaccaatggcagacaataacgaaggtgccgacggagtgggtagttcctcgggaaattggcattgcgattccacatggctgggcgacagagtcatcaccaccagcacccgaacctgggccctgcccacccacaacaaccacctctacaagcaaatctccaacgggacctcgggaggcagcaccaacgacaacgtctacttcggctacagcaccccctgggggtattttgacttcaacagattccactgtcacttctcaccacgtgaccggcagcgactcatcaacaacaactggggattccggcccaagagactcagcttcaagctcttcaacatccaggtcaaagaggtcacgcagaatgaaggcaccaagaccatcgccaataacctcaccagcaccatccaggtgtttacggactcggaataccagctgccgtacgtcctcggctctgcccaccagggctgcctgcctccgttcccggcggacgtcttcatgattcctcagtacggctacctgactctcaacaacggtagtcaggccgtgggacgttcctccttctactgcctggagtacttcccctctcagatgctgagaacgggcaacaacttttccttcagctacactttcgaggacgtgcctttccacagcagctacgcgcacagccagagtttggacaggctgatgaatcctctcatcgaccagtacctgtactacctgtcaagaacccagtctacggaaggcacagcgggaacccagcagttgctgttttctcaggccgggcctagcaacatgtcggctcaggccagaaactggctgcctggaccctgctacagacagcagcgcgtctccacgacactgtcgcaaaacaacaacagcaactttgcctggactggtgccaccaagtatcatctgaacggcagagactctctggtgaatccgggcgtcgccatggcaacccacaaggacgacgaggaacgcttcttcccttcgagcggagtcctgatttttggaaaaactggagcagctaataagactacactggaaaatgtgttaatgacaaatgaagaggaaattcgtcctaccaacccggtagccaccgaggaatacgggactgttagcagcaacctgcaggcggctaacactgcagcccagacacaagttgtcaacaaccagggagccttacctggtatggtctggcagaaccgggacgtgtacctgcagggtcccatctgggccaagattcctcacacggacggcaactttcacccgtctccgctgatgggcggctttggactgaagcatcctcagatcctgatcaaaaacactcctgttcctgctaatcccccggaggtgtttacgcctgccaagtttgcttctttcatcacacagtacagcaccggccaggtcagcgtggagatcgagtgggagctgcagaaggagaacagcaagcgctggaacccagagattcagtatacctccaattttgacaaacagactggtgtggactttgccgttgacagccagggtgtttattctgagcctcgccccattggtactcgttacctcacccgtaatctgtaa

SEQ ID NO: 492 - protein, 735 aa, synthetic construct
  REGION 1..735: note = source = /note="Description of Artificial Sequence: Synthetic polypeptide"
MAADGYLPDWLEDNLSEGIHEWWDPKPGAPKPKANQQKQDDGRGLVLPGYKYLGPFNGLDKGEPVNAADAAALEHDKAYDQQLKAGDNPYLRYNHADAEFQERLQEDTSFGGNLGRAVFQAKKRVLEPLGLVEEGAKTAPGKKRPVEPSPQRSPDSSTGIGKKGQQPARKRLNFGQTGDSESVPDPQPIGEPPAAPSSVGSGTMAAGGGAPMADNNEGADGVGSSSGNWHCDSTWLGDRVITTSTRTWALPTHNNHLYKQISNGTSGGSTNDNVYFGYSTPWGYFDFNRFHCHFSPRDRQRLINNNWGFRPKRLSFKLFNIQVKEVTQNEGTKTIANNLTSTIQVFTDSEYQLPYVLGSAHQGCLPPFPADVFMIPQYGYLTLNNGSQAVGRSSFYCLEYFPSQMLRTGNNFSFSYTFEDVPFHSSYAHSQSLDRLMNPLIDQYLYYLSRTQSTEGTAGTQQLLFSQAGPSNMSAQARNWLPGPCYRQQRVSTTLSQNNNSNFAWTGATKYHLNGRDSLVNPGVAMATHKDDEERFFPSSGVLIFGKTGAANKTTLENVLMTNEEEIRPTNPVATEEYGTVSSNLQAANTAAQTQVVNNQGALPGMVWQNRDVYLQGPIWAKIPHTDGNFHPSPLMGGFGLKHPQILIKNTPVPANPPEVFTPAKFASFITQYSTGQVSVEIEWELQKENSKRWNPEIQYTSNFDKQTGVDFAVDSQGVYSEPRPIGTRYLTRNL

SEQ ID NO: 493 - protein, 738 aa, synthetic construct
  REGION 1..738: note = source = /note="Description of Artificial Sequence: Synthetic polypeptide"
MAADGYLPDWLEDNLSEGIREWWDLKPGAPKPKANQQKQDDGRGLVLPGYKYLGPFNGLDKGEPVNAADAAALEHDKAYDQQLKAGDNPYLRYNHADAEFQERLQEDTSFGGNLGRAVFQAKKRVLEPLGLVEEGAKTAPGKKRPVEPSPQRSPDSSTGIGKKGQQPARKRLNFGQTGDSESVPDPQPIGEPPAAPSSVGSGTMAAGGGAPMADNNEGADGVGSSSGNWHCDSTWLGDRVITTSTRTWALPTYNNHLYKQISNGTSGGSTNDNTYFGYSTPWGYFDFNRFHCHFSPRDWQRPINNNWGFRPKRLSFKLFNIQVKEVTQNEGTKTIANNLTSTIQVFTDSEYQLPYVLGSAHQGCLPPFPADVFMIPQYGYLTLNNGSQAVGRSSFYCLEYFPSQMLRTGNNFSFSYPFEDVPFHSSYAHSQSLDRLMNPLIDQYLYYLSRTQSTGGTAGTQQLLFSQAGPSNMSAQARNWLPGPCYRQQRVSTTLSQNNNSNFAWTGATKYHLNGRDSLVNPGVAMATNKDDEDRFFPSSGILMFGKQGAGKDNVDYSNVMLTSEEEIKTTNPVATEQYGVVADNLQQQDTAPIVGAVNSQGALPGMVWQNRDVYLQGPIWAKIPHTDGNFHPSPLMGGFGLKHPPPQVLIKNTPVPADPPTAFNQAKLNSFITQYSTGQVSVEIEWELQKENSKRWNPEIQYTSNYYKSTNVDFAVNTEGVYSEPRPIGTRYLTRNL

SEQ ID NO: 494 - DNA, 2217 bp, synthetic construct
  misc_feature 1..2217: note = source = /note="Description of Artificial Sequence: Synthetic polynucleotide"
  source 1..2217: mol_type = other DNA
atggctgccgatggttatcttccagattggctcgaggacaacctctctgagggcattcgcgagtggtgggacctgaaacctggagccccgaaacccaaggccaaccagcaaaagcaggacgacggccggggtctggtgcttcctggctacaagtacctcggacccttcaacggactcgacaagggggagcccgtcaacgcggcggacgcagcggccctcgagcacgacaaggcctacgaccagcagctcaaagcgggtgacaatccgtacctgcggtataatcacgccgacgccgagtttcaggagcgtctgcaagaagatacgtcttttgggggcaacctcgggcgagcagtcttccaggccaagaagcgggttctcgaacctctcggtctggttgaggaaggcgctaagacggctcctggaaagaagagaccggtagagccgtcaccacagcgttcccccgactcctccacgggcatcggcaagaaaggccagcagcccgccagaaagagactcaatttcggtcagactggcgactcagagtcagtccccgaccctcaacctatcggagaacctccagcagcgccctctagtgtgggatctggtacaatggctgcaggcggtggcgcaccaatggcagacaataacgaaggtgccgacggagtgggtagttcctcgggaaattggcattgcgattccacatggctgggcgacagagtcatcaccaccagcacccgaacctgggccctgcccacctacaacaaccacctctacaagcaaatctccaacgggacctcgggaggcagcaccaacgacaacacctactttggctacagcaccccctgggggtattttgactttaacagattccactgccacttctcaccacgtgactggcagcgacccatcaacaacaactggggattccggcccaagagactcagcttcaagctcttcaacatccaggtcaaagaggtcacgcagaatgaaggcaccaagaccatcgccaataacctcaccagcaccatccaggtgtttacggactcggaataccagctgccgtacgtcctcggctctgcccaccagggctgcctgcctccgttcccggcggacgtcttcatgattcctcagtacggctacctgactctcaacaacggtagtcaggccgtgggacgttcctccttctactgcctggagtacttcccctctcagatgctgagaacgggcaacaacttttccttcagctaccctttcgaggacgtgcctttccacagcagctacgcgcacagccagagtttggacaggctgatgaatcctctcatcgaccagtacctgtactacctgtcaagaacccagtctacgggaggcacagcgggaacccagcagttgctgttttctcaggccgggcctagcaacatgtcggctcaggccagaaactggctgcctggaccctgctacagacagcagcgcgtctccacgacactgtcgcaaaacaacaacagcaactttgcctggactggtgccaccaagtatcatctgaacggcagagactctctggtgaatccgggcgtcgccatggcaaccaacaaggacgacgaggaccgcttcttcccatccagcggcatcctcatgtttggcaagcagggagctggaaaagacaacgtggactatagcaacgtgatgctaaccagcgaggaagaaatcaagaccaccaaccccgtggccacagaacagtatggcgtggtggctgataacctacagcagcaagacaccgctcctattgtgggggccgtcaacagccagggagccttacctggcatggtctggcagaaccgggacgtgtacctgcagggtcctatttgggccaagattcctcacacagatggcaactttcacccgtctcctttaatgggcggctttggacttaaacatccgcctcctcaggtcctcatcaaaaacactcctgttcctgcggatcctccaacagcgttcaaccaggccaagctgaattctttcatcacgcagtacagcaccggacaagtcagcgtggagatcgagtgggagctgcagaaggagaacagcaagcgctggaacccagagattcagtatacttccaactactacaaatctacaaatgtggactttgctgttaatactgagggtgtttactctgagcctcgccccattggcactcgttacctcacccgtaatctgtaa

SEQ ID NO: 495 - DNA, 2214 bp, synthetic construct
  misc_feature 1..2214: note = source = /note="Description of Artificial Sequence: Synthetic polynucleotide"
  source 1..2214: mol_type = other DNA
atggctgctgacggttatcttccagattggctcgaggacaacctctctgagggcattcgcgagtggtgggacctgaaacctggagcccccaagcccaaggccaaccagcagaagcaggacgacggccggggtctggtgcttcctggctacaagtacctcggacccttcaacggactcgacaagggggagcccgtcaacgcggcggacgcagcggccctcgagcacgacaaggcctacgaccagcagctcaaagcgggtgacaatccgtacctgcggtataaccacgccgacgccgagttccaggagcgtctgcaagaagatacgtcttttgggggcaacctcgggcgagcagtcttccaggccaagaagcgggttctcgaacctctcggtctggctgaggaagctgctaagacggctcctggaaagaagagaccggtagaaccgtcacctcagcgttcccccgactcctccacgggcatcggcaagaaaggccagcagcccgctagaaagagactgaactttgggcagactggcgactcagagtcagtccccgaccctcaaccaatcggagagccaccagcaggcccctctggtctgggatctggtacaatggctgcaggcggtggcgcaccaatggctgacaataacaagggcgccgacggagtgggtaatgcctcaggaaattggcattgcgattccacatggctgggcgacagagtcatcaccaccagcacccgaacctgggctttgcccacctacaacaaccacctctacaagcaaatctccagtcagtcagcaggtagcaccaacgacaacgtctacttcggctacagcaccccctgggggtattttgacttcaacagattccactgtcacttctcaccacgtgactggcagcggctcatcaacaacaactggggattccggcccaagaagctcaacttcaagctgttcaacatccaggtcaaggaggtcacaacgggtgacggcgtcacgaccatcgccaataaccttaccagcacggttcaggtcttttcggactcggaataccagctgccctacgtcctcggctccgcacaccagggctgcctgcctccgttcccggcggacgtcttcatgattccccagtacggctacctgactctgaacaatgacagccaatcggtgggtcgttcctctttctactgcctggaatatttcccttctcaaatgctgagaacgggcaacaacttcaccttcagctacaccttcgaggacgttcccttccacagcagctacgcacacagccagagcctggaccggctgatgaatcctcttatcgaccagtacctgtattacctggccagaacacagagcaacgcaggaggcacagctggcaatcgggaactgcagttttatcagggcgggcctaccaccatggccgaacaagccaaaaactggctgcctggaccttgcttccggcaacaaagagtctccaagacgctggatcaaaacaacaacagcaactttgcttggactggtgccaccaaataccatctaaatggaagaaattcattggttaatcccggtgtcgccatggcaacccacaaggacgacgaggaacgcttcttcccttcgagcggagtcctgatttttggaaaaactggagcagctaataagactacactggaaaatgtgttaatgacaaatgaagaggaaattcgtcctaccaacccggtagccaccgaggaatacgggactgttagcagcaacctgcaggcggctaacactgcagcccagacacaagttgtcaacaaccagggagccttacctggtatggtctggcagaaccgggacgtgtacctgcagggtcccatctgggccaagattcctcacacggacggcaactttcacccgtctccgctgatgggcggctttggactgaagcatccgcctcctcagatcctgatcaaaaacactcctgttcctgctaatcccccggaggtgtttacgcctgccaagtttgcttctttcatcacacagtacagcaccggccaggtcagcgtggagatcgagtgggagctgcagaaggagaacagcaagcgctggaacccagagattcagtatacctccaattttgacaaacagactggtgtggactttgccgttgacagccagggtgtttattctgagcctcgccccattggtactcgttacctcacccgtaatctgtaa

SEQ ID NO: 496 - protein, 737 aa, synthetic construct
  REGION 1..737: note = source = /note="Description of Artificial Sequence: Synthetic polypeptide"
MAADGYLPDWLEDNLSEGIREWWDLKPGAPKPKANQQKQDDGRGLVLPGYKYLGPFNGLDKGEPVNAADAAALEHDKAYDQQLKAGDNPYLRYNHADAEFQERLQEDTSFGGNLGRAVFQAKKRVLEPLGLAEEAAKTAPGKKRPVEPSPQRSPDSSTGIGKKGQQPARKRLNFGQTGDSESVPDPQPIGEPPAGPSGLGSGTMAAGGGAPMADNNKGADGVGNASGNWHCDSTWLGDRVITTSTRTWALPTYNNHLYKQISSQSAGSTNDNVYFGYSTPWGYFDFNRFHCHFSPRDWQRLINNNWGFRPKKLNFKLFNIQVKEVTTGDGVTTIANNLTSTVQVFSDSEYQLPYVLGSAHQGCLPPFPADVFMIPQYGYLTLNNDSQSVGRSSFYCLEYFPSQMLRTGNNFTFSYTFEDVPFHSSYAHSQSLDRLMNPLIDQYLYYLARTQSNAGGTAGNRELQFYQGGPTTMAEQAKNWLPGPCFRQQRVSKTLDQNNNSNFAWTGATKYHLNGRNSLVNPGVAMATHKDDEERFFPSSGVLIFGKTGAANKTTLENVLMTNEEEIRPTNPVATEEYGTVSSNLQAANTAAQTQVVNNQGALPGMVWQNRDVYLQGPIWAKIPHTDGNFHPSPLMGGFGLKHPPPQILIKNTPVPANPPEVFTPAKFASFITQYSTGQVSVEIEWELQKENSKRWNPEIQYTSNFDKQTGVDFAVDSQGVYSEPRPIGTRYLTRNL

SEQ ID NO: 497 - DNA, 2217 bp, synthetic construct
  misc_feature 1..2217: note = source = /note="Description of Artificial Sequence: Synthetic polynucleotide"
  source 1..2217: mol_type = other DNA
atggctgccgatggttatcttccagattggctcgaggacaacctctctgagggcattcgcgagtggtgggacctgaaacctggagccccgaaacccaaagccaaccagcaaaagcaggacgacggccggggtctggtgcttcctggctacaagtacctcggacccttcaacggactcgacaagggggagcccgtcaacgcggcggacgcagcggccctcgagcacgacaaggcctacgaccagcagctcaaagcgggtgacaatccgtacctgcggtataatcacgccgacgccgagtttcaggagcgtctgcaagaagatacgtcttttgggggcaacctcgggcgagcagtcttccaggccaagaagcgggttctcgaacctctcggtctggttgaggaaggcgctaagacggctcctggaaagaagagaccggtagagccgtcaccacagcgttcccccgactcctccacgggcatcggcaagaaaggccagcagcccgccagaaagagactcaatttcggtcagactggcgactcagagtcagtccccgaccctcaacctatcggagaacctccagcagcgccctctagtgtgggatctggtacaatggctgcaggcggtggcgcaccaatggcagacaataacgaaggtgccgacggagtgggtagttcctcgggaaattggcattgcgattccacatggctgggcgacagagtcatcaccaccagcacccgaacctgggccctgcccacctacaacaaccacctctacaagcaaatctccaacgggacctcgggaggcagcaccaacgacaacacctactttggctacagcaccccctgggggtattttgactttaacagattccactgccacttctcaccacgtgactggcagcgactcatcaacaacaactggggattccggcccaagagactcagcttcaagctcttcaacatccaggtcaaagaggtcacgcagaatgaaggcaccaagaccatcgccaataacctcaccagcaccatccaggtgtttacggactcggaataccagctgccgtacgtcctcggctctgcccaccagggctgcctgcctccgttcccggcggacgtcttcatgattcctcagtacggctacctgactctcaacaacggtagtcaggccgtgggacgttcctccttctactgcctggagtacttcccctctcagatgctgagaacgggcaacaacttttccttcagctacactttcgaggacgtgcctttccacagcagctacgcgcacagccagagtttggacaggctgatgaatcctctcatcgaccagtacctgtactacctgtcaagaacccagtctacgggaggcacagcgggaacccagcagttgctgttttctcaggccgggcctagcaacatgtcggctcaggccagaaactggctgcctggaccctgctacagacagcagcgcgtctccacgacactgtcgcaaaacaacaacagcaactttgcctggactggtgccaccaagtatcatctgaacggcagagactctctggtgaatccgggcgtcgccatggcaaccaacaaggacgacgaggaccgcttcttcccatccagcggcatcctcatgtttggcaagcagggagctggaaaagacaacgtggactatagcaacgtgatgctaaccagcgaggaagaaatcaagaccaccaaccccgtggccacagaacagtatggcgtggtggctgataacctacagcagcaaaacaccgctcctattgtgggggccgtcaacagccagggagccttacctggcatggtctggcagaaccgggacgtgtacctgcagggtcctatttgggccaagattcctcacacagatggcaactttcacccgtctcctttaatgggcggctttggacttaaacatccgcctcctcagatcctcatcaaaaacactcctgttcctgcggatcctccaacagcgttcaaccaggccaagctgaattctttcatcacgcagtacagcaccggacaagtcagcgtggagatcgtgtgggagctgcagaaggagaacagcaagcgcaggaacccagagattcagtatacttccaactactacaaatctacaaatgtggactttgctgttaatactgagggtgtttactctgagcctcgccccattggcactcgttacctcacccgtaatctgtaa

SEQ ID NO: 498 - protein, 738 aa, synthetic construct
  REGION 1..738: note = source = /note="Description of Artificial Sequence: Synthetic polypeptide"
MAADGYLPDWLEDNLSEGIREWWDLKPGAPKPKANQQKQDDGRGLVLPGYKYLGPFNGLDKGEPVNAADAAALEHDKAYDQQLKAGDNPYLRYNHADAEFQERLQEDTSFGGNLGRAVFQAKKRVLEPLGLVEEGAKTAPGKKRPVEPSPQRSPDSSTGIGKKGQQPARKRLNFGQTGDSESVPDPQPIGEPPAAPSSVGSGTMAAGGGAPMADNNEGADGVGSSSGNWHCDSTWLGDRVITTSTRTWALPTYNNHLYKQISNGTSGGSTNDNTYFGYSTPWGYFDFNRFHCHFSPRDWQRLINNNWGFRPKRLSFKLFNIQVKEVTQNEGTKTIANNLTSTIQVFTDSEYQLPYVLGSAHQGCLPPFPADVFMIPQYGYLTLNNGSQAVGRSSFYCLEYFPSQMLRTGNNFSFSYTFEDVPFHSSYAHSQSLDRLMNPLIDQYLYYLSRTQSTGGTAGTQQLLFSQAGPSNMSAQARNWLPGPCYRQQRVSTTLSQNNNSNFAWTGATKYHLNGRDSLVNPGVAMATNKDDEDRFFPSSGILMFGKQGAGKDNVDYSNVMLTSEEEIKTTNPVATEQYGVVADNLQQQNTAPIVGAVNSQGALPGMVWQNRDVYLQGPIWAKIPHTDGNFHPSPLMGGFGLKHPPPQILIKNTPVPADPPTAFNQAKLNSFITQYSTGQVSVEIVWELQKENSKRRNPEIQYTSNYYKSTNVDFAVNTEGVYSEPRPIGTRYLTRNL

SEQ ID NO: 499 - protein, 738 aa, synthetic construct
  REGION 1..738: note = source = /note="Description of Artificial Sequence: Synthetic polypeptide"
MAADGYLPDWLEDNLSEGIREWWDLKPGAPKPKANQQKQDDGRGLVLPGYKYLGPFNGLDKGEPVNAADAAALEHDKAYDQQLKAGDNPYLRYNHADAEFQERLQEDTSFGGNLGRAVFQAKKRVLEPLGLVEEGAKTAPGKKRPVEPSPQRSPDSSTGIGKKGQQPARKRLNFGQTGDSESVPDPQPIGEPPAAPSSVGSGTMAAGGGAPMADNNEGADGVGSSSGNWHCDSTWLGDRVITTSTRTWALPTYNNHLYKQISNGTSGGSTNDNTYFGYSTPWGYFDFNRFHCHFSPRDWQRLINNNWGFRPKRLSFKLFNIQVKEVTQNEGTKTIANNLTSTIQVFTDSEYQLPYVLGSAHQGCLPPFPADVFMIPQYGYLTLNNGSQAVGRSSFYCLEYFPSQMLRTGNNFSFSYTFEDVPFHSSYAHSQSLDRLMNPLIDQYLYYLSRTQSTGGTAGTQQLLFSQAGPSNMSAQARNWLPGPCYRQQRVSTTLSQNNNSNFAWTGATKYHLNGRDSLVNPGVAMATNKDDEDRFFPSSGILMFGKQGAGKDNVDYSNVMLTSEEEIKTTNPVATEQYGVVADNLQQQNTAPIVGAVNSQGALPGMVWQNRDVYLQGPIWAKIPHTDGNFHPSPLMGGFGLKHPPPQILIKNTPVPADPPTAFNQAKLNSFITQYSTGQVSVEIEWELQKENSKRWNPEIQYTSNYYKSTNVDFAVNTEGVYSEPRPIGTRYLTRNL

SEQ ID NO: 500 - protein, 738 aa, synthetic construct
  REGION 1..738: note = source = /note="Description of Artificial Sequence: Synthetic polypeptide"
MAADGYLPDWLEDNLSEGIREWWDLKPGAPKPKANQQKQDDGRGLVLPGYKYLGPFNGLDKGEPVNAADAAALEHDKAYDQQLKAGDNPYLRYNHADAEFQERLQEDTSFGGNLGRAVFQAKKRVLEPLGLVEEGAKTAPGKKRPVEPSPQRSPDSSTGIGKKGQQPARKRLNFGQTGDSESVPDPQPIGEPPAAPSSVGSGTMAAGGGAPMADNNEGADGVGSSSGNWHCDSTWLGDRVITTSTRTWALPTYNNHLYKQISNGTSGGSTNDNTYFGYSTPWGYFDFNRFHCHFSPRDWQRLINNNWGFRPKRLSFKLFNIQVKEVTQNEGTKTIANNLTSTIQVFTDSEYQLPYVLGSAHQGCLPPFPADVFMIPQYGYLTLNNGSQAVGRSSFYCLEYFPSQMLRTGNNFSFSYTFEDVPFHSSYAHSQSLDRLMNPLIDQYLYYLSRTQSTGGTAGTQQLLFSQAGPSNMSAQARNWLPGPCYRQQRVSTTLSQNNNSNFAWTGATKYHLNGRDSLVNPGVAMATNKDDEDRFFPSSGILMFGKQGAGKDNVDYSNVMLTSEEEIKTTNPVATEQYGVVADNLQQQNTAPIVGAVNSQGALPGMVWQNRDVYLQGPIWAKIPHTDGNFHPSPLMGGFGLKHPPPQILIKNTPVPADPPTAFNQAKLNSFITQYSTGQVSVEIVWELQKENSKRWNPEIQYTSNYYKSTNVDFAVNTEGVYSEPRPIGTRYLTRNL

SEQ ID NO: 501 - protein, 738 aa, synthetic construct; identical to SEQ ID NO: 499
  REGION 1..738: note = source = /note="Description of Artificial Sequence: Synthetic polypeptide"

SEQ ID NO: 502 - DNA, 2214 bp, synthetic construct
  misc_feature 1..2214: note = source = /note="Description of Artificial Sequence: Synthetic polynucleotide"
  source 1..2214: mol_type = other DNA
atggctgctgacggttatcttccagattggctcgaggacaacctctctgagggcattcgcgagtggtgggacctgaaacctggagcccccaagcccaaggccaaccagcagaagcaggacgacggccggggtctggtgcttcctggctacaagtacctcggacccttcaacggactcgacaagggggagcccgtcaacgcggcggacgcagcggccctcgagcacgacaaggcctacgaccagcagctcaaagcgggtgacaatccgtacctgcggtataaccacgccgacgccgagtttcaggagcgtctgcaagaagatacgtcttttgggggcaacctcgggcgagcagtcttccaggccaagaagcgggttctcgaacctctcggtctggttgaggaagctgctaagacggctcctggaaagaagagaccggtagaaccgtcacctcagcgttcccccgactcctccacgggcatcggcaagaaaggccagcagcccgctagaaagagactgaactttgggcagactggcgactcagagtcagtccccgaccctcaaccaatcggagaaccaccagcaggcccctctggtctgggatctggtacaatggctgcaggcggtggcgctccaatggcagacaataacgaaggcgccgacggagtgggtaatgcctcaggaaattggcattgcgattccacatggctgggcgacagagtcatcaccaccagcacccgaacctgggctttgcccacctacaacaaccacctctacaagcaaatctccagtcagtcagcaggtagcaccaacgacaacgtctacttcggctacagcaccccctgggggtattttgacttcaacagattccactgtcacttctcaccacgtgactggcagcggctcatcaacaacaactggggattccggcccaagaagctcaacttcaagctgttcaacatccaggtcaaggaggtcacaacgaatgacggcgtcacgaccatcgccaataaccttaccagcacggttcaggtcttttcggactcggaataccagctgccctacgtcctcggctccgcacaccagggctgcctgcctccgttcccggcggacgtcttcatgattccccagtacggctacctgactctgaacaatggcagccaatcggtgggtcgttcctctttctactgcctggaatatttcccttctcaaatgctgagaacgggcaacaacttcaccttcagctacaccttcgaggacgttcccttccacagcagctacgcacacagccagagcctggaccggctgatgaatcctcttatcgaccagtacctgtattacctggccagaacacagagcaacgcaggaggcacagctggcaatcgggaactgcagttttatcagggcgggcctaccaccatggccgaacaagccaaaaactggctgcctagaccttgcttccggcaacaaagagtctccaagacgctggatcaaaacaacaacagcaactttgcttggactggtgccaccaaataccatctaaatggaagaaattcattggttaatcccggtgtcgccatggcaacccacaaggacgacgaggaacgcttcttcccttcgagcggagtcctgatttttggaaaaactggagcagctaataagactacactggaaaatgtgttaatgacaaatgaagaggaaattcgtcctaccaacccggtagccaccgaggaatacgggactgttagcagcaacctgcaggcggctaacactgcagcccagacacaagttgtcaacaaccagggagccttacctggtatggtctggcagaaccgggacgtgtacctgcagggtcccatctgggccaagattcctcacacggacggcaactttcacccgtctccgctgatgggcggctttggactgaagcatccgcctcctcagatcctgatcaaaaacactcctgttcctgctaatcccccggaggtgtttacgcctgccaagtttgcttctttcatcacacagtacagcaccggccaggtcagcgtggagatcgagtgggagctgcagaaggagaacagcaagcgctggaacccagagattcagtatacctccaattttgacaaacagactggtgtggactttgccgttgacagccagggtgtttattctgagcctcgccccattggtactcgttacctcacccgtaatctgtaa

SEQ ID NO: 503 - protein, 737 aa, synthetic construct
  REGION 1..737: note = source = /note="Description of Artificial Sequence: Synthetic polypeptide"
MAADGYLPDWLEDNLSEGIREWWDLKPGAPKPKANQQKQDDGRGLVLPGYKYLGPFNGLDKGEPVNAADAAALEHDKAYDQQLKAGDNPYLRYNHADAEFQERLQEDTSFGGNLGRAVFQAKKRVLEPLGLVEEAAKTAPGKKRPVEPSPQRSPDSSTGIGKKGQQPARKRLNFGQTGDSESVPDPQPIGEPPAGPSGLGSGTMAAGGGAPMADNNEGADGVGNASGNWHCDSTWLGDRVITTSTRTWALPTYNNHLYKQISSQSAGSTNDNVYFGYSTPWGYFDFNRFHCHFSPRDWQRLINNNWGFRPKKLNFKLFNIQVKEVTTNDGVTTIANNLTSTVQVFSDSEYQLPYVLGSAHQGCLPPFPADVFMIPQYGYLTLNNGSQSVGRSSFYCLEYFPSQMLRTGNNFTFSYTFEDVPFHSSYAHSQSLDRLMNPLIDQYLYYLARTQSNAGGTAGNRELQFYQGGPTTMAEQAKNWLPRPCFRQQRVSKTLDQNNNSNFAWTGATKYHLNGRNSLVNPGVAMATHKDDEERFFPSSGVLIFGKTGAANKTTLENVLMTNEEEIRPTNPVATEEYGTVSSNLQAANTAAQTQVVNNQGALPGMVWQNRDVYLQGPIWAKIPHTDGNFHPSPLMGGFGLKHPPPQILIKNTPVPANPPEVFTPAKFASFITQYSTGQVSVEIEWELQKENSKRWNPEIQYTSNFDKQTGVDFAVDSQGVYSEPRPIGTRYLTRNL

SEQ ID NO: 504 - DNA, 2214 bp, synthetic construct
  misc_feature 1..2214: note = source = /note="Description of Artificial Sequence: Synthetic polynucleotide"
  source 1..2214: mol_type = other DNA
atggctgctgacggttatcttccagattggctcgaggacaacctctctgagggcattcgcgagtggtgggacctgaaacctggagcccccaagcccaaggccaaccagcagaagcaggacgacggccggggtctggtgcttcctggctacaagtacctcggacccttcaacggactcgacaagggggagcccgtcaacgcggcggacgcagcggccctcgagcacgacaaggcctacgaccagcagctcaaagcgggtgacaatccgtacctgcggtataaccatgccgacgccgagtttcaggagcgtctgcaagaagatacgtcttttgggggcaacctcgggcgagcagtcctccaggccaagaagcgggttctcgaacctctcggtctggttgaggaagctgctaagacggctcctggaaagaagagaccggtagaaccgtcacctcagcgttcccccgactcctccacgggcatcggcaagaaaggccagcagcccgctagaaagagactgaactttgggcagactggcgactcagagtcagtccccgaccctcaaccaatcggagaaccaccagcaggcccctctggtctgggatctggtacaatggctgcaggcggtggcgctccaatggcagacaataacgaaggcgccgacggagtgggtaatgcctcaggaaattggcattgcgattccacatggctgggcgacagagtcatcaccaccagcacccgaacctgggctttgcccacctacaacaaccacctctacaagcaaatctccagtcagtcagcaggtagcaccaacgacaacgtctacttcggctacagcaccccctgggggtattttgacttcaacagattccactgtcacttctcaccacgtgactggcagcggctcatcaacaacaactggggattccggcccaagaagctcaacttcaagctgttcaacatccaggtcaaggaggtcacaacgaatgacggcgtcacgaccatcgccaataaccttaccagcacggttcaggtcttttcggactcggaataccagctgccctacgtcctcggctccgcacaccagggctgcctgcctccgttcccggcggacgtcttcatgattccccagtacggctacctgactctgaacaatggcagccaatcggtgggtcgttcctctttctactgcctggaatatttcccttctcaaatgctgagaacgggcaacaacttcaccttcagctacaccttcgaggacgttcccttccacagcagctacgcacacagccagagcctggaccggctgatgaatcctcttatcgaccagtacctgtattacctggccagaacacagagcaacgcaggaggcacagctggcaatcgggaactgcagttttatcagggcgggcctaccaccatggccgaacaagccaaaaactggctgcctggaccttgcttccggcaacaaagagtctccaagacgctggatcaaaacaacaacagcaactttgcttggactggtgccaccaaataccatctaaatggaagaaattcattggttaatcccggtgtcgccatggcaacccacaaggacgacgaggaacgcttcttcccttcgagcggagtcctgatttttggaaaaactggagcagctaataagactacactggaaaatgtgttaatgacaaatgaagaggaaattcgtcctaccaacccggtagccaccgaggaatacgggactgttagcagcaacctgcaggcggctaacactgcagcccagacacaagttgtcaacaaccagggagccttacctggtatggtctggcagaaccgggacgtgtacctgcagggtcccatctgggccaagattcctcacacggacggcaactttcacccgtctccgctgatgggcggctttggactgaagcatccgcctcctcagatcctgatcaaaaacactcctgttcctgctaatcccccggaggtgtttacgcctgccaagtttgcttctttcatcacacagtacagcaccggccaggtcagcgtggagatcgagtgggagctgcagaaggagaacagcaagcgctggaacccagagattcagtatacctccaattttgacaaacagactggtgtggactttgccgttgacagccagggtgtttattctgagcctcgccccattggtactcgttacctcacccgtaatctgtaa

SEQ ID NO: 505 - protein, 737 aa, synthetic construct; identical to SEQ ID NO: 464
  REGION 1..737: note = source = /note="Description of Artificial Sequence: Synthetic polypeptide"

SEQ ID NO: 506 - protein, 737 aa, synthetic construct
  REGION 1..737: note = source = /note="Description of Artificial Sequence: Synthetic polypeptide"
MAADGYLPDWLEDNLSEGIREWWDLKPGAPKPKANQQKQDDGRGLVLPGYKYLGPFNGLDKGEPVNAADAAALEHDKAYDQQLKAGDNPYLRYNHADAEFQERLQEDTSFGGNLGRAVLQAKKRVLEPLGLVEEAAKTAPGKKRPVEPSPQRSPDSSTGIGKKGQQPARKRLNFGQTGDSESVPDPQPIGEPPAGPSGLGSGTMAAGGGAPMADNNEGADGVGNASGNWHCDSTWLGDRVITTSTRTWALPTYNNHLYKQISSQSAGSTNDNVYFGYSTPWGYFDFNRFHCHFSPRDWQRLINNNWGFRPKKLNFKLFNIQVKEVTTNDGVTTIANNLTSTVQVFSDSEYQLPYVLGSAHQGCLPPFPADVFMIPQYGYLTLNNGSQSVGRSSFYCLEYFPSQMLRTGNNFTFSYTFEDVPFHSSYAHSQSLDRLMNPLIDQYLYYLARTQSNAGGTAGNRELQFYQGGPTTMAEQAKNWLPGPCFRQQRVSKTLDQNNNSNFAWTGATKYHLNGRNSLVNPGVAMATHKDDEERFFPSSGVLIFGKTGAANKTTLENVLMTNEEEIRPTNPVATEEYGTVSSNLQAANTAAQTQVVNNQGALPGMVWQNRDVYLQGPIWAKIPHTDGNFHPSPLMGGFGLKHPPPQILIKNTPVPANPPEVFTPAKFASFITQYSTGQVSVEIEWELQKENSKRWNPEIQYTSNFDKQTGVDFAVDSQGVYSEPRPIGTRYLTRNL

SEQ ID NO: 507 - DNA, 2217 bp, synthetic construct
  misc_feature 1..2217: note = source = /note="Description of Artificial Sequence: Synthetic polynucleotide"
  source 1..2217: mol_type = other DNA
atggctgccgatggttatcttccagattggctcgaggacaacctctctgagggcattcgcgagtggtgggacctgaaacctggagccccgaaacccaaagccaaccagcaaaagcaggacgacggccggggtctggtgcttcctggctacaagtacctcggacccttcaacggactcgacaagggggagcccgtcaacgcggcggacgcagcggccctcgagcacgacaaggcctacgaccagcagctcaaagcgggtgacaatccgtacctgcggtataatcacgccgacgccgagtttcaggagcgtctgcaagaagatacgtcttttgggggcaacctcgggcgagcagtcttccaggccaagaagcgggttctcgaacctctcggtctggttgaggaaggcgctaagacggctcctggaaagaagagaccggtagagccgtcaccacagcgttcccccgactcctccacgggcatcggcaagaaaggccagcagcccgccagaaagagactcaatttcggtcagactggcgactcagagtcagtccccgaccctcaacctatcggagaacctccagcagcgccctctagtgtgggatctggtacaatggctgcaggcggtggcgcaccaatggcagacaataacgaaggtgccgacggagtgggtagttcctcgggaaattggcattgcgattccacatggctgggcgacagagtcatcaccaccagcacccgaacctgggccctgcccacctacaacaaccacctctacaagcaaatctccaacgggacctcgggaggcagcaccaacgacaacacctactttggctacagcaccccctgggggtattttgactttaacagattccactgccacttctcaccacgtgactggcagcgactcatcaacaacaactggggattccggcccaagagactcagcttcaagctcttcaacatccaggtcaaagaggtcacgcagaatgaaggcaccaagaccatcgccaataacctcaccagcaccatccaggtgtttacggactcggaataccagctgccgtacgtcctcggctctgcccaccagggctgcctgcctccgttcccggcggacgtcttcatgattcctcagtacggctacctgactctcaacaacggtagtcaggccgtgggacgttcctccttctactgcctggagtacttcccctctcagatgctgagaacgggcaacaacttttccttcagctacactttcgaggacgtgcctttccacagcagctacgcgcacagccagagtttggacaggctgatgaatcctctcatcgaccagtacctgtactacctgtcaagaacccagtctacgggaggcacagcgggaacccagcagttgctgttttctcaggccgggcctagcaacatgtcggctcaggccagaaactggctgcctggaccctgctacagacagcagcgcgtctccacgacactgtcgcaaaacaacaacagcaactttgcctggactggtgccaccaagtatcatctgaacggcagagactctctggtgaatccgggcgtcgccatggcaaccaacaaggacgacgaggaccgcttcttcccacccagcggcatcctcatgtttggcaagcagggagctggaaaagacaacgtggactatagcaacgtgatgctaaccagcgaggaagaaatcaagaccaccaaccccgtggccacagaacagtatggcgtggtggctgataacctacagcagcaaaacaccgctcctattgtgggggccgtcaacagccagggagccttacctggcatggtctggcagaaccgggacgtgtacctgcagggtcctatttgggccaagattcctcacacagatggcaactttcacccgtctcctttaatgggcggctttggacttaaacatccgcctcctcagatcctcatcaaaaacactcctgttcctgcggatcctccaacagcgttcaaccaggccaagctgaattctttcatcacgcagtacagcaccggacaagtcagcgtggtgatcgagtgggagctgcagaaggagaacagcaagcgctggaacccagagattcagtatacttccaactactacaaatctacaaatgtggactttgctgttaatactgagggtgtttactctgagcttcgccccattggcactcgttacctcacccgtaatctgtaa

SEQ ID NO: 508 - protein, 738 aa, synthetic construct
  REGION 1..738: note = source = /note="Description of Artificial Sequence: Synthetic polypeptide"
MAADGYLPDWLEDNLSEGIREWWDLKPGAPKPKANQQKQDDGRGLVLPGYKYLGPFNGLDKGEPVNAADAAALEHDKAYDQQLKAGDNPYLRYNHADAEFQERLQEDTSFGGNLGRAVFQAKKRVLEPLGLVEEGAKTAPGKKRPVEPSPQRSPDSSTGIGKKGQQPARKRLNFGQTGDSESVPDPQPIGEPPAAPSSVGSGTMAAGGGAPMADNNEGADGVGSSSGNWHCDSTWLGDRVITTSTRTWALPTYNNHLYKQISNGTSGGSTNDNTYFGYSTPWGYFDFNRFHCHFSPRDWQRLINNNWGFRPKRLSFKLFNIQVKEVTQNEGTKTIANNLTSTIQVFTDSEYQLPYVLGSAHQGCLPPFPADVFMIPQYGYLTLNNGSQAVGRSSFYCLEYFPSQMLRTGNNFSFSYTFEDVPFHSSYAHSQSLDRLMNPLIDQYLYYLSRTQSTGGTAGTQQLLFSQAGPSNMSAQARNWLPGPCYRQQRVSTTLSQNNNSNFAWTGATKYHLNGRDSLVNPGVAMATNKDDEDRFFPPSGILMFGKQGAGKDNVDYSNVMLTSEEEIKTTNPVATEQYGVVADNLQQQNTAPIVGAVNSQGALPGMVWQNRDVYLQGPIWAKIPHTDGNFHPSPLMGGFGLKHPPPQILIKNTPVPADPPTAFNQAKLNSFITQYSTGQVSVVIEWELQKENSKRWNPEIQYTSNYYKSTNVDFAVNTEGVYSELRPIGTRYLTRNL

SEQ ID NO: 509 - DNA, 2214 bp, synthetic construct
  misc_feature 1..2214: note = source = /note="Description of Artificial Sequence: Synthetic polynucleotide"
  source 1..2214: mol_type = other DNA
atggctgctgacggttatcttccagattggctcgaggacaacctctctgagggcattcgcgagtggtgggacctgaaacctggagcccccaagcccaaggccaaccagcagaagcaggacgacggccggggtctggtgcttcctggctacaagtacctcggacccttcaacggactcgacaagggggagcccgtcaacgcggcggacgcagcggccctcgagcacgacaaggcctacgaccagcagctcaaagcgggtgacaatccgtacctgcggtataaccacgccgacgccgagtttcaggagcgtctgcaagaagatacgtcttttgggggcaacctcgggcgagcagtcttccaggccaagaagcgggttctcgaacctctcggtctggttgaggaagctgctaagacggctcctggaaagaagagaccggtagaaccgtcacctcagcgttcccccgactcctccacgggcatcggcaagaaaggccagcagcccgctagaaagagactgaactttgggcagactggcgactcagagtcagtccccgaccctcaaccaatcggagaaccaccagcaggcccctctggtctgggatctggtacaatggctgcaggcggtggcgccccaatggcagacaataacgaaggcgccgacggagtgggtaatgcctcaggaaattggcattgcgattccacatggctgggcgacagagtcatcaccaccagcacccgaacctgggctttgcccacctacaacaaccacctctacaagcaaatctccagtcagtcagcaggtagcaccaacgacaacgtctacttcggctacagcaccccctgggggtattttgacttcaacagattccactgtcacttctcaccacgtgactggcagcggctcatcaacaacaactggggattccggcccaagaagctcaacttcaagctgttcaacatccaggtcaaggaggtcacaacgaatgacggcgtcacgaccatcgccaataaccttaccagcacggttcaggtcttttcggactcggaataccagctgccctacgtcctcggctccgcacaccagggctgcctgcctccgttcccggcggacgtcttcatgattccccagtacggctacctgactctgaacaatggcagccaatcggtgggtcgttcctctttctactgcctggaatatttcccttctcaaatgctgagaacgggcaacaacttcaccatcagctacaccttcgaggacgttcccttccacagcagctacgcacacagccagagcctggaccggctgatgaatcctcttatcgaccagtacctgtattacctggccagaacacagagcaacgcaggaggcacagctggcaatcaggaactgcagttttatcagggcgggcctaccaccatggccgaacaagccaaaaactggctgcctggaccttgcttccggcaacaaagagtctccaagacgctggatcaaaacaacaacagcaactttgcttggactggtgccaccaaataccatctaaatggaagaaattcattggttaatcccggtgtcgccatggcaacccacaaggacgacgaggaacgcttcttcccttcgagcggagtcctgatttttggaaaaactggagcagctaataagactacactggaaaatgtgttaatgacaaatgaagaggaaattcgtcctaccaacccggtagccaccgaggaatacgggactgttagcagcaacctgcaggcggctaacactgcagcccagacacaagttgtcaacaaccagggagccttacctggtatggtctggcagaaccgggacgtgtacctgcagggtcccatctgggccaagattcctcacacagatggcaactttcacccgtctcctttaatgggcggctttggacttaaacatccgcctcctcagatcctcatcaaaaacactcctgttcctgcggatcctccaacagcgttcaaccaggccaagctgaattctttcatcacgcagtacagcaccggacaagtcagcgtggagatcgagtgggagctgcagaaggagaacagcaagcgctggaacccagagattcagtatacttccaactactacaaatctacaaatgtggactttgctgttaatactgagggtgtttactctgagcctcgccccattggcactcgttacctcacccgtaatctgtaa

SEQ ID NO: 510 - protein, 737 aa, synthetic construct
  REGION 1..737: note = source = /note="Description of Artificial Sequence: Synthetic polypeptide"
MAADGYLPDWLEDNLSEGIREWWDLKPGAPKPKANQQKQDDGRGLVLPGYKYLGPFNGLDKGEPVNAADAAALEHDKAYDQQLKAGDNPYLRYNHADAEFQERLQEDTSFGGNLGRAVFQAKKRVLEPLGLVEEAAKTAPGKKRPVEPSPQRSPDSSTGIGKKGQQPARKRLNFGQTGDSESVPDPQPIGEPPAGPSGLGSGTMAAGGGAPMADNNEGADGVGNASGNWHCDSTWLGDRVITTSTRTWALPTYNNHLYKQISSQSAGSTNDNVYFGYSTPWGYFDFNRFHCHFSPRDWQRLINNNWGFRPKKLNFKLFNIQVKEVTTNDGVTTIANNLTSTVQVFSDSEYQLPYVLGSAHQGCLPPFPADVFMIPQYGYLTLNNGSQSVGRSSFYCLEYFPSQMLRTGNNFTISYTFEDVPFHSSYAHSQSLDRLMNPLIDQYLYYLARTQSNAGGTAGNQELQFYQGGPTTMAEQAKNWLPGPCFRQQRVSKTLDQNNNSNFAWTGATKYHLNGRNSLVNPGVAMATHKDDEERFFPSSGVLIFGKTGAANKTTLENVLMTNEEEIRPTNPVATEEYGTVSSNLQAANTAAQTQVVNNQGALPGMVWQNRDVYLQGPIWAKIPHTDGNFHPSPLMGGFGLKHPPPQILIKNTPVPADPPTAFNQAKLNSFITQYSTGQVSVEIEWELQKENSKRWNPEIQYTSNYYKSTNVDFAVNTEGVYSEPRPIGTRYLTRNL

SEQ ID NO: 511 - DNA, 2217 bp, synthetic construct
  misc_feature 1..2217: note = source = /note="Description of Artificial Sequence: Synthetic polynucleotide"
  source 1..2217: mol_type = other DNA
atggctgccgatggttatcttccagattggctcgaggacaacctctctgagggcattcgcgagtggtgggacctgaaacctggagccccgaaacccaaagccaaccagcaaaagcaggacgacggccggggtctggtgcttcctggctacaagtacctcggacccttcaacggactcgacaagggggagcccgtcaacgcggcggacgcagcggccctcgagcacgacaaggcctacgaccagcagctcaaagcgggtgacaatccgtacctgcggtataatcacgccgacgccgagtttcaggagcgtctgcaagaagatacgtcttttgggggcaacctcgggcgagcagtcttccaggccaagaagcgggttctcgaacctctcggtctggttgaggaaggcgctaagacggctcctggaaagaagagaccggtagagccgtcaccacagcgttcccccgactcctccacgggcatcggcaagaaaggccagcagcccgccagaaagagactcaatttcggtcagactggcgactcagagtcagtccccgaccctcaacctatcggagaacctccagcagcgccctctagtgtgggatctggtacaatggctgcaggcggtggcgcaccaatggcagacaataacgaaggtgccgacggagtgggtagttcctcgggaaattggcattgcgattccacatggctgggcgacagagtcatcaccaccagcacccgaacctgggccctgcccgcctacaacaaccacctctacaagcaaatctccaacgggacctcgggaggcagcaccaacgacaacacctactttggctacagcaccccctgggggtattttgactttaacagattccactgccacttctcaccacgtgactggcagcgactcatcaacaacaactggggattccggcccaagagactcagcttcaagctcttcaacatccaggtcaaagaggtcacgcagaatgaaggcaccaagaccatcgccaataacctcaccagcaccatccaggtgtttacggactcggaataccagctgccgtacgtcctcggctctgcccaccagggctgcctgcctccgttcccggcggatgtcttcatgattcctcagtacggctacctgactctcaacaacggtagtcaggccgtgggacgttcctccttctactgcctggagtacttcccctctcagatgctgagaacgggcaacaacttttccttcagctacactttcgaggacgtgcctttccacagcagctacgcgcacagccagagtttggacaggctgatgaatcctctcatcgaccagtacctgtactacctgtcaagaacccagtctacgggaggcacagcgggaacccagcagttgctgttttctcaggccgggcctagcaacatgtcggctcaggccagaaactggctgcctggaccctgctacagacagcagcgcgtctccacgacactgtcgcaaaacaacaacagcaactttgcctggactggtgccaccaagtatcatctgagcggcagagactctctggtgaatccgggcgtcgccatggcaaccaacaaggacgacgaggaccgcttcttcccatccagcggcatcctcatgtttggcaagcagggagctggaaaagacaacgtggactatagcaacgtgatgctaaccagcgaggaagaaatcaagaccaccaaccccgtggccacagaacagtatggcgtggtggctgataacctacagcagcaaaacaccgctcctattgtgggggccgtcaacagccagggagccttacctggcatggtctggcagaaccgggacgtgtacctgcagggtcctatttgggccaagattcctcacacagatggcaactttcacccgtctcctttaatgggcggctttggacttaaacatccgcctcctcagatcctcatcaaaaacactcctgttcctgcggatcctccaacagcgttcaaccaggccaagctgaattcttccatcacgcagtacagcaccggacaagtcagcgtggagatcgagtgggagctgcagaaggagaacagcaagcgctggaacccagagattcagtatacttccaactactacaaatctacaaatgtggactttgctgttaatactgagggtgtttactctgagcctcgccccattggcactcgttacctcacccgtaatttgtaa

SEQ ID NO: 512 - protein, 738 aa, synthetic construct
  REGION 1..738: note = source = /note="Description of Artificial Sequence: Synthetic polypeptide"
MAADGYLPDWLEDNLSEGIREWWDLKPGAPKPKANQQKQDDGRGLVLPGYKYLGPFNGLDKGEPVNAADAAALEHDKAYDQQLKAGDNPYLRYNHADAEFQERLQEDTSFGGNLGRAVFQAKKRVLEPLGLVEEGAKTAPGKKRPVEPSPQRSPDSSTGIGKKGQQPARKRLNFGQTGDSESVPDPQPIGEPPAAPSSVGSGTMAAGGGAPMADNNEGADGVGSSSGNWHCDSTWLGDRVITTSTRTWALPAYNNHLYKQISNGTSGGSTNDNTYFGYSTPWGYFDFNRFHCHFSPRDWQRLINNNWGFRPKRLSFKLFNIQVKEVTQNEGTKTIANNLTSTIQVFTDSEYQLPYVLGSAHQGCLPPFPADVFMIPQYGYLTLNNGSQAVGRSSFYCLEYFPSQMLRTGNNFSFSYTFEDVPFHSSYAHSQSLDRLMNPLIDQYLYYLSRTQSTGGTAGTQQLLFSQAGPSNMSAQARNWLPGPCYRQQRVSTTLSQNNNSNFAWTGATKYHLSGRDSLVNPGVAMATNKDDEDRFFPSSGILMFGKQGAGKDNVDYSNVMLTSEEEIKTTNPVATEQYGVVADNLQQQNTAPIVGAVNSQGALPGMVWQNRDVYLQGPIWAKIPHTDGNFHPSPLMGGFGLKHPPPQILIKNTPVPADPPTAFNQAKLNSSITQYSTGQVSVEIEWELQKENSKRWNPEIQYTSNYYKSTNVDFAVNTEGVYSEPRPIGTRYLTRNL

SEQ ID NO: 513 - protein, 736 aa, synthetic construct; identical to SEQ ID NO: 13
  REGION 1..736: note = source = /note="Description of Artificial Sequence: Synthetic polypeptide"

SEQ ID NO: 514 - DNA, 2217 bp, synthetic construct
  misc_feature 1..2217: note = source = /note="Description of Artificial Sequence: Synthetic polynucleotide"
  source 1..2217: mol_type = other DNA
atggctgctgacggttatcttccagattggctcgaggacaacctctctgagggcattcgcgagtggtgggacctgaaacctggagcccccaagcccaaggccaaccagcagaagcaggacgacggccggggtctggtgcttcctggctacaagtacctcggacccttcaacggactcgacaagggggagcccgtcaacgcggcggacgcagcggccctcgagcacgacaaggcctacgaccagcagctcaaagcgggtgacaatccgtacctgcggtataaccacgccgacgccgagtttcaggagcgtctgcaagaagatacgtcttttgggggcaacctcgggcgagcagtcttccaggccaagaagcgggttctcgaacctctcggtctggttgaggaagctgctaagacggctcctggaaagaagagaccggtagaaccgtcacctcagcgttcccccgactcctccacgggcatcggcaagaaaggccagcagcccgctaaaaagagactgaactttggtcagactggcgactcagagtcagtccccgaccctcaaccaatcggagaaccaccagcaggcccctctggtctgggatctggtacaatggctgcaggcggtggcgctccaatggcagacaataacgaaggcgccgacggagtgggtagttcctcaggaaattggcattgcgattccacatggctgggcgacagagtcatcaccaccagcacccgaacctgggccctgcccacctacaacaaccacctctacaagcaaatatccaatgggacatcgggaggaagcaccaacgacaacacctacttcggctacagcaccccctgggggtattttgacttcaacagattccactgccacttctcaccacgtgactggcagcgactcatcaacaacaactggggattccggccaaaaagactcagcttcaagctcttcaacatccaggtcaaggaggtcacgcagaatgaaggcaccaagaccatcgccaataaccttaccagcacgattcaggtatttacggactcggaataccagctgccgtacgtcctcggctccgcgcaccagggctgcctgcctccgttcccggcggacgtcttcatgattccccagtacggctaccttacactgaacaatggaagtcaagccgtaggccgttcctccttctactgcctggaatattttccatctcaaatgctgcgaactggaaacaattttgaattcagctacaccttcgaggacgtgcctttccacagcagctacgcacacagccagagcttggaccgactgatgaatcctctcatcgaccagtacctgtactacttatccagaactcagtccacaggaggaactcaaggtacccagcaattgttattttctcaagctgggcctgcaaacatgtcggctcaggctaagaactggctacctggaccttgctaccggcagcagcgagtctctacgacactgtcgcaaaacaacaacagcaactttgcttggactggtgccaccaaatatcacctgaacggaagagactctttggtaaatcccggtgtcgccatggcaacccacaaggacgacgaggaacgcttcttcccgtcgagtggagtcctgatgtttggaaaacagggtgctggaagagacaatgtggactacagcagcgttatgctaaccagcgaagaagaaattaaaaccactaaccctgtagccacagaacaatacggtgtggtggctgacaacttgcagcaaaccaatacagggcctattgtgggaaatgtcaacagccaaggagccttacctggcatggtctggcagaaccgagacgtgtacctgcagggtcccatctgggccaagattcctcacacggacggcaacttccacccttcaccgctaatgggaggatttggactgaagcacccacctcctcagatcctgatcaagaacacgccggtacctgcggatcctccaacaacgttcagccaggcgaaattggcttccttcattacgcagtacagcaccggacaggtcagcgtggaaatcgagtgggagctgcagaaggagaacagcaaacgctggaacccagagattcagtacacttcaaactactacaaatctacaaatgtggactttgctgtcaatacagagggaacttattctgagcctcgccccattggtactcgttacctcacccgtaatctgtaa

SEQ ID NO: 515 - protein, 738 aa, synthetic construct
  REGION 1..738: note = source = /note="Description of Artificial Sequence: Synthetic polypeptide"
MAADGYLPDWLEDNLSEGIREWWDLKPGAPKPKANQQKQDDGRGLVLPGYKYLGPFNGLDKGEPVNAADAAALEHDKAYDQQLKAGDNPYLRYNHADAEFQERLQEDTSFGGNLGRAVFQAKKRVLEPLGLVEEGAKTAPGKKRPVEPSPQRSPDSSTGIGKKGQQPARKRLNFGQTGDSESVPDPQPLGEPPAAPSSVGSGTMAAGGGAPMADNNEGADGVGSSSGNWHCDSTWLGDRVITTSTRTWALPTYNNHLYKQISNGTSGGSTNDNTYFGYSTPWGYFDFNRFHCHFSPRDWQRLINNNWGFRPKRLSFKLFNIQVKEVTQNEGTKTIANNLTSTIQVFTDSEYQLPYVLGSAHQGCLPPFPADVFMIPQYGYLTLNNGSQAVGRSSFYCLEYFPSQMLRTGNNFSFSYTFEDVPFHSSYAHSQSLDRLMNPLIDQYLYYLSRTQSTGGTAGTQQLLFSQAGPSNMSAQARNWLPGPCYRQQRVSTTLSQNNNSNFAWTGATKYHLNGRDSLVNPGVAMATNKDDEDRFFPSSGILMFGKQGAGKDNVDYSNVMLTSEEEIKTTNPVATEQYGVVADNLQRQNTAPIVGAVNSQGALPGMVWQNRDVYLQGPIWAKIPHTDGNFHPSPLMGGFGLKHPPPQILIKNTPVPADPPTAFNQAKLNSFITQYSTGQVSVEIEWELQKENSKRWNPEIQYTSNYYKSTNVDFAVNTEGVYSEPRPIGTRYLTRNL

SEQ ID NO: 516 - protein, 736 aa, synthetic construct
  REGION 1..736: note = source = /note="Description of Artificial Sequence: Synthetic polypeptide"
MAADGYLPDWLEDNLSEGIREWLNLKPGAPQPKANQQKQDNARGLVLPGYKYLGPFNGLDKGDPVNEADAAALEHDKAYGQQLKAGDNPYLKYNHADAEFQERLQKDTSFGGNLGKAVFQAKKRILEPLGLVETPAKTAPGKKRPVDPSPQRSPDSSSGIGKKSPHPARKRLNFGQTGEAESVPDPQPIGEPPSDPSSVGSGTMAAGGGAPMADNNEGADGVGNSSGNWHCDSTWLGDRVITTSTRTWALPTYNNHLYKQISSQSGATNDNHYFGYSTPWGYFDFNRFHCHFSPRDWQRLINNNWGFRPKRLSFKLFNIQVKEVTQNDGTTTIANNLTSTVQVFTDSEYQLPYVLGSAHQGCLPPFPADVFMIPQYGYLTLNNGSQAVGRSSFYCLEYFPSQMLRTGNNFQFSYTFEDVPFHSSYAHSQSLDRLMNPLIDQYLYYLSKTQGTNATVQGAKLQFSQAGPSNMRDQARNWLPGPCYRQQRVSKTANDNNNSEYAWTGATKYHLNGRDSLVNPGPAMASHKDDEEKFFPMNGTLVFGKNGAGNSNVDIENVMITDEEEIRTTNPVATEQYGVVSDNLQSSNTRPITGDVDSQGVLPGMVWQDRDVYLQGPIWAKIPHTDGHFHPSPLMGGFGLKHPPPQILIKNTPVPANPATTFTPGKFASFITQYSTGQVSVQIEWELQKENSKRWNPEIQYTSNYNKSVNVDFTVDTNGVYSEPRPIGTRYLTRNL

SEQ ID NO: 517 - protein, 736 aa, synthetic construct; identical to SEQ ID NO: 92
  REGION 1..736: note = source = /note="Description of Artificial Sequence: Synthetic polypeptide"

SEQ ID NO: 518 - protein, 736 aa, synthetic construct
  REGION 1..736: note = source = /note="Description of Artificial Sequence: Synthetic polypeptide"
MAADGYLPDWLEDNLSEGIREWWDLKPGAPKPKANQQKQDDGRGLVLPGYKYLGPFNGLDKGEPVNAADAAALEHDKAYDQQLKAGDNPYLRYNHADAEFQERLQEDTSFGGNLGRAVFQAKKRVLEPLGLVEEGAKTAPGKKRPVEQSPQEPDSSSGIGKTGQQPAKKRLNFGQTGDSESVPDPQPLGEPPAAPSGLGPNTMASGGGAPMADNNEGADGVGNSSGNWHCDSTWLGDRVITTSTRTWALPTYNNHLYKQISNGTSGGSTNDNTYFGYSTPWGYFDFNRFHCHFSPRDWQRLINNNWGFRPKRLNFKLFNIQVKEVTTNEGTKTIANNLTSTVQVFTDSEYQLPYVLGSAHQGCLPPFPADVFMVPQYGYLTLNNGSQALGRSSFYCLEYFPSQMLRTGNNFQFSYTFEDVPFHSSYAHSQSLDRLMNPLIDQYLYYLVRTQTTGTGGTQTLAFSQAGPSSMANQARNWVPGPCYRQQRVSTTTNQNNNSNFAWTGAAKFKLNGRDSLMNPGVAMASHKDDEDRFFPSSGVLIFGKQGAGNDGVDYSQVLITDEEEIKATNPVATEEYGAVAINNQAANTQAQTGLVHNQGVIPGMVWQNRDVYLQGPIWAKIPHTDGNFHPSPLMGGFGLKHPPPQILIKNTPVPADPPLTFNQAKLNSFITQYSTGQVSVEIEWELQKENSKRWNPEIQYTSNYYKSTNVDFAVNTEGVYSEPRPIGTRYLTRNL

SEQ ID NO: 519 - protein, 736 aa, synthetic construct; identical to SEQ ID NO: 518
  REGION 1..736: note = source = /note="Description of Artificial Sequence: Synthetic polypeptide"

SEQ ID NO: 520 - protein, 736 aa, synthetic construct
  REGION 1..736: note = source = /note="Description of Artificial Sequence: Synthetic polypeptide"
MAADGYLPDWLEDNLSEGIREWWDLKPGAPKPKANQQKQDDGRGLVLPGYKYLGPFNGLDKGEPVNAADAAALEHDKAYDQQLKAGDNPYLRYNHADAEFQERLQEDTSFGGNLGRAVFQAKKRVLEPLGLVEEGAKTAPGKKRPVEQSPQEPDSSSGIGKTGQQPAKKRLNFGQTGDSESVPDPQPLGEPPAAPSGLGPNTMASGGGAPMADNNEGADGVGNSSGNWHCDSTWLGDRVITTSTRTWALPTYNNHLYKQISNGTSGGSTNDNTYFGYSTPWGYFDFNRFHCHFSPRDWQRLINNNWGFRPKRLNFKLFNIQVKEVTTNEGTKTIANNLTSTVQVFTDSEYQLPYVLGSAHQGCLPPFPADVFMVPQYGYLTLNNGSQALGRSSFYCLEYFPSQMLRTGNNFQFSYTFEDVPFHSSYAHSQSLDRLMNPLIDQYLYYLVRTQTTGTGGTQTLAFSQAGPSSMANQARNWVPGPCYRQQRVSTTTNQNNNSNFAWTGAAKFKLNGRDSLMNPGVAMASHKDDEDRFFPSSGVLIFGKQGAGNDGVDYSQVLITDEEEIKATNPVATEEYGAVAINNQRANTQAQTGLVHNQGVIPGMVWQNRDVYLQGPIWAKIPHTDGNFHPSPLMGGFGLKHPPPQILIKNTPVPADPPLTFNQAKLNSFITQYSTGQVSVEIEWELQKENSKRWNPEIQYTSNYYKSTNVDFAVNTEGVYSEPRPIGTRYLTRNL

SEQ ID NO: 521 - protein, 736 aa, synthetic construct
  REGION 1..736: note = source = /note="Description of Artificial Sequence: Synthetic polypeptide"
MAADGYLPDWLEDNLSEGIREWWDLKPGAPKPKANQQKQDDGRGLVLPGYKYLGPFNGLDKGEPVNAADAAALEHDKAYDQQLKAGDNPYLRYNHADAEFQERLQEDTSFGGNLGRAVFQAKKRVLEPLGLVEEGAKTAPGKKRPVEQSPQEPDSSSGIGKTGQQPAKKRLNFGQTGDSESVPDPQPLGEPPAAPSGLGPNTMASGGGAPMADNNEGADGVGNSSGNWHCDSTWLGDRVITTSTRTWALPTYNNHLYKQISNGTSGGSTNDNTYFGYSTPWGYFDFNRFHCHFSPRDWQRLINNNWGFRPKRLNFKLFNIQVKEVTTNEGTKTIANNLTSTVQVFTDSEYQLPYVLGSAHQGCLPPFPADVFMVPQYGYLTLNNGSQALGRSSFYCLEYFPSQMLRTGNNFQFSYTFEDVPFHSSYAHSQSLDRLMNPLIDQYLYYLVRTQTTGTGGTQTLAFSQAGPSSMANQARNWVPGPCYRQQRVSTTTNQNNNSNFAWTGAAKFKLNGRDSLMNPGVAMASHKDDEDAFFPSSGVLIFGKQGAGNDGVDYSQVLITDEEEIKATNPVATEEYGAVAINNQAANTQAQTGLVHNQGVIPGMVWQNRDVYLQGPIWAKIPHTDGNFHPSPLMGGFGLKHPPPQILIKNTPVPADPPLTFNQAKLNSFITQYSTGQVSVEIEWELQKENSKRWNPEIQYTSNYYKSTNVDFAVNTEGVYSEPRPIGTRYLTRNL

SEQ ID NO: 522 - DNA, 1803 bp, Bovine adeno-associated virus
  source 1..1803: mol_type = genomic DNA
acggcgcctgcggcaaaaaagaggcctctagagcagagtcctcaagagccagactcctcgagcggagttggcaagaaaggcaaacagcctgccagaaagagactcaactttgacgacgaacctggagccggagacgggcctcccccagaaggaccatcttccggagctatgtctactgagactgaaatgcgtgcagcagctggcggaaatggtggcgatgcgggacaaggtgccgagggagtgggtaatgcctccggtgattggcattgcgattccacttggtcagagagccacgtcaccaccacctcaacccgcacctgggtcctgccgacctacaacaaccacctgtacctgcggctcggctcgagcaacgccagcgacaccttcaacggattctccaccccctggggatactttgactttaaccgcttccactgccacttctcgccaagagactggcaaaggctcatcaacaaccactggggactgcgccccaaaagcatgcaagtccgcatcttcaacatccaagttaaggaggtcacgacgtctaacggggagacgaccgtatccaacaacctcaccagcacggtccagatctttgcggacagcacgtacgagctcccgtacgtgatggatgcaggtcaggagggcagcttgcctcctttccccaacgacgtgttcatggtgcctcagtacgggtactgcggactggtaaccggaggcagctctcaaaaccagacagacagaaatgccttctactgtctggagtactttcccagccagatgctgagaaccggaaacaactttgagatggtgtacaagtttgaaaacgtgcccttccactccatgtacgctcacagccagagcctggataggctgatgaacccgctgctggaccagtacctgtgggagctccagtctaccacctctggaggaactctcaaccagggcaattcagccaccaactttgccaagctgaccaaaacaaacttttctggctaccgcaaaaactggctcccggggcccatgatgaagcagcagagattctccaagactgccagtcaaaactacaagattccccagggaagaaacaacagtctgctccattatgagaccagaactaccctcgacggaagatggagcaattttgccccgggaacggccatggcaaccgcagccaacgacgccaccgacttctctcaggcccagctcatctttgcggggcccaacatcaccggcaacaccaccacagatgccaataacctgatgttcacttcagaagatgaacttagggccaccaacccccgggacactgacctgtttggccacctggcaaccaaccagcaaaacgccaccaccgttcctaccgtagacgacgtggacggagtcggcgtgtacccgggaatggtgtggcaggacagagacatttactaccaagggcccatttgggccaaaattccacacacggatggacactttcacccgtctcctctcattggcggatttggactgaaaagcccgcctccacaaatattcatcaaaaacactcctgtacccgccaatcccgcaacgaccttctctccggccagaatcaacagcttcatcacccagtacagcaccggacaggtggctgtcaaaatagaatgggaaatccagaaggagcggtccaagagatggaacccagaggtccagttcacgtccaactacggagcacaggactcgcttctctgggctcccgacaacgccggagcctacaaagagcccagggccattggatcccgatacctcaccaaccacctctag

SEQ ID NO: 523 - DNA, 1617 bp, Bovine adeno-associated virus
  source 1..1617: mol_type = genomic DNA
atgcgtgcagcagctggcggaaatggtggcgatgcgggacaaggtgccgagggagtgggtaatgcctccggtgattggcattgcgattccacttggtcagagagccacgtcaccaccacctcaacccgcacctgggtcctgccgacctacaacaaccacctgtacctgcggctcggctcgagcaacgccagcgacaccttcaacggattctccaccccctggggatactttgactttaaccgcttccactgccacttctcgccaagagactggcaaaggctcatcaacaaccactggggactgcgccccaaaagcatgcaagtccgcatcttcaacatccaagttaaggaggtcacgacgtctaacggggagacgaccgtatccaacaacctcaccagcacggtccagatctttgcggacagcacgtacgagctcccgtacgtgatggatgcaggtcaggagggcagcttgcctcctttccccaacgacgtgttcatggtgcctcagtacgggtactgcggactggtaaccggaggcagctctcaaaaccagacagacagaaatgccttctactgtctggagtactttcccagccagatgctgagaaccggaaacaactttgagatggtgtacaagtttgaaaacgtgcccttccactccatgtacgctcacagccagagcctggataggctgatgaacccgctgctggaccagtacctgtgggagctccagtctaccacctctggaggaactctcaaccagggcaattcagccaccaactttgccaagctgaccaaaacaaacttttctggctaccgcaaaaactggctcccggggcccatgatgaagcagcagagattctccaagactgccagtcaaaactacaagattccccagggaagaaacaacagtctgctccattatgagaccagaactaccctcgacggaagatggagcaattttgccccgggaacggccatggcaaccgcagccaacgacgccaccgacttctctcaggcccagctcatctttgcggggcccaacatcaccggcaacaccaccacagatgccaataacctgatgttcacttcagaagatgaacttagggccaccaacccccgggacactgacctgtttggccacctggcaaccaaccagcaaaacgccaccaccgttcctaccgtagacgacgtggacggagtcggcgtgtacccgggaatggtgtggcaggacagagacatttactaccaagggcccatttgggccaaaattccacacacggatggacactttcacccgtctcctctcattggcggatttggactgaaaagcccgcctccacaaatattcatcaaaaacactcctgtacccgccaatcccgcaacgaccttctctccggccagaatcaacagcttcatcacccagtacagcaccggacaggtggctgtcaaaatagaatgggaaatccagaaggagcggtccaagagatggaacccagaggtccagttcacgtccaactacggagcacaggactcgcttctctgggctcccgacaacgccggagcctacaaagagcccagggccattggatcccgatacctcaccaaccacctctag

SEQ ID NO: 524 - DNA, 1173 bp, Bovine adeno-associated virus
  source 1..1173: mol_type = genomic DNA
atggcgctggtaagctggctggtggaacatggcatcacttccgagaagcagtggattcaggagaatcaggagagctacctgtccttcaactccacgggaaactctcggagccagattaaagccgcgcttgacaacgcgtcaaaaattatgagtctgaccaaatctgcctcagactatctcgtgggacagactgttccagaggacatttctgaaaacagaatctggcagatttttgatctcaacggctacgacccggcatacgcgggctctgttctctacggctggtgcactcgcgcctttggaaagaggaacaccgtctggctgtatggacccgcgaccaccggaaagaccaacatcgcggaagccatctctcacaccgtgcccttttatggctgtgtgaactggactaatgagaactttccctttaatgactgtgtggaaaaaatgttgatctggtgggaggagggaaagatgaccagcaaggtggtggaacccgccaaggccatcttgggggggtctagagtacgagtggatcaaaaatgtaaatcctctgtacaagtagactctaccccggtgattatcacctccaatactaacatgtgtgtggtggtggatgggaactccacgacctttgaacaccagcagccgctggaagaccgcatgttcagatttgaactcatgcggcggctcccgccagattttggcaagattaccaagcaggaagtcaaagacttttttgcttgggcaaaggtcaaccaggtgccggtgactcacgagtttatggttcccaagaaagtggcgggaactgagagggcggagacttctagaaaacgcccactggatgacgtcaccaataccaactataaaagtccggagaagcgggcccggctctcagttgttcctgagacgcctcgcagttcagacgtgcctgtagagcccgctcctctgcgacctctcaactggtcttccaggtatgaatgcagatgtgactatcatgctaaatttgactctgtaacgggggaatgtgacgagtgtgaatatttgaatcggggcaaaaatggctgtatctttcataatgctacacattgtcaaatttgtcacgctgttcctccatgggaaaaggaaaatgtgtcagattttaatgattttgatgactgtaataaagagcagtaa

SEQ ID NO: 525 - DNA, 1833 bp, Bovine adeno-associated virus
  source 1..1833: mol_type = genomic DNA
atggctaccttctatgaagtcattgttcgcgttccatttgatgtggaagagcacctgcctggaatttctgacaactttgtagactgggtaactggtcaaatttgggagctgcctcccgagtcagatttgaatttgactctgattgagcagcctcagctgacggtggctgacagaattcgccgcgtgttcctgtacgagtggaacaaattttccaagcaggagagcaaattctttgtgcagtttgaaaagggatctgaatattttcatctgcacacgctcgtggagacctccggcatctcttctatggtccttggccgctacgtgagtcagattcgcgcccagctggtgaaggtggtgttccagaacattgagccgcggattaacgactgggtcgccatcaccaaggtaaagaagggcggagccaataaggtggtggattctgggtatattcccgcctacctgctgccgaaggtccaaccagagcttcagtgggcgtggactaacctcgaagagtataaattggccgccctcaatctggaggagcgcaaacggctcgtcgctcagtttcagcttgagtcctcgcagcgctcgcaagaggcatcttcccagagggacgtttcggctgacccggtcatcaagagcaagacttcccagaaatacatggcgctggtaagctggctggtggaacatggcatcacttccgagaagcagtggattcaggagaatcaggagagctacctgtccttcaactccacgggaaactctcggagccagattaaagccgcgcttgacaacgcgtcaaaaattatgagtctgaccaaatctgcctcagactatctcgtgggacagactgttccagaggacatttctgaaaacagaatctggcagatttttgatctcaacggctacgacccggcatacgcgggctctgttctctacggctggtgcactcgcgcctttggaaagaggaacaccgtctggctgtatggacccgcgaccaccggaaagaccaacatcgcggaagccatctctcacaccgtgcccttttatggctgtgtgaactggactaatgagaactttccctttaatgactgtgtggaaaaaatgttgatctggtgggaggagggaaagatgaccagcaaggtggtggaacccgccaaggccatcttgggggggtctagagtacgagtggatcaaaaatgtaaatcctctgtacaagtagactctaccccggtgattatcacctccaatactaacatgtgtgtggtggtggatgggaactccacgacctttgaacaccagcagccgctggaagaccgcatgttcagatttgaactcatgcggcggctcccgccagattttggcaagattaccaagcaggaagtcaaagacttttttgcttgggcaaaggtcaaccaggtgccggtgactcacgagtttatggttcccaagaaagtggcgggaactgagagggcggagacttctagaaaacgcccactggatgacgtcaccaataccaactataaaagtccggagaagcgggcccggctctcagttgttcctgagacgcctcgcagttcagacgtgcctgtagagcccgctcctctgcgacctctcaactggtcttccaggtatgaatgcagatgtgactatcatgctaaatttgactctgtaacgggggaatgtgacgagtgtgaatatttgaatcggggcaaaaatggctgtatctttcataatgctacacattgtcaaatttgtcacgctgttcctccatgggaaaaggaaaatgtgtcagattttaatgattttgatgactgtaataaagagcagtaa

SEQ ID NO: 526 - DNA, 2211 bp, Bovine adeno-associated virus
  source 1..2211: mol_type = genomic DNA
atgtcttttgttgaccaccctccagattggttggaatcgatcggcgacggctttcgtgaatttctcggccttgaggcgggtcccccgaaacccaaggccaatcaacagaagcaagataacgctcgaggtcttgtgcttcctgggtacaagtatcttggtcctgggaacggccttgataagggcgatcctgtcaattttgctgacgaggttgcccgagagcacgacctctcctaccagaaacagcttgaggcgggcgataacccttacctcaagtacaaccacgcggacgcagagtttcaggagaaactcgcttctgacacttcttttgggggaaaccttgggaaggctgttttccaggctaaaaagaggattctcgaacctcttggcctggttgagacgccggataaaacggcgcctgcggcaaaaaagaggcctctagagcagagtcctcaagagccagactcctcgagcggagttggcaagaaaggcaaacagcctgccagaaagagactcaactttgacgacgaacctggagccggagacgggcctcccccagaaggaccatcttccggagctatgtctactgagactgaaatgcgtgcagcagctggcggaaatggtggcgatgcgggacaaggtgccgagggagtgggtaatgcctccggtgattggcattgcgattccacttggtcagagagccacgtcaccaccacctcaacccgcacctgggtcctgccgacctacaacaaccacctgtacctgcggctcggctcgagcaacgccagcgacaccttcaacggattctccaccccctggggatactttgactttaaccgcttccactgccacttctcgccaagagactggcaaaggctcatcaacaaccactggggactgcgccccaaaagcatgcaagtccgcatcttcaacatccaagttaaggaggtcacgacgtctaacggggagacgaccgtatccaacaacctcaccagcacggtccagatctttgcggacagcacgtacgagctcccgtacgtgatggatgcaggtcaggagggcagcttgcctcctttccccaacgacgtgttcatggtgcctcagtacgggtactgcggactggtaaccggaggcagctctcaaaaccagacagacagaaatgccttctactgtctggagtactttcccagccagatgctgagaaccggaaacaactttgagatggtgtacaagtttgaaaacgtgcccttccactccatgtacgctcacagccagagcctggataggctgatgaacccgctgctggaccagtacctgtgggagctccagtctaccacctctggaggaactctcaaccagggcaattcagccaccaactttgccaagctgaccaaaacaaacttttctggctaccgcaaaaactggctcccggggcccatgatgaagcagcagagattctccaagactgccagtcaaaactacaagattccccagggaagaaacaacagtctgctccattatgagaccagaactaccctcgacggaagatggagcaattttgccccgggaacggccatggcaaccgcagccaacgacgccaccgacttctctcaggcccagctcatctttgcggggcccaacatcaccggcaacaccaccacagatgccaataacctgatgttcacttcagaagatgaacttagggccaccaacccccgggacactgacctgtttggccacctggcaaccaaccagcaaaacgccaccaccgttcctaccgtagacgacgtggacggagtcggcgtgtacccgggaatggtgtggcaggacagagacatttactaccaagggcccatttgggccaaaattccacacacggatggacactttcacccgtctcctctcattggcggatttggactgaaaagcccgcctccacaaatattcatcaaaaacactcctgtacccgccaatcccgcaacgaccttctctccggccagaatcaacagcttcatcacccagtacagcaccggacaggtggctgtcaaaatagaatgggaaatccagaaggagcggtccaagagatggaacccagaggtccagttcacgtccaactacggagcacaggactcgcttctctgggctcccgacaacgccggagcctacaaagagcccagggccattggatcccgatacctcaccaaccacctctag

SEQ ID NO: 527 - DNA, 4694 bp, Bovine adeno-associated virus
  source 1..4694: mol_type = genomic DNA
gtggcactcccccccctgtcgcgttcgctcgttcgctggctcgattgggggggtggcagctcaaagagctgccagacgacggccctctgggccgtcgcccccccaatcgagccagcgaacgagcgaacgcgacaggggggggagtgccacactctctagcaagggggttttgtaggtggtgatgtcattgttgatgtcattatagttgtcacgcgatagttaatgattaacagtcatgtgatgtgtgttatccaataggatgaaagcgcgcgaatgagatctcgcgagacttccggggtataaaaggggtgagtgaacgagcccgccgccattctctgctctggactgctagaggaccctcgctgccatggctaccttctatgaagtcattgttcgcgttccatttgatgtggaagagcacctgcctggaatttctgacaactttgtagactgggtaactggtcaaatttgggagctgcctcccgagtcagatttgaatttgactctgattgagcagcctcagctgacggtggctgacagaattcgccgcgtgttcctgtacgagtggaacaaattttccaagcaggagagcaaattctttgtgcagtttgaaaagggatctgaatattttcatctgcacacgctcgtggagacctccggcatctcttctatggtccttggccgctacgtgagtcagattcgcgcccagctggtgaaggtggtgttccagaacattgagccgcggattaacgactgggtcgccatcaccaaggtaaagaagggcggagccaataaggtggtggattctgggtatattcccgcctacctgctgccgaaggtccaaccagagcttcagtgggcgtggactaacctcgaagagtataaattggccgccctcaatctggaggagcgcaaacggctcgtcgctcagtttcagcttgagtcctcgcagcgctcgcaagaggcatcttcccagagggacgtttcggctgacccggtcatcaagagcaagacttcccagaaatacatggcgctggtaagctggctggtggaacatggcatcacttccgagaagcagtggattcaggagaatcaggagagctacctgtccttcaactccacgggaaactctcggagccagattaaagccgcgcttgacaacgcgtcaaaaattatgagtctgaccaaatctgcctcagactatctcgtgggacagactgttccagaggacatttctgaaaacagaatctggcagatttttgatctcaacggctacgacccggcatacgcgggctctgttctctacggctggtgcactcgcgcctttggaaagaggaacaccgtctggctgtatggacccgcgaccaccggaaagaccaacatcgcggaagccatctctcacaccgtgcccttttatggctgtgtgaactggactaatgagaactttccctttaatgactgtgtggaaaaaatgttgatctggtgggaggagggaaagatgaccagcaaggtggtggaacccgccaaggccatcttgggggggtctagagtacgagtggatcaaaaatgtaaatcctctgtacaagtagactctaccccggtgattatcacctccaatactaacatgtgtgtggtggtggatgggaactccacgacctttgaacaccagcagccgctggaagaccgcatgttcagatttgaactcatgcggcggctcccgccagattttggcaagattaccaagcaggaagtcaaagacttttttgcttgggcaaaggtcaaccaggtgccggtgactcacgagtttatggttcccaagaaagtggcgggaactgagagggcggagacttctagaaaacgcccactggatgacgtcaccaataccaactataaaagtccggagaagcgggcccggctctcagttgttcctgagacgcctcgcagttcagacgtgcctgtagagcccgctcctctgcgacctctcaactggtcttccaggtatgaatgcagatgtgactatcatgctaaatttgactctgtaacgggggaatgtgacgagtgtgaatatttgaatcggggcaaaaatggctgtatctttcataatgctacacattgtcaaatttgtcacgctgttcctccatgggaaaaggaaaatgtgtcagattttaatgattttgatgactgtaataaagagcagtaaataaagtgagtagtcatgtcttttgttgaccaccctccagattggttggaatcgatcggcgacggctttcgtgaatttctcggccttgaggcgggtcccccgaaacccaaggccaatcaacagaagcaagataacgctcgaggtcttgtgcttcctgggtacaagtatcttggtcctgggaacggccttgataagggcgatcctgtcaattttgctgacgaggttgcccgagagcacgacctctcctaccagaaacagcttgaggcgggcgataacccttacctcaagtacaaccacgcggacgcagagtttcaggagaaactcgcttctgacacttcttttgggggaaaccttgggaaggctgttttccaggctaaaaagaggattctcgaacctcttggcctggttgagacgccggataaaacggcgcctgcggcaaaaaagaggcctctagagcagagtcctcaagagccagactcctcgagcggagttggcaagaaaggcaaacagcctgccagaaagagactcaactttgacgacgaacctggagccggagacgggcctcccccagaaggaccatcttccggagctatgtctactgagactgaaatgcgtgcagcagctggcggaaatggtggcgatgcgggacaaggtgccgagggagtgggtaatgcctccggtgattggcattgcgattccacttggtcagagagccacgtcaccaccacctcaacccgcacctgggtcctgccgacctacaacaaccacctgtacctgcggctcggctcgagcaacgccagcgacaccttcaacggattctccaccccctggggatactttgactttaaccgcttccactgccacttctcgccaagagactggcaaaggctcatcaacaaccactggggactgcgccccaaaagcatgcaagtccgcatcttcaacatccaagttaaggaggtcacgacgtctaacggggagacgaccgtatccaacaacctcaccagcacggtccagatctttgcggacagcacgtacgagctcccgtacgtgatggatgcaggtcaggagggcagcttgcctcctttccccaacgacgtgttcatggtgcctcagtacgggtactgcggactggtaaccggaggcagctctcaaaaccagacagacagaaatgccttctactgtctggagtactttcccagccagatgctgagaaccggaaacaactttgagatggtgtacaagtttgaaaacgtgcccttccactccatgtacgctcacagccagagcctggataggctgatgaacccgctgctggaccagtacctgtgggagctccagtctaccacctctggaggaactctcaaccagggcaattcagccaccaactttgccaagctgaccaaaacaaacttttctggctaccgcaaaaactggctcccggggcccatgatgaagcagcagagattctccaagactgccagtcaaaactacaagattccccagggaagaaacaacagtctgctccattatgagaccagaactaccctcgacggaagatggagcaattttgccccgggaacggccatggcaaccgcagccaacgacgccaccgacttctctcaggcccagctcatctttgcggggcccaacatcaccggcaacaccaccacagatgccaataacctgatgttcacttcagaagatgaacttagggccaccaacccccgggacactgacctgtttggccacctggcaaccaaccagcaaaacgccaccaccgttcctaccgtagacgacgtggacggagtcggcgtgtacccgggaatggtgtggcaggacagagacatttactaccaagggcccatttgggccaaaattccacacacggatggacactttcacccgtctcctctcattggcggatttggactgaaaagcccgcctccacaaatattcatcaaaaacactcctgtacccgccaatcccgcaacgaccttctctccggccagaatcaacagcttcatcacccagtacagcaccggacaggtggctgtcaaaatagaatgggaaatccagaaggagcggtccaagagatggaacccagaggtccagttcacgtccaactacggagcacaggactcgcttctctgggctcccgacaacgccggagcctacaaagagcccagggccattggatcccgatacctcaccaaccacctctagcccaattctgttgcataccctcaataaaccgtgtattcgtttcagtaaaatactgcctcttgtggtcattcggcgtacaacagcttacaacaacaacaaaacccccttgctagagagtgtggcactcccccccctgtcgcgttcgctcgttcgctggctcgattgggggggtggcagctcaaagagctgccagacgacggccctctgggccgtcgcccccccaatcgagccagcgaacgagcgaacgcgacaggggggggagtgccac

SEQ ID NO: 528 - protein, 390 aa, Bovine adeno-associated virus
MALVSWLVEHGITSEKQWIQENQESYLSFNSTGNSRSQIKAALDNASKIMSLTKSASDYLVGQTVPEDISENRIWQIFDLNGYDPAYAGSVLYGWCTRAFGKRNTVWLYGPATTGKTNIAEAISHTVPFYGCVNWTNENFPFNDCVEKMLIWWEEGKMTSKVVEPAKAILGGSRVRVDQKCKSSVQVDSTPVIITSNTNMCVVVDGNSTTFEHQQPLEDRMFRFELMRRLPPDFGKITKQEVKDFFAWAKVNQVPVTHEFMVPKKVAGTERAETSRKRPLDDVTNTNYKSPEKRARLSVVPETPRSSDVPVEPAPLRPLNWSSRYECRCDYHAKFDSVTGECDECEYLNRGKNGCIFHNATHCQICHAVPPWEKENVSDFNDFDDCNKEQ

SEQ ID NO: 529 - protein, 610 aa, Bovine adeno-associated virus
MATFYEVIVRVPFDVEEHLPGISDNFVDWVTGQIWELPPESDLNLTLIEQPQLTVADRIRRVFLYEWNKFSKQESKFFVQFEKGSEYFHLHTLVETSGISSMVLGRYVSQIRAQLVKVVFQNIEPRINDWVAITKVKKGGANKVVDSGYIPAYLLPKVQPELQWAWTNLEEYKLAALNLEERKRLVAQFQLESSQRSQEASSQRDVSADPVIKSKTSQKYMALVSWLVEHGITSEKQWIQENQESYLSFNSTGNSRSQIKAALDNASKIMSLTKSASDYLVGQTVPEDISENRIWQIFDLNGYDPAYAGSVLYGWCTRAFGKRNTVWLYGPATTGKTNIAEAISHTVPFYGCVNWTNENFPFNDCVEKMLIWWEEGKMTSKVVEPAKAILGGSRVRVDQKCKSSVQVDSTPVIITSNTNMCVVVDGNSTTFEHQQPLEDRMFRFELMRRLPPDFGKITKQEVKDFFAWAKVNQVPVTHEFMVPKKVAGTERAETSRKRPLDDVTNTNYKSPEKRARLSVVPETPRSSDVPVEPAPLRPLNWSSRYECRCDYHAKFDSVTGECDECEYLNRGKNGCIFHNATHCQICHAVPPWEKENVSDFNDFDDCNKEQ

SEQ ID NO: 530 - protein, 538 aa, Bovine adeno-associated virus
MRAAAGGNGGDAGQGAEGVGNASGDWHCDSTWSESHVTTTSTRTWVLPTYNNHLYLRLGSSNASDTFNGFSTPWGYFDFNRFHCHFSPRDWQRLINNHWGLRPKSMQVRIFNIQVKEVTTSNGETTVSNNLTSTVQIFADSTYELPYVMDAGQEGSLPPFPNDVFMVPQYGYCGLVTGGSSQNQTDRNAFYCLEYFPSQMLRTGNNFEMVYKFENVPFHSMYAHSQSLDRLMNPLLDQYLWELQSTTSGGTLNQGNSATNFAKLTKTNFSGYRKNWLPGPMMKQQRFSKTASQNYKIPQGRNNSLLHYETRTTLDGRWSNFAPGTAMATAANDATDFSQAQLIFAGPNITGNTTTDANNLMFTSEDELRATNPRDTDLFGHLATNQQNATTVPTVDDVDGVGVYPGMVWQDRDIYYQGPIWAKIPHTDGHFHPSPLIGGFGLKSPPPQIFIKNTPVPANPATTFSPARINSFITQYSTGQVAVKIEWEIQKERSKRWNPEVQFTSNYGAQDSLLWAPDNAGAYKEPRAIGSRYLTNHL

SEQ ID NO: 531 - protein, 736 aa, synthetic construct
  REGION 1..736: note = source = /note="Description of Artificial Sequence: Synthetic polypeptide"
MSFVDHPPDWLESIGDGFREFLGLEAGPPKPKANQQKQDNARGLVLPGYKYLGPGNGLDKGDPVNFADEVAREHDLSYQKQLEAGDNPYLKYNHADAEFQEKLASDTSFGGNLGKAVFQAKKRILEPLGLVETPDKTAPAAKKRPLEQSPQEPDSSSGVGKKGKQPARKRLNFDDEPGAGDGPPPEGPSSGAMSTETEMRAAAGGNGGDAGQGAEGVGNASGDWHCDSTWSESHVTTTSTRTWVLPTYNNHLYLRLGSSNASDTFNGFSTPWGYFDFNRFHCHFSPRDWQRLINNHWGLRPKSMQVRIFNIQVKEVTTSNGETTVSNNLTSTVHIFADSTYELPYVMDAGQEGSLPPFPNDVFMVPQYGYCGLVTGGSSQNQTDRNAFYCLEYFPSQMLRTGNNFEMVYKFENVPFHSMYAHSQSLDRLMNPLLDQYLWELQSTTSGGTLNQGNSATNFAKLTNKNFSGYRKNWLPGPMMKQQRFSKTASQNYKIPQGGNNSLLHYETRTTLDRRWSNFAPGTAMATAANDATDFSQAQLIFAGPNITGNTTTDANNLMFTSEDELRATNPRDTDLFGHLATNQQNATTVPTVDDVDGVGVYPGMVWQDRDIYYQGPIWAKIPHTDGHFHPSPLIGGFGLKSPPPQIFIKNTPVPANPATTFSPARINSFITQYSTGQVAVKIEWEIQKERSKRWNPEVQFTSNYGAQDSLLWAPDNAGAYKEPRAIGSRYLTNHL

SEQ ID NO: 532 - protein, 736 aa, synthetic construct
  REGION 1..736: note = source = /note="Description of Artificial Sequence: Synthetic polypeptide"
MSFVDHPPDWLESIGDGFREFLGLEAGPPKPKANQQKQDNARGLVLPGYKYLGPGNGLDKGDPVNFADEVAREHDLSYQKQLEAGDNPYLKYNHADAEFQEKLASDTSFGGNLGKAVFQAKKRILEPLGLVETPDKTAPAAKKRPLEQSPQEPDSSSGVGKKGKQPARKRLNFDDEPGAGDGPPPEGPSSGAMSTETEMRAAAGGNGGDAGQGAEGVGNASGDWHCDSTWSESHVTTTSTRTWVLPTYNNHLYLRLGSSNASDTFNGFSTPWGYFDFNRFHCHFSPRDWQRLINNHWGLRPKSMQVRIFNIQVKEVTTSNGETTVSNNLTSTVQIFADSTYELPYVMDAGQEGSLPPFPNDVFMVPQYGYCGLVTGGSSQNQTDRNAFYCLEYFPSQMLRTGNNFEMVYKFENVPFHSMYAHSQSLDRLMNPLLDQYLWELQSTTSGGTLNQGNSATNFAKLTKTNFSGYRKNWLPGPMMKQQRFSKTASQNYKIPQGRNNSLLHYETRTTLDGRWSNFAPGTAMATAANDATDFSQAQLIFAGPNITGNTTTDANNLMFTSEDELRATNPRDTDLFGHLATNQQNATTVPTVDDVDGVGVYPGMVWQDRDIYYQGPIWAKIPHTDGHFHPSPLIGGFGLKSPPPQIFIKNTPVPANPATTFSPARINSFITQYSTGQVAVKIEWEIQKERSKRWNPEVQFTSNYGAQDSLLWAPDNAGAYKEPRAIGSRYLTNHL

SEQ ID NO: 533 - protein, 736 aa, Bovine adeno-associated virus; identical to SEQ ID NO: 532

SEQ ID NO: 534 - protein, 600 aa, Bovine adeno-associated virus
TAPAAKKRPLEQSPQEPDSSSGVGKKGKQPARKRLNFDDEPGAGDGPPPEGPSSGAMSTETEMRAAAGGNGGDAGQGAEGVGNASGDWHCDSTWSESHVTTTSTRTWVLPTYNNHLYLRLGSSNASDTFNGFSTPWGYFDFNRFHCHFSPRDWQRLINNHWGLRPKSMQVRIFNIQVKEVTTSNGETTVSNNLTSTVQIFADSTYELPYVMDAGQEGSLPPFPNDVFMVPQYGYCGLVTGGSSQNQTDRNAFYCLEYFPSQMLRTGNNFEMVYKFENVPFHSMYAHSQSLDRLMNPLLDQYLWELQSTTSGGTLNQGNSATNFAKLTKTNFSGYRKNWLPGPMMKQQRFSKTASQNYKIPQGRNNSLLHYETRTTLDGRWSNFAPGTAMATAANDATDFSQAQLIFAGPNITGNTTTDANNLMFTSEDELRATNPRDTDLFGHLATNQQNATTVPTVDDVDGVGVYPGMVWQDRDIYYQGPIWAKIPHTDGHFHPSPLIGGFGLKSPPPQIFIKNTPVPANPATTFSPARINSFITQYSTGQVAVKIEWEIQKERSKRWNPEVQFTSNYGAQDSLLWAPDNAGAYKEPRAIGSRYLTNHL

SEQ ID NO: 535 - DNA, 2214 bp, synthetic construct
  misc_feature 1..2214: note = source = /note="Description of Artificial Sequence: Synthetic polynucleotide"
  source 1..2214: mol_type = other DNA
atggctgccgatggttatcttccagattggctcgaggacactctctctgaaggaataagacagtggtggaagctcaaacctggcccaccaccaccaaagcccgcagagcggcataaggacgacagcaggggtcttgtgcttcctgggtacaagtacctcggacccttcaacggactcgacaagggagagccggtcaacgaggcagacgccgcggccctcgagcacgacaaagcctacgaccggcagctcgacagcggagacaacccgtacctcaagtacaaccacgccgacgcggagtttcaggagcgccttaaagaagatacgtcttttgggggcaacctcgggcgagcagtcttccaggccaaaaagaggcttcttgaacctcttggtctggttgaggaagcggctaagacggctcctggaaagaagaggcctgtagagcagtctcctcaggaaccggactcctcctcgggcatcggcaagacaggccagcagcccgctaaaaagagactcaatttcggtcagactggcgacacagagtcagtcccagaccctcaaccaatcggagaacctcccgcagccccctcaggtgtgggatctcttacaatggcttcaggtggtggcgcaccagtggcagacaataacgaaggtgccgatggagtgggtagttcctcgggaaattggcattgcgattcccaatggctgggggacagagtcatcaccaccagcacccgaacctgggccctgcccacctacaacaatcacctctacaagcaaatctccaacgggacatcgggaggagccaccaacgacaacacctacttcggctacagcaccccctgggggtattttgactttaacagattccactgccacttttcaccacgtgactggcagcgactcatcaacaacaactggggattccggcccaagagactcagcttcaagctcttcaacatccaggtcaaggaggtcacgcagaatgaaggcaccaagaccatcgccaataaccttaccagcacggtccaggtcttcacggactcggagtaccagctgccgtacgttctcggctctgcccaccagggctgcctgcctccgttcccggcggacgtgttcatgattccccagtacggctacctaacactcaacaacggtagtcaggccgtgggacgctcctccttctactgcctggaatactttccttcgcagatgctgagaaccggcaacaacttccagtttacttacaccttcgaggacgtgcctttccacagcagctacgcccacagccagagcttggaccggctgatgaatcctctgattgaccagtacctgtactacttgtctcggactcaaacaacaggaggcacggcaaatacgcagactctgggcttcagccaaggtgggcctaatacaatggccaatcaggcaaagaactggctgccaggaccctgttaccgccaacaacgcgtctcaacgacaaccgggcaaaacaacaatagcaactttgcctggactgctgggaccaaataccatctgaatggaagaaattcattggctaatcctggcatcgctatggcaacacacaaagacgacaaggagcgtttttttcccagtaacgggatcctgatttttggcaaacaaaatgctgccagagacaatgcggattacagcgatgtcatgctcaccagcgaggaagaaatcaaaaccactaaccctgtggctacagaggaatacggtatcgtggcagataacttgcagcagcaaaacacggctcctcaaattggaactgtcaacagccagggggccttacccggtatggtttggcagaaccgggacgtgtacctgcagggtcccatctgggccaagattcctcacacggacggcaacttccacccgtctccgctgatgggcggctttggcctgaaacatcctccgcctcagatcctgatcaagaacacgcctgtacctgcggatcctccgaccaccttcaaccagtcaaagctgaactctttcatcacgcaatacagcaccggacaggtcagcgtggaaattgaatgggagctgcagaaggaaaacagcaagcgctggaaccccgagatccagtacacctccaactactacaaatctacaagtgtggactttgctgttaatacagaaggcgtgtactctgaaccccaccccattggcacccgttacctcacccgtcccctgtaa

SEQ ID NO: 536 - protein, 737 aa, synthetic construct
  REGION 1..737: note = source = /note="Description of Artificial Sequence: Synthetic polypeptide"
MAADGYLPDWLEDTLSEGIRQWWKLKPGPPPPKPAERHKDDSRGLVLPGYKYLGPFNGLDKGEPVNEADAAALEHDKAYDRQLDSGDNPYLKYNHADAEFQERLKEDTSFGGNLGRAVFQAKKRLLEPLGLVEEAAKTAPGKKRPVEQSPQEPDSSSGIGKTGQQPAKKRLNFGQTGDTESVPDPQPIGEPPAAPSGVGSLTMASGGGAPVADNNEGADGVGSSSGNWHCDSQWLGDRVITTSTRTWALPTYNNHLYKQISNGTSGGATNDNTYFGYSTPWGYFDFNRFHCHFSPRDWQRLINNNWGFRPKRLSFKLFNIQVKEVTQNEGTKTIANNLTSTVQVFTDSEYQLPYVLGSAHQGCLPPFPADVFMIPQYGYLTLNNGSQAVGRSSFYCLEYFPSQMLRTGNNFQFTYTFEDVPFHSSYAHSQSLDRLMNPLIDQYLYYLSRTQTTGGTANTQTLGFSQGGPNTMANQAKNWLPGPCYRQQRVSTTTGQNNNSNFAWTAGTKYHLNGRNSLANPGIAMATHKDDKERFFPSNGILIFGKQNAARDNADYSDVMLTSEEEIKTTNPVATEEYGIVADNLQQQNTAPQIGTVNSQGALPGMVWQNRDVYLQGPIWAKIPHTDGNFHPSPLMGGFGLKHPPPQILIKNTPVPADPPTTFNQSKLNSFITQYSTGQVSVEIEWELQKENSKRWNPEIQYTSNYYKSTSVDFAVNTEGVYSEPHPIGTRYLTRPL

SEQ ID NO: 537 - protein, 736 aa, synthetic construct
  REGION 1..736: note = source = /note="Description of Artificial Sequence: Synthetic polypeptide"
MAADGYLPDWLEDNLSEGIREWWDLKPGAPKPKANQQKQDDGRGLVLPGYKYLGPFNGLDKGEPVNAADAAALEHDKAYDQQLKAGDNPYLRYNHADAEFQERLQEDTSFGGNLGRAVFQAKKRVLEPLGLVEEGAKTAPGKKRPVEQSPQEPDSSSGIGKTGQQPAKKRLNFGQTGDTESVPDPQPIGEPPAAPSGVGSLTMASGGGAPVADNNEGADGVGSSSGNWHCDSQWLGDRVITTSTRTWALPTYNNHLYKQISSASTGASNDNHYFGYSTPWGYFDFNRFHCHFSPRDWQRLINNNWGFRPKRLNFKLFNIQVKEVTDNNGVKTIANNLTSTVQVFTDSDYQLPYVLGSAHQGCLPPFPADVFMIPQYGYLTLNNGSQAVGRSSFYCLEYFPSQMLRTGNNFQFTYTFEDVPFHSSYAHSQSLDRLMNPLIDQYLYYLSRTQTTGGTANTQTLGFSQGGPNTMANQAKNWLPGPCYRQQRVSTTTGQNNNSNFAWTAGTKYHLNGRNSLANPGIAMATHKDDKERFFPSNGILIFGKQNAARDNADYSDVMLTSEEEIKTTNPVATEEYGIVADNLQQQNTAPQIGTVNSQGALPGMVWQNRDVYLQGPIWAKIPHTDGNFHPSPLMGGFGLKHPPPQILIKNTPVPADPPTTFNQSKLNSFITQYSTGQVSVEIEWELQKENSKRWNPEIQYTSNYYKSTSVDFAVNTEGVYSEPHPIGTRYLTRPL

SEQ ID NO: 538 - protein, 736 aa, synthetic construct
  REGION 1..736: note = source = /note="Description of Artificial Sequence: Synthetic polypeptide"
MAADGYLPDWLEDTLSEGIRQWWKLKPGPPPPKPAERHKDDSRGLVLPGYKYLGPFNGLDKGEPVNEADAAALEHDKAYDRQLDSGDNPYLKYNHADAEFQERLQGDTSFGGNLGRAVFQAKKRVLEPLGLVEEGAKTAPGKKRPVEQSPQEPDSSSGIGETGQQPAKKRLNFGQTGDSESVPDPQPLGEPPATPAAVGPTTMASGGGAPMADNNEGADGVGSSSGNWHCDSQWLGDRVITTSTRTWALPTYNNHLYKQISSASTGASNDNHYFGYSTPWGYFDFNRFHCHFSPRDWQRLINNNWGFRPKRLSFKLFNIQVKEVTDNNGVKTIANNLTSTVQVFTDSEYQLPYVLGSAHQGCLPPFPADVFMIPQYGYLTLNNGSQAVGRSSFYCLEYFPSQMLRTGNNFTFSYTFEDVPFHSSYAHSQSLDRLMNPLIDQYLYYLSRTQTTGGTANTQTLGFSQGGPNTMANQAKNWLPGPCYRQQRVSTTTGQNNNSNFAWTAGTKYHLNGRNSLANPGIAMATHKDDKERFFPSNGILIFGKQNAARDNADYSDVMLTSEEEIKTTNPVATEEYGIVADNLQQQNTAPQIGTVNSQGALPGMVWQNRDVYLQGPIWAKIPHTDGNFHPSPLMGGFGLKHPPPQILIKNTPVPADPPTTFNQSKLNSFITQYSTGQVSVEIEWELQKENSKRWNPEIQYTSNYYKSTSVDFAVNTEGVYSEPHPIGTRYLTRPL

SEQ ID NO: 539 - DNA, 2181 bp, synthetic construct
  misc_feature 1..2181: note = source = /note="Description of Artificial Sequence: Synthetic polynucleotide"
  source 1..2181: mol_type = other DNA
atgtcttttgttgatcaccctccagattggttggaagaagttggtgaaggtcttcgcgagtttttgggccttgaagcgggcccaccgaaaccaaaacccaatcagcagcatcaagatcaagcccgtggtcttgtgctgcctggttataactatctcggacccggaaacggtctcgatcgaggagagcctgtcaacagggcagacgaggtcgcgcgagagcacgacatctcgtacaacgagcagcttgaggcgggagacaacccctacctcaagtacaaccacgcggacgccgagtttcaggagaagctcgccgacgacacatccttcgggggaaacctcggaaaggcagtctttcaggccaagaaaagggttctcgaaccttttggcctggttgaagagggtgctaagacggcccctaccggaaagcggatagacgaccactttccaaaaagaaagaaggctcggaccgaagaggactccaagccttccacctcgtcagacgccgaagctggacccagcggatcccagcagctgcaaatcccagcacaaccagcctcaagtttgggagctgatacaatgtctgcgggaggtggcggcccattgggcgacaataaccaaggtgccgatggagtgggcaatgcctcgggagattggcattgcgattccacgtggatgggggacagagtcgtcaccaagtccacccgcacctgggtgctgcccagctacaacaaccaccagtaccgagagatcaaaagcggctccgtcgacggaagcaacgccaacgcctactttggatacagcaccccctgggggtactttgactttaaccgcttccacagccactggagcccccgagactggcaaagactcatcaacaactattggggcttcagaccccggtctctcagagtcaaaatcttcaacatccaagtcaaagaggtcacggtgcaggactccaccaccaccatcgccaacaacctcacctccaccgtccaagtgtttacggacgacgactaccaactcccgtacgtcgtcggcaacgggaccgagggatgcctgccggccttccccccgcaggtctttacgctgccgcagtacggctacgcgacgctgaaccgagacaacggagacaacccgacagagcggagcagcttcttttgcctagagtactttcccagcaagatgctgaggacgggcaacaactttgagtttacctacagctttgaagaggtgcccttccactgcagcttcgccccgagccagaacctctttaagctggccaacccgctggtggaccagtacctgtaccgcttcgtgagcacctcggccacgggcgccatccagttccaaaagaacctggcgggcagatacgccaacacctacaaaaactggttcccggggcccatgggccgaacccagggctggaacacgagctctggggtcagcagcaccaacagagtcagcgtcaacaacttttccgtctcaaaccggatgaacctggagggggccagctaccaagtgaacccccagcccaacgggatgacaaacacgctccaaggcagcaaccgctacgcgctggaaaacaccatgatcttcaacgctcaaaacgccacgccgggaactacctcggtgtacccagaggacaatctactgctgaccagcgagagcgagactcagcccgtcaaccgggtggcttacaacacgggcggtcagatggccaccaacgcccagaacgccaccacggctcccacggtcgggacctacaacctccaggaagtgcttcctggcagcgtatggatggagagggacgtgtacctccaaggacccatctgggccaagatcccagagacgggggcgcactttcacccctctccggccatgggcggattcggactcaaacacccgccgcccatgatgctcatcaaaaacacgccggtgcccggcaacatcaccagcttctcggacgtgcccgtcagcagcttcatcacccagtacagcaccgggcaggtcaccgtggagatggaatgggagctcaaaaaggaaaactccaagaggtggaacccagagatccagtacaccaacaactacaacgacccccagtttgtggactttgctccagacggctccggcgaatacagaaccaccagagccatcggaacccgatacctcacccgacccctt

SEQ ID NO: 540 - protein, 726 aa, synthetic construct
  REGION 1..726: note = source = /note="Description of Artificial Sequence: Synthetic polypeptide"
MSFVDHPPDWLEEVGEGLREFLGLEAGPPKPKPNQQHQDQARGLVLPGYNYLGPGNGLDRGEPVNRADEVAREHDISYNEQLEAGDNPYLKYNHADAEFQEKLADDTSFGGNLGKAVFQAKKRVLEPFGLVEEGAKTAPTGKRIDDHFPKRKKARTEEDSKPSTSSDAEAGPSGSQQLQIPAQPASSLGADTMSAGGGGPLGDNNQGADGVGNASGDWHCDSTWMGDRVVTKSTRTWVLPSYNNHQYREIKSGSVDGSNANAYFGYSTPWGYFDFNRFHSHWSPRDWQRLINNYWGFRPRSLRVKIFNIQVKEVTVQDSTTTIANNLTSTVQVFTDDDYQLPYVVGNGTEGCLPAFPPQVFTLPQYGYATLNRDNGDNPTERSSFFCLEYFPSKMLRTGNNFEFTYSFEEVPFHCSFAPSQNLFKLANPLVDQYLYRFVSTSATGAIQFQKNLAGRYANTYKNWFPGPMGRTQGWNTSSGSSTNRVSVNNFSVSNRMNLEGASYQVNPQPNGMTNTLQGSNRYALENTMIFNAQNATPGTTSVYPEDNLLLTSESETQPVNRVAYNTGGQMATNAQNATTAPTVGTYNLQEVLPGSVWMERDVYLQGPIWAKIPETGAHFHPSPAMGGFGLKHPPPMMLIKNTPVPGNITSFSDVPVSSFITQYSTGQVTVEMEWELKKENSKRWNPEIQYTNNYNDPQFVDFAPDGSGEYRTTRAIGTRYLTRPL

SEQ ID NO: 541 - protein, 735 aa, synthetic construct
  REGION 1..735: note = source = /note="Description of Artificial Sequence: Synthetic polypeptide"
MAADGYLPDWLEDTLSEGIRQWWKLKPGPPPPKPAERHKDDSRGLVLPGYKYLGPFNGLDKGEPVNEADAAALEHDKAYDRQLDSGDNPYLKYNHADAEFQERLKEDTSFGGNLGRAVFQAKKRILEPLGLVEEPVKTAPGKKRPVEHSPAEPDSSSGTGKSGQQPARKRLNFGQTGDADSVPDPQPLGQPPAAPSGLGTNTMASGSGAPMADNNEGADGVGNSSGNWHCDSTWMGDRVITTSTRTWALPTYNNHLYKQISSQSGASNDNHYFGYSTPWGYFDFNRFHCHFSPRDWQRLINNNWGFRPKRLSFKLFNIQVKEVTQNDGTTTIANNLTSTVQVFTDSEYQLPYVLGSAHQGCLPPFPADVFMVPQYGYLTLNNGSQAVGRSSFYCLEYFPSQMLRTGNNFTFSYTFEDVPFHSSYAHSQSLDRLMNPLIDQYLYYLSRTNTPSGTTTMSRLQFSQAGASDIRDQSRNWLPGPCYRQQRVSKTAADNNNSDYSWTGATKYHLNGRDSLVNPGPAMASHKDDEEKYFPQSGVLIFGKQDSGKTNVDIEKVMITDEEEIRTTNPVATEQYGSVSTNLQSGNTQAATSDVNTQGVLPGMVWQDRDVYLQGPIWAKIPHTDGHFHPSPLMGGFGLKHPPPQILIKNTPVPANPSTTFSAAKFASFITQYSTGQVSVEIEWELQKENSKRWNPEIQYTSNYNKSVNVDFTVDTNGVYSEPRPIGTRYLTRNL

SEQ ID NO: 542 - DNA, 1797 bp, synthetic construct
  misc_feature 1..1797: note = source = /note="Description of Artificial Sequence: Synthetic polynucleotide"
  source 1..1797: mol_type = other DNA
acggctccgaccggagacaagcggaaaggcgaagacgaacctcgtttgcccgacacttcttcacagactcccaagaaaaacaagaagcctcgcaaggaaagaccttccggcggggcagaagatccgggcgaaggcacctcttccaacgctggagcagcagcacccgcctctagtgtgggatcatctatcatggctgaaggaggtggcggcccagtgggcgatgcaggccagggtgccgatggagtgggcaattcctccggaaattggcattgcgattcccaatggctggaaaacggagtcgtcactcgaaccacccgaacctgggtcttgcccagctacaacaaccacctgtacaaacgaatccaaggacccagcggaggcgacaacaacaacaaattctttggattcagcaccccctggggatactttgactacaatcgattccactgccacttttccccgcgagactggcaacgactcatcaacaacaactggggcatccgtcccaaagcgatgcgctttagactctttaacatccaggttaaagaggtcacggtccaagacttcaacaccaccatcggcaacaacctcaccagtacggtccaggtctttgcggacaaggactaccaactgccgtacgtcctcggatcggctaccgaaggcaccttcccgccgttcccagcggatatctacacgatcccgcagtacgggtactgcacgctaaactacaacaacgaggcggtggatcgttcggccttctactgtctggactactttccctcagacatgctgcggacaggaaataactttgagtttacttacaccttcgaggacgttcctttccatagcatgtttgcccacaaccagacgctagaccggctgatgaatcccctcgtggatcagtacctctgggctttcagctccgtcagccaagcaggctcatctggacgagctcttcattactcgcgggcgactaaaaccaacatggcggctcaatataggaactggttacctgggcctttcttccgtgatcagcaaatctttacgggcgctagcaacatcactaaaaataacgtctttagcgtttgggaaaaaggcaagcaatgggaactcgacaatcggaccaacctaatgcagcccggtcctgcggcagcgaccacctttagcggagaacctgaccgtcaagccatgcaaaacacgctggcttttagcaggaccgtctacgatcaaacgaccgccacgaccgatcgtaaccagatactcatcaccaacgaagacgaaatcagacccaccaactcggtcggtatcgacgcgtggggagcagttcccaccaacaaccagtcgatcgtgacccccggcactcgcgcggccgtcaacaatcaaggggcgcttcccgggatggtgtggcaaaacagagacatttaccctacagggacccatttggccaaaattcccgacactgacaatcacttccatccgtccccgcttattgggcggtttggctgcaagcatccccctccccagattttcattaaaaacacacccgtccctgccaacccttcggaaacgttccagacggccaaagtggcctccttcatcaaccagtactcgaccggacagtgcaccgtcgaaatcttttgggaactcaagaaggaaacctccaagcgctggaaccccgaaatccagttcacctccaactttggcaacgcggccgacatccagtttgccgtctccgacacgggatcctattccgaacctcgtcccatcggtacccgttaccttaccaaacctctgtaa

SEQ ID NO: 543 - DNA, 1989 bp, synthetic construct
  misc_feature 1..1989: note = source = /note="Description of Artificial Sequence: Synthetic polynucleotide"
  source 1..1989: mol_type = other DNA
atgaggtcgtactacgaggtcatcgttcagctgcccaacgacgtcgagagtcaggtacctggaatctccgattcgttcgtcaactggattacgtcgcgagaatggacgttgcctgaggacgccgattgggatttggaccaggtcgatcaagttcaactgacgctcggcgacaaaatccaacgggagattcgaactcattgggggacgatggccaaagaaccggactttcactattttatccaactggaacaaggtgaggtgttctttcatttacacgtcctgctggaaacgtgttccgtaaagccgatggtactcggaagatatatccgacatattcaacaaaaaattgtgagtaaagtctactgcgccacgagcctacgatggaaggatggatgcgtggtgaccaagaccaaaaatttcgggggcgcgaacaaggtccgggccgagtcgtatattcccgcctacctgatcccgaaacagcaaccggaagtgcagtgggcgtggactaacgtgcccgagtatataaaagcgtgcttgcaccgagaactgcgtgccagtctcgcgcgacttcacttcgaggaggcgggcgtctcgcaatccaaggaaaatctcgcgagaactgcagacggcgctcccgtgatgccgacccgcgtcagcaaacgctacatggagctcgtggattggctcgtggagaaggggatcaccaccgagaaggaatggctgctggaaaacagagaaagctttcggagctttcaggcctcgagcaactcggcgcgtcagatcaagacggccctgcaaggcgccattcaggagatgcttctgaccaagacggcggaggactacctcgtcggaaaggatcccgtctcggacgacgacatccgtcagaaccgcatctacaagattctggaactgaaccactacgacccagcgtacgtggggagtattttggtcgggtggtgccagaagaaatggggcaagcgaaacacgctgtggctgttcggacatgcgaccaccggcaagaccaacatcgcggaggctattgcccatgctgtgccgttctatggatgcgttaactggaccaacgagaactttccgttcaacgactgcgtcgaaaaaatgattatctggtgggaggagggcaaaatgaccgccaaagtggtggaaacagccaaggcgattctgggaggatctcgggtgagagtggaccaaaaatgcaaagcttcggttccgatcgaaccgacgccggtcattattaccagtaacaccaacatgtgttatgtcatcgacgggaacacgaccacgttcgagcataagcagccgttggaggacaggatgtttaagctcgaattgctgactcggttgcctgatgactttggtaaggtgaccaaacaggaggtgcgtcaattcttcaggtggtctcaggatcacctgacccctgtgatcccagaattcctagtgcggaaggcggagtctcgcaaaagacccgccccttccggggaaggctatataagcccgacaaagcggcccgcgctcgcagagcagcagcaggcgtcggagagcgcggacccggttcccaccaggtatcgtatcaaatgctcgaaacattgcggtatggataaaatgttgtttccttgccaaatttgtgaatcgatgaacagagatattaatatttgtgctattcataaaacgaccgactgtaaagagtgtttccccgactacggggataaagatgatgtagaactacccccctgtacagaacacaacgtgtctcgttgttatcaatgtcattcgggcgaattgtatcgcgtgacttcggactctgacgagaaacctgcccccgagagtgatgaaggcaccgagccatcctatgctccctgcacgattcaccacctgatgggcaagagtcacgggttagtcacttgcgcggcgtgtcggttgaaaaatagtacgttgcatgatgacttggatgacggtgatctcgaacaataa

SEQ ID NO: 544 - DNA, 1626 bp, synthetic construct
  misc_feature 1..1626: note = source = /note="Description of Artificial Sequence: Synthetic polynucleotide"
  source 1..1626: mol_type = other DNA
atgaggtcgtactacgaggtcatcgttcagctgcccaacgacgtcgagagtcaggtacctggaatctccgattcgttcgtcaactggattacgtcgcgagaatggacgttgcctgaggacgccgattgggatttggaccaggtcgatcaagttcaactgacgctcggcgacaaaatccaacgggagattcgaactcattgggggacgatggccaaagaaccggactttcactattttatccaactggaacaaggtgaggtgttctttcatttacacgtcctgctggaaacgtgttccgtaaagccgatggtactcggaagatatatccgacatattcaacaaaaaattgtgagtaaagtctactgcgccacgagcctacgatggaaggatggatgcgtggtgaccaagaccaaaaatttcgggggcgcgaacaaggtccgggccgagtcgtatattcccgcctacctgatcccgaaacagcaaccggaagtgcagtgggcgtggactaacgtgcccgagtatataaaagcgtgcttgcaccgagaactgcgtgccagtctcgcgcgacttcacttcgaggaggcgggcgtctcgcaatccaaggaaaatctcgcgagaactgcagacggcgctcccgtgatgccgacccgcgtcagcaaacgctacatggagctcgtggattggctcgtggagaaggggatcaccaccgagaaggaatggctgctggaaaacagagaaagctttcggagctttcaggcctcgagcaactcggcgcgtcagatcaagacggccctgcaaggcgccattcaggagatgcttctgaccaagacggcggaggactacctcgtcggaaaggatcccgtctcggacgacgacatccgtcagaaccgcatctacaagattctggaactgaaccactacgacccagcgtacgtggggagtattttggtcgggtggtgccagaagaaatggggcaagcgaaacacgctgtggctgttcggacatgcgaccaccggcaagaccaacatcgcggaggctattgcccatgctgtgccgttctatggatgcgttaactggaccaacgagaactttccgttcaacgactgcgtcgaaaaaatgattatctggtgggaggagggcaaaatgaccgccaaagtggtggaaacagccaaggcgattctgggaggatctcgggtgagagtggaccaaaaatgcaaagcttcggttccgatcgaaccgacgccggtcattattaccagtaacaccaacatgtgttatgtcatcgacgggaacacgaccacgttcgagcataagcagccgttggaggacaggatgtttaagctcgaattgctgactcggttgcctgatgactttggtaaggtgaccaaacaggaggtgcgtcaattcttcaggtggtctcaggatcacctgacccctgtgatcccagaattcctagtgcggaaggcggagtctcgcaaaagacccgccccttccggggaaggctatataagcccgacaaagcggcccgcgctcgcagagcagcagcaggcgtcggagagcgcggacccggttcccaccagattggttggagcggttggtcaaaaagggagtgaatgctgcagctga

SEQ ID NO: 545 - DNA, 1323 bp, synthetic construct
  misc_feature 1..1323: note = source = /note="Description of Artificial Sequence: Synthetic polynucleotide"
  source 1..1323: mol_type = other DNA
atggagctcgtggattggctcgtggagaaggggatcaccaccgagaaggaatggctgctggaaaacagagaaagctttcggagctttcaggcctcgagcaactcggcgcgtcagatcaagacggccctgcaaggcgccattcaggagatgcttctgaccaagacggcggaggactacctcgtcggaaaggatcccgtctcggacgacgacatccgtcagaaccgcatctacaagattctggaactgaaccactacgacccagcgtacgtggggagtattttggtcgggtggtgccagaagaaatggggcaagcgaaacacgctgtggctgttcggacatgcgaccaccggcaagaccaacatcgcggaggctattgcccatgctgtgccgttctatggatgcgttaactggaccaacgagaactttccgttcaacgactgcgtcgaaaaaatgattatctggtgggaggagggcaaaatgaccgccaaagtggtggaaacagccaaggcgattctgggaggatctcgggtgagagtggaccaaaaatgcaaagcttcggttccgatcgaaccgacgccggtcattattaccagtaacaccaacatgtgttatgtcatcgacgggaacacgaccacgttcgagcataagcagccgttggaggacaggatgtttaagctcgaattgctgactcggttgcctgatgactttggtaaggtgaccaaacaggaggtgcgtcaattcttcaggtggtctcaggatcacctgacccctgtgatcccagaattcctagtgcggaaggcggagtctcgcaaaagacccgccccttccggggaaggctatataagcccgacaaagcggcccgcgctcgcagagcagcagcaggcgtcggagagcgcggacccggttcccaccaggtatcgtatcaaatgctcgaaacattgcggtatggataaaatgttgtttccttgccaaatttgtgaatcgatgaacagagatattaatatttgtgctattcataaaacgaccgactgtaaagagtgtttccccgactacggggataaagatgatgtagaactacccccctgtacagaacacaacgtgtctcgttgttatcaatgtcattcgggcgaattgtatcgcgtgacttcggactctgacgagaaacctgcccccgagagtgatgaaggcaccgagccatcctatgctccctgcacgattcaccacctgatgggcaagagtcacgggttagtcacttgcgcggcgtgtcggttgaaaaatagtacgttgcatgatgacttggatgacggtgatctcgaacaataa

SEQ ID NO: 546 - DNA, 960 bp, synthetic construct
  misc_feature 1..960: note = source = /note="Description of Artificial Sequence: Synthetic polynucleotide"
  source 1..960: mol_type = other DNA
atggagctcgtggattggctcgtggagaaggggatcaccaccgagaaggaatggctgctggaaaacagagaaagctttcggagctttcaggcctcgagcaactcggcgcgtcagatcaagacggccctgcaaggcgccattcaggagatgcttctgaccaagacggcggaggactacctcgtcggaaaggatcccgtctcggacgacgacatccgtcagaaccgcatctacaagattctggaactgaaccactacgacccagcgtacgtggggagtattttggtcgggtggtgccagaagaaatggggcaagcgaaacacgctgtggctgttcggacatgcgaccaccggcaagaccaacatcgcggaggctattgcccatgctgtgccgttctatggatgcgttaactggaccaacgagaactttccgttcaacgactgcgtcgaaaaaatgattatctggtgggaggagggcaaaatgaccgccaaagtggtggaaacagccaaggcgattctgggaggatctcgggtgagagtggaccaaaaatgcaaagcttcggttccgatcgaaccgacgccggtcattattaccagtaacaccaacatgtgttatgtcatcgacgggaacacgaccacgttcgagcataagcagccgttggaggacaggatgtttaagctcgaattgctgactcggttgcctgatgactttggtaaggtgaccaaacaggaggtgcgtcaattcttcaggtggtctcaggatcacctgacccctgtgatcccagaattcctagtgcggaaggcggagtctcgcaaaagacccgccccttccggggaaggctatataagcccgacaaagcggcccgcgctcgcagagcagcagcaggcgtcggagagcgcggacccggttcccaccagattggttggagcggttggtcaaaaagggagtgaatgctgcagctga

SEQ ID NO: 547 - DNA, 1608 bp, synthetic construct
  misc_feature 1..1608: note = source = /note="Description of Artificial Sequence: Synthetic polynucleotide"
  source 1..1608: mol_type = other DNA
atggctgaaggaggtggcggcccagtgggcgatgcaggccagggtgccgatggagtgggcaattcctccggaaattggcattgcgattcccaatggctggaaaacggagtcgtcactcgaaccacccgaacctgggtcttgcccagctacaacaaccacctgtacaaacgaatccaaggacccagcggaggcgacaacaacaacaaattctttggattcagcaccccctggggatactttgactacaatcgattccactgccacttttccccgcgagactggcaacgactcatcaacaacaactggggcatccgtcccaaagcgatgcgctttagactctttaacatccaggttaaagaggtcacggtccaagacttcaacaccaccatcggcaacaacctcaccagtacggtccaggtctttgcggacaaggactaccaactgccgtacgtcctcggatcggctaccgaaggcaccttcccgccgttcccagcggatatctacacgatcccgcagtacgggtactgcacgctaaactacaacaacgaggcggtggatcgttcggccttctactgtctggactactttccctcagacatgctgcggacaggaaataactttgagtttacttacaccttcgaggacgttcctttccatagcatgtttgcccacaaccagacgctagaccggctgatgaatcccctcgtggatcagtacctctgggctttcagctccgtcagccaagcaggctcatctggacgagctcttcattactcgcgggcgactaaaaccaacatggcggctcaatataggaactggttacctgggcctttcttccgtgatcagcaaatctttacgggcgctagcaacatcactaaaaataacgtctttagcgtttgggaaaaaggcaagcaatgggaactcgacaatcggaccaacctaatgcagcccggtcctgcggcagcgaccacctttagcggagaacctgaccgtcaagccatgcaaaacacgctggcttttagcaggaccgtctacgatcaaacgaccgccacgaccgatcgtaaccagatactcatcaccaacgaagacgaaatcagacccaccaactcggtcggtatcgacgcgtggggagcagttcccaccaacaaccagtcgatcgtgacccccggcactcgcgcggccgtcaacaatcaaggggcgcttcccgggatggtgtggcaaaacagagacatttaccctacagggacccatttggccaaaattcccgacactgacaatcacttccatccgtccccgcttattgggcggtttggctgcaagcatccccctccccagattttcattaaaaacacacccgtccctgccaacccttcggaaacgttccagacggccaaagtggcctccttcatcaaccagtactcgaccggacagtgcaccgtcgaaatcttttgggaactcaagaaggaaacctccaagcgctggaaccccgaaatccagttcacctccaactttggcaacgcggccgacatccagtttgccgtctccgacacgggatcctattccgaacctcgtcccatcggtacccgttaccttaccaaacctctgtaa

SEQ ID NO: 548 - DNA, 2232 bp, synthetic construct
  misc_feature 1..2232: note = source = /note="Description of Artificial Sequence: Synthetic polynucleotide"
  source 1..2232: mol_type = other DNA
atgtctctcatttctgatgcgattccagattggttggagcggttggtcaaaaagggagtgaatgctgcagctgatttctaccatttggaaagcggtcctcctcgtcctaaggcaaatcagcaaactcaagaatctcttgaaaaggacgattcgagaggtctcgtgttcccaggctacaattatctaggccctttcaacggtctagataaaggagaacccgtcaacgaggcagacgctgccgccttagaacacgacaaggcttacgacctcgaaatcaaggacgggcacaacccgtactttgagtacaacgaggccgacagacgtttccaggaacgtctcaaagacgatacctcctttggaggcaatttaggtaaagccatcttccaggccaaaaagagggttctcgaaccctttggtctggtggaagactcaaagacggctccgaccggagacaagcggaaaggcgaagacgaacctcgtttgcccgacacttcttcacagactcccaagaaaaacaagaagcctcgcaaggaaagaccttccggcggggcagaagatccgggcgaaggcacctcttccaacgctggagcagcagcacccgcctctagtgtgggatcatctatcatggctgaaggaggtggcggcccagtgggcgatgcaggccagggtgccgatggagtgggcaattcctccggaaattggcattgcgattcccaatggctggaaaacggagtcgtcactcgaaccacccgaacctgggtcttgcccagctacaacaaccacctgtacaaacgaatccaaggacccagcggaggcgacaacaacaacaaattctttggattcagcaccccctggggatactttgactacaatcgattccactgccacttttccccgcgagactggcaacgactcatcaacaacaactggggcatccgtcccaaagcgatgcgctttagactctttaacatccaggttaaagaggtcacggtccaagacttcaacaccaccatcggcaacaacctcaccagtacggtccaggtctttgcggacaaggactaccaactgccgtacgtcctcggatcggctaccgaaggcaccttcccgccgttcccagcggatatctacacgatcccgcagtacgggtactgcacgctaaactacaacaacgaggcggtggatcgttcggccttctactgtctggactactttccctcagacatgctgcggacaggaaataactttgagtttacttacaccttcgaggacgttcctttccatagcatgtttgcccacaaccagacgctagaccggctgatgaatcccctcgtggatcagtacctctgggctttcagctccgtcagccaagcaggctcatctggacgagctcttcattactcgcgggcgactaaaaccaacatggcggctcaatataggaactggttacctgggcctttcttccgtgatcagcaaatctttacgggcgctagcaacatcactaaaaataacgtctttagcgtttgggaaaaaggcaagcaatgggaactcgacaatcggaccaacctaatgcagcccggtcctgcggcagcgaccacctttagcggagaacctgaccgtcaagccatgcaaaacacgctggcttttagcaggaccgtctacgatcaaacgaccgccacgaccgatcgtaaccagatactcatcaccaacgaagacgaaatcagacccaccaactcggtcggtatcgacgcgtggggagcagttcccaccaacaaccagtcgatcgtgacccccggcactcgcgcggccgtcaacaatcaaggggcgcttcccgggatggtgtggcaaaacagagacatttaccctacagggacccatttggccaaaattcccgacactgacaatcacttccatccgtccccgcttattgggcggtttggctgcaagcatccccctccccagattttcattaaaaacacacccgtccctgccaacccttcggaaacgttccagacggccaaagtggcctccttcatcaaccagtactcgaccggacagtgcaccgtcgaaatcttttgggaactcaagaaggaaacctccaagcgctggaaccccgaaatccagttcacctccaactttggcaacgcggccgacatccagtttgccgtctccgacacgggatcctattccgaacctcgtcccatcggtacccgttaccttaccaaacctctgtaa

SEQ ID NO: 549 - protein, 535 aa, synthetic construct
  REGION 1..535: note = source = /note="Description of Artificial Sequence: Synthetic polypeptide"
MAEGGGGPVGDAGQGADGVGNSSGNWHCDSQWLENGVVTRTTRTWVLPSYNNHLYKRIQGPSGGDNNNKFFGFSTPWGYFDYNRFHCHFSPRDWQRLINNNWGIRPKAMRFRLFNIQVKEVTVQDFNTTIGNNLTSTVQVFADKDYQLPYVLGSATEGTFPPFPADIYTIPQYGYCTLNYNNEAVDRSAFYCLDYFPSDMLRTGNNFEFTYTFEDVPFHSMFAHNQTLDRLMNPLVDQYLWAFSSVSQAGSSGRALHYSRATKTNMAAQYRNWLPGPFFRDQQIFTGASNITKNNVFSVWEKGKQWELDNRTNLMQPGPAAATTFSGEPDRQAMQNTLAFSRTVYDQTTATTDRNQILITNEDEIRPTNSVGIDAWGAVPTNNQSIVTPGTRAAVNNQGALPGMVWQNRDIYPTGTHLAKIPDTDNHFHPSPLIGRFGCKHPPPQIFIKNTPVPANPSETFQTAKVASFINQYSTGQCTVEIFWELKKETSKRWNPEIQFTSNFGNAADIQFAVSDTGSYSEPRPIGTRYLTKPL

SEQ ID NO: 550 - protein, 440 aa, synthetic construct
  REGION 1..440: note = source = /note="Description of Artificial Sequence: Synthetic polypeptide"
MELVDWLVEKGITTEKEWLLENRESFRSFQASSNSARQIKTALQGAIQEMLLTKTAEDYLVGKDPVSDDDIRQNRIYKILELNHYDPAYVGSILVGWCQKKWGKRNTLWLFGHATTGKTNIAEAIAHAVPFYGCVNWTNENFPFNDCVEKMIIWWEEGKMTAKVVETAKAILGGSRVRVDQKCKASVPIEPTPVIITSNTNMCYVIDGNTTTFEHKQPLEDRMFKLELLTRLPDDFGKVTKQEVRQFFRWSQDHLTPVIPEFLVRKAESRKRPAPSGEGYISPTKRPALAEQQQASESADPVPTRYRIKCSKHCGMDKMLFPCQICESMNRDINICAIHKTTDCKECFPDYGDKDDVELPPCTEHNVSRCYQCHSGELYRVTSDSDEKPAPESDEGTEPSYAPCTIHHLMGKSHGLVTCAACRLKNSTLHDDLDDGDLEQ

SEQ ID NO: 551 - protein, 319 aa, synthetic construct
  REGION 1..319: note = source = /note="Description of Artificial Sequence: Synthetic polypeptide"
MELVDWLVEKGITTEKEWLLENRESFRSFQASSNSARQIKTALQGAIQEMLLTKTAEDYLVGKDPVSDDDIRQNRIYKILELNHYDPAYVGSILVGWCQKKWGKRNTLWLFGHATTGKTNIAEAIAHAVPFYGCVNWTNENFPFNDCVEKMIIWWEEGKMTAKVVETAKAILGGSRVRVDQKCKASVPIEPTPVIITSNTNMCYVIDGNTTTFEHKQPLEDRMFKLELLTRLPDDFGKVTKQEVRQFFRWSQDHLTPVIPEFLVRKAESRKRPAPSGEGYISPTKRPALAEQQQASESADPVPTRLVGAVGQKGSECCS

SEQ ID NO: 552 - protein, 662 aa, synthetic construct
  REGION 1..662: note = source = /note="Description of Artificial Sequence: Synthetic polypeptide"
MRSYYEVIVQLPNDVESQVPGISDSFVNWITSREWTLPEDADWDLDQVDQVQLTLGDKIQREIRTHWGTMAKEPDFHYFIQLEQGEVFFHLHVLLETCSVKPMVLGRYIRHIQQKIVSKVYCATSLRWKDGCVVTKTKNFGGANKVRAESYIPAYLIPKQQPEVQWAWTNVPEYIKACLHRELRASLARLHFEEAGVSQSKENLARTADGAPVMPTRVSKRYMELVDWLVEKGITTEKEWLLENRESFRSFQASSNSARQIKTALQGAIQEMLLTKTAEDYLVGKDPVSDDDIRQNRIYKILELNHYDPAYVGSILVGWCQKKWGKRNTLWLFGHATTGKTNIAEAIAHAVPFYGCVNWTNENFPFNDCVEKMIIWWEEGKMTAKVVETAKAILGGSRVRVDQKCKASVPIEPTPVIITSNTNMCYVIDGNTTTFEHKQPLEDRMFKLELLTRLPDDFGKVTKQEVRQFFRWSQDHLTPVIPEFLVRKAESRKRPAPSGEGYISPTKRPALAEQQQASESADPVPTRYRIKCSKHCGMDKMLFPCQICESMNRDINICAIHKTTDCKECFPDYGDKDDVELPPCTEHNVSRCYQCHSGELYRVTSDSDEKPAPESDEGTEPSYAPCTIHHLMGKSHGLVTCAACRLKNSTLHDDLDDGDLEQ

SEQ ID NO: 553 - protein, 541 aa, synthetic construct
  REGION 1..541: note = source = /note="Description of Artificial Sequence: Synthetic polypeptide"
MRSYYEVIVQLPNDVESQVPGISDSFVNWITSREWTLPEDADWDLDQVDQVQLTLGDKIQREIRTHWGTMAKEPDFHYFIQLEQGEVFFHLHVLLETCSVKPMVLGRYIRHIQQKIVSKVYCATSLRWKDGCVVTKTKNFGGANKVRAESYIPAYLIPKQQPEVQWAWTNVPEYIKACLHRELRASLARLHFEEAGVSQSKENLARTADGAPVMPTRVSKRYMELVDWLVEKGITTEKEWLLENRESFRSFQASSNSARQIKTALQGAIQEMLLTKTAEDYLVGKDPVSDDDIRQNRIYKILELNHYDPAYVGSILVGWCQKKWGKRNTLWLFGHATTGKTNIAEAIAHAVPFYGCVNWTNENFPFNDCVEKMIIWWEEGKMTAKVVETAKAILGGSRVRVDQKCKASVPIEPTPVIITSNTNMCYVIDGNTTTFEHKQPLEDRMFKLELLTRLPDDFGKVTKQEVRQFFRWSQDHLTPVIPEFLVRKAESRKRPAPSGEGYISPTKRPALAEQQQASESADPVPTRLVGAVGQKGSECCS

SEQ ID NO: 554 - protein, 743 aa, synthetic construct
  REGION 1..743: note = source = /note="Description of Artificial Sequence: Synthetic polypeptide"
MSLISDAIPDWLERLVKKGVNAAADFYHLESGPPRPKANQQTQESLEKDDSRGLVFPGYNYLGPFNGLDKGEPVNEADAAALEHDKAYDLEIKDGHNPYFEYNEADRRFQERLKDDTSFGGNLGKAIFQAKKRVLEPFGLVEDSKTAPTGDKRKGEDEPRLPDTSSQTPKKNKKPRKERPSGGAEDPGEGTSSNAGAAAPASSVGSSIMAEGGGGPVGDAGQGADGVGNSSGNWHCDSQWLENGVVTRTTRTWVLPSYNNHLYKRIQGPSGGDNNNKFFGFSTPWGYFDYNRFHCHFSPRDWQRLINNNWGIRPKAMRFRLFNIQVKEVTVQDFNTTIGNNLTSTVQVFADKDYQLPYVLGSATEGTFPPFPADIYTIPQYGYCTLNYNNEAVDRSAFYCLDYFPSDMLRTGNNFEFTYTFEDVPFHSMFAHNQTLDRLMNPLVDQYLWAFSSVSQAGSSGRALHYSRATKTNMAAQYRNWLPGPFFRDQQIFTGASNITKNNVFSVWEKGKQWELDNRTNLMQPGPAAATTFSGEPDRQAMQNTLAFSRTVYDQTTATTDRNQILITNEDEIRPTNSVGIDAWGAVPTNNQSIVTPGTRAAVNNQGALPGMVWQNRDIYPTGTHLAKIPDTDNHFHPSPLIGRFGCKHPPPQIFIKNTPVPANPSETFQTAKVASFINQYSTGQCTVEIFWELKKETSKRWNPEIQFTSNFGNAADIQFAVSDTGSYSEPRPIGTRYLTKPL

SEQ ID NO: 555 - protein, 598 aa, synthetic construct
  REGION 1..598: note = source = /note="Description of Artificial Sequence: Synthetic polypeptide"
TAPTGDKRKGEDEPRLPDTSSQTPKKNKKPRKERPSGGAEDPGEGTSSNAGAAAPASSVGSSIMAEGGGGPVGDAGQGADGVGNSSGNWHCDSQWLENGVVTRTTRTWVLPSYNNHLYKRIQGPSGGDNNNKFFGFSTPWGYFDYNRFHCHFSPRDWQRLINNNWGIRPKAMRFRLFNIQVKEVTVQDFNTTIGNNLTSTVQVFADKDYQLPYVLGSATEGTFPPFPADIYTIPQYGYCTLNYNNEAVDRSAFYCLDYFPSDMLRTGNNFEFTYTFEDVPFHSMFAHNQTLDRLMNPLVDQYLWAFSSVSQAGSSGRALHYSRATKTNMAAQYRNWLPGPFFRDQQIFTGASNITKNNVFSVWEKGKQWELDNRTNLMQPGPAAATTFSGEPDRQAMQNTLAFSRTVYDQTTATTDRNQILITNEDEIRPTNSVGIDAWGAVPTNNQSIVTPGTRAAVNNQGALPGMVWQNRDIYPTGTHLAKIPDTDNHFHPSPLIGRFGCKHPPPQIFIKNTPVPANPSETFQTAKVASFINQYSTGQCTVEIFWELKKETSKRWNPEIQFTSNFGNAADIQFAVSDTGSYSEPRPIGTRYLTKPL

SEQ ID NO: 556 - DNA, 4694 bp, synthetic construct
  misc_feature 1..4694: note = source = /note="Description of Artificial Sequence: Synthetic polynucleotide"
  source 1..4694: mol_type = other DNA
tggccagtttccaagacaggctcgctcgctcactcgggccggggccccaaaggggcccctagcgaccgcttcgcggtcgcggcccgagtgagcgagcgagcctgtcttggaaactggccagcactccggtgaggtaatgccgtcacgtggtcgggaatgggaacgggaaatctcgcgagaacgtaaacaaatataagacggcgccacacggcgctgcgtcatacgcgcgcgcgcaccggcgagatgaggtcgtactacgaggtcatcgttcagctgcccaacgacgtcgagagtcaggtacctggaatctccgattcgttcgtcaactggattacgtcgcgagaatggacgttgcctgaggacgccgattgggatttggaccaggtcgatcaagttcaactgacgctcggcgacaaaatccaacgggagattcgaactcattgggggacgatggccaaagaaccggactttcactattttatccaactggaacaaggtgaggtgttctttcatttacacgtcctgctggaaacgtgttccgtaaagccgatggtactcggaagatatatccgacatattcaacaaaaaattgtgagtaaagtctactgcgccacgagcctacgatggaaggatggatgcgtggtgaccaagaccaaaaatttcgggggcgcgaacaaggtccgggccgagtcgtatattcccgcctacctgatcccgaaacagcaaccggaagtgcagtgggcgtggactaacgtgcccgagtatataaaagcgtgcttgcaccgagaactgcgtgccagtctcgcgcgacttcacttcgaggaggcgggcgtctcgcaatccaaggaaaatctcgcgagaactgcagacggcgctcccgtgatgccgacccgcgtcagcaaacgctacatggagctcgtggattggctcgtggagaaggggatcaccaccgagaaggaatggctgctggaaaacagagaaagctttcggagctttcaggcctcgagcaactcggcgcgtcagatcaagacggccctgcaaggcgccattcaggagatgcttctgaccaagacggcggaggactacctcgtcggaaaggatcccgtctcggacgacgacatccgtcagaaccgcatctacaagattctggaactgaaccactacgacccagcgtacgtggggagtattttggtcgggtggtgccagaagaaatggggcaagcgaaacacgctgtggctgttcggacatgcgaccaccggcaagaccaacatcgcggaggctattgcccatgctgtgccgttctatggatgcgttaactggaccaacgagaactttccgttcaacgactgcgtcgaaaaaatgattatctggtgggaggagggcaaaatgaccgccaaagtggtggaaacagccaaggcgattctgggaggatctcgggtgagagtggaccaaaaatgcaaagcttcggttccgatcgaaccgacgccggtcattattaccagtaacaccaacatgtgttatgtcatcgacgggaacacgaccacgttcgagcataagcagccgttggaggacaggatgtttaagctcgaattgctgactcggttgcctgatgactttggtaaggtgaccaaacaggaggtgcgtcaattcttcaggtggtctcaggatcacctgacccctgtgatcccagaattcctagtgcggaaggcggagtctcgcaaaagacccgccccttccggggaaggctatataagcccgacaaagcggcccgcgctcgcagagcagcagcaggcgtcggagagcgcggacccggttcccaccaggtatcgtatcaaatgctcgaaacattgcggtatggataaaatgttgtttccttgccaaatttgtgaatcgatgaacagagatattaatatttgtgctattcataaaacgaccgactgtaaagagtgtttccccgactacggggataaagatgatgtagaactacccccctgtacagaacacaacgtgtctcgttgttatcaatgtcattcgggcgaattgtatcgcgtgacttcggactctgacgagaaacctgcccccgagagtgatgaaggcaccgagccatcctatgctccctgcacgattcaccacctgatgggcaagagtcacgggttagtcacttgcgcggcgtgtcggttgaaaaatagtacgttgcatgatgacttggatgacggtgatctcgaacaataaatgattgaaatgtagccatgtctctcatttctgatgcgattccagattggttggagcggttggtcaaaaagggagtgaatgctgcagctgatttctaccatttggaaagcggtcctcctcgtcctaaggcaaatcagcaaactcaagaatctcttgaaaaggacgattcgagaggtctcgtgttcccaggctacaattatctaggccctttcaacggtctagataaaggagaacccgtcaacgaggcagacgctgccgccttagaacacgacaaggcttacgacctcgaaatcaaggacgggcacaacccgtactttgagtacaacgaggccgacagacgtttccaggaacgtctcaaagacgatacctcctttggaggcaatttaggtaaagccatcttccaggccaaaaagagggttctcgaaccctttggtctggtggaagactcaaagacggctccgaccggagacaagcggaaaggcgaagacgaacctcgtttgcccgacacttcttcacagactcccaagaaaaacaagaagcctcgcaaggaaagaccttccggcggggcagaagatccgggcgaaggcacctcttccaacgctggagcagcagcacccgcctctagtgtgggatcatctatcatggctgaaggaggtggcggcccagtgggcgatgcaggccagggtgccgatggagtgggcaattcctccggaaattggcattgcgattcccaatggctggaaaacggagtcgtcactcgaaccacccgaacctgggtcttgcccagctacaacaaccacctgtacaaacgaatccaaggacccagcggaggcgacaacaacaacaaattctttggattcagcaccccctggggatactttgactacaatcgattccactgccacttttccccgcgagactggcaacgactcatcaacaacaactggggcatccgtcccaaagcgatgcgctttagactctttaacatccaggttaaagaggtcacggtccaagacttcaacaccaccatcggcaacaacctcaccagtacggtccaggtctttgcggacaaggactaccaactgccgtacgtcctcggatcggctaccgaaggcaccttcccgccgttcccagcggatatctacacgatcccgcagtacgggtactgcacgctaaactacaacaacgaggcggtggatcgttcggccttctactgtctggactactttccctcagacatgctgcggacaggaaataactttgagtttacttacaccttcgaggacgttcctttccatagcatgtttgcccacaaccagacgctagaccggctgatgaatcccctcgtggatcagtacctctgggctttcagctccgtcagccaagcaggctcatctggacgagctcttcattactcgcgggcgactaaaaccaacatggcggctcaatataggaactggttacctgggcctttcttccgtgatcagcaaatctttacgggcgctagcaacatcactaaaaataacgtctttagcgtttgggaaaaaggcaagcaatgggaactcgacaatcggaccaacctaatgcagcccggtcctgcggcagcgaccacctttagcggagaacctgaccgtcaagccatgcaaaacacgctggcttttagcaggaccgtctacgatcaaacgaccgccacgaccgatcgtaaccagatactcatcaccaacgaagacgaaatcagacccaccaactcggtcggtatcgacgcgtggggagcagttcccaccaacaaccagtcgatcgtgacccccggcactcgcgcggccgtcaacaatcaaggggcgcttcccgggatggtgtggcaaaacagagacatttaccctacagggacccatttggccaaaattcccgacactgacaatcacttccatccgtccccgcttattgggcggtttggctgcaagcatccccctccccagattttcattaaaaacacacccgtccctgccaacccttcggaaacgttccagacggccaaagtggcctccttcatcaaccagtactcgaccggacagtgcaccgtcgaaatcttttgggaactcaagaaggaaacctccaagcgctggaaccccgaaatccagttcacctccaactttggcaacgcggccgacatccagtttgccgtctccgacacgggatcctattccgaacctcgtcccatcggtacccgttaccttaccaaacctctgtaaattaaacccttcaataaaccgtttatgcgtaactgtatttccgtctcctgtcgttattcagtcacatgatgcggcattacctcaccggagtgctggccagtttccaagacaggctcgctcgctcactcgggccggggccccaaaggggcccctagcgaccgcttcgcggtcgcggcccgagtgagcgagcgagcctgtcttggaaactggcca

SEQ ID NO: 557 - DNA, 2211 bp, synthetic construct
  misc_feature 1..2211: note = source = /note="Description of Artificial Sequence: Synthetic polynucleotide"
  source 1..2211: mol_type = other DNA
atggctgctgatggttatcttccagattggctcgaggacactctctctgaaggaataagacagtggtggaagctcaaacctggcccaccaccaccaaagcccgcagagcggcataaggacgacagcaggggtcttgtgcttcctgggtacaagtacctcggacccttcaacggactcgacaagggagagccggtcaacgaggcagacgcagcggccctcgagcacgacaaggcctacgaccagcagctcaaggccggtgacaacccctacctcaagtacaaccacgccgacgcggagttccagcagcggcttcagggcgacacatcgtttgggggcaacctcggcagagcagtcttccaggccaaaaagagggttcttgaacctcttggtctggttgagcaagcgggtgagacggctcctggaaagaagagaccgttgattgaatccccccagcagcccgactcctccacgggtatcggcaaaaaaggcaagcagccggctaaaaagagactcaattttggtcagactggcgactcagagtcagtccccgacccacaacctctcggagaacctccagcaacccccgctgctgtgggacctactacaatggcttcaggtggtggcgcaccaatggcagacaataacgaaggcgccgacggagtgggtaatgcctcaggaaattggcattgcgattccacatggctgggcgacagagtcatcaccaccagcacccgcacctgggccttgcccacctacaataaccacctctacaagcaaatctccagtgcttcaacgggggccagcaacgacaaccactacttcggctacagcaccccctgggggtattttgacttcaacagattccactgccacttttcaccacgtgactggcagcgactcatcaacaacaattggggattccggcccaagagactcaacttcaaactcttcaacatccaagtcaaggaggtcacgacgaatgatggcgtcacaaccatcgctaataaccttaccagcacggttcaagtcttctcggactcagactatcagctcccgtacgtgctcgggtcggctcacgagggctgcctcccgccgttcccagcagacgtcttcatggtgccacagtatggatacctcaccctgaacaacgggagtcaggcagtaggacgctcttcattttactgcctggagtactttccttctcagatgctgcgtaccggaaacaactttaccttcagctacacttttgaggacgttcctttccacagcagctacgctcacagccagagtctggaccgtctcatgaatcctctcatcgaccagtacctgtattacctgaacagaactcagaatcagtccggaagtgcccaaaacaaggacttgctgtttagccgggggtctccagctggcatgtctgttcagcccaaaaactggctacctggaccctgttatcggcagcagcgcgtttctaaaacaaaaacagacaacaacaacagcaactttacctggactggtgcttcaaaatataaccttaatgggcgtgaatctataatcaaccctggcactgctatggcctcacacaaagacgacaaagacaagttctttcccatgagcggtgtcatgatttttggaaaggagagcgccggagcttcaaacactgcattggacaatgtcatgatcacagacgaagaggaaatcaaagccactaaccccgtggccaccgaaagatttgggactgtggcagtcaatctccagagcagcagcacagaccctgcgaccggagatgtgcatgttatgggagccttacctggaatggtgtggcaagacagagacgtatacctgcagggtcccatttgggccaaaattcctcacacagatggacactttcacccgtctcctcttatgggcggctttggactcaagaacccgcctcctcagatcctcatcaaaaacacgcctgttcctgcgaatcctccggcggagttttcagctacaaagtttgcttcattcatcacccaatactccacaggacaagtgagtgtggaaattgaatgggagctgcagaaagaaaacagcaagcgctggaatcccgaagtgcagtacacatccaattatgcaaaatctgccaacgttgattttactgtggacaacaatggactttatactgagcctcgccccattggcacccgttacctcacccgtcccctgtaa

SEQ ID NO: 558 - protein, 736 aa, synthetic construct
  REGION 1..736: note = source = /note="Description of Artificial Sequence: Synthetic polypeptide"
MAADGYLPDWLEDTLSEGIRQWWKLKPGPPPPKPAERHKDDSRGLVLPGYKYLGPFNGLDKGEPVNEADAAALEHDKAYDQQLKAGDNPYLKYNHADAEFQQRLQGDTSFGGNLGRAVFQAKKRVLEPLGLVEQAGETAPGKKRPLIESPQQPDSSTGIGKKGKQPAKKRLNFGQTGDSESVPDPQPLGEPPATPAAVGPTTMASGGGAPMADNNEGADGVGNASGNWHCDSTWLGDRVITTSTRTWALPTYNNHLYKQISSASTGASNDNHYFGYSTPWGYFDFNRFHCHFSPRDWQRLINNNWGFRPKRLNFKLFNIQVKEVTTNDGVTTIANNLTSTVQVFSDSDYQLPYVLGSAHEGCLPPFPADVFMVPQYGYLTLNNGSQAVGRSSFYCLEYFPSQMLRTGNNFTFSYTFEDVPFHSSYAHSQSLDRLMNPLIDQYLYYLNRTQNQSGSAQNKDLLFSRGSPAGMSVQPKNWLPGPCYRQQRVSKTKTDNNNSNFTWTGASKYNLNGRESIINPGTAMASHKDDKDKFFPMSGVMIFGKESAGASNTALDNVMITDEEEIKATNPVATERFGTVAVNLQSSSTDPATGDVHVMGALPGMVWQDRDVYLQGPIWAKIPHTDGHFHPSPLMGGFGLKNPPPQILIKNTPVPANPPAEFSATKFASFITQYSTGQVSVEIEWELQKENSKRWNPEVQYTSNYAKSANVDFTVDNNGLYTEPRPIGTRYLTRPL

SEQ ID NO: 559 - DNA, 2211 bp, synthetic construct
  misc_feature 1..2211: note = source = /note="Description of Artificial Sequence: Synthetic polynucleotide"
  source 1..2211: mol_type = other DNA
atggcttccgatggttatcttccagattggctcgaggacaacctctctgagggcatccgcgagtggtgggacttgaaacctggagccccgaaacccaaagccaaccagcaaaagcaggacgacggccggggtctggtgcttcctggctacaagtacctcggacccttcaacggactcgacaagggggagcccgtcaacgcggcggatgcagcggccctcgagcacgacaaggcctacgaccagcagctcagagcgggtgacaatccgtacctgcggtataaccacgccgacgccgagtttcaggagcgtctgcaagaagatacgtcttttgggggcaacctcgggcgagcagtcttccaggccaagaagagggttctcgaaccttttggtctggttgaggaaggtgctaagacggctcctggaaagaaacgtccggtagagcagtcgccacaagagccagactcctcctcgggcattggcaagacaggccagcagcccgctaaaaagagactcaattttggtcagactggcgactcagagtcagtccccgacccacaacctctcggagaacctccagcaacccccgctgctgtgggacctactacaatggcttcaggcggtggcgcaccaatggcagacaataacgaaggcgccgacggagtgggtaatgcctcaggaaattggcattgcgattccacatggctgggcgacagagtcatcaccaccagcacccgaacatgggccttgcccacctataacaaccacctctacaagcaaatctccagtgcttcaacgggggccagcaacgacaaccactacttcggctacagcaccccctgggggtattttgatttcaacagattccactgccatttctcaccacgtgactggcagcgactcatcaacaacaattggggattccggcccaagagactcaacttcaaactcttcaacatccaagtcaaggaggtcacgacgaatgatggcgtcacaaccatcgctaataaccttaccagcacggttcaagtcttctcggactcggagtaccagcttccgtacgtcctcggctctgcgcaccagggctgcctccctccgttcccggcggacgtgttcatgattccgcagtacggctacctaacgctcaacaatggcagccaggcagtgggacggtcatccttttactgcctggaatatttcccatcgcagatgctgagaacgggcaataactttaccttcagctacaccttcgaggacgtgcctttccacagcagctacgcgcacagccagagcctggaccggctgatgaatcctctcatcgaccagtacctgtattacctgaacagaactcagaatcagtccggaagtgcccaaaacaaggacttgctgtttagccgggggtctccagctggcatgtctgttcagcccaaaaactggctacctggaccctgttaccggcagcagcgcgtttctaaaacaaaaacagacaacaacaacagcaactttacctggactggtgcttcaaaatataaccttaatgggcgtgaatctataatcaaccctggcactgctatggcctcacacaaagacgacaaagacaagttctttcccatgagcggtgtcatgatttttggaaaggagagcgccggagcttcaaacactgcattggacaatgtcatgatcacagacgaagaggaaatcaaagccactaaccccgtggccaccgaaagatttgggactgtggcagtcaatctccagagcagcagcacagaccctgcgaccggagatgtgcatgttatgggagccttacctggaatggtgtggcaagacagagacgtatacctgcagggtcccatttgggccaaaattcctcacacagatggacactttcacccgtctcctcttatgggcggctttggacttaagcacccgcctcctcagatcctcatcaaaaacacgcctgttcctgcgaatcctccggcagagttttcggctacaaagtttgcttcattcatcacccagtattctactggccaagtcagcgtggagattgaatgggagctgcagaaagaaaacagcaaacgctggaatcccgaagtgcagtatacatctaactatgcaaaatctgccaacgttgatttcactgtggacaacaatggactttatactgagcctcgtcccattggcacccgttacctcacccgtcccctgtaa

SEQ ID NO: 560 - protein, 736 aa, synthetic construct
  REGION 1..736: note = source = /note="Description of Artificial Sequence: Synthetic polypeptide"
MASDGYLPDWLEDNLSEGIREWWDLKPGAPKPKANQQKQDDGRGLVLPGYKYLGPFNGLDKGEPVNAADAAALEHDKAYDQQLRAGDNPYLRYNHADAEFQERLQEDTSFGGNLGRAVFQAKKRVLEPFGLVEEGAKTAPGKKRPVEQSPQEPDSSSGIGKTGQQPAKKRLNFGQTGDSESVPDPQPLGEPPATPAAVGPTTMASGGGAPMADNNEGADGVGNASGNWHCDSTWLGDRVITTSTRTWALPTYNNHLYKQISSASTGASNDNHYFGYSTPWGYFDFNRFHCHFSPRDWQRLINNNWGFRPKRLNFKLFNIQVKEVTTNDGVTTIANNLTSTVQVFSDSEYQLPYVLGSAHQGCLPPFPADVFMIPQYGYLTLNNGSQAVGRSSFYCLEYFPSQMLRTGNNFTFSYTFEDVPFHSSYAHSQSLDRLMNPLIDQYLYYLNRTQNQSGSAQNKDLLFSRGSPAGMSVQPKNWLPGPCYRQQRVSKTKTDNNNSNFTWTGASKYNLNGRESIINPGTAMASHKDDKDKFFPMSGVMIFGKESAGASNTALDNVMITDEEEIKATNPVATERFGTVAVNLQSSSTDPATGDVHVMGALPGMVWQDRDVYLQGPIWAKIPHTDGHFHPSPLMGGFGLKHPPPQILIKNTPVPANPPAEFSATKFASFITQYSTGQVSVEIEWELQKENSKRWNPEVQYTSNYAKSANVDFTVDNNGLYTEPRPIGTRYLTRPL

SEQ ID NO: 561 - DNA, 2211 bp, synthetic construct
  misc_feature 1..2211: note = source = /note="Description of Artificial Sequence: Synthetic polynucleotide"
  source 1..2211: mol_type = other DNA
atggctgctgatggttatcttccagattggctcgaggacactctctctgaaggaataagacagtggtggaagctcaaacctggcccaccaccaccaaagcccgcagagcggcataaggacgacagcaggggtcttgtgcttcctgggtacaagtacctcggacccttcaacggactcgacaagggagagccggtcaacgaggcagacgcagcggccctcgagcacgacaaggcctacgaccagcagctcaaggccggtgacaacccctacctcaagtacaaccacgccgacgcggagttccagcagcggcttcagggcgacacatcgtttgggggcaacctcggcagagcagtcttccaggccaaaaagagggttcttgaacctcttggtctggttgagcaagcgggtgagacggctcctggaaagaagagaccgttgattgaatccccccagcagcccgactcctccacgggtatcggcaaaaaaggcaagcagccggctaaaaagagactcaattttggtcagactggcgactcagagtcagtccccgacccacaacctctcggagaacctccagcaacccccgctgctgtgggacctactacaatggcttcaggtggtggcgcaccaatggcagacaataacgaaggcgccgacggagtgggtaatgcctcaggaaattggcattgcgattccacatggctgggcgacagagtcatcaccaccagcacccgcacctgggccttgcccacctacaataaccacctctacaagcaaatctccagtgcttcaacgggggccagcaacgacaaccactacttcggctacagcaccccctgggggtattttgacttcaacagattccactgccacttttcaccacgtgactggcagcgactcatcaacaacaattggggattccggcccaagagactcaacttcaaactcttcaacatccaagtcaaggaggtcacgacgaatgatggcgtcacaaccatcgctaataaccttaccagcacggttcaagtcttctcggactcagactatcagctcccgtacgtgctcgggtcggctcacgagggctgcctcccgccgttcccagcagacgtcttcatggtgccacagtatggatacctcaccctgaacaacgggagtcaggcagtaggacgctcttcattttactgcctggagtactttccttctcagatgctgcgtaccggaaacaactttaccttcagctacacttttgaggacgttcctttccacagcagctacgctcacagccagagtctggaccgtctcatgaatcctctcatcgaccagtacctgtattacctgaacagaactcagaatcagtccggaagtgcccaaaacaaggacttgctgtttagccgggggtctccaactggcatgtctgttcagcccaaaaactggctacctggaccctgttatcggcagcagcgcgtttctaaaacaaaaacagacaacaacaacagcaactttacctggactggtgcttcaaaatataaccttaatgggcgtgaatctataatcaaccctggcactgctatggcctcacacaaagacgacaaagacaagttctttcccatgagcggtgtcatgatttttggaaaggagagcgccggagcttcaaacactgcattggacaatgtcatgatcacagacgaagaggaaatcaaagccactaaccccgtggccactgaaagatttgggactgtggcagtcaatctccagagcagcagcacagaccctgcgaccggagatgtgcatgccatgggagccttacctggaatggtgtggcaagacagagacgtatacctgcagggtcctatttgggccaaaattcctcacacggatggacactttcacccgtctcctctcatgggcggctttggactcaagaacccgcctcctcagatcctcatcaaaaacacgcctgttcctgcgaatcctccggcggagttttcagctacaaagtttgcttcattcatcacccagtattccacaggacaagtgagcgtggagattgaatgggagctgcagaaagaaaacagcaaacgctggaatcccgaagtgcagtatacatctaactatgcaaaatctgccaacgttgatttcactgtggacaacaatggactttatactgagcctcgccccattggcacccgttacctcacccgtcccctgtaa

SEQ ID NO: 562 - protein, 736 aa, synthetic construct
  REGION 1..736: note = source = /note="Description of Artificial Sequence: Synthetic polypeptide"
MAADGYLPDWLEDTLSEGIRQWWKLKPGPPPPKPAERHKDDSRGLVLPGYKYLGPFNGLDKGEPVNEADAAALEHDKAYDQQLKAGDNPYLKYNHADAEFQQRLQGDTSFGGNLGRAVFQAKKRVLEPLGLVEQAGETAPGKKRPLIESPQQPDSSTGIGKKGKQPAKKRLNFGQTGDSESVPDPQPLGEPPATPAAVGPTTMASGGGAPMADNNEGADGVGNASGNWHCDSTWLGDRVITTSTRTWALPTYNNHLYKQISSASTGASNDNHYFGYSTPWGYFDFNRFHCHFSPRDWQRLINNNWGFRPKRLNFKLFNIQVKEVTTNDGVTTIANNLTSTVQVFSDSDYQLPYVLGSAHEGCLPPFPADVFMVPQYGYLTLNNGSQAVGRSSFYCLEYFPSQMLRTGNNFTFSYTFEDVPFHSSYAHSQSLDRLMNPLIDQYLYYLNRTQNQSGSAQNKDLLFSRGSPTGMSVQPKNWLPGPCYRQQRVSKTKTDNNNSNFTWTGASKYNLNGRESIINPGTAMASHKDDKDKFFPMSGVMIFGKESAGASNTALDNVMITDEEEIKATNPVATERFGTVAVNLQSSSTDPATGDVHAMGALPGMVWQDRDVYLQGPIWAKIPHTDGHFHPSPLMGGFGLKNPPPQILIKNTPVPANPPAEFSATKFASFITQYSTGQVSVEIEWELQKENSKRWNPEVQYTSNYAKSANVDFTVDNNGLYTEPRPIGTRYLTRPL

SEQ ID NO: 563 - DNA, 2211 bp, synthetic construct
  misc_feature 1..2211: note = source = /note="Description of Artificial Sequence: Synthetic polynucleotide"
  source 1..2211: mol_type = other DNA
atggctgccgatggttatcttccagattggctcgaggacaacctctctgagggcattcgcgagtggtgggcgctgaaacctggagccccgaagcccaaagccaaccagcaaaagcaggacgacggccggggtctggtgcttcctggctacaagtacctcggacccttcaacggactcgacaagggggagcccgtcaacgcggcggatgcagcggccctcgagcacgacaaggcctacgaccagcagctcaaagcgggtgacaatccgtacctgcggtataaccacgccgacgccgagtttcaggagcgtctgcaagaagatacgtcttttgggggcaacctcgggcgagcagtcttccaggccaagaagcgggttctcgaacctctcggtctggttgaggaaggcgctaagacggctcctggaaagaaacgtccggtagagcaatcgccacaagagccagactcctcctcgggcatcggcaagacaggccagcagcccgctaaaaagagactcaattttggtcagactggcgactcagagtcagtccccgacccacaacctctcggagaacctccagcaacccccgctgctgtgggacctactacaatggcttcaggcggtggcgcaccaatggcagacaataacgaaggcgccgacggagtgggtaatgcctcaggaaattggcattgcgattccacatggctgggcgacagagtcatcaccaccagcacccgaacatgggccttgcccacctataacaaccacctctacaagcaaatctccagtgcttcgacgggggccagcaacgacaaccactacttcggctacagcaccccctgggggtattttgactttaacagattccactgccacttttcaccacgtgactggcagcgactcatcaacaacaactggggattccggcccaagagactcagcttcaagctcttcaacatccaggtcaaggaggtcacgacgaatgatggcgtcacaaccatcgctaataaccttaccagcacggttcaagtcttctcggactcggagtaccagcttccgtacgtcctcggctctgcgcaccagggctgcctccctccgttcccggcggacgtgttcatgattccgcaatacggctacctgacgctcaacaatggcagccaagccgtgggacgttcatccttttactgcctggaatatttcccttctcagatgctgagaacgggcaacaactttaccttcagctacacctttgaggaagtgcctttccacagcagctacgcgcacagccagagcctggaccggctgatgaatcctctcatcgatcaatacctgtattacctgaacagaactcaaaatcagtccggaagtgcccaaaacaaggacttgctgtttagccgtgggtctccagctggcatgtctgttcagcccaaaaactggctacctggaccctgttatcggcagcagcgcgtttctaaaacaaaaacagacaacaacaacagcaattttacctggactggtgcttcaaaatataacctcaatgggcgtgaatccatcatcaaccctggcactgctatggcctcacataaagacgacgaagacaagttctttcccatgagcggtgtcatgatttttggaaaagagagcgccggagcttcaaacactgcattggacaatgtcatgattacagacgaagaggaaattaaagccactaaccctgtggccaccgaaagatttgggaccgtggcagtcaatttccagagcagcagcacagaccctgcgaccggagatgtgcatgctatgggagcattacctggcatggtgtggcaagatagagacgtgtacctgcagggtcccatttgggccaaaattcctcacacagatggacactttcacccgtctcctcttatgggcggctttggactcaagaacccgcctcctcagatcctcatcaaaaacacgcctgttcctgcgaatcctccggcggagttttcagctacaaagtttgcttcattcatcacccaatactccacaggacaagtgagcgtggagattgaatgggagctgcagaaagaaaacagcaaacgctggaatcccgaagtgcagtatacatctaactatgcaaaatctgccaacattgatttcactgtggacaacaatggactttatactgagcctcgccccattggcacccgttacctcacccgtccccagtaa

SEQ ID NO: 564 - protein, 736 aa, synthetic construct
  REGION 1..736: note = source = /note="Description of Artificial Sequence: Synthetic polypeptide"
MAADGYLPDWLEDNLSEGIREWWALKPGAPKPKANQQKQDDGRGLVLPGYKYLGPFNGLDKGEPVNAADAAALEHDKAYDQQLKAGDNPYLRYNHADAEFQERLQEDTSFGGNLGRAVFQAKKRVLEPLGLVEEGAKTAPGKKRPVEQSPQEPDSSSGIGKTGQQPAKKRLNFGQTGDSESVPDPQPLGEPPATPAAVGPTTMASGGGAPMADNNEGADGVGNASGNWHCDSTWLGDRVITTSTRTWALPTYNNHLYKQISSASTGASNDNHYFGYSTPWGYFDFNRFHCHFSPRDWQRLINNNWGFRPKRLSFKLFNIQVKEVTTNDGVTTIANNLTSTVQVFSDSEYQLPYVLGSAHQGCLPPFPADVFMIPQYGYLTLNNGSQAVGRSSFYCLEYFPSQMLRTGNNFTFSYTFEEVPFHSSYAHSQSLDRLMNPLIDQYLYYLNRTQNQSGSAQNKDLLFSRGSPAGMSVQPKNWLPGPCYRQQRVSKTKTDNNNSNFTWTGASKYNLNGRESIINPGTAMASHKDDEDKFFPMSGVMIFGKESAGASNTALDNVMITDEEEIKATNPVATERFGTVAVNFQSSSTDPATGDVHAMGALPGMVWQDRDVYLQGPIWAKIPHTDGHFHPSPLMGGFGLKNPPPQILIKNTPVPANPPAEFSATKFASFITQYSTGQVSVEIEWELQKENSKRWNPEVQYTSNYAKSANIDFTVDNNGLYTEPRPIGTRYLTRPQ

SEQ ID NO: 565 - DNA, 2211 bp, synthetic construct
  misc_feature 1..2211: note = source = /note="Description of Artificial Sequence: Synthetic polynucleotide"
  source 1..2211: mol_type = other DNA
atggctgccgatggttatcttccagattggctcgaggacaacctctctgagggcattcgcgagtggtgggacttgaaacctggagccccgaaacccaaagccaaccagcaaaagcaggacgacggccggggtctggtgcttcctggctacaagtacctcggacccttcaacggactcgacaagggggagcccgtcaacgcggcggatgcagcggccctcgagcacgacaaggcctacgaccagcagctcaaagcgggtgacaatccgtaccttcggtataaccacgccgacgccgagtttcaggagcgtctgcaagaagatacgtcttttgggggcaacctcgggcgagcagtcttccaggccaaaaagagggttctcgaacctctcggtctggttgaggaagcggctaagacggctcctggaaagaaacgtccggtagagcagtcgccacaagagccagactcctcctcgggcattggcaagacaggccagcagcccgctaaaaagagactcaattttggtcagactggcgactcagagtcagtccccgacccacaacctctcggagaacctcccgcagccccctcaggtgtgggatctcttacaatggcttcaggtggtggcgcaccaatggcagacaataacgaaggcgccgacggagtgggtaatgcctcaggaaattggcattgcgattccacatggctgggcgacagagtcatcaccaccagcacccgcacctgggccttgcccacctacaataaccacctctacaagcaaatctccagtgcttcaacgggggccagcaacgacaaccactacttcggctacagcaccccctgggggtattttgacttcaacagattccactgccacttttcaccacgtgactggcaaagactcatcaacaacaattggggattccggcccaagagactcaacttcaagctcttcaacatccaagtcaaggaggtcacgacgaatgatggcgtcacgaccatcgctaataaccttaccagcacggttcaagtcttctcggactcggagtaccagttgccgtacgtcctcggctctgcgcaccagggctgcctccctccgttcccggcggacgtgttcatgattccgcagtacggctacctaacgctcaacaatggcagccaggcagtgggacggtcatccttttactgcctggaatatttcccatcgcagatgctgagaacgggcaacaactttaccttcagctacacctttgaggaagtgcctttccacagcagctacgcgcacagccagagcctggaccggctgatgaatcctctcatcgaccagtacctgtattacctgaacagaactcaaaatcagtccggaagtgcccaaaacaaggacttgctgtttagccgtgggtctccagctggcatgtctgttcagcccaaaaactggctacctggaccctgttaccggcagcagtgcgtttctaaaacaaaaacagacaacaacaacagcaactttacctggactggtgcttcaaaatataaccttaatgggcgtgaatctataatcaaccctggcactgctatggcctcacacaaagacgacaaagacaagttctttcccatgagcggtgtcatgatttttggaaaggagagcgccggagcttcaaacactgcattggacaatgtcatgatcacagacgaagaggaaatcaaagccactaaccccgtggccaccgaaagatttgggactgtggcagtcaatctccagagcagcagcacagaccctgcgaccggagatgtgcatgttatgggagccttacctggaatggtgtggcaagacagagacgtatacctgcagggtcctatttgggccaaaattcctcacacagatggacactttcacccgtctcctcttatgggcggctttggactcaagaacccgcctcctcagatcctcatcaaaaacacgcctgttcctgcgaatcctccggcggagttttcagctacaaagtttgcttcattcatcacccaatactccacaggacaagtgagcgtggagattgaatgggagctgcagaaagaaaacagcaagcgctggaatcccgaagtgcagtacacatccaattatgcaaaatctgccaacgttgatttcactgtggacaacaatggactttatactgagcctcgccccattggcacccgttacctcacccgtcccctgtaa

SEQ ID NO: 566 - protein, 736 aa, synthetic construct
  REGION 1..736: note = source = /note="Description of Artificial Sequence: Synthetic polypeptide"
MAADGYLPDWLEDNLSEGIREWWDLKPGAPKPKANQQKQDDGRGLVLPGYKYLGPFNGLDKGEPVNAADAAALEHDKAYDQQLKAGDNPYLRYNHADAEFQERLQEDTSFGGNLGRAVFQAKKRVLEPLGLVEEAAKTAPGKKRPVEQSPQEPDSSSGIGKTGQQPAKKRLNFGQTGDSESVPDPQPLGEPPAAPSGVGSLTMASGGGAPMADNNEGADGVGNASGNWHCDSTWLGDRVITTSTRTWALPTYNNHLYKQISSASTGASNDNHYFGYSTPWGYFDFNRFHCHFSPRDWQRLINNNWGFRPKRLNFKLFNIQVKEVTTNDGVTTIANNLTSTVQVFSDSEYQLPYVLGSAHQGCLPPFPADVFMIPQYGYLTLNNGSQAVGRSSFYCLEYFPSQMLRTGNNFTFSYTFEEVPFHSSYAHSQSLDRLMNPLIDQYLYYLNRTQNQSGSAQNKDLLFSRGSPAGMSVQPKNWLPGPCYRQQCVSKTKTDNNNSNFTWTGASKYNLNGRESIINPGTAMASHKDDKDKFFPMSGVMIFGKESAGASNTALDNVMITDEEEIKATNPVATERFGTVAVNLQSSSTDPATGDVHVMGALPGMVWQDRDVYLQGPIWAKIPHTDGHFHPSPLMGGFGLKNPPPQILIKNTPVPANPPAEFSATKFASFITQYSTGQVSVEIEWELQKENSKRWNPEVQYTSNYAKSANVDFTVDNNGLYTEPRPIGTRYLTRPL

SEQ ID NO: 567 - DNA, 2211 bp, synthetic construct
  misc_feature 1..2211: note = source = /note="Description of Artificial Sequence: Synthetic polynucleotide"
  source 1..2211: mol_type = other DNA
atggctgccgatggttatcttccagattggctcgaggacaacctctctgagggcattcgcgaatggtgggacttgaaacctggagccccgaaacccaaagtcaaccagcaaaagcaggacaacgctcggggtcttgtgcttccgggttacaaatacctcggacccttcaacggactcgacaagggggagcccgtcaacgcggcggacgcagcggccctcgagcacgacaaggcctacgaccagcagctcaaagcgggtgacaatccgtaccttcggtataaccacgccgacgccgagtttcaggagcgtctgcaagaagatacgtcttttgggggcaaccttggacgagcagtcttccaggccaagaagagggttctcgaaccttttggtctggttgaggaaggtgctaagacggctcctggaaagaaacgtccggtagagcagtcgccacaagagccagactcctcctcgggcattggcaagacaggccagcagcccgctaaaaagagactcaattttggtcagactggcgactcagagtcagtccccgacccacaacctctcggagaacctccagcaacccccgctgctgtgggacctactacaatggcttcaggcggtggcgcaccaatggcagacaataacgaaggcgccgacggagtgggtaatgcctcaggaaattggcattgcgattccacatggctgggcgacagagtcatcaccaccagcacccgcacctgggccttgcccacctacaataaccacctctacaagcaaatctccagtgcttcaacgggggccagcaacgacaaccactacttcggctacagcaccccctgggggtattttgacttcaacagattccactgccacttttcaccacgtgactggcaaagactcatcaacaacaattggggattccggcccaagagactcaacttcaagctcttcaacatccaagtcaaggaggtcacgacgaatgatggcgtcacgaccatcgctaataaccttaccagcacggttcaagtcttctcggactcggagtaccagttgccgtacgtcctcggctctgcgcaccagggctgcctccctccgttcccggcggacgtgttcatgattccgcaatacggctacctgacgctcaacaatggcagccaggcagtgggacggtcatccttttactgcctggaatatttcccatcgcagatgctgagaacgggcaataactttaccttcagctacacttttgaggacgttcctttccacagcagctacgctcacagccagagcctggaccggctgatgaatcctctcatcgaccagtacctgtattacctgaacagaactcagaatcagtccggaagtgcccaaaacaaggacttgctgtttagccgtgggtctccaactggcatgtctgttcagcccaaaaactggctacctggaccctgttatcggcagcagcgcgtttctaaaacaaaaacagacaacaacaacagcaactttacctggactggtgcttcaaaatataaccttaatgggcgtgaatctataatcaaccctggcactgctatggcctcacacaaagacgacgaagacaagttctttcccatgagcggtgtcatgatttttggaaaggagagcgccggagcttcaaacactgcattggacaatgtcatgatcacagacgaagaggaaatcaaagccactaaccccgtggccactgaaagatttgggactgtggcagtcaatctccagagcagcagcacagaccctgcgaccggagatgtgcatgccatgggagccttacctggaatggtgtggcaagacagagacgtatacctgcagggtcctatttgggccaaaattcctcacacggatggacactttcacccgtctcctctcatgggcggctttggacttaagcacccgcctcctcagatcctcatcaaaaacacgcctgttcctgcgaatcctccggcagagttttcggctacaaagtttgcttcattcatcacccagtattccacaggacaagtgagcgtggagattgaatgggagctgcagaaagaaaacagcaaacgctggaatcccgaagtgcagtatacatctaactatgcaaaatctgccaacgttgatttcactgtggacaacaatggactttatactgagcctcgccccattggcacccgttacctcacccgtcccctgtaa

SEQ ID NO: 568 - protein, 736 aa, synthetic construct
  REGION 1..736: note = source = /note="Description of Artificial Sequence: Synthetic polypeptide"
MAADGYLPDWLEDNLSEGIREWWDLKPGAPKPKVNQQKQDNARGLVLPGYKYLGPFNGLDKGEPVNAADAAALEHDKAYDQQLKAGDNPYLRYNHADAEFQERLQEDTSFGGNLGRAVFQAKKRVLEPFGLVEEGAKTAPGKKRPVEQSPQEPDSSSGIGKTGQQPAKKRLNFGQTGDSESVPDPQPLGEPPATPAAVGPTTMASGGGAPMADNNEGADGVGNASGNWHCDSTWLGDRVITTSTRTWALPTYNNHLYKQISSASTGASNDNHYFGYSTPWGYFDFNRFHCHFSPRDWQRLINNNWGFRPKRLNFKLFNIQVKEVTTNDGVTTIANNLTSTVQVFSDSEYQLPYVLGSAHQGCLPPFPADVFMIPQYGYLTLNNGSQAVGRSSFYCLEYFPSQMLRTGNNFTFSYTFEDVPFHSSYAHSQSLDRLMNPLIDQYLYYLNRTQNQSGSAQNKDLLFSRGSPTGMSVQPKNWLPGPCYRQQRVSKTKTDNNNSNFTWTGASKYNLNGRESIINPGTAMASHKDDEDKFFPMSGVMIFGKESAGASNTALDNVMITDEEEIKATNPVATERFGTVAVNLQSSSTDPATGDVHAMGALPGMVWQDRDVYLQGPIWAKIPHTDGHFHPSPLMGGFGLKHPPPQILIKNTPVPANPPAEFSATKFASFITQYSTGQVSVEIEWELQKENSKRWNPEVQYTSNYAKSANVDFTVDNNGLYTEPRPIGTRYLTRPL

SEQ ID NO: 569 - DNA, 2208 bp, synthetic construct
  variation 955: note = a, c, t, or g
  variation 971..972: note = a, c, t, or g
  variation 981: note = a, c, t, or g
  variation 986: note = a, c, t, or g
  variation 1235: note = a, c, t, or g
  variation 1694..1696: note = a, c, t, or g
  variation 1698: note = a, c, t, or g
  variation 1763..1765: note = a, c, t, or g
  variation 1778: note = a, c, t, or g
  variation 2204: note = a, c, t, or g
  misc_feature 1..2208: note = source = /note="Description of Artificial Sequence: Synthetic polynucleotide"
  source 1..2208: mol_type = other DNA
atggctgccgatggttatcttccagattggctcgaggacaacctctctgagggcattcgcgaatggtgggacttgaaacctggagccccgaaacccaaagtcaaccagcaaaagcaggacaacgctcggggtcttgtgcttccgggttacaaatacctcggacccttcaacggactcgacaagggggagcccgtcaacgcggcggacgcagcggccctcgagcacgacaaggcctacgaccagcagctcaaagcgggtgacaatccgtaccttcggtataaccacgccgacgccgagtttcaggagcgtctgcaagaagatacgtcttttgggggcaaccttggacgagcagtcttccaggccaagaagagggttctcgaaccttttggtctggttgaggaaggtgctaagacggctcctggaaagaaacgtccggtagagcagtcgccacaagagccagactcctcctcgggcattggcaagacaggccagcagcccgctaaaaagagactcaattttggtcagactggcgactcagagtcagtccccgacccacaacctctcggagaacctccagcaacccccgctgctgtgggacctactacaatggcttcaggcggtggcgcaccaatggcagacaataacgaaggcgccgacggagtgggtaatgcctcaggaaattggcattgcgattccacatggctgggcgacagagtcatcaccaccagcacccgaacatgggccttgcccacctataacaaccacctctacaagcaaatctccagtgcttcaacgggggccagcaacgacaaccactacttcggctacagcaccccctgggggtattttgatttcaacagattccactgccacttttcaccacgtgactggcagcgactcatcaataacaattggggattccggcccaagagactcaacttcaaactcttcaacntccaagtcaaggaggnnacgacgaangatgncgtcacaaccatcgctaataaccttaccagcacggttcaagtcttctcggactcggagtaccagcttccgtacgtcctcggctctgcgcaccagggctgcctccctccgttcccggcggacgtgttcatgattccgcaatacggctacctgacgctcaacaatggcagccaggcagtgggacggtcatccttttactgcctggaatatttcccatcgcagatgctgagaacgggcaataactttacctncagctacacttttgaggacgttcctttccacagcagctacgctcacagccagagcctggaccggctgatgaatcctctcatcgaccagtacctgtattacctgaacagaactcagaatcagtccggaagtgcccaaaacaaggacttgctgtttagccgtgggtctccaactggcatgtctgttcagcccaaaaactggctacctggaccctgttatcggcagcagcgcgtttctaaaacaaaaacagacaacaacaacagcaactttacctggactggtgcttcaaaatataaccttaatgggcgtgaatctataatcaaccctggcactgctatggcctcacacaaagacgacgaagacaagttctttcccatgagcggtgtcatgatttttggaaaggagagcgccggagcttcaaacactgcattggacaatgtcatgatcacagacgaagagannncnaagccactaaccccgtggccactgaaagatttgggactgtggcagtcaatctccaagcagcacannnaccctgcgaccgnagatgtgcatgccatgggagccttacctggaatggtgtggcaagacagagacgtatacctgcagggtcctatttgggccaaaattcctcacacggatggacactttcacccgtctcctctcatgggcggctttggacttaagcacccgcctcctcagatcctcatcaaaaacacgcctgttcctgcgaatcctccggcagagttttcggctacaaagtttgcttcattcatcacccagtattccacaggacaagtgagcgtggagattgaatgggagctgcagaaagaaaacagcaaacgctggaatcccgaagtgcagtatacatctaactatgcaaaatctgccaacgttgatttcactgtggacaacaatggactttatactgagcctcgccccattggcacccgttacctcacccgtccccngtaa

SEQ ID NO: 570 - protein, 723 aa, synthetic construct
  REGION 1..723: note = source = /note="Description of Artificial Sequence: Synthetic polypeptide"
MAADGYLPDWLEDNLSEGIREWWDLKPGAPKPKVNQQKQDNARGLVLPGYKYLGPFNGLDKGEPVNAADAAALEHDKAYDQQLKAGDNPYLRYNHADAEFQERLQEDTSFGGNLGRAVFQAKKRVLEPFGLVEEGAKTAPGKKRPVEQSPQEPDSSSGIGKTGQQPAKKRLNFGQTGDSESVPDPQPLGEPPATPAAVGPTTMASGGGAPMADNNEGADGVGNASGNWHCDSTWLGDRVITTSTRTWALPTYNNHLYKQISSASTGASNDNHYFGYSTPWGYFDFNRFHCHFSPRDWQRLINNNWGFRPKRLNFKLFNQVKETTDVTTIANNLTSTVQVFSDSEYQLPYVLGSAHQGCLPPFPADVFMIPQYGYLTLNNGSQAVGRSSFYCLEYFPSQMLRTGNNFTSYTFEDVPFHSSYAHSQSLDRLMNPLIDQYLYYLNRTQNQSGSAQNKDLLFSRGSPTGMSVQPKNWLPGPCYRQQRVSKTKTDNNNSNFTWTGASKYNLNGRESIINPGTAMASHKDDEDKFFPMSGVMIFGKESAGASNTALDNVMITDEEATNPVATERFGTVAVNLQSSPATDVHAMGALPGMVWQDRDVYLQGPIWAKIPHTDGHFHPSPLMGGFGLKHPPPQILIKNTPVPANPPAEFSATKFASFITQYSTGQVSVEIEWELQKENSKRWNPEVQYTSNYAKSANVDFTVDNNGLYTEPRPIGTRYLTRP

SEQ ID NO: 571 - DNA, 2208 bp, synthetic construct
  misc_feature 1..2208: note = source = /note="Description of Artificial Sequence: Synthetic polynucleotide"
  source 1..2208: mol_type = other DNA
atggctgccgatggttatcttccagattggctcgaggacactctctctgaaggaataagacagtggtggaagctcaaacctggcccaccaccaccaaagcccgcagagcggcataaggacgacagcaggggtcttgtgcttcctgggtacaagtacctcggacccttcaacggactcgacaagggagagccggtcaacgaggcagacgccgcggccctcgagcacgacaaagcctatgaccggcagctcgacagcggagacaacccgtacctcaagtacaaccacgccgacgcggagtttcaggagcgccttaaagaagatacgtcttttgggggcaacctcggacgagcagtcttccaggcgaaaaagagggttcttgaacctctgggcctggttgaggaacctgttaagacggctccgggaaaaaagaggccggtagagcactctcctgtggagccagactcctcctcgggaaccggaaaggcgggtcagcagcctgcaagaaaaagattgaattttggtcagactggagacgcagactcagtacctgacccccagcctctcggacagccaccagcagccccctctggtctgggaactaatacgatggctacaggcagtggcgcaccaatggcagacaataacgagggcgccgacggagtgggtaattcctcgggaaattggcattgcgattccacatggatgggcgacagagtcatcaccaccagcacccgaacctgggccctgcccacctacaacaaccacctctacaaacaaatttccagccaatcaggagcctcgaacgacaatcactactttggctacagcaccccttgggggtattttgacttcaacagattccactgccacttttcaccacgtgactggcaaagactcatcaacaacaactggggattccgacccaagagactcaagttcaagctctttaacattcaagtcaaagaggtcacgcagaatgacggtacgacgacgattgccaataaccttaccagcacggttcaggtgtttactgactcggagtaccagctcccgtacgtcctcggctcggcgcatcaaggatgcctcccgccgttcccagcagacgtcttcatggtgccacagtatggatacctcaccctgaacaacgggagtcaggcagtaggacgctcttcattttactgcctggagtactttccttctcagatgctgcgtaccggtaacaactttaccttcagctacacttttgaggacgttcctttccacagcagctacgctcacagccagagtctggaccgtctcatgaatcctctcatcgaccagtacctgtattacttgagcagaacagacgctccaagtggaaccaccacgcagtcaaggcttcagttttctcaggccggagcgagtgacattcgggaccagtctaggaactggcttcctggaccctgttaccgccagcagcgagtatcaaagacatctgcggataacaacaacagtgaatactcgtggactggagctaccaagtaccacctcaatggcagagactctctggtgaatccgggcccggccatggcaagccacaaggacgatgaagaaaagttttttcctcagagcggggttctcatctttgggaagcaaggctcagagaaaacaagtgtggacattgaaaaggtcatgattacagacgaagaggaaatcaggacaaccaatcccgtggctacggagcagtatggttctgtatctaccaacctccagagaggcaacagacaagcagctaccgcagatgtcaacacacaaggcgttcttccaggcatggtctggcaggacagagatgtgtaccttcaggggcccatctgggcaaagattccacacacggacggacattttcacccctctcccctcatgggtggattcggacttaaacaccctcctccacagattctcatcaagaacaccccggtacctgcgaatccttcgaccaccttcagtgcggcaaagtttgcttccttcatcacacagtactccacgggacaggtcagcgtggagatcgagtgggagctgcagaaggaaaacagcaaacgctggaatcccgaagttcagtacacttccaactacaacaagtctgttaatgtggactttactgtggacactaatggcgtgtattcagagcctcgccccattggcaccagatacctgactcgtaatctgtaa

SEQ ID NO: 572 - protein, 735 aa, synthetic construct
  REGION 1..735: note = source = /note="Description of Artificial Sequence: Synthetic polypeptide"
MAADGYLPDWLEDTLSEGIRQWWKLKPGPPPPKPAERHKDDSRGLVLPGYKYLGPFNGLDKGEPVNEADAAALEHDKAYDRQLDSGDNPYLKYNHADAEFQERLKEDTSFGGNLGRAVFQAKKRVLEPLGLVEEPVKTAPGKKRPVEHSPVEPDSSSGTGKAGQQPARKRLNFGQTGDADSVPDPQPLGQPPAAPSGLGTNTMATGSGAPMADNNEGADGVGNSSGNWHCDSTWMGDRVITTSTRTWALPTYNNHLYKQISSQSGASNDNHYFGYSTPWGYFDFNRFHCHFSPRDWQRLINNNWGFRPKRLKFKLFNIQVKEVTQNDGTTTIANNLTSTVQVFTDSEYQLPYVLGSAHQGCLPPFPADVFMVPQYGYLTLNNGSQAVGRSSFYCLEYFPSQMLRTGNNFTFSYTFEDVPFHSSYAHSQSLDRLMNPLIDQYLYYLSRTDAPSGTTTQSRLQFSQAGASDIRDQSRNWLPGPCYRQQRVSKTSADNNNSEYSWTGATKYHLNGRDSLVNPGPAMASHKDDEEKFFPQSGVLIFGKQGSEKTSVDIEKVMITDEEEIRTTNPVATEQYGSVSTNLQRGNRQAATADVNTQGVLPGMVWQDRDVYLQGPIWAKIPHTDGHFHPSPLMGGFGLKHPPPQILIKNTPVPANPSTTFSAAKFASFITQYSTGQVSVEIEWELQKENSKRWNPEVQYTSNYNKSVNVDFTVDTNGVYSEPRPIGTRYLTRNL

SEQ ID NO: 573 - DNA, 2208 bp, synthetic construct
  misc_feature 1..2208: note = source = /note="Description of Artificial Sequence: Synthetic polynucleotide"
  source 1..2208: mol_type = other DNA
atggctgccgatggttatcttccagattggctcgaggacactctctctgaaggaataagacagtggtggaagctcaaacctggcccaccaccaccaaagcccgcagagcggcataaggacgacagcaggggtcttgtgcttcctgggtacaagtacctcggacccttcaacggactcgacaagggagagccggtcaacgaggcagacgccgcggccctcgagcacgacaaagcctatgaccggcagctcgacagcggagacaacccgtacctcaagtacaaccacgccgacgcggagtttcaggagcgccttaaagaagatacgtcttttgggggcaacctcggacgagcagtcttccaggcgaaaaagagggttcttgaacctctgggcctggttgaggaacctgttaagacggctccgggaaaaaagaggccggtagagcactctcctgtggagccagactcctcctcgggaaccggaaaggcgggccagcagcctgcaagaaaaagattgaattttggtcagactggagacgcaaactcagtacctgacccccagcctctcggacagccaccagcagccccctctggtctgggaactaatacgatggctacaggcagtggcgcaccaatggcagacaataacgagggcgccgacggagtgggtaattcctcgggaaattggcattgcgattccacatggatgggcgacagagtcatcaccaccagcacccgaacctgggccctgcccacctacaacaaccacctctacaaacaaatttccagccaatcaggagcctcgaacgacaatcactactttggctacagcaccccttgggggtattttgacttcaacagattccactgccacttttcaccacgtgactggcaaagactcatcaacaacaactggggattccgacccaagagactcaagttcaagctctttaacattcaagtcaaagaggtcacgcagaatgacggtacgacgacgattgccaataaccttaccagcacggttcaggtgtttactgactcggagtaccagctcccgtacgtcctcggctcggcgcatcaaggatgcctcccgccgttcccagcagacgtcttcatggtgccacagtatggatacctcaccctgaacaacgggagtcgggcagtaggacgctcttcattttactgcctggagtactttccttctcagatgctgcgtaccggtaacaactttaccttcagctacacttttgaggacgttcctttccacagcagctacgctcacagccagagtctggaccgtctcatgaatcctctcatcgaccagtacctgtattacttgagcagaacagacactccaagtggaaccaccacgcagtcaaggcttcagttttctcaggccggagcgagtgacattcgggaccagtctaggaactggcttcctggaccctgttaccgccagcagcgagtatcaaagacatctgcggataacaacaacagtgaatactcgtggactggagctaccaagtaccacctcaatggcagagactctctggtgaatccgggcccggccatggcaagccacaaggacgatgaagaaaagttttttcctcagagcggggttctcatctttgggaagcaaggctcagagaaaacaagtgtggacattgaaaaggtcatgattacagacgaagaggaaatcaggacgaccaatcccgtggctacggagcagtatggttctgtatctaccaacctccagagaggcaacagacaagcagctaccgcagatgtcaacacacaaggcgttcttccaggcatggtctggcaggacagagatgtgtaccttcaggggcccatctgggcaaagattccacacacggacggacattttcacccctctcccctcatgggtggattcggacttaaacaccctcctccacagattctcatcaagaacaccccggtacctgcgaatccttcgaccaccttcagtgcggcaaagtttgcttccttcatcacacagtactccacgggacaggtcagcgtggagatcgagtgggagctgcagaaggaaaacagcaaacgctggaatcccgaagttcagtacacttccaactacaacaagtctgttaatgtggactttactgtggacactaatggcgtgtatacagagcctcgccccattggcaccagatacctgactcgtaatctgtaa

SEQ ID NO: 574 - protein, 735 aa, synthetic construct
  REGION 1..735: note = source = /note="Description of Artificial Sequence: Synthetic polypeptide"
MAADGYLPDWLEDTLSEGIRQWWKLKPGPPPPKPAERHKDDSRGLVLPGYKYLGPFNGLDKGEPVNEADAAALEHDKAYDRQLDSGDNPYLKYNHADAEFQERLKEDTSFGGNLGRAVFQAKKRVLEPLGLVEEPVKTAPGKKRPVEHSPVEPDSSSGTGKAGQQPARKRLNFGQTGDANSVPDPQPLGQPPAAPSGLGTNTMATGSGAPMADNNEGADGVGNSSGNWHCDSTWMGDRVITTSTRTWALPTYNNHLYKQISSQSGASNDNHYFGYSTPWGYFDFNRFHCHFSPRDWQRLINNNWGFRPKRLKFKLFNIQVKEVTQNDGTTTIANNLTSTVQVFTDSEYQLPYVLGSAHQGCLPPFPADVFMVPQYGYLTLNNGSRAVGRSSFYCLEYFPSQMLRTGNNFTFSYTFEDVPFHSSYAHSQSLDRLMNPLIDQYLYYLSRTDTPSGTTTQSRLQFSQAGASDIRDQSRNWLPGPCYRQQRVSKTSADNNNSEYSWTGATKYHLNGRDSLVNPGPAMASHKDDEEKFFPQSGVLIFGKQGSEKTSVDIEKVMITDEEEIRTTNPVATEQYGSVSTNLQRGNRQAATADVNTQGVLPGMVWQDRDVYLQGPIWAKIPHTDGHFHPSPLMGGFGLKHPPPQILIKNTPVPANPSTTFSAAKFASFITQYSTGQVSVEIEWELQKENSKRWNPEVQYTSNYNKSVNVDFTVDTNGVYTEPRPIGTRYLTRNL

SEQ ID NO: 575 - DNA, 2211 bp, synthetic construct
  misc_feature 1..2211: note = source = /note="Description of Artificial Sequence: Synthetic polynucleotide"
  source 1..2211: mol_type = other DNA
atggctgccgatggttatcttccagattggctcgaggacactctctctgaaggaataagacagtggtggaagctcaaacctggcccaccaccaccaaagcccgcagagcggcataaggacgacagcaggggtcttgtgcttcctgggtacaagtacctcggacccttcaacggactcgacaagggagagccggtcaacgaggcagacgccgcggccctcgagcacgacaaggcctacgaccagcagctcaaagcgggtgacaatccgtacctgcggtataaccacgccgacgccgagtttcaggagcgtctgcaagaagatacgtcttttgggggcaacctcgggcgagcagtcttccaggccaagaagcgggttctcgaacctctcggtctggttgaggaaggcgctaagacggctcctggaaagaaacgtccggtagagcagtcgccacaagagccagactcctcctcgggcatcggcaagacaggccagcagcccgctaaaaagagactcaattttggtcagactggcgactcagagtcagtccccgacccacaacctctcggagaacctccagcaacccccgctgctgtgggacctactacaatggcttcaggcggtggcgcaccaatggcagacaataacgaaggcgccgacggagtgggtaatgcctcaggaaattggcattgcgattccacatggctgggcgacagagtcatcaccaccagcacccgaacatgggccttgcccacctataacaaccacctctacaagcaaatctccagtgcttcgacgggggccagcaacgacaaccactacttcggctacagcaccccctgggggtattttgactttaacagattccactgccacttttcaccacgtgactggcagcgactcatcaacaataactggggattccggcccaagagactcagcttcaagctcttcaacatccaggtcaaggaggtcacgacgaatgatggcgtcacaaccatcgctaataaccttaccagcacggttcaagtcttctcggactcggagtaccagcttccgtacgtcctcggctctgcgcaccagggctgcctccctccgttcccggcggacgtgttcatgattccgcaatacggctacctgacgctcaacaatggcagccaagccgtgggacgttcatccttttactgcctggaatatttcccttctcagatgctgagaacgggcaacaactttaccttcagctacacctttgaggaagtgcctttccacagcagctacgcgcacagccagagcctggaccggctgatgaatcctctcatcgatcaatacctgtattacctgaacagaactcaaaatcagtccggaagtgcccaaaacaaggacttgctgtttagccgtgggtctccagctggcatgtctgttcagcccaaaaactggctacctggaccctgttatcggcagcagcgcgtttctaaaacaaaaacagacaacaacaacagcaattttacctggactggtgcttcaaaatataacctcaatgggcgtgaatccatcatcaaccctggcactgctatggcctcacacaaagacgacgaagacaagttctttcccatgagcggtgtcatgatttttggaaaagagagcgccggagcttcaaacactgcattggacaatgtcatgattacggacgaagaggaaattaaagccactaaccctgtggccaccgaaagatttgggaccgtggcagtcaatttccagagcagcagcacagaccctgcgaccggagatgtgcatgctatgggagcattacctggcatggtgtggcaagatagagacgtgtacctgcagggtcccatttgggccaaaattcctcacacagatggacactttcacccgtctcctcttatgggcggctttggactcaagaacccgcctcctcagatcctcatcaaaaacacgcctgttcctgcgaatcctccggcggagttttcagctacaaagtttgcttcattcatcactcaatactccacaggacaagtgagcgtggaaattgaatgggagctgcagaaagaaaacagcaaacgctggaatcccgaagtgcagtatacatctaactatgcaaaatctgccaacgttgatttcactgtggacaacaatggactttatactgagcctcgccccattggcacccgttacctcacccgtcccctgtaa

SEQ ID NO: 576 - protein, 736 aa, synthetic construct
  REGION 1..736: note = source = /note="Description of Artificial Sequence: Synthetic polypeptide"
MAADGYLPDWLEDTLSEGIRQWWKLKPGPPPPKPAERHKDDSRGLVLPGYKYLGPFNGLDKGEPVNEADAAALEHDKAYDQQLKAGDNPYLRYNHADAEFQERLQEDTSFGGNLGRAVFQAKKRVLEPLGLVEEGAKTAPGKKRPVEQSPQEPDSSSGIGKTGQQPAKKRLNFGQTGDSESVPDPQPLGEPPATPAAVGPTTMASGGGAPMADNNEGADGVGNASGNWHCDSTWLGDRVITTSTRTWALPTYNNHLYKQISSASTGASNDNHYFGYSTPWGYFDFNRFHCHFSPRDWQRLINNNWGFRPKRLSFKLFNIQVKEVTTNDGVTTIANNLTSTVQVFSDSEYQLPYVLGSAHQGCLPPFPADVFMIPQYGYLTLNNGSQAVGRSSFYCLEYFPSQMLRTGNNFTFSYTFEEVPFHSSYAHSQSLDRLMNPLIDQYLYYLNRTQNQSGSAQNKDLLFSRGSPAGMSVQPKNWLPGPCYRQQRVSKTKTDNNNSNFTWTGASKYNLNGRESIINPGTAMASHKDDEDKFFPMSGVMIFGKESAGASNTALDNVMITDEEEIKATNPVATERFGTVAVNFQSSSTDPATGDVHAMGALPGMVWQDRDVYLQGPIWAKIPHTDGHFHPSPLMGGFGLKNPPPQILIKNTPVPANPPAEFSATKFASFITQYSTGQVSVEIEWELQKENSKRWNPEVQYTSNYAKSANVDFTVDNNGLYTEPRPIGTRYLTRPL

SEQ ID NO: 577 - protein, 735 aa, synthetic construct
  REGION 1..735: note = source = /note="Description of Artificial Sequence: Synthetic polypeptide"
MAADGYLPDWLEDTLSEGIRQWWKLKPGPPPPKPAERHKDDSRGLVLPGYKYLGPFNGLDKGEPVNEADAAALEHDKAYDRQLDSGDNPYLKYNHADAEFQERLKEDTSFGGNLGRAVFQAKKRVLEPLGLVEEPVKTAPGKKRPVEHSPVEPDSSSGTGKAGQQPARKRLNFGQTGDADSVPDPQPLGQPPAAPSGLGTNTMATGSGAPMADNNEGADGVGNSSGNWHCDSTWMGDRVITTSTRTWALPTYNNHLYKQISSQSGASNDNHYFGYSTPWGYFDFNRFHCHFSPRDWQRLINNNWGFRPKRLKFKLFNIQVKEVTQNDGTTTIANNLTSTVQVFTDSEYQLPYVLGSAHQGCLPPFPADVFMVPQYGYLTLNNGSQAVGRSSFYCLEYFPSQMLRTGNNFTFSYTFEDVPFHSSYAHSQSLDRLMNPLIDQYLYYLSRTDTPSGTTTQSRLQFSQAGASDIRNQSRNWLPGPCYRQQRVSKTSADNNNSEYSWTGATKYHLNGRDSLVNPGPAMASHKDDEEKFFPQSGVLIFGKQGSEKTSVDIEKVMITDEEEIRTTNPVATEQYGSVSTNLQRGNRQAATADVNTQGVLPGMVWQDRDVYLQGPIWAKIPHTDGHFHPSPLMGGFGLKHPPPQILIKNTPVPANPSTTFSAAKFASFITQYSTGQVSVEIEWELQKENSKRWNPEVQYTSNYNKSVNVDFTVDTNGVYSEPRPIGTRYLTRNQ

SEQ ID NO: 578 - DNA, 2208 bp, synthetic construct
  misc_feature 1..2208: note = source = /note="Description of Artificial Sequence: Synthetic polynucleotide"
  source 1..2208: mol_type = other DNA
atggctgccgatggttatcttccagattggctcgaggacactctctctgaaggaataagacagtggtggaagctcaaacctggcccaccaccaccaaagcccgcagagcggcataaggacgacagcaggggtcttgtgcttcctgggtacaagtacctcggacccttcaacggactcgacaagggagagccggtcaacgaggcagacgccgcggccctcgagcacgacaaagcctatgaccggcagctcgacagcggagacaacccgtacctcaagtacaaccacgccgacgcggagtttcaggaacgccttaaagaagatacgtcttttgggggcaacctcggacgagcagtcttccaggcgaaaaagagggttcttgaacctctgggcctggttgaggaacctgttaagacggctccgggaaaaaagaggccggtagagcactctcctgtggagccagactcctcctcgggaaccggaaaggcgggccagcagcctgcaagaaaaagattgaattttggtcagactggagacgcagactcagtacctgacccccagcctctcggacagccaccagcagccccctctggtctgggaactaatacgatggctacaggcagtggcgcaccaatggcagacaataacgagggcgccgacggagtgggtaattcctcgggaaattggcattgcgattccacatggatgggcgacagagtcatcaccaccagcacccgaacctgggccctgcccacctacaacaaccacctctacaaacaaatttccagccaatcaggagcctcgaacgacaatcactactttggctacagcaccccttgggggtattttgacttcaacagattccactgccacttttcaccacgtgactggcaaagactcatcaacaacaactggggattccgacccaagagactcaagttcaagctctttaacattcaagtcaaagaggtcacgcagaatgacggtacgacgacgattgccaataaccttaccagcacggttcaggtgtttactgactcggagtaccagctcccgtacgtcctcggctcggcgcatcaaggatgcctcccgccgttcccagcagacgtcttcatggtgccacagtatggatacctcaccctgaacaacgggagtcaggcagtaggacgctcttcattttactgcctggagtactttccttctcagatgctgcgtaccggtaacaactttaccttcagctacacttttgaggacgttcctttccacagcagctacgctcacagccagagtctggaccgtctcatgaatcctctcatcgaccagtacctgtattacttgagcagaacagacactccaagtggaaccaccacgcagtcaaggcttcagttttctcaggccggagcgagtgacattcggaaccagtctaggaactggcttcctggaccctgttaccgccagcagcgagtatcaaagacatctgcggataacaacaacagtgaatactcgtggactggagctaccaagtaccacctcaatggcagagactctctggtgaatccgggcccggccatggcaagccacaaggacgatgaagaaaagttttttcctcagagcggggttctcatctttgggaagcaaggctcagagaaaacaagtgtggacattgaaaaggtcatgattacagacgaagaggaaatcaggacaaccaatcccgtggctacggagcagtatggttctgtatctaccaacctccagagaggcaacagacaagcagctaccgcagatgtcaacacacaaggcgttcttccaggcatggtctggcaggacagagatgtgtaccttcaggggcccatctgggcaaagattccacacacggacggacattttcacccctctcccctcatgggtggattcggacttaaacaccctcctccacagattctcatcaagaacaccccggtacctgcgaatccttcgaccaccttcagtgcggcaaagtttgcttccttcatcacacagtactccacgggacaggtcagcgtggagatcgagtgggagctgcagaaggaaaacagcaaacgctggaatcccgaagttcagtacacttccaactacaacaagtctgttaatgtggactttactgtggacactaatggcgtgtattcagagcctcgccccattggcaccagatacctgactcgtaatcagtaa

SEQ ID NO: 579 - DNA, 2208 bp, synthetic construct
  misc_feature 1..2208: note = source = /note="Description of Artificial Sequence: Synthetic polynucleotide"
  source 1..2208: mol_type = other DNA
atggctgccgatggttatcttccagattggctcgaggacactctctctgaaggaataagacagtggtggaagctcaaacctggcccaccaccaccaaagcccgcagagcggcataaggacgacagcaggggtcttgtgcttcctgggtacaagtacctcggacccttcaacggactcgacaagggagagccggtcaacgaggcagacgccgcggccctcgagcacgacaaagcctatgaccggcagctcgacagcggagacaacccgtacctcaagtacaaccacgccgacgcggagtttcaggagcgccttaaagaagatacgtcttttgggggcaacctcggacgagcagtcttccaggcgaaaaagagggttcttgaacctctgggcctggttgaggaacctgttaagacggctccgggaaaaaagaggccggtagagcactctcctgtggagccagactcctcctcgggaaccggaaaggcgggccagcagcctgcaagaaaaagattgaattttggtcagactggagacgcagactcagtacctgatccccagcctctcggacagccaccagcagccccctctggtctgggaactaatacgatggctacaggcagtggcgcaccaatggcagacaataacgagggcgccgacggagtgggtaattcctcgggaaattggcattgcgattccacatggatgggcgacagagtcatcaccaccagcacccgaacctgggccctgcccacctacaacaaccacctctacaaacaaatttccagccaatcaggagcctcgaacgacaatcactactttggctacagcaccccttgggggtattttgacttcaacagattccactgccacttttcaccacgtgactggcaaagactcatcaacaacaactggggattccgacccaagagactcaagttcaagctctttaacattcaagtcaaagaggtcacgcagaatgacggtacgacgacgattgccaataaccttaccagcacggttcaggtgtttactgactcggagtaccagctcccgtatgtcctcggctcggcgcatcaaggatgcctcccgccgttcccagcagacgtcttcatggtgccacagtatggatacctcaccctgaacaacgggagtcaggcagtaggacgctcttcattttactgcctggagtactttccttctcagatgctgcgtaccggtaacaactttaccttcagctacacttttgaggacgttcctttccacagcagctacgctcacagccagagtctggaccgtctcatgaatcctctcatcgaccagtacctgtattacttgagcagaacagacactccaagtggaaccaccacgcagtcaaggcttcagttttctcaggccggagcgagtgacattcgggaccagtctaggaactggcttcctggaccctgttaccgccagcagcgagtatcaaagacatctgcggataacaacaacagtgaatactcgtggactggagctaccaagtaccacctcaatggcagagactctctggtgaatccgggcccggccatggcaagccacaaggacgatgaagaaaagttttttcctcagagcggggttctcatctttgggaagcaaggctcagagaaaacaagtgtggacattgaaaaggtcatgattacagacgaagaggaaatcaggacaaccaatcccgtggctacggagcagtatggttctgtatctaccaacctccagagaggcaacagacaagcagctaccgcagatgtcaacacacaaggcgttcttccaggcatggtctggcaggacagagatgtgtaccttcaggggcccatctgggcaaagattccacacacggacggacattttcacccctctcccctcatgggtggattcggacttaaacaccctcctccacagattctcatcaagaacaccccggtacctgcgaatccttcgaccaccttcagtgcggcaaagtttgcttccttcatcacacagtactccacgggacaggtcagcgtggagatcgagtgggagctgcagaaggaaaacagcaaacgctggaatcccgaagttcagtacacttccaactacaacaagtctgttaatgtggactttactgtggacactaatggcgtgtattcagagcctcgccccattggcaccagatacctgactcgtaatctgtaa

SEQ ID NO: 580 - protein, 735 aa, synthetic construct
  REGION 1..735: note = source = /note="Description of Artificial Sequence: Synthetic polypeptide"
MAADGYLPDWLEDTLSEGIRQWWKLKPGPPPPKPAERHKDDSRGLVLPGYKYLGPFNGLDKGEPVNEADAAALEHDKAYDRQLDSGDNPYLKYNHADAEFQERLKEDTSFGGNLGRAVFQAKKRVLEPLGLVEEPVKTAPGKKRPVEHSPVEPDSSSGTGKAGQQPARKRLNFGQTGDADSVPDPQPLGQPPAAPSGLGTNTMATGSGAPMADNNEGADGVGNSSGNWHCDSTWMGDRVITTSTRTWALPTYNNHLYKQISSQSGASNDNHYFGYSTPWGYFDFNRFHCHFSPRDWQRLINNNWGFRPKRLKFKLFNIQVKEVTQNDGTTTIANNLTSTVQVFTDSEYQLPYVLGSAHQGCLPPFPADVFMVPQYGYLTLNNGSQAVGRSSFYCLEYFPSQMLRTGNNFTFSYTFEDVPFHSSYAHSQSLDRLMNPLIDQYLYYLSRTDTPSGTTTQSRLQFSQAGASDIRDQSRNWLPGPCYRQQRVSKTSADNNNSEYSWTGATKYHLNGRDSLVNPGPAMASHKDDEEKFFPQSGVLIFGKQGSEKTSVDIEKVMITDEEEIRTTNPVATEQYGSVSTNLQRGNRQAATADVNTQGVLPGMVWQDRDVYLQGPIWAKIPHTDGHFHPSPLMGGFGLKHPPPQILIKNTPVPANPSTTFSAAKFASFITQYSTGQVSVEIEWELQKENSKRWNPEVQYTSNYNKSVNVDFTVDTNGVYSEPRPIGTRYLTRNL

SEQ ID NO: 581 - DNA, 2601 bp, synthetic construct
  misc_feature 1..2601: note = source = /note="Description of Artificial Sequence: Synthetic polynucleotide"
  source 1..2601: mol_type = other DNA
ccatcgacgtcagacgcggaagcttcgatcaactacgcggacaggtaccaaaacaaatgttctcgtcacgtgggcatgaatctgatgctgtttccctgcagacaatgcgagagactgaatcagaattcaaatatctgcttcactcacggtgtcaaagactgtttagagtgctttcccgtgtcagaatctcaacccgtttctgtcgtcaaaaaggcgtatcagaaactgtgctacattcatcacatcatgggaaaggtgccagacgcttgcactgcttgcgacctggtcaatgtggacttggatgactgtgtttctgaacaataaatgacttaaaccaggtatgactgccgatggttatcttccagattggctcgaggacaaccttagtgaaggaattcgcgagtggtgggctttgaaacctggagcccctcaacccaaggcaaatcaacaacatcaagacaacgctcgaggtcttgtgcttccgggttacaaataccttggacccggcaacggactcgacaagggggagccggtcaacgcagcagacgcggcggccctcgagcacgacaaggcctacgaccagcagctcaaggccggagacaacccgtacctcaagtacaaccacgccgacgccgagttccaggagcggctcaaagaagatacgtcttttgggggcaacctcgggcgagcagtcttccaggccaaaaagaggcttcttgaacctcttggtctggttgaggaagcggctaagacggctcctggaaagaagaggcctgtagagcagtctcctcaggaaccggactcctccgcgggtattggcaaatcgggtgcacagcccgctaaaaagagactcaatttcggtcagactggcgacacagagtcagtcccagaccctcaaccaatcggagaacctcccgcagccccctcaggtgtgggatctcttacaatggcttcaggtggtggcgcaccagtggcagacaataacgaaggtgccgatggagtgggtagttcctcgggaaattggcattgcgattcccaatggctgggggacagagtcatcaccaccagcacccgaacctgggccctgcccacctacaacaatcacctctacaagcaaatctccaacagcacatctggaggatcttcaaatgacaacgcctacttcggctacagcaccccctgggggtattttgacttcaacagattccactgccacttctcaccacgtgactggcagcgactcatcaacaacaactggggattccggcctaagcaactcaacttcaagctcttcaacattcaggtcaaagaggttacggacaacaatggagtcaagaccatcgccaataaccttaccagcacggtccaggtcttcacggactcagactatcagctcccgtacgtgctcgggtcggctcacgagggctgcctcccgccgttcccagcggacgttttcatgattcctcagtacgggtatctgacgcttaatgatggaagccaggccgtgggtcgttcgtccttttactgcctggaatatttcccgtcgcaaatgctaagaacgggtaacaacttccagttcagctacgagtttgagaacgtacctttccatagcagctacgctcacagccaaagcctggaccgactaatgaatccactcatcgaccaatacttgtactatctctcaaagactattaacggttctggacagaatcaacaaacgctaaaattcagtgtggccggacccagcaacatggctgtccagggaagaaactacatacctggacccagctaccgacaacaacgtgtctcaaccactgtgactcaaaacaacaacagcgaatttgcttggcctggagcttcttcttgggctctcaatggacgtaatagcttgatgaatcctggacctgctatggccagccacaaagaaggagaggaccgtttctttcctttgtctggatctttaatttttggcaaacaaggaactggaagagacaacgtggatgcggacaaagtcatgataaccaacgaagaagaaattaaaactactaacccggtagcaacggagtcctatggacaagtggccacaaaccaccagagtgcccaagcacaggcgcagaccggctgggttcaaaaccaaggaatacttccgggtatggtttggcaggacagagatgtgtacctgcaaggacccatttgggccaaaattcctcacacggacggcaactttcacccttctccgctgatgggagggtttggaatgaagcacccgcctcctcagatcctcatcaaaaacacacctgtacctgcggatcctccaacggccttcaacaaggacaagctgaactctttcatcacccagtattctactggccaagtcagcgtggagatcgagtgggagctgcagaaggaaaacagcaagcgctggaacccggagatccagtacacttccaactattacaagtctaataatgttgaatttgctgttaatactgaaggtgtatatagtgaaccccgccccattggcaccagatacctgactcgtaatctgtaattgcttgttaatcaataaaccgtttaattcgtttcagttgaactgcggcc

SEQ ID NO: 582 - DNA, 2601 bp, synthetic construct
  misc_feature 1..2601: note = source = /note="Description of Artificial Sequence: Synthetic polynucleotide"
  source 1..2601: mol_type = other DNA
ccatcgacgtcagacgcggaagcttcgatcaactacgcggacaggtaccaaaacaaatgttctcgtcacgtgggcatgaatctgatgctgtttccctgcagacaatgcgagagactgaatcagaattcaaatatctgcttcactcacggtgtcaaagactgtttagagtgctttcccgtgtcagaatctcaacccgtttctgtcgtcaaaaaggcgtatcagaaactgtgctacattcatcacatcatgggaaaggtgccagacgcttgcactgcttgcgacctggtcaatgtggacttggatgactgtgtttctgaacaataaatgacttaaaccaggtatggctgccgatggttatcttccagattggctcgaggacaaccttagtgaaggaattcgcgagtggtgggctttgaaacctggagcccctcaacccaaggcaaatcaacaacatcaagacaacgctcgaggtcttgtgcttccgggttacaaataccttggacccggcaacggactcgacaagggggagccggtcaacgcagcagacgcggcggccctcgagcacgacaaggcctacgaccagcagctcaaggccggagacaacccgtacctcaagtacaaccacgccgacgccgagttccaggagcggctcaaagaagatacgtcttttgggggcaacctcgggcgagcagtcttccaggccaaaaagaggcttcttgaacctcttggtctggttgaggaagcggctaagacggctcctggaaagaagaggcctgtagagcagtctcctcaggaaccggactcctccgcgggtattggcaaatcgggtgcacagcccgctaaaaagagactcaatttcggtcagactggcgacacagagtcagtcccagaccctcaaccaatcggagaacctcccgcagccccctcaggtgtgggatctcttacaatggcttcaggtggtggcgcaccagtggcagacaataacgaaggtgccgatggagtgggtagttcctcgggaaattggcattgcgattcccaatggctgggggacagagtcatcaccaccagcacccgaacctgggccctgcccacctacaacaatcacctctacaagcaaatctccaacagcacatctggaggatcttcaaatgacaacgcctacttcggctacagcaccccctgggggtattttgacttcaacagattccactgccacttctcaccacgtgactggcagcgactcatcaacaacaactggggattccggcctaagcgactcaacttcaagctcttcaacattcaggtcaaagaggttacggacaacaatggagtcaagaccatcgccaataaccttaccagcacggtccaggtcttcacggactcagactatcagctcccgtacgtgctcgggtcggctcacgagggctgcctcccgccgttcccagcggacgttttcatgattcctcagtacgggtatctgacgcttaatgatggaagccaggccgtgggtcgttcgtccttttactgcctggaatatttcccgtcgcaaatgctaagaacgggtaacaacttccagttcagctacgagtttgagaacgtacctttccatagcagctacgctcacagccaaagcctggaccgactaatgaatccactcatcgaccaatacttgtactatctctcaaagactattaacggttctggacagaatcaacaaacgctaaaattcagtgtggccggacccagcaacatggctgtccagggaagaaactacatacctggacccagctaccgacaacaacgtgtctcaaccactgtgactcaaaacaacaacagcgaatttgcttggcctggggcttcttcttgggctctcaatggacgtaatagcttgatgaatcctggacctgctatggccagccacaaagaaggagaggaccgtttctttcctttgtctggatctttaatttttggcaaacaaggaactggaagagacaacgtggatgcggacaaagtcatgataaccaacgaagaagaaattaaaactactaacccggtagcaacggagtcctatggacaagtggccacaaaccaccagagtgcccaagcacaggcgcagaccggctgggttcaaaaccaaggaatacttccgggtatggtttggcaggacagagatgtgtacctgcaaggacccatttgggccaaaattcctcacacgggcggcaactttcacccttctccgctgatgggagggtttggaatgaagcacccgcctcctcagatcctcatcaaaaacacacctgtacctgcggatcctccaacggccttcaacaaggacaagctgaactctttcatcacccagtattctactggccaagtcagcgtggagatcgagtgggagctgcagaaggaaaacagcaagcgctggaacccggagatccagtacacttccaactattacaagtctaataatgttgaatttgctgttaatactggaggtgtatatagtgaaccccgccccattggcaccagatacctgactcgtaatctgtaattgcttgttaatcaataaaccgtttaattcgtttcagttgaactgcggcc

SEQ ID NO: 583 - DNA, 2601 bp, synthetic construct
  misc_feature 1..2601: note = source = /note="Description of Artificial Sequence: Synthetic polynucleotide"
  source 1..2601: mol_type = other DNA
ccatcgacgtcagacgcggaagcttcgatcaactacgcggacaggtaccaaaacaaatgttctcgtcacgtgggcatgaatctgatgctgtttccctgcagacaatgcgagagactgaatcagaattcaaatatctgcttcactcacggtgtcaaagactgtttagagtgctttcccgtgtcagaatctcaacccgtttctgtcgtcaaaaaggcgtatcagaaactgtgctacattcatcacatcatgggaaaggtgccagacgcttgcactgcttgcgacctggtcaatgtggactcggatgactgtgtttctgaacaataaatgacttaaaccaggtatggctgccgatggttatcttccagattggctcgaggacaaccttagtgaaggaattcgcgagtggtgggctttgaaacctggagcccctcaacccaaggcaaatcaacaacatcaagacaacgctcgaggtcttgtgcttccgggttacaaataccttggacccggcaacggactcgacaagggggagccggtcaacgcagcagacgcggcggccctcgagcacgacaaggcctacgaccagcagctcaaggccggagacaacccgtacctcaagtacaaccacgccgacgccgagttccaggagcggctcaaagaagatacgtcttttgggggcaacctcgggcgagcagtcttccaggccaaaaagaggcttcttgaacctcttggtctggttgaggaagcggctaagacggctcctggaaagaagaggcctgtagagcagtctcctcaggaaccggactcctccgcgggtattgacaaatcgggtgcacagcccgctaaaaagagactcaatttcggtcagactggcgacacagagtcagtcccagaccctcaaccaatcggagaacctcccgcagccccctcaggtgtgggatctcttacaatggcttcaggtggtggcgcaccagtggcagacaataacgaaggtgccgatggagtgggtagttcctcgggaaattggcattgcgattcccaatggctgggggacagagtcatcaccaccagcacccgaacctgggccctgcccacctacaacaatcacctctacaagcaaatctccaacagcacatctggaggatcttcaaatgacaacgcctacttcggctacagcaccccctgggggtattttgacttcaacagattccactgccacttctcaccacgtgactggcagcgactcatcaacaacaactggggattccggcctaagcgactcaacttcaagctcttcaacattcaggtcaaagaggttacggacaacaatggagtcaagaccatcgccaataaccttaccagcacggtccaggtcttcacggactcggactatcagctcccgtacgtgctcgggtcggctcacgagggctgcctcccgccgttcccagcggacgttttcatgattcctcagtacgggtatctgacgcttaatgatggaagccaggccgtgggtcgttcgtccttttactgcctggaatatttcccgtcgcaaatgctaagaacgggtaacaacttccagttcagctacgagtttgagaacgtacctttccatagcagctacgctcacagccaaagcctggaccgactaatgaatccactcatcgaccaatacttgtactatctctcaaagactattaacggttctggacagaatcaacaaacgctaaaattcagtgtggccggacccagcaacatggctgtccagggaagaaactacatacctggacccagctaccgacaacaacgtgtctcaaccactgtgactcaaaacaacaacagcgaatttgcttggcctggagcttcttcttgggctctcaatggacgtaatagcttgatgaatcctggacctgctatggccagccacaaagaaggagaggaccgtttctttcctttgtctggatctttaatttttggcaaacaaggaactggaagagacaacgtggatgcggacaaagtcatgataaccaacgaagaagaaattaaaactactaacccggtagcaacggagtcctatggacaagtggccacaaaccaccagagtgcccaagcacaggcgcagaccggctgggttcaaaaccaaggaatacttccgggtatggtttggcaggacagagatgtgtacctgcaaggacccatttgggccaaaattcctcacacggacggcaactttcacccttctccgctgatgggagggtttggaatgaagcacccgcctcctcagatcctcatcaaaaacacacctgtacctgcggatcctccaacggccttcaacaaggacaagctgaactctttcatcacccagtattctactggccaagtcagcgtggagatcgagtgggagctgcagaaggaaaacagcaagcgctggaacccggagatccagtacacttccaactattacaagtctaataatgttgaatttgctgttaatactgaaggtgtatatagtgaaccccgccccattggcaccagatacctgactcgtaatctgtaattgcttgttaatcaataaaccgtttaattcgtttcagttgaactgcggcc

SEQ ID NO: 584 - DNA, 2601 bp, synthetic construct
  misc_feature 1..2601: note = source = /note="Description of Artificial Sequence: Synthetic polynucleotide"
  source 1..2601: mol_type = other DNA
ccatcgacgtcagacgcggaagcttcgatcaactacgcggacaggtaccaaaacaaatgttctcgtcacgtgggcatgaatctgatgctgtttccctgcagacaatgcgagagactgaatcagaattcaaatatctgcttcactcacggtgtcaaagactgtttagagtgctttcccgtgtcagaatctcaacccgtttctgtcgtcaaaaaggcgtatcagaaactgtgctacattcatcacatcatgggaaaggtgccagacgcttgcactgcttgcgacctggtcaatgtggacttggatgactgtgtttctgaacaataaatgacttaaaccaggtatggctgccgatggttatcttccagattggctcgaggacaaccttagtgaaggaattcgcgagtggtgggctttgaaacctggagcccctcaacccaaggcaaatcaacaacatcaagacaacgctcgaggtcttgtgcttccgggttacaaataccttggacccggcaacggactcgacaagggggagccggtcaacgcagcagacgcggcggccctcgagcacgacaaggcctacgaccagcagctcaaggccggagacaacccgtacctcaagtacaaccacgccgacgccgagttccaggagcggctcaaagaagatacgtcttttgggggcaacctcgggcgagcagtcctccaggccaaaaagaggcttcttgaacctcttggtctggttgaggaagcggctaagacggctcctggaaagaagaggcctgtagagcagtctcctcaggaaccggactcctccgcgggtattggcaaatcgggtgcacagcccgctaaaaagagactcaatttcggtcagactggcgacacagagtcagtcccagaccctcaaccaatcggagaacctcccgcagccccctcaggtgtgggatctcttacaatggcttcaggtggtggcgcaccagtggcagacaataacgaaggtgccgatggagtgggtagttcctcgggaaattggcattgcgattcccaatggctgggggacagagtcatcaccaccagcacccgaacctgggccctgcccacctacaacaatcacctctacaagcaaatctccaacagcacatctggaggatcttcaaatgacaacgcctacttcggctacagcaccccctgggggtattttgacttcaacagattccactgccacttctcaccacgtgactggcagcgactcatcaacaacaactggggattccggcctaagcgactcaacttcaagctcttcaacattcaggtcaaagaggttacggacaacaatggagtcaagaccatcgccaataaccttaccagcacggtccaggtcttcacggactcagactatcagctcccgtacgtgctcgggtcggctcacgagggctgcctcccgccgttcccagcggacgttttcatgattcctcagtacgggtatctgacgcttaatgatggaagccaggccgtgggtcgttcgtccttttactgcctggaatatttcccgtcgcaaatgctaagaacgggtaacaacttccagttcagctacgagtttgagaacgtacctttccatagcagctacgctcacagccaaagcctggaccgactaatgaatccactcatcgaccaatacttgtactatctctcaaagactattaacggttctggacagaatcaacaaacgctaaaattcagtgtggccggatccagcaacatggctgtccagggaagaaactacatacctggacccagctaccgacaacaacgtgtctcaaccactgtgactcaaaacaacaacagcgaatttgcttggcctggagcttcttcttgggctctcaatggacgtaatagcttgatgaatcctggacctgctatggccagccacaaagaaggagaggaccgtttctttcctttgtctggatctttaatttttggcaaacaaggaactggaagagacaacgtggatgcggacaaagtcatgataaccaacgaagaagaaattaaaactactaacccggtagcaacggagtcctatggacaagtggccacaaaccaccagagtgcccaagcacaggcgcagaccggctgggttcaaaaccaaggaatacttccaggtatggtttggcaggacagagatgtgtacctgcaaggacccatttgggccaaaattcctcacacggacggcaactttcacccttctccgctgatgggagggtttggaatgaagcacccgcctcctcagatcctcatcaaaaacacacctgtacctgcggatcctccaacggccttcaacaaggacaagctgaactctttcatcacccagtattctactggccaagtcagcgtggagatcgagtgggagctgcagaaggaaaacagcaagcgctggaacccggagatccagtacacttccaactattacaagtctaataatgttgaatttgctgttaatactgaaggtgtatatagtgaaccccgccccattggcaccagatacctgactcgtaatctgtaattgcttgttaatcaataaaccgtttaattcgtttcagttgaactgcggcc

SEQ ID NO: 585 - DNA, 2601 bp, synthetic construct
  misc_feature 1..2601: note = source = /note="Description of Artificial Sequence: Synthetic polynucleotide"
  source 1..2601: mol_type = other DNA
ccatcgacgtcagacgcggaagcttcgatcaactacgcggacaggtaccaaaacaaatgttctcgtcacgtgggcatgaatctgatgctgtttccctgcagacaatgcgagagactgaatcagaattcaaatatctgcttcactcacggtgtcaaagactgtttagagtgctttcccgtgtcagaatctcaacccgtttctgtcgtcaaaaaggcgtatcagaaactgtgctacattcatcacatcatgggaaaggtgccagacgcttgcactgcttgcgacctggtcaatgtggacttggatgactgtgtttctgaacaataaatgacttaaaccaggtatggctgccgatggttatcttccagattggctcgaggacaaccttagtgaaggaattcgcgagtggtgggctttgaaacctggagcccctcaacccaaggcaaatcaacaacatcaagacaacgctcgaggtcttgtgcttccgggttacaaataccttggacccggcaacggactcgacaagggggagccggtcaacgcagcagacgcggcggccctcgagcacgacagggcctacgaccagcagctcaaggccggagacaacccgtacctcaagtacaaccacgccgacgccgagttccaggagcggctcaaagaagatacgtcttttgggggcaacctcgggcgagcagtcttccaggccaaaaagaggcttcttgaacctcttggtctggttgaggaagcggctaagacggctcctggaaagaagaggcctgtagagcagtctcctcaggaaccggactcctccgcgggtattggcaaatcgggtgcacagcccgctaaaaagagactcaatttcggtcagactggcgacacagagtcagtcccagaccctcaaccaatcggagaacctcccgcagccccctcaggtgtgggatctcttacaatggcttcaggtggtggcgcaccagtggcagacaataacgaaggtgccgatggagtgggtagttcctcgggaaattggcattgcgattcccaatggctgggggacagagtcatcaccaccagcacccgaacctgggccctgcccacctacaacaatcacctctacaagcaaatctccaacagcacatctggaggatcttcaaatgacaacgcctacttcggctacagcaccccctgggggtattttgacttcaacagattccactgccacttctcaccacgtgactggcagcgactcatcaacaacaactggggattccggcctaagcgactcaacttcaagctcttcaacattcaggtcaaagaggttacggacaacaatggagtcaagaccatcgccaataaccttaccagcacggtccaggtcttcacggactcagactatcagctcccgtacgtgctcgggtcggctcacgagggctgcctcccgccgttcccagcggacgttttcatgattcctcagtacgggtatctgacgcttaatgatggaagccaggccgtgggtcgttcgtccttttactgcctggaatatttcccgtcgcaaatgctaagaacgggtaacaacttccagttcagctacgagtttgagaacgtacctttccatagcagctacgctcacagccaaagcctggaccgactaatgaatccactcatcgaccaatacttgtactatctctcaaagactattaacggttctggacagaatcaacaaacgctaaaattcagtgtggccggacctagcaacatggctgtccagggaagaaactacatacctggacccagctaccgacaacaacgtgtctcaaccactgtgactcaaaacaacaacagcgaatttgcttggcctggagcttcttcttgggctctcaatggacgtaatagcttgatgaatcctggacctgctatggccagccacaaagaaggagaggaccgtttctttcctttgtctggatctttaatttttggcaaacaaggaactggaagagacaacgtggatgcggacaaagtcatgataaccaacgaagaagaaattaaaactactaacccggtagcaacggagtcctatggacaagtggccacaaaccaccagagtgcccaagcacaggcgcagaccggctgggttcaaaaccaaggaatacttccgggtatggtttggcaggacagagatgtgtacctgcaaggacccatttgggccaaaattcctcacacggacggcaactttcacccttctccgctgatgggagggtttggaatgaagcacccgcctcctcagatcctcatcaaaaacacacctgtacctgcggatcctccaacggccttcaacaaggacaagctgaactctttcatcacccagtattctactggccaagtcagcgtggagatcgagtgggagctgcagaagaaaaacagcaagcgctggaacccggagatccagtacacttccaactattacaagtctaataatgttgaatttgctgttaacactgaaggtgtatatagtgaaccccgccccattggcaccagatacctgactcgtaatctgtaattgcttgttaatcaataaaccgtttaattcgtttcagttgaactgcggcc

SEQ ID NO: 586 - DNA, 2601 bp, synthetic construct
  misc_feature 1..2601: note = source = /note="Description of Artificial Sequence: Synthetic polynucleotide"
  source 1..2601: mol_type = other DNA
ccatcgacgtcagacgcggaagcttcgatcaactacgcggacaggtaccaaaacaaatgttctcgtcacgtgggcatgaatctgatgctgtttccctgcagacaatgcgagagactgaatcagaattcaaatatctgcttcactcacggtgtcaaagactgtttagagtgctttcccgtgtcagaatctcaacccgtttctgtcgtcaaaaaggcgtatcagaaactgtgctacattcatcacatcatgggaaaggtgccagacgcttgcactgcttgcgacctggtcaatgtggacttggatgactgtgtttctgaacaataaatgacttaaaccaggtatggctgccgatggttatcttccagattggctcgaggacaaccttagtgaaggaattcgcgagtggtgggctttgaaacctggagcccctcaacccaaggcaaatcaacaacatcaagacaacgctcgaggtcttgtgcttccgggttacaaataccttggacccggcaacggactcgacaagggggagccggtcaacgcagcagacgcggcggccctcgagcacgacaaggcctacgaccagcagctcaaggccggagacaacccgtacctcaagtacaaccacgccgacgccgagttccaggagcggctcaaagaagatacgtcttttgggggcaacctcgggcgagcagtcttccaggccaaaaagaggcttcttgaacctcttggtctggttgaggaagcggctaagacggctcctggaaagaagaggcctgtagagcagtctcctcaggaaccggactcctccgcgggtattggcaaatcgggtgcacagcccgctaaaaagagactcaatttcggtcagactggcgacacagagtcagtcccagaccctcaaccaatcggagaacctcccgcagccccctcaggtgtgggatctcttacaatggcttcaggtggtggcgcaccagtggcagacaataacgaaggtgccgatggagtgggtagttcctcgggaaattggcattgcgattcccaatggctgggggacagagtcatcaccaccagcacccgaacctgggccctgcccacctacaacaatcacctctacaagcaaatctccaacagcacatctggaggatcttcaaatgacaacgcctacttcggctacagcaccccctgggggtattttgacttcaacagattccactgccacttctcaccacgtgactggcagcgactcatcaacaacaactggggattccggcctaagcgactcaacttcaagctcttcaacattcaggtcaaagaggttacggacaacaatggagtcaagaccatcgccaataaccttaccagcacggtccaggtcttcacggactcagactatcagctcccgtacgtgctcgggtcggctcacgagggctgcctcccgccgttcccagcggacgttttcatgattcctcagtacgggtatctgacgcttaatgatggaagccaggccgtgggtcgttcgtccttttactgcctggaatatttcccgtcgcaaatgctaagaacgggtaacaacttccagttcagctacgagtttgagaacgtacctttccatagcagctacgctcacagccaaagcctggaccgactaatgaatccactcatcgaccaatacttgtactatctctcaaagactattaacggttctggacagaatcaacaaacgctaaaattcagtgtggccggacccagcaacatggctgtccagggaagaaactacatacctggacccagctaccgacaacaacgtgtctcaaccactgtgactcaaaacaacaacagcgaatttgcttggcctggagcttcttcttgggctctcaatggacgtaatagcttgatgaatcctggacctgctatggccagccacaaagaaggagaggaccgtttctttcctttgtctggatctttaatttttggcaaacaaggaactggaagagacaacgtggatgcggacaaagtcatgataaccaacgaagaagaaattaaaactactaacccggtagcaacggagtcctatggacaagtggccacaaaccaccagagtgcccaagcacgggcgcagaccggctgggttcaaaaccaaggaatacttccgggtatggtttggcaggacagagatgtgtacctgcaaggacccatttgggccaaaattcctcacacggacggcaactttcacccttctccgctgatgggagggtttggaatgaagcacccgcctcctcagatcctcatcaaaaacacacctgtacctgcggatcctccaacggccttcaacaaggacaagctgaactctttcatcacccagtattctactggccaagtcagcgtggagatcgagtgggagctgcagaaggaaaacagcaagcgctggaacccggagatccagtacacttccaactattacaagtctaataatgttgaatttgctgttaatactgaaggtgtatatagtgaaccccgccccattggcaccagatacctgactcgtaatctgtaattgcttgttaatcaataaaccgtttaattcgtttcagttgaactgcggcc

SEQ ID NO: 587 - DNA, 2601 bp, synthetic construct
  misc_feature 1..2601: note = source = /note="Description of Artificial Sequence: Synthetic polynucleotide"
  source 1..2601: mol_type = other DNA
ccatcgacgtcagacgcggaagcttcgatcaactacgcggacaggtaccaaaacaaatgttctcgtcacgtgggcatgaatctgatgctgtttccctgcagacaatgcgagagactgaatcagaattcaaatatctgcttcactcacggtgtcaaagactgtttagagtgctttcccgtgtcagaatctcaacccgtttctgtcgtcaaaaaggcgtatcagaaactgtgctacattcatcacatcatgggaaaggtgccagacgcttgcactgcttgcgacctggtcaatgtggacttggatgactgtgtttctgaacaataaatgacttaaaccaggtatggctgccgatggttatcttccagattggctcgaggacaaccttagtgaaggaattcgcgagtggtgggctttgaaacctggagcccctcaacccaaggcaaatcaacaacatcaagacaacgctcgaggtcttgtgcttccgggttacaaataccttggacccggcaacggactcgacaagggggagccggtcaacgcagtagacgcggcggccctcgagcacgacaaggcctacgaccagcagctcaaggccggagacaacccgtacctcaagtacaaccacgccgacgccgagttccaggagcggctcaaagaagatacgtcttttgggggcaacctcgggcgagcagtcttccaggccaaaaagaggcttcttgaacctcttggtctggttgaggaagcggctaagacggctcctggaaagaagaggcctgtagagcagtctcctcaggaaccggactcctccgcgggtattggcaaatcgggtgcacagcccgctaaaaagagactcaatttcggtcagactggcgacacagagtcagtcccagaccctcaaccaatcggagaacctcccgcagccccctcaggtgtgggatctcttacaatggcttcaggtggtggcgcaccagtggcagacaataacgaaggtgccgatggagtgggtagttcctcgggaaattggcattgcgattcccaatggctgggggacagagtcatcaccaccagcacccgaacctgggccctgcccacctacaacaatcacctctacaagcaaatctccaacagcacatctggaggatcttcaaatgacaacgcctacttcggctacagcaccccctgggggtattttgacttcaacagattccactgccacttctcaccacgtgactggcagcgactcatcaacaacaactggggatttcggcctaagcgactcaacttcaagctcttcaacattcaggtcaaagaggttacggacaacaatggagtcaagaccatcgccaataaccttaccagcacggtccaggtcttcacggactcagactatcagctcccgtacgtgctcgggtcggctcacgagggctgcctcccgccgttcccagcggacgttttcatgattcctcagtacgggtatctgacgcttaatgatggaagccaggccgtgggtcgttcgtccttttactgcctggaatatttcccgtcgcaaatgctaagaacgggtaacaacttccagttcagctacgagtttgagaacgtacctttccatagcagctacgctcacagccaaagcctggaccgactaatgaatccactcatcgaccaatacttgtactatctctcaaagactattaacggttctggacagaatcaacaaacgctaaaattcagtgtggccggacccagcaacatggctgtccagggaagaaactacatacctggacccagctaccgacaacaacgtgtctcaaccactgtgactcaaaacaacaacagcgaatttgcttggcctggagcttcttcttgggctctcaatggacgtaatagcttgatgaatcctggacctgctatggccagccacaaagaaggagaggaccgtttctttcctttgtctggatctttaatttttggcaaacaaggaactggaagagacaacgtggatgcggacaaagtcatgataaccaacgaagaagaaattaaaactactaacccggtagcaacggagtcctatggacaagtggccacaaaccaccagagtgcccaagcacaggcgcagaccggctgggttcaaaaccaaggaatacttccgggtatggtttggcaggacagagatgtgtacctgcaaggacccatttgggccaaaattcctcacacggacggcaactttcacccttctccgctgatgggagggtttggaatgaagcacccgcctcctcagatcctcatcaaaaacacacctgtacctgcggatcctccaacggccttcaacaaggacaagctgaactctttcatcacccagtattctactggccaagtcagcgtggagatcgagtgggagctgcagaaggaaaacagcaagcgctggaacccggagatccagtacacttccaactattacaagtctaataatgttgaatttgctgttaatactgaaggtgtatatagtgaaccccgccccattggcaccagatacctgactcgtaatctgtaattgcttgttaatcaataaaccgtttaattcgtttcagttgaactgcggcc

SEQ ID NO: 588 - DNA, 2580 bp, synthetic construct
  misc_feature 1..2580: note = source = /note="Description of Artificial Sequence: Synthetic polynucleotide"
  source 1..2580: mol_type = other DNA
ccatcgacgtcagacgcggaagcttcgatcaactacgcggacaggtaccaaaacaaatgttctcgtcacgtgggcatgaatctgatgctgtttccctgcagacaatgcgagagactgaatcagaattcaaatatctgcttcactcacggtgtcaaagactgtttagagtgctttcccgtgtcagaatctcaacccgtttctgtcgtcaaaaaggcgtatcagaaactgtgctacattcatcacatcatgggaaaggtgccagacgcttgcactgcttgcgacctggtcaatgtggacttggatgactgtgtttctgaacaataaatgacttaaaccaggtatggctgccgatggttatcttccagattggctcgaggacaaccttagtgaaggaattcgcgagtggtgggctttgaaacctggagcccctcaacccaaggcaaatcaacaacatcaagacaacgctcgaggtcttgtgcttccgggttacaaataccttggacccggcaacggactcgacaagggggagccggtcaacgcagcagacgcggcggccctcgagcacgacaaggcctacgaccagcagctcaaggccggagacaacccgtacctcaagtacaaccacgccgacgccgagttccaggagcggctcaaagaagatacgtcttttgggggcaacctcgggcgagcagtcttccaggccaaaaagaggcttcttgaacctcttggtctggttgaggaagcggctaagacggctcctggaaagaagaggcctgtagagcagtctcctcgggaaccggactcctccgcgggtattggcaaatcgggtgcacagcccgctaaaaagagactcaatttcggtcagactggcgacacagagtcagtcccagaccctcaaccaatcggagaacctcccgcagccccctcaggtgtgggatctcttacaatggcttcaggtggtggcgcaccagtggcagacaataacgaaggtgccgatggagtgggtagttcctcgggaaattggcattgcgattcccaatggctgggggacagagtcatcaccaccagcacccgaacctgggccctgcccacctacaacaatcacctctacaagcaaatctccaacagcacatctggaggatcttcaaatgacaacgcctacttcggctacagcaccccctgggggtattttgacttcaacagattccactgccacttctcaccacgtgactggcagcgactcatcaacaacaactggggattccggcctaagcgactcaacttcaagctcttcaacattcaggtcaaagaggttacggacaacaatggagtcaagaccatcgccaataaccttaccagcacggtccaggtcttcacggactcagactatcagctcccgtacgtgctcgggtcggctcacgagggctgcctcccgccgttcccagcggacgttttcatgattcctcagtacgggtatctgacgcttaatgatggaagccaggccgtgggtcgttcgtccttttactgcctggaatatttcccgtcgcaaatgctaagaacgggtaacaacttccagttcagctacgagtttgagaacgtacctttccatagcagctacgctcacagccaaagcctggaccgactaatgaatccactcatcgaccaatacttgtactatctctcaaagactattaacggttctggacagaatcaacaaacgctaaaattcagtgtggccggacccagcaacatggctgtccagggaagaaactacatacctggacccagctaccgacaacaacgtgtctcaaccactgtgactcaaaacaacaacagcgaatttgcttggcctggagcttcttcttgggctctcaatggacgtaatagcttgatgaatcctggacctgctatggccagccacaaagaaggagaggaccgtttctttcctttgtctggatctttaatttttggcaaacaaggaactggaagagacaacgtggatgcggacaaagtcatgataaccaacgaagaagaaattaaaactactaacccggtagcaacggagtcctatggacaagtggccacaaaccaccagagtgcccaagcacaggcgcagaccggctgggttcaaaaccaaggaatacttccgggtatggtttggcaggacagagatgtgtacctgcaaggacccatttgggccaaaattcctcacacggacggcaactttcacccttctccgctgatgggagggtttggaatgaagcacccgcctcctcagatcctcatcaaaaacacacctgtacctgcggatcctccaacggccttcaacaaggacaagctgaactctttcatcacccagtattctactggccaagtcagcgtggagatcgagtgggaactgcagaaggaaaacagcaagcgctggaacccggagatccagtacacttccaactattacaagtctaataatgttgaatttgctgttaatactgaaggtgtatatagtgaaccccgccccattggcaccagatacctgactcgtaatctgtaattgcttgttaatcaataaaccgtttaatt

SEQ ID NO: 589 - DNA, 2601 bp, synthetic construct
  misc_feature 1..2601: note = source = /note="Description of Artificial Sequence: Synthetic polynucleotide"
  source 1..2601: mol_type = other DNA
ccatcgacgtcagacgcggaagcttcgatcaactacgcggacaggtaccaaaacaaatgttctcgtcacgtgggcatgaatctgatgctgtttccctgcagacaatgcgagagactgaatcagaattcaaatatctgcttcactcacggtgtcaaagactgtttagagtgctttcccgtgtcagaatctcaacccgtttctgtcgtcaaaaaggcgtatcagaaactgtgctacattcatcacatcatgggaaaggtgccagacgcttgcactgcttgcgacctggtcaatgtggacttggatgactgtgtttctgaacaataaatgacttaaaccaggtatggctgccgatggttatcttccagattggctcgaggacaaccttagtgaaggaattcgcgagtggtgggctttgaaacctggagcccctcaacccaaggcaaatcaacaacatcaagacaacgctcgaggtcttgtgcttccgggttacaaataccttggacccggcaacggactcgacaagggggagccggtcaacgcagcagacgcggcggccctcgagcacgacaaggcctacgaccagcagctcaaggccggagacaacccgtacctcaagtacaaccacgccgacgccgagttccaggagcggctcaaagaagatacgtcttttgggggcaacctcgggcgagcagtctttcaggccaaaaagaggcttcttgaacctcttggtctggttgaggaagcggctaagacggctcctggaaagaagaggcctgtagagcagtctcctcaggaaccggactcctccgcgggtattggcaaatcgggtgcacagcccgctaaaaagagactcaatttcggtcagactggcgacacagagtcagtcccagaccctcaaccaatcggagaacctcccgcagccccctcaggtgtgggatctcttacaatggcttcatgtggtggcgcaccagtggcagacaataacgaaggtgccgatggagtgggtagttcctcgggaaattggcattgcgattcccaatggctgggggacagagtcatcaccaccagcacccgaacctgggccctgcccacctacaacaatcacctctacaagcaaatctccaacagcacatctggaggatcttcaaatgacaacgcctacttcggctacagcaccccctgggggtattttgacttcaacagattccactgccacttctcaccacgtgactggcagcgactcatcaacaacaactggggattccggcctaagcgactcaacttcaagctcttcaacattcaggtcaaagaggttacggacaacaatggagtcaagaccatcgccaataaccttaccagcacggtccaggtcttcacggactcagactatcagctcccgtacgtgctcgggtcggctcacgagggctgcctcccgccgttcccagcggacgttttcatgattcctcagtacgggtatctgacgcttaatgatggaagccaggccgtgggtcgttcgtccttttactgcctggaatatttcccgtcgcaaatgctaagaacgggtaacaacttccagttcagctacgagtttgagaacgtacctttccatagcagctacgctcacagccaaagcctggaccgactaatgaatccactcatcgaccaatacttgtactatctctcaaagactattaacggttctggacagaatcaacaaacgctaaaattcagtgtggccggacccagcaacatggctgtccagggaagaaactacatacctggacccagctaccgacaacaacgtgtctcaaccactgtgactcaaaacaacaacagcgaatttgcttggcctggagcttcttcttgggctctcaatggacgtaatagcttgatgaatcctggacctgctatggccagccacaaagaaggagaggaccgtttctttcctttgtctggatctttaatttttggcaaacaaggaactggaagagacaacgtggatgcggacaaagtcatgataaccaacgaagaagaaattaaaactactaacccggtagcaacggagtcctatggacaagtggccacaaaccaccagagtgcccaagcacaggcgcagaccggctgggttcaaaaccaaggaatacttccgggtatggtttggcaggacagagatgtgtacctgcaaggacccatttgggccaaaattcctcacacggacggcaactttcacccttctccgctgatgggagggtttggaatgaagcacccgcctcctcagatcctcatcaaaaacacacctgtacctgcggatcctccaacggccttcaacaaggacaagctgaactctttcatcacccagtattctactggccaagtcagcgtggagatcgagtgggagctgcagaaggaaaacagcaagcgctggaacccggagatccagtacacttccaactattacaagtctaataatgttgaatttgctgttaatactgaaggtgtatatagtgaaccccgccccattggcaccagatacctgactcgtaatctgtaattgcttgttaatcaataaaccgtttaattcgtttcagttgaactgcggcc

SEQ ID NO: 590 - DNA, 2601 bp, synthetic construct
  misc_feature 1..2601: note = source = /note="Description of Artificial Sequence: Synthetic polynucleotide"
  source 1..2601: mol_type = other DNA
ccatcgacgtcagacgcggaagcttcgatcaactacgcggacaggtaccaaaacaaatgttctcgtcacgtgggcatgaatctgatgctgtttccctgcagacaatgcgagagactgaatcagaattcaaatatctgcttcactcacggtgtcaaagactgtttagagtgctttcccgtgtcagaatctcaacccgtttctgtcgtcaaaaaggcgtatcagaaactgtgctacattcatcacatcatgggaaaggtgccagacgcttgcactgcttgcgacctggtcaatgtggacttggatgactgtgtttctgaacaataaatgacttaaaccaggtatggctgccgatggttatcttccagattggctcgaggacaaccttagtgaaggaattcgcgagtggtgggctttgaaacctggagcccctcaacccaaggcaaatcaacaacatcaagacaacgctcgaggtcttgtgcttccgggttacaaataccttggacccggcaacggactcgacaagggggagccgatcaacgcagcagacgcggcggccctcgagcacgacaaggcctacgaccagcagctcaaggccggagacaacccgtacctcaagtacaaccacgccgacgccgagttccaggagcggctcaaagaagatacgtcttttgggggcaacctcgggcgagcagtcttccaggccaaaaagaggcttcttgaacctcttggtctggttgaggaagcggctaagacggctcctggaaagaagaggcctgtagagcagtctcctcaggaaccggactcctccgcgggtattggcaaatcgggtgcacagcccgctaaaaagagactcaatttcggtcagactggcgacacagagtcagtcccagaccctcaaccaatcggagaacctcccgcagccccctcaggtgtgggatctcttacaatggcttcaggtggtggcgcaccagtggcagacaataacgaaggtgccgatggagtgggtagttcctcgggaaattggcattgcgattcccaatggctgggggacagagtcatcaccaccagcacccgaacctgggccctgcccacctacaacaatcacctctacaagcaaatctccaacagcacatctggaggatcttcaaatgacaacgcctacttcggctacagcaccccctgggggtattttgacttcaacagattccactgccacttctcaccacgtgactggcagcgactcatcaacaacaactggggattccggcctaagcgactcaacttcaagctcttcaacattcaggtcaaagaggttacggacaacaatggagtcaagaccatcgccaataaccttaccagcacggtccaggtcttcacggactcagactatcagctcccgtacgtgctcgggtcggctcacgagggctgcctcccgccgttcccagcggacgttttcatgattcctcagtacgggtatctgacgcttaatgatggaagccaggccgtgggtcgttcgtccttttactgcctggaatatttcccgtcgcaaatgctaagaacgggtaacaacttccagttcagctacgagtttgagaacgtacctttccatagcagctacgctcacagccaaagcctggaccgactaatgaatccactcatcgaccaatacttgtactatctctcaaagactattaacggttctggacagaatcaacaaacgctaaaattcagtgtggccggacccagcaacatggctgtccagggaagaaactacatacctggacccagctaccgacaacaacgtgtctcaaccactgtgactcaaaacaacaacagcgaatttgcttggcctggagcttcttcttgggctctcaatggacgtaatagcttgatgaatcctggacctgctatggccagccacaaagaaggagaggaccgtttctttcctttgtctggatctttaatttttggcaaacaaggaactggaagagacaacgtggatgcggacaaagtcatgataaccaacgaagaagaaattaaaactactaacccggtagcaacggagtcctatggacaagtggccacaaaccaccagagtgcccaagcacaggcgcagaccggctgggttcaaaaccaaggaatacttccgggtatggtttggcaggacagagatgtgtacctgcaaggacccatttgggccaaaattcctcacacgtacggcaactttcacccttctccgctgatgggagggtttggaatgaagcacccgcctcctcagatcctcatcaaaaacacacctgtacctgcggatcctccaacggccttcaacaaggacaagctgaactctttcatcacccagtattctactggccaagtcagcgtggagatcgagtgggagctgcagaaggaaaacagcaagcgctggaacccggagatccagtacacttccaactattacaagtctaataatgttgaatttgctgttaatactgaaggtgtatatagtgaaccccgccccattggcaccagatacctgactcgtaatctgtaattgcttgttaatcaataaaccgtttaattcgtttcagttgaactgcggcc

SEQ ID NO: 591 - DNA, 2601 bp, synthetic construct
  misc_feature 1..2601: note = source = /note="Description of Artificial Sequence: Synthetic polynucleotide"
  source 1..2601: mol_type = other DNA
ccatcgacgtcagacgcggaagcttcgatcaactacgcggacaggtaccaaaacaaatgttctcgccacgtgggcatgaatctgatgctgtttccctgcagacaatgcgagagactgaatcagaattcaaatatctgcttcactcacggtgtcaaagactgtttagagtgctttcccgtgtcagaatctcaacccgtttctgtcgtcaaaaaggcgtatcagaaactgtgctacattcatcacatcatgggaaaggtgccagacgcttgcactgcttgcgacctggtcaatgtggacttggatgactgtgtttctgaacaataaatgacttaaaccaggtatggctgccgatggttatcttccagattggctcgaggacaaccttagtgaaggaattcgcgagtggtgggctttgaaacctggagcccctcaacccaaggcaaatcaacaacatcaagacaacgctcgaggtcttgtgcttccgggttacaaataccttggacccggcaacggactcgacaagggggagccggtcaacgcagcagacgcggcggccctcgagcacgacaaggcctacgaccagcagctcaaggccggagacaacccgtacctcaagtacaaccacgccgacgccgagttccaggagcggctcaaagaagatacgtcttttgggggcaacctcgggcgagcagtcttccaggccaaaaagaggcttcttgaacctcttggtctggttgaggaagcggctaagacggctcctggaaagaagaggcctgtagagcagtctcctcaggaaccggactcctccgcgggtattggcaaatcgggtgcacagcccgctaaaaagagactcaatttcggtcagactggcgacacagagtcagtcccagaccctcaaccaatcggagaacctcccgctgccccctcaggtgtgggatctcttacaatggcttcaggtggtggcgcaccagtggcagacaataacgaaggtgccgatggagtgggtagttcctcgggaaattggcattgcgattcccaatggctgggggacagagtcatcaccaccagcacccgaacctgggccctgcccacctacaacaatcacctctacaagcaaatctccaacagcacatctggaggatcttcaaatgacaacgcctacttcggctacagcaccccctgggggtattttgacttcaacagattccactgccacttctcaccacatgactggcagcgactcatcaacaacaactggggattccggcctaagcgactcaacttcaagctcttcaacattcaggtcaaagaggttacggacaacaatggagtcaagaccatcgccaataaccttaccagcacggtccaggtcttcacggactcagactatcagctcccgtacgtgctcgggtcggctcacgagggctgcctcccgccgttcccagcggacgttttcatgattcctcagtacgggtatctgacgcttaatgatggaagccaggccgtgggtcgttcgtccttttactgcctggaatatttcccgtcgcaaatgctaagaacgggtaacaacttccagttcagctacgagtttgagaacgtacctttccatagcagctacgctcacagccaaagcctggaccgactaatgaatccactcatcgaccaatacttgtactatctctcaaagactattaacggttctggacagaatcaacaaacgctaaaattcaatgtggccggacccagcaacatggctgtccagggaagaaactacatacctggacccagctaccgacaacaacgtgtctcaaccactgtgactcaaaacaacaacagcgaatttgcctggcctagagcttcttcttgggctctcaatggacgtaatagcttgatgaatcctggacctgctatggccagccacaaagaaggagaggaccgtttctttcctttgtctggatctttaatttttggcaaacaaggaactggaagagacaacgtggatgcggacaaagtcatgataaccaacgaagaagaaattaaaactactaacccggtagcaacggagtcctatggacaagtggccacaaaccaccagagtgcccaagcacaggcgcagaccggctgggttcaaaaccaaggaatacttccgggtatggtttggcaggacagagatgtgtacctgcaaggacccatttgggccaaaattcctcacacggacggcaactttcacccttctccgctgatgggagggtttggaatgaagcacccgcctcctcagatcctcatcaaaaacacacctgtacctgcggatcctccaacggccttcaacaaggacaagctgaactctttcatcacccagtattctactggccaagtcagcatggagatcgagtgggagctgcagaaggaaaacagcaagcgctggaacccggagatccagtacacttccaactattacaagtctaataatgttgaatttgctgttaatactgaaggtgtatatagtgaaccccgccccattggcaccagatacctgactcgtaatctgtaattgcttgttaatcaataaaccgtttaattcgtttcagttgaactgcggcc

SEQ ID NO: 592 - DNA, 2601 bp, synthetic construct
  misc_feature 1..2601: note = source = /note="Description of Artificial Sequence: Synthetic polynucleotide"
  source 1..2601: mol_type = other DNA
ccatcgacgtcagacgcggaagcttcgatcaactacgcggacaggtaccaaaacaaatgttctcgtcacgtgggcatgaatctgatgctgtttccctgcagacaatgcgagagactgaatcagaattcaaatatctgcttcactcacggtgtcaaagactgtttagagtgctttcccgtgtcagaatctcaacccgtttctgtcgtcaaaaaggcgtatcagaaactgtgctacattcatcacatcatgggaaaggtgccagacgcttgcactgcttgcgacctggtcaatgtggacttggatgactgtgtttctgaacaataaatgacttaaaccaggtatggctgccgatggttatcttccagattggctcgaggacaaccttagtgaaggaattcgcgagtggtgggctttgaaacctggagcccctcaacccaaggcaaatcaacaacatcaagacaacgctcgaggtcttgtgcttccgggttacaaataccttggacccggcaacggactcgacaagggggagccggtcaacgcagcagacgcggcggccctcgagcacgacaaggcctacgaccagcagctcaaggccggagacaacccgtacctcaagtacaaccacgccgacgccgagttccaggagcggctcaaagaagatacgtcttttgggggcaacctcgggcgagcagtcttccaggccaaaaagaggcttcttgaacctcttggtctggttgaggaagcggctaagacggctcctggaaagaagaggcctgtagagcagtctcctcaggaaccggactcctccgcgggtattggcaaatcgggtgcacagcccgctaaaaagagactcaatttcggtcagactggcgacacagagtcagtcccagaccctcaaccaatcggagaacctcccgcagccccctcaggtgtgggatctcttacaatggcttcaggtggtggcgcaccagtggcagacaataacgaaggtgccgatggagtgggtagttcctcgggaaattggcattgcgattcccaatggctgggggacagagtcatcaccaccagcacccgaacctgggccctgcccacctacaacaatcacctctacaagcaaatctccaacagcacatctggaggatcttcaaatgacaacgcctacttcggctacagcaccccctgggggtattttgacttcaacagattccactgccacttctcaccacgtgactggcagcgactcatcaacaacaactggggattccggcctaagcgactcaacttcaagctcttcaacattcaggtcaaagaggttacggacaacaatggagtcaagaccatcgccaataaccttaccagcacggtccaggtcttcacggactcagactatcagctcccgtacgtgctcgggtcggctcacgagggctgcctcccgccgttcccagcggacgttttcatgattcctcagtacgggtatctgacgcttaatgatggaagccaggccgtgggtcgttcgtccttttactgcctggaatatttcccgtcgcaaatgctaagaacgggtaacaacttccagttcagctacgagtttgagaacgtacctttccatagcagctacgctcacagccaaagcctggaccgactaatgaatccactcatcgaccaatacttgtactatctctcaaagactattaacggttctggacagaatcaacaaacgctaaaattcagtgtggccggacccagcaacatggctgtccagggaagaaactacatacctggacccagctaccgacaacaacgtgtctcaaccactgtgactcaaaacaacaacagcgaatttgcttggcctagagcttcttcttgggctctcaatggacgtaatagcttgatgaatcctggacctgctatggccagccacaaagaaggagaggaccgtttctttcctttgtctggatctttaatttttggcaaacaaggaactggaagagacaacgtggatgcggacaaagtcatgataaccaacgaagaagaaattaaaactactaacccggtagcaacggagtcctatggacaagtggccacaaaccaccagagtgcccaagcacaggcgcagaccggctgggttcaaaaccaaggaatacttccgggtatggtttggcaggacagagatgtgtacctgcaaggacccatttgggccaaaattcctcacacggacggcaactttcacccttctccgctgatgggagggtttggaatgaagcacccgcctcctcagatcctcatcaaaaacacacctgtacctgcggatcctccaacggccttcaacaaggacaagctgaactctttcatcacccagtattctactggccaagtcagcgtggagatcgagtgggagctgcagaaggaaaacagcaagcgctggaacccggagatccagtacacttccaactattacaagtctaataatgttgaatttgctgttaatactgaaggtgtatatagtgaaccccgccccattggcaccagatacctgactcgtaatctgtaattgcttgttaatcaataaaccgtttaattcgtttcagttgaactgcggcc

SEQ ID NO: 593 - DNA, 2601 bp, synthetic construct
  misc_feature 1..2601: note = source = /note="Description of Artificial Sequence: Synthetic polynucleotide"
  source 1..2601: mol_type = other DNA
ccatcgacgtcagacgcggaagcttcgatcaactacgcggacaggtaccaaaacaaatgttctcgtcacgtgggcatgaatctgatgctgtttccctgcagacaatgcgagagactgaatcagaattcaaatatctgcttcactcacggtgtcaaagactgtttagagtgctttcccgtgtcagaatctcaacccgtttctgtcgtcaaaaaggcgtatcagaaactgtgctacattcatcacatcatgggaaaggtgccagacgcttgcactgcttgcgacctggtcaatgtggacttggatgactgtgtttctgaacaataaatgacttaaaccaggtatggctgccgatggttatcttccagattggctcgaggacaaccttagtgaaggaattcgcgagtggtgggctttgaaacctggagcccctcaacccaaggcaaatcaacaacatcaagacaacgctcgaggtcttgtgcttccgggttacaaataccttggacccggcaacggactcgacaagggggagccggtcaacgcagcagacgcggcggccctcgagcacgacaaggcctacgaccagcagctcaaggccggagacaacccgtacctcaagtacaaccacgccgacgccgagttccaggagcggctcaaagaagatacgtcttttgggggcaacctcgggcgagcagtcttccaggccaaaaagaggcttcttgaacctcttggtctggttgaggaagcggctaagacggctcctggaaagaagaggcctgtagagcagtctcctcaggaaccggactcctccgcgggtattggcaaatcgggtgcacagcccgctaaaaagagactcaatttcggtcagactggcgacacagagtcagtcccagaccctcaaccaatcggagaacctcccgcagccccctcaggtgtgggatctcttacaatggcttcaggtggtggcgcaccagtggcagacaataacgaaggtgccgatggagtgggtagttcctcgggaaattggcattgcgattcccaatggctgggggacagagtcatcaccaccagcacccgaacctgggccctgcccacctacaacaatcacctctacaagcaaatctccaacagcacatctggaggatcttcaaatgacaacgcctacttcggctacagcaccccctgggggtattttgacttcaacagattccactgccacttctcaccacgtgactggcagcgactcatcaacaacaactggggattccggcctaagcgactcaacttcaagctcttcaacattcaggtcaaagaggttacggacaacaatggagtcaagaccatcgccaataaccttaccagcacggtccaggtcttcacggactcagactatcagctcccgtacgtgctcgggtcggctcacgagggctgcctcccgccgttcccagcggacgttttcatgattcctcagtacgggtatctgacgcttaatgatggaagccaggccgtgggtcgttcgtccttttactgcctggaatatttcccgtcgcaaatgctaagaacgggtaacaacttccagttcagctacgagtttgagaacgtacctttccatagcagctacgctcacagccaaagcctggaccgactaatgaatccactcatcgaccaatacttgtactatctctcaaagactattaacggttctggacagaatcaacaaacgctaaaattcagtgtggccggacccagcaacatggctgtccagggaagaaactacatacctggacccagctaccgacaacaacgtgtctcaaccactgtgactcaaaacaacaacagcgaatttgcttggcctagagcttcttcttgggctctcaatggacgtaatagcttgatgaatcctggacctgctatggccagccacaaagaaggagaggaccgtttctttcctttgtctggatctttaatttttggcaaacaaggaactggaagagacaacgtggatgcggacaaagtcatgataaccaacgaagaagaaattaaaactactaacccggtagcaacggagtcctatggacaagtggccacaaaccaccagagtgcccaagcacaggcgcagaccggctgggttcaaaaccaaggaatacttccgggtatggtttggcaggacagagatgtgtacctgcaaggacccatttgggccaaaattcctcacacggacggcaactttcacccttctccgctgatgggagggtttggaatgaagcacccgcctcctcagatcctcatcaaaaacacacctgtacctgcggatcctccaacggccttcaacaaggacaagctgaactctttcatcacccagtattctactggccaagtcagcgtggagatcgagtgggagcggcagaaggaaaacagcaagcgctggaacccggagatccagtacacttccaactattacaagtctaataatgttgaatttgctgttaatactgaaggtgtatatagtgaaccccgccccattggcaccagatacctgactcgtaatctgtaattgcttgttaatcaataaaccgtttaattcgtttcagttgaactgcggcc

SEQ ID NO: 594 - DNA, 2601 bp, synthetic construct
  misc_feature 1..2601: note = source = /note="Description of Artificial Sequence: Synthetic polynucleotide"
  source 1..2601: mol_type = other DNA
ccatcgacgtcagacgcggaagcttcgatcaactacgcggacaggtaccaaaacaaatgttctcgtcacgtgggcatgaatctgatgctgtttccctgcagacaatgcgagagactgaatcagaattcaaatatctgcttcactcacggtgtcaaagactgtttagagtgctttcccgtgtcagaatctcaacccgtttctgtcgtcaaaaaggcgtatcagaaactgtgctacattcatcacatcatgggaaaggtgccagacgcttgcactgcttgcgacctggtcaatgtggacttggatgactgtgtttctgaacaataaatgacttaaaccaggtatggctgccgatggttatcttccagattggctcgaggacaaccttagtgaaggaattcgcgagtggtgggctttgaaacctggagcccctcaacccaaggcaaatcaacaacatcaagacaacgctcgaggtcttgtgcttccgggttacaaataccttggacccggcaacggactcgacaagggggagccggtcaacgcagcagacgcggcggccctcgagcacgacaaggcctacgaccagcagctcaaggccggagacaacccgtacctcaagtacaaccacgccgacgccgagttccaggagcggctcaaagaagatacgtcttttgggggcaacctcgggcgagcagtcttccaggccaaaaagaggcttcttgaacctcttggtctggttgaggaagcggctaagacggctcctggaaagaagaggcctgtagagcagtctcctcaggaaccggactcctccgcgggtattggcaaatcgggtgcacagcccgctaaaaagagactcaatttcggtcagactggcgacacagagtcagtcccagaccctcaaccaatcggagaacctcccgcagccccctcaggtgtgggatctcttacaatggcttcaggtggtggcgcaccagtggcagacaataacgaaggtgccgatggagtgggtagttcctcgggaaattggcattgcgattcccaatggctgggggacagagtcatcaccaccagcacccgaacctgggccctgcccacctacaacaatcacctctacaagcaaatctccaacagcacatctggaggatcttcaaatgacaacgcctacttcggctacagcaccccctgggggtattttgacttcaacagattccactgccacttctcaccacgtgactggcagcgactcatcaacaacaactggggattccggcctaagcgactcaacttcaagctcttcaacattcaggtcaaagaggttacggacaacaatggagtcaagaccatcgccaataaccttaccagcacggtccaggtcttcgcggactcagactatcagctcccgtacgtgctcgggtcggctcacgagggctgcctcccgccgttcccagcggacgttttcatgattcctcagtacgggtatctgacgcttaatgatggaagccaggccgtgggtcgttcgtccttttactgcctggaatatttcccgtcgcaaatgctaagaacgggtaacaacttccagttcagctacgagtttgagaacgtacctttccatagcagctacgctcacagccaaagcctggaccgactaatgaatccactcatcgaccaatacttgtactatctctcaaagactattaacggttctggacagaatcaacaaacgctaaaattcagtgtggccggacccagcaacatggctgtccagggaagaaactacatacctggacccagctaccgacaacaacgtgtctcaaccactgtgactcaaaacaacaacagcgaatttgcttggcctagagcttcttcttgggctctcaatggacgtaatagcttgatgaatcctggacctgctatggccagccacaaagaaggagaggaccgtttctttcctttgtctggatctttaatttttggcaaacaaggaactggaagagacaacgtggatgcggacaaagtcatgataaccaacgaagaagaaattaaaactactaacccggtagcaacggagtcctatggacaagtggccacaaaccaccagagtgcccaagcacaggcgcagaccggctgggttcaaaaccaaggaatacttccgggtatggtttggcaggacagagatgtgtacctgcaaggacccatttgggccaaaattcctcacacggacggcaactttcacccttctccgctgatgggagggtttggaatgaagcacccgcctcctcagatcctcatcaaaaacacacctgtacctgcggatcctccaacggccttcaacaaggacaagctgaactctttcatcacccagtattctactggccaagtcagcgtggagatcgagtgggagctgcagaaggaaaacagcaagcgctggaacccggagatccagtacacttccaactattacaagtctaataatgttgaatttgctgttaatactgaaggtgtatatagtgaaccccgccccattggcaccagatacctgactcgtaatctgtaattgcttgttaatcaataaaccgtttaattcgtttcagttgaactgcggcc

SEQ ID NO: 595 - DNA, 2601 bp, synthetic construct
  misc_feature 1..2601: note = source = /note="Description of Artificial Sequence: Synthetic polynucleotide"
  source 1..2601: mol_type = other DNA
ccatcgacgtcagacgcggaagcttcgatcaactacgcggacaggtaccaaaacaaatgttctcgtcacgtgggcatgaatctgatgctgtttccctgcagacaatgcgagagactgaatcagaattcaaatatctgcttcactcacggtgtcaaagactgtttagagtgctttcccgtgtcagaatctcaacccgtttctgtcgtcaaaaaggcgtatcagaaactgtgctacattcatcacatcatgggaaaggtgccagacgcttgcactgcttgcgacctggtcaatgtggacttggatgactgtgtttctgaacaataaatgacttaaaccaggtatggctgccgatggttatcttccagattggctcgaggacaaccttagtgaaggaattcgcgagtggtgggctttgaaacctggagcccctcaacccaaggcaaatcaacaacatcaagacaacgctcgaggtcttgtgcttccgggttacaaataccttggacccggcaacggactcgacaagggggagccggtcaacgcagcagacgcggcggccctcgagcacgacaaggcctacgaccagcagctcaaggccggagacaacccgtacctcaagtacaaccacgccgacgccgagttccaggagcggctcaaagaagatacgtcttttgggggcaacctcgggcgagcagtcttccaggccaaaaagaggcttcttgaacctcttggtctggttgaggaagcggctaagacggctcctggaaagaagaggcctgtagagcagtctcctcaggaaccggactcctccgcgggtattggcaaatcgggtgcacagcccgctaaaaagagactcaatttcggtcagactggcgacacagagtcagtcccagaccctcaaccaatcggagaacctcccgcagccccctcaggtgtgggatctcttacaatggcttcaggtggtggcgcaccagtggcagacaataacgaaggtgccgatggagtgggtagttcctcgggaaattggcattgcgattcccaatggctgggggacagagtcatcaccaccagcacccgaacctgggccctgcccacctacaacaatcacctctacaagcaaatctccaacagcacatctggaggatcttcaaatgacaacgcctacttcggctacagcaccccctgggggtattttgacttcaacagattccactgccacttctcaccacgtgactggcagcgactcatcaacaacaactggggattccggcctaagcgactcaacttcaagctcttcaacattcaggtcaaagaggttacggacaacaatggagtcaagaccatcgccaataaccttaccagcacggtccaggtcttcacggactcagactatcagctcccgtacgtgctcgggtcggctcacgagggctgcctcccgccgttcccagcggacgttttcatgattcctcagtacgggtatctgacgcttaatgatggaagccaggccgtgggtcgttcgtccttttactgcctggaatatttcccgtcgcaaatgctaagaacgggtaacaacttccagttcagctacgagtttgagaacgtacctttccatagcagctacgctcacagccaaagcctggaccgactaatgaatccactcatcgaccaatacttgtactatctctcaaagactattaacggttctggacagaatcaacaaacgctaaaattcagtgtggccggacccagcaacatggctgtccagggaagaaactacatacctggacccagctaccgacaacaacgtgtctcaaccactgtgactcaaaacaacaacagcgaaattgcttggcctagagcttcttcttgggctctcaatggacgtaatagcttgatgaatcctggacctgctatggccagccacaaagaaggagaggaccgtttctttcctttgtctggatctttaatttttggcaaacaaggaactggaagagacaacgtggatgcggacaaagtcatgataaccaacgaagaagaaattaaaactactaacccagtagcaacggagtcctatggacaagtggccacaaaccaccagagtgcccaagcacaggcgcagaccggctgggttcaaaaccaaggaatacttccgggtatggtttggcaggacagagatgtgtacctgcaaggacccatttgggccaaaattcctcacacggacggcaactttcacccttctccgctgatgggagggtttggaatgaagcacccgcctcctcagatcctcatcaaaaacacacctgtacctgcggatcctccaacggccttcaacaaggacaagctgaactctttcatcacccagtattctactggccaagtcagcgtggagatcgagtgggagctgcagaaggaaaacagcaagcgctggaacccggagatccagtacacttccaactattgcaagtctaataatgttgaatttgctgttaatactgaaggtgtatatagtgaaccccgccccattggcaccagatacctgactcgtaatctgtaattgcttgttaatcaataaaccgtttaattcgtttcagttgaactgcggcc

SEQ ID NO: 596 - DNA, 2601 bp, synthetic construct
  misc_feature 1..2601: note = source = /note="Description of Artificial Sequence: Synthetic polynucleotide"
  source 1..2601: mol_type = other DNA
ccatcgacgtcagacgcggaagcttcgatcaactacgcggacaggtaccaaaacaaatgttctcgtcacgtgggcatgaatctgatgctgtttccctgcagacaatgcgagagactgaatcagaattcaaatatctgcttcactcacggtgtcaaagactgtttagagtgctttcccgtgtcagaatctcaacccgtttctgtcgtcaaaaaggcgtatcagaaactgtgctacattcatcacatcatgggaaaggtgccagacgcttgcactgcttgcgacctggtcaatgtggacttggatgtctgtgtttctgaacaataaatgacttaaaccaggtatggctgccgatggttatcttccagattggctcgaggacaaccttagtgaaggaattcgcgagtggtgggctttgaaacctggagcccctcaacccaaggcaaatcaacaacatcaagacaacgctcgaggtcttgtgcttccgggttacaaataccttggacccggcaacggactcgataagggggagccggtcaacgcagcagacgcggcggccctcgagcacgacaaggcctacgaccagcagctcaaggccggagacaacccgtacctcaagtacaaccacgccgacgccgagttccaggagcggctcaaagaagatacgtcttttgggggcaacctcgggcgagcagtcttccaggccaaaaagaggcttcttgaacctcttggtctggttgaggaagcggctaagacggctcctggaaagaagaggcctgtagagcagtctcctcaggaaccggactcctccgcgggtattggcaaatcgggtgcacagcccgctaaaaagagactcaatttcggtcagactggcgacacagagtcagtcccagaccctcaaccaatcggagaacctcccgcagccccctcaggtgtgggatctcttacaatggcttcaggtggtggcgcaccagtggcagacaataacgaaggtgccgatggagtgggtagttcctcgggaaattggcattgcgattcccaatggctgggggacagagtcatcaccaccagcacccgaacctgggccctgcccacctacaacaatcacctctacaagcaaatctccaacagcacatctggaggatcttcaaatgacaacgcctacttcggctacagcaccccctgggggtattttgacttcaacagattccactgccacttctcaccacgtgactggcagcgactcatcaacaacaactggggattccggcctaagcgactcaacttcaagctcttcaacattcaggtcaaagaggttacggacaacaatggagtcaagaccatcgccaataaccttaccagcacggtccaggtcttcacggactcagactatcagctcccgtacgtgctcgggtcggctcacgagggctgcctcccgccgttcccagcggacgttttcatgattcctcagtacgggtatctgacgcttaatgatggaagccaggccgtgggtcgttcgtccttttactgcctggaatatttcccgtcgcaaatgctaagaacgggtaacaacttccagttcagctacgagtttgagaacgtacctttccatagcagctacgctcacagccaaagcctggaccgactaatgaatccactcatcgaccaatacttgtactatctctcaaagactattaacggttctggacagaatcaacaaacgctaaaattcagtgtggccggacccagcaacatggctgtccagggaagaaactacatacctggacccagctaccgacaacaacgtgtctcaaccactgtgactcaaaacaacaacagcgaatttgcttggcctagagcttcttcttgggctctcaatggacgtaatagcttgatgaatcctggacctgctatggccagccacaaagaaggagaggaccgtttctttcctttgtctggatctttaatttttggcaaacaaggaactggaagagacaacgtggatgcggacaaagtcatgataaccaacgaagaagaaattaaaactactaacccggtagcaacggagtcctatggacaagtggccacaaaccaccagagtgcccaagcacaggcgcagaccggctgggttcaaaaccaaggaatacttccgggtatggtttggcaggacagagatgtgtacctgcaaggacccatttgggccaaaattcctcacacggacggcaactttcacccttctccgctgatgggagggtttggaatgaagcacccgcctcctcagatcctcatcaaaaacacacctgtacctgcggatcctccaacggccttcaacaaggacaagctgaactctttcatcacccagtattctactggccaagtcagcgtggagatcgagtgggagctgcagaaggaaaacagcaagcgctggaacccggagatccagtacacttccaactattacaagtctaataatgttgaatttgctgttaatactgaaggtgtatatagtgaaccccgccccattggcaccagatacctgactcgtaatctgtaattgcttgttaatcaataaaccgtttaattcgtttcagttgaactgcggcc

SEQ ID NO: 597 - protein, 736 aa, synthetic construct
  REGION 1..736: note = source = /note="Description of Artificial Sequence: Synthetic polypeptide"
MTADGYLPDWLEDNLSEGIREWWALKPGAPQPKANQQHQDNARGLVLPGYKYLGPGNGLDKGEPVNAADAAALEHDKAYDQQLKAGDNPYLKYNHADAEFQERLKEDTSFGGNLGRAVFQAKKRLLEPLGLVEEAAKTAPGKKRPVEQSPQEPDSSAGIGKSGAQPAKKRLNFGQTGDTESVPDPQPIGEPPAAPSGVGSLTMASGGGAPVADNNEGADGVGSSSGNWHCDSQWLGDRVITTSTRTWALPTYNNHLYKQISNSTSGGSSNDNAYFGYSTPWGYFDFNRFHCHFSPRDWQRLINNNWGFRPKQLNFKLFNIQVKEVTDNNGVKTIANNLTSTVQVFTDSDYQLPYVLGSAHEGCLPPFPADVFMIPQYGYLTLNDGSQAVGRSSFYCLEYFPSQMLRTGNNFQFSYEFENVPFHSSYAHSQSLDRLMNPLIDQYLYYLSKTINGSGQNQQTLKFSVAGPSNMAVQGRNYIPGPSYRQQRVSTTVTQNNNSEFAWPGASSWALNGRNSLMNPGPAMASHKEGEDRFFPLSGSLIFGKQGTGRDNVDADKVMITNEEEIKTTNPVATESYGQVATNHQSAQAQAQTGWVQNQGILPGMVWQDRDVYLQGPIWAKIPHTDGNFHPSPLMGGFGMKHPPPQILIKNTPVPADPPTAFNKDKLNSFITQYSTGQVSVEIEWELQKENSKRWNPEIQYTSNYYKSNNVEFAVNTEGVYSEPRPIGTRYLTRNL

SEQ ID NO: 598 - protein, 736 aa, synthetic construct
  REGION 1..736: note = source = /note="Description of Artificial Sequence: Synthetic polypeptide"
MAADGYLPDWLEDNLSEGIREWWALKPGAPQPKANQQHQDNARGLVLPGYKYLGPGNGLDKGEPVNAADAAALEHDKAYDQQLKAGDNPYLKYNHADAEFQERLKEDTSFGGNLGRAVFQAKKRLLEPLGLVEEAAKTAPGKKRPVEQSPQEPDSSAGIGKSGAQPAKKRLNFGQTGDTESVPDPQPIGEPPAAPSGVGSLTMASGGGAPVADNNEGADGVGSSSGNWHCDSQWLGDRVITTSTRTWALPTYNNHLYKQISNSTSGGSSNDNAYFGYSTPWGYFDFNRFHCHFSPRDWQRLINNNWGFRPKRLNFKLFNIQVKEVTDNNGVKTIANNLTSTVQVFTDSDYQLPYVLGSAHEGCLPPFPADVFMIPQYGYLTLNDGSQAVGRSSFYCLEYFPSQMLRTGNNFQFSYEFENVPFHSSYAHSQSLDRLMNPLIDQYLYYLSKTINGSGQNQQTLKFSVAGPSNMAVQGRNYIPGPSYRQQRVSTTVTQNNNSEFAWPGASSWALNGRNSLMNPGPAMASHKEGEDRFFPLSGSLIFGKQGTGRDNVDADKVMITNEEEIKTTNPVATESYGQVATNHQSAQAQAQTGWVQNQGILPGMVWQDRDVYLQGPIWAKIPHTGGNFHPSPLMGGFGMKHPPPQILIKNTPVPADPPTAFNKDKLNSFITQYSTGQVSVEIEWELQKENSKRWNPEIQYTSNYYKSNNVEFAVNTGGVYSEPRPIGTRYLTRNL

SEQ ID NO: 599 - protein, 736 aa, synthetic construct
  REGION 1..736: note = source = /note="Description of Artificial Sequence: Synthetic polypeptide"
MAADGYLPDWLEDNLSEGIREWWALKPGAPQPKANQQHQDNARGLVLPGYKYLGPGNGLDKGEPVNAADAAALEHDKAYDQQLKAGDNPYLKYNHADAEFQERLKEDTSFGGNLGRAVFQAKKRLLEPLGLVEEAAKTAPGKKRPVEQSPQEPDSSAGIDKSGAQPAKKRLNFGQTGDTESVPDPQPIGEPPAAPSGVGSLTMASGGGAPVADNNEGADGVGSSSGNWHCDSQWLGDRVITTSTRTWALPTYNNHLYKQISNSTSGGSSNDNAYFGYSTPWGYFDFNRFHCHFSPRDWQRLINNNWGFRPKRLNFKLFNIQVKEVTDNNGVKTIANNLTSTVQVFTDSDYQLPYVLGSAHEGCLPPFPADVFMIPQYGYLTLNDGSQAVGRSSFYCLEYFPSQMLRTGNNFQFSYEFENVPFHSSYAHSQSLDRLMNPLIDQYLYYLSKTINGSGQNQQTLKFSVAGPSNMAVQGRNYIPGPSYRQQRVSTTVTQNNNSEFAWPGASSWALNGRNSLMNPGPAMASHKEGEDRFFPLSGSLIFGKQGTGRDNVDADKVMITNEEEIKTTNPVATESYGQVATNHQSAQAQAQTGWVQNQGILPGMVWQDRDVYLQGPIWAKIPHTDGNFHPSPLMGGFGMKHPPPQILIKNTPVPADPPTAFNKDKLNSFITQYSTGQVSVEIEWELQKENSKRWNPEIQYTSNYYKSNNVEFAVNTEGVYSEPRPIGTRYLTRNL

SEQ ID NO: 600 - protein, 736 aa, synthetic construct
  REGION 1..736: note = source = /note="Description of Artificial Sequence: Synthetic polypeptide"
MAADGYLPDWLEDNLSEGIREWWALKPGAPQPKANQQHQDNARGLVLPGYKYLGPGNGLDKGEPVNAADAAALEHDKAYDQQLKAGDNPYLKYNHADAEFQERLKEDTSFGGNLGRAVLQAKKRLLEPLGLVEEAAKTAPGKKRPVEQSPQEPDSSAGIGKSGAQPAKKRLNFGQTGDTESVPDPQPIGEPPAAPSGVGSLTMASGGGAPVADNNEGADGVGSSSGNWHCDSQWLGDRVITTSTRTWALPTYNNHLYKQISNSTSGGSSNDNAYFGYSTPWGYFDFNRFHCHFSPRDWQRLINNNWGFRPKRLNFKLFNIQVKEVTDNNGVKTIANNLTSTVQVFTDSDYQLPYVLGSAHEGCLPPFPADVFMIPQYGYLTLNDGSQAVGRSSFYCLEYFPSQMLRTGNNFQFSYEFENVPFHSSYAHSQSLDRLMNPLIDQYLYYLSKTINGSGQNQQTLKFSVAGSSNMAVQGRNYIPGPSYRQQRVSTTVTQNNNSEFAWPGASSWALNGRNSLMNPGPAMASHKEGEDRFFPLSGSLIFGKQGTGRDNVDADKVMITNEEEIKTTNPVATESYGQVATNHQSAQAQAQTGWVQNQGILPGMVWQDRDVYLQGPIWAKIPHTDGNFHPSPLMGGFGMKHPPPQILIKNTPVPADPPTAFNKDKLNSFITQYSTGQVSVEIEWELQKENSKRWNPEIQYTSNYYKSNNVEFAVNTEGVYSEPRPIGTRYLTRNL

SEQ ID NO: 601 - protein, 736 aa, synthetic construct
  REGION 1..736: note = source = /note="Description of Artificial Sequence: Synthetic polypeptide"
MAADGYLPDWLEDNLSEGIREWWALKPGAPQPKANQQHQDNARGLVLPGYKYLGPGNGLDKGEPVNAADAAALEHDRAYDQQLKAGDNPYLKYNHADAEFQERLKEDTSFGGNLGRAVFQAKKRLLEPLGLVEEAAKTAPGKKRPVEQSPQEPDSSAGIGKSGAQPAKKRLNFGQTGDTESVPDPQPIGEPPAAPSGVGSLTMASGGGAPVADNNEGADGVGSSSGNWHCDSQWLGDRVITTSTRTWALPTYNNHLYKQISNSTSGGSSNDNAYFGYSTPWGYFDFNRFHCHFSPRDWQRLINNNWGFRPKRLNFKLFNIQVKEVTDNNGVKTIANNLTSTVQVFTDSDYQLPYVLGSAHEGCLPPFPADVFMIPQYGYLTLNDGSQAVGRSSFYCLEYFPSQMLRTGNNFQFSYEFENVPFHSSYAHSQSLDRLMNPLIDQYLYYLSKTINGSGQNQQTLKFSVAGPSNMAVQGRNYIPGPSYRQQRVSTTVTQNNNSEFAWPGASSWALNGRNSLMNPGPAMASHKEGEDRFFPLSGSLIFGKQGTGRDNVDADKVMITNEEEIKTTNPVATESYGQVATNHQSAQAQAQTGWVQNQGILPGMVWQDRDVYLQGPIWAKIPHTDGNFHPSPLMGGFGMKHPPPQILIKNTPVPADPPTAFNKDKLNSFITQYSTGQVSVEIEWELQKKNSKRWNPEIQYTSNYYKSNNVEFAVNTEGVYSEPRPIGTRYLTRNL

SEQ ID NO: 602 - protein, 736 aa, synthetic construct
  REGION 1..736: note = source = /note="Description of Artificial Sequence: Synthetic polypeptide"
MAADGYLPDWLEDNLSEGIREWWALKPGAPQPKANQQHQDNARGLVLPGYKYLGPGNGLDKGEPVNAADAAALEHDKAYDQQLKAGDNPYLKYNHADAEFQERLKEDTSFGGNLGRAVFQAKKRLLEPLGLVEEAAKTAPGKKRPVEQSPQEPDSSAGIGKSGAQPAKKRLNFGQTGDTESVPDPQPIGEPPAAPSGVGSLTMASGGGAPVADNNEGADGVGSSSGNWHCDSQWLGDRVITTSTRTWALPTYNNHLYKQISNSTSGGSSNDNAYFGYSTPWGYFDFNRFHCHFSPRDWQRLINNNWGFRPKRLNFKLFNIQVKEVTDNNGVKTIANNLTSTVQVFTDSDYQLPYVLGSAHEGCLPPFPADVFMIPQYGYLTLNDGSQAVGRSSFYCLEYFPSQMLRTGNNFQFSYEFENVPFHSSYAHSQSLDRLMNPLIDQYLYYLSKTINGSGQNQQTLKFSVAGPSNMAVQGRNYIPGPSYRQQRVSTTVTQNNNSEFAWPGASSWALNGRNSLMNPGPAMASHKEGEDRFFPLSGSLIFGKQGTGRDNVDADKVMITNEEEIKTTNPVATESYGQVATNHQSAQARAQTGWVQNQGILPGMVWQDRDVYLQGPIWAKIPHTDGNFHPSPLMGGFGMKHPPPQILIKNTPVPADPPTAFNKDKLNSFITQYSTGQVSVEIEWELQKENSKRWNPEIQYTSNYYKSNNVEFAVNTEGVYSEPRPIGTRYLTRNL

SEQ ID NO: 603 - protein, 736 aa, synthetic construct
  REGION 1..736: note = source = /note="Description of Artificial Sequence: Synthetic polypeptide"
MAADGYLPDWLEDNLSEGIREWWALKPGAPQPKANQQHQDNARGLVLPGYKYLGPGNGLDKGEPVNAVDAAALEHDKAYDQQLKAGDNPYLKYNHADAEFQERLKEDTSFGGNLGRAVFQAKKRLLEPLGLVEEAAKTAPGKKRPVEQSPQEPDSSAGIGKSGAQPAKKRLNFGQTGDTESVPDPQPIGEPPAAPSGVGSLTMASGGGAPVADNNEGADGVGSSSGNWHCDSQWLGDRVITTSTRTWALPTYNNHLYKQISNSTSGGSSNDNAYFGYSTPWGYFDFNRFHCHFSPRDWQRLINNNWGFRPKRLNFKLFNIQVKEVTDNNGVKTIANNLTSTVQVFTDSDYQLPYVLGSAHEGCLPPFPADVFMIPQYGYLTLNDGSQAVGRSSFYCLEYFPSQMLRTGNNFQFSYEFENVPFHSSYAHSQSLDRLMNPLIDQYLYYLSKTINGSGQNQQTLKFSVAGPSNMAVQGRNYIPGPSYRQQRVSTTVTQNNNSEFAWPGASSWALNGRNSLMNPGPAMASHKEGEDRFFPLSGSLIFGKQGTGRDNVDADKVMITNEEEIKTTNPVATESYGQVATNHQSAQAQAQTGWVQNQGILPGMVWQDRDVYLQGPIWAKIPHTDGNFHPSPLMGGFGMKHPPPQILIKNTPVPADPPTAFNKDKLNSFITQYSTGQVSVEIEWELQKENSKRWNPEIQYTSNYYKSNNVEFAVNTEGVYSEPRPIGTRYLTRNL

SEQ ID NO: 604 - protein, 736 aa, synthetic construct
  REGION 1..736: note = source = /note="Description of Artificial Sequence: Synthetic polypeptide"
MAADGYLPDWLEDNLSEGIREWWALKPGAPQPKANQQHQDNARGLVLPGYKYLGPGNGLDKGEPVNAADAAALEHDKAYDQQLKAGDNPYLKYNHADAEFQERLKEDTSFGGNLGRAVFQAKKRLLEPLGLVEEAAKTAPGKKRPVEQSPREPDSSAGIGKSGAQPAKKRLNFGQTGDTESVPDPQPIGEPPAAPSGVGSLTMASGGGAPVADNNEGADGVGSSSGNWHCDSQWLGDRVITTSTRTWALPTYNNHLYKQISNSTSGGSSNDNAYFGYSTPWGYFDFNRFHCHFSPRDWQRLINNNWGFRPKRLNFKLFNIQVKEVTDNNGVKTIANNLTSTVQVFTDSDYQLPYVLGSAHEGCLPPFPADVFMIPQYGYLTLNDGSQAVGRSSFYCLEYFPSQMLRTGNNFQFSYEFENVPFHSSYAHSQSLDRLMNPLIDQYLYYLSKTINGSGQNQQTLKFSVAGPSNMAVQGRNYIPGPSYRQQRVSTTVTQNNNSEFAWPGASSWALNGRNSLMNPGPAMASHKEGEDRFFPLSGSLIFGKQGTGRDNVDADKVMITNEEEIKTTNPVATESYGQVATNHQSAQAQAQTGWVQNQGILPGMVWQDRDVYLQGPIWAKIPHTDGNFHPSPLMGGFGMKHPPPQILIKNTPVPADPPTAFNKDKLNSFITQYSTGQVSVEIEWELQKENSKRWNPEIQYTSNYYKSNNVEFAVNTEGVYSEPRPIGTRYLTRNL

SEQ ID NO: 605 - protein, 736 aa, synthetic construct
  REGION 1..736: note = source = /note="Description of Artificial Sequence: Synthetic polypeptide"
MAADGYLPDWLEDNLSEGIREWWALKPGAPQPKANQQHQDNARGLVLPGYKYLGPGNGLDKGEPVNAADAAALEHDKAYDQQLKAGDNPYLKYNHADAEFQERLKEDTSFGGNLGRAVFQAKKRLLEPLGLVEEAAKTAPGKKRPVEQSPQEPDSSAGIGKSGAQPAKKRLNFGQTGDTESVPDPQPIGEPPAAPSGVGSLTMASCGGAPVADNNEGADGVGSSSGNWHCDSQWLGDRVITTSTRTWALPTYNNHLYKQISNSTSGGSSNDNAYFGYSTPWGYFDFNRFHCHFSPRDWQRLINNNWGFRPKRLNFKLFNIQVKEVTDNNGVKTIANNLTSTVQVFTDSDYQLPYVLGSAHEGCLPPFPADVFMIPQYGYLTLNDGSQAVGRSSFYCLEYFPSQMLRTGNNFQFSYEFENVPFHSSYAHSQSLDRLMNPLIDQYLYYLSKTINGSGQNQQTLKFSVAGPSNMAVQGRNYIPGPSYRQQRVSTTVTQNNNSEFAWPGASSWALNGRNSLMNPGPAMASHKEGEDRFFPLSGSLIFGKQGTGRDNVDADKVMITNEEEIKTTNPVATESYGQVATNHQSAQAQAQTGWVQNQGILPGMVWQDRDVYLQGPIWAKIPHTDGNFHPSPLMGGFGMKHPPPQILIKNTPVPADPPTAFNKDKLNSFITQYSTGQVSVEIEWELQKENSKRWNPEIQYTSNYYKSNNVEFAVNTEGVYSEPRPIGTRYLTRNL

SEQ ID NO: 606 - protein, 736 aa, synthetic construct
  REGION 1..736: note = source = /note="Description of Artificial Sequence: Synthetic polypeptide"
MAADGYLPDWLEDNLSEGIREWWALKPGAPQPKANQQHQDNARGLVLPGYKYLGPGNGLDKGEPINAADAAALEHDKAYDQQLKAGDNPYLKYNHADAEFQERLKEDTSFGGNLGRAVFQAKKRLLEPLGLVEEAAKTAPGKKRPVEQSPQEPDSSAGIGKSGAQPAKKRLNFGQTGDTESVPDPQPIGEPPAAPSGVGSLTMASGGGAPVADNNEGADGVGSSSGNWHCDSQWLGDRVITTSTRTWALPTYNNHLYKQISNSTSGGSSNDNAYFGYSTPWGYFDFNRFHCHFSPRDWQRLINNNWGFRPKRLNFKLFNIQVKEVTDNNGVKTIANNLTSTVQVFTDSDYQLPYVLGSAHEGCLPPFPADVFMIPQYGYLTLNDGSQAVGRSSFYCLEYFPSQMLRTGNNFQFSYEFENVPFHSSYAHSQSLDRLMNPLIDQYLYYLSKTINGSGQNQQTLKFSVAGPSNMAVQGRNYIPGPSYRQQRVSTTVTQNNNSEFAWPGASSWALNGRNSLMNPGPAMASHKEGEDRFFPLSGSLIFGKQGTGRDNVDADKVMITNEEEIKTTNPVATESYGQVATNHQSAQAQAQTGWVQNQGILPGMVWQDRDVYLQGPIWAKIPHTYGNFHPSPLMGGFGMKHPPPQILIKNTPVPADPPTAFNKDKLNSFITQYSTGQVSVEIEWELQKENSKRWNPEIQYTSNYYKSNNVEFAVNTEGVYSEPRPIGTRYLTRNL

SEQ ID NO: 607 - protein, 736 aa, synthetic construct
  REGION 1..736: note = source = /note="Description of Artificial Sequence: Synthetic polypeptide"
MAADGYLPDWLEDNLSEGIREWWALKPGAPQPKANQQHQDNARGLVLPGYKYLGPGNGLDKGEPVNAADAAALEHDKAYDQQLKAGDNPYLKYNHADAEFQERLKEDTSFGGNLGRAVFQAKKRLLEPLGLVEEAAKTAPGKKRPVEQSPQEPDSSAGIGKSGAQPAKKRLNFGQTGDTESVPDPQPIGEPPAAPSGVGSLTMASGGGAPVADNNEGADGVGSSSGNWHCDSQWLGDRVITTSTRTWALPTYNNHLYKQISNSTSGGSSNDNAYFGYSTPWGYFDFNRFHCHFSPHDWQRLINNNWGFRPKRLNFKLFNIQVKEVTDNNGVKTIANNLTSTVQVFTDSDYQLPYVLGSAHEGCLPPFPADVFMIPQYGYLTLNDGSQAVGRSSFYCLEYFPSQMLRTGNNFQFSYEFENVPFHSSYAHSQSLDRLMNPLIDQYLYYLSKTINGSGQNQQTLKFNVAGPSNMAVQGRNYIPGPSYRQQRVSTTVTQNNNSEFAWPRASSWALNGRNSLMNPGPAMASHKEGEDRFFPLSGSLIFGKQGTGRDNVDADKVMITNEEEIKTTNPVATESYGQVATNHQSAQAQAQTGWVQNQGILPGMVWQDRDVYLQGPIWAKIPHTDGNFHPSPLMGGFGMKHPPPQILIKNTPVPADPPTAFNKDKLNSFITQYSTGQVSMEIEWELQKENSKRWNPEIQYTSNYYKSNNVEFAVNTEGVYSEPRPIGTRYLTRNL

SEQ ID NO: 608 - protein, 736 aa, synthetic construct
  REGION 1..736: note = source = /note="Description of Artificial Sequence: Synthetic polypeptide"
MAADGYLPDWLEDNLSEGIREWWALKPGAPQPKANQQHQDNARGLVLPGYKYLGPGNGLDKGEPVNAADAAALEHDKAYDQQLKAGDNPYLKYNHADAEFQERLKEDTSFGGNLGRAVFQAKKRLLEPLGLVEEAAKTAPGKKRPVEQSPQEPDSSAGIGKSGAQPAKKRLNFGQTGDTESVPDPQPIGEPPAAPSGVGSLTMASGGGAPVADNNEGADGVGSSSGNWHCDSQWLGDRVITTSTRTWALPTYNNHLYKQISNSTSGGSSNDNAYFGYSTPWGYFDFNRFHCHFSPRDWQRLINNNWGFRPKRLNFKLFNIQVKEVTDNNGVKTIANNLTSTVQVFTDSDYQLPYVLGSAHEGCLPPFPADVFMIPQYGYLTLNDGSQAVGRSSFYCLEYFPSQMLRTGNNFQFSYEFENVPFHSSYAHSQSLDRLMNPLIDQYLYYLSKTINGSGQNQQTLKFSVAGPSNMAVQGRNYIPGPSYRQQRVSTTVTQNNNSEFAWPRASSWALNGRNSLMNPGPAMASHKEGEDRFFPLSGSLIFGKQGTGRDNVDADKVMITNEEEIKTTNPVATESYGQVATNHQSAQAQAQTGWVQNQGILPGMVWQDRDVYLQGPIWAKIPHTDGNFHPSPLMGGFGMKHPPPQILIKNTPVPADPPTAFNKDKLNSFITQYSTGQVSVEIEWELQKENSKRWNPEIQYTSNYYKSNNVEFAVNTEGVYSEPRPIGTRYLTRNL

SEQ ID NO: 609 - protein, 736 aa, synthetic construct
  REGION 1..736: note = source = /note="Description of Artificial Sequence: Synthetic polypeptide"
MAADGYLPDWLEDNLSEGIREWWALKPGAPQPKANQQHQDNARGLVLPGYKYLGPGNGLDKGEPVNAADAAALEHDKAYDQQLKAGDNPYLKYNHADAEFQERLKEDTSFGGNLGRAVFQAKKRLLEPLGLVEEAAKTAPGKKRPVEQSPQEPDSSAGIGKSGAQPAKKRLNFGQTGDTESVPDPQPIGEPPAAPSGVGSLTMASGGGAPVADNNEGADGVGSSSGNWHCDSQWLGDRVITTSTRTWALPTYNNHLYKQISNSTSGGSSNDNAYFGYSTPWGYFDFNRFHCHFSPRDWQRLINNNWGFRPKRLNFKLFNIQVKEVTDNNGVKTIANNLTSTVQVFTDSDYQLPYVLGSAHEGCLPPFPADVFMIPQYGYLTLNDGSQAVGRSSFYCLEYFPSQMLRTGNNFQFSYEFENVPFHSSYAHSQSLDRLMNPLIDQYLYYLSKTINGSGQNQQTLKFSVAGPSNMAVQGRNYIPGPSYRQQRVSTTVTQNNNSEFAWPRASSWALNGRNSLMNPGPAMASHKEGEDRFFPLSGSLIFGKQGTGRDNVDADKVMITNEEEIKTTNPVATESYGQVATNHQSAQAQAQTGWVQNQGILPGMVWQDRDVYLQGPIWAKIPHTDGNFHPSPLMGGFGMKHPPPQILIKNTPVPADPPTAFNKDKLNSFITQYSTGQVSVEIEWERQKENSKRWNPEIQYTSNYYKSNNVEFAVNTEGVYSEPRPIGTRYLTRNL

SEQ ID NO: 610 - protein, 736 aa, synthetic construct
  REGION 1..736: note = source = /note="Description of Artificial Sequence: Synthetic polypeptide"
MAADGYLPDWLEDNLSEGIREWWALKPGAPQPKANQQHQDNARGLVLPGYKYLGPGNGLDKGEPVNAADAAALEHDKAYDQQLKAGDNPYLKYNHADAEFQERLKEDTSFGGNLGRAVFQAKKRLLEPLGLVEEAAKTAPGKKRPVEQSPQEPDSSAGIGKSGAQPAKKRLNFGQTGDTESVPDPQPIGEPPAAPSGVGSLTMASGGGAPVADNNEGADGVGSSSGNWHCDSQWLGDRVITTSTRTWALPTYNNHLYKQISNSTSGGSSNDNAYFGYSTPWGYFDFNRFHCHFSPRDWQRLINNNWGFRPKRLNFKLFNIQVKEVTDNNGVKTIANNLTSTVQVFADSDYQLPYVLGSAHEGCLPPFPADVFMIPQYGYLTLNDGSQAVGRSSFYCLEYFPSQMLRTGNNFQFSYEFENVPFHSSYAHSQSLDRLMNPLIDQYLYYLSKTINGSGQNQQTLKFSVAGPSNMAVQGRNYIPGPSYRQQRVSTTVTQNNNSEFAWPRASSWALNGRNSLMNPGPAMASHKEGEDRFFPLSGSLIFGKQGTGRDNVDADKVMITNEEEIKTTNPVATESYGQVATNHQSAQAQAQTGWVQNQGILPGMVWQDRDVYLQGPIWAKIPHTDGNFHPSPLMGGFGMKHPPPQILIKNTPVPADPPTAFNKDKLNSFITQYSTGQVSVEIEWELQKENSKRWNPEIQYTSNYYKSNNVEFAVNTEGVYSEPRPIGTRYLTRNL

SEQ ID NO: 611 - protein, 736 aa, synthetic construct
  REGION 1..736: note = source = /note="Description of Artificial Sequence: Synthetic polypeptide"
MAADGYLPDWLEDNLSEGIREWWALKPGAPQPKANQQHQDNARGLVLPGYKYLGPGNGLDKGEPVNAADAAALEHDKAYDQQLKAGDNPYLKYNHADAEFQERLKEDTSFGGNLGRAVFQAKKRLLEPLGLVEEAAKTAPGKKRPVEQSPQEPDSSAGIGKSGAQPAKKRLNFGQTGDTESVPDPQPIGEPPAAPSGVGSLTMASGGGAPVADNNEGADGVGSSSGNWHCDSQWLGDRVITTSTRTWALPTYNNHLYKQISNSTSGGSSNDNAYFGYSTPWGYFDFNRFHCHFSPRDWQRLINNNWGFRPKRLNFKLFNIQVKEVTDNNGVKTIANNLTSTVQVFTDSDYQLPYVLGSAHEGCLPPFPADVFMIPQYGYLTLNDGSQAVGRSSFYCLEYFPSQMLRTGNNFQFSYEFENVPFHSSYAHSQSLDRLMNPLIDQYLYYLSKTINGSGQNQQTLKFSVAGPSNMAVQGRNYIPGPSYRQQRVSTTVTQNNNSEIAWPRASSWALNGRNSLMNPGPAMASHKEGEDRFFPLSGSLIFGKQGTGRDNVDADKVMITNEEEIKTTNPVATESYGQVATNHQSAQAQAQTGWVQNQGILPGMVWQDRDVYLQGPIWAKIPHTDGNFHPSPLMGGFGMKHPPPQILIKNTPVPADPPTAFNKDKLNSFITQYSTGQVSVEIEWELQKENSKRWNPEIQYTSNYCKSNNVEFAVNTEGVYSEPRPIGTRYLTRNL

SEQ ID NO: 612 - protein, 736 aa, synthetic construct; identical to SEQ ID NO: 608
  REGION 1..736: note = source = /note="Description of Artificial Sequence: Synthetic polypeptide"

SEQ ID NO: 613 - DNA, 2208 bp, synthetic construct
  misc_feature 1..2208: note = source = /note="Description of Artificial Sequence: Synthetic polynucleotide"
  source 1..2208: mol_type = other DNA
atggctgccgatggttatcttccagattggctcgaggacaaccttagtgaaggaattcgcgagtggtgggctttgaaacctggagcccctcaacccaaggcaaatcaacaacatcaagacaacgctcgaggtcttgtgcttccgggttacaaataccttggacccggcaacggactcgacaagggggagccggtcaacgcagcagacgcggcggccctcgagcacgacaaggcctacgaccagcagctcaaggccggagacaacccgtacctcaagtacaaccacgccgacgccgagttccaggagcggctcaaagaagatacgtcttttgggggcaacctcgggcgagcagtcttccaggccaaaaagaggcttcttgaacctcttggtctggttgaggaagcggctaagacggctcctggaaagaagaggcctgtagagcagtctcctcaggaaccggactcctccgcgggtattggcaaatcgggtgcacagcccgctaaaaagagactcaatttcggtcagactggcgacacagagtcagtcccagaccctcaaccaatcggagaacctcccgcagccccctcaggtgtgggatctcttacaatggcttcaggtggtggcgcaccagtggcagacaataacgaaggtgccgatggagtgggtagttcctcgggaaattggcattgcgattcccaatggctgggggacagagtcatcaccaccagcacccgaacctgggccctgcccacctacaacaatcacctctacaagcaaatctccaacagcacatctggaggatcttcaaatgacaacgcctacttcggctacagcaccccctgggggtattttgacttcaacagattccactgccacttctcaccacgtgactggcagcgactcatcaacaacaactggggattccggcctaagcgactcaacttcaagctcttcaacattcaggtcaaagaggttacggacaacaatggagtcaagaccatcgccaataaccttaccagcacggtccaggtcttcacggactcagactatcagctcccgtacgtgctcgggtcggctcacgagggctgcctcccgccgttcccagcggacgttttcatgattcctcagtacgggtatctgacgcttaatgatggaagccaggccgtgggtcgttcgtccttttactgcctggaatatttcccgtcgcaaatgctaagaacgggtaacaacttccagttcggctacgagtttgagaacgtacctttccatagcagctacgctcacagccaaagcctggaccgactaatgaatccactcatcgaccaatacttgtactatctctcaaagactattaacggttctggacagaatcaacaaacgctaaaattcagtgtggccggacccagcaacatggctgtccagggaagaaactacatacctggacccagctaccgacaacaacgtgtctcaaccactgtgactcaaaacaacaacagcgaatttgcttggcctggagcttcttcttgggctctcaatggacgtaatagcttgatgaatcctggacctgctatggccagccacaaagaaggagaggaccgtttctttcctttgtctggatctttaatttttggcaaacaaggaactggaagagacaacgtggatgcggacaaagtcatgataaccaacgaagaagaaattaaaactactaacccggtagcaacggagtcctatggacaagtggccacaaaccaccagagtgcccaagcacaggcgcagaccggctgggttcaaaaccaaggaatacttccgggtatggtttggcaggacagagatgtgtacctgcaaggacccatttgggccaaaattcctcacacggacggcaactttcacccttctccgctgatgggagggtttggaatgaagcacccgcctcctcagatcctcatcaaaaacacacctgtacctgcggatcctccaacggccttcaacaaggacaagctgaactctttcatcacccagtattctactggccaagtcagcgtggagatcgagtgggagctgcagaaggaaaacagcaagcgctgggacccggagatccagtacacttccaactattacaagtctaataatgttgaatttgctgttaatactgaaggtgtatatagtgaaccccgccccattggcaccagatacctgactcgtaatctg

SEQ ID NO: 614 - DNA, 2208 bp, synthetic construct
  misc_feature 1..2208: note = source = /note="Description of Artificial Sequence: Synthetic polynucleotide"
  source 1..2208: mol_type = other DNA
atggctgccgatggttatcttccagattggctcgaggacaaccttagtgaaggaattcgcgagtggtgggctttgaaacctggagcccctcaacccaaggcaaatcaacaacatcaagacaacgctcgaggtcttgtgcttccgggttacaaataccttggacccggcaacggactcgacaagggggagccggtcaacgcagcagacgcggcggccctcgagcacgacaaggcctacgaccagcagctcaaggccggagacaacccgtacctcaagtacaaccacgccgacgccgagttccaggagcggctcaaagaagatacgtcttttgggggcaacctcgggcgagcagtcttccaggccaaaaagaggcttcttgaacctcttggtctggttgaggaagcggctaagacggctcctggaaagaagaggcctgtagagcagtctcctcaggaaccggactcctccgcgggtattggcaaatcgggtgcacagcccgctaaaaagagactcaatttcggtcagactggcgacacagagtcagtcccagaccctcaaccaatcggagaacctcccgcagccccctcaggtgtgggatctcttacaatggcttcaggtggtggcgcaccagtggcagacaataacgaaggtgccgatggagtgggtagttcctcgggaaattggcattgcgattcccaatggctgggggacagagtcatcaccaccagcacccgaacctgggccctgcccacctacaacaatcacctctacaagcaaatctccaacagcacatctggaggatcttcaaatgacaacgcctacttcggctacagcaccccctgggggtattttgacttcaacagattccactgccgcttctcaccacgtgactggcagcgactcatcaacaacaactggggattccggcctaagcgactcaacttcaagctcttcaacattcaggtcaaagaggttacggacaacaatggagtcaagaccatcgccaataaccttaccagcacggtccaggtcttcacggactcagactatcagctcccgtacgtgctcgggtcggctcacgagggctgcctcccgccgttcccagcggacgttttcatgattcctcagtacgggtatctgacgcttaatgatggaagccaggccgtgggtcgttcgtccttttactgcctggaatatttcccgtcgcaaatgctaagaacgggtaacaacttccagttcagctacgagtttgagaacgtacctttccatagcagctacgctcacagccaaagcctggaccgactaatgaatccactcatcgaccaatacttgtactatctctcaaagactattaacggttctggacagaatcaacaaacgctaaaattcagtgtggccggacccagcaacatggctgtccagggaagaaactacatacctggacccagctaccgacaacaacgtgtctcaaccactgtgactcaaaacaacaacagcgaatttgcttggcctggagcttcttcttgggctctcaatggacgtaatagcttgatgaatcctggacctgctatggccagccacaaagaaggagaggaccgtttctttcctttgtctggatctttaatttttggcaaacaaggaactggaagagacaacgtggatgcggacaaagtcatgataaccaacgaagaagaaattaaaactactaacccggtagcaacggagtcctatggacaagtggccacaaaccaccagagtgcccaagcacaggcgcagaccggctgggttcaaaaccaaggaatacttccgggtatggtttggcaggacagagatgtgtacctgcaaggacccatttgggccaaaattcctcacacggacggcaactttcacccttctccgctgatgggagggtttggaatgaagcacccgcctcctcagatcctcatcaaaaacgcccctgtacctgcggatcctccaacggccttcaacaaggacaagctgaactctttcatcacccagtattctactggccaagtcagcgtggagatcgagtgggagctgcagaaggaaaacagcaagcgctggaacccggagatccagtacacttccaactattacaagtctaataatgttgaatttgctgttaatactgaaggtgtatatagtgaaccccgccccattggcaccagatacctgactcgtaatctg

SEQ ID NO: 615 - DNA, 2208 bp, synthetic construct
  misc_feature 1..2208: note = source = /note="Description of Artificial Sequence: Synthetic polynucleotide"
  source 1..2208: mol_type = other DNA
atggctgccgatggttatcttccagattggctcgaggacaaccttagtgaaggaattcgcgagtggtgggctttgaaacctggagcccctcaacccaaggcaaatcaacaacatcaagacaacgctcgaggtcttgtgcttccgggttacaaataccttggacccggcaacggactcgacaagggggagccggtcagcgcagcagacgcggcggccctcgagcacgacaaggcctacgaccagcagctcaaggccggagacaacccgtacctcaagtacaaccacgccgacgccgagttccaggagcggctcaaagaagatacgtcttttgggggcaacctcgggcgagcagtcttccaggccaaaaagaggcttcttgaacctcttggtctggttgaggaagcggctaagacggctcctggaaagaagaggcctgtagagcagtctcctcaggaaccggactcctccgcgggtattggcaaatcgggtgcacagcccgctaaaaagagactcaatttcggtcagactggcgacacagagtcagtcccagaccctcaaccaatcggagaacctcccgcagccccctcaggtgtgggatctcttacaatggcttcaggtggtggcgcaccagtggcagacaataacgaaggtgccgatggagtgggtagttcctcgggaaattggcattgcgattcccaatggctgggggacagagtcatcaccaccagcacccgaacctgggccctgcccacctacaacaatcacctctacaagcaaatctccaacagcacatctggaggatcttcaaatgacaacgcctacttcggctacagcaccccctgggggtattttgacttcaacagattccactgccacttctcaccgcgtgactggcagcgactcatcaacaacaactggggattccggcctaagcgactcaacttcaagctcttcaacattcaggtcaaagaggttacggacaacaatggagtcaagaccatcgccaataaccttaccagcacggtccaggtcttcacggactcagactatcagctcccgtacgtgctcgggtcggctcacgagggctgcctcccgccgttcccagcggacgttttcatgattcctcagtacgggtatctgacgcttaatgatggaagccaggccgtgggtcgttcgtccttttactgcctggaatatttcccgtcgcaaatgctaagaacgggtaacaacttccagttcagctacgagtttgagaacgtacctttccatagcagctacgctcacagccaaagcctggaccgactaatgaatccactcatcgaccaatacttgtactatctctcaaagactattaacggttctggacagaatcaacaaacgctaaaattcagtgtggccggacccagcaacatggctgtccagggaagaaactacatacctggacccagctaccgacaacaacgtgtctcaaccactgtgactcaaaacaacaacagcgaatttgcttggcctggagcttcttcttgggctctcaatggacgtaatagcttgatgaatcctggacctgctatggccagccacaaagaaggagaggaccgtttctttcctttgtctggatctttaatttttggcaaacaaggaactggaagagacaacgtggatgcggacaaagtcatgataaccaacgaagaagaaattaaaactactaacccggtagcaacggagtcctatggacaagtggccacaaaccaccagagtgcccaagcacaggcgcagaccggctgggttcaaaaccaaggaatacttccgggtatggtttggcaggacagagatgtgtacctgcaaggacccatttgggccaaaattcctcacacggacggcaactttcacccttctccgctgatgggagggtttggaatgaagcacccgcctcctcagatcctcatcaaaaacacacctgtacctgcggatcctccaacggccttcaacaaggacaagctgaactctttcatcacccagtattctactggccaagtcagcgtggagatcgagtgggagctgcagaaggaaaacagcaagcgctggaacccggagatccagtacacttccaactattacaagtctaataatgttgaatttgctgttaatactgaaggtgtatatagtgaaccccgccccattggcaccagatacctgactcgtaatctg

SEQ ID NO: 616 - DNA, 2208 bp, synthetic construct
  misc_feature 1..2208: note = source = /note="Description of Artificial Sequence: Synthetic polynucleotide"
  source 1..2208: mol_type = other DNA
atggctgccgatggttatcttccagattggctcgaggacaaccttagtgaaggaattcgcgagtggtgggctttgaaacctggagcccctcaacccaaggcaaatcaacaacatcaagacaacgctcgaggtcttgtgcttccgggttacaaataccttggacccggcaacggactcgacaagggggagccggtcaacgcagcagacgcggcggccctcgagcacgacaaggcctacgaccagcagctcaaggccggagacaacccgtacctcaagtacaaccacgccgacgccgagttccaggagcggctcaaagaagatacgtcttttgggggcaacctcgggcgagcagtcttccaggccaaaaagaggcttcttgaacctcttggtctggttgaggaagcggctaagacggctcctggaaagaagaggcctgtagagcagtctcctcaggaaccggactcctccgcgggtattggcaaatcgggtgcacagcccgctaaaaagagactcaatttcggtcagactggcgacacagagtcagtcccagaccctcaaccaatcggagaacctcccgcagccccctcaggtgtgggatctcttacaatggcttcaggtggtggcgcaccagtggcagacaataacgaaggtgccgatggagtgggtagttcctcgggaaattggcattgcgattcccaatggctgggggacagagtcatcaccaccagcacccgaacctgggccctgcccacctacaacaatcacctctacaagcaaatctccaacagcacatctggaggatcttcaaatgacaacgcctacttcggctacagcaccccctgggggtattttgacttcaacagattccactgccacttctcaccacgtgactggcagcgactcatcaacaacaactggggattccggcctaagcgactcaacttcaagctcttcaacattcaggtcaaagaggttacggacaacaatggagtcaagaccatcgccaataaccttaccagcacggtccaggtcttcacggactcagactatcagctcccgtacgtgctcgggtcggctcacgagggctgcctcccgccgttcccagcggacgttttcatgattcctcagtacgggtatctgacgcttaatgatggaagccaggccgtgggtcgttcgtccttttactgcctggaatatttcccgtcgcaaatgctaagaacgggtaacaacttccagttcagctacgagtttgagaacgtacctttccatagcagctacgctcacagccaaagcctggaccgactaatgaatccactcatcgaccaatacttgtactatctctcaaagactattaacggttctggacagaatcaacaaacgctaaaattcagtgtggccggacccagcaacacggctgtccagggaagaaactacatacctggacccagctaccgacaacaacgtgtctcaaccactgtgactcaaaacaacaacagcgaatttgcttggcctggagcttcttcttgggctctcaatggacgtaatagcttgatgaatcctggacctgctatggccagccacaaagaaggagaggaccgtttctttcctttgtctggatctttaatttttggcaaacaaggaactggaagagacaacgtggatgcggacaaagtcatgataaccaacgaagaagaaattaaaactactaacccggtagcaacggagtcctatggacaagtggccacaaaccaccagagtgcccaagcacaggcgcagaccggctgggttcaaaaccaaggaatacttccgggtatggtttggcaggacagagatgtgtacctgcaaggacccatttgggccaaaattcctcacacggacggcaactttcacccttctccgctgatgggagggtttggaatgaagcacccgcctcctcagatcctcatcaaaaacacacctgtacctgcggatcctccaacggccttcaacaaggacaagctgaactctttcatcacccagtattctactggccaagtcagcgtggagatcgagtgggagctgcagaaggaaaacagcaagcgctggaacccggagatccagtacacttccaactattacaagtctaataatgttgaatttgctgttaatactgaaggtgtatatagtgaaccccgccccattggcaccagatacctgactcgtaatctg

SEQ ID NO: 617 - DNA, 2208 bp, synthetic construct
  misc_feature 1..2208: note = source = /note="Description of Artificial Sequence: Synthetic polynucleotide"
  source 1..2208: mol_type = other DNA
atggctgccgatggttatcttccagattggctcgaggacaaccttagtgaaggaattcgcgagtggtgggctttgaaacctggagcccctcaacccaaggcaaatcaacaacatcaagacaacgctcgaggtcttgtgcttccgggttacaaataccttggacccggcaacggactcgacaagggggagccggtcaacgcagcagacgcggcggccctcgagcacgacaaggcctacgaccagcagctcaaggccggagacaacccgtacctcaagtacaaccacgccgacgccgagttccaggagcggctcaaagaagatacgtcttttgggggcaacctcgggcgagcagtcttccaggccaaaaagaggcttcttgaacctcttggtctggttgaggaagcggctaagacggctcctggaaagaagaggcctgtagagcagtctcctcaggaaccggactcctccgcgggtattggcaaatcgggtgcacagcccgctaaaaagagactcaatttcggtcagactggcgacacagagtcagtcccagaccctcaaccaatcggagaacctcccgcagccccctcaggtgtgggatctcttacaatggcttcaggtggtggcgcaccagtggcagacaataacgaaggtgccgatggagtgggtagttcctcgggaaattggcattgcgattcccaatggctgggggacagagtcatcaccaccagcacccgaacctgggccctgcccacctacaacaatcacctctacaagcaaatctccaacagcacatctggaggatcttcaaatgacaacgcctacttcggctacagcaccccctgggggtattttgacttcaacagattccactgccacttctcaccacgtgactggcagcgactcatcaacaacaactggggattccggcctaagcggctcaacttcaagctcttcaacattcaggtcaaagaggttacggacaacaatggagtcaagaccatcgccaataaccttaccagcacggtccaggtcttcacggactcagactatcagctcccgtacgtgctcgggtcggctcacgagggctgcctcccgccgttcccagcggacgttttcatgattcctcagtacgggtatctgacgcttaatgatggaagccaggccgtgggtcgttcgtccttttactgcctggaatatttcccgtcgcaaatgctaagaacgggtagcaacttccagttcagctacgagtttgagaacgtacctttccatagcagctacgctcacagccaaagcctggaccgactaatgaatccactcatcgaccaatacttgtactatctctcaaagactattaacggttctggacagaatcaacaaacgctaaaattcagtgtggccggacccagcaacatggctgtccagggaagaaactacatacctggacccagctaccgacaacaacgtgtctcaaccactgtgactcaaaacaacaacagcgaatttgcttggcctggagcttcttcttgggctctcaatggacgtaatagcttgatgaatcctggacctgctatggccagccacaaagaaggagaggaccgtttctttcctttgtctggatctttaatttttggcaaacaaggaactggaagagacaacgtggatgcggacaaagtcatgataaccaacgaagaagaaattaaaactactaacccggcagcaacggagtcctatggacaagtggccacaaaccaccagagtgcccaagcacaggcgcagaccggctgggttcaaaaccaaggaatacttccgggtatggtttggcaggacagagatgtgtacctgcaaggacccatttgggccaaaattcctcacacggacggcaactttcacccttctccgctgatgggagggtttggaatgaagcacccgcctcctcagatcctcatcaaaaacacacctgtacctgcggatcctccaacggccttcaacaaggacaagctgaactctttcatcacccagtattctactggccaagtcagcgtggagatcgagtgggagctgcagaaggaaaacagcaagcgctggaacccggagatccagcacacttccaactattacaagtctaataatgttgaatttgctgttaatactgaaggtgtatatagtgaaccccgccccattggcaccagatacctgactcgtaatctg

SEQ ID NO: 618 - DNA, 2208 bp, synthetic construct
  misc_feature 1..2208: note = source = /note="Description of Artificial Sequence: Synthetic polynucleotide"
  source 1..2208: mol_type = other DNA
atggctgccgatggttatcttccagattggctcgaggacaaccttagtgaaggaattcgcgagtggtgggctttgaaacctggagcccctcaacccaaggcaaatcaacaacatcaagacaacgctcgaggtcttgtgcttccgggttacaaataccttggacccggcaacggactcgacaagggggagccggtcaacgcagcagacgcggcggccctcgagcacgacaaggcctacgaccagcagctcaaggccggagacaacccgtacctcaagtacaaccacgccgacgccgagttccaggagcggctcaaagaagatacgtcttttgggggcaacctcgggcgagcagtcttccaggccaaaaagaggcttcttgaacctcttggtctggttgaggaagcggctaagacggctcctggaaagaagaggcctgtagagcagtctcctcaggaaccggactcctccgcgggtattggcaaatcgggtgcacagcccgctaaaaagagactcaatttcggtcagactggcgacacagagtcagtcccagaccctcaaccaatcggagaacctcccgcagccccctcaggtgtgggatctcttacaatggcttcaggtggtggcgcaccagtggcagacaataacgaaggtgccgatggagtgggtagttcctcgggaaattggcattgcgattcccaatggctgggggacagagtcatcaccaccagcacccgaacctgggccctgcccacctacaacaatcacctctacaagcaaatctccaacagcacatctggaggatcttcaaatgacaacgcctacttcggctacagcaccccctgggggtattttgacttcaacagattccactgccacttctcaccacgtgactggcagcgactcatcaacaacaactggggattccggcctaagcgactcaacttcaggctcttcaacattcaggtcaaagaggttacggacaacaatggagtcaagaccatcgccaataaccttaccagcacggtccaggtcttcacggactcagactatcagctcccgtacgtgctcgggtcggctcacgagggctgcctcccgccgttcccagcggacgttttcatgattcctcagtacgggtatctgacgcttaatgatggaagccaggccgtgggtcgttcgtccttttactgcctggaatatttcccgtcgcaaatgctaagaacgggtaacaacttccagttcagctacgagtttgagaacgtacctttccatagcagctacgctcacagccaaagcctggaccgactaatgaatccactcatcgaccaatacttgtactatctctcaaagactattaacggttctggacagaatcaacaaacgctaaaattcagtgtggccggacccagcaacatggctgtccagggaagaaactacatacctggacccagctaccgacaacaacgtgtctcaaccactgtgactcaaaacaacaacagcgaatttgcttggcctggagcttcttcttgggctctcaatggacgtaatagcttgatgaatcctggacctgctatggccagccacaaagaaggagaggaccgtttctttcctttgtctggatctttaatttttggcaaacaaggaactggaagagacaacgtggatgcggacaaagtcatgataaccaacgaagaagaaattaaaactactaacccggtagcaacggagtcctatggacaagtggccacaaaccaccagagtgcccaagcacaggcgcagaccggctgggttcaaagccaaggaatacttccgggtatggtttggcaggacagagatgtgtacctgcaaggacccatttgggccaaaattcctcacacggacggcaactttcacccttctccgctgatgggagggtttggaatgaagcacccgcctccccagatcctcatcaaaaacacacctgtacctgcggatcctccaacggccttcaacaaggacaagctgaactctttcatcacccagtattctactggccaagtcagcgtggagatcgagtgggagctgcagaaggaaaacagcaagcgctggaacccggagatccagtacacttccaactattacaagtctaataatgttgaatttgctgttaatactgaaggtgtatatagtgaaccccgccccattggcaccagatacctgactcgtaatctg

SEQ ID NO: 619 - DNA, 2205 bp, synthetic construct
  misc_feature 1..2205: note = source = /note="Description of Artificial Sequence: Synthetic polynucleotide"
  source 1..2205: mol_type = other DNA
atggctgccgatggttatcttccagattggctcgaggacaaccttagtgaaggaattcgcgagtggtgggctttgaaacctggagcccctcaacccaaggcaaatcaacaacatcaagacaacgcccgaggtcttgtgcttccgggttacaaataccttggacccggcaacggactcgacaagggggagccggtcaacgcagcagacgcggcggccctcgagcacgacaaggcctacgaccagcagctcaaggccggagacaacccgtacctcaagtacaaccacgccgacgccgagttccaggagcggctcaaagaagatacgtcttttgggggcaacctcgggcgagcagtcttccaggccaaaaagaggcttcttgaacctcttggtctggttgaggaagcggctaagacggctcctggaaagaagaggcctgtagagcagtctcctcaggaaccggactcctccgcgggtattggcaaatcgggtgcacagcccgctaaaaagagactcaatttcggtcagactggcgacacagagtcagtcccagaccctcaaccaatcggagaacctcccgcagccccctcaggtgtgggatctcttacaatggcttcaggtggtggcgcaccagtggcagacaataacgaaggtgccgatggagtgggtagttcctcgggaaattggcattgcgattcccaatggctgggggacagagtcatcaccaccagcacccgaacctgggccctgcccacctacaacaatcacctctacaagcaaatctccaacagcacatctggaggatcttcaaatgacaacgcctacttcggctacagcaccccctggaggtattttgacttcaacagattccactgccacttctcaccacgtgactggcagcgactcatcaacaactggggattccggcctaagcgactcaacttcaagctcttcaacattcaggtcaaagaggttacggacaacaatggagtcaagaccatcgccaataaccttaccagcacggtccaggccttcacggactcagactatcagctcccgtacgtgctcgggtcggctcacgagggctgcctcccgccgttcccagcggacgttttcatgattcctcagtacgggtatctgacgcttaatgatggaagccaggccgtgggtcgttcgtccttttactgcctggaatatttcccgtcgcaaatgctaagaacgggtaacaacttccagttcagctacgagtttgagaacgtacctttccatagcagctacgctcacagccaaagcctggaccgactaatgaatccactcatcgaccaatacttgtactatctctcaaagactattaacggttctggacagaatcaacaaacgctaaaattcagtgtggccggacccagcaacatggctgtccagggaagaaactacatacctggacccagctaccgacaacaacgtgtctcaaccactgtgactcaaaacaacaacagcgaatttgcttggcctggagcttcttcttgggctctcaatggacgtaatagcttgatgaatcctggacctgctatggccagccacaaagaaggagaggaccgtttctttcctttgtctggatctttaatttttggcaaacaaggaactggaagagacaacgtggatgcggacaaagtcatgataaccaacgaagaagaaattaaaactactaacccggtagcaacggagtcctatggacaagtggccacaaaccaccagagtgcccaagcacaggcgcagaccggctgggttcaaaaccaaggaatacttccgggtatggtttggcaggacagagatgtgtacctgcaaggacccatttgggccaaaattcctcacacggacggcaactttcacccttctccgctgatgggagggtttggaatgaagcacccgcctcctcagatcctcatcaaaaacacacctgtacctgcggatcctccaacggccttcaacaaggacgagctgaactctttcatcacccagtattctactggccaagtcagcgtggagatcgagtgggagctgcagaaggaaaacagcaagcgctggaacccggagatccagtacacttccaactattacaagtctaataatgttgaatttgctgttaatactgaaggtgtatatagtgaaccccgccccattggcaccagatacctgactcgtaatctg

SEQ ID NO: 620 - DNA, 2205 bp, synthetic construct
  misc_feature 1..2205: note = source = /note="Description of Artificial Sequence: Synthetic polynucleotide"
  source 1..2205: mol_type = other DNA
atggctgccgatggttatcttccagattggctcgaggacaaccttagtgaaggaattcgcgagtggtgggctttgaaacctggagcccctcaacccaaggcaaatcaacaacatcaagacaacgctcgaggtcttgtgcttccgggttacaaataccttggacccggcaacggactcgacaagggggagccggtcaacgcagcagacgcggcggccctcgagcacgacaaggcctacgaccagcagctcaaggccggagacaacccgtacctcaagtacaaccacgccgacgccgagttccaggagcggctcaaagaagatacgtcttttgggggcaacctcgggcgagcagtcttccaggacaaaaagaggcttcttgaacctcttggtctggttgaggaagcggctaagacggctcctggaaagaagaggcctgtagagcagtctcctcaggaaccggactcctccgcgggtattggcaaatcgggtgcacagcccgctaaaaagagactcaatttcggtcagactggcgacacagagtcagtcccagaccctcaaccaatcggagaacctcccgcagccccctcaggtgtgggatctcttacaatggcttcaggtggtggcgcaccagtggcagacaataacgaaggtgccgatggagtgggtagttcctcgggaaattggcattgcgattcccaatggctgggggacagagtcatcaccaccagcacccgaacctgggccctgcccacctacaacaatcacctctacaagcaaatctccaacagcacatctggaggatcttcaaatgacaacgcctacttcggctacagcaccccctgggggtattttgacttcaacagattccactgccacttctcaccacgtgactggcagcgactcatcaacaactggggattccggcctaagcgactcaacttcaagctcttcaacattcaggtcaaagaggttacggacaacaatggagtcaagaccatcgccaataaccttaccagcacggtccaggtcttcacggactcagactatcagctcccgtacgtgctcgggtcggctcacgagggctgcctcccgccgttcccagcggacgttttcatgattcctcagtacgggtatctgacgcttaatgatggaagccaggccgtgggtcgttcgtccttttactgcctggaatatttcccgtcgcaaatgctaagaacgggtaacaacttccaattcagctacgagtttgagaacgtacctttccatagcagctacgctcacagccaaagcctggaccgactaatgaatccactcatcgaccaatacttgtactatctctcaaagactattaacggttctggacagaatcaacaaacgctaaaattcagtgtggccggacccagcaacatggctgtccagggaagaaactacatacctggacccagctaccgacaacaacgtgtctcaaccactgtgactcaaaacaacaacagcgaatttgcttggcctggagcttcttcttgggctctcaatggacgtaatagcttgatgaatcctggacctgctatggccagccacaaagaaggagaggaccgtttctttcctttgtctggatctttaatttttggcaaacaaggaactggaagagacaacgtggatgcggacaaagtcatgataaccaacgaagaagaaattaaaactactaacccggtagcaacggagtcctatggacaagtggccacaaaccaccagagtgcccaagcacaggcgcagaccggctgggttcaaaaccaaggaatacttccgggtatggtttggcaggacagagatgtgtacctgcaaggacccatttgggccaaaattcctcacacggacggcaactttcacccttctccgctgatgggagggtttggaatgaagcacccgcctcctcagatcctcatcaaaaacacacctgtacctgcggatcctccaacggccttcaacaaggacaagctgaactctttcatcacccagtattctactggccaagtcagcgtggagatcgagtgggagctgcagaaggaaaacagcaagcgctggaacccggagatccagtacacttccaactattacaagtctaataatgttgaatttgctgttaatactgaaggtgtatatagtgaaccccgccccattggcaccagatacctgactcgtaatctg

SEQ ID NO: 621 - DNA, 2208 bp, synthetic construct
  misc_feature 1..2208: note = source = /note="Description of Artificial Sequence: Synthetic polynucleotide"
  source 1..2208: mol_type = other DNA
atggctgccgatggttatcttccagattggctcgaggacaaccttagtgaaggaattcgcgagtggtgggctttgaaacctggagcccctcaacccaaggcaaatcaacaacatcaagacaacgctcgaggtcttgtgcttccgggttacaaataccttggacccggcaacggactcgacaagggggagccggtcaacgcagcagacgcggcggccctcgagcacgacaaggcctacgaccagcagctcaaggccggagacaacccgtacctcaagtacaaccacgccgacgccgagttccaggagcggctcaaagaagatacgtcttttgggggcaacctcgggcgagcagtcttccaggccaaaaagaggcttcttgaacctcttggtctggttgaggaagcggctaagacggctcctggaaagaagaggcctgtagagcagtctcctcaggaaccggactcctccgcgggtattggcaaatcgggtgcacagcccgctaaaaagagactcaatttcggtcagactggcgacacagagtcagtcccagaccctcaaccaatcggagaacctcccgcagccccctcaggtgtgggatctcttacaatggcttcaggtggtggcgcaccagtggcagacaataacgaaggtgccgatggagtgggtagttcctcgggaaattggcattgcgattcccaatggctgggggacagagccatcaccaccagcacccgaacctgggccctgcccacctacaacaatcacctctacaagcaaatctccaacagcacatctggaggatcttcaaatgacaacgcctacttcggctacagcaccccctgggggtattttgacttcaacagattccactgccacttctcaccacgtgactggcagcggctcatcaacaacaactggggattccggcctaagcgactcaacttcaagctcttcaacattcaggtcaaagaggttacggacaacaatggagtcaagaccatcgccaataaccttaccagcacggtccaggtcttcacggactcagactatcagctcccgtacgtgctcgggtcggctcacgagggctgcctcccgccgttcccagcggacgttttcatgattcctcagtacgggtatctgacgcttaatgatggaagccaggccgtgggtcgttcgtccttttactgcctggaatatttcccgtcgcaaatgctaagaacgggtaacaacttccagttcagctacgagtttgagaacgtacctttccatagcagctacgctcacagccaaagcctggaccgactaatgaatccactcatcgaccaatacttgtactatctctcaaagactattaacggttctggacagaatcaacaaacgctaaaattcagtgtggccggacccagcaacatggctgtccagggaagaaactacatacctggacccagctaccgacaacaacgtgtctcaaccactgtgactcaaaacaacaacagcgaatttgcttggcctggagcttcttcttgggctctcaatggacgtaatagcttgatgaatcctggacctgctatggccagccacaaagaaggagaggaccgtttctttcctttgtctggatctttaatttttggcaaacaaggaactggaagagacaacgtggatgcggacaaagtcatgacaaccaacgaagaagaaattaaaactactaacccggtagcaacggagtcctatggacaagtggccacaaaccaccagagtgcccaagcacaggcgcagaccggctgggttcaaaaccaaggaatacttccgggtatggtttggcaggacagagatgtgtacctgcaaggacccatttgggccaaaattcctcacacggacggcaactttcacccttctccgctgatgggagggtttggaatgaagcacccgcctcctcagatcctcatcaaaaacacacctgtacctgcggatcctccaacggccttcaacaaggacaagctgaactctttcatcacccagtattctactggccaagtcagcgtggagatcgagtgggagctgcagaaggaaaacagcaagcgctggaacccggagatccagtacacttccaactattacaagtctaataatgttgaatttgctgttaatactgaaggtgtatatagtgaaccccgccccattggcaccagatacctgactcgtaatctg

SEQ ID NO: 622 - DNA, 2208 bp, synthetic construct
  misc_feature 1..2208: note = source = /note="Description of Artificial Sequence: Synthetic polynucleotide"
  source 1..2208: mol_type = other DNA
atggctgccgatggttatcttccagattggctcgaggacaaccttagtgaaggaattcgcgagtggtgggctttgaaacctggagcccctcaacccaaggcaaatcaacaacatcaagacaacgctcgaggtcttgtgcttccgggttacaaataccttggacccggcaacggactcgacaagggggagccggtcaatgcagcagacgcggcggccctcgagcacgacaaggcctacgaccagcagctcaaggccggagacaacccgtacctcaagtacaaccacgccgacgccgagttccaggagcggctcaaagaagatacgtcttttgggggcaacctcgggcgagcagtcttccagaccaaaaagaggcttcttgaacctcttggtctggttgaggaagcggctaagacggctcctggaaagaagaggcctgtagagcagtctcctcaggaaccgggctcctccgcgggtattggcaaatcgggtgcacagcccgctaaaaagagactcaatttcggtcagactggcgacacagagtcagtcccagaccctcaaccaatcggagaacctcccgcagccccctcaggtgtgggatctcttacaatggcttcaggtggtggcgcaccagtggcagacaataacgaaggtgccgatggagtgggtagttcctcgggaaattggcattgcgattcccaatggctgggggacagagtcatcaccaccagcacccgaacctgggccctgcccacctacaacaatcacctctacaagcaaatctccaacagcacatctggaggatcttcaaatgacaacgcctacttcggctacagcaccccctgggggtattttgacttcaacagattccactgccacttctcaccacgtgactggcagcgactcatcaacaacaactggggattccggcctaagcgactcaacttcaagctcttcaacattcaggtcaaagaggttacggacaacaatggagtcaagaccatcgccaataaccttaccagcacggtccaggtcttcacggactcagactatcagctcccgtacgtgctcgggtcggctcacgagggctgcctcccgccgttcccagcggacgttttcatgattcctcagtacgggtatctgacgcttaatgatggaagccaggccgtgggtcgttcgtccttttactgcctggaatatttcccgtcgcaaatgctaagaacgggtaacaacttccagttcagctacgagtttgagaacgtacctttccatagcagctacgctcacagccaaagcctggaccgactaatgaatccactcatcgaccaatacttgcactatctctcaaagactattaacggttctggacagaatcaacaaacgctaaaattcagtgtggccggacccagcaacatggctgtccagggaagaaactacatacctggacccagctaccgacaacaacgtgtctcaaccactgtgactcaaaacaacaacagcgaatttgcttggcctggagcttcttcttgggctctcaatggacgtaatagcttgatgaatcctggacctgctatggccagccacaaagaaggagaggaccgtttctttcctttgtctggatctttaatttttggcaaacaaggaactggaagagacaacgtggatgcggacaaagtcatgataaccaacgaagaagaaattaaaactactaacccggtagcaacggagtcctatggacaagtggccacaaaccaccagagtgcccaagcacaggcgcagaccggctgggttcaaaaccaaggaatacttccgggtatggtttggcaggacagagatgtgtacctgcaaggacccatttgggccaaaattcctcacacggacggcaactttcacccttctccgctgatgggagggtttggaatgaagcacccgcctcctcagatcctcatcaaaaacacacctgtacctgcggatcctccaacggccttcaacaaggacaagctgaactctttcatcacccagtattctactggccaagtcagcgtggagatcgagtgggagctgcagaaggaaaacagcaagcgctggaacccggagatccagtacacttccaactattacaagtctaataatgttgaatttgctgttaatactgaaggtgtatatagtgaaccccgccccattggcaccagatacctgactcgtaatctg

SEQ ID NO: 623 - DNA, 2208 bp, synthetic construct
  misc_feature 1..2208: note = source = /note="Description of Artificial Sequence: Synthetic polynucleotide"
  source 1..2208: mol_type = other DNA
atggctgccgatggttattttccagattggctcgaggacaaccttagtgaaggaattcgcgagtggtgggctttgaaacctggagcccctcaacccaaggcaaatcaacaacatcaagacaacgctcgaggtcttgtgcttccgggttacaaataccttggacccggcaacggactcgacaagggggagccggtcaacgcagcagacgcggcggccctcgagcacgacaaggcctacgaccagcagctcaaggccggagacaacccgtacctcaagtacaaccacgccgacgccgagttccaggagcggctcaaagaagatacgtcttttgggggcaacctcgggcgagcagtcttccaggccaaaaagaggcttcttgaacctcttggtctggttgaggaagcggctaagacggctcctggaaagaagaggcctgtagagcagtctcctcaggaaccggactcctccgcgggtattggcaaatcgggtgcacagcccgctaaaaagagactcaatttcggtcagactggcgacacagagtcagtcccagaccctcaaccaatcggagaatctcccgcagccccctcaggtgtgggatctcttacaatggcttcaggtggtggcgcaccagtggcagacaataacgaaggtgccgatggagtgggtagttcctcgggaaattggcattgcgattcccaatggctgggggacagagtcatcaccaccagcacccgaacctgggccctgcccacctacaacaatcacctctacaagcaaatctccaacagcacatctggaggatcttcaaatgacaacgcctacttcggctacagcaccccctgggggtattttgacttcaacagattccactgccacttctcaccacgtgactggcagcgactcatcaacaacaactggggattccggcctaagcgactcaacttcaagctcttcaacattcaggtcaaagaggttacggacaacaatggagtcaagaccatcgccaataaccttaccagcacggtccaggtcttcacggactcagactatcagctcccgtacgtgctcgggtcggctcacgagggctgcctcccgccgttcccagcggacgttttcatgattcctcagtacgggtatctgacgcttaatgatggaagccaggccgtgggtcgttcgtccttttactgcctggaatatctcccgtcgcaaatgctaagaacgggtaacaacttccagttcagctacgagtttgagaacgtacctttccatagcagctacgctcacagccaaagcctggaccgactaatgaatccactcatcgaccaatacttgcactatctctcaaagactattaacggttctggacagaatcaacaaacgctaaaattcagtgtggccggacccagcaacatggctgtccagggaagaaactacatacctggacccagctaccgacaacaacgtgtctcaaccactgtgactcaaaacaacaacagcgaatttgcttggcctggagcttcttcttgggctctcaatggacgtaatagcttgatgaatcctggacctgctgtggccagccacaaagaaggagaggaccgtttctttcctttgtctggatctttaatttttggcaaacaaggaactggaagagacaacgtggatgcggacaaagtcatgataaccaacgaagaagaaattaaaactactaacccggtagcaacggagtcctatggacaagtggccacaaaccaccagagtgcccaagcacaggcgcagaccggctgggttcaaaaccaaggaatacttccgggtatggtttggcaggacagagatgtgtacctgcaaggacccatttgggccaaaattcctcacacggacggcaactttcacccttctccgctgatgggagggtttggaatgaagcacccgcctcctcagatcctcatcaaaaacacacctgtacctgcggatcctccaacggccttcaacaaggacaagctgaactctttcatcacccagtattctactggccaagtcagcgtggagatcgagtgggagctgcagaaggaaaacagcaagcgctggaacccggagatccagtacacttccaactattacaagtctaataatgttgaatttgctgttaatactgaaggtgtatatagtgaaccccgccccattggcaccagatacctgactcgtaatctg

SEQ ID NO: 624 - DNA, 2208 bp, synthetic construct
  misc_feature 1..2208: note = source = /note="Description of Artificial Sequence: Synthetic polynucleotide"
  source 1..2208: mol_type = other DNA
atggctgccgatggttatcttccagattggctcgaggacaaccttagtgaaggaattcgcgagtggtgggctttgaaacctggagcccctcaacccaaggcaaatcaacaacatcaagacaacgctcgaggtcttgtgcttccgggttacaaataccttggacccggcaacggactcgacaagggggagccggtcaacgcagcagacgcggcggccctcgagcacgacaaggcctacgaccagcagctcaaggccggagacaacccgtacctcaagtacaaccacgccgacgccgagttccaggagcggctcaaagaagatacgtcttttgggggcaacctcgggcgagcagtcttccaggccaaaaagaggcttcttgaacctcttggtccggttgaggaagcggctaagacggctcctggaaagaagaggcctgtagagcagtctcctcaggaaccggactcctccgcgggtattggcaaatcgggtgcacagcccgctaaaaagagactcaatttcggtcagactggcgacacagagtcagtcccagaccctcaaccaatcggagaacctcccgcagccccctcaggtgtgggatctcttacaatggcttcaggtggtggcgcaccagtggcagacaataacgaaggtgccgatggagtgggtagttcctcgggaaattggcattgcgattcccaatggctgggggacagagtcatcaccaccagcacccgaacctgggccctgcccacctacaacaatcacctctacaagcaaatctccaacagcacatctggaggatcttcaaatgacaacgcctacttcggctacagcaccccctgggggtattttgacttcaacagattccactgccacttctcaccacgtgactggcagcgactcatcaacaacaactggggattccggcctaagcgactcaacttcaagctcttcaacattcaggtcaaagaggttacggacaacaatggagtcaagaccatcgccaataaccttaccagcacggtccaggtcttcacggactcagactatcagctcccgtacgtgctcgggtcggctcacgagggctgcctcccgccgttcccagcggacgttttcatgattcctcagtacgggtatctgacgcttaatgatggaagccaggccgtgggtcgttcgtccttttactgcctggaatatttcccgtcgcaaatgctaagaacgggtaacaacttccagttcagctacgagtttgagaacgtacctttccatagcagctacgctcacagccaaagcctggaccgactaatgaatccactcatcgaccaatacttgtactatctctcaaagactattaacggttctggacagaatcaacaaacgctaaaattcagtgtggccggacccagcaacatggctgtccagggaagaaactacatacctggacccagctaccgacaacaacgtgtctcaaccactgtgactcaaaacaacaacagcgaatttgcttggcctggagcttcttcttgggctctcaatggacgtaatagcttgatgaatcctggacctgctatggccagccacaaagaaggagaggaccgtttctttcctttgtctggatctttaatttttggcaaacaaggaactggaagagacaacgtggatgcggacaaagtcatgataaccaacgaagaagaaattaaaactactaacccggtagcaacggagtcctatggacaagcggccacaaaccaccagagtgcccaagcacaggcgcagaccggctgggttcaaaaccaaggaatacttccgggtatggtttggcaggacagagatgtgtacctgcaaggacccatttgggccaaaattcctcacacggacggcaactttcacccttctccgctgatgggagggtttggaatgaagcacccgcctcctcagatcctcatcaaaaacacacctgtacctgcggatcctccaacggccttcaacaaggacaagctgaactctttcatcacccagtattctactggccaagtcagcgtggagatcgagtgggagctgcagaaggaaaacagcaagcgctggaacccggagatccagtacacttccaactattacaagtctaataatgttgaatttgctgttaatactgaaggtgtatatagtgaaccccgccccattggcaccagatacctgactcgtaatctg

SEQ ID NO: 625 - DNA, 2208 bp, synthetic construct
  misc_feature 1..2208: note = source = /note="Description of Artificial Sequence: Synthetic polynucleotide"
  source 1..2208: mol_type = other DNA
atggctgccgatggttatcttccagattggctcgaggacaaccttagtgaaggaattcgcgagtggtgggctttgaaacctggagcccctcaacccaaggcaaatcaacaacatcaagacaacgctcggggtcttgtgcttccgggttacaaataccttggacccggcaacggactcgacaagggggagccggtcaacgcagcagacgcggcggccctcgagcacgacaaggcctacgaccagcagctcaaggccggagacaacccgtacctcaagtacaaccacgccgacgccgagttccaggagcggctcaaagaagatacgtcttttgggggcaacctcgggcgagcagtcttccaggccaaaaagaggcttcttgaacctcttggtccggttgaggaagcggctaagacggctcctggaaagaagaggcctgtagagcagtctcctcaggaaccggactcctccgcgggtattggcaaatcgggtgcacagcccgctaaaaagagactcaatttcggtcagactggcgacacagagtcagtcccagaccctcaaccaatcggagaacctcccgcagccccctcaggtgtgggatctcttacaatggcttcaggtggtggcgcaccagtggcagacaataacgaaggtgccgatggagtgggtagttcctcgggaaattggcattgcgattcccaatggctgggggacagagtcatcaccaccagcacccgaacctgggccctgcccacctacaacaatcacctctacaagcaaatctccaacagcacatctggaggatcttcaaatgacaacgcctacttcggctacagcaccccctgggggtattttgacttcaacagattccactgccacttctcaccacgtgactggcggcgactcatcaacaacaactggggattccggcctaagcgactcaacttcaagctcttcaacattcaggtcaaagaggttacggacaacaatggagtcaagaccatcgccaataaccttaccagcacggtccaggtcttcacggactcagactatcagctcccgtacgtgctcgggtcggctcacgagggctgcctcccgccgttcccagcggacgttttcatgattcctcagtacgggtatctgacgcttaatgatggaagccaggccgtgggtcgttcgtccttttactgcctggaatatttcccgtcgcaaatgctaagaacgggtaacaacttccagttcagctacgagtttgagaacgtacctttccatagcagctacgctcacagccaaagcctggaccgactaatgaatccactcatcgaccaatacttgtactatctctcaaagactattaacggttctggacagaatcaacaaacgctaaaattcagtgtggccggacccagcaacatggctgtccagggaagaaactacatacctggacccagctaccgacaacaacgtgtctcaaccactgtgactcaaaacaacaacagcgaatttgcttggcctggagcttcttcttgggctctcaatggacgtaatagcttgatgaatcctggacctgctatggccagccacaaagaaggagaggaccgtttctttcctttgtctggatctttaatttttggcaaacaaggaactggaagagacaacgtggatgcggacaaagtcatgataaccaacgaagaagaaattaaaactactaacccggtagcaacggagtcctatggacaagtggccacaaaccaccagagtgcccaagcacaggcgcagaccggctgggttcaaaaccaaggaatacttccgggtatggtttggcaggacagagatgtgtacctgcaaggacccatttgggccaaaattcctcacacggacggcaactttcacccttctccgctgatgggagggtttggaatgaagcacccgcctcctcagatcctcatcaaaaacacacctgtacctgcggatcctccaacggccttcaacaaggacaagctgaactctttcatcacccagtattctactggccaagtcagcgtggagatcgagtgggagctgcagaaggaaaacagcaagcgctggaacccggagatccagtacacttccaactattacaagtctaataatgttgaatttgctgttaatactgaaggtgtatatagtgaaccccgccccattggcaccagatacctgactcgtaatctg

SEQ ID NO: 626 - DNA, 2208 bp, synthetic construct
  misc_feature 1..2208: note = source = /note="Description of Artificial Sequence: Synthetic polynucleotide"
  source 1..2208: mol_type = other DNA
atggctgccgatggttatcttccagattggctcgaggacaaccttagtgaaggaattcgcgagtggtgggctttgaaacctggagcccctcaacccaaggcaaatcaacaacatcaagacaacgctcgaggtcttgtgcttccgggttacaaataccttggacccggcaacggactcgacaagggggagccggtcaacgcagcagacgcggcggccctcgagcacgacaaggcctacgaccagcagctcaaggccggagacaacctgtacctcaagtacaaccacgccgacgccgagttccaggagcggctcaaagaagatacgtcttttgggggcaacctcgggcgagcagtcttccaggccaaaaagaggcttcttgaacctcttggtctggttgaggaagcggctaagacggctcctggaaagaagaggcctgtagagcagtctcctcaggaaccggactcctccgcgggtattggcaaatcgggtgcacagcccgctaaaaagagactcaatttcggtcagactggcgacacagagtcagtcccagaccctcaaccaatcggagaacctcccgcagccccctcaggtgtgggatctcttacaatggcttcaggtggtggcgcaccagtggcagacaataacgaaggtgccgatggagtgggtagttcctcgggaaattggcattgcgattcccaatggctgggggacagagtcatcaccaccagcacccgaacctgggccctgcccacctacaacaatcacctctacaagcaaatctccaacagcacatctggaggatcttcaaatgacaacgcctacttcggctacagcaccccctgggggtattttgacttcaacagattccactgccacttctcaccacgtgactggcagcgactcatcaacaacaactggggattccggcctaagcgactcaacttcaagctcttcaacattcaggtcaaagaggttacggacaacaatggagtcaagaccatcgccaataaccttaccagcacggtccaggtcttcacggactcagactatcagctcccgtacgtgctcgggtcggctcacgagggctgcctcccgccgttcccagcggacgttttcatgattcctcagtacgggtatctgacgcttaatgatggaagccaggccgtgggtcgttcgtccttttactgcctggaatatttcccgtcgcaaatgctaagaacgggtaacaacttccagttcagctacgagtttgagaacgtacctttccatagcagctacgctcacagccaaagcctggaccgactaatgaatccactcatcgaccaatacttgcactatctctcaaagactattaacggttctggacagaatcaacaaacgctaaaattcagtgtggccggacccagcaacatggctgtccagggaagaaactacatacctggacccagctaccgacaacaacgtgtctcaaccactgtgactcaaaacaacaacagcgaatttgcttggcctggagcttcttcttgggctctcaatggacgtaatagcttgatgaatcctggacctgctatggccagccacaaagaaggagaggaccgtttctttcctttgtctggatctttaatttttggcaaacaaggaactggaagagacaacgtggatgcggacaaagtcatgataaccaacgaagaagaaattaaaactactaacccggtagcaacggagtcctatggacaagtggccacaaaccaccagagtgcccaagcacaggcgcagaccggctgggttcaaaaccaaggaatacttccgggtatggtttggcaggacagagatgtgtacctgcaaggacccatttgggccaaaattcctcacacggacggcaactttcacccttctccgctgatgggagggtttggaatgaagcacccgcctcctcagatcctcatcaaaaacacacctgtacctgcggatcctccaacggccttcaacaaggacaagctgaactctttcatcacccagtattctactggccaagtcagcgtggagatcgagtgggagctgcagaaggaaaacagcaagcgctggaacccggagatccagtacacttccaactattacaagtctaataatgttgaatttgctgttaatactgaaggtgtatatagtgaaccccgccccattggcaccagatacctgactcgtaatctg

SEQ ID NO: 627 - DNA, 2208 bp, synthetic construct
  misc_feature 1..2208: note = source = /note="Description of Artificial Sequence: Synthetic polynucleotide"
  source 1..2208: mol_type = other DNA
atggctgccgatggttatcttccagattggctcgaggacaaccttagtgaaggaattcgcgagtggtgggctttgaaacctggagcccctcaacccaaggcaaatcaacaacatcaagacaacgctcgaggtcttgtgcttccgggttacaaataccttggacccggcaacggactcgacaagggggagccggtcaacgcagcagacgcggcggccctcgagcacgacaaggcctacgaccagcagctcaaggccggagacaacccgtacctcaagtacaaccacgccgacgccgagttccaggagcggctcaaagaagatacgtcttttgggggcaacctcgggcgagcagtcttccaggccaaaaagaggcttcttgaacctcttggtctggttgaggaagcggctaagacggctcctggaaagaagaggcctgtagagcagtctcctcaagaaccggactcctccgcgggtattggcaaatcgggtgcacagcccgctaaaaagagactcaatttcggtcagactggcgacacagagtcagtcccagaccctcaaccaatcggagaacctcccgcagccccctcaggtgtgggatctcttacaatggcttcaggtggtggcgcaccagtggcagacaataacgaaggtgccgatggagtgggtagttcctcgggaaattggcattgcgattcccaatggctgggggacagagtcatcaccaccagcacccgaacctgggccctgcccacctacaacaatcacctctacaagcaaatctccaacagcacatctggaggatcttcaaatgacaacgcctacttcggctacagcaccccctgggggtattttgacttcaacagattccactgccacttctcaccacgtgactggcagcgactcatcaacaacaactggggattccggcctaagcgactcaacttcaagctcttcaacattcaggtcaaagaggttacggacaacaatggagtcaagaccatcgccaataaccttaccagcacggtccaggtcttcacggactcagactatcagctcccgtacgtgctcgggtcggctcacgagggctgcctcccgccgttcccagcggacgttttcatgattcctcagtacgggtatctgacgcttaatgatggaagccaggccgtgggtcgttcgtccttttactgcctggaatatttcccgtcgcaaatgctaagaacgggtaacaacttccagttcagctacgagtttgagaacgtacctttccatagcagctacgctcacagccaaagcctggaccgactaatgaatccactcatcgaccaatacttgcactatctctcaaagactattaacggttctggacagaatcaacaaacgctaaaattcagtgtggccggacccagcaacatggctgtccagggaagaaactacatacctggacccagctaccgacaacaacgtgtctcaaccactgtgactcaaaacaacaacagcgaatttgcttggcctggagcttcttcttgggctctcaatggacgtaatagcttgatgaatcctggacctgctatggccagccacaaagaaggagaggaccgtttctttcctttgtctggatctttaatttttggcaaacaaggaactggaagagacaacgtggatgcggacaaagtcatgataaccaacgaagaagaaattaaaactactaacccggtagcaacggagtcctatggacaagtggccacaaaccaccagagtgcccaagcacaggcgcagaccggctgggttcaaaaccaaggaatacttccgggtatggtttggcaggacagagatgtgtacctgcaaggacccatttgggccaaaattcctcacacggacggcaactttcacccttctccgctgatgggagggtttggaatgaagcacccgcctcctcagatcctcatcaaaaacacacctgtacctgcggatcctccaacggccttcaacaaggacaagctgaactctttcatcacccagtattctactggccaagtcagcgtggagatcgagtgggagctgcagaaggaaaacagcaagcgctggaacccggagatccagtacacttccaactattacaagtctaataatgttgaatttgctgttaatactgaaggtgtatatagtgaaccccgccccattggcaccagatacctgactcgtaatctg

SEQ ID NO: 628 - DNA, 2208 bp, synthetic construct
  variation 1325: note = a, c, t, or g
  misc_feature 1..2208: note = source = /note="Description of Artificial Sequence: Synthetic polynucleotide"
  source 1..2208: mol_type = other DNA
atggctgccgatggttatcttccagattggctcgaggacaaccttagtgaaggaattcgcgagtggtgggctttgaaacctggagcccctcaacccaaggcaaatcaacaacatcaagacaacgctcgaggtcttgtgcttccgggttacaaataccttggacccggcaacggactcgacaagggggagccggtcaacgcagcagacgcggcggccctcgagcacgacaaggcctacgaccagcagctcaaggccggagacaacccgtacctcaagtacaaccacgccgacgccgagttccaggagcggctcaaagaagatacgtcttttgggggcaacctcgggcgagcagtcttccaggccaaaaagaggcttcttgaacctcttggtctggttgaggaagcggctaagacggctcctggaaagaagaggcctgtagagcagtctcctcaggaaccggactcctccgcgggtattggcaaatcgggtgcacagcccgctaaaaagagactcaatttcggtcagactggcgacacagagtcagtcccagaccctcaaccaatcggagaacctcccgcagccccctcaggtgtgggatctcttacaatggcttcaggtggtggcgcaccagtggcagacaataacgaaggtgccgatggagtgggtagttcctcgggaaattggcattgcgattcccaatggctgggggacagagtcatcaccaccagcacccgaacctgggccctgcccacctacaacaatcacctctacaagcaaatctccaccagcacatctggaggatcttcaaatgacaacgcctacttcggctacagcaccccctgggggtattttgacttcaacagattccactgccacttctcaccacgtgactggcagcgactcatcaacaacaactggggattccggcctaagcgactcaacttcaagctcttcaacattcaggtcaaagaggttacggacaacaatggagtcaagaccatcgccaataaccttaccagcacggtccaggtcttcacggactcagactatcagctcccgtacgtgctcgggtcggctcacgagggctgcctcccgccgttcccagcggacgttttcatgattcctcagtacgggtatctgacgcttaatgatggaagccaggccgtgggtcgttcgtccttttactgcctggaatatttcccgtcgcaaatgctaagaacgggtaacaacttccagttcagctacgagtttgagaacgtacctttccatagcagctacgctcacagccaaagcctggaccgactaatgaatccactcatcgaccnatacttgcactatctctcaaagactattaacggttctggacagaatcaacaaacgctaaaattcagtgtggccggacccagcaacatggctgtccagggaagaaactacatacctggacccagctaccgacaacaacgtgtctcaaccactgtgactcaaaacaacaacagcgaatttgcttggcctggagcttcttcttgggctctcaatggacgtaatagcttgatgaatcctggacctgctatggccagccacaaagaaggagaggaccgtttctttcctttgtctggatctttaatttttggcaaacaaggaactggaagagacaacgtggatgcggacaaagtcatgataaccaacgaagaagaaattaaaactactaacccggtagcaacggagtcctatggacaagtggccacaaaccaccagagtgcccaagcacaggcgcagaccggctgggttcaaaaccaaggaatacttccggatatggtttggcaggacagagatgtgtacctgcaaggacccatttgggccaaaattcctcacacggacggcaactttcacccttctccgctgatgggagggtttggaatgaagcacccgcctcctcagatcctcatcaaaaacacacctgtacctgcggatcctccaacggccttcaacaaggacaagctgaactctttcatcacccagtattctactggccaagtcagcgtggagatcgagtgggagctgcagaaggaaaacagcaagcgctggaacccggagatccagtacacttccaactattacaagtctaataatgttgaatttgctgttaatactgaaggtgtatatagtgaaccccgccccattggcaccagatacctgactcgtaatctg

SEQ ID NO: 629 - DNA, 2208 bp, synthetic construct
  misc_feature 1..2208: note = source = /note="Description of Artificial Sequence: Synthetic polynucleotide"
  source 1..2208: mol_type = other DNA
atggctgccgatggttatcttccagattggctcgaggacaaccttagtgaaggaattcgcgagtggtgggctttgaaacctggagcccctcaacccaaggcaaatcaacaacatcaagacaacgctcgaggtcttgtgcttccgggttacaaataccttggacccggcaacggactcgacaagggggagccggtcaacgcagcagacgcggcggccctcgagcacgacaaggcctacgaccagcagctcaaggccggagacaacccgtacctcaagtacaaccacgccgacgccgagttccaggagcggctcaaagaagatacgtcttttgggggcaacctcgggcgagcagtcttccaggccaaaaagaggcttcttgaacctcttggtctggttgaggaagcggctaagacggctcctggaaagaagaggcctgtagagcagtctcctcaggaaccggactcctccgcgggtattggcaaatcgggtgcacagcccgctaaaaagagactcaatttcggtcagactggcgacacagagtcagtcccagaccctcaaccaatcggagaacctcccgcagccccctcaggtgtgggatctcttacaatggcttcaggtggtggcgcaccagtggcagacaataacgaaggtgccgatggagtgggtagttcctcgggaaattggcattgcgattcccaatggctgggggacagagtcatcaccaccagcacccgaacctgggccctgcccacctacaacaatcacctctacaagcaaatctccaacagcacatctggaggatcttcaaatgacaacgcctacttcggctacagcaccccctgggggtattttgacttcaacagattccactgccacttctcaccacgtgactggcagcgactcatcaacaacaactggggattccggcctaagcgactcaacttcaagctcttcaacattcaggtcaaagaggttacggacaacaatggagtcaagaccatcgccaataaccttaccagcacggtccaggtcttcacggactcagactatcagctcccgtacgtgctcgggtcggctcacgagggctgcctcccgccgttcccagcggacgttttcatgattcctcagtacgggtatctgacgcttaatgatggaagccaggccgtgggtcgttcgtccttttactgcctggaatatttcccgtcgcaaatgctaagaacgggtaacaacttccagttcagctacgagtttgagaacgtacctttccatagcagctacgctcacagccaaagcctggaccgactaatgaatccactcatcgaccaatacttgcactatctctcaaagactattaacggttctggacagaatcaacaaacgctaaaattcagtgtggccggacccagcaacatggctgtccagggaagaaactacatacctggacccagctaccgacaacaacgtgtctcaaccactgtgactcaaaacaacaacagcgaatttgcttggcctggagcttcttcttgggctctcaatggacgtaatagcttgatgaatcctggacctgctatggccagctacaaagaaggagaggacagtttctttcctttgtctggatctttaatttttggcaaacaaggaactggaagagacaacgtggatgcggacaaagtcatgataaccaacgaagaagaaattaaaactactaacccggtagcaacggagtcctatggacaagtggccacaaaccaccagagtgcccaagcacaggcgcagaccggctgggttcaaaaccaaggaatacttccgggtatggtttggcaggacagagatgtgtacctgcaaggacccatttgggccaaaattcctcacacggacggcaactttcacccttctccgctgatgggagggtttggaatgaagcacccgcctcctcagaccctcatcaaaaacacacctgtacctgcggatcctccaacggccttcaacaaggacaagctgaactctttcatcacccagtattctactggccaagtcagcgtggagatcgagtgggagctgcagaaggaaaacagcaagcgctggaacccggagatccagtacacttccaactattacaagtctaataatgttgaatttgctgttaatactgaaggtgtatatagtgaaccccgccccattggcaccagatacctgactcgtaatctg

SEQ ID NO: 630 - DNA, 2208 bp, synthetic construct; identical to SEQ ID NO: 613
  misc_feature 1..2208: note = source = /note="Description of Artificial Sequence: Synthetic polynucleotide"
  source 1..2208: mol_type = other DNA

SEQ ID NO: 631 - DNA, 2208 bp, synthetic construct
  misc_feature 1..2208: note = source = /note="Description of Artificial Sequence: Synthetic polynucleotide"
  source 1..2208: mol_type = other DNA
atggctgccgatggttatcttccagattggctcgaggacaaccttagtgaaggaattcgcgagtggtgggctttgaaacctggagcccctcaacccagggcaaatcaacaacatcaagacaacgctcgaggtcttgtgcttccgggttacaaataccttggacccggcaacggactcgacaagggggagccggtcaacgcagccgacgcggcggccctcgagcacgacaaggcctacgaccagcagctcaaggccggagacaacccgtacctcaagtacaaccacgccgacgccgagttccaggagcggctcaaagaagatacgtcttttgggggcaacctcgggcgagcagtcttccaggccaaaaagaggcttcttgaacctcttggtctggttgaggaagcggctaagacggctcctggaaagaagaggcctgtagagcagtctcctcaggaaccggactcctccgcgggtattggcaaatcgggtgcacagcccgctaaaaagagactcaatttcggtcagactggcgacacagagtcagtcccagaccctcaaccaatcggagaacctcccgcagccccctcaggtgtgggatctcttacaatggcttcaggtggtggcgcaccagtggcagacaataacgaaggtgccgatggagtgggtagttcctcgggaaattggcattgcgattcccaatggctgggggacagagtcatcaccaccagcacccgaacctgggccctgcccacctacaacaatcacctctacaagcaaatctccaacagcacatctggaggatcttcaaatgacaacgcctacttcggctacagcaccccctgggggtattttgacttcaacagattccactgccacttctcaccacgtgactggcagcgactcatcaacaacaactggggattccggcctaagcgactcaacttcaagctcttcaacattcaggtcaaagaggttacggacaacaatggagtcaagaccatcgccaataaccttaccagcacggtccaggtcttcacggactcagactgtcagctcccgtacgtgctcgggtcggctcacgagggctgcctcccgccgttcccagcggacgttttcatgattcctcagtacgggtatctgacgcttaatgatggaagccaggccgtgggtcgttcgtccttttactgcctggaatatttcccgtcgcaaatgctaagaacgggtaacaacttccagttcagctacgagtttgagaacgtacctttccatagcagctacgctcacagccaaagcctggaccgactaacgaatccactcatcgaccaatacttgtactatctctcaaagactattaacggttctggacagaatcaacaaacgctaaaattcagtgtggccggacccagcaacatggctgtccagggaagaaactacatacctggacccagctaccgacaacaacgtgtctcaaccactgtgactcaaaacaacaacagcgaatttgcttggcctggagcttcttcttgggctctcaatggacgtaatagcttgatgaatcctggacctgctatggccagccacaaagaaggagaggaccgtttctttcctttgtctggatctttaatttttggcaaacaaggaactggaagagacaacgtggatgcggacaaagtcatgataaccaacgaagaagaaattaaaactactaacccggtagcaacggagtcccatggacaagtggccacaaaccaccagagtgcccaagcacaggcgcagaccggctgggttcaaaaccaaggaatacttccgggtatggtttggcaggacagagatgtgtacctgcaaggacccatttgggccaaaattcctcacacggacggcaactttcacccttctccgctgatgggagggtttggaatgaagcacccgcctcctcagatcctcatcaaaaacacacctgtacctgcggatcctccaacggccttcaacaaggacaagctgaactctttcatcacccagtattctactggccaagtcagcgtggagatcgagtgggagctgcagaaggaaaacagcaagcgctggaacccggagatccagtacacttccaactattacaagtctaataatgttgaatttgctgttaatactgaaggtgtatatagtgaaccccgccccattggcaccagatacctgactcgtaatctg

SEQ ID NO: 632 - DNA, 2208 bp, synthetic construct
  misc_feature 1..2208: note = source = /note="Description of Artificial Sequence: Synthetic polynucleotide"
  source 1..2208: mol_type = other DNA
atggctgccgatggttatcttccagattggctcgaggacaaccttagtgaaggaattcgcgagtggtgggctttgaaacctggagcccctcaacccaaggcaaatcaacaacatcaagacaacgctcgaggtcttgtgcttccgggttacaaataccttggacccggcaacggactcgacaagggggagccggtcaacgcagcagacgcggcggccctcgagcacgacaaggcctacgaccagcagctcaaggccggagacaacccgtacctcaagtacaaccacgccgacgccgagttccaggagcggctcaaagaagatacgtcttttgggggcaacctcgggcgagcagtcttccaggccaaaaagaggcttcttgaacctcttggtctggttgaggaagcggctaagacggctcctggaaagaagaggcctgtagagcagtctcctcaggaaccggactcctccgcgggtattggcaaatcgggtgcacagcccgctaagaagagactcaatttcggtcagactggcgacacagagtcagtcccagaccctcaaccaatcggagaacctcccgcagccccctcaggtgtgggatctcttacaatggcttcaggtggtggcgcaccagtggcagacaataacgaaggtgccgatggagtgggtagttcctcgggaaattggcattgcgattcccaatggctgggggacagagtcatcaccaccagcacccgaacctgggccctgcccacctacaacaatcacctctacaagcaaatctccaacagcacatctggaggatcttcaaatgacaacgcctacttcggctacagcaccccctgggggtattttgacttcaacagattccactgccacttctcaccacgtgactggcagcgactcatcaacaacaactggggattccggcctaagcgactcaacttcaagctcttcaacattcaggtcaaagaggttacggacaacaatggagtcaagaccatcgccaataaccttaccagcacggtccaggtcttcacggactcagactatcagctcccgtacgtgctcgggtcggctcacgagggctgcctcccgccgttcccagcggacgttttcatgattcctcagtacgggtatctgacgcttaatgatggaagccaggccgtgggtcgttcgtccttttactgcctggaatatttcccgtcgcaaatgctaagaacgggtaacaacttccagttcagctacgagtttgagaacgtacctttccatagcagctacgctcacagccaaagcctggaccgactaatgaatccacccatcgaccaatacttgtactatctctcaaagactattaacggttctggacagaatcaacaaacgctaaaattcagtgtggccggacccagcaacatggctgtccagggaagaaactacatacctggacccagctaccgacaacaacgtgtctcaaccactgtgactcaaaacaacaacagcgaatttgcttggcctggagcttcttcttgggctctcaatggacgtaatagcttgatgaatcctggacctgctatggccagccacaaagaaggagaggaccgtttctttcctttgtctggatctttaatttttggcaaacaaggaactggaagagacaacgtggatgcggacaaagtcatgataaccaacgaagaagaaattaaaactactaacccggtagcaacggagtcctatggacaagtggccacaaaccaccagagtgcccaagcacaggcgcagaccggctgggttcaaaaccaaggaatacttccgggtatggtttggcaggacagagatgtgtacctgcaaggacccatttgggccaaaattcctcacacggacggcaactttcacccttctccgctgatgggagggtttggaatgaagcacccgcctcctcagatcctcatcaaaaacacacctgtacctgcggatcctccaacggccttcaacaaggacaagctgaactctttcatcacccagtattctactggccaagtcagcgtggagatcgagtgggagctgcagaaggaaaacagcaagcgctggaacccggagatccagtacacttccaactattacaagtctaataatgttgaatttgctgttaatactgaaggtgtatatggtgaaccccgccccattggcaccagatacctgactcgtaatctg

SEQ ID NO: 633 - DNA, 2208 bp, synthetic construct
  misc_feature 1..2208: note = source = /note="Description of Artificial Sequence: Synthetic polynucleotide"
  source 1..2208: mol_type = other DNA
atggctgccgatggttatcttccagattggctcgaggacaaccttagtgaaggaattcgcgagtggtgggctttgaaacctggagcccctcaacccaaggcaaatcaacaacatcaagacaacgctcgaggtcttgtgcttccgggttacaaataccttggacccggcaacggactcgacaagggggagccggtcaacgcagcagacgcggcggccctcgagcacgacaaggcctacgaccagcagctcaaggccggagacaacccgtacctcaagtacaaccacgccgacgccgagttccaggagcggctcaaagaagatacgtcttttgggggcaacctcgggcgagcagtcttccaggccaaaaagaggcttcttgaacctcttggtctggttgaggaagcggctaagacggctcctggaaagaagaggcctgtagagcagtctcctcaggaaccggactcctccgcgggtattggcaaatcgggtgcacagcccgctaaaaagagactcaatttcggtcagactggcgacacagagtcagtcccagaccctcaaccaatcggagaacctcccgcagccccctcaggtgtgggatctcttacaatggcttcaggtggtggcgcaccagtggcagacaataacgaaggtgccgatggagtgggtagttcctcgggaaattggcattgcgattcccaatggctgggggacagagtcatcaccaccagcacccgaacctgggccctgcccacctacaacaatcacctctacaagcaaatctccaacagcacatctggaggatcttcaaatgacaacgcctacttcggctacagcaccccctgggggtattttgacttcaacagattccactgccacttctcaccacgtgaccggcagcgactcatcaacaacaactggggattccggcctaagcgactcaacttcaagctcttcaacattcaggtcaaagaggttacggacaacaatggagtcaagaccatcgccaataaccttaccagcacggtccaggtcttcacggactcagactatcagctcccgtacgtgctcgggtcggctcacgagggctgcctcccgccgttcccagcggacgttttcatgattcctcagtacgggtatctgacgcttaatgatggaagccaggccgtgggtcgttcgtccttttactgcctggaatatttcccgtcgcaaatgctaagaacgggtaacaacttccagttcagctacgagtttgagaacgtacctttccatagcagctacgctcacagccaaagcctggaccgactaatgaatccactcatcgaccaatacttgtactatctctcaaagactattaacggttctggacagaatcaacaaacgctaaaattcagtgtggccggacccagcaacatggctgtccagggaagaaactacatacctggacccagctaccgacaacaacgtgtctcaaccactgtgactcaaaacaacaacagcgaatttgcttggcctggagcttcttcttgggctctcaatggacgtaatagcttgatgaatcctggacctgctatggccagccacaaagaaggagaggaccgtttctttcctttgtctggatctttaatttttggcaaacaaggaactggaagagacaacgtggatgcggacaaagtcatgataaccaacgaagaagaaattaaaactactaacccggtagcaacggagtcctatggacaagtggccacaaaccaccagagtgcccaagcacaggcgcagaccggctgggttcaaaaccaaggaatacttccgggtatggtttggcaggacagagatgtgtacctgcaaggacccatttgggccaaaattcctcacacggacggcaactttcacccttctccgctgatgggagggtttggaatgaagcacccgcctcctcagatcctcatcaaaaacacacctgtacctgcggatcctccaacggccttcaacaaggacaagctgaactctttcatcacccagtattctactggccaagtcagcgtggagatcgagtgggagctgcagaaggaaaacagcaagcgctggaacccggagatccagtacacttccaactattacaagtctaataatgttgaatttgctgttaatactgaaggtgtatatagtgaaccccgccccattggcaccagatacctgactcgtaatctg

SEQ ID NO: 634 - DNA, 2208 bp, synthetic construct
  misc_feature 1..2208: note = source = /note="Description of Artificial Sequence: Synthetic polynucleotide"
  source 1..2208: mol_type = other DNA
atggctgccgatggttatcttccagattggctcgaggacaaccttagtgaaggaattcgcgagtggtgggctttgaaacctggagcccctcaacccaaggcaaatcaacaacatcaagacaacgctcgaggtcttgtgcttccgggttacaaataccttggacccggcaacggactcgacaagggggagccggtcaacgcagcagacgcggcagccctcgagcacgacaaggcctacgaccagcagctcaaggccggagacaacccgtacctcaagtacaaccacgccgacgccgagttccaggagcggctcaaagaagatacgtcttttgggggcaacctcgggcgagcagtcttccaggccaaaaagaggcttcttgaacctcttggtctggttgaggaagcggctaagacggctcctggaaagaagaggcctgtagagcagtctcctcaggaaccggactcctccgcgggtattggcaaatcgggtgcacagcccgctaaaaagagactcaatttcggtcagactggcgacacagagtcagtcccagaccctcaaccaatcggagaacctcccgcagccccctcaggtgtgggatctcttacaatggcttcaggtggtggcgcaccagtggcagacaataacgaaggtgccgatggagtgggtagttcctcgggaaattggcattgcaattcccaatggctgggggacagagtcatcaccaccagcacccgaacctgggccctgcccacctacaacaatcacctctacaagcaaatctccaacagcacatctggaggatcttcaaatgacaacgcctacttcggctacagcaccccctgggggtattttgacttcaacagattccactgccacttctcaccacgtgactggcagcgactcatcaacaacaactggggattccggcctaagcgactcaacttcaagctcttcaacattcaggtcaaagaggttacggacaacaatggagtcaagaccatcgccaataaccttaccagcacggtccaggtcttcacggactcagactatcagctcccgtacgtgctcgggtcggctcacgagggctgcctcccgccgttcccagcggacgttttcatgattcctcagtacgggtatctgacgcttaatgatggaagccaggccgtgggtcgttcgtccttttactgcctggaatatttcccgtcgcaaatgctaagaacgggtaacaacttccagttcagctacgagtttgagaacgtacctttccatagcagctacgctcacagccaaagcctggaccgactaatgaatccactcatcgaccaatacttgtactatctctcaaagactattaacggttctggacagaatcaacaaacgctaaaattcagtgtggccggacccggcaacatggctgtccagggaagaaactacatacctggacccagctaccgacaacaacgtgtctcaaccactgtgactcaaaacaacaacagcgaatttgcttggcctggagcttcttcttgggctctcaatggacgtaatagcttgatgaatcctggacctgctatggccagccacaaagaaggagaggaccgtttctttcctttgtctggatctttaatttttggcaaacaaggaactggaagagacaacgtggatgcggacaaagtcatgataaccaacgaagaagaaattaaaactactaacccggtagcaacggagtcctatggacaagtggccacaaaccaccagagtgcccaagcacaggcgcagaccggctgggttcaaaaccaaggaatacttccgggtatggtttggcaggacagagatgtgtacctgcaaggacccatttgggccaaaattcctcacacggacggcaactttcacccttctccgctgatgggagggtttggaatgaagcacccgcctcctcagatcctcatcaagaacacacctgtacctgcggatcctccaacggccttcaacaaggacaagctgaactctttcatcacccagtattctactggccaagtcagcgtggagatcgagtgggagctgcagaaggaaaacagcaagcgctggaacccggagatccagtacacttccaactattacaagtctaataatgttgaatttgctgttaatactgaaggtgtatatagtgaaccccgccccattggcaccagatacctgactcgtaatctg

SEQ ID NO: 635 - DNA, 2208 bp, synthetic construct
  misc_feature 1..2208: note = source = /note="Description of Artificial Sequence: Synthetic polynucleotide"
  source 1..2208: mol_type = other DNA
atggctgccgatggttatcttccagattggctcgaggacaaccttagtgaaggaattcgcgagtggtgggctttgaaacctggagcccctcaacccaaggcaaatcaacaacatcaagacaacgctcgaggtcttgtgcttccgggttacagataccttggacccggcaacggactcgacaagggggagccggtcaacgcagcagacgcggcggccctcgagcacgacaaggcctacgaccagcagctcaaggccggagacaacccgtacctcaagtacaaccacgccgacgccgagttccaggagcggctcaaagaagatacgtcttttgggggtaacctcgggcgagcagtcttccaggccaaaaagaggcttcttgaacctcttggtctggttgaggaagcggctaagacggctcctggaaagaagaggcctgtagagcagtctcctcaggaaccggactcctccgcgggtatcggcaaatcgggtgcacagcccgctaaaaagagactcaatttcggtcagactggcgacacagagtcagtcccagaccctcaaccaatcggagaacctcccgcagccccctcaggtgtgggatctcttacaatggcttcaggtggtggcgcaccagtggcagacaataacgaaggtgccgatggagtgggtagttcctcgggaaattggcattgcgattcccaatggctgggggacagagtcatcaccaccagcacccgaacctgggccctgcccacctacaacaatcacctctacaagcaaatctccaacagcacatctggaggatcttcaaatgacaacgcctacttcggctacagcaccccctgggggtattttgacttcaacagattccactgccacttctcaccacgtgactggcagcgactcatcaacaacaactggggattccggcctaagcgactcaacttcaagctcttcaacattcaggtcaaagaggttacggacaacaatggagtcaagaccgtcgccaataaccttaccagcacggtccaggtcttcacggactcagactatcagctcccgtacgtgctcgggtcggctcacgagggctgcctcccgccgttcccagcggacgttttcatgattcctcagtacgggtatctgacgcttaatgatggaagccaggccgtgggtcgttcgtccttttactgcctggaatatttcccgtcgcaaatgctaagaacgggtaacaacttccagttcagctacgagtttgagaacgtacctttccatagcagctacgctcacagccaaagcctggaccgactaatgaatccactcatcgaccaatacttgtactatctctcaaagactattaacggttctggacagaatcaacaaacgctaaaattcagtgtggccggacccagcaacatggctgtccagggaagaaactacatacctggacccagctaccgacaacaacgtgtctcaaccactgtgactcaaaacaacaacagcgaatttgcttggcctggagcttcttcttgggctctcaatggacgtaatagcttgatgaatcctggacctgctatggccagccacaaagaaggagaggaccgtttctttcctttgtctggatctttaatttttggcaaacaaggaactggaagagacaacgtggatgcggacaaagtcatgataaccaacgaagaagaaattaaaactactaacccggtagcaacggagtcctatggacaagtggccacaaaccaccagagtgcccaagcacaggcgcagaccggctgggttcaaaaccaaggaatacttccgggtatggtttggcaggacagagatgtgtacctgcaaggacccatttgggccaaaattcctcacacggacggcaactttcacccttctccgctgatgggagggtttggaatgaagcacccgcctcctcagatcctcatcaaaaacacacctgtacctgcggatcctccaacggccttcaacaaggacaagctgaactctttcatcacccagtattctactggccaagtcagcgtggagatcgagtgggagctgcagaaggaaaacagcaagcgctggaacccggagatccagtacacttccaactattacaagtctaataatgttgaatttgctgttaatactgaaggtgtatatagtggaccccgccccattggcaccagatacctgactcgtaatctg

SEQ ID NO: 636 - DNA, 2208 bp, synthetic construct
  misc_feature 1..2208: note = source = /note="Description of Artificial Sequence: Synthetic polynucleotide"
  source 1..2208: mol_type = other DNA
atggctgccgatggttatcttccagattggctcgaggacaaccttagtgaaggaattcgcgagtggtgggctttgaaacctggagcccctcaacccaaggcaaatcaacaacatcaagacaacgctcgaggtcttgtgcttccgggttacaaataccttggacccggcaacggactcgacaagggggagccggtcaacgcagcagacgcggcggccctcgagcacgacaaggcctacgaccagcagctcaaggccggagacaacccgtacctcaagtacaaccacgccgacgccgagttccaggagcggctcaaagaagatacgtcttttgggggcaacctcgggcgagcagtcttccaggccaaaaagaggcttcttgaacctcttggtctggttgaggaagcggctaagacggctcctggaaagaagaggcctgtagagcagtctcctcaggaaccggactcctccgcgggtattggcaaatcgggtgcacagcccgctaaaaagagactcaatttcggtcagactggcgacacagagtcagtcccagaccctcaaccaatcggagaacctcccgcagccccctcaggtgtgggatctcttacaatggcttcaggtggtggcgcaccagtggcagacaataacgaaggtgccgatggagtgggtagttcctcgggaaattggcattgcgattcccaatggctgggggacagagtcatcaccaccagcacccgaacctgggccctgcccacctacaacaatcacctctacaagcaaatctccaacagcacatctggaggatcttcaaatgacaacgcctacttcggctacagcaccccctgggggtattttgacttcaacagattccactgccacttctcaccacgtgactggcagcgactcatcaacaacaactggggattccggcctaagcgactcaacttcaagctcttcaacattcaggtcaaagaggttacggacaacaatggagtcaagaccatcgccaataaccttaccagcacggtccaggtcttcacggactcagactatcagctcccgtacgtgctcgggtcggctcacgagggctgcctcccgccgttcccagcggacgttttcatgattcctcagtacgggtatctgacgcttaatgatggaagccaggccgtgggtcgttcgtccttttactgcctggaatatttcccgtcgcaaatgctaagaacgggtaacaacttccagttcagctacgagtttgagaacgtacctttccatagcagctacgctcacagccaaagcctggaccgactaatgaatccactcatcgaccaatacttgtactatctctcaaagactattaacggttctggacagaatcaacaaacgctaaaattcagtgtggccggacccagcaacatggctgtccagggaagaaactacatacctggacccagctaccgacaacaacgtgtctcaaccactgtgactcaaaacaacaacagcgaatttgcttggcctggagcttcttcttgggctctcaatggacgtaatagcttgatgaatcctggacctgctatggccagccacaaagaaggagaggaccgtttctttcctttgtctggatctttaatttttggcaaacaaggaactggaagagacaacgtggatgcggacaaagtcatgataaccaacgaagaagaaattaaaactactaacccggtagcaacggagtcctatggacaagtggccacaaaccaccagagtgcccaagcacaggcgcagaccggctgggttcaaaaccaaggaatacttccgggtatggtttggcaggacagagatgtgtacctgcaaggacccatttgggccaaaattcctcacacggacggcaactttcacccttctccgctgatgggagggtttggaatgaagcacccgcctcctcagatcctcatcaaaaacacacctgtacctgcggatcctccaacggccttcaacaaggacaagctgaactctttcatcacccagtattctactggccaagtcagcgtggagatcgagtgggagctgcagaaggaaaacagcaagcgctggaacccggagatccagtacacttccaactattacaagtctaataatgttgaatttgctgttaatactgaaggtgtatatagtgaaccccgccccattggcaccagatacctgactcgtaatctg

SEQ ID NO: 637 - DNA, 2208 bp, synthetic construct
  misc_feature 1..2208: note = source = /note="Description of Artificial Sequence: Synthetic polynucleotide"
  source 1..2208: mol_type = other DNA
atggctgccgatggttatcttccagattggctcgaggacaaccttagtgaaggaattcgcgagtggtgggctttgaaacctggagcccctcaacccaaggcaaatcaacaacgtcaagacaacgctcgaggtcttgtgcttccgggttacaaataccttggacccggcaacggactcgacaagggggagccggtcaacgcagcagacgcggcggccctcgagcacgacaaggcctacgaccagcagctcaaggccggaggcaacccgtgcctcaagtacaaccacgccgacgccgagttccaggagcggctcaaagaagatacgtcttttgggggcaacctcgggcgagcagtcttccaggccaaaaagaggcttcttgaacctcttggtctggttgaggaagcggctaagacggctcctggaaagaagaggcctgtagagcagtctcctcaggaaccggactcctccgcgggtattggcagatcgggtgcacagcccgctaaaaagagactcaatttcggtcagactggcgacacagagtcagtcccagaccctcaaccaatcggagaacctcccgcagccccctcaggtgtgggatctcttacaatggcttcaggtggtggcgcaccagtggcagacaataacgaaggtgccgatggagtgggtagttcctcgggaaattggcattgcgattcccaatggctgggggacagagtcatcaccaccagcacccgaacctgggccctgcccacctacaacaatcacctctacaagcaaatctccaacagcacatctggaggatcttcaaatgacaacgcctacttcggctacagcaccccctgggggtattttgacttcaacagattccactgccacttctcaccacgtgactggcagcgactcatcaacaacaactggggattccggcctaagcgactcaacttcaagctcttcaacattcaggtcaaagaggttacggacaacaatggagtcaaggccatcgccaataaccttaccagcacggtccaggtcttcacggactcagactatcagctcccgtacgtgctcgggtcggctcacgagggctgcctcccgccgttcccagcggacgttttcatgattcctcagtacgggtatctgacgcttaatgatggaagccaggccgtgggtcgttcgtccttttactgcctggaatatttcccgtcgcaaatgctaagaacgggtaacaacttccagttcagctacgagtttgagaacgtacctttccatagcagctacgctcacagccaaagcctggaccgactaatgaatccactcatcgaccaatacttgtactatctctcaaagactattgacggttctggacagaatcaacaaacgctaaaattcagtgtggccggacccagcaacatggctgtccagggaagaaactacatacctggacccagctaccgacaacaacgtgtctcaaccactgtgactcaaaacaacaacagcgaatttgcttggcctggagcttcttcttgggctctcaatggacgtaatagcttgatggatcctggacctgctatggccagccacaaagaaggagaggaccgtttctttcctttgtctggatctttaatttttggcaaacaaggaactggaagagacaacgtggatgcggacaaagtcatgataaccaacgaagaagaaattaaaactactaacccggtagcaacggagtcctatggacaagtggccacaaaccaccagagtgcccaagcacaggcgcagaccggctgggttcaaaaccaaggaatacttccgggtatggtttggcaggacagagatgtgtacctgcaaggacccatttgggccaaaattcctcacacgggcggcaactttcacccttctccgctgatgggagggtttggaatgaagcacccgcctcctcagatcctcatcaaaaacacacctgtacctgcggatcctccaacggccttcaacaaggacaagctgaactctttcatcacccagtattctactggccaagtcagcgtggagatcgagtgggagctgcagaaggaaaacagcaagcgctggaacccggagatccagtacacttccaactattacaagtctaataatgttgaatttgctgttaatactgaaggtgtatatagtgaaccccgccccattggcaccagatacctgactcgtaatctg

SEQ ID NO: 638 - DNA, 2208 bp, synthetic construct
  misc_feature 1..2208: note = source = /note="Description of Artificial Sequence: Synthetic polynucleotide"
  source 1..2208: mol_type = other DNA
atggctgccgatggttatcttccagattggctcgaggacaaccttagtgaaggaattcgcgagtggtgggctttgaaacctggagcccctcaacccaaggcaaatcaacaacatcaagacaacgctcgaggtcttgtgcttccgggttacaaataccttggacccggcaacggactcgacaagggggagccggtcaacgcagcagacgcggcggccctcgagcacgacaaggcctacgaccagcagctcaaggccggagacaacccgtacctcaagtacaaccacgccgacgccgagttccaggagcggctcaaagaagatacgtcttttgggggcaacctcgggcgagcagtcttccaggccaaaaagaggcttcttgaacctcttggtctggttgaggaagcggctaagacggctcctggaaagaagaggcctgtagagcagtctcctcaggaaccggactcctccgcgggtattggcaaatcgggtgcacagcccgctaaaaagagactcaatttcggtcagactggcgacacagagtcagtcccagaccctcaaccaatcggagaacctcccgcagccccctcaggtgtgggatctcttacaatggcttcaggtggtggcgcaccagtggcagacaataacgaaggtgccgatggagtgggtagttcctcgggaaattggcattgcgattcccaatggctgggggacagagtcatcaccaccagcacccgaacctgggccctgcccacctacaacaatcacctctacaagcaaatctccaacagcacatctggaggatcttcaaatgacaacgcctacttcggctacagcaccccctgggggtattttgacttcaacagattccactgccacttctcaccacgtgactggcagcgactcatcaacaacaactggggattccggcctaagcgactcaacttcaagctcttcaacattcaggtcaaagaggttacggacaacaatggagtcaagaccatcgccaataaccttaccagcacggtccaggtcttcacggactcagactatcagctcccgtacgtgctcgggtcggctcacgagggctgcctcccgccgttcccagcggacgttttcatgattcctcagtacgggtatctgacgcttaatgatggaagccaggccgtgggtcgttcgtccttttactgcctggaatatttcccgtcgcaaatgctaagaacgggtaacaacttccagttcagctacgagtttgagaacgtacctttccatagcagctacgctcacagccaaagcctggaccgactaatgaatccactcatcgaccaatacttgtactatctctcaaagactattaacggttctggacagaatcaacaaacgctaaaattcagtgtggccggacccagcaacatggctgtccagggaagaaactacatacctggacccagctaccgacaacaacgtgtctcaaccactgtgactcaaaacaacaacagcgaatttgcttggcctggagcttcttcttgggctctcaatggacgtaatagcttgatgaatcctggacctgctatggccagccacaaagaaggagaggaccgtttctttcctttgtctggatctttaatttttggcaaacaaggaactggaagagacaacgtggatgcggacaaagtcatgataaccaacgaagaagaaattaaaactactaacccggtagcaacggagtcctatggacaagtggccacaaaccaccagagtgcccaagcacaggcgcagaccggctgggttcaaaaccaaggaatacttccgggtatggtttggcaggacagagatgtgtacctgcaaggacccatttgggccaaaattcctcacacggacggcaactttcacccttctccgctgatgggagggtttggaatgaagcacccgcctcctcagatcctcatcaaaaacacacctgtacctgcggatcctccaacggccttcaacaaggacaagctgaactctttcatcacccagtattctactggccaagtcagcgtggagatcgagtgggagctgcagaaggaaaacagcaagcgctggaacccggagatccagtacacttccaactattacaagcctaataatgttgaatttgctgttaatactgaaggtgtatatagtgaaccccgccccattggcaccagatacctgactcgtaatctg

SEQ ID NO: 639 - DNA, 2208 bp, synthetic construct
  misc_feature 1..2208: note = source = /note="Description of Artificial Sequence: Synthetic polynucleotide"
  source 1..2208: mol_type = other DNA
atggctgccgatggttatcttccagattggctcgaggacaaccttagtgaaggaattcgcgagtggtgggctttgaaacctggagcccctcaacccaaggcaaatcaacaacatcaagacaacgctcgaggtcttgtgcttccgggttacaaataccttggacccggcaacggactcgacaagggggagccggtcaacgcagcagacgcggcggccctcgagcacaacaaggcctacgaccagcagctcaaggccggagacaacccgtacctcaagtgcaaccacgccgacgccgagttccaggagcggctcaaagaagatacgtcttttgggggcaacctcgggcgagcagtcttccaggccaaaaagaggcctcttgaacctcttggtctggttgaggaagcggctaagacggctcctggaaagaagaggcctgtagagcagtctcctcaggaaccggactcctccgcgggtattggcaaatcgggtgcacagcccgctaaaaagagactcaatttcggtcagactggcgacacagagtcagtcccagaccctcaaccaatcggagaacctcccgcagccccctcaggtgtgagatctcttacaatggcttcaggtggtggcgcaccagtggcagacaataacgaaggtgccgatggagtgggtagttcctcgggaaattggcattgcgattcccaatggctgggggacagagtcatcaccaccagcacccgaacctgggccctgcccacctacaacaatcacctctacaagcaaatctccaacagcacatctggaggatcttcaaatgacaacgcctacctcggctacagcaccccctgggggtattttgacttcaacagattccactgccacttctcaccacgtgactggcagcgactcatcaacaacaactggggattccggcctaagcgactcaacttcaagctcttcaacattcaggtcaaagaggttacggacaacaatggagtcaagaccatcgccaataaccttaccagcacggtccaggtcttcacggactcagactatcagctcccgtacgtgctcgggtcggctcacgagggctgcctcccgccgttcccagcggacgttttcatgattcctcagtacgggtatctgacgcttaatgatggaagccaggccgtgggtcgttcgtccttttactgcctggaatatttcccgtcgcaaatgctaagaacgggtaacaacttccagttcagctacgagtttgagaacgtacctttccatagcagctacgctcacagccaaagcctggaccgactaatgaatccactcatcgaccaatacttgtactatctctcaaagactattaacggttctggacagaatcaacaaacgctaaaattcagtgtggccggacccagcaacatggctgtccagggaagaaactacatacctggacccagctaccgacaacaacgtgtctcaaccactgtgactcaaaacaacaacagcgaatttgcttggcctggagcttcttcttgggctctcaatggacgtaatagcttgatgaatcctggacctactatggccagccacaaagaaggagaggaccgtttctttcctttgtctggatctttaatttttggcaaacaaggaactggaagagacaacgtggatgcggacaaagtcatgataaccaacgaagaagaaattaaaactactaacccggtagcaacggagtcctatggacaagtggccacaaaccaccagagtgcccaagcacaggcgcagaccggctgggttcaaaaccaaggaatacttccgggtatggtttggcaggacagagatgtgtacctgcaaggacccatttgggccaaaattcctcacacggacggcaactttcacccttctccgctgatgggagggtttggaatgaagcacccgcctcctcagatcctcatcaaaaacacacctgtacctgcggatcctccaacggccttcaacaaggacaagctgaactctttcatcacccagtattctactggccaagtcagcgtggagatcgagtgggagctgcagaaggaaaacagcaagcgctggaacccggagatccagtacacttccaactattacaagtctaataatgttgaatttgctgttaatactgaaggtgtatatagtgaaccccgccccattggcaccagatacctgactcgtaatctg

SEQ ID NO: 640 - DNA, 2208 bp, synthetic construct
  misc_feature 1..2208: note = source = /note="Description of Artificial Sequence: Synthetic polynucleotide"
  source 1..2208: mol_type = other DNA
atggctgccgatggttatcttccagattggctcgaggacaaccttagtgaaggaattcgcgagtggtgggctttgaaacctggagcccctcaacccaaggcaaatcaacaacatcaagacaacgctcgaggtcttgtgcttccgggttacaaataccttggacccggcaacggactcgacaagggggagccggtcaacgcagcagacgcggcggccctcgtgcacgacaaggcctacgaccagcagctcaaggccggagacaacccgtacctcaagtgcaaccacgccgacgccgagttccaggagcggctcaaagaagatacgtcttttgggggcaacctcgggcgagcagtcttccaggccaaaaagaggcttcttgaacctcttggtctggttgaggaagcggctaagacggctcctggaaagaagaggcctgtagagcagtctcctcaggaaccggactcctccgcgggtattggcaaatcgggtgcacagcccgctaaaaagagactcaatttcggtcagactggcgacacagagtcagtcccagaccctcaaccaatcggagaacctcccgcagccccctcaggtgtgggatctcttacaatggcttcaggtggtggcgcaccagtggcagacaataacgaaggtgccgatggagtgggtagttcctcgggaaattggcattgcgattcccaatggctgggggacagagtcatcaccaccagcacccgaacctgggccctgcccacctacaacaatcacctctacaagcaaatctccaacagcacatctggaggatcttcaaatgacaacgcctacctcggctacagcaccccctgggggtattttgacttcaacagattccactgccacttctcaccacgtgactggcagcgactcatcaacaacaactggggattccggcctaagcgactcaacttcaagctcttcaacattcaggtcaaagaggttacggacaacaatggagtcaagaccatcgccaataaccttaccagcacggtccaggtcttcacggactcagactatcagctcccgtacgtgctcgggtcggctcacgagggctgcctcccgccgttcccagcggacgttttcacgattcctcagtacgggtatctgacgcttaatgatggaagccaggccgtgggtcgttcgtccttttactgcctggaatatttcccgtcgcaaatgctaagaacgggtaacaacttccagttcagctacgagtttgagaacgtacctttccatagcagctacgctcacagccaaagcctggaccgactaatgaatccactcatcgaccaatacttgtactatctctcaaagactattaacggttctggacagaatcaacaaacgctaaaattcagtgtggccggacccagcaacatggctgtccagggaagaaactacatacctggacccagctaccgacaacaacgtgtctcaaccactgtgactcaaaacaacaacagcgaatttgcttggcctggagcttcttcttgggctctcaatggacgtaatagcttgatgaatcctggacctgctatggccagccacaaagaaggagaggaccgtttctttcctttgtctggatctttaatttttggcaaacaaggaactggaagagacaacgtggatgcggacaaagtcatgataaccaacgaagaagaaattaaaactactaacccggtagcaacggagtcctatggacaagtggccacaaaccaccagagtgcccaagcacaggcgcagaccggctgggttcaaaaccaaggaatacttccgggtatggtttggcaggacagagatgtgtacctgcaaggacccatttgggccaaaattcctcacacggacggcaactttcacccttctccgctgatgggagggtttggaatgaagcacccgcctcctcagatcctcatcaaaaacacacctgtacctgcggatcctccaacggccttcaacaaggacaagctgaactctttcatcacccagtattctactggccaagtcagcgtggagatcgagtgggagctgcagaaggaaaacagcaagcgctggaacccggagatccagtacacttccaactattacaagtctaataatgttgaatttgctgttaatactgaaggtgtatatagtgaaccccgccccattgggccccgatacctgactcgtaatttt

SEQ ID NO: 641 - DNA, 2208 bp, synthetic construct
  misc_feature 1..2208: note = source = /note="Description of Artificial Sequence: Synthetic polynucleotide"
  source 1..2208: mol_type = other DNA
atggctgccgatggttatcttccagattggctcgaggacaaccttagtgaaggaattcgcgagtggtgggctttgaaacctggagcccctcaacccaaggcaaatcaacaacatcaagacaacgctcgaggtcttgtgcttccgggttacaaataccttggacccggcaacggactcgacaagggggagccggtcaacgcagcagacgcggcggccctcgagcacaacaaggcctacgaccagcagctcaaggccggagacaacccgtacctcaagtgcaaccacgccgacgccgagttccaggagcggctcaaagaagatacgtcttttgggggcaacctcgggcgagcagtcttccaggccaaaaagaggcttcttgaacctcttggtctggttgaggaagcggctaagacggctcctggaaagaagaggcctgtagagcagtctcctcaggaaccggactcctccgcgggtattggcaaatcgggtgcacagcccgctaaaaagagactcaatttcggtcagactggcgacacagagtcagtcccagaccctcaaccaatcggagaacctcccgcagccccctcaggtgtgagatctcttacaatggcttcaggtggtggcgcaccagtggcagacaataacgaaggtgccgatggagtgggtagttcctcgggaaattggcattgcgattcccaatggctgggggacagagtcatcaccaccagcacccgaacctgggccctgcccacctacaacaatcacctctacaagcaaatctccaacagcacatctggaggatcttcaaatgacaacgcctacctcggctacagcaccccctgggggtattttgacttcaacagattccactgccacttctcaccacgtgactggcagcgactcatcaacaacaactggggattccggcctaagcgactcaacttcaagctcttcaacattcaggtcaaagaggttacggacaacaatggagtcaagaccatcgccaataaccttaccagcacggtccaggtcttcacggactcagactatcagctcccgtacgtgctcgggtcggctcacgagggctgcctcccgccgttcccagcggacgttttcatgattcctcagtacgggtatctgacgcttaatgatggaagccaggccgtgggtcgttcgtccttttactgcctggaatatttcccgtcgcaaatgctaagaacgggtaacaacttccagttcagctacgagtttgagaacgtacctttccatagcagctacgctcacagccaaagcctggaccgactaatgaatccactcatcgaccaatacttgtactatctctcaaagactattaacggttctggacagaatcaacaaacgctaaaattcagtgtggccggacccagcaacatggctgtccagggaagaaactacatacctggacccagctaccgacaacaacgtgtctcaaccactgtgactcaaaacaacaacagcgaatttgcttggcctggagcttcttcttgggctctcaatggacgtaatagcttgatgaatcctggacctgctatggccagccacaaagaaggagaggaccgtttctttcctttgtctggatctttaatttttggcaaacaaggaactggaagagacaacgtggatgcggacaaagtcatgataaccaacgaagaagaaattaaaactactaacccggtagcaacggagtcctatggacaagtggccacaaaccaccagagtgcccaagcacaggcgcagaccggctgggttcaaaaccaaggaatacttccgggtatggtttggcaggacagagatgtgtacctgcaaggacccatttgggccaaaattcctcacacggacggcaactttcacccttctccgctgatgggagggtttggaatgaagcacccgcctcctcagatcctcatcaaaaacacacctgtacctgcggatcctccaacggccttcaacaaggacaagctgaactctttcatcacccagtattctactggccaagtcagcgtggagatcgagtgggagctgcagaaggaaaacagcaagcgctggaacccggagatccagtacacttccaactattacaagtctaataatgttgaatttgctgttaatactgaaggtgtatatagtgaaccccgccccattggcaccagatacctgactcgtaatctg

SEQ ID NO: 642 - DNA, 2208 bp, synthetic construct
  misc_feature 1..2208: note = source = /note="Description of Artificial Sequence: Synthetic polynucleotide"
  source 1..2208: mol_type = other DNA
atggctgccgatggttatcttccagattggctcgaggacaaccttagtgaaggaattcgcgagtggtgggctttgaaacctggagcccctcaacccaaggcaaatcaacaacatcaagacaacgctcgaggtcttgtgcttccgggttacaaataccttggacccggcaacggactcgacaagggggagccggtcaacgcagcagacgcggcggccctcgagcacgacaaggcctacgaccagcagctcaaggccggagacaacccgtacctcaagtgcaaccacgccgacgccgagttccaggagcggctcaaagaagatacgtcttttgggggcaacctcgggcgagcagtcttccaggccaaaaagaggcttcttgaacctcttggtctggttgaggaagcggctaagacggctcctggaaagaagaggcctgtagagcagtctcctcaggaaccggactcctccgcgggtattggcaaatcgggtgcacagcccgctaaaaagagactcaatttcggtcagactggcgacacagagtcagtcccagaccctcaaccaatcggagaacctcccgcagccccctcaggtgtgggatctcttacaatggcttcaggcggtggcgcaccagtggcagacaataacgaaggtgccgatggagtgggtagttcctcgggaaattggcattgcgattcccaatggctgggggacagagtcatcaccaccagcacccgaacctgggccctgcccacctacaacaatcacctctacaagcaaatctccaacagcacatctggaggatcttcaaatgacaacgcctacctcggctacagcaccccctgggggtattttgacttcaacagattccactgccacttctcaccacgtgactggcagcgactcatcaacaacaactggggattccggcctaagcgactcaacttcgagctcttcaacattcaggtcaaagaggttacggacaacaatggagtcaagaccatcgccaataaccttaccagcacggtccaggtcttcacggactcagactatcagctcccgtacgtgctcgggtcggctcacgagggctgcctcccgccgttcccagcggacgttttcatgattcctcagtacgggtatctgacgcttaatgatggaagccaggccgtgggtcgttcgtccttttactgcctggaatatttcccgtcgcaaatgctaagaacgggtaacaacttccagtccagctacgagtttgagaacgtacctttccatagcagctacgctcacagccaaagcctggaccgactaatgaatccactcatcgaccaatacttgtactatctctcaaagactattaacggttctggacagaatcaacaaacgctaaaattcagtgtggccggacccagcaacatggctgtccagggaagaaactacatacctggacccagctaccgacaacaacgtgcctcaaccactgtgactcaaaacaacaacagcgaatttgcttggcctggagcttcttcttgggctctcaatggacgtaatagcttgatgaatcctggacctgctatggccagccacaaagaaggggaggaccgtttctttcctttgtctggatctttaatttttggcaaacaaggaactggaagagacaacgtggatgcggacaaagtcatgataaccaacgaagaagaaattaaaactactaacccggtagcaacggagtcctatggacaagtggccacaaaccaccagagtgcccaagcacaggcgcagaccggctgggttcaaaaccaaggaatacttccgggtatggtttggcaggacagagatgtgtacctgcaaggacccatttgggccaaaattcctcacacggacggcaactttcacccttctccgctgatgggagggtttggaatgaagcacccgcctcctcagatcctcatcaaaaacacacctgtacctgcggatcctccaacggccttcaacaaggacaagctgaactctttcatcacccagtattctactggccaagtcagcgtggagatcgagtgggagctgcagaaggaaaacagcaagcgctggaacccggagatccagtacacttccaactattacaagtctaataatgttgaatttgctgttaatactgaaggtgtatatagtgaaccccgccccattggcaccagatacctgactcgtaatctg

SEQ ID NO: 643 - DNA, 2208 bp, synthetic construct
  misc_feature 1..2208: note = source = /note="Description of Artificial Sequence: Synthetic polynucleotide"
  source 1..2208: mol_type = other DNA
atggctgccgatggttatcttccagattggctcgaggacaaccttagtgaaggaattcgcgagtggtgggctttgaaacctggagcccctcaacccaaggcaaatcaacaacatcaagacaacgctcgaggtcttgtgcttccgggttacaaataccttggacccggcaacggactcgacaagggggagccggtcaacgcagcagacgcggcggccctcgagcacgacaaggcctacgaccagcagctcaaggccggagacaacccgtacctcaagtgcaaccacgccgacgccgagttccaggagcggctcaaagaagatacgtcttttgggggcaacctcgggcgagcagtcttccaggccaaaaagaggcttcttgaacctcttggtctggttgaggaagcggctaagacggctcctggaaagaagaggcctgtagagcagtctcctcaggaaccggactcctccgcgggtattggcaaatcgggtgcacagcccgctaaaaagagactcaatttcggtcagactggcgacacagagtcagtcccagaccctcaaccaatcggagaacctcccgcagcccccccaggtgtgggatctcttacaatggcttcaggtggtggcgcaccagtggcggacaataacgaaggtgccgatggagtgggtagttcctcgggaaattggcattgcgattcccaatggctgggggacagagtcatcaccaccagcacccgaacctgggccctgcccacctacaacaatcacctctacaagcaaatctccaacagcacatctggaggatcttcaaatgacaacgcctacctcggctacagcaccccctgggggtattttgacttcaacagattccactgccacttctcaccacgtgactggcagcgactcatcaacaacaactggggattccggcctaagcgactcaacttcaagctcttcaacattcaggtcaaagaggttacggacaacaatggagtcaagaccatcgccaataaccttaccagcacggtccaggtcttcacggactcagactatcagctcccgtacgtgctcgggtcggctcacgagggctgcctcccgccgttcccagcggacgttttcatgattcctcagtacgggtatctgacgcttaatgatggaagccaggccgtgggtcgttcgtccttttactgcctggaatatttcccgtcgcaaatgctaagaacgggtaacaacttccagttcagctacgagtttgagaacgtacctttccatagcagctacgctcacagccaaagcctggaccgactaatgaatccactcatcgaccaatacttgtactatctctcaaagactattagcggttctggacagaatcaacaaacgctaaaattcagtgtggccggacccagcaacatggctgtccagggaagaaactacatacctggacccagctaccgacaacaacgtgtctcaaccactgtgactcaaaacaacagcagcgaatttgcttggcctggagcttcttcttgggctctcaatggacgtaatagcttgatgaatcctggacctgctatggccagccacaaagaaggagaggaccgtttctttcctttgtctggatctttaatttttggcaaacaaggaactggaagagacaacgtggatgcggacaaagtcatgataaccaacgaagaagaaattaaaactactaacccggtagcaacggagtcctatggacaagtggccacaaaccaccagagtgcccaagcacaggcgcagaccggctgggttcaaaaccaaggaatactttcgggtatggtttggcaggacagagatgtgtacctgcaaggacccatttgggccaaaattcctcacacggacggcaactttcacccttctccgctgatgggagggtttggaatgaagcacccgcctcctcagatcctcatcaaaaacacacctgtacctgcggatcctccaacggccttcaacaaggacaagctgaactctttcatcacccagtattctactggccaagtcagcgtggagatcgagtgggagctgcagaaggaaaacagcaagcgctggaacccggagatccagtacacttccaactattacaagtctaataatgttgaatttgctgttaatactgaaggtgtatatagtgaaccccgccccattggcaccagatacctgactcgtaatctg

SEQ ID NO: 644 - DNA, 2208 bp, synthetic construct
  misc_feature 1..2208: note = source = /note="Description of Artificial Sequence: Synthetic polynucleotide"
  source 1..2208: mol_type = other DNA
atggctgccgatggttatcttccagattggctcgaggacaaccttagtgaaggaattcgcgagtggtgggctttgaaacctggagcccctcaacccaaggcaaatcaacaacatcaagacaacgctcgaggtcttgtgcttccgggttacaaataccttggacccggcaacggactcgacaagggggagccggtcaacgcagcagacgcggcggccctcgagcacgacaaggcctacgaccagcagctcaaggccggagacaacccgtacctcaagtgcaaccacgccgacgccgagttccaggagcggctcaaagaagatacgtcttttgggggcaacctcgggcgagcagtcttccaggccaaaaagaggcttcttgaacctcttggtctggttgaggaagcggctaagacggctcctggaaagaagaggcctgtagagcagtctcctcaggaaccggactcctccgcgggtattggcaaatcgggtgcacagcccgctaaaaagagactcaatttcggtcagactggcgacacagagtcagtcccagaccctcaaccaatcggagaacctcccgcagccccctcaggtgtgggatctcttacaatggcttcaggtggtggcgcaccagtggcagacaataacgaaggtgccgatggagtgggtagttcctcgggaaattggcattgcgattcccaatggctgggggacagagtcatcaccaccagcacccgaacctgggccctgcccacctacaacaatcacctctacaagcaaatctccaacagcacatctggaggatcttcaaatgacaacgcctacctcggctacagcaccccctgggggtattttgacttcaacagattccactgccacttctcaccacgtgactggcagcgactcatcaacaacaactggggattccggcctaagcgactcaacttcaagctcttcaacattcaggtcaaagaggttacggacaacaatggagtcaagaccatcgccaataaccttaccagcacggtccaggtcttcacggactcagactatcagctcccgtacgtgctcgggtcggctcacgagggctgcctcccgccgttcccagcggacgttttcatgattcctcagtacgggtatctgacgcttaatgatggaagccaggccgtgggtcgttcgtccttttactgcctggaatatttcccgtcgcaaatgctaagaacgggtaacaacttccagttcagctacgagtttgagaacgtacctttccatagcagctacgctcacagccaaagcctggaccgactaatgaatccactcatcgaccaatacttgtactatctctcaaagactattaacggttctggacagaatcaacaaacgctaaaattcagtgtggccggacccagcaacatggctgtccagggaagaaactacatacctggacccagctaccgacaacaacgtgtctcaaccactgtgactcaaaacaacaacagcgaatttgcttggcctggagcttcttcttgggctctcaatggacgtaatagcttgatgaatcctggacctgctatggccagccacaaagaaggagaggaccgtttctttcctttgtctggatctttaatttttggcaaacaaggaactggaagagacaacgtggatgcggacaaagtcatgataaccaacgaagaagaaattaaaactactaacccggtagcaacggagtcctatggacaagtggccacaaaccaccagagtgcccaagcacaggcgcagaccggctgggttcaaaaccaaggaatacttccgggtatggtttggcaggacagagatgtgtacctgcaaggacccatttgggccaaaattcctcacacggacggcaactttcacccttctccgctgatgggagggtttggaatgaagcacccgcctcctcagatcctcatcaaaaacacacctgtacctgcggatcctccaacggccttcaacaaggacaagctgaactctttcatcacccagtattctactggccaagtcagcgtggagatcgagtgggagctgcagaaggaaaacagcaagcgctggaacccggagatccagtacacttccaactattacaagtctaataatgttgaatttgctgttaatactgaaggtgtatatagtgaaccccgccccattggcaccagatacctgactcgtaatctg

SEQ ID NO: 645 - DNA, 2208 bp, synthetic construct; identical to SEQ ID NO: 644
  misc_feature 1..2208: note = source = /note="Description of Artificial Sequence: Synthetic polynucleotide"
  source 1..2208: mol_type = other DNA

SEQ ID NO: 646 - DNA, 2208 bp, synthetic construct
  misc_feature 1..2208: note = source = /note="Description of Artificial Sequence: Synthetic polynucleotide"
  source 1..2208: mol_type = other DNA
atggctgccgatggttatcttccagattggctcgaggacaaccttagtgaaggaattcgcgagtggtgggctttgaaacctggagcccctcaacccaaggcaaatcaacaacatcaagacaacgctcgaggtcttgtgcttccgggttacaaataccttggacccggcaacggactcgacaagggggagccggtcaacgcagcagacgcggcggccctcgagcacgacaaggcctacgaccagcagctcaaggccggagacaacccgtacctcaagtgcaaccacgccgacgccgagttccaggagcggctcaaagaagatacgtcttttgggggcaacctcgggcgagcagtcttccaggccaaaaagaggcttcttgaacctcttggtctggttgaggaagcggctaagacggctcctggaaagaagaggcctgtagagcagtctcctcaggaaccggactcctccgcgggtattggcaaatcgggtgcacagcccgctaaaaagagactcaatttcggtcagactggcgacacagagtcagtcccagaccctcaaccaatcggagaacctcccgcagccccctcaggtgtgggatctcttacaatggcttcaggtggtggcgcaccagtggcagacaataacgaaggtgccgatggagtgggtagttcctcgggaaattggcattgcgattcccaatggctgggggacagagtcatcaccaccagcacccgaacctgggccctgcccacctacaacaatcacctctacaagcaaatctccaacagcacatctggaggatcttcaaatgacaacgcctacctcgactacagcaccccctgggggtattttgacttcaacagattccactgccacttctcaccacgtgactggcagcggctcatcaacaacaactggggattccggcctaagcgactcaacttcaagctcttcaacattcaggtcaaagaggttacggacaacaatggagtcaagaccatcgccaataaccttaccagcacggtccaggtcttcacggactcagactatcagctcccgtacgtgctcgggtcggctcacgagggctgcctcccgccgttcccagcggacgttttcatgattcctcagtacgggtatctgacgcttaatgatggaagccaggccgtgggtcgttcgtccttttactgcctggaatatttcccgtcgcaaatgctaagaacgggtaacaacttccagttcagctacgagtttgagaacgtacctttccatagcagctacgctcacagccaaagcctggaccgactaatgaatccactcatcgaccaatacttgtactatctctcaaagactattaacggttctggacagaatcaacaaacgctaaaattcagtgtggccggacccagcaacatggctgtccagggaagaaactacatacctggacccagctaccgacaacaacgtgtctcaaccactgtgactcaaaacaacaacagcgaatttgcttggcctggagcttcttcttgggctctcaatggacgtaatagcttgatgaatcctggacctgctatggccagccacaaagaaggagaggaccgtttctttcctttgtctggatctttaatttttggcaaacaaggaactggaagagacaacgtggatgcggacaaagtcatgataaccaacgaagaagaaattaaaactactaacccggtagcaacggagtcctatggacaagtggccacaaaccaccagagtgcccaagcacaggcgcagaccggctgggttcaaaaccaaggaatacttccgggtatggtttggcagggcagagatgtgtacctgcaaggacccatttgggccaaaattcctcacacggacggcaactttcacccttctccgctgatgggagggtttggaatgaagcacccgcctcctcagatcctcatcaaaaacacacctgtacctgcggatcctccaacggccttcaacaaggacaagctgaactctttcatcacccagtattctactggccaagtcagcgtggagatcgagtgggagctgcagaaggaaaacagcaagcgctggaacccggagatccagtacacttccaactattacaagtctaataatgttgaatttgctgttaatactgaaggtgtatatagtgaaccccgccccattggcaccagatacctgactcgtaatctg

SEQ ID NO: 647 - DNA, 2208 bp, synthetic construct; identical to SEQ ID NO: 644
  misc_feature 1..2208: note = source = /note="Description of Artificial Sequence: Synthetic polynucleotide"
  source 1..2208: mol_type = other DNA

SEQ ID NO: 648 - DNA, 2208 bp, synthetic construct
  misc_feature 1..2208: note = source = /note="Description of Artificial Sequence: Synthetic polynucleotide"
  source 1..2208: mol_type = other DNA
atggctgccgatggttatcctccagattggctcgaggacaaccttagtgaaggaattcgcgagtggtgggctttgaaacctggagcccctcaacccaaggcaaatcaacaacatcaagacaacgctcgaggtcttgtgcttccgggttacaaataccttggacccggcaacggactcgacaagggggagccggtcaacgcagcagacgcggcggccctcgagcacgacaaggcctacgaccagcagctcaaggccggggacaacccgcacctcaagtacaaccacgccgacgccgagttccaggagcggctcaaagaagatacgtcttttgggggcaacctcgggcgagcagtcttccaggccaaaaagaggcttcttgaacctcttggtctggttgaggaagcggctaagacggctcctggaaagaagaggcccgtagagcagtctcctcaggaaccggactcctccgcgggtattggcaaatcgggtgcacagcccgctaagaagagactcaatttcggtcagactggcgacactgagtcagtcccagaccctcaaccaatcggagaacctcccgcagccccctcaggtgtgggatctcttacaatggcttcaggtggtggcgcaccagtggcagacaataacgaaggtgccgatggagtgggtagttcctcgggaaattggcattgcgattcccaatggctgggggacagagtcatcaccaccagcacccgaacctgggccctgcccacctacaacaatcacctctacaagcaaatctccaacagcacatctggaggatcttcaaatgacaacgcctacttcggctacagcaccccctgggggtattttgacttcaacagattccactgccacttctcaccacgtgactggcagcgactcatcaacaacaactggggattccggcctaagcgactcaacttcaagctcttcaacattcaggtcaaagaggttacggacaacaatggagtcaagaccatcgccaataaccttaccagcacggtccaggtcttcacggactcagactatcagctcccgtacgtgctcgggtcggctcacgagggctgcctcccgccgttcccagcggacgttttcatgattcctcagtacgggtatctgacgcttaatgatggaagccaggccgtgggtcgttcgtccttttactgcctggaatatttcccgtcgcaaatgctaagaacgggtaacaacttccagttcagctacgagtttgagaacgtacctttccatagcagctacgctcacagccaaagcctggaccgactaatgaatccactcatcgaccaatacttgtactatctctcaaagactattaacggttctggacagaatcaacaaacgctaaaattcagtgtggccggacccagcaacatggctgtccagggaagaaactacatacctggacccagctaccgacaacaacgtgtctcaaccactgtgactcaaaacaacaacagcgaatttgcttggcctggagcttcttcttgggctctcaatggacgtaatagcttgatgaatcctggacctgctatggccagccacaaagaaggagaggaccgtttctttcctttgtctggatctttaatttttggcaaacaaggaactggaagagacaacgtggatgcggacaaagtcatgataaccaacgaagaagaaattaaaactactaacccggtagcaacggagtcctatggacaagtggccacaaaccaccagagtgcccaagcacaggcgcagaccggctgggttcaaaaccaaggaatacttccgggtatggtttggcaggacagagatgtgtacctgcaaggacccatttgggccaaaattcctcacacggacggcaactttcacccttctccgctgatgggagggtttggagtgaagcacccgcctcctcagatcctcatcaaaaacacacctgtacctgcggatcctccaacggccttcaacaaggacaggctgaactctttcatcacccagtattctactggccaagtcagcgtggagatcgagtgggagctgcagaaggaaaacagcaagcgctggaacccggagatccagtacacttccaactattacaagtctaataatgttgaatttgctgttaatactgaaggtgtatatagtgaaccccgccccattggcaccagatacctgactcgtaatctg

SEQ ID NO: 649 - DNA, 2208 bp, synthetic construct
  misc_feature 1..2208: note = source = /note="Description of Artificial Sequence: Synthetic polynucleotide"
  source 1..2208: mol_type = other DNA
atggctgccgatggttatcttccagattggctcgaggacaaccttagtgaaggaattcgcgagtggtgggctttgaaacctggagcccctcaacccaaggcaaatcaacaacatcaagacaacgctcgaggtcttgtgcttccgggttacaaataccttggacccggcaacggactcgacaagggggagccggtcaacgcagcagacgcggcggccctcgagcacgacaaggcctacgaccagcagctcaaggccggagacaacccgtacctcaagtacaaccacgccgacgccgagttccaggagcggctcaaagaagatacgtcttttgggggcaacctcgggcgagcagtcttccaggccaaaaagaggcttcttgaacctcttggtctggttgaggaagcggctaagacggctcctggaaagaagaggcctgtagagcagtctcctcaggaaccggactcctccgcgggtattggcaaatcgggtgcacagcccgctaaaaagagactcaatttcggtcagactggcgacacagagtcagtcccagaccctcaaccaatcggagaacctcccgcagccccctcaggtgtgggatctcttacaatggcttcaggtggtggcgcaccagtggcggacaataacgaaggtgccgatggagtgggtagttcctcgggaaattggcattgcgattcccaatggctgggggacagagtcatcaccaccagcacccgaacctgggccctgcccacctacaacaatcacctctacaagcaaatctccaacagcacatctggaggatcttcaaatgacaacgcctacttcggctacagcaccccctgggggtattttgacttcaacagattccactgccacttctcaccacgtgactggcagcgactcatcaacaacaactggggattccggcctaagcgactcaacttcaagctcttcaacattcaggtcaaagaggttacggacaacaatggagtcaagaccatcgccaataaccttaccagcacggtccaggtcttcacggactcagactatcagctcccgtacgtgctcgggtcggctcacgagggctgcctcccgccgttcccagcggacgttttcatgattcctcagtacgggtatctgacgcttaatgatggaagccaggccgtgggtcgttcgtccttttactgcctggaatatttcccgtcgcaaatgctaagaacgggtaacaacttccagttcagctacgagtttgagaacgtacctttccatagcagctacgctcacagccaaagcctggaccgactaatgaatccactcatcgaccaatacttgtactatctctcaaagactattaacggttctggacagaatcaacaaacgctaaaattcagtgtggccggacccagcaacatggctgtccagggaagaaactacatacctggacccagctaccgacaacaacgtgtctcaaccactgtgactcaaaacaacaacagcgaatttgcttggcctggagcttcttcttgggctctcaatggacgtaatagtttgatgaatcctggacctgctatggccagccacaaagaaggagaggaccgtttctttcctttgtctggatctttaatttttggcaaacaaggaactggaagagacaacgtggatgcggacaaagtcatgataaccaacgaagaagaaattaaaactactaacccggtagcaacggagtcctatggacaagtggccacaaaccaccagagtgcccaagcacaggcgcagaccggctgggttcaaaaccaaggaatacttccgggtatggtttggcaggacagagatgtgtacctgcaaggacccatttgggccaaaattcctcacacggacggcaactttcacccttctccgctgatgggagggtttggagtgaagcacccgcctcctcagatcctcatcaaaaacacacctgtacctgcggatcctccaacggccttcaacaaggacaagctgaactctttcatcacccagtattctactggccaagtcagcgtggagatcgagtgggagctgcagaaggaaaacagcaagcgctggaacccggagatccagtacacttccaactattacaagtctaataatgttgaatttgctgttaatactgaaggtgtatatagtgaaccccgccccattggcaccagatacctgactcgtaatctg

SEQ ID NO: 650 - DNA, 2208 bp, synthetic construct
  misc_feature 1..2208: note = source = /note="Description of Artificial Sequence: Synthetic polynucleotide"
  source 1..2208: mol_type = other DNA
atggctgccgatggttatcttccagattggctcgaggacaaccttagtgaaggaattcgcgagtggtgggctttgaaacctggagcccctcaacccaaggcaaatcaacaacatcaagacaacgctcgaggtcttgtgcttccgggttacaaataccttggacccggcaacggactcgacaagggggagccggtcaacgcagcagacgcggcggccctcgagcacgacaaggcctacgaccagcagctcaaggccggagacaacccgtacctcaagtacaaccacgccgacgccgagttccaggagcggctcaaagaagatacgtcttttgggggcaacctcgggcgagcagtcttccaggccaaaaagaggcttcttgaacctcttggtctggttgaggaagcggctaagacggctcctggaaagaagaggcctgtagagcagtctcctcaggaaccggactcctccgcgggtattggcaaatcgggtgcacagcccgctaaaaagagactcaatttcggtcagactggcgacacagagtcagtcccagaccctcaaccaatcggagaacctcccgcagccccctcaggtgtgggatctcttacaatggcttcaggtggtggcgcaccagtggcagacaataacgaaggtgccgatggagtgggtagttcctcgggaaattggcattgcgattcccaatggctgggggacagagtcatcaccaccagcacccgaacctgggccctgcccacttacaacaatcacctctacaagcaaatctccaacagcacatctggaggatcttcaaatgacaacgcctacttcggctacagcaccccctgggggtattttgacttcaacagattccactgccacttctcaccacgtgactggcagcgactcaccaacaacaactggggattccggcctaagcgactcaacttcaagctcttcaacattcaggtcaaagaggttacggacaacaatggagtcaagaccatcgccaataaccttaccagcacggtccaggtcttcacggactcagactatcagctcccgtacgtgctcgggtcggctcacgagggctgcctcccgccgttcccagcggacgttttcatgattcctcagtacgggtatctgacgcttaatgatggaagccaggccgtgggtcgttcgtccttttactgcctggaatatatcccgtcgcaaatgctaagaacgggtaacaacttccagttcagctacgagtttgagaacgtacctttccatagcagctacgctcacagccaaagcctggaccgactaatgaatccactcatcgaccaatacttgtactatctctcaaagactattaacggttctggacagaatcaacaaacgctaaaattcagtgtggccggacccagcaacatggctgtccagggaagaaactacatacctggacccagctaccgacaacaacgtgtctcaaccactgtgactcaaaacaacaacagcgaatttgcttggcctggagcttcttcttgggctctcaatggacgtaatagcttgatgaatcctggacctgctatggccagccacaaagaaggagaggaccgtttctttcctttgtctggatctttaatttttggcaaacaaggaactggaagagacaacgtggatgcggacaaagtcatgataaccaacgaagaagaaattaaaactactaacccggtagcaacggagtcctatggacaagtggccacaaaccaccagagtgcccaagcacaggcgcagaccggctgggttcaaaaccaaggaatacttccgggtatggtttggcaggacagagatgtgtacctgcaaggacccatttgggccaaaattcctcacacggacggcaactttcacccttctccgctgatgggagggtttggagtgaagcacccgcctcctcagatcctcatcaaaaacacacctgtacctgcggatcctccaacggccttcaacaaggacaagctgaactctttcatcacccagtattctactggccaagtcagcgtggagatcgagtgggagctgcagaaggaaaacagcaagcgctggaacccggagatccagtacacttccaactattacaagtctaataatgttgaatttgctgttaatactgaaggtgtatatagtgaaccccgccccattggcaccagatacctgactcgtaatctg

SEQ ID NO: 651 - DNA, 2208 bp, synthetic construct
  misc_feature 1..2208: note = source = /note="Description of Artificial Sequence: Synthetic polynucleotide"
  source 1..2208: mol_type = other DNA
atggctgccgatggttatcttccagattggctcgaggacaaccttagtgaaggaattcgcgagtggtgggctttgaaacctggagcccctcaacccaaggcaaatcaacaacatcaagacaacgctcgaggtcttgtgcttccgggttacaaataccttggacccggcaacggactcgacaagggggagccggtcaacgcagcagacgcggcggccctcgagcacgacaaggcctacgaccagcagctcaaggccggagacaacccgtacctcaagtacaaccacgccgacgccgagttccaggagcggctcaaagaagatacgtcttttgggggcaacctcgggcgagcagtcttccaggccaaaaagaggcttcttgaacctcttggtctggttgaggaagcggctaagacggctcctggaaagaagaggcctgtagagcagtctcctcaggaaccggactcctccgcgggtattggcaaatcgggtgcacagcccgctaaaaagagactcaatttcggtcagactggcgacacagagtcagtcccagaccctcaaccaatcggagaacctcccgcagccccctcaggtgtgggatctcttacaatggcttcaggtggtggcgcaccagtggcagacaataacgaaggtgccgatggagtgggtagttcctcgggaaattggcattgcgattcccaatggctgggggacagagtcatcaccaccagcacccgaacctgggccctgcccacctacaacaatcacctctacaagcaaatctccaacagcacatctggaggatcttcaaatgacaacgcctacttcggctacagcaccccctgggggtattttgacttcaacagattccactgccacttctcaccacgtgactggcagcgactcatcaacaacaactggggattccggcctaagcgactcaacttcaagctcttcaacattcaggtcaaagaggttacggacaacaatggagtcaagaccatcgccaataaccttaccagcacggtccaggtcttcacggactcagactatcagctcccgtacgtgctcgggtcggctcacgagggctgcctcccgccgttcccagcggacgttttcatgattcctcagtacgggtatctgacgcttaatgatggaagccaggccgtgggtcgttcgtccttttactgcctggaatatttcccgtcgcaaatgctaagaacgggtaacaacttccagtttagctacgagtttgagaacgtacctttccatagcagctacgctcacagccaaagcctggaccgactaatgaatccactcatcgaccaatacttgtactatctctcaaagactattaacggttctggacagaatcaacaaacgctaaaattcagtgtggccggacccagcaacatggctgtccagggaagaaactacatacctggacccagctaccgacaacaacgtgtctcaaccactgtgactcaaaacaacaacagcgaatttgcttggcctggagcttcttcttgggctctcaatggacgtaatagcttgatgaatcctggacctgctatggccagccacaaagaaggagaggaccgtttctttcctttgtctggatctttaatttctggcaaacaaggaactggaagagacaacgtggatgcgaacaaagtcatgataaccaacgaagaagaaattaaaactactaacccggtagcaacggagtcctatggacaagtggccacaaaccaccagagtgcccaagcacaggcgcagaccggctgggttcaaaaccaaggaatacttccgggtatggtttggcaggacagagatgtgtacctgcaaggacccatttgggccaaaattcctcacacggacggcaactttcacccttctccgctgatgggagggtttgaaatgaagcacccgcctcctcagatcctcatcaaaaacacacctgtacctgcggatcctccaacggccttcaacaaggacaagctgaactctttcatcacccagtattctactggccaagtcagcgtggagatcgagtgggagctgcagaaggaaaacagcaagcgctggaacccggagatccagtacacttccaactattacaagtctaataatgttgaatttgctgttaatactgaaggtgtatatagtgaaccccgccccattggcaccagatacctgactcgtaatctg

SEQ ID NO: 652 - DNA, 2208 bp, synthetic construct
  misc_feature 1..2208: note = source = /note="Description of Artificial Sequence: Synthetic polynucleotide"
  source 1..2208: mol_type = other DNA
atggctgccgatggttatcttccagattggctcgaggacaaccttagtgaaggaattcgcgagtggtgggctttgaaacctggagcccctcaacccaaggcaaatcaacaacatcaagacaacgctcgaggtcttgtgcttccgggttacaaataccttggacccggcaacggactcgacaagggggagccggtcaacgcagcagacgcggcggccctcgagcacgacaaggcctacgaccagcagctcaaggccggagacaacccgtacctcaagtacaaccacgccgacgccgagttccaggagcggctcaaagaagatacgtcttttgggggcaacctcgggcgagcagtcttccaggccaaaaagaggcttcttgaacctcttggtctggttgaggaagcggctaagacggctcctggaaagaagaggcctgtagagcagtctcctcaggaaccggactcctccgcgggtattggcaaatcgggtgcacagcccgctaaaaagagactcaatttcggtcagactggcgacacagagtcagtcccagaccctcaaccaatcggagaacctcccgcagccccctcaggtgtgggatctcttacaatagcttcaggtggtggcgcaccagtggcagacaataacgaaggtgccgatggagtgggtagttcctcgggaaattggcattgcgattcccaatggctgggggacagagtcatcaccaccagcacccgaacctgggccctgcccacctacaacaatcacctctacaagcgaatctccaacagcacatctggaggatcttcaaatgacaacgcctacttcggctacagcaccccctgggggtattttgacttcaacagattccactgccacttctcaccacgtgactggcagcgactcatcaacaacaactggggattccggcctaagcgactcaacttcaagcttttcaacattcgggtcaaagaggttacggacaacaatggagtcaagaccatcaccaataaccttaccagcacggtccaggtcttcacggactcagactatcagctcccgtacgtgcttgggtcggctcacgagggctgcctcccgccgttcccagcggacgttttcatgattcctcagtacgggtatctgacgcttaatgatggaagccaggccgtgggtcgttcgtccttttactgcctggaatatttcccgtcgcaaatgctaagaacgggtaacaacttccagttcagctacgagtttgagaacgtacctttccatagcagctacgctcacagccaaagcctggaccgactaatgaatccactcatcgaccaatacttgtactatctctcaaagactattaacggttctggacagaatcaacaaacgctaaaattcagtgtggccggacccagcaacatggctgtccagggaagaaactacatacctggacccagctaccgacaacaacgtgtctcaaccactgtgactcgaaacaacaacagcgaatttgcttggcctggagcttcttcttgggctctcaatggacgtaatagcttgatgaatcctggacctgctatggccagccacaaagaaggagaggaccgtttctttcctttgtctggatctttaatttttggcaaacaaggaactggaagagacaacgtggatgcggacaaagtcatgataaccaacgaagaagaaattaaaactactaacccggtagcaacggagtcctatggacaagtggccacaaaccaccagagtgcccaagcacaggcgcagaccggctgggttcaaaaccaaggaatacttccgggtatggtttggcaggacagagatgtgtacctgcaaggacccatttgggccaaaattcctcacacggacggcaactttcacccttctccgctgatgggagggtttggagtgaagcacccgcctcctcagatcctcatcaaaaacacacctgtacctgcggatcctccaacggccttcaacaaggacaagctgaactctttcatcacccagtattctactggccaagtcagcgtggagatcgagtgggagctgcagaaggaaaacagcaagcgctggaacccggagatccagtacacttccaactattacaagtctaataatgttgaatttgctgttaatactgaaggtgtatatagtgaaccccgccccattggcaccagatacctgactcgtaatctg

SEQ ID NO: 653 - DNA, 2208 bp, synthetic construct
  misc_feature 1..2208: note = source = /note="Description of Artificial Sequence: Synthetic polynucleotide"
  source 1..2208: mol_type = other DNA
atggctgccgatggttatcttccagattggctcgaggacaaccttagtgaaggaattcgcgagtggtgggctttgaaacctggagcccctcaacccaaggcaaatcaacaacatcaagacaacgctcgaggtcttgtgcttccgggttacaaataccttggacccggcaacggactcgacaagggggagccggtcaacgcagcagacgcggcggccctcgagcacgacaaggcctacgaccagcagctcaaggccggagacaacccgtacctcaagtacaaccacgccgacgccgagttccaggagcggctcaaagaagatacgtcttttgggggcaacctcgggcgagcagtcttccaggccaaaaagaggcttcttgaacctcttggtctggttgaggaagcggctaagacggctcctggaaagaagaggcctgtagagcagtctcctcaggaaccggactcctccgcgggtattggcaaatcgggcgcacagcccgctaaaaagagactcaatttcggtcagactggcgacacagagccagtcccagaccctcaaccaatcggagaacctcccgcagccccctcaggtgtgggatctcttacaatggcttcaggtggtggcgcaccagtggcagacaataacgaaggtgccgatggagtgggtagttcctcgggaaattggcattgcgattcccaatggctgggggacagagtcatcaccaccagcacccgaacctgggccctgcccacctacaacaatcacctctacaagcaaatctccaacagcacatctggaggatcttcaaatgacaacgcctacttcggctacagcaccccctgggggtattttgacttcaacagattccactgccacttctcaccacgtgactggcagcgactcatcaacaacaactggggattccggcctaagcgactcaacttcaagctcttcaacattcaggtcaaagaggttacggacaacaatggagtcaagaccatcgccaataaccttaccagcacggtccaggtcttcacggactcagactatcagctcccgtacgtgctcgggtcggctcacgagggctgcctcccgccgttcccagcgggcgttttcatgattcctcagtacgggtatctgacgcttaatgatggaagccaggccgtgggtcgttcgtccttttactgcctggaatatttcccgtcgcaaatgctaagaacgggtaacaacttccagttcagctacgagtttgagaacgtacctttccatagcagctacgctcacagccaaagcctggaccgactaatgaatccactcatcgaccaatacttgtactatctctcaaagactattaacggttctggacagaatcaacaaacgctaaaattcagtgtggccggacccagcaacatggctgtccagggaagaaactacatacctggacccagctaccgacaacaacgtgtctcaaccactgcgactcaaaacaacaacagcgaatttgcttggcctggagcttcttcttgggctctcaatggacgtaatagcttgatgaatcctggacctgctatggccagccacaaagaaggagaggaccgtttctttcctttgtctggatctttaatttttggcaaacaaggaactggaagagacaacgtggatgcggacaaagtcatgataaccaacgaagaagaaattaaaactactaacccggtagcaacggagtcctatggacaagtggccacaaaccaccagagtgcccaagcacaggcgcagaccggctgggttcaaaaccaaggaatacttccgggtatggtttggcaggacagagatgtgtacctgcaaggacccatttgggccaaaattcctcacacggacggcaactttcacccttctccgctgatgggagggtttggaatgaagcacccgcctcctcagatcctcatcaaaaacacacctgtacctgcggatcctccaacggccttcaacaaggacaagctgaactctttcatcacccagtattctactggccaagtcagcgtggagatcgagtgggagctgcagaaggaaaacagcaagcgctggaacccggagatccagtacacttccaactattacaagtctaataatgttgaatttgctgttaatactgaaggtgtatatagtgaaccccgccccattggcaccagatacctgactcgtaatctg

SEQ ID NO: 654 - DNA, 2208 bp, synthetic construct
  misc_feature 1..2208: note = source = /note="Description of Artificial Sequence: Synthetic polynucleotide"
  source 1..2208: mol_type = other DNA
atggctgccgatggttatcttccagattggctcgaggacaaccttagtgaaggaattcgcgagtggtgggctttgaaacctggagcccctcaacccaaggcaaatcaacaacatcaagacaacgctcgaggtcttgtgcttccgggttacaaataccttggacccggcaacggactcgacaagggggagccggtcaacgcagcagacgcggcggccctcgagcacgacaaggcctacgaccagcagctcaaggccggagacaacccgtacctcaagtacaaccacgccgacgccgggttccaggagcggctcaaagaagatacgtcttttgggggcaacctcgggcgagcagtcttccaggccaaaaagaggcttcttgaacctcttggtctggttgaggaagcggctaagacggctcctggaaagaagaggcctgtagagcagtctcctcaggaaccggactcctccgcgggtattggcaaatcgggtgcacagcccgctaaaaagagactcaatttcggtcagactggcgacacagagtcagtcccagtccctcaaccaatcggagaacctcccgcagccccctcaggtgtgggatctcttacaatggcttcaggtggtggcgcaccagtggcagacaataacgaaggtgccgatggagtgggtagttcctcgggaaattggcattgcgattcccaatggctgggggacagagtcatcaccaccagcacccgaacctgggccctgcccacctacaacaatcacctctacaagcaaatctccaacagcacatctggaggatcttcaaatgacaacgcctacttcggctacagcaccccctgggggtattttgacttcaacagattccactgccacttctcaccacgtgactggcagcgactcatcaacaacaactggggattccggcctaagcgactcaacttcaagctcttcaacattcaggtcaaagaggttacggacaacaatggagtcaagaccatcgccaataaccttaccagcacggtccaggtcttcacggactcagactatcagctcccgtacgtgctcgggtcggctcacgagggctgcctcccgccgttcccagcggacgttttcatgattcctcagtacgggtatctgacgcttaatgatggaagccaggccgtgggtcgttcgtccttttactgcctggaatatttcccgtcgcaaatgctaagaacgggtaacaacttccagttcagctacgagtttgagaacgtacctttccatagcagctacgctcacagccaaagcctggaccgactaatgaatccactcatcgaccaatacttgtactatctctcaaagactattaacggttctggacagaatcaacaaacgctaaaattcagtgtggccggacccagcaacatggctgtccagggaagaaactacatacctggacccagctaccgacaacaacgtgtctcaaccactgtgactcaaaacaacaacagcgaatttgcttggcctggagcttcttcttgggctctcaatggacgtaatagcttgatgaatcctggacctgctatggccagccacaaagaaggagaggaccgtttctttcctttgtctggatctttaatttttggcaaacaaggagctggaagagacaacgtggatgcggacaaagtcatgataaccaacgaagaagaaattaaaactactaacccggtagcaacggagtcctatggacaagtggccacaaaccaccagagtgcccaagcacaggcgcagaccggctgggttcaaaaccaaggaatacttccgggtatggtttggcaggacagagatgtgtacctgcaaggacccatttgggccaaaattcctcacacggacggcaactttcacccttctccgctgatgggagggtttggaatgaagcacccgcctcctcagatcctcatcaaaaacacacctgtacctgcggatcctccaacggccttcaacaaggacaagctgaactctttcatcacccagtattctactggccaagtcagcgtggagatcgagtgggagctgcagaaggaaaacagcaagcgctggaacccggagatccagtacacttccaactattacaagtctaataatgttgaatttgctgttaatactgaaggtgtatatagtgaaccccgccccattggcaccagatacctgactcgtaatctg

SEQ ID NO: 655 - DNA, 2208 bp, synthetic construct
  variation 377: note = a, c, t, or g
  misc_feature 1..2208: note = source = /note="Description of Artificial Sequence: Synthetic polynucleotide"
  source 1..2208: mol_type = other DNA
atggctgccgatggttatcttccagattggctcgaggacaaccttagtgaaggaattcgcgagaggtgggctttgaaacctggagcccctcaacccaaggcaaatcaacaacatcaagacaacgctcgaggtcttgtgcttccgggttacaaataccttggacccggcaacggactcgacaagggggagccggtcaacgcagcagacgcggcggccctcgagcacgacaaggcctacgaccagcagctcaaggccggagacaacccgtacctcaagtacaaccacgccgacgccgagttccaggagcggctcaaagaagatacgtcttttgggggcaacctcgggcgagcagtcttccaggccaaaaagaggcttcntgaacctcttggtctggttgaggaagcggctaagacggctcctggaaagaagaggcctgtagagcagtctcctcaggaaccggactcctccgcgggtattggcaaatcgggtgcacagcccgctaaaaagagactcaatttcggtcagactggcgacacagagtcagtcccagaccctcaaccaatcggagaacctcccgcagccccctcaggtgtgggatctcttacaatggcttcaggtggtggcgcaccagtggcagacaataacgaaggtgccgatggagtgggtagttcctcggggaattggcattgcgattcccaatggctgggggacagagtcatcaccaccagcacccgaacctgggccctgcccacctacaacaatcacctctacaagcaaatctccaacagcacatctggaggatcttcaaatgacaacgcctacttcggctacagcaccccctgggggtattttgacttcaacagattccactgccacttctcaccacgtgactggcagcgactcatcaacaacaactggggattccggcctaagcgactcaacttcaagctcttcaacattcaggtcaaagaggttacggacaacaatggagtcaagaccatcgccaataaccttaccagcacggtccaggtcttcacggactcagactatcagctcccgtacgtgctcgggtcggctcacgagggctgcctcccgccgttcccagcggacgttttcatgattcctcagtacgggtatctgacgcttaatgatggaagccaggccgtgggtcgttcgtccttttactgcctggaatatttcccgtcgcaaatgctaagaacgggtaacaacttccagttcagctacgagtttgagaacgtacctttccatagcagctacgctcacagccaaagcccggaccgactaatgaatccactcatcgaccaatacttgtactatctctcaaagactattaacggttctggacagaatcaacaaacgctaaaattcagtgtggccggacccagcaacatggctgtccagggaagaaactacatacctggacccagctaccgacaacaacgtgtctcaaccactgtgactcaaaacaacaacagcgaatttgcttggcctggagcttcttcttgggctctcaatggacgtaatagcttgatgaatcctggacctgctatggccagccacaaagaaggagaggaccgtttctttcctttgtctggatctttaatttttggcaaacaaggaactggaagagacaacgtggatgcggacaaagtcatgataaccaacgaagaagaaattaaaactactaacccggtagcaacggagtcctatggacaagtggccacaaaccaccagagtgcccaagcacaggcgcagaccggctgggttcaaaaccaaggaatacttccgggtatggtttggcaggacagagatgtgtacctgcaaggacccatttgggccaaaattcctcacacggacggcaactttcacccttctccgctgatgggagggtttggagtgaagcacccgcctcctcagatcctcatcaaaaacacacctgtacctgcggatcctccaacggccttcaacaaggacaagctgaactctttcatcacccagtattctactggccaagtcagcgtggagatcgagtgggagctgcagaaggaaaacagcaagcgctggaacccggagatccagtacacttccaactattacaagtctaataatgttgaatttgctgttaatactgaaggtgtatatagtgaaccccgccccattggcaccagatacctgactcgtaatctg

SEQ ID NO: 656 - DNA, 2208 bp, synthetic construct
  misc_feature 1..2208: note = source = /note="Description of Artificial Sequence: Synthetic polynucleotide"
  source 1..2208: mol_type = other DNA
atggctgccgatggttatcttccagattggctcgaggacaaccttagtgaaggaattcgcgagtggtgggctttgaaacctggagcccctcaacccaaggcaaatcaacaacatcaagacaacgctcgaggtcttgtgcttccgggttacaaataccttggacccggcaacggactcgacaagggggagccggtcaacgcagcagacgcggcggccctcgagcacgacaaggcctacgaccagcagctcaaggccggagacaacccgtacctcaagtacaaccacgccgacgccgagttccaggagcggctcaaagaagatacgtcttttgggggcaacctcgggcgagcagtcttccaggccaaaaagaggcttcttgaacctcttggtctggttgaggaagcggctaagacggctcctggaaagaagaggcctgtagagcagtctcctcaggaaccggactcctccgcgggtattggcaaatcgggtgcacagcccgctaaaaagagactcaatttcggtcagactggcgacacagagtcagtcccagaccctcaaccaatcggagaacctcccgcagccccctcaggtgtgggatctcttacaatggcttcaggtggtggcgcaccagtggcagacaataacgaaggtgccgatggagtgggtagttcctcgggaaattggcattgcgattcccaatggctgggggacagagtcatcaccaccagcacccgaacctgggccctgcccacctacaacaatcacctctacaagcaaatctccaacagcacatctggaggatcttcaaatgacaacgcctacctcggctacagcaccccctgggggtattttgacttcaacagattccactgccacttctcaccacgtgactggcagcgactcatcaacaacaactggggattccggcctaagcgactcaacttcaagctcttcaacattcaggtcaaagaggttacggacaacaatggagtcaagaccatcgccaataaccttaccagcacggtccaggtcttcacggactcagactatcagctcccgtacgtgctcgggtcggctcacgagggctgcctcccgccgttcccagcggacgttttcatgattcctcagtacgggtatctgacgcttaatgatggaagccaggccgtgggtcgttcgtccttttactgcctggaatatttcccgtcgcaaatgctaagaacgggtaacaacttccagttcagctacgagtttgagaacgtacctttccatagcagctacgctcacagccaaagcctggaccgactaatgaatccactcatcgaccaatacttgtactatctctcaaagactattaacggttctggacagaatcaacaaacgctaaaattcagtgtggccggacccagcaacatggctgtccagggaagaaactacatacctggacccagctaccgacaacaacgtgtctcaaccactgtgactcaaaacaacaacagcgaatttgcttggcctggagcttcttcttgggctctcaatggacgtaatagcttgatgaatcctggacctgctatggccagccacaaagaaggagaggaccgtttctttcctttgtctggatctttaatttttggcaaacaaggaactggaagagacaacgtggatgcggacaaagtcatgataaccaacgaagaagaaattaaaactactaacccggtagcaacggagtcctatggacaagtggccacaaaccaccagagtgcccaagcacaggcgcagaccggctgggttcaaaaccaaggaatacttccgggtatggtttggcaggacagagatgtgtacctgcaaggacccatttgggccaaaattcctcacacggacggcaactttcacccttctccgctgatgggagggtttggaatgaagcacccgcctcctcagatcctcatcaaaaacacacctgtacctgcggatcctccaacggccttcaacaaggacaagctgaactctttcatcacccagtattctactggccaagtcagcgtggagatcgagtgggagctgcagaaggaaaacagcaagcgctggaacccggagatccagtacacttccaactattacaagtctaataatgttgaatttgctgttaatactgaaggtgtatatagtgaaccccgccccattggcaccagatacctgactcgtaatctg

SEQ ID NO: 657 - DNA, 2208 bp, synthetic construct
  misc_feature 1..2208: note = source = /note="Description of Artificial Sequence: Synthetic polynucleotide"
  source 1..2208: mol_type = other DNA
atggctgccgatggttatcttccagattggctcgaggacaaccttagtgaaggaattcgcgagtggtgggctttgaaacctggagcccctcaacccaaggcaaatcaacaacatcaagacaacgctcgaggtcttgtgcttccgggttacaaataccttggacccggcaacggactcgacaagggggagccggtcaacgcagcagacgcggcggccctcgagcacgacaaggcctacgaccagcagctcaaggccggagacaacccgtacctcaagtacaaccacgccgacgccgagttccaggagcggctcaaagaagatacgtcttttgggggcaacctcgggcgagcagtcttccaggccaaaaagaggcttcttgaacctcttggtctggttgaggaagcggctaagacggctcctggaaagaagaggcctgtagagcagtctcctcaggaaccggactcctccgcgggtattggcaaatcgggtgcacagcccgctaaaaagagactcaatttcggtcagactggcgacacagagtcagtcccagaccctcaaccaatcggagaacctcccgcagccccctcaggtgtgggatctcttacaatggcttcaggtggtggcgcaccagtggcagacaataacgaaggtgccgatggagtgggtagttcctcgggaaattggcattgcgattcccaatggctgggggacagagtcatcaccaccagcacccgaacctgggccctgcccacctacaacaatcacctctacaagcaaatctccaacagcacatctggaggatcttcaaatgacaacgcctacttcggctacagcaccccctgggggtattttgacttcaacagattccactgccacttctcaccacgtgactggcagcgactcatcaacaacaactggggattccggcctaagcgactcaacttcaagctcttcaacattcaggtcaaagaggttacggacaacaatggagtcaagaccatcgccaataaccttaccagcacggtccaggtcttcacggactcagactatcagctcccgtacgtgctcgggtcggctcacgagggctgcctcccgccgttcccagcggacgttttcatgattcctcagtacgggtatctgacgcttaatgatggaagccaggccgtgggtcgttcgtccttttactgcctggaatatttcccgtcgcaaatgctaagaacgggtaacaacttccagttcagctacgagtttgagaacgtacctttccatagcagctacgctcacagccagagcctggaccgactaatgaatccactcatcgaccaatacttgtactatctctcaaagactattaacggttctggacagaatcaacaaacgctaaaattcagtgtggccggacccagcaacatggctgtccagggaagaaactacatacctggacccagctaccgacaacaacgtgtctcaaccactgtgactcaaaacaacaacagcgaatttgcttggcctggagcttcttcttgggctctcaatggacgtaatagcttgatgaatcctggacctgctatggccagccacaaagaaggagaggaccgtttctttcctttgtctggatctttaatttttggcaaacaaggaactggaagagacaacgtggatgcggacaaagtcatgataaccaacgaagaagaaattaaaactactaacccggtagcaacggagtcctatggacaagtggccacaaaccaccagagtgcccaagcacaggcgcagaccggctgggttcaaaaccaaggaatacttccgggtatggtttggcaggacagagatgtgtacctgcaaggacccatttgggccaaaattcctcacacggacggcaactttcacccttctccgctgatgggagggtttggaatgaagcacccgcctcctcagatcctcatcaaaaacacacctgtacctgcggatcctccaacggccttcaacaaggacaagctggactctttcatcacccagtattctactggccaagtcagcgtggagatcgagtgggagctgcagaaggaaaacagcaagcgctggaacccggtgatccagtacacttccaactattacaagtctaataatgttgaatttgctgttaatactgaaggtgtatatagtgaaccccgccccattggcaccagatacctgactcgtaatctg

SEQ ID NO: 658 - DNA, 2208 bp, synthetic construct
  misc_feature 1..2208: note = source = /note="Description of Artificial Sequence: Synthetic polynucleotide"
  source 1..2208: mol_type = other DNA
atggctgccgatggttatcttccagattggctcgaggacaacctctctgagggcattcgcgagtggtgggacttgaaacctggagccccgaagcccaaagccaaccagcaaaagcaggacgacggccggggtctggtgcttcctggctacaagtacctcggacccttcaacggactcgacaagggggagcccgtcaacgcggcggacgcagcggccctcgagcacgacaaggcctacgaccagcagctcaaagcgggtgacaatccgtacctgcggtataaccacgccgacgccgagtttcaggagcgtctgcaagaagatacgtcttttgggggcaacctcgggcgagcagtcttccaggccaagaagcgggttctcgaacctctcggtctggttgaggaaggcgctaagacggctcctggaaagaaacgtccggtagagcagtcgccacaagagccagactcctcctcgggcatcggcaagacaggccagcagcccgctaaaaagagactcaattttggtcagactggcgactcagagtcagtccccgatccacaacctctcggagaacctccagcaacccccgctgctgtggggcctactacaatggcttcaggcggtggcgcaccaatggcagacaataacgaaggcgtcgacggagtgggtaatgcctcaggaaattggcattgcgattccacatggctgggcgacagagtcatcaccaccagcacccgcacctgggccttgcccacctacaataaccacctctacaagcaaatctccagtgcttcaacgggggccagcaacgacaaccactacttcggctacagcaccccctgggggtattttgatttcaacagattccactgccacttttcaccacgtgactggcagcgactcatcaacaacaattggggattccggcccaagagactcaacttcaaactcttcaacatccaagtcaaggaggtcacgacgaatgatggcgttacaaccatcgctaataaccttaccagcacggttcaagtcttctcggactcggagtaccagcttccgtacgtcctcggctctgcgcaccagggctgcctccctccgttcccggcggacgtgttcatgattccgcaatacggctacctgacgctcaacaatggcagccaagccgtgggacgttcatccttttactgcctggaatatttcccttctcagatgctgagaacgggcaacaactttaccttcagctacacctttgaggaagtgcctttccacagcagctacgcgcacagccagagcctggaccggctgatgaatcctctcatcgaccaatacctgtattacctgaacagaactcaaaatcagtccggaagtgcccaaaacaaggacttgctgtttagccgtgggtctccagctggcatgtctgttcagcccaaaaactggctacctggaccctgttatcggcagcagcgcgtttctaaaacaaaaacagacaacaacaacagcaattttacctggactggtgcttcaaaatataacctcaatgggcgtgaatccatcatcaaccctggcactgctatggcctcacacaaagacgacgaagacaagttctttcccatgagcggtgtcatgatttttggaaaagagagcgccggagcttcaaacactgcattggacaatgtcatgattacagacgaagaggaaattaaagccactaaccctgtggccaccgaaagatttgggaccgtggcagtcaatttccagagcagcagcacagaccctgcgaccggagatgtgcatgctatgggagcattacctggcatggtgtggcaagatagagacgtgtacctgcagggtcccatttgggccaaaattcctcacacagatggacactttcacccgtctcctcttatgggcggctttggactcaagaacccgcctcctcagatcctcatcaaaaacacgcctgttcctgcgaatcctccggcggagttttcagccacaaagcttgcttcattcatcacccaatactccacaggacaagtgagtgtggaaattgaatgggagctgcagaaagaaaacagcaagcgctggaatcccgaagtgcagtacacatccaattatgcaaaatctgccaacgttgattttactgtggacaacaatggactttatactgagcctcgccccattggcacccgttaccttacccgtcccctg

SEQ ID NO: 659 - DNA, 2208 bp, synthetic construct
  misc_feature 1..2208: note = source = /note="Description of Artificial Sequence: Synthetic polynucleotide"
  source 1..2208: mol_type = other DNA
atggctgccgatggttatcttccagattggctcgaggacaacctctctgagggcattcgcgagtggtgggacttgaaacctggagccccgaagcccaaagccaaccagcaaaagcaggacgacggccggggtctggtgcttcctggctacaagtacctcggacccttcaacggactcgacaagggggagcccgtcaacgcggcggacgcagcggccctcgagcacgacaaggcctacgaccagcagctcaaagcgggtgacaatccgtacctgcggtataaccacgccgacgccgagtttcaggagcgtctgcaagaagatacgtcttttgggggcaacctcgggcgagcagtcttccaggccaagaagcgggttctcgaacctctcggtctggttgaggaaggcgctaagacggctcctggaaagagacgtccggtagagcagtcgccacaagagccagactcctcctcgggcatcggcaagacaggccagcagcccgctaaaaagagactcaattttggtcagactggcgactcagagtcagtccccgatccacaacctctcggagaacctccagcaacccccgctgctgtgggacctactacaatggcttcaggcggtggcgcaccaatggcagacaataacgaaggcgccgacggagtgggtaatgcctcaggaaattggcattgcgattccacatggctgggcgacagagtcatcaccaccagcacccgcacctgggccttgcccacctacaataaccacctctacaagcaaatctccagtgcttcaacgggggccagcaacgacaaccactacttcggctacagcaccccctgggggtattttgatttcaacagattccactgccacttttcaccacgtgactggcagcgactcatcaacaacaattggggattccggcccaagagactcaacttcaaactcttcaacatccaagtcaaggaggtcacgacgaatgatggcgtcacaaccatcgctaataaccttaccagcacggttcaagtcttctcggactcggagtaccagcttccgtacgtcctcggctctgcgcaccagggctgcctccctccgttcccggcggacgtgttcatgattccgcaatacggctacctgacgctcaacaatggcagccaagccgtgggacgttcatccttttactgcctggaatatttcccttctcagatgctgagaacgggcaacaactttaccttcagctacacctttgaggaagtgcctttccacagcagctacgcgcacagccagagcctggaccggctgatgaatcctctcatcgaccaatacctgtattacctgaacagaactcaaaatcagtccggaagtgcccaaaacaaggacttgctgtttagccgtgggtctccagctggcatgtctgttcagcccaaaaactggctacctggaccctgttatcggcagcagcgcgtttctaaaacaaaaacagacaacaacaacagcaattttacctggactggtgcttcaaaatataacctcaatgggcgtgaatccatcatcaaccctggcactgctatggcctcacacaaagacgacgaagacaagttctttcccatgagcggtgtcatgatttttggaaaagagagcgccggagcttcaaacactgcattggacaatgtcatgattacagacgaagaggaaattaaagccactaaccctgtggccaccgaaagatttgggaccgtggcagtcaatttccagagcagcagcacagaccctgcgaccggagatgtgcatgctatgggagcattacctggcatggtgtggcaagatagagacgtgtacctgcagggtcccatttgggccaaaattcctcacacagatggacactttcacccgtctcctcttatgggcggctttggactcaagaacccgcctcctcagatcctcatcaaaaacacgcctgttcctgcgaatcctccggcggagttttcagctacaaagtttgcttcgttcatcacccaatactccacaggacaagtgagtgtggaaattgaatgggagctgcagaaagaaaacagcaagcgctggaatcccgaagtgcagtacacatccaattatgcaaaatctgccaacgttgattttactgtggacaacaatggactttatactgagcctcgccccattggcacccgttaccttacccgtcccctg

SEQ ID NO: 660 - DNA, 2208 bp, synthetic construct
  misc_feature 1..2208: note = source = /note="Description of Artificial Sequence: Synthetic polynucleotide"
  source 1..2208: mol_type = other DNA
atggctgccgatggttatcttccagattggctcgaggacaacctctctgagggcattcgcgagtggtgggacttgaaacctggagccccgaagcccaaagccaaccagcaaaagcaggacgacggccggggtctggtgcttcctggctacaagtacctcggacccttcaacggactcgacaagggggagcccgtcaacgcggcggacgcagcggccctcgagcacgacaaggcctacgaccagcagctcaaagcgggtgacaatccgtacccgcggtataaccacgccgacgccgagtttcaggagcgtctgcaagaagatacgtcttttgggggcaacctcgggcgagcagtcttccaggccaagaagcgggttctcgaacctctcggtctggttggggaaggcgctaagacggctcctggaaagaaacgtccggtagagcagtcgccacaagagccagactcctcctcgggcatcggcaagacaggccagcagcccgctaaaaagagactcaattttggtcagactggcgactcagagtcagtccccgatccacaacctctcggagaacctccagcaacccccgctgctgtgggacctactacaatggcttcaggcggtggcgcaccaatggcagacaataacgaaggcgccgacggagtgggtaatgcctcaggaaattggcattgcgattccacatggctgggcgacagagtcatcaccaccagcacccgcacctgggccttgcccacctacaataaccacctctacaagcaaatctccagtgcttcaacgggggccagcaacgacaaccactacttcggctacagcaccccctgggggtattttgatttcaacagattccactgccacttttcaccacgtgactggcagcgactcatcaacaacaattggggattccggcccaagagactcaacttcaaactcttcaacatccaagtcaaggaggtcacgacgaatgatggcgtcacaaccatcgctaataaccttaccagcacggttcaagtcttctcggactcggagtaccagcttccgtacgtcctcggctctgcgcaccagggctgcctccctccgttcccggcggacgtgttcatgattccgcaatacggctacctgacgctcaacaatggcagccaagccgtgggacgttcatccttttactgcctggaatatttcccttctcagatgctgagaacgggcaacaactttaccttcagctacacctttgaggaagtgcctttccacagcagctacgcgcacagccagagcctggaccggctgatgaatcctcccatcgaccaatacctgtattacctgaacagaactcaaaatcagtccggaagtgcccaaaacaaggacttgctgtttagccgtgggtctccagctggcatgtctgttcagcccaaaaactggctacctggaccctgttatcggcagcagcgcgtttctaaaacaaaaacagacaacaacaacagcaattttacctggactggtgcttcaaaatataacctcaatgggcgtgaatccatcatcaaccctggcactgctatggcctcacacaaagacgacgaagacaagttctttcccatgagcggtgtcatgatttttggaaaagagagcgccggagcttcaaacactgcattggacaatgtcatgattacagacgaagaggaaattaaagccactaaccctgtggccaccgaaagatttgggaccgtggcagtcaatttccagagcagcagcacagaccctgcgaccggagatgtgcatgctatgggagcattacctggcatggtgtggcaagatagagacgtgtacctgcagggtcccatttgggccaaaattcctcacacagatggacactttcacccgtctcctcttatgggcggctttggactcaagaacccgcctcctcagatcctcatcaaaaacacgcctgttcctgcgaatcctccggcggagttttcagctacaaagtttgcttcattcatcacccaatactccacaggacaagtgagtgtggaaattgaatgggagctgcagaaagaaaacagcaagcgctggaatcccgaagtgcagtacacatccaattatgcaaaatctgccaacgttgattttactgtggacaacaatggactttatactgagcctcgccccattggcacccgttaccttacccgtcccctg

SEQ ID NO: 661 - DNA, 2208 bp, synthetic construct
  misc_feature 1..2208: note = source = /note="Description of Artificial Sequence: Synthetic polynucleotide"
  source 1..2208: mol_type = other DNA
atggctgccgatggttatcttccagattggctcgaggacaacctctctgagggcattcgcgagtggtgggacttgaaacctggagccccgaagcccaaagccaaccagcaaaagcaggacgacggccggggtctggtgcttcctggctacaagtacctcggacccttcaacggactcgacaagggggagcccgtcaacgcggcggacgcagcggccctcgagcacgacaaggcctacgaccagcagctcaaagcgggtgacaatccgtacctgcggtataaccacgccgacgccgagtttcaggagcgtctgcaagaagatacgtcttttgggggcaacctcgggcgagcagtcttccaggccaagaagcgggttctcgaacctctcggtctggttgaggaaggcgctaagacggctcctggaaagaaacgtccggtagagcagtcgccacaagagccagactcctcctcgggcatcggcaagacaggccagcagcccgctaaaaagagactcaattttggtcagactggcgactcagagtcagtccccgatccacgacctctcggagaacctccagcaacccccgctgctgtgggacctactacaatggcttcaggcggtggcgcaccaatggcagacaataacgaaggcgccgacggagtgggtaatgcctcaggaaattggcattgcgattccacatggctgggcgacagagtcatcaccaccagcacccgcacctgggccttgcccacctacaataaccacctctacaagcaaatctccagtgcttcaacgggggccagcaacgacaaccactacttcggctacagcaccccctgggggtattttgatttcaacagattccactgccacttttcaccacgcgactggcagcgactcatcaacaacaattggggattccggcccaagagactcaacttcaaactcttcaacatccaagtcaaggaggtcacgacgaatgatggcgtcacaaccatcgctaataaccttaccagcacggttcaagtcttctcggactcggagtaccagcttccgtacgtcctcggctctgcgcaccagggctgcctccctccgttcccggcggacgtgttcatgattccgcaatacggctacctgacgctcaacaatggcagccaagccgtgggacgttcatccttttactgcctggaatatttcccttctcagatgctgagaacgggcaacaactttaccttcagctacacctttgaggaagtgcctttccacagcagctacgcgcacagccagagcctggaccggctgatgaatcctctcatcgaccaatacctgtattacctgaacagaactcaaaatcagtccggaagtgcccaaaacaaggacttgctgtttagccgtgggcctccagctggcatgtctgttcagcccaaaaactggctacctggaccctgttatcggcagcagcgcgtttctaaaacaaaaacagacaacaacaacagcaattttacctggactggtgcttcaaaatataacctcaatgggcgtgaatccatcatcaaccctggcactgctatggcctcacacaaagacgacgaagacaagttctttcccatgagcggtgtcatgatttttggaaaagagagcgccggagcttcaaacactgcattggacaatgtcatgattacggacgaagaggaaattaaagccactaaccctgtggccaccgaaagatttgggaccgtggcagtcaatttccagagcagcagcacagaccctgcgaccggagatgtgcatgctatgggagcattacctggcatggtgtggcaagatagagacgtgtacctgcagggtcccatttgggccaaaattcctcacacagatggacactttcacccgtctcctcttatgggcggctttggactcaagaacccgcctcctcagatcctcatcaaaaacacgcctgttcctgcgaatcctccggcggagttttcagctacaaagtttgcttcattcatcacccaatactccacaggacaagtgagtgtggaaattgaatgggagctgcagaaagaaaacagcaagcgctggaatcccgaagtgcagtacacatccaattatgcaaaatctgccaacgttgattttactgtggacaacaatggactttatactgagcctcgccccattggcacccgttaccttacccgtcccctg

SEQ ID NO: 662 - DNA, 2208 bp, synthetic construct
  misc_feature 1..2208: note = source = /note="Description of Artificial Sequence: Synthetic polynucleotide"
  source 1..2208: mol_type = other DNA
atggctgccgatggttatcttccagattggctcgaggacaacctctctgagggcattcgcgagtggtgggacttgaaacctggagccccgaagcccaaagccaaccagcaaaagcaggacgacggccggggtctggtgcttcctggctacaagtacctcggacccttcaacggactcgacaagggggagcccgtcaacgcggcggacgcagcggccctcgagcacgacaaggcctacgaccagcagctcaaagcgggtgacaatccgtacctgcggtataaccacgccgacgccgagtttcaggagcgtctgcaagaagatacgtcttttgggggcaacctcgggcgagcagtcttccaggccaagaagcgggttctcgaacctctcggtctggttgaggaaggcgctaagacggctcctggaaagaaacgtccggtagagcagtcgccacaagagccagactcctcctcgggcatcggcaagacaggccagcagcccgctaaaaagagactcaattttggtcagactggcggctcagagtcagtccccgatccacaacctctcggagaacctccagcaacccccgctgctgtgggacctactacaatggcttcaggcggtggcgcaccaatggcagacaataacgaaggcgccgacggagtgggtaatgcctcaggaaattggcattgcgattccacatggctgggcgacagagtcatcaccaccagcacccgcacctgggccttgcccacctacaataaccacctctacaagcaaatctccagtgcttcaacgggggccagcaacgacaaccactacttcggctacagcaccccctgggggtattttgatttcaacagattccactgccacttttcaccacgtgactggcagcgactcatcaacaacaattggggattccggcccaagagactcaacttcaaactcttcaacatccaagtcaaggaggtcacgacgaatgatggcgtcacaaccatcgctaataaccttaccagcacggttcaagtcttctcggactcggagtaccagcttccgtacgtcctcggctctgcgcaccagggctgcctccctccgttcccggcggacgtgttcatgattccgcaatacggctacctgacgctcaacaatggcagccaagccgtgggacgttcatccttttactgcctggaatatttcccttctcagatgctgagaacgggcaacaactttaccttcagctacacctttgaggaagtgcctttccacagcagctacgcgcacagccagagcctggaccggctgatgaatcctcccatcgaccaatacctgtattacctgaacagaactcaaaatcagtccgggagtgcccaaaacaaggacttgctgtttagccgtgggtctccagctggcatgtctgttcagcccaaaaactggctacctggaccctgttatcggcagcagcgcgtttctaaaacaaaaacagacaacaacaacagcaattttacctggactggtgcttcaaaatataacctcaatgggcgtgaatccatcatcaaccctggcactgctatggcctcacacaaagacgacgaagacaagttctttcccatgagcggtgtcatgatttttggaaaagagagcgccggagcttcaaacactgcattggacaatgtcatgattacagacgaagaggaaattaaagccactaaccctgtggccaccgaaagatttgggaccgtggcagtcaatttccagagcagcagcacagaccctgcgaccggagatgtgcatgctatgggagcattacctggcatggtgtggcaagatagagacgtgtacctgcagggtcccatttgggccaaaattcctcacacagatggacactttcacccgtctcctcttatgggcggctttggactcaagaacccgcctcctcagatcctcatcaaaaacacgcctgttcctgcgaatcctccggcggagttttcagctacaaagtttgcttcattcatcacccaatactccacaggacaagtgagtgtggaaattgaatgggagctgcagaaagaaaacagcaagcgctggaatcccgaagtgcagtacacatccaattatgcaaaatctgccaacgttgactttactgtggacaacaatggactttatactgagcctcgccccattggcacccgttaccttacccgtcccctg

SEQ ID NO: 663 - DNA, 2208 bp, synthetic construct
  misc_feature 1..2208: note = source = /note="Description of Artificial Sequence: Synthetic polynucleotide"
  source 1..2208: mol_type = other DNA
atggctgccgatggttatcttccagattggctcgaggacaacctctctgagggcattcgcgagtggtgggacttgaaacctggagccccgaagcccaaagccaaccagcaaaagcaggacgacggccggggtctggtgcttcctggctacaagtacctcggacccttcaacggactcgacaagggggagcccgtcaacgcggcggacgcagcggccctcgagcacgacaaggcctacgaccagcagctcaaagcgggtgacaatccgtacctgcggtataaccacgccgacgccgagtttcaagagcgtctgcaagaagatacgtcttttgggggcaacctcgggcgagcagtcttccaggccaagaagcgggttctcgaacctctcggtctggttgaggaaggcgctaagacggctcctggaaagaaacgtccggtagagcagtcgccacaagagccagactcctcctcgggcatcggcaagacaggccagcagcccgctaaaaagagactcaattttggtcagactggcgactcagagtcagtccccgatccgcaacctctcggagaacctccagcaacccccgctgctgtgggacctactacaatggcttcaggcggtggcgcaccaatggcagacaataacgaaggcgccgacggagtgggtaatgcctcaggaaattggcattgcgattccacatggctgggcgacagagtcatcaccaccagcacccgcacctgggccttgcccacctacaataaccacctctacaagcaaatctccagtgcttcaacgggggccagcaacgacaaccactacttcggctacagcaccccctgggggtattttgatttcaacagattccactgccacttttcaccacgtgactggcagcgactcatcaacaacaattggggattccggcccaagagactcaacttcaaactcttcaacatccaagtcaaggaggtcacgacgaatgatggcgtcacaaccatcgctaataaccttaccagcacggttcaagtcttctcggactcggagtaccagcttccgtacgtcctcggctctgcgcaccagggctgcctccctccgttcccggcggacgtgttcatgattccgcaatacggctacctgacgctcaacaatggcagccaagccgtgggacgttcatccttttactgcctggaatatttcccttctcagatgctgagaacgggcaacaactttaccttcagctacacctttgaggaagtgcctttccacagcagctacgcgcacagccagagcctggaccggctgatgaatcctctcatcgaccaatacctgtattacctgaacagaactcaaaatcagtccggaagtgcccaaaacaaggacttgctgtttagccgtgggtctccagctggcatgtctgttcagcccaaaaactggctacctggaccctgttatcggcagcagcgcgtttctaaaacaaaaacagacaacaacaacagcaattttacctggactggtgcttcaaaatataacctcaatgggcgtgaatccatcatcaaccctggcactgctgtggcctcacacaaagacgacgaagacaagttctttcccatgagcggtgtcatgatttttggaaaagagagcgccggagcttcaaacactgcattggacaatgtcatgattacagacgaagaggaaattaaagccactaaccctgtggccaccgaaagatttgggaccgtggcagtcaatttccagagcagcagcacagaccctgcgaccggagatgtgcatgctatgggagcattacctggcatggtgtggcaagatagagacgtgtacctgcagggtcccatttgggccaaaattcctcacacagatggacactttcacccgtctcctcttatgggcggctttggactcaagaacccgcctcctcagatcctcatcaaaaacacgcctgttcctgcgaatcctccggcggagttttcagctacaaagtttgcttcattcatcacccaatactccacaggacaagtgagtgtggaaattgaatgggagctgcagaaagaaaacagcaagcgctggaatcccgaagtgcagtacacatccaattatgcaaaatctgccaacgttgattttactgtggacaacaatggactttatactgagcctcgccccattggcacccgttaccttacccgtcccctg

SEQ ID NO: 664 - DNA, 2208 bp, synthetic construct
  misc_feature 1..2208: note = source = /note="Description of Artificial Sequence: Synthetic polynucleotide"
  source 1..2208: mol_type = other DNA
atggctgccgatggttatcttccagattggctcgaggacaacctctctgagggcattcgcgagtggtgggacttgaaacctggagccccgaagcccaaagccaaccagcaaaagcaggacgacggccggggtctggtgcttcctggctacaagtacctcggacccttcaacggactcgacaagggggagcccgtcaacgcggcggacgcagcggccctcgagcacgacaaggcctacgaccagcagctcaaagcgggtgacaatccgtacctgcggtataaccacgccgacgccgagtttcaggagcgtctgcaagaagatacgtcttttgggggcaacctcgggcgagcagtcttccaggccaagaagcgggttctcgaacctctcggtctggttgaggaaggcgctaagacggctcctggaaagaaacgtccggtagagcagtcgccacaagagccagactcctcctcgggcatcggcaagacaggccagcagcccgctaaaaagagactcaattttggtcagactggcgactcagagtcagtccccgatccacaacctctcggagaacctccagcaacccccgctgctgtgggacctactacaatggcttcaggcggtggcgcaccaatggcagacaataacgaaggcgccgacggagtgggtaatgcctcaggaaattggcattgcgattccacatggctgggcgacagagtcatcaccaccagcacccgcacctgggccttgcccacctacaataaccacctctacaagcaaatctccagtgcttcaacgggggccagcaacgacaaccactacttcggctacagcaccccctgggggtattttgatttcaacagattccactgccacttttcaccacgtgactggcagcaactcatcaacaacaattggggattccggcccaagagactcaacttcaaactcttcaacatccaagtcaaggaggtcacgacgaatgatggcgtcacaaccatcgctaataaccttaccagcacggttcaagtcttctcggactcggagtaccagcttccgtacgtcctcggctctgcgcaccagggctgcctccctccgttcccggcggacgtgttcatgattccgcaatacggctacctgacgctcaacaatggcagccaagccgtgggacgttcatccttttactgcctggaatatttcccttctcagatgctgagaacgggcaacaactttaccttcagctacacctttgaggaagtgcctttccacagcagctacgcgcacagccagagcctggaccggctgatgaatcctctcatcgaccaatacctgtattacctgaacagaactcaaaatcagtccggaagtgcccaaaacaaggacttgctgtttagccgtgggtctccagctggcatgtctgttcagcccaaaaactggctacctggaccctgttatcggcagcagcgcgtttctaaaacaaaaacagacaacaacaacagcaattttacctggactggtgcttcaaaatataacctcaatgggcgtgaatccatcatcaaccctggcactgctatggcctcacacaaagacgacgaagacaagttctttcccatgagcggtgtcatgatttttggaaaagagagcgccggagcttcaaacactgcattggacaatgtcatgattacagacgaagaggaaattaaagccactaaccctgtggccaccgaaagatttgggaccgtggcagtcaatttccagagcaccagcacagaccctgcgaccggagatgtgcatgctatgggagcattacctggcatggtgtggcaagatagagacgtgtacctgcagggtcccatttgggccaaaattcctcacacagatggacactttcacccgtctcctcttatgggcggctttggactcaagaacccgcctcctcagatcctcatcaaaaacacgcctgttcctgcgaatcctccggcggagttttcagctacaaagtttgcttcattcatcacccaatactccacaggacaagtgagtgtggaaattgaatgggagctgcagaaagaaaacagcaagcgctggaatcccgaagtgcagtacacatccaattatgcaaaatctgccgacgttgattttactgtggacaacaatggactttatactgagcctcgccccattggcacccgttaccttacccgtcccctg

SEQ ID NO: 665 - DNA, 2208 bp, synthetic construct
  misc_feature 1..2208: note = source = /note="Description of Artificial Sequence: Synthetic polynucleotide"
  source 1..2208: mol_type = other DNA
atggctgccgatggttatcttccagattggctcgaggacaacctctctgagggcattcgcgagtggtgggacttgaaacctggagccccgaagcccaaagccaaccagcaaaagcaggacgacggccggggtctggtgcttcctggctacaagtacctcggacccttcaacggactcgacaagggggagcccgtcaacgcggcggacgcagcggccctcgagcacgacaaggcctacgaccagcagctcaaagcgggtgacaatccgtacctgcggtataaccacgccgacgccgagtttcaagagcgtctgcaagaagatacgtcttttgggggcaacctcgggcgagcagtcttccaggccaagaagcgggttctcgaacctctcggtctggttgaggaaggcgctaagacggctcctggaaagaaacgtccggtagagcagtcgccacaagagccagactcctcctcgggcatcggcaagacaggccagcagcccgctaaaaagagactcaattttggtcagactggcgactcagagtcagtccccgatccgcaacctctcggagaacctccagcaacccccgctgctgtgggacctactacaatggcttcaggcggtggcgcaccaatggcagacaataacgaaggcgccgacggagtgggtaatgcctcaggaaattggcattgcgattccacatggctgggcgacagagtcatcaccaccagcacccgcacctgggccttgcccacctacaataaccacctctacaagcaaatctccagtgcttcaacgggggccagcaacgacaaccactacttcggctacagcaccccctgggggtattttgatttcaacagattccactgccacttttcaccacgtgactggcagcgactcatcaacaacaattggggattccggcccaagagactcaacttcaaactcttcaacatccaagtcaaggaggtcacgacgaatgatggcgtcacaaccatcgctaataaccttaccagcacggttcaagtcttctcggactcggagtaccagcctccgtacgtcctcggctctgcgcaccagggctgcctccctccgttcccggcggacgtgttcatgattccgcaatacggccacctgacgctcaacaatggcagccaagccgtgggacgttcatccttttactgcctggaatatttcccttctcagatgctgagaacgggcaacaactttaccttcagctacacctttgaggaagtgcctttccacagcagctacgcgcacagccagagcctggaccggctgacgaatcctctcatcgaccaatacctgtattacctgaacagaactcaaaatcagtccggaagtgcccaaaacaaggacttgctgtttagccgtgggtctccagctggcatgtctgttcagcccaaaaactggctacctggaccctgttatcggcagcagcgcgtttctaaaacaaaaacagacaacaacaacagcaattttacctggactggtgcttcaaaatataacctcaatgggcgtgaatccatcatcaaccctggcactgctatggcctcacacaaagacgacgaagacaagttctttcccatgagcggtgtcatgatttttggaaaagagagcgccggagcttcaaacactgcattggacaatgtcatgattacagacgaagaggaaattaaagccactaaccctgtggccaccgaaagatttgggaccgtggcagtcaatttccagagcagcagcacagaccctgcgaccggagatgtgcatgctatgggagcattacctggcatggtgtggcaagatagagacgtgtacctgcagggtcccatttgggccaaaattcctcacacagatggacactttcacccgtctcctcttatgggcggctttggactcaagaacccgcctcctcagatcctcatcaaaaacacgcctgttcctgcgaatcctccggcggagttttcagctacaaagtttgcttcattcatcacccaatactccacaggacaagtgagtgtggaaattgaatgggagctgcagaaagaaaacagcaagcgctggaatcccgaagtgcagtacacatccaattatgcaaaatctgccaacgttgattttactgtggacaacaatggactttatactgagcctcgccccattggcacccgttaccttacccgtcccctg

SEQ ID NO: 666 - DNA, 2208 bp, synthetic construct
  misc_feature 1..2208: note = source = /note="Description of Artificial Sequence: Synthetic polynucleotide"
  source 1..2208: mol_type = other DNA
atggctgccgatggttatcttccagattggctcgaggacaacctctctgagggcattcgcgagtggtgggacttgaaacctggagccccgaagcccaaagccaaccagcaagagcaggacgacggccggggtctggtgcttcctggctacaagtacctcggacccttcaacggactcgacaagggggagcccgtcaacgcggcggacgcagcggccctcgagcacgacaaggcctacgaccagcagctcaaagcgggtgacaatccgtacctgcggtataaccacgccgacgccgagtttcaggagcgtctgcaagaagatacgtcttttgggggcaacctcgggcgagcagtcttccaggccaagaagcgggttctcgaacctctcggtctggttgaggaaggcgctaagacggctcctggaaagaaacgtccggtagagcagtcgccacaagagccagactcctcctcgggcatcggcaagacaggccagcagcccgctaaaaagagactcaattttggtcagactggcgactcagagtcagtccccgatccacaacctctcggagaacctccagcaacccccgctgctgtgggacctactacaatggcttcaggcggtggcgcaccaatggcagacaataacgaaggcgccgacggagtgggtaatgcctcaggaaattggcattgcgattccacatggctgggcgacagagtcatcaccaccagcacccgcacctgggccttgcccacctacaataaccacctctacaagcaaatctccagtgcttcaacgggggccagcaacgacaaccactacttcggctacagcaccccctgggggtattttgatttcaacagattccactgccacttttcaccacgtgactggcagcgactcatcaacaacaattggggattccggcccaagagactcaacttcaaactcttcaacatccaagtcaaggaggtcacgacgaatgatggcgtcacaaccatcgctaataaccttaccagcacggttcaagtcttctcggactcggagtaccagcttccgtacgtcctcggctctgcgcaccagggctgcctccctccgttcccggcggacgtgttcatgattccgcaatacggctacctgacgctcaacaatggcagccaagccgtgggacgttcatccttttactgcctggaatatttcccttctcagatgctgagaacgggcaacaactttaccttcagctacacctttgaggaagtgcctttccacagcagctacgcgcacagccagagcctggaccggctgatgaatcctctcatcgaccaatacctgtattacctgaacagaactcaaaatcagtccggaagtgcccaaaacaaggacttgctgtttagccgtgggtctccagctggcatgtctgttcagcccaaaaactggctacctggaccctgttatcggcagcagcgcgtttctaaaacaaaaacagacaacaacaacagcaattttacctggactggtgcttcaaaatataacctcaatgggcgtgaatccatcatcaaccctggcactgctatggcctcacacaaagacgacgaagacaagttctttcccatgagcggtgtcatgatttttggaaaagagagcgccggagcttcaaacactgcattggacaatgtcatgattacagacgaagaggaaattaaagccactaaccctgtggccaccgaaagatttgggaccgtggcagtcaatttccagagcagcagcacagaccctgcgaccggagatgtgcatgctacgggaacattacctggcatggtgtggcaagatagagacgtgtacctgcagggtcccatttgggccaaaattcctcacacagatggacactttcacccgtctcctcttatgggcggctttggactcaagaacccgcctcctcagatcctcatcaaaaccacgcctgttcctgcgaatcctccggcggagttttcagctacaaagtttgcttcattcatcacccagtactccacaggacaagtgagtgtggaaattgaatgggagctgcagaaagaaaacagcaagcgctggaatcccgaagtgcagtacacatccaattatgcaaaatctgccaacgttgattttactgtggacgacaatggactttatactgagcctcgccccattggcacccgttaccttacccgtcccctg

SEQ ID NO: 667 - DNA, 2208 bp, synthetic construct
  misc_feature 1..2208: note = source = /note="Description of Artificial Sequence: Synthetic polynucleotide"
  source 1..2208: mol_type = other DNA
atggctgccgatggttatcttccagattggctcgaggacaacctctctgagggcattcgcgagtggtgggacttgaaacctggagccccgaagcccaaagccaaccagcaaaagcaggacgacggccggggtctggtgcttcctggctacaagtacctcggacccttcaacggactcgacaagggggagcccgtcaacgcggcggacgcagcggccctcgagcacgacaaggcctacgaccagcagctcaaagcgggtgacaatccgtacctgcggtataaccacgccgacgccgagtttcaggagcgtctgcaagaagatacgtcttttgggggcaacctcgggcgagcagtcttccaggccaagaagcgggttctcgaacctctcggtctggttgaggaaggcgctaagacggctcctggaaagaaacgtccggtagagcagtcgctacaagagccagactcctcctcgggcatcggcaagacaggccagcagcccgctaaaaagagactcaattttggtcagactggcgactcagagtcagtccccgatccacaacctctcggagaacctccagcaacccccgctgctgtgggacctactacaatggcttcaggcggtggcgcaccaatggcagacaataacgaaggcgccgacggagtgggtaatgcctcaggaaattggcattgcgattccacatggctgggcgacagagtcatcaccaccagcacccgcacctgggccttgcccacctacaataaccacctctacaagcaaatctccagtgcttcaacgggggccagcaacgacaaccactacttcggctacagcaccccctgggggtattttgatttcaacagattccactgccacttttcaccacgtgactggcagcgactcatcaacaacaattggggattccggcccaagagactcaacttcaaactcttcaacatccaagtcaaggaggtcacgacgaatgatggcgtcacaaccatcgctaataaccttaccagcacggttcaagtcttctcggactcggagtaccagcttccgtacgtcctcggctctgcgcaccagggctgcctccctccgttcccggcggacgtgttcatgattccgcaatacggctacctgacgctcaacaatggcagccaagccgtgggacgttcatccttttactgcctggaatatttcccttctcagatgctgagaacgggcaacaactttaccttcagctacacctttgaggaagtgcctttccacagcagctacgcgcacagccagagcctggaccggctgatgaatcctctcatcgaccaatacctgtattacctgaacagaactcaaaatcagtccggaagtgcccaaaacaaggacttgctgtttagccgtgggtctccagctggcatgtctgttcagcccaaaaactggctacctggaccctgttatcggcagcagcgcgtttctaaaacaaaaacagacaacgacaacagcaattttacctggactggtgcttcaaaatataacctcaatgggcgtgaatccatcatcaaccctggcactgctatggcctcacacaaagacgacgaagacaagttctttcccatgagcggtgtcatgatttttggaaaagagagcgccggagcttcaaacactgcattggacaatgtcatgattacagacgaagaggaaattaaagccactaaccctgtggccaccgaaagatttgggaccgtggcagtcaatttccagagcagcagcacagaccctgcgaccggagatgtgcatgctatgggagcattacctggcatggtgtggcaagatagagacgtgtacctgcagggtcccatttgggccaaaattcctcacacagatggacactttcacccgtctcctcttatgggcggctttggactcaagaacccgcctcctcagatcctcatcaaaaacacgcctgttcctgcgaatcctccggcggagttttcagctacaaagtttgcttcattcatcacccaatactccacaggacaagtgagtgtggaaattgaatgggagctgcagaaagaaaacagcaagcgctggaatcccgaagtgcagtacacatccaattatgcaaaatctgccaacgttgattttactgtggacaacaatggactttatactgagcctcgccccattggcacccgttaccttacccgtcccctg

SEQ ID NO: 668 - DNA, 2208 bp, synthetic construct
  misc_feature 1..2208: note = source = /note="Description of Artificial Sequence: Synthetic polynucleotide"
  source 1..2208: mol_type = other DNA
atggctgccgatggttatcttccagattggctcgaggacaacctctctgagggcattcgcgagtggtgggacttgaaacctggagctccgaagcccaaagccaaccagcaaaagcaggacgacggccggggtctggtgcttcctggctacaagtacctcggacccttcaacggactcgacaagggggagcccgtcaacgcggcggacgcagcggccctcgagcacgacaaggcctacgaccagcagctcaaagcgggtgacaatccgtacctgcggtataaccacgccgacgccgagtttcaggagcgtctgcaagaagatacgtcttttgggggcaacctcgggcgagcagtcttccaggccaagaagcgggttctcgaacctctcggtctggttgaggaaggcgctaagacggctcctggaaagaaacgtccggtagagcagtcgccacaagagccagactcctcctcgggcatcggcaagacaggccagcagcccgctaaaaagagactcaattttggtcagactggcgactcagagtcagtccccgatccacaacctctcggagaacctccagcaacccccgctgctgtgggacctactacaatggcttcaggcggtggcgcaccaatggcagacaataacgaaggcgccgacggagtgggtaatgcctcaggaaattggcattgcgattccacatggctgggcgacagagtcatcaccaccagcacccgcacctgggccttgcccacctacaataaccacctctacaagcaaatctccagtgcttcaacgggggccagcaacgacaaccactacttcggctacagcaccccctgggggtattttgatttcaacagattccactgccacttttcaccacgtgactggcagcgactcatcaacaacaattggggattccggcccaagagactcaacttcaaactcttcaacatccaagtcaaggaggtcacgacgaatgatggcgtcacaaccatcgctaataaccttaccagcacggttcaagtcttctcggactcggagtaccagcttccgtacgtcctcggctctgcgcaccagggctgcctccctccgttcccggcggacgtgttcatgattccgcaatacggctacctgacgctcaacaatggcagccaagccgtgggacgttcatccttttactgcctggaatatttcccttctcagatgctgagaacgggcaacaactttaccttcagctacacctttgaggaagcgcctttccacagcagctacgcgcacagccagagcctggaccggctgatgaatcctctcatcgaccaatacctgtattacctgaacagaactcaaaatcagtccggaagtgcccaaaacaaggacttgctgtttagccgtgggtctccagctggcatgtctgttcagcccaaaaactggctacctggaccctgttatcggcagcagcgcgtttctaaaacaaaaacagacaacaacaacagcaattttacctggactggtgcttcaaaatataacctcaatgggcgtgaatccatcatcaaccctggcactgctatggcctcacacaaagacgacgaagacaagttctttcccatgagcggtgtcatgatttttggaaaagagagcgccggagcttcaaacactgcattggacaatgtcatgattacagacgaagaggaaattaaagccactaaccctgtggccaccgaaagatttgggaccgtggcagtcaatttccagagcagcagcacagaccctgcgaccggagatgtgcatgctatgggagcattacctggcatggtgtggcaagatagagacgtgtacctgcagggtcccatttgggccaaaattcctcacacagatggacactttcacccgtctcctcttatgggcggctttggactcaagaacccgcctcctcagatcctcatcaaaaacacgcctgttcctgcgaatcctccggcggagttttcagctacaaagtttgcttcattcatcacccaatactccacaggacaagtgagtgtggaaattgaatgggagctgcagaaagaaaacagcaagcgctggaatcccgaagtgcagtacacatccaattatgcgaaatctgccaacgttgattttactgtggacaacaatggactttatactgagcctcgccccgttggcacccgttaccttacccgtcccctg

SEQ ID NO: 669 - DNA, 2208 bp, synthetic construct
  misc_feature 1..2208: note = source = /note="Description of Artificial Sequence: Synthetic polynucleotide"
  source 1..2208: mol_type = other DNA
atggctgccgatggttatcttccagattggctcgaggacaacctctctgagggcattcgcgagtggtgggacttgaaacctggagccccgaagcccaaagccaaccagcaaaagcaggacgacggccggggtctggtgcttcctggctacaagtacctcggacccttcaacggactcgacaagggggagcccgtcaacgcggcggacgcagcggccctcgagcacgacaaggcctacgaccagcagctcaaagcgggtgacaatccatacctgcggtataaccacgccgacgccgagtttcaggagcgtctgcaagaaaatacgtcttttgggggcaacctcgggcgagcagtcttccaggccaagaagcgggttctcgaacctctcggtctggttgaggaaggcgctaagacggctcctggaaagaaacgtccggtagagcagtcgccacaagagccagactcctcctcgggcatcggcaagacaggccagcagcccgctaaaaagagactcaattttggtcagactggcgactcagagtcagtccccgatccacaacctctcggagaacctccagcaacccccgctgctgtgggacctactacaatggcttcaggcggtggcgcaccaatggcagacaataacgaaggcgccgacggagtgggtaatgcctcaggaaattggcattgcgattccacatggctgggcgacagagtcatcaccaccagcacccgcacctgggccttgcccacctacaataaccacctctacaagcaaatctccagtgcttcaacgggggccagcaacgacaaccactacttcggctacagcaccccctgggggtattttgatttcaacagattccactgccactttccaccacgtgactggcagcgactcatcaacaacaattggggattccggcccaagagactcaacttcaaactcttcaacatccaagtcaaggaggtcacgtcgaatgatggcgtcacaaccatcgctaataaccttaccagcacggttcaagtcttctcggactcggagtaccagcttccgtacgtcctcggctctgcgcaccagggctgcctccctccgttcccggcggacgtgttcatgattccgcaatacggctacctgacgctcaacaatggcagccaagccgtgggacgttcatccttttactgcctggaatatttcccttctcagatgctgagaacgggcaacaactttaccttcagctacacctttgaggaagtgcctttccacagcagctacgcgcacagccagagcctggaccggctgatgaatcctctcatcgaccaatacctgtattacctgaacagaactcaaaatcagtccggaagtgcccaaaacaaggacttgctgtttagccgtgggtctccagctggcatgtctgttcagcccaaaaactggctacctggtccctgttatcggcagcagcgcgtttctaaaacaaaaacagacaacaacaacagcaattttacctggactggtgcttcaaaatataacctcaatgggcgtgaatccatcatcaaccctggcactgctatggcctcacacaaagacgacgaagacaagttctttcccatgagcggtgtcatgatttttggaaaagagagcgccggagcttcaaacactgcattggacaatgtcatgattacagacgaagaggaaattaaagccactaaccctgtggccaccgaaagatttgggaccgtggcagtcaatttccagagcagcagcacagaccctgcgaccggagatgtgcatgctatgggagcattacctggcatggtgtggcaagatagagacgtgtacctgcagggtcccatttgggccaaaattcctcacacagatggacactttcacccgtctcctcttatgggcggctttggactcaagaacccgcctcctcagatcctcatcaaaaacacgcctgttcctgcgaatcctccggcggagttttcagctacaaagtttgcttcattcatcacccaatactccacaggacaagtgagtgtggaaattgaatgggagctgcagaaagaaaacagcaagcgctggaatcccgaagtgcagtacacatccaattatgcaaaatctgccaacgttgattttactgtggacaacaatggactttatactgagcctcgccccattggcacccgttaccttacccgtcccctg

SEQ ID NO: 670 - DNA, 2208 bp, synthetic construct
  misc_feature 1..2208: note = source = /note="Description of Artificial Sequence: Synthetic polynucleotide"
  source 1..2208: mol_type = other DNA
atggctgccgatggttatcttccagattggctcgaggacaacctctctgagggcattcgcgagtggtgggacttgaaacctggagccccgaagcccaaagccaaccagcaaaagcaggacgacggccggggtctggtgcttcctggctacaagtacctcggacccttcaacggactcgacaagggggagcccgtcaacgcggcggacgcagcggccctcgagcacgacaaggcctacgaccagcagctcaaagcgggtgacaatccgtacctgcggtataaccacgccgacgccgagtttcaggagcgtctgcaagaagatacgtcttttgggggcaacctcgggcgagcagtcttccaggccaagaagcgggttctcgaacctctcggtctggttgaggaaggcgctaagacggctcctggaaagaaacgtccggtagagcagtcgccacaagagccagactcctcctcgggcatcggcaagacaggccagcagcccgctaaaaagagactcaattttggtcagactggcgactcagagtcagtccccgatccacaacctctcggagaacctccagcaacccccgctgctgtgggacctactacaatggcttcaggcggtggcgcaccaatggcagacaataacgaaggcgccgacggagtgggtaatgcctcaggaaattggcattgcgattccacatggctgggcgacagagtcatcaccaccagcacccgcacctgggccttgcccacctacaataaccacctctacaagcaaatctccagtgcttcaacgggggccagcaacgacaaccactacttcggctacagcaccccctgggggtattttgatttcaacagattccactgccacttttcaccacgtgactggcagcgactcatcaacaacaattggggattccggcccaagagactcaacttcaaactcttcaacatccaagtcaaggaggtcacgacgaatgatggcgtcacaaccatcgctaataaccttaccagcacggttcaagtcttctcggactcggagtaccagcttccgtacgtcctcggctctgcgcaccagggctgcctccctccgttcccggcggacgtgttcatgattccgcaatacggctacctgacgctcaacaatggcagccaagccgtgggacgttcatccttttactgcctggaatatttcccttctcagatgctgagaacgggcaacaactttaccttcagctacacctttgaggaagtgcctttccacagcagctacgcgcacagccagagcctggaccggctgatgaatcctctcatcgaccaatacctgtattacctgaacagaactcaaaatcagtccggaagtgcccaaaacaaggacttgctgtttagccgtgggtctccagctggcacgtctgttcagcccaaaaactggctacctggaccctgttatcggcagcagcgcgtttctaaaacaaaaacagacaacaacaacagcaattttacctggactggtgcttcaaaatataacctcaatgggcgtgaatccatcatcaaccctggcactgctatggcctcacacaaagacgacgaagacaagttctttcccatgagcggtgtcatgatttttggaaaagagagcgccggagcttcaaacactgcattggacaatgtcatgattacagacgaagaggaaattaaagccactaaccctgtggccaccgaaagatttgggaccgtggcagtcaatttccagagcagcagcacagaccctgcgaccggagatgtgcatgctatgggagcattacctggcatggtgtggcaagatagagacgtgtacctgcagggtcccatttgggccaaaattcctcacacagatggacactttcacccgtctcctcttatgggcggctttggactcaagaacccgcctcctcagatcctcatcaaaaacacgcctgttcctgcgaatcctccggcggagttttcagctacaaagtttgcttcattcatcacccaatactccacaggacaagtgagtgtggaaattgaatgggagctgcagaaagaaaacagcaagcgctggaatcccgaagtgcagtacacatccaattatgcaaaatctgccaacgttgattttactgtggacaacaatggactttatactgggcctcgccccattggcacccgttaccttacccgtcccctg

SEQ ID NO: 671 - DNA, 2208 bp, synthetic construct
  misc_feature 1..2208: note = source = /note="Description of Artificial Sequence: Synthetic polynucleotide"
  source 1..2208: mol_type = other DNA
atggctgccgatggttatcttccagattggctcgaggacaacctctctgagggcattcgcgagtggtgggacttgaaacctggagccccgaagcccaaagccaaccagcaaaagcaggacgacggccggggtctggtgcttcctggctacaagtacctcggacccttcaacggactcgacaagggggagcccgtcaacgcggcggacgcagcggccctcgagcacgacaaggcctacgaccagcagctcaaagcgggtgacaatccgtacctgcggtataaccacgccgacgccgagtttcaggagcgtctgcaagaagatacgtcttttgggggcaacctcgggcgagcagtcttccaggccaagaagcgggttctcgaacctctcggtctggttgaggaaggcgctaagacggctcctggaaagaaacgtccggtagagcagtcgccacaagagccagactcctcctcgggcatcggcaagacaggccagcagcccgctaaaaagagactcaattttggtcagactggcgactcagagtcagtccccgatccacaacctctcggagaacctccagcaacccccgctgctgtgggacctactacaatggcttcaggcggtggcgcaccaatggcagacaataacgaaggcgccgacggagtgggtaatgccccaggaaattggcattgcgactccacatggctgggcgacagagtcatcaccaccagcacccgcacctgggccttgcccacctacaataaccacctctacaagcaaatctccagtgcttcaacgggggccagcaacgacaaccactacttcggctacagcaccccctgggggtattttgatttcaacagattccactgccacttttcaccacgtgactggcagcgactcatcaacaacaattggggattccggcccaagagactcaacttcaaactcttcaacatccaagtcaaggaggtcacgacgaatgatggcgtcacaaccatcgctaataaccttaccagcacggttcaagtcttctcggactcggagtaccagcttccgtacgtcctcggctctgcgcaccagggctgcctccctccgttcccggcggacgtgttcatgattccgcaatacggctacctgacgctcaacaatggcagccaagccgtgggacgttcatccttttactgcctggaatatttcccttctcagatgctgagaacgggcaacaactttaccttcagctacacctttgaggaagtgcctttccacagcagctacgcgcacagccagagcctggaccggctgatgaatcctctcatcgaccaatacctgtattacctgaacagaactcaaaatcagtccggaagtgcccaaaacaaggacttgctgtttagccgtgggtctccagctggcatgtctgttcagcccaaaaactggctacctggaccctgttatcggcagcagcgcgtttctaaaacaaaaacagacaacaacaacagcaattttacctggactggtgcttcaaaatataacctcaatgggcgtgaatccatcatcaaccctggcacagctatggcctcacacaaagacgacgaagacaagttctttcccatgagcggtgtcatgatttttggaaaagagagcgccggagcttcaaacactgcattggacaatgtcatgattacaggcgaagaggaaattaaagccactaaccctgtggccaccgaaagatttgggaccgtggcagtcaatttccagagcagcagcacagaccctgcgaccggagatgtgcatgctatgggagcattacctggcatggtgtggcaagatagagacgtgtacctgcagggtcccatttgggccaaaattcctcacacagatggacactttcacccgtctcctcttatgggcggctttggactcaagaacccgcctcctcagatcctcatcaaaaacacgcctgttcctgcgaatcctccggcggagttttcagctacaaagtttgcttcattcatcacccaatactccacaggacaagtgagtgtggaaattgaatgggagctgcagaaagaaaacagcaagcgctggaatcccgaagtgcagtacacatccaattatgcaaaatctgccaacgttgattttactgtggacaacaatggactttatactgagcctcgccccattggcacccgttaccttacccgtcccctg

SEQ ID NO: 672 - DNA, 2208 bp, synthetic construct
  misc_feature 1..2208: note = source = /note="Description of Artificial Sequence: Synthetic polynucleotide"
  source 1..2208: mol_type = other DNA
atggctgccgatggttatcttccagattggctcgaggacaacctctctgagggcattcgcgagtggtgggacttgaaacctggagccccgaagcccaaagccaaccagcaaaagcaggacgacggccggggtctggtgcttcctggctacaagtacctcggacccttcaacagactcgacaagggggagcccgtcaacgcggcggacgcagcggccctcgagcacgacaaggcctacgaccagcagctcaaagcgggtgacaatccgtacctgcggtataaccacgccgacgccgagtttcaggagcgtctgcaagaagatacgtcttttgggggcaacctcgggcgagcagtcttccaggccaagaagcgggttctcgaacctctcggtctggttgaggaaggcgctaagacggctcctggaaggaaacgtccggtagagcagtcgccacaagagccagactcctcctcgggcatcggcaagacaggccagcagcccgctaaaaagagactcaattttggtcagactggcgactcagagtcagtccccgatccacaacctctcggagaacctccagcaacccccgctgctgtgggacctactacaatggcttcaggcggtggcgcgccaatggcagacaataacgaaggcgccgacggagtgggtaatgcctcaggaaattggcattgcgattccacatggctgggcgacagagtcatcaccaccagcacccgcacctgggccttgcccacctacaataaccacctctacaagcaaatctccagtgcttcaacgggggccagcaacgacaaccactacttcggctacagcaccccctgggggtattttgatttcaacagattccactgccacttttcaccacgtgactggcagcgactcatcaacaacaattggggattccggcccaagagactcaacttcaaactcttcaacatccaagtcaaggaggtcacgacgaatgatggcgtcacaaccatcgctaataaccttaccagcacggttcaagtcttctcggactcggagtaccagcttccgtacgtcctcggctctgcgcaccagggctgcctccctccgttcccggcggacgtgttcatgattccgcaatacggctacctgacgctcaacaatggcggccaagccgtgggacgttcatccttttactgcctggaatatttcccttctcagatgctgagaacgggcaacaactttaccttcagctacacctttgaggaagtgcctttccacagcagctacgcgcacagccagagcctggaccggctgatgaatcctctcatcgaccaatacctgtattacctgaacagaactcaaaatcagtccggaagtgcccaaaacaaggacttgctgtttagccgtgggtctccagctggcatgtctgttcagcccaaaaactggctacctggaccctgttatcggcagcagcgcgtttctaaaacaaaaacagacaacaacaacagcaattttacctggactggtgcttcaaaatatagcctcaatgggcgtgaatccatcatcaaccctggcactgctatggcctcacacaaagacgacgaagacaagttctttcccatgggcggtgtcatgatttttggaaaagagagcgccggagcttcaaacactgcattggacaatgccatgattacagacgaagaggaaattaaagccactaaccctgtggccaccgaaagatttgggaccgtggcagtcaatttccagagcagcagcacagaccctgcgaccggagatgtgcatgctatgggagcattacctggcatggtgtggcaagatagagacgtgtacctgcagggtcccatttgggccaaaattcctcacacagatggacactttcacccgtctcctcttatgggcggctttggactcaagaacccgcctcctcagatcctcatcaaaaacacgcctgttcctgcgaatcctccggcggagttttcagctacaaagtttgcttcattcatcacccaatactccacaggacaagtgagtgtggaaattgaatgggagctgcagaaagaaaacagcaagcgctggaatcccgaagtgcagtacacatccaattatgcaaaatctgccaacgttgattttactgtggacaacaatggactttatactgagcctcgccccattggcacccgttaccttacccgtcccctg

SEQ ID NO: 673 - DNA, 2208 bp, synthetic construct
  misc_feature 1..2208: note = source = /note="Description of Artificial Sequence: Synthetic polynucleotide"
  source 1..2208: mol_type = other DNA
atggctgccgatggttatcttccagattggctcgaggacaacctctctgagggcattcgcgagtggtgggacttgaaacctggagccccgaagcccaaagccaaccagcaaaagcaggacgacggccggggtctggtgcttcctggctacaagtacctcggacccttcaacggactcgacaagggggagcccgtcaacgcggcggacgcagcggccctcgagcacgacaaggcctacgaccagcagctcaaagcgggtgacaatccgtacctgcggtataaccacgccgacgccgagtttcaggagcgtctgcaagaagatacgtcttttgggggcaacctcgggcgagcagtcttccaggccaagaagcgggttctcgaacctctcggtctggttgaggaaggcgctaagacggctcctggaaagaaacgtccggtagagcagtcgccacaagagccagactcctcctcgggcatcggcaagacaggccagcagcccgctaaaaagagactcaattttggtcagactggcgactcagagtcagtccccgatccacaacctctcggagaacctccagcaacccccgctgctgtgggacctactacaatggcttcaggcggtggcgcaccaatggcagacaataacgaaggcgccgacggagtgggtaatgcctcaggaaattggcattgcgattccacatggctgggcggcagagtcatcaccaccagcacccgcacctgggccttgcccacctacaataaccacctctacaagcaaatctccagtgcttcaacgggggccagcaacgacaaccactacttcggctacagcaccccctgggggtattttgatttcaacagattccactgccacttttcaccacgtgactggcagcgactcatcaacaacaattggggattccggcccaagagactcaacttcaaactcttcaacatccaagtcaaggaggtcacgacgaatgatggcgtcacaaccatcgctaataaccttaccagcacggttcaagtcttctcggactcggagtaccagcttccgtacgtcctcggctctgcgcaccagggctgcctccctccgttcccggcggacgtgttcatgattccgcaatacggctacctgacgctcaacaatggcagccaagccgtgggacgttcatccttttactgcctggaatatttcccttctcagatgctgagaacgggcaacaactctaccttcagctacacctttgaggaagtgcctttccacagcagctacgcgcacagccagagcctggaccggctgatgaatcctctcatcgaccaatacctgtattacctgaacagaactcaaaatcagtccggaagtgcccaaaacaaggacttgctgtttagccgtgggtctccagctggcatgtctgttcagcccaaaaactggctacctggaccctgttatcggcagcagcgcgtttctaaaacaaaaacagacaacaacaacagcaattttacctggactggtgcttcaaaatataacctcaatgggcgtgaatccatcatcaaccctggcactgctatggcctcacacaaagacgacgaagacaagttctttcccatgagcggtgtcatgatttttggaaaagagagcgccggagcttcaaacactgcattggacaatgtcatgattacagacgaagaggaaattaaagccactaaccctgtggccaccgaaagatttgggaccgtggcagtcaatttccagagcagcagcacagaccctgcgaccggagatgtgcatgctatgggaacattacctggcatggtgtggcaagatagagacgtgtacctgcagggtcccatttgggccaaaattcctcacacagatggacactttcacccgtctcctcttatgggcggctttggactcaagaacccgcctcctcagatcctcatcaaaaacacgcctgttcctgcgaatcctccggcggagttttcagctacaaagtttgcttcattcatcacccaatactccacaggacaagtgagtgtggaaattgaatgggagctgcagaaagaaaacagcaagcgctggaatcccgaagtgcagtacacatccaattatgcaaaatctgccaacgttgattttactgtggacaacaatggactttatactgagcctcgccccattggcacccgttaccttacccgtcccctg

SEQ ID NO: 674 - DNA, 2208 bp, synthetic construct
  misc_feature 1..2208: note = source = /note="Description of Artificial Sequence: Synthetic polynucleotide"
  source 1..2208: mol_type = other DNA
atggctgccgatggttatctcccagattggctcgaggacaacctctctgagggcattcgcgagtggtgggacttgaaacctggagccccgaagcccaaagccaaccagcaaaagcaggacgacggccggggtctggtgcttcctggctacaagtacctcggacccttcaacggactcgacaagggggagcccgtcagcgcggcggacgcagcggccctcgagcacgacaaggcctacgaccagcagctcaaagcgggtgacaatccgtacctgcggtataaccacgccgacgccgagtttcaggagcgtctgcaagaagatacgtcttttgggggcaacctcgggcgagcagtcttccaggccaagaagcgggttctcgaacctctcggtctggttgaggaaggcgctaagacggctcctggaaagaaacgtccggtagagcagtcgccacaagagccagactcctcctcgggcatcggcaagacaggccagcagcccgctaaagagagactcaattttggtcagactggcgactcagagtcagtccccgatccacaacctctcggagaacctccagcaacccccgctgctgtgggacctactacaatggcttcaggcggtggcgcaccaatggcagacaataacgaaggcgccgacggagtgggtaatgcctcaggaaattggcattgcgattccacatggctgggcgacagagtcatcaccaccagcacccgcacctgggccttgcccacctacaataaccacctctacaagcaaatctccagtgcttcaacgggggccagcaacgacaaccactacttcggctacagcaccccctgggggtattttgatttcaacagattccactgccacttttcaccacgtgactggcagcgactcatcaacaacaattggggattccggcccaagagactcaacttcaaactcttcaacatccaagtcaaggaggtcacgacgaatgatggcgtcacaaccatcgccaataaccttaccagcacggttcaagtcttctcggactcggagtaccagcttccgtacgtcctcggctctgcgcaccagggctgcctccctccgttcccggcggacgtgttcatgattccgcaatacggctacctgacgctcaacaatggcagccaagccgtgggacgttcatccttttactgcctggaatatttcccttctcagatgctgagaacgggcaacaactttaccttcagctacacctttgaggaagtgcctttccacagcagctacgcgcacagccagagcctggaccggctgatgaatcctctcatcgaccaatacctgtattacctgaacagaactcaaaatcagtccggaagtgcccaaaacaaggacttgctgtttagccgtgggtctccagctggcatgtctgttcagcccaaaaactggctacctggaccctgttatcggcagcagcgcgtttctaaaacaaaaacagacaacaacaacagcaattttacctggactggtgcttcaaaatataacctcaatgggcgtgaatccatcatcaaccctggcactgctatggcctcacacaaagacgacgaagacaagttctttcccatgagcggtgtcatgatttttggaaaagagagcgccggagcttcaaacactgcattggacaatgtcatgattacagacgaagaggaaattaaagccactaaccctgtggccaccgaaagatttgggaccgtggcagtcaatttccagagcagcagcacagaccctgcgaccggagatgtgcatgctatgggagcattacctggcatggtgtggcaagatagagacgtgtacctgcagggtcccatttgggccaaaattcctcacacagatggacactttcacccgtctcctcttatgggcggctttggactcaagaacccgcctcctcagatcctcatcaaaaacacgcctgttcctgcgaatcctccggcggagttttcagctacaaagtttgcttcattcatcacccaatactccacaggacaagtgagtgtggaaattgaatgggagctgcagaaagaaaacagcaagcgctggaatcccgaagtgcagtacacatccaattatgcaaaatctgccaacgttgattttactgtggacaacaatggactttatactgagcctcgccccattggcacccgttaccttacccgtcccctg

SEQ ID NO: 675 - DNA, 2208 bp, synthetic construct
  misc_feature 1..2208: note = source = /note="Description of Artificial Sequence: Synthetic polynucleotide"
  source 1..2208: mol_type = other DNA
atggctgccgatggttatcttccagattggctcgaggacaacctctctgagggcattcgcgagtggtgggacttgaaacctggagccccgaagcccaaagccaaccagcaaaagcaggacgacggccggggtctggtgcttcctggctacaagtacctcggacccttcaacggactcgacaagggggagcccgtcaacgcggcggacgcagcggccctcgagcacgacaaggcctacgaccagcagctcaaagcgggtgacaatccgtacctgcggtataaccacgccgacgccgagtttcaggagcgtctgcaagaagatacgtcttttgggggcaacctcgggcgagcagtcttccaggccaagaagcgggttctcgaacctctcggtctggttgaggaaggcgctaagacggctcctggaaagaaacgtccggtagagcagtcgccacaagagccagactcctcctcgggcatcggcaagacaggccagcagcccgctaaaaagagactcaattttggtcagactggcgactcagagtcagtccccgatccacaacctctcggagaacctccagcaacccccgctgctgtgggacctactacaatggcttcaggcggtggcgcaccaatggcagacaataacgaaggcgccgacggagtgggtaatgcctcaggaaattggcattgcgattccacatggctgggcgacagagtcatcaccaccagcacccgcacctgggccttgcccacctacaataaccacctctacaagcaaatctccagtgcttcaacgggggccagcaacgacaaccactacttcggctacagcaccccctgggggtattttgatttcaacagattccactgccacttttcaccacgtgactggcagcgactcatcaacaacaattggggattccggcccaagagactcaacttcaaactcttcaacatccaagtcaaggaggtcacgacgaatgatggcgtcacaaccatcgctaataaccttaccagcacggttcaagtcttctcggactcggagtaccagcttccgtacgtcctcggctctgcgcaccagggctgcctccctccgttcccggcggacgtgttcatgattccgcaatacggctacctgacgctcaacaatggcagccaagccgtgggacgttcatccttttactgcctggaatatttcccttctcagatgctgagaacgggcaacaactttaccttcagctacacctttgaggaagtgcctttccacagcagctacgcgcacagccagagcctggaccggctgatgaatcctctcatcgaccaatacctgtattacctgaacagaactcaaaatcagtccggaagtgcccaaaacaaggacttgctgtttagccgtgggtctccagctggcatgtctgttcagcccaaaaactggctacctggaccctgttatcggcagcagcgcgtttctaaaacaaaaacagacaacaacaacagcaattttacctggactggtgcttcaaaatataacctcaatgggcgtgaatccatcatcaaccctggcactgctatggcctcacacaaagacgacgaagacaagttctttcccatgagcggtgtcatgatttttggaaaagagagcgccggagcttcaaacactgcattggacaatgtcatgattacagacgaaggggaaattaaagccactaaccctgtggccaccgaaagatttgggaccgtggcagtcaatttccagagcagcagcacagaccctgcgaccggagatgtgcatgctatgggagcattacctggcatggtgtggcaagatagagacgtgtacctgcagggtcccatttgggccaaaattcctcacacagatggacactttcacccgtctcctcttatgggcggctttggactcaagaacccgcctcctcagatcctcatcaaaaacacgcctgttcctgcgaatcctccggcggagttttcagctacaaagtttgcttcattcatcacccaatactccacaggacaagtgagtgtggaaattgaatgggagctgcagaaagaaaacagcaagcgctggaatcccgaagtgcagtacacatccaattatgcaaaatctgccaacgttgattttactgtggacaacaatggactttatactgagcctcgccccattggcacccgttaccttacccgtcccctg

SEQ ID NO: 676 - DNA, 2208 bp, synthetic construct
  misc_feature 1..2208: note = source = /note="Description of Artificial Sequence: Synthetic polynucleotide"
  source 1..2208: mol_type = other DNA
atggctgccgatggttatcttccagattggctcgaggacaacctctctgagggcattcgcgagtggtgggacttgaaacctggagccccgaaacctaaagccaaccagcaaaagcaggacgacggccggggtctggtgcttcctggctacaagtacctcggacccttcaacggactcgacaagggggagcccgtcaacgcggcggacgcagcggccctcgagcacgacaaggcctacgaccagcagctcaaagcgggtgacaatccgtacctgcggtataaccacgccgacgccgagtttcaggagcgtctgcaagaagatacgtcttttgggggcaacctcgggcgagcagtcttccaggccaagaagcgggttctcgaaccttttggtctggttgaggaaggcgctaagacggctcctggaaagaaacgtccggtagagcagtcgccacaagagccagactcctcctcgggcatcggcaagacaggccagcagcccgctaaaaagagactcaattttggtcagactggcgactcagagtcagtccccgacccacaacctctcggagaacctccagcaacccccgctgctgtgggacctactacaatggcttcaggcggtggcgcaccaatggcagacaataacgaaggcgccgacggagtgggtaatgcctcaggaaattggcattgcgattccacatggctgggcgacagagtcatcaccaccagcacccgcacctgggccttgcccacctacaataaccacctctacaagcaaatctccagtgcttcaacgggggccagcaacgacaaccactacttcggctacagcaccccctgggggtattttgatttcaacagattccactgccacttttcaccacgtgactggcagcgactcatcaacaacaattggggattccggcccaagagactcaacttcaagctcttcaacatccaagtcaaggaggtcacgacgaacgatggcgtcacgaccatcgctaataaccttaccagcacggttcaagtcttctcggattcagagtaccaactgccgtacgtcctcggctctgcgcaccagggctgcctccctccgttcccggcggacgtgtttatgattccgcagtacggctacctaacgctcaacaatggcagccaggccgtgggacgttcatccttttactgcccggaatatttcccttctcagatgctgagaacgggcaacaactttaccttcagctacacctttgaggaagtgcctttccacagcagctacgcgcacagccagagcctggaccggctgatgaatcctctcatcgaccaatacctgtattacctgaacagaactcaaaatcagtccggaagtgcccaaaacaaggacttgctgtttagccgtgggtctccagctggcatgtctgttcagcccaaaaactggctacctggaccctgttatcggcagcagcgcgtttctaaaacaaaaacagacaacaacaacagcaattttacctggactggtgcttcaaaatataacctcaatgggcgtgaatccatcatcaaccctggcactgctatggcctcacacaaagacgacaaagacaagttctttcccatgagcggtgtcatgatttttggaaaagagagcgccggagcttcaaatactgcattggacaatgtcatgatcacagatgaagaggaaattaaagccactaaccctgtggccaccgaaagatttgggaccgtggcagtcaatttccagagcagcaacacagaccccgcgaccggagatgtgcatgttatgggagccttacctggcatggtgtggcaagacagagacgtatacctgcagggtcccatttgggccaaaattcctcacacggatggacactttcacccgtctcctctcatgggcggctttggacttaagcacccgcctcctcaaatcctcatcaaaaacacgcctgttcctgcgaatcctccggcagagttttcggctacaaagtttgcttcattcatcacccagtactccacaggacaagtgagtgtggaaattgaatgggagctgcagaaagaaaacagcaagcgctggaatcccgaagtgcagtacacatccaattatgcaaaatctgccaacgttgatttcactgtggacaacaatggactttatactgagcctcgccccattggcacccgttaccttacccgtcccttg

SEQ ID NO: 677 - DNA, 2208 bp, synthetic construct
  misc_feature 1..2208: note = source = /note="Description of Artificial Sequence: Synthetic polynucleotide"
  source 1..2208: mol_type = other DNA
atggctgccgatggttatcttccagattggctcgaggacaacctctctgagggcattcgcgagtggtgggacttgaaacctggagccccgaaacctaaagccaaccagcaaaagcaggacgacggccggggtctggtgcttcctggctacaagtacctcggacccttcaacggactcgacaagggggagcccgtcaacgcggcggacgcagcggccctcgagcacgacaaggcctacgaccagcagctcaaagcgggtgacaatccgtacctgcggtataaccacgccgacgccgagtttcaggagcgtctacaagaagatacgtcttttgggggcaacctcgggcgagcagtcttccaggccaagaagcgggttctcgaaccttttggtctggttgaggaaggcgctaagacggctcctggaaagaaacgtccggtagagcagtcgccacaagagccagactcctcctcgggcatcggcaagacaggccagcagcccgctaaaaagagactcaattttggtcagactggcgactcagagtcagtccccgacccacaacctctcggagaacctccagcaacccccgctgctgtgggacctactacaatggcttcaggcggtggcgcaccaatggcagacaataacgaaggcgccgacggagtgggtaatgcctcaggaaattggcattgcgattccacatggctgggcgacagagtcatcaccaccagcacccgcacctgggccttgcccacctacaataaccacctctacaagcaaatctccagtgcttcaacgggggccagcaacgacaaccactacttcggctacagcaccccctgggggtattttgatttcaacagattccactgccacttttcaccacgtgactggcagcgactcatcaacaacaattggggattccggcccaagagactcaacttcaagctcttcaacatccaagtcaaggaggtcacgacgaacgatggcgtcacgaccatcgctaataaccttaccagcacggttcaagtcttctcggattcagagtaccaactgccgtacgtcctcggctctgcgcaccagggctgcctccctccgttcccggcggacgtgttcatgattccgcagtacggctacctaacgctcaacaatggcagccaggccgtgggacgttcatccttttactgcctggaatatttcccttctcagatgctgagaacgggcaacaactttaccttcagctacacctttgaggaagtgcctttccacagcagctacgcgcacagccagagcctggaccggctgatgaatcctctcatcgaccaatacctgtattacctgaacagaactcaaaatcagtccggaagtgcccaaaacaaggacttgctgtttagccgtgggtctccagctggcatgtctgttcagcccaaaaactggctacctggaccctgttatcggcagcagcgcgtttctaaaacaaaaacagacaacaacaacagcaattttacctggactggtgcttcaaaatataacctcaatgggcgtgaatccatcatcaaccctggcactgctatggcctcacacaaagacgacaaagacaagttctttcccatgagcggtgtcatgatttttggaaaagagagcgccggagcttcaaatactgcattggacaatgtcatgatcacagatgaagaggaaattaaagccactaaccctgtggccaccgaaagatttgggaccgtggcagtcaatttccagagcagcgacacagaccccgcgaccggagatgtgcatgttatgggagccttacctggcatggtgtggcaagacagagacgtatacctgcagggtcccatttgggccaaaattcctcacacggatggacactttcacccgtctcctctcatgggcggctttggacttaagcacccgcctcctcaaatcctcatcaaaaacacgcctgttcctgcgaatcctccggcagagttttcggctacaaagtttgcttcattcatcacccagtactccacaggacaagtgagtgtggaaattgaatgggagctgcagaaagaaaacagcaagcgctggaatcccgaagtgcagtacacatccaattatgcaaaatctgccaacgttgatttcactgtggacaacaatggactttatactgagcctcgccccattggcacccgttaccttacccgtcccttg

SEQ ID NO: 678 - DNA, 2208 bp, synthetic construct
  misc_feature 1..2208: note = source = /note="Description of Artificial Sequence: Synthetic polynucleotide"
  source 1..2208: mol_type = other DNA
atggctgccgatggttatcttccagattggctcgaggacaacctctctgagggcattcgcgagtggtgggacttgaaacctggagccccgaaacctaaagccaaccagcaaaagcagggcgacggccggggtctggtgcttcctggctacaagtacctcggacccttcaacggactcgacaagggggagcccgtcaacgcggcggacgcagcggccctcgagcacgacaaggcctacgaccagcagctcaaagcgggtgacaatccgtacctgcggtataaccacgccgacgccgagtttcaggagcgtctgcaagaagatacgtcttttgggggcaacctcgggcgagcagtcttccaggccaagaagcgggttctcgaaccttttggtctggttgaggaaggcgctaagacggctcctggaaagaaacgtccggtagagcagtcgccacaagagccagactcctcctcgggcatcggcaagacaggccagcagcccgctaaaaagagactcaattttggtcagactggcgactcagagtcagtccccgacccacaacctctcggagaacctccagcaacccccgctgctgtgggacctactacaatggcttcaggcggtggcgcaccaatggcagacaataacgaaggcgccgacggagtgggtaatgcctcaggaaattggcattgcgattccacatggctgggcgacagagtcatcaccaccaacactcgcacctgggccttgcccacctacaataaccacctctacaagcaaatctccagtgcttcaacgggggccagcaacgacaaccactacttcggctacagcaccccctgggggtattttgatttcaacagattccactgccacttttcaccacgtgactggcagcgactcatcaacaacaattggggattccggcccaagagactcaacttcaagctcttcaacatccaagtcaaggaggtcacgacgaacgatggcgtcacgaccatcgctaataaccttaccagcacggttcaagtcttctcggattcagagtaccaactgccgtacgtcctcggctctgcgcaccagggctgcctccctccgttcccggcggacgtgttcatgattccgcagtacggctacctaacgctcaacaatggcagccaggccgtgggacgttcatccttttactgcctggaatatttcccttctcagatgctgagaacgggcaacaactttaccttcagctacacctttgaggaagtgcctttccacagcagttacgggcacagccagagcctggaccggctgatgaatcttctcatcgaccaatacctgtattacctgaacagaactcaaaatcagtccggaagtgcccaaaacaaggacttgctgtttagccgtgggtctccagctggcatgtttgttcagcccaaaaactggctacctggaccctgttatcggcagcagcgcgtttctaaaacaaaaacagacaacaacaacagcaattttacctggactggtgcttcaaaatataacctcaatgggcgtgaatccatcatcaaccctggcactgctatggcctcacacaaagacgacgaagacaagttctttcccatgagcggtgtcatgatttttggaaaagagagcgccggagcttcaaatactgcattggacaatgtcatgatcacagatgaagaggaaattaaagccactaaccctgtggccaccgaaagatttgggaccgtggcagtcaatttccagagcagcagcacagaccccgcgaccggagatgtgcatgttatgggagccttacctggcatggtgtggcaagacagagacgtatacctgcagggtcccatttgggccaaaattcctcacacggatggacactttcacccgtctcctctcatgggcggctttggacttaagcacccgcctcctcaaatcctcatcaaaaacacgcctgttcctgcgaatcctccggcagagttttcggctacaaagtttgcttcattcatcacccagtactccacaggacaagtgagtgtggaaattgaatgggagctgcagaaagaaaacagcaagcgctggaatcccgaagtgcagtacacatccaattatgcaaaatctgccaacgttgatttcactgtggacaacaatggactttatactgagcctcgccccattggcacccgttaccttacccgtcccttg

SEQ ID NO: 679 - DNA, 2208 bp, synthetic construct
  misc_feature 1..2208: note = source = /note="Description of Artificial Sequence: Synthetic polynucleotide"
  source 1..2208: mol_type = other DNA
atggctgccgatggttatcttccagattggctcgaggacaacctctctgagggcattcgcgagtggtgggacttgaaacctggagccccgaaacctaaagccaaccagcaaaagcaggacgacggccggggtctggtgcttcctggctacaagtacctcggacccttcaacggactcgacaagggggagcccgtcaacgcggcggacgcagcggccctcgagcacgacaaggcctacgaccagcagctcaaagcgggtgacaatccgtacctgcggtataaccacgccgacgccgagtttcaggagcgtctgcaagaagatacgtcttttgggggcaacctcgggcgagcagtcttccaggccaagaagcgggttctcgaaccttttggtctggttgaggaaggcgctaagacggctcctggaaagaaacgtccggtagagcagtcgccacaagagccagactcctcctcgggcatcggcaagacaggccagcagcccgctaaaaagagactcaattttggtcagactggcgactcagagtcagtccccgacccacaacctctcggagaacctccagcaacccccgctgctgtgggacctactacaatggcttcaggcggtggcgcaccaatggcagacaataacgaaggcgccgacggagtgggtaatgcctcaggaaattggcattgcgattccacatggctgggcgacagagtcatcaccaccaacacccgcacctgggccttgcccacctacaataaccacctctacaagcaaatctccagtgcttcaacgggggccagcaacgacaaccactacttcggctacagcaccccctgggggtattttgatttcaacagattccactgccacttttcaccacgtgactggcagcgactcatcaacaacaattggggattccggcccaagagactcaacttcaagctcttcaacatccaagtcaaggaggtcacgacgaacgatggcgtcacgaccatcgctaataaccttaccagcacggttcaagtcttctcggattcagagtaccaactgccgtacgtcctcggctctgcgcaccagggctgcctccctccgttcccggcggacgtgttcatgattccgcagtacggctacctaatgctcaacaatggcagccaggccgtgggacgttcatccttttactgcctggaatatttcccttctcagatgctgagaacgggcaacaactttaccttcagctacacctttgaggaagtgcctttccacagcagctacgcgcacagccagagcctggaccggctgatgaatcctctcatcgaccaatacctgtattacctgaacagaactcaaaatcagtccggaagtgcccaaaacaaggacttgctgtttagccgtgggtctccagctggcatgtctgttcagcccaaaaactggctacctggaccctgttatcggcagcagcgcgtttctaaaacaaaaacagacaacaacaacagcaattttacctggactggtgcttcaaaatataacctcaatgggcgtgaatccatcatcaaccctggcactgctatggcctcacacaaagacgacgaagacaagttctttcccatgagcggtgtcatgatttttggaaaagagagcgccggagcttcaaatactgcattggacaatgtcatgatcacagatgaagaggaaattaaagccactaaccctgcggccaccgaaagatttgggaccgtggcagtcaatttccagagcagcagcacagaccccgcgaccggagatgtgcatgttatgggagccttacctggcatggtgtggcaagacagagacgtatacctgcagggtcccatttgggccaaaattcctcacacggatggacactttcacccgtctcctctcatgggcggctttggacttaagcacccgcctcctcaaatcctcatcaaaaacacgcctgttcctgcgaatcctccggcagagttttcggctacaaagtttgcttcattcatcacccagtactccacaggacaagtgagtgtggaaattgaatgggagctgcagaaagaaaacagcaagcgctggaatcccgaagtgcagtacacatccaattatgcaaaatctgccaacgttgatttcactgtggacaacaatggactttatactgagcctcgccccattggcacccgttaccttacccgtcccttg

SEQ ID NO: 680 - DNA, 2208 bp, synthetic construct
  misc_feature 1..2208: note = source = /note="Description of Artificial Sequence: Synthetic polynucleotide"
  source 1..2208: mol_type = other DNA
atggctgccgatggttatcttccagattggctcgaggacaacctctctgagggcattcgcgagtggtgggacttgaaacctggagccccgaaacctaaagccaaccagcaaaagcaggacgacggccggggtctggtgcttcctggctacaagtacctcggacccttcaacggactcgacaagggggagcccgtcaacgcggcggacgcagcggccctcgagcacgacaaggcctacgaccagcagctcaaagcgggtgacaatccgtacctgcggtataaccacgccgacgccgagtttcaggagcgtctgcaagaagatacgtcttttgggggcaacctcgggcgagcagtcttccaggccaagaagcgggttctcgaaccttttggtctggttgaggaaggcgctaagacggctcctggaaagaaacgtccggtagagcagtcgccacaagagccagactcctcctcgggcatcggcaagacgggccagcagcccgctaaaaagagactcaattttggtcagactggcgactcagagtcagtccccgacccacaacctctcggagaacctccagcaacccccgctgctgtgggacctactacaatggcttcaggcggtggcgcaccaatggcagacaataacgaaggcgccgacggagtgggtaatgcctcaggaaattggcattgcgattccacatggctgggcgacagagtcatcaccaccagcacccgcacctgggccttgcccacctacaataaccacctctacaagcaaatctccagtgcttcaacgggggccagcaacgacaaccactacttcggctacagcaccccctgggggtattttgatttcaacagattccactgccacttttcaccacgtgactggcagcgactcatcaacaacaattggggattccggcccaagagactcaacttcaagctcttcaacatccaagtcaaggaggtcacgacgaacgatggcgtcacgaccatcgctaataaccttaccagcacggttcaagtcttctcggattcagagtaccaactgccgtacgtcctcggctctgcgcaccagggctgcctccctccgttcccggcggacgtgttcatgattccgcagtacggctacctaacgctcaacaatggcagccaggccgtgggacgttcatccttttactgcctggaatatttcccttctcagatgctgagaacgggcaacaactttaccttcagctacacctttgaggaagtgcctttccacagcagctacgcgcacagccagagcctggaccggctgatgaatcctctcatcgaccaatacctgtattacctgaacagaactcaaaatcagtccggaagtgcccaaaacaaggacttgctgtttagccgtgggtctccagctggcatgtccgttcagcccaaaaactggctacctggaccctgttatcggcagcagcgcgtttctaaaacaaaaacagacaacaacaacagcaattttacctggactggtgcttcaaaatataacctcaatgggcgtgaatccatcatcaaccctggcactgctatggcctcacacaaagacgacgaagacaagttctttcccatgagcggtgtcatgatttttggaaaagagagcgccggagcttcaaatactgcattggacaatgtcatgatcacagatgaagaggaaattaaagccactaaccctgtggccaccgaaagatttgggaccgtggcagtcaatttccagagcagcagcacagaccccgcgaccggagatgtgcatgttatgggagccttacctggcatggtgtggcaagacagagacgtatacctgcagggtcccatttgggccaaaattcctcacacggatggacactttcacccgtctcctctcatgggcggctttggacttaagcacccgcctcctcaaatcctcatcaaaaacacgcctgttcctgcgaatcctccggcagagttttcggctacaaagtttgcttcattcatcacccagtactccacaggacaagtgagtgtggaaattgaatgggagctgcagaaagaaaacagcaagcgctggaatcccgaagtgcagtacacatccaattatgcaaaatctgccaacgttgatttcactgtggacaacaatggactttatactgagcctcgccccattggcacccgttaccttacccgtcccttg

SEQ ID NO: 681 - DNA, 2208 bp, synthetic construct
  variation 305: note = a, c, t, or g
  misc_feature 1..2208: note = source = /note="Description of Artificial Sequence: Synthetic polynucleotide"
  source 1..2208: mol_type = other DNA
atggctgccgatggttatcttccagattggctcgaggacaacctctctgagggcattcgcgagtggtgggacttgaaacctggagccccgaaacctaaagccaaccagcaaaagcaggacgacggccggggtctggtgcttcctggctacaagtacctcggacccttcaacggactcgacaagggggagcccgtcaacgcggcggacgcagcggccctcgagcacgacaaggcctacgaccagcagctcaaagcgggtgacaatccgtacctgcggtataaccacgccgacgccgagtttcaggngcgtctgcaagaagatacgtcttttgggggcaacctcgggcgagcagtcttccaggccaagaagcgggttctcgaaccttttggtctggttgaggaaggcgctaagacggctcctggaaagaaacgtccggtagagcagtcgccacaagagccagactcctcctcgggcatcggcaagacaggccagcagcccgctaaaaagagactcaattttggtcagactggcgactcagagtcagtccccgacccacaacctctcggagaacctccagcaacccccgctgctgtgggacctactacaatggcttcaggcggtggcgcaccaatggcagacaataacgaaggcgccgacggagtgggtaatgcctcaggaaattggcattgcgattccacatggctgggcggcagagtcatcaccaccagcacccgcacctgggccttgcccacctacaataaccacctctacaagcaaatctccagtgcttcaacgggggccagcaacgacaaccactacttcggccacagcaccccctgggggtattttgatttcaacagattccactgccacttttcaccacgtgactggcagcgactcatcaacaacaattggggattccggcccaagagactcaacttcaagctcttcaacatccaagtcaaggaggtcacgacgaacgatggcgtcacgaccatcgctaataaccttaccagcacggttcaagtcttctcggattcagagtaccaactgccgtacgtcctcggctctgcgcaccagggctgcctccctccgtccccggcggacgtgttcatgattccgcagtacggctacctaacactcaacaatggcagccaggccgtgggacgttcatccttttactgcctggaatatttcccttctcagatgctgagaacgggcaacaactttaccttcagctacacctttgaggaagtgcctttccacagcagctacgcgcacagccagagcctggaccggctgatgaatcctctcatcgaccaatacctgtattacctgaacagaactcaaaatcagtccggaagtgcccaaaacaaggacttgctgtttagccgtgggtctccagctggcatgtctgttcagcccaaaaactggctacctggaccctgttatcggcagcagcgcgtttctaaaacaaaaacagacaacaacaacagcaattttacctggactggtgcttcaaaatataacctcaatgggcgtgaatccatcatcaaccctggcactgctatggcctcacacaaagacgacaaagacaagttctttcccatgagcggtgtcatgatttttggaaaagagagcgccggagcttcaaatactgcattggacaatgtcatgatcacagatgaagaggaaattaaagccactaaccctgtggccaccgaaagatttgggaccgtggcagtcaatttccagagcagcaacacagaccccgcgaccggagatgtgcatgttatgggagccttacctggcatggtgtggcaagacagagacgtatacctgcagggtcccatttgggccaaaattcctcacacggatggacactttcacccgtctcctctcatgggcggctttggacttaagcacccgcctcctcaaatcctcatcaaaaacacgcctgttcctgcgaatcctccggcagagttttcggctacaaagtttgcttcattcatcacccagtactccacaggacaagtgagtgtggaaattgaatgggagctgcagaaagaaaacagcaagcgctggaatcccgaagtgcagtacacatccaattatgcaaaatctgccaacgttgatttcactgtggacaacaatggactttatactgagcctcgccccattggcacccgttaccttacccgtcccttg

SEQ ID NO: 682 - DNA, 2208 bp, synthetic construct
  misc_feature 1..2208: note = source = /note="Description of Artificial Sequence: Synthetic polynucleotide"
  source 1..2208: mol_type = other DNA
atggctgccgatggttattttccagattggctcgaggacaacctttctgagggcattcgcgagtggtgggacttgaaacctggagccccgaaacctaaagccaaccagcaaaagcaggacgacggccggggtctggtgcttcctggctacaagtacctcggacccttcaacggactcgacaagggggagcccgtcaacgcggcggacgcagcggccctcgagcacgacaaggcctacgaccagcagctcaaagcgggtgacaatccgtacctgcggtataaccacgccgacgccgagtttcaggagcgtctgcaagaagatacgtcttttgggggcaacctcgggcgagcagtcttccaggccaagaagcgggttctcgaaccttttggtctggttgaggaaggcgctaagacggctcctggaaagaaacgtccggtagagcagtcgccacaagagccagactcctcctcgggcatcggcaggacaggccagcagcccgctaaaaagagactcaattttggtcagactggcgactcagagtcagtccccgacccacaacctctcggagaacctccagcgacccccgctgctgtgggacctactacaatggcttcaggcggtggcgcaccaatggcagacaataacgaaggtgccgacggagtgggtaatgcctcaggaaattggcattgcgattccacatggctgggcgacagagtcatcaccaccagcacccgcacctgggccttgcccacctacaataaccacctctacaagcaaatctccagtgcttcaacgggggccagcaacgacaaccactacttcggctacagcaccccctgggggtattttgatttcaacagattccactgccacttttcaccacgtgactggcagcgactcatcaacaacaattggggattccggcccaagagactcaacttcaagctcttcaacatccaagtcaaggaggtcacgacgaacgatggcgtcacgaccatcgctaataaccttaccagcacggttcaagtcttctcggattcagagtaccaactgccgtacgtcctcggctctgcgcaccagggctgcctccctccgttcccggcggacgtgttcatgattccgcagtacggctacctaacgctcaacaatggcagccaggccgtgggacgttcatccttttactgcctggaatatttcccttctcagatgctgagaacgggcaacaactttaccttcagctacacctttgaggaagtgcctttccacagcagctacgcgcacagccagagcctggaccggctgatgaatcctctcatcgaccaatacctgtattacctgaacagaactcaaaatcagtccggaagtgcccaaaacaaggacttgctgtttagccgtgggtctccagctggcatgtctgttcagcccaaaaactggctacctggaccctgttatcggcagcagcgcgtttctaaaacaaaaacagacaacaacaacagcaattttacctggactggtgcttcaaaatataacctcaatgggcgtgaatccatcatcaaccctggcactgctatggcctcacacaaagacgacgaagacaagttctttcccatgagcggtgtcatgatttttggaaaagagagcgccggagcttcaaatactgcattggacaatgtcatgatcacagatgaagaggaaattaaagccactaaccctgtggccaccgaaagatttgggaccgtggcagtcaatttccagagcagcagcccagaccccgcgaccggagatgtgcatgttatgggagccttacctggcatggtgtggcaagacagagacgtatacctgcagggtcccatttgggccaaaattcctcacacggatggacactttcacccgtctcctctcatgggcggctttggacttaagcacccgcctcctcaaatcctcatcaaaaacacgcctgttcctgcgaatcctccggcagagttttcggctacaaagtttgcttcattcatcacccagtactccacaggacaagtgagtgtggaaattgaatgggagctgcagaaagaaaacagcaagcgctggaatcccgaagtgcagtacacatccaattatgcaaaatctgccaacgttgatttcactgtggacaacaatggactttatagtgagcctcgccccattggcacccgttaccttacccgtcccttg

SEQ ID NO: 683 - DNA, 2208 bp, synthetic construct
  misc_feature 1..2208: note = source = /note="Description of Artificial Sequence: Synthetic polynucleotide"
  source 1..2208: mol_type = other DNA
atggctgccgatggttatcttccagattggctcgaggacaacctctctgagggcattcgcgagtggtgggacttgaaacctggagccccgaaacctaaagccaaccagcaaaagcaggacgacggccggggtctggtgcttcctggctacaagtacctcggacccttcaacggactcgacaagggggagcccgtcaacgcggcggacgcagcggccctcgagcacgacaaggcctacgaccagcagctcaaagcgggtgacaatccgtacctgcggtataaccacgccgacgccgagtttcaggagcgtctgcaagaagatacgtcttttgggggcaacctcgggcgagcagtcttccaggccaagaagcgggttctcgaaccttttggtctggttgaggaaggcgctaagacggctcctggaaagaaacgtccggtagagcagtcgccacaagagccagactcctcctcgggcatcggcaagacaggccagcagcccgctaaaaagagactcaattttggtcagactggcgactcagagtcagtccccgacccacaacctctcggagaacctccagcaacccccgctgctgtgggacctactacaatggcttcaggcggtggcgcaccaatggcagacaataacgaaggcgccgacggagtgggtaatgcctcaggaaattggcattgcgattccacatggctgggcgacagagtcatcaccaccagcacccgcacctgggccttgcccacctacaataaccacctctacaagcaaacctccagtgcttcaacgggggccagcaacgacaaccactacttcggctacagcaccccctgggggtattttgatttcaacagattccactgccacttttcaccacgtgactggcagcgactcatcaacaacaattggggattccggcccaagagactcaacttcaagctcttcaacatccaagtcaaggaggtcacgacgaacgatggcgtcacgaccatcgctaataaccttaccagcacggttcaagtcttctcggattcagagtaccaactgccgtacgtcctcggctctgcgcaccagggctgcctccctccgttcccggcggacgtgttcatgattccgcagtacggctacctaacgctcaacaatggcagccaggccgtgggacgttcatccttttactgcctggaatatttcccttctcagatgctgagaacgggcaacaactttaccttcagctacacctttgaggaagtgcctttccacagcagctacgcgcacagccagagcctggaccggctgatgaatcctctcatcgaccaatacctgtattacctgaacagaactcaaaatcagtccggaagtgcccaaaacaaggacttgctgtttagccgtgggtctccagctggcatgtctgttcagcccaaaaactggctacctggaccctgttatcggcagcagcgcgtttctaaaacaaaaacagactacaacaacagcaattttacctggactggtgcttcaaaatataacctcaatgggcgtgaatccatcatcaaccctggcactgctatggcctcacacaaagacgacgaagacaagttctttcccatgagcggtgtcatgatttttggaaaagagagcgccggagcttcaaatactgcattggacaatgtcatgatcacagatgaagaggaaattaaagccactaaccctgtggccaccgaaagatttgggaccgtggcagtcaatttccagagcagcagcacagaccccgcgaccggagatgtgcatgttatgggagccttacctggcatggtgtggcaagacagagacgtatacctgcagggtcccatttgggccaaaattcctcacacggatggacactttcacccgtctcctctcatgggcggctttggacttaagcacccgcctcctcaaatcctcatcaaaaacacgcctgttcctgcgaatcctccggcagagttttcggctacaaagtttgcttcattcatcacccagtactccacaggacaagtgagtgtggaaattgaatgggagctgcagaaagaaaacagcaagcgctggaatcccgaagtgcagtacacatccaattatgcaaaatctgccaacgttgatttcactgtggacaacaatggactttatactgagcctcgccccattggcacccgttaccttacccgtcccttg

SEQ ID NO: 684 - DNA, 2208 bp, synthetic construct
  misc_feature 1..2208: note = source = /note="Description of Artificial Sequence: Synthetic polynucleotide"
  source 1..2208: mol_type = other DNA
atggctgccgatggttatcctccagattggctcgaggacaacctctctgagggcattcgcgagtggtgggacttgaaacctggagtcccgaaacctaaagccaaccagcaaaagcaggacgacggccggggtctggtgcttcctggctacaagtacctcggacccttcaacggactcgacaagggggagcccgtcaacgcggcggacgcagcggccctcgagcacgacaaggcctacgaccagcagctcaaagcgggtgacaatccgtacctgcggtataaccacgccgacgccgagtttcaggagcgtctgcaagaagatacgtcttttgggggcaacctcgggcgagcagtcttccaggccaagaagcgggttctcgaaccttttggtctggttgaggaaggcgctaagacggctcctggaaagaaacgtccggtagagcagtcgccacaagagccagactcctcctcgggcatcggcaagacaggccagcagcccgctaaaaagagactcaattttggtcagactggcgactcagagtcagtccccgacccacaacctctcggagaacctccagcaacccccgctgctgtgggacctactacaatggcttcaggcggtggcgcaccaatggcagacaataacgaaggcgccgacggagtgggtaatgcctcaggaaattggcattgcgattccacatggctgggcgacagagtcatcaccaccagcacccgcacctgggccttgcccacctacaataaccacctctacaagcaaatctccagtgcttcaacgggggccagcaacgacaaccactacttcggctacagcaccccctgggggtattttgatttcaacagattccactgccacttttcaccacgtgactggcagcgactcatcaacaacaattggggattccggcccaagagactcaacttcaagctcttcaacatccaagtcaaggaggtcacgacgaacgatggcgtcacgaccatcgctaataaccttaccagcacggttcaagtcttctcggattcagagtaccaactgccgtacgtcctcggctctgcgcaccagggctgcctccctccgttcccggcggacgtgttcatgattccgcagtacggctacctaacgctcaacaatggcagccaggccgtgggacgttcatccttttactgcctggaatatttcccttctcagatgctgagaacgggcaacaactttaccttcagctacacctttgaggaagtgcctttccacagcagctacgcgcacagccagagcctggaccggctgatgaatcctctcatcgaccaatacctgtattacctgaacagaactcaaaatcagtccggaagtgcccaaaacaaggacttgctgtttagccgtgggtctccagctggcatgtctgttcagcccaaaaactggctacctggaccctgttatcggcagcagcgcgtttctaaaacaaaaacagacaacaacaacagcaattttacctggactggtgcttcaaaatataacctcaatgggcgtgaatccatcatcaaccctggcactgctatggcctcacacaaagacgacgaagacaagttctttcccatgagcggtgtcatgatttttggaaaagagagcgccggagcttcaaatactgcattggacaatgtcatgatcacagatgaagaggaaattaaagccactaaccctgtggccaccgaaagatttgggaccgtggcagtcaatttccagagcagcagcacagaccccgcgaccggagatgtgcatgttatgggagccttacctggcatggtgtggcaagacagagacgtatacctgcagggtcccatttgggccaaaattcctcacacggatggacactttcacccgtctcctctcatgggcggctttggacttaagcacccgcctcctcaaatcctcatcaaaaacacgcctgttcctgcgaatcctccggcagagttttcggctacaaagtttgcttcattcatcacccagtactccacaggacaagtgagtgtggaaattgaatgggagctgcagaaagaaaacagcaagcgctggaatcccgaagtgcagtacacatccaattatgcaaaatctgccaacgttgatttcactgtggacaacaatggactttatactgagcctcgccccattggcacccgttaccttacccgtcccttg

SEQ ID NO: 685 - DNA, 2196 bp, synthetic construct
  misc_feature 1..2196: note = source = /note="Description of Artificial Sequence: Synthetic polynucleotide"
  source 1..2196: mol_type = other DNA
atggctgccgatggttatcttccagattggctcgaggacaacctctctgagggcattcgcgagtggtgggacttgaaacctggagccccgaaacctaaagccaaccagcaaaagcaggacgacggccggggtctggtgcttcctggctacaagtacctcggacccttcaacggactcgacaagggggagcccgtcaacgcggcggacgcagcggccctcgagcacgacaaggcctacgaccagcagctcaaagcgggtgacaatccgtacctgcggtataaccacgccgacgccgagtttcaggagcgtctgcaagaagatacgtcttttgggggcaacctcgggcgagcagtcttccaggccaagaagcgggttctcgaaccttttggtctggttgaggaaggcgctaagacggctcctggaaagaaacgtccggtagagcagtcgccacaagagccagactcctcctcgggcatcggcaagacaggccagcagcccgctaaaaagagactcaattttggtcagactggcgactcagagtcagtccccgacccacaacctctcggagaacctccagcaacccccgctgctgtgggacctactacaatggcttcaggcggtggcgcaccaatggcagacaataacgaaggcgccgacggagtgggtaatgcctcaggaaattggcattgcgattccacatggctgggcgacagagtcatcaccaccagcacccgcacctgggccttgcccacctacaataaccacctctacaagcaaatctccagtgcttcaacgggggccagcaacgacaaccactacttcggctacagcaccccctgggggtattttgatttcaacagattccactgccacttttcaccacgtgactggcagcgactcatcaacaacaattggggattccggcccaagagactcaacttcaagctcttcaacatccaagtcaaggaggtcacgacgaacgatggcgtcacgaccatcgctaataaccttaccagcacggttcaagccttctcggattcagagtaccaactgccgtacgtcctcggctctgcgcaccagggctgcctccctccgttcccggcggacgtgttcatgattccgcagtacggctacctaacgctcaacaatggcagccaggccgtgggacgttcatccttttactgcctggaatatttcccttctcagatgctgagaacgggcaacaactttaccttcagctacacctttgaggaagtgcctttccacagcagctacgcgcacagccagagcctggaccggctgatgaatcctctcatcgacccatacctgtattacctgaacagaactcaaaatcagtccggaagtgcccaaaacaaggacttgctgtttagccgtgggtctccagctggcatgtctgttcagcccaaaaactggctacctggaccctgttatcggcagcagcgcgtttctaaaacaaaaacagacaacaacaacagcaattttacctggactggtgcttcaaaatataacctcaatgggcgtgaatccatcatcaaccctggcactgctatggcctcacacaaagacgacgaagacaagttctttcccatgagcggtgtcatgatttttggaaaagagagcgccggagcttcaaatactgcattggacaatgtcatgatcacagatgaagaggaaattaaagccactaaccctgtggccaccgaaagatttgggaccgtggcagtcaatttccagagcagcagcacagaccccgcgaccggagatgtgcatgttatgggagccttacctggcatggtgtggcaagacagagacgtatacctgcagggtcccatttgggccaaaattcctcacacggatggacactttcacccgtctcctctcatgggcggctttggacttaagcacccgcctcctcaaatcctcatcaaaaacacgcctgttcctgcgaatcctccggcagagttttcggctacaaagtttgcttcattcatcacccagtactccacaggacaagtgagtgtggaaattgaatgggagctgcagaaagaaaacagcaagcgctggaatcccgaagtgcagtacacatccaattatgcaaaatctgccaacgttgatttcactgtggacaacaatggactttatactgagcctcgccccattggcacccgttacctt

SEQ ID NO: 686 - DNA, 2208 bp, synthetic construct
  misc_feature 1..2208: note = source = /note="Description of Artificial Sequence: Synthetic polynucleotide"
  source 1..2208: mol_type = other DNA
atggctgccgatggttatcttccagattggctcgaggacaacctctctgagggcattcgcgagtggtgggacttgaaacctggagccccgaaacctaaagccaaccagcaaaagcaggacgacggccggggtctggtgcttcctggctacaagtacctcggacccttcaacggactcgacaagggggagcccgtcaacgcggcggacgcagcggccctcgagcacgacaaggcctacgaccagcagctcaaagcgggtgacaatccgtacctgcggtataaccacgccgacgccgagtttcaggagcgtctgcaagaagatacgtcttttgggggcaacctcgggcgagcagtcttccaggccaagaagcgggttctcgaaccttttggtctggttgaggaaggcgctaagacggctcctggaaagaaacgtccggtagagcagtcgccacaagagccagactcctcctcgggcatcggcaagacaggccagcagcccgctaaaaagagactcaattttggtcagactggcgactcagagtcagtccccgacccacaacctctcggagaacctccagcaacccccgctgctgtgggacctactacaatggcttcaggcggtggcgcaccaatggcagacaataacgaaggcgccgacggagtgggtaatgcctcaggaaattggcattgcgattccacatggctgggcgacagagtcatcaccaccagcacccgcacctgggccttgcccacctacaataaccacctctacaagcaaatctccagtgcttcaacgggggccagcaacgacaaccactacttcggctacagcaccccctgggggtattttgatttcaacagattccactgccacttttcaccacgtgactggcagcgactcatcaacaacaattggggattccggcccaagagactcaacttcaagctcttcaacatccaagtcaaggaggtcacgacgaacgatggcgtcacgaccatcgctaataaccttaccagcacggttcaagtcttctcggattcagagtaccaactgccgtacgtcctcggctctgcgcaccagggctgcctccctccgttcccggcggacgtgttcatgattccgcagtacggctacctaacgctcaacaatggcagccaggccgtgggacgttcatccttttactgcctggaatatttcccttctcagatgctgagaacgggcaacaactttaccttcagctacacctttgaggaagtgcctttccacagcagctacgcgcacagccagagcctggaccggctgatgaatcctctcatcgaccaatacctgtattacctgaacagaactcaaaatcagtccggaagtgcccaaaacaaggacttgctgtttagccgtgggtctccagctggcatgtctgttcagcccaaaaactggctacctggaccctgttatcggcagcagcgcgtttctaaaacaaaaacagacaacaacaacagcaattttacctggactggtgcttcaaaatataacctcaatgggcgtgaatccatcatcaaccctggcactgctatggcctcacacaaagacgacgaagacaagttctttcccatgagcggtgtcatgatttttggaaaagagagcgccggagcttcaaatactgcattggacaatgtcatgatcacagatgaagaggaaattaaagccactaaccctgtggccaccgaaagatttgggaccgtggcagtcaatttccagagcagcagcacagaccccgcgaccggagatgtgcatgttatgggagccttacctggcatggtgtggcaagacagagacgtatacctgcagggtcccatttgggccaaaattcctcacacggatggacactctcacccgtctcctctcatgggcggctttggacttaagcacccgcctcctcaaatcctcatcaaaaacacgcctgttcctgcgaatcctccggcagagttttcggctacaaagtttgcttcattcatcacccagtactccacaggacaagtgagtgtggaaattgaatgggagctgcagaaagaaaacagcaagcgctggaatcccgaagtgcagtacacatccaattatgcaaaatctgccaacgttgatttcactgtggacaacaatggactttatactgagcctcgccccattggcacccgttaccttacccgtcccttg

SEQ ID NO: 687 - DNA, 2208 bp, synthetic construct
  misc_feature 1..2208: note = source = /note="Description of Artificial Sequence: Synthetic polynucleotide"
  source 1..2208: mol_type = other DNA
atggctgccgatggttatcttccagattggctcgaggacaacctctctgagggcattcgcgagtggtgggacttgaaacctggagccccgaaacctaaagccaaccagcaaaagcaggacgacggccggggtctggtgcttcctggctacaagtacctcggacccttcaacggactcgacaagggggagcccgtcaacgcggcggacgcagcggccctcgagcacgacaaggcctacgaccagcagctcaaagcgggtgacaatccgtacctgcggtataaccacgccgacgccgagtttcaggagcgtctgcaagaagatacgtcttttgggggcaacctcgggcgagcagtcttccaggccaagaagcgggttctcgaaccttttggtctggttgaggaaggcgctaagacggctcctggaaagaaacgtccggtagagcagtcgccacaagagccagactcctcctcgggcatcggcaagacaggccagcagcccgctaaaaagagactcaattttggtcagactggcgactcagagtcagtccccgacccacaacctctcggagaacctccagcaacccccgctgctgtgggacctactacaatggcttcaggcggtggcgcaccaatggcagacaataacgaaggcgccgacggagtgggtaatgcctcaggaaattggcattgcgattccacatggctgggcgacagagtcatcaccaccagcacccgcacctgggccttgcccacctacaataaccacctctacaagcaaatctccagtgcttcaacgggggccagcaacgacaaccactacttcggctacagcaccccctgggggtattttgatttcaacagattccactgccacttttcaccacgtgactggcagcgactcatcaacaacaattggggattccggcccaagagactcaacttcaagctcttcaacatccaagtcaaggaggtcacgacgaacgatggcgtcacgaccatcgctaataaccttaccagcacggttcaagtcttctcggattcagagtaccaactgccgtacgtcctcggctctgcgcaccagggctgcctccctccgttcccggcggacgtgttcatgattccgcagtacggctacctaacgctcaacaatggcagccaggccgtgggacgttcatccttttactgcctggaatatttcccttctcagatgctgagaacgggcaacaactttaccttcagctacacctttgaggaagtgcctttccacagcagctacgcgcacagccagagcctggaccggctgatgaatcctctcatcgacctatacctgtattacctgaacagaactcaaaatcagtccggaagtgcccaaaacaaggacttgctgtttagccgtgggtctccagctggcatgtctgttcagcccaaaaactggctacctggaccctgttatcggcagcagcgcgtttctaaaacaaaaacagacaacaacaacagcaattttacctggactggtgcttcaaaatataacctcaatgggcgtgaatccatcatcaaccctggcactgctatggcctcacacaaagacgacgaagacaagttctttcccatgagcggtgtcatgatttttggaaaagagagcgccggaacttcaaatactgcattggacaatgtcatgatcacagatgaagaggaaattaaagccactaaccctgtggccaccgaaagatttgggaccgtggcagtcaatttccagagcagcagcacagaccccgcgaccggagatgtgcatgttatgggagccttacctggcatggtgtggcaagacagagacgtatacctgcagggtcccatttgggccaaaattcctcacacggatggacactttcacccgtctcctctcatgggcggctttggacttaagcacccgcctcctcaaatcctcatcaaaaacacgcctgttcctgcgaatcctccggcagagttttcggctacaaagtttgcttcattcatcacccagtactccacaggacaagtgagtgtggaaattgaatgggagctgcagaaagaaaacagcaagcgctggaatcccgaagtgcagtacacatccaattatgcaaaatctgccaacgttgatttcactgtggacaacaatggactttatactgagcctcgccccattggcacccgttaccttacccgtcccttg

SEQ ID NO: 688 - DNA, 2208 bp, synthetic construct
  misc_feature 1..2208: note = source = /note="Description of Artificial Sequence: Synthetic polynucleotide"
  source 1..2208: mol_type = other DNA
atggctgccgatggttatcttccagattggctcgaggacagcctctctgagggcattcgcgagtggtgggacttgaaacctggagccccgaaacctaaagccaaccagcaaaagcaggacgacggccggggtctggtgcttcctggctacaagtacctcggacccttcaacggactcgacaagggggagcccgtcaacgcggcggacgcagcggccctcgagcacgacaaggcctacgaccagcagctcaaagcgggtgacaatccgtacctgcggtataaccacgccgacgccgagtttcaggagcgtctgcaagaagatacgtcttttgggggcaacctcgggcgagcagtcttccaggccaagaagcgggttctcgaaccttttggtctggttgaggaaggcgctaagacggctcctggaaagaaacgtccggtagagcagtcgccacaagagccagactcctcctcgggcatcggcaagacaggccagcagcccgctaaaaagagactcaattttggtcagactggcgactcagagtcagtccccgacccacaacctctcggagaacctccagcaacccccgctgctgtgggacctactacgatggcttcaggcggtggcgcaccaatggcagacaataacgaaggcgccgacggagtgggtaatgcctcaggaaattggcattgcgattccacatggctgggcgacagagtcatcaccaccagcacccgcacctgggccttgcccacctacaataaccacctctacaagcaaatctccagtgcttcaacgggggccagcaacgacaaccactacttcggctacagcaccccctgggggtattttgatttcaacagattccactgccacttttcaccacgtgactggcagcgactcatcaacaacaattggggattccggcccaagagactcaacttcaagctcttcaacatccaagtcaaggaggtcacgacgaacgatggcgtcacgaccatcgctaataaccttaccagcacggttcaagtcttctcggattcagagtaccaactgccgtacgtcctcggctctgcgcaccagggctgcctccctccgttcccggcggacgtgttcatgattccgcagtacggctacctaacgcccaacaatggcagccaggccgtgggacgttcatccttttactgcctggaatatttcccttctcagatgctgagaacgggcaacaactttaccttcagctacacctttgaggaagtgcctttccacagcagctacgcgcacagccagagcctggaccggctgatgaatcctctcatcgaccaataccagtattacctgaacagaactcaaaatcagtccggaagtgcccaaaacaaggacttgctgtttagccgtgggtctccagctggcatgtctgttcagcccaaaaactggctacctggaccctgttatcggcagcagcgcgtttctaaaacaaaaacagacaacaacaacagcaattttacctggactggtgcttcaaaatataacctcaatgggcgtgaatccatcatcaaccctggcactgctatggcctcacacaaagacgacgaagacaagttctttcccatgagcggtgtcatgatttttggaaaagagagcgccggagcttcaaatactgcattggacaatgtcatgatcacagatgaagaggaaattaaagccactaaccctgtggccaccgaaagatttgggaccgtggcagtcaatttccagagcagcagcacagaccccgcgaccggagatgtgcatgttatgggagccttacctggcatggtgtggcaagacagagacgtatacctgcagggtcccatttgggccaaaattcctcacacggatggacactttcacccgtctcctctcatgggcggctttggacttaagcacccgcctcctcaaatcctcatcaaaaacacgcctgttcctgcgaatcctccggcagagttttcggctacaaagtttgcttcattcatcacccagtactccacaggacaagtgagtgtggaaattgaatgggagctgcagaaagaaaacagcaagcgctggaatcccgaagtgcagtacacatccaattatgcaaaatctgccaacgttgatttcactgtggacaacaatggactttatactgagcctcgccccattggcacccgttaccttacccgtcccttg

SEQ ID NO: 689 - DNA, 2208 bp, synthetic construct; identical to SEQ ID NO: 680
  misc_feature 1..2208: note = source = /note="Description of Artificial Sequence: Synthetic polynucleotide"
  source 1..2208: mol_type = other DNA

SEQ ID NO: 690 - DNA, 2205 bp, synthetic construct
  misc_feature 1..2205: note = source = /note="Description of Artificial Sequence: Synthetic polynucleotide"
  source 1..2205: mol_type = other DNA
atggctgccgatggttatcttccagattggctcgaggacactctctctgaaggaataagacagtggtggaagctcaaacctggcccaccaccaccaaagcccgcagagcggcataaggacgacagcaggggtcttgtgcttcctgggtacaagtacctcggacccttcaacggactcgacaagggagagccggtcaacgaggcagacgccgcggccctcgagcacgacaaagcctacgaccggcagctcgacagcggagacaacccgtacctcaagtacaaccacgccgacgcggagtttcaggagcgccttaaagaagatacgtcttttgggggcaacctcggacgagcagtcttccaggcgaaaaagagggttcttgaacctctgggcctggttgaggaacctgttaagacggctccgggaaaaaagaggccggtagagcactctcctgtggagccagactcctcctcgggaaccggaaaggcgggccagcagcctgcaagaaaaagattgaattttggtcagactggagacgcagactcagtacctgacccccagcctctcggacagccaccagcagccccctctggtctgggaactaatacgatggctacaggcagtggcgcaccaatggcagacaataacgagggcgccgacggagtgggtaattcctcgggaaattggcattgcgattccacatggatgggcgacagagtcatcaccaccagcacccgaacctgggccctgcccacctacaacaaccacctctacaaacaaatttccagccaatcaggagcctcgaacgacaatcactactttggctacagcaccccttgggggtattttgacttcaacagattccactgccacttttcaccacgtgactggcaaagactcatcaacaacaactggggattccgacccaagagactcaacttcaagctctttaacattcaagtcaaagaggtcacgcagaatgacggtacgacgacgattgccaataaccttaccagcacggttcaggtgtttactgactcggagtaccagctcccgtacgtcctcggctcggcgcatcaaggatgcctcccgccgttcccagcagacgtcttcatggtgccacagtatggatacctcaccctgaacaacgggagtcaggcagtaggacgctcttcattttactgcctggagtactttccttctcagatgctgcgtaccggaaacaactttaccttcagctacacttttgaggacgttcctttccacagcagctacgctcacagccagagtctggaccgtctcatgaatcctctcatcgaccagtacctgtattacttgagcagaacaaacactccaagtggaaccaccacgcagtcaaggcttcagttttctcgggccggagcgagtgacattcgggaccagtctaggaactggcttcctggaccctgttaccgccagcagcgagtatcaaagacatctgcggataacaacaacagtgaatactcgtggactggagctaccaagtaccacctcaatggcagagactctctggtgaatccgggcccggccatggcaagccacaaggacgatgaagaaaagttttttcctcagagcggggttctcatctttgggaagcaaggctcagagaaaacaaatgtggacattgaaaaggtcatgattacagacgaagaggaaatcaggacaaccaatcccgtggctacggagcagtatggttctgtatctaccaacctccagagaggcaacagacaagcagctaccgcagatgtcaacacacaaggcgttcttccaggcatggtctggcaggacagagatgtgtaccttcaggggcccatctgggcaaagattccacacacggacggacattttcacccctctcccctcatgggtggattcggacttaaacaccctcctccacagattctcatcaagaacaccccggtacctgcgaatccttcgaccaccttcagtgcggcaaagtttgcttccttcatcacacagtactccacgggacaggtcagcgtggagatcgagtgggagctgcagaaggaaaacagcaaacgctggaatcccgaaattcagtacacttccaactacaacaagtctgttaatgtggactttactgtggacactaatggcgtgtattcagagcctcgccccattggcaccagatacctgactcgtaatctg

SEQ ID NO: 691 - protein, 736 aa, synthetic construct
  REGION 1..736: note = source = /note="Description of Artificial Sequence: Synthetic polypeptide"
MAADGYLPDWLEDNLSEGIREWWALKPGAPQPKANQQHQDNARGLVLPDYKYLGPGNGLDKGEPVNAADVAALEHDKAYDQQLKAGDNPYLKYNHADAEFQERLKEDTSFGGNLGRAVFQAKKRLLEPLGLVEEAAKTAPGKKRPVEQSPQEPDSSAGIGKSGAQPAKKRLNFGQTGDTESVPDPQPIGEPPAAPSGVGSLTMASGGGAPVADNNEGADGVGSSSGNWHCDSQWLGDGVITTSTRTWALPTYNNHLYKQISNSTSGGSSNDNAYFGYSTPWGYFDFNRFHCHFSPRDWQRLINNNWGFRPKRLNFKLFNIQVKEVTDNNGVKTIANNLTSTVQVFTDSDYQLPYVLGSAHEGCLPPFPADVFMIPQYGYLTLNDGSQAVGRSSFYCLEYFPSQMLRTGNNFQFSYEFENVPFHSSYAHSQSLDRLMNPLIDQYLHYLPKTINGSGQNQQTLKFSVAGPSNMAVQGRNYIPGPSYRQQRVSTTVTQNNNSEFAWPGASSWALNGRNSLMNPGPAMASYKEGEDSFFPLSGSLIFGKQGTGRDNVDADKVMITNEEEIKTTNPVATESYGQVATNHQSAQAQAQTGWVQNQGILPGMVWQDRDVYLQGPIWAKIPHTDGNFHPSPLMGGFGMKHPPPQTLIKNTPVPADPPTAFNKDKLNSFITQYSTGQVSVEIEWELQKENSKRWNPEIQYTSNYYKSNNVEFAVNTEGVYSEPRPIGTRYLTRNL

SEQ ID NO: 692 - protein, 736 aa, synthetic construct
  REGION 1..736: note = source = /note="Description of Artificial Sequence: Synthetic polypeptide"
MAADGYLPDWLEDNLSEGIREWWALKPGAPQPKANQQHQDNARGLVLPGYKYLGPGNGLDKGEPVNAADAAALEHDKAYDQQLKAGDNPYLKYNHADAEFQERLKEDTSFGGNLGRAVFQAKRRLLEPLGLVEEAAKTAPGKKRPVEQSPQEPDSSAGIGKSGAQPAKKRLNFGQTGDTESVPDPQPIGEPPAAPSGVGSLTMASGGGAPVADNNEGADGVGSSSGNWHCDSQWLGDRVITTSTRTWALPTYNNHLYKQISNSTSGGSSNDNAYFGYSTPWGYFDFNRFHCHFSPRDWQRLINNNWGFRPKRLNFKLFNIQIKEVTDNNGVKTIANNLTSTVQVFTDLDYQLPYVLGSAHEGCLPPFPADVFMIPQYGYLTLNDGSQAVGRSSFYCLEYFPSQMLRTGNNFQFSYEFENVPFHSSYAHSQSLDRLMNPLIDQYLHYLSKTINGSGQNQQTLKFSVAGPSNMAVQGRNYIPGPSYRQQRVSTTVTQNNNSEFAWPGASSWALNGRNSLMNPGPAMASYKEGEDSFFPLSGSLIFGKQGTGRDNVDADKVMITNEEEIKTTNPVATESYGQVATNHQSAQAQAQTGWVQNQGILPGMVWQDRDVYLQGPIWAKIPHTDGNFHPSPLMGGFGMKHPPPQTLIKNTPVPADPPTAFNKDKLNSFITQYSTGQVSVEIEWELQKENSKRWNPEIQYTSNYYKSNNVEFAVNTEGVYSEPRPIGTRYLTRNL

SEQ ID NO: 693 - protein, 736 aa, synthetic construct
  REGION 1..736: note = source = /note="Description of Artificial Sequence: Synthetic polypeptide"
MAADGYLPDWLEDNLSEGIREWWALKPGAPQPKANQQHQDNARGLVLPGYKYLGPGNGLDKGEPVSAADAAALEHDKAYDQQLKAGDNPYLKYNHADAEFQERLKEDTSFGGNLGRAVFQAKKRLLEPLGLVEEAAKTAPGKKRPVEQSPQEPDSSAGIGKSGAQPAKKRLNFGQTGDTESVSDPQPIGEPPAAPSGVGSLTMASGGGAPVADNNEGADGVGSSSGNWHCDSQWLGDRVITTSTRTWALPTYNNHLYKQISNSTSGGSSNDNAYFGYSTPWGYFDFNRFHCHFSPRDWQRLINNNWGFRPKRLNFKLFNIQVKEVTDNNGVKTIANNLTSTVQVFTDSDYQLPYVLGSAHEGCLPPSPADVFMIPQYGYLTLNDGSQAVGRSSFYCLEYFPSQMLRTGNNFQFSYEFENVPFHSSYAHSQSLDRLMNPLIDQYLHYLSKTINGSGQNQQTLKFSVAGPSNMAVQGRNYIPGPSYRQQRVSTTVTQNNNSEFAWPGASSWALNGRNSLMNPGPAMASYKEGEDSFFPLSGSLIFGKQGTGRDDVDADKVIITNEEEIKTTNPVATESYGQVATNHQSAQAQAQTGWVQNQGILPGMVWQDRDVYLQGPIWAKIPHTDGNFHPSPLMGGFGMKHPPPQTLIKNTPVPADPPTAFNKDKLNSFITQYSTGQVSVEIEWELQKENSKRWNPEIQYTSNYYKSNNVEFAVNTEGVYSEPRPIGTRYLTRNL

SEQ ID NO: 694 - protein, 736 aa, synthetic construct
  REGION 1..736: note = source = /note="Description of Artificial Sequence: Synthetic polypeptide"
MAADGYLPDWLEDNLSEGIREWWALKPGAPQPKANQQHQDNARGLVLPGYKYLGPGNGLDKGEPVNAADAAALEHDKAYDQQLKAGDNPYLKYNHAGAEFQERLKEDTSFGGNLGRAVFQAKKRLLEPLGLVEEAAKTAPGKKRPVEQSPQEPDSSAGIGKSGAQPAKKRLNFGQTGDTESVPDPQPIGEPPAAPSGVGSLTMASGGGAPVADNNEGAGGVGSSSGNWHCDSQWLGDRVVTTSTRTWALPTYNNHLYKQISNSTSGGSSNDNAYFGYSTPWGYFDFNRFHCHFSPRDWQRLINNNWGFRPKRLNFKLFNIQVKEVTDNNGVKTIANNLTSTVQVFTDSDYQLPYVLGSAHGGCLPPFPADVFMIPQYGYLTLNDGSQAVGRSSFYCLEYFPSQMLRTGNNFQFSYEFENVPFHSSYAHSQSLDRLMNPLIDQYLHYLSKTINGSGQNQQTLKFSVAGPSNMAVQGRSYIPGPSYRQQRVSTTVTQNNNSEFAWPGASSWALNGRNSLMNPGPAMASYKEGEDSFFPLSGSLIFGKQGTGRDNVDADKVMITNEEEIKTTNPVATESYGQVATNHQSAQAQAQTGWVQNQGILPGMVWQDRDVYLQGPIWAKIPHTDGNFHPSPLMGGFGMKHPPPQTLIKNTPVPADPPTAFNKDKLNSFITQYSTGQVSVEIEWELQKENSKRWNPEIQYTSNYYKSNNVEFAVNTEGVYSEPRPIGTRYLTRNL

SEQ ID NO: 695 - protein, 736 aa, synthetic construct
  REGION 1..736: note = source = /note="Description of Artificial Sequence: Synthetic polypeptide"
MAADGYLPDWLEDNLSEGIREWWALKPGAPQPKANQQHQDNARGLVLPGYKYLGPGNGLDKGEPVNAADAAALEHDKAYDQQLKAGDNPYLKYNHADAEFQERLKEDTSFGGNLGRAVFQAKKRLLEPLGLVEEAAKTAPGKKRPVEQSPQEPDSSAGIGKSGAQPAKKRLNFGQTGDTESVPDPQPIGEPPAAPSGVGSLTMASGGGAPVADNNEGADGVGSSSGNWHCDSQWLGDRVVTTSTRTWALPTYNNHLYKQISNSTSGGSSNDNAYFGYSTPWGYFDFNRFHCHFSPRDWQRLINNNWGFRPKRLNFKLFNIQVKEVTDNNGVKTIANNLTSTVQVFTDSDYQLPYVLGSAHEGCLPPFPADVFMIPQYGYLTLNDGSQAVGRSSFYCLEYFPSQMLRTGNNFQFSYEFENVPFHSSHAHSQSLDRLMNPLIDQYLHYLSKTINGSGQNQQTLKFSVAGHSNMAVQGRNYIPGPSYRQQRVSTTVTQNNNSEFAWPGASSWALNGRNSLMNPGPAMASYKEGEDSFFPLSGSLIFGKQGTGRDNVDADKVMITNEEEIKTTNPVATESYGQVATNHQSAQAQAQTGWVQNQGILPGMVWQDRDVYLQGPIWAKIPHTDGNFHPSPLMGGFGMKHPPPQTLIKNTPVPADPPTAFNKDKLNSFITQYSTGQVSVEIGWELQKENSKRWNPEIQYTSNYYKSNNVEFAVNTEGVYSEPRPIGTRYLTRNL

SEQ ID NO: 696 - protein, 736 aa, synthetic construct
  REGION 1..736: note = source = /note="Description of Artificial Sequence: Synthetic polypeptide"
MAADGYLPDWLEDNLSEGIREWWALKPGAPQPKANQQHQDNARGLVLPGYKYLGPGNGLDKGEPVNAADAAALEHDKAYDQQLKAGDNPYLKYNHADAEFQERLKEDTSFGGNLGRAVFQAKKRLLEPLGLVEEAAKTAPGKKRPVEQSPQEPDSSAGIGKSGAQPAKKRLNFGQTGDTESVPDPQPIGEPPAAPSGVGSLTMASGGGAPVADNNEGADGVGSSSGNWHCDSQWLGDRVITTSTRTWALPTYNNRLYKQISNSTSGGSSNDNAYFGYSTPWGYFDFNRFHCHFSPRDWQRLINNNWGFRPKRLNFKPFNIQVKEVTDNNGVKTIANNLTSTVQVFTDSDYQLPYVLGSAHEGCLPPFPADVFMIPQYGYLTLNDGSQAVGRSSFYCLEYFPSQMLRTGNNFQFSYEFENVPFHSSYAHSQSLDRLMNPLIDQYLHYLSKTINGSGQNQQTLKFSVAGPSNMAVQGRNYIPGPSYRQQRVSTTVTQNNNSEFAWPGASSWALNGRNSLMNPGPAMASYKEGEDSFFPLSGSLIFGKQGTGRDNVDADKVMITNEEEIKTTNPVATESYGQVATNHQSAQAQAQTGWVQNQGILPGMVWQDRDVYLQGPIWAKIPHTDGNFHPSPLMGGFGMKHPPPQTLIKNTPVPADPPTAFNKDKLNSFITQYSTGQVSVEIEWELQKENSKRWNPEIQYTSNYYKSNNVEFAVNTEGVYSEPRPIGTRYLTRNL

SEQ ID NO: 697 - protein, 736 aa, synthetic construct
  REGION 1..736: note = source = /note="Description of Artificial Sequence: Synthetic polypeptide"
MAADGYLPDWLEDNLSEGIREWWALKPGAPQPKANQQHQDNARGLVLPGYKYLGPGNGLDKGEPVNAADAAALEHDKAYDQQLKAGDNPYLKYNHADAEFQERLKEDTSFGGNLGRAVFQAKKRLLEPLGLVEEAAKTAPGKKRPVEQSPQEPDSSAGIGKSGAQPAKKRLNFGQTGDTESVPDPQPIGEPPAAPSGVGSLTMASGGGAPVADNNEGADGVGSSSGNWHCDSQWLGDRVITTSTRTWALPTYNNHLYKQISNSTSGGSSNDNAYFGYSTPWGYFDFNRFHCHFSPRDWQRLINNNWGFRPKRLNFKLFNIQVKEVTDNNGVKTIANNLTSTVQVFTDSDYQLPYVLGSAHEGCLPPFPADVFMIPQYGYLTLNDGSQAVGRSSFYCLEYFPSQMLRTGNNFQFSYEFENVPFHSSYAHSQSLDRLMNPLIDQYLHYLSKTINGSGQNQQTLKFSVAGPSNMAVQGRNYIPGPSYRQQRVSTTVTQNNNSEFAWPGASSWALNGRNSLMNPGPAMASYKEGEDSFFPLSGSLIFGKQGTGRDNVDADKVMITNEEEIKTTNPVATESYGQVATNHQSAQAQAQTGWVQNQGILPGMVWQDRDVYLQGPIWAKIPHTDGNFHPSPLMGGFGMKHPPPQTLIKNTPVPADPPTAFNKDKLNSFITQYSTGQVSVEIEWELQKENSKRWNPEIQYTSNYYKSNNVEFAVNTEGVYSEPRPIGTRYLTRNL

SEQ ID NO: 698 - protein, 736 aa, synthetic construct; identical to SEQ ID NO: 697
  REGION 1..736: note = source = /note="Description of Artificial Sequence: Synthetic polypeptide"

SEQ ID NO: 699 - protein, 736 aa, synthetic construct
  REGION 1..736: note = source = /note="Description of Artificial Sequence: Synthetic polypeptide"
MAADGYLPDWLEDNLSEGIREWWDLKPGAPKPKANQQKQDDGRGLVLPGYKYLGPFNGLDKGEPVNAADAAALEHDKAYDQQLKAGDNPYLRYNHADAEFQERLQEDTSFGGNLGRAVFQAKKRVLEPFGLVEEGAKTAPGKKRPVEQSPQEPDSSSGIGKSGQQPAKKRLNFGQTGDSESVPDPQPLGEPPATPAALGPTTMASGGGAPMADNNEGADGVGNASGNWHCDSTWLGDRVITTSTRTWALPTYNNHLYKQISSASTGASNDNHYFGYSTPWGYFDFNRFHCHFSPRDWQRLINNNWGFRPKRLNFKLFNIQVKEVTTNDGVTTIANNLTSTVQVFSDSEYQLPYVLGSAHQGCLPPFPADVFMIPQYGYLTLNNGSKAVGRSSFYCLEYFPSQMLRTGNNFTFSYTFEEVPFHSSYAHSQSLDRLMNPLIDQYLYYLNRTQNQSGSAQNKDLLFSRGSPAGMSVQPKNWLPGPCYRQQRVSKTKTDNNNSNFTWTGASKYNLNGRESIINPGTAMASHKDDEDKFFPMSGVMIFGKESAGASNTALDNVMITDEEEIKATNPVATERFGTVAVNFQSSSTDPATGDVHVMGALPGMVWQDRDVYLQGPIWAKIPHTDGHFHPSPLMGGFGLKHPPPQILIKNTPVPANPPAEFSATKFASFITQYSTGQVSVEIEWELQKENSKRWNPEVQYTSNYAKSANVDFTVDNNGLYTEPRPIGTRYLTRPL

SEQ ID NO: 700 - protein, 736 aa, synthetic construct
  REGION 1..736: note = source = /note="Description of Artificial Sequence: Synthetic polypeptide"
MAADGYLPDWLEDNLSEGIREWWDLKPGAPKPKANQQKQDDGRGLVLPGYKYLGPFNGLDKGEPVNAADAAALEHDKAYDQQLKAGDNPYLRYNHADAEFQERLQEDTSFGGNLGRAVFQAKKRVLEPLGLVEEGAKTAPGKKRPVEQSPQEPDSSSGIGKTGQQPAKKRLNFGQTGDSESVPDPQPLGEPPATPAAVGPTTMASGGGAPMADNNEGADGVGNASGNWHCDSTWLGDRVITTSTRTWALPTYNNHLYKQISSTSTGASNDNHYFGYSTPWGYFDFNRFHCHFSPRDWQRLINNNWGFRPKRLNFKLFNIQVKEVTTNDGVTTIANNLTSTVQVFSDSEYQLPYVLGSAHQGCLPPFPADVFMIPQYGYLTLNNGSQAVGRSSFYCLEYFPSQMLRTGNNFTFSYTFEEVPFHSSYAHSQSLDRLMNPLIDQYLYYLNRTQNQSGSAQNKDLLFSRGSPAGMSVQPKNWLPGPCYRQQRVSKTKTDNNNSNFTWTGASKYNLNGRESIINPGTAVASHKDDEDKFFPMSGVMIFGKESAGASNTALDNVMITDEEEIKATNPVATERFGTVAVNFQSSSTDPATGDVHAMGALPGMVWQDRDVYLQGPIWAKIPHTDGHFHPSPLMGGFGLKNPPPQILIKNTPVPANPPAEFSATKFASFITQYSTGQVSVEIEWELQKENSKRWNPEVQYTSNYAKSANVDFTVDNNGLYTEPRPIGTRYLTRPL

SEQ ID NO: 701 - protein, 736 aa, synthetic construct
  REGION 1..736: note = source = /note="Description of Artificial Sequence: Synthetic polypeptide"
MAADGYLPDWLEDNLSEGIREWWALKPGAPQPKANQQHQDNARGLVLPGYKYLGPGNGLDKGEPVNAADAAALEHDKAYDQQLKAGDNPYLKYNHADAEFQERLKEDTSFGGNLGRAVFQAKKRLLEPLGLVEEAAKTAPGKKRPVEQSPQEPDSSAGIGKSGAQPAKKRLNFGQTGDTESVPDPQPIGEPPAAPSGVGSLTMASGGGAPVADNNEGADGVGSSSGNWHCDSQWLGDRVITTSTRTWALPTYNNHLYKQISNSTSGGSSNDNAYFGYSTPWGYFDFNRFHCHFSPRDWQRLINNNWGFRPKRLNFKLFNIQVKEVTDNNGVKTIANNLTSTVQVFTDSDYQLPYVLGSAHEGCLPPFPADVFMIPQYGYLTLNDGSQAVGRSSFYCLEYFPSQMLRTGNNFQFGYEFENVPFHSSYAHSQSLDRLMNPLIDQYLYYLSKTINGSGQNQQTLKFSVAGPSNMAVQGRNYIPGPSYRQQRVSTTVTQNNNSEFAWPGASSWALNGRNSLMNPGPAMASHKEGEDRFFPLSGSLIFGKQGTGRDNVDADKVMITNEEEIKTTNPVATESYGQVATNHQSAQAQAQTGWVQNQGILPGMVWQDRDVYLQGPIWAKIPHTDGNFHPSPLMGGFGMKHPPPQILIKNTPVPADPPTAFNKDKLNSFITQYSTGQVSVEIEWELQKENSKRWDPEIQYTSNYYKSNNVEFAVNTEGVYSEPRPIGTRYLTRNL

SEQ ID NO: 702 - protein, 736 aa, synthetic construct
  REGION 1..736: note = source = /note="Description of Artificial Sequence: Synthetic polypeptide"
MAADGYLPDWLEDNLSEGIREWWALKPGAPQPKANQQHQDNARGLVLPGYKYLGPGNGLDKGEPVNAADAAALEHDKAYDQQLKAGDNPYLKYNHADAEFQERLKEDTSFGGNLGRAVFQAKKRLLEPLGLVEEAAKTAPGKKRPVEQSPQEPDSSAGIGKSGAQPAKKRLNFGQTGDTESVPDPQPIGEPPAAPSGVGSLTMASGGGAPVADNNEGADGVGSSSGNWHCDSQWLGDRVITTSTRTWALPTYNNHLYKQISNSTSGGSSNDNAYFGYSTPWGYFDFNRFHCRFSPRDWQRLINNNWGFRPKRLNFKLFNIQVKEVTDNNGVKTIANNLTSTVQVFTDSDYQLPYVLGSAHEGCLPPFPADVFMIPQYGYLTLNDGSQAVGRSSFYCLEYFPSQMLRTGNNFQFSYEFENVPFHSSYAHSQSLDRLMNPLIDQYLYYLSKTINGSGQNQQTLKFSVAGPSNMAVQGRNYIPGPSYRQQRVSTTVTQNNNSEFAWPGASSWALNGRNSLMNPGPAMASHKEGEDRFFPLSGSLIFGKQGTGRDNVDADKVMITNEEEIKTTNPVATESYGQVATNHQSAQAQAQTGWVQNQGILPGMVWQDRDVYLQGPIWAKIPHTDGNFHPSPLMGGFGMKHPPPQILIKNAPVPADPPTAFNKDKLNSFITQYSTGQVSVEIEWELQKENSKRWNPEIQYTSNYYKSNNVEFAVNTEGVYSEPRPIGTRYLTRNL

SEQ ID NO: 703 - protein, 736 aa, synthetic construct
  REGION 1..736: note = source = /note="Description of Artificial Sequence: Synthetic polypeptide"
MAADGYLPDWLEDNLSEGIREWWALKPGAPQPKANQQHQDNARGLVLPGYKYLGPGNGLDKGEPVSAADAAALEHDKAYDQQLKAGDNPYLKYNHADAEFQERLKEDTSFGGNLGRAVFQAKKRLLEPLGLVEEAAKTAPGKKRPVEQSPQEPDSSAGIGKSGAQPAKKRLNFGQTGDTESVPDPQPIGEPPAAPSGVGSLTMASGGGAPVADNNEGADGVGSSSGNWHCDSQWLGDRVITTSTRTWALPTYNNHLYKQISNSTSGGSSNDNAYFGYSTPWGYFDFNRFHCHFSPRDWQRLINNNWGFRPKRLNFKLFNIQVKEVTDNNGVKTIANNLTSTVQVFTDSDYQLPYVLGSAHEGCLPPFPADVFMIPQYGYLTLNDGSQAVGRSSFYCLEYFPSQMLRTGNNFQFSYEFENVPFHSSYAHSQSLDRLMNPLIDQYLYYLSKTINGSGQNQQTLKFSVAGPSNMAVQGRNYIPGPSYRQQRVSTTVTQNNNSEFAWPGASSWALNGRNSLMNPGPAMASHKEGEDRFFPLSGSLIFGKQGTGRDNVDADKVMITNEEEIKTTNPVATESYGQVATNHQSAQAQAQTGWVQNQGILPGMVWQDRDVYLQGPIWAKIPHTDGNFHPSPLMGGFGMKHPPPQILIKNTPVPADPPTAFNKDKLNSFITQYSTGQVSVEIEWELQKENSKRWNPEIQYTSNYYKSNNVEFAVNTEGVYSEPRPIGTRYLTRNL

SEQ ID NO: 704 - protein, 736 aa, synthetic construct
  REGION 1..736: note = source = /note="Description of Artificial Sequence: Synthetic polypeptide"
MAADGYLPDWLEDNLSEGIREWWALKPGAPQPKANQQHQDNARGLVLPGYKYLGPGNGLDKGEPVNAADAAALEHDKAYDQQLKAGDNPYLKYNHADAEFQERLKEDTSFGGNLGRAVFQAKKRLLEPLGLVEEAAKTAPGKKRPVEQSPQEPDSSAGIGKSGAQPAKKRLNFGQTGDTESVPDPQPIGEPPAAPSGVGSLTMASGGGAPVADNNEGADGVGSSSGNWHCDSQWLGDRVITTSTRTWALPTYNNHLYKQISNSTSGGSSNDNAYFGYSTPWGYFDFNRFHCHFSPRDWQRLINNNWGFRPKRLNFKLFNIQVKEVTDNNGVKTIANNLTSTVQVFTDSDYQLPYVLGSAHEGCLPPFPADVFMIPQYGYLTLNDGSQAVGRSSFYCLEYFPSQMLRTGNNFQFSYEFENVPFHSSYAHSQSLDRLMNPLIDQYLYYLSKTINGSGQNQQTLKFSVAGPSNTAVQGRNYIPGPSYRQQRVSTTVTQNNNSEFAWPGASSWALNGRNSLMNPGPAMASHKEGEDRFFPLSGSLIFGKQGTGRDNVDADKVMITNEEEIKTTNPVATESYGQVATNHQSAQAQAQTGWVQNQGILPGMVWQDRDVYLQGPIWAKIPHTDGNFHPSPLMGGFGMKHPPPQILIKNTPVPADPPTAFNKDKLNSFITQYSTGQVSVEIEWELQKENSKRWNPEIQYTSNYYKSNNVEFAVNTEGVYSEPRPIGTRYLTRNL

SEQ ID NO: 705 - protein, 736 aa, synthetic construct
  REGION 1..736: note = source = /note="Description of Artificial Sequence: Synthetic polypeptide"
MAADGYLPDWLEDNLSEGIREWWALKPGAPQPKANQQHQDNARGLVLPGYKYLGPGNGLDKGEPVNAADAAALEHDKAYDQQLKAGDNPYLKYNHADAEFQERLKEDTSFGGNLGRAVFQAKKRLLEPLGLVEEAAKTAPGKKRPVEQSPQEPDSSAGIGKSGAQPAKKRLNFGQTGDTESVPDPQPIGEPPAAPSGVGSLTMASGGGAPVADNNEGADGVGSSSGNWHCDSQWLGDRVITTSTRTWALPTYNNHLYKQISNSTSGGSSNDNAYFGYSTPWGYFDFNRFHCHFSPRDWQRLINNNWGFRPKRLNFKLFNIQVKEVTDNNGVKTIANNLTSTVQVFTDSDYQLPYVLGSAHEGCLPPFPADVFMIPQYGYLTLNDGSQAVGRSSFYCLEYFPSQMLRTGSNFQFSYEFENVPFHSSYAHSQSLDRLMNPLIDQYLYYLSKTINGSGQNQQTLKFSVAGPSNMAVQGRNYIPGPSYRQQRVSTTVTQNNNSEFAWPGASSWALNGRNSLMNPGPAMASHKEGEDRFFPLSGSLIFGKQGTGRDNVDADKVMITNEEEIKTTNPAATESYGQVATNHQSAQAQAQTGWVQNQGILPGMVWQDRDVYLQGPIWAKIPHTDGNFHPSPLMGGFGMKHPPPQILIKNTPVPADPPTAFNKDKLNSFITQYSTGQVSVEIEWELQKENSKRWNPEIQHTSNYYKSNNVEFAVNTEGVYSEPRPIGTRYLTRNL

SEQ ID NO: 706 - protein, 736 aa, synthetic construct
  REGION 1..736: note = source = /note="Description of Artificial Sequence: Synthetic polypeptide"
MAADGYLPDWLEDNLSEGIREWWALKPGAPQPKANQQHQDNARGLVLPGYKYLGPGNGLDKGEPVNAADAAALEHDKAYDQQLKAGDNPYLKYNHADAEFQERLKEDTSFGGNLGRAVFQAKKRLLEPLGLVEEAAKTAPGKKRPVEQSPQEPDSSAGIGKSGAQPAKKRLNFGQTGDTESVPDPQPIGEPPAAPSGVGSLTMASGGGAPVADNNEGADGVGSSSGNWHCDSQWLGDRVITTSTRTWALPTYNNHLYKQISNSTSGGSSNDNAYFGYSTPWGYFDFNRFHCHFSPRDWQRLINNNWGFRPKRLNFRLFNIQVKEVTDNNGVKTIANNLTSTVQVFTDSDYQLPYVLGSAHEGCLPPFPADVFMIPQYGYLTLNDGSQAVGRSSFYCLEYFPSQMLRTGNNFQFSYEFENVPFHSSYAHSQSLDRLMNPLIDQYLYYLSKTINGSGQNQQTLKFSVAGPSNMAVQGRNYIPGPSYRQQRVSTTVTQNNNSEFAWPGASSWALNGRNSLMNPGPAMASHKEGEDRFFPLSGSLIFGKQGTGRDNVDADKVMITNEEEIKTTNPVATESYGQVATNHQSAQAQAQTGWVQSQGILPGMVWQDRDVYLQGPIWAKIPHTDGNFHPSPLMGGFGMKHPPPQILIKNTPVPADPPTAFNKDKLNSFITQYSTGQVSVEIEWELQKENSKRWNPEIQYTSNYYKSNNVEFAVNTEGVYSEPRPIGTRYLTRNL

SEQ ID NO: 707 - protein, 735 aa, synthetic construct
  REGION 1..735: note = source = /note="Description of Artificial Sequence: Synthetic polypeptide"
MAADGYLPDWLEDNLSEGIREWWALKPGAPQPKANQQHQDNARGLVLPGYKYLGPGNGLDKGEPVNAADAAALEHDKAYDQQLKAGDNPYLKYNHADAEFQERLKEDTSFGGNLGRAVFQAKKRLLEPLGLVEEAAKTAPGKKRPVEQSPQEPDSSAGIGKSGAQPAKKRLNFGQTGDTESVPDPQPIGEPPAAPSGVGSLTMASGGGAPVADNNEGADGVGSSSGNWHCDSQWLGDRVITTSTRTWALPTYNNHLYKQISNSTSGGSSNDNAYFGYSTPWRYFDFNRFHCHFSPRDWQRLINNWGFRPKRLNFKLFNIQVKEVTDNNGVKTIANNLTSTVQAFTDSDYQLPYVLGSAHEGCLPPFPADVFMIPQYGYLTLNDGSQAVGRSSFYCLEYFPSQMLRTGNNFQFSYEFENVPFHSSYAHSQSLDRLMNPLIDQYLYYLSKTINGSGQNQQTLKFSVAGPSNMAVQGRNYIPGPSYRQQRVSTTVTQNNNSEFAWPGASSWALNGRNSLMNPGPAMASHKEGEDRFFPLSGSLIFGKQGTGRDNVDADKVMITNEEEIKTTNPVATESYGQVATNHQSAQAQAQTGWVQNQGILPGMVWQDRDVYLQGPIWAKIPHTDGNFHPSPLMGGFGMKHPPPQILIKNTPVPADPPTAFNKDELNSFITQYSTGQVSVEIEWELQKENSKRWNPEIQYTSNYYKSNNVEFAVNTEGVYSEPRPIGTRYLTRNL

SEQ ID NO: 708 - protein, 735 aa, synthetic construct
  REGION 1..735: note = source = /note="Description of Artificial Sequence: Synthetic polypeptide"
MAADGYLPDWLEDNLSEGIREWWALKPGAPQPKANQQHQDNARGLVLPGYKYLGPGNGLDKGEPVNAADAAALEHDKAYDQQLKAGDNPYLKYNHADAEFQERLKEDTSFGGNLGRAVFQDKKRLLEPLGLVEEAAKTAPGKKRPVEQSPQEPDSSAGIGKSGAQPAKKRLNFGQTGDTESVPDPQPIGEPPAAPSGVGSLTMASGGGAPVADNNEGADGVGSSSGNWHCDSQWLGDRVITTSTRTWALPTYNNHLYKQISNSTSGGSSNDNAYFGYSTPWGYFDFNRFHCHFSPRDWQRLINNWGFRPKRLNFKLFNIQVKEVTDNNGVKTIANNLTSTVQVFTDSDYQLPYVLGSAHEGCLPPFPADVFMIPQYGYLTLNDGSQAVGRSSFYCLEYFPSQMLRTGNNFQFSYEFENVPFHSSYAHSQSLDRLMNPLIDQYLYYLSKTINGSGQNQQTLKFSVAGPSNMAVQGRNYIPGPSYRQQRVSTTVTQNNNSEFAWPGASSWALNGRNSLMNPGPAMASHKEGEDRFFPLSGSLIFGKQGTGRDNVDADKVMITNEEEIKTTNPVATESYGQVATNHQSAQAQAQTGWVQNQGILPGMVWQDRDVYLQGPIWAKIPHTDGNFHPSPLMGGFGMKHPPPQILIKNTPVPADPPTAFNKDKLNSFITQYSTGQVSVEIEWELQKENSKRWNPEIQYTSNYYKSNNVEFAVNTEGVYSEPRPIGTRYLTRNL

SEQ ID NO: 709 - protein, 736 aa, synthetic construct
  REGION 1..736: note = source = /note="Description of Artificial Sequence: Synthetic polypeptide"
MAADGYLPDWLEDNLSEGIREWWALKPGAPQPKANQQHQDNARGLVLPGYKYLGPGNGLDKGEPVNAADAAALEHDKAYDQQLKAGDNPYLKYNHADAEFQERLKEDTSFGGNLGRAVFQAKKRLLEPLGLVEEAAKTAPGKKRPVEQSPQEPDSSAGIGKSGAQPAKKRLNFGQTGDTESVPDPQPIGEPPAAPSGVGSLTMASGGGAPVADNNEGADGVGSSSGNWHCDSQWLGDRAITTSTRTWALPTYNNHLYKQISNSTSGGSSNDNAYFGYSTPWGYFDFNRFHCHFSPRDWQRLINNNWGFRPKRLNFKLFNIQVKEVTDNNGVKTIANNLTSTVQVFTDSDYQLPYVLGSAHEGCLPPFPADVFMIPQYGYLTLNDGSQAVGRSSFYCLEYFPSQMLRTGNNFQFSYEFENVPFHSSYAHSQSLDRLMNPLIDQYLYYLSKTINGSGQNQQTLKFSVAGPSNMAVQGRNYIPGPSYRQQRVSTTVTQNNNSEFAWPGASSWALNGRNSLMNPGPAMASHKEGEDRFFPLSGSLIFGKQGTGRDNVDADKVMTTNEEEIKTTNPVATESYGQVATNHQSAQAQAQTGWVQNQGILPGMVWQDRDVYLQGPIWAKIPHTDGNFHPSPLMGGFGMKHPPPQILIKNTPVPADPPTAFNKDKLNSFITQYSTGQVSVEIEWELQKENSKRWNPEIQYTSNYYKSNNVEFAVNTEGVYSEPRPIGTRYLTRNL

SEQ ID NO: 710 - protein, 736 aa, synthetic construct
  REGION 1..736: note = source = /note="Description of Artificial Sequence: Synthetic polypeptide"
MAADGYLPDWLEDNLSEGIREWWALKPGAPQPKANQQHQDNARGLVLPGYKYLGPGNGLDKGEPVNAADAAALEHDKAYDQQLKAGDNPYLKYNHADAEFQERLKEDTSFGGNLGRAVFQTKKRLLEPLGLVEEAAKTAPGKKRPVEQSPQEPGSSAGIGKSGAQPAKKRLNFGQTGDTESVPDPQPIGEPPAAPSGVGSLTMASGGGAPVADNNEGADGVGSSSGNWHCDSQWLGDRVITTSTRTWALPTYNNHLYKQISNSTSGGSSNDNAYFGYSTPWGYFDFNRFHCHFSPRDWQRLINNNWGFRPKRLNFKLFNIQVKEVTDNNGVKTIANNLTSTVQVFTDSDYQLPYVLGSAHEGCLPPFPADVFMIPQYGYLTLNDGSQAVGRSSFYCLEYFPSQMLRTGNNFQFSYEFENVPFHSSYAHSQSLDRLMNPLIDQYLHYLSKTINGSGQNQQTLKFSVAGPSNMAVQGRNYIPGPSYRQQRVSTTVTQNNNSEFAWPGASSWALNGRNSLMNPGPAMASHKEGEDRFFPLSGSLIFGKQGTGRDNVDADKVMITNEEEIKTTNPVATESYGQVATNHQSAQAQAQTGWVQNQGILPGMVWQDRDVYLQGPIWAKIPHTDGNFHPSPLMGGFGMKHPPPQILIKNTPVPADPPTAFNKDKLNSFITQYSTGQVSVEIEWELQKENSKRWNPEIQYTSNYYKSNNVEFAVNTEGVYSEPRPIGTRYLTRNL

SEQ ID NO: 711 - protein, 736 aa, synthetic construct
  REGION 1..736: note = source = /note="Description of Artificial Sequence: Synthetic polypeptide"
MAADGYFPDWLEDNLSEGIREWWALKPGAPQPKANQQHQDNARGLVLPGYKYLGPGNGLDKGEPVNAADAAALEHDKAYDQQLKAGDNPYLKYNHADAEFQERLKEDTSFGGNLGRAVFQAKKRLLEPLGLVEEAAKTAPGKKRPVEQSPQEPDSSAGIGKSGAQPAKKRLNFGQTGDTESVPDPQPIGESPAAPSGVGSLTMASGGGAPVADNNEGADGVGSSSGNWHCDSQWLGDRVITTSTRTWALPTYNNHLYKQISNSTSGGSSNDNAYFGYSTPWGYFDFNRFHCHFSPRDWQRLINNNWGFRPKRLNFKLFNIQVKEVTDNNGVKTIANNLTSTVQVFTDSDYQLPYVLGSAHEGCLPPFPADVFMIPQYGYLTLNDGSQAVGRSSFYCLEYLPSQMLRTGNNFQFSYEFENVPFHSSYAHSQSLDRLMNPLIDQYLHYLSKTINGSGQNQQTLKFSVAGPSNMAVQGRNYIPGPSYRQQRVSTTVTQNNNSEFAWPGASSWALNGRNSLMNPGPAVASHKEGEDRFFPLSGSLIFGKQGTGRDNVDADKVMITNEEEIKTTNPVATESYGQVATNHQSAQAQAQTGWVQNQGILPGMVWQDRDVYLQGPIWAKIPHTDGNFHPSPLMGGFGMKHPPPQILIKNTPVPADPPTAFNKDKLNSFITQYSTGQVSVEIEWELQKENSKRWNPEIQYTSNYYKSNNVEFAVNTEGVYSEPRPIGTRYLTRNL

SEQ ID NO: 712 - protein, 736 aa, synthetic construct
  REGION 1..736: note = source = /note="Description of Artificial Sequence: Synthetic polypeptide"
MAADGYLPDWLEDNLSEGIREWWALKPGAPQPKANQQHQDNARGLVLPGYKYLGPGNGLDKGEPVNAADAAALEHDKAYDQQLKAGDNPYLKYNHADAEFQERLKEDTSFGGNLGRAVFQAKKRLLEPLGPVEEAAKTAPGKKRPVEQSPQEPDSSAGIGKSGAQPAKKRLNFGQTGDTESVPDPQPIGEPPAAPSGVGSLTMASGGGAPVADNNEGADGVGSSSGNWHCDSQWLGDRVITTSTRTWALPTYNNHLYKQISNSTSGGSSNDNAYFGYSTPWGYFDFNRFHCHFSPRDWQRLINNNWGFRPKRLNFKLFNIQVKEVTDNNGVKTIANNLTSTVQVFTDSDYQLPYVLGSAHEGCLPPFPADVFMIPQYGYLTLNDGSQAVGRSSFYCLEYFPSQMLRTGNNFQFSYEFENVPFHSSYAHSQSLDRLMNPLIDQYLYYLSKTINGSGQNQQTLKFSVAGPSNMAVQGRNYIPGPSYRQQRVSTTVTQNNNSEFAWPGASSWALNGRNSLMNPGPAMASHKEGEDRFFPLSGSLIFGKQGTGRDNVDADKVMITNEEEIKTTNPVATESYGQAATNHQSAQAQAQTGWVQNQGILPGMVWQDRDVYLQGPIWAKIPHTDGNFHPSPLMGGFGMKHPPPQILIKNTPVPADPPTAFNKDKLNSFITQYSTGQVSVEIEWELQKENSKRWNPEIQYTSNYYKSNNVEFAVNTEGVYSEPRPIGTRYLTRNL

SEQ ID NO: 713 - protein, 736 aa, synthetic construct
  REGION 1..736: note = source = /note="Description of Artificial Sequence: Synthetic polypeptide"
MAADGYLPDWLEDNLSEGIREWWALKPGAPQPKANQQHQDNARGLVLPGYKYLGPGNGLDKGEPVNAADAAALEHDKAYDQQLKAGDNPYLKYNHADAEFQERLKEDTSFGGNLGRAVFQAKKRLLEPLGPVEEAAKTAPGKKRPVEQSPQEPDSSAGIGKSGAQPAKKRLNFGQTGDTESVPDPQPIGEPPAAPSGVGSLTMASGGGAPVADNNEGADGVGSSSGNWHCDSQWLGDRVITTSTRTWALPTYNNHLYKQISNSTSGGSSNDNAYFGYSTPWGYFDFNRFHCHFSPRDWRRLINNNWGFRPKRLNFKLFNIQVKEVTDNNGVKTIANNLTSTVQVFTDSDYQLPYVLGSAHEGCLPPFPADVFMIPQYGYLTLNDGSQAVGRSSFYCLEYFPSQMLRTGNNFQFSYEFENVPFHSSYAHSQSLDRLMNPLIDQYLYYLSKTINGSGQNQQTLKFSVAGPSNMAVQGRNYIPGPSYRQQRVSTTVTQNNNSEFAWPGASSWALNGRNSLMNPGPAMASHKEGEDRFFPLSGSLIFGKQGTGRDNVDADKVMITNEEEIKTTNPVATESYGQVATNHQSAQAQAQTGWVQNQGILPGMVWQDRDVYLQGPIWAKIPHTDGNFHPSPLMGGFGMKHPPPQILIKNTPVPADPPTAFNKDKLNSFITQYSTGQVSVEIEWELQKENSKRWNPEIQYTSNYYKSNNVEFAVNTEGVYSEPRPIGTRYLTRNL

SEQ ID NO: 714 - protein, 736 aa, synthetic construct
  REGION 1..736: note = source = /note="Description of Artificial Sequence: Synthetic polypeptide"
MAADGYLPDWLEDNLSEGIREWWALKPGAPQPKANQQHQDNARGLVLPGYKYLGPGNGLDKGEPVNAADAAALEHDKAYDQQLKAGDNLYLKYNHADAEFQERLKEDTSFGGNLGRAVFQAKKRLLEPLGLVEEAAKTAPGKKRPVEQSPQEPDSSAGIGKSGAQPAKKRLNFGQTGDTESVPDPQPIGEPPAAPSGVGSLTMASGGGAPVADNNEGADGVGSSSGNWHCDSQWLGDRVITTSTRTWALPTYNNHLYKQISNSTSGGSSNDNAYFGYSTPWGYFDFNRFHCHFSPRDWQRLINNNWGFRPKRLNFKLFNIQVKEVTDNNGVKTIANNLTSTVQVFTDSDYQLPYVLGSAHEGCLPPFPADVFMIPQYGYLTLNDGSQAVGRSSFYCLEYFPSQMLRTGNNFQFSYEFENVPFHSSYAHSQSLDRLMNPLIDQYLHYLSKTINGSGQNQQTLKFSVAGPSNMAVQGRNYIPGPSYRQQRVSTTVTQNNNSEFAWPGASSWALNGRNSLMNPGPAMASHKEGEDRFFPLSGSLIFGKQGTGRDNVDADKVMITNEEEIKTTNPVATESYGQVATNHQSAQAQAQTGWVQNQGILPGMVWQDRDVYLQGPIWAKIPHTDGNFHPSPLMGGFGMKHPPPQILIKNTPVPADPPTAFNKDKLNSFITQYSTGQVSVEIEWELQKENSKRWNPEIQYTSNYYKSNNVEFAVNTEGVYSEPRPIGTRYLTRNL

SEQ ID NO: 715 - protein, 736 aa, synthetic construct
  REGION 1..736: note = source = /note="Description of Artificial Sequence: Synthetic polypeptide"
MAADGYLPDWLEDNLSEGIREWWALKPGAPQPKANQQHQDNARGLVLPGYKYLGPGNGLDKGEPVNAADAAALEHDKAYDQQLKAGDNPYLKYNHADAEFQERLKEDTSFGGNLGRAVFQAKKRLLEPLGLVEEAAKTAPGKKRPVEQSPQEPDSSAGIGKSGAQPAKKRLNFGQTGDTESVPDPQPIGEPPAAPSGVGSLTMASGGGAPVADNNEGADGVGSSSGNWHCDSQWLGDRVITTSTRTWALPTYNNHLYKQISNSTSGGSSNDNAYFGYSTPWGYFDFNRFHCHFSPRDWQRLINNNWGFRPKRLNFKLFNIQVKEVTDNNGVKTIANNLTSTVQVFTDSDYQLPYVLGSAHEGCLPPFPADVFMIPQYGYLTLNDGSQAVGRSSFYCLEYFPSQMLRTGNNFQFSYEFENVPFHSSYAHSQSLDRLMNPLIDQYLHYLSKTINGSGQNQQTLKFSVAGPSNMAVQGRNYIPGPSYRQQRVSTTVTQNNNSEFAWPGASSWALNGRNSLMNPGPAMASHKEGEDRFFPLSGSLIFGKQGTGRDNVDADKVMITNEEEIKTTNPVATESYGQVATNHQSAQAQAQTGWVQNQGILPGMVWQDRDVYLQGPIWAKIPHTDGNFHPSPLMGGFGMKHPPPQILIKNTPVPADPPTAFNKDKLNSFITQYSTGQVSVEIEWELQKENSKRWNPEIQYTSNYYKSNNVEFAVNTEGVYSEPRPIGTRYLTRNL

SEQ ID NO: 716 - protein, 736 aa, synthetic construct
  VARIANT 442: note = Any naturally occurring amino acid
  REGION 1..736: note = source = /note="Description of Artificial Sequence: Synthetic polypeptide"
MAADGYLPDWLEDNLSEGIREWWALKPGAPQPKANQQHQDNARGLVLPGYKYLGPGNGLDKGEPVNAADAAALEHDKAYDQQLKAGDNPYLKYNHADAEFQERLKEDTSFGGNLGRAVFQAKKRLLEPLGLVEEAAKTAPGKKRPVEQSPQEPDSSAGIGKSGAQPAKKRLNFGQTGDTESVPDPQPIGEPPAAPSGVGSLTMASGGGAPVADNNEGADGVGSSSGNWHCDSQWLGDRVITTSTRTWALPTYNNHLYKQISTSTSGGSSNDNAYFGYSTPWGYFDFNRFHCHFSPRDWQRLINNNWGFRPKRLNFKLFNIQVKEVTDNNGVKTIANNLTSTVQVFTDSDYQLPYVLGSAHEGCLPPFPADVFMIPQYGYLTLNDGSQAVGRSSFYCLEYFPSQMLRTGNNFQFSYEFENVPFHSSYAHSQSLDRLMNPLIDXYLHYLSKTINGSGQNQQTLKFSVAGPSNMAVQGRNYIPGPSYRQQRVSTTVTQNNNSEFAWPGASSWALNGRNSLMNPGPAMASHKEGEDRFFPLSGSLIFGKQGTGRDNVDADKVMITNEEEIKTTNPVATESYGQVATNHQSAQAQAQTGWVQNQGILPDMVWQDRDVYLQGPIWAKIPHTDGNFHPSPLMGGFGMKHPPPQILIKNTPVPADPPTAFNKDKLNSFITQYSTGQVSVEIEWELQKENSKRWNPEIQYTSNYYKSNNVEFAVNTEGVYSEPRPIGTRYLTRNL

SEQ ID NO: 717 - protein, 736 aa, synthetic construct; identical to SEQ ID NO: 697
  REGION 1..736: note = source = /note="Description of Artificial Sequence: Synthetic polypeptide"

SEQ ID NO: 718 - protein, 736 aa, synthetic construct; identical to SEQ ID NO: 701
  REGION 1..736: note = source = /note="Description of Artificial Sequence: Synthetic polypeptide"

SEQ ID NO: 719 - protein, 736 aa, synthetic construct
  REGION 1..736: note = source = /note="Description of Artificial Sequence: Synthetic polypeptide"
MAADGYLPDWLEDNLSEGIREWWALKPGAPQPRANQQHQDNARGLVLPGYKYLGPGNGLDKGEPVNAADAAALEHDKAYDQQLKAGDNPYLKYNHADAEFQERLKEDTSFGGNLGRAVFQAKKRLLEPLGLVEEAAKTAPGKKRPVEQSPQEPDSSAGIGKSGAQPAKKRLNFGQTGDTESVPDPQPIGEPPAAPSGVGSLTMASGGGAPVADNNEGADGVGSSSGNWHCDSQWLGDRVITTSTRTWALPTYNNHLYKQISNSTSGGSSNDNAYFGYSTPWGYFDFNRFHCHFSPRDWQRLINNNWGFRPKRLNFKLFNIQVKEVTDNNGVKTIANNLTSTVQVFTDSDCQLPYVLGSAHEGCLPPFPADVFMIPQYGYLTLNDGSQAVGRSSFYCLEYFPSQMLRTGNNFQFSYEFENVPFHSSYAHSQSLDRLTNPLIDQYLYYLSKTINGSGQNQQTLKFSVAGPSNMAVQGRNYIPGPSYRQQRVSTTVTQNNNSEFAWPGASSWALNGRNSLMNPGPAMASHKEGEDRFFPLSGSLIFGKQGTGRDNVDADKVMITNEEEIKTTNPVATESHGQVATNHQSAQAQAQTGWVQNQGILPGMVWQDRDVYLQGPIWAKIPHTDGNFHPSPLMGGFGMKHPPPQILIKNTPVPADPPTAFNKDKLNSFITQYSTGQVSVEIEWELQKENSKRWNPEIQYTSNYYKSNNVEFAVNTEGVYSEPRPIGTRYLTRNL

SEQ ID NO: 720 - protein, 736 aa, synthetic construct
  REGION 1..736: note = source = /note="Description of Artificial Sequence: Synthetic polypeptide"
MAADGYLPDWLEDNLSEGIREWWALKPGAPQPKANQQHQDNARGLVLPGYKYLGPGNGLDKGEPVNAADAAALEHDKAYDQQLKAGDNPYLKYNHADAEFQERLKEDTSFGGNLGRAVFQAKKRLLEPLGLVEEAAKTAPGKKRPVEQSPQEPDSSAGIGKSGAQPAKKRLNFGQTGDTESVPDPQPIGEPPAAPSGVGSLTMASGGGAPVADNNEGADGVGSSSGNWHCDSQWLGDRVITTSTRTWALPTYNNHLYKQISNSTSGGSSNDNAYFGYSTPWGYFDFNRFHCHFSPRDWQRLINNNWGFRPKRLNFKLFNIQVKEVTDNNGVKTIANNLTSTVQVFTDSDYQLPYVLGSAHEGCLPPFPADVFMIPQYGYLTLNDGSQAVGRSSFYCLEYFPSQMLRTGNNFQFSYEFENVPFHSSYAHSQSLDRLMNPPIDQYLYYLSKTINGSGQNQQTLKFSVAGPSNMAVQGRNYIPGPSYRQQRVSTTVTQNNNSEFAWPGASSWALNGRNSLMNPGPAMASHKEGEDRFFPLSGSLIFGKQGTGRDNVDADKVMITNEEEIKTTNPVATESYGQVATNHQSAQAQAQTGWVQNQGILPGMVWQDRDVYLQGPIWAKIPHTDGNFHPSPLMGGFGMKHPPPQILIKNTPVPADPPTAFNKDKLNSFITQYSTGQVSVEIEWELQKENSKRWNPEIQYTSNYYKSNNVEFAVNTEGVYGEPRPIGTRYLTRNL

SEQ ID NO: 721 - protein, 736 aa, synthetic construct
  REGION 1..736: note = source = /note="Description of Artificial Sequence: Synthetic polypeptide"
MAADGYLPDWLEDNLSEGIREWWALKPGAPQPKANQQHQDNARGLVLPGYKYLGPGNGLDKGEPVNAADAAALEHDKAYDQQLKAGDNPYLKYNHADAEFQERLKEDTSFGGNLGRAVFQAKKRLLEPLGLVEEAAKTAPGKKRPVEQSPQEPDSSAGIGKSGAQPAKKRLNFGQTGDTESVPDPQPIGEPPAAPSGVGSLTMASGGGAPVADNNEGADGVGSSSGNWHCDSQWLGDRVITTSTRTWALPTYNNHLYKQISNSTSGGSSNDNAYFGYSTPWGYFDFNRFHCHFSPRDRQRLINNNWGFRPKRLNFKLFNIQVKEVTDNNGVKTIANNLTSTVQVFTDSDYQLPYVLGSAHEGCLPPFPADVFMIPQYGYLTLNDGSQAVGRSSFYCLEYFPSQMLRTGNNFQFSYEFENVPFHSSYAHSQSLDRLMNPLIDQYLYYLSKTINGSGQNQQTLKFSVAGPSNMAVQGRNYIPGPSYRQQRVSTTVTQNNNSEFAWPGASSWALNGRNSLMNPGPAMASHKEGEDRFFPLSGSLIFGKQGTGRDNVDADKVMITNEEEIKTTNPVATESYGQVATNHQSAQAQAQTGWVQNQGILPGMVWQDRDVYLQGPIWAKIPHTDGNFHPSPLMGGFGMKHPPPQILIKNTPVPADPPTAFNKDKLNSFITQYSTGQVSVEIEWELQKENSKRWNPEIQYTSNYYKSNNVEFAVNTEGVYSEPRPIGTRYLTRNL

SEQ ID NO: 722 - protein, 736 aa, synthetic construct
  REGION 1..736: note = source = /note="Description of Artificial Sequence: Synthetic polypeptide"
MAADGYLPDWLEDNLSEGIREWWALKPGAPQPKANQQHQDNARGLVLPGYKYLGPGNGLDKGEPVNAADAAALEHDKAYDQQLKAGDNPYLKYNHADAEFQERLKEDTSFGGNLGRAVFQAKKRLLEPLGLVEEAAKTAPGKKRPVEQSPQEPDSSAGIGKSGAQPAKKRLNFGQTGDTESVPDPQPIGEPPAAPSGVGSLTMASGGGAPVADNNEGADGVGSSSGNWHCNSQWLGDRVITTSTRTWALPTYNNHLYKQISNSTSGGSSNDNAYFGYSTPWGYFDFNRFHCHFSPRDWQRLINNNWGFRPKRLNFKLFNIQVKEVTDNNGVKTIANNLTSTVQVFTDSDYQLPYVLGSAHEGCLPPFPADVFMIPQYGYLTLNDGSQAVGRSSFYCLEYFPSQMLRTGNNFQFSYEFENVPFHSSYAHSQSLDRLMNPLIDQYLYYLSKTINGSGQNQQTLKFSVAGPGNMAVQGRNYIPGPSYRQQRVSTTVTQNNNSEFAWPGASSWALNGRNSLMNPGPAMASHKEGEDRFFPLSGSLIFGKQGTGRDNVDADKVMITNEEEIKTTNPVATESYGQVATNHQSAQAQAQTGWVQNQGILPGMVWQDRDVYLQGPIWAKIPHTDGNFHPSPLMGGFGMKHPPPQILIKNTPVPADPPTAFNKDKLNSFITQYSTGQVSVEIEWELQKENSKRWNPEIQYTSNYYKSNNVEFAVNTEGVYSEPRPIGTRYLTRNL

SEQ ID NO: 723 - protein, 736 aa, synthetic construct
  REGION 1..736: note = source = /note="Description of Artificial Sequence: Synthetic polypeptide"
MAADGYLPDWLEDNLSEGIREWWALKPGAPQPKANQQHQDNARGLVLPGYRYLGPGNGLDKGEPVNAADAAALEHDKAYDQQLKAGDNPYLKYNHADAEFQERLKEDTSFGGNLGRAVFQAKKRLLEPLGLVEEAAKTAPGKKRPVEQSPQEPDSSAGIGKSGAQPAKKRLNFGQTGDTESVPDPQPIGEPPAAPSGVGSLTMASGGGAPVADNNEGADGVGSSSGNWHCDSQWLGDRVITTSTRTWALPTYNNHLYKQISNSTSGGSSNDNAYFGYSTPWGYFDFNRFHCHFSPRDWQRLINNNWGFRPKRLNFKLFNIQVKEVTDNNGVKTVANNLTSTVQVFTDSDYQLPYVLGSAHEGCLPPFPADVFMIPQYGYLTLNDGSQAVGRSSFYCLEYFPSQMLRTGNNFQFSYEFENVPFHSSYAHSQSLDRLMNPLIDQYLYYLSKTINGSGQNQQTLKFSVAGPSNMAVQGRNYIPGPSYRQQRVSTTVTQNNNSEFAWPGASSWALNGRNSLMNPGPAMASHKEGEDRFFPLSGSLIFGKQGTGRDNVDADKVMITNEEEIKTTNPVATESYGQVATNHQSAQAQAQTGWVQNQGILPGMVWQDRDVYLQGPIWAKIPHTDGNFHPSPLMGGFGMKHPPPQILIKNTPVPADPPTAFNKDKLNSFITQYSTGQVSVEIEWELQKENSKRWNPEIQYTSNYYKSNNVEFAVNTEGVYSGPRPIGTRYLTRNL

SEQ ID NO: 724 - protein, 736 aa, synthetic construct; identical to SEQ ID NO: 134
  REGION 1..736: note = source = /note="Description of Artificial Sequence: Synthetic polypeptide"

SEQ ID NO: 725 - protein, 736 aa, synthetic construct
  REGION 1..736: note = source = /note="Description of Artificial Sequence: Synthetic polypeptide"
MAADGYLPDWLEDNLSEGIREWWALKPGAPQPKANQQRQDNARGLVLPGYKYLGPGNGLDKGEPVNAADAAALEHDKAYDQQLKAGGNPCLKYNHADAEFQERLKEDTSFGGNLGRAVFQAKKRLLEPLGLVEEAAKTAPGKKRPVEQSPQEPDSSAGIGRSGAQPAKKRLNFGQTGDTESVPDPQPIGEPPAAPSGVGSLTMASGGGAPVADNNEGADGVGSSSGNWHCDSQWLGDRVITTSTRTWALPTYNNHLYKQISNSTSGGSSNDNAYFGYSTPWGYFDFNRFHCHFSPRDWQRLINNNWGFRPKRLNFKLFNIQVKEVTDNNGVKAIANNLTSTVQVFTDSDYQLPYVLGSAHEGCLPPFPADVFMIPQYGYLTLNDGSQAVGRSSFYCLEYFPSQMLRTGNNFQFSYEFENVPFHSSYAHSQSLDRLMNPLIDQYLYYLSKTIDGSGQNQQTLKFSVAGPSNMAVQGRNYIPGPSYRQQRVSTTVTQNNNSEFAWPGASSWALNGRNSLMDPGPAMASHKEGEDRFFPLSGSLIFGKQGTGRDNVDADKVMITNEEEIKTTNPVATESYGQVATNHQSAQAQAQTGWVQNQGILPGMVWQDRDVYLQGPIWAKIPHTGGNFHPSPLMGGFGMKHPPPQILIKNTPVPADPPTAFNKDKLNSFITQYSTGQVSVEIEWELQKENSKRWNPEIQYTSNYYKSNNVEFAVNTEGVYSEPRPIGTRYLTRNL

SEQ ID NO: 726 - protein, 736 aa, synthetic construct
  REGION 1..736: note = source = /note="Description of Artificial Sequence: Synthetic polypeptide"
MAADGYLPDWLEDNLSEGIREWWALKPGAPQPKANQQHQDNARGLVLPGYKYLGPGNGLDKGEPVNAADAAALEHDKAYDQQLKAGDNPYLKYNHADAEFQERLKEDTSFGGNLGRAVFQAKKRLLEPLGLVEEAAKTAPGKKRPVEQSPQEPDSSAGIGKSGAQPAKKRLNFGQTGDTESVPDPQPIGEPPAAPSGVGSLTMASGGGAPVADNNEGADGVGSSSGNWHCDSQWLGDRVITTSTRTWALPTYNNHLYKQISNSTSGGSSNDNAYFGYSTPWGYFDFNRFHCHFSPRDWQRLINNNWGFRPKRLNFKLFNIQVKEVTDNNGVKTIANNLTSTVQVFTDSDYQLPYVLGSAHEGCLPPFPADVFMIPQYGYLTLNDGSQAVGRSSFYCLEYFPSQMLRTGNNFQFSYEFENVPFHSSYAHSQSLDRLMNPLIDQYLYYLSKTINGSGQNQQTLKFSVAGPSNMAVQGRNYIPGPSYRQQRVSTTVTQNNNSEFAWPGASSWALNGRNSLMNPGPAMASHKEGEDRFFPLSGSLIFGKQGTGRDNVDADKVMITNEEEIKTTNPVATESYGQVATNHQSAQAQAQTGWVQNQGILPGMVWQDRDVYLQGPIWAKIPHTDGNFHPSPLMGGFGMKHPPPQILIKNTPVPADPPTAFNKDKLNSFITQYSTGQVSVEIEWELQKENSKRWNPEIQYTSNYYKPNNVEFAVNTEGVYSEPRPIGTRYLTRNL

SEQ ID NO: 727 - protein, 736 aa, synthetic construct
  REGION 1..736: note = source = /note="Description of Artificial Sequence: Synthetic polypeptide"
MAADGYLPDWLEDNLSEGIREWWALKPGAPQPKANQQHQDNARGLVLPGYKYLGPGNGLDKGEPVNAADAAALEHNKAYDQQLKAGDNPYLKCNHADAEFQERLKEDTSFGGNLGRAVFQAKKRPLEPLGLVEEAAKTAPGKKRPVEQSPQEPDSSAGIGKSGAQPAKKRLNFGQTGDTESVPDPQPIGEPPAAPSGVRSLTMASGGGAPVADNNEGADGVGSSSGNWHCDSQWLGDRVITTSTRTWALPTYNNHLYKQISNSTSGGSSNDNAYLGYSTPWGYFDFNRFHCHFSPRDWQRLINNNWGFRPKRLNFKLFNIQVKEVTDNNGVKTIANNLTSTVQVFTDSDYQLPYVLGSAHEGCLPPFPADVFMIPQYGYLTLNDGSQAVGRSSFYCLEYFPSQMLRTGNNFQFSYEFENVPFHSSYAHSQSLDRLMNPLIDQYLYYLSKTINGSGQNQQTLKFSVAGPSNMAVQGRNYIPGPSYRQQRVSTTVTQNNNSEFAWPGASSWALNGRNSLMNPGPTMASHKEGEDRFFPLSGSLIFGKQGTGRDNVDADKVMITNEEEIKTTNPVATESYGQVATNHQSAQAQAQTGWVQNQGILPGMVWQDRDVYLQGPIWAKIPHTDGNFHPSPLMGGFGMKHPPPQILIKNTPVPADPPTAFNKDKLNSFITQYSTGQVSVEIEWELQKENSKRWNPEIQYTSNYYKSNNVEFAVNTEGVYSEPRPIGTRYLTRNL

SEQ ID NO: 728 - protein, 736 aa, synthetic construct
  REGION 1..736: note = source = /note="Description of Artificial Sequence: Synthetic polypeptide"
MAADGYLPDWLEDNLSEGIREWWALKPGAPQPKANQQHQDNARGLVLPGYKYLGPGNGLDKGEPVNAADAAALVHDKAYDQQLKAGDNPYLKCNHADAEFQERLKEDTSFGGNLGRAVFQAKKRLLEPLGLVEEAAKTAPGKKRPVEQSPQEPDSSAGIGKSGAQPAKKRLNFGQTGDTESVPDPQPIGEPPAAPSGVGSLTMASGGGAPVADNNEGADGVGSSSGNWHCDSQWLGDRVITTSTRTWALPTYNNHLYKQISNSTSGGSSNDNAYLGYSTPWGYFDFNRFHCHFSPRDWQRLINNNWGFRPKRLNFKLFNIQVKEVTDNNGVKTIANNLTSTVQVFTDSDYQLPYVLGSAHEGCLPPFPADVFTIPQYGYLTLNDGSQAVGRSSFYCLEYFPSQMLRTGNNFQFSYEFENVPFHSSYAHSQSLDRLMNPLIDQYLYYLSKTINGSGQNQQTLKFSVAGPSNMAVQGRNYIPGPSYRQQRVSTTVTQNNNSEFAWPGASSWALNGRNSLMNPGPAMASHKEGEDRFFPLSGSLIFGKQGTGRDNVDADKVMITNEEEIKTTNPVATESYGQVATNHQSAQAQAQTGWVQNQGILPGMVWQDRDVYLQGPIWAKIPHTDGNFHPSPLMGGFGMKHPPPQILIKNTPVPADPPTAFNKDKLNSFITQYSTGQVSVEIEWELQKENSKRWNPEIQYTSNYYKSNNVEFAVNTEGVYSEPRPIGPRYLTRNF

SEQ ID NO: 729 - protein, 736 aa, synthetic construct
  REGION 1..736: note = source = /note="Description of Artificial Sequence: Synthetic polypeptide"
MAADGYLPDWLEDNLSEGIREWWALKPGAPQPKANQQHQDNARGLVLPGYKYLGPGNGLDKGEPVNAADAAALEHNKAYDQQLKAGDNPYLKCNHADAEFQERLKEDTSFGGNLGRAVFQAKKRLLEPLGLVEEAAKTAPGKKRPVEQSPQEPDSSAGIGKSGAQPAKKRLNFGQTGDTESVPDPQPIGEPPAAPSGVRSLTMASGGGAPVADNNEGADGVGSSSGNWHCDSQWLGDRVITTSTRTWALPTYNNHLYKQISNSTSGGSSNDNAYLGYSTPWGYFDFNRFHCHFSPRDWQRLINNNWGFRPKRLNFKLFNIQVKEVTDNNGVKTIANNLTSTVQVFTDSDYQLPYVLGSAHEGCLPPFPADVFMIPQYGYLTLNDGSQAVGRSSFYCLEYFPSQMLRTGNNFQFSYEFENVPFHSSYAHSQSLDRLMNPLIDQYLYYLSKTINGSGQNQQTLKFSVAGPSNMAVQGRNYIPGPSYRQQRVSTTVTQNNNSEFAWPGASSWALNGRNSLMNPGPAMASHKEGEDRFFPLSGSLIFGKQGTGRDNVDADKVMITNEEEIKTTNPVATESYGQVATNHQSAQAQAQTGWVQNQGILPGMVWQDRDVYLQGPIWAKIPHTDGNFHPSPLMGGFGMKHPPPQILIKNTPVPADPPTAFNKDKLNSFITQYSTGQVSVEIEWELQKENSKRWNPEIQYTSNYYKSNNVEFAVNTEGVYSEPRPIGTRYLTRNL

SEQ ID NO: 730 - protein, 736 aa, synthetic construct
  REGION 1..736: note = source = /note="Description of Artificial Sequence: Synthetic polypeptide"
MAADGYLPDWLEDNLSEGIREWWALKPGAPQPKANQQHQDNARGLVLPGYKYLGPGNGLDKGEPVNAADAAALEHDKAYDQQLKAGDNPYLKCNHADAEFQERLKEDTSFGGNLGRAVFQAKKRLLEPLGLVEEAAKTAPGKKRPVEQSPQEPDSSAGIGKSGAQPAKKRLNFGQTGDTESVPDPQPIGEPPAAPSGVGSLTMASGGGAPVADNNEGADGVGSSSGNWHCDSQWLGDRVITTSTRTWALPTYNNHLYKQISNSTSGGSSNDNAYLGYSTPWGYFDFNRFHCHFSPRDWQRLINNNWGFRPKRLNFELFNIQVKEVTDNNGVKTIANNLTSTVQVFTDSDYQLPYVLGSAHEGCLPPFPADVFMIPQYGYLTLNDGSQAVGRSSFYCLEYFPSQMLRTGNNFQSSYEFENVPFHSSYAHSQSLDRLMNPLIDQYLYYLSKTINGSGQNQQTLKFSVAGPSNMAVQGRNYIPGPSYRQQRASTTVTQNNNSEFAWPGASSWALNGRNSLMNPGPAMASHKEGEDRFFPLSGSLIFGKQGTGRDNVDADKVMITNEEEIKTTNPVATESYGQVATNHQSAQAQAQTGWVQNQGILPGMVWQDRDVYLQGPIWAKIPHTDGNFHPSPLMGGFGMKHPPPQILIKNTPVPADPPTAFNKDKLNSFITQYSTGQVSVEIEWELQKENSKRWNPEIQYTSNYYKSNNVEFAVNTEGVYSEPRPIGTRYLTRNL

SEQ ID NO: 731 - protein, 736 aa, synthetic construct
  REGION 1..736: note = source = /note="Description of Artificial Sequence: Synthetic polypeptide"
MAADGYLPDWLEDNLSEGIREWWALKPGAPQPKANQQHQDNARGLVLPGYKYLGPGNGLDKGEPVNAADAAALEHDKAYDQQLKAGDNPYLKCNHADAEFQERLKEDTSFGGNLGRAVFQAKKRLLEPLGLVEEAAKTAPGKKRPVEQSPQEPDSSAGIGKSGAQPAKKRLNFGQTGDTESVPDPQPIGEPPAAPPGVGSLTMASGGGAPVADNNEGADGVGSSSGNWHCDSQWLGDRVITTSTRTWALPTYNNHLYKQISNSTSGGSSNDNAYLGYSTPWGYFDFNRFHCHFSPRDWQRLINNNWGFRPKRLNFKLFNIQVKEVTDNNGVKTIANNLTSTVQVFTDSDYQLPYVLGSAHEGCLPPFPADVFMIPQYGYLTLNDGSQAVGRSSFYCLEYFPSQMLRTGNNFQFSYEFENVPFHSSYAHSQSLDRLMNPLIDQYLYYLSKTISGSGQNQQTLKFSVAGPSNMAVQGRNYIPGPSYRQQRVSTTVTQNNSSEFAWPGASSWALNGRNSLMNPGPAMASHKEGEDRFFPLSGSLIFGKQGTGRDNVDADKVMITNEEEIKTTNPVATESYGQVATNHQSAQAQAQTGWVQNQGILSGMVWQDRDVYLQGPIWAKIPHTDGNFHPSPLMGGFGMKHPPPQILIKNTPVPADPPTAFNKDKLNSFITQYSTGQVSVEIEWELQKENSKRWNPEIQYTSNYYKSNNVEFAVNTEGVYSEPRPIGTRYLTRNL

SEQ ID NO: 732 - protein, 736 aa, synthetic construct
  REGION 1..736: note = source = /note="Description of Artificial Sequence: Synthetic polypeptide"
MAADGYLPDWLEDNLSEGIREWWALKPGAPQPKANQQHQDNARGLVLPGYKYLGPGNGLDKGEPVNAADAAALEHDKAYDQQLKAGDNPYLKCNHADAEFQERLKEDTSFGGNLGRAVFQAKKRLLEPLGLVEEAAKTAPGKKRPVEQSPQEPDSSAGIGKSGAQPAKKRLNFGQTGDTESVPDPQPIGEPPAAPSGVGSLTMASGGGAPVADNNEGADGVGSSSGNWHCDSQWLGDRVITTSTRTWALPTYNNHLYKQISNSTSGGSSNDNAYLGYSTPWGYFDFNRFHCHFSPRDWQRLINNNWGFRPKRLNFKLFNIQVKEVTDNNGVKTIANNLTSTVQVFTDSDYQLPYVLGSAHEGCLPPFPADVFMIPQYGYLTLNDGSQAVGRSSFYCLEYFPSQMLRTGNNFQFSYEFENVPFHSSYAHSQSLDRLMNPLIDQYLYYLSKTINGSGQNQQTLKFSVAGPSNMAVQGRNYIPGPSYRQQRVSTTVTQNNNSEFAWPGASSWALNGRNSLMNPGPAMASHKEGEDRFFPLSGSLIFGKQGTGRDNVDADKVMITNEEEIKTTNPVATESYGQVATNHQSAQAQAQTGWVQNQGILPGMVWQDRDVYLQGPIWAKIPHTDGNFHPSPLMGGFGMKHPPPQILIKNTPVPADPPTAFNKDKLNSFITQYSTGQVSVEIEWELQKENSKRWNPEIQYTSNYYKSNNVEFAVNTEGVYSEPRPIGTRYLTRNL

SEQ ID NO: 733 - protein, 736 aa, synthetic construct; identical to SEQ ID NO: 732
  REGION 1..736: note = source = /note="Description of Artificial Sequence: Synthetic polypeptide"

SEQ ID NO: 734 - protein, 736 aa, synthetic construct
  REGION 1..736: note = source = /note="Description of Artificial Sequence: Synthetic polypeptide"
MAADGYLPDWLEDNLSEGIREWWALKPGAPQPKANQQHQDNARGLVLPGYKYLGPGNGLDKGEPVNAADAAALEHDKAYDQQLKAGDNPYLKCNHADAEFQERLKEDTSFGGNLGRAVFQAKKRLLEPLGLVEEAAKTAPGKKRPVEQSPQEPDSSAGIGKSGAQPAKKRLNFGQTGDTESVPDPQPIGEPPAAPSGVGSLTMASGGGAPVADNNEGADGVGSSSGNWHCDSQWLGDRVITTSTRTWALPTYNNHLYKQISNSTSGGSSNDNAYLDYSTPWGYFDFNRFHCHFSPRDWQRLINNNWGFRPKRLNFKLFNIQVKEVTDNNGVKTIANNLTSTVQVFTDSDYQLPYVLGSAHEGCLPPFPADVFMIPQYGYLTLNDGSQAVGRSSFYCLEYFPSQMLRTGNNFQFSYEFENVPFHSSYAHSQSLDRLMNPLIDQYLYYLSKTINGSGQNQQTLKFSVAGPSNMAVQGRNYIPGPSYRQQRVSTTVTQNNNSEFAWPGASSWALNGRNSLMNPGPAMASHKEGEDRFFPLSGSLIFGKQGTGRDNVDADKVMITNEEEIKTTNPVATESYGQVATNHQSAQAQAQTGWVQNQGILPGMVWQGRDVYLQGPIWAKIPHTDGNFHPSPLMGGFGMKHPPPQILIKNTPVPADPPTAFNKDKLNSFITQYSTGQVSVEIEWELQKENSKRWNPEIQYTSNYYKSNNVEFAVNTEGVYSEPRPIGTRYLTRNL

SEQ ID NO: 735 - protein, 736 aa, synthetic construct; identical to SEQ ID NO: 732
  REGION 1..736: note = source = /note="Description of Artificial Sequence: Synthetic polypeptide"

SEQ ID NO: 736 - protein, 736 aa, synthetic construct
  REGION 1..736: note = source = /note="Description of Artificial Sequence: Synthetic polypeptide"
MAADGYPPDWLEDNLSEGIREWWALKPGAPQPKANQQHQDNARGLVLPGYKYLGPGNGLDKGEPVNAADAAALEHDKAYDQQLKAGDNPHLKYNHADAEFQERLKEDTSFGGNLGRAVFQAKKRLLEPLGLVEEAAKTAPGKKRPVEQSPQEPDSSAGIGKSGAQPAKKRLNFGQTGDTESVPDPQPIGEPPAAPSGVGSLTMASGGGAPVADNNEGADGVGSSSGNWHCDSQWLGDRVITTSTRTWALPTYNNHLYKQISNSTSGGSSNDNAYFGYSTPWGYFDFNRFHCHFSPRDWQRLINNNWGFRPKRLNFKLFNIQVKEVTDNNGVKTIANNLTSTVQVFTDSDYQLPYVLGSAHEGCLPPFPADVFMIPQYGYLTLNDGSQAVGRSSFYCLEYFPSQMLRTGNNFQFSYEFENVPFHSSYAHSQSLDRLMNPLIDQYLYYLSKTINGSGQNQQTLKFSVAGPSNMAVQGRNYIPGPSYRQQRVSTTVTQNNNSEFAWPGASSWALNGRNSLMNPGPAMASHKEGEDRFFPLSGSLIFGKQGTGRDNVDADKVMITNEEEIKTTNPVATESYGQVATNHQSAQAQAQTGWVQNQGILPGMVWQDRDVYLQGPIWAKIPHTDGNFHPSPLMGGFGVKHPPPQILIKNTPVPADPPTAFNKDRLNSFITQYSTGQVSVEIEWELQKENSKRWNPEIQYTSNYYKSNNVEFAVNTEGVYSEPRPIGTRYLTRNL

SEQ ID NO: 737 - protein, 736 aa, synthetic construct
  REGION 1..736: note = source = /note="Description of Artificial Sequence: Synthetic polypeptide"
MAADGYLPDWLEDNLSEGIREWWALKPGAPQPKANQQHQDNARGLVLPGYKYLGPGNGLDKGEPVNAADAAALEHDKAYDQQLKAGDNPYLKYNHADAEFQERLKEDTSFGGNLGRAVFQAKKRLLEPLGLVEEAAKTAPGKKRPVEQSPQEPDSSAGIGKSGAQPAKKRLNFGQTGDTESVPDPQPIGEPPAAPSGVGSLTMASGGGAPVADNNEGADGVGSSSGNWHCDSQWLGDRVITTSTRTWALPTYNNHLYKQISNSTSGGSSNDNAYFGYSTPWGYFDFNRFHCHFSPRDWQRLINNNWGFRPKRLNFKLFNIQVKEVTDNNGVKTIANNLTSTVQVFTDSDYQLPYVLGSAHEGCLPPFPADVFMIPQYGYLTLNDGSQAVGRSSFYCLEYFPSQMLRTGNNFQFSYEFENVPFHSSYAHSQSLDRLMNPLIDQYLYYLSKTINGSGQNQQTLKFSVAGPSNMAVQGRNYIPGPSYRQQRVSTTVTQNNNSEFAWPGASSWALNGRNSLMNPGPAMASHKEGEDRFFPLSGSLIFGKQGTGRDNVDADKVMITNEEEIKTTNPVATESYGQVATNHQSAQAQAQTGWVQNQGILPGMVWQDRDVYLQGPIWAKIPHTDGNFHPSPLMGGFGVKHPPPQILIKNTPVPADPPTAFNKDKLNSFITQYSTGQVSVEIEWELQKENSKRWNPEIQYTSNYYKSNNVEFAVNTEGVYSEPRPIGTRYLTRNL

SEQ ID NO: 738 - protein, 736 aa, synthetic construct
  REGION 1..736: note = source = /note="Description of Artificial Sequence: Synthetic polypeptide"
MAADGYLPDWLEDNLSEGIREWWALKPGAPQPKANQQHQDNARGLVLPGYKYLGPGNGLDKGEPVNAADAAALEHDKAYDQQLKAGDNPYLKYNHADAEFQERLKEDTSFGGNLGRAVFQAKKRLLEPLGLVEEAAKTAPGKKRPVEQSPQEPDSSAGIGKSGAQPAKKRLNFGQTGDTESVPDPQPIGEPPAAPSGVGSLTMASGGGAPVADNNEGADGVGSSSGNWHCDSQWLGDRVITTSTRTWALPTYNNHLYKQISNSTSGGSSNDNAYFGYSTPWGYFDFNRFHCHFSPRDWQRLTNNNWGFRPKRLNFKLFNIQVKEVTDNNGVKTIANNLTSTVQVFTDSDYQLPYVLGSAHEGCLPPFPADVFMIPQYGYLTLNDGSQAVGRSSFYCLEYIPSQMLRTGNNFQFSYEFENVPFHSSYAHSQSLDRLMNPLIDQYLYYLSKTINGSGQNQQTLKFSVAGPSNMAVQGRNYIPGPSYRQQRVSTTVTQNNNSEFAWPGASSWALNGRNSLMNPGPAMASHKEGEDRFFPLSGSLIFGKQGTGRDNVDADKVMITNEEEIKTTNPVATESYGQVATNHQSAQAQAQTGWVQNQGILPGMVWQDRDVYLQGPIWAKIPHTDGNFHPSPLMGGFGVKHPPPQILIKNTPVPADPPTAFNKDKLNSFITQYSTGQVSVEIEWELQKENSKRWNPEIQYTSNYYKSNNVEFAVNTEGVYSEPRPIGTRYLTRNL

SEQ ID NO: 739 - protein, 736 aa, synthetic construct
  REGION 1..736: note = source = /note="Description of Artificial Sequence: Synthetic polypeptide"
MAADGYLPDWLEDNLSEGIREWWALKPGAPQPKANQQHQDNARGLVLPGYKYLGPGNGLDKGEPVNAADAAALEHDKAYDQQLKAGDNPYLKYNHADAEFQERLKEDTSFGGNLGRAVFQAKKRLLEPLGLVEEAAKTAPGKKRPVEQSPQEPDSSAGIGKSGAQPAKKRLNFGQTGDTESVPDPQPIGEPPAAPSGVGSLTMASGGGAPVADNNEGADGVGSSSGNWHCDSQWLGDRVITTSTRTWALPTYNNHLYKQISNSTSGGSSNDNAYFGYSTPWGYFDFNRFHCHFSPRDWQRLINNNWGFRPKRLNFKLFNIQVKEVTDNNGVKTIANNLTSTVQVFTDSDYQLPYVLGSAHEGCLPPFPADVFMIPQYGYLTLNDGSQAVGRSSFYCLEYFPSQMLRTGNNFQFSYEFENVPFHSSYAHSQSLDRLMNPLIDQYLYYLSKTINGSGQNQQTLKFSVAGPSNMAVQGRNYIPGPSYRQQRVSTTVTQNNNSEFAWPGASSWALNGRNSLMNPGPAMASHKEGEDRFFPLSGSLISGKQGTGRDNVDANKVMITNEEEIKTTNPVATESYGQVATNHQSAQAQAQTGWVQNQGILPGMVWQDRDVYLQGPIWAKIPHTDGNFHPSPLMGGFEMKHPPPQILIKNTPVPADPPTAFNKDKLNSFITQYSTGQVSVEIEWELQKENSKRWNPEIQYTSNYYKSNNVEFAVNTEGVYSEPRPIGTRYLTRNL

SEQ ID NO: 740 - protein, 736 aa, synthetic construct
  REGION 1..736: note = source = /note="Description of Artificial Sequence: Synthetic polypeptide"
MAADGYLPDWLEDNLSEGIREWWALKPGAPQPKANQQHQDNARGLVLPGYKYLGPGNGLDKGEPVNAADAAALEHDKAYDQQLKAGDNPYLKYNHADAEFQERLKEDTSFGGNLGRAVFQAKKRLLEPLGLVEEAAKTAPGKKRPVEQSPQEPDSSAGIGKSGAQPAKKRLNFGQTGDTESVPDPQPIGEPPAAPSGVGSLTIASGGGAPVADNNEGADGVGSSSGNWHCDSQWLGDRVITTSTRTWALPTYNNHLYKRISNSTSGGSSNDNAYFGYSTPWGYFDFNRFHCHFSPRDWQRLINNNWGFRPKRLNFKLFNIRVKEVTDNNGVKTITNNLTSTVQVFTDSDYQLPYVLGSAHEGCLPPFPADVFMIPQYGYLTLNDGSQAVGRSSFYCLEYFPSQMLRTGNNFQFSYEFENVPFHSSYAHSQSLDRLMNPLIDQYLYYLSKTINGSGQNQQTLKFSVAGPSNMAVQGRNYIPGPSYRQQRVSTTVTRNNNSEFAWPGASSWALNGRNSLMNPGPAMASHKEGEDRFFPLSGSLIFGKQGTGRDNVDADKVMITNEEEIKTTNPVATESYGQVATNHQSAQAQAQTGWVQNQGILPGMVWQDRDVYLQGPIWAKIPHTDGNFHPSPLMGGFGVKHPPPQILIKNTPVPADPPTAFNKDKLNSFITQYSTGQVSVEIEWELQKENSKRWNPEIQYTSNYYKSNNVEFAVNTEGVYSEPRPIGTRYLTRNL

SEQ ID NO: 741 - protein, 736 aa, synthetic construct
  REGION 1..736: note = source = /note="Description of Artificial Sequence: Synthetic polypeptide"
MAADGYLPDWLEDNLSEGIREWWALKPGAPQPKANQQHQDNARGLVLPGYKYLGPGNGLDKGEPVNAADAAALEHDKAYDQQLKAGDNPYLKYNHADAEFQERLKEDTSFGGNLGRAVFQAKKRLLEPLGLVEEAAKTAPGKKRPVEQSPQEPDSSAGIGKSGAQPAKKRLNFGQTGDTEPVPDPQPIGEPPAAPSGVGSLTMASGGGAPVADNNEGADGVGSSSGNWHCDSQWLGDRVITTSTRTWALPTYNNHLYKQISNSTSGGSSNDNAYFGYSTPWGYFDFNRFHCHFSPRDWQRLINNNWGFRPKRLNFKLFNIQVKEVTDNNGVKTIANNLTSTVQVFTDSDYQLPYVLGSAHEGCLPPFPAGVFMIPQYGYLTLNDGSQAVGRSSFYCLEYFPSQMLRTGNNFQFSYEFENVPFHSSYAHSQSLDRLMNPLIDQYLYYLSKTINGSGQNQQTLKFSVAGPSNMAVQGRNYIPGPSYRQQRVSTTATQNNNSEFAWPGASSWALNGRNSLMNPGPAMASHKEGEDRFFPLSGSLIFGKQGTGRDNVDADKVMITNEEEIKTTNPVATESYGQVATNHQSAQAQAQTGWVQNQGILPGMVWQDRDVYLQGPIWAKIPHTDGNFHPSPLMGGFGMKHPPPQILIKNTPVPADPPTAFNKDKLNSFITQYSTGQVSVEIEWELQKENSKRWNPEIQYTSNYYKSNNVEFAVNTEGVYSEPRPIGTRYLTRNL

SEQ ID NO: 742 - protein, 736 aa, synthetic construct
  REGION 1..736: note = source = /note="Description of Artificial Sequence: Synthetic polypeptide"
MAADGYLPDWLEDNLSEGIREWWALKPGAPQPKANQQHQDNARGLVLPGYKYLGPGNGLDKGEPVNAADAAALEHDKAYDQQLKAGDNPYLKYNHADAGFQERLKEDTSFGGNLGRAVFQAKKRLLEPLGLVEEAAKTAPGKKRPVEQSPQEPDSSAGIGKSGAQPAKKRLNFGQTGDTESVPVPQPIGEPPAAPSGVGSLTMASGGGAPVADNNEGADGVGSSSGNWHCDSQWLGDRVITTSTRTWALPTYNNHLYKQISNSTSGGSSNDNAYFGYSTPWGYFDFNRFHCHFSPRDWQRLINNNWGFRPKRLNFKLFNIQVKEVTDNNGVKTIANNLTSTVQVFTDSDYQLPYVLGSAHEGCLPPFPADVFMIPQYGYLTLNDGSQAVGRSSFYCLEYFPSQMLRTGNNFQFSYEFENVPFHSSYAHSQSLDRLMNPLIDQYLYYLSKTINGSGQNQQTLKFSVAGPSNMAVQGRNYIPGPSYRQQRVSTTVTQNNNSEFAWPGASSWALNGRNSLMNPGPAMASHKEGEDRFFPLSGSLIFGKQGAGRDNVDADKVMITNEEEIKTTNPVATESYGQVATNHQSAQAQAQTGWVQNQGILPGMVWQDRDVYLQGPIWAKIPHTDGNFHPSPLMGGFGMKHPPPQILIKNTPVPADPPTAFNKDKLNSFITQYSTGQVSVEIEWELQKENSKRWNPEIQYTSNYYKSNNVEFAVNTEGVYSEPRPIGTRYLTRNL

SEQ ID NO: 743 - protein, 736 aa, synthetic construct
  VARIANT 126: note = Any naturally occurring amino acid
  REGION 1..736: note = source = /note="Description of Artificial Sequence: Synthetic polypeptide"
MAADGYLPDWLEDNLSEGIRERWALKPGAPQPKANQQHQDNARGLVLPGYKYLGPGNGLDKGEPVNAADAAALEHDKAYDQQLKAGDNPYLKYNHADAEFQERLKEDTSFGGNLGRAVFQAKKRLXEPLGLVEEAAKTAPGKKRPVEQSPQEPDSSAGIGKSGAQPAKKRLNFGQTGDTESVPDPQPIGEPPAAPSGVGSLTMASGGGAPVADNNEGADGVGSSSGNWHCDSQWLGDRVITTSTRTWALPTYNNHLYKQISNSTSGGSSNDNAYFGYSTPWGYFDFNRFHCHFSPRDWQRLINNNWGFRPKRLNFKLFNIQVKEVTDNNGVKTIANNLTSTVQVFTDSDYQLPYVLGSAHEGCLPPFPADVFMIPQYGYLTLNDGSQAVGRSSFYCLEYFPSQMLRTGNNFQFSYEFENVPFHSSYAHSQSPDRLMNPLIDQYLYYLSKTINGSGQNQQTLKFSVAGPSNMAVQGRNYIPGPSYRQQRVSTTVTQNNNSEFAWPGASSWALNGRNSLMNPGPAMASHKEGEDRFFPLSGSLIFGKQGTGRDNVDADKVMITNEEEIKTTNPVATESYGQVATNHQSAQAQAQTGWVQNQGILPGMVWQDRDVYLQGPIWAKIPHTDGNFHPSPLMGGFGVKHPPPQILIKNTPVPADPPTAFNKDKLNSFITQYSTGQVSVEIEWELQKENSKRWNPEIQYTSNYYKSNNVEFAVNTEGVYSEPRPIGTRYLTRNL

SEQ ID NO: 744 - protein, 736 aa, synthetic construct
  REGION 1..736: note = source = /note="Description of Artificial Sequence: Synthetic polypeptide"
MAADGYLPDWLEDNLSEGIREWWALKPGAPQPKANQQHQDNARGLVLPGYKYLGPGNGLDKGEPVNAADAAALEHDKAYDQQLKAGDNPYLKYNHADAEFQERLKEDTSFGGNLGRAVFQAKKRLLEPLGLVEEAAKTAPGKKRPVEQSPQEPDSSAGIGKSGAQPAKKRLNFGQTGDTESVPDPQPIGEPPAAPSGVGSLTMASGGGAPVADNNEGADGVGSSSGNWHCDSQWLGDRVITTSTRTWALPTYNNHLYKQISNSTSGGSSNDNAYLGYSTPWGYFDFNRFHCHFSPRDWQRLINNNWGFRPKRLNFKLFNIQVKEVTDNNGVKTIANNLTSTVQVFTDSDYQLPYVLGSAHEGCLPPFPADVFMIPQYGYLTLNDGSQAVGRSSFYCLEYFPSQMLRTGNNFQFSYEFENVPFHSSYAHSQSLDRLMNPLIDQYLYYLSKTINGSGQNQQTLKFSVAGPSNMAVQGRNYIPGPSYRQQRVSTTVTQNNNSEFAWPGASSWALNGRNSLMNPGPAMASHKEGEDRFFPLSGSLIFGKQGTGRDNVDADKVMITNEEEIKTTNPVATESYGQVATNHQSAQAQAQTGWVQNQGILPGMVWQDRDVYLQGPIWAKIPHTDGNFHPSPLMGGFGMKHPPPQILIKNTPVPADPPTAFNKDKLNSFITQYSTGQVSVEIEWELQKENSKRWNPEIQYTSNYYKSNNVEFAVNTEGVYSEPRPIGTRYLTRNL

SEQ ID NO: 745 - protein, 736 aa, synthetic construct
  REGION 1..736: note = source = /note="Description of Artificial Sequence: Synthetic polypeptide"
MAADGYLPDWLEDNLSEGIREWWALKPGAPQPKANQQHQDNARGLVLPGYKYLGPGNGLDKGEPVNAADAAALEHDKAYDQQLKAGDNPYLKYNHADAEFQERLKEDTSFGGNLGRAVFQAKKRLLEPLGLVEEAAKTAPGKKRPVEQSPQEPDSSAGIGKSGAQPAKKRLNFGQTGDTESVPDPQPIGEPPAAPSGVGSLTMASGGGAPVADNNEGADGVGSSSGNWHCDSQWLGDRVITTSTRTWALPTYNNHLYKQISNSTSGGSSNDNAYFGYSTPWGYFDFNRFHCHFSPRDWQRLINNNWGFRPKRLNFKLFNIQVKEVTDNNGVKTIANNLTSTVQVFTDSDYQLPYVLGSAHEGCLPPFPADVFMIPQYGYLTLNDGSQAVGRSSFYCLEYFPSQMLRTGNNFQFSYEFENVPFHSSYAHSQSLDRLMNPLIDQYLYYLSKTINGSGQNQQTLKFSVAGPSNMAVQGRNYIPGPSYRQQRVSTTVTQNNNSEFAWPGASSWALNGRNSLMNPGPAMASHKEGEDRFFPLSGSLIFGKQGTGRDNVDADKVMITNEEEIKTTNPVATESYGQVATNHQSAQAQAQTGWVQNQGILPGMVWQDRDVYLQGPIWAKIPHTDGNFHPSPLMGGFGMKHPPPQILIKNTPVPADPPTAFNKDKLDSFITQYSTGQVSVEIEWELQKENSKRWNPVIQYTSNYYKSNNVEFAVNTEGVYSEPRPIGTRYLTRNL

SEQ ID NO: 746 - protein, 736 aa, synthetic construct
  REGION 1..736: note = source = /note="Description of Artificial Sequence: Synthetic polypeptide"
MAADGYLPDWLEDNLSEGIREWWDLKPGAPKPKANQQKQDDGRGLVLPGYKYLGPFNGLDKGEPVNAADAAALEHDKAYDQQLKAGDNPYLRYNHADAEFQERLQEDTSFGGNLGRAVFQAKKRVLEPLGLVEEGAKTAPGKKRPVEQSPQEPDSSSGIGKTGQQPAKKRLNFGQTGDSESVPDPQPLGEPPATPAAVGPTTMASGGGAPMADNNEGVDGVGNASGNWHCDSTWLGDRVITTSTRTWALPTYNNHLYKQISSASTGASNDNHYFGYSTPWGYFDFNRFHCHFSPRDWQRLINNNWGFRPKRLNFKLFNIQVKEVTTNDGVTTIANNLTSTVQVFSDSEYQLPYVLGSAHQGCLPPFPADVFMIPQYGYLTLNNGSQAVGRSSFYCLEYFPSQMLRTGNNFTFSYTFEEVPFHSSYAHSQSLDRLMNPLIDQYLYYLNRTQNQSGSAQNKDLLFSRGSPAGMSVQPKNWLPGPCYRQQRVSKTKTDNNNSNFTWTGASKYNLNGRESIINPGTAMASHKDDEDKFFPMSGVMIFGKESAGASNTALDNVMITDEEEIKATNPVATERFGTVAVNFQSSSTDPATGDVHAMGALPGMVWQDRDVYLQGPIWAKIPHTDGHFHPSPLMGGFGLKNPPPQILIKNTPVPANPPAEFSATKLASFITQYSTGQVSVEIEWELQKENSKRWNPEVQYTSNYAKSANVDFTVDNNGLYTEPRPIGTRYLTRPL

SEQ ID NO: 747 - protein, 736 aa, synthetic construct
  REGION 1..736: note = source = /note="Description of Artificial Sequence: Synthetic polypeptide"
MAADGYLPDWLEDNLSEGIREWWDLKPGAPKPKANQQKQDDGRGLVLPGYKYLGPFNGLDKGEPVNAADAAALEHDKAYDQQLKAGDNPYLRYNHADAEFQERLQEDTSFGGNLGRAVFQAKKRVLEPLGLVEEGAKTAPGKRRPVEQSPQEPDSSSGIGKTGQQPAKKRLNFGQTGDSESVPDPQPLGEPPATPAAVGPTTMASGGGAPMADNNEGADGVGNASGNWHCDSTWLGDRVITTSTRTWALPTYNNHLYKQISSASTGASNDNHYFGYSTPWGYFDFNRFHCHFSPRDWQRLINNNWGFRPKRLNFKLFNIQVKEVTTNDGVTTIANNLTSTVQVFSDSEYQLPYVLGSAHQGCLPPFPADVFMIPQYGYLTLNNGSQAVGRSSFYCLEYFPSQMLRTGNNFTFSYTFEEVPFHSSYAHSQSLDRLMNPLIDQYLYYLNRTQNQSGSAQNKDLLFSRGSPAGMSVQPKNWLPGPCYRQQRVSKTKTDNNNSNFTWTGASKYNLNGRESIINPGTAMASHKDDEDKFFPMSGVMIFGKESAGASNTALDNVMITDEEEIKATNPVATERFGTVAVNFQSSSTDPATGDVHAMGALPGMVWQDRDVYLQGPIWAKIPHTDGHFHPSPLMGGFGLKNPPPQILIKNTPVPANPPAEFSATKFASFITQYSTGQVSVEIEWELQKENSKRWNPEVQYTSNYAKSANVDFTVDNNGLYTEPRPIGTRYLTRPL

SEQ ID NO: 748 - protein, 736 aa, synthetic construct
  REGION 1..736: note = source = /note="Description of Artificial Sequence: Synthetic polypeptide"
MAADGYLPDWLEDNLSEGIREWWDLKPGAPKPKANQQKQDDGRGLVLPGYKYLGPFNGLDKGEPVNAADAAALEHDKAYDQQLKAGDNPYPRYNHADAEFQERLQEDTSFGGNLGRAVFQAKKRVLEPLGLVGEGAKTAPGKKRPVEQSPQEPDSSSGIGKTGQQPAKKRLNFGQTGDSESVPDPQPLGEPPATPAAVGPTTMASGGGAPMADNNEGADGVGNASGNWHCDSTWLGDRVITTSTRTWALPTYNNHLYKQISSASTGASNDNHYFGYSTPWGYFDFNRFHCHFSPRDWQRLINNNWGFRPKRLNFKLFNIQVKEVTTNDGVTTIANNLTSTVQVFSDSEYQLPYVLGSAHQGCLPPFPADVFMIPQYGYLTLNNGSQAVGRSSFYCLEYFPSQMLRTGNNFTFSYTFEEVPFHSSYAHSQSLDRLMNPPIDQYLYYLNRTQNQSGSAQNKDLLFSRGSPAGMSVQPKNWLPGPCYRQQRVSKTKTDNNNSNFTWTGASKYNLNGRESIINPGTAMASHKDDEDKFFPMSGVMIFGKESAGASNTALDNVMITDEEEIKATNPVATERFGTVAVNFQSSSTDPATGDVHAMGALPGMVWQDRDVYLQGPIWAKIPHTDGHFHPSPLMGGFGLKNPPPQILIKNTPVPANPPAEFSATKFASFITQYSTGQVSVEIEWELQKENSKRWNPEVQYTSNYAKSANVDFTVDNNGLYTEPRPIGTRYLTRPL

SEQ ID NO: 749 - protein, 736 aa, synthetic construct
  REGION 1..736: note = source = /note="Description of Artificial Sequence: Synthetic polypeptide"
MAADGYLPDWLEDNLSEGIREWWDLKPGAPKPKANQQKQDDGRGLVLPGYKYLGPFNGLDKGEPVNAADAAALEHDKAYDQQLKAGDNPYLRYNHADAEFQERLQEDTSFGGNLGRAVFQAKKRVLEPLGLVEEGAKTAPGKKRPVEQSPQEPDSSSGIGKTGQQPAKKRLNFGQTGDSESVPDPRPLGEPPATPAAVGPTTMASGGGAPMADNNEGADGVGNASGNWHCDSTWLGDRVITTSTRTWALPTYNNHLYKQISSASTGASNDNHYFGYSTPWGYFDFNRFHCHFSPRDWQRLINNNWGFRPKRLNFKLFNIQVKEVTTNDGVTTIANNLTSTVQVFSDSEYQLPYVLGSAHQGCLPPFPADVFMIPQYGYLTLNNGSQAVGRSSFYCLEYFPSQMLRTGNNFTFSYTFEEVPFHSSYAHSQSLDRLMNPLIDQYLYYLNRTQNQSGSAQNKDLLFSRGPPAGMSVQPKNWLPGPCYRQQRVSKTKTDNNNSNFTWTGASKYNLNGRESIINPGTAMASHKDDEDKFFPMSGVMIFGKESAGASNTALDNVMITDEEEIKATNPVATERFGTVAVNFQSSSTDPATGDVHAMGALPGMVWQDRDVYLQGPIWAKIPHTDGHFHPSPLMGGFGLKNPPPQILIKNTPVPANPPAEFSATKFASFITQYSTGQVSVEIEWELQKENSKRWNPEVQYTSNYAKSANVDFTVDNNGLYTEPRPIGTRYLTRPL

SEQ ID NO: 750 - protein, 736 aa, synthetic construct
  REGION 1..736: note = source = /note="Description of Artificial Sequence: Synthetic polypeptide"
MAADGYLPDWLEDNLSEGIREWWDLKPGAPKPKANQQKQDDGRGLVLPGYKYLGPFNGLDKGEPVNAADAAALEHDKAYDQQLKAGDNPYLRYNHADAEFQERLQEDTSFGGNLGRAVFQAKKRVLEPLGLVEEGAKTAPGKKRPVEQSPQEPDSSSGIGKTGQQPAKKRLNFGQTGGSESVPDPQPLGEPPATPAAVGPTTMASGGGAPMADNNEGADGVGNASGNWHCDSTWLGDRVITTSTRTWALPTYNNHLYKQISSASTGASNDNHYFGYSTPWGYFDFNRFHCHFSPRDWQRLINNNWGFRPKRLNFKLFNIQVKEVTTNDGVTTIANNLTSTVQVFSDSEYQLPYVLGSAHQGCLPPFPADVFMIPQYGYLTLNNGSQAVGRSSFYCLEYFPSQMLRTGNNFTFSYTFEEVPFHSSYAHSQSLDRLMNPPIDQYLYYLNRTQNQSGSAQNKDLLFSRGSPAGMSVQPKNWLPGPCYRQQRVSKTKTDNNNSNFTWTGASKYNLNGRESIINPGTAMASHKDDEDKFFPMSGVMIFGKESAGASNTALDNVMITDEEEIKATNPVATERFGTVAVNFQSSSTDPATGDVHAMGALPGMVWQDRDVYLQGPIWAKIPHTDGHFHPSPLMGGFGLKNPPPQILIKNTPVPANPPAEFSATKFASFITQYSTGQVSVEIEWELQKENSKRWNPEVQYTSNYAKSANVDFTVDNNGLYTEPRPIGTRYLTRPL

SEQ ID NO: 751 - protein, 736 aa, synthetic construct
  REGION 1..736: note = source = /note="Description of Artificial Sequence: Synthetic polypeptide"
MAADGYLPDWLEDNLSEGIREWWDLKPGAPKPKANQQKQDDGRGLVLPGYKYLGPFNGLDKGEPVNAADAAALEHDKAYDQQLKAGDNPYLRYNHADAEFQERLQEDTSFGGNLGRAVFQAKKRVLEPLGLVEEGAKTAPGKKRPVEQSPQEPDSSSGIGKTGQQPAKKRLNFGQTGDSESVPDPQPLGEPPATPAAVGPTTMASGGGAPMADNNEGADGVGNASGNWHCDSTWLGDRVITTSTRTWALPTYNNHLYKQISSASTGASNDNHYFGYSTPWGYFDFNRFHCHFSPRDWQRLINNNWGFRPKRLNFKLFNIQVKEVTTNDGVTTIANNLTSTVQVFSDSEYQLPYVLGSAHQGCLPPFPADVFMIPQYGYLTLNNGSQAVGRSSFYCLEYFPSQMLRTGNNFTFSYTFEEVPFHSSYAHSQSLDRLMNPLIDQYLYYLNRTQNQSGSAQNKDLLFSRGSPAGMSVQPKNWLPGPCYRQQRVSKTKTDNNNSNFTWTGASKYNLNGRESIINPGTAVASHKDDEDKFFPMSGVMIFGKESAGASNTALDNVMITDEEEIKATNPVATERFGTVAVNFQSSSTDPATGDVHAMGALPGMVWQDRDVYLQGPIWAKIPHTDGHFHPSPLMGGFGLKNPPPQILIKNTPVPANPPAEFSATKFASFITQYSTGQVSVEIEWELQKENSKRWNPEVQYTSNYAKSANVDFTVDNNGLYTEPRPIGTRYLTRPL

SEQ ID NO: 752 - protein, 736 aa, synthetic construct
  REGION 1..736: note = source = /note="Description of Artificial Sequence: Synthetic polypeptide"
MAADGYLPDWLEDNLSEGIREWWDLKPGAPKPKANQQKQDDGRGLVLPGYKYLGPFNGLDKGEPVNAADAAALEHDKAYDQQLKAGDNPYLRYNHADAEFQERLQEDTSFGGNLGRAVFQAKKRVLEPLGLVEEGAKTAPGKKRPVEQSPQEPDSSSGIGKTGQQPAKKRLNFGQTGDSESVPDPQPLGEPPATPAAVGPTTMASGGGAPMADNNEGADGVGNASGNWHCDSTWLGDRVITTSTRTWALPTYNNHLYKQISSASTGASNDNHYFGYSTPWGYFDFNRFHCHFSPRDWQQLINNNWGFRPKRLNFKLFNIQVKEVTTNDGVTTIANNLTSTVQVFSDSEYQLPYVLGSAHQGCLPPFPADVFMIPQYGYLTLNNGSQAVGRSSFYCLEYFPSQMLRTGNNFTFSYTFEEVPFHSSYAHSQSLDRLMNPLIDQYLYYLNRTQNQSGSAQNKDLLFSRGSPAGMSVQPKNWLPGPCYRQQRVSKTKTDNNNSNFTWTGASKYNLNGRESIINPGTAMASHKDDEDKFFPMSGVMIFGKESAGASNTALDNVMITDEEEIKATNPVATERFGTVAVNFQSTSTDPATGDVHAMGALPGMVWQDRDVYLQGPIWAKIPHTDGHFHPSPLMGGFGLKNPPPQILIKNTPVPANPPAEFSATKFASFITQYSTGQVSVEIEWELQKENSKRWNPEVQYTSNYAKSADVDFTVDNNGLYTEPRPIGTRYLTRPL

SEQ ID NO: 753 - protein, 736 aa, synthetic construct
  REGION 1..736: note = source = /note="Description of Artificial Sequence: Synthetic polypeptide"
MAADGYLPDWLEDNLSEGIREWWDLKPGAPKPKANQQKQDDGRGLVLPGYKYLGPFNGLDKGEPVNAADAAALEHDKAYDQQLKAGDNPYLRYNHADAEFQERLQEDTSFGGNLGRAVFQAKKRVLEPLGLVEEGAKTAPGKKRPVEQSPQEPDSSSGIGKTGQQPAKKRLNFGQTGDSESVPDPQPLGEPPATPAAVGPTTMASGGGAPMADNNEGADGVGNASGNWHCDSTWLGDRVITTSTRTWALPTYNNHLYKQISSASTGASNDNHYFGYSTPWGYFDFNRFHCHFSPRDWQRLINNNWGFRPKRLNFKLFNIQVKEVTTNDGVTTIANNLTSTVQVFSDSEYQPPYVLGSAHQGCLPPFPADVFMIPQYGHLTLNNGSQAVGRSSFYCLEYFPSQMLRTGNNFTFSYTFEEVPFHSSYAHSQSLDRLTNPLIDQYLYYLNRTQNQSGSAQNKDLLFSRGSPAGMSVQPKNWLPGPCYRQQRVSKTKTDNNNSNFTWTGASKYNLNGRESIINPGTAMASHKDDEDKFFPMSGVMIFGKESAGASNTALDNVMITDEEEIKATNPVATERFGTVAVNFQSSSTDPATGDVHAMGALPGMVWQDRDVYLQGPIWAKIPHTDGHFHPSPLMGGFGLKNPPPQILIKNTPVPANPPAEFSATKFASFITQYSTGQVSVEIEWELQKENSKRWNPEVQYTSNYAKSANVDFTVDNNGLYTEPRPIGTRYLTRPL

SEQ ID NO: 754 - protein, 736 aa, synthetic construct
  REGION 1..736: note = source = /note="Description of Artificial Sequence: Synthetic polypeptide"
MAADGYLPDWLEDNLSEGIREWWDLKPGAPKPKANQQEQDDGRGLVLPGYKYLGPFNGLDKGEPVNAADAAALEHDKAYDQQLKAGDNPYLRYNHADAEFQERLQEDTSFGGNLGRAVFQAKKRVLEPLGLVEEGAKTAPGKKRPVEQSPQEPDSSSGIGKTGQQPAKKRLNFGQTGDSESVPDPQPLGEPPATPAAVGPTTMASGGGAPMADNNEGADGVGNASGNWHCDSTWLGDRVITTSTRTWALPTYNNHLYKQISSASTGASNDNHYFGYSTPWGYFDFNRFHCHFSPRDWQRLINNNWGFRPKRLNFKLFNIQVKEVTTNDGVTTIANNLTSTVQVFSDSEYQLPYVLGSAHQGCLPPFPADVFMIPQYGYLTLNNGSQAVGRSSFYCLEYFPSQMLRTGNNFTFSYTFEEVPFHSSYAHSQSLDRLMNPLIDQYLYYLNRTQNQSGSAQNKDLLFSRGSPAGMSVQPKNWLPGPCYRQQRVSKTKTDNNNSNFTWTGASKYNLNGRESIINPGTAMASHKDDEDKFFPMSGVMIFGKESAGASNTALDNVMITDEEEIKATNPVATERFGTVAVNFQSSSTDPATGDVHATGTLPGMVWQDRDVYLQGPIWAKIPHTDGHFHPSPLMGGFGLKNPPPQILIKTTPVPANPPAEFSATKFASFITQYSTGQVSVEIEWELQKENSKRWNPEVQYTSNYAKSANVDFTVDDNGLYTEPRPIGTRYLTRPL

SEQ ID NO: 755 - protein, 736 aa, synthetic construct
  REGION 1..736: note = source = /note="Description of Artificial Sequence: Synthetic polypeptide"
MAADGYLPDWLEDNLSEGIREWWDLKPGAPKPKANQQKQDDGRGLVLPGYKYLGPFNGLDKGEPVNAADAAALEHDKAYDQQLKAGDNPYLRYNHADAEFQERLQEDTSFGGNLGRAVFQAKKRVLEPLGLVEEGAKTAPGKKRPVEQSLQEPDSSSGIGKTGQQPAKKRLNFGQTGDSESVPDPQPLGEPPATPAAVGPTTMASGGGAPMADNNEGADGVGNASGNWHCDSTWLGDRVITTSTRTWALPTYNNHLYKQISSASTGASNDNHYFGYSTPWGYFDFNRFHCHFSPRDWQRLINNNWGFRPKRLNFKLFNIQVKEVTTNDGVTTIANNLTSTVQVFSDSEYQLPYVLGSAHQGCLPPFPADVFMIPQYGYLTLNNGSQAVGRSSFYCLEYFPSQMLRTGNNFTFSYTFEEVPFHSSYAHSQSLDRLMNPLIDQYLYYLNRTQNQSGSAQNKDLLFSRGSPAGMSVQPKNWLPGPCYRQQRVSKTKTDNDNSNFTWTGASKYNLNGRESIINPGTAMASHKDDEDKFFPMSGVMIFGKESAGASNTALDNVMITDEEEIKATNPVATERFGTVAVNFQSSSTDPATGDVHAMGALPGMVWQDRDVYLQGPIWAKIPHTDGHFHPSPLMGGFGLKNPPPQILIKNTPVPANPPAEFSATKFASFITQYSTGQVSVEIEWELQKENSKRWNPEVQYTSNYAKSANVDFTVDNNGLYTEPRPIGTRYLTRPL

SEQ ID NO: 756 - protein, 736 aa, synthetic construct
  REGION 1..736: note = source = /note="Description of Artificial Sequence: Synthetic polypeptide"
MAADGYLPDWLEDNLSEGIREWWDLKPGAPKPKANQQKQDDGRGLVLPGYKYLGPFNGLDKGEPVNAADAAALEHDKAYDQQLKAGDNPYLRYNHADAEFQERLQEDTSFGGNLGRAVFQAKKRVLEPLGLVEEGAKTAPGKKRPVEQSPQEPDSSSGIGKTGQQPAKKRLNFGQTGDSESVPDPQPLGEPPATPAAVGPTTMASGGGAPMADNNEGADGVGNASGNWHCDSTWLGDRVITTSTRTWALPTYNNHLYKQISSASTGASNDNHYFGYSTPWGYFDFNRFHCHFSPRDWQRLINNNWGFRPKRLNFKLFNIQVKEVTTNDGVTTIANNLTSTVQVFSDSEYQLPYVLGSAHQGCLPPFPADVFMIPQYGYLTLNNGSQAVGRSSFYCLEYFPSQMLRTGNNFTFSYTFEEAPFHSSYAHSQSLDRLMNPLIDQYLYYLNRTQNQSGSAQNKDLLFSRGSPAGMSVQPKNWLPGPCYRQQRVSKTKTDNNNSNFTWTGASKYNLNGRESIINPGTAMASHKDDEDKFFPMSGVMIFGKESAGASNTALDNVMITDEEEIKATNPVATERFGTVAVNFQSSSTDPATGDVHAMGALPGMVWQDRDVYLQGPIWAKIPHTDGHFHPSPLMGGFGLKNPPPQILIKNTPVPANPPAEFSATKFASFITQYSTGQVSVEIEWELQKENSKRWNPEVQYTSNYAKSANVDFTVDNNGLYTEPRPVGTRYLTRPL

SEQ ID NO: 757 - protein, 736 aa, synthetic construct
  REGION 1..736: note = source = /note="Description of Artificial Sequence: Synthetic polypeptide"
MAADGYLPDWLEDNLSEGIREWWDLKPGAPKPKANQQKQDDGRGLVLPGYKYLGPFNGLDKGEPVNAADAAALEHDKAYDQQLKAGDNPYLRYNHADAEFQERLQENTSFGGNLGRAVFQAKKRVLEPLGLVEEGAKTAPGKKRPVEQSPQEPDSSSGIGKTGQQPAKKRLNFGQTGDSESVPDPQPLGEPPATPAAVGPTTMASGGGAPMADNNEGADGVGNASGNWHCDSTWLGDRVITTSTRTWALPTYNNHLYKQISSASTGASNDNHYFGYSTPWGYFDFNRFHCHFPPRDWQRLINNNWGFRPKRLNFKLFNIQVKEVTSNDGVTTIANNLTSTVQVFSDSEYQLPYVLGSAHQGCLPPFPADVFMIPQYGYLTLNNGSQAVGRSSFYCLEYFPSQMLRTGNNFTFSYTFEEVPFHSSYAHSQSLDRLMNPLIDQYLYYLNRTQNQSGSAQNKDLLFSRGSPAGMSVQPKNWLPGPCYRQQRVSKTKTDNNNSNFTWTGASKYNLNGRESIINPGTAMASHKDDEDKFFPMSGVMIFGKESAGASNTALDNVMITDEEEIKATNPVATERFGTVAVNFQSSSTDPATGDVHAMGALPGMVWQDRDVYLQGPIWAKIPHTDGHFHPSPLMGGFGLKNPPPQILIKNTPVPANPPAEFSATKFASFITQYSTGQVSVEIEWELQKENSKRWNPEVQYTSNYAKSANVDFTVDNNGLYTEPRPIGTRYLTRPL

SEQ ID NO: 758 - protein, 736 aa, synthetic construct
  REGION 1..736: note = source = /note="Description of Artificial Sequence: Synthetic polypeptide"
MAADGYLPDWLEDNLSEGIREWWDLKPGAPKPKANQQKQDDGRGLVLPGYKYLGPFNGLDKGEPVNAADAAALEHDKAYDQQLKAGDNPYLRYNHADAEFQERLQEDTSFGGNLGRAVFQAKKRVLEPLGLVEEGAKTAPGKKRPVEQSPQEPDSSSGIGKTGQQPAKKRLNFGQTGDSESVPDPQPLGEPPATPAAVGPTTMASGGGAPMADNNEGADGVGNASGNWHCDSTWLGDRVITTSTRTWALPTYNNHLYKQISSASTGASNDNHYFGYSTPWGYFDFNRFHCHFSPRDWQRLINNNWGFRPKRLNFKLFNIQVKEVTTNDGVTTIANNLTSTVQVFSDSEYQLPYVLGSAHQGCLPPFPADVFMIPQYGYLTLNNGSQAVGRSSFYCLEYFPSQMLRTGNNFTFSYTFEEVPFHSSYAHSQSLDRLMNPLIDQYLYYLNRTQNQSGSAQNKDLLFSRGSPAGTSVQPKNWLPGPCYRQQRVSKTKTDNNNSNFTWTGASKYNLNGRESIINPGTAMASHKDDEDKFFPMSGVMIFGKESAGASNTALDNVMITDEEEIKATNPVATERFGTVAVNFQSSSTDPATGDVHAMGALPGMVWQDRDVYLQGPIWAKIPHTDGHFHPSPLMGGFGLKNPPPQILIKNTPVPANPPAEFSATKFASFITQYSTGQVSVEIEWELQKENSKRWNPEVQYTSNYAKSANVDFTVDNNGLYTGPRPIGTRYLTRPL

SEQ ID NO: 759 - protein, 736 aa, synthetic construct
  REGION 1..736: note = source = /note="Description of Artificial Sequence: Synthetic polypeptide"
MAADGYLPDWLEDNLSEGIREWWDLKPGAPKPKANQQKQDDGRGLVLPGYKYLGPFNGLDKGEPVNAADAAALEHDKAYDQQLKAGDNPYLRYNHADAEFQERLQEDTSFGGNLGRAVFQAKKRVLEPLGLVEEGAKTAPGKKRPVEQSPQEPDSSSGIGKTGQQPAKKRLNFGQTGDSESVPDPQPLGEPPATPAAVGPTTMASGGGAPMADNNEGADGVGNAPGNWHCDSTWLGDRVITTSTRTWALPTYNNHLYKQISSASTGASNDNHYFGYSTPWGYFDFNRFHCHFSPRDWQRLINNNWGFRPKRLNFKLFNIQVKEVTTNDGVTTIANNLTSTVQVFSDSEYQLPYVLGSAHQGCLPPFPADVFMIPQYGYLTLNNGSQAVGRSSFYCLEYFPSQMLRTGNNFTFSYTFEEVPFHSSYAHSQSLDRLMNPLIDQYLYYLNRTQNQSGSAQNKDLLFSRGSPAGMSVQPKNWLPGPCYRQQRVSKTKTDNNNSNFTWTGASKYNLNGRESIINPGTAMASHKDDEDKFFPMSGVMIFGKESAGASNTALDNVMITGEEEIKATNPVATERFGTVAVNFQSSSTDPATGDVHAMGALPGMVWQDRDVYLQGPIWAKIPHTDGHFHPSPLMGGFGLKNPPPQILIKNTPVPANPPAEFSATKFASFITQYSTGQVSVEIEWELQKENSKRWNPEVQYTSNYAKSANVDFTVDNNGLYTEPRPIGTRYLTRPL

SEQ ID NO: 760 - protein, 736 aa, synthetic construct
  REGION 1..736: note = source = /note="Description of Artificial Sequence: Synthetic polypeptide"
MAADGYLPDWLEDNLSEGIREWWDLKPGAPKPKANQQKQDDGRGLVLPGYKYLGPFNRLDKGEPVNAADAAALEHDKAYDQQLKAGDNPYLRYNHADAEFQERLQEDTSFGGNLGRAVFQAKKRVLEPLGLVEEGAKTAPGRKRPVEQSPQEPDSSSGIGKTGQQPAKKRLNFGQTGDSESVPDPQPLGEPPATPAAVGPTTMASGGGAPMADNNEGADGVGNASGNWHCDSTWLGDRVITTSTRTWALPTYNNHLYKQISSASTGASNDNHYFGYSTPWGYFDFNRFHCHFSPRDWQRLINNNWGFRPKRLNFKLFNIQVKEVTTNDGVTTIANNLTSTVQVFSDSEYQLPYVLGSAHQGCLPPFPADVFMIPQYGYLTLNNGGQAVGRSSFYCLEYFPSQMLRTGNNFTFSYTFEEVPFHSSYAHSQSLDRLMNPLIDQYLYYLNRTQNQSGSAQNKDLLFSRGSPAGMSVQPKNWLPGPCYRQQRVSKTKTDNNNSNFTWTGASKYSLNGRESIINPGTAMASHKDDEDKFFPMGGVMIFGKESAGASNTALDNAMITDEEEIKATNPVATERFGTVAVNFQSSSTDPATGDVHAMGALPGMVWQDRDVYLQGPIWAKIPHTDGHFHPSPLMGGFGLKNPPPQILIKNTPVPANPPAEFSATKFASFITQYSTGQVSVEIEWELQKENSKRWNPEVQYTSNYAKSANVDFTVDNNGLYTEPRPIGTRYLTRPL

SEQ ID NO: 761 - protein, 736 aa, synthetic construct
  REGION 1..736: note = source = /note="Description of Artificial Sequence: Synthetic polypeptide"
MAADGYLPDWLEDNLSEGIREWWDLKPGAPKPKANQQKQDDGRGLVLPGYKYLGPFNGLDKGEPVNAADAAALEHDKAYDQQLKAGDNPYLRYNHADAEFQERLQEDTSFGGNLGRAVFQAKKRVLEPLGLVEEGAKTAPGKKRPVEQSPQEPDSSSGIGKTGQQPAKKRLNFGQTGDSESVPDPQPLGEPPATPAAVGPTTMASGGGAPMADNNEGADGVGNASGNWHCDSTWLGGRVITTSTRTWALPTYNNHLYKQISSASTGASNDNHYFGYSTPWGYFDFNRFHCHFSPRDWQRLINNNWGFRPKRLNFKLFNIQVKEVTTNDGVTTIANNLTSTVQVFSDSEYQLPYVLGSAHQGCLPPFPADVFMIPQYGYLTLNNGSQAVGRSSFYCLEYFPSQMLRTGNNSTFSYTFEEVPFHSSYAHSQSLDRLMNPLIDQYLYYLNRTQNQSGSAQNKDLLFSRGSPAGMSVQPKNWLPGPCYRQQRVSKTKTDNNNSNFTWTGASKYNLNGRESIINPGTAMASHKDDEDKFFPMSGVMIFGKESAGASNTALDNVMITDEEEIKATNPVATERFGTVAVNFQSSSTDPATGDVHAMGTLPGMVWQDRDVYLQGPIWAKIPHTDGHFHPSPLMGGFGLKNPPPQILIKNTPVPANPPAEFSATKFASFITQYSTGQVSVEIEWELQKENSKRWNPEVQYTSNYAKSANVDFTVDNNGLYTEPRPIGTRYLTRPL

SEQ ID NO: 762 - protein, 736 aa, synthetic construct
  REGION 1..736: note = source = /note="Description of Artificial Sequence: Synthetic polypeptide"
MAADGYLPDWLEDNLSEGIREWWDLKPGAPKPKANQQKQDDGRGLVLPGYKYLGPFNGLDKGEPVSAADAAALEHDKAYDQQLKAGDNPYLRYNHADAEFQERLQEDTSFGGNLGRAVFQAKKRVLEPLGLVEEGAKTAPGKKRPVEQSPQEPDSSSGIGKTGQQPAKERLNFGQTGDSESVPDPQPLGEPPATPAAVGPTTMASGGGAPMADNNEGADGVGNASGNWHCDSTWLGDRVITTSTRTWALPTYNNHLYKQISSASTGASNDNHYFGYSTPWGYFDFNRFHCHFSPRDWQRLINNNWGFRPKRLNFKLFNIQVKEVTTNDGVTTIANNLTSTVQVFSDSEYQLPYVLGSAHQGCLPPFPADVFMIPQYGYLTLNNGSQAVGRSSFYCLEYFPSQMLRTGNNFTFSYTFEEVPFHSSYAHSQSLDRLMNPLIDQYLYYLNRTQNQSGSAQNKDLLFSRGSPAGMSVQPKNWLPGPCYRQQRVSKTKTDNNNSNFTWTGASKYNLNGRESIINPGTAMASHKDDEDKFFPMSGVMIFGKESAGASNTALDNVMITDEEEIKATNPVATERFGTVAVNFQSSSTDPATGDVHAMGALPGMVWQDRDVYLQGPIWAKIPHTDGHFHPSPLMGGFGLKNPPPQILIKNTPVPANPPAEFSATKFASFITQYSTGQVSVEIEWELQKENSKRWNPEVQYTSNYAKSANVDFTVDNNGLYTEPRPIGTRYLTRPL

SEQ ID NO: 763 - protein, 736 aa, synthetic construct
  REGION 1..736: note = source = /note="Description of Artificial Sequence: Synthetic polypeptide"
MAADGYLPDWLEDNLSEGIREWWDLKPGAPKPKANQQKQDDGRGLVLPGYKYLGPFNGLDKGEPVNAADAAALEHDKAYDQQLKAGDNPYLRYNHADAEFQERLQEDTSFGGNLGRAVFQAKKRVLEPLGLVEEGAKTAPGKKRPVEQSPQEPDSSSGIGKTGQQPAKKRLNFGQTGDSESVPDPQPLGEPPATPAAVGPTTMASGGGAPMADNNEGADGVGNASGNWHCDSTWLGDRVITTSTRTWALPTYNNHLYKQISSASTGASNDNHYFGYSTPWGYFDFNRFHCHFSPRDWQRLINNNWGFRPKRLNFKLFNIQVKEVTTNDGVTTIANNLTSTVQVFSDSEYQLPYVLGSAHQGCLPPFPADVFMIPQYGYLTLNNGSQAVGRSSFYCLEYFPSQMLRTGNNFTFSYTFEEVPFHSSYAHSQSLDRLMNPLIDQYLYYLNRTQNQSGSAQNKDLLFSRGSPAGMSVQPKNWLPGPCYRQQRVSKTKTDNNNSNFTWTGASKYNLNGRESIINPGTAMASHKDDEDKFFPMSGVMIFGKESAGASNTALDNVMITDEGEIKATNPVATERFGTVAVNFQSSSTDPATGDVHAMGALPGMVWQDRDVYLQGPIWAKIPHTDGHFHPSPLMGGFGLKNPPPQILIKNTPVPANPPAEFSATKFASFITQYSTGQVSVEIEWELQKENSKRWNPEVQYTSNYAKSANVDFTVDNNGLYTEPRPIGTRYLTRPL

SEQ ID NO: 764 - protein, 736 aa, synthetic construct
  REGION 1..736: note = source = /note="Description of Artificial Sequence: Synthetic polypeptide"
MAADGYLPDWLEDNLSEGIREWWDLKPGAPKPKANQQKQDDGRGLVLPGYKYLGPFNGLDKGEPVNAADAAALEHDKAYDQQLKAGDNPYLRYNHADAEFQERLQEDTSFGGNLGRAVFQAKKRVLEPFGLVEEGAKTAPGKKRPVEQSPQEPDSSSGIGKTGQQPAKKRLNFGQTGDSESVPDPQPLGEPPATPAAVGPTTMASGGGAPMADNNEGADGVGNASGNWHCDSTWLGDRVITTSTRTWALPTYNNHLYKQISSASTGASNDNHYFGYSTPWGYFDFNRFHCHFSPRDWQRLINNNWGFRPKRLNFKLFNIQVKEVTTNDGVTTIANNLTSTVQVFSDSEYQLPYVLGSAHQGCLPPFPADVFMIPQYGYLTLNNGSQAVGRSSFYCPEYFPSQMLRTGNNFTFSYTFEEVPFHSSYAHSQSLDRLMNPLIDQYLYYLNRTQNQSGSAQNKDLLFSRGSPAGMSVQPKNWLPGPCYRQQRVSKTKTDNNNSNFTWTGASKYNLNGRESIINPGTAMASHKDDKDKFFPMSGVMIFGKESAGASNTALDNVMITDEEEIKATNPVATERFGTVAVNFQSSNTDPATGDVHVMGALPGMVWQDRDVYLQGPIWAKIPHTDGHFHPSPLMGGFGLKHPPPQILIKNTPVPANPPAEFSATKFASFITQYSTGQVSVEIEWELQKENSKRWNPEVQYTSNYAKSANVDFTVDNNGLYTEPRPIGTRYLTRPL

SEQ ID NO: 765 - protein, 736 aa, synthetic construct
  REGION 1..736: note = source = /note="Description of Artificial Sequence: Synthetic polypeptide"
MAADGYLPDWLEDNLSEGIREWWDLKPGAPKPKANQQKQDDGRGLVLPGYKYLGPFNGLDKGEPVNAADAAALEHDKAYDQQLKAGDNPYLRYNHADAEFQERLQEDTSFGGNLGRAVFQAKKRVLEPFGLVEEGAKTAPGKKRPVEQSPQEPDSSSGIGKTGQQPAKKRLNFGQTGDSESVPDPQPLGEPPATPAAVGPTTMASGGGAPMADNNEGADGVGNASGNWHCDSTWLGDRVITTSTRTWALPTYNNHLYKQISSASTGASNDNHYFGYSTPWGYFDFNRFHCHFSPRDWQRLINNNWGFRPKRLNFKLFNIQVKEVTTNDGVTTIANNLTSTVQVFSDSEYQLPYVLGSAHQGCLPPFPADVFMIPQYGYLTLNNGSQAVGRSSFYCLEYFPSQMLRTGNNFTFSYTFEEVPFHSSYAHSQSLDRLMNPLIDQYLYYLNRTQNQSGSAQNKDLLFSRGSPAGMSVQPKNWLPGPCYRQQRVSKTKTDNNNSNFTWTGASKYNLNGRESIINPGTAMASHKDDKDKFFPMSGVMIFGKESAGASNTALDNVMITDEEEIKATNPVATERFGTVAVNFQSSDTDPATGDVHVMGALPGMVWQDRDVYLQGPIWAKIPHTDGHFHPSPLMGGFGLKHPPPQILIKNTPVPANPPAEFSATKFASFITQYSTGQVSVEIEWELQKENSKRWNPEVQYTSNYAKSANVDFTVDNNGLYTEPRPIGTRYLTRPL

SEQ ID NO: 766 - protein, 736 aa, synthetic construct
  REGION 1..736: note = source = /note="Description of Artificial Sequence: Synthetic polypeptide"
MAADGYLPDWLEDNLSEGIREWWDLKPGAPKPKANQQKQGDGRGLVLPGYKYLGPFNGLDKGEPVNAADAAALEHDKAYDQQLKAGDNPYLRYNHADAEFQERLQEDTSFGGNLGRAVFQAKKRVLEPFGLVEEGAKTAPGKKRPVEQSPQEPDSSSGIGKTGQQPAKKRLNFGQTGDSESVPDPQPLGEPPATPAAVGPTTMASGGGAPMADNNEGADGVGNASGNWHCDSTWLGDRVITTNTRTWALPTYNNHLYKQISSASTGASNDNHYFGYSTPWGYFDFNRFHCHFSPRDWQRLINNNWGFRPKRLNFKLFNIQVKEVTTNDGVTTIANNLTSTVQVFSDSEYQLPYVLGSAHQGCLPPFPADVFMIPQYGYLTLNNGSQAVGRSSFYCLEYFPSQMLRTGNNFTFSYTFEEVPFHSSYGHSQSLDRLMNLLIDQYLYYLNRTQNQSGSAQNKDLLFSRGSPAGMFVQPKNWLPGPCYRQQRVSKTKTDNNNSNFTWTGASKYNLNGRESIINPGTAMASHKDDEDKFFPMSGVMIFGKESAGASNTALDNVMITDEEEIKATNPVATERFGTVAVNFQSSSTDPATGDVHVMGALPGMVWQDRDVYLQGPIWAKIPHTDGHFHPSPLMGGFGLKHPPPQILIKNTPVPANPPAEFSATKFASFITQYSTGQVSVEIEWELQKENSKRWNPEVQYTSNYAKSANVDFTVDNNGLYTEPRPIGTRYLTRPL

SEQ ID NO: 767 - protein, 736 aa, synthetic construct
  REGION 1..736: note = source = /note="Description of Artificial Sequence: Synthetic polypeptide"
MAADGYLPDWLEDNLSEGIREWWDLKPGAPKPKANQQKQDDGRGLVLPGYKYLGPFNGLDKGEPVNAADAAALEHDKAYDQQLKAGDNPYLRYNHADAEFQERLQEDTSFGGNLGRAVFQAKKRVLEPFGLVEEGAKTAPGKKRPVEQSPQEPDSSSGIGKTGQQPAKKRLNFGQTGDSESVPDPQPLGEPPATPAAVGPTTMASGGGAPMADNNEGADGVGNASGNWHCDSTWLGDRVITTNTRTWALPTYNNHLYKQISSASTGASNDNHYFGYSTPWGYFDFNRFHCHFSPRDWQRLINNNWGFRPKRLNFKLFNIQVKEVTTNDGVTTIANNLTSTVQVFSDSEYQLPYVLGSAHQGCLPPFPADVFMIPQYGYLMLNNGSQAVGRSSFYCLEYFPSQMLRTGNNFTFSYTFEEVPFHSSYAHSQSLDRLMNPLIDQYLYYLNRTQNQSGSAQNKDLLFSRGSPAGMSVQPKNWLPGPCYRQQRVSKTKTDNNNSNFTWTGASKYNLNGRESIINPGTAMASHKDDEDKFFPMSGVMIFGKESAGASNTALDNVMITDEEEIKATNPAATERFGTVAVNFQSSSTDPATGDVHVMGALPGMVWQDRDVYLQGPIWAKIPHTDGHFHPSPLMGGFGLKHPPPQILIKNTPVPANPPAEFSATKFASFITQYSTGQVSVEIEWELQKENSKRWNPEVQYTSNYAKSANVDFTVDNNGLYTEPRPIGTRYLTRPL

SEQ ID NO: 768 - protein, 736 aa, synthetic construct
  REGION 1..736: note = source = /note="Description of Artificial Sequence: Synthetic polypeptide"
MAADGYLPDWLEDNLSEGIREWWDLKPGAPKPKANQQKQDDGRGLVLPGYKYLGPFNGLDKGEPVNAADAAALEHDKAYDQQLKAGDNPYLRYNHADAEFQERLQEDTSFGGNLGRAVFQAKKRVLEPFGLVEEGAKTAPGKKRPVEQSPQEPDSSSGIGKTGQQPAKKRLNFGQTGDSESVPDPQPLGEPPATPAAVGPTTMASGGGAPMADNNEGADGVGNASGNWHCDSTWLGDRVITTSTRTWALPTYNNHLYKQISSASTGASNDNHYFGYSTPWGYFDFNRFHCHFSPRDWQRLINNNWGFRPKRLNFKLFNIQVKEVTTNDGVTTIANNLTSTVQVFSDSEYQLPYVLGSAHQGCLPPFPADVFMIPQYGYLTLNNGSQAVGRSSFYCLEYFPSQMLRTGNNFTFSYTFEEVPFHSSYAHSQSLDRLMNPLIDQYLYYLNRTQNQSGSAQNKDLLFSRGSPAGMSVQPKNWLPGPCYRQQRVSKTKTDNNNSNFTWTGASKYNLNGRESIINPGTAMASHKDDEDKFFPMSGVMIFGKESAGASNTALDNVMITDEEEIKATNPVATERFGTVAVNFQSSSTDPATGDVHVMGALPGMVWQDRDVYLQGPIWAKIPHTDGHFHPSPLMGGFGLKHPPPQILIKNTPVPANPPAEFSATKFASFITQYSTGQVSVEIEWELQKENSKRWNPEVQYTSNYAKSANVDFTVDNNGLYTEPRPIGTRYLTRPL

SEQ ID NO: 769 - protein, 736 aa, synthetic construct
  VARIANT 102: note = Any amino acid
  REGION 1..736: note = source = /note="Description of Artificial Sequence: Synthetic polypeptide"
MAADGYLPDWLEDNLSEGIREWWDLKPGAPKPKANQQKQDDGRGLVLPGYKYLGPFNGLDKGEPVNAADAAALEHDKAYDQQLKAGDNPYLRYNHADAEFQXRLQEDTSFGGNLGRAVFQAKKRVLEPFGLVEEGAKTAPGKKRPVEQSPQEPDSSSGIGKTGQQPAKKRLNFGQTGDSESVPDPQPLGEPPATPAAVGPTTMASGGGAPMADNNEGADGVGNASGNWHCDSTWLGGRVITTSTRTWALPTYNNHLYKQISSASTGASNDNHYFGHSTPWGYFDFNRFHCHFSPRDWQRLINNNWGFRPKRLNFKLFNIQVKEVTTNDGVTTIANNLTSTVQVFSDSEYQLPYVLGSAHQGCLPPSPADVFMIPQYGYLTLNNGSQAVGRSSFYCLEYFPSQMLRTGNNFTFSYTFEEVPFHSSYAHSQSLDRLMNPLIDQYLYYLNRTQNQSGSAQNKDLLFSRGSPAGMSVQPKNWLPGPCYRQQRVSKTKTDNNNSNFTWTGASKYNLNGRESIINPGTAMASHKDDKDKFFPMSGVMIFGKESAGASNTALDNVMITDEEEIKATNPVATERFGTVAVNFQSSNTDPATGDVHVMGALPGMVWQDRDVYLQGPIWAKIPHTDGHFHPSPLMGGFGLKHPPPQILIKNTPVPANPPAEFSATKFASFITQYSTGQVSVEIEWELQKENSKRWNPEVQYTSNYAKSANVDFTVDNNGLYTEPRPIGTRYLTRPL

SEQ ID NO: 770 - protein, 736 aa, synthetic construct
  REGION 1..736: note = source = /note="Description of Artificial Sequence: Synthetic polypeptide"
MAADGYFPDWLEDNLSEGIREWWDLKPGAPKPKANQQKQDDGRGLVLPGYKYLGPFNGLDKGEPVNAADAAALEHDKAYDQQLKAGDNPYLRYNHADAEFQERLQEDTSFGGNLGRAVFQAKKRVLEPFGLVEEGAKTAPGKKRPVEQSPQEPDSSSGIGRTGQQPAKKRLNFGQTGDSESVPDPQPLGEPPATPAAVGPTTMASGGGAPMADNNEGADGVGNASGNWHCDSTWLGDRVITTSTRTWALPTYNNHLYKQISSASTGASNDNHYFGYSTPWGYFDFNRFHCHFSPRDWQRLINNNWGFRPKRLNFKLFNIQVKEVTTNDGVTTIANNLTSTVQVFSDSEYQLPYVLGSAHQGCLPPFPADVFMIPQYGYLTLNNGSQAVGRSSFYCLEYFPSQMLRTGNNFTFSYTFEEVPFHSSYAHSQSLDRLMNPLIDQYLYYLNRTQNQSGSAQNKDLLFSRGSPAGMSVQPKNWLPGPCYRQQRVSKTKTDNNNSNFTWTGASKYNLNGRESIINPGTAMASHKDDEDKFFPMSGVMIFGKESAGASNTALDNVMITDEEEIKATNPVATERFGTVAVNFQSSSPDPATGDVHVMGALPGMVWQDRDVYLQGPIWAKIPHTDGHFHPSPLMGGFGLKHPPPQILIKNTPVPANPPAEFSATKFASFITQYSTGQVSVEIEWELQKENSKRWNPEVQYTSNYAKSANVDFTVDNNGLYSEPRPIGTRYLTRPL

SEQ ID NO: 771 - protein, 736 aa, synthetic construct
  REGION 1..736: note = source = /note="Description of Artificial Sequence: Synthetic polypeptide"
MAADGYLPDWLEDNLSEGIREWWDLKPGAPKPKANQQKQDDGRGLVLPGYKYLGPFNGLDKGEPVNAADAAALEHDKAYDQQLKAGDNPYLRYNHADAEFQERLQEDTSFGGNLGRAVFQAKKRVLEPFGLVEEGAKTAPGKKRPVEQSPQEPDSSSGIGKTGQQPAKKRLNFGQTGDSESVPDPQPLGEPPATPAAVGPTTMASGGGAPMADNNEGADGVGNASGNWHCDSTWLGDRVITTSTRTWALPTYNNHLYKQTSSASTGASNDNHYFGYSTPWGYFDFNRFHCHFSPRDWQRLINNNWGFRPKRLNFKLFNIQVKEVTTNDGVTTIANNLTSTVQVFSDSEYQLPYVLGSAHQGCLPPFPADVFMIPQYGYLTLNNGSQAVGRSSFYCLEYFPSQMLRTGNNFTFSYTFEEVPFHSSYAHSQSLDRLMNPLIDQYLYYLNRTQNQSGSAQNKDLLFSRGSPAGMSVQPKNWLPGPCYRQQRVSKTKTDYNNSNFTWTGASKYNLNGRESIINPGTAMASHKDDEDKFFPMSGVMIFGKESAGASNTALDNVMITDEEEIKATNPVATERFGTVAVNFQSSSTDPATGDVHVMGALPGMVWQDRDVYLQGPIWAKIPHTDGHFHPSPLMGGFGLKHPPPQILIKNTPVPANPPAEFSATKFASFITQYSTGQVSVEIEWELQKENSKRWNPEVQYTSNYAKSANVDFTVDNNGLYTEPRPIGTRYLTRPL

SEQ ID NO: 772 - protein, 736 aa, synthetic construct
  REGION 1..736: note = source = /note="Description of Artificial Sequence: Synthetic polypeptide"
MAADGYPPDWLEDNLSEGIREWWDLKPGVPKPKANQQKQDDGRGLVLPGYKYLGPFNGLDKGEPVNAADAAALEHDKAYDQQLKAGDNPYLRYNHADAEFQERLQEDTSFGGNLGRAVFQAKKRVLEPFGLVEEGAKTAPGKKRPVEQSPQEPDSSSGIGKTGQQPAKKRLNFGQTGDSESVPDPQPLGEPPATPAAVGPTTMASGGGAPMADNNEGADGVGNASGNWHCDSTWLGDRVITTSTRTWALPTYNNHLYKQISSASTGASNDNHYFGYSTPWGYFDFNRFHCHFSPRDWQRLINNNWGFRPKRLNFKLFNIQVKEVTTNDGVTTIANNLTSTVQVFSDSEYQLPYVLGSAHQGCLPPFPADVFMIPQYGYLTLNNGSQAVGRSSFYCLEYFPSQMLRTGNNFTFSYTFEEVPFHSSYAHSQSLDRLMNPLIDQYLYYLNRTQNQSGSAQNKDLLFSRGSPAGMSVQPKNWLPGPCYRQQRVSKTKTDNNNSNFTWTGASKYNLNGRESIINPGTAMASHKDDEDKFFPMSGVMIFGKESAGASNTALDNVMITDEEEIKATNPVATERFGTVAVNFQSSSTDPATGDVHVMGALPGMVWQDRDVYLQGPIWAKIPHTDGHFHPSPLMGGFGLKHPPPQILIKNTPVPANPPAEFSATKFASFITQYSTGQVSVEIEWELQKENSKRWNPEVQYTSNYAKSANVDFTVDNNGLYTEPRPIGTRYLTRPL

SEQ ID NO: 773 - protein, 732 aa, synthetic construct
  REGION 1..732: note = source = /note="Description of Artificial Sequence: Synthetic polypeptide"
MAADGYLPDWLEDNLSEGIREWWDLKPGAPKPKANQQKQDDGRGLVLPGYKYLGPFNGLDKGEPVNAADAAALEHDKAYDQQLKAGDNPYLRYNHADAEFQERLQEDTSFGGNLGRAVFQAKKRVLEPFGLVEEGAKTAPGKKRPVEQSPQEPDSSSGIGKTGQQPAKKRLNFGQTGDSESVPDPQPLGEPPATPAAVGPTTMASGGGAPMADNNEGADGVGNASGNWHCDSTWLGDRVITTSTRTWALPTYNNHLYKQISSASTGASNDNHYFGYSTPWGYFDFNRFHCHFSPRDWQRLINNNWGFRPKRLNFKLFNIQVKEVTTNDGVTTIANNLTSTVQAFSDSEYQLPYVLGSAHQGCLPPFPADVFMIPQYGYLTLNNGSQAVGRSSFYCLEYFPSQMLRTGNNFTFSYTFEEVPFHSSYAHSQSLDRLMNPLIDPYLYYLNRTQNQSGSAQNKDLLFSRGSPAGMSVQPKNWLPGPCYRQQRVSKTKTDNNNSNFTWTGASKYNLNGRESIINPGTAMASHKDDEDKFFPMSGVMIFGKESAGASNTALDNVMITDEEEIKATNPVATERFGTVAVNFQSSSTDPATGDVHVMGALPGMVWQDRDVYLQGPIWAKIPHTDGHFHPSPLMGGFGLKHPPPQILIKNTPVPANPPAEFSATKFASFITQYSTGQVSVEIEWELQKENSKRWNPEVQYTSNYAKSANVDFTVDNNGLYTEPRPIGTRYL

SEQ ID NO: 774 - protein, 736 aa, synthetic construct
  REGION 1..736: note = source = /note="Description of Artificial Sequence: Synthetic polypeptide"
MAADGYLPDWLEDNLSEGIREWWDLKPGAPKPKANQQKQDDGRGLVLPGYKYLGPFNGLDKGEPVNAADAAALEHDKAYDQQLKAGDNPYLRYNHADAEFQERLQEDTSFGGNLGRAVFQAKKRVLEPFGLVEEGAKTAPGKKRPVEQSPQEPDSSSGIGKTGQQPAKKRLNFGQTGDSESVPDPQPLGEPPATPAAVGPTTMASGGGAPMADNNEGADGVGNASGNWHCDSTWLGDRVITTSTRTWALPTYNNHLYKQISSASTGASNDNHYFGYSTPWGYFDFNRFHCHFSPRDWQRLINNNWGFRPKRLNFKLFNIQVKEVTTNDGVTTIANNLTSTVQVFSDSEYQLPYVLGSAHQGCLPPFPADVFMIPQYGYLTLNNGSQAVGRSSFYCLEYFPSQMLRTGNNFTFSYTFEEVPFHSSYAHSQSLDRLMNPLIDQYLYYLNRTQNQSGSAQNKDLLFSRGSPAGMSVQPKNWLPGPCYRQQRVSKTKTDNNNSNFTWTGASKYNLNGRESIINPGTAMASHKDDEDKFFPMSGVMIFGKESAGASNTALDNVMITDEEEIKATNPVATERFGTVAVNFQSSSTDPATGDVHVMGALPGMVWQDRDVYLQGPIWAKIPHTDGHSHPSPLMGGFGLKHPPPQILIKNTPVPANPPAEFSATKFASFITQYSTGQVSVEIEWELQKENSKRWNPEVQYTSNYAKSANVDFTVDNNGLYTEPRPIGTRYLTRPL

SEQ ID NO: 775 - protein, 736 aa, synthetic construct
  REGION 1..736: note = source = /note="Description of Artificial Sequence: Synthetic polypeptide"
MAADGYLPDWLEDNLSEGIREWWDLKPGAPKPKANQQKQDDGRGLVLPGYKYLGPFNGLDKGEPVNAADAAALEHDKAYDQQLKAGDNPYLRYNHADAEFQERLQEDTSFGGNLGRAVFQAKKRVLEPFGLVEEGAKTAPGKKRPVEQSPQEPDSSSGIGKTGQQPAKKRLNFGQTGDSESVPDPQPLGEPPATPAAVGPTTMASGGGAPMADNNEGADGVGNASGNWHCDSTWLGDRVITTSTRTWALPTYNNHLYKQISSASTGASNDNHYFGYSTPWGYFDFNRFHCHFSPRDWQRLINNNWGFRPKRLNFKLFNIQVKEVTTNDGVTTIANNLTSTVQVFSDSEYQLPYVLGSAHQGCLPPFPADVFMIPQYGYLTLNNGSQAVGRSSFYCLEYFPSQMLRTGNNFTFSYTFEEVPFHSSYAHSQSLDRLMNPLIDLYLYYLNRTQNQSGSAQNKDLLFSRGSPAGMSVQPKNWLPGPCYRQQRVSKTKTDNNNSNFTWTGASKYNLNGRESIINPGTAMASHKDDEDKFFPMSGVMIFGKESAGTSNTALDNVMITDEEEIKATNPVATERFGTVAVNFQSSSTDPATGDVHVMGALPGMVWQDRDVYLQGPIWAKIPHTDGHFHPSPLMGGFGLKHPPPQILIKNTPVPANPPAEFSATKFASFITQYSTGQVSVEIEWELQKENSKRWNPEVQYTSNYAKSANVDFTVDNNGLYTEPRPIGTRYLTRPL

SEQ ID NO: 776 - protein, 736 aa, synthetic construct
  REGION 1..736: note = source = /note="Description of Artificial Sequence: Synthetic polypeptide"
MAADGYLPDWLEDSLSEGIREWWDLKPGAPKPKANQQKQDDGRGLVLPGYKYLGPFNGLDKGEPVNAADAAALEHDKAYDQQLKAGDNPYLRYNHADAEFQERLQEDTSFGGNLGRAVFQAKKRVLEPFGLVEEGAKTAPGKKRPVEQSPQEPDSSSGIGKTGQQPAKKRLNFGQTGDSESVPDPQPLGEPPATPAAVGPTTMASGGGAPMADNNEGADGVGNASGNWHCDSTWLGDRVITTSTRTWALPTYNNHLYKQISSASTGASNDNHYFGYSTPWGYFDFNRFHCHFSPRDWQRLINNNWGFRPKRLNFKLFNIQVKEVTTNDGVTTIANNLTSTVQVFSDSEYQLPYVLGSAHQGCLPPFPADVFMIPQYGYLTPNNGSQAVGRSSFYCLEYFPSQMLRTGNNFTFSYTFEEVPFHSSYAHSQSLDRLMNPLIDQYQYYLNRTQNQSGSAQNKDLLFSRGSPAGMSVQPKNWLPGPCYRQQRVSKTKTDNNNSNFTWTGASKYNLNGRESIINPGTAMASHKDDEDKFFPMSGVMIFGKESAGASNTALDNVMITDEEEIKATNPVATERFGTVAVNFQSSSTDPATGDVHVMGALPGMVWQDRDVYLQGPIWAKIPHTDGHFHPSPLMGGFGLKHPPPQILIKNTPVPANPPAEFSATKFASFITQYSTGQVSVEIEWELQKENSKRWNPEVQYTSNYAKSANVDFTVDNNGLYTEPRPIGTRYLTRPL

SEQ ID NO: 777 - protein, 736 aa, synthetic construct; identical to SEQ ID NO: 768
  REGION 1..736: note = source = /note="Description of Artificial Sequence: Synthetic polypeptide"

SEQ ID NO: 778 - protein, 735 aa, synthetic construct
  REGION 1..735: note = source = /note="Description of Artificial Sequence: Synthetic polypeptide"
MAADGYLPDWLEDTLSEGIRQWWKLKPGPPPPKPAERHKDDSRGLVLPGYKYLGPFNGLDKGEPVNEADAAALEHDKAYDRQLDSGDNPYLKYNHADAEFQERLKEDTSFGGNLGRAVFQAKKRVLEPLGLVEEPVKTAPGKKRPVEHSPVEPDSSSGTGKAGQQPARKRLNFGQTGDADSVPDPQPLGQPPAAPSGLGTNTMATGSGAPMADNNEGADGVGNSSGNWHCDSTWMGDRVITTSTRTWALPTYNNHLYKQISSQSGASNDNHYFGYSTPWGYFDFNRFHCHFSPRDWQRLINNNWGFRPKRLNFKLFNIQVKEVTQNDGTTTIANNLTSTVQVFTDSEYQLPYVLGSAHQGCLPPFPADVFMVPQYGYLTLNNGSQAVGRSSFYCLEYFPSQMLRTGNNFTFSYTFEDVPFHSSYAHSQSLDRLMNPLIDQYLYYLSRTNTPSGTTTQSRLQFSRAGASDIRDQSRNWLPGPCYRQQRVSKTSADNNNSEYSWTGATKYHLNGRDSLVNPGPAMASHKDDEEKFFPQSGVLIFGKQGSEKTNVDIEKVMITDEEEIRTTNPVATEQYGSVSTNLQRGNRQAATADVNTQGVLPGMVWQDRDVYLQGPIWAKIPHTDGHFHPSPLMGGFGLKHPPPQILIKNTPVPANPSTTFSAAKFASFITQYSTGQVSVEIEWELQKENSKRWNPEIQYTSNYNKSVNVDFTVDTNGVYSEPRPIGTRYLTRNL

SEQ ID NO: 779 - DNA, 2211 bp, synthetic construct
  misc_feature 1..2211: note = source = /note="Description of Artificial Sequence: Synthetic polynucleotide"
  source 1..2211: mol_type = other DNA
atggctgctgacggttatcttccagattggctcgaggacaacctttctgaaggcattcgtgagtggtgggctctgaaacctggagtccctcaacccaaagcgaaccaacaacaccaggacaaccgtcggggtcttgtgcttccgggttacaaatacctcggacccggtaacggactcgacaaaggagagccggtcaacgaggcggacgcggcagccctcgaacacgacaaagcttacgaccagcagctcaaggccggtgacaacccgtacctcaagtacaaccacgccgacgccgagtttcaggagcgtcttcaagaagatacgtcttttgggggcaaccttggcagagcagtcttccaggccaaaaagaggatccttgagcctcttggtctggttgaggaagcagctaaaacggctcctggaaagaagaggcctgtagatcagtctcctcaggaaccggactcatcatctggtgttggcaaatcgggcaaacagcctgccagaaaaagactaaatttcggtcagactggcgactcagagtcagtcccagaccctcaacctctcggagaaccaccagcagcccccacaagtttgggatctaatacaatggcttcaggcggtggcgcaccaatggcagacaataacgagggtgccgatggagtgggtaattcctcaggaaattggcattgcgattcccaatggctgggcgacagagtcatcaccaccagcaccagaacctgggccctgcccacttacaacaaccatctctacaagcaaatctccagccaatcaggagcttcaaacgacaaccactactttggctacagcaccccttgggggtattttgactttaacagattccactgccacttctcaccacgtgactggcagcgactcattaacaacaactggggattccggcccaagaaactcagcttcaagctcttcaacatccaagttaaagaggtcacgcagaacgatggcacgacgactattgccaataaccttaccagcacggttcaagtgtttacggactcggagtatcagctcccgtacgtgctcgggtcggcgcaccaaggctgcctcccgccgtttccagcggacgtcttcatggtccctcagtatggatacctcaccctgaacaacggaagtcaagcggtgggacgctcatccttttactgcccggagtacttcccttcgcagatgctaaggactggaaataacttccaattcagctataccttcgaggatgtaccttttcacagcagctacgctcacagccagagtttggatcgcttgatgaatcctcttattgatcagtatctgtactacctgaacagaacgcaaggaacaacctctggaacaaccaaccaatcacggctgctttttagccaggctgggcctcagtctatgtctttgcaggccagaaattggctacctgggccctgctaccggcaacagagactttcaaagactgctaacgacaacaacaacagtaactttccttggacagcggccagcaaatatcatctcaatggccgcgactcgctggtgaatccaggaccagctatggccagtcacaaggacgatgaagaaaaatttttccctatgcacggcaatctaatatttggcaaagaagggacaacggcaagtaacgcagaattagataatgtaatgattacggatgaagaagagattcgtaccaccaatcctgtggcaacagagcagtatggaactgtggcaaataacttgcagagctcaaatacagctcccacgactagaactgtcaatgatcagggggccttacctggcatggtgtggcaagatcgtgacgtgtaccttcaaggacctatctgggcaaagattcctcacacggatggacactttcatccttctcctctgatgggaggctttggactgaaacatccgcctcctcaaatcatgatcaaaaatactccggtaccggcaaatcctccgacgactttcagcccggccaagtttgcttcatttatcactcagtactccactggacaggtcagcgtggaaattgagtgggagctacagaaagaaaacagcaaacgttggaatccagagattcagtacacttccaactacaacaagtctgttaatgtggactttactgtagacactaatggtgtttatagtgaacctcaccctattggaacccggtatctcacacgaaacttgtaa

SEQ ID NO: 780 - DNA, 2211 bp, synthetic construct
  misc_feature 1..2211: note = source = /note="Description of Artificial Sequence: Synthetic polynucleotide"
  source 1..2211: mol_type = other DNA
atggctgctgatggttatcttccagattggctcgaggacaacctttctgaaggcattcgtgagtggtgggctctgaaacctggagtccctcaacccaaagcgaaccaacaacaccaggacaaccgtcggggtcttgtgcttccgggttacaaatacctcggacccggtaacggactcgacaaaggagagccggtcaacgaggcggacgcggcagccctcgaacacgacaaagcttacgaccagcagctcaaggccggtgacaacccgtacctcaagtacaaccacgccgacgccgagtttcaggagcgtcttcaagaagatacgtcttttgggggcaaccttggcagagcagtcttccaggccaaaaagaggatccttgagcctcttggtctggttgaggaagcagctaaaacggctcctggaaagaagaggcctgtagatcagtctcctcaggaaccggactcatcatctggtgttggcaaatcgggcaaacagcctgccagaaaaagactaaatttcggtcagactggcgactcagagtcagtcccagaccctcaacctctcggagaaccaccagcagcccccacaagtttgggatctaatacaatggcttcaggcggtggcgcaccaatggcagacaataacgagggtgccgatggagtgggtaattcctcaggaaattggcattgcgattcccaatggctgggcgacagagtcatcaccaccagcaccagaacctgggccctgcccacttacaacaaccatctctacaagcaaatctccagccaatcaggagcttcaaacgacaaccactactttggctacagcaccccttgggggtattttgactttaacagattccactgccacttctcaccacgtgactggcagcgactcattaacaacaactggggattccggcccaagaaactcagcttcaagctcttcaacatccaagttaaagaggtcacgcagaacgatggcacgacgactgttgccaataaccttaccagcacggttcaagtgtttacggactcggagtatcaactcccgtacgtgctcgggtcggcgcaccaaggctgtctcccgccgtttccagcggacgtcttcatggtccctcagtatggatacctcaccctgaacaacggaagtcaagcggtgggacgctcatccttttactgcctggagtacttcccttcgcagatgctaaggactggaaataacttccaattcagctataccttcgaggatgtaccttttcacagcagctacgctcacagccagagtttggatcgcttgatgaatcctcttattgatcagtatctgtactacctgaacagaacgcaaggaacaacctctggaacaaccaaccaatcacggctgctttttagccaggctgggcctcagtctatgtctttgcaggccagaaattggctacctgggccctgctaccggcaacagagactttcaaagactgctaacgacaacaacaacagtaactttccttggacagcggccagcaaatatcatctcaatggccgcgactcgctggtgaatccaggaccagctatggccagtcacaaggacgatgaagaaaaatttttccctatgcacggcaatctaatatttggcaaagaagggacaacggcaagtaacgcagaattagataatgtaatgattacggatgaagaagagattcgtaccaccaatcctgtggcaacagagcagtatggaactgtggcaaataacttgcagagctcaaatacagctcccacgactagaactgtcaatgatcagggggccttacctggcatggtgtggcaagatcgtgacgtgtaccttcaaggacctatctgggcaaagattcctcacacggatggacactttcatccttctcctctgatgggaggctttggactgaaacatccgcctcctcaaatcatgatcaaaaatactccggtaccggcaaatcctccgacgactttcagcccggccaagtttgcttcatttatcactcagtactccactggacaggtcagcgtggaaattgagtgggagctacagaaagaaaacagcaaacgttggaatccagagattcagtacacttccaactacaacaagtctgttaatgtggactttactgtagacactaatggtgtttatagtgaacctcgccctattggaacccggtatctcacacgaaacttgtaa

SEQ ID NO: 781 - DNA, 2211 bp, synthetic construct
  misc_feature 1..2211: note = source = /note="Description of Artificial Sequence: Synthetic polynucleotide"
  source 1..2211: mol_type = other DNA
atggctgctgacggttatcttccagattggctcgaggacaacctttctgaaggcattcgtgagtggtgggctctgaaacctggagtccctcaacccaaagcgaaccaacaacaccaggacaaccgtcggggtcttgtgcttccgggttacaaatacctcggacccggtaacggactcgacaaaggagagccggtcaacgaggcggacgcggcagccctcgaacacgacaaagcttacgaccagcagctcaaggccggtgacaacccgtacctcaagtacaaccacgccgacgccgagtttcaggagcgtcttcaagaagatacgtcttttgggggcaaccttggcagagcagtcttccaggccaaaaagaggatccttgagcctcttggtctggttgaggaagcagctaaaacggctcctggaaagaagaggcctgtagatcagtctcctcaggaaccggactcatcatctggtgttggcaaatcgggcaaacagcctgccagaaaaagactaaatttcggtcagactggcgactcagagtcagtcccagaccctcaacctctcggagaaccaccagcagcccccacaagtttgggatctaatacaatggcttcaggcggtggcgcaccaatggcagacaataacgagggtgccgatggagtgggtaattcctcaggaaattggcattgcgattcccaatggctgggcgacagagtcatcaccaccagcaccagaacctgggccctgcccacttacaacaaccatctctacaagcaaatctccggccaatcaggagcttcaaacgacaaccactactttggctacagcaccccttgggggtattttgactttaacagattccactgccacttctcaccacgtgactggcagcgactcattaacaacaactggggattccggcccaagaaactcagcttcaagctcttcaacatccaagttaaagaggtcacgcagaacgatggcacgacgactattgccaataaccttaccagcacggttcaagtgtttacggactcggagtatcagctcccgtacgtgctcgggtcggcgcaccaaggctgtctcccgccgtttccagcggacgtcttcatggtccctcagtatggatacctcaccctgaacaacggaagtcaagcggtgggacgctcatccttttactgcctggagtacttcccttcgcagatgctaaggactggaaataacttccaattcagctataccttcgaggatgtaccttttcacagcagctacgctcacagccagagtttggatcgcttgatgaatcctcttattgatcagtatctgtactacctgaacagaacgcaaggaacaacctctggaacaaccaaccaatcacggctgctttttagccaggctgggcctcagtctatgtctttgcaggccagaaattggctacctgggccctgctaccggcaacagagactttcaaagactgctaacggcaacaacaacagtaactttccttggacagcggccagcaaatatcatctcaatggccgcgactcgctggtgaatccaggaccagctatggccagtcacaaggacgatgaagaaaaatttttccctatgcacggcaatctaatatttggcaaagaagggacaacggcaagtaacgcagaattagataatgtaatgattacggatgaagaagagattcgtaccaccaatcctgtggcaacagagcagtgtggaactgtggcaaataacttgcagagctcaaatacagctcccacgactagaactgtcaatgatcagggggccttacctggcatggtgtggcaagatcgtgacgtgtaccttcaaggacctatctgggcaaagattcctcacacggatggacactttcatccttctcctctgatgggaggctttggactgaaacatccgcctcctcaaatcatgatcaaaaatactccggtaccggcaaatcctccgacgactttcagcccggccaagtttgcttcatttatcactcagtactccactggacaggtcagcgtggaaattgagtgggagctacagaaagaaaacagcaaacgttggaatccagagattcagtacacttccaactacaacaagtctgttaatgtggactttactgtagacactaatggtgtttatagtgaacctcgccctattggaacccggtatctcacacgaaacttgtaa

SEQ ID NO: 782 - DNA, 2212 bp, synthetic construct
  variation 1283: note = a, c, t, or g
  misc_feature 1..2212: note = source = /note="Description of Artificial Sequence: Synthetic polynucleotide"
  source 1..2212: mol_type = other DNA
atggctgctgacggttatcttccagattggctcgaggacaacctttctgaaggcattcgtgagtggtgggctctgaaacctggagtccctcaacccaaagcgaaccaacaacaccaggacaaccgtcggggtcttgtgcttccgggttacaaatacctcggaccgggtaacggactcgacaaaggagagccggtcaacgaggcggacgcggcagccctcgaacacgacaaagcttacgaccagcagctcaaggccggtgacaacccgtacctcaagtacaaccacgccgacgccgagtttcaggagcgtcttcaagaagatacgtcttttgggggcaaccttggcagagcagtcttccaggccaaaaagaggatccttgagcctcttggtctggttgagggagcagctaaaacggctcctggaaagaagaggcctgtagatcagtctcctcaggaaccggactcatcatctggtgttggcaaatcgggcaaacagcctgccagaaaaagactaaatttcggtcagactggcgactcagagtcagtcccagaccctcaacctctcggagaaccaccagcagcccccacaagtttgggatctaatacaatggcttcaggcggtggcgcaccaatggcagacaataacgagggtgccgatggagtgggtaattcctcaggaaattggcattgcgattcccaatggctgggcgacagagtcatcaccaccagcaccagaacctgggccctgcccacttacaacagccatctctacaagcaaatctccagccaatcaggagcttcaaacgacaaccactactttggctacagcaccccttgggggtattttgactttaacagattccactgccacttctcaccacgtgactggcagcgactcattaacaacaactggggattccggcccaagaaactcagcttcaagctcttcaacatccaagttaaagaggtcacgcagaacgatggcacgacgactattgccaataaccttaccagcacggtccaagtgtttacggactcggagtatcagctcccgtacgtgctcgggtcggcgcaccaaggctgtctcccgccgtttccagcggacgccttcatggtccctcagtatggatacctcaccctgaacaacggaagtcaagcggtgggacgctcatccttttactgcctggagtacttcccttcgcagatgctaaggactggaaataacttccaattcagctataccttcgaggatgtaccttttcacggcagctacgctcacagccngagtttggatcgcttgatgaatcctcttattgatcagtatctgtactacctgaacagaacgcaaggaacaacctctggaacaaccaaccaatcacggctgctttttagccaggctgggcctcagtctatgtctttgcaggccagaaattggctacctgggccctgctaccggcaacagagacttttcaaagactgctaacgacaacaacaacagtaactttccttggacagcggccagcaaatatcatctcaatggccgcgactcgctggtgaatccaggaccagctatggccagtcacaaggacgatgaagaaaaatttttccctatgcacggcaatctaatatttggcaaagaagggacaacggcaagtaacgcagaattagataatgtaatgattacggatgaagaagagattcgtaccaccaatcctgtggcaacagagcagtatggaactgtggcaaataacttgcagagctcaaatacagctcccacgactagaactgtcaatgatcagggggccttacctggcatggtgtggcaagatcgtgacgtgtaccttcaaggacctatctgggcaaagattcctcacacggatggacactttcatccttctcctctgatgggaggctttggactgaaacatccgcctcctcaaatcatgatcaaaaatactccggtaccggcaaatcctccgacgactttcagcccggccaagtttgcttcatttatcactcagtactccactggacaggtcagcgtggaaattgagtgggagctacagaaagaaaacagcaaacgttggaatccagagattcagtacacttccaactacaacaagtctgttaatgtggactttactgtagacactaatggtgtttatagtgaacctcgccctattggaacccggtatctcacacgaaactcgtaa

SEQ ID NO: 783 - DNA, 2212 bp, synthetic construct
  misc_feature 1..2212: note = source = /note="Description of Artificial Sequence: Synthetic polynucleotide"
  source 1..2212: mol_type = other DNA
atggctgctgacggttatcttccagattggctcgaggacaacctttctgaaggcattcgtgagtggtgggctctgaaacctggagtccctcaacccaaagcgaaccaacaacaccaggacaaccgtcggggtcttgtgcttccgggttacaaatacctcggacccggtaacggactcgacaaaggagagccggtcaacgaggcggacgcggcagccctcgaacacgacaaagcttacgaccagcagctcaaggccggtgacaacccgtacctcaagtacaaccacgccgacgccgagtttcaggagcgtcttcaagaagatacgtcttttgggggcaaccttggcagagcagtcttccaggccaaaaagaggatccttgagcctcttggtctggttgagggagcagctaaaacggctcctggaaagaagaggcctgtagatcagtctcctcaggaaccggactcatcatctggtgttggcaaatcgggcaaacagcttgccagaaaaagactaaatttcggtcagactggcgactcagagtcagtcccagaccctcaacctctcggagaaccaccagcagcccccacaagtttgggatctaatacaatggcttcaggcggtggcgcaccaatggcagacaataacgagggtgccgatggagtgggtaattcctcaggaaattggcattgcgattcccaatggctgggcgacagagtcatcaccaccagcaccagaacctgggccctgcccacttacaacagccatctctacaagcaaatctccggccaatcaggagcttcaaacgacaaccactactttggctacagcaccccctgggggtattttgactttaacagattccactgccacttctcaccacgtgactggcagcgactcattaacaacaactggggattccggcccaagaaactcagcttcaagctcttcaacatccaagttaaagaggtcacgcagaacgatggcacgacgactattgccaataaccttaccagcacggttcaagtgtttacggactcggagtatcagctcccgtacgtgctcgggtcggcgcaccaaggctgtctcccgccgtttccagcggacgtcttcatggtccctcagtatggatacctcaccctgaacaacggaagtcaagcggtgggacgctcatccttttactgcctggagtacttcccttcgcagatgctaaggactggaaataacttccaattcagctataccttcgaggatgtaccttttcacagcagctacgctcacagccagagtttggatcgcttgatgaatcctcttattgatcagtatctgtactacctgaacagaacgcaaggaacaacctctggaacaaccaaccaatcacggctgctttttagccaggctgggcctcagtctatgtctttgcaggccagaaattggctacctgggccctgctaccggcaacagagactttcaaagactgctaacgacaacaacaacagtaactttccttggacagcggccagcaaatatcatctcaatggccgcgactcgctggtgaatcccaggaccagctatggccagtcacaaggacgatgaagaaaaatttttccctatgcacggcaatctaatatttggcaaagaagggacaacggcaagtaacgcagaattagataatgtaatgattacggatgaagaagagattcgtaccaccaatcctgtggcaacagagcagtatggaactgtggcaaataacttgcagagctcaaatacagctcccacgactagaactgtcaatgatcagggggccttacctggcatggtgtggcaagatcgtgacgtgtaccttcaaggacctatctgggcaaagattcctcacacggatggacactttcatccttctcctctgatgggaggctttggactgaaacatccgcctcctcaaatcatgatcaaaaatactccggtaccggcaaatcctccgacgactttcagcccggccaagtttgcttcatttatcactcagtactccactggacaggtcagcgtggaaattgagtgggagctacagaaagaaaacagcaaacgttggaatccagagattcagtacacttccaactacaacaagtctgttaatgtggactttactgtagacactaatggtgtttatagtgaacctcgccctattggaacccggtatctcacacgaaacttgtaa

SEQ ID NO: 784 - DNA, 2212 bp, synthetic construct
  misc_feature 1..2212: note = source = /note="Description of Artificial Sequence: Synthetic polynucleotide"
  source 1..2212: mol_type = other DNA
atggctgctgacggttatcttccagattggctcgaggacaacctttctgaaggcattcgtgagtggtgggctctgaaacctggagtccctcaacccaaagcgaaccaacaacaccaggacgaccgtcggggtcttgtgcttccgggttacaaatacctcggacccggtaacggactcgacaaaggagagccggtcaacgaggcggacgcggcagccctcgaacacgacaaagcttacgaccagcagctcaaggccggtgacaacccgtgcctcaagtacaaccacgccgacgccgagtttcaggagcgtcttcaagaagatacgtcttttgggggcaaccttggcagagcagtcttccaggccaaaaagaggatccttgagcctcttggtctggttgaggaagcagctaaaacggctcctggaaagaagaggcctgtagatcagtctcctcaggaaccggactcatcatctggtgttggcaaatcgggcaaacagcctgccagaaaaagactaaatttcggtcagactggcgactcagagtcagtcccagaccctcaacctctcggagaaccaccagcagcccccacaagtttgggatctaatacaatggcttcaggcggtagcgcaccaatggcagacaataacgagggtgccgatggagtgggtaattcctcaggaaattggcattgcgattcccaatggctgggcgacagagtcatcaccaccagcaccagaacctgggccctgcccacttacaacaaccatctctacaagcaaatctccagccaatcaggagcttcaaacgacaaccactactttggctacagcaccccttgggggtattttgactttaacagattccactgccacttctcaccacgtgactggcagcgactcattaacaacaactggggattccggcccaagaaactcagcttcaagctcttcaacatccaagttaaagaggtcacgcagaacgatggcacgacgactattgccaataaccttaccagcacggttcaagtgtttacggactcggagtatcagctcccgtacgtgctcgggtcggcgcaccaaggctgtctcccgccgtttccagcggacgtcttcatggtccctcagtatggatacctcaccctgaacaacggaagtcaagcggtgggacgctcatccttttactgcctggagtacttcccttcgcagatgctaaggactggaaataacttccaattcagctataccttcgaggatgtaccttttcacagcagctacgctcacagccagagtttggatcgcttgatggatcctcttattgatcagtatctgtactacctgaacagaacgcaaggaacaacctctggaacaaccaaccaatcacggctgctttttagccaggctgggcctcagtctatgtctttgcaggccagaaattggctacctgggccctgctaccggcaacagagactttcaaagactgctaacgacaacaacaacagtaactttccttggacagcggccagcaaatatcatctcaatggccgcgactcgctggtgaatccaggaccagctatggccagtcacaaaggacgatgaagaaaaatttttccctatgcacggcaatctaatatttggcaaagaagggacaacggcaagtaacgcagaattagataatgtaatgattacggatgaagaagagattcgtaccaccaatcctgtggcaacagagcagtatggaactgtggcaaataacttgcagagctcaaatacagctcccacgactagaactgtcaatgatcagggggccttacctggcatggtgtggcaagatcgtgacgtgtaccttcaaggacctatctgggcaaagattcctcacacggatggacactttcatccttctcctctgatgggaggctttggactgaaacatccgcctcctcaaatcatgatcaaaaatactccggtaccggcaaatcctccgacgactttcagcccggccaagtttgcttcatttatcactcagtactccactggacaggtcagcgtggaaattgagtgggagctacagaaagaaaacagcaaacgttggaatccagagattcagtacacttccaactacaacaagtctgttaatgtggactttactgtagacactaatggtgtttatagtgaacctcgccctattggaacccggtatctcacacgaaacctgtaa

SEQ ID NO: 785 - DNA, 2211 bp, synthetic construct
  misc_feature 1..2211: note = source = /note="Description of Artificial Sequence: Synthetic polynucleotide"
  source 1..2211: mol_type = other DNA
atggctgctgacggttatcttccagattggctcgaggacaacctttctgaaggcattcgtgagtggtgggctctgaaacctggagtccctcaacccaaagcgaaccaacaacaccaggacgaccgtcggggtcttgtgcttccgggttacaaatacctcggacccggtaacggactcgacaaaggagagccggtcaacgaggcggacgcggcagccctcgaacacgacaaagcttacgaccagcagctcaaggccggtgacaacccgtacctcaagtacaaccacgccgacgccgagtttcaggagcgtcttcaagaagatacgtcttttgggggcaaccttggcagagcagtcttccaggccaaaaagaggatccttgagcctcttggtctggttgaggaagcagctaaaacggctcctggaaagaagaggcctgtagatcagtctcctcaggaaccggactcatcatctggtgttggcaaatcgggcaaacagcctgccagaaaaagactaaatttcggtcagactggcgactcagagtcagtcccagaccctcaacctctcggagaaccaccagcagcccccacaagtttgggatctaatacaatggcttcaggcggtggcgcaccaatggcagacaataacgagggtgccgatggagtgggtaattcctcaggaaattggcattgcgattcccaatggctgggcaacagagtcatcaccaccagcaccagaacctgggccctgcccacttacaacaaccatctctacaagcaaatctccagccaatcaggagcttcaaacgacaaccactactttggctacagcaccccttgggggtattttgactttaacagattccactgccacttctcaccacgtgactggcagcgactcattaacaacaactggggattccggcccaagaaactcagcttcaagctcttcaacatccaagttaaagaggtcacgcagaacgatggcacgacgactattgccaataaccttaccagcacggttcaagtgtttacggactcggagtatcagctcccgtacgtgctcgggtcggcgcaccaaggctgtctcccgccgtttccagcggacgtcttcatggtccctcagtatggatacctcaccctgaacaacggaagtcaagcggtgggacgctcatccttttactgcctggagtacttcccttcgcagatgctaaggactggaaataacttccaattcagctataccttcgaggatgtaccttttcacagcagctacgctcacagccagagtttggatcgcttgatgaatcctcttattgatcagtatctgtactacctgaacagaacgcaaggaacaacctctggaacaaccaaccaatcacggctgctttttagccaggctgggcctcagtctatgtctttgcaggccagaaattggctacctgggccctgctaccggcaacagagactttcaaagactgctaacgacaacaacaacagtaactttccttggacagcggccagcaaatatcatctcaatggccgcgactcgctggtgaatccaggaccagctatggccagtcacaaggacgatgaagaaaaatttttccctatgcacggcaatctaatatttggcaaagaagggacaacggcaagtaacgcagaattagataatgtaatgattacggatgaagaagagattcgtaccaccaatcctgtggcaacagagcagtatggaactgtggcaaataacttgcagagctcaaatacagctcccacgactagaactgtcaatgatcagggggccttacctggcatggtgtggcaagatcgtgacgtgtaccttcaaggacctatctgggcaaagattcctcacacggatggacactttcatccttctcctctgatgggaggctttggactgaaacatccgcctcctcaaatcatgatcaaaaatactccggtaccggcaaatcctccgacgactttcagcccggccaagtttgcttcatttatcactcagtactccactggacaggtcagcgtggaaattgagtgggagctacagaaagaaaacagcaaacgttggaatccagagattcagtacacttccaactacaacaagtctgttaatgtggactttactgtagacactaatggtgtttatagtgaacctcgccctattggaacccggtatctcacacgaaacttgtaa

SEQ ID NO: 786 - DNA, 2211 bp, synthetic construct
  misc_feature 1..2211: note = source = /note="Description of Artificial Sequence: Synthetic polynucleotide"
  source 1..2211: mol_type = other DNA
atggctgctgacggttatcttccagattggctcgaggacaacctttctgaaggcattcgtgagtggtgggctctgaaacctggagtccctcaacccaaagcgaaccaacaacaccaggacgaccgtcggggtcttgtgcttccgggttacaaatacctcggacccggtaacggactcgacaaaggagagccggtcaacgaggcggacgcggcagccctcgaacacgacaaagcttacgaccagcagctcaaggccggtgacaacccgtacctcaagtacaaccacgccgacgccgagtttcaggagcgtcttcaagaagatacgtcttttgggggcaaccttggcagagcagtcttccaggccaaaaagaggatccttgagcctcttggtctggttgaggaagcagctaaaacggctcctggaaagaagaggcctgtagatcagtctcctcaggaaccggactcatcatctggtgttggcaaatcgggcaaacagcctgccagaaaaagactaaatttcggtcagactggcgactcagagtcagtcccagaccctcaacctctcggagaaccaccagcagcccccacaagtttgggatctaatacaatggcttcaggcggtggcgcaccaatggcggacaataacgagggtgccgatggagtgggtaattcctcaggaaattggcattgcgattcccaatggctgggcgacagagtcatcaccaccagcaccagaacctgggccctgcccacttacaacaaccatctctacaagcaaatctccagccaatcaggagcttcaaacgacaaccactactttggctacagcaccccttgggggtattttgactttaacagattccactgccacttctcaccacgtgactggcagcgactcattaacaacaactggggattccggcccaagaaactcagcttcaagctcttcaacatccaagttaaagaggtcacgcagaacgatggcacgacgactattgccaataaccttaccagcacggttcaagtgtttacggactcggagtatcagctcccgtacgtgctcgggtcggcgcaccaaggctgtctcccgccgtttccagcggacgtcttcatggtccctcagtatggatacctcaccctgaacaacggaagtcaagcggtgggacgctcatccttttactgcctggagtacttcccttcgcagatgctaaggactggaaataacttccaattcagctataccttcgaggatgtaccttttcacagcagctacgctcacagccagagtttggatcgcttgatgaatcctcttattgatcagtatctgtactacctgaacagaacgcaaggaacaacctctggaacaaccaaccaatcacggctgctttttagccaggctgggcctcagtctatgtctttgcaggccagaaattggctacctgggccctgctaccggcaacagagactttcaaagactgctaacgacaacaacaacagtaactttccttggacagcggccagcaaatatcatctcaatggccgcgactcgctggtgaatccaggaccagctatggccagtcacaaggacgatgaagaaaaatttttccctatgcacggcaatctaatatttggcaaagaagggacaacggcaagtaacgcagaattagataatgtaatgattacggatgaagaagagattcgtaccaccaatcctgtggcaacagtgcagtatggaactgtggcaaataacttgcagagctcaaatacagctcccacgactagaactgtcaatgatcagggggccttacctggcatggtgtggcaagatcgtgacgtgtaccttcaaggacctatctgggcaaagattcctcacacggatggacactttcatccttctcctctgatgggaggctttggactgaaacatccgcctcctcaaatcatgatcaaaaatactccggtaccggcaaatcctccgacgactttcagcccggccaagtttgcttcatttatcactcagtactccactggacaggtcagcgtggaaattgagtgggagctacagaaagaaaacagcaaacgttggaatccagagattcagtacacttccaactacaacaagtctgttaatgtggactttactgtagacactaatggtgtttatagtgaacctcgccctattggaacccggtatctcacacgaaacttgtaa

SEQ ID NO: 787 - DNA, 2211 bp, synthetic construct
  misc_feature 1..2211: note = source = /note="Description of Artificial Sequence: Synthetic polynucleotide"
  source 1..2211: mol_type = other DNA
atggctgctgacggttatcttccagattggctcgaggacaacctttctgaaggcattcgtgagtggtgggctctgaaacctggagtccctcaacccaaagcgaaccaacaacaccaggacaaccgtcggggtcttgtgcttccgggttacaaatacctcggacccggtaacggactcgacaaaggagagccggtcaacgaggcggacgcggcagccctcgaacacgacaaagcttacgaccagcagctcaaggccggtgacaacccgtacctcaagtacaaccacgccgacgccgagtttcaggagcgtcttcaagaagatacgtcttttgggggcaaccttggcagagcagtcttccaggccaaaaaggggatccttgagcctcttggtctggttgaggaagcagctaaaacggctcctggaaagaagaggcctgtagatcagtctcctcaggaaccggactcatcatctggtgttggcaaatcgggcaaacagcctgccagaaaaagactaaatttcggtcagactggcgactcagagtcagtcccagaccctcaacctctcggagaaccaccagcagcccccacaagtttgggatctaatacaatggcttcaggcggtggcgcaccaatggcagacaataacgagggtgccgatggagtgggtaattcctcaggaaattggcattgcgattcccaatggctgggcgacagagtcatcaccaccagcaccagaacctgggccctgcccacttacaacaaccatctctacaagcaaatctccagccaatcaggagcttcaaacgacaaccactactttggctacagcaccccttgggggtattttgactttaacagattccactgccacttctcaccacgtgactggcagcgactcattaacaacaactggggattccggcccaagaaactcagcttcaagctcttcaacatccaagttaaagaggtcacgcagaacgatggcacgacgactattgccaataaccttaccagcacggttcaagtgtttacggactcggagtatcagctcccgtacgtgttcgggtcggcgcaccaaggctgtctcccgccgtttccagcggacgtcttcatggtccctcagtatggatacctcaccctgaacaacggaagtcaagcggtgggacgctcatccttttactgcctggagtacttcccttcgcagatgctaaggactggaaataacttccaattcagctataccttcgaggatgtaccttttcacagcagctacgctcacagccagagttcggatcgcttgatgaatcctcttattgatcagtatctgtactacctgaacagaacgcaaggaacaacctctggaacaaccaaccaatcacggctgctttttagccaggctgggcctcagtctatgtctttgcaggccagaaattggctacctgggccctgctaccggcaacagagactttcaaagactgctaacgacaacaacaacagtaactttccttgaacagcggccagcaaatatcatctcaatggccgcgactcgctggtgaatccaggaccagctatggccagtcacaaggacgatgaagaaaaatttttccctatgcacggcaatctaatatttggcaaagaagggacaacggcaagtaacgcagaattagataatgtaatgattacggatgaagaagagattcgtaccaccaatcctgtggcaacagagcagtatggaactgtggcaaataacttgcagagctcaaatacagctcccacgactagaactgtcaatgatcagggggccttacctggcatggtgtggcaagatcgtgacgtgtaccttcaaggacctatctgggcaaagattcctcacacggatggacactttcatccttctcctctgatgggaggctttggactgaaacatccgcctcctcaaatcatgatcaaaaatactccggtaccggcaaatcctccgacgactttcagcccggccaagtttgcttcatttatcactcagtactccactggacaggtcagcgtggaaattgagtgggagctacagaaagaaaacagcaaacgttggaatccagagattcagtacacttccaactacaacaagtctgttaatgtggactttactgtagacactaatggtgtttatagtgaacctcgccctattggaacccggtatctcacacgaaacttgtaa

SEQ ID NO: 788 - DNA, 2211 bp, synthetic construct
  misc_feature 1..2211: note = source = /note="Description of Artificial Sequence: Synthetic polynucleotide"
  source 1..2211: mol_type = other DNA
atggctgctgacggttatcttccagattggctcgaggacaacctttctgaaggcattcgtgagtggtgggctctgaaacctggagtccctcaacccaaagcgaaccaacaacaccaggacaaccgtcggggtcttgtgcttccgggttacaaatacctcggacccggtaacggactcgacgaaggagagccggtcaacgaggcggacgcggcagccctcgaacacgacaaagcttacgaccagcagctcaaggccggtgacaacccgtacctcaagtacaaccacgccgacgccgagtttcaggagcgtcttcaagaagatacgtcttttgggggcaaccttggcagagcagtcttccaggccaaaaagaggatccttgagcctcttggtctggttgagggagcagctaaaacggctcctggaaagaagaggcctgtagatcagtctcctcaggaaccggactcatcatctggtgttggcaaatcgggcaaacagcctgccagaaaaagactaaatttcggtcagactggcgactcagagtcagtcccagaccctcaacctctcggagaaccaccagcagcccccacaagtttgggatctaatacaatggcttcaggcggtggcgcaccaatggcagacaataacgagggtgccgatggagtgggtaattcctcaggaaattggcattgcgattcccaatggctgggcgacagagtcatcaccaccagcaccagaacctgggccctgcccacttacaacagccacctctacaagcaaatctccagccaatcaggagcttcaaacgacaaccactactttggctacagcaccccttgggggtattttgactttaacagattccactgccacttctcaccacgtgactggcagcgactcattaacaacaactggggattccggcccaagaaactcagcttcaagctcttcaacatccaagttaaagaggtcacgcagaacgatggcacgacgactattgccaataaccttaccagcacggttcaagtgtttacggactcggagtatcagctcccgtacgtgctcgggtcggcgcaccaaggctgtctcccgccgtttccagcggacgtcttcatggtccctcagtatggatacctcaccctgaacaacggaagtcaagcggtgggacgctcatccttttactgcctggagtacttcccttcgcagatgctaaggactggaaataacttccaattcagctataccttcgaggatgtaccttttcacagcagctacgctcacagccagagtttggatcgcttgatgaatcctcttattgatcagtatctgtactacctgaacagaacgcaaggaacaacctctggaacaaccaaccaatcacggctgctttttagccaggctgggcctcagtctatgtctttgcaggccagaaattggctacctgggccctgctaccggcaacagagactttcaaagactgctaacgacaacaacaacagtaactttccttggacagcggccagcaaatatcatctcaatggccgcgactcgctggtgaatccaggaccagctatggccagtcacaaggacgatgaagaaaaatttttccctatgcacggcaatctaatatttggcaaagaagggacaacggcaagtaacgcagaattagataatgtaatgattacggatgaagaagagattcgtaccaccaatcctgtggcaacagagcagtatggaactgtggcaaataacttgcagagctcaaatacagctcccacgactagaactgtcaatgatcagggggccttacctggcatggtgtggcaagatcgtgacgtgtaccttcaaggacctatctgggcaaagattcctcacacggatggacactttcatccttctcctctgatgggaggctttggactgaaacatccgcctcctcaaatcatgatcaaaaatactccggtaccggcaaatcctccgacgactttcagcccggccaagtttgcttcatttatcactcagtactccactggacaggtcagcgtggaaattgagtgggagctacagaaagaaaacagcaaacgttggaatccagagattcagtacacttccaactacaacaagtctgttaatgtggactttactgtagacactaatggtgtttatagtgaacctcgccctattggaacccggtatctcacacgaaacttgtaa

SEQ ID NO: 789 - DNA, 2211 bp, synthetic construct
  misc_feature 1..2211: note = source = /note="Description of Artificial Sequence: Synthetic polynucleotide"
  source 1..2211: mol_type = other DNA
atggctgctgacggttatcttccagattggctcgaggacaacctttctgaaggcattcgtgagtggtgggctctgaaacctggagtccctcaacccaaagcgaaccaacaacaccaggacaaccgtcggggtcttgtgcttccgggttacaaatacctcggacccggtaacggactcgacaaaggagagccggtcaacgaggcggacgcggcagccctcgaacacgacaaagcttacgaccagcagctcaaggccggtgacaacccgtacctcaagtacaaccacgccgacgccgagtttcaggagcgtcttcaagaagatacgtcttttgggggcaaccttggcagagcagtcttccaggccaaaaagaggatccttgagcctcttggtctggttgagggagcagctaaaacggctcctggaaagaagaggcctgtagatcagtctcctcaggaaccggactcatcatctggtgttggcaaatcgggcaaacagcctgccagaaaaagactaaatttcggtcagactggcgactcagagtcagtcccagaccctcaacctctcggagaaccaccagcagcccccacaagtttgggatctaatacaatggcttcaggcggtggcgcaccaatggcagacaataacgagggtgccgatggagtgggtaattcctcaggaaattggcattgcgattcccaatggctgggcgacagagtcatcaccaccagcaccagaacctgggccctgcccacttacaacagccatctctacaagcaaatctccagccaatcaggagcttcaaacgacaaccactactttggctacagcaccccttggggtattttgactttaacagattccactgccacttctcaccacgtgactggcagcgactcattaacaacaactggggattccggcccaagaaactcagcttcaagctcttcaacatccaagttaaagaggtcacgcagaacgatggcacgacgactattgccaataaccttaccagcacggttcaagtgtttacggactcggagtatcagctcccgtacgtgctcgggtcggcgcaccaaggctgtctcccgccgtttccagcggacgccttcatggtccctcagtatggatacctcaccctgaacaacggaagtcaagcggtgggacgctcatccttttactgcctggagtacttcccttcgcagatgctaaggactggaaataacttccaattcagctataccctcgaggatgtaccttttcacagcagctacgctcacagccagagtttggatcgcttgatgaatcctcttattgatcagtatctgtactacctgaacagaacgcaaggaacaacctctggaacaaccaaccaatcacggctgctttttagccaggctgggcctcagtctatgtctttgcaggccagaaattggctacctgggccctgctaccggcaacagagactttcaaagactgctaacgacaacaacaacagtaactttccttggacagcggccagcaaatatcatctcaatggccgcgactcgctggtgaatccaggaccagctatggccagtcacaaaggacgatgaagaaaaatttttccctatgcacggcaatctaatatttggcaaagaagggacaacggcaagtaacgcagaattagatagtgtaatgattacggatgaagaagagattcgtaccaccaatcctgtggcaacagagcagtatggaactgtggcaaataacttgcagagctcaaatacagctcccacgactagaactgtcaatgatcagggggccttacctggcatggtgtggcaagatcgtgacgtgtaccttcaaggacctatctgggcaaagattcctcacacggatggacactttcatccttctcctctgatgggaggctttggactgaaacatccgcctcctcaaatcatgatcaaaaatactccggtaccggcaaatcctccgacgactttcagcccggccaagtttgcttcatttatcactcagtactccactggacaggtcagcgtggaaattgagtgggagctacagaaagaaaacagcaaacgttggaatccagagattcagtacacttccaactacaacaagtctgttaatgtggactttactgtagacactaatggtgtttatagtgaacctcgccctattggaacccggtatctcacacgaaacttgtaa

SEQ ID NO: 790 - DNA, 2205 bp, synthetic construct
  misc_feature 1..2205: note = source = /note="Description of Artificial Sequence: Synthetic polynucleotide"
  source 1..2205: mol_type = other DNA
atgactgacggttaccttccagattggctagaggacaacctctctgagggcgttcgagagtggtgggcgctgcaacctggagcccctaaacccaaggcaaatcaacaacatcaggacaacgctcggggtcttgtgcttccgggttacaaatacctcggacccggcaacggactcgacaagggggaacccgtcaacgcagcggacgcggcagccctcgagcacgacaaggcctacgaccagcagctcaaggccggtgacaacccctacctcaagtacaaccacgccgacgcggagttccagcagcggcttcagggcgacacatcgtttgggggcaacctcggcagagcagtcttccaggccaaaaagagggttcttgaacctcttggtctggttgagcaagcgggtgagacggctcctggaaagaagagaccgttgattgaatccccccagcagcccgactcctccacgggtatcggcaaaaaaggcaagcagccggctaaaaagaagctcgttttcgaagacgaaactggagcaggcgacggaccccctgagggatcaacttccggagccatgtctgatgacagtgagatgcgtgcagcaactggcggagctgcagtcgagggcggacaaggtgccgatggagtgggtaatgcctcgggtgattggcattgcgattccacctggtctgagggccacgtcacgaccaccagcaccagaacctgggtcttgcccacctacaacaaccacctctacaagcgactcggagagagcctgcagtccaacacctacaacggattctccaccccctggggatactttgacttcaaccgcttccactgccacttctcaccacgtgactggcagcgactcatcaacaacaactggggcatgcgacccaaagccatgcgggtcaaaatcttcaacatccaggtcaaggaggtcacgacgtcgaacggcgagacaacggtggctaataaccttaccagcacggttcagatctttgcggactcgtcgtacgaactgccgtacgtgatggatgcgggtcaagagggcagcctgcctccttttcccaacgacgtctttatggtgccccagtacggctactgtggactggtgaccggcaacacttcgcagcaacagactgacagaaatgccttctactgcctggagtactttccttcgcagatgctgcggactggcaacaactttgaaattacgtacagttttgagaaggtgcctttccactcgatgtacgcgcacagccagagcctggaccggctgatgaaccctctcatcgaccagtacctgtggggactgcaatcgaccaccaccggaaccaccctgaatgccgggactgccaccaccaactttaccaagctgcggcctaccaacctttccaactttaaaaagaactggctgcccgggccttcaatcaagcagcagggcttctcaaagactgccaatcaaaactacaagatccctgccaccgggtcagacagtctcatcaaatacgagacgcacagcactctggacggaagatggagtgccctgacccccggacctccaatggccacggctggacctgcggacagcaagttcagcaacagccagctcatctttgcggggcctaaacagaacggcaacacggccaccgtacccgggactctgatcttcacctctgaggaggagctggcagccaccaacgctaccgatacggacatgtggggcaacctacctggcggtgaccagagcaacagcaacctgccgaccgtggacagactgacagccttgggagccgtgcctggaatggtctggcaaaacagagacatttactaccagggtcccatttgggccaagattcctcataccgatggacactttcacccctcaccgctgattggtgggtttgggctgaaacacccgcctcctcaaatttttatcaagaacaccccggtacctgcgaatcctgcgacgaccttcagctctactccggtaaactccttcattactcagtacagcactggccaggtgtcggtgcagattgactgggagatccagaaggagcggtccaaacgctggaaccccgaggtccagtttacctccaactacggacagcaaaactctctgttgtgggctcccgatgcggctgggaaatacactgagcctagggctatcggtacccgctacctcacccaccacctgtaa

SEQ ID NO: 791 - DNA, 2205 bp, synthetic construct
  misc_feature 1..2205: note = source = /note="Description of Artificial Sequence: Synthetic polynucleotide"
  source 1..2205: mol_type = other DNA
atgactgacggttaccttccagattggctagaggacaacctctctgaaggcgttcgagagtggtgggcgctgcaacctggagcccctaaacccaaggcaaatcaacaacatcaggacaacgctcggggtcttgtgcttccgggttacaaatacctcggacccggcaacggactcgacaagggggaacccgtcaacgcagcggacgcggcagccctcgagcacgacaaggcctacgaccagcagctcaaggccggtgacaacccctacctcaagtacaaccacgccgacgcggagttccagcagcggcttcagggcgacacatcgtttgggggcaacctcggcagagcagtcttccaggccaaaaagagggttcttgaacctcttggtctggttgagcaagcgggtgagacggctcctggaaagaagagaccgttgattgaatccccccagcagcccgactcctccacgggtatcggcaaaaaaggcaagcagccggctaaaaagaagctcgttttcgaagacgaaactggagcaggcgacggaccccctgagggatcaacttccggagccatgtctgatgacagtgagatgcgtgcagcagctggcggagctgcagtcgagggcggacaaggtgccgatggagtgggtaatgcctcgggtgattggcattgcgattccacctggtctgagggccacgtcacgaccaccagcaccagaacctgggtcttgcccacctacaacaaccacctctacaagcgactcggagagagcctgcagtccaacacctacaacggattctccaccccctggggatactttgacttcaaccgcttccactgccacttcttaccacgtgactggcagcgactcatcaacaacaactggggcgtgcgacccaaagccatgcgggtcaaaatcttcaacatccaggtcaaggaggtcacgacgtcgaacggcgagacaacggtggctaataaccttaccagcacggttcagatctttgcggactcgtcgtacgaactgccgtacgtgatggatgcgggtcaagagggcagcctgcctccttttcccaacgacgtctttatggtgccccagtacggctactgtggactggtgaccggcgacacttcgcagcaacagactgacagaaatgccttctactgcctggagtactttccttcgcagatgctgcggactggcaacaactttgaaattacgtacagttttgagaaggtgcctttccactcgatgtacgcgcacagccagagcctggaccggctgatgaaccctctcatcgaccagtacctgtggggactgcaatcgaccaccaccggaaccaccctgaatgccgggactgccaccaccaactttaccaagctgcggcctaccaacttttccaactttaaaaagaactggctgcccgggccttcaatcaagcagcagggcttctcaaagactgccaatcaaaactacaagatccctgccaccgggtcagacagtctcatcaaatacgagacgcacagcactctggacggaagatggagtgccctgacccccggacctccaatggccacggctggacctgcggacagcaagttcagcaacagccagctcatctttgcggggcctaaacagaacggcaacacggccaccgtacccgggactctgatcttcacctctgaggaggagctggcagccaccaacgccaccgatacggacatgtggggcaacctacctggcggtgaccagagcaacagcaacctgccgaccgtggacagactgacagccttgggagccgtgcctggaatggtctggcaaaacagagacatttactaccagggtcccatttgggccaagattcctcataccgatggacactttcacccctcaccgctgattggtgggtttgggctgaaacacccgcctcctcaaatttttatcaagaacaccccggtacctgcgaatcctgcgacgaccttcagctctactccggtaaactccttcattactcagtacagcactggccaggtgtcggtgcagattgactgggagatccagaaggagcggtccaaacgctggaaccccgaggtccagtttacctccaactacggacagcaaaactctctgttgtgggctcccgatgcggctgggaaatacactgagcctagggctatcggtacccgctacctcacccaccacctgtaa

SEQ ID NO: 792 - DNA, 2205 bp, synthetic construct
  misc_feature 1..2205: note = source = /note="Description of Artificial Sequence: Synthetic polynucleotide"
  source 1..2205: mol_type = other DNA
atgactgacggttaccttccagattggctagaggacaacctctctgaaggcgttcgagagtggtgggcgctgcaacctggagcccctaaacccaaggcaaatcaacaacatcaggacaacgctcggggtcttgtgcttccgggttacaaatacctcggacccggcaacggactcgacgagggggaacccgtcaacgcagcggacgcggcagccctcgagcacgacaaggcctacgaccagcagctcaaggccggtgacaacccctacctcaagtacaaccacgccgacgcggagttccagcagcggcttcagggcgacacatcgtttgggggcaacctcggcagagcagtcttccaggccaaaaagagggttcttgaacctcttggtctggttgagcaagcgggtgagacggctcctggaaagaagagaccgttgattgaatccccccagcagcccgactcctccacgggtatcggcaaaaaaggcaagcagccggctaaaaagaagctcgttttcgaagacgaaactggagcaggcgacggaccccctgagggatcaacttccggagccatgtctgatgacagtgagatgcgtgcagcagctggcggagctgcagtcgagggcggacaaggtgccgatggagtgggtaatgcctcgggtgattggcattgcgattccacctggtctgagggccacgtcacgaccaccagcaccagaacctgggtcttgcccacctacaacaaccacctctacaagcgactcggagagagcctgcagtccaacacctacaacggattctccaccccctggggatactttgacttcaaccgcttccactgccacttctcaccacgtgactggcagcgactcatcaacaacaactggggcatgcgacccaaagccatgcgggtcaaaatcttcaacatccaggtcaaggaggtcacgacgtcgaacggcgagacaacggtggctaataaccttaccagcacggttcagatctttgcggactcgtcgtacgaactgccgtacgtgatggatgcgggtcaagagggcagcctgcctccttttcccaacgacgtctttatggtgccccagtacggctactgtggactggtgaccggcaacacttcgcagcaacagactgacagaaatgccttctactgcctggagtactttccttcgcagatgctgcggactggcaacaactttgaaattacgtacagttttgagaaggtgcctttccactcgatgtacgcgcacagccagagcctggaccggctgatgaaccctctcatcgaccagtacctgtggggactgcaatcgaccaccaccggaaccaccctgaatgccgggactgccaccaccaactttaccaagctgcggcctaccaacttttccaactttaaaaagaactggctgcccgggccttcaatcaagcagcagggcttctcaaagactgccaatcaaaactacaagatccctgccaccgggtcagacagtctcatcaaatacgagacgcacagcactctggacggaagatggagtgccctgacccccggacctccaatggccacggctggacctgcggacagcaagttcagcaacagccagctcatctttgcggggcctaaacagaacggcaacacggccaccgtacccgggactctgatcttcacctctgaggaggagctggcagccaccaacgctaccgatacggacatgtggggcaacctacctggcggtgaccagagcaacagcaacctgccgaccgtggacagactgacagccttgggagccgtgcctggaatggtctggcaaaacagagacatttactaccagggtcccatttgggccaagattcctcataccgatggacactttcacccctcaccgctgattggtgggtttgggctgaaacacccgcctcctcaaatttttatcaagaacaccccggtacctgcgaatcctgcgacgaccttcagctctactccggtaaactccttcattactcagtacagcactggccaggtgtcggtgcagattgactgggagatccagaaggagcggtccaaacgctggaaccccgaggtccagtttacctccaactacggacagcaaaactctctgttgtgggctcccgatgcggctgggaaatacactgagcctagggctatcggtacccgctacctcacccaccacctgtaa

SEQ ID NO: 793 - DNA, 2205 bp, synthetic construct
  misc_feature 1..2205: note = source = /note="Description of Artificial Sequence: Synthetic polynucleotide"
  source 1..2205: mol_type = other DNA
atgactgacggttaccttccagattggctagaggacaacctctctgaaggcgttcgagagtggtgggcgctgcaacctggagcccctaaacccaaggcaaatcaacaacatcaggacaacgctcggggtcttgtgcttccgggttacaaatacctcggacccggcaacggactcgacaagggggaacccgtcaacgcagcggacgcggcagccctcgagcacgacaaggcctacgaccagcagctcaaggccggtgacaacccctacctcaagtacaaccacgccgacgcggagttccagcagcggcttcagggcgacacatcgtttgggggcaacctcggcagagcagtcttccaggccaaaaagagggttcttgaacctcttggtctggttgagcaagcgggtgagacggctcctggaaagaagagaccgttgattgaatccccccagcagcccgactcctccacgggtatcggcaaaaaaggcaagcagccggctaaaaagaagctcgttttcgaagacggaactggagcaggcgacggaccccctgagggatcaacttccggagccatgtctgatgacagtgagatgcgtgcagcagctggcggagctgcagtcgagggcggacaaggtgccgatggagtgggtaatgcctcgggtgattggcattgcgattccacctggtctgagggccacgtcacgaccaccagcaccagaacctgggtcttgcccacctacaacaaccacctctacaagcgactcggagagagcctgcagtccaacacctacaacggattccccaccccctggggatactttgacttcaaccgcttccactgccacttctcaccacgtgactggcagcgactcatcaacaacaactggggcatgcgacccaaagccatgcgggtcaaaatcttcaacatccaggtcaaggaggtcacgacgtcgaacggcgagacaacggcggctaataaccttaccagcacggttcagatctttgcggactcgtcgtacgaactgccgtacgtgatggatgcgggtcaagagggcagcctgcctccttttcccaacgacgtctttatggtgccccagtacggctactgtggactggtgaccggcaacacttcgcagcaacagactgacagaaatgccttctactgcctggagtactttccttcgcagatgctgcggactggcaacaactttgaaattacgtacagttttgagaaggtgcctttccactcgatgtacgcgcacagccagagcctggaccggctgatgaaccctctcatcgaccagtacctgtggggactgcaatcgaccaccaccggaaccaccctgaatgccgggactgccaccaccaactttaccaagctgcggcctaccaacttttccaactttaaaaagaactggctgcccgggccttcaatcaagcagcagggcttctcaaagactgccaatcaaaactacaagatccctgccaccgggtcagacagtctcatcaaatacgagacgcacagcactctggacggaagatggagtgccctgacccccggacctccaatggccacggctggacctgcggacagcaagttcagcaacagccagctcatctttgcggggcctaaacagaacggcaacacggccaccgtacccgggactctgatcttcacctctgaggaggagctggcagccaccaacgccaccgatacggacatgtggggcaacctacctggcggtgaccagagcaacagcaacctgccgaccgtggacagactgacagccttgggagccgtgcctggaatggtctggcaaaacagagacatttactaccagggtcccatttgggccaagattcctcataccgatggacactttcacccctcaccgctgattggtgggtttgggctgaaacacccgcctcctcaaatttttatcaagaacaccccggtacctgcgaatcctgcgacgaccttcagctctactccggtaaactccttcattactcagtacagcactggccaggtgtcggtgcagattgactgggagatccagaaggagcggtccaaacgctggaaccccgaggtccagtttacctccaactacggacagcaaaactctctgttgtgggctcccgatgcggctgggaaatacactgagcctagggctatcggtacccgctacctcacccaccacctgtaa

SEQ ID NO: 794 - DNA, 2205 bp, synthetic construct
  misc_feature 1..2205: note = source = /note="Description of Artificial Sequence: Synthetic polynucleotide"
  source 1..2205: mol_type = other DNA
atgactgacggttaccttccagattggctagaggacaacctctctgaaggcgttcgagagtggtgggcgctgcaacctggagcccctaaacccaaggcaaatcaacaacatcaggacaacgctcggggtcttgtgcttccgggttacaaatacctcggacccggcaacggactcgacaagggggaacccgtcaacgcagcggacgcggcagccctcgagcacgacaaggcctacgaccagcagctcaaggccggtgacaacccctacctcaagtacaaccacgccgacgcggagttccagcagcggcttcagggcgacacatcgtttgggggcaacctcggcagagcagtcttccaggccaaaaagagggttcttgaacctcttggtctggttgagcaagcgggtgagacggctcctggaaagaagagaccgttgattgaatccccccagcagcccgactcctccacgggtatcggcaaaaaaggcaagcagccggctaaaaagaagctcgttttcgaagacgaaactggagcaggcgacggaccccctgagggatcaacttccggagccatgtctgatgacagtgagatgcgtgcagcagctggcggagctgcagtcgagggcggacaaggtgccgatggagtgggtaatgcctcgggtgattggcattgcgattccacctggtctgagggccacgtcacgaccaccagcaccagaacctgggtcttgcccacctacaacaaccacctctacaagcgactcggagagagcctgcagtccaacacctacaacggattctccaccccctggggatactttgacttcaaccgcttccactgccacttctcaccacgtgactggcagcgactcatcaacaacaactggggcatgcgacccaaagccatgcgggtcaaaatcttcaacatccaggtcaaggaggtcacgacgtcgaacggcgagacaacggtggctaataaccttaccagcacggttcagatctttgcggactcgtcgtacgaactgccgtacgtgatggatgcgggtcaagagggcagcctgcctccttttcccaacgacgtctttatggtgccccagtacggctaccgtggactggtgaccggcaacacttcgcagcaacagactgacagaaatgccttctactgcctggagtactttccttcgcagatgctgcggactggcaacaactttgaaattacgtacagttttgagaaggtgcctttccactcgatgtacgcgcacagccagagcctggaccggctgatgaaccctctcatcgaccagtacctgtggggactgcaatcgaccaccaccggaaccaccctgaatgccgggactgccaccaccaactttaccaagctgcggcctaccaacttttccaactttaaaaagaactggctgcccgggccttcaatcaagcagcagggcttctcaaagactgccaatcaaaactacaagatccctgccaccgggtcagacagtctcatcaaatacgagacgcacagcactctggacggaagatggagtgccctgacccccggacctccaatggccacggctggacctgcggacagcaagttcagcaacagccagctcatctttgcggggcctaaacagaacggcaacacggccaccgtacccgggactctgatcttcacctctgaggaggagctggcagccaccaacgccaccgatacggacatgtggggcaacctacctggcggtgaccagagcaacagcaacctgccgaccgtggacagactgacagccttgggagccgtgcctggaatggtctggcaaaacagagacatttactaccagggtcccatttgggccaagattcctcataccgatggacactttcacccctcaccgctgattggtgggtttgggctgaaacacccgcctcctcaaatttttatcaagaacaccccggtacctgcgaatcctgcgacgaccttcagctctactccggtaaactccttcattactcagtacagcactggccaggtgtcggtgcagattgactgggagatccagaaggagcggtccaaacgctggaaccccgaggtccagtttacctccaactacggacagcaaaactctctgttgtgggctcccgatgcggctgggaaatacactgagcctagggctatcggtacccgctacctcacccaccacctgtaa

SEQ ID NO: 795 - DNA, 2205 bp, synthetic construct
  misc_feature 1..2205: note = source = /note="Description of Artificial Sequence: Synthetic polynucleotide"
  source 1..2205: mol_type = other DNA
atgactgacggttaccttccagattggctagaggacaacctctctgaaggcgttcgagagtggtgggcgctgcaacctggagcccctaaacccaaggcaaatcaacaacatcaggacaacgctcggggtcttgtgcttcagggttacaaatacctcggacccggcaacggactcgacaagggggaacccgtcaacgcagcggacgcggcagccctcgagcacgacaaggcctacgaccagcagctcaaggccggtgacaacccctacctcaagtacaaccacgccgacgcggagttccagcagcggcttcagggcgacacatcgtttgggggcaacctcggcagagcagtcttccaggccaaaaagagggttcttgaaccccttggtctggttgagcaagcgggtgagacggctcctggaaagaagagaccgttgattgaatccccccagcagcccgactcctccacgggtatcggcaaaaaaggcaagcagccggctaaaaagaagctcgttttcgaagacgaaactggagcaggcgacggaccccctgagggatcaacttccggagccatgtctgatgacagtgagatgcgtgcagcagctggcggagctgcagtcgagggcggacaaggtgccgatggagtgggtaatgcctcgggtgattggcattgcgattccacccggtctgagggccacgtcacgaccaccagcaccagaacctgggtcttgcccacctacaacaaccacctctacaagcgactcggagagagcctgcagtccaacacctacaacggattctccaccccctggggatactttgacttcaaccgcttccactgccacttctcaccacgtgactggcagcgactcatcaacaataactggggcatgcgacccaaagccatgcgggtcaaaatcttcaacatccaggtcaaggaggtcacgacgtcgaacggcgagacaacggtggctaataaccttaccagcacggttcagatctttgcggactcgtcgtacgaactgccgtacgtgatggatgcgggtcaagagggcagcctgcctccttttcccaacgacgtctttatggtgccccagtacggctactgtggactggtgaccggcaacacttcgcagcaacagactgacagaaatgccttctactgcctggagtactttccttcgcagatgctgcggactggcaacaactttgaaattacgtacagttttgagaaggtgcctttccactcgatgtacgcgcacagccagagcctggaccggctgatgaaccctctcatcgaccagtacctgtggggactgcaatcgaccaccaccggaaccaccctgaatgccgggactgccaccaccaactttaccaagctgcggcctaccaacttttccaactttaaaaagaactggctgcccgggccttcaatcaagcagcagggcttctcaaagactgccaatcaaaactacaagatccctgccaccgggtcagacagtctcatcaaatacgagacgcacagcactctggacggaagatggagtgcccggacccccggacctccaatggccacggctggacctgcggacagcaagttcagcaacagccagctcatctttgcggggcctaaacagaacggcaacacggccaccgtacccgggactctgatcttcacctctgaggaggagctggcagccaccaacgccaccgatacggacatgtggggcaacctacctggcggtgaccagagcaacagcaacctgccgaccgtggacagactgacagccttgggagccgtgcctggaatggtctggcaaaacagagacatttactaccagggtcccatttgggccaagattcctcataccgatggacactttcacccctcaccgctgattggtgggtttgggctgaaacacccgcctcctcaaatttttatcaagaacaccccggtacctgcgaatcctgcgacgaccttcagctctactccggtaaactccttcattactcagtacagcactggccaggtgtcggtgcagattgactgggagatccagaaggagcggtccaaacgctggaaccccgaggtccagtttacctccaactacggacagcaaaactctctgttgtgggctcccgatgcggctgggaaatacactgagcctagggctatcggtacccgctacctcacccaccacctgtaa

SEQ ID NO: 796 - DNA, 2175 bp, synthetic construct
  misc_feature 1..2175: note = source = /note="Description of Artificial Sequence: Synthetic polynucleotide"
  source 1..2175: mol_type = other DNA
atgtcttttgttgatcaccctccagattggttggaagaagttggtgaaggtcttcgcgagtttttgggccttgaagcgggcccaccgaaaccaaaacccaatcagcagcatcaagatcaagcccgtggtcttgtgctgcctggttataactatctcggacccggaaacggtctcgatcgaggagagcctgtcaacagggcagacgaggtcgcgcgagagcacgacatctcgtacaacgagcagcttgaggcgggagacaacccctacctcaagtacaaccacgcggacgccgagtttcaggagaggctcgccgacgacacatccttcgggggaaacctcggaaaggcagtctttcaggccaagaaaagggttctcgaaccttttggcctggttgaagagggtgctaagacggcccctaccggaaagcggatagacgaccactttccaaaaagaaagaaggcccggaccgaagaggactccaagccttccacctcgtcagacgccgaagctggacccagcggatcccagcagctgcaaatcccagcccaaccagcctcaagtttgggagctgatacaatgtctgcgggaggtggcggcccattgggcgacaataaccaaggtgccgatggagtgggcaatgcctcgggagattggcattgcgattccacgtggatgggggacagagtcgtcaccaagtccacccgaacctgggtgctgcccagctacaacaaccaccagtaccgagagatcaaaagcggctccgtcgacggaagcaacgccaacgcctactttggatacagcaccccctgggggtactttgactttaaccgcttccacagccactggagcccccgagactggcaaagactcatcaacaactactggggcttcagaccccggtccctcagagtcaaaatcttcaacattcaagtcaaagaggtcacggtgcaggactccaccaccaccatcgccaacaacctcacctccaccgtccaagtgtttacggacgacgactaccagctgccctacgtcgtcggcaacgggaccgagggatgcctgccggccttccctccgcaggtctttacgctgccgcagtacggttacgcgacgctgaaccgcgacaacacagaaaatcccaccgagaggagcagcttcttctgcctagagtactttcccagcaagatgctgagaacgggcaacaactttgagtttacctacaactttgaggaggtgcccttccactccagcttcgctcccagtcagaacctcttcaagctggccaacccgctggtggaccagtacttgtaccgcttcgtgagcacaaataacactggcggagtccagttcaacaagaacctggccgggagatacgccaacacctacaaaaactggttcccggggcccatgggccgaacccagggctggaacctgggctccggggtcaaccgcgccagtgtcagcgccttcgccacgaccaataggatggagctcgagggcgcgagttaccaggtgcccccgcagccgaacggcatgaccaacaacctccagggcagcaacacctatgccctggagaacactatgatcttcaacagccagccggcgaacccgggcaccaccgccacgtacctcgagggcaacatgctcatcaccagcgagagcgagacgcagccggtgaaccgcgtggcgtacaacgtcggcgggcagatggccaccaacaaccagagctccaccactgcccccgcgaccggcacgtacaacctccaggaaatcgtgcccggcagcgtgtggatggagagggacgtgtacctccaaggacccatctgggccaagatcccagagacggaggcgcactttcacccctctccggccatgggcggattcggactcaaacacccaccgcccatgatgctcatcaagaacacgcctgtgcccggaaatatcaccagcttctcggacgtgcccgtcagcagcttcatcacccagtacagcaccgggcaggtcaccgtggagatggagtgggagctcaagaaggaaaactccaagaggtggaacccagagatccagtacacaaacaactacaacgacccccagtttgtggactttgccccggacagcaccggggaatacagaaccaccagacctatcggaacccgataccttacccgacccctttaa

SEQ ID NO: 797 - DNA, 2175 bp, synthetic construct
  misc_feature 1..2175: note = source = /note="Description of Artificial Sequence: Synthetic polynucleotide"
  source 1..2175: mol_type = other DNA
atgtcttttgttgatcaccctccagattggttggaagaagttggtgaaggtcttcgcgagtttttgggccttgaagcgggcccaccgaaaccaaaacccaatcagcagcatcaagatcaagcccgtggtcttgtgctgcctggttataactatctcggacccggaaacggtctcgatcgaggagagcctgtcaacagggcagacgaggtcgcgcgagagcacgacatctcgtacaacgagcagcttgaggcgggagacaacccctacctcaagtacaaccacgcggacgccgagtttcaggagaagctcgccgacgacacatcctccgggggaaacctcggaaaggcagtctttcaggccaagaaaagggttctcgaaccttttggcctggttgaagagggtgctaagacggcccctaccggaaagcggatagacgaccactttccaaaaagaaagaaggcccggaccgaagaggactccaagccttccacctcgtcagacgccgaagctggacccagcggatcccagcagctgcaaatcccagcccaaccagcctcaagtttgggagctgatacaatgtctgcgggaggtggcggcccattgggcgacaataaccaaggtgccgatggagtgggcaatgcctcgggagattggcattgcgattccacgtggatgggggacagagtcgtcaccaagtccacccgaacctgggtgctgcccagctacaacaaccaccagtaccgagagatcaaaagcggctccgtcgacggaagcaacgccaacgcctactttggatacagcaccccctgggggtactttgactttaaccgcttccacagccactggagcccccgagactggcaaagactcatcaacaactactggggcttcagaccccggtccctcagagtcaaaatcttcaacattcaagtcaaagaggtcacggtgcaggactccaccaccaccatcgccaacaacctcacctccaccgtccaagtgtttacggacgacgactaccagctgccctacgtcgtcggcaacgggaccgagggatgcctgccggccttccctccgcaggtctttacgctgccgcagtacggttacgcgacgctgaaccgcgacaacacagaaaatcccaccgagaggagcagcttcttctgcctagagtactttcccagcaagatgctgagaacgggcaacaactttgagtttacctacaactttgaggaggtgcccttccactccagcttcgctcccagtcagaacctcttcaagctggccaacccgctagtggaccagtacttgtaccgcttcgtgagcacaaataacactggcggagtccagttcaacaagaacctggccgggagatacgccaacacctacaaaaactggttcccggggcccatgggccgaacccagggctggaacctgggctccggggtcaaccgcgccagtgtcagcgccttcgccacgaccaataggatggagctcgagggcgcgagttaccaggtgcccccgcagccgaacggcatgaccaacaacctccagggcagcaacacctatgccctggagaacactatgatcttcaacagccagccggcgaacccgggcaccaccgccacgtacctcgagggcaacatgctcatcaccagcgagagcgagacgcagccggtgaaccgcgtggcgtacaacgtcggcgggcagatggccaccaacaaccagagctccaccactgcccccgcgaccggcacgtacaacctccaggaaatcgtgcccggcagcgtgtggatggagagggacgtgtacctccaaggacccatctgggccaagatcccagagacgggggcgcactttcacccctctccggccatgggcggattcggactcaaacacccaccgcccatgatgctcatcaagaacacgcctgtgcccggaaatatcaccagcttctcggacgtgcccgtcagcagcttcatcacccagtacagcaccgggcaggtcaccgtggagatggagtgggagctcaagaaggaaaactccaagaggtggaacccagagatccagtacacaaacaactacaacgacccccagtttgtggactttgccccggacagcaccggggaatacagaaccaccagacctatcggaacccgataccttacccgacccctttaa

SEQ ID NO: 798 - DNA, 2175 bp, synthetic construct
  misc_feature 1..2175: note = source = /note="Description of Artificial Sequence: Synthetic polynucleotide"
  source 1..2175: mol_type = other DNA
atgtcttttgttgatcaccctccagattggttggaagaagttggtgaaggtcttcgcgagtttttgggccttgaagcgggcccaccgaaaccaaaacccaatcagcagcatcaagatcaagcccgtggtcttgtgctgcctggttataactatctcggacccggaaacggtctcgatcgaggagagcctgtcaacagggcagacgaggtcgcgcgagagcacgacatctcgtacaacgagcagcttgaggcgggagacaacccctacctcaagtacaaccacgcggacgccgagtttcaggagaagctcgccgacgacacatccttcgggggaaacctcggaaaggcagtctttcaggccaagaaaagggttctcgaaccttttggcctggttgaagagggtgctaagacggcccctaccggaaagcggatagacgaccactttccaaaaagaaagaaggcccggaccgaagaggactccaagccttccacctcgtcagacgccgaagctggacccagcggatcccagcagctgcaaatcccagcccaaccagcctcaagtttgggagctgatacaatgtctgcgggaggtggcggcccattgggcgacaataaccaaggtgccgatggagtgggcaatgcctcgggagattggcattgcgattccacgtggatgggggacagagtcgtcaccaagtccacccgaacctgggtgctgcccagctacaacaaccaccagtaccgagagatcaaaagcggctccgtcgacggaagcaacgccaacgcctactttggatacagcaccccctgggggtactttgactttaaccgcttccacagccactggagcccccgagactggcaaagactcatcaacaactactggggcttcagaccccggtccctcagagtcaaaatcttcaacattcaagtcaaagaggtcacggtgcaggactccaccaccaccatcgccaacaacctcacctccaccgtccaagtgtttacggacgacgactaccagctgccctacgtcgtcggcaacgggaccgagggatgcctgccggccttccctccgcaggtctttacgctgccgcagtacggttacgcgacactgaaccgcgacaacacagaaaatcccaccgagaggagcagcttcttctgcctagagtactttcccagcaagatgctgagaacgggcaacaactttgagtttacctacaactttgaggaggtgcccttccactccagcttcgctcccagtcagaacctcttcaagctggccaacccgctggtggaccagtacttgtaccgcttcgtgagcacaaataacactggcggagtccagttcaacaagaacctggccgggagatacgccaacacctacaaaaactggttcccggggcccatgggccgaacccagggctggaacctgggctccggggtcaaccgcgccagtgtcagcgccttcgccacgaccaataggatggagctcgagggcgcgagttaccaggtgcccccgcagccgaacggcatgaccaacaacctccagggcagcaacacctatgccctggagaacactatgatcttcaacagccagccggcgaacccgggcaccaccgccacgtacctcgagggcaacatgctcatcaccagcgagagcgagacgcagccggtgaaccgcgtggcgtacaacgtcggcgggcagatggccaccaacaaccagagctccaccactgcccccgcgaccggcacgtacaacctccaggaaatcgtgcccggcagcgtgtggatggagagggacgtgtacctccaaggacccatctgggccaagatcccagagacgggggcgcactttcacccctctccggccatgggcggattcggactcaaacacccaccgcccatgatgctcatcaagagcacgcctgtgcccggaaatatcaccagcttctcggacgtgcccgtcagcagcttcatcacccagtacagcaccgggcaggtcaccgtggagatggagtgggagctcaagaaggaaaactccaagaggtggaacccagagatccagtacacaaacaactacaacgacccccagtttgtggactttgccccggacagcaccggggaatacagaaccaccagacctatcggaacccgataccttacccgacccctttaa

SEQ ID NO: 799 - DNA, 2175 bp, synthetic construct
  misc_feature 1..2175: note = source = /note="Description of Artificial Sequence: Synthetic polynucleotide"
  source 1..2175: mol_type = other DNA
atgtcttttgttgatcaccctccagattggttggaagaagttggtgaaggtcttcgcgagtttttgggccctgaagcgggcccaccgaaaccaaaacccaatcagcagcatcaagatcaagcccgtggtcttgtgctgcctggttataactatctcggacccggaaacggtctcgatcgaggagagcctgtcaacagggcagacgaggtcgcgcgagagcacgacatctcgtacaacgagcagcttgaggcgggagacaacccctacctcaagtacaaccacgcggacgccgagtttcaggagaagctcgccgacgacacatccttcgggggaaacctcggaaaggcagtctttcaggccaagaaaagggttctcgaaccttttggcctggttgaagagggtgctaagacggcccctaccggaaagcggatagacgaccactttccaaaaagaaagaaggtccggaccgaagaggactccaagccttccacctcgtcagacgccgaagctggacccagcggatcccagcagctgcaaatcccagcccaaccagcctcaagtttgggagctgatacaatgtctgcgggaggtggcggcccattgggcgacaataaccaaggtgccgatggagtgggcaatgcctcgggagattggcattgcgattccacgtggatgggggacagagtcgtcaccaagtccacccgaacctgggtgccgcccagctacaacaaccaccagtaccgagagatcaaaagcggctccgtcgacggaagcaacgccaacgcctactttggatacagcaccccctgggggtactttgactttaaccgcttccacagccactggagcccccgagactggcaaagactcatcaacaactactggggcttcagaccccggtccctcagagtcaaaatcttcaacattcaagtcaaagaggtcacggtgcaggactccaccaccaccatcgccaacaacctcacctccaccgtccaagtgtttacggacgacgactaccagctgccctacgtcgtcggcaacgggaccgagggatgcctgccggccttccctccgcaggtctttacgctgccgcagtacggttacgcgacgctgaaccgcgacaacacagaaaatcccaccgagaggagcagcttcttctgcctagagtactttcccagcaagatgctgagaacgggcaacaactttgagtttacctacaactttgaggaggtgcccttccactccagcttcgctcccagtcagaacctcttcaagctggccaacccgctggtggaccagtacttgtaccgcttcgtgagcacaaataacactggcggagtccagttcaacaagaacctggccgggagatacgccaacacctacaaaaactggttcccggggcccatgggccgaacccagggctggaacctgggctccggggtcaaccgcgccagtgtcagcgccttcgccacgaccaataggatggagctcgagggcgcgagttaccaggtgcccccgcagccgaacggcatgaccaacaacctccagggcagcaacacctatgccctggagaacactatgatcttcaacagccagccggcgaacccgggcaccaccgccacgtacctcgagggcaacatgctcatcaccagcgagagcgagacgcagccggtgaaccgcgtggcgtgcaacgtcggcgggcagatggccaccaacaaccagagctccaccactgcccccgcgaccggcacgtacaacctccaggaaatcgtgcccggcagcgtgtggatggagagggacgtgtacctccaaggacccatctgggccaagatcccagagacgggggcgcactttcacccctctccggccatgggcggattcggactcaaacacccaccgcccatgatgctcatcaagaacacgcctgtgcccggaaatatcaccagcttctcggacgtgcccgtcagcagcttcatcacccagtacagcaccgggcaggtcaccgtggagatggagtgggagctcaagaaggaaaactccaagaggtggaacccagagatccagtacacaaacaactacaacgacccccagtttgtggactttgccccggacagcaccggggaatacagaaccaccagacctattggaacccgataccttacccgacccctttaa

SEQ ID NO: 800 - DNA, 2175 bp, synthetic construct
  misc_feature 1..2175: note = source = /note="Description of Artificial Sequence: Synthetic polynucleotide"
  source 1..2175: mol_type = other DNA
atgtcttttgttgatcaccctccagattggttggaagaagttggtgaaggtcttcgcgagtttttgggccttgaagcgggcccaccgaaaccaaaacccaatcagcagcatcaagatcaagcccgtggtcttgtgctgcctggttataactatctcggacccggaaacggtctcgatcgaggagagcctgtcaacagggcagacgaggtcgcgcgagagcacgacatctcgtacaacgagcagcttgaggcgggagacaacccctacctcaagtacaaccacgcggacgccgagtttcaggagaagctcgccgacgacacatccttcgggggaaacctcggaaaggcagtctttcaggccaagaaaagggttctcgaaccttttggcctggttgaagagggtgctaagacggcccctaccggaaagcggatagacgaccactttccaaaaagaaagaaggcccggaccgaagaggactccaagccttccacctcgtcagacgccgaagctggacccagcggatcccagcagctgcaaatcccagcccaaccagcctcaagtttgggagctgatacaatgtctgcgggaggtggcggcccattgggcgacaataaccaaggtgccgatggagtgggcaatgcctcgggagattggcattgcgattccacgtggatgggggacagagtcgtcaccaagtccacccgaacctgggtgctgcccagctacaacaaccaccagtaccgagagatcaaaagcggctccgtcgacggaagcaacgccaacgcctactttggatacagcaccccctgggggtactttgactttaaccgcttccacagccactggagcccccgagactggcaaagactcatcaacaactactggggcttcagaccccggtccctcagagtcaaaatcttcaacattcaagtcaaagaggtcacggtgcaggactccaccaccaccatcgccaacaacctcacctccaccgtccaagtgtttacggacgacgactaccagctgccctacgtcgtcggcaacgggaccgagggatgcctgccggccttccctccgcaggtctttacgctgccgcagtacggttacgcgacgctgaaccgcgacaacaccgaaaatcccaccgagaggagcagcttcttctgcctagagtactttcccagcaagatgctgagaacgggcaacaactttgagtttacctacaactttgaggaggtgcccttccactccagcttcgctcccagtcagaacctcttcaagctggccaacccgctggtggaccagtacttgtaccgcttcgtgagcacaaataacactggcggagtccagttcaacaagaacctggccgggagatacgccaacacctacaaaaactggttcccggggcccatgggccgaacccagggctggaacctgggctccggggtcaaccgcgccagtgtcagcgccttcgccacgaccaataggatggagctcgagggcgcgagttaccaggtgcccccgcagccgaacggcatgaccaacaacctccagggcagcaacacctatgccctggagaacactatgatcttcaacagccagccggcgaacccgggcaccaccgccacgtacctcgagggcaacatgctcatcaccagcgagagcgagacgcagccggtgaaccgcgtggcgtacaacgtcggcgggcagatggccaccaacaaccagagctccaccactgcccccgcgaccggcgcgtacaacctccaggaaatcgtgcccggcagcgtgtggatggagagggacgtgtacctccaaggacccatctgggccaagatcccagagacgggggcgcactttcacccctctccggccatgggcggattcggactcaaacacccaccgcccatgatgctcatcaagaacacgcctgtgcccggaaatatcaccagcttctcggacgtgcccgtcagcagcttcatcacccagtacagcaccgggcaggtcaccgtggagatggagtgggagctcaagaaggaaaactccaagaggtggaacccagagatccagtacacaaacaactacaacgacccccagtttgtggactttgccccggacagcaccggggaatacagaaccaccagacctatcggaacccgataccttacccgacccctttaa

SEQ ID NO: 801 - DNA, 2175 bp, synthetic construct
  misc_feature 1..2175: note = source = /note="Description of Artificial Sequence: Synthetic polynucleotide"
  source 1..2175: mol_type = other DNA
atgtcttttgttgatcaccctccagattggttggaagaagttggtgaaggtcttcgcgagtttttgggccttgaagcgggcccaccgaaaccaaaacccaatcagcagcatcaagatcaagcccgtggtcttgtgctgcctggttataactatctcggacccggaaacggtctcgatcgaggagagcctgtcaacagggcagacggggtcgcgcgagagcacgacatctcgtacaacgagcagcttgaggcgggagacaacccctacctcaagtacaaccacgcggacgccgagtttcaggagaagctcgccgacgacacatccttcgggggaaacctcggaaaggcagtctttcaggccaagaaaagggttctcgaaccttttggcctggttgaagagggtgctaagacggcccctaccggaaagcggatagacgaccactttccaaaaagaaagaaggcccggaccgaagaggactccaagccttccacctcgtcagacgccgaagctggacccagcggatcccagcagctgcaaatcccagcccaaccagcctcaagtttgggagctgatacaatgtctgcgggaggtggcggcccattgggcgacaataaccaaggtgccgatggagtgggcaatgcctcgggagattggcattgcgattccacgtggatgggggacagagtcgtcaccaagtccacccgaacctgggtgctgcccagctacaacaaccaccagtaccgagagatcaaaagcggctccgtcgacggaagcaacgccaacgcctactttggatacagcaccccctgggggtactttgactttaaccgcttccacagccactggagcccccgagactggcaaagactcatcaacaactactggggcttcagaccccggtccctcagagtcaaaatcttcaacattcaagtcaaagaggtcacggtgcaggactccaccaccaccatcgccaacaacctcacctccaccgtccaagcgtttacggacgacgactaccagctgccctacgtcgtcggcaacgggaccgagggatgcctgccggccttccctccgcaggtctttacgctgccgcagtacggttacgcgacgctgaaccgcgacaacacagaaaatcccaccgagaggagcagcttcttctgcctagagtactttcccagcaagatgctgagaacgggcaacaactttgagtttacctacaactttgaggaggtgcccttccactccagcttcgctcccagtcagaacctcttcaagctggccaacccgctggtggaccagtacttgtaccgcttcgtgagcacaaataacactggcggagtccagttcaacaagaacctggccgggagatacgccaacacctacaaaaactggttcccggggcccatgggccgaacccagggctggaacctgggctccggggtcaaccgcgccagtgtcagcgccttcgccacgaccaataggatggagctcgagggcgcgagttaccaggtgcccccgcagccgaacggcatgaccaacaacctccagggcagcaacacctatgccctggagaacactatgatcttcaacagccagccggcgaacccgggcaccaccgccacgtacctcgagggcaacatgctcatcaccagcgagagcgagacgcagccggtgaaccgcgtggcgtacaacgtcggcgggcagatggccaccaacaaccagagctccaccactgcccccgcgaccggcacgtacaacctccaggaaatcgtgcccggcagcgtgtggatggagagggacgtgtacctccaaggacccatctgggccaagatcccagagacgggggcgcactttcacccctctccggccatgggcggattcggactcaaacacccaccgcccatgatgctcatcaagaacacgcctgtgcccggaaatatcaccagcttctcggacgtgcccgtcagcagcttcatcacccagtacagcaccgggcaggtcaccgtggagatggagtgggagctcaagaaggaaaactccaagaggtggaacccagagatccagtacacaaacaactacaacgacccccagtttgtggactttgccccggacagcaccggggaatacagaaccaccagacctatcggaacccgataccttacccgacccctttaa

SEQ ID NO: 802 - DNA, 2175 bp, synthetic construct
  misc_feature 1..2175: note = source = /note="Description of Artificial Sequence: Synthetic polynucleotide"
  source 1..2175: mol_type = other DNA
atgtcttttgttgatcaccctccagattggttggaagaagttggtgaaggtcttcgcgagtttttgggccttgaagcgggcccaccgaaaccaaaacccaatcagcagcatcaagatcaagcccgtggtcttgtgctgcctggttataactatctcggacccggaaacggtctcgatcgaggagagcctgtcaacagggcagacgaggtcgcgcgagagcacgacatctcgtacaacgagcagcttgaggcgggagacaacccctacctcaagtacaaccacgcggacgccgagtttcaggagaagctcgccgacgacacatccttcgggggaaacctcggaaaggcagtctttcaggccaagaaaagggttctcgaaccttttggcctggttgaagagggtgctaagacggcccctaccggaaagcggatagacgaccactttccaaaaagaaagaaggcccggaccgaagaggactccaagccttccacctcgtcagacgccgaagctggacccagcggatcccagcagctgcaaatcccagcccaaccagcctcaagtttgggagctgatacaatgtctgcgggaggtggcggcccattgggcgacaataaccaaggtgccgatggagtgggcaatgcctcgggagattggcattgcgattccacgtggatgggggacagagtcgtcaccaagtccacccgaacctgggtgctgcccagctacaacaaccaccagtaccgagagatcaaaagcggctccgtcgacggaagcaacgccaacgcctactttggatacagcaccccctgggggtactttgactttaaccgcttccacagccactggagcccccgagactggcaaagactcatcaacaactactggggcttcagaccccggtccctcagagtcaaaatcttcaacattcaagtcaaagaggtcacggtgcaggactccaccaccaccatcgccaacaacctcacctccaccgtccaagtgtttacggacgacgactaccagctgccctacgtcgtcggcaacgggaccgagggatgcctgccggccttccctccgcaggtctttacgctgccgcagtacggttacgcgacgctgaaccgcgacaacacagaaaatcccaccgagaggagcagcttcttctgcctagagtactttcccagcaagatgctgagaacgggcaacaactttgagtttacctacaactttgaggaggtgcccttccactccagcttcgctcccagtcagaacctcttcaagctggccaacccgctggtggaccagtacttgtaccgcttcgtgagcacaaataacactggcggagtccagttcaacaagaacctggccgggagatacgccaacacctacaaaaactggttcccggggcccatgggccgaacccagggctggaacctgggctccggggtcaaccgcgccagtgtcagcgccttcgccacgaccaataggatggagctcgagggcgcgagttactaggtgcccccgcagccgaacggcatgaccaacaacctccagggcagcaacacctatgccctggagaacactatgatcttcaacagccagccggcgaacccgggcaccaccgccacgtacctcgagggcaacatgctcatcaccagcgagagcgagacgcagccggtgaaccgcgtggcgtacaacgtcggcgggcagatggccaccaacaaccagagctccaccactgcccccgcgaccggcacgtacaacctccaggaaatcgtgcccggcagcgtgtggatggagggggacgtgtacctccaaggacccatctgggccaagatcccagagacgggggcgcactttcacccctctccggccatgggcggattcggactcaagcacccaccgcccatgatgctcatcaagaacacgcctgtgcccggaaatatcaccagcttctcggacgtgcccgtcagcagcttcatcacccagtacagcaccgggcaggtcaccgtggagatggagtgggagctcaagaaggaaaactccaagaggtggaacccagagatccagtacacaaacaactacaacgacccccagtttgtggactttgccccggacagcaccggggaatacagaaccaccagacctatcggaacccgataccttacccgacccctttaa

SEQ ID NO: 803 - DNA, 2175 bp, synthetic construct
  misc_feature 1..2175: note = source = /note="Description of Artificial Sequence: Synthetic polynucleotide"
  source 1..2175: mol_type = other DNA
atgtcttttgttgatcaccctccagattggttggaagaagttggtgaaggtcttcgcgagtttttgggccttgaagcgggcccaccgaaaccaaaacccaatcagcagcatcaagatcaagcccgtggtcttgtgctgcctggttataactatctcggacccggaaacggtctcgatcgaggagagcctgtcaacagggcagacgaggtcgcgcgagagcacgacatctcgtacaacgagcagcttgaggcgggagacaacccctacctcaagtacaaccacgcggacgccgagtttcaggagaagctcgccgacgacacatccttcgggggaaacctcggaaaggcagtctttcaggccaagaaaagggttctcgaaccttttggcctggttgaagagggtgctaagacggcccctaccggaaagcggatagacgaccactttccaaaaagaaagaaggtccggaccgaagaggactccaagccttccacctcgtcagacgccgaagctggacccagcggatcccagcagctgcaaatcccagcccaaccagcctcaagtttgggagctgatacaatgtctgcgggaggtggcggcccattgggcgacaataaccaaggtgccgatggagtgggcaatgcctcgggagattggcattgcgattccacgtggatgggggacagagtcgtcaccaagtccacccgaacctgggtgctgcccagctacaacaaccaccagtaccgagagatcaaaagcggctccgtcgacggaagcaacgccaacgcctactttggatacagcaccccctgggggtactttgactttaaccgcttccacagccactggagcccccgagactggcaaagactcatcaacaactactggggcttcagaccccggtccctcagagtcaaaatcttcaacattcaagtcaaagaggtcacggtgcaggactccaccaccaccatcgccaacaacctcacctccaccgtccaagtgtttacggacgacgactaccagctgccctacgtcgtcggcaacgggaccgagggatgcctgccggccttccctccgcaggtctttacgctgccgcagtacggttacgcgacgctgaaccgcgacaacacagaaaatcccaccgagaggagcagcttcttctgcctagagtactttcccagcaagatgctgagaacgggcaacaactttgagtttacctacaactttgaggaggtgcccttccactccagcttcgctcccagtcagaacctcttcaagctggccaacccgctggtggaccagtacttgtaccgcttcgtgagcacaaataacactggcggagtccagttcaacaagaacctggccgggagatacgccaacacctacaaaaactggttcccggggcccatgggccgaacccagggctggaacctgggctccggggtcaaccgcgccagtgtcagcgccttcgccacgaccaataggatggagctcgagggcgcgagttaccaggtgcccccgcagccgaacggcatgaccaacaacctccagggcagcaacacctatgccctggagaacactatgatcttcaacagccagccggcgaacccgggcaccaccgccacgtacctcgagggcaacatgctcatcaccagcgagagcgagacgcagccggtgaaccgcgtggcgtacaacgtcggcgggcagatggccaccaacaaccagagctccaccactgcccccgcgaccggcacgtacaacctccaggaaatcgtgcccggcagcgtgtggatggagagggacgtgtacctccaaggacccatctgggccaagatcccagagacgggggcgcactttcacccctctccggccatgggcggattcggactcaaacacccaccgcccatgatgctcatcaagaacacgcctgtgcccggaaatatcaccagcttctcggacgtgcccgtcagcagcttcatcacccagtacagcaccgggcaggtcaccgtggagatggagtgggagctcaagaaggaaaactccgagaggtggaacccagagatccagtacacaaacaactacaacgacccccagtttgtggactttgccccggacagcaccggggaatacagaaccaccagacctattggaacccgataccttacccgacccctttaa

SEQ ID NO: 804 - DNA, 2175 bp, synthetic construct
  misc_feature 1..2175: note = source = /note="Description of Artificial Sequence: Synthetic polynucleotide"
  source 1..2175: mol_type = other DNA
atgtcttttgttgatcaccctccagattggttggaagaagttggtgaaggtcttcgcgagtttttgggccttgaagcgggcccaccgaaaccaaaacccaatcagcagcatcaagatcaagcccgtggtcttgtgctgcctggttataactatctcggacccggaaacggtctcgatcgaggagagcctgtcaacagggcagacgaggtcgcgcgagagcacgacatctcgtacagcgagcagcttgaggcgggagacaacccctacctcaagtacaaccacgcggacgccgagtttcaggagaagctcgccgacgacacatccttcgggggaaacctcggaaaggcagtctttcaggccaagaaaagggttctcgaaccttttggcctggttgaagagggtgctaagacggcccctaccggaaagcggatagacgaccactttccaaaaagaaagaaggcccggaccgaagaggactccaagccttccacctcgtcagacgccgaagctggacccagcggatcccagcagctgcaaatcccagcccaaccagcctcaagtttgggagctgatacaatgtctgcgggaggtggcggcccattgggcgacaataaccaaggtgccgatggagtgggcaatgcctcgggagattggcattgcgattccacgtggatgggggacagagtcgtcaccaagtccacccgaacctgggtgctgcccagctacaacaaccaccagtaccgagagatcaaaagcggctccgtcgacggaagcaacgccaacgcctactttggatacagcaccccctgggggtactttgactttaaccgcttccacagccactggagcccccgagactggcaaagactcatcaacaactactggggcttcagaccccggtccctcagagtcaaaatcttcaacattcaagtcaaagaggtcacggtgcaggactccaccaccaccatcgccaacaacctcacctccaccgtccaagtgtttacggacgacgactaccagctgccctacgtcgtcggcaacgggaccgagggatgcctgccggccttccctccgcaggtctttacgctgccgcagtacggttacgcgacgctgaaccgcgacaacacagaaaatcccaccgagaggagcagcttcttctgcctagagtactttcccagcaagatgctgagaacgggcaacaactttgagtttacctacaactttgaggaggtgcccttccactccagcttcgctcccagtcagaacctcttcaagctggccaacccgctggtggaccagtacttgtaccgcttcgtgagcacaaataacactggcggagtccagttcaacaagaacctggccgggagatacgccaacacctacaaaaactggttcccggggcccatgggccgaacccagggctggaacctgggctccggggtcaaccgcgccagtgtcagcgccttcgccacgaccaataggatggagctcgagggcgcgagttaccaggtgcccccgcagccgaacggcatgaccaacaacctccagggcagcaacacctatgccctggagaacactatgatcttcaacagccagccggcgaacccgggcaccaccgccacgtacctcgagggcaacatgctcatcaccagcgagagcgagacgcagccggtgaaccgcgtggcgtacaacgtcggcgggcagatggccaccaacaaccagagctccaccactgcccccgcgaccggcacgtacaacctccaggaaatcgtgcccggcagcgtgtggatggagagggacgtgtacctccaaggacccatctgggccaagatcccagagacgggggcgcactttcacccctctccggccatgggcggattcggactcaaacacccaccgcccatgatgctcatcaagaacacgcctgtgcccggaaatatcaccagcttctcggacgtgcccgtcagcagcttcatcacccagtacagcaccgggcaggtcaccgtggagatggagtgggagctcaagaaggaaaactccaagaggtggaacccagagatccagtacacaaacaactacaacgacccccagtttgtggactttgccccggacagcaccggggaatacagaaccgccagacctatcggaacccgataccttacccgacccctttaa

SEQ ID NO: 805 - DNA, 2175 bp, synthetic construct
  misc_feature 1..2175: note = source = /note="Description of Artificial Sequence: Synthetic polynucleotide"
  source 1..2175: mol_type = other DNA
atgtcttttgttgatcaccctccagattggttggaagaagttggtgaaggtcttcgcgagtttttgggccctgaagcgggcccaccgaaaccaaaacccaatcagcagcatcaagatcaagcccgtggtcttgtgctgcctggttataactatctcggacccggaaacggtctcgatcgaggagagcctgtcaacagggcagacgaggtcgcgcgagagcacgacatctcgtacaacgagcagcttgaggcgggagacaacccctacctcaagtacaaccacgcggacgccgagtttcaggagaagctcgccgacgacacatccttcgggggaaacctcggaaaggcagtctttcaggccaagaaaagggttctcgaaccttttggcctggttgaagagggtgctaagacggcccctaccggaaagcggatagacgaccactttccaaaaagaaagaaggcccggaccgaagaggactccaagccttccacctcgtcagacgccgaagctggacccagcggatcccagcagctgcaaatcccagcccaaccagcctcaagtttgggagctgatacaatgtctgcgggaggtggcggcccattgggcgacaataaccaaggtgccgatggagtgggcaatgcctcgggagattggcattgcgattccacgtggatgggggacagagtcgtcaccaagtccacccgaacctgggtgctgcccagctacaacaaccaccagtaccgagagatcaaaagcggctccgtcgacggaagcaacgccaacgcctactttggatacagcaccccctgggggtactttgactttaaccgcttccacagccactggagcccccgagactggcaaagactcatcaacaactactggggcttcagaccccggtccctcagagtcaaaatcttcaacattcaagtcaaagaggtcacggtgcaggactccaccaccaccatcgccaacaacctcacctccaccgtccaagtgtttacggacgacgactaccagctgccctacgtcgtcggcaacgggaccgagggatgcctgccggccttccctccgcaggtctttacgctgccgcagtacggttacgcgacgctgaaccgcgacaacacagaaaatcccaccgagaggagcagcttcttctgcctagagtactttcccagcaagatgctgagaacgggcaacaactttgagtttacctacaactttgaggaggtgcccttccactccagcttcgctcccagtcagaacctcttcaagctggccaacccgctggtggaccagtacttgtaccgcttcgtgagcacaaataacactggcggagtccagttcaacaagaacctggccgggagatacgccaacacctacaaaaactggttcccggggcccatgggccgaacccagggctggaacctgggctccggggtcaaccgcgccagtgtcagcgccttcgccacgaccaataggatggagctcgagggcgcgagttaccaggtgcccccgcagccgaacggcatgaccaacaacctccagggcagcaacacctatgccctggagaacactatgatcttcaacagccagccggcgaacccgggcaccaccgccacgtacctcgagggcaacatgctcatcaccagcgagagcgagacgcagccggtgaaccgcgtggcgtacaacgtcggcgggcagatgaccaccaacaaccagagctccaccactgcccccgcgaccggcacgtacaacctccaggaaatcgtgcccggcagcgtgtggatggagagggacgtgtacccccaaggacccatctgggccaagatcccagagacgggggcgcactttcacccctctccggccatgggcggattcggactcaaacacccaccgcccatgatgctcatcaagaacacgcctgtgcccggaaatatcaccagcttctcggacgtgcccgtcagcagcttcatcacccagtacagcaccgggcaggtcaccgtggagatggagtgggagctcaagaaggaaaactccaagaggtggaacccagagatccagtacacaaacaactacaacgacccccagtttgtggactttgccccggacagcaccggggaatacaggaccaccagacctatcggaacccgataccttacccgacccctttaa

SEQ ID NO: 806 - DNA, 2175 bp, synthetic construct
  misc_feature 1..2175: note = source = /note="Description of Artificial Sequence: Synthetic polynucleotide"
  source 1..2175: mol_type = other DNA
atgtcttttgttgatcaccctccagattggttggaagaagttggtgaaggtcttcgcgagtttttgggccttgaagcgggcccaccgaaaccaaaacccaatcagcagcatcaagatcaagcccgtggtcttgtgctgcctggttataactatctcggacccggaaacggtctcgatcgaggagagcctgtcaacagggcagacgaggtcgcgcgagagcacgacatctcgtacaacgagcagcttgaggcgggagacaacccctacctcaagtacaaccacgcggacgccgagtttcaggagaagctcgccgacgacacatccttcgggggaaacctcggaaaggcagtctttcaggccaagaaaagggttctcgaaccttttggcctggttgaagagggtgctaagacggcccctaccggaaagcggatagacgaccactttccaaaaagaaagaaggcccggaccgaagaggactccaagccttccacctcgtcagacgccgaagctggacccagcggatcccagcagctgcaaatcccagcccaaccagcctcaagtttgggagctgatacaatgtctgcgggaggtggcggcccattgggcgacaataaccaaggtgccgatggagtgggcaatgcctcgggagattggcattgcgattccacgtggatgggggacagagtcgtcaccaagtccacccgaacctgggtgctgcccagctacaacaaccaccagtaccgagagatcaaaagcggctccgtcgacggaagcaacgccaacgcctactttggatacagcaccccctgggggtactttgactttaaccgcttccacagccactggagcccccgagactggcaaagactcatcaacaactactggggcttcagaccccggtccctcagagtcaaaatcttcaacattcaagtcaaagaggtcacggtgcaggactccaccaccaccatcgccaacaacctcacctccaccgtccaagtgtttacggacgacgactaccagctgccctacgtcgtcggcaacgggaccgagggatgcctgccggccttccctccgcaggtctttacgctgccgcagtacggttacgcgacgctgaaccgcgacaacacagaaaatcccaccgagaggagcagcttcctctgcctagagtactttcccagcaagatgctgagaacgggcaacaactttgagtttacctacaactttgaggaggtgcccttccactccagcttcgctcccagtcagaacctcttcaagctggccaacccgctggtggaccagtacttgtaccgcttcgtgagcacaaataacactggcggagtccagttcaacaagaacctggccgggagatacgccaacacctacaaaaactggttcccggggcccatgggccgaacccagggctggaacctgggctccggggtcaaccgcgccagtgtcagcgccttcgccacgaccaataggatggagctcgagggcgcgagttaccaggtgcccccgcagccgaacggcatgaccaacaacctccagggcagcaacacctatgccctggagaacactatgatcttcaacagccagccggcgaacccgggcaccaccgccacgtacctcgagggcaacatgctcatcaccagcgagagcgagacgcagccggtgaaccgcgtggcgtacaacgtcggcgggcagatggccaccaacaaccagagctccaccactgcccccgcgaccggcacgtacaacctccaggaaatcgtgcccggcagcgtgtggatgaagagggacgtgtacctccaaggacccatctgggccaagatcccagagacgggggcgcactttcacccctctccggccatgggcggattcggactcaaacacccaccgcccatgatgctcatcaagaacacgcctgtgcccggaaatatcaccagcttctcggacgtgcccgtcagcagcttcatcacccagtacagcaccgggcaggtcaccgtggagatggagtgggagctcaagaaggaaaactccaagaggtggaacccagagatccagtacacaaacaactacaacgacccccagtttgtggactttgccccggacagcaccggggaatacagaaccaccagacctatcggaacccgataccttacccgacccctttaa

SEQ ID NO: 807 - DNA, 2175 bp, synthetic construct
  misc_feature 1..2175: note = source = /note="Description of Artificial Sequence: Synthetic polynucleotide"
  source 1..2175: mol_type = other DNA
atgtcttttgttgatcaccctccagattggttggaagaagttggtgaaggtcttcgcgagtttttgggccttgaggcgggcccaccgaaaccaaaacccaatcagcagcatcaagatcaagcccgtggtcttgtgctgcctggttataactatctcggacccggaaacggtctcgatcgaggagagcctgtcaacagggcagacgaggtcgcgcgagagcacgacatctcgtacaacgagcagcttgaggcgggagacaacccctacctcaagtacaaccacgcggacgccgagtttcaggagaagctcgccgacgacacatccttcgggggaaacctcggaaaggcagtctttcaggccaagaaaagggttctcgaaccttttggcctggttgaagagggtgctaagacggcccctaccggaaagcggatagacgaccactttccaaaaagaaagaaggcccggaccgaagaggactccaagccttccaccccgtcagacgccgaagctggacccagcggatcccagcagctgcaaatcccagcccaaccagcctcaagtttgggagctgatacaatgtctgcgggaggtggcggcccattgggcgacaataaccaaggtgccgatggagtgggcaatgcctcgggagattggcattgcgattccacgtggatgggggacagagtcgtcaccaagtccacccgaacctgggtgctgcccagctacaacaaccaccagtaccgagagatcaaaagcggctccgtcgacggaagcaacgccaacgcctactttggatacagcaccccctgggggtactttgactttaaccgcttccacagccactggagcccccgagactggcaaagactcatcaacaactactggggcttcagaccccggtccctcagagtcaaaatcttcaacattcaagtcaaagaggtcacggtgcaggactccaccaccaccatcgccaacaacctcacctccaccgtccaagtgtttacggacgacgactaccagctgccctacgtcgtcggcaacgggaccgagggatgcctgccggccttccctccgcaggtctttacgctgccgcagtacggttacgcgacgctgaaccgcgacaacacagaaaatcccaccgagaggagcagcttcttctgcctagagtactttcccagcaagatgctgagaacgggcaacaactttgagtttacctacaactttgaggaggtgcccttccactccagcttcgctcccagtcagaacctcttcaagctggccaacccgctggtggaccagtacttgtaccgcttcgtgagcacaaataacactggcggagtccagttcaacaagaacctggccgggagatacgccaacacctacaaaaactggttcccggggcccatgggccgaacccagggctggaacctgggctccggggtcaaccgcgccagtgtcagcgccttcgccacgaccaataggatggagctcgagggcgcgagttaccaggtgcccccgcagccgaacggcatgaccaacaacctccagggcagcaacacctatgccctggagaacactatgatcttcaacagccagccggcgaacccgggcaccaccgccacgtacctcgagggcaacatgctcatcaccagcgagagcgagacgcagccggtgaaccgcgtggcgtacaacgtcggcgggcagatggccaccaacaaccagagctccaccactgcccccgcgaccggcacgtacaacctccaggaaatcgtgcccggcagcgtgtggatggagagggacgtgtacctccaaggacccatctgggccaagatcccagagacgggggcgcactttcacccctctccggccatgggcggattcggactcaaacacccaccgcccatgatgctcatcaagaacacgcctgtgcccggaaatatcaccagcttctcggacgtgcccgtcagcagcttcatcacccagtacagcaccgggcaggtcaccgtggagatggagtgggagctcaagaaggaaaactccaagaggtggaacccagagatccagtacacaaacaactacaacgacccccagtttgtggactttgccccggacagcaccggggaatacagaaccaccagacctatcggaacccgataccttacccgacccctttaa

SEQ ID NO: 808 - DNA, 2175 bp, synthetic construct
  misc_feature 1..2175: note = source = /note="Description of Artificial Sequence: Synthetic polynucleotide"
  source 1..2175: mol_type = other DNA
atgtcttttgttgatcaccctccagattggttggaagaagttggtgaaggtcttcgcgagtttttgggccttgaagcgggcccaccgaaaccaaaacccaatcagcagcatcaagatcaagcccgtggtcttgtgctgcctggttataactatctcggacccggaaacggtctcgatcgaggagagcctgtcaacagggcagacgaggtcgcgcgagagcacgacatctcgtacaacgagcagcttgaggcgggagacaacccctacctcaagtacaaccacgcggacgccgagtttcaggagaagctcgccgacgacacatccttcgggggaaacctcggaaaggcagtctttcaggccaagaaaagggttctcgaaccttttggcctggttgaagagggtgctaagacggcccctaccggaaagcggatagacgaccactttccaaaaagaaagaaggcccggaccgaagaggactccaagccttccacctcgtcagacgccgaagctggacccagcggatcccagcagctgcaaatcccagcccaaccagcctcaagtttgggagctgatacaatgtctgcgggaggtggcggcccattgggcgacaataaccaaggtgccgatggagtgggcaatgcctcgggagattggcattgcgattccacgtggatgggggacagagtcgtcaccaagtccacccgaacctgggtgctgcccagctacaacaaccaccagtaccgagagatcaaaagcggctccgtcgacggaagcaacgccaacgcctactttggatacagcaccccctgggggtactttgactttaaccgcttccacagccactggagcccccgagactggcaaagactcatcaacaactactggggcttcagaccccggtccctcagagtcaaaatcttcaacattcaagtcaaagaggtcacggtgcaggactccaccaccaccatcgccaacaacctcacctccaccgtccaagtgtttacggacgacgactaccagctgccctacgtcgtcggcaacgggaccgagggatgcctgccggccttccctccgcaggtctttacgctgccgcagtacggttacgcgacgctgaaccgcgacaacacagaaaatcccaccgagaggagcagcttcttctgcctagagtactttcccagcaagatgctgagaacgggcaacaactttgagtttacctacaactttgaggaggtgcccttccactccagcttcgctcccagtcagaacctcttcaagctggccaacccgctggtggaccagtacttgtaccgcttcgtgagcacaaataacactggcggagtccagttcaacaagaacctggccgggagatacgccaacacccacaaaaactggttcccggggcccatgggccgaacccagggctggaacctgggctccggggtcaaccgcgccagtgtcagcgccttcgccacgaccaataggatggagctcgagggcgcgagttaccaggtgcccccgcagtcgaacggcatgaccaacaacctccggggcagcaacacctatgccctggagaacactatgatcttcaacagccagccggcgaacccgggcaccaccgccacgtacctcgagggcaacatgctcatcaccagcgagagcgagacgcagccggtgaaccgcgtggcgtacaacgtcggcgggcagatggccaccaacaaccagagctccaccactgcccccgcgaccggcacgtacaacctccaggaaatcgtgcccggcagcgtgtggatggagagggacgtgtacctccaaggacccatctgggccaagatcccagagacgggggcgcactttcacccctctccggccatgggcggattcggactcaaacacccaccgcccatgatgctcatcaagaacacgcctgtgcccggaaatatcaccagcttctcggacgtgcccgtcagcagcttcatcacccagtacagcaccgggcaggtcaccgtggagatggagtgggagctcaagaaggaaaactccaagaggtggaacccagagatccagtacacaaacaactacaacgacccccagtttgtggactttgccccggacagcaccggggaatacagaaccaccagacctatcggaacccgataccttacccgacccctttaa

SEQ ID NO: 809 - DNA, 2175 bp, synthetic construct
  misc_feature 1..2175: note = source = /note="Description of Artificial Sequence: Synthetic polynucleotide"
  source 1..2175: mol_type = other DNA
atgtcttttgttgatcaccctccagattggttggaagaagttggtgaaggtcttcgcgagtttttgggccttgaagcgggcccaccgaaaccaaaacccaatcagcagcatcaagatcaagcccgtggtcttgtgctgcctggttataactatctcggacccggaaacggtctcgatcgaggagagcctgtcaacagggcagacgaggtcgcgcgagagcacgacatctcgtacaacgagcagcttgaggcgggagacaacccctacctcaagtacaaccacgcggacgccgagtttcaggagaagctcgccgacgacacatccttcgggggaaacctcggaaaggcagtctttcaggccaagaaaagggttctcgaaccttttggcctggttgaagagggtgctaagacggcccctaccggaaagcggatagacgaccactttccaaaaagaaagaaggcccggaccgaagaggactccaagccttccacctcgtcagacgccgaagctggacccagcggatcccagcagctgcaaatcccagcccaaccagcctcaagtttgggagctgatacaatgtctgcgggaggtggcggcccattgggcgacaataaccaaggtgccgatggagtgggcaatgcctcgggagattggcattgcgattccacgtggatgggggacagagtcgtcaccaagtccacccgaacctgggtgctgcccagctacaacaaccaccagtaccgagagatcaaaagcggctccgtcgacggaagcaacgccaacgcctactttggatacagcaccccctgggggtactttgactttaaccgcttccacagccactggagcccccgagactggcaaagactcatcaacaactactggggcttcagaccccggtccctcagagtcaaaatcttcaacattcaagtcaaagaggtcacggtgcaggactccaccaccaccatcgccaacaacctcacctccaccgtccaagtgtttacggacgacgactaccagctgccctacgtcgtcggcaacgggaccgagggatgcctgccggccttccctccgcaggtctttacgctgccgcagtacggttacgcgacgctgaaccgcgacaacacagaaaatcccaccgagaggagcagcttcttctgcctagagtactttcccagcaagatgctgagaacgggcaacaactttgagtttacctacaactttgaggaggtgcccttccactccagcttcgctcccagtcagaacctcttcaagctggccaacccgctggtggaccagtacttgtaccgcttcgtgagcacaaataacactggcggagtccagttcaacaagaacctggccgggagatacgccaacacctacaaaaactggttcccggggcccatgggccgaacccagggctggaacctgggctccggggtcaaccgcgccagtgtcagcgccttcgccacgaccaataggatggagctcgagggcgcgagttaccaggtgcccccgcagccgaacggcatgaccaacaacctccagggcagcaacacctatgccctggagaacactatgatcttcaacagccagccggcgaacccgggcaccaccgccacgtacctcgagggcaacatgctcatcaccagcgagagcgagacgcagccggtgaaccgcgtggcgtacagcgtcggcgggcagatggccaccaacaaccagagctccaccactgcccccacgaccggcacgtacaacctccaggaaatcgtgcccggcagcgtgtggatggagagggacgtgtacctccaaggacccatctgggccaagatcccagagacgggggcgcactttcacccctctccggccatgggcggattcagactcaaacacccaccgcccatgatgctcatcaagaacacgcctgtgcccggaaatatcaccagcttctcggacgtgcccgtcagcagcttcatcacccagtacagcaccgggcaggtcaccgtggagatggagtgggagctcaagaaggaaaactccaagaggtggaacccagagatccagtacacaaacaactacaacgacccccagtttgtggactttgccccggacagcaccggggaatacagaaccaccagacctatcggaacccgataccttacccgacccctttaa

SEQ ID NO: 810 - DNA, 2175 bp, synthetic construct
  misc_feature 1..2175: note = source = /note="Description of Artificial Sequence: Synthetic polynucleotide"
  source 1..2175: mol_type = other DNA
atgtcttttgttgatcaccctccagattggttggaagaagttggtgaaggtcttcgcgagtttttgggccttgaagcgggcccaccgaaaccaaaacccaatcagcagcatcaagatcaagcccgtggtcttgtgctgcctggttataactatctcggacccggaaacggtctcgatcgaggagagcctgtcaacagggcagacgaggtcgcgcgagagcacgacatctcgtacaacgagcagcttgaggcgggagacaacccctacctcaagtacaaccacgcggacgccgagtttcaggagaagctcgccgacgacacatccttcgggggaaacctcggaaaggcagtctttcaggccaagaaaagggttctcgaaccttttggcctggttgaagagggtgctaagacggcccctaccggaaagcggatagacgaccactttccaaaaagaaagaaggcccggaccgaagaggactccaagccttccacctcgtcagacgccgaagctggacccagcggatcccagcagctgcaaatcccagcccaaccagcctcaagtttgggagctgatacaatgtctgcgggaggtggcggcccattgggcgacaataaccaaggtgccgatggagtgggcaatgcctcgggagattggcattgcgattccacgtggatgggggacagagtcgtcaccaagtccacccgaacctgggtgctgcccagctacaacaaccaccagtaccgagagatcaaaagcggctccgtcgacggaagcaacgccaacgcctactttggatacagcaccccctgggggtactttgactttaaccgcttccacagccactggagcccccgagactggcaaagactcatcaacaactactggggcttcagaccccggtccctcagagtcaaaatcttcaacattcaagtcaaagaggtcacggtgcaggactccaccaccaccatcgccaacaacctcacctccaccgtccaagtgtttacggacgacgactaccagctgccctacgtcgtcggcaacgggaccgagggatgcctgccggccttccctccgcaggtctttacgctgccgcagtacggttacgcgacgctgaaccgcgacaacacagaaaatcccaccgagaggagcagcttcttctgcctagagtactttcccagcaagatgctgagaacgggcaacaactttgagtttacctacaactttgaggaggtgcccttccactccagcttcgctcccagtcagaacctcttcaagctggccaacccgctggtggaccagtacttgtaccgcttcgtgagcacaaataacactggcggagtccagttcaacaagaacctggccgggagatacgccaacacctacaaaaactggttcccggggcccatgggccgaacccagggctggaacctgggctccggggtcaaccgcgccagtgtcagcgccttcgccgcgaccaataggatggagctcgagggcgcgagttaccaggtgcccccgcagccgaacggcatgaccaacaacctccagggcagcaacacctatgccctggagaacactatgatcttcaacagccagccggcgaacccgggcaccaccgccacgtacctcgagggcaacatgctcatcaccagcgagagcgagacgcagccggtgaaccgcgtggcgtacaacgtcggcgggcagatggccaccaacaaccagagctccaccactgcccccgcgaccggcacgtacaacctccaggaaatcgtgcccggcggcgtgtggatggagagggacgtgtacctccaaggacccatctgggccaagatcccagagacgggggcgcactttcacccctctccggccatgggcggattcggactcaaacacccaccgcccatgatgctcatcaagaacacgcctgtgcccggaaataccaccagcttctcggacgtgcccgtcagcagcttcatcacccagtacagcaccgggcaggtcaccgtggagatggagtgggagctcaagaaggaaaactccaagaggtggaacccagagatccagtacacaaacaactacaacgacccccagtttgtggactttgccccggacagcaccggggaatacagaaccaccagacctatcggaacccgataccttacccgacccctttaa

SEQ ID NO: 811 - DNA, 2175 bp, synthetic construct
  misc_feature 1..2175: note = source = /note="Description of Artificial Sequence: Synthetic polynucleotide"
  source 1..2175: mol_type = other DNA
atgtcttttgttgatcaccctccagattggttggaagaagttggtgaaggtcttcgcgagtttttgggccttgaagcgggcccaccgaaaccaaaacccaatcagcagcatcaagatcaagcccgtggtcttgtgctgcctggttataactatctcggacccggaaacggtctcgatcgaggagagcctgtcaacagggcagacgaggtcgcgcgagagcacgacatctcgtacaacgagcagcttgaggcgggagacaacccctacctcaagtacaaccacgcggacgccgagtttcaggagaagctcgccgacgacacatccttcgggggaaacctcggaaaggtagtctttcaggccaagaaaagggttctcgaaccttttggcctggttgaagagggtgctaagacggcccctaccggaaagcggatagacgaccactttccaaaaagaaagaaggcccggaccgaagaggactccaagccttccacctcgtcagacgccgaagctggacccagcggatcccagcagctgcaaatcccagcccaaccagcctcaagtttgggagctgatacaatgtctgcgggaggtggcggcccattgggcggcaataaccaaggtgccgatggagtgggcaatgcctcgggagattggcattgcgattccacgtggatgggggacagagtcgtcaccaagtccacccgaacctgggtgctgcccagctacaacaaccaccagtaccgagagatcaaaagcggctccgtcgacggaagcaacgccaacgcctactttggatacagcaccccctgggggtactttgactttaaccgcttccacagccactggggcccccgagactggcaaagactcatcaacaactactggggcttcagaccccggtccctcagagtcaaaatcttcaacattcaagtcaaagaggtcacggtgcaggactccaccaccaccatcgccaacaacctcacctccaccgtccaagtgtttacggacgacgactaccagctgccctacgtcgtcggcaacgggaccgagggatgcctgccggccttccctccgcaggtctttacgctgccgcagtacggttacgcgacgctgaaccgcgacaacacagaaaatcccaccgagaggagcagcttcttctgcctagagtactttcccagcaagatgctgagaacgggcaacaactttgagtttacctacaactttgaggaggtgcccttccactccagcttcgctcccagtcagaacctcttcaagctggccaacccgctggtggaccagtacttgtaccgcttcgtgagcacaaataacactggcggagtccagttcaacaagaacctggccgggagatacgccaacacctacaaaaactggttcccggggcccatgggccgaacccagggctggaacctgggctccggggtcaaccgcgccagtgtcagcgccctcgccacgaccaataggatggagctcgagggcgcgagttaccaggtgcccccgcagccgaacggcatgaccaacaacctccagggcagcaacacctatgccctggagaacactatgatcttcaacagccagccggcgaacccgggcaccaccgccacgtacctcgagggcaacatgctcatcaccagcgagagcgagacgcagccggtgaaccgcgtggcgtacaacgtcggcgggcagatggccaccaacaaccagagctccaccactgcccccgcgaccggcacgtacaacctccaggaaatcgtgcccggcagcgtgtggatggagagggacgtgtacctccaaggacccatctgggccaagatcccagagacgggggcgcactttcacccctctccggccatgggcggattcggactcaaacacccaccgcccatgatgctcatcaagaacacgcctgtgcccggaaatatcaccagcttctcggacgtgcccgtcagcagcttcatcacccagtacagcaccgggcaggtcaccgtggagatggagtgggagctcaagaaggaaaactccaagaggtggaacccagagatccagtacacaaacaactacaacgacccccagtttgtggactttgccccggacagcaccggggaatacagaaccaccagacctatcggaacccgataccttacccgacccctttaa

SEQ ID NO: 812 - DNA, 2175 bp, synthetic construct
  misc_feature 1..2175: note = source = /note="Description of Artificial Sequence: Synthetic polynucleotide"
  source 1..2175: mol_type = other DNA
atgtcttttgttgatcaccctccagattggttggaagaagttggtgaaggtcttcgcgagtttttgggccttgaagcgggcccaccgaaaccaaaacccaatcagcagcatcaagatcaagcccgtggtcttgtgctgcctggttataactatctcggacccggaaacggtctcgatcgaggagagcctgtcaacagggcagacgaggtcgcgcgagagcacgacatctcgtacaacgagcagcttgaggcgggagacaacccctacctcaagtacaaccacgcggacgccgagtttcaggagaagctcgccgacgacacatccttcgggggaaacctcggaaaggcagtctttcaggccaagaaaagggttctcgaaccttttggcctggttgaagagggtgctaagacggcccctaccggaaagcggatagacgaccactttccaaaaagaaagaaggcccggaccgaagaggactccaagccttccacctcgtcagacgccgaagctggacccagcggatcccagcagctgcaaatcccagcccaaccagcctcaagtttgggagctgatacaatgtctgcgggaggtggcggcccattgggcgacaataaccaaggtgccgatggagtgggcaatgcctcgggagattggcattgcgattccacgtggatgggggacagagtcgtcaccaagtccacccgaacctgggtgctgcccagctacaacaaccaccagtaccgagagatcaaaagcggctccgtcgacggaagcaacgccaacgcctactttggatacagcaccccctgggggtactttgactttaaccgcttccacagccactggagcccccgagactggcaaagactcatcaacaactactggggcttcagaccccggtccctcagagtcaaaatcttcaacattcaagtcaaagaggtcacggtgcaggactccaccaccaccatcgccaacaacctcacctccaccgtccaagtgtttacggacgacgactaccagctgccctacgtcgtcggcaacgggaccgagggatgcctgccggccttccctccgcaggtctttacgctgccgcagtacggttacgcgacgctgaaccgcgacaacacagaaaatcccaccgagaggagcagcttcttctgcctagagtactttcccagcaagatgctgagaacgggcaacaactttgagtttacctacaactttgaggaggtgcccttccactccagcttcgctcccagtcagaacctcttcaagctggccaacccgctggtggaccagtacttgtaccgcttcgtgagcacaaataacactggcggagtccagttcaacaagaacctggccgggagatacgccaacacctacaaaaactggttcccggggcccatgggccgaacccagggctggaacctgggctccggggtcaaccgcgccagtgtcagcgccttcgccacgaccaataggatggagctcgagggcgcgagttaccaggtgcccccgcagccgaacggcatgaccaacaacctccagggcagcaacacctatgccctggagaacactatgatcttcaacagccagccggcgaacccgggcaccaccgccacgtacctcgagggcaacatgctcatcaccagcgagagcgagacgcagccggtgaaccgcgtggcgtacaacgtcggcgggcagatggccaccaacaaccagagctccaccactgcccccgcgaccggcacgtacaacctccaggaaatcgtgcccggcagcgtgtggatggagagggacgtgtacctccaaggacccatctgagccaagatcccagagacgggggcgcactttcacccctctccggccatgggcggattcggactcaaacacccaccgcccatgatgctcatcaagaacacgcctgtgcccggaaatatcaccagcttctcggacgtgcccgtcagcagcttcatcacccagtacagcaccgggcaggtcaccgtggagatggagtgggagctcaagaaggaaaactccaagaggtggaacccagagatccagtacacaaacaactacaacgacccccagtttgtggactttgccccggacagcaccggggaatgcagaaccaccagacctatcggaacccgataccttacccgacccctttaa

SEQ ID NO: 813 - DNA, 2175 bp, synthetic construct
  misc_feature 1..2175: note = source = /note="Description of Artificial Sequence: Synthetic polynucleotide"
  source 1..2175: mol_type = other DNA
atgtcttttgttgatcaccctccagattggttggaagaagttggtgaaggtcttcgcgagtttttgggccttgaagcgggcccaccgaaaccaaaacccaatcagcagcatcaagatcaagcccgtggtcttgtgctgcctggttataactatctcggacccggaaacggtctcgatcgaggagagcctgtcaacagggcagacgaggtcgcgcgagagcacgacatctcgtacaacgagcagcttgaggcgggagacaacccctacctcaagtacaaccacgcggacgccgagtttcaggagaagctcgccgacgacacatccttcgggggaaacctcggaaaggcagtctttcaggccaagaaaagggttctcgaaccttttggcctggttgaagagggtgctaagacggcccctaccggaaagcggatagacgaccactttccaaaaagaaagaaggcccggaccgaagaggactccaagccttccacctcgtcagacgccgaagctggacccagcggatcccagcagctgcaaatcccagcccaaccagcctcaagtttgggagctgatacaatgtctgcgggaggtggcggcccattgggcgacaataaccaaggtgccgatggagtgggcaatgcctcgggagattggcattgcgattccacgtggatgggggacagagtcgtcaccaagtccacccgaacctgggtgctgcccagctacaacaaccaccagtaccgagagatcaaaagcggctccgtcgacggaagcaacgccaacgcctactttggatacagcaccccctgggggtactttgactttaaccgcttccacagccactggagcccccgagactggcaaagactcatcaacaactactggggcttcagaccccggtccctcagagtcaaaatcctcaacattcaagtcaaagaggtcacggtgcaggactccaccaccaccatcgccaacaacctcacctccaccgtccaagtgtttacggacgacgactaccagctgccctacgtcgtcggcaacgggaccgagggatgcctgccggccttccctccgcaggtctttacgctgccgcagtacggttacgcgacgctgaaccgcgacaacacagaaaatcccaccgagaggagcagcttcttctgcctagagtactttcccagcaagatgctgagaacgggcaacaactttgagtttacctacaactttgaggaggtgcccttccactccagcttcgctcccagtcagaacctcttcaagctggccaacccgctggtgggccagtacttgtaccgcttcgtgagcacaaataacactggcggagtccagttcaacgagaacctggccgggagatacgccaacacctacaaaaactggttcccggggcccatgggccgaacccagggctggaacctgggctccggggtcaaccgcgccagtgtcagcgccttcgccacgaccaataggatggagctcgagggcgcgagttaccaggtgcccccgcagccgaacggcatgaccaacaacctccagggcagcaacacctatgccctggagaacactatgatcttcaacagccagccggcgaacccgggcaccaccgccacgtacctcgagggcaacatgctcatcaccagcgagagcgagacgcagccggtgaaccgcgtggcgtacaacgtcggcgggcagatggccaccaacaaccagagctccaccactgcccccgcgaccggcacgtacaacctccaggaaatcgtgcccggcagcgtgtggatggagagggacgtgtacctccaaggacccatctgggccaagatcccagagacgggggcgcactttcacccctctccggccatgggcggattcggactcaaacacccaccgcccatgatgctcatcaagaacacgcctgtgcccggaaatatcaccagcttctcggacgtgcccgtcagcagcttcatcacccagtacagcaccgggcaggccaccgtggagatggagtgggagctcaagaaggaaaactccaagaggtggaacccagagatccagtacacaaacaactacaacgacccccagtttgtggactttgccccggacagcaccggggaatacagaaccaccagacctatcggaacccgataccttacccgacccctttaa

SEQ ID NO: 814 - DNA, 2175 bp, synthetic construct
  misc_feature 1..2175: note = source = /note="Description of Artificial Sequence: Synthetic polynucleotide"
  source 1..2175: mol_type = other DNA
atgtcttttgttgatcaccctccagattggttggaagaagttggtgaaggtcttcgcgagtttttgggccttgaagcgggcccaccgaaaccaaaacccaatcagcagcatcaagatcaagcccgtggtcttgtgctgcctggttataactatctcggacccggaaacggcctcgatcgaggagagcctgtcaacagggcagacgaggtcgcgcgagagcacgacatctcgtacaacgagcagcttgaggcgggagacaacccctacctcaagtacaaccacgcggacgccgagtttcaggagaagctcgccgacgacacatccttcgggggaaacctcggaaaggcagtctttcaggccaagaaaagggttctcgaaccttttggcctggttgaagagggtgctaagacggcccctaccggaaagcggatagacgaccactttccaaaaagaaagaaggcccggaccgaagaggactccaagccttccacctcgtcagacgccgaagctggacccagcggatcccagcagctgcaaatcccagcccaaccagcctcaagtttgggagctgatacaatgtctgcgggaggtggcggcccattgggcgacaataaccaaggtgccgatggagtgggcaatgcctcgggagattggcattgcgattccacgtggatgggggacagagtcgtcaccaagtccacccgaacctgggtgctgcccagctacaacaaccaccagtaccgagagatcaaaagcggctccgtcgacggaagcaacgccaacgcctactttggatacagcaccccctgggggtactttgactttaaccgcttccacagccactggagcccccgagactggcaaagactcatcaacaactactggggcttcagaccccggtccctcagagtcaaaatcttcaacattcaagtcaaagaggtcacggtgcaggactccaccaccatcatcgccaacaacctcacctccaccgtccaagtgtttacggacgacgactaccagctgccctacgtcgtcggcaacgggaccgagggatgcctgccggccttccctccgcaggtctttacgctgccgcagtacggttacgcgacgctgaaccgcgacaacacagaaaatcccaccgagaggagcagcttcttctgcctagagtactttcccagcaagatgctgagaacgggcaacaactttgagtttacctacaactttgaggaggtgcccttccactccagcttcgcccccagtcagaacctcttcaagctggccaacccgctggtggaccagtacttgtaccgcttcgtgagcacaaataacactggcggagtccagttcaacaagaacctggccgggagatacgccaacacctacaaaaactggttcccggggcccatgggccgaacccagggctggaacctgggctccggggtcaaccgcgccagtgtcagcgccttcgccacgaccaataggatggagctcgagggcgcgagttaccaggtgcccccgcagccgaacggcatgaccaacaacctccagggcagcaacacctatgccctggagaacactatgatcttcaacagccagccggcgaacccgggcaccaccgccacgtacctcgagggcaacatgctcatcaccagcgagagcgagacgcagccggtgaaccgcgtggcgtacaacgtcggcgggcagatggccaccaacaaccagagctccaccactgcccccgcgaccggcacgtacaacctccaggaaatcgtgcccggcagcgtgtggatggagagggacgtgtacctccaaggacccatctgggccaagatcccagagacgggggcgcactttcacccctctccggccatgggcggattcggactcaaacacccaccgcccatgatgctcatcaagaacacgcctgtgcccggaaatatcaccagcttctcggacgtgcccgtcagcagcttcatcacccagtacagcaccgggcaggtcaccgtggagatggagtgggagctcaagaaggaaaactccaagaggtggaacccagagatccagtacacaaacaactacaacgacccccagtttgtggactttgccccggacagcaccggggaatacagaaccaccagacctatcggaacccgataccttacccgacccctttaa

SEQ ID NO: 815 - DNA, 2175 bp, synthetic construct
  misc_feature 1..2175: note = source = /note="Description of Artificial Sequence: Synthetic polynucleotide"
  source 1..2175: mol_type = other DNA
atgtcttttgttgatcaccctccagattggttggaagaagttggtgaaggtcttcgcgagtttttgggccttgaagcgggcccaccgaaaccaaaacccaatcagcagcatcaagatcaagcccgtggtcttgtgctgcctggttataactatctcggacccggaaacggtctcgatcgaggagagcctgtcaacagggcagacgaggtcgcgcgagagcacgacatctcgtacaacgagcagcttgaggcgggagacaacccctacctcaagtacaaccacgcggacgccgagtttcaggagaagctcgccgacgacacatccttcgggggaaacctcggaaaggcagtctttcaggccaagaaaagggttctcgaaccttttggcctggttgaagagggtgctaagacggcccctaccggaaagcggatagacgaccactttccaaaaagaaagaaggcccggaccgaagaggactccaagccttccacctcgtcagacgccgaagctggacccagcggatcccagcagctgcaaatcccagcccaaccagcctcaagtttgggagctgatacaatgtctgcgggaggtggcggcccattgggcgacaataaccaaggtgccgatggagtgggcaatgcctcgggagattggcattgcgattccacgtggatgggggacagagtcgtcaccaagtccacccgaacctgggtgctgcccagctacaacaaccaccagtaccgagagatcaaaagcggctccgtcgacggaagcaacgccaacgcctactttggatacagcaccccctgggggtactttgactttaaccgcttccacagccactggagcccccgagactggcaaagactcatcaacaactactggggcttcagaccccggtccctcagagtcaaaatcttcaacattcaagtcaaagaggtcacggtgcaggactccaccaccaccatcgccaacaacctcacctccaccgtccaagtgtttacggacgacgactaccagctgccctacgtcgtcggcaacgggaccgagggatgcctgccggccttccctccgcaggtctttacgctgccgcagtacggttacgcgacgctgaaccgcgacaacacagaaaatcccaccgagaggagcagcttcttctgcctagagtactttcccagcaagatgctgagaacgggcaacaactttgagtttacctacaactttgaggaggtgcccttccactccagcttcgctcccagtcagaacctcttcaagctggccaacccgctggtggaccagtacttgtaccgcttcgtgagcacaaataacactggcggagtccagttcaacaagaacctggccgggagatacgccaacacctacaaaaactggttcccggggcccatgggccgaacccagggctggaacctgggctccggggtcaaccgcgccagtgtcagcgccttcgccacgaccaataggatggagctcgagggcgcgagttaccaggtgcccccgcagccgaacggcatgaccaacaacctccagggcagcaacacctatgccctggagaacactatgatcttcaacagccagccggcgaacccgggcaccaccgccacgtacctcgagggcaacatgctcatcaccagcgagagcgagacgcagccggtgaaccgcgtggcgtacaacgtcggcgggcagatggccaccaacaaccagagctccaccactgcccccgcgaccggcacgtacaacctccaggaaatcgtgcccggcagcgtgtggatggagagggacgtgtacctccaaggacccatctgggccaagatcccagagacgggggcgcactttcacccctctccggccatgggcggattcggactcaaacacccaccgcccatgatgctcatcaagaacacgcctgtgcccggaaatatcaccagcctctcggacgtgcccgtcagcagcttcatcacccagtacagcaccgggcaggtcaccgtggagatggagtgggagctcaagaaggaaaactccaagaggtggaacccagagatccagtacacaaacaactacaacgacccccagtttgtggactttgccccggacagcaccggggaatacagaaccaccagacctatcggaacccgataccttacccgacccctttaa

SEQ ID NO: 816 - DNA, 2175 bp, synthetic construct
  misc_feature 1..2175: note = source = /note="Description of Artificial Sequence: Synthetic polynucleotide"
  source 1..2175: mol_type = other DNA
atgtcttttgttgatcaccctccagattggttggaagaagttggtgaaggtcttcgcgagtttttgggccttgaagcgggcccaccgaaaccaaaacccaatcagcagcatcaagatcaagcccgtggtcttgtgctgcctggttataactatctcggacccggaaacggtctcgatcgaggagagcctgccaacagggcagacgaggtcgcgcgagagcacgacatctcgtacaacgagcagcttgaggcgggagacaacccctacctcaagtacaaccacgcgggcgccgagtttcaggagaagctcgccgacgacacatccttcgggggaaacctcggaaaggcagtctttcaggccaagaaaagggttctcgaaccttttggcctggttgaagagggtgctaagacggcccctaccggaaagcggatagacgaccactttccaaaaagaaagaaggcccggaccgaagaggactccaagccttccacctcgtcagacgccgaagctggacccagcggatcccagcagctgcaaatcccagcccaaccagcctcaagtttgggagctgatacaatgtctgcgggaggtggcggcccattgggcgacaataaccaaggtgccgatggagtgggcaatgcctcgggagattggcattgcgattccacgtggatgggggacagagtcgtcaccaagtccacccgaacctgggtgctgcccggctacaacaaccaccagtaccgagagatcaaaagcggctccgtcgacggaagcaacgccaacgcctactttggatacagcaccccctgggggtactttgactttaaccgcttccacagccactggagcccccgagactggcaaagactcatcaacaactactggggcttcagaccccggtccctcagagtcaaaatcttcaacattcaagtcaaagaggtcacggtgcaggactccaccaccaccatcgccaacaacctcacctccaccgtccaagtgtttacggacgacgactaccagctgccctacgtcgtcggcaacgggaccgagggatgcctgccggccttccctccgcaggtctttacgctgccgcagtacggttacgcgacgctgaaccgcgacaacacagaaaatcccaccgagaggagcagcttcttctgcctagagtactttcccagcaagatgctgagaacgggcaacaactttgagtttacctacaactttgaggaggtgcccttccactccagcttcgctcccagtcagaacctcttcaagctggccaacccgctggtggaccagtacttgtaccgcttcgtgagcacaaataatactggcggagtccagttcaacaagaacctggccgggagatacgccaacacctacaaaaactggttcccggggcccatgggccgaacccagggctggaacctgggctccggggtcaaccgcgccagtgtcagcgccttcgccacgaccaataggatggagctcgagggcgcgagttaccaggtgcccccgcagccgaacggcatgaccaacaacctccagggcagcaacacctatgccctggagaacactatgatcttcaacagccagccggcgaacccgggcaccaccgccacgtacctcgagggcaacatgctcatcaccagcgagagcgagacgcagccggtgaaccgcgtggcgtacaacgtcggcgggcagatggccaccaacaaccagagctccaccactgcccccgcgaccggcacgtacaacctccaggaaatcgtgcccggcagcgtgtggatggagagggacgtgtacctccaaggacccatctgggccaagatcccagagacgggggcgcactttcacccctctccggccatgggcggattcggactcaaacacccaccgcccatgatgctcatcaagaacacgcctgtgcccggaaatatcaccagcttctcggacgtgcccgtcagcagcttcatcacccagtacagcaccgggcaggtcaccgtggagatggagtgggagctcaagaaggaaaactccaagaggtggaacccagagatccagtacacaaacaactacaacgacccccagtttgtggactttgccccggacagcaccggggaatacagaaccaccagacctatcggaacccgataccttacccgacccctttaa

SEQ ID NO: 817 - DNA, 2175 bp, synthetic construct
  misc_feature 1..2175: note = source = /note="Description of Artificial Sequence: Synthetic polynucleotide"
  source 1..2175: mol_type = other DNA
atgtcttttgttgatcaccctccagattggttggaagaagttggtgaaggtcttcgcgagtttttgggccttgaagcgggcccaccgaaaccaaaacccaatcagcagcatcaagatcaagcccgtggtcttgtgctgcctggttataactatctcggacccggaaacggtctcgatcgaggagagcctgtcaacagggcagacgaggtcgcgcgagagcacgacatctcgtacaacgagcagcttgaggcgggagacaacccctacctcaagtacaaccacgcggacgccgagtttcaggagaagctcgccgacgacacatccttcgggggaaacctcggaaaggcagtctttcaggccaagaaaagggttctcgaaccttttggcctggttgaagagggtgctaagacggcccctaccggaaagcggatagacgaccactttccaaaaagaaagaaggcccggaccgaagaggactccaagcctcccacctcgtcagacgccgaagctggacccagcggatcccagcagctgcaaatcccagcccaaccagcctcaagtttgggagctgatacaatgtctgcgggaggtggcggcccattgggcgacaataaccaaggtgccgatggagtgggcaatgcctcgggagattggcattgcgattccacgtggatgggggacagagtcgtcaccaagtccacccgaacctgggtgctgcccagctacaacaaccaccagtaccgagagatcaaaagcggctccgtcgacggaagcaacgccaacgcctactttggatacagcaccccctgggggtactttgactttaaccgcttccacagccactggagcccccgagactggcaaagactcatcaacaactactggggcttcagaccccggtccctcagagtcaaaatcttcaacattcaagtcaaagaggtcacggtgcaggactccgccaccaccatcgccaacaacctcacctccaccgtccaagtgtttacggacgacgactaccagctgccctacgtcgtcggcaacgggaccgagggatgcctgccggccttccctccgcaggtctttacgctgccgcagtacggttacgcgacgctgaaccgcgacaacacagaaaatcccaccgagaggagcagcttcttctgcctagagtactttcccagcaagatgctgagaacgggcaacaactttgagtttacctacaactttgaggaggtgcccttccactccagcttcgctcccagtcagaacctcttcaagctggccaacccgctggtggaccagtacttgtaccgcttcgtgagcacaaataacactggcggagtccagttcaacaagaacctggccgggagatacgccaacacctacaaaaactggttcccggggcccatgggccgaacccagggctggaacctgggctccggggtcaaccgcgccagtgtcagcgccttcgccacgaccaataggatggagctcgagggcgcgagttaccaggtgcccccgcagccgaacggcatgaccaacaacctccagggcagcaacacctatgccctggagaacactatgatcttcaacagccagccggcgaacccgggcaccaccgccacgtacctcgagggcaacatgctcatcaccagcgagagcgagacgcagccggtgaaccgcgtggcgtacaacgtcggcgggcagatggccaccaacaaccagagctccaccactgcccccgcgaccggcacgtacaacctccaggaaatcgtgcccggcagcgtgtggatggagagggacgtgtacctccaaggacccatctgggccaagatcccagagacgggggcgcactttcacccctctccggccatgggcggattcggactcaaacacccaccgcccatgatgctcatcaagaacacgcctgtgcccggaaatatcaccagcttctcggacgtgcccgtcagcagcttcatcacccagtacagcaccgggcaggtcaccgtggagatggagtgggagctcaagaaggaaaactccaagaggtggaacccagagatccagtacacaaacaactacaacgacccccagtttgtggactttgccccggacagcaccggggaatacagaaccaccagacctatcggaacccgataccttacccgacccctttaa

SEQ ID NO: 818 - DNA, 2175 bp, synthetic construct
  misc_feature 1..2175: note = source = /note="Description of Artificial Sequence: Synthetic polynucleotide"
  source 1..2175: mol_type = other DNA
atgtcttttgttgatcaccctccagattggttggaagaagttggtgaaggtcttcgcgagtttttgggccttgaagcgggcccaccgaaaccaaaacccaatcagcagcatcaagatcaagcccgtggtcttgtgctgcctggttataactatctcggacccggaaacggtctcgatcgaggagagcctgtcaacagggcagacgaggtcgcgcgagagcacgacatctcgtacaacgagcagcttgaggcgggagacaacccctacctcaagtacaaccacgcggacgccgagtttcaggagaagctcgccgacgacacatccttcgggggaaacctcggaaaggcagtctttcaggccaagaaaagggttctcgaaccttttggcctggttgaagagggtgctaagacggcccctaccggaaagcggatagacgaccactttccaaaaagaaagaaggcccggaccgaagaggactccaagccttccacctcgtcagacgccgaagctggacccagcggatcccagcagccgcaaatcccagcccaaccagcctcaagtttgggagctgatacaatgtctgcgggaggtggcggcccattgggcgacaataaccaaggtgccgatggagtgggcaatgcctcgggagattggcattgcgattccacgtggatgggggacagagtcgtcaccaagtccacccgaacctgggtgctgcccagctacaacaaccaccagtaccgagagatcaaaagcggctccgtcgacggaagcaacgccaacgcctactttggatacagcaccccctgggggtactttgactttaaccgcttccacagccactggagcccccgagactggcaaagactcatcaacaactactggggcttcagaccccggtccctcagagtcaaaatcttcaacattcaagtcaaagaggtcacggtgcaggactccaccaccaccatcgccaacaacctcacctccaccgtccaagtgtttacggacgacgactaccagctgccctacgtcgtcggcaacgggaccgagggatgcctgccggccttccctccgcaggtctttacgctgccgcagtacggttacgcgacgctgaaccgcgacaacacagaaaatcccaccgagaggagcagcttcttctgcctagagtactttcccagcaagatgctgagaacgggcaacaactttgagtttacctacaactttgaggaggtgcccttccactccagcttcgctcccagtcagaacctcttcaagctggccaacccgctggtggaccagtacttgtaccgcttcgtgagcacaaataacactggcggagtccagttcaacaagaacctggccgggagatacgccaacacctacaaaaactggttcccggggcccatgggccgaacccagggctggaacctgggctccggggtcaaccgcgccagtgtcagcgccttcgccacgaccaataggatggagctcgagggcgcgagttaccaggtgcccccgcagccgaacggcatgaccaacaacctccagggcagcaacacctatgccctggagaacactatgatcttcaacagccagccggcgaacccgggcaccaccgccacgtacctcgagggcaacatgctcatcaccagcgagagcgagacgcagccggtgaaccgcgtggcgtacaacgtcggcgggcagatggccaccaacaaccagagctccaccactgcccccgcgaccggcacgtacaacctccaggaaatcgtgcccggcagcgtgtggatggagagggacgtgtacctccaaggacccatctgggccaagatcccagagacgggggcgcactttcacccctctccggccatgggcggattcggactcaaacacccaccgcccatgatgctcatcaagaacacgcctgcgcccggaaatatcaccagcttctcggacgtgcccgtcagcagcttcatcacccagtacagcaccgggcaggtcaccgtggagatggagtgggagctcaagaaggaaaactccaagaggtggaacccagagatccagtacacaaacaactacaacgacccccagtttgtggactttgccccggacagcaccggggaatacagaaccaccagacctatcggaacccgataccttacccgacccctttaa

SEQ ID NO: 819 - DNA, 2175 bp, synthetic construct
  misc_feature 1..2175: note = source = /note="Description of Artificial Sequence: Synthetic polynucleotide"
  source 1..2175: mol_type = other DNA
atgtcttttgttgatcaccctccagattggttggaagaagttggtgaaggtcttcgcgagtttttgggccttgaagcgggcccaccgaaaccaaaacccaatcagcagcatcaagatcaagcccgtggtcttgtgctgcctggttataactatctcggacccggaaacggtctcgatcgaggagagcctgtcaacagggcagacgaggtcgcgcgagagcacgacatctcgtacaacgagcagcttgaggcgggagacaacccctacctcaagtacaaccacgcggacgccgagtttcaggagaagctcgccgacgacacatccttcgggggaaacctcggaaaggcagtctttcaggccaagaaaagggttctcgaaccttttggcctggttgaagagggtgctaagacggcccctaccggaaagcggatagacgaccactttccaaaaagaaagaaggcccggaccgaagaggactccaagcctcccacctcgtcagacgccgaagctggacccagcggatcccagcagctgcaaatcccagcccaaccagcctcaagtttgggagctgatacaatgtctgcgggaggtggcggcccattgggcgacaataaccaaggtgccgatggagtgggcaatgcctcgggagattggcattgcgattccacgtggatgggggacagagtcgtcaccaagtccacccgaacctgggtgctgcccagctacaacaaccaccagtaccgagagatcaaaagcggctccgtcgacggaagcaacgccaacgcctactttggatacagcaccccctgggggtactttgactttaaccgcttccacagccactggagcccccgagactggcaaagactcatcaacaactactggggcttcagaccccggtccctcagagtcaaaatcttcaacattcaagtcaaagaggtcacggtgcaggactccaccaccaccatcgccaacaacctcacctccaccgtccaagtgtttacggacgacgactaccagctgccctacgtcgtcggcaacgggaccgagggatgcctgccggccttccctccgcaggtctttacgctgccgcagtacggttacgcgacgctgaaccgcgacaacacagaaaatcccaccgagaggagcagcttcttctgcctagagtactttcccagcaagatgctgagaacgggcaacaactttgagtttacctacaactttgaggaggtgcccttccactccagcttcgctcccagtcagaacctcttcaagctggccaacccgctggtggaccagtacttgtaccgcttcgtgagcacaaataacactggcggagtccagttcaacaagaacctggccgggagatacgccaacacctacaaaaactggttcccggggcccatgggccgaacccagggctggaacctgggctccggggtcaaccgcgccagtgtcagcgccttcgccacgaccaataggatggagctcgagggcgcgagttaccaggtgcccccgcagccgaacggcatgaccaacaacctccagggcagcaacacctatgccctggagaacactatgatcttcaacagccagccggcgaacccgggcaccaccgccacgtacctcgagggcaacatgctcatcaccagcgagagcgagacgcagccggtgaaccgcgtggcgtacaacgtcggcgggcagatggccaccaacaaccagagctccaccactgcccccgcgaccggcacgtacaacctccaggaaatcgtgcccggcagcgtgtggatggagagggacgtgtacctccaaggacccatctgggccaagatcccagagacgggggcgcactttcacccctctccggccatgggcggattcggactcaaacacccaccgcccatgatgctcatcaagaacacgcctgtgcccggaaatatcaccagcttctcggacgtgcccgtcagcagcttcatcacccagtacagcaccgggcaggtcaccgtggagatggagtgggagctcaagaaggaaaactccaagaggtggaacccagagatccagtacacaaacaactacaacgacccccagtttgtggactttgccccggacagcaccggggaatacagaaccaccagacctatcggaacccgataccttacccgacccctttaa

SEQ ID NO: 820 - DNA, 2175 bp, synthetic construct
  misc_feature 1..2175: note = source = /note="Description of Artificial Sequence: Synthetic polynucleotide"
  source 1..2175: mol_type = other DNA
atgtcttttgttgatcaccctccagattggttggaagaagttggtgaaggtcttcgcgagtttttgggccttgaagcgggcccaccgaaaccaaaacccaatcagcagcatcaagatcaagcccgtggtcttgtgctgcctggttataactatctcggacccggaaacggtctcgatcgaggagagcctgtcaacagggcagacgaggtcgcgcgagagcacgacatctcgtacaacgagcagcttgaggcgggagacaacccctacctcaagtacaaccacgcggacgccgagtttcaggagaagctcgccgacgacacatccttcgggggaaacctcggaaaggcagtctttcaggccaagaaaagggttctcgaaccttttggcctggttgaagagggtgctaagacggcccctaccggaaagcggatagacgaccactttccaaaaagaaagaaggcccggaccgaagaggactccaagcctcccacctcgtcagacgccgaagctggacccagcggatcccagcagctgcaaatcccagcccaaccagcctcaagtttgggagctgatacaatgtctgcgggaggtggcggcccattgggcgacaataaccaaggtgccgatggagtgggcaatgcctcgggagattggcattgcgattccacgtggatgggggacagagtcgtcaccaagtccacccgaacctgggtgccgcccagctacaacaaccaccagtaccgagagatcaaaagcggctccgtcgacggaagcaacgccaacgcctactttggatacagcaccccctgggggtactttgactttaaccgcttccacagccactggagcccccgagactggcaaagactcatcaacaactactggggcttcagaccccggtccctcagagtcaaaatcttcaacattcaagtcaaagaggtcacggtgcaggactccaccaccaccatcgccaacaacctcacctccaccgtccaagtgtttacggacgacgactaccagctgccctacgtcgtcggcaacgggaccgagggatgcctgccggccttccctccgcaggtctttacgctgccgcagtacggttacgcgacgctgaaccgcgacaacacagaaaatcccaccgagaggagcagcttcttctgcctagagtactttcccagcaagatgctgagaacgggcaacaactttgagtttacctacaactttgaggaggtgcccttccactccagcttcgctcccagtcagaacctcttcaagctggccaacccgctggtggaccagtacttgtaccgcttcgtgagcacaaataacactggcggagtccagttcaacaagaacctggccgggagatacgccaacacctacaaaaactggttcccggggcccatgggccgaacccagggctggaacctgggctccggggtcaaccgcgccagtgtcagcgccttcgccacgaccaataggatggagctcgagggcgcgagttaccaggtgcccccgcagccgaacggcatgaccaacaacctccagggcagcaacacctatgccctggagaacactatgatcttcaacagccagccggcgaacccgggcaccaccgccacgtacctcgagggcaacatgctcatcaccagcgagagcgagacgcagccggtgaaccgcgtggcgtacaacgtcggcgggcagatggccaccaacaaccagagctccaccactgcccccgcgaccggcacgtacaacctccaggaaatcgtgcccggcagcgtgtggatggagagggacgtgtacctccaaggacccatctgggccaagatcccagagacgggggcgcactttcacccctctccggccatgggcggattcggactcaaacacccaccgcccatgatgctcatcaagaacacgcctgtgcccggaaatatcaccagcttctcggacgtgcccgtcagcagcttcatcacccagtacagcaccgggcaggtcgccgtggagatggagtgggagctcaagaaggaaaactccaagaggtggaacccagagatccagtacacaaacaactacaacgacccccagtttgtggactttgccccggacagcaccggggaatacagaaccaccagacctatcggaacccgataccttacccgacccctttaa

SEQ ID NO: 821 - DNA, 2175 bp, synthetic construct
  misc_feature 1..2175: note = source = /note="Description of Artificial Sequence: Synthetic polynucleotide"
  source 1..2175: mol_type = other DNA
atgtcttttgttgatcaccctccagattggttggaagaagttggtgaaggtcttcgcgagtttttgggccttgaagcgggcccaccgaaaccaaaacccaatcagcagcatcaagatcaagcccgtggtcttgtgctgcctggttataactatctcggacccggaaacggtctcgatcgaggagagcctgtcaacagggcagacgaggtcgcgcgagagcacgacatctcgtacaacgagcagcttgaggcgggagacaacccctacctcaagtacaaccacgcggacgccgagtttcaggagaagctcgccgacgacacatccttcgggggaaacctcggaaaggcagtctttcaggccaagaaaagggttctcgaaccttttggcctggttgaagagggtgctaagacggcccctaccggaaagcggatagacgaccactttccaaaaagaaagaaggcccggaccgaagaggactccaagccttccacctcgtcagacgccgaagctggacccagcggatcccagcagctgcaaatcccagcccaaccagcctcaagtttgggagctgatacaatgtctgcgggaggtggcggcccattgggcgacaataaccaaggtgccgatggagtgggcaatgcctcgggagattggcattgcgattccacgtggatgggggacagagtcgtcaccaagtccacccgaacctgggtgctgcccagctacaacaaccaccagtaccgagagatcaaaagcggctccgtcgacggaagcaacgccaacgcctactttggatacagcaccccctgggggtactttgactttaaccgcttccacagccactggagcccccgagactggcaaagactcatcaacaactactggggcttcagaccccggtccctcagagtcaaaatcttcaacattcaagtcaaagaggtcacggtgcaggactccaccaccaccatcgccaacaacctcacctccaccgtccaagtgtttacggacgacgactaccagctgccctacgtcgtcggcaacgggaccgagggatgcctgccggccttccctccgcaggtctttacgctgccgcagtacggttacgcgacgctgaaccgcgacaacacagaaaatcccaccgagaggagcagcttcttctgcctagagtactttcccagcaagatgctgagaacgggcaacaactttgagtttacctacaactttgaggaggtgcccttccactccagcttcgctcccagtcagaacctcttcaagctggccaacccgctggtggaccagtacttgtaccgcttcgtgagcacaaataacactggcggagtccagttcaacaagaacctggccgggagatacgccaacacctacaaaaactggttcccggggcccatgggccgaacccagggctggaacctgggctccggggtcaaccgcgccagtgtcagcgccttcgccacgaccaataggatggagctcgagggcgcgagttaccaggtgcccccgcagccgaacggcatgaccaacaacctccagggcagcaacacctatgccctggagaacactatgatcttcaacagccagccggcgaacccgggcaccaccgccacgtacctcgagggcaacatgctcatcaccagcgagagcgagacgcagccggtgaaccgcgtggcgtacaacgtcggcgggcagatggccaccaacaaccagagctccaccactgcccccgcgaccggcacgtacaacctccaggaaatcgtgcccggcagcgtgtggatggagagggacgtgtacctccaaggacccatctgggccaagatcccagagacgggggcgcactttcacccctctccggccatgggcggattcggactcaaacacccaccgcccatgatgctcatcaagaacacgcctgcgcccggaaatatcaccagcttctcggacgtgcccgtcagcagcttcatcacccagtacagcaccgggcaggtcaccgtggagatggagtgggagctcaagaaggaaaactccaagaggtggaacccagagatccagtacacaaacaactacaacgacccccagtttgtggactttgccccggacagcaccggggaatacagaaccaccagacctatcggaacccgataccttacccgacccctttaa

SEQ ID NO: 822 - DNA, 2175 bp, synthetic construct
  misc_feature 1..2175: note = source = /note="Description of Artificial Sequence: Synthetic polynucleotide"
  source 1..2175: mol_type = other DNA
atgtcttttgttgatcaccctccagattggttggaagaagttggtgaaggtcttcgcgagtttttgggccttgaagcgggcccaccgaaaccaaaacccaatcagcagcatcaagatcaagcccgtggtcttgtgctgcctggttataactatctcggacccggaaacggtctcgatcgaggagagcctgtcaacagggcagacgaggtcgcgcgagagcacgacatctcgtacaacgagcagcttgaggcgggagacaacccctacctcaagtacaaccacgcggacgccgagtttcaggagaagctcgccgacgacacatccttcgggggaaacctcggaaaggcagtctttcaggccaagaaaagggttctcgaaccttttggcctggctgaagagggtgctaagacggcccctaccggaaagcggatagacgaccactttccaaaaagaaagaaggcccggaccgaagaggactccaagccttccacctcgtcagacgccgaagctggacccagcggatcccagcagctgcaaatcccagcccaaccagcctcaagtttgggagctgatacaatgtctgcgggaggtggcggcccattgggcgacaataaccaaggtgccgatggagtgggcaatgcctcgggagattggcattgcgattccacgtggatgggggacagagtcgtcaccaagtccacccgaacctgggtgctgcccagctacaacaaccaccagtaccgagagatcaaaagcggctccgtcgacggaagcaacgccaacgcctactttggatacagcaccccctgggggtactttgactttaaccgcttccacagccactggagcccccgagactggcaaagactcatcaacaactactggggcttcagaccccggtccctcagagccaaaatcttcaacattcaagtcaaagaggtcacggtgcaggactccaccaccaccatcgccaacaacctcacctccaccgtccaagtgtttacggacgacgactaccagctgccctacgtcgtcggcaacgggaccgagggatgcctgccggccttccctccgcaggtctttacgctgccgcagtacggttacgcgacgctgaaccgcgacaacacagaaaatcccaccgagaggagcagcttcttctgcctagagtactttcccagcaagatgctgagaacgggcaacaaccttgagtttacctacaactttgaggaggtgcccttccactccagcttcgctcccagtcagaacctcttcaagctggccaacccgctggtggaccagtacttgtaccgcttcgtgagcacaaataacactggcggagtccagttcaacaagaacctggccgggagatacgccaacacctacaaaaactggttcccggggcccatgggccgaacccagggctggaacctgggctccggggtcaaccgcgccagtgtcagcgccttcgccacgaccaataggatggagctcgagggcgcgagttaccaggtgcccccgcagccgaacggcatgaccaacaacctccagggcagcaacacctatgccctggagaacactatgatcttcaacagccagccggcgaacccgggcaccaccgccacgtacctcgagggcaacatgctcatcaccagcgagagcgagacgcagccggtgaaccgcgtggtgcacaacgtcggcgggcagatggccaccaacaaccagagctccaccactgcccccgcgaccggcacgtacaacctccaggaaatcgtgcccggcagcgtgtggatggagagggacgtgtacctccaaggacccatctgggccaagatcccagagacgggggcgcactttcacccctctccggccatgggcggattcggactcaaacacccaccgcccatgatgctcatcaagaacacgcctgtgcccggaaatatcaccagcttctcggacgtgcccgtcagcagcttcatcacccagtacagcaccgggcaggtcaccgtggagatggagtgggagctcaagaaggaaaactccaagaggtggaacccggagatccagtacacaaacaactacaacgacccccagtttgtggactttgccccggacagcaccggggaatacagaaccaccagacctatcggaacccgataccttacccgacccctttaa

SEQ ID NO: 823 - DNA, 2175 bp, synthetic construct
  misc_feature 1..2175: note = source = /note="Description of Artificial Sequence: Synthetic polynucleotide"
  source 1..2175: mol_type = other DNA
atgtcttttgttgatcaccctccagattggttggaagaagttggtgaaggtcttcgcgagtttttgggccttgaagcgggcccaccgaaaccaaaacccaatcagcagcatcaagatcaagcccgtggtcttgtgctgcctggttataactatctcggacccggaaacggtctcgatcgaggagagcctgtcaacagggcagacgaggtcgcgcgagagcacgacatctcgtacaacgagcagcttgaggcgggagacaacccctacctcaagtacaaccacgcggacgccgagtttcaggagaagctcgccgacgacacatccttcgggggaaacctcggaaaggcagtctttcaggccaagaaaagggttctcgaaccttttggcctggttgaagagggtgctaagacggcccctaccggaaagcggatagacgaccactttccaaaaagaaagaaggcccggaccgaagaggactccaagccttccacctcgtcagacgccgaagctggacccagcggatcccagcagctgcaaatcccagcccaaccagcctcaagtttgggagctgatacaatgtctgcgggaggtggcggcccattgggcgacaataaccaaggtgccgatggagtgggcaatgcctcgggagattggcattgcgattccacgtggatgggggacagagtcgtcaccaagtccacccgaacctgggtgctgcccagctacaacaaccaccagtaccgagagatcaaaagcggctccgtcgacggaggcaacgccaacgcctactttggatacagcaccccctgggggtactttgactttaaccgcttccacagccactggagcccccgggactggcaaagactcatcaacaactactggggcttcagaccccggtccctcagagtcaaaatcttcaacattcaagtcaaagaggtcacggtgcaggactccaccaccaccatcgccaacaacctcacctccaccgtccaagtgtttacggacgacgactaccagctgccctacgtcgtcggcaacgggaccgagggatgcctgccggccttccctccgcaggtctttacgctgccgcagtacggttacgcgacgctgaaccgcgacaacacagaaaatcccaccgagaggagcagcttcttctgcctagagtactttcccagcaagatgctgagaacgggcaacaactttgagtttacctacaactttgaggaggtgcccttccactccagcttcgctcccagtcagaacctcttcaagctggccaacccgctggtggaccagtacttgtaccgcttcgtgagcacaaataacactggcggagtccagttcaacaagaacctggccgggagatacgccaacacctacaaaaactggttcccggggcccatgggccgaacccagggctggaacctgggctccggggtcaaccgcgccagtgtcagcgccttcgccacgaccaataggatggagctcgagggcgcgagttaccaggtgcccccgcagccgaacggcatgaccaacaacctccagggcagcaacacctatgccctggagaacactatgatcttcaacagccagccggcgaacccgggcaccaccgccacgtacctcgagggcaacatgctcatcaccagcgagagcgagacgcagccggtgaaccgcgtggcgtacaacgtcggcgggcagatggccaccaacaaccagagctccaccactgcccccgcgaccggcacgtacaacctccaggaaatcgtgcccggcagcgtgtggatggagagggacgtgtacctccaaggacccatctgggccaagatcccagagacgggggcgcactttcacccctctccggccatgggcggattcggactcaaacacccaccgcccatgatgctcatcaagaacacgcctgcgcccggaaatatcaccagcttctcggacgtgcccgtcagcagcttcatcacccagtacagcaccgggcaggtcaccgtggagatggagtgggagctcaagaagggaaactccaagaggtggaacccagagatccagtacacaaacaactacaacgacccccagtttgtggactttgccccggacagcaccggggaatacagaaccaccagacctatcggaacccgataccttacccgacccctttaa

SEQ ID NO: 824 - DNA, 2175 bp, synthetic construct
  misc_feature 1..2175: note = source = /note="Description of Artificial Sequence: Synthetic polynucleotide"
  source 1..2175: mol_type = other DNA
atgtcttttgttgatcaccctccagattggttggaagaagttggtgaaggtcttcgcgagtttttgggccttgaagcgggcccaccgaaaccaaaacccaatcagcagcatcaagatcaagcccgtggtcttgtgctgcctggttataactatctcggacccggaaacggtctcgatcgaggagagcctgtcaacagggcagacgaggtcgcgcgagagcacgacatctcgtacaacgagcagcttgaggcgggagacaacccctacctcaagtacaaccacgcggacgccgagtttcaggagaagctcgccgacgacacgtccttcgggggaaacctcggaaaggcagtctttcaggccaagaaaagggttctcgaaccttttggcctggttgaagagggtgctaagacggcccctaccggaaagcggatagacgaccactttccaaaaagaaagaaggcccggaccgaagaggactccaagccttccacctcgtcagacgccgaagctggacccagcggatcccagcagctgcaaatcccagcccaaccagcctcaagtttgggagctgatacaatgtctgcgggaggtggcggcccattgggcgacaataaccaaggtgccgatggagtgggcaatgcctcgggagattggcattgcgattccacgtggatgggggacagagtcgtcaccaagtccacccgaacctgggtgctgcccagctacaacaaccaccagtaccgagagatcaaaagcggctccgtcgacggaagcaacgccaacgcctactttggatacagcaccccctgggggtactttgactttaaccgcttccacagccactggagcccccgagactggcaaagactcatcaacaactactggggcttcagaccccggtccctcagagtcaaaatcttcaacattcaagtcaaagaggtcacggtgcaggactccaccaccaccatcgccaacaacctcacctccaccgtccaagtgtttacggacgacgactaccagctgccctacgtcgtcggcaacgggaccgagggatgcctgccggccttccctccgcaggtctttacgctgccgcagtacggttacgcgacgctgaaccgcgacaacacagaaaatcccaccgagaggagcagcttcttctgcctagagtactttcccagcaagatgctgagaacgggcaacaactttgagtttacctacaactttgaggaggtgcccttccactccagcttcgctcccagtcagaacctcttcaagctggccaacccgctggtggaccagtacttgtaccgcttcgtgagcacaaataacactggcggagtccagttcaacaagaacctggccgggagatacgccaacacctacaaaaactggttcccggggcccatgggccgaacccagggctggaacctgggctccggggtcaaccgcgccagtgtcagcgccttcgccacgaccaataggatggagctcgagggcgcgagttaccaggtgcccccgcagccgaacggcatgaccaacaacctccagggcagcaacacctatgccctggagaacactatgatcttcaacagccagccggcgaacccgggcaccaccgccacgtacctcgagggcaacatgctcatcaccagcgagagcgagacgcagccggtgaaccgcgtggcgtacaacgtcggcgggcagatggccaccaacaaccagagctccaccactgcccccgcgaccggcacgtacaacctccaggaaatcgtgcccggcagcgtgtggatggagagggacgtgtacctccaaggacccatctgggccaagatcccagagacgggggtgcactttcacccctctccggccatgggcggattcggactcaaacacccaccgcccatgatgctcatcaagaacacgcctgtgcccggaaatatcaccagcttctcggacgtgcccgtcagcagcttcatcacccagtacagcaccgggcaggtcaccgtggagatggagtgggagctcaagaaggaaaactccaagaggtggaacccagagatccagtacacaaacaactacaacgacccccagtttgtggactttgccccggacagcaccggggaatacagaaccaccagacctatcggaacccgataccttacccgacccctttaa

SEQ ID NO: 825 - DNA, 2175 bp, synthetic construct
  variation 1652: note = a, c, t, or g
  misc_feature 1..2175: note = source = /note="Description of Artificial Sequence: Synthetic polynucleotide"
  source 1..2175: mol_type = other DNA
atgtcttttgttgatcaccctccagattggttggaagaagttggtgaaggtcttcgcgagtttttgggccttgaagcgggcccaccgaaaccaaaacccaatcagcagcatcaagatcaagcccgtggtcttgtgctgcctggttataactatctcggacccggaaacggtctcgatcgaggagagcctgtcaacagggcagacgaggtcgcgcgagagcacgacatctcgtacaacgagcagcttgaggcgggagacaacccctacctcaagtacaaccacgcggacgccgagtttcaggagaagctcgccgacgacacatccttcgggggaaacctcggaaaggcagtctttcaggccaagaaaagggttctcgaaccttttggcctggttgaagagggtgctaagacggcccctaccggaaagcggatagacgaccactttccaaaaagaaagaaggcccggaccgaggaggactccaagccttccacctcgtcagacgccgaagctggacccagcggatcccagcagctgcaaatcccagcccaaccagcctcaagtttgggagctgatacaatgtctgcgggaggtggcggcccattgggcgacaataaccaaggtgccgatggagtgggcaatgcctcgggagattggcattgcgattccacgtggatgggggacagagtcgtcaccaagtccacccgaacctgggtgctgcccagctacaacaaccaccagtaccgagagatcaaaagcggctccgtcgacggaagcaacgccaacgcctactttggatacagcaccccctgggggtactttgactttaaccgcttccacagccactggagcccccgagactggcaaagactcatcaacaactactggggcttcagaccccggtccctcagagtcaaaatcttcaacattcaagtcaaagaggtcacggtgcaggactccaccaccaccatcgccaacaacctcacctccaccgtccaagtgtttacggacgacgactaccagctgccctacgtcgtcggcaacgggaccgagggatgcctgccggccttccctccgcaggtctttacgctgccgcagtacggttacgcgacgctgaaccgcgacaacacagaaaatcccaccgagaggagcagcttcttctgcctagagtactttcccagcaagatgctgagaacgggcaacaactttgagtttacctacaactttgaggaggtgcccttccactccagcttcgctcccagtcagaacctcttcaagctggccaacccgctggtggaccagtacttgtaccgcttcgtgagcacaaataacactggcggagtccagttcaacaagaacctggccgggagatacgccaacacctacaaaaactggttcccggggcccatgggccgaacccagggctggaacctgggctccggggtcaaccgcgccagtgtcagcgccttcgccacgaccaataggatggagctcgagggcgcgagttaccaggtgcccccgcagccgaacggcatgaccaacaacctccagggcagcaacacctatgccctggagaacactatgatcttcaacagccagccggcgaacccgggcaccaccgccacgtacctcgagggcagcatgctcatcaccancgagagcgagacgcagccggtgaaccgcgtggcgtacaacgtcggcgggcagatggccaccaacaaccagagctccaccactgcccccgcgaccggcacgtacaacctccaggaaatcgtgcccggcagcgtgtggatggagagggacgtgtacctccaaggacccatctgggccaagatcccagagacgggggcgcactttcacccctctccggccatgggcggattcggactcaaacacccaccgcccatgatgctcatcaagaacacgcctgtgcccggaaatatcaccagcttctcggacgtgcccgtcagcagcttcatcacccagtacagcaccgggcaggtcaccgtggagatggagtgggagctcaagaaggaaaactccaagaggtggaacccagagatccagtacacaaacaactacaacgacccccagtttgtggactttgccccggacagcaccggggaatacagaaccaccagacctatcggaacccgataccttacccgacccctttaa

SEQ ID NO: 826 - DNA, 2211 bp, synthetic construct
  misc_feature 1..2211: note = source = /note="Description of Artificial Sequence: Synthetic polynucleotide"
  source 1..2211: mol_type = other DNA
atggctgctgacggttatcttccagattggctcgaggacaacctttctgaaggcattcgtgagtggtgggctctgaaacctggagtccctcaacccaaagcgaaccaacaacaccaggacaaccgtcggggtcttgtgcttccgggttacaaatacctcggacccggtaacggactcgacaaaggagagccggtcaacgaggcggacgcggcagccctcgaacacgacaaagcttacgaccagcagctcaaggccggtgacaacccgtacctcaagtacaaccacgccgacgccgagtttcaggagcgtcttcaagaagatacgtcttttgggggcaaccttggcagagcagtcttccaggccaaaaagaggatccttgagcctcttggtctggttgaggaagcagctaaaacggctcctggaaagaagaggcctgtagatcagtctcctcaggaaccggactcatcatctggtgttggcaaatcgggcaaacagcctgccagaaaaagactaaatttcggtcagactggcgactcagagtcagtcccagaccctcaacctctcggagaaccaccagcagcccccacaagtttgggatctaatacaatggcttcaggcggtggcgcaccaatggcagacaataacgagggtgccgatggagtgggtaattcctcaggaaattggcattgcgattcccaatggctgggcgacagagtcatcaccaccagcaccagaacctgggccctgcccacttacaacaaccatctctacaagcaaatctccagccaatcaggagcttcaaacgacaaccactactttggctacagcaccccttgggggtattttgactttaacagattccactgccacttctcaccacgtgactggcagcgactcattaacaacaactggggattccggcccaagaaactcagcttcaagctcttcaacatccaagttaaagaggtcacgcagaacgatggcacgacgactattgccaataaccttaccagcacggttcaagtgtttacggactcggagtatcagctcccgtacgtgctcgggtcggcgcaccaaggctgtctcccgccgtttccagcggacgtcttcatggtccctcagtatggatacctcaccctgaacaacggaagtcaagcggtgggacgctcatccttttactgcctggagtacttcccttcgcagatgctaaggactggaaataacttccaattcagctataccttcgaggatgtaccttttcacagcagctacgctcacagccagagtttggatcgcttgatgaatcctcttattgatcagtatctgtactacctgaacagaacgcaaggaacaacctctggaacaaccaaccaatcacggctgctttttagccaggctgggcctcagtctatgtctttgcaggccagaaattggctacctgggccctgctaccggcaacagagactttcaaagactgctaacgacaacaacaacagtaactttccttggacagcggccagcaaatatcatctcaatggccgcgactcgctggtgaatccaggaccagctatggccagtcacaaggacgatgaagaaaaatttttccctatgcacggcaatctaatatttggcaaagaagggacaacggcaagtaacgcagaattagataatgtaatgattacggatgaagaagagattcgtaccaccaatcctgtggcaacagagcagtatggaactgtggcaaataacttgcagagctcaaatacagctcccacgactagaactgtcaatgatcagggggccttacctggcatggtgtggcaagatcgtgacgtgtaccttcaaggacctatctgggcaaagattcctcacacggatggacactttcatccttctcctctgatgggaggctttggactgaaacatccgcctcctcaaatcatgatcaaaaatactccggtaccggcaaatcctccgacgactttcagcccggccaagtttgcttcatttatcactcagtactccactggacaggtcagcgtggaaattgagtgggagctacagaaagaaaacagcaaacgttggaatccagagattcagtacacttccaactacaacaagtctgttaatgtggactttactgtagacactaatggtgtttatagtgaacctcgccctattggaacccggtatctcacacgaaacttgtaa

SEQ ID NO: 827 - DNA, 2205 bp, synthetic construct; identical to SEQ ID NO: 95
  misc_feature 1..2205: note = source = /note="Description of Artificial Sequence: Synthetic polynucleotide"
  source 1..2205: mol_type = other DNA

SEQ ID NO: 828 - DNA, 2234 bp, synthetic construct
  misc_feature 1..2234: note = source = /note="Description of Artificial Sequence: Synthetic polynucleotide"
  source 1..2234: mol_type = other DNA
atgtcttttgttgatcaccctccagattggttggaagaagttggtgaaggtcttcgcgagtttttgggccttgaagcgggcccaccgaaaccaaaacccaatcagcagcatcaagatcaagcccgtggtcttgtgctgcctggttataactatctcggacccggaaacggtctcgatcgaggagagcctgtcaacagggcagacgaggtcgcgcgagagcacgacatctcgtacaacgagcagcttgaggcgggagacaacccctacctcaagtacaaccacgcggacgccgagtttcaggagaagctcgccgacgacacatccttcgggggaaacctcggaaaggcagtctttcaggccaagaaaagggttctcgaaccttttggcctggttgaagagggtgctaagacggcccctaccggaaagcggatagacgaccactttccaaaaagaaagaaggctcggaccgaagaggactccaagccttccacctcgtcagacgccgaagctggacccagcggatcccagcagctgcaaatcccagcccaaccagcctcaagtttgggagctgatacaatgtctgcgggaggtggcggcccattgggcgacaataaccaaggtgccgatggagtgggcaatgcctcgggagattggcattgcgattccacgtggatgggggacagagtcgtcaccaagtccacccgaacctgggtgctgcccagctacaacaaccaccagtaccgagagatcaaaagcggctccgtcgacggaagcaacgccaacgcctactttggatacagcaccccctgggggtactttgactttaaccgcttccacagccactggagcccccgagactggcaaagactcatcaacaactactggggcttcagaccccggtccctcagagtcaaaatcttcaacattcaagtcaaagaggtcacggtgcaggactccaccaccaccatcgccaacaacctcacctccaccgtccaagtgtttacggacgacgactaccagctgccctacgtcgtcggcaacgggaccgagggatgcctgccggccttccctccgcaggtctttacgctgccgcagtacggttacgcgacgctgaaccgcgacaacacagaaaatcccaccgagaggagcagcttcttctgcctagagtactttcccagcaagatgctgagaacgggcaacaactttgagtttacctacaactttgaggaggtgcccttccactccagcttcgctcccagtcagaacctgttcaagctggccaacccgctggtggaccagtacttgtaccgcttcgtgagcacaaataacactggcggagtccagttcaacaagaacctggccgggagatacgccaacacctacaaaaactggttcccggggcccatgggccgaacccagggctggaacctgggctccggggtcaaccgcgccagtgtcagcgccttcgccacgaccaataggatggagctcgagggcgcgagttaccaggtgcccccgcagccgaacggcatgaccaacaacctccagggcagcaacacctatgccctggagaacactatgatcttcaacagccagccggcgaacccgggcaccaccgccacgtacctcgagggcaacatgctcatcaccagcgagagcgagacgcagccggtgaaccgcgtggcgtacaacgtcggcgggcagatggccaccaacaaccagagctccaccactgcccccgcgaccggcacgtacaacctccaggaaatcgtgcccggcagcgtgtggatggagagggacgtgtacctccaaggacccatctgggccaagatcccagagacgggggcgcactttcacccctctccggccatgggcggattcggactcaaacacccaccgcccatgatgctcatcaagaacacgcctgtgcccggaaatatcaccagcttctcggacgtgcccgtcagcagcttcatcacccagtacagcaccgggcaggtcaccgtggagatggagtgggagctcaagaaggaaaactccaagaggtggaacccagagatccagtacacaaacaactacaacgacccccagtttgtggactttgccccggacagcaccggggaatacagaaccaccagacctatcggaacccgataccttacccgacccctttaacccattcatgtcgcataccctcaataaaccgtgtattcgtgtcagtaaaatactgcctc

SEQ ID NO: 829 - protein, 736 aa, synthetic construct
  REGION 1..736: note = source = /note="Description of Artificial Sequence: Synthetic polypeptide"
MAADGYLPDWLEDNLSEGIREWWALKPGVPQPKANQQHQDNRRGLVLPGYKYLGPGNGLDKGEPVNEADAAALEHDKAYDQQLKAGDNPYLKYNHADAEFQERLQEDTSFGGNLGRAVFQAKKRILEPLGLVEEAAKTAPGKKRPVDQSPQEPDSSSGVGKSGKQPARKRLNFGQTGDSESVPDPQPLGEPPAAPTSLGSNTMASGGGAPMADNNEGADGVGNSSGNWHCDSQWLGDRVITTSTRTWALPTYNNHLYKQISSQSGASNDNHYFGYSTPWGYFDFNRFHCHFSPRDWQRLINNNWGFRPKKLSFKLFNIQVKEVTQNDGTTTIANNLTSTVQVFTDSEYQLPYVLGSAHQGCLPPFPADVFMVPQYGYLTLNNGSQAVGRSSFYCPEYFPSQMLRTGNNFQFSYTFEDVPFHSSYAHSQSLDRLMNPLIDQYLYYLNRTQGTTSGTTNQSRLLFSQAGPQSMSLQARNWLPGPCYRQQRLSKTANDNNNSNFPWTAASKYHLNGRDSLVNPGPAMASHKDDEEKFFPMHGNLIFGKEGTTASNAELDNVMITDEEEIRTTNPVATEQYGTVANNLQSSNTAPTTRTVNDQGALPGMVWQDRDVYLQGPIWAKIPHTDGHFHPSPLMGGFGLKHPPPQIMIKNTPVPANPPTTFSPAKFASFITQYSTGQVSVEIEWELQKENSKRWNPEIQYTSNYNKSVNVDFTVDTNGVYSEPHPIGTRYLTRNL

SEQ ID NO: 830 - protein, 736 aa, synthetic construct
  REGION 1..736: note = source = /note="Description of Artificial Sequence: Synthetic polypeptide"
MAADGYLPDWLEDNLSEGIREWWALKPGVPQPKANQQHQDNRRGLVLPGYKYLGPGNGLDKGEPVNEADAAALEHDKAYDQQLKAGDNPYLKYNHADAEFQERLQEDTSFGGNLGRAVFQAKKRILEPLGLVEEAAKTAPGKKRPVDQSPQEPDSSSGVGKSGKQPARKRLNFGQTGDSESVPDPQPLGEPPAAPTSLGSNTMASGGGAPMADNNEGADGVGNSSGNWHCDSQWLGDRVITTSTRTWALPTYNNHLYKQISSQSGASNDNHYFGYSTPWGYFDFNRFHCHFSPRDWQRLINNNWGFRPKKLSFKLFNIQVKEVTQNDGTTTVANNLTSTVQVFTDSEYQLPYVLGSAHQGCLPPFPADVFMVPQYGYLTLNNGSQAVGRSSFYCLEYFPSQMLRTGNNFQFSYTFEDVPFHSSYAHSQSLDRLMNPLIDQYLYYLNRTQGTTSGTTNQSRLLFSQAGPQSMSLQARNWLPGPCYRQQRLSKTANDNNNSNFPWTAASKYHLNGRDSLVNPGPAMASHKDDEEKFFPMHGNLIFGKEGTTASNAELDNVMITDEEEIRTTNPVATEQYGTVANNLQSSNTAPTTRTVNDQGALPGMVWQDRDVYLQGPIWAKIPHTDGHFHPSPLMGGFGLKHPPPQIMIKNTPVPANPPTTFSPAKFASFITQYSTGQVSVEIEWELQKENSKRWNPEIQYTSNYNKSVNVDFTVDTNGVYSEPRPIGTRYLTRNL

SEQ ID NO: 831 - protein, 736 aa, synthetic construct
  REGION 1..736: note = source = /note="Description of Artificial Sequence: Synthetic polypeptide"
MAADGYLPDWLEDNLSEGIREWWALKPGVPQPKANQQHQDNRRGLVLPGYKYLGPGNGLDKGEPVNEADAAALEHDKAYDQQLKAGDNPYLKYNHADAEFQERLQEDTSFGGNLGRAVFQAKKRILEPLGLVEEAAKTAPGKKRPVDQSPQEPDSSSGVGKSGKQPARKRLNFGQTGDSESVPDPQPLGEPPAAPTSLGSNTMASGGGAPMADNNEGADGVGNSSGNWHCDSQWLGDRVITTSTRTWALPTYNNHLYKQISGQSGASNDNHYFGYSTPWGYFDFNRFHCHFSPRDWQRLINNNWGFRPKKLSFKLFNIQVKEVTQNDGTTTIANNLTSTVQVFTDSEYQLPYVLGSAHQGCLPPFPADVFMVPQYGYLTLNNGSQAVGRSSFYCLEYFPSQMLRTGNNFQFSYTFEDVPFHSSYAHSQSLDRLMNPLIDQYLYYLNRTQGTTSGTTNQSRLLFSQAGPQSMSLQARNWLPGPCYRQQRLSKTANGNNNSNFPWTAASKYHLNGRDSLVNPGPAMASHKDDEEKFFPMHGNLIFGKEGTTASNAELDNVMITDEEEIRTTNPVATEQCGTVANNLQSSNTAPTTRTVNDQGALPGMVWQDRDVYLQGPIWAKIPHTDGHFHPSPLMGGFGLKHPPPQIMIKNTPVPANPPTTFSPAKFASFITQYSTGQVSVEIEWELQKENSKRWNPEIQYTSNYNKSVNVDFTVDTNGVYSEPRPIGTRYLTRNL

SEQ ID NO: 832 - protein, 736 aa, synthetic construct
  REGION 1..736: note = source = /note="Description of Artificial Sequence: Synthetic polypeptide"
MAADGYLPDWLEDNLSEGIREWWALKPGVPQPKANQQHQDNRRGLVLPGYKYLGPGNGLDKGEPVNEADAAALEHDKAYDQQLKAGDNPYLKYNHADAEFQERLQEDTSFGGNLGRAVFQAKKRILEPLGLVEGAAKTAPGKKRPVDQSPQEPDSSSGVGKSGKQPARKRLNFGQTGDSESVPDPQPLGEPPAAPTSLGSNTMASGGGAPMADNNEGADGVGNSSGNWHCDSQWLGDRVITTSTRTWALPTYNSHLYKQISSQSGASNDNHYFGYSTPWGYFDFNRFHCHFSPRDWQRLINNNWGFRPKKLSFKLFNIQVKEVTQNDGTTTIANNLTSTVQVFTDSEYQLPYVLGSAHQGCLPPFPADAFMVPQYGYLTLNNGSQAVGRSSFYCLEYFPSQMLRTGNNFQFSYTFEDVPFHGSYAHSQSLDRLMNPLIDQYLYYLNRTQGTTSGTTNQSRLLFSQAGPQSMSLQARNWLPGPCYRQQRLSKTANDNNNSNFPWTAASKYHLNGRDSLVNPGPAMASHKDDEEKFFPMHGNLIFGKEGTTASNAELDNVMITDEEEIRTTNPVATEQYGTVANNLQSSNTAPTTRTVNDQGALPGMVWQDRDVYLQGPIWAKIPHTDGHFHPSPLMGGFGLKHPPPQIMIKNTPVPANPPTTFSPAKFASFITQYSTGQVSVEIEWELQKENSKRWNPEIQYTSNYNKSVNVDFTVDTNGVYSEPRPIGTRYLTRNS

SEQ ID NO: 833 - protein, 736 aa, synthetic construct
  REGION 1..736: note = source = /note="Description of Artificial Sequence: Synthetic polypeptide"
MAADGYLPDWLEDNLSEGIREWWALKPGVPQPKANQQHQDNRRGLVLPGYKYLGPGNGLDKGEPVNEADAAALEHDKAYDQQLKAGDNPYLKYNHADAEFQERLQEDTSFGGNLGRAVFQAKKRILEPLGLVEGAAKTAPGKKRPVDQSPQEPDSSSGVGKSGKQLARKRLNFGQTGDSESVPDPQPLGEPPAAPTSLGSNTMASGGGAPMADNNEGADGVGNSSGNWHCDSQWLGDRVITTSTRTWALPTYNSHLYKQISGQSGASNDNHYFGYSTPWGYFDFNRFHCHFSPRDWQRLINNNWGFRPKKLSFKLFNIQVKEVTQNDGTTTIANNLTSTVQVFTDSEYQLPYVLGSAHQGCLPPFPADVFMVPQYGYLTLNNGSQAVGRSSFYCLEYFPSQMLRTGNNFQFSYTFEDVPFHSSYAHSQSLDRLMNPLIDQYLYYLNRTQGTTSGTTNQSRLLFSQAGPQSMSLQARNWLPGPCYRQQRLSKTANDNNNSNFPWTAASKYHLNGRDSLVNPGPAMASHKDDEEKFFPMHGNLIFGKEGTTASNAELDNVMITDEEEIRTTNPVATEQYGTVANNLQSSNTAPTTRTVNDQGALPGMVWQDRDVYLQGPIWAKIPHTDGHFHPSPLMGGFGLKHPPPQIMIKNTPVPANPPTTFSPAKFASFITQYSTGQVSVEIEWELQKENSKRWNPEIQYTSNYNKSVNVDFTVDTNGVYSEPRPIGTRYLTRNL

SEQ ID NO: 834 - protein, 736 aa, synthetic construct
  REGION 1..736: note = source = /note="Description of Artificial Sequence: Synthetic polypeptide"
MAADGYLPDWLEDNLSEGIREWWALKPGVPQPKANQQHQDDRRGLVLPGYKYLGPGNGLDKGEPVNEADAAALEHDKAYDQQLKAGDNPCLKYNHADAEFQERLQEDTSFGGNLGRAVFQAKKRILEPLGLVEEAAKTAPGKKRPVDQSPQEPDSSSGVGKSGKQPARKRLNFGQTGDSESVPDPQPLGEPPAAPTSLGSNTMASGGSAPMADNNEGADGVGNSSGNWHCDSQWLGDRVITTSTRTWALPTYNNHLYKQISSQSGASNDNHYFGYSTPWGYFDFNRFHCHFSPRDWQRLINNNWGFRPKKLSFKLFNIQVKEVTQNDGTTTIANNLTSTVQVFTDSEYQLPYVLGSAHQGCLPPFPADVFMVPQYGYLTLNNGSQAVGRSSFYCLEYFPSQMLRTGNNFQFSYTFEDVPFHSSYAHSQSLDRLMDPLIDQYLYYLNRTQGTTSGTTNQSRLLFSQAGPQSMSLQARNWLPGPCYRQQRLSKTANDNNNSNFPWTAASKYHLNGRDSLVNPGPAMASHKDDEEKFFPMHGNLIFGKEGTTASNAELDNVMITDEEEIRTTNPVATEQYGTVANNLQSSNTAPTTRTVNDQGALPGMVWQDRDVYLQGPIWAKIPHTDGHFHPSPLMGGFGLKHPPPQIMIKNTPVPANPPTTFSPAKFASFITQYSTGQVSVEIEWELQKENSKRWNPEIQYTSNYNKSVNVDFTVDTNGVYSEPRPIGTRYLTRNL

SEQ ID NO: 835 - protein, 736 aa, synthetic construct
  REGION 1..736: note = source = /note="Description of Artificial Sequence: Synthetic polypeptide"
MAADGYLPDWLEDNLSEGIREWWALKPGVPQPKANQQHQDDRRGLVLPGYKYLGPGNGLDKGEPVNEADAAALEHDKAYDQQLKAGDNPYLKYNHADAEFQERLQEDTSFGGNLGRAVFQAKKRILEPLGLVEEAAKTAPGKKRPVDQSPQEPDSSSGVGKSGKQPARKRLNFGQTGDSESVPDPQPLGEPPAAPTSLGSNTMASGGGAPMADNNEGADGVGNSSGNWHCDSQWLGNRVITTSTRTWALPTYNNHLYKQISSQSGASNDNHYFGYSTPWGYFDFNRFHCHFSPRDWQRLINNNWGFRPKKLSFKLFNIQVKEVTQNDGTTTIANNLTSTVQVFTDSEYQLPYVLGSAHQGCLPPFPADVFMVPQYGYLTLNNGSQAVGRSSFYCLEYFPSQMLRTGNNFQFSYTFEDVPFHSSYAHSQSLDRLMNPLIDQYLYYLNRTQGTTSGTTNQSRLLFSQAGPQSMSLQARNWLPGPCYRQQRLSKTANDNNNSNFPWTAASKYHLNGRDSLVNPGPAMASHKDDEEKFFPMHGNLIFGKEGTTASNAELDNVMITDEEEIRTTNPVATEQYGTVANNLQSSNTAPTTRTVNDQGALPGMVWQDRDVYLQGPIWAKIPHTDGHFHPSPLMGGFGLKHPPPQIMIKNTPVPANPPTTFSPAKFASFITQYSTGQVSVEIEWELQKENSKRWNPEIQYTSNYNKSVNVDFTVDTNGVYSEPRPIGTRYLTRNL

SEQ ID NO: 836 - protein, 736 aa, synthetic construct
  REGION 1..736: note = source = /note="Description of Artificial Sequence: Synthetic polypeptide"
MAADGYLPDWLEDNLSEGIREWWALKPGVPQPKANQQHQDDRRGLVLPGYKYLGPGNGLDKGEPVNEADAAALEHDKAYDQQLKAGDNPYLKYNHADAEFQERLQEDTSFGGNLGRAVFQAKKRILEPLGLVEEAAKTAPGKKRPVDQSPQEPDSSSGVGKSGKQPARKRLNFGQTGDSESVPDPQPLGEPPAAPTSLGSNTMASGGGAPMADNNEGADGVGNSSGNWHCDSQWLGDRVITTSTRTWALPTYNNHLYKQISSQSGASNDNHYFGYSTPWGYFDFNRFHCHFSPRDWQRLINNNWGFRPKKLSFKLFNIQVKEVTQNDGTTTIANNLTSTVQVFTDSEYQLPYVLGSAHQGCLPPFPADVFMVPQYGYLTLNNGSQAVGRSSFYCLEYFPSQMLRTGNNFQFSYTFEDVPFHSSYAHSQSLDRLMNPLIDQYLYYLNRTQGTTSGTTNQSRLLFSQAGPQSMSLQARNWLPGPCYRQQRLSKTANDNNNSNFPWTAASKYHLNGRDSLVNPGPAMASHKDDEEKFFPMHGNLIFGKEGTTASNAELDNVMITDEEEIRTTNPVATVQYGTVANNLQSSNTAPTTRTVNDQGALPGMVWQDRDVYLQGPIWAKIPHTDGHFHPSPLMGGFGLKHPPPQIMIKNTPVPANPPTTFSPAKFASFITQYSTGQVSVEIEWELQKENSKRWNPEIQYTSNYNKSVNVDFTVDTNGVYSEPRPIGTRYLTRNL

SEQ ID NO: 837 - protein, 735 aa, synthetic construct
  REGION 1..735: note = source = /note="Description of Artificial Sequence: Synthetic polypeptide"
MAADGYLPDWLEDNLSEGIREWWALKPGVPQPKANQQHQDNRRGLVLPGYKYLGPGNGLDKGEPVNEADAAALEHDKAYDQQLKAGDNPYLKYNHADAEFQERLQEDTSFGGNLGRAVFQAKKGILEPLGLVEEAAKTAPGKKRPVDQSPQEPDSSSGVGKSGKQPARKRLNFGQTGDSESVPDPQPLGEPPAAPTSLGSNTMASGGGAPMADNNEGADGVGNSSGNWHCDSQWLGDRVITTSTRTWALPTYNNHLYKQISSQSGASNDNHYFGYSTPWGYFDFNRFHCHFSPRDWQRLINNNWGFRPKKLSFKLFNIQVKEVTQNDGTTTIANNLTSTVQVFTDSEYQLPYVFGSAHQGCLPPFPADVFMVPQYGYLTLNNGSQAVGRSSFYCLEYFPSQMLRTGNNFQFSYTFEDVPFHSSYAHSQSSDRLMNPLIDQYLYYLNRTQGTTSGTTNQSRLLFSQAGPQSMSLQARNWLPGPCYRQQRLSKTANDNNNSNFPTAASKYHLNGRDSLVNPGPAMASHKDDEEKFFPMHGNLIFGKEGTTASNAELDNVMITDEEEIRTTNPVATEQYGTVANNLQSSNTAPTTRTVNDQGALPGMVWQDRDVYLQGPIWAKIPHTDGHFHPSPLMGGFGLKHPPPQIMIKNTPVPANPPTTFSPAKFASFITQYSTGQVSVEIEWELQKENSKRWNPEIQYTSNYNKSVNVDFTVDTNGVYSEPRPIGTRYLTRNL

SEQ ID NO: 838 - protein, 736 aa, synthetic construct
  REGION 1..736: note = source = /note="Description of Artificial Sequence: Synthetic polypeptide"
MAADGYLPDWLEDNLSEGIREWWALKPGVPQPKANQQHQDNRRGLVLPGYKYLGPGNGLDEGEPVNEADAAALEHDKAYDQQLKAGDNPYLKYNHADAEFQERLQEDTSFGGNLGRAVFQAKKRILEPLGLVEGAAKTAPGKKRPVDQSPQEPDSSSGVGKSGKQPARKRLNFGQTGDSESVPDPQPLGEPPAAPTSLGSNTMASGGGAPMADNNEGADGVGNSSGNWHCDSQWLGDRVITTSTRTWALPTYNSHLYKQISSQSGASNDNHYFGYSTPWGYFDFNRFHCHFSPRDWQRLINNNWGFRPKKLSFKLFNIQVKEVTQNDGTTTIANNLTSTVQVFTDSEYQLPYVLGSAHQGCLPPFPADVFMVPQYGYLTLNNGSQAVGRSSFYCLEYFPSQMLRTGNNFQFSYTFEDVPFHSSYAHSQSLDRLMNPLIDQYLYYLNRTQGTTSGTTNQSRLLFSQAGPQSMSLQARNWLPGPCYRQQRLSKTANDNNNSNFPWTAASKYHLNGRDSLVNPGPAMASHKDDEEKFFPMHGNLIFGKEGTTASNAELDNVMITDEEEIRTTNPVATEQYGTVANNLQSSNTAPTTRTVNDQGALPGMVWQDRDVYLQGPIWAKIPHTDGHFHPSPLMGGFGLKHPPPQIMIKNTPVPANPPTTFSPAKFASFITQYSTGQVSVEIEWELQKENSKRWNPEIQYTSNYNKSVNVDFTVDTNGVYSEPRPIGTRYLTRNL

SEQ ID NO: 839 - protein, 668 aa, synthetic construct
  REGION 1..668: note = source = /note="Description of Artificial Sequence: Synthetic polypeptide"
MAADGYLPDWLEDNLSEGIREWWALKPGVPQPKANQQHQDNRRGLVLPGYKYLGPGNGLDKGEPVNEADAAALEHDKAYDQQLKAGDNPYLKYNHADAEFQERLQEDTSFGGNLGRAVFQAKKRILEPLGLVEGAAKTAPGKKRPVDQSPQEPDSSSGVGKSGKQPARKRLNFGQTGDSESVPDPQPLGEPPAAPTSLGSNTMASGGGAPMADNNEGADGVGNSSGNWHCDSQWLGDRVITTSTRTWALPTYNSHLYKQISSQSGASNDNHYFGYSTPWGILTLTDSTATSHHVTGSDSLTTTGDSGPRNSASSSSTSKLKRSRRTMARRLLPITLPARFKCLRTRSISSRTCSGRRTKAVSRRFQRTPSWSLSMDTSPTTEVKRWDAHPFTAWSTSLRRCGLEITSNSAIPSRMYLFTAATLTARVWIAILLLISICTTTERKEQPLEQPTNHGCFLARLGLSLCLCRPEIGYLGPATGNRDFQRLLTTTTTVTFLGQRPANIISMAATRWIQDQLWPVTRTMKKNFSLCTAIRGPYLAWCGKIVTCTFKDLSGQRFLTRMDTFILLLWEALDNIRLLKSSKILRYRQILRRLSARPSLLHLSLSTPLDRSAWKLSGSYRKKTANVGIQRFSTLPTTTSLLMWTLLTLMVFIVNLALLEPGISHETC

SEQ ID NO: 840 - protein, 734 aa, synthetic construct
  REGION 1..734: note = source = /note="Description of Artificial Sequence: Synthetic polypeptide"
MTDGYLPDWLEDNLSEGVREWWALQPGAPKPKANQQHQDNARGLVLPGYKYLGPGNGLDKGEPVNAADAAALEHDKAYDQQLKAGDNPYLKYNHADAEFQQRLQGDTSFGGNLGRAVFQAKKRVLEPLGLVEQAGETAPGKKRPLIESPQQPDSSTGIGKKGKQPAKKKLVFEDETGAGDGPPEGSTSGAMSDDSEMRAATGGAAVEGGQGADGVGNASGDWHCDSTWSEGHVTTTSTRTWVLPTYNNHLYKRLGESLQSNTYNGFSTPWGYFDFNRFHCHFSPRDWQRLINNNWGMRPKAMRVKIFNIQVKEVTTSNGETTVANNLTSTVQIFADSSYELPYVMDAGQEGSLPPFPNDVFMVPQYGYCGLVTGNTSQQQTDRNAFYCLEYFPSQMLRTGNNFEITYSFEKVPFHSMYAHSQSLDRLMNPLIDQYLWGLQSTTTGTTLNAGTATTNFTKLRPTNLSNFKKNWLPGPSIKQQGFSKTANQNYKIPATGSDSLIKYETHSTLDGRWSALTPGPPMATAGPADSKFSNSQLIFAGPKQNGNTATVPGTLIFTSEEELAATNATDTDMWGNLPGGDQSNSNLPTVDRLTALGAVPGMVWQNRDIYYQGPIWAKIPHTDGHFHPSPLIGGFGLKHPPPQIFIKNTPVPANPATTFSSTPVNSFITQYSTGQVSVQIDWEIQKERSKRWNPEVQFTSNYGQQNSLLWAPDAAGKYTEPRAIGTRYLTHHL

SEQ ID NO: 841 - protein, 734 aa, synthetic construct
  REGION 1..734: note = source = /note="Description of Artificial Sequence: Synthetic polypeptide"
MTDGYLPDWLEDNLSEGVREWWALQPGAPKPKANQQHQDNARGLVLPGYKYLGPGNGLDKGEPVNAADAAALEHDKAYDQQLKAGDNPYLKYNHADAEFQQRLQGDTSFGGNLGRAVFQAKKRVLEPLGLVEQAGETAPGKKRPLIESPQQPDSSTGIGKKGKQPAKKKLVFEDETGAGDGPPEGSTSGAMSDDSEMRAAAGGAAVEGGQGADGVGNASGDWHCDSTWSEGHVTTTSTRTWVLPTYNNHLYKRLGESLQSNTYNGFSTPWGYFDFNRFHCHFLPRDWQRLINNNWGVRPKAMRVKIFNIQVKEVTTSNGETTVANNLTSTVQIFADSSYELPYVMDAGQEGSLPPFPNDVFMVPQYGYCGLVTGDTSQQQTDRNAFYCLEYFPSQMLRTGNNFEITYSFEKVPFHSMYAHSQSLDRLMNPLIDQYLWGLQSTTTGTTLNAGTATTNFTKLRPTNFSNFKKNWLPGPSIKQQGFSKTANQNYKIPATGSDSLIKYETHSTLDGRWSALTPGPPMATAGPADSKFSNSQLIFAGPKQNGNTATVPGTLIFTSEEELAATNATDTDMWGNLPGGDQSNSNLPTVDRLTALGAVPGMVWQNRDIYYQGPIWAKIPHTDGHFHPSPLIGGFGLKHPPPQIFIKNTPVPANPATTFSSTPVNSFITQYSTGQVSVQIDWEIQKERSKRWNPEVQFTSNYGQQNSLLWAPDAAGKYTEPRAIGTRYLTHHL

SEQ ID NO: 842 - protein, 734 aa, synthetic construct
  REGION 1..734: note = source = /note="Description of Artificial Sequence: Synthetic polypeptide"
MTDGYLPDWLEDNLSEGVREWWALQPGAPKPKANQQHQDNARGLVLPGYKYLGPGNGLDEGEPVNAADAAALEHDKAYDQQLKAGDNPYLKYNHADAEFQQRLQGDTSFGGNLGRAVFQAKKRVLEPLGLVEQAGETAPGKKRPLIESPQQPDSSTGIGKKGKQPAKKKLVFEDETGAGDGPPEGSTSGAMSDDSEMRAAAGGAAVEGGQGADGVGNASGDWHCDSTWSEGHVTTTSTRTWVLPTYNNHLYKRLGESLQSNTYNGFSTPWGYFDFNRFHCHFSPRDWQRLINNNWGMRPKAMRVKIFNIQVKEVTTSNGETTVANNLTSTVQIFADSSYELPYVMDAGQEGSLPPFPNDVFMVPQYGYCGLVTGNTSQQQTDRNAFYCLEYFPSQMLRTGNNFEITYSFEKVPFHSMYAHSQSLDRLMNPLIDQYLWGLQSTTTGTTLNAGTATTNFTKLRPTNFSNFKKNWLPGPSIKQQGFSKTANQNYKIPATGSDSLIKYETHSTLDGRWSALTPGPPMATAGPADSKFSNSQLIFAGPKQNGNTATVPGTLIFTSEEELAATNATDTDMWGNLPGGDQSNSNLPTVDRLTALGAVPGMVWQNRDIYYQGPIWAKIPHTDGHFHPSPLIGGFGLKHPPPQIFIKNTPVPANPATTFSSTPVNSFITQYSTGQVSVQIDWEIQKERSKRWNPEVQFTSNYGQQNSLLWAPDAAGKYTEPRAIGTRYLTHHL

SEQ ID NO: 843 - protein, 734 aa, synthetic construct
  REGION 1..734: note = source = /note="Description of Artificial Sequence: Synthetic polypeptide"
MTDGYLPDWLEDNLSEGVREWWALQPGAPKPKANQQHQDNARGLVLPGYKYLGPGNGLDKGEPVNAADAAALEHDKAYDQQLKAGDNPYLKYNHADAEFQQRLQGDTSFGGNLGRAVFQAKKRVLEPLGLVEQAGETAPGKKRPLIESPQQPDSSTGIGKKGKQPAKKKLVFEDGTGAGDGPPEGSTSGAMSDDSEMRAAAGGAAVEGGQGADGVGNASGDWHCDSTWSEGHVTTTSTRTWVLPTYNNHLYKRLGESLQSNTYNGFPTPWGYFDFNRFHCHFSPRDWQRLINNNWGMRPKAMRVKIFNIQVKEVTTSNGETTAANNLTSTVQIFADSSYELPYVMDAGQEGSLPPFPNDVFMVPQYGYCGLVTGNTSQQQTDRNAFYCLEYFPSQMLRTGNNFEITYSFEKVPFHSMYAHSQSLDRLMNPLIDQYLWGLQSTTTGTTLNAGTATTNFTKLRPTNFSNFKKNWLPGPSIKQQGFSKTANQNYKIPATGSDSLIKYETHSTLDGRWSALTPGPPMATAGPADSKFSNSQLIFAGPKQNGNTATVPGTLIFTSEEELAATNATDTDMWGNLPGGDQSNSNLPTVDRLTALGAVPGMVWQNRDIYYQGPIWAKIPHTDGHFHPSPLIGGFGLKHPPPQIFIKNTPVPANPATTFSSTPVNSFITQYSTGQVSVQIDWEIQKERSKRWNPEVQFTSNYGQQNSLLWAPDAAGKYTEPRAIGTRYLTHHL

SEQ ID NO: 844 - protein, 734 aa, synthetic construct
  REGION 1..734: note = source = /note="Description of Artificial Sequence: Synthetic polypeptide"
MTDGYLPDWLEDNLSEGVREWWALQPGAPKPKANQQHQDNARGLVLPGYKYLGPGNGLDKGEPVNAADAAALEHDKAYDQQLKAGDNPYLKYNHADAEFQQRLQGDTSFGGNLGRAVFQAKKRVLEPLGLVEQAGETAPGKKRPLIESPQQPDSSTGIGKKGKQPAKKKLVFEDETGAGDGPPEGSTSGAMSDDSEMRAAAGGAAVEGGQGADGVGNASGDWHCDSTWSEGHVTTTSTRTWVLPTYNNHLYKRLGESLQSNTYNGFSTPWGYFDFNRFHCHFSPRDWQRLINNNWGMRPKAMRVKIFNIQVKEVTTSNGETTVANNLTSTVQIFADSSYELPYVMDAGQEGSLPPFPNDVFMVPQYGYRGLVTGNTSQQQTDRNAFYCLEYFPSQMLRTGNNFEITYSFEKVPFHSMYAHSQSLDRLMNPLIDQYLWGLQSTTTGTTLNAGTATTNFTKLRPTNFSNFKKNWLPGPSIKQQGFSKTANQNYKIPATGSDSLIKYETHSTLDGRWSALTPGPPMATAGPADSKFSNSQLIFAGPKQNGNTATVPGTLIFTSEEELAATNATDTDMWGNLPGGDQSNSNLPTVDRLTALGAVPGMVWQNRDIYYQGPIWAKIPHTDGHFHPSPLIGGFGLKHPPPQIFIKNTPVPANPATTFSSTPVNSFITQYSTGQVSVQIDWEIQKERSKRWNPEVQFTSNYGQQNSLLWAPDAAGKYTEPRAIGTRYLTHHL

SEQ ID NO: 845 - protein, 734 aa, synthetic construct
  REGION 1..734: note = source = /note="Description of Artificial Sequence: Synthetic polypeptide"
MTDGYLPDWLEDNLSEGVREWWALQPGAPKPKANQQHQDNARGLVLQGYKYLGPGNGLDKGEPVNAADAAALEHDKAYDQQLKAGDNPYLKYNHADAEFQQRLQGDTSFGGNLGRAVFQAKKRVLEPLGLVEQAGETAPGKKRPLIESPQQPDSSTGIGKKGKQPAKKKLVFEDETGAGDGPPEGSTSGAMSDDSEMRAAAGGAAVEGGQGADGVGNASGDWHCDSTRSEGHVTTTSTRTWVLPTYNNHLYKRLGESLQSNTYNGFSTPWGYFDFNRFHCHFSPRDWQRLINNNWGMRPKAMRVKIFNIQVKEVTTSNGETTVANNLTSTVQIFADSSYELPYVMDAGQEGSLPPFPNDVFMVPQYGYCGLVTGNTSQQQTDRNAFYCLEYFPSQMLRTGNNFEITYSFEKVPFHSMYAHSQSLDRLMNPLIDQYLWGLQSTTTGTTLNAGTATTNFTKLRPTNFSNFKKNWLPGPSIKQQGFSKTANQNYKIPATGSDSLIKYETHSTLDGRWSARTPGPPMATAGPADSKFSNSQLIFAGPKQNGNTATVPGTLIFTSEEELAATNATDTDMWGNLPGGDQSNSNLPTVDRLTALGAVPGMVWQNRDIYYQGPIWAKIPHTDGHFHPSPLIGGFGLKHPPPQIFIKNTPVPANPATTFSSTPVNSFITQYSTGQVSVQIDWEIQKERSKRWNPEVQFTSNYGQQNSLLWAPDAAGKYTEPRAIGTRYLTHHL

SEQ ID NO: 846 - protein, 724 aa, synthetic construct
  REGION 1..724: note = source = /note="Description of Artificial Sequence: Synthetic polypeptide"
MSFVDHPPDWLEEVGEGLREFLGLEAGPPKPKPNQQHQDQARGLVLPGYNYLGPGNGLDRGEPVNRADEVAREHDISYNEQLEAGDNPYLKYNHADAEFQERLADDTSFGGNLGKAVFQAKKRVLEPFGLVEEGAKTAPTGKRIDDHFPKRKKARTEEDSKPSTSSDAEAGPSGSQQLQIPAQPASSLGADTMSAGGGGPLGDNNQGADGVGNASGDWHCDSTWMGDRVVTKSTRTWVLPSYNNHQYREIKSGSVDGSNANAYFGYSTPWGYFDFNRFHSHWSPRDWQRLINNYWGFRPRSLRVKIFNIQVKEVTVQDSTTTIANNLTSTVQVFTDDDYQLPYVVGNGTEGCLPAFPPQVFTLPQYGYATLNRDNTENPTERSSFFCLEYFPSKMLRTGNNFEFTYNFEEVPFHSSFAPSQNLFKLANPLVDQYLYRFVSTNNTGGVQFNKNLAGRYANTYKNWFPGPMGRTQGWNLGSGVNRASVSAFATTNRMELEGASYQVPPQPNGMTNNLQGSNTYALENTMIFNSQPANPGTTATYLEGNMLITSESETQPVNRVAYNVGGQMATNNQSSTTAPATGTYNLQEIVPGSVWMERDVYLQGPIWAKIPETEAHFHPSPAMGGFGLKHPPPMMLIKNTPVPGNITSFSDVPVSSFITQYSTGQVTVEMEWELKKENSKRWNPEIQYTNNYNDPQFVDFAPDSTGEYRTTRPIGTRYLTRPL

SEQ ID NO: 847 - protein, 724 aa, synthetic construct
  REGION 1..724: note = source = /note="Description of Artificial Sequence: Synthetic polypeptide"
MSFVDHPPDWLEEVGEGLREFLGLEAGPPKPKPNQQHQDQARGLVLPGYNYLGPGNGLDRGEPVNRADEVAREHDISYNEQLEAGDNPYLKYNHADAEFQEKLADDTSSGGNLGKAVFQAKKRVLEPFGLVEEGAKTAPTGKRIDDHFPKRKKARTEEDSKPSTSSDAEAGPSGSQQLQIPAQPASSLGADTMSAGGGGPLGDNNQGADGVGNASGDWHCDSTWMGDRVVTKSTRTWVLPSYNNHQYREIKSGSVDGSNANAYFGYSTPWGYFDFNRFHSHWSPRDWQRLINNYWGFRPRSLRVKIFNIQVKEVTVQDSTTTIANNLTSTVQVFTDDDYQLPYVVGNGTEGCLPAFPPQVFTLPQYGYATLNRDNTENPTERSSFFCLEYFPSKMLRTGNNFEFTYNFEEVPFHSSFAPSQNLFKLANPLVDQYLYRFVSTNNTGGVQFNKNLAGRYANTYKNWFPGPMGRTQGWNLGSGVNRASVSAFATTNRMELEGASYQVPPQPNGMTNNLQGSNTYALENTMIFNSQPANPGTTATYLEGNMLITSESETQPVNRVAYNVGGQMATNNQSSTTAPATGTYNLQEIVPGSVWMERDVYLQGPIWAKIPETGAHFHPSPAMGGFGLKHPPPMMLIKNTPVPGNITSFSDVPVSSFITQYSTGQVTVEMEWELKKENSKRWNPEIQYTNNYNDPQFVDFAPDSTGEYRTTRPIGTRYLTRPL

SEQ ID NO: 848 - protein, 724 aa, synthetic construct
  REGION 1..724: note = source = /note="Description of Artificial Sequence: Synthetic polypeptide"
MSFVDHPPDWLEEVGEGLREFLGLEAGPPKPKPNQQHQDQARGLVLPGYNYLGPGNGLDRGEPVNRADEVAREHDISYNEQLEAGDNPYLKYNHADAEFQEKLADDTSFGGNLGKAVFQAKKRVLEPFGLVEEGAKTAPTGKRIDDHFPKRKKARTEEDSKPSTSSDAEAGPSGSQQLQIPAQPASSLGADTMSAGGGGPLGDNNQGADGVGNASGDWHCDSTWMGDRVVTKSTRTWVLPSYNNHQYREIKSGSVDGSNANAYFGYSTPWGYFDFNRFHSHWSPRDWQRLINNYWGFRPRSLRVKIFNIQVKEVTVQDSTTTIANNLTSTVQVFTDDDYQLPYVVGNGTEGCLPAFPPQVFTLPQYGYATLNRDNTENPTERSSFFCLEYFPSKMLRTGNNFEFTYNFEEVPFHSSFAPSQNLFKLANPLVDQYLYRFVSTNNTGGVQFNKNLAGRYANTYKNWFPGPMGRTQGWNLGSGVNRASVSAFATTNRMELEGASYQVPPQPNGMTNNLQGSNTYALENTMIFNSQPANPGTTATYLEGNMLITSESETQPVNRVAYNVGGQMATNNQSSTTAPATGTYNLQEIVPGSVWMERDVYLQGPIWAKIPETGAHFHPSPAMGGFGLKHPPPMMLIKSTPVPGNITSFSDVPVSSFITQYSTGQVTVEMEWELKKENSKRWNPEIQYTNNYNDPQFVDFAPDSTGEYRTTRPIGTRYLTRPL

SEQ ID NO: 849 - protein, 724 aa, synthetic construct
  REGION 1..724: note = source = /note="Description of Artificial Sequence: Synthetic polypeptide"
MSFVDHPPDWLEEVGEGLREFLGPEAGPPKPKPNQQHQDQARGLVLPGYNYLGPGNGLDRGEPVNRADEVAREHDISYNEQLEAGDNPYLKYNHADAEFQEKLADDTSFGGNLGKAVFQAKKRVLEPFGLVEEGAKTAPTGKRIDDHFPKRKKVRTEEDSKPSTSSDAEAGPSGSQQLQIPAQPASSLGADTMSAGGGGPLGDNNQGADGVGNASGDWHCDSTWMGDRVVTKSTRTWVPPSYNNHQYREIKSGSVDGSNANAYFGYSTPWGYFDFNRFHSHWSPRDWQRLINNYWGFRPRSLRVKIFNIQVKEVTVQDSTTTIANNLTSTVQVFTDDDYQLPYVVGNGTEGCLPAFPPQVFTLPQYGYATLNRDNTENPTERSSFFCLEYFPSKMLRTGNNFEFTYNFEEVPFHSSFAPSQNLFKLANPLVDQYLYRFVSTNNTGGVQFNKNLAGRYANTYKNWFPGPMGRTQGWNLGSGVNRASVSAFATTNRMELEGASYQVPPQPNGMTNNLQGSNTYALENTMIFNSQPANPGTTATYLEGNMLITSESETQPVNRVACNVGGQMATNNQSSTTAPATGTYNLQEIVPGSVWMERDVYLQGPIWAKIPETGAHFHPSPAMGGFGLKHPPPMMLIKNTPVPGNITSFSDVPVSSFITQYSTGQVTVEMEWELKKENSKRWNPEIQYTNNYNDPQFVDFAPDSTGEYRTTRPIGTRYLTRPL

SEQ ID NO: 850 - protein, 724 aa, synthetic construct
  REGION 1..724: note = source = /note="Description of Artificial Sequence: Synthetic polypeptide"
MSFVDHPPDWLEEVGEGLREFLGLEAGPPKPKPNQQHQDQARGLVLPGYNYLGPGNGLDRGEPVNRADEVAREHDISYNEQLEAGDNPYLKYNHADAEFQEKLADDTSFGGNLGKAVFQAKKRVLEPFGLVEEGAKTAPTGKRIDDHFPKRKKARTEEDSKPSTSSDAEAGPSGSQQLQIPAQPASSLGADTMSAGGGGPLGDNNQGADGVGNASGDWHCDSTWMGDRVVTKSTRTWVLPSYNNHQYREIKSGSVDGSNANAYFGYSTPWGYFDFNRFHSHWSPRDWQRLINNYWGFRPRSLRVKIFNIQVKEVTVQDSTTTIANNLTSTVQVFTDDDYQLPYVVGNGTEGCLPAFPPQVFTLPQYGYATLNRDNTENPTERSSFFCLEYFPSKMLRTGNNFEFTYNFEEVPFHSSFAPSQNLFKLANPLVDQYLYRFVSTNNTGGVQFNKNLAGRYANTYKNWFPGPMGRTQGWNLGSGVNRASVSAFATTNRMELEGASYQVPPQPNGMTNNLQGSNTYALENTMIFNSQPANPGTTATYLEGNMLITSESETQPVNRVAYNVGGQMATNNQSSTTAPATGAYNLQEIVPGSVWMERDVYLQGPIWAKIPETGAHFHPSPAMGGFGLKHPPPMMLIKNTPVPGNITSFSDVPVSSFITQYSTGQVTVEMEWELKKENSKRWNPEIQYTNNYNDPQFVDFAPDSTGEYRTTRPIGTRYLTRPL

SEQ ID NO: 851 - protein, 724 aa, synthetic construct
  REGION 1..724: note = source = /note="Description of Artificial Sequence: Synthetic polypeptide"
MSFVDHPPDWLEEVGEGLREFLGLEAGPPKPKPNQQHQDQARGLVLPGYNYLGPGNGLDRGEPVNRADGVAREHDISYNEQLEAGDNPYLKYNHADAEFQEKLADDTSFGGNLGKAVFQAKKRVLEPFGLVEEGAKTAPTGKRIDDHFPKRKKARTEEDSKPSTSSDAEAGPSGSQQLQIPAQPASSLGADTMSAGGGGPLGDNNQGADGVGNASGDWHCDSTWMGDRVVTKSTRTWVLPSYNNHQYREIKSGSVDGSNANAYFGYSTPWGYFDFNRFHSHWSPRDWQRLINNYWGFRPRSLRVKIFNIQVKEVTVQDSTTTIANNLTSTVQAFTDDDYQLPYVVGNGTEGCLPAFPPQVFTLPQYGYATLNRDNTENPTERSSFFCLEYFPSKMLRTGNNFEFTYNFEEVPFHSSFAPSQNLFKLANPLVDQYLYRFVSTNNTGGVQFNKNLAGRYANTYKNWFPGPMGRTQGWNLGSGVNRASVSAFATTNRMELEGASYQVPPQPNGMTNNLQGSNTYALENTMIFNSQPANPGTTATYLEGNMLITSESETQPVNRVAYNVGGQMATNNQSSTTAPATGTYNLQEIVPGSVWMERDVYLQGPIWAKIPETGAHFHPSPAMGGFGLKHPPPMMLIKNTPVPGNITSFSDVPVSSFITQYSTGQVTVEMEWELKKENSKRWNPEIQYTNNYNDPQFVDFAPDSTGEYRTTRPIGTRYLTRPL

SEQ ID NO: 852 - protein, 723 aa, synthetic construct
  REGION 1..723: note = source = /note="Description of Artificial Sequence: Synthetic polypeptide"
MSFVDHPPDWLEEVGEGLREFLGLEAGPPKPKPNQQHQDQARGLVLPGYNYLGPGNGLDRGEPVNRADEVAREHDISYNEQLEAGDNPYLKYNHADAEFQEKLADDTSFGGNLGKAVFQAKKRVLEPFGLVEEGAKTAPTGKRIDDHFPKRKKARTEEDSKPSTSSDAEAGPSGSQQLQIPAQPASSLGADTMSAGGGGPLGDNNQGADGVGNASGDWHCDSTWMGDRVVTKSTRTWVLPSYNNHQYREIKSGSVDGSNANAYFGYSTPWGYFDFNRFHSHWSPRDWQRLINNYWGFRPRSLRVKIFNIQVKEVTVQDSTTTIANNLTSTVQVFTDDDYQLPYVVGNGTEGCLPAFPPQVFTLPQYGYATLNRDNTENPTERSSFFCLEYFPSKMLRTGNNFEFTYNFEEVPFHSSFAPSQNLFKLANPLVDQYLYRFVSTNNTGGVQFNKNLAGRYANTYKNWFPGPMGRTQGWNLGSGVNRASVSAFATTNRMELEGASYVPPQPNGMTNNLQGSNTYALENTMIFNSQPANPGTTATYLEGNMLITSESETQPVNRVAYNVGGQMATNNQSSTTAPATGTYNLQEIVPGSVWMEGDVYLQGPIWAKIPETGAHFHPSPAMGGFGLKHPPPMMLIKNTPVPGNITSFSDVPVSSFITQYSTGQVTVEMEWELKKENSKRWNPEIQYTNNYNDPQFVDFAPDSTGEYRTTRPIGTRYLTRPL

SEQ ID NO: 853 - protein, 724 aa, synthetic construct
  REGION 1..724: note = source = /note="Description of Artificial Sequence: Synthetic polypeptide"
MSFVDHPPDWLEEVGEGLREFLGLEAGPPKPKPNQQHQDQARGLVLPGYNYLGPGNGLDRGEPVNRADEVAREHDISYNEQLEAGDNPYLKYNHADAEFQEKLADDTSFGGNLGKAVFQAKKRVLEPFGLVEEGAKTAPTGKRIDDHFPKRKKVRTEEDSKPSTSSDAEAGPSGSQQLQIPAQPASSLGADTMSAGGGGPLGDNNQGADGVGNASGDWHCDSTWMGDRVVTKSTRTWVLPSYNNHQYREIKSGSVDGSNANAYFGYSTPWGYFDFNRFHSHWSPRDWQRLINNYWGFRPRSLRVKIFNIQVKEVTVQDSTTTIANNLTSTVQVFTDDDYQLPYVVGNGTEGCLPAFPPQVFTLPQYGYATLNRDNTENPTERSSFFCLEYFPSKMLRTGNNFEFTYNFEEVPFHSSFAPSQNLFKLANPLVDQYLYRFVSTNNTGGVQFNKNLAGRYANTYKNWFPGPMGRTQGWNLGSGVNRASVSAFATTNRMELEGASYQVPPQPNGMTNNLQGSNTYALENTMIFNSQPANPGTTATYLEGNMLITSESETQPVNRVAYNVGGQMATNNQSSTTAPATGTYNLQEIVPGSVWMERDVYLQGPIWAKIPETGAHFHPSPAMGGFGLKHPPPMMLIKNTPVPGNITSFSDVPVSSFITQYSTGQVTVEMEWELKKENSERWNPEIQYTNNYNDPQFVDFAPDSTGEYRTTRPIGTRYLTRPL

SEQ ID NO: 854 - protein, 724 aa, synthetic construct
  REGION 1..724: note = source = /note="Description of Artificial Sequence: Synthetic polypeptide"
MSFVDHPPDWLEEVGEGLREFLGLEAGPPKPKPNQQHQDQARGLVLPGYNYLGPGNGLDRGEPVNRADEVAREHDISYSEQLEAGDNPYLKYNHADAEFQEKLADDTSFGGNLGKAVFQAKKRVLEPFGLVEEGAKTAPTGKRIDDHFPKRKKARTEEDSKPSTSSDAEAGPSGSQQLQIPAQPASSLGADTMSAGGGGPLGDNNQGADGVGNASGDWHCDSTWMGDRVVTKSTRTWVLPSYNNHQYREIKSGSVDGSNANAYFGYSTPWGYFDFNRFHSHWSPRDWQRLINNYWGFRPRSLRVKIFNIQVKEVTVQDSTTTIANNLTSTVQVFTDDDYQLPYVVGNGTEGCLPAFPPQVFTLPQYGYATLNRDNTENPTERSSFFCLEYFPSKMLRTGNNFEFTYNFEEVPFHSSFAPSQNLFKLANPLVDQYLYRFVSTNNTGGVQFNKNLAGRYANTYKNWFPGPMGRTQGWNLGSGVNRASVSAFATTNRMELEGASYQVPPQPNGMTNNLQGSNTYALENTMIFNSQPANPGTTATYLEGNMLITSESETQPVNRVAYNVGGQMATNNQSSTTAPATGTYNLQEIVPGSVWMERDVYLQGPIWAKIPETGAHFHPSPAMGGFGLKHPPPMMLIKNTPVPGNITSFSDVPVSSFITQYSTGQVTVEMEWELKKENSKRWNPEIQYTNNYNDPQFVDFAPDSTGEYRTARPIGTRYLTRPL

SEQ ID NO: 855 - protein, 724 aa, synthetic construct
  REGION 1..724: note = source = /note="Description of Artificial Sequence: Synthetic polypeptide"
MSFVDHPPDWLEEVGEGLREFLGPEAGPPKPKPNQQHQDQARGLVLPGYNYLGPGNGLDRGEPVNRADEVAREHDISYNEQLEAGDNPYLKYNHADAEFQEKLADDTSFGGNLGKAVFQAKKRVLEPFGLVEEGAKTAPTGKRIDDHFPKRKKARTEEDSKPSTSSDAEAGPSGSQQLQIPAQPASSLGADTMSAGGGGPLGDNNQGADGVGNASGDWHCDSTWMGDRVVTKSTRTWVLPSYNNHQYREIKSGSVDGSNANAYFGYSTPWGYFDFNRFHSHWSPRDWQRLINNYWGFRPRSLRVKIFNIQVKEVTVQDSTTTIANNLTSTVQVFTDDDYQLPYVVGNGTEGCLPAFPPQVFTLPQYGYATLNRDNTENPTERSSFFCLEYFPSKMLRTGNNFEFTYNFEEVPFHSSFAPSQNLFKLANPLVDQYLYRFVSTNNTGGVQFNKNLAGRYANTYKNWFPGPMGRTQGWNLGSGVNRASVSAFATTNRMELEGASYQVPPQPNGMTNNLQGSNTYALENTMIFNSQPANPGTTATYLEGNMLITSESETQPVNRVAYNVGGQMTTNNQSSTTAPATGTYNLQEIVPGSVWMERDVYPQGPIWAKIPETGAHFHPSPAMGGFGLKHPPPMMLIKNTPVPGNITSFSDVPVSSFITQYSTGQVTVEMEWELKKENSKRWNPEIQYTNNYNDPQFVDFAPDSTGEYRTTRPIGTRYLTRPL

SEQ ID NO: 856 - protein, 724 aa, synthetic construct
  REGION 1..724: note = source = /note="Description of Artificial Sequence: Synthetic polypeptide"
MSFVDHPPDWLEEVGEGLREFLGLEAGPPKPKPNQQHQDQARGLVLPGYNYLGPGNGLDRGEPVNRADEVAREHDISYNEQLEAGDNPYLKYNHADAEFQEKLADDTSFGGNLGKAVFQAKKRVLEPFGLVEEGAKTAPTGKRIDDHFPKRKKARTEEDSKPSTSSDAEAGPSGSQQLQIPAQPASSLGADTMSAGGGGPLGDNNQGADGVGNASGDWHCDSTWMGDRVVTKSTRTWVLPSYNNHQYREIKSGSVDGSNANAYFGYSTPWGYFDFNRFHSHWSPRDWQRLINNYWGFRPRSLRVKIFNIQVKEVTVQDSTTTIANNLTSTVQVFTDDDYQLPYVVGNGTEGCLPAFPPQVFTLPQYGYATLNRDNTENPTERSSFLCLEYFPSKMLRTGNNFEFTYNFEEVPFHSSFAPSQNLFKLANPLVDQYLYRFVSTNNTGGVQFNKNLAGRYANTYKNWFPGPMGRTQGWNLGSGVNRASVSAFATTNRMELEGASYQVPPQPNGMTNNLQGSNTYALENTMIFNSQPANPGTTATYLEGNMLITSESETQPVNRVAYNVGGQMATNNQSSTTAPATGTYNLQEIVPGSVWMKRDVYLQGPIWAKIPETGAHFHPSPAMGGFGLKHPPPMMLIKNTPVPGNITSFSDVPVSSFITQYSTGQVTVEMEWELKKENSKRWNPEIQYTNNYNDPQFVDFAPDSTGEYRTTRPIGTRYLTRPL

SEQ ID NO: 857 - protein, 724 aa, synthetic construct
  REGION 1..724: note = source = /note="Description of Artificial Sequence: Synthetic polypeptide"
MSFVDHPPDWLEEVGEGLREFLGLEAGPPKPKPNQQHQDQARGLVLPGYNYLGPGNGLDRGEPVNRADEVAREHDISYNEQLEAGDNPYLKYNHADAEFQEKLADDTSFGGNLGKAVFQAKKRVLEPFGLVEEGAKTAPTGKRIDDHFPKRKKARTEEDSKPSTPSDAEAGPSGSQQLQIPAQPASSLGADTMSAGGGGPLGDNNQGADGVGNASGDWHCDSTWMGDRVVTKSTRTWVLPSYNNHQYREIKSGSVDGSNANAYFGYSTPWGYFDFNRFHSHWSPRDWQRLINNYWGFRPRSLRVKIFNIQVKEVTVQDSTTTIANNLTSTVQVFTDDDYQLPYVVGNGTEGCLPAFPPQVFTLPQYGYATLNRDNTENPTERSSFFCLEYFPSKMLRTGNNFEFTYNFEEVPFHSSFAPSQNLFKLANPLVDQYLYRFVSTNNTGGVQFNKNLAGRYANTYKNWFPGPMGRTQGWNLGSGVNRASVSAFATTNRMELEGASYQVPPQPNGMTNNLQGSNTYALENTMIFNSQPANPGTTATYLEGNMLITSESETQPVNRVAYNVGGQMATNNQSSTTAPATGTYNLQEIVPGSVWMERDVYLQGPIWAKIPETGAHFHPSPAMGGFGLKHPPPMMLIKNTPVPGNITSFSDVPVSSFITQYSTGQVTVEMEWELKKENSKRWNPEIQYTNNYNDPQFVDFAPDSTGEYRTTRPIGTRYLTRPL

SEQ ID NO: 858 - protein, 724 aa, synthetic construct
  REGION 1..724: note = source = /note="Description of Artificial Sequence: Synthetic polypeptide"
MSFVDHPPDWLEEVGEGLREFLGLEAGPPKPKPNQQHQDQARGLVLPGYNYLGPGNGLDRGEPVNRADEVAREHDISYNEQLEAGDNPYLKYNHADAEFQEKLADDTSFGGNLGKAVFQAKKRVLEPFGLVEEGAKTAPTGKRIDDHFPKRKKARTEEDSKPSTSSDAEAGPSGSQQLQIPAQPASSLGADTMSAGGGGPLGDNNQGADGVGNASGDWHCDSTWMGDRVVTKSTRTWVLPSYNNHQYREIKSGSVDGSNANAYFGYSTPWGYFDFNRFHSHWSPRDWQRLINNYWGFRPRSLRVKIFNIQVKEVTVQDSTTTIANNLTSTVQVFTDDDYQLPYVVGNGTEGCLPAFPPQVFTLPQYGYATLNRDNTENPTERSSFFCLEYFPSKMLRTGNNFEFTYNFEEVPFHSSFAPSQNLFKLANPLVDQYLYRFVSTNNTGGVQFNKNLAGRYANTHKNWFPGPMGRTQGWNLGSGVNRASVSAFATTNRMELEGASYQVPPQSNGMTNNLRGSNTYALENTMIFNSQPANPGTTATYLEGNMLITSESETQPVNRVAYNVGGQMATNNQSSTTAPATGTYNLQEIVPGSVWMERDVYLQGPIWAKIPETGAHFHPSPAMGGFGLKHPPPMMLIKNTPVPGNITSFSDVPVSSFITQYSTGQVTVEMEWELKKENSKRWNPEIQYTNNYNDPQFVDFAPDSTGEYRTTRPIGTRYLTRPL

SEQ ID NO: 859 - protein, 724 aa, synthetic construct
  REGION 1..724: note = source = /note="Description of Artificial Sequence: Synthetic polypeptide"
MSFVDHPPDWLEEVGEGLREFLGLEAGPPKPKPNQQHQDQARGLVLPGYNYLGPGNGLDRGEPVNRADEVAREHDISYNEQLEAGDNPYLKYNHADAEFQEKLADDTSFGGNLGKAVFQAKKRVLEPFGLVEEGAKTAPTGKRIDDHFPKRKKARTEEDSKPSTSSDAEAGPSGSQQLQIPAQPASSLGADTMSAGGGGPLGDNNQGADGVGNASGDWHCDSTWMGDRVVTKSTRTWVLPSYNNHQYREIKSGSVDGSNANAYFGYSTPWGYFDFNRFHSHWSPRDWQRLINNYWGFRPRSLRVKIFNIQVKEVTVQDSTTTIANNLTSTVQVFTDDDYQLPYVVGNGTEGCLPAFPPQVFTLPQYGYATLNRDNTENPTERSSFFCLEYFPSKMLRTGNNFEFTYNFEEVPFHSSFAPSQNLFKLANPLVDQYLYRFVSTNNTGGVQFNKNLAGRYANTYKNWFPGPMGRTQGWNLGSGVNRASVSAFATTNRMELEGASYQVPPQPNGMTNNLQGSNTYALENTMIFNSQPANPGTTATYLEGNMLITSESETQPVNRVAYSVGGQMATNNQSSTTAPTTGTYNLQEIVPGSVWMERDVYLQGPIWAKIPETGAHFHPSPAMGGFRLKHPPPMMLIKNTPVPGNITSFSDVPVSSFITQYSTGQVTVEMEWELKKENSKRWNPEIQYTNNYNDPQFVDFAPDSTGEYRTTRPIGTRYLTRPL

SEQ ID NO: 860 - protein, 724 aa, synthetic construct
  REGION 1..724: note = source = /note="Description of Artificial Sequence: Synthetic polypeptide"
MSFVDHPPDWLEEVGEGLREFLGLEAGPPKPKPNQQHQDQARGLVLPGYNYLGPGNGLDRGEPVNRADEVAREHDISYNEQLEAGDNPYLKYNHADAEFQEKLADDTSFGGNLGKAVFQAKKRVLEPFGLVEEGAKTAPTGKRIDDHFPKRKKARTEEDSKPSTSSDAEAGPSGSQQLQIPAQPASSLGADTMSAGGGGPLGDNNQGADGVGNASGDWHCDSTWMGDRVVTKSTRTWVLPSYNNHQYREIKSGSVDGSNANAYFGYSTPWGYFDFNRFHSHWSPRDWQRLINNYWGFRPRSLRVKIFNIQVKEVTVQDSTTTIANNLTSTVQVFTDDDYQLPYVVGNGTEGCLPAFPPQVFTLPQYGYATLNRDNTENPTERSSFFCLEYFPSKMLRTGNNFEFTYNFEEVPFHSSFAPSQNLFKLANPLVDQYLYRFVSTNNTGGVQFNKNLAGRYANTYKNWFPGPMGRTQGWNLGSGVNRASVSAFAATNRMELEGASYQVPPQPNGMTNNLQGSNTYALENTMIFNSQPANPGTTATYLEGNMLITSESETQPVNRVAYNVGGQMATNNQSSTTAPATGTYNLQEIVPGGVWMERDVYLQGPIWAKIPETGAHFHPSPAMGGFGLKHPPPMMLIKNTPVPGNTTSFSDVPVSSFITQYSTGQVTVEMEWELKKENSKRWNPEIQYTNNYNDPQFVDFAPDSTGEYRTTRPIGTRYLTRPL

SEQ ID NO: 861 - protein, 724 aa, synthetic construct
  REGION 1..724: note = source = /note="Description of Artificial Sequence: Synthetic polypeptide"
MSFVDHPPDWLEEVGEGLREFLGLEAGPPKPKPNQQHQDQARGLVLPGYNYLGPGNGLDRGEPVNRADEVAREHDISYNEQLEAGDNPYLKYNHADAEFQEKLADDTSFGGNLGKVVFQAKKRVLEPFGLVEEGAKTAPTGKRIDDHFPKRKKARTEEDSKPSTSSDAEAGPSGSQQLQIPAQPASSLGADTMSAGGGGPLGGNNQGADGVGNASGDWHCDSTWMGDRVVTKSTRTWVLPSYNNHQYREIKSGSVDGSNANAYFGYSTPWGYFDFNRFHSHWGPRDWQRLINNYWGFRPRSLRVKIFNIQVKEVTVQDSTTTIANNLTSTVQVFTDDDYQLPYVVGNGTEGCLPAFPPQVFTLPQYGYATLNRDNTENPTERSSFFCLEYFPSKMLRTGNNFEFTYNFEEVPFHSSFAPSQNLFKLANPLVDQYLYRFVSTNNTGGVQFNKNLAGRYANTYKNWFPGPMGRTQGWNLGSGVNRASVSALATTNRMELEGASYQVPPQPNGMTNNLQGSNTYALENTMIFNSQPANPGTTATYLEGNMLITSESETQPVNRVAYNVGGQMATNNQSSTTAPATGTYNLQEIVPGSVWMERDVYLQGPIWAKIPETGAHFHPSPAMGGFGLKHPPPMMLIKNTPVPGNITSFSDVPVSSFITQYSTGQVTVEMEWELKKENSKRWNPEIQYTNNYNDPQFVDFAPDSTGEYRTTRPIGTRYLTRPL

SEQ ID NO: 862 - protein, 723 aa, synthetic construct
  REGION 1..723: note = source = /note="Description of Artificial Sequence: Synthetic polypeptide"
MSFVDHPPDWLEEVGEGLREFLGLEAGPPKPKPNQQHQDQARGLVLPGYNYLGPGNGLDRGEPVNRADEVAREHDISYNEQLEAGDNPYLKYNHADAEFQEKLADDTSFGGNLGKAVFQAKKRVLEPFGLVEEGAKTAPTGKRIDDHFPKRKKARTEEDSKPSTSSDAEAGPSGSQQLQIPAQPASSLGADTMSAGGGGPLGDNNQGADGVGNASGDWHCDSTWMGDRVVTKSTRTWVLPSYNNHQYREIKSGSVDGSNANAYFGYSTPWGYFDFNRFHSHWSPRDWQRLINNYWGFRPRSLRVKIFNIQVKEVTVQDSTTTIANNLTSTVQVFTDDDYQLPYVVGNGTEGCLPAFPPQVFTLPQYGYATLNRDNTENPTERSSFFCLEYFPSKMLRTGNNFEFTYNFEEVPFHSSFAPSQNLFKLANPLVDQYLYRFVSTNNTGGVQFNKNLAGRYANTYKNWFPGPMGRTQGWNLGSGVNRASVSAFATTNRMELEGASYQVPPQPNGMTNNLQGSNTYALENTMIFNSQPANPGTTATYLEGNMLITSESETQPVNRVAYNVGGQMATNNQSSTTAPATGTYNLQEIVPGSVWMERDVYLQGPIAKIPETGAHFHPSPAMGGFGLKHPPPMMLIKNTPVPGNITSFSDVPVSSFITQYSTGQVTVEMEWELKKENSKRWNPEIQYTNNYNDPQFVDFAPDSTGECRTTRPIGTRYLTRPL

SEQ ID NO: 863 - protein, 724 aa, synthetic construct
  REGION 1..724: note = source = /note="Description of Artificial Sequence: Synthetic polypeptide"
MSFVDHPPDWLEEVGEGLREFLGLEAGPPKPKPNQQHQDQARGLVLPGYNYLGPGNGLDRGEPVNRADEVAREHDISYNEQLEAGDNPYLKYNHADAEFQEKLADDTSFGGNLGKAVFQAKKRVLEPFGLVEEGAKTAPTGKRIDDHFPKRKKARTEEDSKPSTSSDAEAGPSGSQQLQIPAQPASSLGADTMSAGGGGPLGDNNQGADGVGNASGDWHCDSTWMGDRVVTKSTRTWVLPSYNNHQYREIKSGSVDGSNANAYFGYSTPWGYFDFNRFHSHWSPRDWQRLINNYWGFRPRSLRVKILNIQVKEVTVQDSTTTIANNLTSTVQVFTDDDYQLPYVVGNGTEGCLPAFPPQVFTLPQYGYATLNRDNTENPTERSSFFCLEYFPSKMLRTGNNFEFTYNFEEVPFHSSFAPSQNLFKLANPLVGQYLYRFVSTNNTGGVQFNENLAGRYANTYKNWFPGPMGRTQGWNLGSGVNRASVSAFATTNRMELEGASYQVPPQPNGMTNNLQGSNTYALENTMIFNSQPANPGTTATYLEGNMLITSESETQPVNRVAYNVGGQMATNNQSSTTAPATGTYNLQEIVPGSVWMERDVYLQGPIWAKIPETGAHFHPSPAMGGFGLKHPPPMMLIKNTPVPGNITSFSDVPVSSFITQYSTGQATVEMEWELKKENSKRWNPEIQYTNNYNDPQFVDFAPDSTGEYRTTRPIGTRYLTRPL

SEQ ID NO: 864 - protein, 724 aa, synthetic construct
  REGION 1..724: note = source = /note="Description of Artificial Sequence: Synthetic polypeptide"
MSFVDHPPDWLEEVGEGLREFLGLEAGPPKPKPNQQHQDQARGLVLPGYNYLGPGNGLDRGEPVNRADEVAREHDISYNEQLEAGDNPYLKYNHADAEFQEKLADDTSFGGNLGKAVFQAKKRVLEPFGLVEEGAKTAPTGKRIDDHFPKRKKARTEEDSKPSTSSDAEAGPSGSQQLQIPAQPASSLGADTMSAGGGGPLGDNNQGADGVGNASGDWHCDSTWMGDRVVTKSTRTWVLPSYNNHQYREIKSGSVDGSNANAYFGYSTPWGYFDFNRFHSHWSPRDWQRLINNYWGFRPRSLRVKIFNIQVKEVTVQDSTTIIANNLTSTVQVFTDDDYQLPYVVGNGTEGCLPAFPPQVFTLPQYGYATLNRDNTENPTERSSFFCLEYFPSKMLRTGNNFEFTYNFEEVPFHSSFAPSQNLFKLANPLVDQYLYRFVSTNNTGGVQFNKNLAGRYANTYKNWFPGPMGRTQGWNLGSGVNRASVSAFATTNRMELEGASYQVPPQPNGMTNNLQGSNTYALENTMIFNSQPANPGTTATYLEGNMLITSESETQPVNRVAYNVGGQMATNNQSSTTAPATGTYNLQEIVPGSVWMERDVYLQGPIWAKIPETGAHFHPSPAMGGFGLKHPPPMMLIKNTPVPGNITSFSDVPVSSFITQYSTGQVTVEMEWELKKENSKRWNPEIQYTNNYNDPQFVDFAPDSTGEYRTTRPIGTRYLTRPL

SEQ ID NO: 865 - protein, 724 aa, synthetic construct
  REGION 1..724: note = source = /note="Description of Artificial Sequence: Synthetic polypeptide"
MSFVDHPPDWLEEVGEGLREFLGLEAGPPKPKPNQQHQDQARGLVLPGYNYLGPGNGLDRGEPVNRADEVAREHDISYNEQLEAGDNPYLKYNHADAEFQEKLADDTSFGGNLGKAVFQAKKRVLEPFGLVEEGAKTAPTGKRIDDHFPKRKKARTEEDSKPSTSSDAEAGPSGSQQLQIPAQPASSLGADTMSAGGGGPLGDNNQGADGVGNASGDWHCDSTWMGDRVVTKSTRTWVLPSYNNHQYREIKSGSVDGSNANAYFGYSTPWGYFDFNRFHSHWSPRDWQRLINNYWGFRPRSLRVKIFNIQVKEVTVQDSTTTIANNLTSTVQVFTDDDYQLPYVVGNGTEGCLPAFPPQVFTLPQYGYATLNRDNTENPTERSSFFCLEYFPSKMLRTGNNFEFTYNFEEVPFHSSFAPSQNLFKLANPLVDQYLYRFVSTNNTGGVQFNKNLAGRYANTYKNWFPGPMGRTQGWNLGSGVNRASVSAFATTNRMELEGASYQVPPQPNGMTNNLQGSNTYALENTMIFNSQPANPGTTATYLEGNMLITSESETQPVNRVAYNVGGQMATNNQSSTTAPATGTYNLQEIVPGSVWMERDVYLQGPIWAKIPETGAHFHPSPAMGGFGLKHPPPMMLIKNTPVPGNITSLSDVPVSSFITQYSTGQVTVEMEWELKKENSKRWNPEIQYTNNYNDPQFVDFAPDSTGEYRTTRPIGTRYLTRPL

SEQ ID NO: 866 - protein, 724 aa, synthetic construct
  REGION 1..724: note = source = /note="Description of Artificial Sequence: Synthetic polypeptide"
MSFVDHPPDWLEEVGEGLREFLGLEAGPPKPKPNQQHQDQARGLVLPGYNYLGPGNGLDRGEPANRADEVAREHDISYNEQLEAGDNPYLKYNHAGAEFQEKLADDTSFGGNLGKAVFQAKKRVLEPFGLVEEGAKTAPTGKRIDDHFPKRKKARTEEDSKPSTSSDAEAGPSGSQQLQIPAQPASSLGADTMSAGGGGPLGDNNQGADGVGNASGDWHCDSTWMGDRVVTKSTRTWVLPGYNNHQYREIKSGSVDGSNANAYFGYSTPWGYFDFNRFHSHWSPRDWQRLINNYWGFRPRSLRVKIFNIQVKEVTVQDSTTTIANNLTSTVQVFTDDDYQLPYVVGNGTEGCLPAFPPQVFTLPQYGYATLNRDNTENPTERSSFFCLEYFPSKMLRTGNNFEFTYNFEEVPFHSSFAPSQNLFKLANPLVDQYLYRFVSTNNTGGVQFNKNLAGRYANTYKNWFPGPMGRTQGWNLGSGVNRASVSAFATTNRMELEGASYQVPPQPNGMTNNLQGSNTYALENTMIFNSQPANPGTTATYLEGNMLITSESETQPVNRVAYNVGGQMATNNQSSTTAPATGTYNLQEIVPGSVWMERDVYLQGPIWAKIPETGAHFHPSPAMGGFGLKHPPPMMLIKNTPVPGNITSFSDVPVSSFITQYSTGQVTVEMEWELKKENSKRWNPEIQYTNNYNDPQFVDFAPDSTGEYRTTRPIGTRYLTRPL

SEQ ID NO: 867 - protein, 724 aa, synthetic construct
  REGION 1..724: note = source = /note="Description of Artificial Sequence: Synthetic polypeptide"
MSFVDHPPDWLEEVGEGLREFLGLEAGPPKPKPNQQHQDQARGLVLPGYNYLGPGNGLDRGEPVNRADEVAREHDISYNEQLEAGDNPYLKYNHADAEFQEKLADDTSFGGNLGKAVFQAKKRVLEPFGLVEEGAKTAPTGKRIDDHFPKRKKARTEEDSKPPTSSDAEAGPSGSQQLQIPAQPASSLGADTMSAGGGGPLGDNNQGADGVGNASGDWHCDSTWMGDRVVTKSTRTWVLPSYNNHQYREIKSGSVDGSNANAYFGYSTPWGYFDFNRFHSHWSPRDWQRLINNYWGFRPRSLRVKIFNIQVKEVTVQDSATTIANNLTSTVQVFTDDDYQLPYVVGNGTEGCLPAFPPQVFTLPQYGYATLNRDNTENPTERSSFFCLEYFPSKMLRTGNNFEFTYNFEEVPFHSSFAPSQNLFKLANPLVDQYLYRFVSTNNTGGVQFNKNLAGRYANTYKNWFPGPMGRTQGWNLGSGVNRASVSAFATTNRMELEGASYQVPPQPNGMTNNLQGSNTYALENTMIFNSQPANPGTTATYLEGNMLITSESETQPVNRVAYNVGGQMATNNQSSTTAPATGTYNLQEIVPGSVWMERDVYLQGPIWAKIPETGAHFHPSPAMGGFGLKHPPPMMLIKNTPVPGNITSFSDVPVSSFITQYSTGQVTVEMEWELKKENSKRWNPEIQYTNNYNDPQFVDFAPDSTGEYRTTRPIGTRYLTRPL

SEQ ID NO: 868 - protein, 724 aa, synthetic construct
  REGION 1..724: note = source = /note="Description of Artificial Sequence: Synthetic polypeptide"
MSFVDHPPDWLEEVGEGLREFLGLEAGPPKPKPNQQHQDQARGLVLPGYNYLGPGNGLDRGEPVNRADEVAREHDISYNEQLEAGDNPYLKYNHADAEFQEKLADDTSFGGNLGKAVFQAKKRVLEPFGLVEEGAKTAPTGKRIDDHFPKRKKARTEEDSKPSTSSDAEAGPSGSQQPQIPAQPASSLGADTMSAGGGGPLGDNNQGADGVGNASGDWHCDSTWMGDRVVTKSTRTWVLPSYNNHQYREIKSGSVDGSNANAYFGYSTPWGYFDFNRFHSHWSPRDWQRLINNYWGFRPRSLRVKIFNIQVKEVTVQDSTTTIANNLTSTVQVFTDDDYQLPYVVGNGTEGCLPAFPPQVFTLPQYGYATLNRDNTENPTERSSFFCLEYFPSKMLRTGNNFEFTYNFEEVPFHSSFAPSQNLFKLANPLVDQYLYRFVSTNNTGGVQFNKNLAGRYANTYKNWFPGPMGRTQGWNLGSGVNRASVSAFATTNRMELEGASYQVPPQPNGMTNNLQGSNTYALENTMIFNSQPANPGTTATYLEGNMLITSESETQPVNRVAYNVGGQMATNNQSSTTAPATGTYNLQEIVPGSVWMERDVYLQGPIWAKIPETGAHFHPSPAMGGFGLKHPPPMMLIKNTPAPGNITSFSDVPVSSFITQYSTGQVTVEMEWELKKENSKRWNPEIQYTNNYNDPQFVDFAPDSTGEYRTTRPIGTRYLTRPL

SEQ ID NO: 869 - protein, 724 aa, synthetic construct
  REGION 1..724: note = source = /note="Description of Artificial Sequence: Synthetic polypeptide"
MSFVDHPPDWLEEVGEGLREFLGLEAGPPKPKPNQQHQDQARGLVLPGYNYLGPGNGLDRGEPVNRADEVAREHDISYNEQLEAGDNPYLKYNHADAEFQEKLADDTSFGGNLGKAVFQAKKRVLEPFGLVEEGAKTAPTGKRIDDHFPKRKKARTEEDSKPPTSSDAEAGPSGSQQLQIPAQPASSLGADTMSAGGGGPLGDNNQGADGVGNASGDWHCDSTWMGDRVVTKSTRTWVLPSYNNHQYREIKSGSVDGSNANAYFGYSTPWGYFDFNRFHSHWSPRDWQRLINNYWGFRPRSLRVKIFNIQVKEVTVQDSTTTIANNLTSTVQVFTDDDYQLPYVVGNGTEGCLPAFPPQVFTLPQYGYATLNRDNTENPTERSSFFCLEYFPSKMLRTGNNFEFTYNFEEVPFHSSFAPSQNLFKLANPLVDQYLYRFVSTNNTGGVQFNKNLAGRYANTYKNWFPGPMGRTQGWNLGSGVNRASVSAFATTNRMELEGASYQVPPQPNGMTNNLQGSNTYALENTMIFNSQPANPGTTATYLEGNMLITSESETQPVNRVAYNVGGQMATNNQSSTTAPATGTYNLQEIVPGSVWMERDVYLQGPIWAKIPETGAHFHPSPAMGGFGLKHPPPMMLIKNTPVPGNITSFSDVPVSSFITQYSTGQVTVEMEWELKKENSKRWNPEIQYTNNYNDPQFVDFAPDSTGEYRTTRPIGTRYLTRPL

SEQ ID NO: 870 - protein, 724 aa, synthetic construct
  REGION 1..724: note = source = /note="Description of Artificial Sequence: Synthetic polypeptide"
MSFVDHPPDWLEEVGEGLREFLGLEAGPPKPKPNQQHQDQARGLVLPGYNYLGPGNGLDRGEPVNRADEVAREHDISYNEQLEAGDNPYLKYNHADAEFQEKLADDTSFGGNLGKAVFQAKKRVLEPFGLVEEGAKTAPTGKRIDDHFPKRKKARTEEDSKPPTSSDAEAGPSGSQQLQIPAQPASSLGADTMSAGGGGPLGDNNQGADGVGNASGDWHCDSTWMGDRVVTKSTRTWVPPSYNNHQYREIKSGSVDGSNANAYFGYSTPWGYFDFNRFHSHWSPRDWQRLINNYWGFRPRSLRVKIFNIQVKEVTVQDSTTTIANNLTSTVQVFTDDDYQLPYVVGNGTEGCLPAFPPQVFTLPQYGYATLNRDNTENPTERSSFFCLEYFPSKMLRTGNNFEFTYNFEEVPFHSSFAPSQNLFKLANPLVDQYLYRFVSTNNTGGVQFNKNLAGRYANTYKNWFPGPMGRTQGWNLGSGVNRASVSAFATTNRMELEGASYQVPPQPNGMTNNLQGSNTYALENTMIFNSQPANPGTTATYLEGNMLITSESETQPVNRVAYNVGGQMATNNQSSTTAPATGTYNLQEIVPGSVWMERDVYLQGPIWAKIPETGAHFHPSPAMGGFGLKHPPPMMLIKNTPVPGNITSFSDVPVSSFITQYSTGQVAVEMEWELKKENSKRWNPEIQYTNNYNDPQFVDFAPDSTGEYRTTRPIGTRYLTRPL

SEQ ID NO: 871 - protein, 724 aa, synthetic construct
  REGION 1..724: note = source = /note="Description of Artificial Sequence: Synthetic polypeptide"
MSFVDHPPDWLEEVGEGLREFLGLEAGPPKPKPNQQHQDQARGLVLPGYNYLGPGNGLDRGEPVNRADEVAREHDISYNEQLEAGDNPYLKYNHADAEFQEKLADDTSFGGNLGKAVFQAKKRVLEPFGLVEEGAKTAPTGKRIDDHFPKRKKARTEEDSKPSTSSDAEAGPSGSQQLQIPAQPASSLGADTMSAGGGGPLGDNNQGADGVGNASGDWHCDSTWMGDRVVTKSTRTWVLPSYNNHQYREIKSGSVDGSNANAYFGYSTPWGYFDFNRFHSHWSPRDWQRLINNYWGFRPRSLRVKIFNIQVKEVTVQDSTTTIANNLTSTVQVFTDDDYQLPYVVGNGTEGCLPAFPPQVFTLPQYGYATLNRDNTENPTERSSFFCLEYFPSKMLRTGNNFEFTYNFEEVPFHSSFAPSQNLFKLANPLVDQYLYRFVSTNNTGGVQFNKNLAGRYANTYKNWFPGPMGRTQGWNLGSGVNRASVSAFATTNRMELEGASYQVPPQPNGMTNNLQGSNTYALENTMIFNSQPANPGTTATYLEGNMLITSESETQPVNRVAYNVGGQMATNNQSSTTAPATGTYNLQEIVPGSVWMERDVYLQGPIWAKIPETGAHFHPSPAMGGFGLKHPPPMMLIKNTPAPGNITSFSDVPVSSFITQYSTGQVTVEMEWELKKENSKRWNPEIQYTNNYNDPQFVDFAPDSTGEYRTTRPIGTRYLTRPL

SEQ ID NO: 872 - protein, 724 aa, synthetic construct
  REGION 1..724: note = source = /note="Description of Artificial Sequence: Synthetic polypeptide"
MSFVDHPPDWLEEVGEGLREFLGLEAGPPKPKPNQQHQDQARGLVLPGYNYLGPGNGLDRGEPVNRADEVAREHDISYNEQLEAGDNPYLKYNHADAEFQEKLADDTSFGGNLGKAVFQAKKRVLEPFGLAEEGAKTAPTGKRIDDHFPKRKKARTEEDSKPSTSSDAEAGPSGSQQLQIPAQPASSLGADTMSAGGGGPLGDNNQGADGVGNASGDWHCDSTWMGDRVVTKSTRTWVLPSYNNHQYREIKSGSVDGSNANAYFGYSTPWGYFDFNRFHSHWSPRDWQRLINNYWGFRPRSLRAKIFNIQVKEVTVQDSTTTIANNLTSTVQVFTDDDYQLPYVVGNGTEGCLPAFPPQVFTLPQYGYATLNRDNTENPTERSSFFCLEYFPSKMLRTGNNLEFTYNFEEVPFHSSFAPSQNLFKLANPLVDQYLYRFVSTNNTGGVQFNKNLAGRYANTYKNWFPGPMGRTQGWNLGSGVNRASVSAFATTNRMELEGASYQVPPQPNGMTNNLQGSNTYALENTMIFNSQPANPGTTATYLEGNMLITSESETQPVNRVVHNVGGQMATNNQSSTTAPATGTYNLQEIVPGSVWMERDVYLQGPIWAKIPETGAHFHPSPAMGGFGLKHPPPMMLIKNTPVPGNITSFSDVPVSSFITQYSTGQVTVEMEWELKKENSKRWNPEIQYTNNYNDPQFVDFAPDSTGEYRTTRPIGTRYLTRPL

SEQ ID NO: 873 - protein, 724 aa, synthetic construct
  REGION 1..724: note = source = /note="Description of Artificial Sequence: Synthetic polypeptide"
MSFVDHPPDWLEEVGEGLREFLGLEAGPPKPKPNQQHQDQARGLVLPGYNYLGPGNGLDRGEPVNRADEVAREHDISYNEQLEAGDNPYLKYNHADAEFQEKLADDTSFGGNLGKAVFQAKKRVLEPFGLVEEGAKTAPTGKRIDDHFPKRKKARTEEDSKPSTSSDAEAGPSGSQQLQIPAQPASSLGADTMSAGGGGPLGDNNQGADGVGNASGDWHCDSTWMGDRVVTKSTRTWVLPSYNNHQYREIKSGSVDGGNANAYFGYSTPWGYFDFNRFHSHWSPRDWQRLINNYWGFRPRSLRVKIFNIQVKEVTVQDSTTTIANNLTSTVQVFTDDDYQLPYVVGNGTEGCLPAFPPQVFTLPQYGYATLNRDNTENPTERSSFFCLEYFPSKMLRTGNNFEFTYNFEEVPFHSSFAPSQNLFKLANPLVDQYLYRFVSTNNTGGVQFNKNLAGRYANTYKNWFPGPMGRTQGWNLGSGVNRASVSAFATTNRMELEGASYQVPPQPNGMTNNLQGSNTYALENTMIFNSQPANPGTTATYLEGNMLITSESETQPVNRVAYNVGGQMATNNQSSTTAPATGTYNLQEIVPGSVWMERDVYLQGPIWAKIPETGAHFHPSPAMGGFGLKHPPPMMLIKNTPAPGNITSFSDVPVSSFITQYSTGQVTVEMEWELKKGNSKRWNPEIQYTNNYNDPQFVDFAPDSTGEYRTTRPIGTRYLTRPL

SEQ ID NO: 874 - protein, 724 aa, synthetic construct
  REGION 1..724: note = source = /note="Description of Artificial Sequence: Synthetic polypeptide"
MSFVDHPPDWLEEVGEGLREFLGLEAGPPKPKPNQQHQDQARGLVLPGYNYLGPGNGLDRGEPVNRADEVAREHDISYNEQLEAGDNPYLKYNHADAEFQEKLADDTSFGGNLGKAVFQAKKRVLEPFGLVEEGAKTAPTGKRIDDHFPKRKKARTEEDSKPSTSSDAEAGPSGSQQLQIPAQPASSLGADTMSAGGGGPLGDNNQGADGVGNASGDWHCDSTWMGDRVVTKSTRTWVLPSYNNHQYREIKSGSVDGSNANAYFGYSTPWGYFDFNRFHSHWSPRDWQRLINNYWGFRPRSLRVKIFNIQVKEVTVQDSTTTIANNLTSTVQVFTDDDYQLPYVVGNGTEGCLPAFPPQVFTLPQYGYATLNRDNTENPTERSSFFCLEYFPSKMLRTGNNFEFTYNFEEVPFHSSFAPSQNLFKLANPLVDQYLYRFVSTNNTGGVQFNKNLAGRYANTYKNWFPGPMGRTQGWNLGSGVNRASVSAFATTNRMELEGASYQVPPQPNGMTNNLQGSNTYALENTMIFNSQPANPGTTATYLEGNMLITSESETQPVNRVAYNVGGQMATNNQSSTTAPATGTYNLQEIVPGSVWMERDVYLQGPIWAKIPETGVHFHPSPAMGGFGLKHPPPMMLIKNTPVPGNITSFSDVPVSSFITQYSTGQVTVEMEWELKKENSKRWNPEIQYTNNYNDPQFVDFAPDSTGEYRTTRPIGTRYLTRPL

SEQ ID NO: 875 - protein, 724 aa, synthetic construct
  VARIANT 551: note = Any naturally occurring amino acid
  REGION 1..724: note = source = /note="Description of Artificial Sequence: Synthetic polypeptide"
MSFVDHPPDWLEEVGEGLREFLGLEAGPPKPKPNQQHQDQARGLVLPGYNYLGPGNGLDRGEPVNRADEVAREHDISYNEQLEAGDNPYLKYNHADAEFQEKLADDTSFGGNLGKAVFQAKKRVLEPFGLVEEGAKTAPTGKRIDDHFPKRKKARTEEDSKPSTSSDAEAGPSGSQQLQIPAQPASSLGADTMSAGGGGPLGDNNQGADGVGNASGDWHCDSTWMGDRVVTKSTRTWVLPSYNNHQYREIKSGSVDGSNANAYFGYSTPWGYFDFNRFHSHWSPRDWQRLINNYWGFRPRSLRVKIFNIQVKEVTVQDSTTTIANNLTSTVQVFTDDDYQLPYVVGNGTEGCLPAFPPQVFTLPQYGYATLNRDNTENPTERSSFFCLEYFPSKMLRTGNNFEFTYNFEEVPFHSSFAPSQNLFKLANPLVDQYLYRFVSTNNTGGVQFNKNLAGRYANTYKNWFPGPMGRTQGWNLGSGVNRASVSAFATTNRMELEGASYQVPPQPNGMTNNLQGSNTYALENTMIFNSQPANPGTTATYLEGSMLITXESETQPVNRVAYNVGGQMATNNQSSTTAPATGTYNLQEIVPGSVWMERDVYLQGPIWAKIPETGAHFHPSPAMGGFGLKHPPPMMLIKNTPVPGNITSFSDVPVSSFITQYSTGQVTVEMEWELKKENSKRWNPEIQYTNNYNDPQFVDFAPDSTGEYRTTRPIGTRYLTRPL

SEQ ID NO: 876 - protein, 736 aa, synthetic construct; identical to SEQ ID NO: 50
  REGION 1..736: note = source = /note="Description of Artificial Sequence: Synthetic polypeptide"

SEQ ID NO: 877 - protein, 734 aa, synthetic construct; identical to SEQ ID NO: 68
  REGION 1..734: note = source = /note="Description of Artificial Sequence: Synthetic polypeptide"

SEQ ID NO: 878 - protein, 723 aa, synthetic construct
  REGION 1..723: note = source = /note="Description of Artificial Sequence: Synthetic polypeptide"
MSFVDHPPDWLEEVGEGLREFLGLEAGPPKPKPNQQHQDQARGLVLPGYNYLGPGNGLDRGEPVNRADEVAREHDISYNEQLEAGDNPYLKYNHADAEFQEKLADDTSFGGNLGKAVFQAKKRVLEPFGLVEEGAKTAPTGKRIDDHFPKRKKARTEEDSKPSTSSDAEAGPSGSQQLQIPAQPASSLGADTMSAGGGPLGDNNQGADGVGNASGDWHCDSTWMGDRVVTKSTRTWVLPSYNNHQYREIKSGSVDGSNANAYFGYSTPWGYFDFNRFHSHWSPRDWQRLINNYWGFRPRSLRVKIFNIQVKEVTVQDSTTTIANNLTSTVQVFTDDDYQLPYVVGNGTEGCLPAFPPQVFTLPQYGYATLNRDNTENPTERSSFFCLEYFPSKMLRTGNNFEFTYNFEEVPFHSSFAPSQNLFKLANPLVDQYLYRFVSTNNTGGVQFNKNLAGRYANTYKNWFPGPMGRTQGWNLGSGVNRASVSAFATTNRMELEGASYQVPPQPNGMTNNLQGSNTYALENTMIFNSQPANPGTTATYLEGNMLITSESETQPVNRVAYNVGGQMATNNQSSTTAPATGTYNLQEIVPGSVWMERDVYLQGPIWAKIPETGAHFHPSPAMGGFGLKHPPPMMLIKNTPVPGNITSFSDVPVSSFITQYSTGQVTVEMEWELKKENSKRWNPEIQYTNNYNDPQFVDFAPDSTGEYRTTRPIGTRYLTRPL

SEQ ID NO: 879 - protein, 534 aa, synthetic construct
  REGION 1..534: note = source = /note="Description of Artificial Sequence: Synthetic polypeptide"
MAEGGGGAMGDSSGGADGVGNASGNWHCDSQWMGNTVITKTTRTWVLPSYNNHIYKAITSGTSQDANVQYAGYSTPWGYFDFNRFHCHFSPRDWQRLINNHWGIRPKSLKFKIFNVQVKEVTTQDQTKTIANNLTSTIQVFTDDEHQLPYVLGSATEGTMPPFPSDVYALPQYGYCTMHTNQNGARFNDRSAFYCLEYFPSQMLRTGNNFEFTFDFEEVPFHSMFAHSQDLDRLMNPLVDQYLWNFNEVDSSRNAQFKKAVKGAYGTMGRNWLPGPKFLDQRVRAYTGGTDNYANWNIWSNGNKVNLKDRQYLLQPGPVSATYTEGEASSLPAQNILGIAKDPYRSGSTTAGISDIMVTEEQEVAPTNGVGWKPYGRTVTNEQNTTTAPTSSDLDVLGALPGMVWQNRDIYLQGPIGAKIPKTDGKFHPSPNLGGFGLHNPPPQVFIKNTPVPADPPVEYVHQKWNSYITQYSTGQCTVEMVWELRKENSKRWNPEIQFTSNFSNRTSIMFAPNETGGYVEDRLIGTRYLTQNL

SEQ ID NO: 880 - protein, 554 aa, synthetic construct
  REGION 1..554: note = source = /note="Description of Artificial Sequence: Synthetic polypeptide"
MTSVNSAEASTGAGGGGSNPVKSMWSEGATFSANSVTCTFSRQFLIPYDPEHHYKVFSPAASSCHNASGKEAKVCTISPIMGYSTPWRYLDFNALNLFFSPLEFQHLIENYGSIAPDALTVTISEIAVKDVTDKTGGGVQVTDSTTGRLCMLVDHEYKYPYVLGQGQDTLAPELPIWVYFPPQYAYLTVGDVNTQGISGDSKKLASEESAFYVLEHSSFQLLGTGGTATMSYKFPPVPPENLEGCSQHFYEMYNPLYGSRLGVPDTLGGDPKFRSLTHEDHAIQPQNFMPGPLVNSVSTKEGDSFNTGAGKALTGLSTGTSQNTRISLRPGPVSQPYHHWDTDKYVTGINAISHGQTTYGNAEDKEYQQGVGRFPNEKEQLKQLQGLNMHTYFPNKGTQQYTDQIERPLMVGSVWNRRALHYESQLWSKIPNLDDSFKTQFAALGGWGLHQPPPQIFLKILPQSGPIGGIKSMGITTLVQYAVGIMTVTMTFKLGPRKATGRWNPQPGVYPPHAAGHLPYVLYDPTATDAKQHHRHGYEKPEELWTAKSRVHPL

SEQ ID NO: 881 - protein, 587 aa, synthetic construct
  REGION 1..587: note = source = /note="Description of Artificial Sequence: Synthetic polypeptide"
MSDGTSQPDGGNAVHSAARVERAADGPGGSGGGGSGGGGVGVSTGSYDNQTHYRFLGDGWVEITALATRLVHLNMPKSENYCRIRVHNTTDTSVKGNMAKDDAHEQIWTPWSLVDANAWGVWLQPSDWQYICNTMSQLNLVSLDQEIFNVVLKTVTEQDSGGQAIKIYNNDLTACMMVAVDSNNILPYTPAANSMETLGFYPWKPTIASPYRYYFCVDRDLSVTYENQEGTIEHNVMGTPKGMNSQFFTIENTQQITLLRTGDEFATGTYYFDTNPVKLTHTWQTNRQLGQPPLLSTFPEADTDAGTLTAQGSRHGATQMEVNWVSEAIRTRPAQVGFCQPHNDFEASRAGPFAAPKVPADVTQGMDREANGSVRYSYGKQHGENWAAHGPAPERYTWDETNFGSGRDTRDGFIQSAPLVVPPPLNGILTNANPIGTKNDIHFSNVFNSYGPLTTFSHPSPVYPQGQIWDKELDLEHKPRLHITAPFVCKNNAPGQMLVRLGPNLTDQYDPNGATLSRIVTYGTFFWKGKLTMRAKLRANTTWNPVYQVSVEDNGNSYMSVTKWLPTATGNMQSVPLITRPVARNTY

SEQ ID NO: 882 - protein, 584 aa, synthetic construct
  REGION 1..584: note = source = /note="Description of Artificial Sequence: Synthetic polypeptide"
MSDGAVQPDGGQPAVRNERATGSGNGSGGGGGGGSGGVGISTGTFNNQTEFKFLENGWVEITANSSRLVHLNMPESENYKRVVVNNMDKTAVKGNMALDDIHVEIVTPWSLVDANAWGVWFNPGDWQLIVNTMSELHLVSFEQEIFNVVLKTVSESATQPPTKVYNNDLTASLMVALDSNNTMPFTPAAMRSETLGFYPWKPTIPTPWRYYFQWDRTLIPSHTGTSGTPTNVYHGTDPDDVQFYTIENSVPVHLLRTGDEFATGTFFFDCKPCRLTHTWQTNRALGLPPFLNSLPQSEGATNFGDIGVQQDKRRGVTQMGNTDYITEATIMRPAEVGYSAPYYSFEASTQGPFKTPIAAGRGGAQTDENQAADGDPRYAFGRQHGQKTTTTGETPERFTYIAHQDTGRYPEGDWIQNINFNLPVTNDNVLLPTDPIGGKTGINYTNIFNTYGPLTALNNVPPVYPNGQIWDKEFDTDLKPRLHINAPFVCQNNCPGQLFVKVAPNLTNQYDPDASANMSRIVTYSDFWWKGKLVFKAKLRASHTWNPIQQMSINVDNQFNYVPNNIGAMKIVYEKSQLAPRKLY

SEQ ID NO: 883 - protein, 548 aa, synthetic construct
  REGION 1..548: note = source = /note="Description of Artificial Sequence: Synthetic polypeptide"
GVGISTGTFNNQTEFKFLENGWVEITANSSRLVHLNMPESENYRRVVVNNMDKTAVNGNMALDDIHAQIVTPWSLVDANAWGVWFNPGDWQLIVNTMSELHLVSFEQEIFNVVLKTVSESATQPPTKVYNNDLTASLMVALDSNNTMPFTPAAMRSETLGFYPWKPTIPTPWRYYFQWDRTLIPSHTGTSGTPTNIYHGTDPDDVQFYTIENSVPVHLLRTGDEFATGTFFFDCKPCRLTHTWQTNRALGLPPFLNSLPQSEGATNFGDIGVQQDKRRGVTQMGNTNYITEATIMRPAEVGYSAPYYSFEASTQGPFKTPIAAGRGGAQTDENQAADGNPRYAFGRQHGQKTTTTGETPERFTYIAHQDTGRYPEGDWIQNINFNLPVTNDNVLLPTDPIGGKTGINYTNIFNTYGPLTALNNVPPVYPNGQIWDKEFDTDLKPRLHVNAPFVCQNNCPGQLFVKVAPNLTNEYDPDASANMSRIVTYSDFWWKGKLVFKAKLRASHTWNPIQQMSINVDNQFNYVPSNIGGMKIVYEKSQLAPRKLY

SEQ ID NO: 884 - protein, 736 aa, synthetic construct; identical to SEQ ID NO: 112
  REGION 1..736: note = source = /note="Description of Artificial Sequence: Synthetic polypeptide"

SEQ ID NO: 885 - protein, 736 aa, synthetic construct; identical to SEQ ID NO: 107
  REGION 1..736: note = source = /note="Description of Artificial Sequence: Synthetic polypeptide"

SEQ ID NO: 886 - protein, 736 aa, synthetic construct
  REGION 1..736: note = source = /note="Description of Artificial Sequence: Synthetic polypeptide"
MAADGYLPDWLEDTLSEGIRQWWKLKPGPPPPKPAERHKDDSRGLVLPGYKYLGPFNGLDKGEPVNEADAAALEHDKAYDRQLDSGDNPYLKYNHADAEFQERLKEDTSFGGNLGRAVFQAKKRVLEPLGLVEEPVKTAPGKKRPVEHSPVEEPDSSSGTGKAGQQPARKRLNFGQTGDADSVPDPQPLGQPPAAPSGLGTNTMATGSGAPMADNNEGADGVGNSSGNWHCDSTWMGDRVITTSTRTWALPTYNNHLYKQISSQSGASNDNHYFGYSTPWGYFDFNRFHCHFSPRDWQRLINNNWGFRPKRLNFKLFNIQVKEVTQNDGTTTIANNLTSTVQVFTDSEYQLPYVLGSAHQGCLPPFPADVFMVPQYGYLTLNNGSQAVGRSSFYCLEYFPSQMLRTGNNFTFSYTFEDVPFHSSYAHSQSLDRLMNPLIDQYLYYLSRTNTPSGTTTQSRLQFSQAGASDIRDQSRNWLPGPCYRQQRVSKTSADNNNSEYSWTGATKYHLNGRDSLVNPGPAMASHKDDEEKFFPQSGVLIFGKQGSEKTNVDIEKVMITDEEEIRTTNPVATEQYGSVSTNLQRGNRQAATADVNTQGVLPGMVWQDRDVYLQGPIWAKIPHTDGHFHPSPLMGGFGLKHPPPQILIKNTPVPANPSTTFSAAKFASFITQYSTGQVSVEIEWELQKENSKRWNPEIQYTSNYNKSVNVDFTVDTNGVYSEPRPIGTRYLTRNL

SEQ ID NO: 887 - protein, 736 aa, synthetic construct
  REGION 1..736: note = source = /note="Description of Artificial Sequence: Synthetic polypeptide"
MAADGYLPDWLEDNLSEGIREWWDLKPGAPKPKANQQKQDDGRGLVLPGYKYLGPFNGLDKGEPVNAADAAALEHDKAYDQQLKAGDNPYLRYNHADAEFQERLQEDTSFGGNLGRAVFQAKKRVLEPFGLVEEGAKTAPGKKRPVEQSPQEPDSSSGIGKTGQQPAKKRLNFGQTGDSESVPDPQPLGEPPATPAAVGPTTMASGGGAPMADNNEGADGVGNASGNWHCDSTWLGDRVITTSTRTWALPTYNNHLYKQISSASTGASNDNHYFGYSTPWGYFDFNRFHCHFSPRDWQRLINNNWGFRPKRLNFKLFNVQVKEVTTNDGVTTIANNLTSTVQVFSDSEYQLPYVLGSAHQGCLPPFPADVFMIPQYGYLTLNNGSQAVGRSSFYCLEYFPSQMLRTGNNFTFSYTFEDVPFHSSYAHSQSLDRLMNPLIDQYLYYLNRTQDQSGSAQNKDLLFSRGSPAGMSVQPKNWLPGPCYRQQRVSKTKTDNNNSNFTWTGASKYNLNGRESIINPGTAMASHKDDKNKFFPMSGVMIFGKESAGASNTALDNVMITDEEEIKATNPVATERFGTVAVNLQSSSTDPATGDVHVMGALPGMVWQDRDVYLQGPIWAKIPHTDGHFHPSPLMGGFGLKNPPPQILIKNTPVPANPPAEFSATKFASFITQYSTGQVSVEIEWELQKENSKRWNPEVQYTSNYAKSANVDFTVDNNGLYTEPRPIGTRYLTRPL

SEQ ID NO: 888 - protein, 737 aa, synthetic construct
  REGION 1..737: note = source = /note="Description of Artificial Sequence: Synthetic polypeptide"
MAADGYLPDWLEDTLSEGIRQWWKLKPGPPPPKPAERHKDDSRGLVLPGYKYLGPGNGLDKGEPVNAADAAALEHDKAYDQQLKAGDNPYLKYNHADAEFQERLKEDTSFGGNLGRAVFQAKKRVLEPLGLVEEGAKTAPGKKRPVEPSPQRSPDSSTGIGKKGQQPARKRLNFGQTGDSESVPDPQPLGEPPATPAAVGPTTMASGGGAPMADNNEGADGVGNASGNWHCDSTWLGDRVITTSTRTWALPTYNNHLYKQISSASTGASNDNHYFGYSTPWGYFDFNRFHCHFSPRDWQRLINNNWGFRPKRLNFKLFNIQVKEVTTNDGVTTIANNLTSTVQVFSDSEYQLPYVLGSAHQGCLPPFPADVFMIPQYGYLTLNNGSQAVGRSSFYCLEYFPSQMLRTGNNFTFSYTFEDVPFHSSYAHSQSLDRLMNPLIDQYLYYLNRTQNQSGSAQNKDLLFSRGSPAGMSVQPKNWLPGPCYRQQRVSKTKTDNNNSNFTWTGASKYNLNGRESIINPGTAMASHKDDKDKFFPMSGVMIFGKESAGASNTALDNVMITDEEEIKATNPVATERFGTVAVNLQSSSTDPATEDVHVMGALPGMVWQDRDVYLQGPIWAKIPHTDGHFHPSPLMGGFGLKNPPPQILIKNTPVPANPPAEFSATKFASFITQYSTGQVSVEIEWELQKENSKRWNPEVQYTSNYAKSANVDFTVDNNGLYTEPRPIGTRYLTRNL

SEQ ID NO: 889 - protein, 736 aa, synthetic construct
  REGION 1..736: note = source = /note="Description of Artificial Sequence: Synthetic polypeptide"
MAADGYLPDWLEDNLSEGIREWWDLKPGAPKPKANQQKQDDGRGLVLPGYKYLGPFNGLDKGEPVNAADAAALEHDKAYDQQLKAGDNPYLRYNHADAEFQERLQEDTSFGGNLGRAVFQAKKRVLEPFGLVEEGAKTAPGKKRPVEQSPQEPDSSSGIGKTGQQPAKKRLNFGQTGDSESVPDPQPLGEPPATPAAVGPTTMASGGGAPMADNNEGADGVGNASGNWHCDSTWLGDRVITTSTRTWALPTYNNHLYKQISSASTGASNDNHYFGYSTPWGYFDFNRFHCHFSPRDWQRLINNNWGFRPKRLNFKLFNVQVKEVTTNDGVTTIANNLTSTVQVFSDSEYQLPYVLGSAHQGCLPPFPADVFMIPQYGYLTLNNGSQAVGRSSFYCLEYFPSQMLRTGNNFTFSYTFEDVPFHSSYAHSQSLDRLMNPLIDQYLYYLNRTQDQSGSAQNKDLLFSRGSPAGMSVQPKNWLPGPCYRQQRVSKTKTDNNNSNFTWTGASKYNLNGRESIINPGTAMASHKDDKNKFFPMSGVMIFGKESAGASNTALDNVMITDEEEIKATNPVATERFGTVAVNLQSSSTDPATGDVHVMGALPGMVWQDRDVYLQGPIWAKIPHTDGHFHPSPLMGGFGLKHPPPQILIKNTPVPANPPAEFSATKFASFITQYSTGQVSVEIEWELQKENSKRWNPEVQYTSNYAKSANVDFTVDNNGLYTEPRPIGTRYLTRPL

SEQ ID NO: 890 - protein, 736 aa, synthetic construct
  REGION 1..736: note = source = /note="Description of Artificial Sequence: Synthetic polypeptide"
MAADGYLPDWLEDNLSEGIREWWDLKPGAPKPKANQQKQDDGRGLVLPGYKYLGPFNGLDKGEPVNAADAAALEHDKAYDQQLKAGDNPYLRYNHADAEFQERLQEDTSFGGNLGRAVFQAKKRVLEPFGLVEEGAKTAPGKKRPVEQSPQEPDSSSGIGKTGQQPAKKRLNFGQTGDSESVPDPQPLGEPPATPAAVGPTTMASGGGAPMADNNEGADGVGNASGNWHCDSTWLGDRVITTSTRTWALPTYNNHLYKQISSASTGASNDNHYFGYSTPWGYFDFNRFHCHFSPRDWQRLINNNWGFRPKRLNFKLFNVQVKEVTTNDGVTTIANNLTSTVQVFSDSEYQLPYVLGSAHQGCLPPFPADVFMIPQYGYLTLNNGSQAVGRSSFYCLEYFPSQMLRTGNNFTFSYTFEDVPFHSSYAHSQSLDRLMNPLIDQYLYYLNRTQDQSGSAQNKDLLFSRGSPAGMSVQPKNWLPGPCYRQQRVSKTKTDNNNSNFTWTGASKYNLNGRESIINPGTAMASHKDDKDKFFPMSGVMIFGKESAGASNTALDNVMITDEEEIKATNPVATERFGTVAVNLQSSSTDPATGDVHVMGALPGMVWQDRDVYLQGPIWAKIPHTDGHFHPSPLMGGFGLKHPPPQILIKNTPVPANPPAEFSATKFASFITQYSTGQVSVEIEWELQKENSKRWNPEVQYTSNYAKSANVDFTVDNNGLYTEPRPIGTRYLTRPL

SEQ ID NO: 891 - protein, 736 aa, synthetic construct
  REGION 1..736: note = source = /note="Description of Artificial Sequence: Synthetic polypeptide"
MAADGYLPDWLEDNLSEGIREWWDLKPGAPKPKANQQKQDDGRGLVLPGYKYLGPFNGLDKGEPVNAADAAALEHDKAYDQQLKAGDNPYLRYNHADAEFQERLQEDTSFGGNLGRAVFQAKKRVLEPFGLVEEGAKTAPGKKRPVEQSPQEPDSSSGIGKTGQQPAKKRLNFGQTGDSESVPDPQPLGEPPATPAAVGPTTMASGGGAPMADNNEGADGVGNASGNWHCDSTWLGDRVITTSTRTWALPTYNNHLYKQISSASTGASNDNHYFGYSTPWGYFDFNRFHCHFSPRDWQRLINNNWGFRPKRLNFKLFNIQVKEVTTNDGVTTIANNLTSTVQVFSDSEYQLPYVLGSAHQGCLPPFPADVFMIPQYGYLTLNNGSQAVGRSSFYCLEYFPSQMLRTGNNFTFSYTFEDVPFHSSYAHSQSLDRLMNPLIDQYLYYLNRTQDQSGSAQNKDLLFSRGSPAGMSVQPKNWLPGPCYRQQRVSKTKTDNNNSNFTWTGASKYNLNGRESIINPGTAMASHKDDKNKFFPMSGVMIFGKESAGASNTALDNVMITDEEEIKATNPVATERFGTVAVNLQSSSTDPATGDVHVMGALPGMVWQDRDVYLQGPIWAKIPHTDGHFHPSPLMGGFGLKHPPPQILIKNTPVPANPPAEFSATKFASFITQYSTGQVSVEIEWELQKENSKRWNPEVQYTSNYAKSANVDFTVDNNGLYTEPRPIGTRYLTRPL

SEQ ID NO: 892 - protein, 736 aa, synthetic construct
  REGION 1..736: note = source = /note="Description of Artificial Sequence: Synthetic polypeptide"
MAADGYLPDWLEDNLSEGIREWWDLKPGAPKPKANQQKQDDGRGLVLPGYKYLGPFNGLDKGEPVNAADAAALEHDKAYDQQLKAGDNPYLRYNHADAEFQERLQEDTSFGGNLGRAVFQAKKRVLEPFGLVEEGAKTAPGKKRPVEQSPQEPDSSSGIGKTGQQPAKKRLNFGQTGDSESVPDPQPLGEPPATPAAVGPTTMASGGGAPMADNNEGADGVGNASGNWHCDSTWLGDRVITTSTRTWALPTYNNHLYKQISSASTGASNDNHYFGYSTPWGYFDFNRFHCHFSPRDWQRLINNNWGFRPKRLNFKLFNVQVKEVTTNDGVTTIANNLTSTVQVFSDSEYQLPYVLGSAHQGCLPPFPADVFMIPQYGYLTLNNGSQAVGRSSFYCLEYFPSQMLRTGNNFTFSYTFEDVPFHSSYAHSQSLDRLMNPLIDQYLYYLNRTQNQSGSAQNKDLLFSRGSPAGMSVQPKNWLPGPCYRQQRVSKTKTDNNNSNFTWTGASKYNLNGRESIINPGTAMASHKDDKDKFFPMSGVMIFGKESAGASNTALDNVMITDEEEIKATNPVATERFGTVAVNLQSSSTDPATGDVHVMGALPGMVWQDRDVYLQGPIWAKIPHTDGHFHPSPLMGGFGLKHPPPQILIKNTPVPANPPAEFSATKFASFITQYSTGQVSVEIEWELQKENSKRWNPEVQYTSNYAKSANVDFTVDNNGLYTEPRPIGTRYLTRPL

SEQ ID NO: 893 - protein, 736 aa, synthetic construct
  REGION 1..736: note = source = /note="Description of Artificial Sequence: Synthetic polypeptide"
MAADGYLPDWLEDNLSEGIREWWDLKPGAPKPKANQQKQDDGRGLVLPGYKYLGPFNGLDKGEPVNAADAAALEHDKAYDQQLKAGDNPYLRYNHADAEFQERLQEDTSFGGNLGRAVFQAKKRVLEPFGLVEEGAKTAPGKKRPVEQSPQEPDSSSGIGKTGQQPAKKRLNFGQTGDSESVPDPQPLGEPPATPAAVGPTTMASGGGAPMADNNEGADGVGNASGNWHCDSTWLGDRVITTSTRTWALPTYNNHLYKQISSASTGASNDNHYFGYSTPWGYFDFNRFHCHFSPRDWQRLINNNWGFRPKRLNFKLFNVQVKEVTTNDGVTTIANNLTSTVQVFSDSEYQLPYVLGSAHQGCLPPFPADVFMIPQYGYLTLNNGSQAVGRSSFYCLEYFPSQMLRTGNNFTFSYTFEDVPFHSSYAHSQSLDRLMNPLIDQYLYYLNRTQNQSGSAQNKDLLFSRGSPAGMSVQPKNWLPGPCYRQQRVSKTKTDNNNSNFTWTGASKYNLNGRESIINPGTAMASHKDDKNKFFPMSGVMIFGKESAGASNTALDNVMITDEEEIKATNPVATERFGTVAVNLQSSSTDPATGDVHVMGALPGMVWQDRDVYLQGPIWAKIPHTDGHFHPSPLMGGFGLKHPPPQILIKNTPVPANPPAEFSATKFASFITQYSTGQVSVEIEWELQKENSKRWNPEVQYTSNYAKSANVDFTVDNNGLYTEPRPIGTRYLTRPL

SEQ ID NO: 894 - DNA, 2217 bp, synthetic construct
  misc_feature 1..2217: note = source = /note="Description of Artificial Sequence: Synthetic polynucleotide"
  source 1..2217: mol_type = other DNA
atggctgccgatggttatcttccagattggctcgaggacaacctctctgagggcattcgcgagtggtgggacctgaaacctggagccccgaaacccaaagccaaccagcaaaagcaggacaacggccggggtctggtgcttcctggctacaagtacctcggacccttcaacggactcgacaagggggagcccgtcaacgcggcggacgcagcggccctcgagcacgacaaggcctacgaccagcagctccaagcgggtgacaatccgtacctgcggtataatcacgccgacgccgagtttcaggagcgtctgcaagaagatacgtcttttgggggcaacctcgggcgcgcagtcttccaggccaaaaagcgggttctcgaacctctgggcctggttgaatcgccggttaagacggctcctggaaagaagagaccggtagagccatcaccccagcgctctccagactcctctacgggcatcggcaagaaaggccagcagcccgcaaaaaagagactcaattttgggcagactggcgactcagagtcagtccccgaccctcaaccaatcggagaaccaccagcaggcccctctggtctgggatctggtacaatggctgcaggcggtggcgctccaatggcagacaataacgaaggcgccgacggagtgggtagttcctcaggaaattggcattgcgattccacatggctgggcgacagagtcatcaccaccagcacccgcacctgggccctgcccacctacaacaaccacctctacaagcaaatctccaacgggacctcgggaggaagcaccaacgacaacacctacttcggctacagcaccccctgggggtattttgacttcaacagattccactgccacttttcaccacgtgactggcagcgactcatcaacaacaactggggattccggcccaagaggctcaacttcaagctcttcaacatccaagtcaaggaggtcacgcagaatgaaggcaccaagaccatcgccaataaccttaccagcacgattcaggtctttacggactcggaataccagctcccgtacgtgctcggctcggcgcaccagggctgcctgcctccgttcccggcggacgtcttcatgattcctcagtacgggtacctgactctgaacaatggcagtcaggctgtgggccggtcgtccttctactgcctggagtactttccttctcaaatgctgagaacgggcaacaactttgaattcagctacaacttcgaggacgtgcccttccacagcagctacgcgcacagccagagcctggaccggctgatgaaccctctcatcgaccagtacttgtactacctgtcccggactcaaagcacgggcggtactgcaggaactcagcagttgctattttctcaggccgggcctaacaacatgtcggctcaggccaagaactggctacccggtccctgctaccggcagcaacgcgtctccacgacactgtcgcagaacaacaacagcaactttgcctggacgggtgccaccaagtatcatctgaatggcagagactctctggtgaatcctggcgttgccatggctacccacaaggacgacgaagagcgattttttccatccagcggagtcttaatgtttgggaaacagggagctggaaaagacaacgtggactatagcagcgtgatgctaaccagcgaggaagaaataaagaccaccaacccagtggccacagaacagtacggcgtggtggccgataacctgcaacagcaaaacgccgctcctattgtaggggccgtcaatagtcaaggagccttacctggcatggtgtggcagaaccgggacgtgtacctgcagggtcccatctgggccaagattcctcatacggacggcaactttcatccctcgccgctgatgggaggctttggactgaagcatccgcctcctcagatcctgattaaaaacacacctgttcccgcggatcctccgaccaccttcaatcaggccaagctggcttctttcatcacgcagtacagtaccggccaggtcagcgtggagatcgagtgggagctgcagaaggagaacagcaaacgctggaacccagagattcagtacacttccaactactacaaatctacaaatgtggactttgctgtcaatactgagggtacttattccgagcctcgccccattggcacccgttacctcacccgtaatctgtaa

SEQ ID NO: 895 - protein, 738 aa, synthetic construct
  REGION 1..738: note = source = /note="Description of Artificial Sequence: Synthetic polypeptide"
MAADGYLPDWLEDNLSEGIREWWDLKPGAPKPKANQQKQDNGRGLVLPGYKYLGPFNGLDKGEPVNAADAAALEHDKAYDQQLQAGDNPYLRYNHADAEFQERLQEDTSFGGNLGRAVFQAKKRVLEPLGLVESPVKTAPGKKRPVEPSPQRSPDSSTGIGKKGQQPAKKRLNFGQTGDSESVPDPQPIGEPPAGPSGLGSGTMAAGGGAPMADNNEGADGVGSSSGNWHCDSTWLGDRVITTSTRTWALPTYNNHLYKQISNGTSGGSTNDNTYFGYSTPWGYFDFNRFHCHFSPRDWQRLINNNWGFRPKRLNFKLFNIQVKEVTQNEGTKTIANNLTSTIQVFTDSEYQLPYVLGSAHQGCLPPFPADVFMIPQYGYLTLNNGSQAVGRSSFYCLEYFPSQMLRTGNNFEFSYNFEDVPFHSSYAHSQSLDRLMNPLIDQYLYYLSRTQSTGGTAGTQQLLFSQAGPNNMSAQAKNWLPGPCYRQQRVSTTLSQNNNSNFAWTGATKYHLNGRDSLVNPGVAMATHKDDEERFFPSSGVLMFGKQGAGKDNVDYSSVMLTSEEEIKTTNPVATEQYGVVADNLQQQNAAPIVGAVNSQGALPGMVWQNRDVYLQGPIWAKIPHTDGNFHPSPLMGGFGLKHPPPQILIKNTPVPADPPTTFNQAKLASFITQYSTGQVSVEIEWELQKENSKRWNPEIQYTSNYYKSTNVDFAVNTEGTYSEPRPIGTRYLTRNL

SEQ ID NO: 896 - protein, 738 aa, synthetic construct; identical to SEQ ID NO: 895
  REGION 1..738: note = source = /note="Description of Artificial Sequence: Synthetic polypeptide"

SEQ ID NO: 897 - DNA, 4472 bp, synthetic construct
  misc_feature 1..4472: note = source = /note="Description of Artificial Sequence: Synthetic polynucleotide"
  source 1..4472: mol_type = other DNA
ctccatcactaggggtaaccgcgaagcgcctcccacgctgccgcgtcagcgctgacgtaaattacgtcataggggagtggtcctgtattagctgtcacgtgagtgcttttgcgacattttgcgacaccacgtggccattcatggtatatatggccgagtgagcgagcaggatctccattttgaccgcgaaatttgaacgagcagcagccatgccgggcttctacgagatcgtgcttaaggtgccgagcgacctggacgagcacctgccgggcatttctgactcgtttgtgaactgggtggcagagaaggaatgggagctgcccccggattctgacatggatcggaatctgattgagcaggcacccctgaccgtggccgagaagctacagcgcgacttcctggtccaatggcgccgcgtgagtaaggccccggaggccctcttctttgttcagttcgagaagggcgagtcctacttccacctccatattctggtagagaccacgggggtcaaatccatggtgctgggccgcttcctgagtcagattcgggacaagctggtgcagaccatctaccgcgggatcgagccgaccctgcccaactggttcgcggtgacaaagacgcgtaatggcgccggaggggggaacaaggtggtggacgagtgctacatccccaactacctgctgcccaagactcagcccgagctgcagtgggcgtggactaacatggaggagtatataagcgcgtgcttgaacctggccgagcgcaaacggctcgtggcgcagcacctgacccacgtcagccagacccaggagcagaacaaggagaatctgaacccgaattctgacgcgcctgtcatccggtcaaaaacctccgcgcgctacatggagctggtcgggtggctggtggaccggggcatcacctccgagaagcagtggatccaggaggaccaggcctcgtacatctccttcaacgccgcctccaactcgcggtctcagatcaaggccgcgctggacaatgccggcaagatcatggcgctgaccaaatccgcgcccgactacctggtaggccccgctctgcccgcggacattaaatccaaccgcatctaccgcatcctggagctgaatggctacgaccctgcctacgccggttccgtctttctcggctgggcccagaaaaagtttggcaaaaggaacaccatctggctgtttgggccggccaccacgggcaagaccaacatcgcggaagccatcgcccacgccgtgcccttctacggctgcgtcaactggaccaatgagaactttcccttcaacgattgcgtcgacaagatggtgatctggtgggaggagggcaagatgacggccaaggtcgtggagtccgccaaggccattctcggcggcagcaaggtgcgcgtggaccaaaagtgcaagtcgtccgcccagatcgatcccacccccgtgatcgtcacctccaacaccaacatgtgcgccgtgattgacgggaacagcaccaccttcgagcaccagcagccgttgcaggaccggatgttcaaatttgaacttacccgccgtctggagcacgactttggcaaggtgacaaagcaggaagtcaaagagttcttccgctgggcgcaggatcacgtgaccgaggtggcgcatgagttctacgtcagaaagggtggagctaacaaaagacccgcccccgatgacgcggatataagcgagcccaagcgggcctgcccctcagtcgcggatccatcgacgtcagacgcggaaggagctccggtggactttgccgacaggtaccaaaacaaatgttctcgtcacgcgggcatgcttcagatgctgtttccctgcaaaacatgcgagagaatgaatcagaatttcaacatttgcttcacgcacgggaccagagactgttcagaatgtttccctggcgtgtcagaatctcaaccggtcgtcagaaaaaagacgtatcggaaactctgtgcgattcatcatctgctggggcgggcacccgagattgcttgctcggcctgcgacctggtcaacgtggacctggatgactgtgtttctgagcaataaatgacttaaaccaggtatggctgccgatggttatcttccagattggctcgaggacaacctctctgagggcattcgcgagtggtgggacctgaaacctggagccccgaaacccaaagccaaccagcaaaagcaggacaacggccggggtctggtgcttcctggctacaagtacctcggacccttcaacggactcgacaagggggagcccgtcaacgcggcggacgcagcggccctcgagcacgacaaggcctacgaccagcagctccaagcgggtgacaatccgtacctgcggtataatcacgccgacgccgagtttcaggagcgtctgcaagaagatacgtcttttgggggcaacctcgggcgcgcagtcttccaggccaaaaagcgggttctcgaacctctgggcctggttgaatcgccggttaagacggctcctggaaagaagagaccggtagagccatcaccccagcgctctccagactcctctacgggcatcggcaagaaaggccagcagcccgcaaaaaagagactcaattttgggcagactggcgactcagagtcagtccccgaccctcaaccaatcggagaaccaccagcaggcccctctggtctgggatctggtacaatggctgcaggcggtggcgctccaatggcagacaataacgaaggcgccgacggagtgggtagttcctcaggaaattggcattgcgattccacatggctgggcgacagagtcatcaccaccagcacccgcacctgggccctgcccacctacaacaaccacctctacaagcaaatctccaacgggacctcgggaggaagcaccaacgacaacacctacttcggctacagcaccccctgggggtattttgacttcaacagattccactgccacttttcaccacgtgactggcagcgactcatcaacaacaactggggattccggcccaagaggctcaacttcaagctcttcaacatccaagtcaaggaggtcacgcagaatgaaggcaccaagaccatcgccaataaccttaccagcacgattcaggtctttacggactcggaataccagctcccgtacgtgctcggctcggcgcaccagggctgcctgcctccgttcccggcggacgtcttcatgattcctcagtacgggtacctgactctgaacaatggcagtcaggctgtgggccggtcgtccttctactgcctggagtactttccttctcaaatgctgagaacgggcaacaactttgaattcagctacaacttcgaggacgtgcccttccacagcagctacgcgcacagccagagcctggaccggctgatgaaccctctcatcgaccagtacttgtactacctgtcccggactcaaagcacgggcggtactgcaggaactcagcagttgctattttctcaggccgggcctaacaacatgtcggctcaggccaagaactggctacccggtccctgctaccggcagcaacgcgtctccacgacactgtcgcagaacaacaacagcaactttgcctggacgggtgccaccaagtatcatctgaatggcagagactctctggtgaatcctggcgttgccatggctacccacaaggacgacgaagagcgattttttccatccagcggagtcttaatgtttgggaaacagggagctggaaaagacaacgtggactatagcagcgtgatgctaaccagcgaggaagaaataaagaccaccaacccagtggccacagaacagtacggcgtggtggccgataacctgcaacagcaaaacgccgctcctattgtaggggccgtcaatagtcaaggagccttacctggcatggtgtggcagaaccgggacgtgtacctgcagggtcccatctgggccaagattcctcatacggacggcaactttcatccctcgccgctgatgggaggctttggactgaagcatccgcctcctcagatcctgattaaaaacacacctgttcccgcggatcctccgaccaccttcaatcaggccaagctggcttctttcatcacgcagtacagtaccggccaggtcagcgtggagatcgagtgggagctgcagaaggagaacagcaaacgctggaacccagagattcagtacacttccaactactacaaatctacaaatgtggactttgctgtcaatactgagggtacttattccgagcctcgccccattggcacccgttacctcacccgtaatctgtaattacatgttaatcaataaaccggttaattcgtttcagttgaactttggtctcctgtccttcttatcttatcggttaccatagaaactggttacttattaactgcttggtgcgcttcgcgataaaagacttacgtcatcgggttacccctagtgatgga

SEQ ID NO: 898 - protein, 738 aa, synthetic construct
  REGION 1..738: note = source = /note="Description of Artificial Sequence: Synthetic polypeptide"
MAADGYLPDWLEDNLSEGIREWWDLKPGAPKPKANQQKQDNGRGLVLPGYKYLGPFNGLDKGEPVNAADAAALEHDKAYDQQLQAGDNPYLRYNHADAEFQERLQEDTSFGGNLGRAVFQAKKRVLEPLGLVESPVKTAPGKKRPVEPSPQRSPDSSTGIGKKGQQPAKKRLNFGQTGDSESVPDPQPIGEPPAAPSGVGPNTMAAGGGAPMADNNEGADGVGSSSGNWHCDSTWLGDRVITTSTRTWALPTYNNHLYKQISNGTSGGSTNDNTYFGYSTPWGYFDFNRFHCHFSPRDWQRLINNNWGFRPKRLNFKLFNIQVKEVTQNEGTKTIANNLTSTIQVFTDSEYQLPYVLGSAHQGCLPPFPADVFMIPQYGYLTLNNGSQAVGRSSFYCLEYFPSQMLRTGNNFEFSYNFEDVPFHSSYAHSQSLDRLMNPLIDQYLYYLSRTQSTGGTAGTQQLLFSQAGPNNMSAQAKNWLPGPCYRQQRVSTTLSQNNNSNFAWTGATKYHLNGRDSLVNPGVAMATHKDDEERFFPSSGVLMFGKQGAGKDNVDYSSVMLTSEEEIKTTNPVATEQYGVVADNLQQQNAAPIVGAVNSQGALPGMVWQNRDVYLQGPIWAKIPHTDGNFHPSPLMGGFGLKHPPPQILIKNTPVPADPPTTFNQAKLASFITQYSTGQVSVEIEWELQKENSKRWNPEIQYTSNYYKSTNVDFAVNTEGTYSEPRPIGTRYLTRNL

SEQ ID NO: 899 - protein, 738 aa, synthetic construct
  REGION 1..738: note = source = /note="Description of Artificial Sequence: Synthetic polypeptide"
MAADGYLPDWLEDNLSEGIREWWDLKPGAPKPKANQQRQDNGRGLVLPGYRYLGPFNGLDKGEPVNAADAAALEHDRAYDQQLQAGDNPYLRYNHADAEFQERLQEDTSFGGNLGRAVFQAKKRVLEPLGLVESPVRTAPGKKRPVEPSPQRSPDSSTGIGKKGQQPARKRLNFGQTGDSESVPDPQPIGEPPAAPSGVGPNTMAAGGGAPMADNNEGADGVGSSSGNWHCDSTWLGDRVITTSTRTWALPTYNNHLYRQISNGTSGGSTNDNTYFGYSTPWGYFDFNRFHCHFSPRDWQRLINNNWGFRPKRLNFKLFNIQVKEVTQNEGTRTIANNLTSTIQVFTDSEYQLPYVLGSAHQGCLPPFPADVFMIPQYGYLTLNNGSQAVGRSSFYCLEYFPSQMLRTGNNFEFSYNFEDVPFHSSYAHSQSLDRLMNPLIDQYLYYLSRTQSTGGTAGTQQLLFSQAGPNNMSAQAKNWLPGPCYRQQRVSTTLSQNNNSNFAWTGATKYHLNGRDSLVNPGVAMATHRDDEERFFPSSGVLMFGRQGAGRDNVDYSSVMLTSEEEIRTTNPVATEQYGVVADNLQQQNAAPIVGAVNSQGALPGMVWQNRDVYLQGPIWAKIPHTDGNFHPSPLMGGFGLKHPPPQILIKNTPVPADPPTTFNQAKLASFITQYSTGQVSVEIEWELQKENSKRWNPEIQYTSNYYKSTNVDFAVNTEGTYSEPRPIGTRYLTRNL

SEQ ID NO: 900 - protein, 738 aa, synthetic construct
  REGION 1..738: note = source = /note="Description of Artificial Sequence: Synthetic polypeptide"
MAADGYLPDWLEDNLSEGIREWWDLKPGAPKPKANQQRQDNGRGLVLPGYRYLGPFNGLDKGEPVNAADAAALEHDRAYDQQLQAGDNPYLRYNHADAEFQERLQEDTSFGGNLGRAVFQAKKRVLEPLGLVESPVRTAPGKKRPVEPSPQRSPDSSTGIGKRGQQPARKRLNFGQTGDSESVPDPQPIGEPPAAPSGVGPNTMAAGGGAPMADNNEGADGVGSSSGNWHCDSTWLGDRVITTSTRTWALPTYNNHLYRQISNGTSGGSTNDNTYFGYSTPWGYFDFNRFHCHFSPRDWQRLINNNWGFRPKRLNFKLFNIQVKEVTQNEGTRTIANNLTSTIQVFTDSEYQLPYVLGSAHQGCLPPFPADVFMIPQYGYLTLNNGSQAVGRSSFYCLEYFPSQMLRTGNNFEFSYNFEDVPFHSSYAHSQSLDRLMNPLIDQYLYYLSRTQSTGGTAGTQQLLFSQAGPNNMSAQAKNWLPGPCYRQQRVSTTLSQNNNSNFAWTGATKYHLNGRDSLVNPGVAMATHRDDEERFFPSSGVLMFGKQGAGRDNVDYSSVMLTSEEEIRTTNPVATEQYGVVADNLQQQNAAPIVGAVNSQGALPGMVWQNRDVYLQGPIWAKIPHTDGNFHPSPLMGGFGLKHPPPQILIKNTPVPADPPTTFNQAKLASFITQYSTGQVSVEIEWELQKENSKRWNPEIQYTSNYYKSTNVDFAVNTEGTYSEPRPIGTRYLTRNL

SEQ ID NO: 901 - protein, 738 aa, synthetic construct
  REGION 1..738: note = source = /note="Description of Artificial Sequence: Synthetic polypeptide"
MAADGYLPDWLEDNLSEGIREWWDLKPGAPKPKANQQRQDNGRGLVLPGYRYLGPFNGLDKGEPVNAADAAALEHDRAYDQQLQAGDNPYLRYNHADAEFQERLQEDTSFGGNLGRAVFQAKKRVLEPLGLVESPVRTAPGKKRPVEPSPQRSPDSSTGIGKRGQQPAKKRLNFGQTGDSESVPDPQPIGEPPAAPSGVGPNTMAAGGGAPMADNNEGADGVGSSSGNWHCDSTWLGDRVITTSTRTWALPTYNNHLYRQISNGTSGGSTNDNTYFGYSTPWGYFDFNRFHCHFSPRDWQRLINNNWGFRPKRLNFKLFNIQVKEVTQNEGTRTIANNLTSTIQVFTDSEYQLPYVLGSAHQGCLPPFPADVFMIPQYGYLTLNNGSQAVGRSSFYCLEYFPSQMLRTGNNFEFSYNFEDVPFHSSYAHSQSLDRLMNPLIDQYLYYLSRTQSTGGTAGTQQLLFSQAGPNNMSAQAKNWLPGPCYRQQRVSTTLSQNNNSNFAWTGATKYHLNGRDSLVNPGVAMATHRDDEERFFPSSGVLMFGRQGAGRDNVDYSSVMLTSEEEIRTTNPVATEQYGVVADNLQQQNAAPIVGAVNSQGALPGMVWQNRDVYLQGPIWAKIPHTDGNFHPSPLMGGFGLKHPPPQILIKNTPVPADPPTTFNQAKLASFITQYSTGQVSVEIEWELQKENSKRWNPEIQYTSNYYKSTNVDFAVNTEGTYSEPRPIGTRYLTRNL

SEQ ID NO: 902 - protein, 738 aa, synthetic construct
  REGION 1..738: note = source = /note="Description of Artificial Sequence: Synthetic polypeptide"
MAADGYLPDWLEDNLSEGIREWWDLKPGAPKPKANQQRQDNGRGLVLPGYRYLGPFNGLDKGEPVNAADAAALEHDRAYDQQLQAGDNPYLRYNHADAEFQERLQEDTSFGGNLGRAVFQAKKRVLEPLGLVESPVRTAPGKKRPVEPSPQRSPDSSTGIGKRGQQPAKKRLNFGQTGDSESVPDPQPIGEPPAAPSGVGPNTMAAGGGAPMADNNEGADGVGSSSGNWHCDSTWLGDRVITTSTRTWALPTYNNHLYRQISNGTSGGSTNDNTYFGYSTPWGYFDFNRFHCHFSPRDWQRLINNNWGFRPKRLNFKLFNIQVKEVTQNEGTRTIANNLTSTIQVFTDSEYQLPYVLGSAHQGCLPPFPADVFMIPQYGYLTLNNGSQAVGRSSFYCLEYFPSQMLRTGNNFEFSYNFEDVPFHSSYAHSQSLDRLMNPLIDQYLYYLSRTQSTGGTAGTQQLLFSQAGPNNMSAQAKNWLPGPCYRQQRVSTTLSQNNNSNFAWTGATKYHLNGRDSLVNPGVAMATHRDDEERFFPSSGVLMFGKQGAGRDNVDYSSVMLTSEEEIRTTNPVATEQYGVVADNLQQQNAAPIVGAVNSQGALPGMVWQNRDVYLQGPIWAKIPHTDGNFHPSPLMGGFGLKHPPPQILIKNTPVPADPPTTFNQARLASFITQYSTGQVSVEIEWELQKENSKRWNPEIQYTSNYYKSTNVDFAVNTEGTYSEPRPIGTRYLTRNL

SEQ ID NO: 903 - protein, 738 aa, synthetic construct
  REGION 1..738: note = source = /note="Description of Artificial Sequence: Synthetic polypeptide"
MAADGYLPDWLEDNLSEGIREWWDLKPGAPKPKANQQRQDNGRGLVLPGYRYLGPFNGLDKGEPVNAADAAALEHDRAYDQQLQAGDNPYLRYNHADAEFQERLQEDTSFGGNLGRAVFQAKKRVLEPLGLVESPVRTAPGKKRPVEPSPQRSPDSSTGIGKKGQQPAKKRLNFGQTGDSESVPDPQPIGEPPAAPSGVGPNTMAAGGGAPMADNNEGADGVGSSSGNWHCDSTWLGDRVITTSTRTWALPTYNNHLYRQISNGTSGGSTNDNTYFGYSTPWGYFDFNRFHCHFSPRDWQRLINNNWGFRPKRLNFKLFNIQVKEVTQNEGTRTIANNLTSTIQVFTDSEYQLPYVLGSAHQGCLPPFPADVFMIPQYGYLTLNNGSQAVGRSSFYCLEYFPSQMLRTGNNFEFSYNFEDVPFHSSYAHSQSLDRLMNPLIDQYLYYLSRTQSTGGTAGTQQLLFSQAGPNNMSAQAKNWLPGPCYRQQRVSTTLSQNNNSNFAWTGATKYHLNGRDSLVNPGVAMATHRDDEERFFPSSGVLMFGRQGAGRDNVDYSSVMLTSEEEIRTTNPVATEQYGVVADNLQQQNAAPIVGAVNSQGALPGMVWQNRDVYLQGPIWAKIPHTDGNFHPSPLMGGFGLKHPPPQILIKNTPVPADPPTTFNQARLASFITQYSTGQVSVEIEWELQKENSKRWNPEIQYTSNYYKSTNVDFAVNTEGTYSEPRPIGTRYLTRNL

SEQ ID NO: 904 - DNA, 2214 bp, synthetic construct
  misc_feature 1..2214: note = source = /note="Description of Artificial Sequence: Synthetic polynucleotide"
  source 1..2214: mol_type = other DNA
atggctgccgatggttatcttccagattggctcgaggacaacctctctgagggcattcgcgagtggtgggacctgaaacctggagccccgaaacccaaagccaaccagcaaaagcaggacaacggccggggtctggtgcttcctggctacaagtacctcggacccttcaacggactcgacaagggggagcccgtcaacgcggcggacgcagcggccctcgagcacgacaaggcctacgaccagcagctccaagcgggtgacaatccgtacctgcggtataatcacgccgacgccgagtttcaggagcgtctgcaagaagatacgtcttttgggggcaacctcgggcgcgcagtcttccaggccaaaaagcgggttctcgaacctctgggcctggttgaatcgccggttaagacggctcctggaaagaagagaccggtagagccatcaccccagcgctctccagactcctctacgggcatcggcaagaaaggccagcagcccgcaaaaaagagactcaattttgggcagactggcgactcagagtcagtccccgaccctcaaccaatcggagaaccaccagcagccccctctggtgtgggacctaatacaatggctgcaggcggtggcgctccaatggcagacaataacgaaggcgccgacggagtgggtagttcctcaggaaattggcattgcgattccacatggctgggcgacagagtcatcaccaccagcacccgcacctgggccctgcccacctacaacaaccacctctacaagcaaatctccaacgggacctcgggaggaagcaccaacgacaacacctacttcggctacagcaccccctgggggtattttgacttcaacagattccactgccacttttcaccacgtgactggcagcgactcatcaacaacaactggggattccggcccaagaggctcaacttcaagctcttcaacatccaagtcaaggaggtcacgcagaatgaaggcaccaagaccatcgccaataaccttaccagcacgattcaggtctttacggactcggaataccagctcccgtacgtgctcggctcggcgcaccagggctgcctgcctccgttcccggcggacgtcttcatgattcctcagtacgggtacctgactctgaacaatggcagtcaggctgtgggccggtcgtccttctactgcctggagtactttccttctcaaatgctgagaacgggcaacaactttgaattcagctacaacttcgaggacgtgcccttccacagcagctacgcgcacagccagagcctggaccggctgatgaaccctctcatcgaccagtacttgtactacctgtcccggactcaaagcacgggcggtactgcaggaactcagcagttgctattttctcaggccgggcctaacaacatgtcggctcaggccaagaactggctacccggtccctgctaccggcagcaacgcgtctccacgacactgtcgcagaacaacaacagcaactttgcctggacgggtgccaccaagtatcatctgaatggcagagactctctggtgaatcctggcgttgccatggctacccacaaggacgacgaagagcgattttttccatccagcggagtcttaatgtttgggaaacagggagctggaaaagacaacgtggactatagcagcgtgatgctaaccagcgaggaagaaataaagaccaccaacccagtggccacagaacagtacggcgtggtggccgataacctgcaacagcaaaacgccgctcctattgtaggggccgtcaatagtcaaggagccttacctggcatggtgtggcagaaccgggacgtgtacctgcagggtcccatctgggccaagattcctcatacggacggcaactttcatccctcgccgctgatgggaggctttggactgaagcatccgcctcctcagatcctgattaaaaacacacctgttcccgcggatcctccgaccaccttcaatcaggccaagctggcttctttcatcacgcagtacagtaccggccaggtcagcgtggagatcgagtgggagctgcagaaggagaacagcaaacgctggaacccagagattcagtacacttccaactactacaaatctacaaatgtggactttgctgtcaatactgagggtacttattccgagcctcgccccattggcacccgttacctcacccgtaatctg

SEQ ID NO: 905 - DNA, 2217 bp, synthetic construct
  misc_feature 1..2217: note = source = /note="Description of Artificial Sequence: Synthetic polynucleotide"
  source 1..2217: mol_type = other DNA
atggctgccgatggttatcttccagattggctcgaggacaacctctctgagggcattcgcgagtggtgggacctgaaacctggagccccgaaacccaaagccaaccagcaaaggcaggacaacggccggggtctggtgcttcctggctacaggtacctcggacccttcaacggactcgacaagggggagcccgtcaacgcggcggacgcagcggccctcgagcacgacagggcctacgaccagcagctccaagcgggtgacaatccgtacctgcggtataatcacgccgacgccgagtttcaggagcgtctgcaagaagatacgtcttttgggggcaacctcgggcgcgcagtcttccaggccaaaaagcgggttctcgaacctctgggcctggttgaatcgccggttaggacggctcctggaaagaagagaccggtagagccatcaccccagcgctctccagactcctctacgggcatcggcaagaaaggccagcagcccgcaagaaagagactcaattttgggcagactggcgactcagagtcagtccccgaccctcaaccaatcggagaaccaccagcagccccctctggtgtgggacctaatacaatggctgcaggcggtggcgctccaatggcagacaataacgaaggcgccgacggagtgggtagttcctcaggaaattggcattgcgattccacatggctgggcgacagagtcatcaccaccagcacccgcacctgggccctgcccacctacaacaaccacctctacaggcaaatctccaacgggacctcgggaggaagcaccaacgacaacacctacttcggctacagcaccccctgggggtattttgacttcaacagattccactgccacttttcaccacgtgactggcagcgactcatcaacaacaactggggattccggcccaagaggctcaacttcaagctcttcaacatccaagtcaaggaggtcacgcagaatgaaggcaccaggaccatcgccaataaccttaccagcacgattcaggtctttacggactcggaataccagctcccgtacgtgctcggctcggcgcaccagggctgcctgcctccgttcccggcggacgtcttcatgattcctcagtacgggtacctgactctgaacaatggcagtcaggctgtgggccggtcgtccttctactgcctggagtactttccttctcaaatgctgagaacgggcaacaactttgaattcagctacaacttcgaggacgtgcccttccacagcagctacgcgcacagccagagcctggaccggctgatgaaccctctcatcgaccagtacttgtactacctgtcccggactcaaagcacgggcggtactgcaggaactcagcagttgctattttctcaggccgggcctaacaacatgtcggctcaggccaagaactggctacccggtccctgctaccggcagcaacgcgtctccacgacactgtcgcagaacaacaacagcaactttgcctggacgggtgccaccaagtatcatctgaatggcagagactctctggtgaatcctggcgttgccatggctacccacagggacgacgaagagcgattttttccatccagcggagtcttaatgtttgggagacagggagctggaagagacaacgtggactatagcagcgtgatgctaaccagcgaggaagaaataaggaccaccaacccagtggccacagaacagtacggcgtggtggccgataacctgcaacagcaaaacgccgctcctattgtaggggccgtcaatagtcaaggagccttacctggcatggtgtggcagaaccgggacgtgtacctgcagggtcccatctgggccaagattcctcatacggacggcaactttcatccctcgccgctgatgggaggctttggactgaagcatccgcctcctcagatcctgattaaaaacacacctgttcccgcggatcctccgaccaccttcaatcaggccaagctggcttctttcatcacgcagtacagtaccggccaggtcagcgtggagatcgagtgggagctgcagaaggagaacagcaaacgctggaacccagagattcagtacacttccaactactacaaatctacaaatgtggactttgctgtcaatactgagggtacttattccgagcctcgccccattggcacccgttacctcacccgtaatctgtaa

SEQ ID NO: 906 - DNA, 2217 bp, synthetic construct
  misc_feature 1..2217: note = source = /note="Description of Artificial Sequence: Synthetic polynucleotide"
  source 1..2217: mol_type = other DNA
atggctgccgatggttatcttccagattggctcgaggacaacctctctgagggcattcgcgagtggtgggacctgaaacctggagccccgaaacccaaagccaaccagcaaaggcaggacaacggccggggtctggtgcttcctggctacaggtacctcggacccttcaacggactcgacaagggggagcccgtcaacgcggcggacgcagcggccctcgagcacgacagggcctacgaccagcagctccaagcgggtgacaatccgtacctgcggtataatcacgccgacgccgagtttcaggagcgtctgcaagaagatacgtcttttgggggcaacctcgggcgcgcagtcttccaggccaaaaagcgggttctcgaacctctgggcctggttgaatcgccggttaggacggctcctggaaagaagagaccggtagagccatcaccccagcgctctccagactcctctacgggcatcggcaagagaggccagcagcccgcaagaaagagactcaattttgggcagactggcgactcagagtcagtccccgaccctcaaccaatcggagaaccaccagcagccccctctggtgtgggacctaatacaatggctgcaggcggtggcgctccaatggcagacaataacgaaggcgccgacggagtgggtagttcctcaggaaattggcattgcgattccacatggctgggcgacagagtcatcaccaccagcacccgcacctgggccctgcccacctacaacaaccacctctacaggcaaatctccaacgggacctcgggaggaagcaccaacgacaacacctacttcggctacagcaccccctgggggtattttgacttcaacagattccactgccacttttcaccacgtgactggcagcgactcatcaacaacaactggggattccggcccaagaggctcaacttcaagctcttcaacatccaagtcaaggaggtcacgcagaatgaaggcaccaggaccatcgccaataaccttaccagcacgattcaggtctttacggactcggaataccagctcccgtacgtgctcggctcggcgcaccagggctgcctgcctccgttcccggcggacgtcttcatgattcctcagtacgggtacctgactctgaacaatggcagtcaggctgtgggccggtcgtccttctactgcctggagtactttccttctcaaatgctgagaacgggcaacaactttgaattcagctacaacttcgaggacgtgcccttccacagcagctacgcgcacagccagagcctggaccggctgatgaaccctctcatcgaccagtacttgtactacctgtcccggactcaaagcacgggcggtactgcaggaactcagcagttgctattttctcaggccgggcctaacaacatgtcggctcaggccaagaactggctacccggtccctgctaccggcagcaacgcgtctccacgacactgtcgcagaacaacaacagcaactttgcctggacgggtgccaccaagtatcatctgaatggcagagactctctggtgaatcctggcgttgccatggctacccacagggacgacgaagagcgattttttccatccagcggagtcttaatgtttgggaaacagggagctggaagagacaacgtggactatagcagcgtgatgctaaccagcgaggaagaaataaggaccaccaacccagtggccacagaacagtacggcgtggtggccgataacctgcaacagcaaaacgccgctcctattgtaggggccgtcaatagtcaaggagccttacctggcatggtgtggcagaaccgggacgtgtacctgcagggtcccatctgggccaagattcctcatacggacggcaactttcatccctcgccgctgatgggaggctttggactgaagcatccgcctcctcagatcctgattaaaaacacacctgttcccgcggatcctccgaccaccttcaatcaggccaagctggcttctttcatcacgcagtacagtaccggccaggtcagcgtggagatcgagtgggagctgcagaaggagaacagcaaacgctggaacccagagattcagtacacttccaactactacaaatctacaaatgtggactttgctgtcaatactgagggtacttattccgagcctcgccccattggcacccgttacctcacccgtaatctgtaa

SEQ ID NO: 907 - DNA, 2217 bp, synthetic construct
  misc_feature 1..2217: note = source = /note="Description of Artificial Sequence: Synthetic polynucleotide"
  source 1..2217: mol_type = other DNA
atggctgccgatggttatcttccagattggctcgaggacaacctctctgagggcattcgcgagtggtgggacctgaaacctggagccccgaaacccaaagccaaccagcaaaggcaggacaacggccggggtctggtgcttcctggctacaggtacctcggacccttcaacggactcgacaagggggagcccgtcaacgcggcggacgcagcggccctcgagcacgacagggcctacgaccagcagctccaagcgggtgacaatccgtacctgcggtataatcacgccgacgccgagtttcaggagcgtctgcaagaagatacgtcttttgggggcaacctcgggcgcgcagtcttccaggccaaaaagcgggttctcgaacctctgggcctggttgaatcgccggttaggacggctcctggaaagaagagaccggtagagccatcaccccagcgctctccagactcctctacgggcatcggcaagagaggccagcagcccgcaaaaaagagactcaattttgggcagactggcgactcagagtcagtccccgaccctcaaccaatcggagaaccaccagcagccccctctggtgtgggacctaatacaatggctgcaggcggtggcgctccaatggcagacaataacgaaggcgccgacggagtgggtagttcctcaggaaattggcattgcgattccacatggctgggcgacagagtcatcaccaccagcacccgcacctgggccctgcccacctacaacaaccacctctacaggcaaatctccaacgggacctcgggaggaagcaccaacgacaacacctacttcggctacagcaccccctgggggtattttgacttcaacagattccactgccacttttcaccacgtgactggcagcgactcatcaacaacaactggggattccggcccaagaggctcaacttcaagctcttcaacatccaagtcaaggaggtcacgcagaatgaaggcaccaggaccatcgccaataaccttaccagcacgattcaggtctttacggactcggaataccagctcccgtacgtgctcggctcggcgcaccagggctgcctgcctccgttcccggcggacgtcttcatgattcctcagtacgggtacctgactctgaacaatggcagtcaggctgtgggccggtcgtccttctactgcctggagtactttccttctcaaatgctgagaacgggcaacaactttgaattcagctacaacttcgaggacgtgcccttccacagcagctacgcgcacagccagagcctggaccggctgatgaaccctctcatcgaccagtacttgtactacctgtcccggactcaaagcacgggcggtactgcaggaactcagcagttgctattttctcaggccgggcctaacaacatgtcggctcaggccaagaactggctacccggtccctgctaccggcagcaacgcgtctccacgacactgtcgcagaacaacaacagcaactttgcctggacgggtgccaccaagtatcatctgaatggcagagactctctggtgaatcctggcgttgccatggctacccacagggacgacgaagagcgattttttccatccagcggagtcttaatgtttgggagacagggagctggaagagacaacgtggactatagcagcgtgatgctaaccagcgaggaagaaataaggaccaccaacccagtggccacagaacagtacggcgtggtggccgataacctgcaacagcaaaacgccgctcctattgtaggggccgtcaatagtcaaggagccttacctggcatggtgtggcagaaccgggacgtgtacctgcagggtcccatctgggccaagattcctcatacggacggcaactttcatccctcgccgctgatgggaggctttggactgaagcatccgcctcctcagatcctgattaaaaacacacctgttcccgcggatcctccgaccaccttcaatcaggccaagctggcttctttcatcacgcagtacagtaccggccaggtcagcgtggagatcgagtgggagctgcagaaggagaacagcaaacgctggaacccagagattcagtacacttccaactactacaaatctacaaatgtggactttgctgtcaatactgagggtacttattccgagcctcgccccattggcacccgttacctcacccgtaatctgtaa

SEQ ID NO: 908 - DNA, 2217 bp, synthetic construct
  misc_feature 1..2217: note = source = /note="Description of Artificial Sequence: Synthetic polynucleotide"
  source 1..2217: mol_type = other DNA
atggctgccgatggttatcttccagattggctcgaggacaacctctctgagggcattcgcgagtggtgggacctgaaacctggagccccgaaacccaaagccaaccagcaaaggcaggacaacggccggggtctggtgcttcctggctacaggtacctcggacccttcaacggactcgacaagggggagcccgtcaacgcggcggacgcagcggccctcgagcacgacagggcctacgaccagcagctccaagcgggtgacaatccgtacctgcggtataatcacgccgacgccgagtttcaggagcgtctgcaagaagatacgtcttttgggggcaacctcgggcgcgcagtcttccaggccaaaaagcgggttctcgaacctctgggcctggttgaatcgccggttaggacggctcctggaaagaagagaccggtagagccatcaccccagcgctctccagactcctctacgggcatcggcaagagaggccagcagcccgcaaaaaagagactcaattttgggcagactggcgactcagagtcagtccccgaccctcaaccaatcggagaaccaccagcagccccctctggtgtgggacctaatacaatggctgcaggcggtggcgctccaatggcagacaataacgaaggcgccgacggagtgggtagttcctcaggaaattggcattgcgattccacatggctgggcgacagagtcatcaccaccagcacccgcacctgggccctgcccacctacaacaaccacctctacaggcaaatctccaacgggacctcgggaggaagcaccaacgacaacacctacttcggctacagcaccccctgggggtattttgacttcaacagattccactgccacttttcaccacgtgactggcagcgactcatcaacaacaactggggattccggcccaagaggctcaacttcaagctcttcaacatccaagtcaaggaggtcacgcagaatgaaggcaccaggaccatcgccaataaccttaccagcacgattcaggtctttacggactcggaataccagctcccgtacgtgctcggctcggcgcaccagggctgcctgcctccgttcccggcggacgtcttcatgattcctcagtacgggtacctgactctgaacaatggcagtcaggctgtgggccggtcgtccttctactgcctggagtactttccttctcaaatgctgagaacgggcaacaactttgaattcagctacaacttcgaggacgtgcccttccacagcagctacgcgcacagccagagcctggaccggctgatgaaccctctcatcgaccagtacttgtactacctgtcccggactcaaagcacgggcggtactgcaggaactcagcagttgctattttctcaggccgggcctaacaacatgtcggctcaggccaagaactggctacccggtccctgctaccggcagcaacgcgtctccacgacactgtcgcagaacaacaacagcaactttgcctggacgggtgccaccaagtatcatctgaatggcagagactctctggtgaatcctggcgttgccatggctacccacagggacgacgaagagcgattttttccatccagcggagtcttaatgtttgggaaacagggagctggaagagacaacgtggactatagcagcgtgatgctaaccagcgaggaagaaataaggaccaccaacccagtggccacagaacagtacggcgtggtggccgataacctgcaacagcaaaacgccgctcctattgtaggggccgtcaatagtcaaggagccttacctggcatggtgtggcagaaccgggacgtgtacctgcagggtcccatctgggccaagattcctcatacggacggcaactttcatccctcgccgctgatgggaggctttggactgaagcatccgcctcctcagatcctgattaaaaacacacctgttcccgcggatcctccgaccaccttcaatcaggccaggctggcttctttcatcacgcagtacagtaccggccaggtcagcgtggagatcgagtgggagctgcagaaggagaacagcaaacgctggaacccagagattcagtacacttccaactactacaaatctacaaatgtggactttgctgtcaatactgagggtacttattccgagcctcgccccattggcacccgttacctcacccgtaatctgtaa

SEQ ID NO: 909 - DNA, 2217 bp, synthetic construct
  misc_feature 1..2217: note = source = /note="Description of Artificial Sequence: Synthetic polynucleotide"
  source 1..2217: mol_type = other DNA
atggctgccgatggttatcttccagattggctcgaggacaacctctctgagggcattcgcgagtggtgggacctgaaacctggagccccgaaacccaaagccaaccagcaaaggcaggacaacggccggggtctggtgcttcctggctacaggtacctcggacccttcaacggactcgacaagggggagcccgtcaacgcggcggacgcagcggccctcgagcacgacagggcctacgaccagcagctccaagcgggtgacaatccgtacctgcggtataatcacgccgacgccgagtttcaggagcgtctgcaagaagatacgtcttttgggggcaacctcgggcgcgcagtcttccaggccaaaaagcgggttctcgaacctctgggcctggttgaatcgccggttaggacggctcctggaaagaagagaccggtagagccatcaccccagcgctctccagactcctctacgggcatcggcaagaaaggccagcagcccgcaaaaaagagactcaattttgggcagactggcgactcagagtcagtccccgaccctcaaccaatcggagaaccaccagcagccccctctggtgtgggacctaatacaatggctgcaggcggtggcgctccaatggcagacaataacgaaggcgccgacggagtgggtagttcctcaggaaattggcattgcgattccacatggctgggcgacagagtcatcaccaccagcacccgcacctgggccctgcccacctacaacaaccacctctacaggcaaatctccaacgggacctcgggaggaagcaccaacgacaacacctacttcggctacagcaccccctgggggtattttgacttcaacagattccactgccacttttcaccacgtgactggcagcgactcatcaacaacaactggggattccggcccaagaggctcaacttcaagctcttcaacatccaagtcaaggaggtcacgcagaatgaaggcaccaggaccatcgccaataaccttaccagcacgattcaggtctttacggactcggaataccagctcccgtacgtgctcggctcggcgcaccagggctgcctgcctccgttcccggcggacgtcttcatgattcctcagtacgggtacctgactctgaacaatggcagtcaggctgtgggccggtcgtccttctactgcctggagtactttccttctcaaatgctgagaacgggcaacaactttgaattcagctacaacttcgaggacgtgcccttccacagcagctacgcgcacagccagagcctggaccggctgatgaaccctctcatcgaccagtacttgtactacctgtcccggactcaaagcacgggcggtactgcaggaactcagcagttgctattttctcaggccgggcctaacaacatgtcggctcaggccaagaactggctacccggtccctgctaccggcagcaacgcgtctccacgacactgtcgcagaacaacaacagcaactttgcctggacgggtgccaccaagtatcatctgaatggcagagactctctggtgaatcctggcgttgccatggctacccacagggacgacgaagagcgattttttccatccagcggagtcttaatgtttgggagacagggagctggaagagacaacgtggactatagcagcgtgatgctaaccagcgaggaagaaataaggaccaccaacccagtggccacagaacagtacggcgtggtggccgataacctgcaacagcaaaacgccgctcctattgtaggggccgtcaatagtcaaggagccttacctggcatggtgtggcagaaccgggacgtgtacctgcagggtcccatctgggccaagattcctcatacggacggcaactttcatccctcgccgctgatgggaggctttggactgaagcatccgcctcctcagatcctgattaaaaacacacctgttcccgcggatcctccgaccaccttcaatcaggccaggctggcttctttcatcacgcagtacagtaccggccaggtcagcgtggagatcgagtgggagctgcagaaggagaacagcaaacgctggaacccagagattcagtacacttccaactactacaaatctacaaatgtggactttgctgtcaatactgagggtacttattccgagcctcgccccattggcacccgttacctcacccgtaatctgtaa

SEQ ID NO: 910 - protein, 744 aa, synthetic construct
  REGION 1..744: note = source = /note="Description of Artificial Sequence: Synthetic polypeptide"
MAADGYLPDWLEDTLSEGIRQWWKLKPGPPPPKPAERHKDDSRGLVLPGYKYLGPFNGLDKGEPVNEADAAALEHDKAYDRQLDSGDNPYLKYNHADAEFQERLKEDTSFGGNLGRAVFQAKKRVLEPLGLVEEPVKTAPGKKRPVEHSPVEPDSSSGTGKAGQQPARKRLNFGQTGDADSVPDPQPLGQPPAAPSGLGTNTMATGSGAPMADNNEGADGVGNSSGNWHCDSTWMGDRVITTSTRTWALPTYNNHLYKQISSQSGASNDNHYFGYSTPWGYFDFNRFHCHFSPRDWQRLINNNWGFRPKRLNFKLFNIQVKEVTQNDGTTTIANNLTSTVQVFTDSEYQLPYVLGSAHQGCLPPFPADVFMVPQYGYLTLNNGSQAVGRSSFYCLEYFPSQMLRTGNNFTFSYTFEDVPFHSSYAHSQSLDRLMNPLIDQYLYYLSRTNTPSGTTTQSRLQFSQAGASDIRDQSRNWLPGPCYRQQRVSKTSADNNNSEYSWTGATKYHLNGRDSLVNPGPAMASHKDDEEKFFPQSGVLIFGKQGSEKTNVDIEKVMITDEEEIRTTNPVATEQYGSVSTNLQRGQRGESGHGYFAQAATADVNTQGVLPGMVWQDRDVYLQGPIWAKIPHTDGHFHPSPLMGGFGLKHPPPQILIKNTPVPANPSTTFSAAKFASFITQYSTGQVSVEIEWELQKENSKRWNPEIQYTSNYNKSVNVDFTVDTNGVYSEPRPIGTRYLTRNL

SEQ ID NO: 911 - DNA, 8359 bp, synthetic construct
  misc_feature 1..8359: note = source = /note="Description of Artificial Sequence: Synthetic polynucleotide"
  source 1..8359: mol_type = other DNA
catcatcaataatataccttattttggattgaagccaatatgataatgagggggtggagtttgtgacgtggcgcggggcgtgggaacggggcgggtgacgtagtagctctagaggtcctgtattagaggtcacgtgagtgttttgcgacattttgcgacaccatgtggtcacgctgggtatttaagcccgagtgagcacgcagggtctccattttgaagcgggaggtttgaacgcgcagccgccatgccggggttttacgagattgtgattaaggtccccagcgaccttgacgagcatctgcccggcatttctgacagctttgtgaactgggtggccgagaaggaatgggagttgccgccagattctgacatggatctgaatctgattgagcaggcacccctgaccgtggccgagaagctgcagcgcgactttctgacggaatggcgccgtgtgagtaaggcaccggaggcccttttctttgtgcaatttgagaagggagagagctacttccacatgcacgtgctcgtggaaaccaccggggtgaaatccatggttttgggacgtttcctgagtcagattcgcgaaaaactgattcagagaatttaccgcgggatcgagccgactttgccaaactggttcgcggtcacaaagaccagaaatggcgccggaggcgggaacaaggtggtggatgagtgctacatccccaattacttgctccccaaaacccagcctgagctccagtgggcgtggactaatatggaacagtatttaagcgcctgtttgaatctcacggagcgtaaacggttggtggcgcagcatctgacgcacgtgtcgcagacgcaggagcagaacaaagagaatcagaatcccaattctgatgcgccggtgatcagatcaaaaacttcagccaggtacatggagctggtcgggtggctcgtggacaaggggattacctcggagaagcagtggatccaggaggaccaggcctcatacatctccttcaatgcggcctccaactcgcggtcccaaatcaaggctgccttggacaatgcgggaaagattatgagcctgactaaaaccgcccccgactacctggtgggccagcagcccgtggaggacatttccagcaatcggatttataaaattttggaactaaacgggtacgatccccaatatgcggcttccgtctttctgggatgggccacgaaaaagttcggcaagaggaacaccatctggctgtttgggcctgcaactaccgggaagaccaacatcgcggaggccatagcccacactgtgcccttctacgggtgcgtaaactggaccaatgagaactttcccttcaacgactgtgtcgacaagatggtgatctggtgggaggaggggaagatgaccgccaaggtcgtggagtcggccaaagccattctcggaggaagcaaggtgcgcgtggaccagaaatgcaagtcctcggcccagatagacccgactcccgtgatcgtcacctccaacaccaacatgtgcgccgtgattgacgggaactcaacgaccttcgaacaccagcagccgttgcaagaccggatgttcaaatttgaactcacccgccgtctggatcatgactttgggaaggtcaccaagcaggaagtcaaagactttttccggtgggcaaaggatcacgtggttgaggtggagcatgaattctacgtcaaaaagggtggagccaagaaaagacccgcccccagtgacgcagatataagtgagcccaaacgggtgcgcgagtcagttgcgcagccatcgacgtcagacgcggaagcttcgatcaactacgcagacaggtaccaaaacaaatgttctcgtcacgtgggcatgaatctgatgctgtttccctgcagacaatgcgagagaatgaatcagaattcaaatatctgcttcactcacggacagaaagactgtttagagtgctttcccgtgtcagaatctcaacccgtttctgtcgtcaaaaaggcgtatcagaaactgtgctacattcatcatatcatgggaaaggtgccagacgcttgcactgcctgcgatctggtcaatgtggatttggatgactgcatctttgaacaataaatgatttaaatcaggtatggctgccgatggttatcttccagattggctcgaggacactctctctgaaggaataagacagtggtggaagctcaaacctggcccaccaccaccaaagcccgcagagcggcataaggacgacagcaggggtcttgtgcttcctgggtacaagtacctcggacccttcaacggactcgacaagggagagccggtcaacgaggcagacgccgcggccctcgagcacgacaaagcctacgaccggcagctcgacagcggagacaacccgtacctcaagtacaaccacgccgacgcggagtttcaggagcgccttaaagaagatacgtcttttgggggcaacctcggacgagcagtcttccaggcgaaaaagagggttcttgaacctctgggcctggttgaggaacctgttaagacggctccgggaaaaaagaggccggtagagcactctcctgtggagccagactcctcctcgggaaccggaaaggcgggccagcagcctgcaagaaaaagattgaattttggtcagactggagacgcagactcagtacctgacccccagcctctcggacagccaccagcagccccctctggtctgggaactaatacgatggctacaggcagtggcgcaccaatggcagacaataacgagggcgccgacggagtgggtaattcctcgggaaattggcattgcgattccacatggatgggcgacagagtcatcaccaccagcacccgaacctgggccctgcccacctacaacaaccacctctacaaacaaatttccagccaatcaggagcctcgaacgacaatcactactttggctacagcaccccttgggggtattttgacttcaacagattccactgccacttttcaccacgtgactggcaaagactcatcaacaacaactggggattccgacccaagagactcaacttcaagctctttaacattcaagtcaaagaggtcacgcagaatgacggtacgacgacgattgccaataaccttaccagcacggttcaggtgtttactgactcggagtaccagctcccgtacgtcctcggctcggcgcatcaaggatgcctcccgccgttcccagcagacgtcttcatggtgccacagtatggatacctcaccctgaacaacgggagtcaggcagtaggacgctcttcattttactgcctggagtactttccttctcagatgctgcgtaccggaaacaactttaccttcagctacacttttgaggacgttcctttccacagcagctacgctcacagccagagtctggaccgtctcatgaatcctctcatcgaccagtacctgtattacttgagcagaacaaacactccaagtggaaccaccacgcagtcaaggcttcagttttctcaggccggagcgagtgacattcgggaccagtctaggaactggcttcctggaccctgttaccgccagcagcgagtatcaaagacatctgcggataacaacaacagtgaatactcgtggactggagctaccaagtaccacctcaatggcagagactctctggtgaatccgggcccggccatggcaagccacaaggacgatgaagaaaagttttttcctcagagcggggttctcatctttgggaagcaaggctcagagaaaacaaatgtggacattgaaaaggtcatgattacagacgaagaggaaatcaggacaaccaatcccgtggctacggagcagtatggttctgtatctaccaacctccagagaggccagagaggcgagtctggtcatggttattttgcccaggcggccaccgcagatgtcaacacacaaggcgttcttccaggcatggtctggcaggacagagatgtgtaccttcaggggcccatctgggcaaagattccacacacggacggacattttcacccctctcccctcatgggtggattcggacttaaacaccctcctccacagattctcatcaagaacaccccggtacctgcgaatccttcgaccaccttcagtgcggcaaagtttgcttccttcatcacacagtactccacgggacaggtcagcgtggagatcgagtgggagctgcagaaggaaaacagcaaacgctggaatcccgaaattcagtacacttccaactacaacaagtctgttaatgtggactttactgtggacactaatggcgtgtattcagagcctcgccccattggcaccagatacctgactcgtaatctgtaattgcttgttaatcaataaaccgtttaattcgtttcagttgaactttggtctctgcgtatttctttcttatctagtttccatgctctagaggtcctgtattagaggtcacgtgagtgttttgcgacattttgcgacaccatgtggtcacgctgggtatttaagcccgagtgagcacgcagggtctccattttgaagcgggaggtttgaacgcgcagccaccacggcggggttttacgagattgtgattaaggtccccagcgaccttgacgagcatctgcccggcatttctgacagctttgtgaactgggtggccgagaaggaatgggagttgccgccagattctgacatggatctgaatctgattgagcaggcacccctgaccgtggccgagaagctgcatcgctggcgtaatagcgaagaggcccgcaccgatcgcccttcccaacagttgcgcagcctgaatggcgaatggcgattccgttgcaatggctggcggtaatattgttctggatattaccagcaaggccgatagtttgagttcttctactcaggcaagtgatgttattactaatcaaagaagtattgcgacaacggttaatttgcgtgatggacagactcttttactcggtggcctcactgattataaaaacacttctcaggattctggcgtaccgttcctgtctaaaatccctttaatcggcctcctgtttagctcccgctctgattctaacgaggaaagcacgttatacgtgctcgtcaaagcaaccatagtacgcgccctgtagcggcgcattaagcgcggcgggtgtggtggttacgcgcagcgtgaccgctacacttgccagcgccctagcgcccgctcctttcgctttcttcccttcctttctcgccacgttcgccggctttccccgtcaagctctaaatcgggggctccctttagggttccgatttagtgctttacggcacctcgaccccaaaaaacttgattagggtgatggttcacgtagtgggccatcgccctgatagacggtttttcgccctttgacgttggagtccacgttctttaatagtggactcttgttccaaactggaacaacactcaaccctatctcggtctattcttttgatttataagggattttgccgatttcggcctattggttaaaaaatgagctgatttaacaaaaatttaacgcgaattttaacaaaatattaacgtttacaatttaaatatttgcttatacaatcttcctgtttttggggcttttctgattatcaaccggggtacatatgattgacatgctagttttacgattaccgttcatcgattctcttgtttgctccagactctcaggcaatgacctgatagcctttgtagagacctctcaaaaatagctaccctctccggcatgaatttatcagctagaacggttgaatatcatattgatggtgatttgactgtctccggcctttctcacccgtttgaatctttacctacacattactcaggcattgcatttaaaatatatgagggttctaaaaatttttatccttgcgttgaaataaaggcttctcccgcaaaagtattacagggtcataatgtttttggtacaaccgatttagctttatgctctgaggctttattgcttaattttgctaattctttgccttgcctgtatgatttattggatgttggaattcctgatgcggtattttctccttacgcatctgtgcggtatttcacaccgcatatggtgcactctcagtacaatctgctctgatgccgcatagttaagccagccccgacacccgccaacacccgctgacgcgccctgacgggcttgtctgctcccggcatccgcttacagacaagctgtgaccgtctccgggagctgcatgtgtcagaggttttcaccgtcatcaccgaaacgcgcgagacgaaagggcctcgtgatacgcctatttttataggttaatgtcatgataataatggtttcttagacgtcaggtggcacttttcggggaaatgtgcgcggaacccctatttgtttatttttctaaatacattcaaatatgtatccgctcatgagacaataaccctgataaatgcttcaataatattgaaaaaggaagagtatgagtattcaacatttccgtgtcgcccttattcccttttttgcggcattttgccttcctgtttttgctcacccagaaacgctggtgaaagtaaaagatgctgaagatcagttgggtgcacgagtgggttacatcgaactggatctcaacagcggtaagatccttgagagttttcgccccgaagaacgttttccaatgatgagcacttttaaagttctgctatgtggcgcggtattatcccgtattgacgccgggcaagagcaactcggtcgccgcatacactattctcagaatgacttggttgagtactcaccagtcacagaaaagcatcttacggatggcatgacagtaagagaattatgcagtgctgccataaccatgagtgataacactgcggccaacttacttctgacaacgatcggaggaccgaaggagctaaccgcttttttgcacaacatgggggatcatgtaactcgccttgatcgttgggaaccggagctgaatgaagccataccaaacgacgagcgtgacaccacgatgcctgtagcaatggcaacaacgttgcgcaaactattaactggcgaactacttactctagcttcccggcaacaattaatagactggatggaggcggataaagttgcaggaccacttctgcgctcggcccttccggctggctggtttattgctgataaatctggagccggtgagcgtgggtctcgcggtatcattgcagcactggggccagatggtaagccctcccgtatcgtagttatctacacgacggggagtcaggcaactatggatgaacgaaatagacagatcgctgagataggtgcctcactgattaagcattggtaactgtcagaccaagtttactcatatatactttagattgatttaaaacttcatttttaatttaaaaggatctaggtgaagatcctttttgataatctcatgaccaaaatcccttaacgtgagttttcgttccactgagcgtcagaccccgtagaaaagatcaaaggatcttcttgagatcctttttttctgcgcgtaatctgctgcttgcaaacaaaaaaaccaccgctaccagcggtggtttgtttgccggatcaagagctaccaactctttttccgaaggtaactggcttcagcagagcgcagataccaaatactgtccttctagtgtagccgtagttaggccaccacttcaagaactctgtagcaccgcctacatacctcgctctgctaatcctgttaccagtggctgctgccagtggcgataagtcgtgtcttaccgggttggactcaagacgatagttaccggataaggcgcagcggtcgggctgaacggggggttcgtgcacacagcccagcttggagcgaacgacctacaccgaactgagatacctacagcgtgagctatgagaaagcgccacgcttcccgaagggagaaaggcggacaggtatccggtaagcggcagggtcggaacaggagagcgcacgagggagcttccagggggaaacgcctggtatctttatagtcctgtcgggtttcgccacctctgacttgagcgtcgatttttgtgatgctcgtcaggggggcggagcctatggaaaaacgccagcaacgcggcctttttacggttcctggccttttgctggccttttgctcacatgttctttcctgcgttatcccctgattctgtggataaccgtattaccgcctttgagtgagctgataccgctcgccgcagccgaacgaccgagcgcagcgagtcagtgagcgaggaagcggaagagcgcccaatacgcaaaccgcctctccccgcgcgttggccgattcattaatgcagaattcc

SEQ ID NO: 912 - protein, 736 aa, synthetic construct
  VARIANT 168: note = /replace="Arg"
  VARIANT 204: note = /replace="Ser"
  VARIANT 266: note = /replace="Gly"
  VARIANT 311: note = /replace="Lys"
  VARIANT 411: note = /replace="Gln"
  VARIANT 460: note = /replace="Glu"
  VARIANT 493: note = /replace="Thr"
  VARIANT 562: note = /replace="Asn"
  VARIANT 576: note = /replace="Glu"
  VARIANT 587: note = /replace="Ala"
  VARIANT 609: note = /replace="Asp"
  SITE 1..736: note = /note="Variant residues given in the sequence have no preference with respect to those in the annotations for variant positions"
  REGION 1..736: note = source = /note="Description of Artificial Sequence: Synthetic polypeptide"
MAADGYLPDWLEDNLSEGIREWWDLKPGAPKPKANQQKQDDGRGLVLPGYKYLGPFNGLDKGEPVNAADAAALEHDKAYDQQLKAGDNPYLRYNHADAEFQERLQEDTSFGGNLGRAVFQAKKRVLEPLGLVEEGAKTAPGKKRPVEQSPQEPDSSSGIGKKGQQPAKKRLNFGQTGDSESVPDPQPLGEPPAAPSGVGSNTMAAGGGAPMADNNEGADGVGNASGNWHCDSTWLGDRVITTSTRTWALPTYNNHLYKQISSQSGASTNDNTYFGYSTPWGYFDFNRFHCHFSPRDWQRLINNNWGFRPKRLNFKLFNIQVKEVTTNDGTTTIANNLTSTVQVFTDSEYQLPYVLGSAHQGCLPPFPADVFMIPQYGYLTLNNGSQAVGRSSFYCLEYFPSQMLRTGNNFEFSYTFEDVPFHSSYAHSQSLDRLMNPLIDQYLYYLSRTQTTSGTAGNRTLQFSQAGPSSMANQAKNWLPGPCYRQQRVSKTANQNNNSNFAWTGATKYHLNGRDSLVNPGPAMATHKDDEDKFFPMSGVLIFGKQGAGNSNVDLDNVMITSEEEIKTTNPVATEQYGTVATNLQSSNTAPATGTVNSQGALPGMVWQNRDVYLQGPIWAKIPHTDGHFHPSPLMGGFGLKHPPPQILIKNTPVPANPPTTFSPAKFASFITQYSTGQVSVEIEWELQKENSKRWNPEIQYTSNYNKSTNVDFAVDTNGVYSEPRPIGTRYLTRNL

SEQ ID NO: 913 - DNA, 2208 bp, synthetic construct
  variation 502..504: note = /replace="agg"
  variation 610..612: note = /replace="agc"
  variation 796..798: note = /replace="ggc"
  variation 931..933: note = /replace="aag"
  variation 1231..1233: note = /replace="cag"
  variation 1378..1380: note = /replace="gag"
  variation 1477..1479: note = /replace="acc"
  variation 1684..1686: note = /replace="aac"
  variation 1726..1728: note = /replace="gag"
  variation 1759..1761: note = /replace="gcc"
  variation 1825..1827: note = /replace="gac"
  misc_feature 1..2208: note = /note="Variant nucleotides given in the sequence have no preference with respect to those in the annotations for variant positions"
  misc_feature 1..2208: note = source = /note="Description of Artificial Sequence: Synthetic polynucleotide"
  source 1..2208: mol_type = other DNA
atggctgccgatggttatcttccagattggctcgaggacaacctctctgagggcattcgcgagtggtgggacttgaaacctggagccccgaaacccaaagccaaccagcaaaagcaggacgacggccggggtctggtgcttcctggctacaagtacctcggacccttcaacggactcgacaagggggagcccgtcaacgcggcggacgcagcggccctcgagcacgacaaggcctacgaccagcagctcaaagcgggtgacaatccgtacctgcggtataaccacgccgacgccgagtttcaggagcgtctgcaagaagatacgtcttttgggggcaacctcgggcgagcagtcttccaggccaagaagcgggttctcgaacctctcggtctggttgaggaaggcgctaagacggctcctggaaagaagagaccggtagagcaatcaccccaggaaccagactcctcttcgggcatcggcaagaaaggccagcagcccgcgaagaagagactcaactttgggcagacaggcgactcagagtcagtgcccgaccctcaaccactcggagaaccccccgcagccccctctggtgtgggatctaatacaatggcagcaggcggtggcgctccaatggcagacaataacgaaggcgccgacggagtgggtaacgcctcaggaaattggcattgcgattccacatggctgggcgacagagtcatcaccaccagcacccgaacctgggccctccccacctacaacaaccacctctacaagcaaatctccagccaatcgggagcaagcaccaacgacaacacctacttcggctacagcaccccctgggggtattttgactttaacagattccactgccacttctcaccacgtgactggcagcgactcatcaacaacaactggggattccggcccaagagactcaacttcaagctcttcaacatccaggtcaaggaggtcacgacgaatgatggcaccacgaccatcgccaataaccttaccagcacggttcaggtctttacggactcggaataccagctcccgtacgtcctcggctctgcgcaccagggctgcctgcctccgttcccggcggacgtcttcatgattcctcagtacgggtacctgactctgaacaatggcagtcaggccgtgggccgttcctccttctactgcctggagtactttccttctcaaatgctgagaacgggcaacaactttgagttcagctacacgtttgaggacgtgccttttcacagcagctacgcgcacagccaaagcctggaccggctgatgaaccccctcatcgaccagtacctgtactacctgtctcggactcagaccacgagtggtaccgcaggaaatcggacgttgcaattttctcaggccgggcctagtagcatggcgaatcaggccaaaaactggctacccgggccctgctaccggcagcaacgcgtctccaagacagcgaatcaaaataacaacagcaactttgcctggaccggtgccaccaagtatcatctgaatggcagagactctctggtaaatcccggtcccgctatggcaacccacaaggacgacgaagacaaattttttccgatgagcggagtcttaatatttgggaaacagggagctggaaatagcaacgtggaccttgacaacgttatgataaccagtgaggaagaaattaaaaccaccaacccagtggccacagaacagtacggcacggtggccactaacctgcaatcgtcaaacaccgctcctgctacagggaccgtcaacagtcaaggagccttacctggcatggtctggcagaaccgggacgtgtacctgcagggtcctatctgggccaagattcctcacacggacggacactttcatccctcgccgctgatgggaggctttggactgaaacacccgcctcctcagatcctgattaagaatacacctgttcccgcgaatcctccaactaccttcagtccagctaagtttgcgtcgttcatcacgcagtacagcaccggacaggtcagcgtggaaattgaatgggagctgcagaaagaaaacagcaaacgctggaacccagagattcaatacacttccaactacaacaaatctacaaatgtggactttgctgttgacacaaatggcgtttattctgagcctcgccccatcggcacccgttacctcacccgtaatctg

SEQ ID NO: 914 - protein, 737 aa, synthetic construct
  VARIANT 157: note = /replace="Ser"
  VARIANT 168: note = /replace="Arg"
  VARIANT 262: note = /replace="Ser"
  VARIANT 263: note = /replace="His"
  VARIANT 312: note = /replace="Lys"
  VARIANT 412: note = /replace="Gln"
  VARIANT 460: note = /replace="Gln"
  VARIANT 461: note = /replace="Glu"
  VARIANT 552: note = /replace="Ser"
  VARIANT 556: note = /replace="Tyr"
  VARIANT 557: note = /replace="Ser"
  VARIANT 563: note = /replace="Asn"
  VARIANT 580: note = /replace="Ile"
  VARIANT 588: note = /replace="Ser"
  VARIANT 664: note = /replace="Thr"
  SITE 1..737: note = /note="Variant residues given in the sequence have no preference with respect to those in the annotations for variant positions"
  REGION 1..737: note = source = /note="Description of Artificial Sequence: Synthetic polypeptide"
MAADGYLPDWLEDNLSEGIREWWDLKPGAPKPKANQQKQDDGRGLVLPGYKYLGPFNGLDKGEPVNAADAAALEHDKAYDQQLKAGDNPYLRYNHADAEFQERLQEDTSFGGNLGRAVFQAKKRVLEPLGLVEEGAKTAPGKKRPVEQSPQEPDSSTGIGKKGQQPAKKRLNFGQTGDSESVPDPQPLGEPPAAPSGVGSNTMAAGGGAPMADNNEGADGVGNASGNWHCDSTWLGDRVITTSTRTWALPTYNNHLYKQISNSQSGGSTNDNTYFGYSTPWGYFDFNRFHCHFSPRDWQRLINNNWGFRPKRLNFKLFNIQVKEVTTNDGTTTIANNLTSTVQVFTDSEYQLPYVLGSAHQGCLPPFPADVFMIPQYGYLTLNNGSQAVGRSSFYCLEYFPSQMLRTGNNFEFSYTFEDVPFHSSYAHSQSLDRLMNPLIDQYLYYLSRTQTTGGTAGNRTLQFSQAGPSSMANQAKNWLPGPCYRQQRVSKTTNQNNNSNFAWTGATKYHLNGRDSLVNPGVAMATHKDDEDRFFPSSGVLIFGKQGAGNDNVDLDNVMITSEEEIKTTNPVATEEYGVVATNLQSANTAPQTGTVNSQGALPGMVWQNRDVYLQGPIWAKIPHTDGNFHPSPLMGGFGLKHPPPQILIKNTPVPANPPTTFSPAKFASFITQYSTGQVSVEIEWELQKENSKRWNPEIQYTSNYNKSTNVDFAVDTEGVYSEPRPIGTRYLTRNL

SEQ ID NO: 915 - DNA, 2211 bp, synthetic construct
  variation 469..471: note = /replace="agc"
  variation 502..504: note = /replace="aga"
  variation 784..786: note = /replace="agt"
  variation 787..789: note = /replace="cac"
  variation 934..936: note = /replace="aag"
  variation 1234..1236: note = /replace="cag"
  variation 1378..1380: note = /replace="cag"
  variation 1381..1383: note = /replace="gag"
  variation 1654..1656: note = /replace="agc"
  variation 1666..1668: note = /replace="tac"
  variation 1669..1671: note = /replace="agc"
  variation 1687..1689: note = /replace="aac"
  variation 1738..1740: note = /replace="atc"
  variation 1762..1764: note = /replace="agc"
  variation 1990..1992: note = /replace="acc"
  misc_feature 1..2211: note = /note="Variant nucleotides given in the sequence have no preference with respect to those in the annotations for variant positions"
  misc_feature 1..2211: note = source = /note="Description of Artificial Sequence: Synthetic polynucleotide"
  source 1..2211: mol_type = other DNA
atggctgccgatggttatcttccagattggctcgaggacaacctctctgagggcattcgcgagtggtgggacttgaaacctggagccccgaaacccaaagccaaccagcaaaagcaggacgacggccggggtctggtgcttcctggctacaagtacctcggacccttcaacggactcgacaagggggagcccgtcaacgcggcggacgcagcggccctcgagcacgacaaggcctacgaccagcagctcaaagcgggtgacaatccgtacctgcggtataaccacgccgacgccgagtttcaggagcgtctgcaagaagatacgtcttttgggggcaacctcgggcgagcagtcttccaggccaagaagcgggttctcgaacctctcggtctggttgaggaaggcgctaagacggctcctggaaagaagagaccggtagagcaatcaccccaggaaccagactcctctacgggcatcggcaagaaaggccagcagcccgcgaaaaagagactcaactttgggcagactggcgactcagagtcagtgcccgaccctcaaccactcggagaaccccccgcagccccctctggtgtgggatctaatacaatggctgcaggcggtggcgctccaatggcagacaataacgaaggcgccgacggagtgggtaatgcctcaggaaattggcattgcgattccacatggctgggcgacagagtcatcaccaccagcacccgaacctgggccctccccacctacaacaaccacctctacaagcaaatctccaacagccaatcgggaggaagcaccaacgacaacacctacttcggctacagcaccccctgggggtattttgactttaacagattccactgccacttctcaccacgtgactggcagcgactcatcaacaacaactggggattccggcccaagagactcaacttcaagctcttcaacatccaggtcaaggaggtcacgacgaatgatggcaccacgaccatcgccaataaccttaccagcacggttcaggtctttacggactcggaataccagctcccgtacgtcctcggctctgcgcaccagggctgcctgcctccgttcccggcggacgtcttcatgattcctcagtacgggtacctgactctgaacaatggcagtcaggccgtgggccgttcctccttctactgcctggagtactttccttctcaaatgctgagaacgggcaacaactttgagttcagctacacgtttgaggacgtgccttttcacagcagctacgcgcacagccaaagcctggaccggctgatgaaccccctcatcgaccagtacctgtactacctgtctcggactcagaccacgggaggtaccgcaggaaatcggacgttgcaattttctcaggccgggcctagtagcatggcgaatcaggccaaaaactggctacccgggccctgctaccggcagcaacgcgtctccaagacaacgaatcaaaataacaacagcaactttgcctggaccggtgccaccaagtatcatctgaatggcagagactctctggtaaatcccggtgtcgctatggcaacccacaaggacgacgaagaccgattttttccgtccagcggagtcttaatatttgggaaacagggagctggaaatgacaacgtggaccttgacaacgttatgataaccagtgaggaagaaattaaaaccaccaacccagtggccacagaagagtacggcgtggtggccactaacctgcaatcggcaaacaccgctcctcaaacagggaccgtcaacagtcaaggagccttacctggcatggtctggcagaaccgggacgtgtacctgcagggtcctatctgggccaagattcctcacacggacggaaactttcatccctcgccgctgatgggaggctttggactgaaacacccgcctcctcagatcctgattaagaatacacctgttcccgcgaatcctccaactaccttcagtccagctaagtttgcgtcgttcatcacgcagtacagcaccggacaggtcagcgtggaaattgaatgggagctgcagaaagaaaacagcaaacgctggaacccagagattcaatacacttccaactacaacaaatctacaaatgtggactttgctgttgacacagaaggcgtttattctgagcctcgccccatcggcacccgttacctcacccgtaatctg

SEQ ID NO: 916 - protein, 738 aa, synthetic construct
  VARIANT 158: note = /replace="Ser"
  VARIANT 169: note = /replace="Arg"
  VARIANT 564: note = /replace="Asn"
  SITE 1..738: note = /note="Variant residues given in the sequence have no preference with respect to those in the annotations for variant positions"
  REGION 1..738: note = source = /note="Description of Artificial Sequence: Synthetic polypeptide"
MAADGYLPDWLEDNLSEGIREWWDLKPGAPKPKANQQKQDDGRGLVLPGYKYLGPFNGLDKGEPVNAADAAALEHDKAYDQQLKAGDNPYLRYNHADAEFQERLQEDTSFGGNLGRAVFQAKKRVLEPLGLVEEGAKTAPGKKRPVEQSPQREPDSSTGIGKKGQQPAKKRLNFGQTGDSESVPDPQPLGEPPAAPSGVGSNTMAAGGGAPMADNNEGADGVGNSSGNWHCDSTWLGDRVITTSTRTWALPTYNNHLYKQISNGTSGGSTNDNTYFGYSTPWGYFDFNRFHCHFSPRDWQRLINNNWGFRPKRLNFKLFNIQVKEVTTNEGTKTIANNLTSTVQVFTDSEYQLPYVLGSAHQGCLPPFPADVFMIPQYGYLTLNNGSQAVGRSSFYCLEYFPSQMLRTGNNFQFSYTFEDVPFHSSYAHSQSLDRLMNPLIDQYLYYLSRTQTTGGTAGTQTLQFSQAGPSSMANQAKNWLPGPCYRQQRVSTTTNQNNNSNFAWTGATKYHLNGRDSLVNPGVAMATHKDDEDRFFPSSGVLIFGKQGAGNDNVDYSNVMITSEEEIKTTNPVATEEYGVVATNLQSANTAPQTGTVNSQGALPGMVWQNRDVYLQGPIWAKIPHTDGNFHPSPLMGGFGLKHPPPQILIKNTPVPADPPTTFNQAKLNSFITQYSTGQVSVEIEWELQKENSKRWNPEIQYTSNYYKSTNVDFAVNTEGVYSEPRPIGTRYLTRNL

SEQ ID NO: 917 - DNA, 2214 bp, synthetic construct
  variation 472..474: note = /replace="agc"
  variation 505..507: note = /replace="aga"
  variation 1690..1692: note = /replace="aac"
  misc_feature 1..2214: note = /note="Variant nucleotides given in the sequence have no preference with respect to those in the annotations for variant positions"
  misc_feature 1..2214: note = source = /note="Description of Artificial Sequence: Synthetic polynucleotide"
  source 1..2214: mol_type = other DNA
atggctgccgatggttatcttccagattggctcgaggacaacctctctgagggcattcgcgagtggtgggacctgaaacctggagccccgaaacccaaagccaaccagcaaaagcaggacgacggccggggtctggtgcttcctggctacaagtacctcggacccttcaacggactcgacaagggggagcccgtcaacgcggcggacgcagcggccctcgagcacgacaaggcctacgaccagcagctcaaagcgggtgacaatccgtacctgcggtataatcacgccgacgccgagtttcaggagcgtctgcaagaagatacgtcttttgggggcaacctcgggcgagcagtcttccaggccaagaagcgggttctcgaacctctcggtctggttgaggaaggcgctaagacggctcctggaaagaagagaccggtagagcagtcaccacagcgtgagcccgactcctccacgggcatcggcaagaaaggccagcagcccgccaaaaagagactcaatttcggtcagactggcgactcagagtcagtccccgaccctcaacctctcggagaacctccagcagcgccctctggtgtgggatctaatacaatggctgcaggcggtggcgcaccaatggcagacaataacgaaggtgccgacggagtgggtaattcctcgggaaattggcattgcgattccacatggctgggcgacagagtcatcaccaccagcacccgaacctgggccctgcccacctacaacaaccacctctacaagcaaatctccaacgggacctcgggaggcagcaccaacgacaacacctactttggctacagcaccccctgggggtattttgactttaacagattccactgccacttctcaccacgtgactggcagcgactcatcaacaacaactggggattccggcccaagagactcaacttcaagctcttcaacatccaggtcaaagaggtcacgacgaatgaaggcaccaagaccatcgccaataacctcaccagcaccgtccaggtgtttacggactcggaataccagctgccgtacgtcctcggctctgcccaccagggctgcctgcctccgttcccggcggacgtcttcatgattcctcagtacggctacctgactctcaacaacggtagtcaggccgtgggacgttcctccttctactgcctggagtacttcccctctcagatgctgagaacgggcaacaactttcaattcagctacactttcgaggacgtgcctttccacagcagctacgcgcacagccagagtttggacaggctgatgaatcctctcatcgaccagtacctgtactacctgtcaagaacccagactacgggaggcacagcgggaacccagacgttgcagttttctcaggccgggcctagcagcatggcgaatcaggccaaaaactggctgcctggaccctgctacagacagcagcgcgtctccacgacaacgaatcaaaacaacaacagcaactttgcctggactggtgccaccaagtatcatctgaacggcagagactctctggtgaatccgggcgtcgccatggcaacccacaaggacgacgaggaccgcttcttcccatccagcggcgtcctcatatttggcaagcagggagctggaaatgacaacgtggactatagcaacgtgatgataaccagcgaggaagaaatcaagaccaccaaccccgtggccacagaagagtatggcgtggtggctactaacctacagtcggcaaacaccgctcctcaaacggggaccgtcaacagccagggagccttacctggcatggtctggcagaaccgggacgtgtacctgcagggtcctatttgggccaagattcctcacacagatggcaactttcacccgtctcctttaatgggcggctttggacttaaacatccgcctcctcagatcctcatcaaaaacactcctgttcctgcggatcctccaacaacgttcaaccaggccaagctgaattctttcatcacgcagtacagcaccggacaagtcagcgtggagatcgagtgggagctgcagaaggagaacagcaagcgctggaacccagagattcagtatacttccaactactacaaatctacaaatgtggactttgctgttaatactgagggtgtttactctgagcctcgccccattggcactcgttacctcacccgtaatctg

SEQ ID NO: 918 - protein, 738 aa, synthetic construct
  VARIANT 158: note = /replace="Ser"
  VARIANT 169: note = /replace="Lys"
  VARIANT 315: note = /replace="Ser"
  VARIANT 413: note = /replace="Glu"
  VARIANT 472: note = /replace="Thr" or "Ser"
  VARIANT 534: note = /replace="Glu"
  VARIANT 542: note = /replace="Val"
  VARIANT 595: note = /replace="Val"
  SITE 1..738: note = /note="Variant residues given in the sequence have no preference with respect to those in the annotations for variant positions"
  REGION 1..738: note = source = /note="Description of Artificial Sequence: Synthetic polypeptide"
MAADGYLPDWLEDNLSEGIREWWDLKPGAPKPKANQQKQDDGRGLVLPGYKYLGPFNGLDKGEPVNAADAAALEHDKAYDQQLKAGDNPYLRYNHADAEFQERLQEDTSFGGNLGRAVFQAKKRVLEPLGLVEEGAKTAPGKKRPVEQSPQREPDSSTGIGKKGQQPARKRLNFGQTGDSESVPDPQPLGEPPAAPSGVGSNTMAAGGGAPMADNNEGADGVGSSSGNWHCDSTWLGDRVITTSTRTWALPTYNNHLYKQISNGTSGGSTNDNTYFGYSTPWGYFDFNRFHCHFSPRDWQRLINNNWGFRPKRLNFKLFNIQVKEVTQNEGTKTIANNLTSTIQVFTDSEYQLPYVLGSAHQGCLPPFPADVFMIPQYGYLTLNNGSQAVGRSSFYCLEYFPSQMLRTGNNFQFSYTFEDVPFHSSYAHSQSLDRLMNPLIDQYLYYLSRTQTTGGTAGTQTLQFSQAGPSNMANQAKNWLPGPCYRQQRVSTTTSQNNNSNFAWTGATKYHLNGRDSLVNPGVAMATHKDDEDRFFPSSGILIFGKQGAGKDNVDYSNVMLTSEEEIKTTNPVATEEYGVVADNLQQQNTAPQIGTVNSQGALPGMVWQNRDVYLQGPIWAKIPHTDGNFHPSPLMGGFGLKHPPPQILIKNTPVPADPPTTFNQAKLNSFITQYSTGQVSVEIEWELQKENSKRWNPEIQYTSNYYKSTNVDFAVNTEGVYSEPRPIGTRYLTRNL

SEQ ID NO: 919 - DNA, 2214 bp, synthetic construct
  variation 472..474: note = /replace="agc"
  variation 505..507: note = /replace="aag"
  variation 943..945: note = /replace="agc"
  variation 1237..1239: note = /replace="gaa"
  variation 1414..1416: note = /replace="aac" or "agc"
  variation 1600..1602: note = /replace="gag"
  variation 1624..1626: note = /replace="gtc"
  variation 1783..1785: note = /replace="gta"
  misc_feature 1..2214: note = /note="Variant nucleotides given in the sequence have no preference with respect to those in the annotations for variant positions"
  misc_feature 1..2214: note = source = /note="Description of Artificial Sequence: Synthetic polynucleotide"
  source 1..2214: mol_type = other DNA
atggctgccgatggttatcttccagattggctcgaggacaacctctctgagggcattcgcgagtggtgggacctgaaacctggagccccgaaacccaaagccaaccagcaaaagcaggacgacggccggggtctggtgcttcctggctacaagtacctcggacccttcaacggactcgacaagggggagcccgtcaacgcggcggacgcagcggccctcgagcacgacaaggcctacgaccagcagctcaaagcgggtgacaatccgtacctgcggtataatcacgccgacgccgagtttcaggagcgtctgcaagaagatacgtcttttgggggcaacctcgggcgagcagtcttccaggccaagaagcgggttctcgaacctctcggtctggttgaggaaggcgctaagacggctcctggaaagaagagaccggtagagcagtcaccacagcgtgagcccgactcctccacgggcatcggcaagaaaggccagcagcccgccagaaagagactcaatttcggtcagactggcgactcagagtcagtccccgaccctcaacctctcggagaacctccagcagcgccctctggtgtgggatctaatacaatggctgcaggcggtggcgcaccaatggcagacaataacgaaggtgccgacggagtgggtagttcctcgggaaattggcattgcgattccacatggctgggcgacagagtcatcaccaccagcacccgaacctgggccctgcccacctacaacaaccacctctacaagcaaatctccaacgggacctcgggaggcagcaccaacgacaacacctactttggctacagcaccccctgggggtattttgactttaacagattccactgccacttctcaccacgtgactggcagcgactcatcaacaacaactggggattccggcccaagagactcaacttcaagctcttcaacatccaggtcaaagaggtcacgcagaatgaaggcaccaagaccatcgccaataacctcaccagcaccatccaggtgtttacggactcggaataccagctgccgtacgtcctcggctctgcccaccagggctgcctgcctccgttcccggcggacgtcttcatgattcctcagtacggctacctgactctcaacaacggtagtcaggccgtgggacgttcctccttctactgcctggagtacttcccctctcagatgctgagaacgggcaacaactttcaattcagctacactttcgaggacgtgcctttccacagcagctacgcgcacagccagagtttggacaggctgatgaatcctctcatcgaccagtacctgtactacctgtcaagaacccagactacgggaggcacagcgggaacccagacgttgcagttttctcaggccgggcctagcaccatggcgaatcaggccaaaaactggctgcctggaccctgctacagacagcagcgcgtctccacgacaacgtcgcaaaacaacaacagcaactttgcctggactggtgccaccaagtatcatctgaacggcagagactctctggtgaatccgggcgtcgccatggcaacccacaaggacgacgaggaccgcttcttcccatccagcggcatcctcatatttggcaagcagggagctggaaaagacaacgtggactatagcaacgtgatgctaaccagcgaggaagaaatcaagaccaccaaccccgtggccacagaagagtatggcgtggtggctgataacctacagcagcaaaacaccgctcctcaaatagggaccgtcaacagccagggagccttacctggcatggtctggcagaaccgggacgtgtacctgcagggtcctatttgggccaagattcctcacacagatggcaactttcacccgtctcctttaatgggcggctttggacttaaacatccgcctcctcagatcctcatcaaaaacactcctgttcctgcggatcctccaacaacgttcaaccaggccaagctgaattctttcatcacgcagtacagcaccggacaagtcagcgtggagatcgagtgggagctgcagaaggagaacagcaagcgctggaacccagagattcagtatacttccaactactacaaatctacaaatgtggactttgctgttaatactgagggtgtttactctgagcctcgccccattggcactcgttacctcacccgtaatctg

SEQ ID NO: 920 - protein, 738 aa, synthetic construct
  VARIANT 169: note = /replace="Lys"
  VARIANT 315: note = /replace="Ser"
  VARIANT 534: note = /replace="Glu"
  VARIANT 542: note = /replace="Val"
  SITE 1..738: note = /note="Variant residues given in the sequence have no preference with respect to those in the annotations for variant positions"
  REGION 1..738: note = source = /note="Description of Artificial Sequence: Synthetic polypeptide"
MAADGYLPDWLEDNLSEGIREWWDLKPGAPKPKANQQKQDDGRGLVLPGYKYLGPFNGLDKGEPVNAADAAALEHDKAYDQQLKAGDNPYLRYNHADAEFQERLQEDTSFGGNLGRAVFQAKKRVLEPLGLVEEGAKTAPGKKRPVEPSPQRSPDSSTGIGKKGQQPARKRLNFGQTGDSESVPDPQPIGEPPAAPSGVGSGTMAAGGGAPMADNNEGADGVGSSSGNWHCDSTWLGDRVITTSTRTWALPTYNNHLYKQISNGTSGGSTNDNTYFGYSTPWGYFDFNRFHCHFSPRDWQRLINNNWGFRPKRLNFKLFNIQVKEVTQNEGTKTIANNLTSTIQVFTDSEYQLPYVLGSAHQGCLPPFPADVFMIPQYGYLTLNNGSQAVGRSSFYCLEYFPSQMLRTGNNFEFSYTFEDVPFHSSYAHSQSLDRLMNPLIDQYLYYLSRTQSTGGTAGTQQLLFSQAGPSNMSAQAKNWLPGPCYRQQRVSTTLSQNNNSNFAWTGATKYHLNGRDSLVNPGVAMATHKDDEDRFFPSSGILMFGKQGAGKDNVDYSNVMLTSEEEIKTTNPVATEQYGVVADNLQQQNTAPIVGAVNSQGALPGMVWQNRDVYLQGPIWAKIPHTDGNFHPSPLMGGFGLKHPPPQILIKNTPVPADPPTTFNQAKLNSFITQYSTGQVSVEIEWELQKENSKRWNPEIQYTSNYYKSTNVDFAVNTEGVYSEPRPIGTRYLTRNL

SEQ ID NO: 921 - DNA, 2214 bp, synthetic construct
  variation 505..507: note = /replace="aaa"
  variation 943..945: note = /replace="agc"
  variation 1600..1602: note = /replace="gag"
  variation 1624..1626: note = /replace="gtc"
  misc_feature 1..2214: note = /note="Variant nucleotides given in the sequence have no preference with respect to those in the annotations for variant positions"
  misc_feature 1..2214: note = source = /note="Description of Artificial Sequence: Synthetic polynucleotide"
  source 1..2214: mol_type = other DNA
atggctgccgatggttatcttccagattggctcgaggacaacctctctgagggcattcgcgagtggtgggacctgaaacctggagccccgaaacccaaagccaaccagcaaaagcaggacgacggccggggtctggtgcttcctggctacaagtacctcggacccttcaacggactcgacaagggggagcccgtcaacgcggcggacgcagcggccctcgagcacgacaaggcctacgaccagcagctcaaagcgggtgacaatccgtacctgcggtataatcacgccgacgccgagtttcaggagcgtctgcaagaagatacgtcttttgggggcaacctcgggcgagcagtcttccaggccaagaagcgggttctcgaacctctcggtctggttgaggaaggcgctaagacggctcctggaaagaagagaccggtagagccgtcaccacagcgttcccccgactcctccacgggcatcggcaagaaaggccagcagcccgccagaaagagactcaatttcggtcagactggcgactcagagtcagtccccgaccctcaacctatcggagaacctccagcagcgccctctggtgtgggatctggtacaatggctgcaggcggtggcgcaccaatggcagacaataacgaaggtgccgacggagtgggtagttcctcgggaaattggcattgcgattccacatggctgggcgacagagtcatcaccaccagcacccgaacctgggccctgcccacctacaacaaccacctctacaagcaaatctccaacgggacctcgggaggcagcaccaacgacaacacctactttggctacagcaccccctgggggtattttgactttaacagattccactgccacttctcaccacgtgactggcagcgactcatcaacaacaactggggattccggcccaagagactcaacttcaagctcttcaacatccaggtcaaagaggtcacgcagaatgaaggcaccaagaccatcgccaataacctcaccagcaccatccaggtgtttacggactcggaataccagctgccgtacgtcctcggctctgcccaccagggctgcctgcctccgttcccggcggacgtcttcatgattcctcagtacggctacctgactctcaacaacggtagtcaggccgtgggacgttcctccttctactgcctggagtacttcccctctcagatgctgagaacgggcaacaactttgagttcagctacactttcgaggacgtgcctttccacagcagctacgcgcacagccagagtttggacaggctgatgaatcctctcatcgaccagtacctgtactacctgtcaagaacccagtctacgggaggcacagcgggaacccagcagttgctgttttctcaggccgggcctagcaacatgtcggctcaggccaaaaactggctgcctggaccctgctacagacagcagcgcgtctccacgacactgtcgcaaaacaacaacagcaactttgcctggactggtgccaccaagtatcatctgaacggcagagactctctggtgaatccgggcgtcgccatggcaacccacaaggacgacgaggaccgcttcttcccatccagcggcatcctcatgtttggcaagcagggagctggaaaagacaacgtggactatagcaacgtgatgctaaccagcgaggaagaaatcaagaccaccaaccccgtggccacagaacagtatggcgtggtggctgataacctacagcagcaaaacaccgctcctattgtgggggccgtcaacagccagggagccttacctggcatggtctggcagaaccgggacgtgtacctgcagggtcctatttgggccaagattcctcacacagatggcaactttcacccgtctcctttaatgggcggctttggacttaaacatccgcctcctcagatcctcatcaaaaacactcctgttcctgcggatcctccaacaacgttcaaccaggccaagctgaattctttcatcacgcagtacagcaccggacaagtcagcgtggagatcgagtgggagctgcagaaggagaacagcaagcgctggaacccagagattcagtatacttccaactactacaaatctacaaatgtggactttgctgttaatactgagggtgtttactctgagcctcgccccattggcactcgttacctcacccgtaatctg

SEQ ID NO: 922 - protein, 738 aa, synthetic construct
  VARIANT 471: note = /replace="Asn"
  SITE 1..738: note = /note="Variant residues given in the sequence have no preference with respect to those in the annotations for variant positions"
  REGION 1..738: note = source = /note="Description of Artificial Sequence: Synthetic polypeptide"
MAADGYLPDWLEDNLSEGIREWWDLKPGAPKPKANQQKQDDGRGLVLPGYKYLGPFNGLDKGEPVNAADAAALEHDKAYDQQLKAGDNPYLRYNHADAEFQERLQEDTSFGGNLGRAVFQAKKRVLEPLGLVEEGAKTAPGKKRPVEPSPQRSPDSSTGIGKKGQQPAKKRLNFGQTGDSESVPDPQPIGEPPAGPSGLGSGTMAAGGGAPMADNNEGADGVGSSSGNWHCDSTWLGDRVITTSTRTWALPTYNNHLYKQISNGTSGGSTNDNTYFGYSTPWGYFDFNRFHCHFSPRDWQRLINNNWGFRPKRLNFKLFNIQVKEVTQNEGTKTIANNLTSTIQVFTDSEYQLPYVLGSAHQGCLPPFPADVFMIPQYGYLTLNNGSQAVGRSSFYCLEYFPSQMLRTGNNFEFSYTFEDVPFHSSYAHSQSLDRLMNPLIDQYLYYLSRTQSTGGTAGTQQLLFSQAGPSNMSAQAKNWLPGPCYRQQRVSTTLSQNNNSNFAWTGATKYHLNGRDSLVNPGVAMATHKDDEERFFPSSGVLMFGKQGAGKDNVDYSSVMLTSEEEIKTTNPVATEQYGVVADNLQQQNTAPIVGAVNSQGALPGMVWQNRDVYLQGPIWAKIPHTDGNFHPSPLMGGFGLKHPPPQILIKNTPVPADPPTTFSQAKLASFITQYSTGQVSVEIEWELQKENSKRWNPEIQYTSNYYKSTNVDFAVNTEGTYSEPRPIGTRYLTRNL

SEQ ID NO: 923 - DNA, 2214 bp, synthetic construct
  variation 1411..1413: note = /replace="aat"
  misc_feature 1..2214: note = /note="Variant nucleotides given in the sequence have no preference with respect to those in the annotations for variant positions"
  misc_feature 1..2214: note = source = /note="Description of Artificial Sequence: Synthetic polynucleotide"
  source 1..2214: mol_type = other DNA
atggctgccgatggttatcttccagattggctcgaggacaacctctctgagggcattcgcgagtggtgggacttgaaacctggagccccgaaacccaaagccaaccagcaaaagcaggacgacggccggggtctggtgcttcctggctacaagtacctcggacccttcaacggactcgacaagggggagcccgtcaacgcggcggacgcagcggccctcgagcacgacaaggcctacgaccagcagctcaaagcgggtgacaatccgtacctgcggtataaccacgccgacgccgagtttcaggagcgtctgcaagaagatacgtcttttgggggcaacctcgggcgagcagtcttccaggccaagaagcgggttctcgaacctctcggtctggttgaggaaggcgctaagacggctcctggaaagaagagaccggtagagccatcaccccagcgttctccagactcctctacgggcatcggcaagaaaggccagcagcccgcgaaaaagagactcaactttgggcagactggcgactcagagtcagtgcccgaccctcaaccaatcggagaaccccccgcaggcccctctggtctgggatctggtacaatggctgcaggcggtggcgctccaatggcagacaataacgaaggcgccgacggagtgggtagttcctcaggaaattggcattgcgattccacatggctgggcgacagagtcatcaccaccagcacccgaacctgggccctccccacctacaacaaccacctctacaagcaaatctccaacgggacttcgggaggaagcaccaacgacaacacctacttcggctacagcaccccctgggggtattttgactttaacagattccactgccacttctcaccacgtgactggcagcgactcatcaacaacaactggggattccggcccaagagactcaacttcaagctcttcaacatccaggtcaaggaggtcacgcagaatgaaggcaccaagaccatcgccaataaccttaccagcacgattcaggtctttacggactcggaataccagctcccgtacgtcctcggctctgcgcaccagggctgcctgcctccgttcccggcggacgtcttcatgattcctcagtacgggtacctgactctgaacaatggcagtcaggccgtgggccgttcctccttctactgcctggagtactttccttctcaaatgctgagaacgggcaacaactttgagttcagctacacgtttgaggacgtgccttttcacagcagctacgcgcacagccaaagcctggaccggctgatgaaccccctcatcgaccagtacctgtactacctgtctcggactcagtccacgggaggtaccgcaggaactcagcagttgctattttctcaggccgggcctagtaacatgtcggctcaggccaaaaactggctacccgggccctgctaccggcagcaacgcgtctccacgacactgtcgcaaaataacaacagcaactttgcctggaccggtgccaccaagtatcatctgaatggcagagactctctggtaaatcccggtgtcgctatggcaacccacaaggacgacgaagagcgattttttccgtccagcggagtcttaatgtttgggaaacagggagctggaaaagacaacgtggactatagcagcgttatgctaaccagtgaggaagaaattaaaaccaccaacccagtggccacagaacagtacggcgtggtggccgataacctgcaacagcaaaacaccgctcctattgtaggggccgtcaacagtcaaggagccttacctggcatggtctggcagaaccgggacgtgtacctgcagggtcctatctgggccaagattcctcacacggacggaaactttcatccctcgccgctgatgggaggctttggactgaaacacccgcctcctcagatcctgattaagaatacacctgttcccgcggatcctccaactaccttcagtcaagctaagctggcgtcgttcatcacgcagtacagcaccggacaggtcagcgtggaaattgaatgggagctgcagaaagaaaacagcaaacgctggaacccagagattcaatacacttccaactactacaaatctacaaatgtggactttgctgttaacacagaaggcacttattctgagcctcgccccatcggcacccgttacctcacccgtaatctg

SEQ ID NO: 924 - protein, 737 aa, synthetic construct
  VARIANT 148: note = /replace="Gln"
  VARIANT 169: note = /replace="Arg"
  VARIANT 314: note = /replace="Asn"
  VARIANT 466: note = /replace="His"
  VARIANT 563: note = /replace="Ser"
  VARIANT 580: note = /replace="Ile"
  VARIANT 588: note = /replace="Ser"
  SITE 1..737: note = /note="Variant residues given in the sequence have no preference with respect to those in the annotations for variant positions"
  REGION 1..737: note = source = /note="Description of Artificial Sequence: Synthetic polypeptide"
MAADGYLPDWLEDNLSEGIREWWDLKPGAPKPKANQQKQDDGRGLVLPGYKYLGPFNGLDKGEPVNAADAAALEHDKAYDQQLKAGDNPYLRYNHADAEFQERLQEDTSFGGNLGRAVFQAKKRVLEPLGLVEEGAKTAPGKKRPVEPSPQRSPDSSTGIGKKGQQPAKKRLNFGQTGDSESVPDPQPLGEPPAAPSGVGSGTMAAGGGAPMADNNEGADGVGNASGNWHCDSTWLGDRVITTSTRTWALPTYNNHLYKQISSQSAGSTNDNTYFGYSTPWGYFDFNRFHCHFSPRDWQRLINNNWGFRPKKLRFKLFNIQVKEVTTNDGVTTIANNLTSTVQVFSDSEYQLPYVLGSAHQGCLPPFPADVFMIPQYGYLTLNNGSQSVGRSSFYCLEYFPSQMLRTGNNFEFSYTFEDVPFHSSYAHSQSLDRLMNPLIDQYLYYLARTQSTTGGTAGNRELQFYQAGPSTMAEQAKNWLPGPCYRQQRVSKTLDQNNNSNFAWTGATKYHLNGRNSLVNPGVAMATHKDDEDRFFPSSGVLIFGKTGAANKTTLENVLMTNEEEIKTTNPVATEEYGVVSSNLQSANTAPQTQTVNSQGALPGMVWQNRDVYLQGPIWAKIPHTDGNFHPSPLMGGFGLKHPPPQILIKNTPVPANPPEVFTPAKFASFITQYSTGQVSVEIEWELQKENSKRWNPEIQYTSNYDKSTNVDFAVDSEGVYSEPRPIGTRYLTRNL

SEQ ID NO: 925 - DNA, 2211 bp, synthetic construct
  variation 442..444: note = /replace="cag"
  variation 505..507: note = /replace="aga"
  variation 940..942: note = /replace="aac"
  variation 1396..1398: note = /replace="cac"
  variation 1687..1689: note = /replace="agt"
  variation 1738..1740: note = /replace="ata"
  variation 1762..1764: note = /replace="tct"
  misc_feature 1..2211: note = /note="Variant nucleotides given in the sequence have no preference with respect to those in the annotations for variant positions"
  misc_feature 1..2211: note = source = /note="Description of Artificial Sequence: Synthetic polynucleotide"
  source 1..2211: mol_type = other DNA
atggctgccgatggttatcttccagattggctcgaggacaacctctctgagggcattcgcgagtggtgggacctgaaacctggagccccgaaacccaaagccaaccagcaaaagcaggacgacggccggggtctggtgcttcctggctacaagtacctcggacccttcaacggactcgacaagggggagcccgtcaacgcggcggacgcagcggccctcgagcacgacaaggcctacgaccagcagctcaaagcgggtgacaatccgtacctgcggtataaccacgccgacgccgagtttcaggagcgtctgcaagaagatacgtcatttgggggcaacctcgggcgagcagtcttccaggccaagaagcgggttctcgaacctctcggtctggttgaggaaggcgctaagacggctcctggaaagaagagaccggtagagccgtcacctcagcgttcccccgactcctccacgggcatcggcaagaaaggccagcagcccgccaaaaagagactcaatttcggtcagactggcgactcagagtcagtccccgaccctcaacctctcggagaacctccagcagcgccctctggtgtgggatctggtacaatggctgcaggcggtggcgcaccaatggcagacaataacgaaggtgccgacggagtgggtaatgcctcaggaaattggcattgcgattccacatggctgggcgacagagtcattaccaccagcacccgaacctgggccctgcccacctacaacaaccacctctacaagcaaatctccagtcaaagtgcaggtagtaccaacgacaacacctacttcggctacagcaccccctgggggtattttgactttaacagattccactgccacttctcaccacgtgactggcagcgactcatcaacaacaactggggattccggcccaagaagctgcggttcaagctcttcaacatccaggtcaaggaggtcacgacgaatgacggcgttacgaccatcgctaataaccttaccagcacggttcaggtattctcggactcggaataccagctgccgtacgtcctcggctctgcgcaccagggctgcctgcctccgttcccggcggacgtcttcatgattcctcagtacggctacctgactctcaacaatggcagtcagtctgtgggacgttcctccttctactgcctggagtacttcccctctcagatgctgagaacgggcaacaactttgagttcagctacaccttcgaggacgtgcctttccacagcagctacgcacacagccagagcctggaccggctgatgaatcccctcatcgaccagtacttgtactacctggccagaacacagagtaccacaggaggcacagctggcaatcgggaactgcagttttaccaggccgggccttcaactatggccgaacaagccaagaattggttacctggaccttgctaccggcaacaaagagtctccaaaacgctggatcaaaacaacaacagcaactttgcttggactggtgccaccaaatatcacctgaacggcagaaactcgttggttaatcccggcgtcgccatggcaactcacaaggacgacgaggaccgctttttcccatccagcggagtcctgatttttggaaaaactggagcagctaacaaaactacattggaaaatgtgttaatgacaaatgaagaagaaattaaaactactaatcctgtagccacggaagaatacggggtagtcagcagcaacttacaatcggctaatactgcaccccagacacaaactgtcaacagccagggagccttacctggcatggtctggcagaaccgggacgtgtacctgcagggtcccatctgggccaagattcctcacacggatggcaactttcacccgtctcctttgatgggcggctttggacttaaacatccgcctcctcagatcctgatcaagaacactcccgttcccgctaatcctccggaggtgtttactcctgccaagtttgcttcgttcatcacacagtacagcaccggacaagtcagcgtggaaatcgagtgggagctgcagaaggaaaacagcaagcgctggaacccggagattcagtacacctccaactatgataagtcgactaatgtggactttgccgttgacagcgagggtgtttactctgagcctcgccctattggcactcgttacctcacccgtaatctg

SEQ ID NO: 926 - protein, 735 aa, synthetic construct
  VARIANT 162: note = /replace="Thr"
  VARIANT 168: note = /replace="Arg"
  VARIANT 224: note = /replace="Ser"
  VARIANT 310: note = /replace="Lys"
  VARIANT 410: note = /replace="Gln"
  VARIANT 446: note = /replace="Asn"
  VARIANT 461: note = /replace="Leu"
  VARIANT 471: note = /replace="Ser"
  VARIANT 708: note = /replace="Thr"
  SITE 1..735: note = /note="Variant residues given in the sequence have no preference with respect to those in the annotations for variant positions"
  REGION 1..735: note = source = /note="Description of Artificial Sequence: Synthetic polypeptide"
MAADGYLPDWLEDNLSEGIREWWDLKPGAPKPKANQQKQDDGRGLVLPGYKYLGPFNGLDKGEPVNAADAAALEHDKAYDQQLKAGDNPYLRYNHADAEFQERLQEDTSFGGNLGRAVFQAKKRVLEPLGLVEEGAKTAPGKKRPVEQSPQEPDSSSGIGKSGQQPAKKRLNFGQTGDSESVPDPQPLGEPPAAPSGVGSNTMASGGGAPMADNNEGADGVGNASGNWHCDSTWLGDRVITTSTRTWALPTYNNHLYKQISSQSGASNDNHYFGYSTPWGYFDFNRFHCHFSPRDWQRLINNNWGFRPKRLNFKLFNIQVKEVTTNDGTTTIANNLTSTVQVFTDSEYQLPYVLGSAHQGCLPPFPADVFMIPQYGYLTLNNGSQAVGRSSFYCLEYFPSQMLRTGNNFTFSYTFEDVPFHSSYAHSQSLDRLMNPLIDQYLYYLSRTQTTSGTAQNRELQFSQAGPSSMANQAKNWLPGPCYRQQRVSKTANDNNNSNFAWTGATKYHLNGRDSLVNPGPAMASHKDDEDKFFPMSGVLIFGKQGAGASNVDLDNVMITDEEEIKTTNPVATEQYGTVATNLQSSNTAPATGTVNSQGALPGMVWQDRDVYLQGPIWAKIPHTDGHFHPSPLMGGFGLKHPPPQILIKNTPVPANPPTTFSPAKFASFITQYSTGQVSVEIEWELQKENSKRWNPEIQYTSNYNKSANVDFTVDTNGVYSEPRPIGTRYLTRNL

SEQ ID NO: 927 - DNA, 2205 bp, synthetic construct
  variation 484..486: note = /replace="aca"
  variation 502..504: note = /replace="aga"
  variation 670..672: note = /replace="tcc"
  variation 928..930: note = /replace="aaa"
  variation 1228..1230: note = /replace="cag"
  variation 1336..1338: note = /replace="aac"
  variation 1381..1383: note = /replace="ctg"
  variation 1411..1413: note = /replace="tct"
  variation 2122..2124: note = /replace="acc"
  misc_feature 1..2205: note = /note="Variant nucleotides given in the sequence have no preference with respect to those in the annotations for variant positions"
  misc_feature 1..2205: note = source = /note="Description of Artificial Sequence: Synthetic polynucleotide"
  source 1..2205: mol_type = other DNA
atggctgccgatggttatcttccagattggctcgaggacaacctctctgagggcattcgcgagtggtgggacttgaaacctggagccccgaaacccaaagccaaccagcaaaagcaggacgacggccggggtctggtgcttcctggctacaagtacctcggacccttcaacggactcgacaagggggagcccgtcaacgcggcggatgcagcggccctcgagcacgacaaggcctacgaccagcagctcaaagcgggtgacaatccgtacctgcggtataaccacgccgacgccgagtttcaggagcgtctgcaagaagatacgtcttttgggggcaacctcgggcgagcagtcttccaggccaagaagagggttctcgaacctcttggtctggttgaggaaggtgctaagacggctcctggaaagaaacgtccggtagagcagtcgccacaagagccagactcctcctcgggcattggcaagtcaggccagcagcccgctaaaaagagactcaattttggtcagactggcgactcagagtcagtccccgacccacaacctctcggagaacctccagcagccccctctggtgtgggatctaatacaatggcttcaggcggtggcgcaccaatggcagacaataacgaaggcgccgacggagtgggtaatgcctcaggaaattggcattgcgattccacatggctgggcgacagagtcatcaccaccagcacccgaacatgggccttgcccacctataacaaccacctctacaagcaaatctccagtcaatcaggggccagcaacgacaaccactacttcggctacagcaccccctgggggtattttgatttcaacagattccactgccatttctcaccacgtgactggcagcgactcatcaacaacaattggggattccggcccaagagactcaacttcaagctcttcaacatccaagtcaaggaggtcacgacgaatgatggcaccacgaccatcgctaataaccttaccagcacggttcaagtcttcacggactcggagtaccagttgccgtacgtcctcggctctgcgcaccagggctgcctccctccgttcccggcggacgtgttcatgattccgcagtacggctacctaacgctcaacaatggcagccaggcagtgggacggtcatccttttactgcctggaatatttcccatcgcagatgctgagaacgggcaataactttaccttcagctacaccttcgaggacgtgcctttccacagcagctacgcgcacagccagagcctggaccggctgatgaatcctctcatcgaccagtacctgtattacctgagcagaactcagactacgtccggaactgcccaaaacagggagttgcagtttagccaggcgggtccatctagcatggctaatcaggccaaaaactggctacctggaccctgttaccggcagcagcgcgtttctaaaacagcaaatgacaacaacaacagcaactttgcctggactggtgctacaaaatatcaccttaatgggcgtgattctttagtcaaccctggccctgctatggcctcacacaaagacgacgaagacaagttctttcccatgagcggtgtcttgatttttggaaagcagggcgccggagcttcaaacgttgatttggacaatgtcatgatcacagacgaagaggaaatcaaaaccactaaccccgtggccaccgaacaatatgggactgtggcaaccaatctccagagcagcaacacagcccctgcgaccggaactgtgaattctcagggagccttacctggaatggtgtggcaagacagagacgtatacctgcagggtcctatttgggccaaaattcctcacacggatggacactttcacccgtctcctctcatgggcggctttggacttaagcacccgcctcctcagatcctcatcaaaaacacgcctgttcctgcgaatcctccgacaacgttttcgcctgcaaagtttgcttcattcatcacccagtattccacaggacaagtgagcgtggagattgaatgggagctgcagaaagaaaacagcaaacgctggaatcccgaaatacagtatacatctaactataataaatctgccaacgttgatttcactgtggacaccaatggagtttatagtgagcctcgccccattggcacccgttacctcacccgtaacctg

SEQ ID NO: 928 - protein, 735 aa, synthetic construct
  VARIANT 42: note = /replace="Ser"
  VARIANT 168: note = /replace="Lys"
  VARIANT 310: note = /replace="Arg"
  VARIANT 410: note = /replace="Gln"
  VARIANT 446: note = /replace="Arg"
  VARIANT 461: note = /replace="Leu"
  VARIANT 471: note = /replace="Ser"
  VARIANT 475: note = /replace="Arg"
  VARIANT 504: note = /replace="Ala"
  VARIANT 539: note = /replace="Asn"
  SITE 1..735: note = /note="Variant residues given in the sequence have no preference with respect to those in the annotations for variant positions"
  REGION 1..735: note = source = /note="Description of Artificial Sequence: Synthetic polypeptide"
MAADGYLPDWLEDNLSEGIREWWDLKPGAPQPKANQQHQDDGRGLVLPGYKYLGPFNGLDKGEPVNEADAAALEHDKAYDQQLKAGDNPYLKYNHADAEFQERLQEDTSFGGNLGRAVFQAKKRVLEPLGLVEEAAKTAPGKKRPVEQSPQEPDSSSGIGKSGQQPARKRLNFGQTGDSESVPDPQPLGEPPAAPSGVGSNTMASGGGAPMADNNEGADGVGNSSGNWHCDSTWLGDRVITTSTRTWALPTYNNHLYKQISSQSGASNDNHYFGYSTPWGYFDFNRFHCHFSPRDWQRLINNNWGFRPKKLNFKLFNIQVKEVTQNDGTTTIANNLTSTVQVFTDSEYQLPYVLGSAHQGCLPPFPADVFMIPQYGYLTLNNGSQAVGRSSFYCLEYFPSQMLRTGNNFTFSYTFEDVPFHSSYAHSQSLDRLMNPLIDQYLYYLSRTQTTSGTTQQSRLQFSQAGPSSMAQQAKNWLPGPCYRQQRVSKTANDNNNSNFAWTGATKYHLNGRDSLVNPGPAMASHKDDEEKFFPMHGVLIFGKQGTGASNVDLDNVMITDEEEIRTTNPVATEQYGTVATNLQSSNTAPATGTVNSQGALPGMVWQDRDVYLQGPIWAKIPHTDGHFHPSPLMGGFGLKHPPPQILIKNTPVPANPPTTFSPAKFASFITQYSTGQVSVEIEWELQKENSKRWNPEIQYTSNYNKSVNVDFTVDTNGVYSEPRPIGTRYLTRNL

SEQ ID NO: 929 - DNA, 2205 bp, synthetic construct
  variation 124..126: note = /replace="agt"
  variation 502..504: note = /replace="aaa"
  variation 928..930: note = /replace="aga"
  variation 1228..1230: note = /replace="cag"
  variation 1336..1338: note = /replace="aga"
  variation 1381..1383: note = /replace="ctc"
  variation 1411..1413: note = /replace="tct"
  variation 1423..1425: note = /replace="aga"
  variation 1510..1512: note = /replace="gcg"
  variation 1615..1617: note = /replace="aac"
  misc_feature 1..2205: note = /note="Variant nucleotides given in the sequence have no preference with respect to those in the annotations for variant positions"
  misc_feature 1..2205: note = source = /note="Description of Artificial Sequence: Synthetic polynucleotide"
  source 1..2205: mol_type = other DNA
atggctgctgacggttatcttccagattggctcgaggacaacctttctgaaggcattcgtgagtggtgggatctgaaacctggagcccctcaacccaaagcgaaccaacaacaccaggacgacggtcggggtcttgtgcttccgggttacaaatacctcggaccctttaacggactcgacaaaggagagccggtcaacgaggcggacgcggcagccctcgaacacgacaaagcttacgaccagcagctcaaggccggtgacaacccgtacctcaagtacaaccacgccgacgccgagtttcaggagcgtcttcaagaagatacgtcttttgggggcaaccttggcagagcagtcttccaggccaaaaagagggtccttgagcctcttggtctggttgaggaagcagctaaaacggctcctggaaagaagaggcctgtagaacagtctcctcaggaaccggactcatcatctggtattggcaaatcgggccaacagcctgccagaaaaagactaaatttcggtcagactggagactcagagtcagtcccagaccctcaacctctcggagaaccaccagcagccccctcaggtgtgggatctaatacaatggcttcaggcggtggcgcaccaatggcagacaataacgagggtgccgatggagtgggtaattcctcaggaaattggcattgcgattccacatggctgggcgacagagtcatcaccaccagcaccagaacctgggccctgcccacttacaacaaccatctctacaagcaaatctccagccaatcaggagcttcaaacgacaaccactactttggctacagcaccccttgggggtattttgactttaacagattccactgccacttctcaccacgtgactggcagcgactcattaacaacaactggggattccggcccaagaaactcaacttcaagctcttcaacatccaagttaaagaggtcacgcagaacgatggcacgacgactattgccaataaccttaccagcacggttcaagtgtttacggactcggagtatcagctcccgtacgtgctcgggtcggcgcaccaaggctgtctcccgccgtttccagcggacgtcttcatgatccctcagtatggatacctcaccctgaacaacggaagtcaagcggtgggacgctcatccttttactgcctggagtacttcccttcgcagatgctaaggactggaaataacttcacattcagctataccttcgaggatgtaccttttcacagcagctacgctcacagccagagtttggatcgcttgatgaatcctcttattgatcagtatctgtactacctgagcagaacgcaaacaacctctggaacaacccaacaatcacggctgcaatttagccaggctgggccttcgtctatggctcagcaggccaaaaattggctacctgggccctgctaccggcaacagagagtttcaaagactgctaacgacaacaacaacagtaactttgcttggacaggggccaccaaatatcatctcaatggccgcgactcgctggtgaatccaggaccagctatggccagtcacaaggacgatgaagaaaaatttttccctatgcacggcgttctaatatttggcaaacaagggacaggggcaagtaacgtagatttagataatgtaatgattacggatgaagaagagattcgtaccaccaatcctgtggcaacagagcagtatggaactgtggcaactaacttgcagagctcaaatacagctcccgcgactggaactgtcaatagtcagggggccttacctggcatggtgtggcaagatcgtgacgtgtaccttcaaggacctatctgggcaaagattcctcacacggatggacactttcatccttctcctctgatgggaggctttggactgaaacatccgcctcctcaaatcttgatcaaaaatactccggtaccggcaaatcctccgacgactttcagcccggccaagtttgcttcatttatcactcagtactccactggacaggtcagcgtggaaattgagtgggagctacagaaagaaaacagcaaacgttggaatccagagattcagtacacttccaactacaacaagtctgttaatgtggactttactgtagacactaatggtgtttatagtgaacctcgccctattggaacccggtatctcacacgaaacttg

SEQ ID NO: 930 - protein, 736 aa, synthetic construct
  REGION 1..736: note = source = /note="Description of Artificial Sequence: Synthetic polypeptide"
MAADGYLPDWLEDNLSEGIREWWDLKPGAPKPKANQQKQDDGRGLVLPGYKYLGPFNGLDKGEPVNAADAAALEHDKAYDQQLKAGDNPYLRYNHADAEFQERLQEDTSFGGNLGRAVFQAKKRVLEPLGLVEEGAKTAPGKKRPVEQSPQEPDSSSGIGKKGQQPARKRLNFGQTGDSESVPDPQPLGEPPAAPSGVGSNTMAAGGGAPMADNNEGADGVGNASGNWHCDSTWLGDRVITTSTRTWALPTYNNHLYKQISSQSGGSTNDNTYFGYSTPWGYFDFNRFHCHFSPRDWQRLINNNWGFRPKRLNFKLFNIQVKEVTTNDGTTTIANNLTSTVQVFTDSEYQLPYVLGSAHQGCLPPFPADVFMIPQYGYLTLNNGSQAVGRSSFYCLEYFPSQMLRTGNNFEFSYTFEDVPFHSSYAHSQSLDRLMNPLIDQYLYYLSRTQTTSGTAGNRTLQFSQAGPSSMANQAKNWLPGPCYRQQRVSKTANQNNNSNFAWTGATKYHLNGRDSLVNPGPAMATHKDDEDKFFPMSGVLIFGKQGAGNSNVDLDNVMITNEEEIKTTNPVATEQYGTVATNLQSANTAPATGTVNSQGALPGMVWQDRDVYLQGPIWAKIPHTDGHFHPSPLMGGFGLKHPPPQILIKNTPVPANPPTTFSPAKFASFITQYSTGQVSVEIEWELQKENSKRWNPEIQYTSNYNKSTNVDFAVDTNGVYSEPRPIGTRYLTRNL

SEQ ID NO: 931 - protein, 736 aa, synthetic construct
  REGION 1..736: note = source = /note="Description of Artificial Sequence: Synthetic polypeptide"
MAADGYLPDWLEDNLSEGIREWWDLKPGAPKPKANQQKQDDGRGLVLPGYKYLGPFNGLDKGEPVNAADAAALEHDKAYDQQLKAGDNPYLRYNHADAEFQERLQEDTSFGGNLGRAVFQAKKRVLEPLGLVEEGAKTAPGKKRPVEQSPQEPDSSSGIGKKGQQPAKKRLNFGQTGDSESVPDPQPLGEPPAAPSGVGSNTMASGGGAPMADNNEGADGVGNASGNWHCDSTWLGDRVITTSTRTWALPTYNNHLYKQISSQSGASTNDNTYFGYSTPWGYFDFNRFHCHFSPRDWQRLINNNWGFRPKRLNFKLFNIQVKEVTTNDGTTTIANNLTSTVQVFTDSEYQLPYVLGSAHQGCLPPFPADVFMIPQYGYLTLNNGSQAVGRSSFYCLEYFPSQMLRTGNNFQFSYTFEDVPFHSSYAHSQSLDRLMNPLIDQYLYYLSRTQTTSGTAGNRELQFSQAGPSSMANQAKNWLPGPCYRQQRVSKTTNQNNNSNFAWTGATKYHLNGRDSLVNPGPAMATHKDDEDKFFPMSGVLIFGKQGAGNSNVDLDNVMITNEEEIKTTNPVATEEYGTVATNLQSANTAPATGTVNSQGALPGMVWQNRDVYLQGPIWAKIPHTDGHFHPSPLMGGFGLKHPPPQILIKNTPVPANPPTTFSPAKFASFITQYSTGQVSVEIEWELQKENSKRWNPEIQYTSNYNKSTNVDFAVDTNGVYSEPRPIGTRYLTRNL

SEQ ID NO: 932 - protein, 736 aa, synthetic construct
  REGION 1..736: note = source = /note="Description of Artificial Sequence: Synthetic polypeptide"
MAADGYLPDWLEDNLSEGIREWWDLKPGAPKPKANQQKQDDGRGLVLPGYKYLGPFNGLDKGEPVNAADAAALEHDKAYDQQLKAGDNPYLRYNHADAEFQERLQEDTSFGGNLGRAVFQAKKRVLEPLGLVEEGAKTAPGKKRPVEQSPQEPDSSSGIGKKGQQPARKRLNFGQTGDSESVPDPQPLGEPPAAPSGVGSNTMAAGGGAPMADNNEGADGVGNASGNWHCDSTWLGDRVITTSTRTWALPTYNNHLYKQISSQSGGSTNDNTYFGYSTPWGYFDFNRFHCHFSPRDWQRLINNNWGFRPKRLNFKLFNIQVKEVTTNDGTTTIANNLTSTVQVFTDSEYQLPYVLGSAHQGCLPPFPADVFMIPQYGYLTLNNGSQAVGRSSFYCLEYFPSQMLRTGNNFEFSYTFEDVPFHSSYAHSQSLDRLMNPLIDQYLYYLSRTQTTSGTAGNRELQFSQAGPSSMANQAKNWLPGPCYRQQRVSKTTNQNNNSNFAWTGATKYHLNGRDSLVNPGPAMATHKDDEDKFFPMSGVLIFGKQGAGNSNVDLDNVMITSEEEIKTTNPVATEEYGTVATNLQSSNTAPATGTVNSQGALPGMVWQERDVYLQGPIWAKIPHTDGHFHPSPLMGGFGLKHPPPQILIKNTPVPANPPTTFSPAKFASFITQYSTGQVSVEIEWELQKENSKRWNPEIQYTSNYNKSTNVDFAVDTNGVYSEPRPIGTRYLTRNL

SEQ ID NO: 933 - protein, 736 aa, synthetic construct
  REGION 1..736: note = source = /note="Description of Artificial Sequence: Synthetic polypeptide"
MAADGYLPDWLEDNLSEGIREWWDLKPGAPKPKANQQKQDDGRGLVLPGYKYLGPFNGLDKGEPVNAADAAALEHDKAYDQQLKAGDNPYLRYNHADAEFQERLQEDTSFGGNLGRAVFQAKKRVLEPLGLVEEGAKTAPGKKRPVEQSPQEPDSSSGIGKKGQQPARKRLNFGQTGDSESVPDPQPLGEPPAAPSGVGSNTMASGGGAPMADNNEGADGVGNASGNWHCDSTWLGDRVITTSTRTWALPTYNNHLYKQISSQSGGSTNDNTYFGYSTPWGYFDFNRFHCHFSPRDWQRLINNNWGFRPKKLNFKLFNIQVKEVTTNDGTTTIANNLTSTVQVFTDSEYQLPYVLGSAHQGCLPPFPADVFMIPQYGYLTLNNGSQAVGRSSFYCLEYFPSQMLRTGNNFEFSYTFEDVPFHSSYAHSQSLDRLMNPLIDQYLYYLSRTQTTSGTAGNRELQFSQAGPSSMANQAKNWLPGPCYRQQRVSKTTNQNNNSNFAWTGATKYHLNGRDSLVNPGPAMATHKDDEDKFFPMSGVLIFGKQGAGNSNVDLDNVMITSEEEIKTTNPVATEEYGTVATNLQSANTAPATGTVNSQGALPGMVWQDRDVYLQGPIWAKIPHTDGHFHPSPLMGGFGLKHPPPQILIKNTPVPANPPTTFSPAKFASFITQYSTGQVSVEIEWELQKENSKRWNPEIQYTSNYNKSTNVDFAVDTNGVYSEPRPIGTRYLTRNL

SEQ ID NO: 934 - protein, 736 aa, synthetic construct
  REGION 1..736: note = source = /note="Description of Artificial Sequence: Synthetic polypeptide"
MAADGYLPDWLEDNLSEGIREWWDLKPGAPKPKANQQKQDDGRGLVLPGYKYLGPFNGLDKGEPVNAADAAALEHDKAYDQQLKAGDNPYLRYNHADAEFQERLQEDTSFGGNLGRAVFQAKKRVLEPLGLVEEGAKTAPGKKRPVEQSPQEPDSSSGIGKKGQQPARKRLNFGQTGDSESVPDPQPLGEPPAAPSGVGSNTMAAGGGAPMADNNEGADGVGNASGNWHCDSTWLGDRVITTSTRTWALPTYNNHLYKQISSQSGGSTNDNTYFGYSTPWGYFDFNRFHCHFSPRDWQRLINNNWGFRPKKLNFKLFNIQVKEVTTNDGTTTIANNLTSTVQVFTDSEYQLPYVLGSAHQGCLPPFPADVFMIPQYGYLTLNNGSQAVGRSSFYCLEYFPSQMLRTGNNFQFSYTFEDVPFHSSYAHSQSLDRLMNPLIDQYLYYLSRTQTTSGTAGNRTLQFSQAGPSSMANQAKNWLPGPCYRQQRVSKTTNQNNNSNFAWTGATKYHLNGRDSLVNPGPAMATHKDDEDKFFPMSGVLIFGKQGAGNSNVDLDNVMITNEEEIKTTNPVATEEYGTVATNLQSANTAPATGTVNSQGALPGMVWQDRDVYLQGPIWAKIPHTDGHFHPSPLMGGFGLKHPPPQILIKNTPVPANPPTTFSPAKFASFITQYSTGQVSVEIEWELQKENSKRWNPEIQYTSNYNKSTNVDFAVDTNGVYSEPRPIGTRYLTRNL

SEQ ID NO: 935 - protein, 736 aa, synthetic construct
  REGION 1..736: note = source = /note="Description of Artificial Sequence: Synthetic polypeptide"
MAADGYLPDWLEDNLSEGIREWWDLKPGAPKPKANQQKQDDGRGLVLPGYKYLGPFNGLDKGEPVNAADAAALEHDKAYDQQLKAGDNPYLRYNHADAEFQERLQEDTSFGGNLGRAVFQAKKRVLEPLGLVEEGAKTAPGKKRPVEQSPQEPDSSSGIGKKGQQPAKKRLNFGQTGDSESVPDPQPLGEPPAAPSGVGSNTMAAGGGAPMADNNEGADGVGNASGNWHCDSTWLGDRVITTSTRTWALPTYNNHLYKQISSQSGGSTNDNTYFGYSTPWGYFDFNRFHCHFSPRDWQRLINNNWGFRPKKLNFKLFNIQVKEVTTNDGTTTIANNLTSTVQVFTDSEYQLPYVLGSAHQGCLPPFPADVFMIPQYGYLTLNNGSQAVGRSSFYCLEYFPSQMLRTGNNFEFSYTFEDVPFHSSYAHSQSLDRLMNPLIDQYLYYLSRTQTTSGTAGNRTLQFSQAGPSSMANQAKNWLPGPCYRQQRVSKTANQNNNSNFAWTGATKYHLNGRDSLVNPGPAMATHKDDEDKFFPMSGVLIFGKQGAGNSNVDLDNVMITSEEEIKTTNPVATEQYGTVATNLQSSNTAPATGTVNSQGALPGMVWQNRDVYLQGPIWAKIPHTDGHFHPSPLMGGFGLKHPPPQILIKNTPVPANPPTTFSPAKFASFITQYSTGQVSVEIEWELQKENSKRWNPEIQYTSNYNKSTNVDFAVDTNGVYSEPRPIGTRYLTRNL

SEQ ID NO: 936 - protein, 736 aa, synthetic construct
  REGION 1..736: note = source = /note="Description of Artificial Sequence: Synthetic polypeptide"
MAADGYLPDWLEDNLSEGIREWWDLKPGAPKPKANQQKQDDGRGLVLPGYKYLGPFNGLDKGEPVNAADAAALEHDKAYDQQLKAGDNPYLRYNHADAEFQERLQEDTSFGGNLGRAVFQAKKRVLEPLGLVEEGAKTAPGKKRPVEQSPQEPDSSSGIGKKGQQPAKKRLNFGQTGDSESVPDPQPLGEPPAAPSGVGSNTMASGGGAPMADNNEGADGVGNASGNWHCDSTWLGDRVITTSTRTWALPTYNNHLYKQISSQSGGSTNDNTYFGYSTPWGYFDFNRFHCHFSPRDWQRLINNNWGFRPKKLNFKLFNIQVKEVTTNDGTTTIANNLTSTVQVFTDSEYQLPYVLGSAHQGCLPPFPADVFMIPQYGYLTLNNGSQAVGRSSFYCLEYFPSQMLRTGNNFEFSYTFEDVPFHSSYAHSQSLDRLMNPLIDQYLYYLSRTQTTSGTAGNRTLQFSQAGPSSMANQAKNWLPGPCYRQQRVSKTANQNNNSNFAWTGATKYHLNGRDSLVNPGPAMATHKDDEDKFFPMSGVLIFGKQGAGNSNVDLDNVMITSEEEIKTTNPVATEEYGTVATNLQSSNTAPATGTVNSQGALPGMVWQNRDVYLQGPIWAKIPHTDGHFHPSPLMGGFGLKHPPPQILIKNTPVPANPPTTFSPAKFASFITQYSTGQVSVEIEWELQKENSKRWNPEIQYTSNYNKSTNVDFAVDTNGVYSEPRPIGTRYLTRNL

SEQ ID NO: 937 - protein, 736 aa, synthetic construct
  REGION 1..736: note = source = /note="Description of Artificial Sequence: Synthetic polypeptide"
MAADGYLPDWLEDNLSEGIREWWDLKPGAPKPKANQQKQDDGRGLVLPGYKYLGPFNGLDKGEPVNAADAAALEHDKAYDQQLKAGDNPYLRYNHADAEFQERLQEDTSFGGNLGRAVFQAKKRVLEPLGLVEEGAKTAPGKKRPVEQSPQEPDSSSGIGKKGQQPAKKRLNFGQTGDSESVPDPQPLGEPPAAPSGVGSNTMASGGGAPMADNNEGADGVGNASGNWHCDSTWLGDRVITTSTRTWALPTYNNHLYKQISSQSGGSTNDNTYFGYSTPWGYFDFNRFHCHFSPRDWQRLINNNWGFRPKKLNFKLFNIQVKEVTTNDGTTTIANNLTSTVQVFTDSEYQLPYVLGSAHQGCLPPFPADVFMIPQYGYLTLNNGSQAVGRSSFYCLEYFPSQMLRTGNNFQFSYTFEDVPFHSSYAHSQSLDRLMNPLIDQYLYYLSRTQTTSGTAGNRELQFSQAGPSSMANQAKNWLPGPCYRQQRVSKTTNQNNNSNFAWTGATKYHLNGRDSLVNPGPAMATHKDDEDKFFPMSGVLIFGKQGAGNSNVDLDNVMITNEEEIKTTNPVATEQYGTVATNLQSANTAPATGTVNSQGALPGMVWQDRDVYLQGPIWAKIPHTDGHFHPSPLMGGFGLKHPPPQILIKNTPVPANPPTTFSPAKFASFITQYSTGQVSVEIEWELQKENSKRWNPEIQYTSNYNKSTNVDFAVDTNGVYSEPRPIGTRYLTRNL

SEQ ID NO: 938 - DNA, 2211 bp, synthetic construct
  misc_feature 1..2211: note = source = /note="Description of Artificial Sequence: Synthetic polynucleotide"
  source 1..2211: mol_type = other DNA
atggctgccgatggttatcttccagattggctcgaggacaacctctctgagggcattcgcgagtggtgggacttgaaacctggagccccgaaacccaaagccaaccagcaaaagcaggacgacggccggggtctggtgcttcctggctacaagtacctcggacccttcaacggactcgacaagggggagcccgtcaacgcggcggacgcagcggccctcgagcacgacaaggcctacgaccagcagctcaaagcgggtgacaatccgtacctgcggtataaccacgccgacgccgagtttcaggagcgtctgcaagaagatacgtcttttgggggcaacctcgggcgagcagtcttccaggccaagaagcgggttctcgaacctctcggtctggttgaggaaggcgctaagacggctcctggaaagaagagaccggtagagcaatcaccccaggaaccagactcctcttcgggcatcggcaagaaaggccagcagcccgcgaaaaagagactcaactttgggcagacaggcgactcagagtcagtgcccgaccctcaaccactcggagaaccccccgcagccccctctggtgtgggatctaatacaatggctgcaggcggtggcgctccaatggcagacaataacgaaggcgccgacggagtgggtaacgcctcaggaaattggcattgcgattccacatggctgggcgacagagtcatcaccaccagcacccgaacctgggccctccccacctacaacaaccacctctacaagcaaatctccagccaatcgggagcaagcaccaacgacaacacctacttcggctacagcaccccctgggggtattttgactttaacagattccactgccacttctcaccacgtgactggcagcgactcatcaacaacaactggggattccggcccaagagactcaacttcaagctcttcaacatccaggtcaaggaggtcacgacgaatgatggcaccacgaccatcgccaataaccttaccagcacggttcaggtctttacggactcggaataccagctcccgtacgtcctcggctctgcgcaccagggctgcctgcctccgttcccggcggacgtcttcatgattcctcagtacgggtacctgactctgaacaatggcagtcaggccgtgggccgttcctccttctactgcctggagtactttccttctcaaatgctgagaacgggcaacaactttgagttcagctacacgtttgaggacgtgccttttcacagcagctacgcgcacagccaaagcctggaccggctgatgaaccccctcatcgaccagtacctgtactacctgtctcggactcagaccacgagtggtaccgcaggaaatcggacgttgcaattttctcaggccgggcctagtagcatggcgaatcaggccaaaaactggctacccgggccctgctaccggcagcaacgcgtctccaagacagcgaatcaaaataacaacagcaactttgcctggaccggtgccaccaagtatcatctgaatggcagagactctctggtaaatcccggtcccgctatggcaacccacaaggacgacgaagacaaattttttccgatgagcggagtcttaatatttgggaaacagggagctggaaatagcaacgtggaccttgacaacgttatgataaccagtgaggaagaaattaaaaccaccaacccagtggccacagaacagtacggcacggtggccactaacctgcaatcgtcaaacaccgctcctgctacagggaccgtcaacagtcaaggagccttacctggcatggtctggcagaaccgggacgtgtacctgcagggtcctatctgggccaagattcctcacacggacggacactttcatccctcgccgctgatgggaggctttggactgaaacacccgcctcctcagatcctgattaagaatacacctgttcccgcgaatcctccaactaccttcagtccagctaagtttgcgtcgttcatcacgcagtacagcaccggacaggtcagcgtggaaattgaatgggagctgcagaaagaaaacagcaaacgctggaacccagagattcaatacacttccaactacaacaaatctacaaatgtggactttgctgttgacacaaatggcgtttattctgagcctcgccccatcggcacccgttacctcacccgtaatctgtaa

SEQ ID NO: 939 - protein, 738 aa, synthetic construct; identical to SEQ ID NO: 18
  REGION 1..738: note = source = /note="Description of Artificial Sequence: Synthetic polypeptide"

SEQ ID NO: 940 - DNA, 2211 bp, synthetic construct
  misc_feature 1..2211: note = source = /note="Description of Artificial Sequence: Synthetic polynucleotide"
  source 1..2211: mol_type = other DNA
atggctgccgatggttatcttccagattggctcgaggacaacctctctgagggcattcgcgagtggtgggacttgaaacctggagccccgaaacccaaagccaaccagcaaaagcaggacgacggccggggtctggtgcttcctggctacaagtacctcggacccttcaacggactcgacaagggggagcccgtcaacgcggcggacgcagcggccctcgagcacgacaaggcctacgaccagcagctcaaagcgggtgacaatccgtacctgcggtataaccacgccgacgccgagtttcaggagcgtctgcaagaagatacgtcttttgggggcaacctcgggcgagcagtcttccaggccaagaagcgggttctcgaaccttttggtctggttgaggaaggcgctaagacggctcctggaaagaaacgtccggtagagcagtcgccacaagagccagactcctcctcgggcatcggcaagacaggccagcagcccgctaaaaagagactcaattttggtcagactggcgactcagagtcagtccccgacccacaacctctcggagaacctccagcaacccccgctgctgtgggacctactacaatggcttcaggcggtggcgcaccaatggcagacaataacgaaggcgccgacggagtgggtaatgcctcaggaaattggcattgcgattccacatggctgggcgacagagtcatcaccaccagcacccgcacctgggccttgcccacctacaataaccacctctacaagcaaatctccagtgcttcaacgggggccagcaacgacaaccactacttcggctacagcaccccctgggggtattttgatttcaacagattccactgccacttttcaccgcgtgactggcagcgactcatcaacaacaattggggattccggcccaagagactcaacttcaagctcttcaacatccaagtcaaggaggtcacgacgagtgatggcgtcacaaccatcgctaataaccttaccagcacggttcaagtcttctcggactcggagtaccagcttccgtacgtcctcggctctgcgcaccagggctgcctccctccgttcccggcggacgtgttcatgattccgcaatacggctacctgacgctcaacaatggcagccaagccgtgggacgttcatccttttactgcctggaatatttcccttctcagatgctgagaacgggcaacaactttaccttcagctacacctttgaggaagtgcctttccacagcagctacgcgcacagccagagcctggaccggctgatgaatcctctcatcgaccaatacctgtattacctgaacagaactcaaaatcagtccggaagtgcccaaaacaaggacttgctgtttagccgtgggtctccagctggcatgtctgttcagcccaaaaactggctacctggaccctgttatcggcagcagcgcgtttctaaaacaaaaacaggcaacaacaacagcaattttacctggactggtgcttcaaaatataacctcaatgggcatgaatccatcatcaaccctggcactgctatggcctcacacaaagacgacgaagacaagttctttcccatgagcggtgtcatgatttttggaaaagagagcgccggagcttcaaacactgcattggacaatgtcatgattacagacgaagaggaaattaaagccactaaccctgtggccaccgaaagatttgggaccgtggcagtcaatttccagagcagcagcacacaccctgcgaccggagatgtgcatgttatgggagcattacctggcatggtgtggcaagatagagacgtgtacctgcagggtcccatctgggccaaaattcctcacacagatggacactttcacccgtctcctcttatgggcggctttggactcaagcacccgcctcctcagatcctcatcaaaaacacgcctgttcctgcgaatcctccggcggagttttcagctacaaagtttgcttcattcatcacccaatactccacaggacaagtgagtgtggaaattgaatgggagctgcagaaagaaaacagcaagcgctggaatcccgaagtgcagtacacatccaattatgcaaaatctgccaacgttgattttaccgtggacaacaatggactttatactgagcctcgccccattggcacccgttaccttacccgtcccctgtaa

SEQ ID NO: 941 - DNA, 2211 bp, synthetic construct; identical to SEQ ID NO: 940
  misc_feature 1..2211: note = source = /note="Description of Artificial Sequence: Synthetic polynucleotide"
  source 1..2211: mol_type = other DNA

SEQ ID NO: 942 - DNA, 2202 bp, synthetic construct
  misc_feature 1..2202: note = source = /note="Description of Artificial Sequence: Synthetic polynucleotide"
  source 1..2202: mol_type = other DNA
atgactgacggttaccttccagattggctagaggacaacctctctgaaggcgttcgagagtggtgggcgctgcaacctggagcccctaaacccaaggcaaatcaacaacatcaggacaacgctcggggtcttgtgcttccgggttacaaatacctcggacccggcaacggacttgacaagggggaacccgtcaacgcagcggacgcggcagccctcgaacacgacaaggcctacgaccagcagctcaaggccggtgacaacccctacctcaagtacaaccacgccgacgccgagtttcaggagcgtcttcaagaagatacgtcttttgggggcaacctcggacgagcagtcttccaggccaaaaagaggatccttgagcctctgggtctggttgaggaagcggctaagacggctcctggaaaaaagagacctgtagagcaatctccagcagaaccggactcctcttcgggcatcggcaaatcaggccagcagcccgctagaaaaagactgaattttggtcagactggcgacacagagtcagtcccagaccctcaaccactcggacaacctcccgcagccccctctggtgtgggatctactacaatggcttcaggcggtggcgcaccaatggcagacaataacgagggtgccgatggagtgggtaattcctcaggaaattggcattgcgattcccaatggctgggcgacagagtcatcaccaccagcacccgcacctgggccctgcccacctacaacaatcacctctacaagcaaatctccagccaatcaggagccaccaacgacaaccactactttggctacagcaccccctgggggtattttgacttcaacagattccactgccacttttcaccacgtgactggcaaagactcatcaacaacaactggggattccgacccaagagactcaacttcaagctctttaacattcaagtcaaagaggtcacgcagaatgacggtacgacgacgattgccaataaccttaccagcacggttcaggtgtttactgactccgagtaccagctcccgtacgtcctcggctcggcgcatcagggatgcctcccgccgttcccagcagacgtcttcatggtcccacagtatggatacctcaccctgaacaacgggagtcaggcggtaggacgctcttccttttactgcctggagtactttccttctcagatgctgcgtactggaaacaactttcagtttagctacacttttgaagacgtgcctttccacagcagctacgctcacagccaaagtctggaccgtctcatgaatcctctgatcgaccagtacctgtactatctgaacaggacacaaacagccagtggaactcagcagtctcggctactgtttagccaagctggacccaccagtatgtctcttcaagctaaaaactggctgcctggaccttgctacagacagcagcgtctgtcaaagcaggcaaacgacaacaacaacagcaactttccctggactggtgccaccaaatatcatctgaatggccgggactcattggtgaacccgggccctgctatggccagtcacaaggatgacaaagaaaagtttttccccatgcatggaaccctgatatttggtaaagaaggaacaaatgccaacaacgcggatttggaaaatgtcatgattacagatgaagaagaaatccgcaccaccaatcccgtggctacggagcagtacgggactgtgtcaaataatttgcaaaactcaaacgctggtccaactactggaactgtcaatcaccaaggagcgttacctggtatggtgtggcaggatcgagacgtgtacctgcagggacccatttgggccaagattcctcacaccgatggacactttcatccttctccactgatgggaggttttgggctcaaacacccgcctcctcagatcatgatcaaaaacactcccgttccagccaatcctcccacaaactttagtgcggcaaagtttgcttccttcatcacacagtactccacggggcaggtcagcgtggagatcgagtgggagctgcagaaggagaacagcaaacgctggaatcccgaaattcagtacacttccaactacaacaaatctgttaatgtggactttactgtggacactaatggtgtgtattcagagcctcgccccattggcaccagatacctgactcgtaatctgtaa

SEQ ID NO: 943 - DNA, 2211 bp, synthetic construct
  misc_feature 1..2211: note = source = /note="Description of Artificial Sequence: Synthetic polynucleotide"
  source 1..2211: mol_type = other DNA
atggctgccgatggttatcttccagattggctcgaggacaacctctctgagggcattcgcgagtggtgggacttgaaacctggagccccgaaacccaaagccaaccagcaaaagcaggacgacggccggggtctggtgcttcctggctacaagtacctcggacccttcaacggactcgacaagggggagcccgtcaacgcggcggacgcagcggccctcgagcacgacaaggcctacgaccagcagctcaaagcgggtgacaatccgtacctgcggtataaccacgccgacgccgagtttcaggagcgtctgcaagaagatacgtcttttgggggcaacctcgggcgagcagtcttccaggccaagaagcgggttctcgaaccttttggtctggttgaggaaggcgctaagacggctcctggaaagaaacgtccggtagagcagtcgccacaagagccagactcctcctcgggcatcggcaagacaggccagcagcccgctaaaaagagactcaattttggtcagactggcgactcagagtcagtccccgacccacaacctctcggagaacctccagcaacccccgctgctgtgggacctactacaatggcttcaggcggtggcgcaccaatggcagacaataacgaaggcgccgacggagtgggtaatgcctcaggaaattggcattgcgattccacatggctgggcgacagagtcatcaccaccagcacccgcacctgggccttgcccacctacaataaccacctctacaagcaaatctccagtgcttcaacgggggccagcaacgacaaccactacttcggctacagcaccccctgggggtattttgatttcaacagattccactgccacttttcaccacgtgactggcagcgactcatcaacaacaattggggattccggcccaagagactcaacttcaagctcttcaacatccaagtcaaggaggtcacgacgaatgatggcgtcacaaccatcgctaataaccttaccagcacggttcaagtcttctcggactcggagtaccagcttccgtacgtcctcggctctgcgcaccagggctgcctccctccgttcccggcggacgtgttcatgattccgcaatacggctacctgacgctcaacaatggcagccaagccgtgggacgttcatccttttactgcctggaatatttcccttctcagatgctgagaacgggcaacaactttaccttcagctacacctttgaggaagtgcctttccacagcagctacgcgcacagccagagcctggaccggctgatgaatcctctcatcgaccaatacctgtattacctgaacagaactcaaaatcagtccggaagtgcccaaaacaaggacttgctgtttagccgtgggtctccagctggcatgtctgttcagcccaaaaactggctacctggaccctgttatcggcagcagcgcgtttctaaaacaaaaacagacaacaacaacagcaattttacctggactggtgcttcaaaatataacctcaatgggcgtgaatccatcatcaaccctggcactgctatggcctcacacaaagacgacgaagacaagttctttcccatgagcggtgtcatgatttttggaaaagagagcgccggagcttcaaacactgcattggacaatgtcatgattacagacgaagaggaaattaaagccactaaccctgtggccaccgaaagatttgggaccgtggcagtcaatttccagagcagcagcacagaccctgcgaccggagatgtgcatgttatgggagcattacctggcatggtgtggcaagatagagacgtgtacctgcagggtcccatctgggccaaaattcctcacacagatggacactttcacccgtctcctcttatgggcggctttggactcaagcacccgcctcctcagatcctcatcaaaaacacgcctgttcctgcgaatcctccggcggagttttcagctacaaagtttgcttcattcatcacccaatactccacaggacaagtgagtgtggaaattgaatgggagctgcagaaagaaaacagcaagcgctggaatcccgaagtgcagtacacatccaattatgcaaaatctgccaacgttgattttaccgtggacaacaatggactttatactgagcctcgccccattggcacccgttaccttacccgtcccctgtaa

SEQ ID NO: 944 - DNA, 2211 bp, synthetic construct
  misc_feature 1..2211: note = source = /note="Description of Artificial Sequence: Synthetic polynucleotide"
  source 1..2211: mol_type = other DNA
atggctgccgatggttatcttccagattggctcgaggacaacctctctgagggcattcgcaagtggtgggacttgaaacctggagccccgaaacccaaagccaaccagcaaaagcaggacgacggccggggtctggtgcttcctggctacaagtacctcggacccttcaacggactcgacaagggggagcccgtcaacgcggcggacgcagcggccctcgagcacgacaaggcctacgaccagcagctcaaagcgggtgacaatccgtacctgcggtataaccacgccgacgccgagtttcaggagcgtctgcaagaagatacgtcttttgggggcaacctcgggagagcagtcttccaggccaagaagcgggttctcgaaccttttggtctggttgaggaaggcgctaagacggctcctggaaagaaacgtccggtagagcagtcgccacaagagccagactcctcctcgggcatcggcaagacaggccagcagcccgctaaaaagagactcaattttggtcagactggcgactcagagtcagtccccgacccacaacctctcggagaacctccagcaacccccgctgctgtgggacctactacaatggcttcaggcggtggcgcaccaatggcagacaataacgaaggcgccgacggagtgggtaatgcctcaggaaattggcattgcgattccacatggctgggcgacagagtcatcaccaccagcacccgcacctgggccttgcccacctacaataaccacctctacaagcaaatctccagtgcttcaacgggggccagcaacgacaaccactacttcggctacagcaccccctgggggtattttgatttcaacagattccactgccacttttcaccacgtgactggcagcgactcatcaacaacaattggggattccggcccaagagactcaacttcaagctcttcaacatccaagtcaaggaggtcacgacgaatgatggcgtcacaaccatcgctaataaccttaccagcacggttcaagtcttctcggactcggagtaccagcttccgtacgtcctcggctctgcgcaccagggctgcctccctccgttcccggcggacgtgttcatgattccgcaatacggctacctgacgctcaacaatggcagccaagccgtgggacgttcatccttttactgcctggaatatttcccttctcagatgctgagaacgggcaacaactttaccttcagctacacctttgaggaagtgcctttccacagcagctacgcgcacagccagagcctggaccggctgatgaatcctctcatcgaccaatacctgtattacctgaacagaactcaaaatcagtccggaagtgcccaaaacaaggacttgctgtttagccgtgggtctccagctggcatgtctgttcagcccaaaaactggctacctggaccctgttatcggcagcagcgcgtttctaaaacaaaaacagacaacaacaacagcaattttacctggactggtgcttcaaaatataacctcaatgggcgtgaatccatcatcaaccctggcactgctatggcctcacacaaagacgacaaagacaagttctttcccatgagcggtgtcatgatttttggaaaagagagcgccggagcttcaaacactgcattggacaatgtcatgattacagacgaagaggaaattaaagccactaaccctgtggccaccgaaagatttgggaccgtggcagtcaatttccagagcagcagcacagaccctgcgaccggagatgtgcatgttatgggagcattacctggcatggtgtggcaagatagagacgtgtacctgcagggtcccatttgggccaaaattcctcacacagatggacactttcacccgtctcctcttatgggcggctttggactcaagcacccgcctcctcagatcctcatcaaaaacacacctgttcctgcgaatcctccggcggagttttcagctacaaagtttgcttcattcatcacccaatactccacaggacaagtgagtgtggaaattgaatgggagctgcagaaagaaaacagcaagcgctggaatcccgaagtgcagtacacatccaattatgcaaaatctgccaacgttgattttaccgtggacaacaatggactttatactgagcctcgccccattggcacccgttaccttacccgtcccctgtaa

SEQ ID NO: 945 - DNA, 2211 bp, synthetic construct
  misc_feature 1..2211: note = source = /note="Description of Artificial Sequence: Synthetic polynucleotide"
  source 1..2211: mol_type = other DNA
atggctgccgatggttatcttccagattggctcgaggacaacctctctgagggcattcgcgagtggtgggacttgaaacctggagccccgaaacccaaagccaaccagcaaaagcaggacaacggccggggtctggtgcttcctggctacaagtacctcggacccttcaacggactcgacaagggggagcccgtcaacgcggcggacgcagcggccctcgagcacgacaaggcctacgaccagcagctcaaagcgggtgacaatccgtacctgcggtataaccacgccgacgccgagtttcaggagcgtctgcaagaagatacgtcttttgggggcaacctcgggcgagcagtcttccaggccaagaagcgggttctcgaaccttttggtctggttgaggaaggcgctaagacggctcctggaaagaaacgtccggtagagcagtcgccacaagagccagactcctcctcgggcatcggcaagacaggccagcagcccgctaaaaagagactcaattttggtcagactggcgactcagagtcagtccccgacccacaacctctcggagaacctccagcaacccccgctgctgtgggacctactacaatggcttcaggcggtggcgcaccaatggcagacaataacgaaggcgccgacggagtgggtaatgcctcaggaaattggcattgcgattccacatggctgggcgacagagtcatcaccaccagcacccgcacctgggccttgcccacctacaataaccacctctacaagcaaatctccagtgcttcaacgggggccagcaacgacaaccactacttcggctacagcaccccctgggggtattttgatttcaacagattccactgccacttttcaccacgtgactggcagcgactcatcaacaacaattggggattccggcccaagagactcaacttcaagctcttcaacatccaagtcaaggaggtcacgacgaatgatggcgtcacaaccatcgctaataaccttaccagcacggttcaagtcttctcggactcggagtaccagcttccgtacgtcctcggctctgcgcaccagggctgcctccctccgttcccggcggacgtgttcatgattccgcaatacggctacctgacgctcaacaatggcagccaagccgtgggacgttcatccttttactgcctggaatatttcccttctcagatgctgagaacgggcaacaactttaccttcagctacacctttgaggaagtgcctttccacagcagctacgcgcacagccagagcctggaccggctgatgaatcctctcatcgaccaatacctgtattacctgaacagaactcaaaatcagtccggaagtgcccaaaacaaggacttgctgtttagccgtgggtctccagctggcatgtctgttcagcccaaaaactggctacctggaccctgttatcggcagcagcgcgtttctaaaacaaaaacagacaacaacaacagcaattttacctggactggtgcttcaaaatataacctcaatgggcgtgaatccatcatcaaccctggcactgctatggcctcacacaaagacgacgaagacaagttctttcccatgagcggtgtcatgatttttggaaaagagagcgccggagcttcaaacactgcattggacaatgtcatgattacagacgaagaggaaattaaagccactaaccctgtggccaccgaaagatttgggaccgtggcagtcaatttccagagcagcagcacacaccctgcgaccggagatgtgcatgttatgggagcattacctggcatggtgtggcaagatagagacgtgtacctgcagggtcccatctgggccaaaattcctcacacagatggacactttcacccgtctcctcttatgggcggctttggactcaagcacccgcctcctcagatcctcatcaaaaacacgcctgttcctgcgaatcctccggcggagttttcagctacaaagtttgcttcattcatcacccaatactccacaggacaagtgagtgtggaaattgaatgggagctgcagaaagaaaacagcaagcgctggaatcccgaagtgcagtacacatccaattatgcaaaatctgccaacgttgattttaccgtggacaacaatggactttatactgagcctcgccccattggcacccgttaccttacccgtcccctgtaa

SEQ ID NO: 946 - DNA, 2211 bp, synthetic construct
  misc_feature 1..2211: note = source = /note="Description of Artificial Sequence: Synthetic polynucleotide"
  source 1..2211: mol_type = other DNA
atggctgccgatggttatcttccagattggctcgaggacaacctctctgagggcattcgcgagtggtgggacttgaaacctggagccccgaaacccaaagccaaccagcaaaagcaggacgacggccggggtctggtgcttcctggctacaagtacctcggacccttcaacggactcgacaagggggagcccgtcaacgcggcggacgcagcggccctcgagcacgacaaggcctacgaccagcagctcaaagcgggtgacaatccgtacctgcggtataaccacgccgacgccgagtttcaggagcgtctgcaagaagatacgtcttttgggggcaacctcgggcgagcagtcttccaggccaaaaagcgggttctcgaaccttttggtctggttgaggaaggcgctaagacggctcctggaaagaaacgtccggtagagcagtcgccacaagagccagactcctcctcgggcatcggcaagacaggccagcagcccgctaaaaagagactcaattttggtcagactggcgactcagagtcagtccccgacccacaacctctcggagaacctccagcaacccccgctgctgtgggacctactacaatggcttcaggcggtggcgcaccaatggcagacaataacgaaggcgccgacggagtgggtaatgcctcaggaaattggcattgcgattccacatggctgggcgacagagtcatcaccaccagcacccgcacctgggccttgcccacctacaataaccacctctacaagcaaatctccagtgcttcaacgggggccagcaacgacaaccactacttcggctacagcaccccctgggggtattttgatttcaacagattccactgccacttttcaccacgtgactggcagcgactcatcaacaacaattggggattccggcccaagagactcaacttcaagctcttcaacatccaagtcaaggaggtcacgacgaatgatggcgtcacaaccatcgctaataaccttaccagcacggttcaagtcttctcggactcggagtaccagcttccgtacgtcctcggctctgcgcaccagggctgcctccctccgttcccggcggacgtgttcatgattccgcaatacggctacctgacgctcaacaatggcagccaagccgtgggacgttcatccttttattgcctggaatatttcccatcgcagatgctgagaacgggcaataactttaccttcagctacacctttgaggacgtgcctttccacagcagctacgcgcacagccagagcctggaccggctgatgaatcctctcatcgaccagtacctgtattacctgaacagaactcagaaccagtccggaagtgcccaaaacaaggacttgctgtttagccgggggtctccagctggcatgtctgttcagctcaaaaactggctacctggaccctgttatcggcagcagcgcgtttctaaaacaaaaacagacaacaacaacagcaattttacctggactggtgcttcaaaatataaccttaatgggcgtgaatccatcatcaaccctggcactgctatggcctcacacaaagacgacgaagacaagttctttcccatgagcggtgtcatgatttttggaaaagagagcgccggagcttcaaacactgcattggacaatgtcatgattacagacgaagaggaaattaaagccactaaccctgtggccaccgaaagatttgggaccgtggcagtcaatttccagagcagcagcacagaccctgcgaccggagatgtgcatgttatgggagcattacctggcatggtgtggcaagatagagacgtgtacctgcagggtcccatttgggccaaaattcctcacacagatggacactttcacccgtctcctcttatgggcggctttggactcaaacacccgcctcctcagatcctcatcaaaaacacacctgttcctgcgaatcctccggcggagttttcagctacaaagtttgcttcattcatcacccaatactccacaggacaagtgagcgtggaaattgaatgggagctgcagaaagaaaacagcaagcgctggaatcccgaagtgcagtacacatccaattatgcaaaatctgccaacgttgattttaccgtggacaacaatggactttatactgagcctcgccccattggcacccgttaccttacccgtcccctgtaa

SEQ ID NO: 947 - DNA, 2211 bp, synthetic construct
  misc_feature 1..2211: note = source = /note="Description of Artificial Sequence: Synthetic polynucleotide"
  source 1..2211: mol_type = other DNA
atggctgccgatggttatcttccagattggctcgaggacaacctctctgagggcattcgcgagtggtgggacttgaaacctggagccccgaaacccaaagccaaccagcaaaagcaggacgacggccggggtctggtgcttcctggctacaagtacctcggacccttcaacggactcgacaagggggagcccgtcaacgcggcggacgcagcggccctcgagcacgacaaggcctacgaccagcagctcaaagcgggtgacaatccgtacctgcggtataaccacgccgacgccgagtttcaggagcgtctgcaagaagatacgtcttttgggggcaacctcgggcgagcagtcttccaggccaagaagcgggttctcgaaccttttggtctggttgaggaaggtgctaagacggctcctggaaagaagagaccggtagagcagtcgccccaagaaccagactcctcatcgggcatcggcaaatcaggccagcagcccgctaaaaagagactcaattttggtcagactggcgactcagagtcagtccccgacccacaacctctcggagaacctccagcaacccccgctgctgtgggacctactacaatggcttcaggcggtggcgcaccaatggcagacaataacgaaggcgccgacggagtgggtaatgcctcaggaaattggcattgcgattccacatggctgggcgacagagtcattaccaccagcacccgaacctgggccctgcccacctataacaaccacctctacaaacaaatctccagcgcttcaacgggggccagcaacgacaaccactacttcggctacagcaccccctgggggtattttgattttaacagattccactgccacttctcaccacgtgactggcagcgactcatcaacaacaattggggattccggcccaagagactcaacttcaagctcttcaacatccaagtcaaggaggtcacgacgaacgatggcgtcacgaccatcgctaataaccttaccagcacggttcaagtcttctcggactcggagtaccagttgccgtacgtcctcggctctgcgcaccagggctgcctccctccgttcccggcggacgtgttcatgattccgcagtacggctacctaacactcaacaatggcagccaggccgtgggacgttcatccttttactgcctggaatatttcccatcgcagatgctgagaacgggcaataactttaccttcagctacacattcgaggacgtgcctttccacagcagctacgcgcacagccaaagcctggaccggctgatgaatcctctcatcgaccagtacttgtattacctaaacagaactcaaaatcagtccggaagtgcccaaaacaaggacttgctgtttagccgggggtctccagctggcatgtctgttcagcccaaaaactggctacctggaccctgttatcggcagcagcgcgtttctaaaacaaaaacagacaacaacaacagcaactttacctggactggtgcttcaaaatataaccttaatgggcgtgaatctataatcaaccctggcactgctatggcttcacacaaagacgacgaagacaagttctttccaatgagcggtgtcatgatttttggcaaggagagcgccggagcttcaaacactgcattggacaatgtcatgattacagacgaagaggaaattaaagccactaaccctgtggccaccgaaagatttgggaccgtggcagtcaatttccagagcagcagcacagaccctgcgaccggagatgtgcatgttatgggagcattacctggcatggtgtggcaagatagagacgtgtacctgcagggtccaatttgggccaaaattcctcacacagatggacactttcacccgtctcctcttatgggcggctttggacttaagcacccgcctcctcagatcctcatcaaaaacacgcctgttcctgcgaatcctccggcagagttttcggctacaaagtttgcttcattcatcacccagtattccacaggacaagtgagtgtggaaattgaatgggagttgcagaaagaaaacagcaagcgttggaatcccgaagtgcagtacacatctaattatgcaaaatctgccaacgttgatttcactgtggacaacaatggactttatactgagcctcgccccattggcacccgttacctcacccgtcccctgtaa

SEQ ID NO: 948 - DNA, 2211 bp, synthetic construct
  misc_feature 1..2211: note = source = /note="Description of Artificial Sequence: Synthetic polynucleotide"
  source 1..2211: mol_type = other DNA
atggctgccgatggttatcttccagattggctcgaggacaacctctctgagggcattcgcgagtggtgggacttgaaacctggagccccgaaacccaaagccaaccagcaaaagcaggacgacggccggggtctggtgcttcctggctacaagtacctcggacccttcaacggactcgacaagggggagcccgtcaacgcggcggacgcagcggccctcgagcacgacaaggcctacgaccagcagctcaaagcgggtgacaatccgtacctgcggtataaccacgccgacgccgagtttcaggagcgtctgcaagaagatacgtcttttgggggcaacctcgggcgagcagtcttccaggccaagaagagggttctcgaaccttttggtctggttgaggaaggtgctaagacggctcctggaaagaaacgtccggtagagcagtcaccccaagaaccagactcctcctcgggcattggcaaatcaggccagcagcccgctaaaaagagactcaattttggtcagactggcgactcagagtcagtccccgacccacaacctctcggagaacctccagcaacccccgctgctttgggacctactacaatggcttcaggcggtggcgcaccaatggcagacaataacgaaggcgccgacggagtgggtaatgcctcaggaaattggcattgcgattccacatggctgggcgacagagtcatcaccaccagcacccgcacctgggccttgcccacctacaataaccacctctacaagcaaatctccagtgcttcaacgggggccagcaacgacaaccactacttcggctacagcaccccctgggggtattttgatttcaacagattccactgccatttctcaccacgtgactggcagcgactcatcaacaacaactggggattccggcccaagagactcaacttcaagctcttcaacatccaagtcaaggaggtcacgacgaacgatggcgtcacgaccatcgctaataaccttaccagcacggttcaagtcttctcggactcggagtaccagcttccgtacgtcctcggctctgcgcaccagggctgcctccctccgttcccggcggacgtgttcatgattccgcagtacggctacctgacgctcaacaatggcagcaaagccgtgggacgttcatccttttactgcctggaatatttcccttctcagatgctgagaacgggcaacaactttaccttcagctacacctttgaggaagtgcctttccacagcagctacgcgcacagccagagcctggaccggctgatgaatcctctcatcgaccaatacctgtattacctgaacagaactcaaaatcagtccggaagtgcccaaaacaaggacttgctgtttagccgtgggtctccagctggcatgtctgttcagcccaaaaactggctacctggaccctgttatcggcagcagcgcgtttctaaaacaaaaacagacaacaacaacagcaattttacctggactggtgcttcaaaatataacctcaatgggcgtgaatccatcatcaaccctggcactgctatggcctcacacaaagacgacgaagacaagttctttcccatgagcggtgtcatgatttttggaaaagagagcgccggagcttcaaacactgcattggacaatgtcatgattacagacgaagaggaaattaaagccactaaccctgtggccaccgaaagatttgggaccgtggcagtcaatttccagagcagcagcacagaccctgcgaccggagatgtgcatgttatgggagcattacctggcatggtgtggcaagatagagacgtgtacctgcagggtcccatttgggccaaaattcctcacacggatggacactttcacccgtctcctcttatgggcggctttggactcaagcacccgcctcctcagatcctcatcaaaaacacacctgttcctgcgaatcctccggcagagttttcggctacaaagtttgcttcattcatcacccagtactccacaggacaagtgagcgtggaaattgaatgggagttgcagaaagaaaacagtaagcgctggaatcccgaagtgcagtacacatctaattatgcaaaatctgccaacgttgacttcactgtggacaacaatggactttatactgagcctcgccccattggcacccgttacctcacccgtcccctgtaa

SEQ ID NO: 949 - DNA, 2970 bp, synthetic construct
  misc_feature 1..2970: note = source = /note="Description of Artificial Sequence: Synthetic polynucleotide"
  source 1..2970: mol_type = other DNA
agatgaccgccaaggtcgtagagtccgccaaggccattctgggcggcagcaaggtgcgcgtggaccaaaaatgcaaggcctctgcgcagatcgaccccacccccgtgatcgtcacctccaacaccaacatgtgcgccgtgattgacgggaacagcaccaccttcgagcaccagcagcccctgcaggaccggatgttcaagtttgaactcacccgccgcctcgactacgactttggcaaggtcaccaagcaggaagtcaaggactttttccggtgggcggctgatcacgtgactgacgtggctcatgagttttacgtcacaaagggtggagctaagaaaaggcccgccccctctgacgaggatataagcgagcccaagcggccgcgcgtgtcatttgcgcagccggagacgtcagacgcggaagctcccggagacttcgccgacaggtaccaaaacaaatgttctcgtcacgcgggtatgctgcagatgctctttccctgcaagacgtgcgagagaatgaatcagaattccaacgtctgcttcacgcacggtcagaaagattgcggggagtgctttcccgggtcagaatctcaaccggtttctgtcgtcagaaaaacgtatcagaaactgtgcatccttcatcagctccggggggcacccgagatcgcctgctctgcttgcgaccaactcaaccccgatttggacgattgccaatttgagcaataaatgactgaaatcaggtatggctgctgacggttatcttccagattggctcgaggacaacctctctgaaggcattcgcgagtggtgggcgctgaaacctggagctccacaacccaaggccaaccaacagcatcaggacaacggcaggggtcttgtgcttcctgggtacaagtacctcggacccttcaacggactcgacaagggagagccggtcaacgaggcagacgccgcggccctcgagcacgacaaggcctacgacaagcagctcgagcagggggacaacccgtatctcaagtacaaccacggcgacgccgagttccagcagcgcttggcgaccgacacctcttttgggggcaacctcgggcgagcagtcttccaggccaaaaagaggattctcgagcctctgggtctggttgaagagggcgttaaaacggctcctggaaagaaacgcccattagaaaagactccaaatcggccgaccaacccggactctgggaaggccccggccaagaaaaagcaaaaagacggcgaaccagccgactctgctagaaggacactcgactttgaagactctggagcaggagacggaccccctgagggatcatcttccggagaaatgtctcatgatgctgagatgcgtgcggcgccaggcggaaatgctgtcgaggcgggacaaggtgccgatggagtgggtaatgcctccggtgattggcattgcgattccacctggtcagagggccgagtcaccaccaccagcacccgaacctgggtcctacccacgtacaacaaccacctgtacctgcgaatcggaacaacggccaacagcaacacctacaacggattctccaccccctggggatactttgactttaaccgcttccactgccacttttccccacgcgactggcagcgactcatcaacaacaactggggactcaggccgaaatcgatgcgtgttaaaatcttcaacatacaggtcaaggaggtcacgacgtcaaacggcgagactacggtcgctaataaccttaccagcacggttcagatctttgcggattcgacgtatgaactcccatacgtgatggacgccggtcaggaggggagctttcctccgtttcccaacgacgtctttatggttccccaatacggatactgcggagttgtcactggaaaaaaccagaaccagacagacagaaatgccttttactgcctggaatactttccatcccaaatgctaagaactggcaacaattttgaagtcagttaccaatttgaaaaagttcctttccattcaatgtacgcgcacagccagagcctggacagaatgatgaatcctttactggatcagtacctgtggcatctgcaatcgaccactaccggaaattcccttaatcaaggaacagctaccaccacgtacgggaaaattaccactggagactttgcctactacaggaaaaactggttgcctggagcctgcattaaacaacaaaaattttcaaagaatgccaatcaaaactacaagattcccgccagcgggggagacgcccttttaaagtatgacacgcataccactctaaatgggcgatggagtaacatggctcctggacctccaatggcaaccgcaggtgccggggactcggattttagcaacagccagctgatctttgccggacccaatccgagcggtaacacgaccacatcttcaaacaatttgttgtttacctcagaagaggagattgccacaacaaacccacgagacacggacatgtttggacagattgcagataataatcaaaatgccaccaccgcccctcacatcgctaacctggacgctatgggaattgttcccggaatggtctggcaaaacagagacatctactaccagggccctatttgggccaaggtccctcacacggacggacactttcacccttcgccgctgatgggaggatttggactgaaacacccgcctccacagattttcatcaaaaacacccccgtacccgccaatcccaatactacctttagcgctgcaaggattaattcttttctgacgcagtacagcaccggacaagttgccgttcagatcgactgggaaattcagaaggagcattccaaacgctggaatcccgaagttcaatttacttcaaactacggcactcaaaattctatgctgtgggctcccgacaatgctggcaactaccacgaactccgggctattgggtcccgtttcctcacccaccacttgtaa

SEQ ID NO: 950 - protein, 736 aa, synthetic construct
  REGION 1..736: note = source = /note="Description of Artificial Sequence: Synthetic polypeptide"
MAADGYLPDWLEDNLSEGIREWWDLKPGAPKPKANQQKQDDGRGLVLPGYKYLGPFNGLDKGEPVNAADAAALEHDKAYDQQLKAGDNPYLRYNHADAEFQERLQEDTSFGGNLGRAVFQAKKRVLEPFGLVEEGAKTAPGKKRPVEQSPQEPDSSSGIGKTGQQPAKKRLNFGQTGDSESVPDPQPLGEPPATPAAVGPTTMASGGGAPMADNNEGADGVGNASGNWHCDSTWLGDRVITTSTRTWALPTYNNHLYKQISSASTGASNDNHYFGYSTPWGYFDFNRFHCHFSPRDWQRLINNNWGFRPKRLNFKLFNIQVKEVTTSDGVTTIANNLTSTVQVFSDSEYQLPYVLGSAHQGCLPPFPADVFMIPQYGYLTLNNGSQAVGRSSFYCLEYFPSQMLRTGNNFTFSYTFEEVPFHSSYAHSQSLDRLMNPLIDQYLYYLNRTQNQSGSAQNKDLLFSRGSPAGMSVQPKNWLPGPCYRQQRVSKTKTGNNNSNFTWTGASKYNLNGHESIINPGTAMASHKDDEDKFFPMSGVMIFGKESAGASNTALDNVMITDEEEIKATNPVATERFGTVAVNFQSSSTHPATGDVHVMGALPGMVWQDRDVYLQGPIWAKIPHTDGHFHPSPLMGGFGLKHPPPQILIKNTPVPANPPAEFSATKFASFITQYSTGQVSVEIEWELQKENSKRWNPEVQYTSNYAKSANVDFTVDNNGLYTEPRPIGTRYLTRPL

SEQ ID NO: 951 - protein, 736 aa, synthetic construct; identical to SEQ ID NO: 950
  REGION 1..736: note = source = /note="Description of Artificial Sequence: Synthetic polypeptide"

SEQ ID NO: 952 - protein, 733 aa, synthetic construct
  REGION 1..733: note = source = /note="Description of Artificial Sequence: Synthetic polypeptide"
MTDGYLPDWLEDNLSEGVREWWALQPGAPKPKANQQHQDNARGLVLPGYKYLGPGNGLDKGEPVNAADAAALEHDKAYDQQLKAGDNPYLKYNHADAEFQERLQEDTSFGGNLGRAVFQAKKRILEPLGLVEEAAKTAPGKKRPVEQSPAEPDSSSGIGKSGQQPARKRLNFGQTGDTESVPDPQPLGQPPAAPSGVGSTTMASGGGAPMADNNEGADGVGNSSGNWHCDSQWLGDRVITTSTRTWALPTYNNHLYKQISSQSGATNDNHYFGYSTPWGYFDFNRFHCHFSPRDWQRLINNNWGFRPKRLNFKLFNIQVKEVTQNDGTTTIANNLTSTVQVFTDSEYQLPYVLGSAHQGCLPPFPADVFMVPQYGYLTLNNGSQAVGRSSFYCLEYFPSQMLRTGNNFQFSYTFEDVPFHSSYAHSQSLDRLMNPLIDQYLYYLNRTQTASGTQQSRLLFSQAGPTSMSLQAKNWLPGPCYRQQRLSKQANDNNNSNFPWTGATKYHLNGRDSLVNPGPAMASHKDDKEKFFPMHGTLIFGKEGTNANNADLENVMITDEEEIRTTNPVATEQYGTVSNNLQNSNAGPTTGTVNHQGALPGMVWQDRDVYLQGPIWAKIPHTDGHFHPSPLMGGFGLKHPPPQIMIKNTPVPANPPTNFSAAKFASFITQYSTGQVSVEIEWELQKENSKRWNPEIQYTSNYNKSVNVDFTVDTNGVYSEPRPIGTRYLTRNL

SEQ ID NO: 953 - protein, 736 aa, synthetic construct; identical to SEQ ID NO: 768
  REGION 1..736: note = source = /note="Description of Artificial Sequence: Synthetic polypeptide"

SEQ ID NO: 954 - protein, 736 aa, synthetic construct
  REGION 1..736: note = source = /note="Description of Artificial Sequence: Synthetic polypeptide"
MAADGYLPDWLEDNLSEGIRKWWDLKPGAPKPKANQQKQDDGRGLVLPGYKYLGPFNGLDKGEPVNAADAAALEHDKAYDQQLKAGDNPYLRYNHADAEFQERLQEDTSFGGNLGRAVFQAKKRVLEPFGLVEEGAKTAPGKKRPVEQSPQEPDSSSGIGKTGQQPAKKRLNFGQTGDSESVPDPQPLGEPPATPAAVGPTTMASGGGAPMADNNEGADGVGNASGNWHCDSTWLGDRVITTSTRTWALPTYNNHLYKQISSASTGASNDNHYFGYSTPWGYFDFNRFHCHFSPRDWQRLINNNWGFRPKRLNFKLFNIQVKEVTTNDGVTTIANNLTSTVQVFSDSEYQLPYVLGSAHQGCLPPFPADVFMIPQYGYLTLNNGSQAVGRSSFYCLEYFPSQMLRTGNNFTFSYTFEEVPFHSSYAHSQSLDRLMNPLIDQYLYYLNRTQNQSGSAQNKDLLFSRGSPAGMSVQPKNWLPGPCYRQQRVSKTKTDNNNSNFTWTGASKYNLNGRESIINPGTAMASHKDDKDKFFPMSGVMIFGKESAGASNTALDNVMITDEEEIKATNPVATERFGTVAVNFQSSSTDPATGDVHVMGALPGMVWQDRDVYLQGPIWAKIPHTDGHFHPSPLMGGFGLKHPPPQILIKNTPVPANPPAEFSATKFASFITQYSTGQVSVEIEWELQKENSKRWNPEVQYTSNYAKSANVDFTVDNNGLYTEPRPIGTRYLTRPL

SEQ ID NO: 955 - protein, 736 aa, synthetic construct
  REGION 1..736: note = source = /note="Description of Artificial Sequence: Synthetic polypeptide"
MAADGYLPDWLEDNLSEGIREWWDLKPGAPKPKANQQKQDNGRGLVLPGYKYLGPFNGLDKGEPVNAADAAALEHDKAYDQQLKAGDNPYLRYNHADAEFQERLQEDTSFGGNLGRAVFQAKKRVLEPFGLVEEGAKTAPGKKRPVEQSPQEPDSSSGIGKTGQQPAKKRLNFGQTGDSESVPDPQPLGEPPATPAAVGPTTMASGGGAPMADNNEGADGVGNASGNWHCDSTWLGDRVITTSTRTWALPTYNNHLYKQISSASTGASNDNHYFGYSTPWGYFDFNRFHCHFSPRDWQRLINNNWGFRPKRLNFKLFNIQVKEVTTNDGVTTIANNLTSTVQVFSDSEYQLPYVLGSAHQGCLPPFPADVFMIPQYGYLTLNNGSQAVGRSSFYCLEYFPSQMLRTGNNFTFSYTFEEVPFHSSYAHSQSLDRLMNPLIDQYLYYLNRTQNQSGSAQNKDLLFSRGSPAGMSVQPKNWLPGPCYRQQRVSKTKTDNNNSNFTWTGASKYNLNGRESIINPGTAMASHKDDEDKFFPMSGVMIFGKESAGASNTALDNVMITDEEEIKATNPVATERFGTVAVNFQSSSTHPATGDVHVMGALPGMVWQDRDVYLQGPIWAKIPHTDGHFHPSPLMGGFGLKHPPPQILIKNTPVPANPPAEFSATKFASFITQYSTGQVSVEIEWELQKENSKRWNPEVQYTSNYAKSANVDFTVDNNGLYTEPRPIGTRYLTRPL

SEQ ID NO: 956 - protein, 736 aa, synthetic construct
  REGION 1..736: note = source = /note="Description of Artificial Sequence: Synthetic polypeptide"
MAADGYLPDWLEDNLSEGIREWWDLKPGAPKPKANQQKQDDGRGLVLPGYKYLGPFNGLDKGEPVNAADAAALEHDKAYDQQLKAGDNPYLRYNHADAEFQERLQEDTSFGGNLGRAVFQAKKRVLEPFGLVEEGAKTAPGKKRPVEQSPQEPDSSSGIGKTGQQPAKKRLNFGQTGDSESVPDPQPLGEPPATPAAVGPTTMASGGGAPMADNNEGADGVGNASGNWHCDSTWLGDRVITTSTRTWALPTYNNHLYKQISSASTGASNDNHYFGYSTPWGYFDFNRFHCHFSPRDWQRLINNNWGFRPKRLNFKLFNIQVKEVTTNDGVTTIANNLTSTVQVFSDSEYQLPYVLGSAHQGCLPPFPADVFMIPQYGYLTLNNGSQAVGRSSFYCLEYFPSQMLRTGNNFTFSYTFEDVPFHSSYAHSQSLDRLMNPLIDQYLYYLNRTQNQSGSAQNKDLLFSRGSPAGMSVQLKNWLPGPCYRQQRVSKTKTDNNNSNFTWTGASKYNLNGRESIINPGTAMASHKDDEDKFFPMSGVMIFGKESAGASNTALDNVMITDEEEIKATNPVATERFGTVAVNFQSSSTDPATGDVHVMGALPGMVWQDRDVYLQGPIWAKIPHTDGHFHPSPLMGGFGLKHPPPQILIKNTPVPANPPAEFSATKFASFITQYSTGQVSVEIEWELQKENSKRWNPEVQYTSNYAKSANVDFTVDNNGLYTEPRPIGTRYLTRPL

SEQ ID NO: 957 - protein, 736 aa, synthetic construct
  REGION 1..736: note = source = /note="Description of Artificial Sequence: Synthetic polypeptide"
MAADGYLPDWLEDNLSEGIREWWDLKPGAPKPKANQQKQDDGRGLVLPGYKYLGPFNGLDKGEPVNAADAAALEHDKAYDQQLKAGDNPYLRYNHADAEFQERLQEDTSFGGNLGRAVFQAKKRVLEPFGLVEEGAKTAPGKKRPVEQSPQEPDSSSGIGKSGQQPAKKRLNFGQTGDSESVPDPQPLGEPPATPAAVGPTTMASGGGAPMADNNEGADGVGNASGNWHCDSTWLGDRVITTSTRTWALPTYNNHLYKQISSASTGASNDNHYFGYSTPWGYFDFNRFHCHFSPRDWQRLINNNWGFRPKRLNFKLFNIQVKEVTTNDGVTTIANNLTSTVQVFSDSEYQLPYVLGSAHQGCLPPFPADVFMIPQYGYLTLNNGSQAVGRSSFYCLEYFPSQMLRTGNNFTFSYTFEDVPFHSSYAHSQSLDRLMNPLIDQYLYYLNRTQNQSGSAQNKDLLFSRGSPAGMSVQPKNWLPGPCYRQQRVSKTKTDNNNSNFTWTGASKYNLNGRESIINPGTAMASHKDDEDKFFPMSGVMIFGKGSAGASNTALDNVMITDEEEIKATNPVATERFGTVAVNFQSSSTDPATGDVHVMGALPGMVWQDRDVYLQGPIWAKIPHTDGHFHPSPLMGGFGLKHPPPQILIKNTPVPANPPAEFSATKFASFITQYSTGQVSVEIEWELQKENSKRWNPEVQYTSNYAKSANVDFTVDNNGLYTEPRPIGTRYLTRPL

SEQ ID NO: 958 - protein, 736 aa, synthetic construct; identical to SEQ ID NO: 699
  REGION 1..736: note = source = /note="Description of Artificial Sequence: Synthetic polypeptide"

SEQ ID NO: 959 - protein, 742 aa, synthetic construct
  REGION 1..742: note = source = /note="Description of Artificial Sequence: Synthetic polypeptide"
MAADGYLPDWLEDNLSEGIREWWALKPGAPQPKANQQHQDNGRGLVLPGYKYLGPFNGLDKGEPVNEADAAALEHDKAYDKQLEQGDNPYLKYNHADAEFQQRLATDTSFGGNLGRAVFQAKKRILEPLGLVEEGVKTAPGKKRPLEKTPNRPTNPDSGKAPAKKKQKDGEPADSARRTLDFEDSGAGDGPPEGSSSGEMSHDAEMRAAPGGNAVEAGQGADGVGNASGDWHCDSTWSEGRVTTTSTRTWVLPTYNNHLYLRIGTTANSNTYNGFSTPWGYFDFNRFHCHFSPRDWQRLINNNWGLRPKSMRVKIFNIQVKEVTTSNGETTVANNLTSTVQIFADSTYELPYVMDAGQEGSFPPFPNDVFMVPQYGYCGVVTGKNQNQTDRNAFYCLEYFPSQMLRTGNNFEVSYQFEKVPFHSMYAHSQSLDRMMNPLLDQYLWHLQSTTTGNSLNQGTATTTYGKITTGDFAYYRKNWLPGACIKQQKFSKNANQNYKIPASGGDALLKYDTHTTLNGRWSNMAPGPPMATAGAGDSDFSNSQLIFAGPNPSGNTTTSSNNLLFTSEEEIATTNPRDTDMFGQIADNNQNATTAPHIANLDAMGIVPGMVWQNRDIYYQGPIWAKVPHTDGHFHPSPLMGGFGLKHPPPQIFIKNTPVPANPNTTFSAARINSFLTQYSTGQVAVQIDWEIQKEHSKRWNPEVQFTSNYGTQNSMLWAPDNAGNYHELRAIGSRFLTHHL

SEQ ID NO: 960 - DNA, 2211 bp, synthetic construct
  misc_feature 1..2211: note = source = /note="Description of Artificial Sequence: Synthetic polynucleotide"
  source 1..2211: mol_type = other DNA
atggctgccgatggttatcttccagattggctcgaggacaacctctctgagggcattcgcgagtggtgggacttgaaacctggagccccgaagcccaaagccaaccagcaaaagcaggacgacggccggggtctggtgcttcctggctacaagtacctcggacccttcaacggactcgacaagggggagcccgtcaacgcggcggacgcagcggccctcgagcacgacaaggcctacgaccagcagctcaaagcgggtgacaatccgtacctgcggtataaccacgccgacgccgagtttcaggagcgtctgcaagaagatacgtcttttgggggcaacctcgggcgagcagtcttccaggccaagaagcgggttctcgaacctctcggtctggttgaggaaggcgctaaggcggctcctggaaagaaacgtccggtagagcagtcgccacaagagccagactcctcctcgggcatcggcaagacaggccagcagcccgctaaaaagagactcaattttggtcagactggcgactcagagtcagtccccgatccacaacctctcggagaacctccagcagccccctcaggtctgggacctaatacaatggcttcaggcggtggcgctccaatggcagacaataacgaaggcgccgacggagtgggtaattcctcgggaaattggcattgcgattccacatggctgggggacagagtcatcaccaccagcacccgaacctgggccctgcccacctacaacaaccacctctacaagcaaatctccaacggcacctcgggaggaagcaccaacgacaacacctattttggctacagcaccccctgggggtattttgacttcaacagattccactgtcacttttcaccacgtgactggcaacgactcatcaacaacaattggggattccggcccaaaagactcaacttcaagctgttcaacatccaggtcaaggaagtcacgacgaacgaaggcaccaagaccatcgccaataatctcaccagcaccgtgcaggtctttacggactcggagtaccagttaccgtacgtgctaggatccgctcaccagggatgtctgcctccgttcccggcggacgtcttcatggttcctcagtacggctatttaactttaaacaatggaagccaagccctgggacgttcctccttctactgtctggagtatttcccatcgcagatgctgagaaccggcaacaactttcagttcagctacaccttcgaggacgtgcctttccacagcagctacgcgcacagccagagcctggacaggctgatgaatcccctcatcgaccagtacctgtactacctggtcagaacgcaaacgactggaactggagggacgcagactctggcattcagccaagcgggtcctagctcaatggccaaccaggctagaaattgggtgcccggaccttgctaccggcagcagcgcgtctccacgacaaccaaccagaacaacaacagcaactttgcctggacgggagctgccaagtttaagctgaacggccgagactctctaatgaatccgggcgtggcaatggcttcccacaaggatgacgacgaccgcttcttcccttcgagcggggtcctgatttttggcaagcaaggagccgggaacgatggagtggattacagccaagtgctgattacagatgaggaagaaatcaaggctaccaaccccgtggccacagaagaatatggagcagtggccatcaacaaccaggccgccaatacgcaggcgcagaccggactcgtgcacaaccagggggtgattcccggcatggtgtggcagaatagagacgtgtacctgcagggtcccatctgggccaaaattcctcacacggacggcaactttcacccgtctcccctgatgggcggctttggactgaagcacccgcctcctcaaattctcatcaagaacacaccggttccagcggacccgccgcttaccttcaaccaggccaagctgaactctttcatcacgcagtacagcaccggacaggtcagcgtggaaatcgagtgggagctgcagaaagaaaacagcaaacgctggaatccagagattcaatacacttccaactactacaaatctacaaatgtggactttgctgtcaacacggagggggtttatagcgagcctcgccccattggcacccgttacctcacccgcaacctgtaa

SEQ ID NO: 961 - DNA, 2592 bp, synthetic construct
  misc_feature 1..2592: note = source = /note="Description of Artificial Sequence: Synthetic polynucleotide"
  source 1..2592: mol_type = other DNA
ctggctgccgatggttatcttccagattggctcgaggacaacctctctgagggcattcgcgagtggtgggacttgaaacctggagccccgaagcccaaagccaaccagcaaaagcaggacgacggccggggtctggtgcttcctggctacaagtacctcggacccttcaacggactcgacaagggggagcccgtcaacgcggcggacgcagcggccctcgagcacgacaaggcctacgaccagcagctcaaagcgggtgacaatccgtacctgcggtataaccacgccgacgccgagtttcaggagcgtctgcaagaagatacgtcttttgggggcaacctcgggcgagcagtcttccaggccaagaagcgggttctcgaacctctcggtctggttgaggaaggcgctaagatggaagtgcagctccaagccagtggtggcggactggtgcaggcaggaggcagcttgaggctcagctgtgccgccagcggcttcaagatcacccactacaccatgggctggttccggcaggcccctggcaaggagagggagttcgtgagcaggattacctggggtggtgacaacaccttctacagcaacagcgtgaagggcaggttcaccatcagcagggacaacgccaagaacaccgtgtacctgcagatgaacagcctgaagcccgaggacaccgccgactactactgtgcagccggcagtaccagcaccgctacccccctgagggtggactactggggcaaaggcactcaggtgacagtgtcttcaggagggggtggcagcgctcctggaaagaaacgtccggtagagcagtcgccacaagagccagactcctcctcgggcatcggcaagacaggccagcagcccgctaaaaagagactcaattttggtcagactggcgactcagagtcagtccccgatccacaacctctcggagaacctccagcagccccctcaggtctgggacctaatacaatggcttcaggcggtggcgctccaatggcagacaataacgaaggcgccgacggagtgggtaattcctcgggaaattggcattgcgattccacatggctgggggacagagtcatcaccaccagcacccgaacctgggccctgcccacctacaacaaccacctctacaagcaaatctccaacggcacctcgggaggaagcaccaacgacaacacctattttggctacagcaccccctgggggtattttgacttcaacagattccactgtcacttttcaccacgtgactggcaacgactcatcaacaacaattggggattccggcccaaaagactcaacttcaagctgttcaacatccaggtcaaggaagtcacgacgaacgaaggcaccaagaccatcgccaataatctcaccagcaccgtgcaggtctttacggactcggagtaccagttaccgtacgtgctaggatccgctcaccagggatgtctgcctccgttcccggcggacgtcttcatggttcctcagtacggctatttaactttaaacaatggaagccaagccctgggacgttcctccttctactgtctggagtatttcccatcgcagatgctgagaaccggcaacaactttcagttcagctacaccttcgaggacgtgcctttccacagcagctacgcgcacagccagagcctggacaggctgatgaatcccctcatcgaccagtacctgtactacctggtcagaacgcaaacgactggaactggagggacgcagactctggcattcagccaagcgggtcctagctcaatggccaaccaggctagaaattgggtgcccggaccttgctaccggcagcagcgcgtctccacgacaaccaaccagaacaacaacagcaactttgcctggacgggagctgccaagtttaagctgaacggccgagactctctaatgaatccgggcgtggcaatggcttcccacaaggatgacgacgaccgcttcttcccttcgagcggggtcctgatttttggcaagcaaggagccgggaacgatggagtggattacagccaagtgctgattacagatgaggaagaaatcaaggctaccaaccccgtggccacagaagaatatggagcagtggccatcaacaaccaggccgccaatacgcaggcgcagaccggactcgtgcacaaccagggggtgattcccggcatggtgtggcagaatagagacgtgtacctgcagggtcccatctgggccaaaattcctcacacggacggcaactttcacccgtctcccctgatgggcggctttggactgaagcacccgcctcctcaaattctcatcaagaacacaccggttccagcggacccgccgcttaccttcaaccaggccaagctgaactctttcatcacgcagtacagcaccggacaggtcagcgtggaaatcgagtgggagctgcagaaagaaaacagcaaacgctggaatccagagattcaatacacttccaactactacaaatctacaaatgtggactttgctgtcaacacggagggggtttatagcgagcctcgccccattggcacccgttacctcacccgcaacctgtaa

SEQ ID NO: 962 - DNA, 2601 bp, synthetic construct
  misc_feature 1..2601: note = source = /note="Description of Artificial Sequence: Synthetic polynucleotide"
  source 1..2601: mol_type = other DNA
ctggctgccgatggttatcttccagattggctcgaggacaacctctctgagggcattcgcgagtggtgggacttgaaacctggagccccgaagcccaaagccaaccagcaaaagcaggacgacggccggggtctggtgcttcctggctacaagtacctcggacccttcaacggactcgacaagggggagcccgtcaacgcggcggacgcagcggccctcgagcacgacaaggcctacgaccagcagctcaaagcgggtgacaatccgtacctgcggtataaccacgccgacgccgagtttcaggagcgtctgcaagaagatacgtcttttgggggcaacctcgggcgagcagtcttccaggccaagaagcgggttctcgaacctctcggtctggttgaggaaggcgctaagatggaggtgcagctgcaggcttctggaggaggactggtgcaggctggagggagtctgaggctgtcttgcagtgcctcagtgaggactttctccatctacgccatgggctggtttaggcaggctcccgggaaggagcgcgaattcgtggccggaatcaaccggtctggcgacgtgaccaagtacgctgatttcgtgaaaggccggtttagcatttccagagacaacgccaagaatatggtgtatctgcagatgaactccctgaaacctgaagacacagctctgtactattgtgccgctacttgggcctacgataccgtgggggctctgacatcaggatataatttttggggccaggggacccaggtgacagtgagctccggaggaggaggaagcgctcctggaaagaaacgtccggtagagcagtcgccacaagagccagactcctcctcgggcatcggcaagacaggccagcagcccgctaaaaagagactcaattttggtcagactggcgactcagagtcagtccccgatccacaacctctcggagaacctccagcagccccctcaggtctgggacctaatacaatggcttcaggcggtggcgctccaatggcagacaataacgaaggcgccgacggagtgggtaattcctcgggaaattggcattgcgattccacatggctgggggacagagtcatcaccaccagcacccgaacctgggccctgcccacctacaacaaccacctctacaagcaaatctccaacggcacctcgggaggaagcaccaacgacaacacctattttggctacagcaccccctgggggtattttgacttcaacagattccactgtcacttttcaccacgtgactggcaacgactcatcaacaacaattggggattccggcccaaaagactcaacttcaagctgttcaacatccaggtcaaggaagtcacgacgaacgaaggcaccaagaccatcgccaataatctcaccagcaccgtgcaggtctttacggactcggagtaccagttaccgtacgtgctaggatccgctcaccagggatgtctgcctccgttcccggcggacgtcttcatggttcctcagtacggctatttaactttaaacaatggaagccaagccctgggacgttcctccttctactgtctggagtatttcccatcgcagatgctgagaaccggcaacaactttcagttcagctacaccttcgaggacgtgcctttccacagcagctacgcgcacagccagagcctggacaggctgatgaatcccctcatcgaccagtacctgtactacctggtcagaacgcaaacgactggaactggagggacgcagactctggcattcagccaagcgggtcctagctcaatggccaaccaggctagaaattgggtgcccggaccttgctaccggcagcagcgcgtctccacgacaaccaaccagaacaacaacagcaactttgcctggacgggagctgccaagtttaagctgaacggccgagactctctaatgaatccgggcgtggcaatggcttcccacaaggatgacgacgaccgcttcttcccttcgagcggggtcctgatttttggcaagcaaggagccgggaacgatggagtggattacagccaagtgctgattacagatgaggaagaaatcaaggctaccaaccccgtggccacagaagaatatggagcagtggccatcaacaaccaggccgccaatacgcaggcgcagaccggactcgtgcacaaccagggggtgattcccggcatggtgtggcagaatagagacgtgtacctgcagggtcccatctgggccaaaattcctcacacggacggcaactttcacccgtctcccctgatgggcggctttggactgaagcacccgcctcctcaaattctcatcaagaacacaccggttccagcggacccgccgcttaccttcaaccaggccaagctgaactctttcatcacgcagtacagcaccggacaggtcagcgtggaaatcgagtgggagctgcagaaagaaaacagcaaacgctggaatccagagattcaatacacttccaactactacaaatctacaaatgtggactttgctgtcaacacggagggggtttatagcgagcctcgccccattggcacccgttacctcacccgcaacctgtaa

SEQ ID NO: 963 - DNA, 2367 bp, synthetic construct
  misc_feature 1..2367: note = source = /note="Description of Artificial Sequence: Synthetic polynucleotide"
  source 1..2367: mol_type = other DNA
ctggctgccgatggttatcttccagattggctcgaggacaacctctctgagggcattcgcgagtggtgggacttgaaacctggagccccgaagcccaaagccaaccagcaaaagcaggacgacggccggggtctggtgcttcctggctacaagtacctcggacccttcaacggactcgacaagggggagcccgtcaacgcggcggacgcagcggccctcgagcacgacaaggcctacgaccagcagctcaaagcgggtgacaatccgtacctgcggtataaccacgccgacgccgagtttcaggagcgtctgcaagaagatacgtcttttgggggcaacctcgggcgagcagtcttccaggccaagaagcgggttctcgaacctctcggtctggttgaggaaggcgctaagatgccaagcagtgtaatcgatgcgctgcagtacaagctggagggcaccacgaggctgaccaggaagaggggtctgaagctggccacggccctcagccttagcaataagttcgtagagggcagccccagcggcggcggcggcagcggcggcggcggcagcgctcctggaaagaaacgtccggtagagcagtcgccacaagagccagactcctcctcgggcatcggcaagacaggccagcagcccgctaaaaagagactcaattttggtcagactggcgactcagagtcagtccccgatccacaacctctcggagaacctccagcagccccctcaggtctgggacctaatacaatggcttcaggcggtggcgctccaatggcagacaataacgaaggcgccgacggagtgggtaattcctcgggaaattggcattgcgattccacatggctgggggacagagtcatcaccaccagcacccgaacctgggccctgcccacctacaacaaccacctctacaagcaaatctccaacggcacctcgggaggaagcaccaacgacaacacctattttggctacagcaccccctgggggtattttgacttcaacagattccactgtcacttttcaccacgtgactggcaacgactcatcaacaacaattggggattccggcccaaaagactcaacttcaagctgttcaacatccaggtcaaggaagtcacgacgaacgaaggcaccaagaccatcgccaataatctcaccagcaccgtgcaggtctttacggactcggagtaccagttaccgtacgtgctaggatccgctcaccagggatgtctgcctccgttcccggcggacgtcttcatggttcctcagtacggctatttaactttaaacaatggaagccaagccctgggacgttcctccttctactgtctggagtatttcccatcgcagatgctgagaaccggcaacaactttcagttcagctacaccttcgaggacgtgcctttccacagcagctacgcgcacagccagagcctggacaggctgatgaatcccctcatcgaccagtacctgtactacctggtcagaacgcaaacgactggaactggagggacgcagactctggcattcagccaagcgggtcctagctcaatggccaaccaggctagaaattgggtgcccggaccttgctaccggcagcagcgcgtctccacgacaaccaaccagaacaacaacagcaactttgcctggacgggagctgccaagtttaagctgaacggccgagactctctaatgaatccgggcgtggcaatggcttcccacaaggatgacgacgaccgcttcttcccttcgagcggggtcctgatttttggcaagcaaggagccgggaacgatggagtggattacagccaagtgctgattacagatgaggaagaaatcaaggctaccaaccccgtggccacagaagaatatggagcagtggccatcaacaaccaggccgccaatacgcaggcgcagaccggactcgtgcacaaccagggggtgattcccggcatggtgtggcagaatagagacgtgtacctgcagggtcccatctgggccaaaattcctcacacggacggcaactttcacccgtctcccctgatgggcggctttggactgaagcacccgcctcctcaaattctcatcaagaacacaccggttccagcggacccgccgcttaccttcaaccaggccaagctgaactctttcatcacgcagtacagcaccggacaggtcagcgtggaaatcgagtgggagctgcagaaagaaaacagcaaacgctggaatccagagattcaatacacttccaactactacaaatctacaaatgtggactttgctgtcaacacggagggggtttatagcgagcctcgccccattggcacccgttacctcacccgcaacctgtaa

SEQ ID NO: 964 - DNA, 2328 bp, synthetic construct
  misc_feature 1..2328: note = source = /note="Description of Artificial Sequence: Synthetic polynucleotide"
  source 1..2328: mol_type = other DNA
ctggctgccgatggttatcttccagattggctcgaggacaacctctctgagggcattcgcgagtggtgggacttgaaacctggagccccgaagcccaaagccaaccagcaaaagcaggacgacggccggggtctggtgcttcctggctacaagtacctcggacccttcaacggactcgacaagggggagcccgtcaacgcggcggacgcagcggccctcgagcacgacaaggcctacgaccagcagctcaaagcgggtgacaatccgtacctgcggtataaccacgccgacgccgagtttcaggagcgtctgcaagaagatacgtcttttgggggcaacctcgggcgagcagtcttccaggccaagaagcgggttctcgaacctctcggtctggttgaggaaggcgctaagatgtataccatctggatgcccgagaaccccaggcccggtaccccctgcgacatcttcaccaacagcaggggcaagcgagccagcaacggcggcggcggcggcagcggcggcggcggcagcgctcctggaaagaaacgtccggtagagcagtcgccacaagagccagactcctcctcgggcatcggcaagacaggccagcagcccgctaaaaagagactcaattttggtcagactggcgactcagagtcagtccccgatccacaacctctcggagaacctccagcagccccctcaggtctgggacctaatacaatggcttcaggcggtggcgctccaatggcagacaataacgaaggcgccgacggagtgggtaattcctcgggaaattggcattgcgattccacatggctgggggacagagtcatcaccaccagcacccgaacctgggccctgcccacctacaacaaccacctctacaagcaaatctccaacggcacctcgggaggaagcaccaacgacaacacctattttggctacagcaccccctgggggtattttgacttcaacagattccactgtcacttttcaccacgtgactggcaacgactcatcaacaacaattggggattccggcccaaaagactcaacttcaagctgttcaacatccaggtcaaggaagtcacgacgaacgaaggcaccaagaccatcgccaataatctcaccagcaccgtgcaggtctttacggactcggagtaccagttaccgtacgtgctaggatccgctcaccagggatgtctgcctccgttcccggcggacgtcttcatggttcctcagtacggctatttaactttaaacaatggaagccaagccctgggacgttcctccttctactgtctggagtatttcccatcgcagatgctgagaaccggcaacaactttcagttcagctacaccttcgaggacgtgcctttccacagcagctacgcgcacagccagagcctggacaggctgatgaatcccctcatcgaccagtacctgtactacctggtcagaacgcaaacgactggaactggagggacgcagactctggcattcagccaagcgggtcctagctcaatggccaaccaggctagaaattgggtgcccggaccttgctaccggcagcagcgcgtctccacgacaaccaaccagaacaacaacagcaactttgcctggacgggagctgccaagtttaagctgaacggccgagactctctaatgaatccgggcgtggcaatggcttcccacaaggatgacgacgaccgcttcttcccttcgagcggggtcctgatttttggcaagcaaggagccgggaacgatggagtggattacagccaagtgctgattacagatgaggaagaaatcaaggctaccaaccccgtggccacagaagaatatggagcagtggccatcaacaaccaggccgccaatacgcaggcgcagaccggactcgtgcacaaccagggggtgattcccggcatggtgtggcagaatagagacgtgtacctgcagggtcccatctgggccaaaattcctcacacggacggcaactttcacccgtctcccctgatgggcggctttggactgaagcacccgcctcctcaaattctcatcaagaacacaccggttccagcggacccgccgcttaccttcaaccaggccaagctgaactctttcatcacgcagtacagcaccggacaggtcagcgtggaaatcgagtgggagctgcagaaagaaaacagcaaacgctggaatccagagattcaatacacttccaactactacaaatctacaaatgtggactttgctgtcaacacggagggggtttatagcgagcctcgccccattggcacccgttacctcacccgcaacctgtaa

SEQ ID NO: 965 - DNA, 2298 bp, synthetic construct
  misc_feature 1..2298: note = source = /note="Description of Artificial Sequence: Synthetic polynucleotide"
  source 1..2298: mol_type = other DNA
ctggctgccgatggttatcttccagattggctcgaggacaacctctctgagggcattcgcgagtggtgggacttgaaacctggagccccgaagcccaaagccaaccagcaaaagcaggacgacggccggggtctggtgcttcctggctacaagtacctcggacccttcaacggactcgacaagggggagcccgtcaacgcggcggacgcagcggccctcgagcacgacaaggcctacgaccagcagctcaaagcgggtgacaatccgtacctgcggtataaccacgccgacgccgagtttcaggagcgtctgcaagaagatacgtcttttgggggcaacctcgggcgagcagtcttccaggccaagaagcgggttctcgaacctctcggtctggttgaggaaggcgctaagatgaccttcttctacggcggcagcaggggcaagaggaacaacttcaagaccgaggagtacggcggcggcggcagcggcggcggcggcagcgctcctggaaagaaacgtccggtagagcagtcgccacaagagccagactcctcctcgggcatcggcaagacaggccagcagcccgctaaaaagagactcaattttggtcagactggcgactcagagtcagtccccgatccacaacctctcggagaacctccagcagccccctcaggtctgggacctaatacaatggcttcaggcggtggcgctccaatggcagacaataacgaaggcgccgacggagtgggtaattcctcgggaaattggcattgcgattccacatggctgggggacagagtcatcaccaccagcacccgaacctgggccctgcccacctacaacaaccacctctacaagcaaatctccaacggcacctcgggaggaagcaccaacgacaacacctattttggctacagcaccccctgggggtattttgacttcaacagattccactgtcacttttcaccacgtgactggcaacgactcatcaacaacaattggggattccggcccaaaagactcaacttcaagctgttcaacatccaggtcaaggaagtcacgacgaacgaaggcaccaagaccatcgccaataatctcaccagcaccgtgcaggtctttacggactcggagtaccagttaccgtacgtgctaggatccgctcaccagggatgtctgcctccgttcccggcggacgtcttcatggttcctcagtacggctatttaactttaaacaatggaagccaagccctgggacgttcctccttctactgtctggagtatttcccatcgcagatgctgagaaccggcaacaactttcagttcagctacaccttcgaggacgtgcctttccacagcagctacgcgcacagccagagcctggacaggctgatgaatcccctcatcgaccagtacctgtactacctggtcagaacgcaaacgactggaactggagggacgcagactctggcattcagccaagcgggtcctagctcaatggccaaccaggctagaaattgggtgcccggaccttgctaccggcagcagcgcgtctccacgacaaccaaccagaacaacaacagcaactttgcctggacgggagctgccaagtttaagctgaacggccgagactctctaatgaatccgggcgtggcaatggcttcccacaaggatgacgacgaccgcttcttcccttcgagcggggtcctgatttttggcaagcaaggagccgggaacgatggagtggattacagccaagtgctgattacagatgaggaagaaatcaaggctaccaaccccgtggccacagaagaatatggagcagtggccatcaacaaccaggccgccaatacgcaggcgcagaccggactcgtgcacaaccagggggtgattcccggcatggtgtggcagaatagagacgtgtacctgcagggtcccatctgggccaaaattcctcacacggacggcaactttcacccgtctcccctgatgggcggctttggactgaagcacccgcctcctcaaattctcatcaagaacacaccggttccagcggacccgccgcttaccttcaaccaggccaagctgaactctttcatcacgcagtacagcaccggacaggtcagcgtggaaatcgagtgggagctgcagaaagaaaacagcaaacgctggaatccagagattcaatacacttccaactactacaaatctacaaatgtggactttgctgtcaacacggagggggtttatagcgagcctcgccccattggcacccgttacctcacccgcaacctgtaa

SEQ ID NO: 966 - DNA, 2211 bp, synthetic construct
  misc_feature 1..2211: note = source = /note="Description of Artificial Sequence: Synthetic polynucleotide"
  source 1..2211: mol_type = other DNA
atggctgccgatggttatcttccagattggctcgaggacaaccttagtgaaggaattcgcgagtggtgggctttgaaacctggagcccctcaacccaaggcaaatcaacaacatcaagacaacgctcgaggtcttgtgcttccgggttacaaataccttggacccggcaacggactcgacaagggggagccggtcaacgcagcagacgcggcggccctcgagcacgacaaggcctacgaccagcagctcaaggccggagacaacccgtacctcaagtacaaccacgccgacgccgagttccaggagcggctcaaagaagatacgtcttttgggggcaacctcgggcgagcagtcttccaggccaaaaagaggcttcttgaacctcttggtctggttgaggaagcggctaaggcggctcctggaaagaagaggcctgtagagcagtctcctcaggaaccggactcctccgcgggtattggcaaatcgggtgcacagcccgctaaaaagagactcaatttcggtcagactggcgacacagagtcagtcccagaccctcaaccaatcggagaacctcccgcagccccctcaggtgtgggatctcttacaatggcttcaggtggtggcgcaccagtggcagacaataacgaaggtgccgatggagtgggtagttcctcgggaaattggcattgcgattcccaatggctgggggacagagtcatcaccaccagcacccgaacctgggccctgcccacctacaacaatcacctctacaagcaaatctccaacagcacatctggaggatcttcaaatgacaacgcctacttcggctacagcaccccctgggggtattttgacttcaacagattccactgccacttctcaccacgtgactggcagcgactcatcaacaacaactggggattccggcctaagcgactcaacttcaagctcttcaacattcaggtcaaagaggttacggacaacaatggagtcaagaccatcgccaataaccttaccagcacggtccaggtcttcacggactcagactatcagctcccgtacgtgctcgggtcggctcacgagggctgcctcccgccgttcccagcggacgttttcatgattcctcagtacgggtatctgacgcttaatgatggaagccaggccgtgggtcgttcgtccttttactgcctggaatatttcccgtcgcaaatgctaagaacgggtaacaacttccagttcaactacgagtttgagaacgtacctttccatagcagctacgctcacagccaaagcctggaccgactaatgaatccactcatcgaccaatacttgtactatctctcaaagactattaacgattctggacagaatcaacaaacgctaaaattcagtgtggccggacccagcaacatggctgtccagggaagaaactacatacctggacccagctaccgacaacaacgtgtctcaaccactgtgactcaaaacaacaacagcgaatttgcttggcctggagcttcttcttgggctctcaatggacgtaatagcttgatgaatcctggacctgctatggccagccacaaagaaggagaggaccgtttctttcctttgtctggatctttaatttttggcaaacaaggaactggaagagacaacgtggatgcggacgaagtcatgataaccaacgaagaagaaattaaaactactaacccggtagcaacggagtcctatggacaagtggccataaaccaccagagtgcccaagcacaggcgcagaccggctgggttcaaaaccaaggaatacttccgggtatggtttggcaggacagagatgtgtacctgcaaggacccatttgggccaaaattcctcacacggacggcaactttcacccttctccgctgatgggagggtttggaatgaagcacccgcctcctcagatcctcatcaaaaacacacctgtacctgcggatcctccaacggccttcaacaaggacaagctgaactctttcatcacccagtattctactggccaagtcagcgtggagatcgagtgggagctgcagaaggaaaacagcaagcgctggaacccggagatccagtacacttccaactattacaagtctaataatgttgaatttgctgttaatactgaaggtgtatatagtgaaccccgccccattggcaccagatacctgactcgtaatctgtaa

SEQ ID NO: 967 - DNA, 2277 bp, synthetic construct
  misc_feature 1..2277: note = source = /note="Description of Artificial Sequence: Synthetic polynucleotide"
  source 1..2277: mol_type = other DNA
ctggctgccgatggttatcttccagattggctcgaggacaaccttagtgaaggaattcgcgagtggtgggctttgaaacctggagcccctcaacccaaggcaaatcaacaacatcaagacaacgctcgaggtcttgtgcttccgggttacaaataccttggacccggcaacggactcgacaagggggagccggtcaacgcagcagacgcggcggccctcgagcacgacaaggcctacgaccagcagctcaaggccggagacaacccgtacctcaagtacaaccacgccgacgccgagttccaggagcggctcaaagaagatacgtcttttgggggcaacctcgggcgagcagtcttccaggccaaaaagaggcttcttgaacctcttggtctggttgaggaagcggctaagatgaacaaccagaagatcgtgaacctgaaggagaaggtggcccagctggaggccggcggcggcggcagcgctcctggaaagaagaggcctgtagagcagtctcctcaggaaccggactcctccgcgggtattggcaaatcgggtgcacagcccgctaaaaagagactcaatttcggtcagactggcgacacagagtcagtcccagaccctcaaccaatcggagaacctcccgcagccccctcaggtgtgggatctcttacaatggcttcaggtggtggcgcaccagtggcagacaataacgaaggtgccgatggagtgggtagttcctcgggaaattggcattgcgattcccaatggctgggggacagagtcatcaccaccagcacccgaacctgggccctgcccacctacaacaatcacctctacaagcaaatctccaacagcacatctggaggatcttcaaatgacaacgcctacttcggctacagcaccccctgggggtattttgacttcaacagattccactgccacttctcaccacgtgactggcagcgactcatcaacaacaactggggattccggcctaagcgactcaacttcaagctcttcaacattcaggtcaaagaggttacggacaacaatggagtcaagaccatcgccaataaccttaccagcacggtccaggtcttcacggactcagactatcagctcccgtacgtgctcgggtcggctcacgagggctgcctcccgccgttcccagcggacgttttcatgattcctcagtacgggtatctgacgcttaatgatggaagccaggccgtgggtcgttcgtccttttactgcctggaatatttcccgtcgcaaatgctaagaacgggtaacaacttccagttcaactacgagtttgagaacgtacctttccatagcagctacgctcacagccaaagcctggaccgactaatgaatccactcatcgaccaatacttgtactatctctcaaagactattaacgattctggacagaatcaacaaacgctaaaattcagtgtggccggacccagcaacatggctgtccagggaagaaactacatacctggacccagctaccgacaacaacgtgtctcaaccactgtgactcaaaacaacaacagcgaatttgcttggcctggagcttcttcttgggctctcaatggacgtaatagcttgatgaatcctggacctgctatggccagccacaaagaaggagaggaccgtttctttcctttgtctggatctttaatttttggcaaacaaggaactggaagagacaacgtggatgcggacgaagtcatgataaccaacgaagaagaaattaaaactactaacccggtagcaacggagtcctatggacaagtggccataaaccaccagagtgcccaagcacaggcgcagaccggctgggttcaaaaccaaggaatacttccgggtatggtttggcaggacagagatgtgtacctgcaaggacccatttgggccaaaattcctcacacggacggcaactttcacccttctccgctgatgggagggtttggaatgaagcacccgcctcctcagatcctcatcaaaaacacacctgtacctgcggatcctccaacggccttcaacaaggacaagctgaactctttcatcacccagtattctactggccaagtcagcgtggagatcgagtgggagctgcagaaggaaaacagcaagcgctggaacccggagatccagtacacttccaactattacaagtctaataatgttgaatttgctgttaatactgaaggtgtatatagtgaaccccgccccattggcaccagatacctgactcgtaatctgtaa

SEQ ID NO: 968 - DNA, 2313 bp, synthetic construct
  misc_feature 1..2313: note = source = /note="Description of Artificial Sequence: Synthetic polynucleotide"
  source 1..2313: mol_type = other DNA
ctggctgccgatggttatcttccagattggctcgaggacaaccttagtgaaggaattcgcgagtggtgggctttgaaacctggagcccctcaacccaaggcaaatcaacaacatcaagacaacgctcgaggtcttgtgcttccgggttacaaataccttggacccggcaacggactcgacaagggggagccggtcaacgcagcagacgcggcggccctcgagcacgacaaggcctacgaccagcagctcaaggccggagacaacccgtacctcaagtacaaccacgccgacgccgagttccaggagcggctcaaagaagatacgtcttttgggggcaacctcgggcgagcagtcttccaggccaaaaagaggcttcttgaacctcttggtctggttgaggaagcggctaagatgtataccatctggatgcccgagaaccccaggcccggtaccccctgcgacatcttcaccaacagcaggggcaagcgagccagcaacggcggcggcggcggcagcgctcctggaaagaagaggcctgtagagcagtctcctcaggaaccggactcctccgcgggtattggcaaatcgggtgcacagcccgctaaaaagagactcaatttcggtcagactggcgacacagagtcagtcccagaccctcaaccaatcggagaacctcccgcagccccctcaggtgtgggatctcttacaatggcttcaggtggtggcgcaccagtggcagacaataacgaaggtgccgatggagtgggtagttcctcgggaaattggcattgcgattcccaatggctgggggacagagtcatcaccaccagcacccgaacctgggccctgcccacctacaacaatcacctctacaagcaaatctccaacagcacatctggaggatcttcaaatgacaacgcctacttcggctacagcaccccctgggggtattttgacttcaacagattccactgccacttctcaccacgtgactggcagcgactcatcaacaacaactggggattccggcctaagcgactcaacttcaagctcttcaacattcaggtcaaagaggttacggacaacaatggagtcaagaccatcgccaataaccttaccagcacggtccaggtcttcacggactcagactatcagctcccgtacgtgctcgggtcggctcacgagggctgcctcccgccgttcccagcggacgttttcatgattcctcagtacgggtatctgacgcttaatgatggaagccaggccgtgggtcgttcgtccttttactgcctggaatatttcccgtcgcaaatgctaagaacgggtaacaacttccagttcaactacgagtttgagaacgtacctttccatagcagctacgctcacagccaaagcctggaccgactaatgaatccactcatcgaccaatacttgtactatctctcaaagactattaacgattctggacagaatcaacaaacgctaaaattcagtgtggccggacccagcaacatggctgtccagggaagaaactacatacctggacccagctaccgacaacaacgtgtctcaaccactgtgactcaaaacaacaacagcgaatttgcttggcctggagcttcttcttgggctctcaatggacgtaatagcttgatgaatcctggacctgctatggccagccacaaagaaggagaggaccgtttctttcctttgtctggatctttaatttttggcaaacaaggaactggaagagacaacgtggatgcggacgaagtcatgataaccaacgaagaagaaattaaaactactaacccggtagcaacggagtcctatggacaagtggccataaaccaccagagtgcccaagcacaggcgcagaccggctgggttcaaaaccaaggaatacttccgggtatggtttggcaggacagagatgtgtacctgcaaggacccatttgggccaaaattcctcacacggacggcaactttcacccttctccgctgatgggagggtttggaatgaagcacccgcctcctcagatcctcatcaaaaacacacctgtacctgcggatcctccaacggccttcaacaaggacaagctgaactctttcatcacccagtattctactggccaagtcagcgtggagatcgagtgggagctgcagaaggaaaacagcaagcgctggaacccggagatccagtacacttccaactattacaagtctaataatgttgaatttgctgttaatactgaaggtgtatatagtgaaccccgccccattggcaccagatacctgactcgtaatctgtaa

SEQ ID NO: 969 - DNA, 2283 bp, synthetic construct
  misc_feature 1..2283: note = source = /note="Description of Artificial Sequence: Synthetic polynucleotide"
  source 1..2283: mol_type = other DNA
ctggctgccgatggttatcttccagattggctcgaggacaaccttagtgaaggaattcgcgagtggtgggctttgaaacctggagcccctcaacccaaggcaaatcaacaacatcaagacaacgctcgaggtcttgtgcttccgggttacaaataccttggacccggcaacggactcgacaagggggagccggtcaacgcagcagacgcggcggccctcgagcacgacaaggcctacgaccagcagctcaaggccggagacaacccgtacctcaagtacaaccacgccgacgccgagttccaggagcggctcaaagaagatacgtcttttgggggcaacctcgggcgagcagtcttccaggccaaaaagaggcttcttgaacctcttggtctggttgaggaagcggctaagatgaccttcttctacggcggcagcaggggcaagaggaacaacttcaagaccgaggagtacggcggcggcggcagcgctcctggaaagaagaggcctgtagagcagtctcctcaggaaccggactcctccgcgggtattggcaaatcgggtgcacagcccgctaaaaagagactcaatttcggtcagactggcgacacagagtcagtcccagaccctcaaccaatcggagaacctcccgcagccccctcaggtgtgggatctcttacaatggcttcaggtggtggcgcaccagtggcagacaataacgaaggtgccgatggagtgggtagttcctcgggaaattggcattgcgattcccaatggctgggggacagagtcatcaccaccagcacccgaacctgggccctgcccacctacaacaatcacctctacaagcaaatctccaacagcacatctggaggatcttcaaatgacaacgcctacttcggctacagcaccccctgggggtattttgacttcaacagattccactgccacttctcaccacgtgactggcagcgactcatcaacaacaactggggattccggcctaagcgactcaacttcaagctcttcaacattcaggtcaaagaggttacggacaacaatggagtcaagaccatcgccaataaccttaccagcacggtccaggtcttcacggactcagactatcagctcccgtacgtgctcgggtcggctcacgagggctgcctcccgccgttcccagcggacgttttcatgattcctcagtacgggtatctgacgcttaatgatggaagccaggccgtgggtcgttcgtccttttactgcctggaatatttcccgtcgcaaatgctaagaacgggtaacaacttccagttcaactacgagtttgagaacgtacctttccatagcagctacgctcacagccaaagcctggaccgactaatgaatccactcatcgaccaatacttgtactatctctcaaagactattaacgattctggacagaatcaacaaacgctaaaattcagtgtggccggacccagcaacatggctgtccagggaagaaactacatacctggacccagctaccgacaacaacgtgtctcaaccactgtgactcaaaacaacaacagcgaatttgcttggcctggagcttcttcttgggctctcaatggacgtaatagcttgatgaatcctggacctgctatggccagccacaaagaaggagaggaccgtttctttcctttgtctggatctttaatttttggcaaacaaggaactggaagagacaacgtggatgcggacgaagtcatgataaccaacgaagaagaaattaaaactactaacccggtagcaacggagtcctatggacaagtggccataaaccaccagagtgcccaagcacaggcgcagaccggctgggttcaaaaccaaggaatacttccgggtatggtttggcaggacagagatgtgtacctgcaaggacccatttgggccaaaattcctcacacggacggcaactttcacccttctccgctgatgggagggtttggaatgaagcacccgcctcctcagatcctcatcaaaaacacacctgtacctgcggatcctccaacggccttcaacaaggacaagctgaactctttcatcacccagtattctactggccaagtcagcgtggagatcgagtgggagctgcagaaggaaaacagcaagcgctggaacccggagatccagtacacttccaactattacaagtctaataatgttgaatttgctgttaatactgaaggtgtatatagtgaaccccgccccattggcaccagatacctgactcgtaatctgtaa

SEQ ID NO: 970 - DNA, 2283 bp, synthetic construct
  misc_feature 1..2283: note = source = /note="Description of Artificial Sequence: Synthetic polynucleotide"
  source 1..2283: mol_type = other DNA
ctggctgccgatggttatcttccagattggctcgaggacaaccttagtgaaggaattcgcgagtggtgggctttgaaacctggagcccctcaacccaaggcaaatcaacaacatcaagacaacgctcgaggtcttgtgcttccgggttacaaataccttggacccggcaacggactcgacaagggggagccggtcaacgcagcagacgcggcggccctcgagcacgacaaggcctacgaccagcagctcaaggccggagacaacccgtacctcaagtacaaccacgccgacgccgagttccaggagcggctcaaagaagatacgtcttttgggggcaacctcgggcgagcagtcttccaggccaaaaagaggcttcttgaacctcttggtctggttgaggaagcggctaagatggcagctgcggccgccgcggctgcagcggctgcagccgccgcagctgcggctgcagcgggcggcggcggcagcgctcctggaaagaagaggcctgtagagcagtctcctcaggaaccggactcctccgcgggtattggcaaatcgggtgcacagcccgctaaaaagagactcaatttcggtcagactggcgacacagagtcagtcccagaccctcaaccaatcggagaacctcccgcagccccctcaggtgtgggatctcttacaatggcttcaggtggtggcgcaccagtggcagacaataacgaaggtgccgatggagtgggtagttcctcgggaaattggcattgcgattcccaatggctgggggacagagtcatcaccaccagcacccgaacctgggccctgcccacctacaacaatcacctctacaagcaaatctccaacagcacatctggaggatcttcaaatgacaacgcctacttcggctacagcaccccctgggggtattttgacttcaacagattccactgccacttctcaccacgtgactggcagcgactcatcaacaacaactggggattccggcctaagcgactcaacttcaagctcttcaacattcaggtcaaagaggttacggacaacaatggagtcaagaccatcgccaataaccttaccagcacggtccaggtcttcacggactcagactatcagctcccgtacgtgctcgggtcggctcacgagggctgcctcccgccgttcccagcggacgttttcatgattcctcagtacgggtatctgacgcttaatgatggaagccaggccgtgggtcgttcgtccttttactgcctggaatatttcccgtcgcaaatgctaagaacgggtaacaacttccagttcaactacgagtttgagaacgtacctttccatagcagctacgctcacagccaaagcctggaccgactaatgaatccactcatcgaccaatacttgtactatctctcaaagactattaacgattctggacagaatcaacaaacgctaaaattcagtgtggccggacccagcaacatggctgtccagggaagaaactacatacctggacccagctaccgacaacaacgtgtctcaaccactgtgactcaaaacaacaacagcgaatttgcttggcctggagcttcttcttgggctctcaatggacgtaatagcttgatgaatcctggacctgctatggccagccacaaagaaggagaggaccgtttctttcctttgtctggatctttaatttttggcaaacaaggaactggaagagacaacgtggatgcggacgaagtcatgataaccaacgaagaagaaattaaaactactaacccggtagcaacggagtcctatggacaagtggccataaaccaccagagtgcccaagcacaggcgcagaccggctgggttcaaaaccaaggaatacttccgggtatggtttggcaggacagagatgtgtacctgcaaggacccatttgggccaaaattcctcacacggacggcaactttcacccttctccgctgatgggagggtttggaatgaagcacccgcctcctcagatcctcatcaaaaacacacctgtacctgcggatcctccaacggccttcaacaaggacaagctgaactctttcatcacccagtattctactggccaagtcagcgtggagatcgagtgggagctgcagaaggaaaacagcaagcgctggaacccggagatccagtacacttccaactattacaagtctaataatgttgaatttgctgttaatactgaaggtgtatatagtgaaccccgccccattggcaccagatacctgactcgtaatctgtaa

SEQ ID NO: 971 - protein, 726 aa, synthetic construct
  REGION 1..726: note = source = /note="Description of Artificial Sequence: Synthetic polypeptide"
MEVQLQASGGGLVQAGGSLRLSCAASGFKITHYTMGWFRQAPGKEREFVSRITWGGDNTFYSNSVKGRFTISRDNAKNTVYLQMNSLKPEDTADYYCAAGSTSTATPLRVDYWGKGTQVTVSSGGGGSAPGKKRPVEQSPQEPDSSSGIGKTGQQPAKKRLNFGQTGDSESVPDPQPLGEPPAAPSGLGPNTMASGGGAPMADNNEGADGVGNSSGNWHCDSTWLGDRVITTSTRTWALPTYNNHLYKQISNGTSGGSTNDNTYFGYSTPWGYFDFNRFHCHFSPRDWQRLINNNWGFRPKRLNFKLFNIQVKEVTTNEGTKTIANNLTSTVQVFTDSEYQLPYVLGSAHQGCLPPFPADVFMVPQYGYLTLNNGSQALGRSSFYCLEYFPSQMLRTGNNFQFSYTFEDVPFHSSYAHSQSLDRLMNPLIDQYLYYLVRTQTTGTGGTQTLAFSQAGPSSMANQARNWVPGPCYRQQRVSTTTNQNNNSNFAWTGAAKFKLNGRDSLMNPGVAMASHKDDDDRFFPSSGVLIFGKQGAGNDGVDYSQVLITDEEEIKATNPVATEEYGAVAINNQAANTQAQTGLVHNQGVIPGMVWQNRDVYLQGPIWAKIPHTDGNFHPSPLMGGFGLKHPPPQILIKNTPVPADPPLTFNQAKLNSFITQYSTGQVSVEIEWELQKENSKRWNPEIQYTSNYYKSTNVDFAVNTEGVYSEPRPIGTRYLTRNL

SEQ ID NO: 972 - protein, 729 aa, synthetic construct
  REGION 1..729: note = source = /note="Description of Artificial Sequence: Synthetic polypeptide"
MEVQLQASGGGLVQAGGSLRLSCSASVRTFSIYAMGWFRQAPGKEREFVAGINRSGDVTKYADFVKGRFSISRDNAKNMVYLQMNSLKPEDTALYYCAATWAYDTVGALTSGYNFWGQGTQVTVSSGGGGSAPGKKRPVEQSPQEPDSSSGIGKTGQQPAKKRLNFGQTGDSESVPDPQPLGEPPAAPSGLGPNTMASGGGAPMADNNEGADGVGNSSGNWHCDSTWLGDRVITTSTRTWALPTYNNHLYKQISNGTSGGSTNDNTYFGYSTPWGYFDFNRFHCHFSPRDWQRLINNNWGFRPKRLNFKLFNIQVKEVTTNEGTKTIANNLTSTVQVFTDSEYQLPYVLGSAHQGCLPPFPADVFMVPQYGYLTLNNGSQALGRSSFYCLEYFPSQMLRTGNNFQFSYTFEDVPFHSSYAHSQSLDRLMNPLIDQYLYYLVRTQTTGTGGTQTLAFSQAGPSSMANQARNWVPGPCYRQQRVSTTTNQNNNSNFAWTGAAKFKLNGRDSLMNPGVAMASHKDDDDRFFPSSGVLIFGKQGAGNDGVDYSQVLITDEEEIKATNPVATEEYGAVAINNQAANTQAQTGLVHNQGVIPGMVWQNRDVYLQGPIWAKIPHTDGNFHPSPLMGGFGLKHPPPQILIKNTPVPADPPLTFNQAKLNSFITQYSTGQVSVEIEWELQKENSKRWNPEIQYTSNYYKSTNVDFAVNTEGVYSEPRPIGTRYLTRNL

SEQ ID NO: 973 - protein, 651 aa, synthetic construct
  REGION 1..651: note = source = /note="Description of Artificial Sequence: Synthetic polypeptide"
MPSSVIDALQYKLEGTTRLTRKRGLKLATALSLSNKFVEGSPSGGGGSGGGGSAPGKKRPVEQSPQEPDSSSGIGKTGQQPAKKRLNFGQTGDSESVPDPQPLGEPPAAPSGLGPNTMASGGGAPMADNNEGADGVGNSSGNWHCDSTWLGDRVITTSTRTWALPTYNNHLYKQISNGTSGGSTNDNTYFGYSTPWGYFDFNRFHCHFSPRDWQRLINNNWGFRPKRLNFKLFNIQVKEVTTNEGTKTIANNLTSTVQVFTDSEYQLPYVLGSAHQGCLPPFPADVFMVPQYGYLTLNNGSQALGRSSFYCLEYFPSQMLRTGNNFQFSYTFEDVPFHSSYAHSQSLDRLMNPLIDQYLYYLVRTQTTGTGGTQTLAFSQAGPSSMANQARNWVPGPCYRQQRVSTTTNQNNNSNFAWTGAAKFKLNGRDSLMNPGVAMASHKDDDDRFFPSSGVLIFGKQGAGNDGVDYSQVLITDEEEIKATNPVATEEYGAVAINNQAANTQAQTGLVHNQGVIPGMVWQNRDVYLQGPIWAKIPHTDGNFHPSPLMGGFGLKHPPPQILIKNTPVPADPPLTFNQAKLNSFITQYSTGQVSVEIEWELQKENSKRWNPEIQYTSNYYKSTNVDFAVNTEGVYSEPRPIGTRYLTRNL

SEQ ID NO: 974 - protein, 638 aa, synthetic construct
  REGION 1..638: note = source = /note="Description of Artificial Sequence: Synthetic polypeptide"
MYTIWMPENPRPGTPCDIFTNSRGKRASNGGGGGSGGGGSAPGKKRPVEQSPQEPDSSSGIGKTGQQPAKKRLNFGQTGDSESVPDPQPLGEPPAAPSGLGPNTMASGGGAPMADNNEGADGVGNSSGNWHCDSTWLGDRVITTSTRTWALPTYNNHLYKQISNGTSGGSTNDNTYFGYSTPWGYFDFNRFHCHFSPRDWQRLINNNWGFRPKRLNFKLFNIQVKEVTTNEGTKTIANNLTSTVQVFTDSEYQLPYVLGSAHQGCLPPFPADVFMVPQYGYLTLNNGSQALGRSSFYCLEYFPSQMLRTGNNFQFSYTFEDVPFHSSYAHSQSLDRLMNPLIDQYLYYLVRTQTTGTGGTQTLAFSQAGPSSMANQARNWVPGPCYRQQRVSTTTNQNNNSNFAWTGAAKFKLNGRDSLMNPGVAMASHKDDDDRFFPSSGVLIFGKQGAGNDGVDYSQVLITDEEEIKATNPVATEEYGAVAINNQAANTQAQTGLVHNQGVIPGMVWQNRDVYLQGPIWAKIPHTDGNFHPSPLMGGFGLKHPPPQILIKNTPVPADPPLTFNQAKLNSFITQYSTGQVSVEIEWELQKENSKRWNPEIQYTSNYYKSTNVDFAVNTEGVYSEPRPIGTRYLTRNL

SEQ ID NO: 975 - protein, 628 aa, synthetic construct
  REGION 1..628: note = source = /note="Description of Artificial Sequence: Synthetic polypeptide"
MTFFYGGSRGKRNNFKTEEYGGGGSGGGGSAPGKKRPVEQSPQEPDSSSGIGKTGQQPAKKRLNFGQTGDSESVPDPQPLGEPPAAPSGLGPNTMASGGGAPMADNNEGADGVGNSSGNWHCDSTWLGDRVITTSTRTWALPTYNNHLYKQISNGTSGGSTNDNTYFGYSTPWGYFDFNRFHCHFSPRDWQRLINNNWGFRPKRLNFKLFNIQVKEVTTNEGTKTIANNLTSTVQVFTDSEYQLPYVLGSAHQGCLPPFPADVFMVPQYGYLTLNNGSQALGRSSFYCLEYFPSQMLRTGNNFQFSYTFEDVPFHSSYAHSQSLDRLMNPLIDQYLYYLVRTQTTGTGGTQTLAFSQAGPSSMANQARNWVPGPCYRQQRVSTTTNQNNNSNFAWTGAAKFKLNGRDSLMNPGVAMASHKDDDDRFFPSSGVLIFGKQGAGNDGVDYSQVLITDEEEIKATNPVATEEYGAVAINNQAANTQAQTGLVHNQGVIPGMVWQNRDVYLQGPIWAKIPHTDGNFHPSPLMGGFGLKHPPPQILIKNTPVPADPPLTFNQAKLNSFITQYSTGQVSVEIEWELQKENSKRWNPEIQYTSNYYKSTNVDFAVNTEGVYSEPRPIGTRYLTRNL

SEQ ID NO: 976 - protein, 621 aa, synthetic construct
  REGION 1..621: note = source = /note="Description of Artificial Sequence: Synthetic polypeptide"
MNNQKIVNLKEKVAQLEAGGGGSAPGKKRPVEQSPQEPDSSAGIGKSGAQPAKKRLNFGQTGDTESVPDPQPIGEPPAAPSGVGSLTMASGGGAPVADNNEGADGVGSSSGNWHCDSQWLGDRVITTSTRTWALPTYNNHLYKQISNSTSGGSSNDNAYFGYSTPWGYFDFNRFHCHFSPRDWQRLINNNWGFRPKRLNFKLFNIQVKEVTDNNGVKTIANNLTSTVQVFTDSDYQLPYVLGSAHEGCLPPFPADVFMIPQYGYLTLNDGSQAVGRSSFYCLEYFPSQMLRTGNNFQFNYEFENVPFHSSYAHSQSLDRLMNPLIDQYLYYLSKTINDSGQNQQTLKFSVAGPSNMAVQGRNYIPGPSYRQQRVSTTVTQNNNSEFAWPGASSWALNGRNSLMNPGPAMASHKEGEDRFFPLSGSLIFGKQGTGRDNVDADEVMITNEEEIKTTNPVATESYGQVAINHQSAQAQAQTGWVQNQGILPGMVWQDRDVYLQGPIWAKIPHTDGNFHPSPLMGGFGMKHPPPQILIKNTPVPADPPTAFNKDKLNSFITQYSTGQVSVEIEWELQKENSKRWNPEIQYTSNYYKSNNVEFAVNTEGVYSEPRPIGTRYLTRNL

SEQ ID NO: 977 - protein, 633 aa, synthetic construct
  REGION 1..633: note = source = /note="Description of Artificial Sequence: Synthetic polypeptide"
MYTIWMPENPRPGTPCDIFTNSRGKRASNGGGGGSAPGKKRPVEQSPQEPDSSAGIGKSGAQPAKKRLNFGQTGDTESVPDPQPIGEPPAAPSGVGSLTMASGGGAPVADNNEGADGVGSSSGNWHCDSQWLGDRVITTSTRTWALPTYNNHLYKQISNSTSGGSSNDNAYFGYSTPWGYFDFNRFHCHFSPRDWQRLINNNWGFRPKRLNFKLFNIQVKEVTDNNGVKTIANNLTSTVQVFTDSDYQLPYVLGSAHEGCLPPFPADVFMIPQYGYLTLNDGSQAVGRSSFYCLEYFPSQMLRTGNNFQFNYEFENVPFHSSYAHSQSLDRLMNPLIDQYLYYLSKTINDSGQNQQTLKFSVAGPSNMAVQGRNYIPGPSYRQQRVSTTVTQNNNSEFAWPGASSWALNGRNSLMNPGPAMASHKEGEDRFFPLSGSLIFGKQGTGRDNVDADEVMITNEEEIKTTNPVATESYGQVAINHQSAQAQAQTGWVQNQGILPGMVWQDRDVYLQGPIWAKIPHTDGNFHPSPLMGGFGMKHPPPQILIKNTPVPADPPTAFNKDKLNSFITQYSTGQVSVEIEWELQKENSKRWNPEIQYTSNYYKSNNVEFAVNTEGVYSEPRPIGTRYLTRNL

SEQ ID NO: 978 - protein, 623 aa, synthetic construct
  REGION 1..623: note = source = /note="Description of Artificial Sequence: Synthetic polypeptide"
MTFFYGGSRGKRNNFKTEEYGGGGSAPGKKRPVEQSPQEPDSSAGIGKSGAQPAKKRLNFGQTGDTESVPDPQPIGEPPAAPSGVGSLTMASGGGAPVADNNEGADGVGSSSGNWHCDSQWLGDRVITTSTRTWALPTYNNHLYKQISNSTSGGSSNDNAYFGYSTPWGYFDFNRFHCHFSPRDWQRLINNNWGFRPKRLNFKLFNIQVKEVTDNNGVKTIANNLTSTVQVFTDSDYQLPYVLGSAHEGCLPPFPADVFMIPQYGYLTLNDGSQAVGRSSFYCLEYFPSQMLRTGNNFQFNYEFENVPFHSSYAHSQSLDRLMNPLIDQYLYYLSKTINDSGQNQQTLKFSVAGPSNMAVQGRNYIPGPSYRQQRVSTTVTQNNNSEFAWPGASSWALNGRNSLMNPGPAMASHKEGEDRFFPLSGSLIFGKQGTGRDNVDADEVMITNEEEIKTTNPVATESYGQVAINHQSAQAQAQTGWVQNQGILPGMVWQDRDVYLQGPIWAKIPHTDGNFHPSPLMGGFGMKHPPPQILIKNTPVPADPPTAFNKDKLNSFITQYSTGQVSVEIEWELQKENSKRWNPEIQYTSNYYKSNNVEFAVNTEGVYSEPRPIGTRYLTRNL

SEQ ID NO: 979 - protein, 623 aa, synthetic construct
  REGION 1..623: note = source = /note="Description of Artificial Sequence: Synthetic polypeptide"
MAAAAAAAAAAAAAAAAAAAGGGGSAPGKKRPVEQSPQEPDSSAGIGKSGAQPAKKRLNFGQTGDTESVPDPQPIGEPPAAPSGVGSLTMASGGGAPVADNNEGADGVGSSSGNWHCDSQWLGDRVITTSTRTWALPTYNNHLYKQISNSTSGGSSNDNAYFGYSTPWGYFDFNRFHCHFSPRDWQRLINNNWGFRPKRLNFKLFNIQVKEVTDNNGVKTIANNLTSTVQVFTDSDYQLPYVLGSAHEGCLPPFPADVFMIPQYGYLTLNDGSQAVGRSSFYCLEYFPSQMLRTGNNFQFNYEFENVPFHSSYAHSQSLDRLMNPLIDQYLYYLSKTINDSGQNQQTLKFSVAGPSNMAVQGRNYIPGPSYRQQRVSTTVTQNNNSEFAWPGASSWALNGRNSLMNPGPAMASHKEGEDRFFPLSGSLIFGKQGTGRDNVDADEVMITNEEEIKTTNPVATESYGQVAINHQSAQAQAQTGWVQNQGILPGMVWQDRDVYLQGPIWAKIPHTDGNFHPSPLMGGFGMKHPPPQILIKNTPVPADPPTAFNKDKLNSFITQYSTGQVSVEIEWELQKENSKRWNPEIQYTSNYYKSNNVEFAVNTEGVYSEPRPIGTRYLTRNL

SEQ ID NO: 980 - DNA, 2214 bp, synthetic construct
  misc_feature 1..2214: note = source = /note="Description of Artificial Sequence: Synthetic polynucleotide"
  source 1..2214: mol_type = other DNA
atggctgccgatggttatcttccagattggctcgaggacaacctctctgagggcattcgcgagtggtgggacttgaaacctggagccccgaagcccaaagccaaccagcaaaagcaggacgacggccggggtctggtgcttcctggctacaagtacctcggacccttcaacggactcgacaagggggagcccgtcaacgcggcggacgcagcggccctcgagcacgacaaggcctacgaccagcagctcaaagcgggtgacaatccgtacctgcggtataaccacgccgacgtcgagtttcaggagcgtctgcaagaagatacgtcttttgggggcaacctcgggcgagcagtcttccaggccaagaagagggttctcgaaccttttggtctggttgaggaaggcgctaagacggctcctggaaagaaacgtccggtagagcagtcgccacaagagccagactcctcctcgggcatcggcaagaaaggccaacagcccgccagaaaaagactcaattttggccagactggcgactcagagtcagttccagaccctcaacctctcggagaacctccagcagcgccctctggtgtgggacctaatacaatggctgcaggcggtggcgcaccaatggcagacaataacgagggcgccgacggagtgggtaattcctcgggaaattggcattgcgattccacatggatgggggacagagtcatcaccaccagcacccgaacctgggccctgcccacctacaacaaccacctctacaagcaaatctccaacggcacctcgggaggaagcaccaacgacaacacctattttggctacagcaccccctgggggtattttgatttcaacagattccactgccacttctcaccacgtgactggcagcgactcatcaacaacaactggggattccggccaaaaagactcagcttcaagctcttcaacatccaggtcaaggaggtcacgcagaatgaaggcaccaagaccatcgccaataaccttaccagcacgattcaggtatttacggactcggaataccagctgccatacgtcctcggctccgcgcaccagggctgcctgcctccgttcccggcggacgtcttcatgattccccagtacggctaccttacactgaacaatggaagtcaagccgtaggccgttcctccttctactgcctggaatattttccttctcaaatgctgagaacgggcaacaactttgagttcagctaccagtttgaggacgtgccttttcacagcagctacgcgcacagccaaagcctggaccggctgatgaaccccctcatcgaccagtacctgtactacctgtctcggactcagtccacgggaggtaccgcaagaactcagcagttgctattttctcaggccgggcctaatacaatggccaatcaggcaaagaactggctgccaggaccctgttaccgccaacaacgcgtctcaacgacaaccgggcaaaacaacaatagcaactctgcctggactgctgggaccaaataccatctgaatggaagaaattcattggctaatcctggcatcgctatggcaacacacaaagacgacgaggagcgtttttttcccagtaacgggatcctgatttttggcaaacaaaatgctgccagagacaatgcggattacagcgatgtcatgctcaccagcgaggaagaaatcaaaaccactaaccctgtggctacagaggaatacggtatcgtggcagataacttgcagcagcaaaacacggctcctcaaattggaactgtcaacagccagggggccttacccggtatggtctggcagaaccgggacgtgtacctgcagggtcccatctgggccaagattcctcacacggacggcaacttccacccatctccgctgatgggcggctttggcctgaaacatcctccgcctcagatcctgatcaagaacacgcctgtacctgcggatcctccgaccaccttcaaccagtcaaagctgaactctttcatcacgcaatacagcaccggacaggtcagcgtggaaattgaatgggagctacagaaggaaaacagcaagcgctggaaccccgagatccagtacacctccaactactacaaatctacaagtgtggactttgctgttaatacagaaggcgtgtactctgaaccccgccccattggcacccgttacctcacccgtaatctgtaa

SEQ ID NO: 981 - DNA, 2214 bp, synthetic construct
  misc_feature 1..2214: note = source = /note="Description of Artificial Sequence: Synthetic polynucleotide"
  source 1..2214: mol_type = other DNA
atggctgccgatggttatcttccagattggctcgaggacaacctctctgagggcattcgcgagtggtgggcgctgaaacctggagccccgaagcccaaagccaaccagcaaaagcaggacgacggccggggtctggtgcttcctggctacaagtacctcggacccttcaacggactcgacaagggggagcccgtcaacgcggcggacgcagcggccctcgagcacgacaaggcctacgaccagcagctcaaagcgggtgacaatccgtacctgcggtataaccacgccgacgccgagtttcaggagcgtctgcaagaagatacgtcttttgggggcaacctcgggcgagcagtcttccaggccaagaagcgggttctcgaacctctcggtctggttgaggacggcgctaagacggctcctggaaagaagagaccagtagagcagtcaccccaagaaccagactcctcctcgggcatcggcaagaaaggccaacagcccgccagaaaaagactcaattttggccagactggcgactcagagtcagttccagaccctcaacctctcggagaacctccagcaacccccgctgctgtgggacctactacaatggcttcaggcggtggcgcaccaatggcagacaataacgaaggcgccgacggagtgggtagttcctcgggaaattggcattgcgattccacatggctgggcgacagagtcatcaccaccagcacccgaacctgggccctgcccacctacaacaaccacctctacaagcaaatctccaacgggacatcgggaggagccaccaacgacaacacctacttcggctacagcaccccctgggggtattttgactttaacagattccactgccacttttcaccacgtgactggcagcgactcatcaacaacaactggggattccggcccaagagactcagcttcaagctcttcaacatccaggtcaaggaggtcacgcagaatgaaggcaccaagaccatcgccaataacctcaccagcaccatccaggtgtttacggactcggagtaccagctgccgtacgttctcggctctgcccaccagggctgcctgcctccgttcccggcggacgtgttcatgattccccagtacggctacctaacactcaacaacggtagtcaggccgtgggacgctcctccttctactgcctggaatactttccttcgcagatgctgagaaccggcaacaacttccagtttacttacaccttcgaggacgtgcctttccacagcagctacgcccacagccagagcttggaccggctgatgaatcctctgattgaccagtacctgtactacttgtctcggactcaaacaacaggaggcacggcaaatacgcagactctgggcttcagccaaggtgggcctaatacaatggccaatcaggcaaagaactggctgccaggaccctgttaccgccaacaacgcgtctcaacgacaaccgggcaaaacaacaatagcaactttgcctggactgctgggaccaaataccatctgaatggaagaaattcattggctaatcctggcatcgctatggcaacacacaaggacgacgaggagcgtttttttcccagtaacgggatcctgatttttggcaaacaaaatgctgccagagacaatgcggattacagcgatgtcatgctcaccagcgaggaagaaatcaaaaccactaaccctgtggctacagaggaatacggtatcgtggcagataacttgcagcagcaaaacacggctcctcaaattggaactgtcaacagccagggggccttacccggtatggtctggcagaaccgggacgtgtacctgcagggtcccatctgggccaagattcctcacacggacggcaacttccacccgtctccgctgatgggcggctttggcctgaaacatcctccgcctcagatcctgatcaagaacacgcctgtacctgcggatcctccgaccaccttcaaccagtcaaagctgaactctttcatcacgcaatacagcaccggacaggtcagcgtggaaatcgagtgggagctgcagaaagaaaacagcaagcgctggaaccccgagatccagtacacctccaactactacaaatctacaaatgtggactttgctgtcaacacggagggggtttatagcgagcctcgccccattggcacccgttacctcacccgcaacctgtaa

SEQ ID NO: 982 - DNA, 2211 bp, synthetic construct
  variation 715: note = a, c, t, or g
  misc_feature 1..2211: note = source = /note="Description of Artificial Sequence: Synthetic polynucleotide"
  source 1..2211: mol_type = other DNA
atggctgccgatggttatcttccagattggctcgaggacaacctctctgagggcattcgcgagtggtgggcgctgaaacctggagccccgaagcccaaagccaaccagcaaaagcaggacgacggccggggtctggtgcttcctggctacaagtacctcggacccttcaacggactcgacaagggggagcccgtcaacgcggcggacgcagcggccctcgagcacgacaaggcctacgaccagcagctcaaagcgggtgacaatccgtacctgcggtataaccacgccgacgccgagtttcaggagcgtctgcaagaagatacgtcttttgggggcaacctcgggcgagcagtcttccaggccaagaagcgggttctcgaacctctcggtctggttgaggaaggcgctaagacggctcctggaaagaaacgtccggtagagcagtcgccacaagagccagactcctcctcgggcatcggcaagacaggccagcagcccgctaaaaagaggctcaattttggtcagactggcgactcagagtcagtccccgacccacaacctctcggagaacctccagcaacccccgctgctgtgggacctactacaatggcttcaggcggtggcgcaccaatggcagacaataacgaaggcgccgacggagtgggtaatgcctcaggaaattggcattgcgattccacatggctgggcgacagantcatcaccaccagcacccgaacatgggccttgcccacctataacaaccacctctacaagcaaatctccagtgcttcaacgggggccagcaacgacaaccactacttcggctacagcaccccctgggggtattttgatttcaacagattccactgccatttctcaccacgtgactggcagcgactcatcaacaacaattggggattccggcccaagagactcaacttcaagctcttcaacatccaagtcaaggaggtcacgcagaatgaaggcaccaagaccatcgccaataacctcaccagcaccatccaggtgtttacggactcggagtaccagctgccgtacgttctcggctctgcccaccagggctgcctgcctccgttcccggcggacgtgttcatgattccccagtacggctacctaacactcaacaacggtagtcaggccgtgggacgctcctccttctactgcctggaatattttccatctcaaatgctgcgaactggaaacaattttgaattcagctacaccttcgaggacgtgcctttccacagcagctacgcacacagccagagcttggaccgactgatgaatcctctcatcgaccagtacctgtactacttgtctcggactcaaacaacaggaggcacggcaaatacgcagactctgggcttcagccaaggtgggcctaatacaatggccaatcaggcaaagaactggctgccaggaccctgttaccgccaacaacgcgtctcaacgacaaccgggcaaaacaacaatagcaactttgcctggactgctgggaccaaataccatctgaatggaagaaattcattggctaatcctggcatcgctatggcaacacacaaagacgacgaggagcgtttttttcccagtaacgggatcctgatttttggcaaacaaaatgctgccagagacaatgcggattacagcgatgtcatgctcaccagcgaggaagaaatcaaaaccactaaccctgtggctacagaggaatacggtatcgtggcagataacttgcagcagcaaaacacggctcctcaaattggaactgtcaacagccaggggaccttacccggtatggtctggcagaaccgggacgtgtacctgcagggtcccatctgggccaagattcctcacacggacggcaacttccacccgtctccgctgatgggcggctttggcctgaaacatcctccgcctcagatcctgatcaagaacacgcctgtacctgcggatcctccgaccaccttcaaccagtcaaagctgaactctttcatcacgcaatacagcaccggacaggtcagcgtggaaattgaatgggagctacagaaggaaaacagcaagcgctggaaccccgagatccagtacacctccaattactacaaatctacaagtgtggactttgctgttaatacagaaggcgtgtactctgaaccccgccccattggcacgcgtttcctcacccgtaatctgtaa

SEQ ID NO: 983 - DNA, 2214 bp, synthetic construct
  misc_feature 1..2214: note = source = /note="Description of Artificial Sequence: Synthetic polynucleotide"
  source 1..2214: mol_type = other DNA
atggctgccgatggttatcttccagattggctcgaggacaacctctctgagggcattcgcgagtggtgggcgctgaaacctggagccccgaagcccaaagccaaccagcaaaagcaggacgacggccggggtctggtgcttcctggctacaagtacctcggacccttcaacggactcgacaagggggagcccgtcaacgcggcggacgcagcggccctcgagcacgacaaggcctacgaccagcagctcaaagcgggtgacaatccgtacctgcggtataaccacgccgacgccgagtttcaggagcgtctgcaagaagatacgtcttttgggggcaacctcgggcgagcagtcttccaggccaagaagcgggttctcgaacctctcggtctggttgaggaaggcgctaagacggctcctggaaagaaacgtccggtagagcagtcgccacaagagccagactcctcctcgggcatcggcaagacaggccagcagcccgctaaaaagaggctcaattttggccagactggcgactcagagtcagttccagaccctcaacctctcggagaacctccagcagcgccctctggtgtgggacctaatacaatggctgcaggcggtggcgcaccaatggcagacaataacgaaggcgccgacggagtgggtagttcctcgggaaattggcattgcgattccacatggctgggcgacagagtcatcaccaccagcacccgaacctgggccctgcccacctacaacaaccacctctacaagcaaatctccaacgggacatcgggaggagccaccaacgacaacacctacttcggctacagcaccccctgggggtattttgactttaacagattccactgccacttttcaccacgtgactggcagcgactcatcaacaacaactggggattccggcccaagagactcagcttcaagctcttcaacatccaggtcaaggaggtcacgcagaatgaaggcaccaagaccatcgccaataacctcaccagcaccatccaggtgtttacggactcggagtaccagctgccgtacgtactaggatccgctcaccagggatgtctgcctccgttcccggcggacgtgttcatgattccccagtacggctacctaacactcaacaacggtagtcaggccgtgggacgctcctccttctactgcctggaatattttccatctcagatgctgagaacgggcaataactttaccttcagctacaccttcgaggacgtgcctttccacagcagctatgcccacagccagagcttggaccggctgatgaatcctctgattgaccagtacctgtactacttgtctcggactcaaacaacaggaggcacggcaaatacgcagactctgggcttcagccaaggtgggcctaatacaatggccaatcaggcaaagaactggctgccaggaccctgttaccgccaacaacgcgtctcaacgacaaccgggcaaaacaacaatagcaactttgcctggactgctgggaccaaataccatctgaatggaagaaattcattggctaatcctggcatcgctatggcaacacacaaagacgacgaggagcgtttttttcccagtaacgggatcctgatttttggcaaacaaaatgctgccagagacaatgcggattacagcgatgtcatgctcaccagcgaggaagaaatcaaaaccactaaccctgtggctacagaggaatacggtatcgtggcagataacttgcagcagcaaaacacggctcctcaaattggaactgtcaacagccagggggccttacccggtatggtctggcagaaccgggacgtgtacctgcagggtcccatctgggccaagattcctcacacggacggcaacttccacccgtctccgctaatgggaggatttggactgaagcacccacctcctcagatcctgatcaagaacacgccggtacctgcggatcctccgaccaccttcaaccagtcaaagctgtactctttcatcacgcaatacagcaccggacaggtcagcgtggaaattgaatgggagctgcagaaggaaaacagcaagcgctggaaccccgagatccaatacacctccaactactacaaatctacaagtgtggactttgctgttaatacagaaggcgtgtactctgaaccccgccccattggcacccgttacctcacccgtaatctgtaa

SEQ ID NO: 984 - protein, 737 aa, synthetic construct
  REGION 1..737: note = source = /note="Description of Artificial Sequence: Synthetic polypeptide"
MAADGYLPDWLEDNLSEGIREWWDLKPGAPKPKANQQKQDDGRGLVLPGYKYLGPFNGLDKGEPVNAADAAALEHDKAYDQQLKAGDNPYLRYNHADVEFQERLQEDTSFGGNLGRAVFQAKKRVLEPFGLVEEGAKTAPGKKRPVEQSPQEPDSSSGIGKKGQQPARKRLNFGQTGDSESVPDPQPLGEPPAAPSGVGPNTMAAGGGAPMADNNEGADGVGNSSGNWHCDSTWMGDRVITTSTRTWALPTYNNHLYKQISNGTSGGSTNDNTYFGYSTPWGYFDFNRFHCHFSPRDWQRLINNNWGFRPKRLSFKLFNIQVKEVTQNEGTKTIANNLTSTIQVFTDSEYQLPYVLGSAHQGCLPPFPADVFMIPQYGYLTLNNGSQAVGRSSFYCLEYFPSQMLRTGNNFEFSYQFEDVPFHSSYAHSQSLDRLMNPLIDQYLYYLSRTQSTGGTARTQQLLFSQAGPNTMANQAKNWLPGPCYRQQRVSTTTGQNNNSNSAWTAGTKYHLNGRNSLANPGIAMATHKDDEERFFPSNGILIFGKQNAARDNADYSDVMLTSEEEIKTTNPVATEEYGIVADNLQQQNTAPQIGTVNSQGALPGMVWQNRDVYLQGPIWAKIPHTDGNFHPSPLMGGFGLKHPPPQILIKNTPVPADPPTTFNQSKLNSFITQYSTGQVSVEIEWELQKENSKRWNPEIQYTSNYYKSTSVDFAVNTEGVYSEPRPIGTRYLTRNL

SEQ ID NO: 985 - protein, 737 aa, synthetic construct
  REGION 1..737: note = source = /note="Description of Artificial Sequence: Synthetic polypeptide"
MAADGYLPDWLEDNLSEGIREWWALKPGAPKPKANQQKQDDGRGLVLPGYKYLGPFNGLDKGEPVNAADAAALEHDKAYDQQLKAGDNPYLRYNHADAEFQERLQEDTSFGGNLGRAVFQAKKRVLEPLGLVEDGAKTAPGKKRPVEQSPQEPDSSSGIGKKGQQPARKRLNFGQTGDSESVPDPQPLGEPPATPAAVGPTTMASGGGAPMADNNEGADGVGSSSGNWHCDSTWLGDRVITTSTRTWALPTYNNHLYKQISNGTSGGATNDNTYFGYSTPWGYFDFNRFHCHFSPRDWQRLINNNWGFRPKRLSFKLFNIQVKEVTQNEGTKTIANNLTSTIQVFTDSEYQLPYVLGSAHQGCLPPFPADVFMIPQYGYLTLNNGSQAVGRSSFYCLEYFPSQMLRTGNNFQFTYTFEDVPFHSSYAHSQSLDRLMNPLIDQYLYYLSRTQTTGGTANTQTLGFSQGGPNTMANQAKNWLPGPCYRQQRVSTTTGQNNNSNFAWTAGTKYHLNGRNSLANPGIAMATHKDDEERFFPSNGILIFGKQNAARDNADYSDVMLTSEEEIKTTNPVATEEYGIVADNLQQQNTAPQIGTVNSQGALPGMVWQNRDVYLQGPIWAKIPHTDGNFHPSPLMGGFGLKHPPPQILIKNTPVPADPPTTFNQSKLNSFITQYSTGQVSVEIEWELQKENSKRWNPEIQYTSNYYKSTNVDFAVNTEGVYSEPRPIGTRYLTRNL

SEQ ID NO: 986 - protein, 736 aa, synthetic construct
  VARIANT 239: note = Any naturally occurring amino acid
  REGION 1..736: note = source = /note="Description of Artificial Sequence: Synthetic polypeptide"
MAADGYLPDWLEDNLSEGIREWWALKPGAPKPKANQQKQDDGRGLVLPGYKYLGPFNGLDKGEPVNAADAAALEHDKAYDQQLKAGDNPYLRYNHADAEFQERLQEDTSFGGNLGRAVFQAKKRVLEPLGLVEEGAKTAPGKKRPVEQSPQEPDSSSGIGKTGQQPAKKRLNFGQTGDSESVPDPQPLGEPPATPAAVGPTTMASGGGAPMADNNEGADGVGNASGNWHCDSTWLGDRXITTSTRTWALPTYNNHLYKQISSASTGASNDNHYFGYSTPWGYFDFNRFHCHFSPRDWQRLINNNWGFRPKRLNFKLFNIQVKEVTQNEGTKTIANNLTSTIQVFTDSEYQLPYVLGSAHQGCLPPFPADVFMIPQYGYLTLNNGSQAVGRSSFYCLEYFPSQMLRTGNNFEFSYTFEDVPFHSSYAHSQSLDRLMNPLIDQYLYYLSRTQTTGGTANTQTLGFSQGGPNTMANQAKNWLPGPCYRQQRVSTTTGQNNNSNFAWTAGTKYHLNGRNSLANPGIAMATHKDDEERFFPSNGILIFGKQNAARDNADYSDVMLTSEEEIKTTNPVATEEYGIVADNLQQQNTAPQIGTVNSQGTLPGMVWQNRDVYLQGPIWAKIPHTDGNFHPSPLMGGFGLKHPPPQILIKNTPVPADPPTTFNQSKLNSFITQYSTGQVSVEIEWELQKENSKRWNPEIQYTSNYYKSTSVDFAVNTEGVYSEPRPIGTRFLTRNL

SEQ ID NO: 987 - protein, 737 aa, synthetic construct
  REGION 1..737: note = source = /note="Description of Artificial Sequence: Synthetic polypeptide"
MAADGYLPDWLEDNLSEGIREWWALKPGAPKPKANQQKQDDGRGLVLPGYKYLGPFNGLDKGEPVNAADAAALEHDKAYDQQLKAGDNPYLRYNHADAEFQERLQEDTSFGGNLGRAVFQAKKRVLEPLGLVEEGAKTAPGKKRPVEQSPQEPDSSSGIGKTGQQPAKKRLNFGQTGDSESVPDPQPLGEPPAAPSGVGPNTMAAGGGAPMADNNEGADGVGSSSGNWHCDSTWLGDRVITTSTRTWALPTYNNHLYKQISNGTSGGATNDNTYFGYSTPWGYFDFNRFHCHFSPRDWQRLINNNWGFRPKRLSFKLFNIQVKEVTQNEGTKTIANNLTSTIQVFTDSEYQLPYVLGSAHQGCLPPFPADVFMIPQYGYLTLNNGSQAVGRSSFYCLEYFPSQMLRTGNNFTFSYTFEDVPFHSSYAHSQSLDRLMNPLIDQYLYYLSRTQTTGGTANTQTLGFSQGGPNTMANQAKNWLPGPCYRQQRVSTTTGQNNNSNFAWTAGTKYHLNGRNSLANPGIAMATHKDDEERFFPSNGILIFGKQNAARDNADYSDVMLTSEEEIKTTNPVATEEYGIVADNLQQQNTAPQIGTVNSQGALPGMVWQNRDVYLQGPIWAKIPHTDGNFHPSPLMGGFGLKHPPPQILIKNTPVPADPPTTFNQSKLYSFITQYSTGQVSVEIEWELQKENSKRWNPEIQYTSNYYKSTSVDFAVNTEGVYSEPRPIGTRYLTRNL

SEQ ID NO: 988 - DNA, 2208 bp, synthetic construct
  misc_feature 1..2208: note = source = /note="Description of Artificial Sequence: Synthetic polynucleotide"
  source 1..2208: mol_type = other DNA
atggctgccgatggttatcttccagattggctcgaggacaacctctctgagggcattcgcgagtggtgggacttgaaacctggagccccgaaacccaaagccaaccagcaaaagcaggacgacggccggggtctggtgcttcctggctacaagtacctcggacccttcaacggactcgacaagggggagcccgtcaacgcggcggatgcagcggccctcgagcacgacaaagcctacgaccggcagctcgacagcggagacaacccgtacctcaagtacaaccacgccgacgcggagtttcaggagcgccttaaagaagatacgtcttttgggggcaacctcggacgagcagtcttccaggccaagaagagggttctcgaaccttttggtctggttgaggaaggtgctaagacggctcctggaaagaaacgtccggtagagcagtcgccacaagagccagactcctcctcgggcattggcaagacaggccagcagcccgctaaaaagagactcaattttggtcagactggcgactcagagtcagtccccgacccacaacctctcggagaacctccagcaacccccgctgctgtgggacctactacaatggcttcaggtggtggcgcaccagtggcagacaataacgaaggcgccgacggagtgggtagttcctcgggaaattggcattgcgattccacatggctgggcgacagagtcatcaccaccagcacccgaacatgggccttgcccacctataacaaccacctctacaagcaaatctccagtgcttcgacgggggccagcaacgacaaccactacttcggctacagcaccccctgggggtattttgatttcaacaggttccactgccatttctcaccacgtgactggcagcgactcatcaacaacaattggggattccggcccaaaagactcaacttcaagctgttcaacatccaggtcaaggaagtcacgacgaacgaaggcaccaagaccatcgccaataatctcaccagcaccgtgcaggtctttacggactcggagtaccagttaccgtacgtgctaggatccgctcaccagggatgtctgcctccgttcccggcggacgtcttcatggttcctcagtacggctatttaactttaaacaatggaagccaagccctgggacgttcctccttctactgtctggagtatttcccatcgcagatgctgagaacgggcaacaactttacctttagctacaccttcgaggacgtgcctttccacagcagctacgcgcacagccagagcctggacaggctgatgaatcccctcatcgaccagtacctgtactacctggtcagaacgcaaacgactggaactggagggacgcagactctggcattcagccaagcgggtcctagctcaatggccaaccaggctagaaattgggtgcccggaccttgctaccggcagcagcgcgtctccacgacaaccaaccagaacaacaacagcaactttgcctggacgggagctgccaagtttaagctgaacggccgagactctctaatgaatccgggcgtggcaatggcttcccacaaggatgacgacgaccgcttcttcccttcgagcggggtcctgatttttggcaagcaaggagccgggaacgatggagtggattacagccaagtgctgattacagatgaggaagaaatcaaggctaccaaccccgtggccacagaagaatatggagcagtggccatcaacaaccaggccgccaatacgcaggcgcagaccggactcgtgcacaaccagggggtgattcccggcatggtgtggcagaatagagacgtgtacctgcagggtcccatctgggccaaaattcctcacacggacggcaactttcacccgtctcccctgatgggcggctttggactgaagcacccgcctcctcaaattctcatcaagaacacaccggttccagcggacccgccgcttaccttcaaccaggccaagctgaactctttcatcacgcagtacagcaccggacaggtcagcgtggaaatcgagtgggagctgcagaaagaaaacagcaaacgctggaatccagagattcaatacacttccaactactacaaatctacaaatgtggactttgctgtcaacacggagggggtttatagcgagcctcgccccattggcacccgttacctcacccgcaacctgtaa

SEQ ID NO: 989 - DNA, 2211 bp, synthetic construct
  variation 337: note = a, c, g, or t
  misc_feature 1..2211: note = source = /note="Description of Artificial Sequence: Synthetic polynucleotide"
  source 1..2211: mol_type = other DNA
atggctgccgatggttatcttccagattggctcgaggacactctctctgaaggaataagacagtggtggaagctcaaacctggcccaccaccaccaaagcccgcagagcggcataaggacgacagcaggggtcttgtgcttcctggctacaagtacctcggacccttcaacggactcgacaagggggagcccgtcaacgcggcggacgcagcgaccctcgagcacgacaaggcctacgaccagcagctcaaagcgggtgacaatccgtacctgcggtataaccacgccgacgccgagtttcaggagcgtctgcaagaagatacgtcttttgggggcnacctcgggcgagcagtcttccaggccaagaagcgggttctcgaacctctcggtctggttgaggaagctgctaagacggctcctggaaagaagagaccagtagagccatcaccccagcgttctccagactcctctacgggcatcggcaagaaaggccaacagcccgccagaaaaagactcaattttggtcagactggcgactcagagtcagttccagaccctcaacctctcggagaacctccagcagcgccctctggtgtgggacctaatacaatggctgcaggcggtggcgcaccaatggcagacaataacgaaggcgccgacggagtgggtagttcctcgggaaattggcattgcgattccacatggctgggcgacagagtcatcaccaccagcacccgaacctgggccctgcccacctacaacaaccacctctacaagcaaatctccagtgcttcaacgggggccagcaacgacaaccactacttcggctacagcaccccctgggggtattttgatttcaacagattccactgccatttctcaccacgtgactggcagcgactcatcaacaacaattggggattccggcccaagagactcaacttcaagctcttcaacatccaagtcaaggaggtcacgacgaatgatggcgtcacgaccatcgctaataaccttaccagcacggttcaagtcttctcggactcagactatcagctcccgtacgtgctcgggtcggctcacgagggctgcctcccgccgttcccagcggacgttttcatgattcctcagtacggctatttaactttaaacaatggaagccaagccctgggacgttcctccttctactgtctggagtatttcccatcgcagatgctgagaaccggcaacaactttcagttcagctacaccttcgaggacgtgcctttccacagcagctacgcgcacagccagagcctggacaggctgatgaatcccctcatcgaccagtacctgtactacctggtcagaacgcaaacgactggaactggagggacgcagactctggcattcagccaagcgggtcctagctcaatggccaaccaggctagaaattgggtgcccggaccttgctaccggcagcagcgcgtctccacgacaaccaaccagaacaacaacagcaactttgcctggacgggagctgccaagtttaagctgaacggccgagactctctaatgaatccgggcgtggcaatggcttcccacaaggatgacgacgaccgcttcttcccttcgagcggggtcctgatttttggcaagcaaggagccgggaacgatggagtggattacagccaagtgctgattacagatgaggaagaaatcaaggctaccaaccccgtagccacagaagaatatggagcagtggccatcaacaaccaggccgccaatacgcaggcgcagaccggactcgtgcacaaccagggggtgattcccggaatggtgtggcaagacagagacgtatacctgcagggtcctatttgggccaaaattcctcacacggatggacactttcacccgtctcctctcatgggcggctttggacttaagcacccgcctcctcagatcctcatcaaaaacacgcctgttcctgcgaatcctccggcagagttttcggctacaaagtttgcttcattcatcacccagtattccacaggacaagtgagcgtggagattgaatgggagctgcagaaagaaaacagcaaacgctggaatcccgaagtgcagtatacatctaactatgcaaaatctgccaacgttgatttcactgtggacaacaatggactttatactgagcctcgccccattggcacccgttacctcacccgtcccctgtaa

SEQ ID NO: 990 - DNA, 2214 bp, synthetic construct
  variation 335: note = a, c, g, or t
  misc_feature 1..2214: note = source = /note="Description of Artificial Sequence: Synthetic polynucleotide"
  source 1..2214: mol_type = other DNA
atgactgacggttaccttccagattggctagaggacaacctctctgaaggcgttcgagagtggtgggcgctgcaacctggagccccgaagcccaaagccaaccagcaaaagcaggacgacggccggggtctggtgcttcctggctacaagtacctcggacccttcaacggactcgacaagggggagcccgtcaacgcggcggacgcagcggccctcgagcacgacaaggcctacgaccagcagctcaaagcgggtgacaatccgtacctgcggtataaccacgccgacgccgagtttcaggagcgtctgcaagaagatacgtcttttgggggcancctcgggcgagcagtcttccaggccaagaagcgggttctcgaacctctcggtctggttgaggaaggcgctaagacggctcctggaaagaaacgtccggtagagccatcaccccagcgttctccagactcctctacgggcatcggcaagaaaggccaacagcccgccagaaaaagactcaattttggtcagactggcgactcagagtcagttccagaccctcaacctctcggagaacctccagcagcgccctcaggtgtgggatctcttacaatggcttcaggtggtggcgcaccagtggcagacaataacgaaggtgccgatggagtgggtagttcctcgggaaattggcattgcgattcccaatggctgggggacagagtcatcaccaccagcacccgaacctgggccctgcccacctacaacaatcacctctacaagcaaatctccaacagcacatctggaggatcttcaaatgacaacgcctacttcggctacagcaccccctgggggtattttgacttcaacagattccactgccacttctcaccacgtgactggcagcgactcatcaacaacaactggggattccggcccaagagactcagcttcaagctcttcaacatccaggtcaaggaggtcacgcagaatgaaggcaccaagaccatcgccaataacctcaccagcaccatccaggtgtttacggactcggagtaccagctgccgtacgttctcggctctgcccaccagggctgcctgcctccgttcccggcggacgtgttcatgattccccagtacggctacctaacactcaacaacggtagtcaggccgtgggacgctcctccttctactgcctggaatactttccttcgcagatgctgagaaccggcaacaacttccagtttacttacaccttcgaggacgtgcctttccacagcagctacgcccacagccagagcttggaccggctgatgaatcctctgattgaccagtacctgtactacttgtctcggactcaaacaacaggaggcacggcaaatacgcagactctgggcttcagccaaggtgggcctaatacaatggccaatcaggcaaagaactggctgccaggaccctgttaccgccaacaacgcgtctcaacgacaaccgggcaaaacaacaatagcaactttgcctggactgctgggaccaaataccatctgaatggaagaaattcattggctaatcctggcatcgctatggcaacacacaaagacgacgaggagcgtttttttcccagtaacgggatcctgatttttggcaaacaaaatgctgccagagacaatgcggattacagcgatgtcatgctcaccagcgaggaagaaatcaaaaccactaaccctgtggctacagaggaatacggtatcgtggcagataacttgcagcagcaaaacacggctcctcaaattggaactgtcaacagccagggggccttacccggtatggtctggcagaaccgggacgtgtacctgcagggtcccatctgggccaagattcctcacacggacggcaacttccacccgtctccgctgatgggcggctttggcctgaaacatcctccgcctcagatcctgatcaagaacacgcctgtacctgcggatcctccgaccaccttaaaccaggccaagctgaactctttcatcacgcaatacagcaccggacaggtcagcgtggaaattgaatgggagctgcagaaggaaaacagcaagcgctggaacccagagattcagtacacttcaaactactacaaatctacaaatgtggactttgctgtcaatacagagggaacttatagtgaaccccgccccattggcaccagatttctgactcgtaatctgtaa

SEQ ID NO: 991 - DNA, 2211 bp, synthetic construct
  variation 338: note = a, c, g, or t
  misc_feature 1..2211: note = source = /note="Description of Artificial Sequence: Synthetic polynucleotide"
  source 1..2211: mol_type = other DNA
atggctgccgatggttatcttccagattggctcgaggacactctctctgaaggaataagacagtggtggaagctcaaacctggcccaccaccaccaaagcccgcagagcggcataaggacgacagcaggggtcttgtgcttcctgggtacaagtacctcggccccttcaacggactcgacaagggggagcccgtcaacgcggcggacgcagcggccctcgagcacgacaaggcctacgaccagcagctcgaagcgggtgacaatccgtacctgcggtataaccacgccgacgccgagtttcaggagcgtctgcaagaagatacgtcttttgggggcancctcgggcgagcagtcttccaggccaagaagcgggttctcgaacctctcggtctggttgaggaaggcgctaagacggctcctggaaagaagagaccagtagagcagtcaccccaagaaccagactcctcctcgggcatcggcaggaaaggccaacagcccgccagaaaaagactcaattttggccagactggcgactcagagtcagttccagaccctcaacctctcggagaacctccagcagcgccctctggtgtgggacctaatacaatggcttcaggcggtggcgctccaatggcagacaataacgaaggcgccgacggagtgggtaatgcctcaggaaattggcattgcgattccacatggctgggcgacagagtcatcaccaccagcacccgcacctgggccttgcccacctacaataaccacctctacaagcaaatctccagtgcttcaacgggggccagcaacgacaaccactacttcggctacagcaccccctgggggtattttgatttcaacagattccactgccacttttcaccacgtgactggcagcgactcatcaacaacaattggggattccggcccaagagactcaacttcaaactcttcaacatccaggtcaaggaggtcacgcagaatgaaggcactaagaccatcgccaataaccttaccagcacgattcaggtatttacggactcggaataccagctgccgtacgtcctcggctccgcgcaccagggctgcctgcctccgttcccggcggacgtcttcatgattccccagtacggctaccttacactgaacaatggaagtcaagccgtaggccgttcctccttctactgcctggaatattttccatctcaaatgctgcgaactggcaacaacttccagtttacctacaccttcgaggacgtgcctttccacagcagctacgcccacagccagagcttggaccggctgatgaatcctctgattgaccagtacctgtactacttgtctcggactcagtccacaggaggaactcaaggtacccagcaattgttattttctcaagctgggcctgcaaacatgtcggctcaggctaagaactggctacctggaccttgctaccggcagcagcgagtctctacgacactgtcgcaaaacaacaacagcaactttgcttggactggtgccaccaaatatcacctgaacggaagagactctttggtaaatcccggtgtcgccatggcaacccacaaggacgacgaggaacgcttcttcccgtcgagtggagtcctgatgtttggaaaacagggtgctggaagagacaatgtggactacagcagcgttatgctaaccagcgaagaagaaattaaaaccactaaccctgtagccacagaacaatacggtgtggtggttgataacttgcagcaaaccaatacggggcctattgtgggaaatgtcaacagccaaggagccttacctggtatggtctggcagaaccgggacgtgtacctgcagggtcccatctgggccaagattcctcacacggacggcaacttccacccgtctccgctgatgggcggctttggcctgaaacatcctccgcctcagatcctcatcaaaaacacacctgtacctgcggatcctccaacggccttcaacaaggacaagctgaactctttcatcacccagtattctactggccaagtcagcgtggagatcgagtgggagctgcagaaggaaaacagcaagcgctggaacccggagatccagtacacttccaactattacaagtctaataatgttgaatttgctgttaatactgaaggtgtatatagtgaaccccgccccattggcaccagatacctgactcgtaatctgtaa

SEQ ID NO: 992 - protein, 735 aa, synthetic construct
  REGION 1..735: note = source = /note="Description of Artificial Sequence: Synthetic polypeptide"
MAADGYLPDWLEDNLSEGIREWWDLKPGAPKPKANQQKQDDGRGLVLPGYKYLGPFNGLDKGEPVNAADAAALEHDKAYDRQLDSGDNPYLKYNHADAEFQERLKEDTSFGGNLGRAVFQAKKRVLEPFGLVEEGAKTAPGKKRPVEQSPQEPDSSSGIGKTGQQPAKKRLNFGQTGDSESVPDPQPLGEPPATPAAVGPTTMASGGGAPVADNNEGADGVGSSSGNWHCDSTWLGDRVITTSTRTWALPTYNNHLYKQISSASTGASNDNHYFGYSTPWGYFDFNRFHCHFSPRDWQRLINNNWGFRPKRLNFKLFNIQVKEVTTNEGTKTIANNLTSTVQVFTDSEYQLPYVLGSAHQGCLPPFPADVFMVPQYGYLTLNNGSQALGRSSFYCLEYFPSQMLRTGNNFTFSYTFEDVPFHSSYAHSQSLDRLMNPLIDQYLYYLVRTQTTGTGGTQTLAFSQAGPSSMANQARNWVPGPCYRQQRVSTTTNQNNNSNFAWTGAAKFKLNGRDSLMNPGVAMASHKDDDDRFFPSSGVLIFGKQGAGNDGVDYSQVLITDEEEIKATNPVATEEYGAVAINNQAANTQAQTGLVHNQGVIPGMVWQNRDVYLQGPIWAKIPHTDGNFHPSPLMGGFGLKHPPPQILIKNTPVPADPPLTFNQAKLNSFITQYSTGQVSVEIEWELQKENSKRWNPEIQYTSNYYKSTNVDFAVNTEGVYSEPRPIGTRYLTRNL

SEQ ID NO: 993 - protein, 736 aa, synthetic construct
  VARIANT 113: note = Any naturally occurring amino acid
  REGION 1..736: note = source = /note="Description of Artificial Sequence: Synthetic polypeptide"
MAADGYLPDWLEDTLSEGIRQWWKLKPGPPPPKPAERHKDDSRGLVLPGYKYLGPFNGLDKGEPVNAADAATLEHDKAYDQQLKAGDNPYLRYNHADAEFQERLQEDTSFGGXLGRAVFQAKKRVLEPLGLVEEAAKTAPGKKRPVEPSPQRSPDSSTGIGKKGQQPARKRLNFGQTGDSESVPDPQPLGEPPAAPSGVGPNTMAAGGGAPMADNNEGADGVGSSSGNWHCDSTWLGDRVITTSTRTWALPTYNNHLYKQISSASTGASNDNHYFGYSTPWGYFDFNRFHCHFSPRDWQRLINNNWGFRPKRLNFKLFNIQVKEVTTNDGVTTIANNLTSTVQVFSDSDYQLPYVLGSAHEGCLPPFPADVFMIPQYGYLTLNNGSQALGRSSFYCLEYFPSQMLRTGNNFQFSYTFEDVPFHSSYAHSQSLDRLMNPLIDQYLYYLVRTQTTGTGGTQTLAFSQAGPSSMANQARNWVPGPCYRQQRVSTTTNQNNNSNFAWTGAAKFKLNGRDSLMNPGVAMASHKDDDDRFFPSSGVLIFGKQGAGNDGVDYSQVLITDEEEIKATNPVATEEYGAVAINNQAANTQAQTGLVHNQGVIPGMVWQDRDVYLQGPIWAKIPHTDGHFHPSPLMGGFGLKHPPPQILIKNTPVPANPPAEFSATKFASFITQYSTGQVSVEIEWELQKENSKRWNPEVQYTSNYAKSANVDFTVDNNGLYTEPRPIGTRYLTRPL

SEQ ID NO: 994 - protein, 737 aa, synthetic construct
  VARIANT 112: note = Any naturally occurring amino acid
  REGION 1..737: note = source = /note="Description of Artificial Sequence: Synthetic polypeptide"
MTDGYLPDWLEDNLSEGVREWWALQPGAPKPKANQQKQDDGRGLVLPGYKYLGPFNGLDKGEPVNAADAAALEHDKAYDQQLKAGDNPYLRYNHADAEFQERLQEDTSFGGXLGRAVFQAKKRVLEPLGLVEEGAKTAPGKKRPVEPSPQRSPDSSTGIGKKGQQPARKRLNFGQTGDSESVPDPQPLGEPPAAPSGVGSLTMASGGGAPVADNNEGADGVGSSSGNWHCDSQWLGDRVITTSTRTWALPTYNNHLYKQISNSTSGGSSNDNAYFGYSTPWGYFDFNRFHCHFSPRDWQRLINNNWGFRPKRLSFKLFNIQVKEVTQNEGTKTIANNLTSTIQVFTDSEYQLPYVLGSAHQGCLPPFPADVFMIPQYGYLTLNNGSQAVGRSSFYCLEYFPSQMLRTGNNFQFTYTFEDVPFHSSYAHSQSLDRLMNPLIDQYLYYLSRTQTTGGTANTQTLGFSQGGPNTMANQAKNWLPGPCYRQQRVSTTTGQNNNSNFAWTAGTKYHLNGRNSLANPGIAMATHKDDEERFFPSNGILIFGKQNAARDNADYSDVMLTSEEEIKTTNPVATEEYGIVADNLQQQNTAPQIGTVNSQGALPGMVWQNRDVYLQGPIWAKIPHTDGNFHPSPLMGGFGLKHPPPQILIKNTPVPADPPTTLNQAKLNSFITQYSTGQVSVEIEWELQKENSKRWNPEIQYTSNYYKSTNVDFAVNTEGTYSEPRPIGTRFLTRNL

SEQ ID NO: 995 - protein, 736 aa, synthetic construct
  VARIANT 113: note = Any naturally occurring amino acid
  REGION 1..736: note = source = /note="Description of Artificial Sequence: Synthetic polypeptide"
MAADGYLPDWLEDTLSEGIRQWWKLKPGPPPPKPAERHKDDSRGLVLPGYKYLGPFNGLDKGEPVNAADAAALEHDKAYDQQLEAGDNPYLRYNHADAEFQERLQEDTSFGGXLGRAVFQAKKRVLEPLGLVEEGAKTAPGKKRPVEQSPQEPDSSSGIGRKGQQPARKRLNFGQTGDSESVPDPQPLGEPPAAPSGVGPNTMASGGGAPMADNNEGADGVGNASGNWHCDSTWLGDRVITTSTRTWALPTYNNHLYKQISSASTGASNDNHYFGYSTPWGYFDFNRFHCHFSPRDWQRLINNNWGFRPKRLNFKLFNIQVKEVTQNEGTKTIANNLTSTIQVFTDSEYQLPYVLGSAHQGCLPPFPADVFMIPQYGYLTLNNGSQAVGRSSFYCLEYFPSQMLRTGNNFQFTYTFEDVPFHSSYAHSQSLDRLMNPLIDQYLYYLSRTQSTGGTQGTQQLLFSQAGPANMSAQAKNWLPGPCYRQQRVSTTLSQNNNSNFAWTGATKYHLNGRDSLVNPGVAMATHKDDEERFFPSSGVLMFGKQGAGRDNVDYSSVMLTSEEEIKTTNPVATEQYGVVVDNLQQTNTGPIVGNVNSQGALPGMVWQNRDVYLQGPIWAKIPHTDGNFHPSPLMGGFGLKHPPPQILIKNTPVPADPPTAFNKDKLNSFITQYSTGQVSVEIEWELQKENSKRWNPEIQYTSNYYKSNNVEFAVNTEGVYSEPRPIGTRYLTRNL

SEQ ID NO: 996 - DNA, 2211 bp, synthetic construct
  misc_feature 1..2211: note = source = /note="Description of Artificial Sequence: Synthetic AAV9 VP1"
  source 1..2211: mol_type = other DNA
atggccgccgacggctacctgcccgactggctggaggacaacctgagcgagggcatccgcgagtggtgggccctgaagcccggcgccccccagcccaaggccaaccagcagcaccaggacaacgcccgcggcctggtgctgcccggctacaagtacctgggccccggcaacggcctggacaagggcgagcccgtgaacgccgccgacgccgccgccctggagcacgacaaggcctacgaccagcagctgaaggccggcgacaacccctacctgaagtacaaccacgccgacgccgagttccaggagcgcctgaaggaggacaccagcttcggcggcaacctgggccgcgccgtgttccaggccaagaagcgcctgctggagcccctgggcctggtggaggaggccgccaagaccgcccccggcaagaagcgccccgtggagcagagcccccaggagcccgacagcagcgccggcatcggcaagagcggcgcccagcccgccaagaagcgcctgaacttcggccagaccggcgacaccgagagcgtgcccgacccccagcccatcggcgagccccccgccgcccccagcggcgtgggcagcctgaccatggccagcggcggcggcgcccccgtggccgacaacaacgagggcgccgacggcgtgggcagcagcagcggcaactggcactgcgacagccagtggctgggcgaccgcgtgatcaccaccagcacccgcacctgggccctgcccacctacaacaaccacctgtacaagcagatcagcaacagcaccagcggcggcagcagcaacgacaacgcctacttcggctacagcaccccctggggctacttcgacttcaaccgcttccactgccacttcagcccccgcgactggcagcgcctgatcaacaacaactggggcttccgccccaagcgcctgaacttcaagctgttcaacatccaggtgaaggaggtgaccgacaacaacggcgtgaagaccatcgccaacaacctgaccagcaccgtgcaggtgttcaccgacagcgactaccagctgccctacgtgctgggcagcgcccacgagggctgcctgccccccttccccgccgacgtgttcatgatcccccagtacggctacctgaccctgaacgacggcagccaggccgtgggccgcagcagcttctactgcctggagtacttccccagccagatgctgcgcaccggcaacaacttccagttcagctacgagttcgagaacgtgcccttccacagcagctacgcccacagccagagcctggaccgcctgatgaaccccctgatcgaccagtacctgtactacctgagcaagaccatcaacggcagcggccagaaccagcagaccctgaagttcagcgtggccggccccagcaacatggccgtgcagggccgcaactacatccccggccccagctaccgccagcagcgcgtgagcaccaccgtgacccagaacaacaacagcgagttcgcctggcccggcgccagcagctgggccctgaacggccgcaacagcctgatgaaccccggccccgccatggccagccacaaggagggcgaggaccgcttcttccccctgagcggcagcctgatcttcggcaagcagggcaccggccgcgacaacgtggacgccgacaaggtgatgatcaccaacgaggaggagatcaagaccaccaaccccgtggccaccgagagctacggccaggtggccaccaaccaccagagcgcccaggcccaggcccagaccggctgggtgcagaaccagggcatcctgcccggcatggtgtggcaggaccgcgacgtgtacctgcagggccccatctgggccaagatcccccacaccgacggcaacttccaccccagccccctgatgggcggcttcggcatgaagcacccccccccccagatcctgatcaagaacacccccgtgcccgccgacccccccaccgccttcaacaaggacaagctgaacagcttcatcacccagtacagcaccggccaggtgagcgtggagatcgagtgggagctgcagaaggagaacagcaagcgctggaaccccgagatccagtacaccagcaactactacaagagcaacaacgtggagttcgccgtgaacaccgagggcgtgtacagcgagccccgccccatcggcacccgctacctgacccgcaacctgtaa

SEQ ID NO: 997 - DNA, 2211 bp, synthetic construct
  misc_feature 1..2211: note = source = /note="Description of Artificial Sequence: Synthetic polynucleotide"
  source 1..2211: mol_type = other DNA
atggctgccgatggttatcttccagattggctcgaggacactctctctgaaggaataagacagtggtggaagctcaaacctggcccaccaccaccaaagcccgcagagcggcataaggacgacagcaggggtcttgtgcttcctgggtacaagtacctcggacccttcaacggactcgacaagggagagccggtcaacgaggcagacgccgcggccctcgagcacgacaaggcctacgaccagcagctcaaggccggagacaacccgtacctcaagtacaaccacgccgacgccgagttccaggagcggctcaaagaagatacgtcttttgggggcaacctcggacgagcagtcttccaggccaagaagcgggttctcgaacctctcggtctggttgaggaaggcgctaagacggctcctggaaagaaacgtccggtagagcagtcgccacaagagccagactcctcctcgggcattggcaagacaggccagcagcccgctaaaaagagactcaattttggtcagactggcgactcagagtcagtccccgacccacaacctctcggagaacctccagcaacccccgctgctgtgggacctactacaatggcttcaggcggtggcgcaccaatggcggacaataacgaaggcgccgatggagtgggtagttcctcgggaaattggcattgcgattcccaatggctgggggacagagtcatcaccaccagcacccgaacatgggccttgcccacctataacaaccacctctacaagcaaatctccagtgcttcaacgggggccagcaacgacaaccactacttcggctacagcaccccctgggggtattttgacttcaacagattccactgccacttctcaccacgtgactggcagcgactcatcaacaacaactggggattccgacccaagagactcaacttcaagctctttaacattcaagtcaaggaggtcacgcagaatgaaggcaccaagaccatcgccaataacctcaccagcaccatccaggtgtttacggactcggagtaccagctgccgtacgttctcggctccgcccaccagggctgcctgcctccgttcccggcggacgtgttcatgattccccagtacggctacctaacactcaacaacggtagtcaggccgtgggacgctcctccttctactgcctggaatactttccttcgcagatgctgagaaccggcaacaacttccagtttacttacaccttcgaggacgtgcctttccacagcagctacgcccacagccagagcttggaccggctgatgaatcctctgattgaccagtacctgtactacttgtctcggactcaaacaacaggaggcacggcaaatacgcagactctgggcttcagccaaggtgggcctaatacaatggccaatcaggcaaagaactggctgccaggaccctgttaccgccaacaacgcgtctcaacgacaaccgggcaaaacaacaatagcaactttgcctggactgctgggaccaaataccatctgaatggaagaaattcattggctaatcctggcatcgctatggcaacacacaaagacgacaaggagcgtttttttcccagtaacgggatcctgatttttggcaaacaaaatgctgccagagacaatgcggattacagcgatgtcatgctcaccagcgaggaagaaatcaaaaccactaaccctgtggctacagaggaatacggtatcgtggcagataacttgcagcagcaaaacacggctcctcaaattggaactgtcaacagccagggggccttacccggtatggtctggcagaaccgggacgtgtacctgcagggtcccatctgggccaagattcctcacacggacggcaacttccacccgtctccgctgatgggcggctttggcctgaaacatcctccgcctcagatcctgatcaagaacacgcctgtacctgcggatcctccgaccaccttcaaccagtcaaagctgaactctttcatcacgcaatacagcaccggacaggtcagcgtggaaattgaatgggagctgcagaaagaaaacagcaaacgctggaacccagagattcaatacacttccaactactacaaatctacaagtgtggactttgctgttaatacagaaggcgtgtactctgaaccccaccccattggcacccgttacctcacccgtcccctgtaa

SEQ ID NO: 998 - DNA, 2211 bp, synthetic construct
  misc_feature 1..2211: note = source = /note="Description of Artificial Sequence: Synthetic polynucleotide"
  source 1..2211: mol_type = other DNA
atggctgccgatggttatcttccagattggctcgaggacaacctctctgagggcattcgcgagtggtgggcgctgaaacctggagccccgaagcccaaagccaaccagcaaaagcaggacgacggccggggtctggtgcttcctggctacaagtacctcggacccttcaacggactcgacaagggggagccggtcaacgcagcagacgcggcggccctcgagcacgacaaggcctacgaccagcagctcaaggccggagacaacccgtacctcaagtacaaccacgccgacgccgagttccaggagcggctcaaagaagatacgtcttttgggggcaacctcgggcgagcagtcttccaggccaaaaagaggcttcttgaacctcttggtctggttgaggaagcggctaagacggctcctggaaagaagaggcctgtagagcagtctcctcaggaaccggactcctccgcgggtattggcaaatcgggtgcacagcccgctaaaaagagactcaattttggtcagactggcgactcagagtcagtccccgacccacaacctctcggagaacctccagcaacccccgctgctgtgggacctactacaatggcttcaggcggtggcgcaccaatggcagacaataacgaaggcgccgacggagtgggtaatgcctcaggaaattggcattgcgattccacatggctgggcgacagagtcatcaccaccagcacccgaacctgggccctgcccacctacaataaccacctctacaagcaaatctccagtgcttcaacgggggccagcaacgacaaccactacttcggctacagcaccccctgggggtattttgatttcaacagattccactgccacttttcaccacgtgactggcagcgactcatcaacaacaattggggattccggcccaagagactcaacttcaaactcttcaacatccaagtcaaggaggtcacgcagaatgaaggcaccaagaccatcgccaataacctcaccagcaccatccaggtgtttacggactcggagtaccagctgccgtacgttctcggctctgcccaccagggctgcctgcctccgttcccggcggacgtgttcatgattccccagtacggctacctaacactcaacaacggtagtcaggccgtgggacgctcctccttctactgcctggaatactttccttcgcagatgctgagaaccggcaacaacttccagtttacttacaccttcgaggacgtgcctttccacagcagctacgcccacagccagagcttggaccggctgatgaatcctctgattgaccagtacctgtactacttgtctcggactcaaacaacaggaggcacggcaaatacgcagactctgggcttcagccaaggtgggcctaatacaatggccaatcaggcaaagaactggctgccaggaccctgttaccgccaacaacgcgtctcaacgacaaccgggcaaaacaacaatagcaactttgcctggactgctgggaccaaataccatctgaatggaagaaattcattggctaatcctggcatcgctatggcaacacacaaagacgacaaggagcgtttttttcccagtaacgggatcctgatttttggcaaacaaaatgctgccagagacaatgcggattacagcgatgtcatgctcaccagcgaggaagaaatcaaagccactaaccctgtggctacagaggaatacggtatcgtggcagataacttgcagcagcaaaacacggctcctcaaattggaactgtcaacagccagggggccttacccggtatggtttggcagaaccgggacgtgtacctgcagggtcccatctgggccaagattcctcacacggacggcaacttccacccgtctccgctgatgggcggctttggcctgaaacatcctccgcctcagatcctgatcaagaacacgcctgtacctgcggatcctccgaccaccttcaaccagtcaaagctgaactctttcatcacgcaatacagcaccggacaggtcagcgtggaaattgaatgggagctgcagaaggaaaacagcaagcgctggaaccccgagatccagtacacctccaactactacaaatctacaagtgtggactttgctgttaatacagaaggcgtgtactctgaaccccaccccattggcacccgttacctcacccgtcccctgtaa

SEQ ID NO: 999 - DNA, 2214 bp, synthetic construct
  misc_feature 1..2214: note = source = /note="Description of Artificial Sequence: Synthetic polynucleotide"
  source 1..2214: mol_type = other DNA
atggctgccgatggttatcttccagattggctcgaggacaacctctctgagggcattcgcgagtggtgggacttgaaacctggagccccgaagcccaaagccaaccagcaaaagcaggacgacggccggggtctggtgcttcctggctacaagtacctcggacccttcaacggactcgacaagggggagcccgtcaacgcggcggacgcagcggccctcgagcacgacaaggcctacgaccagcagctcaaagcgggtgacaatccgtacctgcggtataaccacgccgacgccgagtttcaggagcgtctgcaagaagatacgtcttttgggggcaacctcgggcgagcagtcttccaggccaagaagcgggttctcgaacctctcggtctggttgaggaaggcgctaatacggctcctggaaagaaacgtccggtagagcagtcgccacaagagccagactcctccgcgggtattggcaaatcgggtgcacagcccgctaaaaagagactcaatttcggtcagactggcgacacagagtcagtcccagaccctcaaccaatcggagaacctcccgcagccccctcaggtgtgggatctcttacaatggcttcaggtggtggcgcaccagtggcagacaataacgaaggtgccgatggagtgggtagttcctcgggaaattggcattgcgattcccaatggctgggggacagagtcatcaccaccagcacccgaacctgggccctgcccacctacaacaatcacctctacaagcaaatctccaacagcacatctggaggatcttcaaatgacaacgcctacttcggctacagcaccccctgggggtattttgacttcaacagattccactgccacttctcaccacgtgactggcagcgactcatcaacaacaactggggattccggcctaagcgactcaacttcaagctcttcaacattcaggtcaaagaggttacggacaacaatggagtcaagaccatcgccaataacctcaccagcaccatccaggtgtttacggactcggagtaccagctgccgtacgttctcggctccgcccaccagggctgcctgcctccgttcccggcggacgtgttcatgattccccagtacggctacctaacactcaacaacggtagtcaggccgtgggacgctcctccttctactgcctggaatactttccttcgcagatgctgagaaccggcaacaacttccagtttacttacaccttcgaggacgtgcctttccacagcagctacgcccacagccagagcttggaccggctgatgaatcctctgattgaccagtacctgtactacttgtctcggactcaaacaacaggaggcacggcaaatacgcagactctgggcttcagccaaggtgggcctaatacaatggccaatcaggcaaagaactggctgccaggaccctgttaccgccaacaacgcgtctcaacgacaaccgggcaaaacaacaatagcaactttgcctggactgctgggaccaaataccatctgaatggaagaaattcattggctaatcctggcatcgctatggcctcacacaaagacgacaaggagcgtttttttcccagtaacgggatcctgatttttggcaaacaaaatgctgccagagacaatgcggattacagcgatgtcatgctcaccagcgaggaagaaatcaaaaccactaaccctgtggctacagaggaatacggtatcgtggcagataacttgcagcagcaaaacacggctcctcaaattggaactgtcaacagtcaaggagccttacctggcatggtctggcagaaccgggacgtgtacctgcagggtcccatctgggccaagattcctcacacggacggcaacttccacccgtctccgctgatgggcggctttggcctgaaacatcctccgcctcagatcctgatcaagaacacgcctgtacctgcggatcctccgaccaccttcaaccagtcaaagctgaactctttcatcacgcaatacagcaccggacaggtcagcgtggaaattgaatgggagctgcagaaggaaaacagcaagcgctggaaccccgagatccagtacaccaccaactactacaaatctacaagtgtggactttgctgttaatacagaaggcgtgtactctgaaccccaccccattggcacccgttacctcacccgtcccctgtaa

SEQ ID NO: 1000 - DNA, 2211 bp, synthetic construct
  misc_feature 1..2211: note = source = /note="Description of Artificial Sequence: Synthetic polynucleotide"
  source 1..2211: mol_type = other DNA
atggctgccgatggttatcttccagattggctcgaggacaacctctctgagggcattcgcgagtggtgggcgctgaaacctggagccccgaagcccaaagccaaccagcaaaagcaggacgacggccggggtctggtgcttcctggctacaagtacctcggacccttcaacggactcgacaaaggagagccggtcaacgaggcggacgcggcagccctcgaacacgacaaagcttacgaccagcagctcaaggccggtgacaatccgtacctgcggtataaccacgccgacgccgagtttcaggagcgtcttcaagaagatacgtcttttgggggcaacctcgggcgagcagtcttccaggccaagaagcgggttctcgaacctctcggtctggttgaggaaggcgctaagacggctcctggaaagaaacgtccggtagagcagtcgccacaagagccagactcctcctcgggcatcggcaagacaggccagcagcccgctaaaaagagactcaattttggtcagactggcgactcagagtcagtccccgacccacaacctctcggagaacctccagcaacccccgctgctgtgggacctactacaatggcttcaggcggtggcgcaccaatggcagacaataacgaaggcgccgacggagtgggtaatgcctcaggaaattggcattgcgattccacatggctgggcgacagagtcatcaccaccagcacccgcacctgggccttgcccacctacaataaccacctctacaagcaaatctccagtgcttcaacgggggccagcaacgacaaccactacttcggctacagcaccccctgggggtattttgactttaacagattccactgccacttttcaccacgtgactggcaaagactcatcaacaacaactggggattccggcccaagagactcaacttcaagctcttcaacatccaggtcaaggaggtcacgcagaatgaaggcaccaagaccatcgccaataaccttaccagcacgattcaggtctttacggactcggaataccagctcccgtacgtcctcggctctgcgcaccagggctgcctccctccgttcccggcggacgtgttcatgattccgcagtacggctacctaacactcaacaacggtagtcaggccgtgggacgctcctccttctactgcctggaatactttccttcgcagatgctgagaaccggcaacaacttccagtttacttacaccttcgaggacgtgcctttccacagcagctacgcccacagccagagcttggaccggctgatgaatcctctgattgaccagtacctgtactacttgtctcggactcaaacaacaggaggcacggcaaatacgcagactctgggcttcagccaaggtgggcctaatacaatggccaatcaggcaaagaactggctgccaggaccctgttaccgccaacaacgcgtctcaacgacaaccgggcaaaacaacaatagcaactttgcctggactgctgggaccaaataccatctgaatggaagaaattcattggctaatcctggcatcgctatggcaacacacaaagacgacaaggagcgtttttttcccagtaacgggatcctgatttttggcaaacaaaatgctgccagagacaatgcggattacagcgatgtcatgctcaccagcgaggaagaaatcaaaaccactaaccctgtggctacagaggaatacggtatcgtggcagataacttgcagcagcaaaacacggctcctcaaattggaactgtcaacagccagggggccttacccggtatggtctggcagaaccgggacgtgtacctgcagggtcccatctgggccaagattcctcacacggacggcaacttccacccgtctccgctgatgggcggctttggcctgaaacatcctccgcctcagatcctgatcaagaacacgcctgtacctgcggatcctccgaccaccttcaaccagtcaaagctgaactctttcatcacgcaatacagcaccggacaggtcagcgtggaaattgaatgggagctgcagaaggaaaacagcaagcgctggaaccccgagatccagtacacctccaactactacaaatctacaagtgtggactttgctgttaatacagaaggcgtgtactctgaaccccaccccattggcacccgttacctcacccgtcccctgtaa

SEQ ID NO: 1001 - DNA, 2211 bp, synthetic construct
  misc_feature 1..2211: note = source = /note="Description of Artificial Sequence: Synthetic polynucleotide"
  source 1..2211: mol_type = other DNA
atggctgccgatggttatcttccagattggctcgaggacaacctctctgagggcattcgcgagtggtgggcgctgaaacctggagccccgaagcccaaagccaaccagcaaaagcaggacgacggccggggtctggtgcttcctggctacaagtacctcggacccttcaacggactcgacaaaggagagccggtcaacgaggcggacgcggcagccctcgaacacgacaaagcttacgaccagcagctcaaagcgggtgacaatccgtacctgcggtataaccacgccgacgccgagtttcaggagcgtctgcaagaagatacgtcttttgggggcaacctcgggcgagcagtcttccaggccaagaagagggttctcgaaccttttggtctggttgaggaaggtgctaagacggctcctggaaagaaacgtccggtagagcagtcgccacaagagccagactcctcctcgggcattggcaagacaggccagcagcccgctaaaaagagactcaattttggtcagactggcgactcagagtcagtccccgacccacaacctctcggagaacctccagcaacccccgctgctgtgggacctactacaatggcttcaggcggtggcgcaccaatggcagacaataacgaaggcgccgacggagtgggtaatgcctcaggaaattggcattgcgattcccaatggctgggcgacagagtcatcaccaccagcaccagaacctgggccttgcccacctataacaaccacctctacaagcaaatctccagtgcttcaacgggggccagcaacgacaaccactacttcggctacagcaccccctgggggtattttgatttcaacagattccactgccacttctcaccacgtgactggcagcgactcatcaacaacaactggggattccggcctaagcgactcaacttcaagctcttcaacattcaggtcaaagaggttacggacaacaatggagtcaagaccatcgccaataaccttaccagcacggttcaagtcttctcggactcggagtaccagttgccgtacgtcctcggctctgcgcaccagggctgcctccctccgttcccggcggacgtgttcatgattccccagtacggctacctaacactcaacaacggtagtcaggccgtgggacgctcctccttctactgcctggaatactttccttcgcagatgctgagaaccggcaacaacttccagtttacttacaccttcgaggacgtgcctttccacagcagctacgcgcacagccagagcttggaccggctgatgaatcctctgattgaccagtacctgtactacttgtctcggactcaaacaacaggaggcacggcaaatacgcagactctgggcttcagccaaggtgggcctaatacaatggccaatcaggcaaagaactggctgccaggaccctgttaccgccaacaacgcgtctcaacgacaaccgggcaaaacaacaatagcaactttgcctggactgctgggaccaaataccatctgaatggaagaaattcattggctaatcctggcatcgctatggcaacacacaaagacgacaaggagcgtttttttcccagtaacgggatcctgatttttggcaaacaaaatgctgccagagacaatgcggattacagcgatgtcatgctcaccagcgaggaagaaatcaaaaccactaaccctgtggctacagaggaatacggtatcgtggcagataacttgcagcagcaaaacacggctcctcaaattggaactgtcaacagccagggggccttacccggtatggtctggcagaaccgggacgtgtacctgcagggtcccatctgggccaagattcctcacacggacggcaacttccacccgtctccgctgatgggcggctttggcctgaaacatcctccgcctcagatcctgatcaagaacacgcctgtacctgcggatcctccgaccaccttcaaccagtcaaagctgaactctttcatcacgcaatacagcaccggacaggtcagcgtggaaattgaatgggagctgcagaaggaaaacagcaagcgctggaaccccgagatccagtacacctccaactactacaaatctacaagtgtggactttgctgttaatacagaaggcgtgtactctgaaccccaccccattggcacccgttacctcacccgtcccctgtaa

SEQ ID NO: 1002 - DNA, 2244 bp, synthetic construct
  variation 2241: note = a, c, g, or t
  misc_feature 1..2244: note = source = /note="Description of Artificial Sequence: Synthetic polynucleotide"
  source 1..2244: mol_type = other DNA
atggctgccgatggttatcttccagattggctcgaggacactctctctgaaggaataagacagtggtggaagctcaaacctggcccaccaccaccaaagcccgcagagcggcataaggacgacagcaggggtcttgtgcttcctgggtacaagtacctcggacccttcaacggactcgacaagggagagccggtcaacgaggcagacgccgcggccctcgagcacgacaaagcctacgaccggcagctcgacagcggagacaacccgtacctcaagtacaaccacgccgacgcggagtttcaggagcgccttaaagaagatacgtcttttgggggcaacctcgggcgagcagtcttccaggccaagaagagggttctcgaaccttttggtctggttgaggaaggtgctaagacggctcctggaaagaaacgtccggtagagcagtcgccacaagagccagactcctcctcgggcattggcaagacaggccagcagcccgctaaaaagagactcaattttggtcagactggcgactcagagtcagtccccgacccacaacctctcggagaacctccagcaacccccgctgctgtgggacctactacaatggcttcaggcggtggcgcaccaatggcagacaataacgaaggcgccgacggagtgggtaatgcctcaggaaattggcattgcgattccacatggctgggcgacagagtcatcaccaccagcacccgaacatgggccttgcccacctataacaaccacctctacaagcaaatctccagtgcttcaacgggggccagcaacgacaaccactacttcggctacagcaccccctgggggtattttgacttcaacagattccactgccacttctcaccacgtgactggcagcgactcatcaacaacaactggggattccggcctaagcgactcaacttcaagctcttcaacattcaggtcaaagaggttacggacaacaatggagtcaagaccatcgccaataaccttaccagcacggtccaggtcttcacggactcagactatcagctcccgtacgtgctcgggtcggctcacgagggctgcctcccgccgttcccagcggacgttttcatgattcctcagtacggctacctaacactcaacaacggtagtcaggccgtgggacgctcctccttctactgcctggaatactttccttcgcagatgctgagaaccggcaacaacttccagtttacttacaccttcgaggacgtgcctttccacagcagctacgcgcacagccagagcttggaccggctgatgaatcctctgattgaccagtacctgtactacttgtctcggactcaaacaacaggaggcacggcaaatacgcagactctgggcttcagccaaggtgggcctaatacaatggccaatcaggcaaagaactggctgccaggaccctgttaccgccaacaacgcgtctcaacgacaaccgggcaaaacaacaatagcaactttgcctggactgctgggaccaaataccatctgaatggaagaaattcattggctaatcctggcatcgctatggcaacacacaaagacgacaaggagcgtttttttcccagtaacgggatcctgatttttggcaaacaaaatgctgccagagacaatgcggattacagcgatgtcatgctcaccagcgaggaagaaatcaaaaccactaaccctgtggctacagaggaatacggtatcgtggcagataacttgcagcagcaaaacacggctcctcaaattggaactgtcaacagccagggggccttacccggtatggtctggcagaaccgggacgtgtacctgcagggtcccatctgggccaagattcctcacacggacggcaacttccacccgtctccgctgatgggcggctttggcctgaaacatcctccgcctcagatcctgatcaagaacacgcctgtacctgcggatcctccgaccaccttcaaccagtcaaagctgaactctttcatcacgcaatacagcaccggacaggtcagcgtggaaattgaatgggagctgcagaaggaaaacagcaagcgctggaaccccgagatccagtacacctccaactactacaaatctacaagtgtggactttgctgttaatacagaaggcgtgtactctgaaccccaccccattggcaccagatacctgactcgtaatctgtaattgcttgttaatcaataaaccgtttaattnttt

SEQ ID NO: 1003 - DNA, 2217 bp, synthetic construct
  misc_feature 1..2217: note = source = /note="Description of Artificial Sequence: Synthetic polynucleotide"
  source 1..2217: mol_type = other DNA
atggctgccgatggttatcttccagattggctcgaggacaacctctctgagggcattcgcgagtggtgggacttgaaacctggagccccgaaacccaaagccaaccagcaaaagcaggacgacggccggggtctggtgcttcctggctacaagtacctcggacccttcaacggactcgacaagggggagcccgtcaacgcggcggacgcagcggccctcgagcacgacaaggcctacgaccagcagctccaagcgggtgacaatccgtacctgcggtataaccacgccgacgccgagtttcaggagcgtctgcaagaagatacgtcttttgggggcaacctcggacgagcagtcttccaggcgaaaaagagggttctcgaacctctcggtctggttgaggaaggcgctaagacggctcctggaaagaagagaccggtagagccatcaccccagcgttctccagactcctctacgggcatcggcaagaaaggccaacagcccgccagaaaaagactcaattttggtcagactggcgactcagagtcagttccagaccctcaacctctcggagaacctccagcagcgccctctggtgtgggacctaatacaatggctgcaggcggtggcgcaccaatggcagacaataacgaaggcgccgacggagtgggtagttcctcgggaaattggcattgcgattcccaatggctgggggacagagtcatcaccaccagcacccgaacctgggccctgcccacctacaacaatcacctctacaagcaaatctccaacagcacatctggaggatcttcaaatgacaacgcctacttcggctacagcaccccctgggggtattttgacttcaaccgcttccactgccacttctcaccacgtgactggcagcgactcatcaacaacaactggggattccggcccaagagactcagcttcaaactcttcaacatccaggtcaaggaggtcacgcagaatgaaggcaccaagaccatcgccaataacctcaccagcaccatccaggtgtttacggactcggagtaccagctgccgtacgttctcggctctgcccaccagggctgcctgcctccgttcccggcggacgtgttcatgattcctcagtacggctacctaacgctcaacaatggcagccaggcagtgggacggtcatccttttactgcctggaatatttcccatcgcagatgctgagaacgggcaacaactttaccttcagctacacctttgaggacgttcctttccacagcagctacgctcacagccagagtctggaccgtctcatgaatcctctgattgaccagtacctgtactacttgtctcggactcaaacaacaggaggcacggcaaatacgcagactctgggcttcagccaaggtgggcctaatacaatggccaatcaggcaaagaactggctgccaggaccctgttaccgccaacaacgcgtctcaacgacaaccgggcaaaacaacaatagcaactttgcctggactgctgggaccaaataccatctgaatggaagaaattcattggctaatcctggcatcgctatggcaacacacaaagacgacaaggagcgtttttttcccagtaacgggatcctgatttttggcaaacaaaatgctgccagagacaatgcggattacagcgatgtcatgctcaccagcgaggaagaaatcaaaaccactaaccctgtggctacagaggaatacggtatcgtggcagataacttgcagcagcaaaacacggctcctcaaattggaactgtcaacagccagggggccttacccggtatggtctggcagaaccgggacgtgtacctgcagggtcccatctgggccaagattcctcacacggacggcaacttccacccgtctccgctgatgggcggctttggacttaagcacccgcctcctcagatcctcatcaaaaacacgcctgttcctgcggatcctccgaccaccttcaaccagtcaaagctgaactctttcatcacgcaatacagcaccggacaggtcagcgtggaaattgaatgggagctgcagaaggaaaacagcaagcgctggaaccccgagatccagtacacctccaactactacaaatctacaagtgtggactttgctgttaatacagaaggcgtgtactctgaaccccaccccattggcacccgttacctcacccgtcccctgtaa

SEQ ID NO: 1004 - DNA, 2214 bp, synthetic construct
  misc_feature 1..2214: note = source = /note="Description of Artificial Sequence: Synthetic polynucleotide"
  source 1..2214: mol_type = other DNA
atggctgccgatggttatcttccagattggctcgaggacaacctctctgagggcattcgcgagtggtgggacttgaaacctggagccccgaagcccaaagccaaccagcaaaagcaggacgacggccggggtctggtgcttcctggctacaagtacctcggacccttcaacggactcgacaagggggagcccgtcaacgcggcggatgcagcggccctcgagcacgacaaagcctacgaccagcagctcaaagcgggtgacaatccgtacctgcggtataaccacgccgacgccgagtttcaggagcgtctgcaagaagatacgtcttttgggggcaacctcgggcgagcagtcttccaggccaagaagagggttctcgaaccttttggtctggttgaggaaggtgctaagacggctcctggaaagaaacgtccggtagagcagtcgccacaagagccagactcctcctcgggcattggcaagacaggccagcagcccgctaaaaagagactcaattttggtcagactggcgactcagagtcagtccccgacccacaacctctcggagaacctccagcaacccccgctgctgtgggacctactacaatggcttcaggcggtggcgcacccatgcaagacaataacgaaggcgccgacggagtgggtagttcctcgggaaattggcattgcgattccacatggctgggcgacagagtcatcaccaccagcacccgaacctgggccctgcccacctacaacaaccacctctacaagcaaatctccaacgggacatcgggaggagccaccaacgacaacacctacttcggctacagcaccccctgggggtattttgactttaacagattccactgccacttttcaccacgtgactggcagcgactcatcaacaacaactggggattccggcccaagagactcaacttcaagctcttcaacatccaggtcaaggaggtcacgcagaatgaaggcaccaagaccatcgccaataaccttaccagcacgattcaggtctttacggattcggaataccagctcccgtacgtcctcggctctgcgcaccagggctgcctccctccgttcccggcggacgtgttcatgattccgcagtacggctacctaacgctcaacaatggtagccaggcagtgggacggtcatccttttactgcctggaatatttcccatcgcagatgctgagaacgggcaacaactttaccttcagctacacctttgaggacgttcctttccacagcagctacgctcacagccagagtctggaccgtctcatgaatcctctgattgaccagtacctgtactacttgtctcggactcaaacaacaggaggcacggcaaatacgcagactctgggcttcagccaaggtgggcctaatacaatggccaatcaggcaaagaactggctgccaggaccctgttaccgccaacaacgcgtctcaacgacaaccgggcaaaacaacaatagcaactttgcctggactgctgggaccaaataccatctgaatggaagaaattcattggctaatcctggcatcgctatggcaacacacaaagacgacaaggagcgtttttttcccagtaacgggatcctgatttttggcaaacaaaatgctgccagagacaatgcggattacagcgatgtcatgctcaccagcgaggaagaaatcaaaaccactaaccctgtggctacagaggaatacggtatcgtggcagataacttgcagcagcaaaacacggctcctcaaattggaactgtcaacagccagggggccttacccggtatggtctggcagaaccgggacgtgtacctgcagggtcccatctgggccaagattcctcacacggacggcaacttccacccgtctccgctgatgggcggctttggcctgaaacatcctccgcctcagatcctgatcaagaacacgcctgtacctgcggatcctccgaccaccttcaaccagtcaaagctgaactctttcatcacgcaatacagcaccggacaggtcagcgtggaaattgaatgggagctgcagaaggaaaacagcaagcgctggaaccccgagatccagtacacctccaactactacaaatctacaagtgtggactttgctgttaatacagaaggcgtgtactctgaaccccaccccattggcacccgttacctcacccgtcccctgtaa

SEQ ID NO: 1005 - DNA, 2211 bp, synthetic construct
  misc_feature 1..2211: note = source = /note="Description of Artificial Sequence: Synthetic polynucleotide"
  source 1..2211: mol_type = other DNA
atggctgccgatggttatcttccagattggctcgaggacaacctctctgagggcattcgcgagtggtgggcgctgaaacctggagccccgaagcccaaagccaaccagcaaaagcaggacgacggccggggtctggtgcttcctggctacaagtacctcggacccttcaacggactcgacaagggggagcccgtcaacgcggcggacgcagcggccctcgagcacgacaaggcctacgaccagcagctcaaagcgggtgacaatccgtacctgcggtataaccacgccgacgccgagtttcaggagcgtctgcaagaagatacgtcttttgggggcaacctcgggcgagcagtcttccaggccaagaagcgggttctcgaacctctcggtctggttgaggaaggcgctaagacggctcctggaaagaaacgtccggtagagcagtcgccacaagagccagactcctcctcgggcatcggcaagacaggccagcagcccgctaaaaagagactcaattttggtcagactggcgactcagagtcagtccccgacccacaacctctcggagaacctccagcaacccccgctgctgtgggacctactacaatggcttcaggcggtggcgcaccaatggcagacaataacgaaggcgccgacggagtgggtagttcctcgggaaattggcattgcgattccacatggctgggcgacagagtcatcaccaccagcacccgcacctgggccttgcccacctacaataaccacctctacaagcaaatctccagtgcttcaacgggggccagcaacgacaaccactacttcggctacagcaccccctgggggtattttgacttcaacagattccactgccacttctcaccacgtgactggcagcgactcatcaacaacaactggggattccggcctaagcgactcaacttcaagctcttcaacattcaggtcaaagaggttacggacaacaatggagtcaagaccatcgccaataaccttaccagcacggtccaggtcttcacggactcagactatcagctcccgtacgtgctcgggtcggctcacgagggctgcctcccgccgttcccagcggacgttttcatgattcctcagtacgggtatctgacgctcaacaatggcagccaggcagtgggacggtcatccttttactgcctggaatatttcccatcgcagatgctgagaacgggcaataactttaccttcagctacaccttcgaggacgtgcctttccacagcagctacgcgcacagccagagcctggaccggctgatgaatcctctgattgaccagtacctgtactacttgtctcggactcaaacaacaggaggcacggcaaatacgcagactctgggcttcagccaaggtgggcctaatacaatggccaatcaggcaaagaactggctgccaggaccctgttaccgccaacaacgcgtctcaacgacaaccgggcaaaacaacaatagcaactttgcctggactgctgggaccaaataccatctgaatggaagaaattcattggctaatcctggcatcgctatggcaacacacaaagacgacaaggagcgtttttttcccagtaacgggatcctgatttttggcaaacaaaatgctgccagagacaatgcggattacagcgatgtcatgctcaccagcgaggaagaaatcaaaaccactaaccctgtggctacagaggaatacggtatcgtggcagataacttgcagcagcaaaacacggctcctcaaattggaactgtcaacagccagggggccttacccggtatggtctggcagaaccgggacgtgtacctgcagggtcccatctgggccaagattcctcacacggacggcaacttccacccgtctccgctgatgggcggctttggcctgaaacatcctccgcctcagatcctgatcaagaacacgcctgtacctgcggatcctccgaccaccttcaaccagtcaaagctgaactctttcatcacgcaatacagcaccggacaggtcagcgtggaaattgaatgggagctgcagaaggaaaacagcaagcgctggaaccccgagatccagtacacctccaactactacaaatctacaagtgtggactttgctgttaatacagaaggcgtgtactctgaaccccaccccattggcacccgttacctcacccgtcccctgtaa

SEQ ID NO: 1006 - DNA, 2214 bp, synthetic construct
  misc_feature 1..2214: note = source = /note="Description of Artificial Sequence: Synthetic polynucleotide"
  source 1..2214: mol_type = other DNA
atggctgccgatggttatcttccagattggctcgaggacaacctctctgagggcattcgcgagtggtgggacttgaaacctggagccccgaaacccaaagccaaccagcaaaagcaggacgacggccggggtctggtgcttcctggctacaagtacctcggacccttcaacggactcgacaagggggagcccgtcaacgcggcggatgcagcggccctcgagcacgacaaggcctacgaccagcagctcaaagcgggtgacaatccgtacctgcggtataaccacgccgacgccgagtttcaggagcgtctgcaagaagatacgtcttttgggggcaacctcgggcgagcagtcttccaggccaagaagcgggttctcgaacctctcggtctggttgaggaaggcgctaagacggctcctggaaagaagagaccggtagagccatcaccccagcgttctccagactcctctacgggcatcggcaagaaaggccaacagcccgccagaaaaagactcaattttggtcagactggcgactcagagtcagtccccgacccacaacctctcggagaacctccagcaacccccgctgctgtgggacctactacaatggcttcaggcggtggcgcaccaatggcagacaataacgaaggcgccgacggagtgggtaatgcctcaggaaattggcattgcgattccacatggctgggcgacagagtcatcaccaccagcacccgaacatgggccttgcccacctataacaaccacctctacaagcaaatctccagtgcttcaacgggggccagcaacgacaaccactacttcggctacagcaccccctgggggtattttgatttcaacagattccactgccatttctcaccacgtgactggcagcgactcatcaacaacaatttgggatcccggcccaagagactcaacttcaagctcttcatcatccaagtcaaggaggtcacgacgaatgatggcgtcacgaccatcgctaataaccttaccagcacggttcaagtcttctcggactcggagtaccagttgccgtacgtcctcggctctgcgcaccagggctgcctccctccgttcccggcggacgtgttcatgattccgcagtacggctacctaacgctcaacaatggcagccaggcagtgggacggtcatccttttactgcctggaatatttcccatcgcagatgctgagaacgggcaataactttaccttcagctacaccttcgaggacgtgcctttccacagcagctacgcgcacagccagagcctggaccggctgatgaatcctctcatcgaccagtacctgtattacctgaacagaactcagaatcagtccggaagtgcccaaaacaaggacttgctgtttagccgggggtctccagctggcatgtctgttcagcccaaaaactggctacctggaccctgttaccggcagcagcgcgtttctaaaacaaaaacagacaacaacaacagcaactttacctggactggtgcttcaaaatataaccttaatgggcgtgaatctataatcaaccctggcactgctatggcctcacacaaagacgacaaagacaagttctttcccatgagcggtgtcatgatttttggaaaggagagcgccggagcttcaaacactgcattggacaatgtcatgatcacagacgaagaggaaatcaaagccactaaccccgtggccaccgaaagatttgggactgtggcagtcaatctccagagcagcagcacagaccctgcgaccggagatgtgcatgttatgggagccttacctggaatggtgtggcaagacagagacgtatacctgcagggtcctatttgggccaaaattcctcacacggatggacactttcacccgtctcctctcatgggcggctttggacttaagcacccgcctcctcagatcctcatcaaaaacacgcctgttcctgcgaatcctccggcagagttttcggctacaaagtttgcttcattcatcacccagtattccacaggacaagtgagcgtggagattgaatgggagctgcagaaagaaaacagcaaacgctggaatcccgaagtgcagtatacatctaactatgcaaaatctgccaacgttgatttcactgtggacaacaatggactttatactgagcctcgccccattggcacccgttacctcacccgtcccctgtaa

SEQ ID NO: 1007 - DNA, 2211 bp, synthetic construct
  misc_feature 1..2211: note = source = /note="Description of Artificial Sequence: Synthetic polynucleotide"
  source 1..2211: mol_type = other DNA
atggctgccgatggttatcttccagattggctcgaggacaacctctctgagggcattcgcgagtggtgggcgctgaaacctggagccccgaaacccaaagccaaccagcaaaagcaggacgacggccggggtctggtgcttcctggctacaagtacctcggacccttcaacggactcgacaagggggagcccgtcaacgcggcggacgcagcggccctcgagcacgacaaggcctacgaccagcagctcaaggcgggtgacaatccgtacctgcggtataaccacgccgacgccgagtttcaggagcgtctgcaagaagatacgtcttttgggggcaacctcgggcgagcagtcttccaggccaaaaagaggcttcttgaacctcttggtctggttgaggaagcggctaagacggctcctggaaagaaacgtccggtagagcagtcgccacaagagccagactcctcctcgggcattggcaagacaggccagcagcccgctaaaaagagactcaactttgggcagactggcgactcagagtcagtgcccgaccctcaaccaatcggagaacctccagcaacccccgctgctgtgggacctactacaatggcttcaggcggtggcgcaccaatggcggacaataacgaaggcgccgatggagtgggtaattcctcgggaaattggcattgcgattccacatggctgggcgacagagtcatcaccaccagcacccgaacctgggccctgcccacctacaacaatcacctctacaagcaaatctccagtgcttcaacgggggccagcaacgacaaccactacttcggctacagcaccccctgggggtattttgatttcaacagattccactgccacttttcaccacgtgactggcagcgactcatcaacaacaactggggattccggcccaagagactcaacttcaagctcttcaacatccaggtcaaggaggtcacgcagaatgaaggcaccaagaccatcgccaataacctcaccagcaccatccaggtgtttacggactcggagtaccagctgccgtacgttctcggctccgcccaccagggctgcctgcctccgttcccggcggacgtgttcatgattccgcagtacggctacctaacgctcaacaatggcagccaggcagtgggacggtcatccttttactgcctggaatatttcccatcgcagatgctgagaacgggcaacaactttaccttcagctacacctttgaggacgttcctttccacagcagctacgctcacagccagagtctggaccgtctcatgaatcctctgattgaccagtacctgtactacttgtctcggactcaaacaacaggaggcacggcaaatacgcagactctgggcttcagccaaggtgggcctaatacaatggccaatcaggcaaagaactggctgccaggaccctgttaccgccaacaacgcgtctcaacgacaaccgggcaaaacaacaatagcaactttgcctggactgctgggaccaaataccatctgaatggaagaaattcattggctaatcctggcatcgctatggcaacacacaaagacgacaaggagcgtttttttcccagtaacgggatcctgatttttggcaaacaaaatgctgccagagacaatgcggattacagcgatgtcatgctcaccagcgaggaagaaatcaaaaccactaaccctgtggctacagaggaatacggtatcgtggcagataacttgcagcagcaaaacacggctcctcaaattggaactgtcaacagccagggggccttacccggtatggtctggcagaaccgggacgtgtacctgcagggtcccatctgggccaagattcctcacacggacggcaacttccacccgtctccgctgatgggcggctttggcctgaaacatcctccgcctcagatcctgatcaagaacacgcctgtacctgcggatcctccgaccaccttcaaccagtcaaagctgaactctttcatcacgcaatacagcaccggacaggtcagcgtggaaattgaatgggagctgcagaaggaaaacagcaagcgctggaaccccgagatccagtacacctccaactactacaaatctacaagtgtggactttgctgttaatacagaaggcgtgtactctgatccccaccccattggcacccgttacctcacccgtcccctgtaa

SEQ ID NO: 1008 - DNA, 2211 bp, synthetic construct
  misc_feature 1..2211: note = source = /note="Description of Artificial Sequence: Synthetic polynucleotide"
  source 1..2211: mol_type = other DNA
atggctgccgatggttatcttccagattggctcgaggacaacctctctgagggcattcgcgagtggtgggcgctgaaacctggagccccgaagcccaaagccaaccagcaagagcaggacgacggccggggtctggtgcttcctggctacaagtacctcggacccttcaacggactcgacaagggagagcccgtcaacgcggcggatgcagcggccctcgagcacgacaaagcctacgaccagcagctcaaagcgggtgacaatccgtacctgcggtataaccacgccgacgccgagtttcaggagcgtctgcaagaagatacgtcttttgggggcaacctcgggcgagcagtcttccaggccaagaagagggttctcgaaccttttggtctggttgaggaaggtgctaagacggctcctggaaagaaacgtccggtagagcagtcgccacaagagccagactcctcctcgggcattggcaagacaggccagcagcccgctaaaaagagactcaattttggtcagactggcgactcagagtcagttccagaccctcaacctctcggagaacctccagcagcgccctctggtgtgggacctaatacaatggctgcaggcggtggcgcaccaatggcagacaataacgaaggcgccgacggagtgggtagttcctcgggaaattggcattgcgattccacatggctgggcgacagagtcatcaccaccagcacccgaacctgggccctgcccacctacaacaaccacctctacaagcaaatctccagtgcttcaacgggggccagcaacgacaaccactacttcggctacagcaccccctgggggtattttgactttaacagattccactgccacttttcaccacgtgactggcagcgactcatcaacaacaactggggattccggcccaagagactcaacttcaagctcttcaacatccaggtcaaggaggtcacgcagaatgaaggcaccaagaccatcgccaataaccttaccagcacgattcaggtctttacggattcggaataccagctcccgtacgtcctcggctctgcgcaccagggctgcctccctccgttcccggcggacgtgttcatgattccgcagtacggctacctaacgctcaacaatggtagccaggcagtgggacggtcatcctttttctgcctggaatatttcccatcgcagatgctgagaacgggcaacaactttaccttcagctacacctttgaggacgttcctttccacagcagctacgctcacagccagagtctggaccgtctcatgaatcctctgattgaccagtacctgtactacttgtctcggactcaaacaacaggaggcacggcaaatacgcagactctgggcttcagccaaggtgggcctaatacaatggccaatcaggcaaagaactggctgccaggaccctgttaccgccaacaacgcgtctcaacgacaaccgggcaaaacaacaatagcaactttgcctggactgctgggaccaaataccatctgaatggaagaaattcattggctaatcctggcatcgctatggcaacacacaaagacgacaaggagcgtttttttcccagtaacgggatcctgatttttggcaaacaaaatgctgccagagacaatgcggattacagcgatgtcatgctcaccagcgaggaagaaatcaaaaccactaaccctgtggctacagaggaatacggtatcgtggcagataacttgcagcagcaaaacacggctcctcaaattggaactgtcaacagccagggggccttacccggtatggtctggcagaaccgagacgtgtacctgcagggtcccatctgggccaagattcctcacacggacggcaacttccacccgtctccgctgatgggcggctttggcctgaaacatcctccgcctcagatcctgatcaagaacacgcctgtacctgcggatcctccgaccaccttcaaccagtcaaagctgaactctttcatcacgcaatacagcaccggacaggtcagcgtggaaattgaatgggagctgcagaaggaaaacagcaagcgctggaaccccgagatccagtacacctccaactactacaaatctacaagtgtggactttgctgttaatacagaaggcgtgtactctgaaccccaccccattggcacccgttacctcacccgtcccctgtaa

SEQ ID NO: 1009 - DNA, 2211 bp, synthetic construct
  misc_feature 1..2211: note = source = /note="Description of Artificial Sequence: Synthetic polynucleotide"
  source 1..2211: mol_type = other DNA
atggctgccgatggttatcttccagattggctcgaggacaacctctctgagggcattcgcgagtggtgggacttgaaacctggagccccgaagcccaaagccaaccagcaaaagcaggacgacggccggggtctggtgcttcctggctacaagtacctcggacccttcaacggactcgacaagggggagcccgtcaacgcggcggacgcagcggccctcgagcacgacaaggcctacgaccagcagctcaaagcgggtgacaatccgtacctgcggtataaccacgccgacgccgagtttcaggagcgtctgcaagaagatacgtcttttgggggcaacctcgggcgagcagtcttccaggccaagaagcgggttctcgaacctctcggtctggttgaggaaggcgctaagacggctcctggaaagaaacgtccggtagagcagtcaccacaagagccagactcctcctcgggcatcggcaagacaggccagcagcccgctaaaaagagactcaattttggtcagactggcgactcagagtcagtccccgacccacaacctctcggagaacctccagcaacccccgctgctgtgggacctactacaatggcttcaggcggtggcgcaccaatggcggacaataacgaaggcgccgacggagtgggtaatgcctcaggaaattggcattgcgattccacatggctgggcgacagagtcatcaccaccagcacccgaacatgggccttgcccacctataacaaccacctctacaagcaaatctccagtgcttcaacgggggccagcaacgacaaccactacttcggctacagcaccccctgggggtattttgatttcaacagattccactgccatttctcaccacgtgactggcagcgactcatcaacaacaattggggattccggcccaagagactcaacttcaagctcttcaacatccaagtcaaggaggtcacgacgaatgatggcgtcacgaccatcgctaataaccttaccagcacggttcaagtcttctcggactcggagtaccagttgccgtacgtcctcggctctgcgcaccagggctgcctccctccgttcccggcggacgtgttcatgattccgcagtacggctacctaacgctcaacaatggcagccaggcagtgggacggtcatccttttactgcctggaatatttcccatcgcagatgctgagaacgggcaataactttaccttcagctacaccttcgaggacgtgcctttccacagcagctacgcgcacagccagagcctggaccggctgatgaatcctctcatcgaccagtacctgtattacctgaacagaactcagaatcagtccggaagtgcccaaaacaaggacttgctgtttagccgggggtctccagctggcatgtctgttcagcccaaaaactggctacctggaccctgttaccggcagcagcgcgtttctaaaacaaaaacagacaacaacaacagcaactttacctggacaggtgcttcaaaatataaccttaatgggcgtgaatctataatcaaccctggcactgctatggcctcacacaaagacgacaaagacaagttctttcccatgagcggtgtcatgatttttggaaaggagagcgccggagcttcaaacactgcattggacaatgtcatgatcacagacgaagaggaaatcaaagccactaaccccgtggccaccgaaagatttgggactgtggcagtcaatctccagaacagcagcacagaccctgcgaccggagatgtgcatgttatgggagccttacctggaatggtgtggcaagacagagacgtatacctgcagggtcctatttgggccaaaattcctcacacggatggacactttcacccgtctcctctcatgggcggctttggacttaagcacccgcctcctcagatcctcatcaaaaacacgcctgttcctgcgaatcctccggcagagttttcggctacaaagtttgcttcattcatcacccagtattccacaggacaagtgagcgtggagattgaatgggagctgcagaaagaaaacagcaaacgctggaatcccgaagtgcagtatacatctaactatgcaaaatctgccaacgttgatttcactgtagacaacaatggactttatactgtgcctcgccccattggcacccgttacctcacccgtcccctgtaa

SEQ ID NO: 1010 - DNA, 2211 bp, synthetic construct
  misc_feature 1..2211: note = source = /note="Description of Artificial Sequence: Synthetic polynucleotide"
  source 1..2211: mol_type = other DNA
atggctgccgatggttatcttccagattggctcgaggacaacctctctgagggcattcgcgagtggtgggcgctgaaacctggagccccgaagcccaaagccaaccagcaaaagcaggacgacggccggggtctggtgcttcctggctacaagtacctcggacccttcaacggactcgacaaaggagagccggtcaacgcggcggacgcggcggccctcgaacacgacaaggcttacgaccagcagctcaaggcgggtgacaacccctacctgcggtataaccacgccgacgccgagttccaggagcggctgcaagaagatacgtcttttgggggcaacctcgggcgagcagtcttccaggccaaaaagaggcttcttgaacctcttggtctggttgaggaaggcgctaagacggctcctggaaagaagaggcctgtagagcagtctcctcaagaaccggactcctcctcgggtattggcaaaacaggtgagcagcccgctaaaaagagactcaattttggtcagactggcgactcagagtcagtccccgacccacaacctctcggagaacctccagcaacccccgctgctgtgggacctactacaatggcttcaggcggtggcgcaccaatggcagacaataacgaaggcgccgacggagtgggtagtgcctcaggaaattggcattgcgattccacatggctgggcgacagagtcatcaccaccagcacccgaacctgggccctgcccacctataacaaccatctctacaagcaaatctccagtgcttcaacgggggccagcaacgacaaccactacttcggctacagcaccccctgggggtattttgacttcaacagattccactgccacttctcaccacgtgactggcagcgactcatcaacaacaactggggattccggcctaagcgactcaacttcaagctcttcaacattcaggtcaaagaggttacggacaacaatggagtcaagaccatcgccaataacctcaccagcaccatccaggtgttcacggactcagagtatcagctgccgtacgtgctcgggtcggctcaccagggctgcctccctccgttcccagcggacgtgttcatgattcctcagtacgggtatctgacactcaacaacggcagtcaggcagtgggacggtcatccttctactgcctggaatattttccatcgcagatgctgagaaccggcaacaactttccgttcagttacaccttcgaggacgtgcctttccacagcagctacgcgcacagccagagcctggaccggctgatgaatcctctgattgaccagtacctgtactacttgtctcggactcaaacaacaggaggcacggcaaatacgcagactctgggcttcagccaaggtgggcctaatacaatggccaatcaggcaaagaactggctgccaggaccctgttaccgccaacaacgcgtctcaacgacaaccgggcaaaacaacaatagcaactttgcctggactgctgggaccaaataccatctgaatggaagaaattcattggctaatcctggcatcgctatggcaacacacaaagacgacaaggagcgtttttttcccagtaacgggatcctgatttttggcaaacaaaatgctgccagagacaatgcggattacagcgatgtcatgctcaccagcgaggaagaaatcaaaaccactaaccctgtggctacagaggaatacggtatcgtggcagataacttgcagcagcaaaacacggctcctcaaattggaactgtcaacagccagggggccttacccggtatggtctggcagaaccgggacgtgtacctgcagggtcccatctgggccaagattcctcacacggacggcaacttccacccgtctccgctgatgggcggctttggcctgaaacatcctccgcctcagatcctgatcaagaacacgcctgtacctgcggatcctccgaccaccttcaaccagtcaaagctgaactctttcatcacgcaatacagcaccggacaggtcagcgtggaaattgaatgggagctgcagaaggaaaacagcaagcgctggaaccccgagatccagtacacctccaactactacaaatctacaagtgtggactttgctgttaatacagaaggcgtgtactctgaaccccaccccattggcacccgttacctcacccgtcccctgtaa

SEQ ID NO: 1011 - DNA, 2211 bp, synthetic construct
  misc_feature 1..2211: note = source = /note="Description of Artificial Sequence: Synthetic polynucleotide"
  source 1..2211: mol_type = other DNA
atggctgccgatggttatcttccagattggctcgaggacaacctctctgagggcattcgcgagtggtgggcgctgaaacctggagccccgaagcccaaagccaaccagcaaaagcaggacgacggccggggtctggtgcttcctggctacaagtacctcggacccttcaacggactcgacaagggggagcccgtcaacgcggcggacgcagcggccctcgagcacgacaaggcctacgaccagcagctcaaagcgggtgacaatccgtacctgcggtataaccacgccgacgccgagtttcaggagcgtctgcaagaagatacgtcttttgggggcaacctcgggcgagcagtcttccaggccaagaagcgggttctcgaacctctcggtctggttgaggaaggcgctaagacggctcctggaaagaaacgtccggtagaacagtcgccacaagagccagactcctcctcgggcatcggcaagacaggccagcagcccgctaaaaagagactcaattttggtcagactggcgactcagagtcagtccccgatccacaacctctcggagaacctccagcaacccccgctgctgtgggacctactacaatggcttcaggcggtggcgcaccaatggcagacaataacgaaggcgccgacggagtgggtagttcctcgggaaattggcattgcgattcccaatggctgggggacagagtcatcaccaccagcacccgaacctgggccctgcccacctacaacaaccacctctacaagcaaatctccagtgcttcaacgggggccagcaacgacaaccactacttcggctacagcaccccctgggggtattttgatttcaacagattccactgccatttctcaccacgtgactggcagcgactcatcaacaacaactggggattccggcctaagcgactcaacttcaagctcttcaacattcaggtcaaagaggttacggacaacaatggagtcaagaccatcgccaataaccttaccagcacggtccaggtcttcacggactcggagtaccagttgccgtacgtcctcggctctgcgcaccaggactgcctccctccgttcccggcggacgtgttcatgattccgcagtacggctacctaacgctcaacaatggcagccaggcagtgggacggtcatccttttactgcctggaatatttcccatcgcagatgctgagaacgggcaacaactttaccttcagctacacctttgaggacgttcctttccacagcagctacgctcacagccagagtctggaccgtctcatgaatcctctgattgaccagtacctgtactacttgtctcggactcaaacaacaggaggcacggcaaatacgcagactctgggcttcagccaaggtgggcctaatacaatggccaatcaggcaaagaactggctgccaggaccctgttaccgccaacaacgcgtctcaacgacaaccggacaaaacaacaatagcaactttgcctggactgctgggaccaaataccatctgaatggaagaaattcattggctaatcctggcatcgctatggcaacacacaaagacgacaaggagcgtttttttcccagtaacgggatcctgatttttggcaaacaaaatgctgccagagacaatgcggattacagcgatgtcatgctcaccagcgaggaagaaatcaaaaccactaaccctgtggctacagaggaatacggtatcgtggcagataacttgcagcagcaaaacacggctcctcaaattggaactgtcaacagccagggggccttacccggtatggtctggcagaaccgggacgtgtacctgcagggtcccatctgggccaagattcctcacacggacggcaacttccacccgtctccgctgatgggcggctttggcctgaaacatcctccgcctcagatcctgatcaagaacacgcctgtacctgcggatcctccgaccaccttcaaccagtcaaagctgaactctttcatcacgcaatacagcaccggacaggtcagcgtggaaattgaatgggagctgcagaaggaaaacagcaagcgctggaaccccgagatccagtacacctccaactactacaaatctacaagtgtggactttgctgttaatacagaaggcgtgtactctgaaccccaccccattggcacccgttacctcacccgtcccctgtaa

SEQ ID NO: 1012 - DNA, 2211 bp, synthetic construct
  misc_feature 1..2211: note = source = /note="Description of Artificial Sequence: Synthetic polynucleotide"
  source 1..2211: mol_type = other DNA
atggctgccgatggttatcttccagattggctcgaggacaacctctctgagggcattcgcgagtggtgggacttgaaacctggagccccgaagcccaaagccaaccagcaaaagcaggacgacggccggggtctggtgcttcctggctacaagtacctcggacccttcaacggactcgacaagggggagcccgtcaacgcggcggacgcagcggccctcgagcacgacaaggcctacgaccagcagctcaaagcgggtgacaatccgtacctgcggtataaccacgccgacgccgagtttcaggagcgtctgcaagaagatacgtcttttgggggcaacctcgggcgagcagtcttccaggccaagaagcgggttctcgaacctctcggtctggttgaggaaggcgctaagacggctcctggaaagaaacgtccggtagagcagtcaccacaagagccagactcctcctcgggcatcggcaagacaggccagcagcccgctaaaaagagactcaattttggtcagactggcgactcagagtcagtccccgacccacaacctctcggagaacctccagcaacccccgctgctgtgggacctactacaatggcttcaggcggtggcgcaccaatggcagacaataacgaaggtgccgacggagtgggtaatgcctcaggaaattggcattgcgattccacatggctgggcgactgagtcatcaccaccagcacccgcacctgggccttgcccacctacaataaccacctctacaagcaaatctccagtgcttcaacgggggccagcaacgacaaccactacttcggctacagcaccccctgggggtattttgatttcaacagattccactgccacttttcaccacgtgactggcagcgactcatcaacaacaattggggattccggcccaagagactcaacttcaaactcttcaacatccaagtcaaggaggtcacgcagaatgaaggcaccaagaccatcgccaataacctcaccagcaccatccaggtgtttacggactcggagtaccagctgccgtacgttctcggctctgcccaccagggctgcctgcctccgttcccggcggacgtgttcatgattccccagtacggctacctaacgctcaacaatggcagccaggcagtgggacggtcatccttttactgcctggaatactttccttcgcagatgctgagaaccggcaacaacttccagtttacttacaccttcgaggacgtgcctttccacagcagctacgcccacagccagagcttggaccggctgatgaatcctctgattgaccagtacctgtactacttgtctcggactcaaacaacaggaggcacggcaaatacgcagactctgggcttcagccaaggtgggcctaatacaatggccaatcaggcaaagaactggctgccaggaccctgttaccgccaacaacgcgtctcaacgacaaccgggcaaaacaacaatagcaactttgcctggactgctgggaccaaataccatctgaatggaagaaattcattggctaatcctggcatcgctatggcaacacacaaagacgacaaggagcgtttttttcccagtaacgggatcctgatttttggcaaacaaaatgctgccagagacaatgcggattacagcgatgtcatactcaccagcgaggaagaaatcaaaaccactaaccctgtggctacagaggaatacggtatcgtggcagataacttgcagcagcaaaacacggctcctcaaattggaactgtcaacagccagggggccttacccggtatggtctggcagaaccgggacgtgtacctgcagggtcccatctgggccaagattcctcacacggacggcaacttccacccgtctccgctgatgggcggctttggcctgaaacatcctccgcctcagatcctgatcaagaacacgcctgtacctgcggatcctccgaccaccttcaaccagtcaaagctgaactctttcatcacgcaatacagcaccggacaggtcagcgtggaaattgaatgggagctgcagaaggaaaacagcaagcgctggaaccccgagatccagtacacctccaactactacaaatctacaagtgtggactttgctgttaatacagaaggcgtgtactctgaaccccaccccattggcacccgttacctcacccgtcccctgtaa

SEQ ID NO: 1013 - DNA, 2211 bp, synthetic construct
  misc_feature 1..2211: note = source = /note="Description of Artificial Sequence: Synthetic polynucleotide"
  source 1..2211: mol_type = other DNA
atggctgccgatggttatcttccagattggctcgaggacactctctctgaaggaataagacagtggtggaagctcaaacctggcccaccaccaccaaagcccgcagagcggcataaggacgacagcaggggtcttgtgcttcctgggtacaagtacctcggacccttcaacggactcgacaagggagagccggtcaacgaggcagacgccgcggccctcgagcacgacaaagcctacgaccggcagctcgacagcggagacaacccgtacctcaagtacaaccacgccgacgcggagtttcaggagcgccttaaagaagatacgtcttttgggggcaacctcgggcgagcagtcttccaggccaagaagagggttctcgaaccttttggtctggttgaggaaggtgctaagacggctcctggaaagaaacgtccggtagagcagtcgccacaagagccagactcctcctcgggcattggcaagacaggccagcagcccgctaaaaagagactcaattttggtcagactggcgactcagagtcagtccccgacccacaacctctcggagaacctccagcaacccccgctgctgtgggacctactacaatggcttcaggcggtggcgcaccaatggcagacaataacgaaggcgccgacggagtgggtaatgcctcaggaaattggcattgcgattccacatggctgggcgacagagtcatcaccaccagcacccgaacatgggccttgcccacctataacaaccacctctacaagcaaatctccagtacttcaacgggggccagtaacgacaaccactacttcggctacagcaccccctgggggtattttgacttcaacagattccactgccacttctcaccacgtgactggcagcgactcatcaacaacaactggggattccggcctaagcgactcaacttcaagctcttcaacattcaggtcaaagaggttacggacaacaatggagtcaagaccatcgccaataaccttaccagcacggtccaggtcttcacggactcggagtaccagttgccgtacgtcctcggctctgcgcaccagggctgcctgcctccgttcccggcggacgtgttcatgattccgcagtacggctacctaacgctcaacaatggcagccaggcagtgggacggtcatccttttactgcctggaatatttcccatcgcagatgctgagaacgggcaacaactttaccttcagctacacttttgaggacgttcctttccacagcagctacgctcacagccagagtctggaccgtctcatgaatcctctgattgaccagtacctgtactacttgtctcggactcaaacaacaggaggcacggcaaatacgcagactctgggcttcagccaaggtgggcctaatacaatggccaatcaggcaaagaactggctgccaggaccctgttaccgccaacaacgcgtctcaacgacaaccggacaaaacaacaatagcaactttgcctggactgctgggaccaaataccatctgaatggaagaaattcattggctaatcctggcatcgctatggcaacacacaaagacgacaaggagcgtttttttcccagtaacgggatcctgatttttggcaaacaaaatgctgccagagacaatgcggattacagcgatgtcatgctcaccagcgaggaagaaatcaaaaccactaaccctgtggctacagaggaatacggtatcgtggcagataacttgcagcagcaaaacacggctcctcaaattggaactgtcaacagccagggggccttacccggtatggtctggcagaaccgggacgtgtacctgcagggtcccatctgggccaagattcctcacacggacggcaacttccacccgtctccgctgatgggcggctttggcctgaaacatcctccgcctcagatcctgatcaagaacacgcctgtacctgcggatcctccgaccaccttcaaccagtcaaagctgaactctttcatcacgcaatacagcaccggacaggtcagcgtggaaattgaatgggagctgcagaaggaaaacagcaagcgctggaaccccgagatccagtacacctccaactactacaaatctacaagtgtggactttgctgttaatacagaaggcgtgtactctgaaccccaccccattggcacccgttacctcacccgtcccctgtaa

SEQ ID NO: 1014 - DNA, 2208 bp, synthetic construct
  misc_feature 1..2208: note = source = /note="Description of Artificial Sequence: Synthetic polynucleotide"
  source 1..2208: mol_type = other DNA
atggctgccgatggttatcttccagattggctcgaggacaacctctctgagggcattcgcgagtggtgggacttgaaacctggagccccgaagcccaaagccaaccagcaaaagcaggacgacggccggggtctggtgcttcctggctacaagtacctcggacccttcaacggactcgacaagggggagcccgtcaacgcggcggatgcagcggccctcgagcacgacaaggcctacgaccggcagctcgacagcggagacaacccgtacctgcggtataaccacgccgacgcggagtttcaggagcgccttaaagaagatacgtcttttgggggcaacctcgggcgagcagtcttccaggccaagaagagggttctcgaaccttttggtctggttgaggaaggtgctaagacggctcctggaaagaaacgtccggtagagcagtcgccacaagagccagactcctcctcgggcattggcaagacaggccagcagcccgctaaaaagagactcaattttggtcagactggcgactcagagtcagtccccgacccacaacctctcggagaacctccagcaacccccgctgctgtgggacctactacaatggcttcaggcggtggcgcaccaatggcagacaataacgaaggcgccgacggagtgggtaatgcctcaggaaattggcattgcgattccacatggctgggcgacagagtcatcaccaccagcacccgcacctgggccttgcccacctacaataaccacctctacaagcaaatctccagtgcttcaacgggggccagcaacgacaaccactacttcggctacagcaccccctgggggtattttgactttaacagattccactgccacttttcaccacgtgactggcaaagactcatcaacaacaactggggattccggcccaagagactcaacttcaagctcttcaacatccaggtcaaggaggtcacgcagaatgaaggcaccaagaccatcgccaataaccttaccagcacgattcaggtctttacggactcggaataccagctcccgtacgtcctcggctctgcgcaccagggctgcctccctccgttcccggcggacgtgttcatgattccgcagtacggctacctaacactcaacaacggtagtcaggccgtgggacgctcctccttctactgcctggaatactttccttcgcagatgctgagaaccggcaacaacttccagtttacttacaccttcgaggacgtgcctttccacagcagctacgcccacagccagagcttggaccggctgatgaatcctctgattgaccagtacctgtactacttgtctcggactcaaacaacaggaggcacggcaaatacgcagactctgggcttcagccaaggtgggcctaatacaatggccaatcaggcaaagaactggctgccaggaccctgttaccgccaacaacgcgtctcaacgacaaccgggcaaaacaacaatagcaactttgcctggactgctgggaccaaataccatctgaatggaagaaattcactggctaatcctggcatcgctatggcaacacacaaagacgacaggagcgtttttttccagtaccgggatcctgattttggcaaacaaaatgctgccagagacaatgcggattacagcgatgtcatgctcaccagcgaggaagaaatcaaaaccactaaccctgtggctacagaggaatacggtatcgtggcagataacttgcagcagcaaaacacggctcctcaaattggaactgtcaacagccagggggccttacccggtatggtctggcagaaccgggacgtgtacctgcagggtcccatctgggccaagattcctcacacggacggcaacttccacccgtctccgctgatgggcggctttggcctgaaacatcctccgcctcagatcctgatcaagaacacgcctgtacctgcggatcctccgaccaccttcaaccagtcaaagctgaactctttcatcacgcaatacagcaccggacaggtcagcgtggaaattgaatgggagctgcagaaggaaaacagcaagcgctggaaccccgagatccagtacacctccaactactacaaatctacaagtgtggactttgctgttaatacagaaggcgtgtactctgaaccccaccccattggcacccgttacctcacccgtcccctgtaa

SEQ ID NO: 1015 - DNA, 2211 bp, synthetic construct
  misc_feature 1..2211: note = source = /note="Description of Artificial Sequence: Synthetic polynucleotide"
  source 1..2211: mol_type = other DNA
atggctgccgatggttatcttccagattggctcgaggacaacctctctgagggcattcgcgagtggtgggcgctgaaacctggagccccgaagcccaaagccaaccagcaaaagcaggacgacggccggggtctggtgcttcctggctacaagtacctcggacccttcaacggactcgacaagggggagcccgtcaacgcggcggatgcagcagccctcgaacacgacaaagcttacgaccagcagctcaaggccggtgacaacccctacctcaagtataaccacgccgacgccgagtttcaggagcgtcttcaaggagatacgtcttttgggggcaacctcggacgagcagtcttccaggccaagaagcgggttctcgaacctcttggtctggttgaggaagcggctaagacggctcctggaaagaagaggcctgtagagcagtctcctcaggaaccggactcctccgcgggtattggcaaatcgggtgcacagcccgctaaaaagagactcaatttcggtcagactggcgacacagagtcagtcccagaccctcaacctctcggagaacctccagcagcgccctctggtgtgggacctaatacaatggctgcaggcggtggcgcaccaatggcagacaataacgaaggtgccgatggagtgggtagttcctcgggaaattggcattgcgattcccaatggctgggggacagagtcatcaccaccagcacccgaacctgggccctgcccacctacaacaaccacctctacaagcaaatctccagtgcttcaacgggggccagcaacgacaaccactacttcggctacagcaccccttgggggtattttgacttcaacagattccactgccacttttcaccacgtgactggcagcgactcatcaacaacaactggggattccggcctaagcgactcaacttcaagctcttcaacattcaggtcaaagaggttacggacaacaatggagtcaagaccatcgccaataaccttaccagcacggtccaggtcttcacggactcagactatcagctcccgtacgtgctcgggtcggctcacgagggctgcctccctccgttcccggcggacgtgttcatgattccgcagtacggctacctaacgctcaacaatggcagccaggcagtgggacggtcatccttttactgcctggaatactttccttcgcagatgctgagaaccggcaacaacttccagtttacttacaccttcgaggacgtgcctttccacagcagctacgctcacagccagagtctggaccgtctcatgaatcctctgattgaccagtacctgtactacttgtctcggactcaaacaacaggaggcacggcaaatacgcagactctgggcttcagccaaggtgggcctaatacaatggccaatcaggcaaagaactggctgccaggaccctgttaccgccaacaacgcgtctcaacgacaaccgggcaaaacaacaatagcaactttgcctggactgctgggaccaaataccatctgaatggaagaaattcattggctaatcctggcatcgctatggcaacacacaaagacgacaaggagcgtttttttcccagtaacgggatcctgatttttggcaaacaaaatgctgccagagacaatgcggattacagcgatgtcatgctcaccagcgaggaagaaatcaaaaccactaaccctgtggctacagaggaatacggtatcgtagcagataacttgcagcagcaaaacacggctcctcaaattggaactgtcaacagccagggggccttacccggtatggtctggcagaaccgggacgtgtacctgcagggtcccatctgggccaagattcctcacacggacggcaacttccacccgtctccgctgatgggcggctttggcctgaaacatcctccgcctcagatcctgatcaagaacacgcctgtacctgcggatcctccgaccaccttcaaccagtcaaagctgaactctttcatcacgcaatacagcaccggacaggtcagcgtggaaattgaatgggagctgcagaaggaaaacagcaagcgctggaaccccgagatccagtacacctccaactactacaaatctacaagtgtggactttgctgttaatacagaaggcgtgtactctgaaccccaccccattggcacccgttacctcacccgtcccctgtaa

SEQ ID NO: 1016 - DNA, 2211 bp, synthetic construct
  misc_feature 1..2211: note = source = /note="Description of Artificial Sequence: Synthetic polynucleotide"
  source 1..2211: mol_type = other DNA
atggctgccgatggttatcttccagattggctcgaggacactctctctgaaggaataagacagtggtggaagctcaaacctggcccaccaccaccaaagcccgcagagcggcataaggacgacagcaggggtcttgtgcttcctgggtacaagtacctcggacccttcaacggactcgacaagggagagccggtcaacgaggcagacgccgcggccctcgagcacgacaaagcctacgaccggcagctcgacagcggagacaacccgtacctcaagtacaaccacgccgacgcggagtttcaggagcgccttaaagaagatacgtcttttgggggcaacctcgggcgagcagtcttccaggccaagaagagggttctcgaaccttttggtctggttgaggaagcggctaagacggctcctggaaagaaacgtccggtagagcagtcgccacaagagccagactcctcctcgggcattggcaagacaggccagcagcccgctaaaaagagactcaattttggtcagactggcgactcagagtcagtccccgacccacaacctctcggagaacctccagcaacccccgctgctgtgggacctactacaatggcttcaggcggtggcgcaccaatggcagacaataacgaaggcgccgacggagtgggtaatgcctcaggaaattggcattgcgattccacatggctgggcgacagagtcatcaccaccagcacccgaacatgggccttgcccacctataacaaccacctctacaagcaaatctccagtgcttcaacgggggccagcaacgacaaccactacttcggctacagcaccccctgggggtattttgacttcaacagattccactgccacttctcaccacgtgactggcagcgactcatcaacaacaactggggattccggcctaagcgactcaacttcaagctcttcaacattcaggtcaaagaggttacggacaacaatggagtcaagaccatcgccaataaccttaccagcacggtccaggtcttcacggactcagactatcagctcccgtacgtgctcgggtcggctcacgagggctgcctcccgccgttcccagcggacgttttcatgattcctcagtacggctacctaacactcaacaacggtagtcaggccgtgggacgctcctccttctactgcctggaatactttccttcgcagatgctgagaacgggcaacaactttaccttcagctacacctttgaggacgttcctttccacagcagctacgctcacagccagagtctggaccgtctcatgaatcctctgattgaccagtacctgtactacttgtctcggactcaaacaacaggaggcacggcaaatacgcagactctgggcttcagccaaggtgggcctaatacaatggccaatcaggcaaagaactggctgccaggaccctgttaccgccaacaacgcgtctcaacgacaaccgggcaaaacaacaatagcaactttgcctggactgctgggacaaaataccatctgaatggaagaaattcattggctaatcctggcatcgctatggcaacacacaaagacgacaaggagcgtttttttcccagtaacgggattctgatttttggcaaacaaaatgctgccagagacaatgcggattacagcgatgtcatgctcaccagcgaggaagaaatcaaaaccactaaccctgtggctacagaggaatacggtatcgtggcagataacttgcagcagcaaaacacggctcctcaaattggaactgtcaacagccagggggccttacccggtatggtctggcagaaccgggacgtgtacctgcagggtcccatctgggccaagattcctcacacggacggcaacttccacccgtctccgctgatgggcggctttggacttaagcacccgcctcctcagatcctcatcaaaaacacgcctgttcctgcggatcctccgaccaccttcaaccagtcaaagctgaactctttcatcacgcaatacagcaccggacaggtcagcgtggaaattgaatgggagctgcagaaggaaaacagcaagcgctggaaccccgagatccagtacacctccaactactacaaatctacaagtgtggactttgctgttaatacagaaggcgtgtactctgaaccccaccccattggcacccgttacctcacccgtcccctgtaa

SEQ ID NO: 1017 - DNA, 2211 bp, synthetic construct
  misc_feature 1..2211: note = source = /note="Description of Artificial Sequence: Synthetic polynucleotide"
  source 1..2211: mol_type = other DNA
atggctgccgatggttatcttccagattggctcgaggacaacctctctgagggcattcgcgagtggtgggcgctgaaacctggagccccgaagcccaaagccaaccagcaaaagcaggacgacggccggggtctggtgcttcctggctacaagtacctcggacccttcaacggactcgacaaaggagagccggtcaacgcggcggacgcagcggccctcgagcacgacaaggcctacgaccagcagctcaaagcgggtgacaatccgtacctgcggtataaccacgccgacgccgagtttcaggagcgtctgcaagaagatacgtcttttgggggcaacctcgggcgagcagtcttccaggccaagaagcgggttctcgaacctctcggtctggttgaggaaggcgctaagacggctcctggaaagaaacgtccggtagagcagtcgccacaagagccagactcctcctcgggcatcggcaagacaggccagcagcccgctaaaaagagactcaattttggtcagactggcgactcagagtcagtccccgacccacaacctctcggagaacctccagcaacccccgctgctgtgggacctactacaatggcttcaggcggtggcgcaccaatggcagacaataacgaaggcgccgacggagtgggtagttcctcgggaaattggcattgcgattccacatggctgggcgacagagtcatcaccaccagcacccgcacctgggccttgcccacctacaataaccacctctacaagcaaatctccagtgcttcaacgggggccagcaacgacaaccactacttcggctacagcaccccctgggggtattttgacttcaacagattccactgccacttctcaccacgtgactggcagcgactcatcaacaacaactggggattccggcctaagcgactcaacttcaagctcttcaacattcaggtcaaagaggttacggacaacaatggagtcaagaccatcgccaataaccttaccagcacggtccaggtcttcacggactcggagtaccagttgccgtacgtcctcggctctgcgcaccagggctgcctccctccgttcccggcggacgtgttcatgattccgcagtacggctacctaacgctcaacaatggcagccaggcagtgggacggtcatccttttactgcctggaatatttcccatcgcagatgctgagaacgggcaacaactttaccttcagctacacctttgaggacgttcctttccacagcagctacgctcacagccagagtctggaccgtctcatgaatcctctgattgaccagtacctgtactacttgtctcggactcaaacaacaggaggcacggcaaatacgcagactctgggcttcagccaaggtgggcctaatacaatggccaatcaggcaaagaactggctgccaggaccctgttaccgccaacaacgcgtctcaacgacaaccgggcaaaacaacaatagcaactttgcctggactgctgggaccaaataccatctgaatggaagaaattcattggctaatcctggcatcgctatggcaacacacaaagacgacaaggagcgtttttttcccagtaacgggatcctgatttttggcaaacaaaatgctgccagagacaatgcggattacagcgatgtcatgctcaccagcgaggaagaaatcaaaaccactaaccctgtggctacagaggaatacggtatcgtggcagataacttgcagcagcaaaacacggctcctcaaattggaactgtcaacagccagggggccttacccggtatggtctggcagaaccgggatgtgtacctgcagggtcccatctgggccaagattcctcacacggacggcaacttccacccgtctccgctgatgggcggctttggcctgaaacatcctccgcctcagatcctgatcaagaacacgcctgtacctgcggatcctccgaccaccttcaaccagtcaaagctgaactctttcatcacgcaatacagcaccggacaggtcagcgtggaaattgaatgggagctgcagaaggaaaacagcaagcgctggaaccccgagatccagtacacctccaactactacaaatctacaagtgtggactttgctgttaatacagaaggcgtgtactctgaaccccaccccattggcacccgttacctcacccgtcccctgtaa

SEQ ID NO: 1018 - DNA, 2214 bp, synthetic construct
  misc_feature 1..2214: note = source = /note="Description of Artificial Sequence: Synthetic polynucleotide"
  source 1..2214: mol_type = other DNA
atggctgccgatggttatcttccagattggctcgaggacaaccttagtgaaggaattcgcgagtggtgggcgctgaaacctggagccccgaagcccaaagccaaccagcaaaagcaggacgacggccggggtctggtgcttcctggctacaagtacctcggacccttcaacggactcgacaagggggagcccgtcaacgcggcggacgcagcggccctcgagcacgacaaggcctacgaccagcagctcaaagcgggtgacaatccgtacctgcggtataaccacgccgacgccgagtttcaggagcgtctgcaagaagatacgtcttttgggggcaacctcgggcgagcagtcttccaggccaagaagcgggttctcgaacctctcggtctggttgaggaaggcgctaagacggctcctggaaagaaacgtccggtagagcagtcgccacaagagccagactcctcctcgggcatcggcaagacaggccagcagcccgctaaaaagagactcaatttcggtcagactggcgacacagagtcagtcccagaccctcaaccaatcggagaacctcccgcagccccctcaggtgtgggatctcttacaatggcttcaggtggtggcgcaccagtggcagacaataacgaaggtgccgatggagtgggtagttcctcgggaaattggcattgcgattcccaatggctgggggacagagtcatcaccaccagcaccagaacctgggccttgcccacctacaataaccacctctacaagcaaatctccaacagcacatctggaggatcttcaaatgacaacgcctacttcggctacagcaccccctgggggtattttgactttaacagattccactgccacttttcaccacgtgactggcagcgactcatcaacaacaactggggattccgacccaagagactcaacttcaagctcttcaacatccaggtcaaggaggtcacgcagaacgaaggcaccaagaccatcgccaataacctcaccagcaccatccaggtgtttacggactcggagtaccagctgccgtacgttctcggctccgcccaccagggctgcctgcctccgttcccggcggacgtgttcatgattccccagtacggctacctaacgctcaacaacggtagtcaggccgtgggacgctcctccttctactgcctggaatactttccttcgcagatgctgagaaccggcaacaacttccagtttacttacaccttcgaggacgtgcctttccacagcagctacgcgcacagccagagcttggaccggctgatgaatcctctgattgaccagtacctgtactacttgtctcggactcaaacaacaggaggcacggcaaatacgcagactctgggcttcagccaaggtgggcctaatacaatggccaatcaggcaaagaactggctgccaggaccctgttaccgccaacaacgcgtctcaacgacaaccgggcaaaacaacaatagcaactttgcctggactgctgggaccaaataccatctgaatggaagaaattcattggctaatcctggcatcgctatggcaacacacaaagacgacaaggagcgtttttttcccagtaacgggatcctgatttttggcaaacaaaatgctgccagagacaatgcggattacagcgatgtcatgctcaccagcgaggaagaaatcaaaaccactaaccctgtggctacagaggaatacggtatcgtggcagataacttgcagcagcaaaacacggctcctcaaattggaactgtcaacagccagggggccttacccggtatggtctggcagaaccgggacgtgtacctgcagggtcccatctgggccaagattcctcacacggacggcaacttccacccgtctccgctgatgggcggctttggcctgaaacatcctccgcctcagatcctgatcaagaacacgcctgtacctgcggatcctccgaccaccttcaaccagtcaaagctgaactctttcatcacgcaatacagcaccggacaggtcagcgtggaaattgaatgggagctgcagaaggaaaacagcaagcgctggaaccccgagatccagtacacctccaactactacaaatctacaagtgtggactttgctgttaatacagaaggcgtgtactctgaaccccaccccattggcactcgttacctcacccgtcccctgtaa

SEQ ID NO: 1019 - DNA, 2211 bp, synthetic construct
  misc_feature 1..2211: note = source = /note="Description of Artificial Sequence: Synthetic polynucleotide"
  source 1..2211: mol_type = other DNA
atggctgccgatggttatcttccagattggctcgaggacaacctctctgagggcattcgcgagtggtgggcgctgaaacctggagccccgaagcccaaagccaaccagcaaaagcaggacgacggccggggtctggtgcttcctggctacaagtacctcggacccttcaacggactcgacaagggggagcccgtcaacgcggcggatgcagcagccctcgaacacgacaaagcttacgaccagcagctcaaggccggtgacaacccctacctcaagtataaccacgccgacgccgagtttcaggagcgtcttcaaggagatacgtcttttgggggcaacctcggacgagcagtcttccaggccaagaagcgggttctcgaacctcttggtctggttgaggaagcggctaagacggctcctggaaagaagaggcctgtagagcagtctcctcaggaaccggactcctccgcgggtattggcaaatcgggtgcacagcccgctaaaaagagactcaatttcggtcagactggcgacacagagtcagtcccagaccctcaacctctcggagaacctccagcagcgccctctggtgtgggacctaatacaatggctgcaggcggtggcgcaccaatggcagacaataacgaaggtgccgatggagtgggtagttcctcgggaaattggcattgcgattcccaatggctgggggacagagtcatcaccaccagcacccgaacctgggccctgcccacctacaacaaccacctctacaagcaaatctccagtgcttcaacgggggccagcaacgacaaccactacttcggctacagcaccccttgggggtattttgacttcaacagattccactgccacttctcaccacgtgactggcagcgactcatcaacaacaactggggattccggcctaagcgactcaacttcaagctcttcaacattcaggtcaaagaggttacggacaacaatggagtcaagaccatcgccaataaccttaccagcacggtccaggtcttcacggactcggagtaccagttgccgtacgtcctcggctctgcgcaccagggctgcctccctccgttcccggcggacgtgttcatgattccgcagtacggctacctaacgctcaacaatggcagccaggcagtgggacggtcatccttttactgcctggaatatttcccatcgcagatgctgagaacgggcaacaactttaccttcagctacacctttgaggacgttcctttccacagcagctacgctcacagccagagtctggaccgtctcatgaatcctctgattgaccagtacctgtactacttgtctcggactcaaacaacaggaggcacggcaaatacgcagactctgggcttcagccaaggtgggcctaatacaatggccaatcaggcaaagaactggctgccaggaccctgttaccgccaacaacgcgtctcaacgacaaccgggcaaaacaacaatagcaactttgcctggactgctgggaccaaataccatctgaatggaagaaattcattggctaatcctggcatcgctatggcaacacacaaagacgacaaggagcgtttttttcccagtaacgggatcctgatttttgacaaacaaaatgctgccagagacaatgcggattacagcgatgtcatgctcaccagcgaggaagaaatcaaaaccactaaccctgtggctacagaggaatacggtatcgtggcagataacttgcagcagcaaaacacggctcctcaaattggaactgtcaacagccagggggccttacccggtatggtctggcagaaccgggatgtgtacctgcagggtcccatctgggccaagattcctcacacggacggcaacttccacccgtctccgctgatgggcggctttggcctgaaacatcctccgcctcagatcctgatcaagaacacgcctgtacctgcggatcctccgaccaccttcaaccagtcaaagctgaactctttcatcacgcaatacagcaccggacaggtcagcgtggaaattgaatgggagctgcagaaggaaaacagcaagcgctggaaccccgagatccagtacacctccaactactacaaatctacaagtgtggactttgctgttaatacagaaggcgtgtactctgaaccccaccccattggcacccgttacctcacccgtcccctgtaa

SEQ ID NO: 1020 - DNA, 2211 bp, synthetic construct
  misc_feature 1..2211: note = source = /note="Description of Artificial Sequence: Synthetic polynucleotide"
  source 1..2211: mol_type = other DNA
atggctgccgatggttatcttccagattggctcgaggacactctctctgaaggaataagacagtggtggaagctcaaacctggcccaccaccaccaaagcccgcagagcggcataaggacgacagcaggggtcttgtgcttcctgggtacaagtacctcggacccttcaacggactcgacaagggagagccggtcaacgaggcagacgccgcggccctcgagcacgacaaagcctacgaccggcagctcgacagcggagacaacccgtacctcaagtacaaccacgccgacgcggagtttcaggagcgccttaaagaagatacgtcttttgggggcaacctcggacgagcagtcttccaggcgaaaaagagggttcttgaacctctgggcctggttgaggaacctgttaagacggctccgggaaaaaagaggccggtagagcactctcctgtggagccagactcctcctcgggaaccggaaaggcgggccagcagcctgcaagaaaaagattgaattttggtcagactggcgactcagagtcagtccccgacccacaacctctcggagaacctccagcaacccccgctgctgtgggacctaatacgatggctacaggcagtggcgcaccaatggcagacaataacgagggcgccgacggagtgggtaattcctcgggaaattggcattgcgattccacatggatgggcgacagagtcatcaccaccagcaccagaacctgggccctgcccacttacaacaaccatctctacaagcaaatctccagtgcttcaacgggggccagcaacgacaaccactacttcggctacagcaccccctgggggtattttgacttcaacagattccactgccacttctcaccacgtgactggcagcgactcatcaacaacaactggggattccggcctaagcgactcaacttcaagctcttcaacattcaggtcaaagaggttacggacaacaatggagtcaagaccatcgccaataaccttaccagcaccatccaggtctttacggactcggaataccagctgccgtacgttctcggctctgcccaccagggctgcctgcctccgttcccggcggacgtgttcatgattccccagtacggctacctaacactcaacaacggtagtcaggccgtgggacgctcctccttctactgcctggaatatttcccatcgcagatgctgagaacgggcaacaactttaccttcagctacacctttgaggacgttcctttccacagcagctacgctcacagccagagtctggaccgtctcatgaatcctctgattgaccagtacctgtactacttgtctcggactcaaacaacaggaggcaaggcaaatacgcagactctgggcttcagccaaggtgggcctaatacaatggccaatcaggcaaagaactggctgccaggaccctgttaccgccaacaacgcgtctcaacgacaaccgggcaaaacaacaatagcaactttgcctggactgctgggaccaaataccatctgaatggaagaaattcattggctaatcctggcatcgctatggcaacacacaaagacgacaaggagcgtttttttcccagtaacgggatcctgatttttggcaaacaaaatgctgccagagacaatgcggattacagcgatgtcatgctcaccagcgaggaagaaatcaaaaccactaaccctgtggctacagaggaatacggtatcgtggcagataacttgcagcagcaaaacacggctcctcaaattggaactgtcaacagccagggggccttacccggtatggtctggcagaaccgggacgtgtacctgcagggtcccatctgggccaagattcctcacacggacggcaacttccacccgtctccgctgatgggcggctttggcctgaaacatcctccgcctcagatcctgatcaagaacacgcctgtacctgcggatcctccgaccaccttcaaccagtcaaagctgaactctttcatcacgcaatacagcaccggacaggtcagcgtggaaattgaatgggagctgcagaaggaaaacagcaagcgctggaaccccgagatccagtacacctccaactactacaaatctacaagtgtggactttgctgttaatacagaaggcgtgtactctgaaccccaccccattggcacccgttacctcacccgtcccctgtaa

SEQ ID NO: 1021 - DNA, 2211 bp, synthetic construct
  misc_feature 1..2211: note = source = /note="Description of Artificial Sequence: Synthetic polynucleotide"
  source 1..2211: mol_type = other DNA
atggctgccgatggttatcttccagattggctcgaggacaacctctctgagggcattcgcgagtggtgggcgctgaaacctggagccccgaagcccaaagccaaccagcaaaagcaggacgacggccggggtctggtgcttcctggctacaagtacctcggacccttcaacggactcgacaagggggagcccgtcaacgcggcggacgcagcggccctcgagcacgacaaggcctacgaccagcagctcaaagcgggtgacaatccgtacctgcggtataaccacgccgacgccgagtttcaggagcgtctgcaagaagatacgtcttttgggggcaacctcgggcgagcagtcttccaggccaagaagcgggttctcgaaccttttggtctggttgaggaaggtgctaagacggctcctggaaagaaacgtccggtagagcagtcgccacaagagccagactcctcctcgggcatcggcaagacaggccagcagcccgctaaaaagagactcaattttggtcagactggcgactcagagtcagtccccgacccacaacctctcggagaacctccagcaacccccgctgctgtgggacctactacaatggcttcaggcggtggcgcaccaatggcggacaataacgaaggcgccgacggagtgggtaatgcctcaggaaattggcattgcgattccacatggctgggcgacagagtcatcaccaccagcacccgcacctgggccttgcccacctacaataaccacctctacaagcaaatctccagtgcttcaacgggggccagcaacgacaaccactacttcggctacagcaccccctgggggtattttgacttcaacagattccactgccacttttcaccacgtgactggcaaagactcatcaacaacaactggggattccggcctaagcgactcaacttcaagctcttcaacattcaggtcaaagaggttacggacaacaatggagtcaagaccatcgccaataaccttaccagcacggtccaggtcttcacggactcggagtaccagttgccgtacgtcctcggctctgcgcaccagggctgcctccctccgttcccggcggacgtgttcatgattccgcagtacggctacctaacgctcaacaatggcagccaggcagtgggacggtcatccttttactgcctggaatatttcccatcgcagatgctgagaacgggcaacaactttaccttcagctacacctttgaggacgttcctttccacagcagctacgctcacagccagagtctggaccgtctcatgaatcctctgattgaccagtacctgtactacttgtctcggactcaaacaacaggaggcacgggaaatacgcagactctgggcttcagccaaggtgggcctaatacaatggccaatcaggcaaagaactggctgccaggaccctgttaccgccaacaacgcgtctcaacgacaaccgggcaaaacaacaatagcaactttgcctggactgctgggaccaaataccatctgaatggaagaaattcattggctaatcctggcatcgctatggcaacacacaaagacgacaaggagcgtttttttcccagtaacgggatcctgatttttggcaaacaaaatgctgccagagacaatgcggattacagcgatgtcatgctcaccagcgaggaagaaatcaaaaccactaaccctgtggctacagaggaatacggtatcgtggcagataacttgcagcagcaaaacacggctcctcaaattggaactgtcaacagccagggggccttacccggtatggtctggcagaaccgggacgtgtacctgcagggtcccatctgggccaagattcctcacacggacggcaacttccacccgtctccgctgatgggcggctttggcctgaaacatcctccgcctcagatcctgatcaagaacacgcctgtacctgcggatcctccgaccaccttcaaccagtcaaagctgaactctttcatcacgcaatacagcaccggacaggtcagcgtggaaattgaatgggagctgcagaaggaaaacagcaagcgctggaaccccgagatccagtacacctccaactactacaaatctacaagtgtggactttgctgttaatacagaaggcgtgtactctgaaccccaccccattggcacccgttacctcacccgtcccctgtaa

SEQ ID NO: 1022 - DNA, 2211 bp, synthetic construct
  misc_feature 1..2211: note = source = /note="Description of Artificial Sequence: Synthetic polynucleotide"
  source 1..2211: mol_type = other DNA
atggctgccgatggttatcttccagattggctcgaggacaacctctctgagggcattcgcgagtggtgggacttgaaacctggagccccgaaacccaaagccaaccagcaaaagcaggacgacggccggggtctggtgcttcctggctacaagtacctcggacccttcaacggactcgacaagggggagcccgtcaacgcggcggacgcagcggccctcgagcacgacaaggcctacgaccagcagctcaaagcgggtgacaatccgtacctgcggtataaccacgccgacgccgagtttcaggagcgtctgcaagaagatacgtcttttgggggcaacctcgggcgagcagtcttccaggccaagaagcgggttctcgaacctctcggtctggttgaggaaggcgctaagacggctcctggaaagaagaggcctgtagagcagtcgccacaagagccagactcctcctcgggcatcggcaagacaggccagcagcccgctaaaaagagactcaattttggtcagactggcgactcagagtcagtccccgatccacaacctctcggagaacctccagcaacccccgctgctgtgggacctactacaatggcttcaggcggtggcgcaccaatggcagacaataacgaaggcgccgacggagtgggtagttcctcgggaaattggcattgcgattccacatggctgggcgacagagtcatcaccaccagcacccgaacatgggccttgcccacctataacaaccacctctacaagcaaatctccagtgcttcaacgggggccagcaacgacaaccactacttcggctacagcaccccctgggggtattttgacttcaacagattccactgccacttctcaccacgtgactggcagcgactcatcaacaacaactggggattccggcctaagcgactcaacttcaagctcttcaacatccaggtcaaggaggtcacgcagaatgaaggcaccaagaccatcgccaataacctcaccagcaccatccaggtgtttacggactcggagtaccagcttccgtacgtcctcggctctgcgcaccagggctgcctccctccgttcccggcggacgtgttcatgattccgcagtacggctacctaacgctcaacaatggcagccaggcagtgggacggtcatccttttactgcctggaatatttcccatcgcagatgctgagaacgggcaacaactttaccttcagctacacctttgaggacgttcctttccacagcagctacgcgcacagccagagcttggaccggctgatgaatcctctgattgaccagtacctgtactacttgtctcggactcaaacaacaggaggcacggcaaatacgcagactctgggcttcagccaaggtgggcctaatacaatggccaatcaggcaaagaactggctgccaggaccctgttaccgccaacaacgcgtctcaacgacaaccgggcaaaacaacaatagcaactttgcctggactgctgggaccaaataccatctgaatggaagaaattcattggctaatcctggcatcgctatggcaacacacaaagacgacaaggagcgtttttttcccagtaacgggatcctgatttttggcaaacaaaatgctgccagagacaatgcggattacagcgatgtcatgctcaccagcgaggaagaaatcaaaaccactaaccctgtggctacagaggaatacggtatcgtggcagataacttgcagcagcaaaacacggctcctcaaattggaactgtcaacagccagggggccttacccggtatggtctggcagaaccgggacgtgtacctgcagggtcccatctgggccaagattcctcacacggacggcaacttccacccgtctccgctgatgggcggctttggcctgaaacatcctccgcctcagatcctgatcaagaacacgcctgtacctgcggatcctccgaccaccttcaaccagtcaaagctgaactctttcatcacgcaatacagcaccggacaggtcagcgtggaaattgaatgggagctgcagaaggaaaacagcaagcgctggaaccccgagatccagtacacctccaactactacaaatctacaagtgtggactttgctgttaatacagaaggcgtgtactctgaaccccaccccattggcacccgttacctcacccgtcccctgtaa

SEQ ID NO: 1023 - DNA, 2211 bp, synthetic construct
  misc_feature 1..2211: note = source = /note="Description of Artificial Sequence: Synthetic polynucleotide"
  source 1..2211: mol_type = other DNA
atggctgccgatggttatcttccagattggctcgaggacaacctctctgagggcattcgcgagtggtgggcgctgaaacctggagccccgaagcccaaagccaaccagcaaaagcaggacgacggccggggtctggtgcttcctggctacaagtacctcggacccttcaacggactcgacaagggggagcccgtcaacgcggcggatgcagcggccctcgagcacgacaaggcctacgaccagcagctcaaagcgggtgacaatccgtacctgcggtataaccacgccgacgccgagtttcaggagcgtctgcaagaagatacgtcttttgggggcaacctcgggcgagcagtcttccaggccaagaagcgggttctcgaacctctcggtctggttgaggaaggcgctaagacggctcctggaaagaaacgtccggtagagcagtcgccacaagagccagactcctcctcgggcatcggcaagacaggccagcagcccgctaaaaagagactcaattttggtcagactggcgactcagagtcagtccccgacccacaacctctcggagaacctccagcaacccccgctgctgtgggacctactacaatggctgcaggcggtggcgcaccaatggcagacaataacgaaggcgccgacggagtgggtagttcctcgggaaattggcattgcgattccacatggatgggcgacagagtcatcaccaccagcacccgaacctgggccttgcccacctataacaaccatctctacaagcaaatctccagtgcttcaacgggggccagcaacgacaaccactacttcggctacagcaccccctgggggtattttgacttcaacagattccactgccacttctcaccacgtgactggcagcgactcatcaacaacaactggggattccggcccaagagactcagcttcaagctcttcaacatccaggtcaaggaggtcacgcagaatgaaggcaccaagaccatcgccaataacctcaccagcaccatccaggtgtttacggactcggagtaccagctgccgtacgtcctcggctctgcgcaccagggctgcctccctccgttcccggcggacgtgttcatgattccgcagtacggctacctaacgctcaacaatggcagccaggcagtgggacggtcatccttttactgcctggaatatttcccatcgcagatgctgagaacgggcaacaactttaccttcagctacacctttgaggacgttcctttccacagcagctacgctcacagccagagcttggaccggctgatgaatcctctgattgaccagtacctgtactacttgtctcggactcaaacaacaggaggcacggcaaatacgcagactctgggtttcagccaaggtgggcctaatacaatggccaatcaggcaaagaactggctgcaaggaccctgttaccgccaacaacgcgtctcaacgacaaccgggcaaaacaacaatagcaactttgcctggactgctgggaccaaataccatctgaatggaagaaattcattggctaatcctggcatcgctatggcaacacacaaagacgacaaggagcgtttttttcccagtaacgggatcctgatttttggcaaacaaaatgctgccagagacaatgcggattacagcgatgtcatgctcaccagcgaggaagaaatcaaaaccactaaccctgtggctacagaggaatacggtatcgtggcagataacttgcagcagcaaaacacggctcctcaaattggaactgtcaacagccagggggccttacccggtatggtctggcagaacctggacgtgtacctgcagggtcccatctgggccaagattcctcacacggacggcaacttccacccgtctccgctgatgggcggctttggcctgaaacatcctccgcctcagatcctgatcaagaacacgcctgtacctgcggatcctccgaccaccttcaaccagtcaaagctgaactctttcatcacgcaatacagcaccggacaggtcagcgtggaaattgaatgggagctgcagaaggaaaacagcaagcgctggaaccccgagatccagtacacctccaactactacaaatctacaagtgtggactttgctgttaatacagaaggcgtgtactctgaaccccaccccattggcacccgttacctcacccgtcccctgtaa

SEQ ID NO: 1024 - DNA, 2214 bp, synthetic construct
  misc_feature 1..2214: note = source = /note="Description of Artificial Sequence: Synthetic polynucleotide"
  source 1..2214: mol_type = other DNA
atggctgccgatggttatcttccagattggctcgaggacaacctctctgagggcattcgcgagtggtgggcgctgaaacctggagccccgaagcccaaagccaaccagcaaaagcaggacgacggccggggtctggtgcttcctggctacaagtacctcggacccttcaacggactcgacaagggagagcccgtcaacgcggcggacgcagcggccctcgagcacgacaaggcctacgaccagcagctcaaagcgggtgacaatccgtacctgcggtataaccacgccgacgccgagtttcaggagcgtctgcaagaagatacgtcttttgggggcaacctcgggcgagcagtcttccaggccaagaagcgggttctcgaacctctcggtctggttgaggaaggcgctaagacggctcctggaaagaagagaccggtagagccatcaccccagcgttctccagactcctcctcgggcatcggcaagacaggccagcagcccgctaaaaagagactcaattttggtcagactggcgactcagagtcagtccccgacccacaacctctcggagaacctccagcaacccccgctgctgtgggacctactacaatggcttcaggtggtggcgcaccaatggcagacaataacgaaggcgccgacggagtgggtaatgcctcaggaaattggcattgcgattcccaatggctgggcgacagagtcatcaccaccagcacccgaacatgggccttgcccacctataacaaccacctctacaagcaaatctccagtgcttcaacgggggccagcaacgacaaccactacttcggctacagcaccccctgggggtattttgacttcaacagattccactgccacttttcaccacgtgactggcagcgactcatcaacaacaactggggattccggcctaagcgactcaacttcaagctcttcaacattcaggtcaaagaggttacggacaacaatggagtcaagaccatcgccaataaccttaccagcacggtccaggtcttcacggactcagactatcagctcccgtacgtgctcgggtcggctcacgagggctgcctcccgccgttcccagcggacgttttcatgattccccagtacggctacctaacactcaacaacggtagtcaggccgtgggacgctcctccttctactgcctggaatactttccttcgcagatgctgagaaccggcaacaacttccagtttacttacaccttcgaggacgtgcctttccacagcagctacgctcacagccagagcttggaccggctgatgaatcctctgattgaccagtacctgtactacttgtctcggactcaaacaacaggaggcacggcaaatacgcagactttgggcttcagccaaggtgggcctaatacaatggccaatcaggcaaagaactgggtgccaggaccctgttaccgccaacaacgggtttcaacggcaaccgggcaaaacaacaatagcaactttgcctggactgctgggaccaaataccatctgaaaggaagaaattcattggctaatcctggcatcgctatggcaacacacaaagacgacaaggagcgtttttttcccagtaacgggatcctgatttttggcaaacaaaatgctgccagagacaatgcggattacagcgatgtcatgctcaccagcgaggaagaaatcaaaaccactaaccctgtggctacagaggaatacggtatcgtggcagataacttgcagcagcaaaacacggctcctcaaattggaactgtcaacagccagggggccttacccggtatggtctggcagaaccgggacgtgtacctgcagggtcccatctgggccaagattcctcacacggacggcaacttccacccgtctccgctgatgggcggctttggcctgaaacatcctccgcctcagatcctgatcaagaacacgcctgtacctgcggatcctccgaccaccttcaaccagtcaaagctgaactctttcatcacgcaatacagcaccggacaggtcagcgtggaaattgaatgggagctgcagaaggaaaacagcaaacgctggaacccagagattcaatacacttccaactactacaaatctacaagtgtggactttgctgttaatacagaaggcgtgtactctgaaccccaccccattggcacccgttacctcacccgtcccctgtaa

SEQ ID NO: 1025 - DNA, 2214 bp, synthetic construct
  variation 676: note = a, c, g, or t
  variation 697: note = a, c, g, or t
  variation 715: note = a, c, g, or t
  variation 748: note = a, c, g, or t
  variation 750: note = a, c, g, or t
  variation 757: note = a, c, g, or t
  variation 763: note = a, c, g, or t
  misc_feature 1..2214: note = source = /note="Description of Artificial Sequence: Synthetic polynucleotide"
  source 1..2214: mol_type = other DNA
atggctgccgatggttatcttccagattggctcgaggacactctctctgaaggaataagacagtggtggaagctcaaacctggcccaccaccaccaaagcccgcagagcggcataaggacgacagcaggggtcttgtgcttcctgggtacaagtacctcggacccttcaacggactcgacaagggagagccggtcaacgaggcagacgccgcggccctcgagcacgacaaagcctacgaccggcagctcgacagcggagacaacccgtacctcaagtacaaccacgccgacgcggagtttcaggagcgccttaaagaagatacgtcttttgggggcaacctcggacgagcagtcttccaggcgaaaaagagggttcttgaacctctcggtctggttgaggaaggcgctaagacggctcctggaaagaaacgtccggtagagcagtcgccacaagagccagactcctcctcgggcatcggcaagacaggccagcagcccgctaaaaagagactcaattttggtcagactggcgactcagagtcagtccccgacccacaacctctcggagaacctccagcaacgccctctggtgtgggacctaatacaatggctgcaggcggtggcgctccaatggcagacaataacgaaggcgccgacggagtgggtagttcctcangaaattggcattgcgattccncatggctgggcgacagantcatcaccaccagcacccgaacctgggccctgncnacctacnacaacnacctctacaagcaaatctccaacagcacatctggaggagccaccaacgacaacacctacttcggctacagcaccccctgggggtattttgactttaacagattccactgccacttttcaccacgtgactggcagcgactcatcaacaacaactggggattccggcctaagcgactcaacttcaagctcttcaacatccaggtcaaggaggtcacgcagaatgaaggcaccaagaccatcgccaataacctcaccagcaccatccaggtgtttacggactcggagtaccagctgccgtacgttctcggctctgcccaccagggctgcctgcctccgttcccggcggacgtgttcatgattccccagtacggctacctaacactcaacaacggtagtcaggccgtgggacgctcctccttctactgcctggaatactttccttcgcagatgctgagaaccggcaacaacttccagtttacttacaccttcgaggacgtgcctttccacagcagctacgcccacagccagagcttggaccggctgatgaatcctctgattgaccagtacctgtactacttgtctcggactcaaacaacaggaggcacggcaaatacgcagactctgggcttcagccaaggtgggcctaatacaatggccaatcaggcaaagaactggctgccaggaccctgttaccgccaacaacgcgtctcaacgacaaccgggcaaaacaacaatagcaactttgcctggactgctgggaccaaataccatctgaatggaagaaattcattggctaatcctggcatcgctatggcaacacacaaagacgacaaggagcgtttttttcccagtaacgggatcctgatttttggcaaacaaaatgctgccagagacaatgcggattacagcgatgtcatgctcaccagcgaggaagaaatcaaaaccactaaccctgtggctacagaggaatacggtatcgtggcagataacttgcagcagcaaaacacggctcctcaaattggaactgtcaacagccagggggccttacccggtatggtttggcagaaccgggacgtgtacctgcagggtcctatctgggccaagattcctcacacggacggaaactttcatccctcgccgctgatgggaggctttggactgaaacacccgcctcctcagatcctgattaagaatacacctgttcccgcggatcctccaactaccttcagtcaagctaagctggcgtcgttcatcacgcaatacagcacaggacaagtgagtgtggaaattgaatgggagctgcagaaagaaaacagcaagcgctggaatcccgaagtgcagtacacatccaattatgcaaaatctgccaacgttgattttactgtggacaacaatggactttatactgagcctcgccccattggcacccgttaccttacccgtcccctgtaa

SEQ ID NO: 1026 - DNA, 2214 bp, synthetic construct
  misc_feature 1..2214: note = source = /note="Description of Artificial Sequence: Synthetic polynucleotide"
  source 1..2214: mol_type = other DNA
atggctgccgatggttatcttccagattggctcgaggacaacctctctgagggcattcgcgagtggtgggacttgaaacctggagccccgaagcccaaagccaaccagcaaaagcaggacgacggccggggtctggtgcttcctggctacaagtacctcggacccttcaacggactcgacaagggggagcccgtcaacgcggcggacgcagcggccctcgagcacgacaaggcctacgaccagcagctcaaagcgggtgacaatccgtacctgcggtataaccacgccgacgccgagtttcaggagcgtctgcaagaagatacgtcttttgggggcaacctcgggcgagcagtcttccaggccaagaagcgggttctcgaacctctcggtctggttgaggaaggcgctaagacggctcctggaaagaagagaccggtagagccatcaccccagcgttctccagactcctctacgggcatcggcaagaaaggccagcagcccgcgaaaaagagactcaactttgggcagactggcgactcagagtcagtgcccgaccctcaaccaatcggagaaccccccgcaggcccctctggtgtgggatctcttacaatggcttcaggtggtggcgcaccagtggcagacaataacgaaggtgccgatggagtgggtagttcctcgggaaattggcattgcgattcccaatggctgggggacagagtcatcaccaccagcacccgaacatgggccttgcccacctataacaaccacctctacaagcaaatctccagtgcttcaacgggggccagcaacgacaaccactacttcggctacagcaccccctgggggtattttgactttaacagattccactgccacttctcaccacgtgactggcagcgactcatcaacaacaactggggattccggcccaagagactcaacttcaagctcttcaacatccaggtcaaggaggtcacggacaatgatggagtcaagaccatcgccaataaccttaccagcacgattcaggtctttacggactcggaataccagttgccgtacgtcctcggctctgcgcaccagggctgcctgcctccgttcccggcggacgtgttcatgattccgcagtacggctacctaacgctcaacaatggcagccaggcagtgggacggtcatccttttactgcctggaatatttcccatcgcagatgctgagaacgggcaacaactttaccttcagctacacttttgaggacgttcctttccacagcagctacgctcacagccagagtctggaccgtctcatgaatcctctgattgaccagtacctgtactacttgtctcggactcaaacaacaggaggcacggcaaatacgcagactctgggcttcagccaaggtgggcctaatacaatggccaatcacgcaaagaactggctgccaggaccctgttaccgccaacaacgcgtctcaacgacaaccggacaaaacaacaatagcaactttgcctggactgctgggaccaaataccatctgaatggaagaaattcattggctaatcctggcatcgctatggcaacacacaaagacgacaaggagcgtttttttcccagtaacgggatcctgatttttggcaaacaaaatgctgccagagacaatgcggattacagcgatgtcatgctcaccagcgaggaagaaatcaaaaccactaaccctgtggctacagaggaatacggtatcgtggcagataacttgcagcagcaaaacacggctcctcaaattggaactgtcaacagccagggggccttacccggtatggtctggcagaaccgggacgtgtacctgcagggtcccatctgggccaagattcctcacacggacggcaacttccacccgtctccgctgatgggcggctttggcctgaaacatcctccgcctcagatcctgatcaagaacacgcctgtacctgcggatcctccgaccaccttcaaccagtcaaagctgaactctttcatcacgcaatacagcaccggacaggtcagcgtggaaattgaatgggagctgcagaaggaaaacagcaagcgctggaaccccgagatccagtacacctccaactactacaaatctacaagtgtggactttgctgttaatacagaaggcgtgtactctgaaccccaccccattggcacccgttacctcacccgtcccctgtaa

SEQ ID NO: 1027 - DNA, 2211 bp, synthetic construct
  misc_feature 1..2211: note = source = /note="Description of Artificial Sequence: Synthetic polynucleotide"
  source 1..2211: mol_type = other DNA
atggctgccgatggttatcttccagattggctcgaggacactctctctgaaggaataagacagtggtggaagctcaaacctggcccaccaccaccaaagcccgcagagcggcacaaggacgacagcaggggtcttgtgcttcctgggtacaagtacctcggacccttcaacggactcgacaagggagagccggtcaacgaggcagacgccgcggccctcgagcacgacaaagcctacgaccggcagctcgacagcggagacaacccgtacctcaagtacaaccacgccgacgcggagtttcaggagcgccttaaagaagatacgtcttttgggggcaacctcggacgagcagtcttccaggcgaaaaagagggttcttgaacctctgggcctggttgaggaacctgttaagacggctccgggaaaaaagaggccggtagagcactctcctgtggagccagactcctcctcgggaaccggaaaggcgggccagcagcctgctaaaaagagactcaattttggtcagactggcgactcagagtcagtccccgacccacaacctctcggagaacctccagcaacccccgctgctgtgggacctactacaatggcttcaggtggtggcgcaccaatggcagacaataacgaaggcgccgacggagtgggtaatgcctcaggaaattggcattgcgattccacatggctgggcgacagagtcatcaccaccagcacccgcacctgggccttgcccacctacaataaccacctctacaagcaaatctccagtgcttcaacgggggccagcaacgacaaccactacttcggctacagcaccccctgggggtattttgacttcaacagattccactgccacttctcaccacgtgactggcagcgactcatcaacaacaactggggattccggcccaagagactcaacttcaaactcttcaacatccaagtcaaggaggtcacgcagaatgaaggcaccaagaccatcgccaataacctcaccagcaccatccaggtgtttacggactcggagtaccagctgccgtacgttctcggctctgcccaccagggctgcctgcctccgttcccggcggacgtgttcatgattccccagtacggctacctaacactcaacaacggtagtcaggccgtgggacgctcctccttctactgcctggaatactttccttcgcagatgctgagaaccggcaacaacttccagtttacttacaccttcgaggacgtgcctttccacagcagctacgcgcacagccagagcttggaccggctgatgaatcctctgattgaccagtacctgtactacttgtctcggactcaaacaacaggaggcacggcaaatacgcagactctgggcttcagccaaggtgggcctaatacaatggccaatcaggcaaagaactggctgccaggaccctgttaccgccaacaacgcgtctcaacgacaaccgggcaaaacaacaatagcaactttgcctggactgctgggaccaaataccatctgaatggaagaaattcattggctaatcctggcatcgctatggcaacacacaaagacgacaaggagcgtttttttcccagtaacgggatcctgatttttggcaaacaaaatgctgccagagacaatgcggattacagcgatgtcatgctcaccagcgaggaagaaatcaaaaccactaaccctgtggctacagaggaatacggtatcgtggcagataacttgcagcagcaaaacacggctcctcaaattggaactgtcaacagccagggggccttacccggtatggtctggcagaaccgggacgtgtacctgcagggtcccatctgggccaagattcctcacacggacggcaacttccacccgtctccgctgatgggcggctttggcctgaaacatcctccgcctcagatcctgatcaagaacacgcctgtacctgcggatcctccgaccaccttcaaccagtcaaagctgaactctttcatcacgcaatacagcaccggacaggtcagcgtggaaattgaatgggagctgcagaaggaaaacagcaagcgctggaaccccgagatccagtacacctccaactactacaaatctacaagtgtggactttgctgttaatacagaaggcgtgtactctgaaccccaccccattggcacccgttacctcacccgtcccctgtaa

SEQ ID NO: 1028 - DNA, 2211 bp, synthetic construct
  misc_feature 1..2211: note = source = /note="Description of Artificial Sequence: Synthetic polynucleotide"
  source 1..2211: mol_type = other DNA
atggctgccgatggttatcttccagattggctcgaggacaacctctctgagggcattcgcgagtggtgggcgctgaaacctggagccccgaagcccaaagccaaccagcaaaagcaggacgacggccggggtctggtgcttcctggctacaagtacctcggacccttcaacggactcgacaagggggagcccgtcaacgcggcggatgcagcggccctcgagcacgacaaggcctacgaccagcagctccaagcgggtgacaatccgtacctgcggtataaccacgccgacgccgagtttcaggagcgtcttcaaggagatacgtcttttgggggcaacctcggacgagcagtcttccaggccaagaagcgggttctcgaacctctcggtctggttgaggaaggcgctaagacggctcctggaaagaaacgtccggtagagcagtcgccacaagagccagactcctcctcgggcatcggcaagacaggccagcagcccgctaaaaagagactcaattttggtcagactggcgactcagagtcagtccccgacccacaacctctcggagaacctccagcaacccccgctgctgtgggacctactacaatggcttcaggcggtggcgcaccaatggcggacaataacgaaggcgccgatggagtgggtaatgcctcaggaaattggcattgcgattccacatggctgggcgacagagtcatcaccaccagcacccgcacctgggccttgcccacctacaataaccacctctacaagcaaatctccagtgcttcaacgggggccagcaacgacaaccactacttcggctacagcaccccctgggggtattttgacttcaacagattccactgccacttctcaccacgtgactggcagcgactcatcaacaacaactggggattccggcctaagcgactcaacttcaagctcttcaacattcaggtcaaagaggttacggacaacaatggagtcaagaccatcgccaataacctcaccagcaccatccaggtgtttacggactcggagtaccagctgccgtacgttctcggctctgcccaccagggctgcctgcctccgttcccggcggacgtgttcatgattccccagtacggctacctaacactcaacaacggtagtcaggccgtgggacgctcctccttctactgcctggaatactttccttcgcagatgctgagaaccggcaacaacttccagtttacttacaccttcgaggacgtgcctttccacagcagctacgcccacagccagagcttggaccggctgatgaatcctctgattgaccagtacctgtactacttgtctcggactcaaacaacaggaggcacggcaaatacgcagactctgggcttcagccaaggtgggcctaatacaatggccaatcaggcaaagaactggctgccaggaccctgttaccgccaacaacgcgtctcaacgacaaccgggcaaaacaacaatagcaactttgcctggactgctgggaccaaataccatctgaatggaagaaattcattggctaatcctggcatcgctatggcaacacacaaagacgacaaggagcgtttttttcccagtaacgggatcctgatttttggcaaacaaaatgctgccagagacaatgcggattacagcgatgtcatgctcaccagcgaggaagaaatcaaaaccactaaccctgtggctacagaggaatacggtatcgtggcagataacttgcagcagcaaaacacggctcctcaaattggaactgtcaacagccagggggccttacccggtatggtctggcagaaccgggacgtgtacctgcagggtcccatctgggccaagattcctcacacggacggcaacttccacccgtctccgctgatgggcggctttggcctgaaacatcctccgcctcagatcctgatcaagaacacgcctgtacctgcggatcctccgaccaccttcaaccagtcaaagctgaactctttcatcacgcaatacagcaccggacaggtcagcgtggaaattgaatgggagctgcagaaggaaaacagcaagcgctggaaccccgagatccagtacacctccaactactacaaatctacaagtgtggactttgctgttaatacagaaggcgtgtactctgaaccccaccccattggcacccgttacctcacccgtcccctgtaa

SEQ ID NO: 1029 - DNA, 2217 bp, synthetic construct
  misc_feature 1..2217: note = source = /note="Description of Artificial Sequence: Synthetic polynucleotide"
  source 1..2217: mol_type = other DNA
atggctgccgatggttatcttccagattggctcgaggacactctctctgaaggaataagacagtggtggaagctcaaacctggcccaccaccaccaaagcccgcagagcggcataaggacgacagcaggggtcttgtgcttcctgggtacaagtacctcggacccttcaacggactcgacaagggggagcccgtcaacgcggcggatgcagcggccctcgagcacgacaaggcctacgaccagcagctcaaagcgggtgacaatccgtacctgcggtataaccacgccgacgcggagtttcaggagcgccttaaagaagatacgtcttttgggggcaacctcggacgagcagtcttccaggcgaaaaagagggttcttgaacctctcggtctggttgaggaaggcgctaagacggctcctggaaagaagagaccggtagagccatcaccccagcgttctccagactcctctacgggcatcggcaagaaaggccaacagcccgccagaaaaagactcaattttggtcagactggcgactcagagtcagttccagaccctcaacctctcggagaacctccagcagcgccctctggtgtgggacctaatacaatggctgcaggcggtggcgcaccaatggcagacaataacgaaggcgccgacggagtgggtagttcctcgggaaattggcattgcgattcccaatggctgggggacagagtcatcaccaccagcaccagaacctgggccctgcccacctacaacaatcacctctacaagcaaatctccaacagcacatctggaggatcttcaaatgacaacgcctacttcggctacagcaccccctgggggtattttgacttcaaccgcttccactgccacttctcaccacgtgactggcagcgactcatcaacaacaactggggattccggcccaagagactcaacttcaagctcttcaacattcaggtcaaagaggttacggacaacaatggagtcaagaccatcgccaataaccttaccagcacggtccaggtctttacggactcggagtaccagttgccgtacgtcctcggctctgcgcaccagggctgcctccctccgttcccggcggacgtgttcatgattccccagtacggctacctaacactcaacaacggtagtcaggccgtgggacgctcctccttctactgcctggaatatttcccttctcagatgctgagaacgggcaacaactttaccttcagctacacctttgaggacgttcctttccacagcagctacgctcacagccagagtctggaccgtctcatgaatcctctgattgaccagtacctgtactacttgtctcggactcaaacaacaggaggcacggcaaatacgcagactctgggcttcagccaaggtgggcctaatacaatggccaatcaggcaaagaactggctgccaggaccctgttaccgccaacaacgcgtctcaacgacaaccgggcaaaacaacaatagcaactttgcctggactgctgggaccaaataccatctgaatggaagaaattcattggctaatcctggcatcgctatggcaacacacaaagacgacaaggagcgtttttttcccagtaacgggatcctgatttttggcaaacaaaatgctgccagagacaatgcggattacagcgatgtcatgctcaccagcgaggaagaaatcaaaaccactaaccctgtggctacagaggaatacggtatcgtggcagataacttgcagcagcaaaacacggctcctcaaattggaactgtcaacagccagggggccttacccggtatggtctggcagaaccgggacgtgtacctgcagggtcccatctgggcaaagattccacacacggacggacattttcacccctctcccctcatgggtggattcggacttaaacaccctcctccacagattctcatcaagaacaccccggtacctgcgaatcctccgaccaccttcaaccagtcaaagctgaactctttcatcacgcaatacagcacaggacaagtgagtgtggaaattgaatgggagctgcagaaagaaaacagcaagcgctggaatcccgaagtgcagtacacatccaattatgcaaaatctgccaacgttgattttactgtggacaacaatggactttatactgagcctcgccccattggcacccgttaccttacccgtcccctgtaa

SEQ ID NO: 1030 - DNA, 2211 bp, synthetic construct
  misc_feature 1..2211: note = source = /note="Description of Artificial Sequence: Synthetic polynucleotide"
  source 1..2211: mol_type = other DNA
atggctgccgatggttatcttccagattggctcgaggacaacctctctgagggcattcgcgagtggtgggcgctgaaacctggagccccgaaacccaaagccaaccagcaaaagcaggacgacggccggggtctggtgcttcctggctacaagtacctcggacccttcaacggactcgacaagggggagcccgtcaacgcggcggacgcagcggccctcgagcacgacaaggcctacgaccagcagctcaaggcgggtgacaatccgtacctgcggtataaccacgccgacgccgagtttcaggagcgtctgcaagaagatacgtcttttgggggcaacctcgggcgagcagtcttccaggccaaaaagaggcttcttgaacctcttggtctggttgaggaaggggctaagacggctcctggaaagaaacgtccggtagagcagtcgccacaagagccagactcctcctcgggcattggcaagacaggccagcagcccgctaaaaagagactcaactttgggcagactggcgactcagagtcagtgcccgatcctcaacctctcggagaacctccagcaacccccgctgctgtgggacctactacaatggcttcaggcggtggcgcaccaatggcggacaataacgaaggcgccgatggagtgggtaattcctcgggaaattggcattgcgattccacatggatgggcgacagagtcatcaccaccagcacccgaacctgggccctgcccacctacaacaatcacctctacaagcaaatctccagtgcttcaacgggggccagcaacgacaaccactacttcggctacagcaccccctgggggtattttgatttcaacagattccactgccatttttcaccacgtgactggcagcgactcatcaacaacaactggggattccggcccaagagactcaacttcaagctcttcaacatccaggtcaaggaggtcacgcagaatgaaggcaccaagaccatcgccaataaccttaccagcacgattcaggtctttacggattcggaataccagctcccgtacgtcctcggctctgcgcaccagggctgcctccctccgttcccggcggacgtgttcattattccgcagtacggctacctaacgctcaacaatggtagccaggcagtgggacggtcatccttttactgcctggaatatttcccatcgcagatgctgagaacgggcaacaactttaccttcagctacacctttgaggacgttcctttccacagcagctacgctcacagccagagtctggaccgtctcatgaatcctctgattgaccagtacctgtactacttgtctcggactcaaacaacaggaggcacggcaaatacgcagactctgggcttcagccaaggtgggcctaatacaatggccaatcaggcaaagaactggctgccaggaccctgttaccgccaacaacgcgtctcaacgacaaccgggcaaaacaacaatagcaactttgcctggactgctgggaccaaataccatctgaatggaagaaattcattggctaatcctggcatcgctatggcaacacacaaagacgacaaggagcgtttttttcccagtaacgggatcctgatttttggcaaacaaaatgctgccagagacaatgcggattacagcgatgtcatgctcaccagcgaggaagaaatcaaaaccactaaccctgtggctacagaggaatacggtatcgtggcagataacttgcagcagcaaaacacggctcctcaaattggaactgtcaacagccagggggccttacccggtatggtctggcagaaccgggacgtgtacctgcagggtcccatctgggccaagattcctcacacggacggcaacttccacccgtctccgctgatgggcggctttggcctgaaacatcctccgcctcagatcctgatcaagaacacgccagtacctgcggatcctccgaccaccttcaaccagtcaaagctgaactctttcatcacgcaatacagcaccggacaggtcagcgtggaaattgaatgggagctgcagaaggaaaacagcaagcgctggaaccccgagatccagtacacctccaactactacaaatctacaagtgtggactttgctgttaatacagaaggcgtgtactctgaaccccaccccattggcacccgttacctcacccgtcccctgtaa

SEQ ID NO: 1031 - DNA, 2211 bp, synthetic construct
  misc_feature 1..2211: note = source = /note="Description of Artificial Sequence: Synthetic polynucleotide"
  source 1..2211: mol_type = other DNA
atggctgccgatggttatcttccagattggctcgaggacaacctctctgagggcattcgcgagtggtgggcgctgaaacctggagccccgaaacccaaagccaaccagcaaaagcaggacgacggccggggtctggtgcttcctggctacaagtacctcggacccttcaacggactcgacaagggggagcccgtcaacgcggcggatgcagcggccctcgagcacgacaaggcctacgaccagcagctcaaggcgggtgacaatccgtacctgcggtataaccacgccgacgccgagtttcaggagcgtctgcaagaagatacgtcttttgggggcaacctcgggcgagcagtcttccaggccaaaaagagggttcttgaaccttttggtctggttgaggaagctgctaagacggctcctggaaagaaacgtccggtagagcagtcgccacaagagccagactcctcctcgggcattggcaagacaggccagcagcccgctaaaaagagactcaattttggtcagactggcgactcagagtcagtgcccgaccctcaacctctcggagaacctccagcaacccccgctgctgtgggacctactacaatggcttcaggcggtggcgcaccaatggcagacaataacgaaggcgccgatggagtgggtaatgcctcaggaaattggcattgcgattccacatggctgggcgacagagtcatcaccaccagcacccgaacctgggccctgcccacctacaacaatcacctctacaagcaaatctccagtgcttcaacgggggccagcaacgacaaccactacttcggctacagcaccccctgggggtattttgactttaacagattccactgccacttttcaccacgtgactggcagcgactcatcaacaacaactggggattccggcccaagagactcaacttcaagctcttcaacatccaggtcaaggaggtcacgcagaatgaaggcaccaagaccatcgccaataacctcaccagcaccattcaggtctttacggattcggaataccagctcccgtacgtcctcggctctgcccaccagggctgcctccctccgttcccggcggacgtgttcatgattccgcagtacggctacctaacgctcaacaatggtagccaggcagtgggacggtcatccttttactgcctggaatatttcccatcgcagatgctgagaacgggcaacaactttaccttcagctacacctttgaggacgttcctttccacagcagctacgctcacagccagagtctggaccgtctcatgaatcctctgattgaccagtacctgtactacttgtctcggactcaaacaacaggaggcacggcaaatacgcagactctgggcttcagccaaggtgggcctaatacaatggccaatcacgcaaagaactggctgccaggaccctgttaccgccaacaacgcgtctcaacgacaaccgggcaaaacaacaatagcaactttgcctggactgctgggaccaaataccatctgaatggaagaaattcattggctaatcctggcatcgctatggcaacacacaaagacgacaaggagcgtttttttcccagtaacgggatcctgatttttggcaaacaaaatgctgccagagacaatgcggattacagcgatgtcatgctcaccagcgaggaagaaatcaaaaccactaaccctgtggctacagaggaatacggtatcgtggcagataacttgcagcagcaaaacacggctcctcaaattggaactgtcaacagccagggggccttacccggtatggtctggcagaaccgggacgtgtacctgcagggtcccatctgggccaagattcctcacacggacggcaacttccacccgtctccgctgatgggcggctttggcctgaaacatcctccgcctcagatcctgatcaagaacacgcctgtacctgcggatcctccgaccaccttcaaccagtcaaagctgaactctttcatcacgcaatacagcaccggacaggtcagcgtggaaattgaatgggagctgcagaaggaaaacagcaagcgctggaaccccgagatccagtacacctccaactactacaaatctacaagtgtggactttgctgttaatacagaaggcgtgtactctgaaccccaccccattggcacccgttacctcacccgtcccctgtaa

SEQ ID NO: 1032 - DNA, 2211 bp, synthetic construct
  misc_feature 1..2211: note = source = /note="Description of Artificial Sequence: Synthetic polynucleotide"
  source 1..2211: mol_type = other DNA
atggctgccgatggttatcttccagattggctcgaggacaacctctctgagggcattcgcgagtggtgggcgctgaaacctggagccccgaagcccaaagccaaccagcaaaagcaggacgacggccggggtctggtgcttcctggctacaagtacctcggacccttcaacggactcgacaaaggagagcccgtcaacgaggcggacgcggcggccctcgaacacgacaaggcttacgaccagcagctcaaggccggtgacaacccctacctgcggtacaaccacgccgacgccgagttccaggagcggctgcaagaagatacgtcttttgggggcaacctcgggcgagcagtcttccaggccaagaagaggcttcttgaacctcttggtctggttgaggaagcggctaagacggctcctggaaagaagaggcctgtagagcagtctcctcaggaaccggactcctccgcgggtattggcaaatcaggtgcacagcccgctaaaaagagactcaattttggtcagactggcgactcagagtcagtccccgacccacaacctctcggagaacctccagcaacccccgctgctgtgggacctactacaatggcttcaggcggtggcgcaccaatggcagacaataacgaaggcgccgatggagtgggtaatgcctcaggaaattggcattgcgattccacatggctgggcgacagagtcatcaccaccagcacccgaacctgggccctgcccacctataacaaccatctctacaagcaaatctccagtgcttcaacgggggccagtaacgacaaccactacttcggctacagcaccccctgggggtattttgactttaacagattccactgccacttctcaccacgtgactggcagcgactcatcaacaacaactggggattccggcccaagcgactcaacttcaagctcttcaacattcaggtcaaagaggttacggacaacgatggagtcaagaccatcgccaataaccttaccagcaccattcaggtgtttacggactcggaataccagctgccgtacgttctcggctccgcccaccagggctgcctgcctccgttcccggcggacgtgttcatgattccccagtacggctacctaacactcaacaacggtagtcaggccgtgggacgctcctccttctactgcctggaatactttccttcgcagatgctgagaactggcaacaacttccagtttacttacaccttcgaggacgtgcctttccacagcagctacgcccacagccagagcttggaccggctgatgaatcctctgattgaccagtacctgtactacttgtctcggactcaaacaacaggaggcacggcaaatacgcagactctgggcttcagccaaggtgggcctaatacaatggccaatcaggcaaagaactggctgccaggaccctgttaccgccaacaacgcgtctcaacgacaaccgggcaaaacaacaatagcaactttgcctggactgctgggaccaaataccatctgaatggaagaaattcattggctaatcctggcatcgctatggcaacacacaaagacgacaaggagcgtttttttcccagtaacgggatcctgatttttggcaaacaaaatgctgccagagacaatgcggattacagcgatgtcatgctcaccagcgaggaagaaatcaaaaccactaaccctgtggctacagaggaatacggtatcgtggcagataacttgcagcagcaaaacacggctcctcaaattggaactgtcaacagccagggggccttacccggtatggtctggcagaaccgggacgtgtacctgcagggtcccatctgggccaagattcctcacacggacggcaacttccacccgtctccgctgatgggcggctttggcctgaaacatcctccgcctcagatcctgatcaagaacacgcctgtacctgcggatcctccgaccaccttcaaccagtcaaagctgaactctttcatcacgcaatacagcaccggacaggtcagcgtggaaattgaatgggagctgcagaaggaaaacagcaagcgctggaaccccgagatccagtacacctccaactactacaaatctacaagtgtggactttgctgttaatacagaaggcgtgtactctgaaccccaccccattggcacccgttacctcacccgtcccctgtaa

SEQ ID NO: 1033 - DNA, 2211 bp, synthetic construct
  misc_feature 1..2211: note = source = /note="Description of Artificial Sequence: Synthetic polynucleotide"
  source 1..2211: mol_type = other DNA
atggctgccgatggttatcttccagattggctcgaggacaacctctctgagggcattcgcgagtggtgggcgctgaaacctggagccccgaagcccaaagccaaccagcaaaagcaggacgacggccggggtctggtgcttcctggctacaagtacctcggacccttcaacggactcgacaagggggagcccgtcaacgcggcggatgcagcggccctcgagcacgacaaagcctacgaccagcagctcaaagcgggtgacaatccgtacctgcggtataaccacgccgacgccgagtttcaggagcgtctgcaagaagatacgtcttttgggggcaacctcgggcgagcagtcttccaggccaagaagagggttctcgaacctttgggtctggttgaggaaggggctaagacggctcctggaaagaaaaggccggtagagcagtctcctcaggaaccggactcctccgcgggtattggcaagacaggtgcacagcccgctaaaaagagactcaattttggtcagactggcgactcagagtcagtccccgacccacaacctctcggagaacctccagcaacccccgctgctgtgggacctactacaatggcttcaggcggtggcgcaccaatggcagacaataacgaaggcgccgacggagtgggtagtgcctcgggaaattggcattgcgattccacatggctgggcgacagagtcatcaccaccagcacccgaacctgggccctgcccacctataacaaccatctctacaagcaaatctccagtgcttcaacgggggccagtaacgacaaccactacttcggctacagcaccccctgggggtattttgacttcaacagattccactgccacttctcaccacgtgactggcagcgactcatcaacaacaactggggattccggcccaagcgactcaacttcaagctcttcaacattcaggtcaaagaggttacggacaacaatggagtcaagaccatcgccaataaccttaccagcacgatccaggtctttacggactcggagtaccagctgccgtacgtcctcggctctgcgcaccagggctgcctgcctccgttcccggcggacgtgttcatgattccgcagtacggctacctaacgctcaacaatggtagccaggcagtgggacggtcatccttttactgcctggaatatttcccatcgcagatgctgagaacgggcaacaactttaccttcagctacacctttgaggacgttcctttccacagcagctacgctcacagccagagtctggaccgtctcatgaatcctctgattgaccagtacctgtactacttgtctcggactcaaacaacaggaggcacggcaaatacgcagactctgggcttcagccaaggtgggcctaatacaatggccaatcaggcaaagaactggctgccaggaccctgttaccgccaacaacgcgtctcaacgacaaccgggcaaaacaacaatagcaactttgcctggactgctgggaccaaataccatctgaatggaagaaattcattggctaatcctggcatcgctatggcaacacacaaagacgacaaggagcgtttttttcccagtaacgggatcctgatttttggcaaacaaaatgctgccagagacaatgcggattacagcgatgtcatgctcaccagcgaggaagaaatcaaaaccactaaccctgtggctacagaggaatacggtatcgtggcagataacttgcagcagcaaaacacggctcctcaaattggaactgtcaacagccagggggccttacccggtatggtctggcagaaccgggacgtgtacctgcagggtcccatctgggccaagattcctcacacggacggcaacttccacccgtctccgctgatgggcggctttggcctgaaacatcctccgcctcagatcctgatcaagaacacgcctgtacctgcggatcctccgaccaccttcaaccagtcaaagctgaactctttcatcacgcaatacagcaccggacaggtcagcgtggaaattgaatgggagctgcagaaggaaaacagcaagcgctggaaccccgagatccagtacacctccaactactacaaatctacaagtgtggactttgctgttaatacagaaggcgtgtactctgaaccccaccccattggcacccgttacctcacccgtcccctgtaa

SEQ ID NO: 1034 - DNA, 2211 bp, synthetic construct
  misc_feature 1..2211: note = source = /note="Description of Artificial Sequence: Synthetic polynucleotide"
  source 1..2211: mol_type = other DNA
atggctgccgatggttatcttccagattggctcgaggacaacctctctgagggcattcgcgagtggtgggacttgaaacctggagccccgaagcccaaagccaaccagcaaaagcaggacgacggccggggtctggtgcttcctggctacaagtacctcggacccttcaacggactcgacaagggggagcccgtcaacgcggcggacgcagcggccctcgagcacgacaaggcctacgaccagcagctcaaagcgggtgacaatccgtacctgcggtataaccacgccgacgccgagtttcaggagcgtctgcaagaagatacgtcttttgggggcaacctcggacgagcagtcttccaggccaaaaagaggcttcttgaacctcttggtctggttgaggaagcggctaagacggctcctggaaagaagaggcctgtagagcagtctcctcaggaaccggactcctccgcgggtattggcaaatcgggtgcacagcccgctaaaaagagactcaatttcggtcagactggcgacacagagtcagtcccagaccctcaaccaatcggagaacctccagcagcgccctctggtgtgggacctaatacaatggctgcaggcggtggcgcaccaatggcagacaataacgaaggtgccgatggagtgggtagttcctcgggaaattggcattgcgattcccaatggctgggggacagagtcatcaccaccagcacccgaacctgggccctgcccacctataacaaccacctctacaagcaaatctccagtgcttcaacgggggccagcaacgacaaccactactttggctacagcaccccttgggggtattttgacttcaacagattccactgccacttttcaccacgtgactggcaaagactcatcaacaacaactggggattccgacccaagagactcaacttcaagctcttcaacatccaggtcaaggaggtcacgcagaatgaaggcaccaagaccatcgccaataacctcaccagcaccatccaggtgtttacggactcggagtaccagctgccgtacgttctcggctctgcccaccagggctgcctgcctccgttcccggcggacgtgttcatgattccccagtacggctacctaacactcaacaacggtagtcaggccgtgggacgctcctccttctactgcctggaatactttccttcgcagatgctgagaaccggcaacaacttccagtttacttacaccttcgaggacgtgcctttccacagcagctacgcgcacagccagagcttggaccggctgatgaatcctctgattgaccagtacctgtactacttgtctcggactcaaacaacaggaggcacggcaaatacgcagactctgggcttcagccaaggtgggcctaatacaatggccaatcacgcaaagaactggctgccaggaccctgttaccgccaacaacgcgtctcaacgacaaccgggcaaaacaacaatagcaactttgcctggactgctgggaccaaataccatctgaatggaagaaattcattggctaatcctggcatcgctatggcaacacacaaagacgacaaggagcgtttttttcccagtaacgggatcctgatttttggcaaacaaaatgctgccagagacaatgcggattacagcgatgtcatgctcaccagcgaggaagaaatcaaaaccactaaccctgtggctacagaggaatacggtatcgtggcagataacttgcagcagcaaaacacggctcctcaaattggaactgtcaacagccagggggccttacccggtatggtctggcagaaccgggacgtgtacctgcagggtcccatctgggccaagattcctcacacggacggcaacttccacccgtctccgctgatgggcggctttggcctgaaacatcctccgcctcagatcctgatcaagaacacgcctgtacctgcggatcctccgaccaccttcaaccagtcaaagctgaactctttcatcacgcaatacagcaccggacaggtcagcgtggaaattgaatgggagctgcagaaggaaaacagcaagcgctggaaccccgagatccagtacacctccaactactacaaatctacaagtgtggactttgctgttaatacagaaggcgtgtactctgaaccccaccccattggcacccgttacctcacccgtcccctgtaa

SEQ ID NO: 1035 - DNA, 2214 bp, synthetic construct
  misc_feature 1..2214: note = source = /note="Description of Artificial Sequence: Synthetic polynucleotide"
  source 1..2214: mol_type = other DNA
atggctgccgatggttatcttccagattggctcgaggacaaccttagtgaaggaattcgcgagtggtgggcgctgaaacctggagccccgaagcccaaagccaaccagcaaaagcaggacgacggccggggtctggtgcttcctggctacaagtacctcggacccttcaacggactcgacaagggggagcccgtcaacgcggcggacgcagcggccctcgagcacgacaaggcctacgaccagcagctcaaagcgggtgacaatccgtacctgcggtataaccacgccgacgccgagtttcaggagcgtctgcaagaagatacgtcttttgggggcaacctcgggcgagcagtcttccaggccaagaagcgggttctcgaacctctcggtctggttgaggaaggcgctaagacggctcctggaaagaaacgtccggtagagcagtcgccacaagagccagactcctcctcgggcatcggcaagacaggccagcagcccgctaaaaagagactcaatttcggtcagactggcgacacagagtcagtcccagaccctcaaccaatcggagaacctcccgcagccccctcaggtgtgggatctcttacaatggcttcaggtggtggcgcaccagtggcagacaataacgaaggtgccgatggagtgggtagttcctcgggaaattggcattgcgattcccaatggctgggggacagagtcatcaccaccagcaccagaacctgggccttgcccacctacaataaccacctctacaagcaaatctccaacagcacatctggaggatcttcaaatgacaacgcctacttcggctacagcaccccctgggggtattttgactttaacagattccactgccacttttcaccacgtgactggcagcgactcatcaacaacaactggggattccgacccaagagactcaacttcaagctcttcaacatccaggtcaaggaggtcacgcagaacgaaggcaccaagaccatcgccaataacctcaccagcaccatccaggtgtttacggactcggagtaccagctgccgtacgttctcggctccgcccaccagggctgcctgcctccgttcccggcggacgtgttcatgattccccagtacggctacctaacgctcaacaacggtagtcaggccgtgggacgctcctccttctactgcctggaatactttccttcgcagatgctgagaaccggcaacaacttccagtttacttacaccttcgaggacgtgcctttccacagcagctacgcgcacagccagagcttggaccggctgatgaatcctctgattgaccagtacctgtactacttgtctcggactcaaacaacaggaggcacggcaaatacgcagactctgggcttcagccaaggtgggcctaatacaatggccaatcaggcaaagaactggctgccaggaccctgttaccgccaacaacgcgtctcaacgacaaccgggcaaaacaacaatagcaactttgcctggactgctgggaccaaataccatctgaatggaagaaattcattggctaatcctggcatcgctatggcaacacacaaagacgacaaggagcgtttttttcccagtaacgggatcctgatttttggcaaacaaaatgctgccagagacaatgcggattacagcgatgtcatgctcaccagcgaggaagaaatcaaaaccactaaccctgtggctacagaggaatacggtatcgtggcagataacttgcagcagcaaaacacggctcctcaaattggaactgtcaacagccagggggccttacccggtatggtctggcagaaccgggacgtgtacctgcagggtcccatctgggccaagattcctcacacggacggcaacttccacccgtctccgctgatgggcggctttggcctgaaacatcctccgcctcagatcctgatcaagaacacgcctgtacctgcggatcctccgaccaccttcaaccagtcaaagctgaactctttcatcacgcaatacagcaccggacaggtcagcgtggaaattgaatgggagctgcagaaggaaaacagcaagcgctggaaccccgagatccagtacacctccaactactacaaatctacaagtgtggactttgctgttaatacagaaggcgtgtactctgaaccccaccccattggcacccgttacctcacccgtcccctgtaa

SEQ ID NO: 1036 - DNA, 2214 bp, synthetic construct
  misc_feature 1..2214: note = source = /note="Description of Artificial Sequence: Synthetic polynucleotide"
  source 1..2214: mol_type = other DNA
atggctgccgatggttatcttccagattggctcgaggacaaccttagtgaaggaattcgcgagtggtgggcgctgaaacctggagccccgaagcccaaagccaaccagcaaaagcaggacgacggccggggtctggtgcttcctggctacaagtacctcggacccttcaacggactcgacaagggggagcccgtcaacgcggcggacgcagcggccctcgagcacgacaaggcctacgaccagcagctcaaagcgggtgacaatccgtacctgcggtataaccacgccgacgcggagtttcaggagcgccttaaagaagatacgtcttttgggggcaacctcgggcgagcagtcttccaggccaagaagagggttctcgaaccttttggtctggttgaggaaggtgctaagacggctcctggaaagaaacgtccggtagagcagtcgccacaagagccagactcctcctcgggcatcggcaagacaggccagcagcccgctaaaaagagactcaattttggtcagactggcgactcagagtcagttccagaccctcaacctctcggagaacctccagcagcgccctctggtgtgggacctaatacaatggctgcaggcggtggcgcaccaatggcagacaataacgaaggtgccgatggagtgggtagttcctcgggaaattggcattgcgattcccaatggctggggaacagagtcatcaccaccagcacccgaacctgggccctgcccacctacaacaatcacctctacaagcaaatctccaacagcacatctggaggatcttcaaatgacaacgcctacttcggctacagcaccccctgggggtattttgacttcaacagattccactgccacttctcaccacgtgactggcagcgactcatcaacaacaactggggattccggcccaagagactcaacttcaagctcttcaacattcaggtcaaagaggttacggacaacaatggagtcaagaccatcgccaataaccttaccagcacggtccaggtcttcacggactcggagtaccagttgccgtacgtcctcggctctgcgcaccagggctgcctccctccgttcccggcggacgtgttcatgattccgcaatacggctacctgacgctcaacaacggtagccaagccgtgggacgttcatccttttactgcctggaatatttcccttctcagatgctgagaaccggcaacaacttccagtttacttacaccttcgaggacgtgcctttccacagcagctacgcgcacagccagagcttggaccggctgatgaatcctctgattgaccagtacctgtactacttgtctcggactcaaacaacaggaggcacggcaaatacgcagactctgggcttcagccaaggtgggcctaatacaatggccaatcaggcaaagaactggctgccaggaccctgttaccgccaacaacgcgtctcaacgacaaccgggcaaaacaacaatagcaactttgcctggactgctgggaccaaataccatctgaatggaagaaattcattggctaatcctggcatcgctatggcaacacacaaagacgacaaggagcgtttttttcccagtaacgggatcctgatttttggcaaacaaaatgctgccagagacaatgcggattacagcgatgtcatgctcaccagcgaggaagaaatcaaaaccactaaccctgtggctacagaggaatacggtatcgtggcagataacttgcagcagcaaaacacggctcctcaaattggaactgtcaacagccagggggccttacccggtatggtctggcagaaccgggacgtgtacctgcagggtcccatctgggccaagattcctcacacggacggcaacttccacccgtctccgctgatgggcggctttggcctgaaacatcctccgcctcagatcctgatcaagaacacgcctgtacctgcggatcctccgaccaccttcaaccagtcaaagctgaactctttcatcacgcaatacagcaccggacaggtcagcgtggaaattgaatgggagctgcagaaggaaaacagcaagcgctggaaccccgagatccagtacacctccaactactacaaatctacaagtgtggactttgctgttaatacagaaggcgtgtactctgaaccccaccccattggcacccgttacctcacccgtcccctgtaa

SEQ ID NO: 1037 - DNA, 2211 bp, synthetic construct
  misc_feature 1..2211: note = source = /note="Description of Artificial Sequence: Synthetic polynucleotide"
  source 1..2211: mol_type = other DNA
atggctgccgatggttatcttccagattggctcgaggacaacctctctgagggcattcgcgagtggtgggacttgaaacctggagccccgaagcccaaagccaaccagcaaaagcaggacgacggccggggtctggtgcttcctggctacaagtacctcggacccttcaacggactcgacaggggggagcccgtcaacgcggcggacgcagcggccctcgagcacgacaaggcctacgaccagcagctcaaagcgggtgacaatccgtacctgcggtataaccacgccgacgccgagtttcaggagcgtctgcaagaagatacgtcttttgggggcaacctcgggcgagcagtcttccaggccaagaagcgggttctcgaacctctcggtctggttgaggaaggcgctaagacggctcctggaaagaaacgtccggtagagcagtcgccacaagagccagactcctcctcgggcatcggcaagacaggccagcagcccgctaaaaagagactcaattttggtcagactggcgactcagagtcagtccccgacccacaacctctcggagaacctccagcaacccccgctgctgtgggacctactacaatggcttcaggcggtggcgcaccaatggcagacaataacgaaggcgccgacggagtgggtaatgcctcaggaaattggcattgcgattccacatggctgggcgacagagtcatcaccaccagcacccgaacctgggccttgcccacctataacaaccacctctacaagcaaatctccagtgcttcaacgggggccagcaacgacaaccactacttcggctacagcaccccctgggggtattttgacttcaacagattccactgccacttctcaccacgtgactggcagcgactcatcaacaacaactggggattccggcctaagcgactcaacttcaagctcttcaacattcaggtcaaagaggttacggacaacaatggagtcaagaccatcgccaataacctcaccagcaccatccaggtgtttacggactcggagtaccagctgccgtacgttctcggctctgcccaccagggctgcctgcctccgttcccggcggacgtgttcatgattccccagtacggctacctaacactcaacaacggtagtcaggccgtgggacgctcctccttctactgcctggaatactttccttcgcagatgctgagaaccggcaacaacttccagtttacttacaccttcgaggacgtgcctttccacagcagctacgcccacagccagagcttggaccggctgatgaatcctctgattgaccagtacctgtactacttgtctcggactcaaacaacaggaggcacggcaaatacgcagactctgggcttcagccaaggtgggcctaatacaatggccaatcaggcaaagaactggctgccaggaccctgttaccgccaacaacgcgtctcaacgacaaccgggcaaaacaacaatagcaactttgcctggactgctgggaccaaataccatctgaatggaagaaattcattggctaatcctggcatcgctatggcaacacacaaagacgacaaggagcgtttttttcccagtaacgggatcctgatttttggcaaacaaaatgctgccagagacaatgcggattacagcgatgtcatgctcaccagcgaggaagaaatcaaaaccactaaccctgtggctacagaggaatacggtatcgtggcagataacttgcagcagcaaaacacggctcctcaaattggaactgtcaacagccagggggccttacccggtatggtctggcagaaccgggacgtgtacctgcagggtcccatctgggccaagattcctcacacggacggcaacttccacccgtctccgctgatgggcggctttggcctgaaacatcctccgcctcagatcctgatcaagaacacgcctgtacctgcggatcctccgaccaccttcaaccagtcaaagctgaactctttcatcacgcaatacagcaccggacaggtcagcgtggaaattgaatgggagctgcagaaggaaaacagcaagcgctggaaccccgagatccagtacacctccaactactacaaatctacaagtgtggactttgctgttaatacagaaggcgtgtactctgaaccccaccccattggcacccgttacctcacccgtcccctgtaa

SEQ ID NO: 1038 - DNA, 2211 bp, synthetic construct
  misc_feature 1..2211: note = source = /note="Description of Artificial Sequence: Synthetic polynucleotide"
  source 1..2211: mol_type = other DNA
atggctgccgatggttatcttccagattggctcgaggacaacctctctgagggcattcgcgagtggtgggacttgaaacctggagccccgaagcccaaagccaaccagcaaaagcaggacgacggccggggtctggtgcttcctggctacaagtacctcggacccttcaacggactcgacaagggggagcccgtcaacgcggcggacgcagcggccctcgagcacgacaaggcctacgaccagcagctcaaagcgggtgacaatccgtacctgcggtataaccacgccgacgccgagtttcaggagcgtctgcaagaagatacgtcttttgggggcaacctcgggcgagcagtcttccaggccaagaagcgggttctcgaacctctcggtctggttgaggaaggcgctaagacggctcctggaaagaaacgtccggtagagcagtcgccacaagagccagactcctcctcgggcatcggcaagaaaggccaacagcccgccagaaaaagactcaattttggtcagactggcgactcagagtcagttccagaccctcaacctctcggagaacctcccgcagccccctcaggtgtgggatctcttacaatggcttcaggcggtggcgcaccaatggcagacaataacgaaggcgccgacggagtgggtaatgcctcaggaaattggcattgcgattccacatggctgggcgacagagtcatcaccaccagcacccgaacatgggccttgcccacttacaacaaccatctctacaagcaaatctccagtgcttcaacgggggccagcaacgacaaccactacttcggctacagcaccccctgggggtattttgatttcaacagattccactgccacttttcaccacgtgactggcaaagactcatcaacaacaactggggattccgacccaagagactcaacttcaagctctttaacattcaagtcaaagaggtcacgcagaatgaaggcaccaagaccatcgccaataaccttaccagcacggtccaggtcttcacggactcagactatcagctcccgtacgttctcggctccgcccaccagggctgcctgcctccgttcccggcggacgtgttcatgattccccagtacggctacctaacactcaacaacggtagtcaggccgtgggacgctcctccttctactgcctggaatactttccttcgcagatgctgagaaccggcaacaacttccagtttacttacacctttgaggacgttcctttccacagcagctacgctcacagccagagtctggaccgtctcatgaatcctctgattgaccagtacctgtactacttgtctcggactcaaacaacaggaggcacggcaaatacgcagactctgggcttcagccaaggtgggcctaatacaatggccaatcaggcaaagaactggctgccaggaccctgttaccgccaacaacgcgtctcaacgacaaccgggcaaaacaacaatagcaactttgcctggactgctggaaccaaataccatctgaatggaagaaattcattgtctaatcctggcatcgctatggcgacacacaaagacgacaaggagcgtttttttcccagtaacgggatcctgatttttggcaaacaaaatgctgccagagacaatgcggattacagcgatgtcatgctcaccagcgaggaagaaatcaaaaccactaaccctgtggctacagaggaatacggtatcgtggcagataacttgcagcagcaaaacacggctcctcaaattggaactgtcaacagccagggggccttacccggtatggtctggcagaaccgggacatgtacctgcagggtcccatctgggccaagattcctcacacggacggcaacttccacccgtctccgctgatgggcggctttggcctgaaacatcctccgcctcagatcctgatcaagaacacgcctgtacctgcggatcctccgaccaccttcaaccagtcaaagctgaactctttcatcacgcaatacagcaccggacaggtcagcgtggaaattgaatgggagctgcagaaggaaaacagcaagcgctggaaccccgagatccagtacacctccaactactacaaatctacaagtgtggactttgctgttaatacagaaggcgtgtactctgaaccccaccccattggcacccgttacctcacccgtcccctgtaa

SEQ ID NO: 1039 - DNA, 2211 bp, synthetic construct
  misc_feature 1..2211: note = source = /note="Description of Artificial Sequence: Synthetic polynucleotide"
  source 1..2211: mol_type = other DNA
atggctgccgatggttatcttccagattggctcgaggacaacctctctgagggcattcgcgagtggtgggcgctgaaacctggagccccgaagcccaaagccaaccagcaaaagcaggacgacggccggggtctggtgcttcctggctacaagtacctcggacccttcaacggactcgacaagggggagcccgtcaacgcggcggatgcagcggccctcgagcacgacaaggcctacgaccagcagctcaaagcgggtgacaatccgtacctgcggtataaccacgccgacgccgagtttcaggagcgtctgcaggaagatacgtcttttgggggcaacctcgggcgagcagtcttccaggccaagaagagggttctcgaaccttttggtctggttgaggaaggcgctaagacggctcctggaaagaaacgtccggtagagcagtcgccacaagagccagactcctcctcgggcatcggcaagacaggccagcagcccgctaaaaagagactcaattttggtcagactggcggctcagagtcagtccccgacccacaacctctcggagaacctccagcaacccccgctgctgtgggacctactacaatggctgcaggcggtggcgcaccaatggcagacaataacgaaggcgccgacggagtgggtagttcctcgggaaattggcattgcgattccacatggctgggcgacagagtcatcaccaccagcaccagaacctgggccttgcccacctataacaaccacctctacaagcaaatctccagtgcttcaacgggggccagcaacgacaaccactacttcggctacagcaccccctgggggtattttgatttcaacagattccactgccatttctcaccacgtgactggcagcgactcatcaacaacaactggggattccggcccaagagactcaacttcaaactcttcaacattcaggtcaaagaggttacggacaacaatggagtcaagaccatcgccaataaccttaccagcacggtccaggtgtttacggactcggagtaccagctgccgtacgttctcggctctgcccaccagggctgcctccctccgttcccggcggacgtgttcatgattccgcagtacggctacctaacgctcaacaatggcagccaggcagtgggacggtcatccttttactgcctggaatatttcccttctcagatgctgagaacgggcaacaactttaccttcagctacacctttgaggaagtgcctttccacagcagctacgcgcacagccagagcctggaccggctgatgaatcctctgattgaccagtacctgtactacttgtctcggactcaaacaacaggaggcacggcaaatacgcagactctgggcttcagccaaggtgggcctaatacaatggccaatcaggcaaagaactggctgccaggaccctgttaccgccaacaacgcgtctcaacgacaaccgggcaaaacaacaatagcaactttgcctggactgctgggaccaaataccatctgaatggaagaaattcattggctaatcctggcatcgctatggcctcacacaaagacgacaaggagcgtttttttcccagtaacgggatcctgatttttggcaaacaaaatgctgccagagacaatgcggattacagcgatgtcatgctcaccagcgaggaagaaatcaaaaccactaaccctgtggctacagaggaatacggtatcgtggcagataacttgcagcagcaaaacacggctcctcaaattggaactgtcaacagccagggggccttacccggtatggtctggcagaaccgggacgtgtacctgcagggtcccatctgggccaagattcctcacacggacggcaacttccacccgtctccgctgatgggcggctttggcctgaaacatcctccgcctcagatcctgatcaagaacacgcctgtacctgcggatcctccgaccaccttcaaccagtcaaagctgaactctttcatcacgcaatacagcaccggacaggtcagcgtggaaattgaatgggagctgcagaaggaaaacagcaagcgctggaaccccgagatccagtacacctccaactactacaaatctacaagtgtggactttgctgttaatacagaaggcgtgtactctgaaccccaccccattggcacccgttacctcacccgtcccctgtaa

SEQ ID NO: 1040 - protein, 736 aa, synthetic construct
  REGION 1..736: note = source = /note="Description of Artificial Sequence: Synthetic polypeptide"
MAADGYLPDWLEDTLSEGIRQWWKLKPGPPPPKPAERHKDDSRGLVLPGYKYLGPFNGLDKGEPVNEADAAALEHDKAYDQQLKAGDNPYLKYNHADAEFQERLKEDTSFGGNLGRAVFQAKKRVLEPLGLVEEGAKTAPGKKRPVEQSPQEPDSSSGIGKTGQQPAKKRLNFGQTGDSESVPDPQPLGEPPATPAAVGPTTMASGGGAPMADNNEGADGVGSSSGNWHCDSQWLGDRVITTSTRTWALPTYNNHLYKQISSASTGASNDNHYFGYSTPWGYFDFNRFHCHFSPRDWQRLINNNWGFRPKRLNFKLFNIQVKEVTQNEGTKTIANNLTSTIQVFTDSEYQLPYVLGSAHQGCLPPFPADVFMIPQYGYLTLNNGSQAVGRSSFYCLEYFPSQMLRTGNNFQFTYTFEDVPFHSSYAHSQSLDRLMNPLIDQYLYYLSRTQTTGGTANTQTLGFSQGGPNTMANQAKNWLPGPCYRQQRVSTTTGQNNNSNFAWTAGTKYHLNGRNSLANPGIAMATHKDDKERFFPSNGILIFGKQNAARDNADYSDVMLTSEEEIKTTNPVATEEYGIVADNLQQQNTAPQIGTVNSQGALPGMVWQNRDVYLQGPIWAKIPHTDGNFHPSPLMGGFGLKHPPPQILIKNTPVPADPPTTFNQSKLNSFITQYSTGQVSVEIEWELQKENSKRWNPEIQYTSNYYKSTSVDFAVNTEGVYSEPHPIGTRYLTRPL

SEQ ID NO: 1041 - protein, 736 aa, synthetic construct
  REGION 1..736: note = source = /note="Description of Artificial Sequence: Synthetic polypeptide"
MAADGYLPDWLEDNLSEGIREWWALKPGAPKPKANQQKQDDGRGLVLPGYKYLGPFNGLDKGEPVNAADAAALEHDKAYDQQLKAGDNPYLKYNHADAEFQERLKEDTSFGGNLGRAVFQAKKRLLEPLGLVEEAAKTAPGKKRPVEQSPQEPDSSAGIGKSGAQPAKKRLNFGQTGDSESVPDPQPLGEPPATPAAVGPTTMASGGGAPMADNNEGADGVGNASGNWHCDSTWLGDRVITTSTRTWALPTYNNHLYKQISSASTGASNDNHYFGYSTPWGYFDFNRFHCHFSPRDWQRLINNNWGFRPKRLNFKLFNIQVKEVTQNEGTKTIANNLTSTIQVFTDSEYQLPYVLGSAHQGCLPPFPADVFMIPQYGYLTLNNGSQAVGRSSFYCLEYFPSQMLRTGNNFQFTYTFEDVPFHSSYAHSQSLDRLMNPLIDQYLYYLSRTQTTGGTANTQTLGFSQGGPNTMANQAKNWLPGPCYRQQRVSTTTGQNNNSNFAWTAGTKYHLNGRNSLANPGIAMATHKDDKERFFPSNGILIFGKQNAARDNADYSDVMLTSEEEIKATNPVATEEYGIVADNLQQQNTAPQIGTVNSQGALPGMVWQNRDVYLQGPIWAKIPHTDGNFHPSPLMGGFGLKHPPPQILIKNTPVPADPPTTFNQSKLNSFITQYSTGQVSVEIEWELQKENSKRWNPEIQYTSNYYKSTSVDFAVNTEGVYSEPHPIGTRYLTRPL

SEQ ID NO: 1042 - protein, 737 aa, synthetic construct
  REGION 1..737: note = source = /note="Description of Artificial Sequence: Synthetic polypeptide"
MAADGYLPDWLEDNLSEGIREWWDLKPGAPKPKANQQKQDDGRGLVLPGYKYLGPFNGLDKGEPVNAADAAALEHDKAYDQQLKAGDNPYLRYNHADAEFQERLQEDTSFGGNLGRAVFQAKKRVLEPLGLVEEGANTAPGKKRPVEQSPQEPDSSAGIGKSGAQPAKKRLNFGQTGDTESVPDPQPIGEPPAAPSGVGSLTMASGGGAPVADNNEGADGVGSSSGNWHCDSQWLGDRVITTSTRTWALPTYNNHLYKQISNSTSGGSSNDNAYFGYSTPWGYFDFNRFHCHFSPRDWQRLINNNWGFRPKRLNFKLFNIQVKEVTDNNGVKTIANNLTSTIQVFTDSEYQLPYVLGSAHQGCLPPFPADVFMIPQYGYLTLNNGSQAVGRSSFYCLEYFPSQMLRTGNNFQFTYTFEDVPFHSSYAHSQSLDRLMNPLIDQYLYYLSRTQTTGGTANTQTLGFSQGGPNTMANQAKNWLPGPCYRQQRVSTTTGQNNNSNFAWTAGTKYHLNGRNSLANPGIAMASHKDDKERFFPSNGILIFGKQNAARDNADYSDVMLTSEEEIKTTNPVATEEYGIVADNLQQQNTAPQIGTVNSQGALPGMVWQNRDVYLQGPIWAKIPHTDGNFHPSPLMGGFGLKHPPPQILIKNTPVPADPPTTFNQSKLNSFITQYSTGQVSVEIEWELQKENSKRWNPEIQYTTNYYKSTSVDFAVNTEGVYSEPHPIGTRYLTRPL

SEQ ID NO: 1043 - protein, 736 aa, synthetic construct
  REGION 1..736: note = source = /note="Description of Artificial Sequence: Synthetic polypeptide"
MAADGYLPDWLEDNLSEGIREWWALKPGAPKPKANQQKQDDGRGLVLPGYKYLGPFNGLDKGEPVNEADAAALEHDKAYDQQLKAGDNPYLRYNHADAEFQERLQEDTSFGGNLGRAVFQAKKRVLEPLGLVEEGAKTAPGKKRPVEQSPQEPDSSSGIGKTGQQPAKKRLNFGQTGDSESVPDPQPLGEPPATPAAVGPTTMASGGGAPMADNNEGADGVGNASGNWHCDSTWLGDRVITTSTRTWALPTYNNHLYKQISSASTGASNDNHYFGYSTPWGYFDFNRFHCHFSPRDWQRLINNNWGFRPKRLNFKLFNIQVKEVTQNEGTKTIANNLTSTIQVFTDSEYQLPYVLGSAHQGCLPPFPADVFMIPQYGYLTLNNGSQAVGRSSFYCLEYFPSQMLRTGNNFQFTYTFEDVPFHSSYAHSQSLDRLMNPLIDQYLYYLSRTQTTGGTANTQTLGFSQGGPNTMANQAKNWLPGPCYRQQRVSTTTGQNNNSNFAWTAGTKYHLNGRNSLANPGIAMATHKDDKERFFPSNGILIFGKQNAARDNADYSDVMLTSEEEIKTTNPVATEEYGIVADNLQQQNTAPQIGTVNSQGALPGMVWQNRDVYLQGPIWAKIPHTDGNFHPSPLMGGFGLKHPPPQILIKNTPVPADPPTTFNQSKLNSFITQYSTGQVSVEIEWELQKENSKRWNPEIQYTSNYYKSTSVDFAVNTEGVYSEPHPIGTRYLTRPL

SEQ ID NO: 1044 - protein, 736 aa, synthetic construct
  REGION 1..736: note = source = /note="Description of Artificial Sequence: Synthetic polypeptide"
MAADGYLPDWLEDNLSEGIREWWALKPGAPKPKANQQKQDDGRGLVLPGYKYLGPFNGLDKGEPVNEADAAALEHDKAYDQQLKAGDNPYLRYNHADAEFQERLQEDTSFGGNLGRAVFQAKKRVLEPFGLVEEGAKTAPGKKRPVEQSPQEPDSSSGIGKTGQQPAKKRLNFGQTGDSESVPDPQPLGEPPATPAAVGPTTMASGGGAPMADNNEGADGVGNASGNWHCDSQWLGDRVITTSTRTWALPTYNNHLYKQISSASTGASNDNHYFGYSTPWGYFDFNRFHCHFSPRDWQRLINNNWGFRPKRLNFKLFNIQVKEVTDNNGVKTIANNLTSTVQVFSDSEYQLPYVLGSAHQGCLPPFPADVFMIPQYGYLTLNNGSQAVGRSSFYCLEYFPSQMLRTGNNFQFTYTFEDVPFHSSYAHSQSLDRLMNPLIDQYLYYLSRTQTTGGTANTQTLGFSQGGPNTMANQAKNWLPGPCYRQQRVSTTTGQNNNSNFAWTAGTKYHLNGRNSLANPGIAMATHKDDKERFFPSNGILIFGKQNAARDNADYSDVMLTSEEEIKTTNPVATEEYGIVADNLQQQNTAPQIGTVNSQGALPGMVWQNRDVYLQGPIWAKIPHTDGNFHPSPLMGGFGLKHPPPQILIKNTPVPADPPTTFNQSKLNSFITQYSTGQVSVEIEWELQKENSKRWNPEIQYTSNYYKSTSVDFAVNTEGVYSEPHPIGTRYLTRPL

SEQ ID NO: 1045 - protein, 736 aa, synthetic construct
  REGION 1..736: note = source = /note="Description of Artificial Sequence: Synthetic polypeptide"
MAADGYLPDWLEDTLSEGIRQWWKLKPGPPPPKPAERHKDDSRGLVLPGYKYLGPFNGLDKGEPVNEADAAALEHDKAYDRQLDSGDNPYLKYNHADAEFQERLKEDTSFGGNLGRAVFQAKKRVLEPFGLVEEGAKTAPGKKRPVEQSPQEPDSSSGIGKTGQQPAKKRLNFGQTGDSESVPDPQPLGEPPATPAAVGPTTMASGGGAPMADNNEGADGVGNASGNWHCDSTWLGDRVITTSTRTWALPTYNNHLYKQISSASTGASNDNHYFGYSTPWGYFDFNRFHCHFSPRDWQRLINNNWGFRPKRLNFKLFNIQVKEVTDNNGVKTIANNLTSTVQVFTDSDYQLPYVLGSAHEGCLPPFPADVFMIPQYGYLTLNNGSQAVGRSSFYCLEYFPSQMLRTGNNFQFTYTFEDVPFHSSYAHSQSLDRLMNPLIDQYLYYLSRTQTTGGTANTQTLGFSQGGPNTMANQAKNWLPGPCYRQQRVSTTTGQNNNSNFAWTAGTKYHLNGRNSLANPGIAMATHKDDKERFFPSNGILIFGKQNAARDNADYSDVMLTSEEEIKTTNPVATEEYGIVADNLQQQNTAPQIGTVNSQGALPGMVWQNRDVYLQGPIWAKIPHTDGNFHPSPLMGGFGLKHPPPQILIKNTPVPADPPTTFNQSKLNSFITQYSTGQVSVEIEWELQKENSKRWNPEIQYTSNYYKSTSVDFAVNTEGVYSEPHPIGTRYLTRNL

SEQ ID NO: 1046 - protein, 738 aa, synthetic construct
  REGION 1..738: note = source = /note="Description of Artificial Sequence: Synthetic polypeptide"
MAADGYLPDWLEDNLSEGIREWWDLKPGAPKPKANQQKQDDGRGLVLPGYKYLGPFNGLDKGEPVNAADAAALEHDKAYDQQLQAGDNPYLRYNHADAEFQERLQEDTSFGGNLGRAVFQAKKRVLEPLGLVEEGAKTAPGKKRPVEPSPQRSPDSSTGIGKKGQQPARKRLNFGQTGDSESVPDPQPLGEPPAAPSGVGPNTMAAGGGAPMADNNEGADGVGSSSGNWHCDSQWLGDRVITTSTRTWALPTYNNHLYKQISNSTSGGSSNDNAYFGYSTPWGYFDFNRFHCHFSPRDWQRLINNNWGFRPKRLSFKLFNIQVKEVTQNEGTKTIANNLTSTIQVFTDSEYQLPYVLGSAHQGCLPPFPADVFMIPQYGYLTLNNGSQAVGRSSFYCLEYFPSQMLRTGNNFTFSYTFEDVPFHSSYAHSQSLDRLMNPLIDQYLYYLSRTQTTGGTANTQTLGFSQGGPNTMANQAKNWLPGPCYRQQRVSTTTGQNNNSNFAWTAGTKYHLNGRNSLANPGIAMATHKDDKERFFPSNGILIFGKQNAARDNADYSDVMLTSEEEIKTTNPVATEEYGIVADNLQQQNTAPQIGTVNSQGALPGMVWQNRDVYLQGPIWAKIPHTDGNFHPSPLMGGFGLKHPPPQILIKNTPVPADPPTTFNQSKLNSFITQYSTGQVSVEIEWELQKENSKRWNPEIQYTSNYYKSTSVDFAVNTEGVYSEPHPIGTRYLTRPL

SEQ ID NO: 1047 - protein, 737 aa, synthetic construct
  REGION 1..737: note = source = /note="Description of Artificial Sequence: Synthetic polypeptide"
MAADGYLPDWLEDNLSEGIREWWDLKPGAPKPKANQQKQDDGRGLVLPGYKYLGPFNGLDKGEPVNAADAAALEHDKAYDQQLKAGDNPYLRYNHADAEFQERLQEDTSFGGNLGRAVFQAKKRVLEPFGLVEEGAKTAPGKKRPVEQSPQEPDSSSGIGKTGQQPAKKRLNFGQTGDSESVPDPQPLGEPPATPAAVGPTTMASGGGAPMQDNNEGADGVGSSSGNWHCDSTWLGDRVITTSTRTWALPTYNNHLYKQISNGTSGGATNDNTYFGYSTPWGYFDFNRFHCHFSPRDWQRLINNNWGFRPKRLNFKLFNIQVKEVTQNEGTKTIANNLTSTIQVFTDSEYQLPYVLGSAHQGCLPPFPADVFMIPQYGYLTLNNGSQAVGRSSFYCLEYFPSQMLRTGNNFTFSYTFEDVPFHSSYAHSQSLDRLMNPLIDQYLYYLSRTQTTGGTANTQTLGFSQGGPNTMANQAKNWLPGPCYRQQRVSTTTGQNNNSNFAWTAGTKYHLNGRNSLANPGIAMATHKDDKERFFPSNGILIFGKQNAARDNADYSDVMLTSEEEIKTTNPVATEEYGIVADNLQQQNTAPQIGTVNSQGALPGMVWQNRDVYLQGPIWAKIPHTDGNFHPSPLMGGFGLKHPPPQILIKNTPVPADPPTTFNQSKLNSFITQYSTGQVSVEIEWELQKENSKRWNPEIQYTSNYYKSTSVDFAVNTEGVYSEPHPIGTRYLTRPL

SEQ ID NO: 1048 - protein, 736 aa, synthetic construct
  REGION 1..736: note = source = /note="Description of Artificial Sequence: Synthetic polypeptide"
MAADGYLPDWLEDNLSEGIREWWALKPGAPKPKANQQKQDDGRGLVLPGYKYLGPFNGLDKGEPVNAADAAALEHDKAYDQQLKAGDNPYLRYNHADAEFQERLQEDTSFGGNLGRAVFQAKKRVLEPLGLVEEGAKTAPGKKRPVEQSPQEPDSSSGIGKTGQQPAKKRLNFGQTGDSESVPDPQPLGEPPATPAAVGPTTMASGGGAPMADNNEGADGVGSSSGNWHCDSTWLGDRVITTSTRTWALPTYNNHLYKQISSASTGASNDNHYFGYSTPWGYFDFNRFHCHFSPRDWQRLINNNWGFRPKRLNFKLFNIQVKEVTDNNGVKTIANNLTSTVQVFTDSDYQLPYVLGSAHEGCLPPFPADVFMIPQYGYLTLNNGSQAVGRSSFYCLEYFPSQMLRTGNNFTFSYTFEDVPFHSSYAHSQSLDRLMNPLIDQYLYYLSRTQTTGGTANTQTLGFSQGGPNTMANQAKNWLPGPCYRQQRVSTTTGQNNNSNFAWTAGTKYHLNGRNSLANPGIAMATHKDDKERFFPSNGILIFGKQNAARDNADYSDVMLTSEEEIKTTNPVATEEYGIVADNLQQQNTAPQIGTVNSQGALPGMVWQNRDVYLQGPIWAKIPHTDGNFHPSPLMGGFGLKHPPPQILIKNTPVPADPPTTFNQSKLNSFITQYSTGQVSVEIEWELQKENSKRWNPEIQYTSNYYKSTSVDFAVNTEGVYSEPHPIGTRYLTRPL

SEQ ID NO: 1049 - protein, 737 aa, synthetic construct
  REGION 1..737: note = source = /note="Description of Artificial Sequence: Synthetic polypeptide"
MAADGYLPDWLEDNLSEGIREWWDLKPGAPKPKANQQKQDDGRGLVLPGYKYLGPFNGLDKGEPVNAADAAALEHDKAYDQQLKAGDNPYLRYNHADAEFQERLQEDTSFGGNLGRAVFQAKKRVLEPLGLVEEGAKTAPGKKRPVEPSPQRSPDSSTGIGKKGQQPARKRLNFGQTGDSESVPDPQPLGEPPATPAAVGPTTMASGGGAPMADNNEGADGVGNASGNWHCDSTWLGDRVITTSTRTWALPTYNNHLYKQISSASTGASNDNHYFGYSTPWGYFDFNRFHCHFSPRDWQRLINNNLGSRPKRLNFKLFIIQVKEVTTNDGVTTIANNLTSTVQVFSDSEYQLPYVLGSAHQGCLPPFPADVFMIPQYGYLTLNNGSQAVGRSSFYCLEYFPSQMLRTGNNFTFSYTFEDVPFHSSYAHSQSLDRLMNPLIDQYLYYLNRTQNQSGSAQNKDLLFSRGSPAGMSVQPKNWLPGPCYRQQRVSKTKTDNNNSNFTWTGASKYNLNGRESIINPGTAMASHKDDKDKFFPMSGVMIFGKESAGASNTALDNVMITDEEEIKATNPVATERFGTVAVNLQSSSTDPATGDVHVMGALPGMVWQDRDVYLQGPIWAKIPHTDGHFHPSPLMGGFGLKHPPPQILIKNTPVPANPPAEFSATKFASFITQYSTGQVSVEIEWELQKENSKRWNPEVQYTSNYAKSANVDFTVDNNGLYTEPRPIGTRYLTRPL

SEQ ID NO: 1050 - protein, 736 aa, synthetic construct
  REGION 1..736: note = source = /note="Description of Artificial Sequence: Synthetic polypeptide"
MAADGYLPDWLEDNLSEGIREWWALKPGAPKPKANQQKQDDGRGLVLPGYKYLGPFNGLDKGEPVNAADAAALEHDKAYDQQLKAGDNPYLRYNHADAEFQERLQEDTSFGGNLGRAVFQAKKRLLEPLGLVEEAAKTAPGKKRPVEQSPQEPDSSSGIGKTGQQPAKKRLNFGQTGDSESVPDPQPIGEPPATPAAVGPTTMASGGGAPMADNNEGADGVGNSSGNWHCDSTWLGDRVITTSTRTWALPTYNNHLYKQISSASTGASNDNHYFGYSTPWGYFDFNRFHCHFSPRDWQRLINNNWGFRPKRLNFKLFNIQVKEVTQNEGTKTIANNLTSTIQVFTDSEYQLPYVLGSAHQGCLPPFPADVFMIPQYGYLTLNNGSQAVGRSSFYCLEYFPSQMLRTGNNFTFSYTFEDVPFHSSYAHSQSLDRLMNPLIDQYLYYLSRTQTTGGTANTQTLGFSQGGPNTMANQAKNWLPGPCYRQQRVSTTTGQNNNSNFAWTAGTKYHLNGRNSLANPGIAMATHKDDKERFFPSNGILIFGKQNAARDNADYSDVMLTSEEEIKTTNPVATEEYGIVADNLQQQNTAPQIGTVNSQGALPGMVWQNRDVYLQGPIWAKIPHTDGNFHPSPLMGGFGLKHPPPQILIKNTPVPADPPTTFNQSKLNSFITQYSTGQVSVEIEWELQKENSKRWNPEIQYTSNYYKSTSVDFAVNTEGVYSDPHPIGTRYLTRPL

SEQ ID NO: 1051 - protein, 736 aa, synthetic construct
  REGION 1..736: note = source = /note="Description of Artificial Sequence: Synthetic polypeptide"
MAADGYLPDWLEDNLSEGIREWWALKPGAPKPKANQQEQDDGRGLVLPGYKYLGPFNGLDKGEPVNAADAAALEHDKAYDQQLKAGDNPYLRYNHADAEFQERLQEDTSFGGNLGRAVFQAKKRVLEPFGLVEEGAKTAPGKKRPVEQSPQEPDSSSGIGKTGQQPAKKRLNFGQTGDSESVPDPQPLGEPPAAPSGVGPNTMAAGGGAPMADNNEGADGVGSSSGNWHCDSTWLGDRVITTSTRTWALPTYNNHLYKQISSASTGASNDNHYFGYSTPWGYFDFNRFHCHFSPRDWQRLINNNWGFRPKRLNFKLFNIQVKEVTQNEGTKTIANNLTSTIQVFTDSEYQLPYVLGSAHQGCLPPFPADVFMIPQYGYLTLNNGSQAVGRSSFFCLEYFPSQMLRTGNNFTFSYTFEDVPFHSSYAHSQSLDRLMNPLIDQYLYYLSRTQTTGGTANTQTLGFSQGGPNTMANQAKNWLPGPCYRQQRVSTTTGQNNNSNFAWTAGTKYHLNGRNSLANPGIAMATHKDDKERFFPSNGILIFGKQNAARDNADYSDVMLTSEEEIKTTNPVATEEYGIVADNLQQQNTAPQIGTVNSQGALPGMVWQNRDVYLQGPIWAKIPHTDGNFHPSPLMGGFGLKHPPPQILIKNTPVPADPPTTFNQSKLNSFITQYSTGQVSVEIEWELQKENSKRWNPEIQYTSNYYKSTSVDFAVNTEGVYSEPHPIGTRYLTRPL

SEQ ID NO: 1052 - protein, 736 aa, synthetic construct
  REGION 1..736: note = source = /note="Description of Artificial Sequence: Synthetic polypeptide"
MAADGYLPDWLEDNLSEGIREWWDLKPGAPKPKANQQKQDDGRGLVLPGYKYLGPFNGLDKGEPVNAADAAALEHDKAYDQQLKAGDNPYLRYNHADAEFQERLQEDTSFGGNLGRAVFQAKKRVLEPLGLVEEGAKTAPGKKRPVEQSPQEPDSSSGIGKTGQQPAKKRLNFGQTGDSESVPDPQPLGEPPATPAAVGPTTMASGGGAPMADNNEGADGVGNASGNWHCDSTWLGDRVITTSTRTWALPTYNNHLYKQISSASTGASNDNHYFGYSTPWGYFDFNRFHCHFSPRDWQRLINNNWGFRPKRLNFKLFNIQVKEVTTNDGVTTIANNLTSTVQVFSDSEYQLPYVLGSAHQGCLPPFPADVFMIPQYGYLTLNNGSQAVGRSSFYCLEYFPSQMLRTGNNFTFSYTFEDVPFHSSYAHSQSLDRLMNPLIDQYLYYLNRTQNQSGSAQNKDLLFSRGSPAGMSVQPKNWLPGPCYRQQRVSKTKTDNNNSNFTWTGASKYNLNGRESIINPGTAMASHKDDKDKFFPMSGVMIFGKESAGASNTALDNVMITDEEEIKATNPVATERFGTVAVNLQNSSTDPATGDVHVMGALPGMVWQDRDVYLQGPIWAKIPHTDGHFHPSPLMGGFGLKHPPPQILIKNTPVPANPPAEFSATKFASFITQYSTGQVSVEIEWELQKENSKRWNPEVQYTSNYAKSANVDFTVDNNGLYTVPRPIGTRYLTRPL

SEQ ID NO: 1053 - protein, 736 aa, synthetic construct
  REGION 1..736: note = source = /note="Description of Artificial Sequence: Synthetic polypeptide"
MAADGYLPDWLEDNLSEGIREWWALKPGAPKPKANQQKQDDGRGLVLPGYKYLGPFNGLDKGEPVNAADAAALEHDKAYDQQLKAGDNPYLRYNHADAEFQERLQEDTSFGGNLGRAVFQAKKRLLEPLGLVEEGAKTAPGKKRPVEQSPQEPDSSSGIGKTGEQPAKKRLNFGQTGDSESVPDPQPLGEPPATPAAVGPTTMASGGGAPMADNNEGADGVGSASGNWHCDSTWLGDRVITTSTRTWALPTYNNHLYKQISSASTGASNDNHYFGYSTPWGYFDFNRFHCHFSPRDWQRLINNNWGFRPKRLNFKLFNIQVKEVTDNNGVKTIANNLTSTIQVFTDSEYQLPYVLGSAHQGCLPPFPADVFMIPQYGYLTLNNGSQAVGRSSFYCLEYFPSQMLRTGNNFPFSYTFEDVPFHSSYAHSQSLDRLMNPLIDQYLYYLSRTQTTGGTANTQTLGFSQGGPNTMANQAKNWLPGPCYRQQRVSTTTGQNNNSNFAWTAGTKYHLNGRNSLANPGIAMATHKDDKERFFPSNGILIFGKQNAARDNADYSDVMLTSEEEIKTTNPVATEEYGIVADNLQQQNTAPQIGTVNSQGALPGMVWQNRDVYLQGPIWAKIPHTDGNFHPSPLMGGFGLKHPPPQILIKNTPVPADPPTTFNQSKLNSFITQYSTGQVSVEIEWELQKENSKRWNPEIQYTSNYYKSTSVDFAVNTEGVYSEPHPIGTRYLTRPL

SEQ ID NO: 1054 - protein, 736 aa, synthetic construct
  REGION 1..736: note = source = /note="Description of Artificial Sequence: Synthetic polypeptide"
MAADGYLPDWLEDNLSEGIREWWALKPGAPKPKANQQKQDDGRGLVLPGYKYLGPFNGLDKGEPVNAADAAALEHDKAYDQQLKAGDNPYLRYNHADAEFQERLQEDTSFGGNLGRAVFQAKKRVLEPLGLVEEGAKTAPGKKRPVEQSPQEPDSSSGIGKTGQQPAKKRLNFGQTGDSESVPDPQPLGEPPATPAAVGPTTMASGGGAPMADNNEGADGVGSSSGNWHCDSQWLGDRVITTSTRTWALPTYNNHLYKQISSASTGASNDNHYFGYSTPWGYFDFNRFHCHFSPRDWQRLINNNWGFRPKRLNFKLFNIQVKEVTDNNGVKTIANNLTSTVQVFTDSEYQLPYVLGSAHQDCLPPFPADVFMIPQYGYLTLNNGSQAVGRSSFYCLEYFPSQMLRTGNNFTFSYTFEDVPFHSSYAHSQSLDRLMNPLIDQYLYYLSRTQTTGGTANTQTLGFSQGGPNTMANQAKNWLPGPCYRQQRVSTTTGQNNNSNFAWTAGTKYHLNGRNSLANPGIAMATHKDDKERFFPSNGILIFGKQNAARDNADYSDVMLTSEEEIKTTNPVATEEYGIVADNLQQQNTAPQIGTVNSQGALPGMVWQNRDVYLQGPIWAKIPHTDGNFHPSPLMGGFGLKHPPPQILIKNTPVPADPPTTFNQSKLNSFITQYSTGQVSVEIEWELQKENSKRWNPEIQYTSNYYKSTSVDFAVNTEGVYSEPHPIGTRYLTRPL

SEQ ID NO: 1055 - protein, 735 aa, synthetic construct
  REGION 1..735: note = source = /note="Description of Artificial Sequence: Synthetic polypeptide"
MAADGYLPDWLEDNLSEGIREWWDLKPGAPKPKANQQKQDDGRGLVLPGYKYLGPFNGLDKGEPVNAADAAALEHDKAYDQQLKAGDNPYLRYNHADAEFQERLQEDTSFGGNLGRAVFQAKKRVLEPLGLVEEGAKTAPGKKRPVEQSPQEPDSSSGIGKTGQQPAKKRLNFGQTGDSESVPDPQPLGEPPATPAAVGPTTMASGGGAPMADNNEGADGVGNASGNWHCDSTWLGDVITTSTRTWALPTYNNHLYKQISSASTGASNDNHYFGYSTPWGYFDFNRFHCHFSPRDWQRLINNNWGFRPKRLNFKLFNIQVKEVTQNEGTKTIANNLTSTIQVFTDSEYQLPYVLGSAHQGCLPPFPADVFMIPQYGYLTLNNGSQAVGRSSFYCLEYFPSQMLRTGNNFQFTYTFEDVPFHSSYAHSQSLDRLMNPLIDQYLYYLSRTQTTGGTANTQTLGFSQGGPNTMANQAKNWLPGPCYRQQRVSTTTGQNNNSNFAWTAGTKYHLNGRNSLANPGIAMATHKDDKERFFPSNGILIFGKQNAARDNADYSDVILTSEEEIKTTNPVATEEYGIVADNLQQQNTAPQIGTVNSQGALPGMVWQNRDVYLQGPIWAKIPHTDGNFHPSPLMGGFGLKHPPPQILIKNTPVPADPPTTFNQSKLNSFITQYSTGQVSVEIEWELQKENSKRWNPEIQYTSNYYKSTSVDFAVNTEGVYSEPHPIGTRYLTRPL

SEQ ID NO: 1056 - protein, 736 aa, synthetic construct
  REGION 1..736: note = source = /note="Description of Artificial Sequence: Synthetic polypeptide"
MAADGYLPDWLEDTLSEGIRQWWKLKPGPPPPKPAERHKDDSRGLVLPGYKYLGPFNGLDKGEPVNEADAAALEHDKAYDRQLDSGDNPYLKYNHADAEFQERLKEDTSFGGNLGRAVFQAKKRVLEPFGLVEEGAKTAPGKKRPVEQSPQEPDSSSGIGKTGQQPAKKRLNFGQTGDSESVPDPQPLGEPPATPAAVGPTTMASGGGAPMADNNEGADGVGNASGNWHCDSTWLGDRVITTSTRTWALPTYNNHLYKQISSTSTGASNDNHYFGYSTPWGYFDFNRFHCHFSPRDWQRLINNNWGFRPKRLNFKLFNIQVKEVTDNNGVKTIANNLTSTVQVFTDSEYQLPYVLGSAHQGCLPPFPADVFMIPQYGYLTLNNGSQAVGRSSFYCLEYFPSQMLRTGNNFTFSYTFEDVPFHSSYAHSQSLDRLMNPLIDQYLYYLSRTQTTGGTANTQTLGFSQGGPNTMANQAKNWLPGPCYRQQRVSTTTGQNNNSNFAWTAGTKYHLNGRNSLANPGIAMATHKDDKERFFPSNGILIFGKQNAARDNADYSDVMLTSEEEIKTTNPVATEEYGIVADNLQQQNTAPQIGTVNSQGALPGMVWQNRDVYLQGPIWAKIPHTDGNFHPSPLMGGFGLKHPPPQILIKNTPVPADPPTTFNQSKLNSFITQYSTGQVSVEIEWELQKENSKRWNPEIQYTSNYYKSTSVDFAVNTEGVYSEPHPIGTRYLTRPL

SEQ ID NO: 1057 - protein, 735 aa, synthetic construct
  REGION 1..735: note = source = /note="Description of Artificial Sequence: Synthetic polypeptide"
MAADGYLPDWLEDNLSEGIREWWDLKPGAPKPKANQQKQDDGRGLVLPGYKYLGPFNGLDKGEPVNAADAAALEHDKAYDRQLDSGDNPYLRYNHADAEFQERLKEDTSFGGNLGRAVFQAKKRVLEPFGLVEEGAKTAPGKKRPVEQSPQEPDSSSGIGKTGQQPAKKRLNFGQTGDSESVPDPQPLGEPPATPAAVGPTTMASGGGAPMADNNEGADGVGNASGNWHCDSTWLGDRVITTSTRTWALPTYNNHLYKQISSASTGASNDNHYFGYSTPWGYFDFNRFHCHFSPRDWQRLINNNWGFRPKRLNFKLFNIQVKEVTQNEGTKTIANNLTSTIQVFTDSEYQLPYVLGSAHQGCLPPFPADVFMIPQYGYLTLNNGSQAVGRSSFYCLEYFPSQMLRTGNNFQFTYTFEDVPFHSSYAHSQSLDRLMNPLIDQYLYYLSRTQTTGGTANTQTLGFSQGGPNTMANQAKNWLPGPCYRQQRVSTTTGQNNNSNFAWTAGTKYHLNGRNSLANPGIAMATHKDDRSVFFQYRDPDFGKQNAARDNADYSDVMLTSEEEIKTTNPVATEEYGIVADNLQQQNTAPQIGTVNSQGALPGMVWQNRDVYLQGPIWAKIPHTDGNFHPSPLMGGFGLKHPPPQILIKNTPVPADPPTTFNQSKLNSFITQYSTGQVSVEIEWELQKENSKRWNPEIQYTSNYYKSTSVDFAVNTEGVYSEPHPIGTRYLTRPL

SEQ ID NO: 1058 - protein, 736 aa, synthetic construct
  REGION 1..736: note = source = /note="Description of Artificial Sequence: Synthetic polypeptide"
MAADGYLPDWLEDNLSEGIREWWALKPGAPKPKANQQKQDDGRGLVLPGYKYLGPFNGLDKGEPVNAADAAALEHDKAYDQQLKAGDNPYLKYNHADAEFQERLQGDTSFGGNLGRAVFQAKKRVLEPLGLVEEAAKTAPGKKRPVEQSPQEPDSSAGIGKSGAQPAKKRLNFGQTGDTESVPDPQPLGEPPAAPSGVGPNTMAAGGGAPMADNNEGADGVGSSSGNWHCDSQWLGDRVITTSTRTWALPTYNNHLYKQISSASTGASNDNHYFGYSTPWGYFDFNRFHCHFSPRDWQRLINNNWGFRPKRLNFKLFNIQVKEVTDNNGVKTIANNLTSTVQVFTDSDYQLPYVLGSAHEGCLPPFPADVFMIPQYGYLTLNNGSQAVGRSSFYCLEYFPSQMLRTGNNFQFTYTFEDVPFHSSYAHSQSLDRLMNPLIDQYLYYLSRTQTTGGTANTQTLGFSQGGPNTMANQAKNWLPGPCYRQQRVSTTTGQNNNSNFAWTAGTKYHLNGRNSLANPGIAMATHKDDKERFFPSNGILIFGKQNAARDNADYSDVMLTSEEEIKTTNPVATEEYGIVADNLQQQNTAPQIGTVNSQGALPGMVWQNRDVYLQGPIWAKIPHTDGNFHPSPLMGGFGLKHPPPQILIKNTPVPADPPTTFNQSKLNSFITQYSTGQVSVEIEWELQKENSKRWNPEIQYTSNYYKSTSVDFAVNTEGVYSEPHPIGTRYLTRPL

SEQ ID NO: 1059 - protein, 736 aa, synthetic construct
  REGION 1..736: note = source = /note="Description of Artificial Sequence: Synthetic polypeptide"
MAADGYLPDWLEDTLSEGIRQWWKLKPGPPPPKPAERHKDDSRGLVLPGYKYLGPFNGLDKGEPVNEADAAALEHDKAYDRQLDSGDNPYLKYNHADAEFQERLKEDTSFGGNLGRAVFQAKKRVLEPFGLVEEAAKTAPGKKRPVEQSPQEPDSSSGIGKTGQQPAKKRLNFGQTGDSESVPDPQPLGEPPATPAAVGPTTMASGGGAPMADNNEGADGVGNASGNWHCDSTWLGDRVITTSTRTWALPTYNNHLYKQISSASTGASNDNHYFGYSTPWGYFDFNRFHCHFSPRDWQRLINNNWGFRPKRLNFKLFNIQVKEVTDNNGVKTIANNLTSTVQVFTDSDYQLPYVLGSAHEGCLPPFPADVFMIPQYGYLTLNNGSQAVGRSSFYCLEYFPSQMLRTGNNFTFSYTFEDVPFHSSYAHSQSLDRLMNPLIDQYLYYLSRTQTTGGTANTQTLGFSQGGPNTMANQAKNWLPGPCYRQQRVSTTTGQNNNSNFAWTAGTKYHLNGRNSLANPGIAMATHKDDKERFFPSNGILIFGKQNAARDNADYSDVMLTSEEEIKTTNPVATEEYGIVADNLQQQNTAPQIGTVNSQGALPGMVWQNRDVYLQGPIWAKIPHTDGNFHPSPLMGGFGLKHPPPQILIKNTPVPADPPTTFNQSKLNSFITQYSTGQVSVEIEWELQKENSKRWNPEIQYTSNYYKSTSVDFAVNTEGVYSEPHPIGTRYLTRPL

SEQ ID NO: 1060 - protein, 736 aa, synthetic construct
  REGION 1..736: note = source = /note="Description of Artificial Sequence: Synthetic polypeptide"
MAADGYLPDWLEDNLSEGIREWWALKPGAPKPKANQQKQDDGRGLVLPGYKYLGPFNGLDKGEPVNAADAAALEHDKAYDQQLKAGDNPYLRYNHADAEFQERLQEDTSFGGNLGRAVFQAKKRVLEPLGLVEEGAKTAPGKKRPVEQSPQEPDSSSGIGKTGQQPAKKRLNFGQTGDSESVPDPQPLGEPPATPAAVGPTTMASGGGAPMADNNEGADGVGSSSGNWHCDSTWLGDRVITTSTRTWALPTYNNHLYKQISSASTGASNDNHYFGYSTPWGYFDFNRFHCHFSPRDWQRLINNNWGFRPKRLNFKLFNIQVKEVTDNNGVKTIANNLTSTVQVFTDSEYQLPYVLGSAHQGCLPPFPADVFMIPQYGYLTLNNGSQAVGRSSFYCLEYFPSQMLRTGNNFTFSYTFEDVPFHSSYAHSQSLDRLMNPLIDQYLYYLSRTQTTGGTANTQTLGFSQGGPNTMANQAKNWLPGPCYRQQRVSTTTGQNNNSNFAWTAGTKYHLNGRNSLANPGIAMATHKDDKERFFPSNGILIFGKQNAARDNADYSDVMLTSEEEIKTTNPVATEEYGIVADNLQQQNTAPQIGTVNSQGALPGMVWQNRDVYLQGPIWAKIPHTDGNFHPSPLMGGFGLKHPPPQILIKNTPVPADPPTTFNQSKLNSFITQYSTGQVSVEIEWELQKENSKRWNPEIQYTSNYYKSTSVDFAVNTEGVYSEPHPIGTRYLTRPL

SEQ ID NO: 1061 - protein, 737 aa, synthetic construct
  REGION 1..737: note = source = /note="Description of Artificial Sequence: Synthetic polypeptide"
MAADGYLPDWLEDNLSEGIREWWALKPGAPKPKANQQKQDDGRGLVLPGYKYLGPFNGLDKGEPVNAADAAALEHDKAYDQQLKAGDNPYLRYNHADAEFQERLQEDTSFGGNLGRAVFQAKKRVLEPLGLVEEGAKTAPGKKRPVEQSPQEPDSSSGIGKTGQQPAKKRLNFGQTGDTESVPDPQPIGEPPAAPSGVGSLTMASGGGAPVADNNEGADGVGSSSGNWHCDSQWLGDRVITTSTRTWALPTYNNHLYKQISNSTSGGSSNDNAYFGYSTPWGYFDFNRFHCHFSPRDWQRLINNNWGFRPKRLNFKLFNIQVKEVTQNEGTKTIANNLTSTIQVFTDSEYQLPYVLGSAHQGCLPPFPADVFMIPQYGYLTLNNGSQAVGRSSFYCLEYFPSQMLRTGNNFQFTYTFEDVPFHSSYAHSQSLDRLMNPLIDQYLYYLSRTQTTGGTANTQTLGFSQGGPNTMANQAKNWLPGPCYRQQRVSTTTGQNNNSNFAWTAGTKYHLNGRNSLANPGIAMATHKDDKERFFPSNGILIFGKQNAARDNADYSDVMLTSEEEIKTTNPVATEEYGIVADNLQQQNTAPQIGTVNSQGALPGMVWQNRDVYLQGPIWAKIPHTDGNFHPSPLMGGFGLKHPPPQILIKNTPVPADPPTTFNQSKLNSFITQYSTGQVSVEIEWELQKENSKRWNPEIQYTSNYYKSTSVDFAVNTEGVYSEPHPIGTRYLTRPL

SEQ ID NO: 1062 - protein, 736 aa, synthetic construct
  REGION 1..736: note = source = /note="Description of Artificial Sequence: Synthetic polypeptide"
MAADGYLPDWLEDNLSEGIREWWALKPGAPKPKANQQKQDDGRGLVLPGYKYLGPFNGLDKGEPVNAADAAALEHDKAYDQQLKAGDNPYLKYNHADAEFQERLQGDTSFGGNLGRAVFQAKKRVLEPLGLVEEAAKTAPGKKRPVEQSPQEPDSSAGIGKSGAQPAKKRLNFGQTGDTESVPDPQPLGEPPAAPSGVGPNTMAAGGGAPMADNNEGADGVGSSSGNWHCDSQWLGDRVITTSTRTWALPTYNNHLYKQISSASTGASNDNHYFGYSTPWGYFDFNRFHCHFSPRDWQRLINNNWGFRPKRLNFKLFNIQVKEVTDNNGVKTIANNLTSTVQVFTDSEYQLPYVLGSAHQGCLPPFPADVFMIPQYGYLTLNNGSQAVGRSSFYCLEYFPSQMLRTGNNFTFSYTFEDVPFHSSYAHSQSLDRLMNPLIDQYLYYLSRTQTTGGTANTQTLGFSQGGPNTMANQAKNWLPGPCYRQQRVSTTTGQNNNSNFAWTAGTKYHLNGRNSLANPGIAMATHKDDKERFFPSNGILIFDKQNAARDNADYSDVMLTSEEEIKTTNPVATEEYGIVADNLQQQNTAPQIGTVNSQGALPGMVWQNRDVYLQGPIWAKIPHTDGNFHPSPLMGGFGLKHPPPQILIKNTPVPADPPTTFNQSKLNSFITQYSTGQVSVEIEWELQKENSKRWNPEIQYTSNYYKSTSVDFAVNTEGVYSEPHPIGTRYLTRPL

SEQ ID NO: 1063 - protein, 736 aa, synthetic construct
  REGION 1..736: note = source = /note="Description of Artificial Sequence: Synthetic polypeptide"
MAADGYLPDWLEDTLSEGIRQWWKLKPGPPPPKPAERHKDDSRGLVLPGYKYLGPFNGLDKGEPVNEADAAALEHDKAYDRQLDSGDNPYLKYNHADAEFQERLKEDTSFGGNLGRAVFQAKKRVLEPLGLVEEPVKTAPGKKRPVEHSPVEPDSSSGTGKAGQQPARKRLNFGQTGDSESVPDPQPLGEPPATPAAVGPNTMATGSGAPMADNNEGADGVGNSSGNWHCDSTWMGDRVITTSTRTWALPTYNNHLYKQISSASTGASNDNHYFGYSTPWGYFDFNRFHCHFSPRDWQRLINNNWGFRPKRLNFKLFNIQVKEVTDNNGVKTIANNLTSTIQVFTDSEYQLPYVLGSAHQGCLPPFPADVFMIPQYGYLTLNNGSQAVGRSSFYCLEYFPSQMLRTGNNFTFSYTFEDVPFHSSYAHSQSLDRLMNPLIDQYLYYLSRTQTTGGKANTQTLGFSQGGPNTMANQAKNWLPGPCYRQQRVSTTTGQNNNSNFAWTAGTKYHLNGRNSLANPGIAMATHKDDKERFFPSNGILIFGKQNAARDNADYSDVMLTSEEEIKTTNPVATEEYGIVADNLQQQNTAPQIGTVNSQGALPGMVWQNRDVYLQGPIWAKIPHTDGNFHPSPLMGGFGLKHPPPQILIKNTPVPADPPTTFNQSKLNSFITQYSTGQVSVEIEWELQKENSKRWNPEIQYTSNYYKSTSVDFAVNTEGVYSEPHPIGTRYLTRPL

SEQ ID NO: 1064 - protein, 736 aa, synthetic construct
  REGION 1..736: note = source = /note="Description of Artificial Sequence: Synthetic polypeptide"
MAADGYLPDWLEDNLSEGIREWWALKPGAPKPKANQQKQDDGRGLVLPGYKYLGPFNGLDKGEPVNAADAAALEHDKAYDQQLKAGDNPYLRYNHADAEFQERLQEDTSFGGNLGRAVFQAKKRVLEPFGLVEEGAKTAPGKKRPVEQSPQEPDSSSGIGKTGQQPAKKRLNFGQTGDSESVPDPQPLGEPPATPAAVGPTTMASGGGAPMADNNEGADGVGNASGNWHCDSTWLGDRVITTSTRTWALPTYNNHLYKQISSASTGASNDNHYFGYSTPWGYFDFNRFHCHFSPRDWQRLINNNWGFRPKRLNFKLFNIQVKEVTDNNGVKTIANNLTSTVQVFTDSEYQLPYVLGSAHQGCLPPFPADVFMIPQYGYLTLNNGSQAVGRSSFYCLEYFPSQMLRTGNNFTFSYTFEDVPFHSSYAHSQSLDRLMNPLIDQYLYYLSRTQTTGGTGNTQTLGFSQGGPNTMANQAKNWLPGPCYRQQRVSTTTGQNNNSNFAWTAGTKYHLNGRNSLANPGIAMATHKDDKERFFPSNGILIFGKQNAARDNADYSDVMLTSEEEIKTTNPVATEEYGIVADNLQQQNTAPQIGTVNSQGALPGMVWQNRDVYLQGPIWAKIPHTDGNFHPSPLMGGFGLKHPPPQILIKNTPVPADPPTTFNQSKLNSFITQYSTGQVSVEIEWELQKENSKRWNPEIQYTSNYYKSTSVDFAVNTEGVYSEPHPIGTRYLTRPL

SEQ ID NO: 1065 - protein, 736 aa, synthetic construct
  REGION 1..736: note = source = /note="Description of Artificial Sequence: Synthetic polypeptide"
MAADGYLPDWLEDNLSEGIREWWDLKPGAPKPKANQQKQDDGRGLVLPGYKYLGPFNGLDKGEPVNAADAAALEHDKAYDQQLKAGDNPYLRYNHADAEFQERLQEDTSFGGNLGRAVFQAKKRVLEPLGLVEEGAKTAPGKKRPVEQSPQEPDSSSGIGKTGQQPAKKRLNFGQTGDSESVPDPQPLGEPPATPAAVGPTTMASGGGAPMADNNEGADGVGSSSGNWHCDSTWLGDRVITTSTRTWALPTYNNHLYKQISSASTGASNDNHYFGYSTPWGYFDFNRFHCHFSPRDWQRLINNNWGFRPKRLNFKLFNIQVKEVTQNEGTKTIANNLTSTIQVFTDSEYQLPYVLGSAHQGCLPPFPADVFMIPQYGYLTLNNGSQAVGRSSFYCLEYFPSQMLRTGNNFTFSYTFEDVPFHSSYAHSQSLDRLMNPLIDQYLYYLSRTQTTGGTANTQTLGFSQGGPNTMANQAKNWLPGPCYRQQRVSTTTGQNNNSNFAWTAGTKYHLNGRNSLANPGIAMATHKDDKERFFPSNGILIFGKQNAARDNADYSDVMLTSEEEIKTTNPVATEEYGIVADNLQQQNTAPQIGTVNSQGALPGMVWQNRDVYLQGPIWAKIPHTDGNFHPSPLMGGFGLKHPPPQILIKNTPVPADPPTTFNQSKLNSFITQYSTGQVSVEIEWELQKENSKRWNPEIQYTSNYYKSTSVDFAVNTEGVYSEPHPIGTRYLTRPL

SEQ ID NO: 1066 - protein, 736 aa, synthetic construct
  REGION 1..736: note = source = /note="Description of Artificial Sequence: Synthetic polypeptide"
MAADGYLPDWLEDNLSEGIREWWALKPGAPKPKANQQKQDDGRGLVLPGYKYLGPFNGLDKGEPVNAADAAALEHDKAYDQQLKAGDNPYLRYNHADAEFQERLQEDTSFGGNLGRAVFQAKKRVLEPLGLVEEGAKTAPGKKRPVEQSPQEPDSSSGIGKTGQQPAKKRLNFGQTGDSESVPDPQPLGEPPATPAAVGPTTMAAGGGAPMADNNEGADGVGSSSGNWHCDSTWMGDRVITTSTRTWALPTYNNHLYKQISSASTGASNDNHYFGYSTPWGYFDFNRFHCHFSPRDWQRLINNNWGFRPKRLSFKLFNIQVKEVTQNEGTKTIANNLTSTIQVFTDSEYQLPYVLGSAHQGCLPPFPADVFMIPQYGYLTLNNGSQAVGRSSFYCLEYFPSQMLRTGNNFTFSYTFEDVPFHSSYAHSQSLDRLMNPLIDQYLYYLSRTQTTGGTANTQTLGFSQGGPNTMANQAKNWLQGPCYRQQRVSTTTGQNNNSNFAWTAGTKYHLNGRNSLANPGIAMATHKDDKERFFPSNGILIFGKQNAARDNADYSDVMLTSEEEIKTTNPVATEEYGIVADNLQQQNTAPQIGTVNSQGALPGMVWQNLDVYLQGPIWAKIPHTDGNFHPSPLMGGFGLKHPPPQILIKNTPVPADPPTTFNQSKLNSFITQYSTGQVSVEIEWELQKENSKRWNPEIQYTSNYYKSTSVDFAVNTEGVYSEPHPIGTRYLTRPL

SEQ ID NO: 1067 - protein, 737 aa, synthetic construct
  REGION 1..737: note = source = /note="Description of Artificial Sequence: Synthetic polypeptide"
MAADGYLPDWLEDNLSEGIREWWALKPGAPKPKANQQKQDDGRGLVLPGYKYLGPFNGLDKGEPVNAADAAALEHDKAYDQQLKAGDNPYLRYNHADAEFQERLQEDTSFGGNLGRAVFQAKKRVLEPLGLVEEGAKTAPGKKRPVEPSPQRSPDSSSGIGKTGQQPAKKRLNFGQTGDSESVPDPQPLGEPPATPAAVGPTTMASGGGAPMADNNEGADGVGNASGNWHCDSQWLGDRVITTSTRTWALPTYNNHLYKQISSASTGASNDNHYFGYSTPWGYFDFNRFHCHFSPRDWQRLINNNWGFRPKRLNFKLFNIQVKEVTDNNGVKTIANNLTSTVQVFTDSDYQLPYVLGSAHEGCLPPFPADVFMIPQYGYLTLNNGSQAVGRSSFYCLEYFPSQMLRTGNNFQFTYTFEDVPFHSSYAHSQSLDRLMNPLIDQYLYYLSRTQTTGGTANTQTLGFSQGGPNTMANQAKNWVPGPCYRQQRVSTATGQNNNSNFAWTAGTKYHLKGRNSLANPGIAMATHKDDKERFFPSNGILIFGKQNAARDNADYSDVMLTSEEEIKTTNPVATEEYGIVADNLQQQNTAPQIGTVNSQGALPGMVWQNRDVYLQGPIWAKIPHTDGNFHPSPLMGGFGLKHPPPQILIKNTPVPADPPTTFNQSKLNSFITQYSTGQVSVEIEWELQKENSKRWNPEIQYTSNYYKSTSVDFAVNTEGVYSEPHPIGTRYLTRPL

SEQ ID NO: 1068 - protein, 737 aa, synthetic construct
  VARIANT 226: note = Any naturally occurring amino acid
  VARIANT 233: note = Any naturally occurring amino acid
  VARIANT 239: note = Any naturally occurring amino acid
  VARIANT 250: note = Any naturally occurring amino acid
  VARIANT 253: note = Any naturally occurring amino acid
  VARIANT 255: note = Any naturally occurring amino acid
  REGION 1..737: note = source = /note="Description of Artificial Sequence: Synthetic polypeptide"
MAADGYLPDWLEDTLSEGIRQWWKLKPGPPPPKPAERHKDDSRGLVLPGYKYLGPFNGLDKGEPVNEADAAALEHDKAYDRQLDSGDNPYLKYNHADAEFQERLKEDTSFGGNLGRAVFQAKKRVLEPLGLVEEGAKTAPGKKRPVEQSPQEPDSSSGIGKTGQQPAKKRLNFGQTGDSESVPDPQPLGEPPATPSGVGPNTMAAGGGAPMADNNEGADGVGSSSXNWHCDSXWLGDRXITTSTRTWALXTYXNXLYKQISNSTSGGATNDNTYFGYSTPWGYFDFNRFHCHFSPRDWQRLINNNWGFRPKRLNFKLFNIQVKEVTQNEGTKTIANNLTSTIQVFTDSEYQLPYVLGSAHQGCLPPFPADVFMIPQYGYLTLNNGSQAVGRSSFYCLEYFPSQMLRTGNNFQFTYTFEDVPFHSSYAHSQSLDRLMNPLIDQYLYYLSRTQTTGGTANTQTLGFSQGGPNTMANQAKNWLPGPCYRQQRVSTTTGQNNNSNFAWTAGTKYHLNGRNSLANPGIAMATHKDDKERFFPSNGILIFGKQNAARDNADYSDVMLTSEEEIKTTNPVATEEYGIVADNLQQQNTAPQIGTVNSQGALPGMVWQNRDVYLQGPIWAKIPHTDGNFHPSPLMGGFGLKHPPPQILIKNTPVPADPPTTFSQAKLASFITQYSTGQVSVEIEWELQKENSKRWNPEVQYTSNYAKSANVDFTVDNNGLYTEPRPIGTRYLTRPL

SEQ ID NO: 1069 - protein, 737 aa, synthetic construct
  REGION 1..737: note = source = /note="Description of Artificial Sequence: Synthetic polypeptide"
MAADGYLPDWLEDNLSEGIREWWDLKPGAPKPKANQQKQDDGRGLVLPGYKYLGPFNGLDKGEPVNAADAAALEHDKAYDQQLKAGDNPYLRYNHADAEFQERLQEDTSFGGNLGRAVFQAKKRVLEPLGLVEEGAKTAPGKKRPVEPSPQRSPDSSTGIGKKGQQPAKKRLNFGQTGDSESVPDPQPIGEPPAGPSGVGSLTMASGGGAPVADNNEGADGVGSSSGNWHCDSQWLGDRVITTSTRTWALPTYNNHLYKQISSASTGASNDNHYFGYSTPWGYFDFNRFHCHFSPRDWQRLINNNWGFRPKRLNFKLFNIQVKEVTDNDGVKTIANNLTSTIQVFTDSEYQLPYVLGSAHQGCLPPFPADVFMIPQYGYLTLNNGSQAVGRSSFYCLEYFPSQMLRTGNNFTFSYTFEDVPFHSSYAHSQSLDRLMNPLIDQYLYYLSRTQTTGGTANTQTLGFSQGGPNTMANHAKNWLPGPCYRQQRVSTTTGQNNNSNFAWTAGTKYHLNGRNSLANPGIAMATHKDDKERFFPSNGILIFGKQNAARDNADYSDVMLTSEEEIKTTNPVATEEYGIVADNLQQQNTAPQIGTVNSQGALPGMVWQNRDVYLQGPIWAKIPHTDGNFHPSPLMGGFGLKHPPPQILIKNTPVPADPPTTFNQSKLNSFITQYSTGQVSVEIEWELQKENSKRWNPEIQYTSNYYKSTSVDFAVNTEGVYSEPHPIGTRYLTRPL

SEQ ID NO: 1070 - protein, 736 aa, synthetic construct
  REGION 1..736: note = source = /note="Description of Artificial Sequence: Synthetic polypeptide"
MAADGYLPDWLEDTLSEGIRQWWKLKPGPPPPKPAERHKDDSRGLVLPGYKYLGPFNGLDKGEPVNEADAAALEHDKAYDRQLDSGDNPYLKYNHADAEFQERLKEDTSFGGNLGRAVFQAKKRVLEPLGLVEEPVKTAPGKKRPVEHSPVEPDSSSGTGKAGQQPAKKRLNFGQTGDSESVPDPQPLGEPPATPAAVGPTTMASGGGAPMADNNEGADGVGNASGNWHCDSTWLGDRVITTSTRTWALPTYNNHLYKQISSASTGASNDNHYFGYSTPWGYFDFNRFHCHFSPRDWQRLINNNWGFRPKRLNFKLFNIQVKEVTQNEGTKTIANNLTSTIQVFTDSEYQLPYVLGSAHQGCLPPFPADVFMIPQYGYLTLNNGSQAVGRSSFYCLEYFPSQMLRTGNNFQFTYTFEDVPFHSSYAHSQSLDRLMNPLIDQYLYYLSRTQTTGGTANTQTLGFSQGGPNTMANQAKNWLPGPCYRQQRVSTTTGQNNNSNFAWTAGTKYHLNGRNSLANPGIAMATHKDDKERFFPSNGILIFGKQNAARDNADYSDVMLTSEEEIKTTNPVATEEYGIVADNLQQQNTAPQIGTVNSQGALPGMVWQNRDVYLQGPIWAKIPHTDGNFHPSPLMGGFGLKHPPPQILIKNTPVPADPPTTFNQSKLNSFITQYSTGQVSVEIEWELQKENSKRWNPEIQYTSNYYKSTSVDFAVNTEGVYSEPHPIGTRYLTRPL

SEQ ID NO: 1071 - protein, 736 aa, synthetic construct
  REGION 1..736: note = source = /note="Description of Artificial Sequence: Synthetic polypeptide"
MAADGYLPDWLEDNLSEGIREWWALKPGAPKPKANQQKQDDGRGLVLPGYKYLGPFNGLDKGEPVNAADAAALEHDKAYDQQLQAGDNPYLRYNHADAEFQERLQGDTSFGGNLGRAVFQAKKRVLEPLGLVEEGAKTAPGKKRPVEQSPQEPDSSSGIGKTGQQPAKKRLNFGQTGDSESVPDPQPLGEPPATPAAVGPTTMASGGGAPMADNNEGADGVGNASGNWHCDSTWLGDRVITTSTRTWALPTYNNHLYKQISSASTGASNDNHYFGYSTPWGYFDFNRFHCHFSPRDWQRLINNNWGFRPKRLNFKLFNIQVKEVTDNNGVKTIANNLTSTIQVFTDSEYQLPYVLGSAHQGCLPPFPADVFMIPQYGYLTLNNGSQAVGRSSFYCLEYFPSQMLRTGNNFQFTYTFEDVPFHSSYAHSQSLDRLMNPLIDQYLYYLSRTQTTGGTANTQTLGFSQGGPNTMANQAKNWLPGPCYRQQRVSTTTGQNNNSNFAWTAGTKYHLNGRNSLANPGIAMATHKDDKERFFPSNGILIFGKQNAARDNADYSDVMLTSEEEIKTTNPVATEEYGIVADNLQQQNTAPQIGTVNSQGALPGMVWQNRDVYLQGPIWAKIPHTDGNFHPSPLMGGFGLKHPPPQILIKNTPVPADPPTTFNQSKLNSFITQYSTGQVSVEIEWELQKENSKRWNPEIQYTSNYYKSTSVDFAVNTEGVYSEPHPIGTRYLTRPL

SEQ ID NO: 1072 - protein, 738 aa, synthetic construct
  REGION 1..738: note = source = /note="Description of Artificial Sequence: Synthetic polypeptide"
MAADGYLPDWLEDTLSEGIRQWWKLKPGPPPPKPAERHKDDSRGLVLPGYKYLGPFNGLDKGEPVNAADAAALEHDKAYDQQLKAGDNPYLRYNHADAEFQERLKEDTSFGGNLGRAVFQAKKRVLEPLGLVEEGAKTAPGKKRPVEPSPQRSPDSSTGIGKKGQQPARKRLNFGQTGDSESVPDPQPLGEPPAAPSGVGPNTMAAGGGAPMADNNEGADGVGSSSGNWHCDSQWLGDRVITTSTRTWALPTYNNHLYKQISNSTSGGSSNDNAYFGYSTPWGYFDFNRFHCHFSPRDWQRLINNNWGFRPKRLNFKLFNIQVKEVTDNNGVKTIANNLTSTVQVFTDSEYQLPYVLGSAHQGCLPPFPADVFMIPQYGYLTLNNGSQAVGRSSFYCLEYFPSQMLRTGNNFTFSYTFEDVPFHSSYAHSQSLDRLMNPLIDQYLYYLSRTQTTGGTANTQTLGFSQGGPNTMANQAKNWLPGPCYRQQRVSTTTGQNNNSNFAWTAGTKYHLNGRNSLANPGIAMATHKDDKERFFPSNGILIFGKQNAARDNADYSDVMLTSEEEIKTTNPVATEEYGIVADNLQQQNTAPQIGTVNSQGALPGMVWQNRDVYLQGPIWAKIPHTDGHFHPSPLMGGFGLKHPPPQILIKNTPVPANPPTTFNQSKLNSFITQYSTGQVSVEIEWELQKENSKRWNPEVQYTSNYAKSANVDFTVDNNGLYTEPRPIGTRYLTRPL

SEQ ID NO: 1073 - protein, 738 aa, synthetic construct; identical to SEQ ID NO: 1072
  REGION 1..738: note = source = /note="Description of Artificial Sequence: Synthetic polypeptide"

SEQ ID NO: 1074 - protein, 736 aa, synthetic construct
  REGION 1..736: note = source = /note="Description of Artificial Sequence: Synthetic polypeptide"
MAADGYLPDWLEDNLSEGIREWWALKPGAPKPKANQQKQDDGRGLVLPGYKYLGPFNGLDKGEPVNAADAAALEHDKAYDQQLKAGDNPYLRYNHADAEFQERLQEDTSFGGNLGRAVFQAKKRLLEPLGLVEEGAKTAPGKKRPVEQSPQEPDSSSGIGKTGQQPAKKRLNFGQTGDSESVPDPQPLGEPPATPAAVGPTTMASGGGAPMADNNEGADGVGNSSGNWHCDSTWMGDRVITTSTRTWALPTYNNHLYKQISSASTGASNDNHYFGYSTPWGYFDFNRFHCHFSPRDWQRLINNNWGFRPKRLNFKLFNIQVKEVTQNEGTKTIANNLTSTIQVFTDSEYQLPYVLGSAHQGCLPPFPADVFIIPQYGYLTLNNGSQAVGRSSFYCLEYFPSQMLRTGNNFTFSYTFEDVPFHSSYAHSQSLDRLMNPLIDQYLYYLSRTQTTGGTANTQTLGFSQGGPNTMANQAKNWLPGPCYRQQRVSTTTGQNNNSNFAWTAGTKYHLNGRNSLANPGIAMATHKDDKERFFPSNGILIFGKQNAARDNADYSDVMLTSEEEIKTTNPVATEEYGIVADNLQQQNTAPQIGTVNSQGALPGMVWQNRDVYLQGPIWAKIPHTDGNFHPSPLMGGFGLKHPPPQILIKNTPVPADPPTTFNQSKLNSFITQYSTGQVSVEIEWELQKENSKRWNPEIQYTSNYYKSTSVDFAVNTEGVYSEPHPIGTRYLTRPL

SEQ ID NO: 1075 - protein, 736 aa, synthetic construct
  REGION 1..736: note = source = /note="Description of Artificial Sequence: Synthetic polypeptide"
MAADGYLPDWLEDNLSEGIREWWALKPGAPKPKANQQKQDDGRGLVLPGYKYLGPFNGLDKGEPVNAADAAALEHDKAYDQQLKAGDNPYLRYNHADAEFQERLQEDTSFGGNLGRAVFQAKKRVLEPFGLVEEAAKTAPGKKRPVEQSPQEPDSSSGIGKTGQQPAKKRLNFGQTGDSESVPDPQPLGEPPATPAAVGPTTMASGGGAPMADNNEGADGVGNASGNWHCDSTWLGDRVITTSTRTWALPTYNNHLYKQISSASTGASNDNHYFGYSTPWGYFDFNRFHCHFSPRDWQRLINNNWGFRPKRLNFKLFNIQVKEVTQNEGTKTIANNLTSTIQVFTDSEYQLPYVLGSAHQGCLPPFPADVFMIPQYGYLTLNNGSQAVGRSSFYCLEYFPSQMLRTGNNFTFSYTFEDVPFHSSYAHSQSLDRLMNPLIDQYLYYLSRTQTTGGTANTQTLGFSQGGPNTMANHAKNWLPGPCYRQQRVSTTTGQNNNSNFAWTAGTKYHLNGRNSLANPGIAMATHKDDKERFFPSNGILIFGKQNAARDNADYSDVMLTSEEEIKTTNPVATEEYGIVADNLQQQNTAPQIGTVNSQGALPGMVWQNRDVYLQGPIWAKIPHTDGNFHPSPLMGGFGLKHPPPQILIKNTPVPADPPTTFNQSKLNSFITQYSTGQVSVEIEWELQKENSKRWNPEIQYTSNYYKSTSVDFAVNTEGVYSEPHPIGTRYLTRPL

SEQ ID NO: 1076 - protein, 736 aa, synthetic construct
  REGION 1..736: note = source = /note="Description of Artificial Sequence: Synthetic polypeptide"
MAADGYLPDWLEDNLSEGIREWWALKPGAPKPKANQQKQDDGRGLVLPGYKYLGPFNGLDKGEPVNEADAAALEHDKAYDQQLKAGDNPYLRYNHADAEFQERLQEDTSFGGNLGRAVFQAKKRLLEPLGLVEEAAKTAPGKKRPVEQSPQEPDSSAGIGKSGAQPAKKRLNFGQTGDSESVPDPQPLGEPPATPAAVGPTTMASGGGAPMADNNEGADGVGNASGNWHCDSTWLGDRVITTSTRTWALPTYNNHLYKQISSASTGASNDNHYFGYSTPWGYFDFNRFHCHFSPRDWQRLINNNWGFRPKRLNFKLFNIQVKEVTDNDGVKTIANNLTSTIQVFTDSEYQLPYVLGSAHQGCLPPFPADVFMIPQYGYLTLNNGSQAVGRSSFYCLEYFPSQMLRTGNNFQFTYTFEDVPFHSSYAHSQSLDRLMNPLIDQYLYYLSRTQTTGGTANTQTLGFSQGGPNTMANQAKNWLPGPCYRQQRVSTTTGQNNNSNFAWTAGTKYHLNGRNSLANPGIAMATHKDDKERFFPSNGILIFGKQNAARDNADYSDVMLTSEEEIKTTNPVATEEYGIVADNLQQQNTAPQIGTVNSQGALPGMVWQNRDVYLQGPIWAKIPHTDGNFHPSPLMGGFGLKHPPPQILIKNTPVPADPPTTFNQSKLNSFITQYSTGQVSVEIEWELQKENSKRWNPEIQYTSNYYKSTSVDFAVNTEGVYSEPHPIGTRYLTRPL

SEQ ID NO: 1077 - protein, 736 aa, synthetic construct
  REGION 1..736: note = source = /note="Description of Artificial Sequence: Synthetic polypeptide"
MAADGYLPDWLEDNLSEGIREWWALKPGAPKPKANQQKQDDGRGLVLPGYKYLGPFNGLDKGEPVNAADAAALEHDKAYDQQLKAGDNPYLRYNHADAEFQERLQEDTSFGGNLGRAVFQAKKRVLEPLGLVEEGAKTAPGKKRPVEQSPQEPDSSAGIGKTGAQPAKKRLNFGQTGDSESVPDPQPLGEPPATPAAVGPTTMASGGGAPMADNNEGADGVGSASGNWHCDSTWLGDRVITTSTRTWALPTYNNHLYKQISSASTGASNDNHYFGYSTPWGYFDFNRFHCHFSPRDWQRLINNNWGFRPKRLNFKLFNIQVKEVTDNNGVKTIANNLTSTIQVFTDSEYQLPYVLGSAHQGCLPPFPADVFMIPQYGYLTLNNGSQAVGRSSFYCLEYFPSQMLRTGNNFTFSYTFEDVPFHSSYAHSQSLDRLMNPLIDQYLYYLSRTQTTGGTANTQTLGFSQGGPNTMANQAKNWLPGPCYRQQRVSTTTGQNNNSNFAWTAGTKYHLNGRNSLANPGIAMATHKDDKERFFPSNGILIFGKQNAARDNADYSDVMLTSEEEIKTTNPVATEEYGIVADNLQQQNTAPQIGTVNSQGALPGMVWQNRDVYLQGPIWAKIPHTDGNFHPSPLMGGFGLKHPPPQILIKNTPVPADPPTTFNQSKLNSFITQYSTGQVSVEIEWELQKENSKRWNPEIQYTSNYYKSTSVDFAVNTEGVYSEPHPIGTRYLTRPL

SEQ ID NO: 1078 - protein, 736 aa, synthetic construct
  REGION 1..736: note = source = /note="Description of Artificial Sequence: Synthetic polypeptide"
MAADGYLPDWLEDNLSEGIREWWDLKPGAPKPKANQQKQDDGRGLVLPGYKYLGPFNGLDKGEPVNAADAAALEHDKAYDQQLKAGDNPYLRYNHADAEFQERLQEDTSFGGNLGRAVFQAKKRLLEPLGLVEEAAKTAPGKKRPVEQSPQEPDSSAGIGKSGAQPAKKRLNFGQTGDTESVPDPQPIGEPPAAPSGVGPNTMAAGGGAPMADNNEGADGVGSSSGNWHCDSQWLGDRVITTSTRTWALPTYNNHLYKQISSASTGASNDNHYFGYSTPWGYFDFNRFHCHFSPRDWQRLINNNWGFRPKRLNFKLFNIQVKEVTQNEGTKTIANNLTSTIQVFTDSEYQLPYVLGSAHQGCLPPFPADVFMIPQYGYLTLNNGSQAVGRSSFYCLEYFPSQMLRTGNNFQFTYTFEDVPFHSSYAHSQSLDRLMNPLIDQYLYYLSRTQTTGGTANTQTLGFSQGGPNTMANHAKNWLPGPCYRQQRVSTTTGQNNNSNFAWTAGTKYHLNGRNSLANPGIAMATHKDDKERFFPSNGILIFGKQNAARDNADYSDVMLTSEEEIKTTNPVATEEYGIVADNLQQQNTAPQIGTVNSQGALPGMVWQNRDVYLQGPIWAKIPHTDGNFHPSPLMGGFGLKHPPPQILIKNTPVPADPPTTFNQSKLNSFITQYSTGQVSVEIEWELQKENSKRWNPEIQYTSNYYKSTSVDFAVNTEGVYSEPHPIGTRYLTRPL

SEQ ID NO: 1079 - protein, 737 aa, synthetic construct; identical to SEQ ID NO: 1061
  REGION 1..737: note = source = /note="Description of Artificial Sequence: Synthetic polypeptide"

SEQ ID NO: 1080 - protein, 737 aa, synthetic construct
  REGION 1..737: note = source = /note="Description of Artificial Sequence: Synthetic polypeptide"
MAADGYLPDWLEDNLSEGIREWWALKPGAPKPKANQQKQDDGRGLVLPGYKYLGPFNGLDKGEPVNAADAAALEHDKAYDQQLKAGDNPYLRYNHADAEFQERLKEDTSFGGNLGRAVFQAKKRVLEPFGLVEEGAKTAPGKKRPVEQSPQEPDSSSGIGKTGQQPAKKRLNFGQTGDSESVPDPQPLGEPPAAPSGVGPNTMAAGGGAPMADNNEGADGVGSSSGNWHCDSQWLGNRVITTSTRTWALPTYNNHLYKQISNSTSGGSSNDNAYFGYSTPWGYFDFNRFHCHFSPRDWQRLINNNWGFRPKRLNFKLFNIQVKEVTDNNGVKTIANNLTSTVQVFTDSEYQLPYVLGSAHQGCLPPFPADVFMIPQYGYLTLNNGSQAVGRSSFYCLEYFPSQMLRTGNNFQFTYTFEDVPFHSSYAHSQSLDRLMNPLIDQYLYYLSRTQTTGGTANTQTLGFSQGGPNTMANQAKNWLPGPCYRQQRVSTTTGQNNNSNFAWTAGTKYHLNGRNSLANPGIAMATHKDDKERFFPSNGILIFGKQNAARDNADYSDVMLTSEEEIKTTNPVATEEYGIVADNLQQQNTAPQIGTVNSQGALPGMVWQNRDVYLQGPIWAKIPHTDGNFHPSPLMGGFGLKHPPPQILIKNTPVPADPPTTFNQSKLNSFITQYSTGQVSVEIEWELQKENSKRWNPEIQYTSNYYKSTSVDFAVNTEGVYSEPHPIGTRYLTRPL

SEQ ID NO: 1081 - protein, 736 aa, synthetic construct
  REGION 1..736: note = source = /note="Description of Artificial Sequence: Synthetic polypeptide"
MAADGYLPDWLEDNLSEGIREWWDLKPGAPKPKANQQKQDDGRGLVLPGYKYLGPFNGLDRGEPVNAADAAALEHDKAYDQQLKAGDNPYLRYNHADAEFQERLQEDTSFGGNLGRAVFQAKKRVLEPLGLVEEGAKTAPGKKRPVEQSPQEPDSSSGIGKTGQQPAKKRLNFGQTGDSESVPDPQPLGEPPATPAAVGPTTMASGGGAPMADNNEGADGVGNASGNWHCDSTWLGDRVITTSTRTWALPTYNNHLYKQISSASTGASNDNHYFGYSTPWGYFDFNRFHCHFSPRDWQRLINNNWGFRPKRLNFKLFNIQVKEVTDNNGVKTIANNLTSTIQVFTDSEYQLPYVLGSAHQGCLPPFPADVFMIPQYGYLTLNNGSQAVGRSSFYCLEYFPSQMLRTGNNFQFTYTFEDVPFHSSYAHSQSLDRLMNPLIDQYLYYLSRTQTTGGTANTQTLGFSQGGPNTMANQAKNWLPGPCYRQQRVSTTTGQNNNSNFAWTAGTKYHLNGRNSLANPGIAMATHKDDKERFFPSNGILIFGKQNAARDNADYSDVMLTSEEEIKTTNPVATEEYGIVADNLQQQNTAPQIGTVNSQGALPGMVWQNRDVYLQGPIWAKIPHTDGNFHPSPLMGGFGLKHPPPQILIKNTPVPADPPTTFNQSKLNSFITQYSTGQVSVEIEWELQKENSKRWNPEIQYTSNYYKSTSVDFAVNTEGVYSEPHPIGTRYLTRPL

SEQ ID NO: 1082 - protein, 736 aa, synthetic construct
  REGION 1..736: note = source = /note="Description of Artificial Sequence: Synthetic polypeptide"
MAADGYLPDWLEDNLSEGIREWWDLKPGAPKPKANQQKQDDGRGLVLPGYKYLGPFNGLDKGEPVNAADAAALEHDKAYDQQLKAGDNPYLRYNHADAEFQERLQEDTSFGGNLGRAVFQAKKRVLEPLGLVEEGAKTAPGKKRPVEQSPQEPDSSSGIGKKGQQPARKRLNFGQTGDSESVPDPQPLGEPPAAPSGVGSLTMASGGGAPMADNNEGADGVGNASGNWHCDSTWLGDRVITTSTRTWALPTYNNHLYKQISSASTGASNDNHYFGYSTPWGYFDFNRFHCHFSPRDWQRLINNNWGFRPKRLNFKLFNIQVKEVTQNEGTKTIANNLTSTVQVFTDSDYQLPYVLGSAHQGCLPPFPADVFMIPQYGYLTLNNGSQAVGRSSFYCLEYFPSQMLRTGNNFQFTYTFEDVPFHSSYAHSQSLDRLMNPLIDQYLYYLSRTQTTGGTANTQTLGFSQGGPNTMANQAKNWLPGPCYRQQRVSTTTGQNNNSNFAWTAGTKYHLNGRNSLSNPGIAMATHKDDKERFFPSNGILIFGKQNAARDNADYSDVMLTSEEEIKTTNPVATEEYGIVADNLQQQNTAPQIGTVNSQGALPGMVWQNRDMYLQGPIWAKIPHTDGNFHPSPLMGGFGLKHPPPQILIKNTPVPADPPTTFNQSKLNSFITQYSTGQVSVEIEWELQKENSKRWNPEIQYTSNYYKSTSVDFAVNTEGVYSEPHPIGTRYLTRPL

SEQ ID NO: 1083 - protein, 736 aa, synthetic construct
  REGION 1..736: note = source = /note="Description of Artificial Sequence: Synthetic polypeptide"
MAADGYLPDWLEDNLSEGIREWWALKPGAPKPKANQQKQDDGRGLVLPGYKYLGPFNGLDKGEPVNAADAAALEHDKAYDQQLKAGDNPYLRYNHADAEFQERLQEDTSFGGNLGRAVFQAKKRVLEPFGLVEEGAKTAPGKKRPVEQSPQEPDSSSGIGKTGQQPAKKRLNFGQTGGSESVPDPQPLGEPPATPAAVGPTTMAAGGGAPMADNNEGADGVGSSSGNWHCDSTWLGDRVITTSTRTWALPTYNNHLYKQISSASTGASNDNHYFGYSTPWGYFDFNRFHCHFSPRDWQRLINNNWGFRPKRLNFKLFNIQVKEVTDNNGVKTIANNLTSTVQVFTDSEYQLPYVLGSAHQGCLPPFPADVFMIPQYGYLTLNNGSQAVGRSSFYCLEYFPSQMLRTGNNFTFSYTFEEVPFHSSYAHSQSLDRLMNPLIDQYLYYLSRTQTTGGTANTQTLGFSQGGPNTMANQAKNWLPGPCYRQQRVSTTTGQNNNSNFAWTAGTKYHLNGRNSLANPGIAMASHKDDKERFFPSNGILIFGKQNAARDNADYSDVMLTSEEEIKTTNPVATEEYGIVADNLQQQNTAPQIGTVNSQGALPGMVWQNRDVYLQGPIWAKIPHTDGNFHPSPLMGGFGLKHPPPQILIKNTPVPADPPTTFNQSKLNSFITQYSTGQVSVEIEWELQKENSKRWNPEIQYTSNYYKSTSVDFAVNTEGVYSEPHPIGTRYLTRPL

SEQ ID NO: 1084 - DNA, 2211 bp, synthetic construct
  misc_feature 1..2211: note = source = /note="Description of Artificial Sequence: Synthetic polynucleotide"
  source 1..2211: mol_type = other DNA
atggctgccgatggttatcttccagattggctcgaggacaacctctctgagggcattcgcgagtggtgggacttgaaacctgcatccccgaaacccaaagccaaccagcaaaagcaggacgacggccggggtctggtgcttcctggctacaagtacctcggacccttcaacggactcgacaagggggagcccgtcaacgcggcggacgcagcggccctcgagcacgacaaggcctacgaccagcagctcaaagcgggtgacaatccgtacctgcggtataaccacgccgacgccgagtttcaggagcgtctgcaagaagatacgtcttttgggggcaacctcgggcgagcagtcttccaggccaaaaagaggcttcttgaacctcttggtctggttgaggaagcggctaagacggctcctggaaagaagaggcctgtagagcagtctcctcaggaaccggactcctccgcgggtattggcaaatcgggtgcacagcccgccaaaaagagactcaatttcggtcagactggcggcacagagtcagttccagaccctcaacctctcggagaacctccagcagcgccctctggtgtgggacctaatacaatggctgcaggcggtggcgcaccaatggcagacaataacgaaggcgccgacggagtgggtagttcctcgggaaattggcattgcgattccacatggctgggcgacagagtcatcaccaccagcaccagaacctgggccctgcccacttacaacaaccatctctacaagcaaatctccagtgcttcaacgggggccagcaacgacaaccactacttcggctacagcaccccctgggggtattttgatttcaacagattccactgccacttctcaccacgtgactggcagcgactcatcaacaacaactggggattccggcccaagagactcagcttcaagctcttcaacatccaggtcaaggaggtcacgcagaatgaaggcaccaagaccatcgccaataacctcaccagcaccatccaggtgtttacggactcggagtaccagctgccgtacgttctcggctctgcccaccagggctgcctgcctccgttcccggcggacgtgttcatgattccccagtacggatacctaacactcaacaacggtagtcaggccgtgggacgctcctccttctactgcctggaatactttccttcgcagatgctgagaaccggcaacaacttccagtttacttacaccttcgaggacgtgcctttccacagcagctacgcccacagccagagcttggaccggctgatgaatcctctgattgaccagtacctgtactacttgtctcggactcaaacaacaggaggcacggcaaatacgcagactctgggcttcagccaaggtgggcctaatacaatggccaatcaggcaaagaactggctgccaggaccctgttaccgccaacaacgcgtctcaacgacaaccgggcaaaacaacaatagcaactttgcctggactgctgggaccaaataccatctgaatggaagaaattcattggctaatcctggcatcgctatggcaacacacaaagacgacaaggagcgtttttttcccagtaacgggatcctgatttttggcaaacaaaatgctgccagagacaatgcggattacagcgatgtcatgctcaccagcgaggaagaaatcaaaaccactaaccctgtggctacagaggaatacggtatcgtggcagataacttgcagcagcaaaacacggctcctcaaattggaactgtcaacagccagggggccttacccggtatggtctggcagaaccgggacgtgtacctgcagggtcccatctgggccaagattcctcacacggacggcaacttccacccgtctccgctgatgggcggctttggcctgaaacatcctccgcctcagatcctgatcaagaacacgcctgtacctgcggatcctccgaccaccttcaaccagtcaaagctgaactctttcatcacgcaatacagcaccggacaggtcagcgtggaaattgaatgggagctgcagaaggaaaacagcaagcgctggaaccccgagatccagtacacctccaactactacaaatctacaagtgtggactttgctgttaatacagaaggcgtgtactctgaaccccaccccattggcacccgttacctcacccgtcccctgtaa

SEQ ID NO: 1085 - DNA, 2211 bp, synthetic construct
  misc_feature 1..2211: note = source = /note="Description of Artificial Sequence: Synthetic polynucleotide"
  source 1..2211: mol_type = other DNA
atggctgccgatggttatcttccagattggctcgaggacaacctctctgagggcattcgcgagtggtgggacttgaaacctggagccccgaaacccaaagccaaccagcaaaagcaggacgacggccggggtctggtgcttcctggctacaagtacctcggacccttcaacggactcgacaagggggagcccgtcaacgcggcggacgcagcggccctcgagcacgacaaggcctacgaccagcagctcaaagcgggtgacaatccgtacctgcggtataaccacgccgacgccgagtttcaggagcgtctgcaagaagatacgtcttttgggggcaacctcgggcgagcagtcttccaggccaagaagagggttctcgaaccttttggtctggttgaggaaggcgctaagacggctcctggaaagaaacgtccggtagagcagtcgccacaagagccagactcctcctcgggcattggcaagacaggccagcagcccgctaaaaagagactcaattttggtcagactggcgactcagagtcagtccccgacccacaacctctcggagaacctccagcaacccccgctgctgtgggacctactacaatggcttcaggtggtggcgcaccaatggcagacaataacgaaggcgccgacggagtgggtaatgcctcaggaaattggcattgcgattcccaatggctgggggacagagtcatcaccaccagcacccgaacctgggccctgcccacctacaacaatcacctctacaagcaaatctccagtgcttcaacgggggccagcaacgacaaccactacttcggctacagcaccccctgggggtattttgatttcaacagattccactgccatttctcaccacgtgactggcagcgactcatcaacaacaattggggattccggcccaagagactcaacttcaaactcttcaacatccaagtcaaggaggtcacgcagaatgaaggcaccaagaccatcgccaataacctcaccagcaccatccaggtgtttacggactcggagtaccagctgccgtacgttctcggctccgcccaccagggctgcctgcctccgttcccggcggacgtgttcatgattccccagtacggctacctaacactcaacaacggtagtcaggccgtgggacgctcctccttctactgcctggaatactttccttcgcagatgctgagaaccggcaacaacttccagtttacttacaccttcgaggacgtgcctttccacagcagctacgcccacagccagagcttggaccggctgatgaatcctctgattgaccagtacctgtactacttgtctcggactcaaacaacaggaggcacggcaaatacgcagactctgggcttcagccaaggtgggcctaatacaatggccaatcaggcaaagaactggctgccaggaccctgttaccgccaacaacgcgtctcaacgacaaccgggcaaaacaacaatagcaactttgcctggactgctgggaccaaataccatctgaatggaagaaattcattggctaatcctggcatcgctatggcaacacacaaagacgacaaggagcgtttttttcccagtaacgggatcctgatttttggcaaacaaaatgctgccagagacaatgcggattacagcgatgtcatgctcaccagcgaggaagaaatcaaaaccactaaccctgtggctacagaggaatacggtatcgtggcagataacttgcagcagcaaaacacggctcctcaaattggaactgtcaacagccagggggccttacccggtatggtctggcagaaccgggacgtgtacctgcagggtcccatctgggccaagattcctcacacggacggcaacttccacccgtctccgctgatgggcggctttggcctgaaacatcctccgcctcagatcctgatcaagaacacgcctgtacctgcggatcctccgaccaccttcaaccagtcaaagctgaactctttcatcacgcaatacagcaccggacaggtcagcgtggaaattgaatgggagctgcagaaggaaaacagcaagcgctggaaccccgagatccagtacacctccaactactacaaatctacaagtgtggactttgctgttaatacagaaggcgtgtactctgaaccccaccccattggcacccgttacctcacccgtcccctgtaa

SEQ ID NO: 1086 - DNA, 2211 bp, synthetic construct
  misc_feature 1..2211: note = source = /note="Description of Artificial Sequence: Synthetic polynucleotide"
  source 1..2211: mol_type = other DNA
atggctgccgatggttatcttccagattggctcgaggacaacctctctgagggcattcgcgagtggtgggacttggaacctggagccccgaagcccaaagccaaccagcaaaagcaggacgacggccggggtctggtgcttcctggctacaagtacctcggacccttcaacggactcgacaagggggagcccgtcaacgcggcggacgcagcggccctcgagcacgacaaggcctacgaccagcagctcaaagcgggtgacaatccgtacctgcggtataaccacgccgacgccgagtttcaggagcgtctgcaagaagatacgtcttttgggggcaacctcgggcgagcagtcttccaggccaagaagcgggttctcgaacctctcggtctggttgaggaaggcgctaagacggctcctggaaagaaacgtccggtagagcagtcgccacaagagccagactcctcctcgggcatcggcaagacaggccagcagcccgctaaaaagagactcaattttggtcagactggcgactcagagtcagtccccgatccacaacctctcggagaacctccagcaacccccgctgctgtgggacctactacaatggcttcaggcggtggcgcaccaatggcagacaataacgaaggcgccgacggagtgggtaatgcctcaggaaattggcattgcgattccacatggctgggcgacagagtcatcaccaccagcacccgcacctgggccttgcccacctacaataaccacctctacaagcaaatctccagtgcttcaacaggggccagcaacgacaaccactacttcggctacagcaccccctgggggtattttgacttcaacagattccactgccacttctcaccacgtgactggcagcgactcatcaacaacaactggggattccggcctaagcgactcaacttcaagctcttcaacattcaggtcaaagaggttacggacaacaatggagtcaagaccatcgccaataaccttaccagcacggtccaggtcttcacggactcggagtaccagttgccgtacgtcctcggctctgcgcaccagggctgcctccctccgttcccggcggacgtgttcatgattccgcagtacggctacctaacgctcaacaacggtagtcaggccgtgggacgctcctccttctactgcctggaatactttccttcgcagatgctgagaaccggcaacaacttccagtttacttacaccttcgaggacgtgcctttccacagcagctacgcccacagccagagcttggaccggctgatgaatcctctgattgaccagtacctgtactacttgtctcggactcaaacaacaggaggcacggcaaatacgcagactctgggcttcagccaaggtgggcctaatacaatggccaatcaggcaaagaactggctgccaggaccctgttaccgccaacaacgcgtctcaacgacaaccgggcaaaacaacaatagcaactttgcctggactgctgggaccaaataccatctgaatggaagaaattcattggctaatcctggcatcgctatggcaacacacaaagacgacaaggagcgtttttttcccagtaacgggatcctgatttttggcaaacaaaatgctgccagagacaatgcggattacagcgatgtcatgctcaccagcgaggaagaaatcaaaaccactaaccctgtggctacagaggaatacggtatcgtggcagataacttgcagcagcaaaacacggctcctcaaattggaactgtcaacagccagggggccttacccggtatggtctggcagaaccgggacgtgtacctgcagggtcccatctgggccaagattcctcacacggacggcaacttccacccgtctccgctgatgggcggctttggcctgaaacatcctccgcctcagatcctgatcaagaacacgcctgtacctgcggatcctccgaccaccttcaaccagtcaaagctgaactctttcatcacgcaatacagcaccggacaggtcagcgtggaaattgaatgggagctgcagaaggaaaacagcaagcgctggaaccccgagatccagtacacctccaactactacaaatctacaagtgtggactttgctgttaatacagaaggcgtgtactctgaaccccaccccattggcacccgttacctcacccgtcccctgtaa

SEQ ID NO: 1087 - DNA, 2211 bp, synthetic construct
  misc_feature 1..2211: note = source = /note="Description of Artificial Sequence: Synthetic polynucleotide"
  source 1..2211: mol_type = other DNA
atggctgccgatggttatcttccagattggctcgaggacactctctctgaaggaataagacagtggtggaagctcaaacctggcccaccaccaccaaagcccgcagagcggcataaggacgacagcaggggtcttgtgcttcctgggtacaagtacctcggacccttcaacggactcgacaagggagagccggtcaacgaggcagacgccgcggccctcgagcacgacaaagcctacgaccggcagctcgacagcggagacaacccgtacctcaagtacaaccacgccgacgcggagtttcaggagcgccttaaagaagatacgtcttttgggggcaacctcgggcgagcagtcttccaggccaagaagagggttctcgaaccttttggtctggttgaggaaggtgctaagacggctcctggaaagaaacgtccggtagagcagtcgccacaagagccagactcctcctcgggcattggcaagacaggccagcagcccgctaaaaagagactcaattttggtcagactggcgactcagagtcagtccccgacccacaacctctcggagaacctccagcaacccccgctgctgtgggacctactacaatggcttcaggcggtggcgcaccaatggcagacaataacgaaggcgccgacggagtgggtaatgcctcaggaaattggcattgcgattccacatggctgggcgacagagtcatcaccaccagcacccgaacatgggccttgcccacctataacaaccacctctacaagcaaatctccagtgcttcaacgggggccagcaacgacaaccactacttcggctacagcaccccctgggggtattttgacttcaacagattccactgccacttctcaccacgtgactggcagcgactcatcaacaacaactggggattccggcctaagcgactcaacttcaagctcttcaacattcaggtcaaagaggttacggacaacaatggagtcaagaccatcgccaataaccttaccagcacggtccaggtcttcacggactcagactatcagctcccgtacgtgctcgggtcggctcacgagggctgcctcccgccgttcccagcggacgttttcatgattcctcagtacggctacctaacactcaacaacggtagtcaggccgtgggacgctcctccttctactgcctggaatactttccttcgcagatgctgagaaccggcaacaacttccagtttacttacaccttcgaggacgtgcctttccacagcagctacgcgcacagccagagtctggaccggctgatgaatcctctgattgaccagtacctgtactacttgtctcggactcaaacaacaggaggcacggcaaatacgcagactctgggcttcagccaaggtgggcctaatacaatggccaatcaggcaaagaactggctgccaggaccctgttaccgccaacaacgcgtctcaacgacaaccgggcaaaacaacaatagcaactttgcctggactgctgggaccaaataccatctgaatggaagaaattcattggctaatcctggcatcgctatggcaacacacaaagacgacaaggagcgtttttttcccagtaacgggatcctgattttcggcaaacaaaatgctgccagagacaatgcggattacagcgatgtcatgctcaccagcgaggaagaaatcaaaaccactaaccctgtggctacagaggaatacggtatcgtggcagataacttgcagcagcaaaacacggctcctcaaattggaactgtcaacagccagggggccttacccggtatggtctggcagaaccgggacgtgtacctgcagggtcccatctgggccaagattcctcacacggacggcaacttccacccgtctccgctgatgggcggctttggcctgaaacatcctccgcctcagatcctgatcaagaacacgcctgtacctgcggatcctccgaccaccttcaaccagtcaaagctgaactctttcatcacgcaatacagcaccggacaggtcagcgtggaaattgaatgggagctgcagaaggaaaacagcaagcgctggaaccccgagatccagtacacctccaactactacaaatctacaagtgtggactttgctgttaatacagaaggcgtgtactctgaaccccaccccattggcaccagatacctgactcgtaatctgtaa

SEQ ID NO: 1088 - DNA, 2208 bp, synthetic construct
  misc_feature 1..2208: note = source = /note="Description of Artificial Sequence: Synthetic polynucleotide"
  source 1..2208: mol_type = other DNA
atggctgccgatggttatcttccagattggctcgaggacactctctctgaaggaataagacagtggtggaagctcaaacctggcccaccaccaccaaagcccgcagagcggcataaggacgacagcaggggtcttgtgcttcctgggtacaagtacctcggacccttcaacggactcgacaagggagagccggtcaacgaggcagacgccgcggccctcgagcacgacaaagcctacgaccggcagctcgacagcggagacaacccgtacctcaagtacaaccacgccgacgcggagtttcaggagcgccttaaagaagatacgtcttttgggggcaacctcggacgagcagtcttccaggcgaaaaagagggttcttgaacctctgggcctggttgaggaacctgttaagacggctccgggaaaaaagaggccggtagagcagtcgccacaagagccagactcctcctcgggcatcggcaagaaaggccagcagcccgctaaaaagagactcaattttggtcagactggcgactcagagtcagtccccgacccacaacctctcggagaacctccagcaacccccgctgctgtgggacctactacaatggcttcaggcggtggcgcaccaatggcggacaataacgaaggcgccgatggagtgggtaatgcctcaggaaattggcattgcgattccacatggctgggcgacagagtcatcaccaccagcacccgaacatgggccttgcccacctataacaaccacctctacaagcaaatctccagtgcttcaacgggggccagcaacgacaaccactacttcggctacagcaccccctgggggtattttgacttcaacagattccactgccacttctcaccacgtgactggcagcgactcatcaacaacaactggggattccggcctaagcgactcaacttcaagctcttcaacattcaggtcaaagaggttacggacaacaatggagtcaagaccatcgccaataaccttaccagcacggtccaggtcttcacggactcagactatcagctcccgtacgttctcggctctgcccaccagggctgcctgcctccgttcccggcggacgtgttcatgattccccagtacggctacctaacactcaacaacggtagtcaggccgtgggacgctcctccttctactgcctggaatactttccttcgcagatgctgagaaccggcaacaacttccagtttacttacaccttcgaggacgtgcctttccacagcagctacgcccacagccagagcttggaccggctgatgaatcctctgattgaccagtacctgtactacttgtctcggactcaaacaacaggaggcacggcaaatacgcagactctgggcttcagccaaggtgggcctaatacaatggccaatcaggcaaagaactggctgccaggaccctgttaccgccaacaacgcgtctcaacgacaaccgggcaaaacaacaatagcaactttgcctggactgctgggaccaaataccatctgaatggaagaaattcattggctaatcctggcatcgctatggcaacacacaaagacgacaaggagcgtttttttcccagtaacgggatcctgatttttggcaaacaaaatgctgccagagacaatgcggattacagcgatgtcatgctcaccagcgaggaagaaatcaaaaccactaaccctgtggctacagaggaatacggtatcgtggcagataacttgcagcagcaaaacacggctcctcaaattggaactgtcaacagccagggggccttacccggtatggtctggcagaaccgggacgtgtacctgcagggtcccatctgggccaagattcctcacacggacggcaacttccacccgtctccgctgatgggcggctttggcctgaaacatcctccgcctcagatcctgatcaagaacacgcctgtacctgcggatcctccgaccaccttcaaccagtcaaagctgaactctttcatcacgcaatacagcaccggacaggtcagcgtggaaattgaatgggagctgcagaaggaaaacagcaagcgctggaaccccgagatccagtacacctccaactactacaaatctacaagtgtggactttgctgttaatacagaaggcgtgtactctgaaccccaccccattggcacccgttacctcacccgtcccctg

SEQ ID NO: 1089 - DNA, 2211 bp, synthetic construct
  misc_feature 1..2211: note = source = /note="Description of Artificial Sequence: Synthetic polynucleotide"
  source 1..2211: mol_type = other DNA
atggctgccgatggttatcttccagattggctcgaggacactctctctgaaggaataagacagtggtggaagctcaaacctggcccaccaccaccaaagcccgcagagcggcataaggacgacagcaggggtcttgtgcttcctgggtacaagtacctcggacccttcaacggactcgacaagggagagccggtcaacgaggcagacgccgcggccctcgagcacgacaaagcctacgaccagcagctccaagcgggtgacaatccgtacctgcggtataaccacgccgacgccgagtttcaggagcgtcttcaaggagatacgtcttttgggggcaacctcggacgagcagtcttccaggccaaaaagaggcttcttgaacctcttggtctggttgaggaagcggctaagacggctcctggaaagaagaggcctgtagagcagtctcctcaggaaccggactcctccgcgggtattggcaaatcgggtgcacagcccgctaaaaagagactcaatttcggtcagactggcgacacagagtcagtcccagaccctcaaccaatcggagaacctcccgcagccccctcaggtgtgggatctcttacaatggcttcaggtggtggcgcaccagtggcagacaataacgaaggtgccgatggagtgggtagttcctcgggaaattggcattgcgattcccaatggctgggggacagagtcatcaccaccagcacccgaacatgggccttgcccacctataacaaccacctctacaagcaaatctccagtgcttcaacgggggccagcaacgacaaccactacttcggctacagcaccccctgggggtattttgacttcaaccgcttccactgccacttctcaccacgtgactggcagcgactcatcaacaacaactggggattccggcccaagagactcagcttcaagctcttcaaccatccaggtcaaggaggtcacgcagaatgaaggcaccaagaccatcgccaataacctcaccagcacatccaggtgtttacggactcggagtaccagctgccgtacgttctcggctctgcccaccagggctgcctgcctccgttcccggcggacgtgttcatgattccccagtacggctacctaacactcaacaacggtagtcaggccgtgggacgctcctccttctactgcctggaatactttccttcgcagatgctgagaaccggcaacaacttccagttcacttacaccttcgaggacgtgcctttccacagcagctacgcgcacagccagagcttggaccggctgatgaatcctctgattgaccagtacctgtactacttgtctcggactcaaacaacaggaggcacggcaaatacgcagactctgggcttcagccaaggtgggcctaatacaatggccaatcaggcaaagaactggctgccaggaccctgttaccgccaacaacgcgtctcaacgacaaccgggcaaaacaacaatagcaactttgcctggactgctgggaccaaataccatctgaatggaagaaattcattgggtaatcctggcatcgctatggcaacacacaaagacgacaaggagcgtttttttcccagtaacgggatcctgatttttggcaaacaaaatgctgccagagacaatgcggattacagcgatgtcatgctcaccagcgaggaagaaatcaaaaccactaaccctgtggctacagaggaatacggtatcgtggcagataacttgcagcagcaaaacacggctcctcaaattggaactgtcaacagccagggggccttacccggtatggtctggcagaaccgggacgtgtacctgcagggtcccatctgggccaagattcctcacacggacggcaacttccacccgtctccgctgatgggcggctttggcctgaaacatcctccgcctcagatcctcatcaaaaacacacctgtacctgcggatcctccaacggccttcaaccagtcaaagctgaactctttcatcacgcaatacagcaccggacaggtcagcgtggaaattgaatgggagctgcagaaggaaaacagcaagcgctggaaccccgagatccagtacacctccaactactacaaatctacaagtgtggactttgctgttaatacagaaggcgtgtactctgaaccccaccccattggcacccgttacctcacccgtcccctgtaa

SEQ ID NO: 1090 - DNA, 2214 bp, synthetic construct
  misc_feature 1..2214: note = source = /note="Description of Artificial Sequence: Synthetic polynucleotide"
  source 1..2214: mol_type = other DNA
atggctgccgatggttatcttccagattggctcgaggacaacctctctgagggcattcgcgagtggtgggacttgaaacatggagccccgaaacccaaagccaaccagcaaaagcaggacgacggccggggtctggtgcttcctggctacaagtacctcggacccttcaacggactcgacaagggggagcccgtcaacgcggcggatgcagcggccctcgagcacgacaaggcctacgaccagcagctcaaagcgggtgacaatccgtacctgcggtataaccacgccgacgccgagtttcaggagcgtctgcaagaagatacgtcttttgggggcaacctcgggcgagcagtcttccaggccaagaagagggttctcgaaccttttggtctggttgaggaaggtgctaagacggctcctggaaagaaacgtccggtagagcagtcgccacaagagccagactcctcctcgggcattggcaagacaggccagcagcccgctaaaaagagactcaattttggtcagactggcgactcagagtcagtccccgacccacaacctctcggagaacctccagcaacccccgctgctgtgggacctactacaatggcttcaggcggtggcgcaccaatggcagacaataacgaaggcgccgacggagtgggtaatgcctcaggaaattggcattgcgattccacatggctgggcgacagagtcatcaccaccagcacccgaacatgggccttgcccacctataacaaccacctctacaagcaaatctccaacgggacttcgggaggaagcaccaacgacaacacctacttcggctacagcaccccctgggggtattttgactttaacagattccactgccacttctcaccacgtgactggcagcgactcatcaacaacaactggggattccggcccaagagactcaacttcaaactcttcaacatccaagtcaaggaggtcacgcagaatgaaggcaccaagaccatcgccaataacctcaccagcaccatccaggtgtttacggactcggagtaccagctgccgtacgttctcggctccgcccaccagggctgcctgcctccgttcccggcggacgtgttcatgattccccagtacggctacctaacactcaacaacggtagtcaggccgtgggacgctcctccttctactgcctggaatactttccttcgcagatgctgagaacgggcaacaactttaccttcagctacacctttgaggacgttcctttccacagcagctacgctcacagccagagtctggaccgtctcatgaatcctctgattgaccagtacctgtactacttgtctcggactcaaacaacaggaggcacggcaaatacgcagactctgggcttcagccaaggtgggcctaatacaatggccaatcaggcaaagaactggctgccaggaccctgttaccgccaacaacgcgtctcaacgacaaccgggcaaaacaacaatagcaactttgcctggactgctgggaccaaataccatctgaatggaagaaattcattggctaatcctggcatcgctatggcaacacacaaagacgacaaggagcgtttttttcccagtaacgggatcctgatttttggcaaacaaaatgctgccagagacaatgcggattacagcgatgtcatgctcaccagcgaggaagaaatcaaaaccactaaccctgtggctacagaggaatacggtatcgtggcagataacttgcagcagcaaaacacggctcctcaaattggaactgtcaacagccagggggccttacccggtatggtctggcagaaccgggacgtgtacctgcagggtcccatctgggccaagattcctcacacggacggcaacttccacccgtctccgctgatgggcggctttggcctgaaacatcctccgcctcagatcctgatcaagaacacgcctgtacctgcggatcctccgaccaccttcaaccagtcaaagctgaactctttcatcacgcaatacagcaccggacaggtcagcgtggaaattgaatgggagctgcagaaggaaaacagcaagcgctggaaccccgagatccagtacacctccaactactacaaatctacaagtgtggactttgctgttaatacagaaggcgtgtactctgatccccaccccattggcacccgttacctcacccgtcccctgtaa

SEQ ID NO: 1091 - DNA, 2214 bp, synthetic construct
  misc_feature 1..2214: note = source = /note="Description of Artificial Sequence: Synthetic polynucleotide"
  source 1..2214: mol_type = other DNA
atggctgccgatggttatcttccagattggctcgaggacaacctctctgagggcattcgcgagtggtgggcgctgaaacctggagccccgaagcccaaagccaaccagcaaaagcaggacgacggccggggtctggtgcttcctggctacaagtacctcggacccttcaacggactcgacaaaggagagccggtcaacgaggcggacgcggcagccctcgaacacgacaaggcctacgaccagcagctcaaagcgggtgacaatccgtacctgcggtataaccacgccgacgccgagtttcaggagcgtctgcaagaagatacgtcttttgggggcaacctcgggcgagcagtcttccaggccaagaagcgggttctcgaacctctcggtctggttgaggaaggcgctaagacggctcctggaaagaagagaccggtagagccatcaccccagcgttctccagactcctctacgggcatcggcaagaaaggccagcagcccgccagaaaaagactcaattttggtcagactggcgactcagagtcagttccagaccctcaacctctcggagaacctccagcagcgccctctggtgtgggacctaatacaatggcttcaggcggtggcgcaccaatggcagacaataacgagggcgccgacggagtgggtaattcctcgggaaattggcattgcgattccacatggatgggcgacagagtcatcaccaccagcacccgaacctgggccctgcccacctacaacaaccacctctacaagcaaatctccagtgcttcaacgggggccagcaacgacaaccactacttcggctacagcaccccctgggggtattttgactttaacagattccactgccacttttcaccacgtgactggcagcgactcatcaacaacaactggggattccggcccaagagactcaacttcaagctcttcaacatccaagtcaaggaggtcacgcagaatgaaggcaccaagaccatcgccaataacctcaccagcaccatccaggtgtttacggactcggagtaccagctgccgtacgttctcggctctgcccaccagggctgcctgcctccgttcccggcggacgtgttcatgattccccagtacggctacctaacactcaacaacggtagtcaggccgtgggacgctcctccttctactgcctggaatactttccttcgcagatgctgagaaccggcaacaacttccagtttacttacaccttcgaggacgtgcctttccacagcagctacgcgcacagccagagcttggaccggctgatgaatcctctgattgaccagtacctgtactacttgtctcggactcaaacaacaggaggcacggcaaatacgcagactctgggcttcagccaaggtgggcctaatacaatggccaatcaggcaaagaactggctgccaggaccctgttaccgccaacaacgcgtctcaacgacaaccgggcaaaacaacaatagcaactttgcctggactgctgggaccaaataccatctgaatggaagaaattcattggctaatcctggcatcgctatggcaacacacaaagacgacaaggagcgtttttttcccagtaacgggatcctgatttttggcaaacaaaatgctgccagagacaatgcggattacagcgatgtcatgctcaccagcgaggaagaaatcaaaaccactaaccctgtggctacagaggaatacggtatcgtggcagataacttgcagcagcaaaacacggctcctcaaattggaactgtcaacagccagggggccttacccggtatggtctggcagaaccgggacgtgtacctgcagggtcccatctgggccaagattcctcacacggacggcaacttccacccgtctccgctgatgggcggctttggcctgaaacatcctccgcctcagatcctgatcaagaacacgcctgtacctgcggatcctccgaccaccttcaaccagtcaaagctgaactctttcatcacacaatacagcaccggacaggtcagcgtggaaattgaatgggagctgcagaaggaaaacagcaagcgctggaaccccgagatccagtacacctccaactactacaaatctacaagtgtggactttgctgttaatacagaaggcgtgtactctgaaccccaccccattggcacccgttacctcacccgtcccctgtaa

SEQ ID NO: 1092 - DNA, 2211 bp, synthetic construct
  variation 676: note = a, c, g, or t
  misc_feature 1..2211: note = source = /note="Description of Artificial Sequence: Synthetic polynucleotide"
  source 1..2211: mol_type = other DNA
atggctgccgatggttatcttccagattggctcgaggacactctctctgaaggaataagacagtggtggaagctcaaacctggcccaccaccaccaaagcccgcagagcggcataaggacgacagcaggggtcttgtgcttcctgggtacaagtacctcggacccttcaacggactcgacaagggagagccggtcaacgaggcagacgccgcggccctcgagcacgacaaagcctacgaccggcagctcgacagcggagacaacccgtacctcaagtacaaccacgccgacgcggagtttcaggagcgccttaaagaagatacgtcttttgggggcaacctcggacgagcagtcttccaggcgaaaaagagggttcttgaacctctgggcctggttgaggaacctgttaagacggctccgggaaaaaagaggccggtagagcagtcgccacaagagccagactcctcctcgggcatcggcaagaaaggccagcagcccgctaaaaagagactcaattttggtcagactggcgactcagagtcagtccccgacccacaacctctcggagaacctccagcaacccccgctgctgtgggacctactacaatggcttcaggcggtggcgcaccaatggcggacaataacgaaggcgccgatggagtgggtaatgcctcangaaattggcattgcgattccacatggctgggcgacagagtcatcaccaccagcacccgaacatgggccttgccacctataacaaccacctctacaagcaaatctccagtgcttcaacgggggcgcagcaacgacaaccactacttcggctacagcaccccctgggggtattttgacttcaacagattccactgccacttctcaccacgtgactggcagcgactcatcaacaacaactggggattccggcctaagcgactcaacttcaagctcttcaacattcaggtcaaagaggttacggacaacaatggagtcaagaccatcgccaataaccttaccagcacggtccaggtcttcacggactcagactatcagctcccgtacgttctcggctctgcccaccagggctgcctgcctccgttcccggcggacgtgttcatgattccccagtacggctacctaacactcaacaacggtagtcaggccgtgggacgctcctccttctactgcctggaatactttccttcgcagatgctgagaaccggcaacaacttccagtttacttacaccttcgaggacgtgcctttccacagcagctacgcccacagccagagcttggaccggctgatgaatcctctgattgaccagtacctgtactacttgtctcggactcaaacaacaggaggcacggcaaatacgcagactctgggcttcagccaaggtgggcctaatacaatggccaatcaggcaaagaactggctgccaggaccctgttaccgccaacaacgcgtctcaacgacaaccgggcaaaacaacaatagcaactttgcctggactgctgggaccaaataccatctgaatggaagaaattcattggctaatcctggcatcgctatggcaacacacaaagacgacaaggagcgtttttttcccagtaacgggatcctgatttttggcaaacaaaatgctgccagagacaatgcggattacagcgatgtcatgctcaccagcgaggaagaaatcaaaaccactaaccctgtggctacagaggaatacggtatcgtggcagataacttgcagcagcaaaacacggctcctcaaattggaactgtcaacagccagggggccttacccggtatggtttggcagaaccgggacgtgtacctgcagggtcccatctgggccaagattcctcacacggacggcaacttccacccgtctccgctgatgggcggctttggcctgaaacatcctccgcctcagatcctgatcaagaacacgcctgtacctgcggatcctccgaccaccttcaaccagtcaaagctgaactctttcatcacacagtactccacgggacaggtcagcgtggaaattgaatgggagctgcagaaggaaaacagcaagcgctggaacccggagatccagtacacttccaactactacaaatctacaaatgtggactttgctgttaacacagaaggcgtgtactctgaaccccaccccattggcacccgttacctcacccgtcccctgtaa

SEQ ID NO: 1093 - DNA, 2211 bp, synthetic construct
  variation 715: note = a, c, g, or t
  misc_feature 1..2211: note = source = /note="Description of Artificial Sequence: Synthetic polynucleotide"
  source 1..2211: mol_type = other DNA
atggctgccgatggttatcttccagattggctcgaggacaacctctctgagggcattcgcgagtggtgggacttgaaacctggagccccgaaacccaaagccaaccagcaaaagcaggacgacggccggggtctggtgcttcctggctacaagtacctcggacccttcaacggactcgacaagggggagcccgtcaacgcggcggatgcagcggccctcgagcacgacaaggcctacgaccagcagctccaagcgggtgacaatccgtacctgcggtataaccacgccgacgccgagtttcaggagcgtcttcaaggagatacgtcttttgggggcaacctcggacgagcagtcttccaggccaagaagcgggttctcgaacctctcggtctggttgaggaagcggctaagacggctcctggaaagaagaggcctgtagagcagtctcctcaggaaccggactcctccgcgggtattggcaaatcgggtgcacagcccgctaaaaagagactcaatttcggtcagactggcgacacagagtcagtcccagaccctcaaccaatcggagaacctcccgcagccccctctggtgtgggacctaatacaatggctgcaggcggtggcgcaccaatggcagacaataacgaaggcgccgatggagtgggtagttcctcgggaaattggcattgcgattccacatggctgggcgacagantcatcaccaccagcacccgaacctgggccctgcccacctataacaaccatctctacaagcaaatctccagtgcttcaacgggggccagcaacgacaaccactacttcggctacagcaccccctgggggtattttgacttcaacagattccactgccacttctcaccacgtgactggcagcgactcatcaacaacaactggggattccggcctaagcgactcaacttcaagctcttcaacattcaggtcaaagaggttacggacaacaatggagtcaagaccatcgccaataaccttaccagcacggtccaggtcttcacggactcggagtaccagttgccgtacgtcctcggctctgcgcaccagggctgcctgcctccgttcccggcggacgtgttcatgattccgcagtacggctacctaacgctcaacaatggcagccaggcagtgggacggtcatccttttactgcctggaatatttcccatcgcagatgctgagaacgggcaacaactttaccttcagctacacttttgaggacgttcctttccacagcagctacgctcacagccagagtctggaccgtctcatgaatcctctgattgaccagtacctgtactacttgtctcggactcaaacaacaggaggcacggcaaatacgcagactctgggcttcagccaaggtgggcctaatacaatggccaatcaggcaaagaactggctgccaggaccctgttaccgccaacaacgcgtctcaacgacaaccggacaaaacaacaatagcaactttgcctggactgctgggaccaaataccatctgaatggaagaaattcattggctaatcctggcatcgctatggcaacacacaaagacgacaaggagcgtttttttcccagtaacgggatcctgatttttggcaaacaaaatgctgccagagacaatgcggattacagcgatgtcatgctcaccagcgaggaagaaatcaaaaccactaaccctgtggctacagaggaatacggtatcgtggcagataactttcagcagcaaaacacggctcctcaaattggaactgtcaacagccagggggccttacccggtatggtctggcagaaccgggacgtgtacctgcagggtcccatctgggccaagattcctcacacggacggcaacttccacccgtctccgctgatgggcggctttggcctgaaacatcctccgcctcagatcctgatcaagaacacgcctgtacctgcggatcctccgaccaccttcaaccagtcaaagctgaactctttcatcacgcaatacagcaccggacaggtcagcgtggaaattgaatgggagctgcagaaggaaaacagcaagcgctggaaccccgagatccagtacacctccaactactacaaatctacaagtgtggactttgctgttaatacagaaggcgtgtactctgaaccccaccccattggcacccgttacctcacccgtcccctgtaa

SEQ ID NO: 1094 - DNA, 2211 bp, synthetic construct
  misc_feature 1..2211: note = source = /note="Description of Artificial Sequence: Synthetic polynucleotide"
  source 1..2211: mol_type = other DNA
atggctgccgatggttatcttccagattggctcgaggacaacctctctgagggcattcgcgagtggtgggcgctgaaacctggagccccgaagcccaaagccaaccagcaaaagcaggacgacggccggggtctggtgcttcctggctacaagtacctcggacccttcaacggactcgacaaaggagagccggtcaacgaggcggacgcggcagccctcgaacacgacaaagcttacgaccagcagctcaaggccggtgacaacccctacctcaagtataaccacgccgacgccgagtttcaggagcgtctgcaagaagatacgtcttttgggggcaacctcgggcgagcagtcttccaggccaaaaagaggcttcttgaacctcttggtctggttgaggaagcggctaagacggctcctggaaagaagaggcctgtagagcagtctcctcaggaaccggactcctccgcgggtattggcaaatcgggtgcacagcccgctaaaaagagactcaatttcggtcagactggcgacacagagtcagtcccagacccacaacctctcggagaacctccagcaacccccgctgctgtgggacctactacaatggcttcaggcggtggcgcaccaatggcggacaataacgaaggcgccgatggagtgggtaatgcctcaggaaattggcattgcgattccacatggctgggcgacagagtcatcaccaccagcacccgaacatgggccttgcccacctataacaaccacctctacaagcaaatctccagtgcttcaacgggggccagcaacgacaaccactacttcggctacagcaccccctgggggtattttgacttcaacagattccactgccacttctcaccacgtgactggcagcgactcatcaacaacaactggggattccggcccaagagactcagcttcaagctcttcaacatccaggtcaaggaggtcacgcagaatgaaggcaccaagaccatcgccaataacctcaccagcaccatccaggtgtttacggactcggagtaccagctgccgtacgttctcggctccgcccaccagggctgcctgcctccgttcccggcggacgtgttcatgattccccagtacggctacctaacactcaacaacggtagtcaggccgtgggacgctcctccttctactgcctggaatactttccttcgcagatgctgagaaccggcaacaacttccagtttacttacaccttcgaggacgtgcctttccacagcagctacgcccacagccagagcttggaccggctgatgaatcctctgattgaccagtacctgtactacttgtctcggactcaaacaacaggaggcacggcaaatacgcagactctgggcttcagccaaggtgggcctaatacaatggccaatcaggcaaagaactggctgccaggaccctgttaccgccaacaacgcgtctcaacgacaaccgggcaaaacaacaatagcaactttgcctggactgctgggaccaaataccatctgaatggaagaaattcattggctaatcctggcatcgctatggcaacacacaaagacgacaaggagcgtttttttcccagtaacgggatcctgatttttggcaaacaaaatgctgccagagacaatgcggattacagcgatgtcatgctcaccagcgaggaagaaatcaaaaccactaaccctgtggctacagaggaatacggtatcgtggcagataacttgcagcagcaaaacacggctcctcaaattggaactgtcaacagccagggggccttacccggtatggtctggcagaaccgggacgtgtacctgcagggtcccatctgggccaagattcctcacacggacggcaacttccacccgtctccgctgatgggcggctttggcctgaaacatcctccgcctcagatcctgatcaagaacacgcctgtacctgcggatcctccgaccaccttcaaccagtcaaagctgaactctttcatcacgcaatacagcaccggacaggtcagcgtggaaattgaatgggagctgcagaaggaaaacagcaagcgctggaaccccgagatccagtacacctccaactactacaaatctacaagtgtggactttgctgttaatacagaaggcgtgtactctgaaccccaccccattggcacccgttacctcacccgtcccctgtaa

SEQ ID NO: 1095 - DNA, 2211 bp, synthetic construct
  misc_feature 1..2211: note = source = /note="Description of Artificial Sequence: Synthetic polynucleotide"
  source 1..2211: mol_type = other DNA
atggctgccgatggttatcttccagattggctcgaggacactctctctgaaggaataagacagtggtggaagctcaaacctggcccaccaccaccaaagcccgcagagcggcataaggacgacagcaggggtcttgtgcttcctgggtacaagtacctcggacccttcaacggactcgacaagggagagccggtcaacgaggcagacgccgcggccctcgagcacgacaaagcctacgaccagcagctccaagcgggtgacaatccgtacctgcggtataaccacgccgacgccgagtttcaggagcgtcttcaaggagatacgtcttttgggggcaacctcggacgagcagtcttccaggccaaaaagaggcttcttgaacctcttggtctggttgaggaagcggctaagacggctcctggaaagaagaggcctgtagagcagtctcctcaggaaccggactcctccgcgggtattggcaaatcgggtgcacagcccgctaaaaagagactcaatttcggtcagactggcgacacagagtcagtcccagaccctcaaccaatcggagaacctcccgcagccccctcaggtgtgggatctcttacaatggcttcaggtggtggcgcaccagtggcagacaataacgaaggtgccgatggagtgggtagttcctcgggaaattggcattgcgattcccaatggctgggggacagagtcatcaccaccagcacccgaacatgggccttgcccacctataacaaccacctctacaagcaaatctccagtgcttcaacgggggccagcaacgacaaccactacttcggctacagcaccccctgggggtattttgacttcaaccgcttccactgccacttctcaccacgtgactggcagcgactcatcaacaacaactggggattccggcccaagagactcagcttcaagctcttcaacatccaggtcaaggaggtcacgcagaatgaaggcaccaagaccatcgccaataacctcaccagcaccatccaggtgtttacggactcggagtaccagctgccgtacgttctcggctctgcccaccagggctgcctgcctccgttcccggcggacgtgttcatgattccccagtacggctacctaacactcaacaacggtagtcaggccgtgggacgctcctccttctactgcctggaatactttccttcgcagatgctgagaaccggcaacaacttccagtttacttacaccttcgaggacgtgcctttccacagcagctacgcccacagccagagcttggaccggctgatgaatcctctgattgaccagtacctgtactacttgtctcggactcaaacaacaggaggcacggcaaatacgcagactctgggcttcagccaaggtgggcctaatacaatggccaatcaggcaaagaactggctgccaggaccctgttaccgccaacaacgcgtctcaacgacaaccgggcaaaacaacaatagcaactttgcctggactgctgggaccaaataccatctgaatggaagaaattcattggctaatcctggcatcgctatggcaacacacaaagacgacaaggagcgtttttttcccagtaacgggatcctgatttttggcaaacaaaatgctgccagagacaatgcggattacagcgatgtcatgctcaccagcgaggaagaaatcaaaaccactaaccctgtggctacagaggaatacggtatcgtggcagataacttgcagcagcaaaacacggctcctcaaattggaactgtcaacagccagggggccttacccggtatggtctggcagaaccgggacgtgtacctgcagggtcccatctgggccaagattcctcacacggacggcaacttccacccgtctccgctgatgggcggctttggcctgaaacatcctccgcctcagatcctgatcaagaacacgcctgtacctgcggatcctccgaccaccttcaaccagtcaaagctgaactctttcatcacgcaatacagcaccggacaggtcagcgtggaaattgaatgggagctgcagaaggaaaacagcaagcgctggaaccccgagatccagtacacctccaactactacaaatctacaagtgtggactttgctgttaatacagaaggcgtgtactctgaaccccaccccattggcacccgttacctcacccgtcccctgtaa

SEQ ID NO: 1096 - DNA, 2217 bp, synthetic construct
  misc_feature 1..2217: note = source = /note="Description of Artificial Sequence: Synthetic polynucleotide"
  source 1..2217: mol_type = other DNA
atggctgccgatggttatcttccagattggctcgaggacaacctctctgagggaataagacagtggtggaagctcaaacctggcccaccaccaccaaagcccgcagagcggcataaggacgacagcaggggtcttgtgcttcctgggtacaagtacctcggacccttcaacggactcgacaagggagagccggtcaacgcggcggacgcagcggccctcgagcacgacaaggcctacgaccagcagctcaaagcgggtgacaatccgtacctgcggtataaccacgccgacgccgagtttcaggagcgtctgcaagaagatacgtcttttgggggcaacctcgggcgagcagtcttccaggccaagaagcgggttctcgaacctctcggtctggttgaggaaggcgctaagacggctcctggaaagaagagaccggtagagccatcaccccagcgttctccagactcctctacgggcatcggcaagaaaggccagcagcccgctaaaaagagactcaattttggtcagactggcgactcagagtcagtccccgacccacaacctctcggagaacctccagcaacccccgctgctgtgggacctactacaatggcttcaggcggtggcgcaccaatggcagacaataacgaaggcgccgacggagtgggtaatgcctcaggaaattggcattgcgattccacatggctgggggacagagtcatcaccaccagcacccgaacctgggccctgcccacctacaacaaccacctctacaagcaaatctccaacgggacttcgggaggaagcaccaacgacaacacctacttcggctgcgtcacgccctgggggtattttgactttaacaaattccactgccacttttcaccggatgactggcaacgactcatcaacaacggctggggattccggactaagcgactcaacttcaagctcttcagcatgaaagtcaaaaagggtacggacaacactggaatcaagaccatcgcgaataaccttaccaacacggtccatgtcttcgcggactcggagtaccagttgccgtacgtcctcggctctgcgcaccagggctgcctccctccgttcccggcggacgtgttcatgattccgcagtacggctacctaacgctcaacaatggcagccaggcagtgggacggtcatccttttactgcctggaatatttcccatcgcagatgctgagaacgggcaacaactttaccttcagctacacctttgaggacgttcctttccacagcagctacgctcacagccagagtctggaccgtctcatgaatcctctgattgaccagtacctgtactacttgtctcggactcaaacaacaggaggcacggcaaatacgcagactctgggcttcagccaaggtgggcctaatacaatggccaatcaggcaaagaactggctgccaggaccctgttaccgccaacaacgcgtctcaacgacaaccgggcaaaacaacaatagcaactttgcctggactgctgggaccaaataccatctgaatggaagaaattcattggctaatcctggcatcgctatggcaacacacaaagacgacaaggagcgtttttttcccagtaacgggatcctgatttttggcaaacaaaatgctgccagagacaatgcggattacagcgatgtcatgctcaccagcgaggaagaaatcaaaaccactaaccctgtggctacagaggaatacggtatcgtggcagataacttgcagcagcaaaacacggctcctcaaattggaactgtcaacagccagggggccttacccggtatggtctggcagaaccgggacgtgtacctgcagggtcccatctgggccaagattcctcacacggacggcaacttccacccgtctccgctgatgggcggctttggcctgaaacatcctccgcctcagatcctgatcaagaacacgcctgtacctgcggatcctccgaccaccttcaaccagtcaaagctgaactctttcatcacgcaatacagcaccggacaggtcagcgtggagatcgagtgggagctgcagaaggaaaacagcaagcgctggaacccggagatccagtacacctccaactactacaaatctacaagtgtggactttgctgttaatacagaaggcgtgtactctgaaccccaccccattggcacccgttacctcacccgtcccctgtaa

SEQ ID NO: 1097 - DNA, 2214 bp, synthetic construct
  misc_feature 1..2214: note = source = /note="Description of Artificial Sequence: Synthetic polynucleotide"
  source 1..2214: mol_type = other DNA
atggctgccgatggttatcttccagattggctcgaggacactctctctgaaggaataagacagtggtggaagctcaaacctggcccaccaccaccaaagcccgcagagcggcataaggacgacagcaggggtcttgtgcttcctgggtacaagtacctcggacccttcaacggactcgacaagggggagcccgtcaacgcggcggacgcagcggccctcgagcacgacaaggcctacgaccagcagctcaaagcgggtgacaatccgtacctgcggtataaccacgccgacgccgagtttcaggagcgtctgcaagaagatacgtcttttgggggcaacctcgggcgagcagtcttccaggccaagaagcgggttctcgaacctctcggtctggttgaggaaggcgctaagacggctcctggaaagaagagaccggtagagccatcaccccagcgttctccagactcctctacgggcatcggcaagaaaggccagcagcccgcgaaaaagagactcaactttgggcagactggcgactcagagtcagtgcccgaccctcaaccaatcggagaaccccccgcaggcccctctggtctgggatctggtacaatggctgcaggcggtggcgctccaatggcagacaataacgaaggcgccgatggagtgggtagttcctcgggaaattggcattgcgattccacatggctgggggacagagtcatcaccaccagcacccgaacctgggccctgcccacctacaacaaccacctctacaaacaaatttccagcgcttcaacgggagcctcgaacgacaatcactactttggctacagcaccccctgggggtattttgacttcaacagattccactgccacttctcaccacgtgactggcagcgactcatcaacaacaactggggattccggcctaagcgactcaacttcaagctcttcaacattcaggtcaaagaggttacggacaacaatggagtcaagaccatcgccaataaccttaccagcacggtccaggtcttcacggactcggagtaccagttgccgtacgtcctcggctctgcgcaccagggctgcctccctccgttcccggcggacgtgttcatgattccgcagtacggctacctaacgctcaacaatggcagccaggcagtgggacggtcatccttttactgcctggaatatttcccatcgcagatgctgagaacgggcaacaactttaccttcagctacacctttgaggacgttcctttccacagcagctacgctcacagccagagtctggaccgtctcatgaatcctctgattgaccagtacctgtactacttgtctcggactcaaacaacaggaggcacggcaaatacgcagactctgggcttcagccaaggtgggcctaatacaatggccaatcaggcaaagaactggctgccaggaccctgttaccgccaacaacgcgtctcaacgacaaccgggcaaaacaacaatagcaactttgcctggactgctgggaccaaataccatctgaatggaagaaattcattggctaatcctggcatcgctatggcaacacacaaagacgacaaggagcgtttttttcccagtaacgggatcctgatttttggcaaacaaaatgctgccagagacaatgcggattacagcgatgtcatgctcaccagcgaggaagaaatcaaaaccactaaccctgtggctacagaggaatacggtatcgtggcagataacctgcagcagcaaaacacggctcctcaaattggaactgtcaacagccagggggccttacccggtatggtctggcagaaccgggacgtgtacctgcagggtcccatctgggccaagattcttcacacggacggcaactttcacccttctccgctgatgggagggtttggaatgaagcacccgcctcctccgatcctgatcaagaacacgcctgtacctgcggatcctccgaccaccttcaaccagtcaaagctgaactctttcatcacgcaatacagcaccggacaggtcagcgtggaaattgaatgggagctgccgaaggaaaacagcaagcgctggaaccccgagatccagtacacctccaactactacaaatctacaagtgtggactttgctgttaatacagaaggtgtgtactatgaaccccaccccattggcacccgttacctcacccctcccctgtaa

SEQ ID NO: 1098 - DNA, 2214 bp, synthetic construct
  misc_feature 1..2214: note = source = /note="Description of Artificial Sequence: Synthetic polynucleotide"
  source 1..2214: mol_type = other DNA
atggctgccgatggttatcttccagattggctcgaggacaacctctctgagggcattcgcgagtggtgggcgctgaaacctggagccccgaagcccaaagccaaccagcaaaagcaggacgacggccggggtctggtgcttcctggctacaagtacctcggacccttcaacggactcgacaagggggagcccgtcaacgcggcggacgcagcggccctcgagcacgacaaggcctacgaccagcagctcaaagcgggtgacaatccgtacctgcggtataaccacgccgacgccgagtttcaggagcgtctgcaagaagatacgtcttttgggggcaacctcgggcgagcagtcttccaggccaagaagcgggttctcgaacctctcggtctggttgaggaaggcgctaagacggctcctggaaagaagagaccggtagagccatcaccccagcgctctccagactcctctacgggcatcggcaagaaaggccaacagcccgccagaaaaagactcaattttggtcagactggcgactcagagtcagttccagaccctcaacctctcggagaacctccagcagcgccctctggtgtggcacctaatacaatggctgcaggcggtggcgcaccaatggcagacaataacgaaggcgccgacggagtgggtaatgcctcaggaaattggcattgcgattccacatggctgggcgacagagtcatcaccaccagcacccgaacatgggccttgcccacctataacaaccacctctacaagcaaatctccagtgcttcaacgggggccagcaacgacaaccactacttcggctacagcaccccctgggggtattttgatttcaacagattccactgccacttttcaccacgtgactggcagcgactcatcacaacaattgggggattccggcctaagcgactcaacttcaagctcttcaacattcaggtcaaagaggttacggacaacaatggagtcaagaccatcgccaataaccttaccagcacggtccaggtcttcacggactcggagtaccagttgccgtacgtcctcggctctgcgcaccagggctgcctccctccgttcccggcggacgtgttcatgattccgcagtacggctacctaacgctcaacaatggcagccaggcagtgggacggtcatccttttactgcctggaatatttcccatcgcagatgctgagaacgggcaacaactttaccttcagctacacctttgaggacgttcctttccacagcagctacgctcacagccagagtctggaccggctgatgaatcctctgattgaccagtacctgtactacttgtctcggactcaaacaacaggaggcacggcaaatacgcagactctgggcttcagccaaggtgggcctaatacaatggccaatcaggcaaagaactggctgccaggaccctgttaccgccaacaacgcgtctcaacgacaaccgggcaaaacaacaatagcaactttgcctggactgctgggaccaaataccatctgaatggaagaaattcattggctaatcctggcatcgctatggcaacacacaaagacgacaaggagcgtttttttcccagtaacgggatcctgatttttggcaaacaaaatgctgccagagacaatgcggattacagcgatgtcatgctcaccagcgaggaagaaatcaaaaccactaaccctgtggctacagaggaatacggtatcgtggcagataacttgcagcagcaaaacacggctcctcaaattggaactgtcaacagccagggggccttacccggtatggtctggcagaaccgggacgtgtacctgcagggtcccatctgggccaagattcctcacacggacggcaacttccacccgtctccgctgatgggcggctttggcctgaaacatcctccgcctcagatcctgatcaagaacacgcctgtacctgcggatcctccgaccaccttcaaccagtcaaagctgaactctttcatcacgcaatacagcaccggacaggtcagcgtggaaattgaatgggagctgcagaaggaaaacagcaagcgctggaaccccgagatccagtacacctccaactactacaaatctacaagtgtggactttgctgttaatacagaaggcgtgtactctgaaccccaccccattggcacccgttacctcacccgtcccctgtaa

SEQ ID NO: 1099 - DNA, 2211 bp, synthetic construct
  misc_feature 1..2211: note = source = /note="Description of Artificial Sequence: Synthetic polynucleotide"
  source 1..2211: mol_type = other DNA
atggctgccgatggttatcttccagattggctcgaggacactctctctgaaggaataagacagtggtggaagctcaaacctggcccaccaccaccaaagcccgcagagcggcataaggacgacggccggggtctggtgcttcctggctacaagtacctcggacccttcaacggactcgacaagggggagcccgtcaacgcggcggacgcagcggccctcgagcacgacaaggcctacgaccagcagctcaaagcgggtgacaatccgtacctgcggtataaccacgccgacgccgagtttcaggagcgtctgcaagaagatacgtcttttgggggcaacctcggacgagcagtcttccaggcgaaaaagagggttcttgaacctctgggcctggttgaggaacctgttaagacggctccgggaaaaaagaggccggtagagcagtcgccacaagagccagactcctcctcgggcatcggcaagaaaggccagcagcccgctaaaaagagactcaattttggtcagactggcgactcagagtcagtccccgacccacaacctctcggagaacctccagcaacccccgctgctgtgggacctactacaatggcttcaggcggtggcgcaccaatggcagacaataacgaaggcgccgacggagtgggtaatgcctcaggaaattggcattgcgattccacatggatgggcgacagagtcatcaccaccagcacccgaacatgggccttgcccacctataacaaccacctctacaagcaaatctccagtgcttcaacgggggccagcaacgacaaccactacttcggctacagcaccccctgggggtattttgactttaacagattccactgccacttttcaccacgtgactggcagcgactcatcaacaacaactggggattccggcctaagcgactcaacttcaagctcttcaacattcaggtcaaggaggtcacgcagaatgaaggcaccaagaccatcgccaataacctcaccagcaccatccaggtgtttacggactcggagtaccagctgccgtacgttctcggctccgcccaccagggctgcctgcctccgttcccggcggacgtgttcatgatcccccagtacggctacctaacactcaacaacggtagtcaggccgtgggacgctcctccttctactgcctggaatactttccttcgcagatgctgagaaccggcaacaacttccagtttacttacaccttcgaggacgtgcctttccacagcagctacgcgcacagccagagcttggaccggctgatgaatcctctgattgaccagtacctgtactacttgtctcggactcaaacaacaggaggcacggcaaatacgcagactctgggcttcagccaaggtgggcctaatacaatggccaatcacgcaaagaactggctgccaggaccctgttaccgccaacaacgcgtctcaacgacaaccgggcaaaacaacaatagcaactttgcctggactgctgggaccaaataccatctgaatggaagaaattcattggctaatcctggcatcgctatggcaacacacaaagacgacaaggagcgtttttttcccagtaacgggatcctgatttttggcaaacaaaatgctgccagagacaatgcggattacagcgatgtcatgctcaccagcgaggaagaaatcaaaaccactaaccctgtggctacagaggaatacggtatcgtggcagataacttgcagcagcaaaacacggctcctcaaattggaactgtcaacagccagggggccttacccggtatggtctggcagaaccgggacgtgtacctgcagggtcccatctgggccaagattcctcacacggacggcaacttccacccgtctccgctgatgggcggcttcggcctgaaacatcctccgcctcagatcctgatcaagaacacgcctgtacctgcggatcctccgaccaccttcaaccagtcaaagctgaactctttcatcacgcaatacagcaccggacaggtcagcgtggaaattgaatgggagctgcagaaggaaaacagcaagcgctggaaccccgagatccagtacacctccaactactacaaatctacaagtgtggactttgctgttaatacagaaggcgtgtactctgaaccccaccccattggcacccgttacctcacccgtcccctgtaa

SEQ ID NO: 1100 - DNA, 2214 bp, synthetic construct
  misc_feature 1..2214: note = source = /note="Description of Artificial Sequence: Synthetic polynucleotide"
  source 1..2214: mol_type = other DNA
atggctgccgatggttatcttccagattggctcgaggacaacctctctcagggcattcgcgagtggtgggacttgaaacctggagccccgaaacccaaagccaaccagcaaaagcaggacgacggccggggtctggtgcttcctggctacaagtacctcggacccttcaacggactcgacaagggggagcccgtcaacgcggcggacgcagcggccctcgagcacgacaaggcctacgaccagcagctcaaagcgggtgacaatccgtacctgcggtataaccacgccgacgccgagtttcaggagcgtctgcaagaagatacgtcttttgggggcaacctcggacgagcagtcttccaggccaagaagcgggttctcgaacctctcggtctggttgaggaaggcgctaagacggctcctggaaagaagagaccggtagagccatcaccccagcgttctccagactcctctacgggcatcggcaagaaaggccaacagcccgccagaaaaagactcaattttggtcagactggcgactcagagtcagttccagaccctcaacctctcggagaacctccagcagcgcccgctgctgtgggacctactacaatggcttcaggcggtggcgcaccaatggcagacaataacgaaggcgccgacggagtgggtagttcctcgggaaattggcattgcgattcccaatggctgggggacagagtcatcaccaccagcacccgaacctgggccctgcccacctacaacaaccacctctacaagcaaatctccagtgcttcaacgggggccagcaacgacaaccactacttcggctacagcaccccctgggggtattttgacttcaacagattccactgccacttttcaccacgtgactggcaaagactcatcaacaacaactggggattccggcccaagagactcagcttcaagctcttcaacatccaggtcaaggaggtcacgcagaatgaaggcaccaagaccatcgccaataacctcaccagcaccatccaggtgtttacggactcggagtaccagctgccgtacgttctcggctctgcccaccagggctgcctgcctccgttcccggcggacgtgttcatgattccccagtacgggtacctgactctgaacaatggcagtcaggccgtgggccgttcctccttctactgcctggagtactttccttctcaaatgctgagaaccggcaacaacttccagtttacttacaccttcgaggacgtgcctttccacagcagctacgcccacagccagagcttggaccggctgatgaatcctctgattgaccagtacctgtactacttgtctcggactcaaacaacaggaggcacgacaaatgcgcagactctgggcttcagccaaggtgggcctaatacaatggccaatcaggcaaagaactggctgccaggaccctgttaccgccaacaacgcgtctcaacgacaaccgggcaaaacaacaatagcaactttgcctggactgctgggaccaaataccatctgaatggaagaaattcattggctaatcctggcatcgctatggcaacacacaaagacgacaaggagcgtttttttcccagtaacgggatcctgatttttggcaaacaaaatgctgccagagacaatgcggattacagcgatgtcatgctcaccagcgaggaagaaatcaaaaccactaaccctgtggctacagaggaatacggtatcgtggcagataacttgcagcagcaaaacacggctcctcaaattggaactgtcaacagccagggggccttacccggtatggtctggcagaaccgggacgtgtacctgcagggtcccatctgggccaagattcctcacacggacggcaacttccacccgtctccgctgatgggcggctttggcctgaaacatcctccgcctcagatcctgatcaagaacacgcctgtacctgcggatcctccgaccaccttcaaccagtcaaagctgaactctttcatcacacagtactccacgggacaggtcagcgtggaaattgaatgggagctgcagaaggaaaacagcaagcgctggaacccggagatccagtacacttccaactactacaaatctacaaatgtggactttgctgttaacacagaaggcgtgtactctgaaccccaccccattggcacccgttacctcacccgtcccctgtaa

SEQ ID NO: 1101 - DNA, 2211 bp, synthetic construct
  misc_feature 1..2211: note = source = /note="Description of Artificial Sequence: Synthetic polynucleotide"
  source 1..2211: mol_type = other DNA
atggctgccgatggttatcttccagattggctcgaggacaacctctctgagggcattcgcgagtggtgggacttgaaacctggagccccgaaacccaaagccaaccagcaaaagcaggacgacggccggggtctggtgcttcctggctacaagtacctcggacccttcaacggactcgacaagggggagcccgtcaacgcggcggacgcagcggccctcgagcacgacaaggcctacgaccagcagctcaaagcgggtgacaatccgtacctgcggtataaccacgccgacgccgagtttcaggagcgtctgcaagaagatacgtcttttgggggcaacctcgggcgagcagtcttccaggccaagaagagggttctcgaaccttttggtctggttgaggaaggcgctaagacggctcctggaaagaaacgtccggtagagcagtcgccacaagagccagactcctcctcgggcatcggcaagacaggccagcagcccgctaaaaagagactcaatttcggtcagactggcgacacagagtcagtcccagaccctcaaccaatcggagaacctcccgcagccccctcaggtgtgggacctaatacaatggctgcaggcggtggcgcaccaatggcagacaataacgaaggcgccgacggagtgggtagttcctcgggaaattggcattgcgattccacatggatgggtgacagagtcatcaccaccagcacccgaacctgggccctgcccacctacaataaccacctctacaagcaaatctccagtgcttcaacgggggccagcaacgacaaccactacttcggctacagcaccccctgggggtattttgacttcaacagattccactgccacttctcaccacgtgactggcagcgactcatcaacaacaactggggattccggcctaagcgactcaacttcaagctcttcaacattcaggtcaaggaggtcacgcagaatgaaggcaccaagaccatcgccaataacctcaccagcaccatccaggtgtttacggactcggagtaccagctgccgtacgttctcggctctgcccaccagggctgcctgcctccgttcccggcggacgtgttcatgattccccagtacggctacctaacactcaacaacggtagtcaggccgtgggacgctcctccttctactgcctggaatactttccttcgcagatgctgagaaccggcaacaacttccagtttacttacaccttcgaggacgtgcctttccacagcagctacgcccacagccagagcttggaccggctgatgaatcctctgattgaccagtacctgtactacttgtctcggactcaaacaacaggaggcacggcaaatacgcagactctgggcttcagccaaggtgggcctaatacaatggccaatcaggcaaagaactggctgccaggaccctgttaccgccaacaacgcgtctcaacgacaaccgggcaaaacaacaatagcaactttgcctggactgctgggaccaaataccatctgaatggaagaaattcattggctaatcctggcatcgctatggcaacacacaaagacgacaaggagcgtttttttcccagtaacgggatcctgatttttggcaaacaaaatgctgccagagacaatgcggattacagcgatgtcatgctcaccagcgaggaagaaatcaaaaccactaaccctgtggctacagaggaatacggtatcgtggcagataacttgcagcagcaaaacacggctcctcaaattggaactgtcaacagccagggggccttacccggtatggtctggcagaaccgggacgtgtacctgcagggtcccatctgggccaagattcctcacacggacggcaacttccacccgtctccgctgatgggcggctttggcctgaaacatcctccgcctcagatcctgatcaagaacacgcctgtacctgcggatcctccgaccaccttcaaccagtcaaagctgaactctttcatcacacagtactccacgggacaggtcagcgtggaaattgaatgggagctgcagaaggaaaacagcaagcgctggaacccggagatccagtacacttccaactactacaaatctacaaatgtggactttgctgttaacacagaaggcgtgtactctgaaccccaccccattggcacccgttacttcacccgtcccctgtaa

SEQ ID NO: 1102 - DNA, 2211 bp, synthetic construct
  misc_feature 1..2211: note = source = /note="Description of Artificial Sequence: Synthetic polynucleotide"
  source 1..2211: mol_type = other DNA
atggctgccgatggttatcttccagattggctcgaggacaacctctctgagggcattcgcgagtggtgggacttgaaacctggagccccgaaacccaaagccaaccagcaaaagcaggacgacggccggggtctggtgcttcctggctacaagtacctcggacccttcaacggactcgacaagggggagcccgtcaacgcggcggacgcagcggccctcgagcacgacaaggcctacgaccagcagctcaaagcgggtgacaatccgtacctgcggtataaccacgccgacgccgagtttcaggagcgtctgcaagaagatacgtcttttgggggcaacctcgggcgagcagtcttccaggccaagaagcgggttctcgaacctctcggtctggttgaggaaggcgctaagacggctcctggaaagaaacgtccggtagagcagtcgccacaagagccagactcctcctcgggcatcggcaagacaggccagcagcccgctaaaaaaagactcaattttggtcagactggcgactcagagtcagttccagaccctcaacctctcggagaacctccagcaacccccgctgctgtgggacctactacaatggcttcaggtggtggcgcaccaatggcagacaataacgagggcgccgacggagtgggtaattcctcgggaaattggcattgcgattccacatggatgggcgacagagtcatcaccaccagcacccgaacctgggccctgcccacctacaacaatcacctctacaagcaaatctccagtgcttcaacgggggccagcaacgacaaccactacttcggctacagcaccccctgggggtattttgacttcaacagattccactgccacttctcaccacgtgactggcagcgactcatcaacaacaactggggattccggcctaagcgactcaacttcaagctcttcaacattcaggtcaaagaggttacggacaacaatggagtcaagaccatcgccaataaccttaccagcacggtccaggtcttcacggactcggagtaccagttgccgtacgtcctcggctctgcgcaccagggctgcctccctccgttcccggcggacgtgttcatgattccgcagtacggctacctaacgctcaacaacggtagtcaggccgtgggacgctcctccttctactgcctggaatactttccttcgcagatgctgagaaccggcaacaacttccagtttacttacaccttcgaggacgtgcctttccacagcagctacgcccacagccagagcttggaccggctgatgaatcctctgattgaccagtacctgtactacttgtctcggactcaaacaacaggaggcacggcaaatacgcagactctgggcttcagccaaggtgggcctaatacaatggccaatcaggcaaagaactggctgccaggaccctgttaccgccaacaacgcgtctcgacgacaaccgggcaaaacaacaatagcaactttgcctggactgctgggaccaaataccatctgaatggaagaaattcattggctaatcctggcatcgctatggcaacacacaaagacgacaaggagcgtttttttcccagtaacgggatcctgatttttggcaaacaaaatgctgccagagacaatgcggattacagcgatgtcatgctcaccagcgaggaagaaatcaaaaccactaaccctgtggctacagaggaatacggtatcgtggcagataacttgcagcagcaaaacacggctcctcaaattggaactgtcaacagccagggggccttacccggtatggtttggcagaaccgggacgtgtacctgcagggtcccatctgggccaagattcctcacacggacggcaacttccacccgtctccgctgatgggcggctttggcctgaaacatcctccgcctcagatcctgatcaagaacacgcctgtacctgcggatcctccgaccaccttcaaccagtcaaagctgaactctttcatcacacagtactccacgggacaggtcagcgtggaaattgaatgggagctgcagaaggaaaacagcaagcgctggaacccggagatccagtacacttccaactactacaaatctacaaatgtggactttgctgttaacacagaaggcgtgtactctgaaccccaccccattggcacccgttacctcacccgtcccctgtaa

SEQ ID NO: 1103 - DNA, 2211 bp, synthetic construct
  misc_feature 1..2211: note = source = /note="Description of Artificial Sequence: Synthetic polynucleotide"
  source 1..2211: mol_type = other DNA
atggctgccgatggttatcttccagattggctcgaggacaacctctctgagggcattcgcgagtggtgggacttgaaacctggagccccgaagcccaaagccaaccagcaaaagcaggacgacggccggggtctggtgcttcctggctacaagtacctcggacccttcaacggactcgacaagggggagcccgtcaacgcggcggacgcagcggccctcgagcacgacaaggcctacgaccagcagctcaaagcgggtgacaatccgtacctgcggtataaccacgccgacgccgagtttcaggagcgtctgcaagaagatacgtcttttgggggcaacctcgggcgagcagtcttccaggccaagaagcgggttctcgaacctctcggtctggttgaggaaggcgctaagacggctcctggaaagaaacgtccggtagagcagtcaccacaagagccagactcctcctcgggcatcggcaagacaggccagcagcccgctaaaaagagactcaattttggtcagactggcgactcagagtcagtccccgacccacaacctctcggagaacctccagcaacccccgctgctgtgggacctactacaatggcttcaggcggtggcgcaccaatggcggacaataacgaaggcgccgatggagtgggtaatgcctcaggaaattggcattgcgattccacatggctgggcgacagagtcatcaccaccagcacccgaacatgggccttgcccacctataacaaccacctctacaagcaaatctccagtgcttcaacgggggccagcaacgacaaccactacttcggctacagcaccccctgggggtattttgactttaacagattccactgccacttctcaccacgtgactggcagcgactcatcaacaacaactggggattccggcccaagagactcaacttcaagctcttcaacatccaggtcaaggaggtcacgcagaatgaaggcaccaagaccatcgccaataacctcaccagcaccatccaggtgtttacggactcggagtaccagctgccgtacgttctcggctctgcccaccagggctgcctgcctccgttcccggcggacgtgttcatgattccccagtacggctacctgactctgaacaatggcagtcaggccgtgggccgttcctccttctactgcctagagtactttccttctcaaatgctgagaacgggcaacaactttgagttcagctaccagtttgaggacgtgccttttcacagcagctacgcgcacagccaaagcctggaccggctgatgaatcctctgattgaccagtacctgtactacttgtctcggactcaaacaacaggaggcacggcaaatacgcagactctgggcttcagccaaggtgggcctaatacaatggccaatcaggcaaagaactggctgccaggaccctgttaccgccaacaacgcgtctcaacgacaaccgggcaaaacaacaatagcaactttgcctggactgctgggaccaaataccatatgaatggaagaaattcattggttaatcctggcatcgctatggcaacacacaaagacgacaaggagcgtttttttcccagtaacgggatcctgatttttggcaaacaaaatgttgccagagacaatgcggattacagcgatgtcatgctcaccagcgaggaagaaatcaaaaccactaaccctgtggctacagaggaatacggtattgtggcagataacttgcagcagcaaaacacggctcctcaaattggaactgtcaacagccagggggccttacccggtatggtctggcagaaccgggacgtgtacctgcagggtcccatctgggccaagattcctcacacggacggcaacttccacccgtcgccgctgatgggcggctttggcctgaaacatcctccgcctcagatcctgatcaagaacacgcctgtacctgcggatcctccgaccaccttcaaccagtcaaagctgaactctttcatcacgcaatacagcaccggacaggtcagcgtggaaattgaatgggagctgcagaaggaaaacagcaagcgctggaaccccgagatccagtacacctccaactactacaaatctacaagtgtggactttgctgttaatacagaaggcgtgtactctgaaccccaccccattggcacccgttacctcacccgtcccctgtaa

SEQ ID NO: 1104 - protein, 736 aa, synthetic construct
  REGION 1..736: note = source = /note="Description of Artificial Sequence: Synthetic polypeptide"
MAADGYLPDWLEDTLSEGIRQWWKLKPGPPPPKPAERHKDDSRGLVLPGYKYLGPFNGLDKGEPVNEADAAALEHDKAYDRQLDSGDNPYLKYNHADAEFQERLKEDTSFGGNLGRAVFQAKKRVLEPLGLVEEPVKTAPGKKRPVEQSPQEPDSSSGIGKKGQQPAKKRLNFGQTGDSESVPDPQPLGEPPATPAAVGPTTMASGGGAPMADNNEGADGVGNASGNWHCDSTWMGDRVITTSTRTWALPTYNNHLYKQISSASTGASNDNHYFGYSTPWGYFDFNRFHCHFSPRDWQRLINNNWGFRPKRLNFRLFNIQVKEVTDNNGVKTIANNLTSTVQVFTDSEYQLPYVLGSAHQGCLPPFPADVFMIPQYGYLTLNNGSQAVGRSSFYCLEYFPSQMLRTGNNFTFSYTFEEVPFHSSYAHSQSLDRLMNPLIDQYLYYLSRTQTTGGTANTQTLGFSQGGPNTMANQAKNWLPGPCYRQQRVSTTTGQNNNSNFAWTAGTKYHLNGRNSLANPGIAMATHKDDKERFFPSNGILIFGKQNAARDNADYSDVMLTSEEEIKTTNPVATEEYGIVADNLQQQNTAPQIGTVNSQGALPGMVWQNRDVYLQGPIWAKIPHTDGNFHPSPLMGGFGLKHPPPQILIKNTPVPADPPTTFNQSKLNSFITQYSTGQVSVEIEWELQKENSKRWNPEIQYTSNYYKSTSVDFAVNTEGVYSEPHPIGTRYLTRPL

SEQ ID NO: 1105 - protein, 736 aa, synthetic construct
  REGION 1..736: note = source = /note="Description of Artificial Sequence: Synthetic polypeptide"
MAADGYLPDWLEDNLSEGIREWWDLKPASPKPKANQQKQDDGRGLVLPGYKYLGPFNGLDKGEPVNAADAAALEHDKAYDQQLKAGDNPYLRYNHADAEFQERLQEDTSFGGNLGRAVFQAKKRLLEPLGLVEEAAKTAPGKKRPVEQSPQEPDSSAGIGKSGAQPAKKRLNFGQTGGTESVPDPQPLGEPPAAPSGVGPNTMAAGGGAPMADNNEGADGVGSSSGNWHCDSTWLGDRVITTSTRTWALPTYNNHLYKQISSASTGASNDNHYFGYSTPWGYFDFNRFHCHFSPRDWQRLINNNWGFRPKRLSFKLFNIQVKEVTQNEGTKTIANNLTSTIQVFTDSEYQLPYVLGSAHQGCLPPFPADVFMIPQYGYLTLNNGSQAVGRSSFYCLEYFPSQMLRTGNNFQFTYTFEDVPFHSSYAHSQSLDRLMNPLIDQYLYYLSRTQTTGGTANTQTLGFSQGGPNTMANQAKNWLPGPCYRQQRVSTTTGQNNNSNFAWTAGTKYHLNGRNSLANPGIAMATHKDDKERFFPSNGILIFGKQNAARDNADYSDVMLTSEEEIKTTNPVATEEYGIVADNLQQQNTAPQIGTVNSQGALPGMVWQNRDVYLQGPIWAKIPHTDGNFHPSPLMGGFGLKHPPPQILIKNTPVPADPPTTFNQSKLNSFITQYSTGQVSVEIEWELQKENSKRWNPEIQYTSNYYKSTSVDFAVNTEGVYSEPHPIGTRYLTRPL

SEQ ID NO: 1106 - protein, 736 aa, synthetic construct; identical to SEQ ID NO: 1045
  REGION 1..736: note = source = /note="Description of Artificial Sequence: Synthetic polypeptide"

SEQ ID NO: 1107 - protein, 736 aa, synthetic construct
  REGION 1..736: note = source = /note="Description of Artificial Sequence: Synthetic polypeptide"
MAADGYLPDWLEDNLSEGIREWWDLEPGAPKPKANQQKQDDGRGLVLPGYKYLGPFNGLDKGEPVNAADAAALEHDKAYDQQLKAGDNPYLRYNHADAEFQERLQEDTSFGGNLGRAVFQAKKRVLEPLGLVEEGAKTAPGKKRPVEQSPQEPDSSSGIGKTGQQPAKKRLNFGQTGDSESVPDPQPLGEPPATPAAVGPTTMASGGGAPMADNNEGADGVGNASGNWHCDSTWLGDRVITTSTRTWALPTYNNHLYKQISSASTGASNDNHYFGYSTPWGYFDFNRFHCHFSPRDWQRLINNNWGFRPKRLNFKLFNIQVKEVTDNNGVKTIANNLTSTVQVFTDSEYQLPYVLGSAHQGCLPPFPADVFMIPQYGYLTLNNGSQAVGRSSFYCLEYFPSQMLRTGNNFQFTYTFEDVPFHSSYAHSQSLDRLMNPLIDQYLYYLSRTQTTGGTANTQTLGFSQGGPNTMANQAKNWLPGPCYRQQRVSTTTGQNNNSNFAWTAGTKYHLNGRNSLANPGIAMATHKDDKERFFPSNGILIFGKQNAARDNADYSDVMLTSEEEIKTTNPVATEEYGIVADNLQQQNTAPQIGTVNSQGALPGMVWQNRDVYLQGPIWAKIPHTDGNFHPSPLMGGFGLKHPPPQILIKNTPVPADPPTTFNQSKLNSFITQYSTGQVSVEIEWELQKENSKRWNPEIQYTSNYYKSTSVDFAVNTEGVYSEPHPIGTRYLTRPL

SEQ ID NO: 1108 - protein, 736 aa, synthetic construct; identical to SEQ ID NO: 1045
  REGION 1..736: note = source = /note="Description of Artificial Sequence: Synthetic polypeptide"

SEQ ID NO: 1109 - protein, 736 aa, synthetic construct
  REGION 1..736: note = source = /note="Description of Artificial Sequence: Synthetic polypeptide"
MAADGYLPDWLEDTLSEGIRQWWKLKPGPPPPKPAERHKDDSRGLVLPGYKYLGPFNGLDKGEPVNEADAAALEHDKAYDRQLDSGDNPYLKYNHADAEFQERLKEDTSFGGNLGRAVFQAKKRVLEPLGLVEEPVKTAPGKKRPVEQSPQEPDSSSGIGKKGQQPAKKRLNFGQTGDSESVPDPQPLGEPPATPAAVGPTTMASGGGAPMADNNEGADGVGNASGNWHCDSTWLGDRVITTSTRTWALPTYNNHLYKQISSASTGASNDNHYFGYSTPWGYFDFNRFHCHFSPRDWQRLINNNWGFRPKRLNFKLFNIQVKEVTDNNGVKTIANNLTSTVQVFTDSDYQLPYVLGSAHQGCLPPFPADVFMIPQYGYLTLNNGSQAVGRSSFYCLEYFPSQMLRTGNNFQFTYTFEDVPFHSSYAHSQSLDRLMNPLIDQYLYYLSRTQTTGGTANTQTLGFSQGGPNTMANQAKNWLPGPCYRQQRVSTTTGQNNNSNFAWTAGTKYHLNGRNSLANPGIAMATHKDDKERFFPSNGILIFGKQNAARDNADYSDVMLTSEEEIKTTNPVATEEYGIVADNLQQQNTAPQIGTVNSQGALPGMVWQNRDVYLQGPIWAKIPHTDGNFHPSPLMGGFGLKHPPPQILIKNTPVPADPPTTFNQSKLNSFITQYSTGQVSVEIEWELQKENSKRWNPEIQYTSNYYKSTSVDFAVNTEGVYSEPHPIGTRYLTRPL

SEQ ID NO: 1110 - protein, 734 aa, synthetic construct
  REGION 1..734: note = source = /note="Description of Artificial Sequence: Synthetic polypeptide"
MAADGYLPDWLEDTLSEGIRQWWKLKPGPPPPKPAERHKDDSRGLVLPGYKYLGPFNGLDKGEPVNEADAAALEHDKAYDQQLQAGDNPYLRYNHADAEFQERLQGDTSFGGNLGRAVFQAKKRLLEPLGLVEEAAKTAPGKKRPVEQSPQEPDSSAGIGKSGAQPAKKRLNFGQTGDTESVPDPQPIGEPPAAPSGVGSLTMASGGGAPVADNNEGADGVGSSSGNWHCDSQWLGDRVITTSTRTWALPTYNNHLYKQISSASTGASNDNHYFGYSTPWGYFDFNRFHCHFSPRDWQRLINNNWGFRPKRLSFKLFNHPGQGGHAERHQDHRQPHQHIQVFTDSEYQLPYVLGSAHQGCLPPFPADVFMIPQYGYLTLNNGSQAVGRSSFYCLEYFPSQMLRTGNNFQFTYTFEDVPFHSSYAHSQSLDRLMNPLIDQYLYYLSRTQTTGGTANTQTLGFSQGGPNTMANQAKNWLPGPCYRQQRVSTTTGQNNNSNFAWTAGTKYHLNGRNSLGNPGIAMATHKDDKERFFPSNGILIFGKQNAARDNADYSDVMLTSEEEIKTTNPVATEEYGIVADNLQQQNTAPQIGTVNSQGALPGMVWQNRDVYLQGPIWAKIPHTDGNFHPSPLMGGFGLKHPPPQILIKNTPVPADPPTAFNQSKLNSFITQYSTGQVSVEIEWELQKENSKRWNPEIQYTSNYYKSTSVDFAVNTEGVYSEPHPIGTRYLTRPL

SEQ ID NO: 1111 - protein, 737 aa, synthetic construct
  REGION 1..737: note = source = /note="Description of Artificial Sequence: Synthetic polypeptide"
MAADGYLPDWLEDNLSEGIREWWDLKHGAPKPKANQQKQDDGRGLVLPGYKYLGPFNGLDKGEPVNAADAAALEHDKAYDQQLKAGDNPYLRYNHADAEFQERLQEDTSFGGNLGRAVFQAKKRVLEPFGLVEEGAKTAPGKKRPVEQSPQEPDSSSGIGKTGQQPAKKRLNFGQTGDSESVPDPQPLGEPPATPAAVGPTTMASGGGAPMADNNEGADGVGNASGNWHCDSTWLGDRVITTSTRTWALPTYNNHLYKQISNGTSGGSTNDNTYFGYSTPWGYFDFNRFHCHFSPRDWQRLINNNWGFRPKRLNFKLFNIQVKEVTQNEGTKTIANNLTSTIQVFTDSEYQLPYVLGSAHQGCLPPFPADVFMIPQYGYLTLNNGSQAVGRSSFYCLEYFPSQMLRTGNNFTFSYTFEDVPFHSSYAHSQSLDRLMNPLIDQYLYYLSRTQTTGGTANTQTLGFSQGGPNTMANQAKNWLPGPCYRQQRVSTTTGQNNNSNFAWTAGTKYHLNGRNSLANPGIAMATHKDDKERFFPSNGILIFGKQNAARDNADYSDVMLTSEEEIKTTNPVATEEYGIVADNLQQQNTAPQIGTVNSQGALPGMVWQNRDVYLQGPIWAKIPHTDGNFHPSPLMGGFGLKHPPPQILIKNTPVPADPPTTFNQSKLNSFITQYSTGQVSVEIEWELQKENSKRWNPEIQYTSNYYKSTSVDFAVNTEGVYSDPHPIGTRYLTRPL

SEQ ID NO: 1112 - protein, 737 aa, synthetic construct
  REGION 1..737: note = source = /note="Description of Artificial Sequence: Synthetic polypeptide"
MAADGYLPDWLEDNLSEGIREWWALKPGAPKPKANQQKQDDGRGLVLPGYKYLGPFNGLDKGEPVNEADAAALEHDKAYDQQLKAGDNPYLRYNHADAEFQERLQEDTSFGGNLGRAVFQAKKRVLEPLGLVEEGAKTAPGKKRPVEPSPQRSPDSSTGIGKKGQQPARKRLNFGQTGDSESVPDPQPLGEPPAAPSGVGPNTMASGGGAPMADNNEGADGVGNSSGNWHCDSTWMGDRVITTSTRTWALPTYNNHLYKQISSASTGASNDNHYFGYSTPWGYFDFNRFHCHFSPRDWQRLINNNWGFRPKRLNFKLFNIQVKEVTQNEGTKTIANNLTSTIQVFTDSEYQLPYVLGSAHQGCLPPFPADVFMIPQYGYLTLNNGSQAVGRSSFYCLEYFPSQMLRTGNNFQFTYTFEDVPFHSSYAHSQSLDRLMNPLIDQYLYYLSRTQTTGGTANTQTLGFSQGGPNTMANQAKNWLPGPCYRQQRVSTTTGQNNNSNFAWTAGTKYHLNGRNSLANPGIAMATHKDDKERFFPSNGILIFGKQNAARDNADYSDVMLTSEEEIKTTNPVATEEYGIVADNLQQQNTAPQIGTVNSQGALPGMVWQNRDVYLQGPIWAKIPHTDGNFHPSPLMGGFGLKHPPPQILIKNTPVPADPPTTFNQSKLNSFITQYSTGQVSVEIEWELQKENSKRWNPEIQYTSNYYKSTSVDFAVNTEGVYSEPHPIGTRYLTRPL

SEQ ID NO: 1113 - protein, 736 aa, synthetic construct
  VARIANT 226: note = Any naturally occurring amino acid
  REGION 1..736: note = source = /note="Description of Artificial Sequence: Synthetic polypeptide"
MAADGYLPDWLEDTLSEGIRQWWKLKPGPPPPKPAERHKDDSRGLVLPGYKYLGPFNGLDKGEPVNEADAAALEHDKAYDRQLDSGDNPYLKYNHADAEFQERLKEDTSFGGNLGRAVFQAKKRVLEPLGLVEEPVKTAPGKKRPVEQSPQEPDSSSGIGKKGQQPAKKRLNFGQTGDSESVPDPQPLGEPPATPAAVGPTTMASGGGAPMADNNEGADGVGNASXNWHCDSTWLGDRVITTSTRTWALPPITTTSTSKSPVLQRGRSNDNHYFGYSTPWGYFDFNRFHCHFSPRDWQRLINNNWGFRPKRLNFKLFNIQVKEVTDNNGVKTIANNLTSTVQVFTDSDYQLPYVLGSAHQGCLPPFPADVFMIPQYGYLTLNNGSQAVGRSSFYCLEYFPSQMLRTGNNFQFTYTFEDVPFHSSYAHSQSLDRLMNPLIDQYLYYLSRTQTTGGTANTQTLGFSQGGPNTMANQAKNWLPGPCYRQQRVSTTTGQNNNSNFAWTAGTKYHLNGRNSLANPGIAMATHKDDKERFFPSNGILIFGKQNAARDNADYSDVMLTSEEEIKTTNPVATEEYGIVADNLQQQNTAPQIGTVNSQGALPGMVWQNRDVYLQGPIWAKIPHTDGNFHPSPLMGGFGLKHPPPQILIKNTPVPADPPTTFNQSKLNSFITQYSTGQVSVEIEWELQKENSKRWNPEIQYTSNYYKSTNVDFAVNTEGVYSEPHPIGTRYLTRPL

SEQ ID NO: 1114 - protein, 736 aa, synthetic construct
  VARIANT 239: note = Any naturally occurring amino acid
  REGION 1..736: note = source = /note="Description of Artificial Sequence: Synthetic polypeptide"
MAADGYLPDWLEDNLSEGIREWWDLKPGAPKPKANQQKQDDGRGLVLPGYKYLGPFNGLDKGEPVNAADAAALEHDKAYDQQLQAGDNPYLRYNHADAEFQERLQGDTSFGGNLGRAVFQAKKRVLEPLGLVEEAAKTAPGKKRPVEQSPQEPDSSAGIGKSGAQPAKKRLNFGQTGDTESVPDPQPIGEPPAAPSGVGPNTMAAGGGAPMADNNEGADGVGSSSGNWHCDSTWLGDRXITTSTRTWALPTYNNHLYKQISSASTGASNDNHYFGYSTPWGYFDFNRFHCHFSPRDWQRLINNNWGFRPKRLNFKLFNIQVKEVTDNNGVKTIANNLTSTVQVFTDSEYQLPYVLGSAHQGCLPPFPADVFMIPQYGYLTLNNGSQAVGRSSFYCLEYFPSQMLRTGNNFTFSYTFEDVPFHSSYAHSQSLDRLMNPLIDQYLYYLSRTQTTGGTANTQTLGFSQGGPNTMANQAKNWLPGPCYRQQRVSTTTGQNNNSNFAWTAGTKYHLNGRNSLANPGIAMATHKDDKERFFPSNGILIFGKQNAARDNADYSDVMLTSEEEIKTTNPVATEEYGIVADNFQQQNTAPQIGTVNSQGALPGMVWQNRDVYLQGPIWAKIPHTDGNFHPSPLMGGFGLKHPPPQILIKNTPVPADPPTTFNQSKLNSFITQYSTGQVSVEIEWELQKENSKRWNPEIQYTSNYYKSTSVDFAVNTEGVYSEPHPIGTRYLTRPL

SEQ ID NO: 1115 - protein, 736 aa, synthetic construct
  REGION 1..736: note = source = /note="Description of Artificial Sequence: Synthetic polypeptide"
MAADGYLPDWLEDNLSEGIREWWALKPGAPKPKANQQKQDDGRGLVLPGYKYLGPFNGLDKGEPVNEADAAALEHDKAYDQQLKAGDNPYLKYNHADAEFQERLQEDTSFGGNLGRAVFQAKKRLLEPLGLVEEAAKTAPGKKRPVEQSPQEPDSSAGIGKSGAQPAKKRLNFGQTGDTESVPDPQPLGEPPATPAAVGPTTMASGGGAPMADNNEGADGVGNASGNWHCDSTWLGDRVITTSTRTWALPTYNNHLYKQISSASTGASNDNHYFGYSTPWGYFDFNRFHCHFSPRDWQRLINNNWGFRPKRLSFKLFNIQVKEVTQNEGTKTIANNLTSTIQVFTDSEYQLPYVLGSAHQGCLPPFPADVFMIPQYGYLTLNNGSQAVGRSSFYCLEYFPSQMLRTGNNFQFTYTFEDVPFHSSYAHSQSLDRLMNPLIDQYLYYLSRTQTTGGTANTQTLGFSQGGPNTMANQAKNWLPGPCYRQQRVSTTTGQNNNSNFAWTAGTKYHLNGRNSLANPGIAMATHKDDKERFFPSNGILIFGKQNAARDNADYSDVMLTSEEEIKTTNPVATEEYGIVADNLQQQNTAPQIGTVNSQGALPGMVWQNRDVYLQGPIWAKIPHTDGNFHPSPLMGGFGLKHPPPQILIKNTPVPADPPTTFNQSKLNSFITQYSTGQVSVEIEWELQKENSKRWNPEIQYTSNYYKSTSVDFAVNTEGVYSEPHPIGTRYLTRPL

SEQ ID NO: 1116 - protein, 736 aa, synthetic construct
  REGION 1..736: note = source = /note="Description of Artificial Sequence: Synthetic polypeptide"
MAADGYLPDWLEDTLSEGIRQWWKLKPGPPPPKPAERHKDDSRGLVLPGYKYLGPFNGLDKGEPVNEADAAALEHDKAYDQQLQAGDNPYLRYNHADAEFQERLQGDTSFGGNLGRAVFQAKKRLLEPLGLVEEAAKTAPGKKRPVEQSPQEPDSSAGIGKSGAQPAKKRLNFGQTGDTESVPDPQPIGEPPAAPSGVGSLTMASGGGAPVADNNEGADGVGSSSGNWHCDSQWLGDRVITTSTRTWALPTYNNHLYKQISSASTGASNDNHYFGYSTPWGYFDFNRFHCHFSPRDWQRLINNNWGFRPKRLSFKLFNIQVKEVTQNEGTKTIANNLTSTIQVFTDSEYQLPYVLGSAHQGCLPPFPADVFMIPQYGYLTLNNGSQAVGRSSFYCLEYFPSQMLRTGNNFQFTYTFEDVPFHSSYAHSQSLDRLMNPLIDQYLYYLSRTQTTGGTANTQTLGFSQGGPNTMANQAKNWLPGPCYRQQRVSTTTGQNNNSNFAWTAGTKYHLNGRNSLANPGIAMATHKDDKERFFPSNGILIFGKQNAARDNADYSDVMLTSEEEIKTTNPVATEEYGIVADNLQQQNTAPQIGTVNSQGALPGMVWQNRDVYLQGPIWAKIPHTDGNFHPSPLMGGFGLKHPPPQILIKNTPVPADPPTTFNQSKLNSFITQYSTGQVSVEIEWELQKENSKRWNPEIQYTSNYYKSTSVDFAVNTEGVYSEPHPIGTRYLTRPL

SEQ ID NO: 1117 - protein, 738 aa, synthetic construct
  REGION 1..738: note = source = /note="Description of Artificial Sequence: Synthetic polypeptide"
MAADGYLPDWLEDNLSEGIRQWWKLKPGPPPPKPAERHKDDSRGLVLPGYKYLGPFNGLDKGEPVNAADAAALEHDKAYDQQLKAGDNPYLRYNHADAEFQERLQEDTSFGGNLGRAVFQAKKRVLEPLGLVEEGAKTAPGKKRPVEPSPQRSPDSSTGIGKKGQQPAKKRLNFGQTGDSESVPDPQPLGEPPATPAAVGPTTMASGGGAPMADNNEGADGVGNASGNWHCDSTWLGDRVITTSTRTWALPTYNNHLYKQISNGTSGGSTNDNTYFGCVTPWGYFDFNKFHCHFSPDDWQRLINNGWGFRTKRLNFKLFSMKVKKGTDNTGIKTIANNLTNTVHVFADSEYQLPYVLGSAHQGCLPPFPADVFMIPQYGYLTLNNGSQAVGRSSFYCLEYFPSQMLRTGNNFTFSYTFEDVPFHSSYAHSQSLDRLMNPLIDQYLYYLSRTQTTGGTANTQTLGFSQGGPNTMANQAKNWLPGPCYRQQRVSTTTGQNNNSNFAWTAGTKYHLNGRNSLANPGIAMATHKDDKERFFPSNGILIFGKQNAARDNADYSDVMLTSEEEIKTTNPVATEEYGIVADNLQQQNTAPQIGTVNSQGALPGMVWQNRDVYLQGPIWAKIPHTDGNFHPSPLMGGFGLKHPPPQILIKNTPVPADPPTTFNQSKLNSFITQYSTGQVSVEIEWELQKENSKRWNPEIQYTSNYYKSTSVDFAVNTEGVYSEPHPIGTRYLTRPL

SEQ ID NO: 1118 - protein, 737 aa, synthetic construct
  REGION 1..737: note = source = /note="Description of Artificial Sequence: Synthetic polypeptide"
MAADGYLPDWLEDTLSEGIRQWWKLKPGPPPPKPAERHKDDSRGLVLPGYKYLGPFNGLDKGEPVNAADAAALEHDKAYDQQLKAGDNPYLRYNHADAEFQERLQEDTSFGGNLGRAVFQAKKRVLEPLGLVEEGAKTAPGKKRPVEPSPQRSPDSSTGIGKKGQQPAKKRLNFGQTGDSESVPDPQPIGEPPAGPSGLGSGTMAAGGGAPMADNNEGADGVGSSSGNWHCDSTWLGDRVITTSTRTWALPTYNNHLYKQISSASTGASNDNHYFGYSTPWGYFDFNRFHCHFSPRDWQRLINNNWGFRPKRLNFKLFNIQVKEVTDNNGVKTIANNLTSTVQVFTDSEYQLPYVLGSAHQGCLPPFPADVFMIPQYGYLTLNNGSQAVGRSSFYCLEYFPSQMLRTGNNFTFSYTFEDVPFHSSYAHSQSLDRLMNPLIDQYLYYLSRTQTTGGTANTQTLGFSQGGPNTMANQAKNWLPGPCYRQQRVSTTTGQNNNSNFAWTAGTKYHLNGRNSLANPGIAMATHKDDKERFFPSNGILIFGKQNAARDNADYSDVMLTSEEEIKTTNPVATEEYGIVADNLQQQNTAPQIGTVNSQGALPGMVWQNRDVYLQGPIWAKILHTDGNFHPSPLMGGFGMKHPPPPILIKNTPVPADPPTTFNQSKLNSFITQYSTGQVSVEIEWELPKENSKRWNPEIQYTSNYYKSTSVDFAVNTEGVYYEPHPIGTRYLTPPL

SEQ ID NO: 1119 - protein, 737 aa, synthetic construct
  REGION 1..737: note = source = /note="Description of Artificial Sequence: Synthetic polypeptide"
MAADGYLPDWLEDNLSEGIREWWALKPGAPKPKANQQKQDDGRGLVLPGYKYLGPFNGLDKGEPVNAADAAALEHDKAYDQQLKAGDNPYLRYNHADAEFQERLQEDTSFGGNLGRAVFQAKKRVLEPLGLVEEGAKTAPGKKRPVEPSPQRSPDSSTGIGKKGQQPARKRLNFGQTGDSESVPDPQPLGEPPAAPSGVAPNTMAAGGGAPMADNNEGADGVGNASGNWHCDSTWLGDRVITTSTRTWALPTYNNHLYKQISSASTGASNDNHYFGYSTPWGYFDFNRFHCHFSPRDWQRLITTIGGFRPKRLNFKLFNIQVKEVTDNNGVKTIANNLTSTVQVFTDSEYQLPYVLGSAHQGCLPPFPADVFMIPQYGYLTLNNGSQAVGRSSFYCLEYFPSQMLRTGNNFTFSYTFEDVPFHSSYAHSQSLDRLMNPLIDQYLYYLSRTQTTGGTANTQTLGFSQGGPNTMANQAKNWLPGPCYRQQRVSTTTGQNNNSNFAWTAGTKYHLNGRNSLANPGIAMATHKDDKERFFPSNGILIFGKQNAARDNADYSDVMLTSEEEIKTTNPVATEEYGIVADNLQQQNTAPQIGTVNSQGALPGMVWQNRDVYLQGPIWAKIPHTDGNFHPSPLMGGFGLKHPPPQILIKNTPVPADPPTTFNQSKLNSFITQYSTGQVSVEIEWELQKENSKRWNPEIQYTSNYYKSTSVDFAVNTEGVYSEPHPIGTRYLTRPL

SEQ ID NO: 1120 - protein, 736 aa, synthetic construct
  REGION 1..736: note = source = /note="Description of Artificial Sequence: Synthetic polypeptide"
MAADGYLPDWLEDTLSEGIRQWWKLKPGPPPPKPAERHKDDGRGLVLPGYKYLGPFNGLDKGEPVNAADAAALEHDKAYDQQLKAGDNPYLRYNHADAEFQERLQEDTSFGGNLGRAVFQAKKRVLEPLGLVEEPVKTAPGKKRPVEQSPQEPDSSSGIGKKGQQPAKKRLNFGQTGDSESVPDPQPLGEPPATPAAVGPTTMASGGGAPMADNNEGADGVGNASGNWHCDSTWMGDRVITTSTRTWALPTYNNHLYKQISSASTGASNDNHYFGYSTPWGYFDFNRFHCHFSPRDWQRLINNNWGFRPKRLNFKLFNIQVKEVTQNEGTKTIANNLTSTIQVFTDSEYQLPYVLGSAHQGCLPPFPADVFMIPQYGYLTLNNGSQAVGRSSFYCLEYFPSQMLRTGNNFQFTYTFEDVPFHSSYAHSQSLDRLMNPLIDQYLYYLSRTQTTGGTANTQTLGFSQGGPNTMANHAKNWLPGPCYRQQRVSTTTGQNNNSNFAWTAGTKYHLNGRNSLANPGIAMATHKDDKERFFPSNGILIFGKQNAARDNADYSDVMLTSEEEIKTTNPVATEEYGIVADNLQQQNTAPQIGTVNSQGALPGMVWQNRDVYLQGPIWAKIPHTDGNFHPSPLMGGFGLKHPPPQILIKNTPVPADPPTTFNQSKLNSFITQYSTGQVSVEIEWELQKENSKRWNPEIQYTSNYYKSTSVDFAVNTEGVYSEPHPIGTRYLTRPL

SEQ ID NO: 1121 - protein, 737 aa, synthetic construct
  REGION 1..737: note = source = /note="Description of Artificial Sequence: Synthetic polypeptide"
MAADGYLPDWLEDNLSQGIREWWDLKPGAPKPKANQQKQDDGRGLVLPGYKYLGPFNGLDKGEPVNAADAAALEHDKAYDQQLKAGDNPYLRYNHADAEFQERLQEDTSFGGNLGRAVFQAKKRVLEPLGLVEEGAKTAPGKKRPVEPSPQRSPDSSTGIGKKGQQPARKRLNFGQTGDSESVPDPQPLGEPPAAPAAVGPTTMASGGGAPMADNNEGADGVGSSSGNWHCDSQWLGDRVITTSTRTWALPTYNNHLYKQISSASTGASNDNHYFGYSTPWGYFDFNRFHCHFSPRDWQRLINNNWGFRPKRLSFKLFNIQVKEVTQNEGTKTIANNLTSTIQVFTDSEYQLPYVLGSAHQGCLPPFPADVFMIPQYGYLTLNNGSQAVGRSSFYCLEYFPSQMLRTGNNFQFTYTFEDVPFHSSYAHSQSLDRLMNPLIDQYLYYLSRTQTTGGTTNAQTLGFSQGGPNTMANQAKNWLPGPCYRQQRVSTTTGQNNNSNFAWTAGTKYHLNGRNSLANPGIAMATHKDDKERFFPSNGILIFGKQNAARDNADYSDVMLTSEEEIKTTNPVATEEYGIVADNLQQQNTAPQIGTVNSQGALPGMVWQNRDVYLQGPIWAKIPHTDGNFHPSPLMGGFGLKHPPPQILIKNTPVPADPPTTFNQSKLNSFITQYSTGQVSVEIEWELQKENSKRWNPEIQYTSNYYKSTNVDFAVNTEGVYSEPHPIGTRYLTRPL

SEQ ID NO: 1122 - protein, 736 aa, synthetic construct
  REGION 1..736: note = source = /note="Description of Artificial Sequence: Synthetic polypeptide"
MAADGYLPDWLEDNLSEGIREWWDLKPGAPKPKANQQKQDDGRGLVLPGYKYLGPFNGLDKGEPVNAADAAALEHDKAYDQQLKAGDNPYLRYNHADAEFQERLQEDTSFGGNLGRAVFQAKKRVLEPFGLVEEGAKTAPGKKRPVEQSPQEPDSSSGIGKTGQQPAKKRLNFGQTGDTESVPDPQPIGEPPAAPSGVGPNTMAAGGGAPMADNNEGADGVGSSSGNWHCDSTWMGDRVITTSTRTWALPTYNNHLYKQISSASTGASNDNHYFGYSTPWGYFDFNRFHCHFSPRDWQRLINNNWGFRPKRLNFKLFNIQVKEVTQNEGTKTIANNLTSTIQVFTDSEYQLPYVLGSAHQGCLPPFPADVFMIPQYGYLTLNNGSQAVGRSSFYCLEYFPSQMLRTGNNFQFTYTFEDVPFHSSYAHSQSLDRLMNPLIDQYLYYLSRTQTTGGTANTQTLGFSQGGPNTMANQAKNWLPGPCYRQQRVSTTTGQNNNSNFAWTAGTKYHLNGRNSLANPGIAMATHKDDKERFFPSNGILIFGKQNAARDNADYSDVMLTSEEEIKTTNPVATEEYGIVADNLQQQNTAPQIGTVNSQGALPGMVWQNRDVYLQGPIWAKIPHTDGNFHPSPLMGGFGLKHPPPQILIKNTPVPADPPTTFNQSKLNSFITQYSTGQVSVEIEWELQKENSKRWNPEIQYTSNYYKSTNVDFAVNTEGVYSEPHPIGTRYFTRPL

SEQ ID NO: 1123 - protein, 736 aa, synthetic construct
  REGION 1..736: note = source = /note="Description of Artificial Sequence: Synthetic polypeptide"
MAADGYLPDWLEDNLSEGIREWWDLKPGAPKPKANQQKQDDGRGLVLPGYKYLGPFNGLDKGEPVNAADAAALEHDKAYDQQLKAGDNPYLRYNHADAEFQERLQEDTSFGGNLGRAVFQAKKRVLEPLGLVEEGAKTAPGKKRPVEQSPQEPDSSSGIGKTGQQPAKKRLNFGQTGDSESVPDPQPLGEPPATPAAVGPTTMASGGGAPMADNNEGADGVGNSSGNWHCDSTWMGDRVITTSTRTWALPTYNNHLYKQISSASTGASNDNHYFGYSTPWGYFDFNRFHCHFSPRDWQRLINNNWGFRPKRLNFKLFNIQVKEVTDNNGVKTIANNLTSTVQVFTDSEYQLPYVLGSAHQGCLPPFPADVFMIPQYGYLTLNNGSQAVGRSSFYCLEYFPSQMLRTGNNFQFTYTFEDVPFHSSYAHSQSLDRLMNPLIDQYLYYLSRTQTTGGTANTQTLGFSQGGPNTMANQAKNWLPGPCYRQQRVSTTTGQNNNSNFAWTAGTKYHLNGRNSLANPGIAMATHKDDKERFFPSNGILIFGKQNAARDNADYSDVMLTSEEEIKTTNPVATEEYGIVADNLQQQNTAPQIGTVNSQGALPGMVWQNRDVYLQGPIWAKIPHTDGNFHPSPLMGGFGLKHPPPQILIKNTPVPADPPTTFNQSKLNSFITQYSTGQVSVEIEWELQKENSKRWNPEIQYTSNYYKSTNVDFAVNTEGVYSEPHPIGTRYLTRPL

SEQ ID NO: 1124 - protein, 736 aa, synthetic construct
  REGION 1..736: note = source = /note="Description of Artificial Sequence: Synthetic polypeptide"
MAADGYLPDWLEDNLSEGIREWWDLKPGAPKPKANQQKQDDGRGLVLPGYKYLGPFNGLDKGEPVNAADAAALEHDKAYDQQLKAGDNPYLRYNHADAEFQERLQEDTSFGGNLGRAVFQAKKRVLEPLGLVEEGAKTAPGKKRPVEQSPQEPDSSSGIGKTGQQPAKKRLNFGQTGDSESVPDPQPLGEPPATPAAVGPTTMASGGGAPMADNNEGADGVGNASGNWHCDSTWLGDRVITTSTRTWALPTYNNHLYKQISSASTGASNDNHYFGYSTPWGYFDFNRFHCHFSPRDWQRLINNNWGFRPKRLNFKLFNIQVKEVTQNEGTKTIANNLTSTIQVFTDSEYQLPYVLGSAHQGCLPPFPADVFMIPQYGYLTLNNGSQAVGRSSFYCLEYFPSQMLRTGNNFEFSYQFEDVPFHSSYAHSQSLDRLMNPLIDQYLYYLSRTQTTGGTANTQTLGFSQGGPNTMANQAKNWLPGPCYRQQRVSTTTGQNNNSNFAWTAGTKYHMNGRNSLVNPGIAMATHKDDKERFFPSNGILIFGKQNVARDNADYSDVMLTSEEEIKTTNPVATEEYGIVADNLQQQNTAPQIGTVNSQGALPGMVWQNRDVYLQGPIWAKIPHTDGNFHPSPLMGGFGLKHPPPQILIKNTPVPADPPTTFNQSKLNSFITQYSTGQVSVEIEWELQKENSKRWNPEIQYTSNYYKSTSVDFAVNTEGVYSEPHPIGTRYLTRPL

SEQ ID NO: 1125 - DNA, 2217 bp, synthetic construct
  misc_feature 1..2217: note = source = /note="Description of Artificial Sequence: Synthetic polynucleotide"
  source 1..2217: mol_type = other DNA
atggctgccgatggttatcttccagattggctcgaggacaacctctctgagggcattcgcgagtggtgggcgctgaaacctggagccccgaagcccaaagccaaccagcaaaagcaggacgacggccggggtctggtgcttcctggctacaagtacctcggacccttcaacggactcgacaagggggagcccgtcaacgcggcggacgcagcggccctcgagcacgacaaggcctacgaccagcagctgcaggcgggtgacaatccgtacctgcggtataaccacgccgacgccgagtttcaggagcgtctgcaagaagatacgtcttttgggggcaacctcgggcgagcagtcttccaggccaagaagcgggttctcgaacctctcggtctggttgaggaaggcgctaagacggctcctggaaagaagagaccggtagagccatcaccccagcgttctccagactcctctacgggcatcggcaagaaaggccaacagcccgccagaaaaagactcaattttggtcagactggcgactcagagtcagttccagaccctcaacctctcggagaacctccagcagcgccctctggtgtgggacctaatacaatggctgcaggcggtggcgcaccaatggcagacaataacgaaggcgccgacggagtgggtagttcctcgggaaattggcattgcgattccacatggctgggcgacagagtcatcaccaccagcacccgaacctgggccctgcccacctacaacaaccacctctacaagcaaatctccaacgggacatcgggaggagccaccaacgacaacacctacttcggctacagcaccccctgggggtattttgactttaacagattccactgccacttttcaccacgtgactggcagcgactcatcaacaacaactggggattccggcccaagagactcagcttcaagctcttcaacatccaggtcaaggaggtcacgcagaatgaaggcaccaagaccatcgccaataacctcaccagcaccatccaggtgtttacggactcggagtaccagctgccgtacgttctcggctctgcccaccagggctgcctgcctccgttcccggcggacgtgttcatgattccccagtacggctacctaacactcaacaacggtagtcaggccgtgggacgctcctccttctactgcctggaatactttccttcgcagatgctgagaaccggcaacaacttccagtttacttacaccttcgaggacgtgcctttccacagcagctacgcccacagccagagcttggaccggctgatgaatcctctgattgaccagtacctgtactacttgtctcggactcaaacaacaggaggcacggcaaatacgcagactctgggcttcagccaaggtgggcctaatacaatggccaatcaggcaaagaactggctgccaggaccctgttaccgccaacaacgcgtctcaacgacaaccgggcaaaacaacaatagcaactttgcctggactgctgggaccaaataccatctgaatggaagaaattcattggctaatcctggcatcgctatggcaacacacaaagacgacgaggagcgtttttttcccagtaacgggatcctgatttttggcaaacaaaatgctgccagagacaatgcggattacagcgatgtcatgctcaccagcgaggaagaaatcaaaaccactaaccctgtggctacagaggaatacggtatcgtggcagataacttgcagcagcaaaacacggctcctcaaattggaactgtcaacagccagggggccttacccggtatggtttggcagaaccgggacgtgtacctgcagggtcccatctgggccaagattcctcacacggacggcaacttccacccgtctccgctgatgggcggctttggcctgaaacatcctccgcctcagatcctgatcaagaacacgcctgtacctgcggatcctccgaccaccttcaaccagtcaaagctgaactctttcatcacgcaatacagcaccggacaggtcagcgtggaaattgaatgggagctgcagaaggaaaacagcaagcgctggaaccccgagatccagtacacctccaactactacaaatctacaagtgtggactttgctgttaatacagaaggcgtgtactctgaaccccgccccattggcacccgttacctcacccgtaatctgtaa

SEQ ID NO: 1126 - protein, 738 aa, synthetic construct; identical to SEQ ID NO: 116
  REGION 1..738: note = source = /note="Description of Artificial Sequence: Synthetic polypeptide"

SEQ ID NO: 1127 - protein, 735 aa, synthetic construct
  REGION 1..735: note = source = /note="Description of Artificial Sequence: Synthetic polypeptide"
MAADGYLPDWLEDNLSEGVREWWALQPGAPKPKANQQHQDNARGLVLPGYKYLGPGNGLDKGEPVNAADAAALEHDKAYDQQLKAGDNPYLKYNHADAEFQQRLQGDTSFGGNLGRAVFQAKKRVLEPLGLVEQAGETAPGKKRPLIESPQQPDSSTGIGKKGKQPAKKKLVFEDETGAGDGPPEGSTSGAMSDDSEMRAAAGGAAVEGGQGADGVGNASGDWHCDSTWSEGHVTTTSTRTWVLPTYNNHLYKRLGESLQSNTYNGFSTPWGYFDFNRFHCHFSPRDWQRLINNNWGMRPKAMRVKIFNIQVKEVTTSNGETTVANNLTSTVQIFADSSYELPYVMDAGQEGSLPPFPNDVFMVPQYGYCGLVTGNTSQQQTDRNAFYCLEYFPSQMLRTGNNFEITYSFEKVPFHSMYAHSQSLDRLMNPLIDQYLWGLQSTTTGTTLNAGTATTNFTKLRPTNFSNFKKNWLPGPSIKQQGFSKTANQNYKIPATGSDSLIKYETHSTLDGRWSALTPGPPMATAGPADSKFSNSQLIFAGPKQNGNTATVPGTLIFTSEEELAATNATDTDMWGNLPGGDQSNSNLPTVDRLTALGAVPGMVWQNRDIYYQGPIWAKIPHTDGHFHPSPLIGGFGLKHPPPQIFIKNTPVPANPATTFSSTPVNSFITQYSTGQVSVQIDWEIQKERSKRWNPEVQFTSNYGQQNSLLWAPDAAGKYTEPRAIGTRYLTHHL

SEQ ID NO: 1128 - protein, 735 aa, synthetic construct
  REGION 1..735: note = source = /note="Description of Artificial Sequence: Synthetic polypeptide"
MAADGYLPDWLEDNLSEGVREWWALQPGAPKPKANQQHQDNARGLVLPGYKYLGPGNGLDKGEPVNAADAAALEHDKAYDQQLKAGDNPYLKYNHADAEFQQRLQGDTSFGGNLGRAVFQAKKRVLEPLGLVEQAGETAPGKKRPLIESPQQPDSSTGIGKKGKQPAKKKLVFEDETGAGDGPPEGSTSGAMSDDSEMRAAAGGAAVEGGQGADGVGNASGDWHCDSTWSEGHVTTTSTRTWVLPTYNNHLYKRLGESLQSNTYNGFSTPWGYFDFNRFHCHFSPRDWQRLINNNWGMRPKAMRVKIFNIQVKEVTTSNGETTVANNLTSTVQIFADSSYELPYVMDAGQEGSLPPFPNDVFMVPQYGYCGLVTGNTSQQQTDRNAFYCLEYFPSQMLRTGNNFEITYSFEKVPFHSMYAHSQSLDRLMNPLIDQYLWGLQSTTTGTTLNAGTATTNFTKLRPTNFSNFKKNWLPGPSIKQQGFSKTANQNYLIPATGSDSLIRYETHSTLDGRWSALTPGPPMATAGPADSKFSNSQLIFAGPKQNGNTATVPGTLIFTSEEELAATNATDTDMWGNLPFRDLSSSNLPTVDRSTPLGAVPGMVWQNRDIYYQGPIWAKIPHTDGHFHPSPLIGGFGLKHPPPQIFIKNTPVPANPATTFSSTPVNSFITQYSTGQVSVQIDWEIQKERSKRWNPEVQFTSNYGQQNSLLWAPDAAGKYTEPRAIGTRYLTHHL

SEQ ID NO: 1129 - protein, 735 aa, synthetic construct
  REGION 1..735: note = source = /note="Description of Artificial Sequence: Synthetic polypeptide"
MAADGYLPDWLEDNLSEGVREWWALQPGAPKPKANQQHQDNARGLVLPGYKYLGPGNGLDKGEPVNAADAAALEHDKAYDQQLKAGDNPYLKYNHADAEFQQRLQGDTSFGGNLGRAVFQAKKRVLEPLGLVEQAGETAPGKKRPLIESPQQPDSSTGIGKKGKQPAKKKLVFEDETGAGDGPPEGSTSGAMSDDSEMRAAAGGAAVEGGQGADGVGNASGDWHCDSTWSEGHVTTTSTRTWVLPTYNNHLYKRLGESLQSNTYNGFSTPWGYFDFNRFHCHFSPRDWQRLINNNWGMRPKAMRVKIFNIQVKEVTTSNGETTVANNLTSTVQIFADSSYELPYVMDAGQEGSLPPFPNDVFMVPQYGYCGLVTGNTSQQQTDRNAFYCLEYFPSQMLRTGNNFEITYSFEKVPFHSMYAHSQSLDRLMNPLIDQYLWGLQSTTTGTTLNAGTATTNFTKLRPTNFSNFKKNWLPGPSIKQQGFSKTANQNYYIPATGSDSLILYETHSTLDGRWSALTPGPPMATAGPADSKFSNSQLIFAGPKQNGNTATVPGTLIFTSEEELAATNATDTDMWGNLPGGDQSNSNLPTVDRLTALGAVPGMVWQNRDIYYQGPIWAKIPHTDGHFHPSPLIGGFGLKHPPPQIFIKNTPVPANPATTFSSTPVNSFITQYSTGQVSVQIDWEIQKERSKRWNPEVQFTSNYGQQNSLLWAPDAAGKYTEPRAIGTRYLTHHL

SEQ ID NO: 1130 - protein, 735 aa, synthetic construct
  REGION 1..735: note = source = /note="Description of Artificial Sequence: Synthetic polypeptide"
MAADGYLPDWLEDNLSEGVREWWALQPGAPKPKANQQHQDNARGLVLPGYKYLGPGNGLDKGEPVNAADAAALEHDKAYDQQLKAGDNPYLKYNHADAEFQQRLQGDTSFGGNLGRAVFQAKKRVLEPLGLVEQAGETAPGKKRPLIESPQQPDSSTGIGKKGKQPAKKKLVFEDETGAGDGPPEGSTSGAMSDDSEMRAAAGGAAVEGGQGADGVGNASGDWHCDSTWSEGHVTTTSTRTWVLPTYNNHLYKRLGESLQSNTYNGFSTPWGYFDFNRFHCHFSPRDWQRLINNNWGMRPKAMRVKIFNIQVKEVTTSNGETTVANNLTSTVQIFADSSYELPYVMDAGQEGSLPPFPNDVFMVPQYGYCGLVTGNTSQQQTDRNAFYCLEYFPSQMLRTGNNFEITYSFEKVPFHSMYAHSQSLDRLMNPLIDQYLWGLQSTTTGTTLNAGTATTNFTKLRPTNFSNFKKNWLPGPSIKQQGFSKTANQNYGIPATGSDSLIKYETHSTLDGRWSALTPGPPIATAGPADSKFSNSQLIFAGPKQNGNTATVPGTLIFTSEEELAATNATDTDMWGNLPLYDASSSNLPTVDRLTLLGAVPGMVWQNRDIYYQGPIWAKIPHTDGHFHPSPLIGGFGLKHPPPQIFIKNTPVPANPATTFSSTPVNSFITQYSTGQVSVQIDWEIQKERSKRWNPEVQFTSNYGQQNSLLWAPDAAGKYTEPRAIGTRYLTHHL

SEQ ID NO: 1131 - protein, 735 aa, synthetic construct
  REGION 1..735: note = source = /note="Description of Artificial Sequence: Synthetic polypeptide"
MAADGYLPDWLEDNLSEGVREWWALQPGAPKPKANQQHQDNARGLVLPGYKYLGPGNGLDKGEPVNAADAAALEHDKAYDQQLKAGDNPYLKYNHADAEFQQRLQGDTSFGGNLGRAVFQAKKRVLEPLGLVEQAGETAPGKKRPLIESPQQPDSSTGIGKKGKQPAKKKLVFEDETGAGDGPPEGSTSGAMSDDSEMRAAAGGAAVEGGQGADGVGNASGDWHCDSTWSEGHVTTTSTRTWVLPTYNNHLYKRLGESLQSNTYNGFSTPWGYFDFNRFHCHFSPRDWQRLINNNWGMRPKAMRVKIFNIQVKEVTTSNGETTVANNLTSTVQIFADSSYELPYVMDAGQEGSLPPFPNDVFMVPQYGYCGLVTGNTSQQQTDRNAFYCLEYFPSQMLRTGNNFEITYSFEKVPFHSMYAHSQSLDRLMNPLIDQYLWGLQSTTTGTTLNAGTATTNFTKLRPTNFSNFKKNWLPGPSIKQQGFSKTANQNYTIPATGSDSLITYETHSTLDGRWSALTPGPPGATAGPADSKFSNSQLIFAGPKQNGNTATVPGTLIFTSEEELAATNATDTDMWGNLPRVDTSASNLPTVDRYTNLGAVPGMVWQNRDIYYQGPIWAKIPHTDGHFHPSPLIGGFGLKHPPPQIFIKNTPVPANPATTFSSTPVNSFITQYSTGQVSVQIDWEIQKERSKRWNPEVQFTSNYGQQNSLLWAPDAAGKYTEPRAIGTRYLTHHL

SEQ ID NO: 1132 - protein, 735 aa, synthetic construct
  REGION 1..735: note = source = /note="Description of Artificial Sequence: Synthetic polypeptide"
MAADGYLPDWLEDNLSEGVREWWALQPGAPKPKANQQHQDNARGLVLPGYKYLGPGNGLDKGEPVNAADAAALEHDKAYDQQLKAGDNPYLKYNHADAEFQQRLQGDTSFGGNLGRAVFQAKKRVLEPLGLVEQAGETAPGKKRPLIESPQQPDSSTGIGKKGKQPAKKKLVFEDETGAGDGPPEGSTSGAMSDDSEMRAAAGGAAVEGGQGADGVGNASGDWHCDSTWSEGHVTTTSTRTWVLPTYNNHLYKRLGESLQSNTYNGFSTPWGYFDFNRFHCHFSPRDWQRLINNNWGMRPKAMRVKIFNIQVKEVTTSNGETTVANNLTSTVQIFADSSYELPYVMDAGQEGSLPPFPNDVFMVPQYGYCGLVTGNTSQQQTDRNAFYCLEYFPSQMLRTGNNFEITYSFEKVPFHSMYAHSQSLDRLMNPLIDQYLWGLQSTTTGTTLNAGTATTNFTKLRPTNFSNFKKNWLPGPSIKQQGFSKTANQNYSIPATGSDSLIKYETHSTLDGRWSALTPGPPFATAGPADSKFSNSQLIFAGPKQNGNTATVPGTLIFTSEEELAATNATDTDMWGNLPDYDSSLSNLPTVDRDTTLGAVPGMVWQNRDIYYQGPIWAKIPHTDGHFHPSPLIGGFGLKHPPPQIFIKNTPVPANPATTFSSTPVNSFITQYSTGQVSVQIDWEIQKERSKRWNPEVQFTSNYGQQNSLLWAPDAAGKYTEPRAIGTRYLTHHL

SEQ ID NO: 1133 - protein, 735 aa, synthetic construct
  REGION 1..735: note = source = /note="Description of Artificial Sequence: Synthetic polypeptide"
MAADGYLPDWLEDNLSEGVREWWALQPGAPKPKANQQHQDNARGLVLPGYKYLGPGNGLDKGEPVNAADAAALEHDKAYDQQLKAGDNPYLKYNHADAEFQQRLQGDTSFGGNLGRAVFQAKKRVLEPLGLVEQAGETAPGKKRPLIESPQQPDSSTGIGKKGKQPAKKKLVFEDETGAGDGPPEGSTSGAMSDDSEMRAAAGGAAVEGGQGADGVGNASGDWHCDSTWSEGHVTTTSTRTWVLPTYNNHLYKRLGESLQSNTYNGFSTPWGYFDFNRFHCHFSPRDWQRLINNNWGMRPKAMRVKIFNIQVKEVTTSNGETTVANNLTSTVQIFADSSYELPYVMDAGQEGSLPPFPNDVFMVPQYGYCGLVTGNTSQQQTDRNAFYCLEYFPSQMLRTGNNFEITYSFEKVPFHSMYAHSQSLDRLMNPLIDQYLWGLQSTTTGTTLNAGTATTNFTKLRPTNFSNFKKNWLPGPSIKQQGFSKTANQNYSIPATGSDSLIWYETHSTLDGRWSALTPGPPCATAGPADSKFSNSQLIFAGPKQNGNTATVPGTLIFTSEEELAATNATDTDMWGNLPQGDSSLSNLPTVDRMTVLGAVPGMVWQNRDIYYQGPIWAKIPHTDGHFHPSPLIGGFGLKHPPPQIFIKNTPVPANPATTFSSTPVNSFITQYSTGQVSVQIDWEIQKERSKRWNPEVQFTSNYGQQNSLLWAPDAAGKYTEPRAIGTRYLTHHL

SEQ ID NO: 1134 - protein, 735 aa, synthetic construct
  REGION 1..735: note = source = /note="Description of Artificial Sequence: Synthetic polypeptide"
MAADGYLPDWLEDNLSEGVREWWALQPGAPKPKANQQHQDNARGLVLPGYKYLGPGNGLDKGEPVNAADAAALEHDKAYDQQLKAGDNPYLKYNHADAEFQQRLQGDTSFGGNLGRAVFQAKKRVLEPLGLVEQAGETAPGKKRPLIESPQQPDSSTGIGKKGKQPAKKKLVFEDETGAGDGPPEGSTSGAMSDDSEMRAAAGGAAVEGGQGADGVGNASGDWHCDSTWSEGHVTTTSTRTWVLPTYNNHLYKRLGESLQSNTYNGFSTPWGYFDFNRFHCHFSPRDWQRLINNNWGMRPKAMRVKIFNIQVKEVTTSNGETTVANNLTSTVQIFADSSYELPYVMDAGQEGSLPPFPNDVFMVPQYGYCGLVTGNTSQQQTDRNAFYCLEYFPSQMLRTGNNFEITYSFEKVPFHSMYAHSQSLDRLMNPLIDQYLWGLQSTTTGTTLNAGTATTNFTKLRPTNFSNFKKNWLPGPSIKQQGFSKTANQNYCIPATGSDSLIRYETHSTLDGRWSALTPGPPLATAGPADSKFSNSQLIFAGPKQNGNTATVPGTLIFTSEEELAATNATDTDMWGNLPYKDSSRSNLPTVDRETSLGAVPGMVWQNRDIYYQGPIWAKIPHTDGHFHPSPLIGGFGLKHPPPQIFIKNTPVPANPATTFSSTPVNSFITQYSTGQVSVQIDWEIQKERSKRWNPEVQFTSNYGQQNSLLWAPDAAGKYTEPRAIGTRYLTHHL

SEQ ID NO: 1135 - protein, 735 aa, synthetic construct
  REGION 1..735: note = source = /note="Description of Artificial Sequence: Synthetic polypeptide"
MAADGYLPDWLEDNLSEGVREWWALQPGAPKPKANQQHQDNARGLVLPGYKYLGPGNGLDKGEPVNAADAAALEHDKAYDQQLKAGDNPYLKYNHADAEFQQRLQGDTSFGGNLGRAVFQAKKRVLEPLGLVEQAGETAPGKKRPLIESPQQPDSSTGIGKKGKQPAKKKLVFEDETGAGDGPPEGSTSGAMSDDSEMRAAAGGAAVEGGQGADGVGNASGDWHCDSTWSEGHVTTTSTRTWVLPTYNNHLYKRLGESLQSNTYNGFSTPWGYFDFNRFHCHFSPRDWQRLINNNWGMRPKAMRVKIFNIQVKEVTTSNGETTVANNLTSTVQIFADSSYELPYVMDAGQEGSLPPFPNDVFMVPQYGYCGLVTGNTSQQQTDRNAFYCLEYFPSQMLRTGNNFEITYSFEKVPFHSMYAHSQSLDRLMNPLIDQYLWGLQSTTTGTTLNAGTATTNFTKLRPTNFSNFKKNWLPGPSIKQQGFSKTANQNYIIPATGSDSLIYYETHSTLDGRWSALTPGPPRATAGPADSKFSNSQLIFAGPKQNGNTATVPGTLIFTSEEELAATNATDTDMWGNLPWIDNSRSNLPTVDRPTSLGAVPGMVWQNKNIYYQGPIWAKIPHTDGHFHPSPLIGGFGLKHPPPQIFIKNTPVPANPATTFTSTPVNSFITQYSTGQVSVQIDWEIQKERSKRWNPEVQFTSNYGQQNSLLWAPDAAGKYTEPRAIGTRYLTHHL

SEQ ID NO: 1136 - protein, 735 aa, synthetic construct
  REGION 1..735: note = source = /note="Description of Artificial Sequence: Synthetic polypeptide"
MAADGYLPDWLEDNLSEGVREWWALQPGAPKPKANQQHQDNARGLVLPGYKYLGPGNGLDKGEPVNAADAAALEHDKAYDQQLKAGDNPYLKYNHADAEFQQRLQGDTSFGGNLGRAVFQAKKRVLEPLGLVEQAGETAPGKKRPLIESPQQPDSSTGIGKKGKQPAKKKLVFEDETGAGDGPPEGSTSGAMSDDSEMRAAAGGAAVEGGQGADGVGNASGDWHCDSTWSEGHVTTTSTRTWVLPTYNNHLYKRLGESLQSNTYNGFSTPWGYFDFNRFHCHFSPRDWQRLINNNWGMRPKAMRVKIFNIQVKEVTTSNGETTVANNLTSTVQIFADSSYELPYVMDAGQEGSLPPFPNDVFMVPQYGYCGLVTGNTSQQQTDRNAFYCLEYFPSQMLRTGNNFEITYSFEKVPFHSMYAHSQSLDRLMNPLIDQYLWGLQSTTTGTTLNAGTATTNFTKLRPTNFSNFKKNWLPGPSIKQQGFSKTANQNYGIPATGSDSLIIYETHSTLDGRWSALTPGPPRATAGPADSKFSNSQLIFAGPKQNGNTATVPGTLIFTSEEELAATNATDTDMWGNLPGGDQSNSNLPTVDRLTALGAVPGMVWQNRDIYYQGPIWAKIPHTDGHFHPSPLIGGFGLKHPPPQIFIKNTPVPANPATTFSSTPVNSFITQYSTGQVSVQIDWEIQKERSKRWNPEVQFTSNYGQQNSLLWAPDAAGKYTEPRAIGTRYLTHHL

SEQ ID NO: 1137 - protein, 735 aa, synthetic construct
  REGION 1..735: note = source = /note="Description of Artificial Sequence: Synthetic polypeptide"
MAADGYLPDWLEDNLSEGVREWWALQPGAPKPKANQQHQDNARGLVLPGYKYLGPGNGLDKGEPVNAADAAALEHDKAYDQQLKAGDNPYLKYNHADAEFQQRLQGDTSFGGNLGRAVFQAKKRVLEPLGLVEQAGETAPGKKRPLIESPQQPDSSTGIGKKGKQPAKKKLVFEDETGAGDGPPEGSTSGAMSDDSEMRAAAGGAAVEGGQGADGVGNASGDWHCDSTWSEGHVTTTSTRTWVLPTYNNHLYKRLGESLQSNTYNGFSTPWGYFDFNRFHCHFSPRDWQRLINNNWGMRPKAMRVKIFNIQVKEVTTSNGETTVANNLTSTVQIFADSSYELPYVMDAGQEGSLPPFPNDVFMVPQYGYCGLVTGNTSQQQTDRNAFYCLEYFPSQMLRTGNNFEITYSFEKVPFHSMYAHSQSLDRLMNPLIDQYLWGLQSTTTGTTLNAGTATTNFTKLRPTNFSNFKKNWLPGPSIKQQGFSKTANQNYVIPATESDSLIYYETHSTLDGRWSALTPGPPYATAGPADSKFSNSQLIFAGPKQNGNTATVPGTLIFTSEEELAATNATDTDMWGNLPPRDDSTSNLPTVDRKTYLGAVPGMVWQNRDIYYQGPIWAKIPHTDGHFHPSPLIGGFGLKHPPPQIFIKNTPVPANPATTFSSTPVNSFITQYSTGQVSVQIDWEIQKERSKRWNPEVQFTSNYGQQNSLLWAPDAAGKYTEPRAIGTRYLTHHL

SEQ ID NO: 1138 - protein, 735 aa, synthetic construct
  REGION 1..735: note = source = /note="Description of Artificial Sequence: Synthetic polypeptide"
MAADGYLPDWLEDNLSEGVREWWALQPGAPKPKANQQHQDNARGLVLPGYKYLGPGNGLDKGEPVNAADAAALEHDKAYDQQLKAGDNPYLKYNHADAEFQQRLQGDTSFGGNLGRAVFQAKKRVLEPLGLVEQAGETAPGKKRPLIESPQQPDSSTGIGKKGKQPAKKKLVFEDETGAGDGPPEGSTSGAMSDDSEMRAAAGGAAVEGGQGADGVGNASGDWHCDSTWSEGHVTTTSTRTWVLPTYNNHLYKRLGESLQSNTYNGFSTPWGYFDFNRFHCHFSPRDWQRLINNNWGMRPKAMRVKIFNIQVKEVTTSNGETTVANNLTSTVQIFADSSYELPYVMDAGQEGSLPPFPNDVFMVPQYGYCGLVTGNTSQQQTDRNAFYCLEYFPSQMLRTGNNFEITYSFEKVPFHSMYAHSQSLDRLMNPLIDQYLWGLQSTTTGTTLNAGTATTNFTKLRPTNFSNFKKNWLPGPSIKQQGFSKTANQNYYIPATGSDSLIIYETHSTLDGRWSALTPGPPIATAGPADSKFSNSQLIFAGPKQNGNTATVPGTLIFTSEEELAATNSTDTDMWGNLPTDDDSRSNLPTVDRMTLLGAVPGMVWQNRDIYYQGPIWAKIPHTDGHFHPSPLIGGFGLKHPPPQIFIKNTPVPANPATTFSSTPVNSFITQYSTGQVSVQIDWEIQKERSKRWNPEVQFTSNYGQQNSLLWAPDAAGKYTEPRAIGTRYLTHHL

SEQ ID NO: 1139 - protein, 735 aa, synthetic construct
  REGION 1..735: note = source = /note="Description of Artificial Sequence: Synthetic polypeptide"
MAADGYLPDWLEDNLSEGVREWWALQPGAPKPKANQQHQDNARGLVLPGYKYLGPGNGLDKGEPVNAADAAALEHDKAYDQQLKAGDNPYLKYNHADAEFQQRLQGDTSFGGNLGRAVFQAKKRVLEPLGLVEQAGETAPGKKRPLIESPQQPDSSTGIGKKGKQPAKKKLVFEDETGAGDGPPEGSTSGAMSDDSEMRAAAGGAAVEGGQGADGVGNASGDWHCDSTWSEGHVTTTSTRTWVLPTYNNHLYKRLGESLQSNTYNGFSTPWGYFDFNRFHCHFSPRDWQRLINNNWGMRPKAMRVKIFNIQVKEVTTSNGETTVANNLTSTVQIFADSSYELPYVMDAGQEGSLPPFPNDVFMVPQYGYCGLVTGNTSQQQTDRNAFYCLEYFPSQMLRTGNNFEITYSFEKVPFHSMYAHSQSLDRLMNPLIDQYLWGLQSTTTGTTLNAGTATTNFTKLRPTNFSNFKKNWLPGPSIKQQGFSKTANQNYHIPATGSDSLIYYETHSTLDGRWSALTPGPPSATAGPADSKFSNSQLIFAGPKQNGNTATVPGTLIFTSEEELAATNATDTDMWGNLPRRDSSVSNLPTVDRYTDLGAVPGMVWQNRDIYYQGPIWAKIPHTDGHFHPSPLIGGFGLKHPPPQIFIKNTPVPANPATTFSSTPVNSFITQYSTGQVSVQIDWEIQKERSKRWNPEVQFTSNYGQQNSLLWAPDAAGKYTEPRAIGTRYLTHHL

SEQ ID NO: 1140 - protein, 735 aa, synthetic construct
  REGION 1..735: note = source = /note="Description of Artificial Sequence: Synthetic polypeptide"
MAADGYLPDWLEDNLSEGVREWWALQPGAPKPKANQQHQDNARGLVLPGYKYLGPGNGLDKGEPVNAADAAALEHDKAYDQQLKAGDNPYLKYNHADAEFQQRLQGDTSFGGNLGRAVFQAKKRVLEPLGLVEQAGETAPGKKRPLIESPQQPDSSTGIGKKGKQPAKKKLVFEDETGAGDGPPEGSTSGAMSDDSEMRAAAGGAAVEGGQGADGVGNASGDWHCDSTWSEGHVTTTSTRTWVLPTYNNHLYKRLGESLQSNTYNGFSTPWGYFDFNRFHCHFSPRDWQRLINNNWGMRPKAMRVKIFNIQVKEVTTSNGETTVANNLTSTVQIFADSSYELPYVMDAGQEGSLPPFPNDVFMVPQYGYCGLVTGNTSQQQTDRNAFYCLEYFPSQMLRTGNNFEITYSFEKVPFHSMYAHSQSLDRLMNPLIDQYLWGLQSTTTGTTLNAGTATTNFTKLRPTNFSNFKKNWLPGPSIKQQGFSKTANQNYSIPATGSDSLISYETHSTLDGRWSALTPGPPRATAGPADSKFSNSQLIFAGPKQNGNTATVPGTLIFTSEEELAATNATDTDMWGNLPRHDSSLSNLPTVDRNTGLGAVPGMVWQNRDIYYQGPIWAKIPHTDGHFHPSPLIGGFGLKHPPPQIFIKNTPVPANPATTFSSTPVNSFITQYSTGQVSVQIDWEIQKERSKRWNPEVQFTSNYGQQNSLLWAPDAAGKYTEPRAIGTRYLTHHL

SEQ ID NO: 1141 - protein, 735 aa, synthetic construct
  REGION 1..735: note = source = /note="Description of Artificial Sequence: Synthetic polypeptide"
MAADGYLPDWLEDNLSEGVREWWALQPGAPKPKANQQHQDNARGLVLPGYKYLGPGNGLDKGEPVNAADAAALEHDKAYDQQLKAGDNPYLKYNHADAEFQQRLQGDTSFGGNLGRAVFQAKKRVLEPLGLVEQAGETAPGKKRPLIESPQQPDSSTGIGKKGKQPAKKKLVFEDETGAGDGPPEGSTSGAMSDDSEMRAAAGGAAVEGGQGADGVGNASGDWHCDSTWSEGHVTTTSTRTWVLPTYNNHLYKRLGESLQSNTYNGFSTPWGYFDFNRFHCHFSPRDWQRLINNNWGMRPKAMRVKIFNIQVKEVTTSNGETTVANNLTSTVQIFADSSYELPYVMDAGQEGSLPPFPNDVFMVPQYGYCGLVTGNTSQQQTDRNAFYCLEYFPSQMLRTGNNFEITYSFEKVPFHSMYAHSQSLDRLMNPLIDQYLWGLQSTTTGTTLNAGTATTNFTKLRPTNFSNFKKNWLPGPSIKQQGFSKTANQNYFIPATGSDSLIRYETHSTLDGRWSALTPGPPLATAGPADSKFSNSQLIFAGPKQNGNTATVPGTLIFTSEEELAATNATDTDMWGNLPVIDFSKSNLPTVDRLTHLGAVPGMVWQNRDIYYQGPIWAKIPHTDGHFHPSPLIGGFGLKHPPPQIFIKNTPVPANPATTFSSTPVNSFITQYSTGQVSVQIDWEIQKERSKRWNPEVQFTSNYGQQNSLLWAPDAAGKYTEPRAIGTRYLTHHL

SEQ ID NO: 1142 - protein, 735 aa, synthetic construct
  REGION 1..735: note = source = /note="Description of Artificial Sequence: Synthetic polypeptide"
MAADGYLPDWLEDNLSEGVREWWALQPGAPKPKANQQHQDNARGLVLPGYKYLGPGNGLDKGEPVNAADAAALEHDKAYDQQLKAGDNPYLKYNHADAEFQQRLQGDTSFGGNLGRAVFQAKKRVLEPLGLVEQAGETAPGKKRPLIESPQQPDSSTGIGKKGKQPAKKKLVFEDETGAGDGPPEGSTSGAMSDDSEMRAAAGGAAVEGGQGADGVGNASGDWHCDSTWSEGHVTTTSTRTWVLPTYNNHLYKRLGESLQSNTYNGFSTPWGYFDFNRFHCHFSPRDWQRLINNNWGMRPKAMRVKIFNIQVKEVTTSNGETTVANNLTSTVQIFADSSYELPYVMDAGQEGSLPPFPNDVFMVPQYGYCGLVTGNTSQQQTDRNAFYCLEYFPSQMLRTGNNFEITYSFEKVPFHSMYAHSQSLDRLMNPLIDQYLWGLQSTTTGTTLNAGTATTNFTKLRPTNFSNFKKNWLPGPSIKQQGFSKTANQNYKIPATGSDSLIKYETHSTLDGRWSALTPGPPMATAGPADSKFSNSQLIFAGPKQNGNTATVPGTLIFTSEEELAATNATDTDMWGNLPVRDFSLSNLPTVDRTTKLGAVPGMVWQNRDIYYQGPIWAKIPHTDGHFHPSPLIGGFGLKHPPPQIFIKNTPVPANPATTFSSTPVNSFITQYSTGQVSVQIDWEIQKERSKRWNPEVQFTSNYGQQNSLLWAPDAAGKYTEPRAIGTRYLTHHL

SEQ ID NO: 1143 - protein, 735 aa, synthetic construct
  REGION 1..735: note = source = /note="Description of Artificial Sequence: Synthetic polypeptide"
MAADGYLPDWLEDNLSEGVREWWALQPGAPKPKANQQHQDNARGLVLPGYKYLGPGNGLDKGEPVNAADAAALEHDKAYDQQLKAGDNPYLKYNHADAEFQQRLQGDTSFGGNLGRAVFQAKKRVLEPLGLVEQAGETAPGKKRPLIESPQQPDSSTGIGKKGKQPAKKKLVFEDETGAGDGPPEGSTSGAMSDDSEMRAAAGGAAVEGGQGADGVGNASGDWHCDSTWSEGHVTTTSTRTWVLPTYNNHLYKRLGESLQSNTYNGFSTPWGYFDFNRFHCHFSPRDWQRLINNNWGMRPKAMRVKIFNIQVKEVTTSNGETTVANNLTSTVQIFADSSYELPYVMDAGQEGSLPPFPNDVFMVPQYGYCGLVTGNTSQQQTDRNAFYCLEYFPSQMLRTGNNFEITYSFEKVPFHSMYAHSQSLDRLMNPLIDQYLWGLQSTTTGTTLNAGTATTNFTKLRPTNFSNFKKNWLPGPSIKQQGFSKTANQNYFIPATGSDSLIQYETHSTLDGRWSALTPGPPMATAGPADSKFSNSQLIFAGPKQNGNTATVPGTLIFTSEEELAATNATDTDMWGNLPGGDQSNSNLPTVDRLTALGAVPGMVWQNRDIYYQGPIWAKIPHTDGHFHPSPLIGGFGLKHPPPQIFIKNTPVPANPATTFSSTPVNSFITQYSTGQVSVQIDWEIQKERSKRWNPEVQFTSNYGQQNSLLWAPDAAGKYTEPRAIGTRYLTHHL

SEQ ID NO: 1144 - protein, 735 aa, synthetic construct
  REGION 1..735: note = source = /note="Description of Artificial Sequence: Synthetic polypeptide"
MAADGYLPDWLEDNLSEGVREWWALQPGAPKPKANQQHQDNARGLVLPGYKYLGPGNGLDKGEPVNAADAAALEHDKAYDQQLKAGDNPYLKYNHADAEFQQRLQGDTSFGGNLGRAVFQAKKRVLEPLGLVEQAGETAPGKKRPLIESPQQPDSSTGIGKKGKQPAKKKLVFEDETGAGDGPPEGSTSGAMSDDSEMRAAAGGAAVEGGQGADGVGNASGDWHCDSTWSEGHVTTTSTRTWVLPTYNNHLYKRLGESLQSNTYNGFSTPWGYFDFNRFHCHFSPRDWQRLINNNWGMRPKAMRVKIFNIQVKEVTTSNGETTVANNLTSTVQIFADSSYELPYVMDAGQEGSLPPFPNDVFMVPQYGYCGLVTGNTSQQQTDRNAFYCLEYFPSQMLRTGNNFEITYSFEKVPFHSMYAHSQSLDRLMNPLIDQYLWGLQSTTTGTTLNAGTATTNFTKLRPTNFSNFKKNWLPGPSIKQQGFSKTANQNYEMPATGSDSLIIYETHSTLDGRWSALTPGPPFATAGPADSKFSNSQLIFAGPKQNGNTATVPGTLIFTSEEELAATNATDTDVWGNLPSGDHSQSNLPTVDRPTMLGAVPGMVWQNRDIYYQGPIWAKIPHTDGHFHPSPLIGGFGLKHPPPQIFIKNTPVPANPATTFISTPVNSFITQYSTGQVSVHIDWEIQKERSKRWNPEVQFTSDYGQHSSLLWAPDAAGKYTEPTAIGTRYLTHHL

SEQ ID NO: 1145 - protein, 734 aa, synthetic construct
  REGION 1..734: note = source = /note="Description of Artificial Sequence: Synthetic polypeptide"
MAADGYLPDWLEDNLSEGVREWWALQPGAPKPKANQQHQDNARGLVLPGYKYLGPGNGLDKGEPVNAADAAALEHDKAYDQQLKAGDNPYLKYNHADAEFQQRLQGDTSFGGNLGRAVFQAKKRVLEPLGLVEQAGETAPGKKRPLIESPQQPDSSTGIGKKGKQPAKKKLVFEDETGAGDGPPEGSTSGAMSDDSEMRAAAGGAAVEGGQGADGVGNASGDWHCDSTWSEGHVTTTSTRTWVLPTYNNHLYKRLGESLQSNTYNGFSTPWGYFDFNRFHCHFSPRDWQRLINNNWGMRPKAMRVKIFNIQVKEVTTSNGETTVANNLTSTVQIFADSSYELPYVMDAGQEGSLPPFPNDVFMVPQYGYCGLVTGNTSQQQTDRNAFYCLEYFPSQMLRTGNNFEITYSFEKVPFHSMYAHSQSLDRLMNPLIDQYLWGLQSTTTGTTLNAGTATTNFTKLRPTNFSNFKKNWLPGPSIKQQGFSKTANQNDIPATGSDSLIKYETHSTLDGRWSALTPGPPMATAGPADSKFSNSQLIFAGPKQNGNTATVPGTLIFTSEEELAATNATDTDMWGNLPGGDQSNSNLPTVDRLTALGAVPGMVWQNRDIYYQGPIWAKIPHTDGHFHPSPLIGGFGLKHPPPQIFIKNTPVPANPATTFSSTPVNSFITQYSTGQVSVQIDWEIQKERSKRWNPEVQFTSNYGQQNSLLWAPDAAGKYTEPRAIGTRYLTHHL

SEQ ID NO: 1146 - protein, 735 aa, synthetic construct
  REGION 1..735: note = source = /note="Description of Artificial Sequence: Synthetic polypeptide"
MAADGYLPDWLEDNLSEGVREWWALQPGAPKPKANQQHQDNARGLVLPGYKYLGPGNGLDKGEPVNAADAAALEHDKAYDQQLKAGDNPYLKYNHADAEFQQRLQGDTSFGGNLGRAVFQAKKRVLEPLGLVEQAGETAPGKKRPLIESPQQPDSSTGIGKKGKQPAKKKLVFEDETGAGDGPPEGSTSGAMSDDSEMRAAAGGAAVEGGQGADGVGNASGDWHCDSTWSEGHVTTTSTRTWVLPTYNNHLYKRLGESLQSNTYNGFSTPWGYFDFNRFHCHFSPRDWQRLINNNWGMRPKAMRVKIFNIQVKEVTTSNGETTVANNLTSTVQIFADSSYELPYVMDAGQEGSLPPFPNDVFMVPQYGYCGLVTGNTSQQQTDRNAFYCLEYFPSQMLRTGNNFEITYSFEKVPFHSMYAHSQSLDRLMNPLIDQYLWGLQSTTTGTTLNAGTATTNFTKLRPTNFSNFKKNWLPGPSIKQQGFSKTANQNYIIPATGSDSLITYETHSTLDGRWSALTPGPPVATAGPADSKFSNSQLIFAGPKQNGNTATVPGTLIFTSEEELAATNATDTDMWGNLPFNDDSSSNLPTVDRSTFLGAVPGMVWQNRDIYYQGPIWAKIPHTDGHFHPSPLIGGFGLKHPPPQIFIKNTPVPANPATTFSSTPVNSFITQYSTGQVSVQIDWEIQKERSKRWNPEVQFTSNYGQQNSLLWAPDAAGKYTEPRAIGTRYLTHHL

SEQ ID NO: 1147 - protein, 733 aa, synthetic construct
  REGION 1..733: note = source = /note="Description of Artificial Sequence: Synthetic polypeptide"
MAADGYLPDWLEDNLSEGIREWWDLKPGAPKPKANQQKQDDGRGLVLPGYKYLGPFNGLDKGEPVNAADAAALEHDKAYDQQLKAGDNPYLRYNHADAEFQERLQEDTSFGGNLGRAVFQAKKRVLEPLGLVEEGAKTAPGKKRPLESPQEPDSSSGIGKKGKQPARKRLNFEEDTGAGDGPPEGSDTSAMSSDIEMRAAPGGNAVDAGQGSDGVGNASGDWHCDSTWSEGKVTTTSTRTWVLPTYNNHLYLRLGTTSSSNTYNGFSTPWGYFDFNRFHCHFSPRDWQRLINNNWGLRPKAMRVKIFNIQVKEVTTSNGETTVANNLTSTVQIFADSSYELPYVMDAGQEGSLPPFPNDVFMVPQYGYCGIVTGENQNQTDRNAFYCLEYFPSQMLRTGNNFEMAYNFEKVPFHSMYAHSQSLDRLMNPLLDQYLWHLQSTTSGETLNQGNAATTFGKIRSGDFAFYRKNWLPGPCVKQQRFSKTASQNYKIPASGGNALLKYDTHYTLNNRWSNIAPGPPMATAGPSDGDFSNAQLIFPGPSVTGNTTTSANNLLFTSEEEIAATNPRDTDMFGQIADNNQNATTAPITGNVTAMGVLPGMVWQNRDIYYQGPIWAKIPHADGHFHPSPLIGGFGLKHPPPQIFIKNTPVPANPATTFTAARVDSFITQYSTGQVAVQIEWEIEKERSKRWNPEVQFTSNYGNQSSMLWAPDTTGKYTEPRVIGSRYLTNHL

SEQ ID NO: 1148 - protein, 742 aa, synthetic construct; identical to SEQ ID NO: 959
  REGION 1..742: note = source = /note="Description of Artificial Sequence: Synthetic polypeptide"

SEQ ID NO: 1149 - protein, 733 aa, synthetic construct; identical to SEQ ID NO: 432
  REGION 1..733: note = source = /note="Description of Artificial Sequence: Synthetic polypeptide"

SEQ ID NO: 1150 - protein, 733 aa, synthetic construct; identical to SEQ ID NO: 149
  REGION 1..733: note = source = /note="Description of Artificial Sequence: Synthetic polypeptide"

SEQ ID NO: 1151 - protein, 733 aa, synthetic construct; identical to SEQ ID NO: 436
  REGION 1..733: note = source = /note="Description of Artificial Sequence: Synthetic polypeptide"

SEQ ID NO: 1152 - protein, 735 aa, synthetic construct
  REGION 1..735: note = source = /note="Description of Artificial Sequence: Synthetic polypeptide"
MAADGYLPDWLEDNLSEGVREWWALQPGAPKPKANQQHQDNARGLVLPGYKYLGPGNGLDKGEPVNAADAAALEHDKAYDQQLKAGDNPYLKYNHADAEFQQRLQGDTSFGGNLGRAVFQAKKRVLEPLGLVEQAGETAPGKKRPLIESPQQPDSSTGIGKKGKQPAKKKLVFEDETGAGDGPPEGSTSGAMSDDSEMRAAAGGAAVEGGQGADGVGNASGDWHCDSTWSEGHVTTTSTRTWVLPTYNNHLYKRLGESLQSNTYNGFSTPWGYFDFNRFHCHFSPRDWQRLINNNWGMRPKAMRVKIFNIQVKEVTTSNGETTVANNLTSTVQIFADSSYELPYVMDAGQEGSLPPFPNDVFMVPQYGYCGLVTGNTSQQQTDRNAFYCLEYFPSQMLRTGNNFEITYSFEKVPFHSMYAHSQSLDRLMNPLIDQYLWGLQSTTTGTTLNAGTATTNFTKLRPTNFSNFKKNWLPGPSIKQQGFSKTANQNYEIPATGSDSLIEYETHSTLDGRWSALTPGPPMATAGPADSKFSNSQLIFAGPKQNGNTATVPGTLIFTSEEELAATNATDTDMWGNLPGGDQSSSNLPTVDRLTALGAVPGMVWQNRDIYYQGPIWAKIPHTDGHFHPSPLIGGFGLKHPPPQIFIKNTPVPANPATTFSSTPVNSFITQYSTGQVSVQIDWEIQKERSKRWNPEVQFTSNYGQQNSLLWAPDAAGKYTEPRAIGTRYLTHHL

SEQ ID NO: 1153 - protein, 735 aa, synthetic construct
  REGION 1..735: note = source = /note="Description of Artificial Sequence: Synthetic polypeptide"
MAADGYLPDWLEDNLSEGVREWWALQPGAPKPKANQQHQDNARGLVLPGYKYLGPGNGLDKGEPVNAADAAALEHDKAYDQQLKAGDNPYLKYNHADAEFQQRLQGDTSFGGNLGRAVFQAKKRVLEPLGLVEQAGETAPGKKRPLIESPQQPDSSTGIGKKGKQPAKKKLVFEDETGAGDGPPEGSTSGAMSDDSEMRAAAGGAAVEGGQGADGVGNASGDWHCDSTWSEGHVTTTSTRTWVLPTYNNHLYKRLGESLQSNTYNGFSTPWGYFDFNRFHCHFSPRDWQRLINNNWGMRPKAMRVKIFNIQVKEVTTSNGETTVANNLTSTVQIFADSSYELPYVMDAGQEGSLPPFPNDVFMVPQYGYCGLVTGNTSQQQTDRNAFYCLEYFPSQMLRTGNNFEITYSFEKVPFHSMYAHSQSLDRLMNPLIDQYLWGLQSTTTGTTLNAGTATTNFTKLRPTNFSNFKKNWLPGPSIKQQGFSKTANQNYEIPATGSDSLIEYETHSTLDGRWSALTPGPPMATAGPADSKFSNSQLIFAGPKQNGNTATVPGTLIFTSEEELAATNATDTDMWGNLPGGDQSSSNLPVVRGLRALGAVPGMVWQNRDIYYQGPIWAKIPHTDGHFHPSPLIGGFGLKHPPPQIFIKNTPVPANPATTFSSTPVNSFITQYSTGQVSVQIDWEIQKERSKRWNPEVQFTSNYGQQNSLLWAPDAAGKYTEPRAIGTRYLTHHL

SEQ ID NO: 1154 - protein, 735 aa, synthetic construct
  REGION 1..735: note = source = /note="Description of Artificial Sequence: Synthetic polypeptide"
MAADGYLPDWLEDNLSEGVREWWALQPGAPKPKANQQHQDNARGLVLPGYKYLGPGNGLDKGEPVNAADAAALEHDKAYDQQLKAGDNPYLKYNHADAEFQQRLQGDTSFGGNLGRAVFQAKKRVLEPLGLVEQAGETAPGKKRPLIESPQQPDSSTGIGKKGKQPAKKKLVFEDETGAGDGPPEGSTSGAMSDDSEMRAAAGGAAVEGGQGADGVGNASGDWHCDSTWSEGHVTTTSTRTWVLPTYNNHLYKRLGESLQSNTYNGFSTPWGYFDFNRFHCHFSPRDWQRLINNNWGMRPKAMRVKIFNIQVKEVTTSNGETTVANNLTSTVQIFADSSYELPYVMDAGQEGSLPPFPNDVFMVPQYGYCGLVTGNTSQQQTDRNAFYCLEYFPSQMLRTGNNFEITYSFEKVPFHSMYAHSQSLDRLMNPLIDQYLWGLQSTTTGTTLNAGTATTNFTKLRPTNFSNFKKNWLPGPSIKQQGFSKTANQNYEIPATGSDSLIEYETHSTLDGRWSALTPGPPMATAGPADSKFSNSQLIFAGPKQNGNTATVPGTLIFTSEEELAATNATDTDMWGNLPGGDQSSSNLPVVNRLSALGAVPGMVWQNRDIYYQGPIWAKIPHTDGHFHPSPLIGGFGLKHPPPQIFIKNTPVPANPATTFSSTPVNSFITQYSTGQVSVQIDWEIQKERSKRWNPEVQFTSNYGQQNSLLWAPDAAGKYTEPRAIGTRYLTHHL

SEQ ID NO: 1155 - protein, 735 aa, synthetic construct
  REGION 1..735: note = source = /note="Description of Artificial Sequence: Synthetic polypeptide"
MAADGYLPDWLEDNLSEGVREWWALQPGAPKPKANQQHQDNARGLVLPGYKYLGPGNGLDKGEPVNAADAAALEHDKAYDQQLKAGDNPYLKYNHADAEFQQRLQGDTSFGGNLGRAVFQAKKRVLEPLGLVEQAGETAPGKKRPLIESPQQPDSSTGIGKKGKQPAKKKLVFEDETGAGDGPPEGSTSGAMSDDSEMRAAAGGAAVEGGQGADGVGNASGDWHCDSTWSEGHVTTTSTRTWVLPTYNNHLYKRLGESLQSNTYNGFSTPWGYFDFNRFHCHFSPRDWQRLINNNWGMRPKAMRVKIFNIQVKEVTTSNGETTVANNLTSTVQIFADSSYELPYVMDAGQEGSLPPFPNDVFMVPQYGYCGLVTGNTSQQQTDRNAFYCLEYFPSQMLRTGNNFEITYSFEKVPFHSMYAHSQSLDRLMNPLIDQYLWGLQSTTTGTTLNAGTATTNFTKLRPTNFSNFKKNWLPGPSIKQQGFSKTANQNYEIPATGSDSLIEYETHSTLDGRWSALTPGPPMATAGPADSKFSNSQLIFAGPKQNGNTATVPGTLIFTSEEELAATNATDTDMWGNLPGGDQSSSNLPPVMGLGALGAVPGMVWQNRDIYYQGPIWAKIPHTDGHFHPSPLIGGFGLKHPPPQIFIKNTPVPANPATTFSSTPVNSFITQYSTGQVSVQIDWEIQKERSKRWNPEVQFTSNYGQQNSLLWAPDAAGKYTEPRAIGTRYLTHHL

SEQ ID NO: 1156 - protein, 736 aa, synthetic construct
  REGION 1..736: note = source = /note="Description of Artificial Sequence: Synthetic polypeptide"
MAADGYLPDWLEDNLSEGVREWWALQPGAPKPKANQQHQDNARGLVLPGYKYLGPGNGLDKGEPVNAADAAALEHDKAYDQQLKAGDNPYLKYNHADAEFQQRLQGDTSFGGNLGRAVFQAKKRVLEPLGLVEQAGETAPGKKRPLIESPQQPDSSTGIGKKGKQPAKKKLVFEDETGAGDGPPEGSTSGAMSDDSEMRAAAGGAAVEGGQGADGVGNASGDWHCDSTWSEGHVTTTSTRTWVLPTYNNHLYKRLGESLQSNTYNGFSTPWGYFDFNRFHCHFSPRDWQRLINNNWGMRPKAMRVKIFNIQVKEVTTSNGETTVANNLTSTVQIFADSSYELPYVMDAGQEGSLPPFPNDVFMVPQYGYCGLVTGNTSQQQTDRNAFYCLEYFPSQMLRTGNNFEITYSFEKVPFHSMYAHSQSLDRLMNPLIDQYLWGLQSTTTGTTLNAGTATTNFTKLRPTNFSNFKKNWLPGPSIKQQGFSKTANQNYEIPATGSDSLIEYETHSTLDGRWSALTPGPPMATAGPADSKFSNSQLIFAGPKQNGNTATVPGTLIFTSEEELAATNATDTDMWGNLPGGDQSRVDRLPTVDRLTALGAVPGMVWQNRDIYYQGPIWAKIPHTDGHFHPSPLIGGFGLKHPPPQIFIKNTPVPANPATTFSSTPVNSFITQYSTGQVSVQIDWEIQKERSKRWNPEVQFTSNYGQQNSLLWAPDAAGKYTEPRAIGTRYLTHHL

SEQ ID NO: 1157 - protein, 736 aa, synthetic construct
  REGION 1..736: note = source = /note="Description of Artificial Sequence: Synthetic polypeptide"
MAADGYLPDWLEDNLSEGVREWWALQPGAPKPKANQQHQDNARGLVLPGYKYLGPGNGLDKGEPVNAADAAALEHDKAYDQQLKAGDNPYLKYNHADAEFQQRLQGDTSFGGNLGRAVFQAKKRVLEPLGLVEQAGETAPGKKRPLIESPQQPDSSTGIGKKGKQPAKKKLVFEDETGAGDGPPEGSTSGAMSDDSEMRAAAGGAAVEGGQGADGVGNASGDWHCDSTWSEGHVTTTSTRTWVLPTYNNHLYKRLGESLQSNTYNGFSTPWGYFDFNRFHCHFSPRDWQRLINNNWGMRPKAMRVKIFNIQVKEVTTSNGETTVANNLTSTVQIFADSSYELPYVMDAGQEGSLPPFPNDVFMVPQYGYCGLVTGNTSQQQTDRNAFYCLEYFPSQMLRTGNNFEITYSFEKVPFHSMYAHSQSLDRLMNPLIDQYLWGLQSTTTGTTLNAGTATTNFTKLRPTNFSNFKKNWLPGPSIKQQGFSKTANQNYEIPATGSDSLIEYETHSTLDGRWSALTPGPPMATAGPADSKFSNSQLIFAGPKQNGNTATVPGTLIFTSEEELAATNATDTDMWGNLPGGDQSRALRLPTVDRLTALGAVPGMVWQNRDIYYQGPIWAKIPHTDGHFHPSPLIGGFGLKHPPPQIFIKNTPVPANPATTFSSTPVNSFITQYSTGQVSVQIDWEIQKERSKRWNPEVQFTSNYGQQNSLLWAPDAAGKYTEPRAIGTRYLTHHL

SEQ ID NO: 1158 - DNA, 1172 bp, synthetic construct
  misc_feature 1..1172: note = source = /note="Description of Artificial Sequence: Synthetic polynucleotide"
  source 1..1172: mol_type = other DNA
cttaattaggctgcgcgctcgctcgctcactgaggccgcccgggcaaagcccgggcgtcgggcgacctttggtcgcccggcctcagtgagcgagcgagcgcgcagagagggagtggccaactccatcactaggggttccttgtagttaatgattaacccgccatgctacttatctaccagggtaatggggatcctctagaactatagctagtcgacattgattattgactagttattaatagtaatcaattacggggtcattagttcatagcccatatatggagttccgcgttacataacttacggtaaatggcccgcctggctgaccgcccaacgacccccgcccattgacgtcaataatgacgtatgttcccatagtaacgccaatagggactttccattgacgtcaatgggtggactatttacggtaaactgcccacttggcagtacatcaagtgtatcatatgccaagtacgccccctattgacgtcaatgacggtaaatggcccgcctggcattatgcccagtacatgaccttatgggactttcctacttggcagtacatctacgtattagtcatcgctattaccatgtcgaggccacgttctgcttcactctccccatctcccccccctccccacccccaattttgtatttatttattttttaattattttgtgcagcgatgggggcggggggggggggcgcgcgccaggcggggcggggcggggcgaggggcggggcggggcgaggcggagaggtgcggcggcagccaatcagagcggcgcgctccgaaagtttccttttatggcgaggcggcggcggcggcggccctataaaaagcgaagcgcgcggcgggcgggagcaagctttattgcggtagtttatcacagttaaattgctaacgcagtcagtgcttctgacacaacagtctcgaacttaagctgcagaagttggtcgtgaggcactgggcaggtaagtatcaaggttacaagacaggtttaaggagaccaatagaaactgggcttgtcgagacagagaagactcttgcgtttctgataggcacctattggtcttactgacatccactttgcctttctctccacaggtgtccactcccagttcaattacagctcttaaggctagagtacttaatacgactcsactatagg

SEQ ID NO: 1159 - DNA, 3231 bp, synthetic construct
  misc_feature 1..3231: note = source = /note="Description of Artificial Sequence: Synthetic polynucleotide"
  source 1..3231: mol_type = other DNA
taagaattcacgcgtggtacctctagagtcgacccgggcggcctcgaggacggggtgaactacgcctgaggatccgatctttttccctctgccaaaaattatggggacatcatgaagccccttgagcatctgacttctggctaataaaggaaatttattttcattgcaatagtgtgttggaattttttgtgtctctcactcggaagcaattcgttgatctgaatttcgaccacccataatacccattaccctggtagataagtagcatggcgggttaatcattaactacaaggaacccctagtgatggagttggccactccctctctgcgcgctcgctcgctcactgaggccgggcgaccaaaggtcgcccgacgcccgggctttgcccgggcggcctcagtgagcgagcgagcgcgcagccttaattaacctaattcactggccgtcgttttacaacgtcgtgactgggaaaaccctggcgttacccaacttaatcgccttgcagcacatccccctttcgccagctggcgtaatagcgaagaggcccgcaccgatcgcccttcccaacagttgcgcagcctgaatggcgaatgggacgcgccctgtagcggcgcattaagcgcggcgggtgtggtggttacgcgcagcgtgaccgctacacttgccagcgccctagcgcccgctcctttcgctttcttcccttcctttctcgccacgttcgccggctttccccgtcaagctctaaatcgggggctccctttagggttccgatttagtgctttacggcacctcgaccccaaaaaacttgattagggtgatggttcacgtagtgggccatcgccctgatagacggtttttcgccctttgacgttggagtccacgttctttaatagtggactcttgttccaaactggaacaacactcaaccctatctcggtctattcttttgatttataagggattttgccgatttcggcctattggttaaaaaatgagctgatttaacaaaaatttaacgcgaattttaacaaaatattaacgcttacaatttaggtggcacttttcggggaaatgtgcgcggaacccctatttgtttatttttctaaatacattcaaatatgtatccgctcatgagacaataaccctgataaatgcttcaataatattgaaaaaggaagagtatgagtattcaacatttccgtgtcgcccttattcccttttttgcggcattttgccttcctgtttttgctcacccagaaacgctggtgaaagtaaaagatgctgaagatcagttgggtgcacgagtgggttacatcgaactggatctcaacagcggtaagatccttgagagttttcgccccgaagaacgttttccaatgatgagcacttttaaagttctgctatgtggcgcggtattatcccgtattgacgccgggcaagagcaactcggtcgccgcatacactattctcagaatgacttggttgagtactcaccagtcacagaaaagcatcttacggatggcatgacagtaagagaattatgcagtgctgccataaccatgagtgataacactgcggccaacttacttctgacaacgatcggaggaccgaaggagctaaccgcttttttgcacaacatgggggatcatgtaactcgccttgatcgttgggaaccggagctgaatgaagccataccaaacgacgagcgtgacaccacgatgcctgtagcaatggcaacaacgttgcgcaaactattaactggcgaactacttactctagcttcccggcaacaattaatagactggatggaggcggataaagttgcaggaccacttctgcgctcggcccttccggctggctggtttattgctgataaatctggagccggtgagcgtgggtctcgcggtatcattgcagcactggggccagatggtaagccctcccgtatcgtagttatctacacgacggggagtcaggcaactatggatgaacgaaatagacagatcgctgagataggtgcctcactgattaagcattggtaactgtcagaccaagtttactcatatatactttagattgatttaaaacttcatttttaatttaaaaggatctaggtgaagatcctttttgataatctcatgaccaaaatcccttaacgtgagttttcgttccactgagcgtcagaccccgtagaaaagatcaaaggatcttcttgagatcctttttttctgcgcgtaatctgctgcttgcaaacaaaaaaaccaccgctaccagcggtggtttgtttgccggatcaagagctaccaactctttttccgaaggtaactggcttcagcagagcgcagataccaaatactgttcttctagtgtagccgtagttaggccaccacttcaagaactctgtagcaccgcctacatacctcgctctgctaatcctgttaccagtggctgctgccagtggcgataagtcgtgtcttaccgggttggactcaagacgatagttaccggataaggcgcagcggtcgggctgaacggggggttcgtgcacacagcccagcttggagcgaacgacctacaccgaactgagatacctacagcgtgagctatgagaaagcgccacgcttcccgaagggagaaaggcggacaggtatccggtaagcggcagggtcggaacaggagagcgcacgagggagcttccagggggaaacgcctggtatctttatagtcctgtcgggtttcgccacctctgacttgagcgtcgatttttgtgatgctcgtcaggggggcggagcctatggaaaaacgccagcaacgcggcctttttacggttcctggccttttgctggccttttgctcacatgttctttcctgcgttatcccctgattctgtggataaccgtattaccgcctttgagtgagctgataccgctcgccgcagccgaacgaccgagcgcagcgagtcagtgagcgaggaagcggaagagcgcccaatacgcaaaccgcctctccccgcgcgttggccgattcattaatgcagctggcacgacaggtttcccgactggaaagcgggcagtgagcgcaacgcaattaatgtgagttagctcactcattaggcaccccaggctttacactttatgcttccggctcgtatgttgtgtggaattgtgagcggataacaatttcacacaggaaacagctatgaccatgattacgccagatttaattaaggc

SEQ ID NO: 1160 - protein, 737 aa, synthetic construct
  VARIANT 264: note = Any amino acid
  VARIANT 266: note = Any amino acid
  VARIANT 268: note = Any amino acid
  VARIANT 448: note = Any amino acid
  VARIANT 459..460: note = Any amino acid
  VARIANT 467: note = Any amino acid
  VARIANT 470..471: note = Any amino acid
  VARIANT 474: note = Any amino acid
  VARIANT 495: note = Any amino acid
  VARIANT 516: note = Any amino acid
  VARIANT 533: note = Any amino acid
  VARIANT 547: note = Any amino acid
  VARIANT 551: note = Any amino acid
  VARIANT 555: note = Any amino acid
  VARIANT 557: note = Any amino acid
  VARIANT 561: note = Any amino acid
  VARIANT 563: note = Any amino acid
  VARIANT 577: note = Any amino acid
  VARIANT 583: note = Any amino acid
  VARIANT 593: note = Any amino acid
  VARIANT 596: note = Any amino acid
  VARIANT 661..662: note = Any amino acid
  VARIANT 664..665: note = Any amino acid
  VARIANT 710: note = Any amino acid
  VARIANT 717..719: note = Any amino acid
  VARIANT 723: note = Any amino acid
  REGION 1..737: note = source = /note="Description of Artificial Sequence: Synthetic polypeptide"
MAADGYLPDWLEDNLSEGIREWWDLKPGAPKPKANQQKQDDGRGLVLPGYKYLGPFNGLDKGEPVNAADAAALEHDKAYDQQLKAGDNPYLRYNHADAEFQERLQEDTSFGGNLGRAVFQAKKRVLEPLGLVEEGAKTAPGKKRPVEPSPQRSPDSSTGIGKKGQQPAKKRLNFGQTGDSESVPDPQPLGEPPAGPSGLGSGTMAAGGGAPMADNNEGADGVGNASGNWHCDSTWLGDRVITTSTRTWALPTYNNHLYKQISSXSXGXTNDNHYFGYSTPWGYFDFNRFHCHFSPRDWQRLINNNWGFRPKRLNFKLFNIQVKEVTTNDGVTTIANNLTSTVQVFSDSEYQLPYVLGSAHQGCLPPFPADVFMIPQYGYLTLNNGSQAVGRSSFYCLEYFPSQMLRTGNNFTFSYTFEDVPFHSSYAHSQSLDRLMNPLIDQYLYYLXRTQSTGGTAGXXELLFSQXGPXXMSXQAKNWLPGPCYRQQRVSKTLXQNNNSNFAWTGATKYHLNGRXSLVNPGVAMATHKDDEXRFFPSSGVLIFGKXGAGXNNTXLXNVMXTXEEEIKTTNPVATEXYGVVAXNLQSSNTAPXTGXVNSQGALPGMVWQNRDVYLQGPIWAKIPHTDGNFHPSPLMGGFGLKHPPPQILIKNTPVPANPPXXFXXAKFASFITQYSTGQVSVEIEWELQKENSKRWNPEIQYTSNYAKSXNVDFAVXXXGVYXEPRPIGTRYLTRNL

SEQ ID NO: 1161 - protein, 737 aa, synthetic construct
  REGION 1..737: note = source = /note="Description of Artificial Sequence: Synthetic polypeptide"
MAADGYLPDWLEDNLSEGIREWWDLKPGAPKPKANQQKQDDGRGLVLPGYKYLGPFNGLDKGEPVNAADAAALEHDKAYDQQLKAGDNPYLRYNHADAEFQERLQEDTSFGGNLGRAVFQAKKRVLEPLGLVEEGAKTAPGKKRPVEPSPQRSPDSSTGIGKKGQQPAKKRLNFGQTGDSESVPDPQPLGEPPAGPSGLGSGTMAAGGGAPMADNNEGADGVGNASGNWHCDSTWLGDRVITTSTRTWALPTYNNHLYKQISSASSGSTNDNHYFGYSTPWGYFDFNRFHCHFSPRDWQRLINNNWGFRPKRLNFKLFNIQVKEVTTNDGVTTIANNLTSTVQVFSDSEYQLPYVLGSAHQGCLPPFPADVFMIPQYGYLTLNNGSQAVGRSSFYCLEYFPSQMLRTGNNFTFSYTFEDVPFHSSYAHSQSLDRLMNPLIDQYLYYLARTQSTGGTAGNRELLFSQGGPSNMSAQAKNWLPGPCYRQQRVSKTLAQNNNSNFAWTGATKYHLNGRDSLVNPGVAMATHKDDEDRFFPSSGVLIFGKEGAGANNTALENVMLTNEEEIKTTNPVATEQYGVVASNLQSSNTAPATGAVNSQGALPGMVWQNRDVYLQGPIWAKIPHTDGNFHPSPLMGGFGLKHPPPQILIKNTPVPANPPATFTPAKFASFITQYSTGQVSVEIEWELQKENSKRWNPEIQYTSNYAKSTNVDFAVNNEGVYSEPRPIGTRYLTRNL

SEQ ID NO: 1162 - protein, 737 aa, synthetic construct
  REGION 1..737: note = source = /note="Description of Artificial Sequence: Synthetic polypeptide"
MAADGYLPDWLEDNLSEGIREWWDLKPGAPKPKANQQKQDDGRGLVLPGYKYLGPFNGLDKGEPVNAADAAALEHDKAYDQQLKAGDNPYLRYNHADAEFQERLQEDTSFGGNLGRAVFQAKKRVLEPLGLVEEGAKTAPGKKRPVEPSPQRSPDSSTGIGKKGQQPAKKRLNFGQTGDSESVPDPQPLGEPPAGPSGLGSGTMAAGGGAPMADNNEGADGVGNASGNWHCDSTWLGDRVITTSTRTWALPTYNNHLYKQISSQSSGSTNDNHYFGYSTPWGYFDFNRFHCHFSPRDWQRLINNNWGFRPKRLNFKLFNIQVKEVTTNDGVTTIANNLTSTVQVFSDSEYQLPYVLGSAHQGCLPPFPADVFMIPQYGYLTLNNGSQAVGRSSFYCLEYFPSQMLRTGNNFTFSYTFEDVPFHSSYAHSQSLDRLMNPLIDQYLYYLSRTQSTGGTAGNRELLFSQGGPANMSAQAKNWLPGPCYRQQRVSKTLSQNNNSNFAWTGATKYHLNGRDSLVNPGVAMATHKDDEERFFPSSGVLIFGKQGAGANNTTLDNVMMTSEEEIKTTNPVATEQYGVVASNLQSSNTAPQTGTVNSQGALPGMVWQNRDVYLQGPIWAKIPHTDGNFHPSPLMGGFGLKHPPPQILIKNTPVPANPPAVFSPAKFASFITQYSTGQVSVEIEWELQKENSKRWNPEIQYTSNYAKSTNVDFAVNSEGVYSEPRPIGTRYLTRNL

SEQ ID NO: 1163 - protein, 737 aa, synthetic construct
  REGION 1..737: note = source = /note="Description of Artificial Sequence: Synthetic polypeptide"
MAADGYLPDWLEDNLSEGIREWWDLKPGAPKPKANQQKQDDGRGLVLPGYKYLGPFNGLDKGEPVNAADAAALEHDKAYDQQLKAGDNPYLRYNHADAEFQERLQEDTSFGGNLGRAVFQAKKRVLEPLGLVEEGAKTAPGKKRPVEPSPQRSPDSSTGIGKKGQQPAKKRLNFGQTGDSESVPDPQPLGEPPAGPSGLGSGTMAAGGGAPMADNNEGADGVGNASGNWHCDSTWLGDRVITTSTRTWALPTYNNHLYKQISSASSGSTNDNHYFGYSTPWGYFDFNRFHCHFSPRDWQRLINNNWGFRPKRLNFKLFNIQVKEVTTNDGVTTIANNLTSTVQVFSDSEYQLPYVLGSAHQGCLPPFPADVFMIPQYGYLTLNNGSQAVGRSSFYCLEYFPSQMLRTGNNFTFSYTFEDVPFHSSYAHSQSLDRLMNPLIDQYLYYLARTQSTGGTAGTRELLFSQGGPSNMSAQAKNWLPGPCYRQQRVSKTLTQNNNSNFAWTGATKYHLNGRDSLVNPGVAMATHKDDEDRFFPSSGVLIFGKQGAGANNTALDNVMITNEEEIKTTNPVATEQYGVVASNLQSSNTAPATGTVNSQGALPGMVWQNRDVYLQGPIWAKIPHTDGNFHPSPLMGGFGLKHPPPQILIKNTPVPANPPTVFSPAKFASFITQYSTGQVSVEIEWELQKENSKRWNPEIQYTSNYAKSTNVDFAVNSEGVYTEPRPIGTRYLTRNL

SEQ ID NO: 1164 - protein, 737 aa, synthetic construct
  VARIANT 264: note = Any amino acid
  VARIANT 448: note = Any amino acid
  VARIANT 459: note = Any amino acid
  VARIANT 470: note = Any amino acid
  VARIANT 495: note = Any amino acid
  VARIANT 533: note = Any amino acid
  VARIANT 547: note = Any amino acid
  VARIANT 555: note = Any amino acid
  VARIANT 557: note = Any amino acid
  VARIANT 561: note = Any amino acid
  VARIANT 563: note = Any amino acid
  VARIANT 593: note = Any amino acid
  VARIANT 596: note = Any amino acid
  VARIANT 661..662: note = Any amino acid
  VARIANT 664: note = Any amino acid
  VARIANT 718: note = Any amino acid
  VARIANT 723: note = Any amino acid
  REGION 1..737: note = source = /note="Description of Artificial Sequence: Synthetic polypeptide"
MAADGYLPDWLEDNLSEGIREWWDLKPGAPKPKANQQKQDDGRGLVLPGYKYLGPFNGLDKGEPVNAADAAALEHDKAYDQQLKAGDNPYLRYNHADAEFQERLQEDTSFGGNLGRAVFQAKKRVLEPLGLVEEGAKTAPGKKRPVEPSPQRSPDSSTGIGKKGQQPAKKRLNFGQTGDSESVPDPQPLGEPPAGPSGLGSGTMAAGGGAPMADNNEGADGVGNASGNWHCDSTWLGDRVITTSTRTWALPTYNNHLYKQISSXSSGSTNDNHYFGYSTPWGYFDFNRFHCHFSPRDWQRLINNNWGFRPKRLNFKLFNIQVKEVTTNDGVTTIANNLTSTVQVFSDSEYQLPYVLGSAHQGCLPPFPADVFMIPQYGYLTLNNGSQAVGRSSFYCLEYFPSQMLRTGNNFTFSYTFEDVPFHSSYAHSQSLDRLMNPLIDQYLYYLXRTQSTGGTAGXRELLFSQGGPXNMSAQAKNWLPGPCYRQQRVSKTLXQNNNSNFAWTGATKYHLNGRDSLVNPGVAMATHKDDEXRFFPSSGVLIFGKXGAGANNTXLXNVMXTXEEEIKTTNPVATEQYGVVASNLQSSNTAPXTGXVNSQGALPGMVWQNRDVYLQGPIWAKIPHTDGNFHPSPLMGGFGLKHPPPQILIKNTPVPANPPXXFXPAKFASFITQYSTGQVSVEIEWELQKENSKRWNPEIQYTSNYAKSTNVDFAVNXEGVYXEPRPIGTRYLTRNL

SEQ ID NO: 1165 - protein, 737 aa, synthetic construct
  VARIANT 264: note = Any amino acid
  VARIANT 448: note = Any amino acid
  VARIANT 470: note = Any amino acid
  VARIANT 533: note = Any amino acid
  VARIANT 547: note = Any amino acid
  VARIANT 555: note = Any amino acid
  VARIANT 557: note = Any amino acid
  VARIANT 561: note = Any amino acid
  VARIANT 563: note = Any amino acid
  VARIANT 593: note = Any amino acid
  VARIANT 596: note = Any amino acid
  VARIANT 662: note = Any amino acid
  VARIANT 664: note = Any amino acid
  VARIANT 718: note = Any amino acid
  REGION 1..737: note = source = /note="Description of Artificial Sequence: Synthetic polypeptide"
MAADGYLPDWLEDNLSEGIREWWDLKPGAPKPKANQQKQDDGRGLVLPGYKYLGPFNGLDKGEPVNAADAAALEHDKAYDQQLKAGDNPYLRYNHADAEFQERLQEDTSFGGNLGRAVFQAKKRVLEPLGLVEEGAKTAPGKKRPVEPSPQRSPDSSTGIGKKGQQPAKKRLNFGQTGDSESVPDPQPLGEPPAGPSGLGSGTMAAGGGAPMADNNEGADGVGNASGNWHCDSTWLGDRVITTSTRTWALPTYNNHLYKQISSXSSGSTNDNHYFGYSTPWGYFDFNRFHCHFSPRDWQRLINNNWGFRPKRLNFKLFNIQVKEVTTNDGVTTIANNLTSTVQVFSDSEYQLPYVLGSAHQGCLPPFPADVFMIPQYGYLTLNNGSQAVGRSSFYCLEYFPSQMLRTGNNFTFSYTFEDVPFHSSYAHSQSLDRLMNPLIDQYLYYLXRTQSTGGTAGNRELLFSQGGPXNMSAQAKNWLPGPCYRQQRVSKTLSQNNNSNFAWTGATKYHLNGRDSLVNPGVAMATHKDDEXRFFPSSGVLIFGKXGAGANNTXLXNVMXTXEEEIKTTNPVATEQYGVVASNLQSSNTAPXTGXVNSQGALPGMVWQNRDVYLQGPIWAKIPHTDGNFHPSPLMGGFGLKHPPPQILIKNTPVPANPPAXFXPAKFASFITQYSTGQVSVEIEWELQKENSKRWNPEIQYTSNYAKSTNVDFAVNXEGVYSEPRPIGTRYLTRNL

SEQ ID NO: 1166 - DNA, 2217 bp, synthetic construct
  misc_feature 1..2217: note = source = /note="Description of Artificial Sequence: Synthetic polynucleotide"
  source 1..2217: mol_type = other DNA
atggctgccgatggttatcttccagattggctcgaggacactctctctgaaggaataagacagtggtggaagctcaaacctggcccaccaccaccaaagcccgcagagcggcataaggacgacagcaggggtcttgtgcttcctgggtacaagtacctcggacccttcaacggactcgacaagggagagccggtcaacgaggcagacgccgcggccctcgagcacgacaaagcctacgaccggcagctcgacagcggagacaacccgtacctcaagtacaaccacgccgacgcggagtttcaggagcgccttaaagaagatacgtcttttgggggcaacctcggacgagcagtcttccaggcgaaaaagagggttcttgaacctctgggcctggttgaggaacctgttaagacggctccgggaaagaagagaccggtagagccatcaccccagcgttctccagactcctctacgggcatcggcaagaaaggccaacagcccgccagaaaaagactcaattttggtcagactggcgactcagagtcagttccagaccctcaacctctcggagaacctccagcagcgccctctggtgtgggacctaatacaatggctgcaggcggtggcgcaccaatggcagacaataacgaaggcgccgacggagtgggtagttcctcgggaaattggcattgcgattccacatggctgggcgacagagtcatcaccaccagcacccgaacctgggccctgcccacctacaacaaccacctctacaagcaaatctccaacgggacatcgggaggagccaccaacgacaacacctacttcggctacagcaccccctgggggtattttgactttaacagattccactgccacttttcaccacgtgactggcagcgactcatcaacaacaactggggattccggcccaagagactcagcttcaagctcttcaacatccaggtcaaggaggtcacgcagaatgaaggcaccaagaccatcgccaataacctcaccagcaccatccaggtgtttacggactcggagtaccagctgccgtacgttctcggctctgcccaccagggctgcctgcctccgttcccggcggacgtgttcatgattccccagtacggctacctaacactcaacaacggtagtcaggccgtgggacgctcctccttctactgcctggaatactttccttcgcagatgctgagaaccggcaacaacttccagtttacttacaccttcgaggacgtgcctttccacagcagctacgcccacagccagagcttggaccggctgatgaatcctctgattgaccagtacctgtactacttgtctcggactcaaacaacaggaggcacggcaaatacgcagactctgggcttcagccaaggtgggcctaatacaatggccaatcaggcaaagaactggctgccaggaccctgttaccgccaacaacgcgtctcaacgacaaccgggcaaaacaacaatagcaactttgcctggactgctgggaccaaataccatctgaatggaagaaattcattggctaatcctggcatcgctatggcaacacacaaagacgacgaggagcgtttttttcccagtaacgggatcctgatttttggcaaacaaaatgctgccagagacaatgcggattacagcgatgtcatgctcaccagcgaggaagaaatcaaaaccactaaccctgtggctacagaggaatacggtatcgtggcagataacttgcagcagcaaaacacggctcctcaaattggaactgtcaacagccagggggccttacccggtatggtctggcagaaccgggacgtgtacctgcagggtcccatctgggccaagattcctcacacggacggcaacttccacccgtctccgctgatgggcggctttggcctgaaacatcctccgcctcagatcctgatcaagaacacgcctgtacctgcggatcctccgaccaccttcaaccagtcaaagctgaactctttcatcacgcaatacagcaccggacaggtcagcgtggaaattgaatgggagctgcagaaggaaaacagcaagcgctggaaccccgagatccagtacacctccaactactacaaatctacaagtgtggactttgctgttaatacagaaggcgtgtactctgaaccccgccccattggcacccgttacctcacccgtaatctgtaa

SEQ ID NO: 1167 - protein, 733 aa, synthetic construct; identical to SEQ ID NO: 952
  REGION 1..733: note = source = /note="Description of Artificial Sequence: Synthetic polypeptide"

SEQ ID NO: 1168 - DNA, 2203 bp, synthetic construct
  misc_feature 1..2203: note = source = /note="Description of Artificial Sequence: Synthetic polynucleotide"
  source 1..2203: mol_type = other DNA
atgtcttttgttgatcaccctccagattggttggaagaagttggtgaaggtcttcgcgagtttttgggccttgaagcgggcccaccgaaaccaaaacccaatcagcagcatcaagatcaagcccgtggtcttgtgctgcctggttataactatctcggacccggaaacggtctcgatcgaggagagcctgtcaacagggcagacgaggtcgcgcgagagcacgacatctcgtacaacgagcagcttgaggcgggagacaacccctacctcaagtacaaccacgcggacgccgagtttcaggagaagctcgccgacgacacatccttcgggggaaacctcggaaaggcagtctttcaggccaagaaaagggttctcgaaccttttggcctggttgaagagggtgctaagacggcccctaccggaaagcggatagacgaccactttccaaaaagaaagaaggctcggaccgaagaggactccaagccttccacctcgtcagacgccgaagctggacccagcggatcccagcagctgcaaatcccagcccaaccagcctcaagtttgggagctgatacaatgtctgcgggaggtggcggcccattgggcgacaataaccaaggtgccgatggagtgggcaatgcctcgggagattggcattgcgattccacgtggatgggggacagagtcgtcaccaagtccacccgaacctgggtgctgcccagctacaacaaccaccagtaccgagagatcaaaagcggctccgtcgacggaagcaacgccaacgcctactttggatacagcaccccctgggggtactttgactttaaccgcttccacagccactggagcccccgagactggcaaagactcatcaacaactactggggcttcagaccccggtccctcagagtcaaaatcttcaacattcaagtcaaagaggtcacggtgcaggactccaccaccaccatcgccaacaacctcacctccaccgtccaagtgtttacggacgacgactaccagctgccctacgtcgtcggcaacgggaccgagggatgcctgccggccttccctccgcaggtctttacgctgccgcagtacggttacgcgacgctgaaccgcgacaacacagaaaatcccaccgagaggagcagcttcttctgcctagagtactttcccagcaagatgctgagaacgggcaacaactttgagtttacctacaactttgaggaggtgcccttccactccagcttcgctcccagtcagaacctgttcaagctggccaacccgctggtggaccagtacttgtaccgcttcgtgagcacaaataacactggcggagtccagttcaacaagaacctggccgggagatacgccaacacctacaaaaactggttcccggggcccatgggccgaacccagggctggaacctgggctccggggtcaaccgcgccagtgtcagcgccttcgccacgaccaataggatggagctcgagggcgcgagttaccaggtgcccccgcagccgaacggcatgaccaacaacctccagggcagcaacacctatgccctggagaacactatgatcttcaacagccagccggcgaacccgggcaccaccgccacgtacctcgagggcaacatgctcatcaccagcgagagcgagacgcagccggtgaaccgcgtggcgtacaacgtcggcgggcaggtggccaccaacaaccagagctccaccactgcccccgcgaccggcacgtacaacctccaggaaatcgtgcccggcagcgtgtggatggagagggacgtgtacctccaaggacccatctgggccaagatcccagagacgggggcgcactttcacccctctccggccatgggcggattcggactcaaacacccaccgcccatgatgctcatcaagaacacgcctgtgcccggaaatatcaccagcttctcggacgtgcccgtcagcagcttcatcacccagtacagcaccgggcaggtcaccgtggagatggagtgggagctcaagaaggaaaactccaagaggtggaacccagagatccagtacacaaacaactacaacgacccccagtttgtggactttgccccggacagcaccggggaatacagaaccaccagacctatcggaacccgataccttacccgacccctttaacccattcatgtcgcataccctcaataaa

SEQ ID NO: 1169 - protein, 724 aa, synthetic construct
  REGION 1..724: note = source = /note="Description of Artificial Sequence: Synthetic polypeptide"
MSFVDHPPDWLEEVGEGLREFLGLEAGPPKPKPNQQHQDQARGLVLPGYNYLGPGNGLDRGEPVNRADEVAREHDISYNEQLEAGDNPYLKYNHADAEFQEKLADDTSFGGNLGKAVFQAKKRVLEPFGLVEEGAKTAPTGKRIDDHFPKRKKARTEEDSKPSTSSDAEAGPSGSQQLQIPAQPASSLGADTMSAGGGGPLGDNNQGADGVGNASGDWHCDSTWMGDRVVTKSTRTWVLPSYNNHQYREIKSGSVDGSNANAYFGYSTPWGYFDFNRFHSHWSPRDWQRLINNYWGFRPRSLRVKIFNIQVKEVTVQDSTTTIANNLTSTVQVFTDDDYQLPYVVGNGTEGCLPAFPPQVFTLPQYGYATLNRDNTENPTERSSFFCLEYFPSKMLRTGNNFEFTYNFEEVPFHSSFAPSQNLFKLANPLVDQYLYRFVSTNNTGGVQFNKNLAGRYANTYKNWFPGPMGRTQGWNLGSGVNRASVSAFATTNRMELEGASYQVPPQPNGMTNNLQGSNTYALENTMIFNSQPANPGTTATYLEGNMLITSESETQPVNRVAYNVGGQVATNNQSSTTAPATGTYNLQEIVPGSVWMERDVYLQGPIWAKIPETGAHFHPSPAMGGFGLKHPPPMMLIKNTPVPGNITSFSDVPVSSFITQYSTGQVTVEMEWELKKENSKRWNPEIQYTNNYNDPQFVDFAPDSTGEYRTTRPIGTRYLTRPL

SEQ ID NO: 1170 - DNA, 2203 bp, synthetic construct
  misc_feature 1..2203: note = source = /note="Description of Artificial Sequence: Synthetic polynucleotide"
  source 1..2203: mol_type = other DNA
atgtcttttgttgatcaccctccagattggttggaagaagttggtgaaggtcttcgcgagtttttgggccttgaagcgggcccaccgaaaccaaaacccaatcagcagcatcaagatcaagcccgtggtcttgtgctgcctggttataactatctcggacccggaaacggtctcgatcgaggagagcctgtcaacagggcagacgaggtcgcgcgagagcacgacatctcgtacaacgagcagcttgaggcgggagacaacccctacctcaagtacaaccacgcggacgccgagtttcaggagaagctcgccgacgacacatccttcgggggaaacctcggaaaggcagtctttcaggccaagaaaagggttctcgaaccttttggcctggttgaagagggtgctaagacggcccctaccggaaagcggatagacgaccactttccaaaaagaaagaaggctcggaccgaagaggactccaagccttccacctcgtcagacgccgaagctggacccagcggatcccagcagctgcaaatcccagcccaaccagcctcaagtttgggagctgatacaatgtctgcgggaggtggcggcccattgggcgacaataaccaaggtgccgatggagtgggcaatgcctcgggagattggcattgcgattccacgtggatgggggacagagtcgtcaccaagtccacccgaacctgggtgctgcccagctacaacaaccaccagtaccgagagatcaaaagcggctccgtcgacggaagcaacgccaacgcctactttggatacagcaccccctgggggtactttgactttaaccgcttccacagccactggagcccccgagactggcaaagactcatcaacaactactggggcttcagaccccggtccctcagagtcaaaatcttcaacattcaagtcaaagaggtcacggtgcaggactccaccaccaccatcgccaacaacctcacctccaccgtccaagtgtttacggacgacgactaccagctgccctacgtcgtcggcaacgggaccgagggatgcctgccggccttccctccgcaggtctttacgctgccgcagtacggttacgcgacgctgaaccgcgacaacacagaaaatcccaccgagaggagcagcttcttctgcctagagtactttcccagcaagatgctgagaacgggcaacaactttgagtttacctacaactttgaggaggtgcccttccactccagcttcgctcccagtcagaacctgttcaagctggccaacccgctggtggaccagtacttgtaccgcttcgtgagcacaaataacactggcggagtccagttcaacaagaacctggccgggagatacgccaacacctacaaaaactggttcccggggcccatgggccgaacccagggctggaacctgggctccggggtcaaccgcgccagtgtcagcgccttcgccacgaccaataggatggagctcgagggcgcgagttaccaggtgcccccgcagccgaacggcatgaccaacaacctccagggcagcaacacctatgccctggagaacactatgatcttcaacagccagccggcgaacccgggcaccaccgccacgtacctcgagggcaacatgctcatcaccagcgagagcgagacgcagccggtgaaccgcgtggcgtacaacgtcggcgggcagatggccaccaacaaccagagctccaccactgcccccgcgaccggcacggtcaacctccaggaaatcgtgcccggcagcgtgtggatggagagggacgtgtacctccaaggacccatctgggccaagatcccagagacgggggcgcactttcacccctctccggccatgggcggattcggactcaaacacccaccgcccatgatgctcatcaagaacacgcctgtgcccggaaatatcaccagcttctcggacgtgcccgtcagcagcttcatcacccagtacagcaccgggcaggtcaccgtggagatggagtgggagctcaagaaggaaaactccaagaggtggaacccagagatccagtacacaaacaactacaacgacccccagtttgtggactttgccccggacagcaccggggaatacagaaccaccagacctatcggaacccgataccttacccgacccctttaacccattcatgtcgcataccctcaataaa

SEQ ID NO: 1171 - protein, 724 aa, synthetic construct
  REGION 1..724: note = source = /note="Description of Artificial Sequence: Synthetic polypeptide"
MSFVDHPPDWLEEVGEGLREFLGLEAGPPKPKPNQQHQDQARGLVLPGYNYLGPGNGLDRGEPVNRADEVAREHDISYNEQLEAGDNPYLKYNHADAEFQEKLADDTSFGGNLGKAVFQAKKRVLEPFGLVEEGAKTAPTGKRIDDHFPKRKKARTEEDSKPSTSSDAEAGPSGSQQLQIPAQPASSLGADTMSAGGGGPLGDNNQGADGVGNASGDWHCDSTWMGDRVVTKSTRTWVLPSYNNHQYREIKSGSVDGSNANAYFGYSTPWGYFDFNRFHSHWSPRDWQRLINNYWGFRPRSLRVKIFNIQVKEVTVQDSTTTIANNLTSTVQVFTDDDYQLPYVVGNGTEGCLPAFPPQVFTLPQYGYATLNRDNTENPTERSSFFCLEYFPSKMLRTGNNFEFTYNFEEVPFHSSFAPSQNLFKLANPLVDQYLYRFVSTNNTGGVQFNKNLAGRYANTYKNWFPGPMGRTQGWNLGSGVNRASVSAFATTNRMELEGASYQVPPQPNGMTNNLQGSNTYALENTMIFNSQPANPGTTATYLEGNMLITSESETQPVNRVAYNVGGQMATNNQSSTTAPATGTVNLQEIVPGSVWMERDVYLQGPIWAKIPETGAHFHPSPAMGGFGLKHPPPMMLIKNTPVPGNITSFSDVPVSSFITQYSTGQVTVEMEWELKKENSKRWNPEIQYTNNYNDPQFVDFAPDSTGEYRTTRPIGTRYLTRPL

SEQ ID NO: 1172 - DNA, 2203 bp, synthetic construct
  misc_feature 1..2203: note = source = /note="Description of Artificial Sequence: Synthetic polynucleotide"
  source 1..2203: mol_type = other DNA
atgtcttttgttgatcaccctccagattggttggaagaagttggtgaaggtcttcgcgagtttttgggccttgaagcgggcccaccgaaaccaaaacccaatcagcagcatcaagatcaagcccgtggtcttgtgctgcctggttataactatctcggacccggaaacggtctcgatcgaggagagcctgtcaacagggcagacgaggtcgcgcgagagcacgacatctcgtacaacgagcagcttgaggcgggagacaacccctacctcaagtacaaccacgcggacgccgagtttcaggagaagctcgccgacgacacatccttcgggggaaacctcggaaaggcagtctttcaggccaagaaaagggttctcgaaccttttggcctggttgaagagggtgctaagacggcccctaccggaaagcggatagacgaccactttccaaaaagaaagaaggctcggaccgaagaggactccaagccttccacctcgtcagacgccgaagctggacccagcggatcccagcagctgcaaatcccagcccaaccagcctcaagtttgggagctgatacaatgtctgcgggaggtggcggcccattgggcgacaataaccaaggtgccgatggagtgggcaatgcctcgggagattggcattgcgattccacgtggatgggggacagagtcgtcaccaagtccacccgaacctgggtgctgcccagctacaacaaccaccagtaccgagagatcaaaagcggctccgtcgacggaagcaacgccaacgcctactttggatacagcaccccctgggggtactttgactttaaccgcttccacagccactggagcccccgagactggcaaagactcatcaacaactactggggcttcagaccccggtccctcagagtcaaaatcttcaacattcaagtcaaagaggtcacggtgcaggactccaccaccaccatcgccaacaacctcacctccaccgtccaagtgtttacggacgacgactaccagctgccctacgtcgtcggcaacgggaccgagggatgcctgccggccttccctccgcaggtctttacgctgccgcagtacggttacgcgacgctgaaccgcgacaacacagaaaatcccaccgagaggagcagcttcttctgcctagagtactttcccagcaagatgctgagaacgggcaacaactttgagtttacctacaactttgaggaggtgcccttccactccagcttcgctcccagtcagaacctgttcaagctggccaacccgctggtggaccagtacttgtaccgcttcgtgagcacaaataacactggcggagtccagttcaacaagaacctggccgggagatacgccaacacctacaaaaactggttcccggggcccatgggccgaacccagggctggaacctgggctccggggtcaaccgcgccagtgtcagcgccttcgccacgaccaataggatggagctcgagggcgcgagttaccaggtgcccccgcagccgaacggcatgaccaacaacctccagggcagcaacacctatgccctggagaacactatgatcttcaacagccagccggcgaacccgggcaccaccgccacgtacctcgagggcaacatgctcatcaccagcgagagcgagacgcagccggtgaaccgcgtggcgtacaacgtcggcgggcagatggccaccaacaaccagagctccaccactgcccccgcgaccggcacgtacaacacccaggaaatcgtgcccggcagcgtgtggatggagagggacgtgtacctccaaggacccatctgggccaagatcccagagacgggggcgcactttcacccctctccggccatgggcggattcggactcaaacacccaccgcccatgatgctcatcaagaacacgcctgtgcccggaaatatcaccagcttctcggacgtgcccgtcagcagcttcatcacccagtacagcaccgggcaggtcaccgtggagatggagtgggagctcaagaaggaaaactccaagaggtggaacccagagatccagtacacaaacaactacaacgacccccagtttgtggactttgccccggacagcaccggggaatacagaaccaccagacctatcggaacccgataccttacccgacccctttaacccattcatgtcgcataccctcaataaa

SEQ ID NO: 1173 - protein, 724 aa, synthetic construct
  REGION 1..724: note = source = /note="Description of Artificial Sequence: Synthetic polypeptide"
MSFVDHPPDWLEEVGEGLREFLGLEAGPPKPKPNQQHQDQARGLVLPGYNYLGPGNGLDRGEPVNRADEVAREHDISYNEQLEAGDNPYLKYNHADAEFQEKLADDTSFGGNLGKAVFQAKKRVLEPFGLVEEGAKTAPTGKRIDDHFPKRKKARTEEDSKPSTSSDAEAGPSGSQQLQIPAQPASSLGADTMSAGGGGPLGDNNQGADGVGNASGDWHCDSTWMGDRVVTKSTRTWVLPSYNNHQYREIKSGSVDGSNANAYFGYSTPWGYFDFNRFHSHWSPRDWQRLINNYWGFRPRSLRVKIFNIQVKEVTVQDSTTTIANNLTSTVQVFTDDDYQLPYVVGNGTEGCLPAFPPQVFTLPQYGYATLNRDNTENPTERSSFFCLEYFPSKMLRTGNNFEFTYNFEEVPFHSSFAPSQNLFKLANPLVDQYLYRFVSTNNTGGVQFNKNLAGRYANTYKNWFPGPMGRTQGWNLGSGVNRASVSAFATTNRMELEGASYQVPPQPNGMTNNLQGSNTYALENTMIFNSQPANPGTTATYLEGNMLITSESETQPVNRVAYNVGGQMATNNQSSTTAPATGTYNTQEIVPGSVWMERDVYLQGPIWAKIPETGAHFHPSPAMGGFGLKHPPPMMLIKNTPVPGNITSFSDVPVSSFITQYSTGQVTVEMEWELKKENSKRWNPEIQYTNNYNDPQFVDFAPDSTGEYRTTRPIGTRYLTRPL

SEQ ID NO: 1174 - DNA, 2203 bp, synthetic construct
  misc_feature 1..2203: note = source = /note="Description of Artificial Sequence: Synthetic polynucleotide"
  source 1..2203: mol_type = other DNA
atgtcttttgttgatcaccctccagattggttggaagaagttggtgaaggtcttcgcgagtttttgggccttgaagcgggcccaccgaaaccaaaacccaatcagcagcatcaagatcaagcccgtggtcttgtgctgcctggttataactatctcggacccggaaacggtctcgatcgaggagagcctgtcaacagggcagacgaggtcgcgcgagagcacgacatctcgtacaacgagcagcttgaggcgggagacaacccctacctcaagtacaaccacgcggacgccgagtttcaggagaagctcgccgacgacacatccttcgggggaaacctcggaaaggcagtctttcaggccaagaaaagggttctcgaaccttttggcctggttgaagagggtgctaagacggcccctaccggaaagcggatagacgaccactttccaaaaagaaagaaggctcggaccgaagaggactccaagccttccacctcgtcagacgccgaagctggacccagcggatcccagcagctgcaaatcccagcccaaccagcctcaagtttgggagctgatacaatgtctgcgggaggtggcggcccattgggcgacaataaccaaggtgccgatggagtgggcaatgcctcgggagattggcattgcgattccacgtggatgggggacagagtcgtcaccaagtccacccgaacctgggtgctgcccagctacaacaaccaccagtaccgagagatcaaaagcggctccgtcgacggaagcaacgccaacgcctactttggatacagcaccccctgggggtactttgactttaaccgcttccacagccactggagcccccgagactggcaaagactcatcaacaactactggggcttcagaccccggtccctcagagtcaaaatcttcaacattcaagtcaaagaggtcacggtgcaggactccaccaccaccatcgccaacaacctcacctccaccgtccaagtgtttacggacgacgactaccagctgccctacgtcgtcggcaacgggaccgagggatgcctgccggccttccctccgcaggtctttacgctgccgcagtacggttacgcgacgctgaaccgcgacaacacagaaaatcccaccgagaggagcagcttcttctgcctagagtactttcccagcaagatgctgagaacgggcaacaactttgagtttacctacaactttgaggaggtgcccttccactccagcttcgctcccagtcagaacctgttcaagctggccaacccgctggtggaccagtacttgtaccgcttcgtgagcacaaataacactggcggagtccagttcaacaagaacctggccgggagatacgccaacacctacaaaaactggttcccggggcccatgggccgaacccagggctggaacctgggctccggggtcaaccgcgccagtgtcagcgccttcgccacgaccaataggatggagctcgagggcgcgagttaccaggtgcccccgcagccgaacggcatgaccaacaacctccagggcagcaacacctatgccctggagaacactatgatcttcaacagccagccggcgaacccgggcaccaccgccacgtacctcgagggcaacatgctcatcaccagcgagagcgagacgcagccggtgaaccgcgtggcgtacaacgtcggcgggcagatggccaccaacaaccagagctccaccactgcccccgcgaccggcacggtcaacacccaggaaatcgtgcccggcagcgtgtggatggagagggacgtgtacctccaaggacccatctgggccaagatcccagagacgggggcgcactttcacccctctccggccatgggcggattcggactcaaacacccaccgcccatgatgctcatcaagaacacgcctgtgcccggaaatatcaccagcttctcggacgtgcccgtcagcagcttcatcacccagtacagcaccgggcaggtcaccgtggagatggagtgggagctcaagaaggaaaactccaagaggtggaacccagagatccagtacacaaacaactacaacgacccccagtttgtggactttgccccggacagcaccggggaatacagaaccaccagacctatcggaacccgataccttacccgacccctttaacccattcatgtcgcataccctcaataaa

SEQ ID NO: 1175 - protein, 724 aa, synthetic construct
  REGION 1..724: note = source = /note="Description of Artificial Sequence: Synthetic polypeptide"
MSFVDHPPDWLEEVGEGLREFLGLEAGPPKPKPNQQHQDQARGLVLPGYNYLGPGNGLDRGEPVNRADEVAREHDISYNEQLEAGDNPYLKYNHADAEFQEKLADDTSFGGNLGKAVFQAKKRVLEPFGLVEEGAKTAPTGKRIDDHFPKRKKARTEEDSKPSTSSDAEAGPSGSQQLQIPAQPASSLGADTMSAGGGGPLGDNNQGADGVGNASGDWHCDSTWMGDRVVTKSTRTWVLPSYNNHQYREIKSGSVDGSNANAYFGYSTPWGYFDFNRFHSHWSPRDWQRLINNYWGFRPRSLRVKIFNIQVKEVTVQDSTTTIANNLTSTVQVFTDDDYQLPYVVGNGTEGCLPAFPPQVFTLPQYGYATLNRDNTENPTERSSFFCLEYFPSKMLRTGNNFEFTYNFEEVPFHSSFAPSQNLFKLANPLVDQYLYRFVSTNNTGGVQFNKNLAGRYANTYKNWFPGPMGRTQGWNLGSGVNRASVSAFATTNRMELEGASYQVPPQPNGMTNNLQGSNTYALENTMIFNSQPANPGTTATYLEGNMLITSESETQPVNRVAYNVGGQMATNNQSSTTAPATGTVNTQEIVPGSVWMERDVYLQGPIWAKIPETGAHFHPSPAMGGFGLKHPPPMMLIKNTPVPGNITSFSDVPVSSFITQYSTGQVTVEMEWELKKENSKRWNPEIQYTNNYNDPQFVDFAPDSTGEYRTTRPIGTRYLTRPL

SEQ ID NO: 1176 - DNA, 2203 bp, synthetic construct
  misc_feature 1..2203: note = source = /note="Description of Artificial Sequence: Synthetic polynucleotide"
  source 1..2203: mol_type = other DNA
atgtcttttgttgatcaccctccagattggttggaagaagttggtgaaggtcttcgcgagtttttgggccttgaagcgggcccaccgaaaccaaaacccaatcagcagcatcaagatcaagcccgtggtcttgtgctgcctggttataactatctcggacccggaaacggtctcgatcgaggagagcctgtcaacagggcagacgaggtcgcgcgagagcacgacatctcgtacaacgagcagcttgaggcgggagacaacccctacctcaagtacaaccacgcggacgccgagtttcaggagaagctcgccgacgacacatccttcgggggaaacctcggaaaggcagtctttcaggccaagaaaagggttctcgaaccttttggcctggttgaagagggtgctaagacggcccctaccggaaagcggatagacgaccactttccaaaaagaaagaaggctcggaccgaagaggactccaagccttccacctcgtcagacgccgaagctggacccagcggatcccagcagctgcaaatcccagcccaaccagcctcaagtttgggagctgatacaatgtctgcgggaggtggcggcccattgggcgacaataaccaaggtgccgatggagtgggcaatgcctcgggagattggcattgcgattccacgtggatgggggacagagtcgtcaccaagtccacccgaacctgggtgctgcccagctacaacaaccaccagtaccgagagatcaaaagcggctccgtcgacggaagcaacgccaacgcctactttggatacagcaccccctgggggtactttgactttaaccgcttccacagccactggagcccccgagactggcaaagactcatcaacaactactggggcttcagaccccggtccctcagagtcaaaatcttcaacattcaagtcaaagaggtcacggtgcaggactccaccaccaccatcgccaacaacctcacctccaccgtccaagtgtttacggacgacgactaccagctgccctacgtcgtcggcaacgggaccgagggatgcctgccggccttccctccgcaggtctttacgctgccgcagtacggttacgcgacgctgaaccgcgacaacacagaaaatcccaccgagaggagcagcttcttctgcctagagtactttcccagcaagatgctgagaacgggcaacaactttgagtttacctacaactttgaggaggtgcccttccactccagcttcgctcccagtcagaacctgttcaagctggccaacccgctggtggaccagtacttgtaccgcttcgtgagcacaaataacactggcggagtccagttcaacaagaacctggccgggagatacgccaacacctacaaaaactggttcccggggcccatgggccgaacccagggctggaacctgggctccggggtcaaccgcgccagtgtcagcgccttcgccacgaccaataggatggagctcgagggcgcgagttaccaggtgcccccgcagccgaacggcatgaccaacaacctccagggcagcaacacctatgccctggagaacactatgatcttcaacagccagccggcgaacccgggcaccaccgccacgtacctcgagggcaacatgctcatcaccagcgagagcgagacgcagccggtgaaccgcgtggcgtacaacgtcggcgggcagatggccaccaacaaccagagctccaccactgcccccgcgaccggcacgtacaacctccaggaaatcgtgcccggcagcgtgtggatggagagggacgtgtacctccaaggacccatctgggccaagatcccagagacgggggcgcactttcacccctctccggccatgggcggattcggactcaaacacccaccgcccatgatgctcatcaagaacacgcctgtgcccggaaatatcaccagcttctcggccgtgcccgtcagcagcttcatcacccagtacagcaccgggcaggtcaccgtggagatggagtgggagctcaagaaggaaaactccaagaggtggaacccagagatccagtacacaaacaactacaacgacccccagtttgtggactttgccccggacagcaccggggaatacagaaccaccagacctatcggaacccgataccttacccgacccctttaacccattcatgtcgcataccctcaataaa

SEQ ID NO: 1177 - protein, 724 aa, synthetic construct
  REGION 1..724: note = source = /note="Description of Artificial Sequence: Synthetic polypeptide"
MSFVDHPPDWLEEVGEGLREFLGLEAGPPKPKPNQQHQDQARGLVLPGYNYLGPGNGLDRGEPVNRADEVAREHDISYNEQLEAGDNPYLKYNHADAEFQEKLADDTSFGGNLGKAVFQAKKRVLEPFGLVEEGAKTAPTGKRIDDHFPKRKKARTEEDSKPSTSSDAEAGPSGSQQLQIPAQPASSLGADTMSAGGGGPLGDNNQGADGVGNASGDWHCDSTWMGDRVVTKSTRTWVLPSYNNHQYREIKSGSVDGSNANAYFGYSTPWGYFDFNRFHSHWSPRDWQRLINNYWGFRPRSLRVKIFNIQVKEVTVQDSTTTIANNLTSTVQVFTDDDYQLPYVVGNGTEGCLPAFPPQVFTLPQYGYATLNRDNTENPTERSSFFCLEYFPSKMLRTGNNFEFTYNFEEVPFHSSFAPSQNLFKLANPLVDQYLYRFVSTNNTGGVQFNKNLAGRYANTYKNWFPGPMGRTQGWNLGSGVNRASVSAFATTNRMELEGASYQVPPQPNGMTNNLQGSNTYALENTMIFNSQPANPGTTATYLEGNMLITSESETQPVNRVAYNVGGQMATNNQSSTTAPATGTYNLQEIVPGSVWMERDVYLQGPIWAKIPETGAHFHPSPAMGGFGLKHPPPMMLIKNTPVPGNITSFSAVPVSSFITQYSTGQVTVEMEWELKKENSKRWNPEIQYTNNYNDPQFVDFAPDSTGEYRTTRPIGTRYLTRPL

SEQ ID NO: 1178 - DNA, 2203 bp, synthetic construct
  misc_feature 1..2203: note = source = /note="Description of Artificial Sequence: Synthetic polynucleotide"
  source 1..2203: mol_type = other DNA
atgtcttttgttgatcaccctccagattggttggaagaagttggtgaaggtcttcgcgagtttttgggccttgaagcgggcccaccgaaaccaaaacccaatcagcagcatcaagatcaagcccgtggtcttgtgctgcctggttataactatctcggacccggaaacggtctcgatcgaggagagcctgtcaacagggcagacgaggtcgcgcgagagcacgacatctcgtacaacgagcagcttgaggcgggagacaacccctacctcaagtacaaccacgcggacgccgagtttcaggagaagctcgccgacgacacatccttcgggggaaacctcggaaaggcagtctttcaggccaagaaaagggttctcgaaccttttggcctggttgaagagggtgctaagacggcccctaccggaaagcggatagacgaccactttccaaaaagaaagaaggctcggaccgaagaggactccaagccttccacctcgtcagacgccgaagctggacccagcggatcccagcagctgcaaatcccagcccaaccagcctcaagtttgggagctgatacaatgtctgcgggaggtggcggcccattgggcgacaataaccaaggtgccgatggagtgggcaatgcctcgggagattggcattgcgattccacgtggatgggggacagagtcgtcaccaagtccacccgaacctgggtgctgcccagctacaacaaccaccagtaccgagagatcaaaagcggctccgtcgacggaagcaacgccaacgcctactttggatacagcaccccctgggggtactttgactttaaccgcttccacagccactggagcccccgagactggcaaagactcatcaacaactactggggcttcagaccccggtccctcagagtcaaaatcttcaacattcaagtcaaagaggtcacggtgcaggactccaccaccaccatcgccaacaacctcacctccaccgtccaagtgtttatggacgacgactaccagctgccctacgtcgtcggcaacgggaccgagggatgcctgccggccttccctccgcaggtctttacgctgccgcagtacggttacgcgacgctgaaccgcgacaacacagaaaatcccaccgagaggagcagcttcttctgcctagagtactttcccagcaagatgctgagaacgggcaacaactttgagtttacctacaactttgaggaggtgcccttccactccagcttcgctcccagtcagaacctgttcaagctggccaacccgctggtggaccagtacttgtaccgcttcgtgagcacaaataacactggcggagtccagttcaacaagaacctggccgggagatacgccaacacctacaaaaactggttcccggggcccatgggccgaacccagggctggaacctgggctccggggtcaaccgcgccagtgtcagcgccttcgccacgaccaataggatggagctcgagggcgcgagttaccaggtgcccccgcagccgaacggcatgaccaacaacctccagggcagcaacacctatgccctggagaacactatgatcttcaacagccagccggcgaacccgggcaccaccgccacgtacctcgagggcaacatgctcatcaccagcgagagcgagacgcagccggtgaaccgcgtggcgtacaacgtcggcgggcagatggccaccaacaaccagagctccaccactgcccccgcgaccggcacgtacaacctccaggaaatcgtgcccggcagcgtgtggatggagagggacgtgtacctccaaggacccatctgggccaagatcccagagacgggggcgcactttcacccctctccggccatgggcggattcggactcaaacacccaccgcccatgatgctcatcaagaacacgcctgtgcccggaaatatcaccagcttctcggacgtgcccgtcagcagcttcatcacccagtacagcaccgggcaggtcaccgtggagatggagtgggagctcaagaaggaaaactccaagaggtggaacccagagatccagtacacaaacaactacaacgacccccagtttgtggactttgccccggacagcaccggggaatacagaaccaccagacctatcggaacccgataccttacccgacccctttaacccattcatgtcgcataccctcaataaa

SEQ ID NO: 1179 - protein, 724 aa, synthetic construct
  REGION 1..724: note = source = /note="Description of Artificial Sequence: Synthetic polypeptide"
MSFVDHPPDWLEEVGEGLREFLGLEAGPPKPKPNQQHQDQARGLVLPGYNYLGPGNGLDRGEPVNRADEVAREHDISYNEQLEAGDNPYLKYNHADAEFQEKLADDTSFGGNLGKAVFQAKKRVLEPFGLVEEGAKTAPTGKRIDDHFPKRKKARTEEDSKPSTSSDAEAGPSGSQQLQIPAQPASSLGADTMSAGGGGPLGDNNQGADGVGNASGDWHCDSTWMGDRVVTKSTRTWVLPSYNNHQYREIKSGSVDGSNANAYFGYSTPWGYFDFNRFHSHWSPRDWQRLINNYWGFRPRSLRVKIFNIQVKEVTVQDSTTTIANNLTSTVQVFMDDDYQLPYVVGNGTEGCLPAFPPQVFTLPQYGYATLNRDNTENPTERSSFFCLEYFPSKMLRTGNNFEFTYNFEEVPFHSSFAPSQNLFKLANPLVDQYLYRFVSTNNTGGVQFNKNLAGRYANTYKNWFPGPMGRTQGWNLGSGVNRASVSAFATTNRMELEGASYQVPPQPNGMTNNLQGSNTYALENTMIFNSQPANPGTTATYLEGNMLITSESETQPVNRVAYNVGGQMATNNQSSTTAPATGTYNLQEIVPGSVWMERDVYLQGPIWAKIPETGAHFHPSPAMGGFGLKHPPPMMLIKNTPVPGNITSFSDVPVSSFITQYSTGQVTVEMEWELKKENSKRWNPEIQYTNNYNDPQFVDFAPDSTGEYRTTRPIGTRYLTRPL

SEQ ID NO: 1180 - DNA, 2203 bp, synthetic construct
  misc_feature 1..2203: note = source = /note="Description of Artificial Sequence: Synthetic polynucleotide"
  source 1..2203: mol_type = other DNA
atgtcttttgttgatcaccctccagattggttggaagaagttggtgaaggtcttcgcgagtttttgggccttgaagcgggcccaccgaaaccaaaacccaatcagcagcatcaagatcaagcccgtggtcttgtgctgcctggttataactatctcggacccggaaacggtctcgatcgaggagagcctgtcaacagggcagacgaggtcgcgcgagagcacgacatctcgtacaacgagcagcttgaggcgggagacaacccctacctcaagtacaaccacgcggacgccgagtttcaggagaagctcgccgacgacacatccttcgggggaaacctcggaaaggcagtctttcaggccaagaaaagggttctcgaaccttttggcctggttgaagagggtgctaagacggcccctaccggaaagcggatagacgaccactttccaaaaagaaagaaggctcggaccgaagaggactccaagccttccacctcgtcagacgccgaagctggacccagcggatcccagcagctgcaaatcccagcccaaccagcctcaagtttgggagctgatacaatgtctgcgggaggtggcggcccattgggcgacaataaccaaggtgccgatggagtgggcaatgcctcgggagattggcattgcgattccacgtggatgggggacagagtcgtcaccaagtccacccgaacctgggtgctgcccagctacaacaaccaccagtaccgagagatcaaaagcggctccgtcgacggaagcaacgccaacgcctactttggatacagcaccccctgggggtactttgactttaaccgcttccacagccactggagcccccgagactggcaaagactcatcaacaactactggggcttcagaccccggtccctcagagtcaaaatcttcaacattcaagtcaaagaggtcacggtgcaggactccaccaccaccatcgccaacaacctcacctccaccgtcgatgtgtttacggacgacgactaccagctgccctacgtcgtcggcaacgggaccgagggatgcctgccggccttccctccgcaggtctttacgctgccgcagtacggttacgcgacgctgaaccgcgacaacacagaaaatcccaccgagaggagcagcttcttctgcctagagtactttcccagcaagatgctgagaacgggcaacaactttgagtttacctacaactttgaggaggtgcccttccactccagcttcgctcccagtcagaacctgttcaagctggccaacccgctggtggaccagtacttgtaccgcttcgtgagcacaaataacactggcggagtccagttcaacaagaacctggccgggagatacgccaacacctacaaaaactggttcccggggcccatgggccgaacccagggctggaacctgggctccggggtcaaccgcgccagtgtcagcgccttcgccacgaccaataggatggagctcgagggcgcgagttaccaggtgcccccgcagccgaacggcatgaccaacaacctccagggcagcaacacctatgccctggagaacactatgatcttcaacagccagccggcgaacccgggcaccaccgccacgtacctcgagggcaacatgctcatcaccagcgagagcgagacgcagccggtgaaccgcgtggcgtacaacgtcggcgggcagatggccaccaacaaccagagctccaccactgcccccgcgaccggcacgtacaacctccaggaaatcgtgcccggcagcgtgtggatggagagggacgtgtacctccaaggacccatctgggccaagatcccagagacgggggcgcactttcacccctctccggccatgggcggattcggactcaaacacccaccgcccatgatgctcatcaagaacacgcctgtgcccggaaatatcaccagcttctcggacgtgcccgtcagcagcttcatcacccagtacagcaccgggcaggtcaccgtggagatggagtgggagctcaagaaggaaaactccaagaggtggaacccagagatccagtacacaaacaactacaacgacccccagtttgtggactttgccccggacagcaccggggaatacagaaccaccagacctatcggaacccgataccttacccgacccctttaacccattcatgtcgcataccctcaataaa

SEQ ID NO: 1181 - protein, 724 aa, synthetic construct
  REGION 1..724: note = source = /note="Description of Artificial Sequence: Synthetic polypeptide"
MSFVDHPPDWLEEVGEGLREFLGLEAGPPKPKPNQQHQDQARGLVLPGYNYLGPGNGLDRGEPVNRADEVAREHDISYNEQLEAGDNPYLKYNHADAEFQEKLADDTSFGGNLGKAVFQAKKRVLEPFGLVEEGAKTAPTGKRIDDHFPKRKKARTEEDSKPSTSSDAEAGPSGSQQLQIPAQPASSLGADTMSAGGGGPLGDNNQGADGVGNASGDWHCDSTWMGDRVVTKSTRTWVLPSYNNHQYREIKSGSVDGSNANAYFGYSTPWGYFDFNRFHSHWSPRDWQRLINNYWGFRPRSLRVKIFNIQVKEVTVQDSTTTIANNLTSTVDVFTDDDYQLPYVVGNGTEGCLPAFPPQVFTLPQYGYATLNRDNTENPTERSSFFCLEYFPSKMLRTGNNFEFTYNFEEVPFHSSFAPSQNLFKLANPLVDQYLYRFVSTNNTGGVQFNKNLAGRYANTYKNWFPGPMGRTQGWNLGSGVNRASVSAFATTNRMELEGASYQVPPQPNGMTNNLQGSNTYALENTMIFNSQPANPGTTATYLEGNMLITSESETQPVNRVAYNVGGQMATNNQSSTTAPATGTYNLQEIVPGSVWMERDVYLQGPIWAKIPETGAHFHPSPAMGGFGLKHPPPMMLIKNTPVPGNITSFSDVPVSSFITQYSTGQVTVEMEWELKKENSKRWNPEIQYTNNYNDPQFVDFAPDSTGEYRTTRPIGTRYLTRPL

SEQ ID NO: 1182 - DNA, 2203 bp, synthetic construct
  misc_feature 1..2203: note = source = /note="Description of Artificial Sequence: Synthetic polynucleotide"
  source 1..2203: mol_type = other DNA
atgtcttttgttgatcaccctccagattggttggaagaagttggtgaaggtcttcgcgagtttttgggccttgaagcgggcccaccgaaaccaaaacccaatcagcagcatcaagatcaagcccgtggtcttgtgctgcctggttataactatctcggacccggaaacggtctcgatcgaggagagcctgtcaacagggcagacgaggtcgcgcgagagcacgacatctcgtacaacgagcagcttgaggcgggagacaacccctacctcaagtacaaccacgcggacgccgagtttcaggagaagctcgccgacgacacatccttcgggggaaacctcggaaaggcagtctttcaggccaagaaaagggttctcgaaccttttggcctggttgaagagggtgctaagacggcccctaccggaaagcggatagacgaccactttccaaaaagaaagaaggctcggaccgaagaggactccaagccttccacctcgtcagacgccgaagctggacccagcggatcccagcagctgcaaatcccagcccaaccagcctcaagtttgggagctgatacaatgtctgcgggaggtggcggcccattgggcgacaataaccaaggtgccgatggagtgggcaatgcctcgggagattggcattgcgattccacgtggatgggggacagagtcgtcaccaagtccacccgaacctgggtgctgcccagctacaacaaccaccagtaccgagagatcaaaagcggctccgtcgacggaagcaacgccaacgcctactttggatacagcaccccctgggggtactttgactttaaccgcttccacagccactggagcccccgagactggcaaagactcatcaacaactactggggcttcagaccccggtccctcagagtcaaaatcttcaacattcaagtcaaagaggtcacggtgcaggactccaccaccaccatcgccaacaacctcacctccaccgtccaagtgtttacggacgacgactaccagctgccctacgtcgtcggcaacgggacccagggatgcctgccggccttccctccgcaggtctttacgctgccgcagtacggttacgcgacgctgaaccgcgacaacacagaaaatcccaccgagaggagcagcttcttctgcctagagtactttcccagcaagatgctgagaacgggcaacaactttgagtttacctacaactttgaggaggtgcccttccactccagcttcgctcccagtcagaacctgttcaagctggccaacccgctggtggaccagtacttgtaccgcttcgtgagcacaaataacactggcggagtccagttcaacaagaacctggccgggagatacgccaacacctacaaaaactggttcccggggcccatgggccgaacccagggctggaacctgggctccggggtcaaccgcgccagtgtcagcgccttcgccacgaccaataggatggagctcgagggcgcgagttaccaggtgcccccgcagccgaacggcatgaccaacaacctccagggcagcaacacctatgccctggagaacactatgatcttcaacagccagccggcgaacccgggcaccaccgccacgtacctcgagggcaacatgctcatcaccagcgagagcgagacgcagccggtgaaccgcgtggcgtacaacgtcggcgggcagatggccaccaacaaccagagctccaccactgcccccgcgaccggcacgtacaacctccaggaaatcgtgcccggcagcgtgtggatggagagggacgtgtacctccaaggacccatctgggccaagatcccagagacgggggcgcactttcacccctctccggccatgggcggattcggactcaaacacccaccgcccatgatgctcatcaagaacacgcctgtgcccggaaatatcaccagcttctcggacgtgcccgtcagcagcttcatcacccagtacagcaccgggcaggtcaccgtggagatggagtgggagctcaagaaggaaaactccaagaggtggaacccagagatccagtacacaaacaactacaacgacccccagtttgtggactttgccccggacagcaccggggaatacagaaccaccagacctatcggaacccgataccttacccgacccctttaacccattcatgtcgcataccctcaataaa

SEQ ID NO: 1183 - protein, 724 aa, synthetic construct
  REGION 1..724: note = source = /note="Description of Artificial Sequence: Synthetic polypeptide"
MSFVDHPPDWLEEVGEGLREFLGLEAGPPKPKPNQQHQDQARGLVLPGYNYLGPGNGLDRGEPVNRADEVAREHDISYNEQLEAGDNPYLKYNHADAEFQEKLADDTSFGGNLGKAVFQAKKRVLEPFGLVEEGAKTAPTGKRIDDHFPKRKKARTEEDSKPSTSSDAEAGPSGSQQLQIPAQPASSLGADTMSAGGGGPLGDNNQGADGVGNASGDWHCDSTWMGDRVVTKSTRTWVLPSYNNHQYREIKSGSVDGSNANAYFGYSTPWGYFDFNRFHSHWSPRDWQRLINNYWGFRPRSLRVKIFNIQVKEVTVQDSTTTIANNLTSTVQVFTDDDYQLPYVVGNGTQGCLPAFPPQVFTLPQYGYATLNRDNTENPTERSSFFCLEYFPSKMLRTGNNFEFTYNFEEVPFHSSFAPSQNLFKLANPLVDQYLYRFVSTNNTGGVQFNKNLAGRYANTYKNWFPGPMGRTQGWNLGSGVNRASVSAFATTNRMELEGASYQVPPQPNGMTNNLQGSNTYALENTMIFNSQPANPGTTATYLEGNMLITSESETQPVNRVAYNVGGQMATNNQSSTTAPATGTYNLQEIVPGSVWMERDVYLQGPIWAKIPETGAHFHPSPAMGGFGLKHPPPMMLIKNTPVPGNITSFSDVPVSSFITQYSTGQVTVEMEWELKKENSKRWNPEIQYTNNYNDPQFVDFAPDSTGEYRTTRPIGTRYLTRPL

SEQ ID NO: 1184 - DNA, 2203 bp, synthetic construct
  misc_feature 1..2203: note = source = /note="Description of Artificial Sequence: Synthetic polynucleotide"
  source 1..2203: mol_type = other DNA
atgtcttttgttgatcaccctccagattggttggaagaagttggtgaaggtcttcgcgagtttttgggccttgaagcgggcccaccgaaaccaaaacccaatcagcagcatcaagatcaagcccgtggtcttgtgctgcctggttataactatctcggacccggaaacggtctcgatcgaggagagcctgtcaacagggcagacgaggtcgcgcgagagcacgacatctcgtacaacgagcagcttgaggcgggagacaacccctacctcaagtacaaccacgcggacgccgagtttcaggagaagctcgccgacgacacatccttcgggggaaacctcggaaaggcagtctttcaggccaagaaaagggttctcgaaccttttggcctggttgaagagggtgctaagacggcccctaccggaaagcggatagacgaccactttccaaaaagaaagaaggctcggaccgaagaggactccaagccttccacctcgtcagacgccgaagctggacccagcggatcccagcagctgcaaatcccagcccaaccagcctcaagtttgggagctgatacaatgtctgcgggaggtggcggcccattgggcgacaataaccaaggtgccgatggagtgggcaatgcctcgggagattggcattgcgattccacgtggatgggggacagagtcgtcaccaagtccacccgaacctgggtgctgcccagctacaacaaccaccagtaccgagagatcaaaagcggctccgtcgacggaagcaacgccaacgcctactttggatacagcaccccctgggggtactttgactttaaccgcttccacagccactggagcccccgagactggcaaagactcatcaacaactactggggcttcagaccccggtccctcagagtcaaaatcttcaacattcaagtcaaagaggtcacggtgcaggactccaccaccaccatcgccaacaacctcacctccaccgtccaagtgtttacggacgacgactaccagctgccctacgtcgtcggcaacgggaccgagggatgcctgccggccttccctccgcaggtctttacgctgccgcagtacggttacgcgacgctgaaccgcgacaacacagaaaatcccaccgagaggagcagcttcttctgcctagagtactttcccagcaagatgctgagaacgggcaacaactttgagtttacctacaactttgaggaggtgcccttccactccagcttcgctcccagtcagaacctgttcaagctggccaacccgctggtggaccagtacttgtaccgcttcgtgagcacaaataacactggcggagtccagttcaacaagaacctggccgggagatacgccaacacctacaaaaactggttcccggggcccatgggccgaacccagggctggaacctgggctccggggtcaaccgcgccagtgtcagcgccttcgccacgaccaataggatggagctcgagggcgcgagttaccaggtgcccccgcagccgaacggcatgaccaacaacctccagggcagcaacacctatgccctggagaacactatgatcttcaacagccagtcggcgaacccgggcaccaccgccacgtacctcgagggcaacatgctcatcaccagcgagagcgagacgcagccggtgaaccgcgtggcgtacaacgtcggcgggcagatggccaccaacaaccagagctccaccactgcccccgcgaccggcacgtacaacctccaggaaatcgtgcccggcagcgtgtggatggagagggacgtgtacctccaaggacccatctgggccaagatcccagagacgggggcgcactttcacccctctccggccatgggcggattcggactcaaacacccaccgcccatgatgctcatcaagaacacgcctgtgcccggaaatatcaccagcttctcggacgtgcccgtcagcagcttcatcacccagtacagcaccgggcaggtcaccgtggagatggagtgggagctcaagaaggaaaactccaagaggtggaacccagagatccagtacacaaacaactacaacgacccccagtttgtggactttgccccggacagcaccggggaatacagaaccaccagacctatcggaacccgataccttacccgacccctttaacccattcatgtcgcataccctcaataaa

SEQ ID NO: 1185 - protein, 724 aa, synthetic construct
  REGION 1..724: note = source = /note="Description of Artificial Sequence: Synthetic polypeptide"
MSFVDHPPDWLEEVGEGLREFLGLEAGPPKPKPNQQHQDQARGLVLPGYNYLGPGNGLDRGEPVNRADEVAREHDISYNEQLEAGDNPYLKYNHADAEFQEKLADDTSFGGNLGKAVFQAKKRVLEPFGLVEEGAKTAPTGKRIDDHFPKRKKARTEEDSKPSTSSDAEAGPSGSQQLQIPAQPASSLGADTMSAGGGGPLGDNNQGADGVGNASGDWHCDSTWMGDRVVTKSTRTWVLPSYNNHQYREIKSGSVDGSNANAYFGYSTPWGYFDFNRFHSHWSPRDWQRLINNYWGFRPRSLRVKIFNIQVKEVTVQDSTTTIANNLTSTVQVFTDDDYQLPYVVGNGTEGCLPAFPPQVFTLPQYGYATLNRDNTENPTERSSFFCLEYFPSKMLRTGNNFEFTYNFEEVPFHSSFAPSQNLFKLANPLVDQYLYRFVSTNNTGGVQFNKNLAGRYANTYKNWFPGPMGRTQGWNLGSGVNRASVSAFATTNRMELEGASYQVPPQPNGMTNNLQGSNTYALENTMIFNSQSANPGTTATYLEGNMLITSESETQPVNRVAYNVGGQMATNNQSSTTAPATGTYNLQEIVPGSVWMERDVYLQGPIWAKIPETGAHFHPSPAMGGFGLKHPPPMMLIKNTPVPGNITSFSDVPVSSFITQYSTGQVTVEMEWELKKENSKRWNPEIQYTNNYNDPQFVDFAPDSTGEYRTTRPIGTRYLTRPL

SEQ ID NO: 1186 - DNA, 2203 bp, synthetic construct
  misc_feature 1..2203: note = source = /note="Description of Artificial Sequence: Synthetic polynucleotide"
  source 1..2203: mol_type = other DNA
atgtcttttgttgatcaccctccagattggttggaagaagttggtgaaggtcttcgcgagtttttgggccttgaagcgggcccaccgaaaccaaaacccaatcagcagcatcaagatcaagcccgtggtcttgtgctgcctggttataactatctcggacccggaaacggtctcgatcgaggagagcctgtcaacagggcagacgaggtcgcgcgagagcacgacatctcgtacaacgagcagcttgaggcgggagacaacccctacctcaagtacaaccacgcggacgccgagtttcaggagaagctcgccgacgacacatccttcgggggaaacctcggaaaggcagtctttcaggccaagaaaagggttctcgaaccttttggcctggttgaagagggtgctaagacggcccctaccggaaagcggatagacgaccactttccaaaaagaaagaaggctcggaccgaagaggactccaagccttccacctcgtcagacgccgaagctggacccagcggatcccagcagctgcaaatcccagcccaaccagcctcaagtttgggagctgatacaatgtctgcgggaggtggcggcccattgggcgacaataaccaaggtgccgatggagtgggcaatgcctcgggagattggcattgcgattccacgtggatgggggacagagtcgtcaccaagtccacccgaacctgggtgctgcccagctacaacaaccaccagtaccgagagatcaaaagcggctccgtcgacggaagcaacgccaacgcctactttggatacagcaccccctgggggtactttgactttaaccgcttccacagccactggagcccccgagactggcaaagactcatcaacaactactggggcttcagaccccggtccctcagagtcaaaatcttcaacattcaagtcaaagaggtcacggtgcaggactccaccaccaccatcgccaacaacctcacctccaccgtccaagtgtttacggacgacgactaccagctgccctacgtcgtcggcaacgggaccgagggatgcctgccggccttccctccgcaggtctttacgctgccgcagtacggttacgcgacgctgaaccgcgacaacacagaaaatcccaccgagaggagcagcttcttctgcctagagtactttcccagcaagatgctgagaacgggcaacaactttgagtttacctacaactttgaggaggtgcccttccactccagcttcgctcccagtcagaacctgttcaagctggccaacccgctggtggaccagtacttgtaccgcttcgtgagcacaaataacactggcggagtccagttcaacaagaacctggccgggagatacgccaacacctacaaaaactggttcccggggcccatgggccgaacccagggctggaacctgggctccggggtcaaccgcgccagtgtcagcgccttcgccacgaccaataggatggagctcgagggcgcgagttaccaggtgcccccgcagccgaacggcatgaccaacaacctccagggcagcaacacctatgccctggagaacactatgatcttcaacagccagggggcgaacccgggcaccaccgccacgtacctcgagggcaacatgctcatcaccagcgagagcgagacgcagccggtgaaccgcgtggcgtacaacgtcggcgggcagatggccaccaacaaccagagctccaccactgcccccgcgaccggcacgtacaacctccaggaaatcgtgcccggcagcgtgtggatggagagggacgtgtacctccaaggacccatctgggccaagatcccagagacgggggcgcactttcacccctctccggccatgggcggattcggactcaaacacccaccgcccatgatgctcatcaagaacacgcctgtgcccggaaatatcaccagcttctcggacgtgcccgtcagcagcttcatcacccagtacagcaccgggcaggtcaccgtggagatggagtgggagctcaagaaggaaaactccaagaggtggaacccagagatccagtacacaaacaactacaacgacccccagtttgtggactttgccccggacagcaccggggaatacagaaccaccagacctatcggaacccgataccttacccgacccctttaacccattcatgtcgcataccctcaataaa

SEQ ID NO: 1187 - protein, 724 aa, synthetic construct
  REGION 1..724: note = source = /note="Description of Artificial Sequence: Synthetic polypeptide"
MSFVDHPPDWLEEVGEGLREFLGLEAGPPKPKPNQQHQDQARGLVLPGYNYLGPGNGLDRGEPVNRADEVAREHDISYNEQLEAGDNPYLKYNHADAEFQEKLADDTSFGGNLGKAVFQAKKRVLEPFGLVEEGAKTAPTGKRIDDHFPKRKKARTEEDSKPSTSSDAEAGPSGSQQLQIPAQPASSLGADTMSAGGGGPLGDNNQGADGVGNASGDWHCDSTWMGDRVVTKSTRTWVLPSYNNHQYREIKSGSVDGSNANAYFGYSTPWGYFDFNRFHSHWSPRDWQRLINNYWGFRPRSLRVKIFNIQVKEVTVQDSTTTIANNLTSTVQVFTDDDYQLPYVVGNGTEGCLPAFPPQVFTLPQYGYATLNRDNTENPTERSSFFCLEYFPSKMLRTGNNFEFTYNFEEVPFHSSFAPSQNLFKLANPLVDQYLYRFVSTNNTGGVQFNKNLAGRYANTYKNWFPGPMGRTQGWNLGSGVNRASVSAFATTNRMELEGASYQVPPQPNGMTNNLQGSNTYALENTMIFNSQGANPGTTATYLEGNMLITSESETQPVNRVAYNVGGQMATNNQSSTTAPATGTYNLQEIVPGSVWMERDVYLQGPIWAKIPETGAHFHPSPAMGGFGLKHPPPMMLIKNTPVPGNITSFSDVPVSSFITQYSTGQVTVEMEWELKKENSKRWNPEIQYTNNYNDPQFVDFAPDSTGEYRTTRPIGTRYLTRPL

SEQ ID NO: 1188 - DNA, 2194 bp, synthetic construct
  misc_feature 1..2194: note = source = /note="Description of Artificial Sequence: Synthetic polynucleotide"
  source 1..2194: mol_type = other DNA
atgtcttttgttgatcaccctccagattggttggaagaagttggtgaaggtcttcgcgagtttttgggccttgaagcgggcccaccgaaaccaaaacccaatcagcagcatcaagatcaagcccgtggtcttgtgctgcctggttataactatctcggacccggaaacggtctcgatcgaggagagcctgtcaacagggcagacgaggtcgcgcgagagcacgacatctcgtacaacgagcagcttgaggcgggagacaacccctacctcaagtacaaccacgcggacgccgagtttcaggagaagctcgccgacgacacatccttcgggggaaacctcggaaaggcagtctttcaggccaagaaaagggttctcgaaccttttggcctggttgaagagggtgctaagacggcccctaccggaaagcggatagacgaccactttccaaaaagaaagaaggctcggaccgaagaggactccaagccttccacctcgtcagacgccgaagctggacccagcggatcccagcagctgcaaatcccagcccaaccagcctcaagtttgggagctgatacaatgtctgcgggaggtggcggcccattgggcgacaataaccaaggtgccgatggagtgggcaatgcctcgggagattggcattgcgattccacgtggatgggggacagagtcgtcaccaagtccacccgaacctgggtgctgcccagctacaacaaccaccagtaccgagagatcaaaagcggctccgtcgacggaagcaacgccaacgcctactttggatacagcaccccctgggggtactttgactttaaccgcttccacagccactggagcccccgagactggcaaagactcatcaacaactactggggcttcagaccccggtccctcagagtcaaaatcttcaacattcaagtcaaagaggtcacggtgcaggactccaccaccaccatcgccaacaacctcacctccaccgtccaagtgtttacggacgacgactaccagctgccctacgtcgtcggcaacgggaccgagggatgcctgccggccttccctccgcaggtctttacgctgccgcagtacggttacgcgacgctgaaccgcgacaacacagaaaatcccaccgagaggagcagcttcttctgcctagagtactttcccagcaagatgctgagaacgggcaacaactttgagtttacctacaactttgaggaggtgcccttccactccagcttcgctcccagtcagaacctgttcaagctggccaacccgctggtggaccagtacttgtaccgcttcgtgagcacaaataacactggcggagtccagttcaacaagaacctggccgggagatacgccaacacctacaaaaactggttcccggggcccatgggccgaacccagggctggaacctgggctccggggtcaaccgcgccagtgtcagcgccttcgccacgaccaataggatggagctcgagggcgcgagttaccaggtgcccccgcagccgaacggcatgaccaacaacctccagggcagcaacacctatgccctggagaacactatgatcttcgggaagcaaggctcagagaaaacaaatgtggacattgaaaaggtcatgatcaccagcgagagcgagacgcagccggtgaaccgcgtggcgtacaacgtcggcgggcagatggccaccaacaaccagagctccaccactgcccccgcgaccggcacgtacaacctccaggaaatcgtgcccggcagcgtgtggatggagagggacgtgtacctccaaggacccatctgggccaagatcccagagacgggggcgcactttcacccctctccggccatgggcggattcggactcaaacacccaccgcccatgatgctcatcaagaacacgcctgtgcccggaaatatcaccagcttctcggacgtgcccgtcagcagcttcatcacccagtacagcaccgggcaggtcaccgtggagatggagtgggagctcaagaaggaaaactccaagaggtggaacccagagatccagtacacaaacaactacaacgacccccagtttgtggactttgccccggacagcaccggggaatacagaaccaccagacctatcggaacccgataccttacccgacccctttaacccattcatgtcgcataccctcaataaa

SEQ ID NO: 1189 - protein, 721 aa, synthetic construct
  REGION 1..721: note = source = /note="Description of Artificial Sequence: Synthetic polypeptide"
MSFVDHPPDWLEEVGEGLREFLGLEAGPPKPKPNQQHQDQARGLVLPGYNYLGPGNGLDRGEPVNRADEVAREHDISYNEQLEAGDNPYLKYNHADAEFQEKLADDTSFGGNLGKAVFQAKKRVLEPFGLVEEGAKTAPTGKRIDDHFPKRKKARTEEDSKPSTSSDAEAGPSGSQQLQIPAQPASSLGADTMSAGGGGPLGDNNQGADGVGNASGDWHCDSTWMGDRVVTKSTRTWVLPSYNNHQYREIKSGSVDGSNANAYFGYSTPWGYFDFNRFHSHWSPRDWQRLINNYWGFRPRSLRVKIFNIQVKEVTVQDSTTTIANNLTSTVQVFTDDDYQLPYVVGNGTEGCLPAFPPQVFTLPQYGYATLNRDNTENPTERSSFFCLEYFPSKMLRTGNNFEFTYNFEEVPFHSSFAPSQNLFKLANPLVDQYLYRFVSTNNTGGVQFNKNLAGRYANTYKNWFPGPMGRTQGWNLGSGVNRASVSAFATTNRMELEGASYQVPPQPNGMTNNLQGSNTYALENTMIFGKQGSEKTNVDIEKVMITSESETQPVNRVAYNVGGQMATNNQSSTTAPATGTYNLQEIVPGSVWMERDVYLQGPIWAKIPETGAHFHPSPAMGGFGLKHPPPMMLIKNTPVPGNITSFSDVPVSSFITQYSTGQVTVEMEWELKKENSKRWNPEIQYTNNYNDPQFVDFAPDSTGEYRTTRPIGTRYLTRPL

SEQ ID NO: 1190 - protein, 519 aa, synthetic construct
  REGION 1..519: note = source = /note="Description of Artificial Sequence: Synthetic polypeptide"
DGVGSSSGNWHCDSTWLGDRVITTSTRTWALPTYNNHLYKQISNGTSGGATNDNTYFGYSTPWGYFDFNRFHCHFSPRDWQRLINNNWGFRPKRLSFKLFNIQVKEVTQNEGTKTIANNLTSTIQVFTDSEYQLPYVLGSAHQGCLPPFPADVFMIPQYGYLTLNNGSQAVGRSSFYCLEYFPSQMLRTGNNFQFTYTFEDVPFHSSYAHSQSLDRLMNPLIDQYLYYLSRTQTTGGTANTQTLGFSQGGPNTMANQAKNWLPGPCYRQQRVSTTTGQNNNSNFAWTAGTKYHLNGRNSLANPGIAMATHKDDEERFFPSNGILIFGKQNAARDNADYSDVMLTSEEEIKTTNPVATEEYGIVADNLQQQNTAPQIGTVNSQGALPGMVWQNRDVYLQGPIWAKIPHTDGNFHPSPLMGGFGLKHPPPQILIKNTPVPADPPTTFNQSKLNSFITQYSTGQVSVEIEWELQKENSKRWNPEIQYTSNYYKSTSVDFAVNTEGVYSEPRPIGTRYLTRNL

SEQ ID NO: 1191 - protein, 738 aa, synthetic construct
  REGION 1..738: note = source = /note="Description of Artificial Sequence: Synthetic polypeptide"
MAADGYLPDWLEDNLSEGIREWWALQPGAPKPKANQQHQDNARGLVLPGYKYLGPGNGLDKGEPVNAADAAALEHDKAYDQQLKAGDNPYLKYNHADAEFQERLKEDTSFGGNLGRAVFQAKKRLLEPLGLVEEAAKTAPGKKRPVEPSPQRSPDSSTGIGKKGQQPARKRLNFGQTGDSESVPDPQPLGEPPAAPSGVGPNTMAAGGGAPMADNNEGADGVGSSSGNWHCDSTWLGDRVITTSTRTWALPTYNNHLYKQISNGTSGGATNDNTYFGYSTPWGYFDFNRFHCHFSPRDWQRLINNNWGFRPKRLSFKLFNIQVKEVTQNEGTKTIANNLTSTIQVFTDSEYQLPYVLGSAHQGCLPPFPADVFMIPQYGYLTLNNGSQAVGRSSFYCLEYFPSQMLRTGNNFQFTYTFEDVPFHSSYAHSQSLDRLMNPLIDQYLYYLSRTQTTGGTANTQTLGFSQGGPNTMANQAKNWLPGPCYRQQRVSTTTGQNNNSNFAWTAGTKYHLNGRNSLANPGIAMATHKDDEERFFPSNGILIFGKQNAARDNADYSDVMLTSEEEIKTTNPVATEEYGIVADNLQQQNTAPQIGTVNSQGALPGMVWQNRDVYLQGPIWAKIPHTDGNFHPSPLMGGFGLKHPPPQILIKNTPVPADPPTTFNQSKLNSFITQYSTGQVSVEIEWELQKENSKRWNPEIQYTSNYYKSTSVDFAVNTEGVYSEPRPIGTRYLTRNL

SEQ ID NO: 1192 - protein, 725 aa, synthetic construct
  REGION 1..725: note = source = /note="Description of Artificial Sequence: Synthetic polypeptide"
MAADGYLPDWLEDNLSEGIREWWALQPGAPKPKANQQHQDNARGLVLPGYKYLGPGNGLDKGEPVNAADAAALEHDKAYDQQLKAGDNPYLKYNHADAEFQERLKEDTSFGGNLGRAVFQAKKRLLEPLGLVEEAAKTAPTGKRIDDHFPKRKKARTEEDSKPSTSSDAEAGPSGSQQLQIPAQPASSLGADTMSAGGGGPLGDNNQGADGVGNASGDWHCDSTWMGDRVVTKSTRTWVLPSYNNHQYREIKSGSVDGSNANAYFGYSTPWGYFDFNRFHSHWSPRDWQRLINNYWGFRPRSLRVKIFNIQVKEVTVQDSTTTIANNLTSTVQVFTDDDYQLPYVVGNGTEGCLPAFPPQVFTLPQYGYATLNRDNTENPTERSSFFCLEYFPSKMLRTGNNFEFTYNFEEVPFHSSFAPSQNLFKLANPLVDQYLYRFVSTNNTGGVQFNKNLAGRYANTYKNWFPGPMGRTQGWNLGSGVNRASVSAFATTNRMELEGASYQVPPQPNGMTNNLQGSNTYALENTMIFNSQPANPGTTATYLEGNMLITSESETQPVNRVAYNVGGQMATNNQSSTTAPATGTYNLQEIVPGSVWMERDVYLQGPIWAKIPETGAHFHPSPAMGGFGLKHPPPMMLIKNTPVPGNITSFSDVPVSSFITQYSTGQVTVEMEWELKKENSKRWNPEIQYTNNYNDPQFVDFAPDSTGEYRTTRPIGTRYLTRPL

SEQ ID NO: 1193 - protein, 736 aa, synthetic construct
  REGION 1..736: note = source = /note="Description of Artificial Sequence: Synthetic polypeptide"
MAADGYLPDWLEDNLSEGIREWWALKPGAPKPKANQQKQDDGRGLVLPGYKYLGPFNGLDKGEPVNAADAAALEHDKAYDQQLQAGDNPYLRYNHADAEFQERLQEDTSFGGNLGRAVFQAKKRVLEPLGLVEEGAKTAPGKKRPVDQSPQEPDSSSGVGKSGKQPARKRLNFGQTGDSESVPDPQPLGEPPAAPTSLGSNTMASGGGAPMADNNEGADGVGNSSGNWHCDSQWLGDRVITTSTRTWALPTYNNHLYKQISSQSGASNDNHYFGYSTPWGYFDFNRFHCHFSPRDWQRLINNNWGFRPKKLSFKLFNIQVKEVTQNDGTTTIANNLTSTVQVFTDSEYQLPYVLGSAHQGCLPPFPADVFMVPQYGYLTLNNGSQAVGRSSFYCLEYFPSQMLRTGNNFQFSYTFEDVPFHSSYAHSQSLDRLMNPLIDQYLYYLNRTQGTTSGTTNQSRLLFSQAGPQSMSLQARNWLPGPCYRQQRLSKTANDNNNSNFPWTAASKYHLNGRDSLVNPGPAMASHKDDEEKFFPMHGNLIFGKEGTTASNAELDNVMITDEEEIRTTNPVATEQYGTVANNLQSSNTAPTTRTVNDQGALPGMVWQDRDVYLQGPIWAKIPHTDGHFHPSPLMGGFGLKHPPPQIMIKNTPVPANPPTTFSPAKFASFITQYSTGQVSVEIEWELQKENSKRWNPEIQYTSNYNKSVNVDFTVDTNGVYSEPRPIGTRYLTRNL

SEQ ID NO: 1194 - protein, 735 aa, synthetic construct
  REGION 1..735: note = source = /note="Description of Artificial Sequence: Synthetic polypeptide"
MSFVDHPPDWLEEVGEGLREFLGLEAGPPKPKPNQQHQDQARGLVLPGYNYLGPGNGLDRGEPVNRADEVAREHDISYNEQLEAGDNPYLKYNHADAEFQEKLADDTSFGGNLGKAVFQAKKRVLEPFGLVEEGAKTAPGKKRPVDQSPQEPDSSSGVGKSGKQPARKRLNFGQTGDSESVPDPQPLGEPPAAPTSLGSNTMASGGGAPMADNNEGADGVGNSSGNWHCDSQWLGDRVITTSTRTWALPTYNNHLYKQISSQSGASNDNHYFGYSTPWGYFDFNRFHCHFSPRDWQRLINNNWGFRPKKLSFKLFNIQVKEVTQNDGTTTIANNLTSTVQVFTDSEYQLPYVLGSAHQGCLPPFPADVFMVPQYGYLTLNNGSQAVGRSSFYCLEYFPSQMLRTGNNFQFSYTFEDVPFHSSYAHSQSLDRLMNPLIDQYLYYLNRTQGTTSGTTNQSRLLFSQAGPQSMSLQARNWLPGPCYRQQRLSKTANDNNNSNFPWTAASKYHLNGRDSLVNPGPAMASHKDDEEKFFPMHGNLIFGKEGTTASNAELDNVMITDEEEIRTTNPVATEQYGTVANNLQSSNTAPTTRTVNDQGALPGMVWQDRDVYLQGPIWAKIPHTDGHFHPSPLMGGFGLKHPPPQIMIKNTPVPANPPTTFSPAKFASFITQYSTGQVSVEIEWELQKENSKRWNPEIQYTSNYNKSVNVDFTVDTNGVYSEPRPIGTRYLTRPL

SEQ ID NO: 1195 - protein, 736 aa, synthetic construct
  REGION 1..736: note = source = /note="Description of Artificial Sequence: Synthetic polypeptide"
MAADGYLPDWLEDNLSEGIREWWALKPGAPKPKANQQKQDDGRGLVLPGYKYLGPFNGLDKGEPVNAADAAALEHDKAYDQQLQAGDNPYLRYNHADAEFQERLQEDTSFGGNLGRAVFQAKKRVLEPLGLVEEGAKTAPGKKRPVEPSPQRSPDSSTGIGKKGQQPARKRLNFGQTGDSESVPDPQPLGEPPAAPSGVGPNTMAAGGGAPMADNNEGADGVGSSSGNWHCDSTWLGDRVITTSTRTWALPTYNNHLYKQISSQSGASNDNHYFGYSTPWGYFDFNRFHCHFSPRDWQRLINNNWGFRPKRLSFKLFNIQVKEVTQNEGTKTIANNLTSTIQVFTDSEYQLPYVLGSAHQGCLPPFPADVFMIPQYGYLTLNNGSQAVGRSSFYCLEYFPSQMLRTGNNFQFTYTFEDVPFHSSYAHSQSLDRLMNPLIDQYLYYLSRTQTTGGTANTQTLGFSQGGPNTMANQAKNWLPGPCYRQQRVSTTTGQNNNSNFAWTAGTKYHLNGRNSLANPGIAMATHKDDEERFFPSNGILIFGKQGTTASNAELDNVMITDEEEIKTTNPVATEEYGIVADNLQQQNTAPQIGTVNSQGALPGMVWQNRDVYLQGPIWAKIPHTDGNFHPSPLMGGFGLKHPPPQILIKNTPVPADPPTTFNQSKLNSFITQYSTGQVSVEIEWELQKENSKRWNPEIQYTSNYNKSVNVDFTVDTNGVYSEPRPIGTRYLTRNL

SEQ ID NO: 1196 - protein, 736 aa, synthetic construct
  REGION 1..736: note = source = /note="Description of Artificial Sequence: Synthetic polypeptide"
MAADGYLPDWLEDNLSEGIREWWALKPGAPKPKANQQKQDDGRGLVLPGYKYLGPFNGLDKGEPVNAADAAALEHDKAYDQQLQAGDNPYLRYNHADAEFQERLQEDTSFGGNLGRAVFQAKKRVLEPLGLVEEGAKTAPGKKRPVEPSPQRSPDSSTGIGKKGQQPARKRLNFGQTGDSESVPDPQPLGEPPAAPSGVGPNTMAAGGGAPMADNNEGADGVGSSSGNWHCDSTWLGDRVITTSTRTWALPTYNNHLYKQISSQSGASNDNHYFGYSTPWGYFDFNRFHCHFSPRDWQRLINNNWGFRPKRLSFKLFNIQVKEVTQNEGTKTIANNLTSTIQVFTDSEYQLPYVLGSAHQGCLPPFPADVFMIPQYGYLTLNNGSQAVGRSSFYCLEYFPSQMLRTGNNFQFTYTFEDVPFHSSYAHSQSLDRLMNPLIDQYLYYLSRTQTTGGTANTQTLGFSQGGPNTMANQAKNWLPGPCYRQQRVSTTTGQNNNSNFAWTAGTKYHLNGRNSLANPGIAMATHKDDEERFFPSNGILIFGKQNAARDNADYSDVMLTSEEEIKTTNPVATEEYGIVADNLQQQNTAPQIGTVNSQGALPGMVWQNRDVYLQGPIWAKIPHTDGNFHPSPLMGGFGLKHPPPQILIKNTPVPADPPTTFNQSKLNSFITQYSTGQVSVEIEWELQKENSKRWNPEIQYTSNYYKSTSVDFAVNTEGVYSEPRPIGTRYLTRNL

SEQ ID NO: 1197 - protein, 736 aa, synthetic construct
  REGION 1..736: note = source = /note="Description of Artificial Sequence: Synthetic polypeptide"
MAADGYLPDWLEDNLSEGIREWWDLKPGAPKPKANQQKQDDGRGLVLPGYKYLGPFNGLDKGEPVNAADAAALEHDKAYDQQLKAGDNPYLRYNHADAEFQERLQEDTSFGGNLGRAVFQAKKRVLEPLGLVEEGAKTAPGKKRPVEQSPQEPDSSSGIGKTGQQPAKKRLNFGQTGDTESVPDPQPLGEPPAAPSGLGPNTMASGGGAPMADNNEGADGVGNSSGNWHCDSTWLGDRVITTSTRTWALPTYNNHLYKQISNGTSGGSTNDNTYFGYSTPWGYFDFNRFHCHFSPRDWQRLINNNWGFRPKRLNFKLFNIQVKEVTTNEGTKTIANNLTSTVQVFTDSEYQLPYVLGSAHQGCLPPFPADVFMVPQYGYLTLNNGSQALGRSSFYCLEYFPSQMLRTGNNFQFSYTFEDVPFHSSYAHSQSLDRLMNPLIDQYLYYLVRTQTTGTGGTQTLAFSQAGPSSMASQARNWVPGPSYRQQRVSTTTNQNNNSNFAWTGAAKFKLNGRDSLMNPGVAMASHKDDEDRFFPSSGVLIFGKQGAGNDGVDYSQVLITDEEEIKATNPVATEEYGAVAINNQAANTQAQTGLVHNQGVIPGMVWQNRDVYLQGPIWAKIPHTDGNFHPSPLMGGFGLKHPPPQILIKNTPVPADPPLTFNQAKLNSFITQYSTGQVSVEIEWELQKENSKRWNPEIQYTSNYYKSTNVDFAVNTEGVYSEPRPIGTRYLTRNL

SEQ ID NO: 1198 - DNA, 3695 bp, synthetic construct
  misc_feature 1..3695: note = source = /note="Description of Artificial Sequence: Synthetic polynucleotide"
  source 1..3695: mol_type = other DNA
ctctttgcgcttgcgttttcccttgtccagatagcccagtagctgacattcatccggggtcagcaccgtttctgcggactggctttctacgtgaaaaggatctaggtgaagatcctttttgataatctcatgcctgacatttatattccccagaacatcaggttaatggcgtttttgatgtcattttcgcggtggctgagatcagccacttcttccccgataacggagaccggcacactggccatatcggtggtcatcatgcgccagctttcatccccgatatgcaccaccgggtaaagttcacgggagactttatctgacagcagacgtgcactggccagggggatcaccatccgtcgccccggcgtgtcaataatatcactctgtacatccacaaacagacgataacggctctctcttttataggtgtaaaccttaaactgccgtacgtataggctgcgcaactgttgggaagggcgatcggtgcgggcctcttcgctattacgccagctggcgaaagggggatgtgctgcaaggcgattaagttgggtaacgccagggttttcccagtcacgacgttgtaaaacgacggccagtgaattgtaatacgactcactatagggcgaattgaatttagcggccgcgaattcgcccttatgatatctggtgggaggagggcaagatgacggccaaggtcgtggagtccgccaaggccattctcggcggcagcaaagtgcgcgtggaccaaaagtgcaagtcgtccgcccagatcgatcccactcccgtcattgtcacctccaacaccaacatgtgcgccgtgattgacgggaacagcaccaccttcgagcaccagcagccgttgcaggaccggatgttcaaatttgaacttacccgccgtctggagcatgactttggcaaggtgacaaagcaggaagtcaaagagttcttccgctgggcgcaggatcacgtgaccgaggtggcgcatgagttccacgtcagaaagggtggagccaacaagagacccgcccccgatgacgctgataaaagcgagcccaagcgggcctgcccctcagtcgcagatccatcgacgtcagacgcggaaggagctccggtggactttgccgacaggtaccaaaacaaatgttctcgtcacgcgggcatgcttcagatgctgtttccctgcaagacatgcgagagaatgaatcagaatttcaacatttgcttcacgcacgggaccagggactgttcggagtgcttccccggcgtgtcagaatctcaaccggtcgtcagaaaaaggacgtatcggaaactctgtgccattcatcatctgctggggagggctcccgagattgcttgctcggcctgcgatctggtcaacgtggacctggatgactgtgtctctgagcaataaatgacttaaaccaggtatggctgccgatggttatcttccagattggctcgaggacaacctctctgagggcattcgcgagtggtgggacttgaaacctggagccccgaaacccaaagccaaccagcaaaagcaggacgacggccggggtctggtgcttcctggctacaagtacctcggacccttcaacggactcgacaagggggagcccgtcaacgcggcggacgcagcggccctcgagcacgacaaggcctacgaccagcagctcaaagcgggtgacaatccgtacctgcggtataaccacgccgacgccgagtttcaggagcgtctgcaagaagatacgtcttttgggggcaacctcgggcgagcagtcttccaggccaagaagcgggttctcgaacctctcggtctggttgaggaaggcgctaagacggctcctggaaagaagagaccggtagagcagtcaccccaagaaccagactcctcatcgggcatcggcaagacaggccagcagcccgctaaaaagagactcaattttggtcagactggcgacacagagtcagtccccgacccacaacctctcggagaacctccagcagccccctcaggtctgggacctaatacaatggcttcaggcggtggcgctccaatggcagacaataacgaaggcgccgacggagtgggtaattcctcgggaaattggcattgcgattccacatggctgggggacagagtcatcaccaccagcacccgaacctgggccctgcccacctacaacaaccacctctacaagcaaatctccaacggcacctcgggaggaagcaccaacgacaacacctactttggctacagcaccccctgggggtattttgacttcaacagattccactgccacttttcaccacgtgactggcagcgactcatcaacaacaattggggattccggcccaagagactcaacttcaagctcttcaacatccaggtcaaggaagtcacgacgaacgaaggcaccaagaccatcgccaataatctcaccagcaccgtgcaggtctttacggactcggagtaccagctaccgtacgtgctaggatcagctcaccagggatgtctgcctccgttcccggcggacgtcttcatggttcctcagtacggttatctaactctgaacaatggcagccaggccctgggacgttcctccttctactgcctggagtatttcccatcgcagatgctgagaaccggcaacaactttcagttcagctacaccttcgaggacgtgcctttccacagcagctacgcgcacagccaaagcctggacaggctgatgaatcccctcatcgaccagtacctgtattacctggtcagaacgcagacaaccgggactggagggacgcagactctggcattcagccaagcaggccctagctcaatggccagccaggctagaaactgggtgcccggaccgagctaccggcagcagcgcgtctccacgacaaccaaccagaacaacaacagcaactttgcctggacgggagctgccaaatttaaactgaacggccgagactctctaatgaaccccggcgtggccatggcttcacacaaggatgacgaggaccgcttcttcccttctagcggggtcctgattttcggcaagcaaggagccgggaatgatggagtggattacagccaagtgctgattacagatgaggaagaaatcaaggctaccaaccccgtggcaacagaggaatatggagcagtggccatcaacaaccaggccgctaatacgcaggcgcagaccggactcgtgcacaaccagggggtgattcccggcatggtgtggcagaacagagacgtgtacctgcagggtcccatctgggccaaaattcctcacacggacggcaactttcacccgtctcccctgatgggcggctttggactgaagcacccgcctcctcaaattctcatcaagaacacaccggttccagcggacccgccgcttaccttcaaccaggccaagctgaactctttcatcacgcagtacagcaccggacaggtcagcgtggaaatcgagtgggagctgcagaaagaaaacagcaaacgctggaatccagagattcagtacacttccaactactacaaatctacaaatgtggactttgctgtcaacacggaaggagtgtatagcgagcctcgccccattggcacccgttacctcacccgcaacctgtaattgcctgttaatcaataaaccggttaattcgtttcagtaaggaagaattcgtttaaa

SEQ ID NO: 1199 - protein, 736 aa, synthetic construct; identical to SEQ ID NO: 518
  REGION 1..736: note = source = /note="Description of Artificial Sequence: Synthetic polypeptide"

SEQ ID NO: 1200 - protein, 736 aa, synthetic construct
  REGION 1..736: note = source = /note="Description of Artificial Sequence: Synthetic polypeptide"
MAADGYLPDWLEDNLSEGIREWWDLKPGAPKPKANQQKQDDGRGLVLPGYKYLGPFNGLDKGEPVNAADAAALEHDKAYDQQLKAGDNPYLRYNHADAEFQERLQEDTSFGGNLGRAVFQAKKRVLEPLGLVEEGAKTAPGKKRPVEQSPQEPDSSSGIGKTGQQPAKKRLNFGQTGDTESVPDPQPLGEPPAAPSGLGPNTMASGGGAPMADNNEGADGVGNSSGNWHCDSTWLGDRVITTSTRTWALPTYNNHLYKQISNGTSGGSTNDNTYFGYSTPWGYFDFNRFHCHFSPRDWQRLINNNWGFRPKRLNFKLFNIQVKEVTTNEGTKTIANNLTSTVQVFTDSEYQLPYVLGSAHQGCLPPFPADVFMVPQYGYLTLNNGSQALGRSSFYCLEYFPSQMLRTGNNFQFSYTFEDVPFHSSYAHSQSLDRLMNPLIDQYLYYLVRTQTTGTGGTQTLAFSQAGPSNMASQARNWVPGPSYRQQRVSTTTNQNNNSNFAWTGAAKFKLNGRDSLMNPGVAMASHKDDEDRFFPSSGVLIFGKQGAGNDGVDYSQVLITDEEEIKATNPVATEEYGAVAINNQAANTQAQTGLVHNQGVIPGMVWQNRDVYLQGPIWAKIPHTDGNFHPSPLMGGFGLKHPPPQILIKNTPVPADPPLTFNQAKLNSFITQYSTGQVSVEIEWELQKENSKRWNPEIQYTSNYYKSTNVDFAVNTEGVYSEPRPIGTRYLTRNL

SEQ ID NO: 1201 - protein, 738 aa, synthetic construct; identical to SEQ ID NO: 895
  REGION 1..738: note = source = /note="Description of Artificial Sequence: Synthetic polypeptide"

SEQ ID NO: 1202 - protein, 736 aa, synthetic construct
  REGION 1..736: note = source = /note="Description of Artificial Sequence: Synthetic polypeptide"
MAADGYLPDWLEDNLSEGIREWWALQPGAPKPKANQQHQDNARGLVLPGYKYLGPGNGLDKGEPVNAADAAALEHDKAYDQQLKAGDNPYLKYNHADAEFQERLKEDTSFGGNLGRAVFQAKKRILEPLGLVEEAAKTAPGKKRPVDQSPQEPDSSSGVGKSGKQPARKRLNFGQTGDSESVPDPQPLGEPPAAPTSLGSNTMASGGGAPMADNNEGADGVGNSSGNWHCDSQWLGDRVITTSTRTWALPTYNNHLYKQISSQSGASNDNHYFGYSTPWGYFDFNRFHCHFSPRDWQRLINNNWGFRPKKLSFKLFNIQVKEVTQNDGTTTIANNLTSTVQVFTDSEYQLPYVLGSAHQGCLPPFPADVFMVPQYGYLTLNNGSQAVGRSSFYCLEYFPSQMLRTGNNFQFSYTFEDVPFHSSYAHSQSLDRLMNPLIDQYLYYLNRTQGTTSGTTNQSRLLFSQAGPQSMSLQARNWLPGPCYRQQRLSKTANDNNNSNFPWTAASKYHLNGRDSLVNPGPAMASHKDDEEKFFPMHGNLIFGKEGTTASNAELDNVMITDEEEIRTTNPVATEQYGTVANNLQSSNTAPTTRTVNDQGALPGMVWQDRDVYLQGPIWAKIPHTDGHFHPSPLMGGFGLKHPPPQIMIKNTPVPANPPTTFSPAKFASFITQYSTGQVSVEIEWELQKENSKRWNPEIQYTSNYNKSVNVDFTVDTNGVYSEPRPIGTRYLTRPL

SEQ ID NO: 1203 - protein, 736 aa, synthetic construct
  REGION 1..736: note = source = /note="Description of Artificial Sequence: Synthetic polypeptide"
MAADGYLPDWLEDNLSEGIREWWALQPGAPKPKANQQHQDNARGLVLPGYKYLGPGNGLDKGEPVNAADAAALEHDKAYDQQLKAGDNPYLKYNHADAEFQERLKEDTSFGGNLGRAVFQAKKRLLEPLGLVEEAAKTAPGKKRPVDQSPQEPDSSSGVGKSGKQPARKRLNFGQTGDSESVPDPQPLGEPPAAPTSLGSNTMASGGGAPMADNNEGADGVGNSSGNWHCDSQWLGDRVITTSTRTWALPTYNNHLYKQISSQSGASNDNHYFGYSTPWGYFDFNRFHCHFSPRDWQRLINNNWGFRPKKLSFKLFNIQVKEVTQNDGTTTIANNLTSTVQVFTDSEYQLPYVLGSAHQGCLPPFPADVFMVPQYGYLTLNNGSQAVGRSSFYCLEYFPSQMLRTGNNFQFSYTFEDVPFHSSYAHSQSLDRLMNPLIDQYLYYLNRTQGTTSGTTNQSRLLFSQAGPQSMSLQARNWLPGPCYRQQRLSKVANDNNNSNFPWTAASKYHLNGRDSLVNPGPAMASHKDDEEKFFPMHGNLIFGKEGTTASNAELDNVMITDEEEIRTTNPVATEQYGTVANNLQSSNTAPTTRTVNDQGALPGMVWQDRDVYLQGPIWAKIPHTDGHFHPSPLMGGFGLKHPPPQIMIKNTPVPANPPTTFVPAKFASFITQYSTGQVSVEIEWELQKENSKRWNPEIQYTSNYNKSVNVDFTVDTNGVYSEPRPIGTRYLTRPL

SEQ ID NO: 1204 - protein, 736 aa, synthetic construct; identical to SEQ ID NO: 912
  VARIANT 168: note = /replace="Arg"
  VARIANT 204: note = /replace="Ser"
  VARIANT 266: note = /replace="Gly"
  VARIANT 311: note = /replace="Lys"
  VARIANT 411: note = /replace="Gln"
  VARIANT 460: note = /replace="Glu"
  VARIANT 493: note = /replace="Thr"
  VARIANT 562: note = /replace="Asn"
  VARIANT 576: note = /replace="Glu"
  VARIANT 587: note = /replace="Ala"
  VARIANT 609: note = /replace="Asp"
  SITE 1..736: note = /note="Variant residues given in the sequence have no preference with respect to those in the annotations for variant positions"
  REGION 1..736: note = source = /note="Description of Artificial Sequence: Synthetic polypeptide"

SEQ ID NO: 1205 - DNA, 2208 bp, synthetic construct; identical to SEQ ID NO: 913
  variation 502..504: note = /replace="aaa"
  variation 610..612: note = /replace="agc"
  variation 796..798: note = /replace="ggc"
  variation 931..933: note = /replace="aag"
  variation 1231..1233: note = /replace="cag"
  variation 1378..1380: note = /replace="gag"
  variation 1477..1479: note = /replace="acc"
  variation 1684..1686: note = /replace="aac"
  variation 1726..1728: note = /replace="gag"
  variation 1759..1761: note = /replace="gcc"
  variation 1825..1827: note = /replace="gac"
  misc_feature 1..2208: note = /note="Variant nucleotides given in the sequence have no preference with respect to those in the annotations for variant positions"
  misc_feature 1..2208: note = source = /note="Description of Artificial Sequence: Synthetic polynucleotide"
  source 1..2208: mol_type = other DNA

SEQ ID NO: 1206 - protein, 737 aa, synthetic construct
  VARIANT 157: note = /replace="Ser"
  VARIANT 168: note = /replace="Arg"
  VARIANT 262: note = /replace="Ser"
  VARIANT 263: note = /replace="His"
  VARIANT 312: note = /replace="Lys"
  VARIANT 412: note = /replace="Gln"
  VARIANT 460: note = /replace="Gln"
  VARIANT 461: note = /replace="Glu"
  VARIANT 552: note = /replace="Ser"
  VARIANT 556: note = /replace="Tyr"
  VARIANT 557: note = /replace="Ser"
  VARIANT 563: note = /replace="Asn"
  VARIANT 580: note = /replace="Ile"
  VARIANT 588: note = /replace="Ser"
  VARIANT 664: note = /replace="Thr"
  SITE 1..737: note = /note="Variant residues given in the sequence have no preference with respect to those in the annotations for variant positions"
  REGION 1..737: note = source = /note="Description of Artificial Sequence: Synthetic polypeptide"
MAADGYLPDWLEDNLSEGIREWWDLKPGAPKPKANQQKQDDGRGLVLPGYKYLGPFNGLDKGEPVNAADAAALEHDKAYDQQLKAGDNPYLRYNHADAEFQERLQEDTSFGGNLGRAVFQAKKRVLEPLGLVEEGAKTAPGKKRPVEQSPQEPDSSTGIGKKGQQPAKKRLNFGQTGDSESVPDPQPLGEPPAAPSGVGSNTMAAGGGAPMADNNEGADGVGNASGNWHCDSTWLGDRVITTSTRTWALPTYNNHLYKQISNSQSGGSTNDNTYFGYSTPWGYFDFNRFHCHFSPRDWQRLINNNWGFRPKRLNFKLFNIQVKEVTTNDGTTTIANNLTSTVQVFTDSEYQLPYVLGSAHQGCLPPFPADVFMIPQYGYLTLNNGSQAVGRSSFYCLEYFPSQMLRTGNNFEFSYTFEDVPFHSSYAHSQSLDRLMNPLIDQYLYYLSRTQTTGGTAGNRTLQFSQAGPSSMANQAKNWLPGPCYRQQRVSKTTNQNNNSNFAWTGATKYHLNGRDSLVNPGVAMATHKDDEDRFFPSSGVLIFGKQGAGNDNVDLDNVMITSEEEIKTTNPVATEEYGVVATNLQSNNTAPQTGTVNSQGALPGMVWQNRDVYLQGPIWAKIPHTDGNFHPSPLMGGFGLKHPPPQILIKNTPVPANPPTTFSPAKFASFITQYSTGQVSVEIEWELQKENSKRWNPEIQYTSNYNKSTNVDFAVDTEGVYSEPRPIGTRYLTRNL

SEQ ID NO: 1207 - DNA, 2211 bp, synthetic construct; identical to SEQ ID NO: 915
  variation 469..471: note = /replace="agc"
  variation 502..504: note = /replace="aag"
  variation 784..786: note = /replace="agt"
  variation 787..789: note = /replace="cac"
  variation 934..936: note = /replace="aag"
  variation 1234..1236: note = /replace="cag"
  variation 1378..1380: note = /replace="cag"
  variation 1381..1383: note = /replace="gag"
  variation 1654..1656: note = /replace="agc"
  variation 1666..1668: note = /replace="tac"
  variation 1669..1671: note = /replace="agc"
  variation 1687..1689: note = /replace="aac"
  variation 1738..1740: note = /replace="atc"
  variation 1762..1764: note = /replace="agc"
  variation 1990..1992: note = /replace="acc"
  misc_feature 1..2211: note = /note="Variant nucleotides given in the sequence have no preference with respect to those in the annotations for variant positions"
  misc_feature 1..2211: note = source = /note="Description of Artificial Sequence: Synthetic polynucleotide"
  source 1..2211: mol_type = other DNA

SEQ ID NO: 1208 - protein, 738 aa, synthetic construct; identical to SEQ ID NO: 916
  VARIANT 158: note = /replace="Ser"
  VARIANT 169: note = /replace="Arg"
  VARIANT 564: note = /replace="Asn"
  SITE 1..738: note = /note="Variant residues given in the sequence have no preference with respect to those in the annotations for variant positions"
  REGION 1..738: note = source = /note="Description of Artificial Sequence: Synthetic polypeptide"

SEQ ID NO: 1209 - DNA, 2214 bp, synthetic construct; identical to SEQ ID NO: 917
  variation 472..474: note = /replace="agc"
  variation 505..507: note = /replace="aga"
  variation 1690..1692: note = /replace="aac"
  misc_feature 1..2214: note = /note="Variant nucleotides given in the sequence have no preference with respect to those in the annotations for variant positions"
  misc_feature 1..2214: note = source = /note="Description of Artificial Sequence: Synthetic polynucleotide"
  source 1..2214: mol_type = other DNA

SEQ ID NO: 1210 - protein, 738 aa, synthetic construct; identical to SEQ ID NO: 918
  VARIANT 158: note = /replace="Ser"
  VARIANT 169: note = /replace="Lys"
  VARIANT 315: note = /replace="Ser"
  VARIANT 413: note = /replace="Glu"
  VARIANT 472: note = /replace="Thr" or "Ser"
  VARIANT 534: note = /replace="Glu"
  VARIANT 542: note = /replace="Val"
  VARIANT 595: note = /replace="Val"
  SITE 1..738: note = /note="Variant residues given in the sequence have no preference with respect to those in the annotations for variant positions"
  REGION 1..738: note = source = /note="Description of Artificial Sequence: Synthetic polypeptide"

SEQ ID NO: 1211 - DNA, 2214 bp, synthetic construct
  variation 472..474: note = /replace="agc"
  variation 505..507: note = /replace="aag"
  variation 943..945: note = /replace="agc"
  variation 1237..1239: note = /replace="gaa"
  variation 1414..1416: note = /replace="acc" or "agc"
  variation 1600..1602: note = /replace="gag"
  variation 1624..1626: note = /replace="gtc"
  variation 1783..1785: note = /replace="gta"
  misc_feature 1..2214: note = /note="Variant nucleotides given in the sequence have no preference with respect to those in the annotations for variant positions"
  misc_feature 1..2214: note = source = /note="Description of Artificial Sequence: Synthetic polynucleotide"
  source 1..2214: mol_type = other DNA
atggctgccgatggttatcttccagattggctcgaggacaacctctctgagggcattcgcgagtggtgggacctgaaacctggagccccgaaacccaaagccaaccagcaaaagcaggacgacggccggggtctggtgcttcctggctacaagtacctcggacccttcaacggactcgacaagggggagcccgtcaacgcggcggacgcagcggccctcgagcacgacaaggcctacgaccagcagctcaaagcgggtgacaatccgtacctgcggtataatcacgccgacgccgagtttcaggagcgtctgcaagaagatacgtcttttgggggcaacctcgggcgagcagtcttccaggccaagaagcgggttctcgaacctctcggtctggttgaggaaggcgctaagacggctcctggaaagaagagaccggtagagcagtcaccacagcgtgagcccgactcctccacgggcatcggcaagaaaggccagcagcccgccagaaagagactcaatttcggtcagactggcgactcagagtcagtccccgaccctcaacctctcggagaacctccagcagcgccctctggtgtgggatctaatacaatggctgcaggcggtggcgcaccaatggcagacaataacgaaggtgccgacggagtgggtagttcctcgggaaattggcattgcgattccacatggctgggcgacagagtcatcaccaccagcacccgaacctgggccctgcccacctacaacaaccacctctacaagcaaatctccaacgggacctcgggaggcagcaccaacgacaacacctactttggctacagcaccccctgggggtattttgactttaacagattccactgccacttctcaccacgtgactggcagcgactcatcaacaacaactggggattccggcccaagagactcaacttcaagctcttcaacatccaggtcaaagaggtcacgcagaatgaaggcaccaagaccatcgccaataacctcaccagcaccatccaggtgtttacggactcggaataccagctgccgtacgtcctcggctctgcccaccagggctgcctgcctccgttcccggcggacgtcttcatgattcctcagtacggctacctgactctcaacaacggtagtcaggccgtgggacgttcctccttctactgcctggagtacttcccctctcagatgctgagaacgggcaacaactttcaattcagctacactttcgaggacgtgcctttccacagcagctacgcgcacagccagagtttggacaggctgatgaatcctctcatcgaccagtacctgtactacctgtcaagaacccagactacgggaggcacagcgggaacccagacgttgcagttttctcaggccgggcctagcaacatggcgaatcaggccaaaaactggctgcctggaccctgctacagacagcagcgcgtctccacgacaacgtcgcaaaacaacaacagcaactttgcctggactggtgccaccaagtatcatctgaacggcagagactctctggtgaatccgggcgtcgccatggcaacccacaaggacgacgaggaccgcttcttcccatccagcggcatcctcatatttggcaagcagggagctggaaaagacaacgtggactatagcaacgtgatgctaaccagcgaggaagaaatcaagaccaccaaccccgtggccacagaagagtatggcgtggtggctgataacctacagcagcaaaacaccgctcctcaaatagggaccgtcaacagccagggagccttacctggcatggtctggcagaaccgggacgtgtacctgcagggtcctatttgggccaagattcctcacacagatggcaactttcacccgtctcctttaatgggcggctttggacttaaacatccgcctcctcagatcctcatcaaaaacactcctgttcctgcggatcctccaacaacgttcaaccaggccaagctgaattctttcatcacgcagtacagcaccggacaagtcagcgtggagatcgagtgggagctgcagaaggagaacagcaagcgctggaacccagagattcagtatacttccaactactacaaatctacaaatgtggactttgctgttaatactgagggtgtttactctgagcctcgccccattggcactcgttacctcacccgtaatctg

SEQ ID NO: 1212 - protein, 738 aa, synthetic construct; identical to SEQ ID NO: 920
  VARIANT 169: note = /replace="Lys"
  VARIANT 315: note = /replace="Ser"
  VARIANT 534: note = /replace="Glu"
  VARIANT 542: note = /replace="Val"
  SITE 1..738: note = /note="Variant residues given in the sequence have no preference with respect to those in the annotations for variant positions"
  REGION 1..738: note = source = /note="Description of Artificial Sequence: Synthetic polypeptide"

SEQ ID NO: 1213 - DNA, 2214 bp, synthetic construct; identical to SEQ ID NO: 921
  variation 505..507: note = /replace="aaa"
  variation 943..945: note = /replace="agc"
  variation 1600..1602: note = /replace="gag"
  variation 1624..1626: note = /replace="gtc"
  misc_feature 1..2214: note = /note="Variant nucleotides given in the sequence have no preference with respect to those in the annotations for variant positions"
  misc_feature 1..2214: note = source = /note="Description of Artificial Sequence: Synthetic polynucleotide"
  source 1..2214: mol_type = other DNA

SEQ ID NO: 1214 - protein, 738 aa, synthetic construct; identical to SEQ ID NO: 922
  VARIANT 471: note = /replace="Asn"
  SITE 1..738: note = /note="Variant residues given in the sequence have no preference with respect to those in the annotations for variant positions"
  REGION 1..738: note = source = /note="Description of Artificial Sequence: Synthetic polypeptide"

SEQ ID NO: 1215 - DNA, 2214 bp, synthetic construct; identical to SEQ ID NO: 923
  variation 1411..1413: note = /replace="aat"
  misc_feature 1..2214: note = /note="Variant nucleotides given in the sequence have no preference with respect to those in the annotations for variant positions"
  misc_feature 1..2214: note = source = /note="Description of Artificial Sequence: Synthetic polynucleotide"
  source 1..2214: mol_type = other DNA

SEQ ID NO: 1216 - protein, 737 aa, synthetic construct; identical to SEQ ID NO: 924
  VARIANT 148: note = /replace="Gln"
  VARIANT 169: note = /replace="Arg"
  VARIANT 314: note = /replace="Asn"
  VARIANT 466: note = /replace="His"
  VARIANT 563: note = /replace="Ser"
  VARIANT 580: note = /replace="Ile"
  VARIANT 588: note = /replace="Ser"
  SITE 1..737: note = /note="Variant residues given in the sequence have no preference with respect to those in the annotations for variant positions"
  REGION 1..737: note = source = /note="Description of Artificial Sequence: Synthetic polypeptide"

SEQ ID NO: 1217 - DNA, 2211 bp, synthetic construct; identical to SEQ ID NO: 925
  variation 442..444: note = /replace="cag"
  variation 505..507: note = /replace="aga"
  variation 940..942: note = /replace="aac"
  variation 1396..1398: note = /replace="cac"
  variation 1687..1689: note = /replace="agt"
  variation 1738..1740: note = /replace="ata"
  variation 1762..1764: note = /replace="tct"
  misc_feature 1..2211: note = /note="Variant nucleotides given in the sequence have no preference with respect to those in the annotations for variant positions"
  misc_feature 1..2211: note = source = /note="Description of Artificial Sequence: Synthetic polynucleotide"
  source 1..2211: mol_type = other DNA

SEQ ID NO: 1218 - protein, 735 aa, synthetic construct; identical to SEQ ID NO: 926
  VARIANT 162: note = /replace="Thr"
  VARIANT 168: note = /replace="Arg"
  VARIANT 224: note = /replace="Ser"
  VARIANT 310: note = /replace="Lys"
  VARIANT 410: note = /replace="Gln"
  VARIANT 446: note = /replace="Asn"
  VARIANT 461: note = /replace="Leu"
  VARIANT 471: note = /replace="Ser"
  VARIANT 708: note = /replace="Thr"
  SITE 1..735: note = /note="Variant residues given in the sequence have no preference with respect to those in the annotations for variant positions"
  REGION 1..735: note = source = /note="Description of Artificial Sequence: Synthetic polypeptide"

SEQ ID NO: 1219 - DNA, 2205 bp, synthetic construct; identical to SEQ ID NO: 927
  variation 484..486: note = /replace="aca"
  variation 502..504: note = /replace="aga"
  variation 670..672: note = /replace="tcc"
  variation 928..930: note = /replace="aaa"
  variation 1228..1230: note = /replace="cag"
  variation 1336..1338: note = /replace="aac"
  variation 1381..1383: note = /replace="ctg"
  variation 1411..1413: note = /replace="tct"
  variation 2122..2124: note = /replace="acc"
  misc_feature 1..2205: note = /note="Variant nucleotides given in the sequence have no preference with respect to those in the annotations for variant positions"
  misc_feature 1..2205: note = source = /note="Description of Artificial Sequence: Synthetic polynucleotide"
  source 1..2205: mol_type = other DNA

SEQ ID NO: 1220 - protein, 735 aa, synthetic construct; identical to SEQ ID NO: 928
  VARIANT 42: note = /replace="Ser"
  VARIANT 168: note = /replace="Lys"
  VARIANT 310: note = /replace="Arg"
  VARIANT 410: note = /replace="Gln"
  VARIANT 446: note = /replace="Arg"
  VARIANT 461: note = /replace="Leu"
  VARIANT 471: note = /replace="Ser"
  VARIANT 475: note = /replace="Arg"
  VARIANT 504: note = /replace="Ala"
  VARIANT 539: note = /replace="Asn"
  SITE 1..735: note = /note="Variant residues given in the sequence have no preference with respect to those in the annotations for variant positions"
  REGION 1..735: note = source = /note="Description of Artificial Sequence: Synthetic polypeptide"

SEQ ID NO: 1221 - DNA, 2205 bp, synthetic construct; identical to SEQ ID NO: 929
  variation 124..126: note = /replace="agt"
  variation 502..504: note = /replace="aaa"
  variation 928..930: note = /replace="aga"
  variation 1228..1230: note = /replace="cag"
  variation 1336..1338: note = /replace="aga"
  variation 1381..1383: note = /replace="ctc"
  variation 1411..1413: note = /replace="tct"
  variation 1423..1425: note = /replace="aga"
  variation 1510..1512: note = /replace="gcg"
  variation 1615..1617: note = /replace="gac"
  misc_feature 1..2205: note = /note="Variant nucleotides given in the sequence have no preference with respect to those in the annotations for variant positions"
  misc_feature 1..2205: note = source = /note="Description of Artificial Sequence: Synthetic polynucleotide"
  source 1..2205: mol_type = other DNA

SEQ ID NO: 1222 - protein, 736 aa, synthetic construct; identical to SEQ ID NO: 930
  REGION 1..736: note = source = /note="Description of Artificial Sequence: Synthetic polypeptide"

SEQ ID NO: 1223 - protein, 736 aa, synthetic construct; identical to SEQ ID NO: 931
  REGION 1..736: note = source = /note="Description of Artificial Sequence: Synthetic polypeptide"

SEQ ID NO: 1224 - protein, 736 aa, synthetic construct; identical to SEQ ID NO: 932
  REGION 1..736: note = source = /note="Description of Artificial Sequence: Synthetic polypeptide"

SEQ ID NO: 1225 - protein, 736 aa, synthetic construct; identical to SEQ ID NO: 933
  REGION 1..736: note = source = /note="Description of Artificial Sequence: Synthetic polypeptide"

SEQ ID NO: 1226 - protein, 736 aa, synthetic construct; identical to SEQ ID NO: 934
  REGION 1..736: note = source = /note="Description of Artificial Sequence: Synthetic polypeptide"

SEQ ID NO: 1227 - protein, 736 aa, synthetic construct; identical to SEQ ID NO: 935
  REGION 1..736: note = source = /note="Description of Artificial Sequence: Synthetic polypeptide"

SEQ ID NO: 1228 - protein, 736 aa, synthetic construct; identical to SEQ ID NO: 936
  REGION 1..736: note = source = /note="Description of Artificial Sequence: Synthetic polypeptide"

SEQ ID NO: 1229 - protein, 736 aa, synthetic construct; identical to SEQ ID NO: 937
  REGION 1..736: note = source = /note="Description of Artificial Sequence: Synthetic polypeptide"

SEQ ID NO: 1230 - DNA, 2211 bp, synthetic construct; identical to SEQ ID NO: 938
  misc_feature 1..2211: note = source = /note="Description of Artificial Sequence: Synthetic polynucleotide"
  source 1..2211: mol_type = other DNA

SEQ ID NO: 1231 - protein, 738 aa, synthetic construct; identical to SEQ ID NO: 18
  REGION 1..738: note = source = /note="Description of Artificial Sequence: Synthetic polypeptide"

SEQ ID NO: 1232 - protein, 738 aa, synthetic construct; identical to SEQ ID NO: 18
  REGION 1..738: note = source = /note="Description of Artificial Sequence: Synthetic polypeptide"

SEQ ID NO: 1233 - protein, 738 aa, synthetic construct
  VARIANT 157: note = /replace="Thr"
  VARIANT 169: note = /replace="Arg"
  VARIANT 457: note = /replace="Gly"
  VARIANT 463: note = /replace="Ala"
  VARIANT 508: note = /replace="Ala"
  VARIANT 510: note = /replace="Phe"
  VARIANT 511: note = /replace="Lys"
  VARIANT 558: note = /replace="Asn"
  VARIANT 585: note = /replace="His"
  VARIANT 587: note = /replace="Ala"
  SITE 1..738: note = /note="Variant residues given in the sequence have no preference with respect to those in the annotations for variant positions"
  REGION 1..738: note = source = /note="Description of Artificial Sequence: Synthetic polypeptide"
MAADGYLPDWLEDNLSEGIREWWDLKPGAPKPKANQQKQDDGRGLVLPGYKYLGPFNGLDKGEPVNAADAAALEHDKAYDQQLKAGDNPYLRYNHADAEFQERLQEDTSFGGNLGRAVFQAKKRVLEPLGLVEEGAKTAPGKKRPVEQSPQEPDSSSLGIGKTGQQPAKKRLNFGQTGDSESVPDPQPLGEPPAAPSGVGSNTMASGGGAPMADNNEGADGVGNSSGNWHCDSTWLGDRVITTSTRTWALPTYNNHLYKQISNGTSGGSTNDNTYFGYSTPWGYFDFNRFHCHFSPRDWQRLINNNWGFRPKRLNFKLFNIQVKEVTTNEGTKTIANNLTSTVQVFTDSEYQLPYVLGSAHQGCLPPFPADVFMIPQYGYLTLNNGSQAVGRSSFYCLEYFPSQMLRTGNNFQFSYTFEDVPFHSSYAHSQSLDRLMNPLIDQYLYYLSRTQTTGTAGTQTLQFSQAGPSSMANQARNWVPGPCYRQQRVSTTTNQNNNSNFAWTGATKYHLNGRDSLMNPGVAMASHKDDEDRFFPSSGVLIFGKQGAGNDNVDYSQVMITNEEEIKTTNPVATEEYGAVATNNQSLANTQAQTGLVHNQGVLPGMVWQNRDVYLQGPIWAKIPHTDGNFHPSPLMGGFGLKHPPPQILIKNTPVPADPPTTFNQAKLNSFITQYSTGQVSVEIEWELQKENSKRWNPEIQYTSNYYKSTNVDFAVNTEGVYSEPRPIGTRYLTRNL

SEQ ID NO: 1234 - DNA, 2211 bp, synthetic construct
  variation 469..471: note = /replace="acg"
  variation 502..504: note = /replace="aga"
  variation 1366..1368: note = /replace="gga"
  variation 1384..1386: note = /replace="gca"
  variation 1519..1521: note = /replace="gcc"
  variation 1525..1527: note = /replace="ttt"
  variation 1528..1530: note = /replace="aaa"
  variation 1669..1671: note = /replace="aac"
  variation 1750..1752: note = /replace="cac"
  variation 1756..1758: note = /replace="gcc"
  misc_feature 1..2211: note = /note="Variant nucleotides given in the sequence have no preference with respect to those in the annotations for variant positions"
  misc_feature 1..2211: note = source = /note="Description of Artificial Sequence: Synthetic polynucleotide"
  source 1..2211: mol_type = other DNA
atggctgccgatggttatcttccagattggctcgaggacaacctctctgagggcattcgcgagtggtgggacttgaaacctggagccccgaaacccaaagccaaccagcaaaagcaggacgacggccggggtctggtgcttcctggctacaagtacctcggacccttcaacggactcgacaagggggagcccgtcaacgcggcggacgcagcggccctcgagcacgacaaagcctacgaccagcagctcaaagcgggtgacaatccgtacctgcggtataatcacgccgacgccgagtttcaggagcgtctgcaagaagatacgtcttttgggggcaacctcgggcgagcagtcttccaggccaagaagcgggttctcgaacctctcggtctggttgaggaaggcgctaagacggctcctggaaagaagaggccggtagagcagtcgccacaagagccagactcctcctcgggcatcggcaagacaggccagcagcccgctaaaaagagactcaattttggtcagactggcgactcagagtcagtccccgacccacaacctctcggagaacctccagcagccccctcaggtgtgggatctaatacaatggcttcaggcggtggcgctccaatggcagacaataacgaaggcgccgacggagtgggtaattcctcgggaaattggcattgcgattccacatggctgggggacagagtcatcaccaccagcacccgaacctgggccctgcccacctacaacaaccacctctacaagcaaatctccaacggcacctcgggaggaagcaccaacgacaacacctattttggctacagcaccccctgggggtattttgacttcaacagattccactgtcacttttcaccacgtgactggcaacgactcatcaacaacaattggggattccggcccaaaagactcaacttcaagctgttcaacatccaggtcaaggaagtcacgacgaacgaaggcaccaagaccatcgccaataatctcaccagcaccgtgcaggtctttacggactcggagtaccagttaccgtacgtgctaggatccgctcaccagggatgtctgcctccgttcccggcggacgtcttcatgattcctcagtacggctatttaactttaaacaatggaagccaagccgtgggacgttcctccttctactgtctggagtatttcccatcgcagatgctgagaaccggcaacaactttcagttcagctacaccttcgaggacgtgcctttccacagcagctacgcgcacagccagagcctggacaggctgatgaatcccctcatcgaccagtacctgtactacctgtccagaacgcaaacgactggaactgcagggacgcagactctgcaattcagccaagcgggtcctagctcaatggccaaccaggctagaaattgggtgcccggaccttgctaccggcagcagcgcgtctccacgacaaccaaccagaacaacaacagcaactttgcctggacgggagctaccaagtatcacctgaacggccgagactctctaatgaatccgggcgtggcaatggcttcccacaaggatgacgaggaccgcttcttcccttcgagcggggtcctgatttttggcaagcaaggagccgggaacgataatgtggattacagccaagtgatgattacaaatgaggaagaaatcaagactaccaaccccgtggccacagaagaatatggagcagtggccaccaacaaccagtccgccaatacgcaggcgcagaccggactcgtgcacaaccagggggtgcttcccggcatggtgtggcagaatagagacgtgtacctgcagggtcccatctgggccaaaattcctcacacggacggcaactttcacccgtctcccctgatgggcggctttggactgaagcacccgcctcctcaaattctcatcaagaacacaccggttccagcggacccgccgactaccttcaaccaggccaagctgaactctttcatcacgcagtacagcaccggacaggtcagcgtggaaatcgagtgggagctgcagaaagaaaacagcaaacgctggaatccagagattcaatacacttccaactactacaaatctacaaatgtggactttgctgtcaacacggagggggtttatagcgagcctcgccccattggcacccgttacctcacccgcaacctgtaa

SEQ ID NO: 1235 - protein, 733 aa, synthetic construct; identical to SEQ ID NO: 434
  REGION 1..733: note = source = /note="Description of Artificial Sequence: Synthetic polypeptide"

SEQ ID NO: 1236 - DNA, 4472 bp, synthetic construct
  misc_feature 1..4472: note = source = /note="Description of Artificial Sequence: Synthetic polynucleotide"
  source 1..4472: mol_type = other DNA
ctccatcactaggggtaaccgcgaagcgcctcccacgctgccgcgtcagcgctgacgtaaattacgtcataggggagtggtcctgtattagctgtcacgtgagtgcttttgcgacattttgcgacaccacgtggccattcatggtatatatggccgagtgagcgagcaggatctccattttgaccgcgaaatttgaacgagcagcagccatgccgggcttctacgagatcgtgcttaaggtgccgagcgacctggacgagcacctgccgggcatttctgactcgtttgtgaactgggtggcagagaaggaatgggagctgcccccggattctgacatggatcggaatctgattgagcaggcacccctgaccgtggccgagaagctacagcgcgacttcctggtccaatggcgccgcgtgagtaaggccccggaggccctcttctttgttcagttcgagaagggcgagtcctacttccacctccatattctggtagagaccacgggggtcaaatccatggtgctgggccgcttcctgagtcagattcgggacaagctggtgcagaccatctaccgcgggatcgagccgaccctgcccaactggttcgcggtgacaaagacgcgtaatggcgccggaggggggaacaaggtggtggacgagtgctacatccccaactacctgctgcccaagactcagcccgagctgcagtgggcgtggactaacatggaggagtatataagcgcgtgcttgaacctggccgagcgcaaacggctcgtggcgcagcacctgacccacgtcagccagacccaggagcagaacaaggagaatctgaacccgaattctgacgcgcctgtcatccggtcaaaaacctccgcgcgctacatggagctggtcgggtggctggtggaccggggcatcacctccgagaagcagtggatccaggaggaccaggcctcgtacatctccttcaacgccgcctccaactcgcggtctcagatcaaggccgcgctggacaatgccggcaagatcatggcgctgaccaaatccgcgcccgactacctggtaggccccgctctgcccgcggacattaaatccaaccgcatctaccgcatcctggagctgaatggctacgaccctgcctacgccggttccgtctttctcggctgggcccagaaaaagtttggcaaaaggaacaccatctggctgtttgggccggccaccacgggcaagaccaacatcgcggaagccatcgcccacgccgtgcccttctacggctgcgtcaactggaccaatgagaactttcccttcaacgattgcgtcgacaagatggtgatctggtgggaggagggcaagatgacggccaaggtcgtggagtccgccaaggccattctcggcggcagcaaggtgcgcgtggaccaaaagtgcaagtcgtccgcccagatcgatcccacccccgtgatcgtcacctccaacaccaacatgtgcgccgtgattgacgggaacagcaccaccttcgagcaccagcagccgttgcaggaccggatgttcaaatttgaacttacccgccgtctggagcacgactttggcaaggtgacaaagcaggaagtcaaagagttcttccgctgggcgcaggatcacgtgaccgaggtggcgcatgagttctacgtcagaaagggtggagctaacaaaagacccgcccccgatgacgcggatataagcgagcccaagcgggcctgcccctcagtcgcggatccatcgacgtcagacgcggaaggagctccggtggactttgccgacaggtaccaaaacaaatgttctcgtcacgcgggcatgcttcagatgctgtttccctgcaaaacatgcgagagaatgaatcagaatttcaacatttgcttcacgcacgggaccagagactgttcagaatgtttccctggcgtgtcagaatctcaaccggtcgtcagaaaaaagacgtatcggaaactctgtgcgattcatcatctgctggggcgggcacccgagattgcttgctcggcctgcgacctggtcaacgtggacctggatgactgtgtttctgagcaataaatgacttaaaccaggtatggctgccgatggttatcttccagattggctcgaggacaacctctctgagggcattcgcgagtggtgggacctgaaacctggagccccgaaacccaaagccaaccagcaaaagcaggacaacggccggggtctggtgcttcctggctacaagtacctcggacccttcaacggactcgacaagggggagcccgtcaacgcggcggacgcagcggccctcgagcacgacaaggcctacgaccagcagctccaagcgggtgacaatccgtacctgcggtataatcacgccgacgccgagtttcaggagcgtctgcaagaagatacgtcttttgggggcaacctcgggcgcgcagtcttccaggccaaaaagcgggttctcgaacctctgggcctggttgaatcgccggttaagacggctcctggaaagaagagaccggtagagccatcaccccagcgctctccagactcctctacgggcatcggcaagaaaggccagcagcccgcaaaaaagagactcaattttgggcagactggcgactcagagtcagtccccgaccctcaaccaatcggagaaccaccagcaggcccctctggtctgggatctggtacaatggctgcaggcggtggcgctccaatggcagacaataacgaaggcgccgacggagtgggtagttcctcaggaaattggcattgcgattccacatggctgggcgacagagtcatcaccaccagcacccgcacctgggccctgcccacctacaacaaccacctctacaagcaaatctccaacgggacctcgggaggaagcaccaacgacaacacctacttcggctacagcaccccctgggggtattttgacttcaacagattccactgccacttttcaccacgtgactggcagcgactcatcaacaacaactggggattccggcccaagaggctcaacttcaagctcttcaacatccaagtcaaggaggtcacgcagaatgaaggcaccaagaccatcgccaataaccttaccagcacgattcaggtctttacggactcggaataccagctcccgtacgtgctcggctcggcgcaccagggctgcctgcctccgttcccggcggacgtcttcatgattcctcagtacgggtacctgactctgaacaatggcagtcaggctgtgggccggtcgtccttctactgcctggagtactttccttctcaaatgctgagaacgggcaacaactttgaattcagctacaacttcgaggacgtgcccttccacagcagctacgcgcacagccagagcctggaccggctgatgaaccctctcatcgaccagtacttgtactacctgtcccggactcaaagcacgggcggtactgcaggaactcagcagttgctattttctcaggccgggcctaacaacatgtcggctcaggccaagaactggctacccggtccctgctaccggcagcaacgcgtctccacgacactgtcgcagaacaacaacagcaactttgcctggacgggtgccaccaagtatcatctgaatggcagagactctctggtgaatcctggcgttgccatggctacccacaaggacgacgaagagcgattttttccatccagcggagtcttaatgtttgggaaacagggagctggaaaagacaacgtggactatagcagcgtgatgctaaccagcgaggaagaaataaagaccaccaacccagtggccacagaacagtacggcgtggtggccgataacctgcaacagcaaaacgccgctcctattgtaggggccgtcaatagtcaaggagccttacctggcatggtgtggcagaaccgggacgtgtacctgcagggtcccatctgggccaagattcctcatacggacggcaactttcatccctcgccgctgatgggaggctttggactgaagcatccgcctcctcagatcctgattaaaaacacacctgttcccgcggatcctccgaccaccttcactaaggccaagctggcttctttcatcacgcagtacagtaccggccaggtcagcgtggagatcgagtgggagctgcagaaggagaacagcaaacgctggaacccagagattcagtacacttccaactactacaaatctacaaatgtggactttgctgtcaatactgagggtacttattccgagcctcgccccattggcacccgttacctcacccgtaatctgtaattacatgttaatcaataaaccggttaattcgtttcagttgaactttggtctcctgtccttcttatcttatcggttaccatagaaactggttacttattaactgcttggtgcgcttcgcgataaaagacttacgtcatcgggttacccctagtgatgga

SEQ ID NO: 1237 - DNA, 2208 bp, synthetic construct
  misc_feature 1..2208: note = source = /note="Description of Artificial Sequence: Synthetic polynucleotide"
  source 1..2208: mol_type = other DNA
atggctgccgatggttatcttccagattggctcgaggacactctctctgaaggaataagacagtggtggaagctcaaacctggcccaccaccaccaaagcccgcagagcggcataaggacgacagcaggggtcttgtgcttcctgggtacaagtacctcggacccttcaacggactcgacaagggagagccggtcaacgaggcagacgccgcggccctcgagcacgacaaagcctacgaccggcagctcgacagcggagacaacccgtacctcaagtacaaccacgccgacgcggagtttcaggagcgccttaaagaagatacgtcttttgggggcaacctcggacgagcagtcttccaggcgaaaaagagggttcttgaacctctgggcctggttgaggaacctgttaagaaggctccgggaaaaaagaggccggtagagcactctcctgtggagccagactcctcctcgggaaccggaaaggcgggccagcagcctgcaagaaaaagattgaattttggtcagactggagacgcagactcagtacctgacccccagcctctcggacagccaccagcagccccctctggtctgggaactaataccatggctacaggcagtggcgcaccaatggcagacaataacgagggtgccgacggagtgggtaattcctcgggaaattggcattgcgattccacatggatgggcgacagagtcatcaccaccagcacccgaacctgggccctgcccacctacaacaaccacctctacaaacaaatttccagccaatcaggagcctcgaacgacaatcactactttggctacagcaccccttgggggtattttgacttcaacagattccactgccacttttcaccacgtgactggcaaagactcatcaacaacaactggggattccgacccaagagactcaacttcaagctctttaacattcaagtcaaagaggtcacgcagaatgacggtacgacgacgattgccaataaccttaccagcacggttcaggtgtttactgactcggagtaccagctcccgtacgtcctcggctcggcgcatcaaggatgcctcccgccgttcccagcagacgtcttcatggtgccacagtatggatacctcaccctgaacaacgggagtcaggcagtaggacgctcttcattttactgcctggagtactttccttctcagatgctgcgtaccggaaacaactttaccttcagctacacttttgaggacgttcctttccacagcagctacgctcacagccagagtctggaccgtctcatgaatcctctcatcgaccagtacctgtattacttgagcagaacaaacactccaagtggaaccaccacgcagtcaaggcttcagttttctcaggccggagcgagtgacattcgggaccagtctaggaactggcttcctggaccctgttaccgccagcagcgagtatcaaagacatctgcggataacaacaacagtgaatactcgtggactggagctaccaagtaccacctcaatggcagagactctctggtgaatccgggcccggctatggcaagccacaaggacgatgaagaaaagttttttcctcagagcggggttctcatctttgggaagcaaggctcagagaaaacaaatgtggacattgaaaaggtcatgattacagacgaagaggaaatcaggacaaccaatcccgtggctacggagcagtatggttctgtatctaccaacctccagagaggcaacagacaagcagctaccgcagatgtcaacacacaaggcgttcttccaggcatggtctggcaggacagagatgtgtaccttcaggggcccatctgggcaaagattccacacacggacggacattttcacccctctcccctcatgggtggattcggacttaaacaccctcctccacagattctcatcaagaacaccccggtgcctgcgaatccttcgaccaccttcagtgcggcaaagtttgcttccttcatcacacagtactccacgggacaggtcagcgtggagatcgagtgggagctgcagaaggaaaacagcaaacgctggaatcccgaaattcagtacacttccaactacaacaagtctgttaatgtggactttactgtggacactaatggcgtgtattcagagcctcgccccattggcaccagatacctgactcgtaatctgtaa

SEQ ID NO: 1238 - protein, 735 aa, synthetic construct
  REGION 1..735: note = source = /note="Description of Artificial Sequence: Synthetic polypeptide"
MAADGYLPDWLEDTLSEGIRQWWKLKPGPPPPKPAERHKDDSRGLVLPGYKYLGPFNGLDKGEPVNEADAAALEHDKAYDRQLDSGDNPYLKYNHADAEFQERLKEDTSFGGNLGRAVFQAKKRVLEPLGLVEEPVKKAPGKKRPVEHSPVEPDSSSGTGKAGQQPARKRLNFGQTGDADSVPDPQPLGQPPAAPSGLGTNTMATGSGAPMADNNEGADGVGNSSGNWHCDSTWMGDRVITTSTRTWALPTYNNHLYKQISSQSGASNDNHYFGYSTPWGYFDFNRFHCHFSPRDWQRLINNNWGFRPKRLNFKLFNIQVKEVTQNDGTTTIANNLTSTVQVFTDSEYQLPYVLGSAHQGCLPPFPADVFMVPQYGYLTLNNGSQAVGRSSFYCLEYFPSQMLRTGNNFTFSYTFEDVPFHSSYAHSQSLDRLMNPLIDQYLYYLSRTNTPSGTTTQSRLQFSQAGASDIRDQSRNWLPGPCYRQQRVSKTSADNNNSEYSWTGATKYHLNGRDSLVNPGPAMASHKDDEEKFFPQSGVLIFGKQGSEKTNVDIEKVMITDEEEIRTTNPVATEQYGSVSTNLQRGNRQAATADVNTQGVLPGMVWQDRDVYLQGPIWAKIPHTDGHFHPSPLMGGFGLKHPPPQILIKNTPVPANPSTTFSAAKFASFITQYSTGQVSVEIEWELQKENSKRWNPEIQYTSNYNKSVNVDFTVDTNGVYSEPRPIGTRYLTRNL

SEQ ID NO: 1239 - DNA, 8376 bp, synthetic construct
  misc_feature 1..8376: note = source = /note="Description of Artificial Sequence: Synthetic polynucleotide"
  source 1..8376: mol_type = other DNA
aattcccatcatcaataatataccttattttggattgaagccaatatgataatgagggggtggagtttgtgacgtggcgcggggcgtgggaacggggcgggtgacgtagtagtctctagagtcctgtattagaggtcacgtgagtgttttgcgacattttgcgacaccatgtggtcacgctgggtatttaagcccgagtgagcacgcagggtctccattttgaagcgggaggtttgaacgcgcagccaccacgccggggttttacgagattgtgattaaggtccccagcgaccttgacgggcatctgcccggcatttctgacagctttgtgaactgggtggccgagaaggaatgggagttgccgccagattctgacatggatctgaatctgattgagcaggcacccctgaccgtggccgagaagctgcagcgcgactttctgacggaatggcgccgtgtgagtaaggccccggaggcccttttctttgtgcaatttgagaagggagagagctacttccacatgcacgtgctcgtggaaaccaccggggtgaaatccatggttttgggacgtttcctgagtcagattcgcgaaaaactgattcagagaatttaccgcgggatcgagccgactttgccaaactggttcgcggtcacaaagaccagaaatggcgccggaggcgggaacaaggtggtggatgagtgctacatccccaattacttgctccccaaaacccagcctgagctccagtgggcgtggactaatatggaacagtatttaagcgcctgtttgaatctcacggagcgtaaacggttggtggcgcagcatctgacgcacgtgtcgcagacgcaggagcagaacaaagagaatcagaatcccaattctgatgcgccggtgatcagatcaaaaacttcagccaggtacatggagctggtcgggtggctcgtggacaaggggattacctcggagaagcagtggatccaggaggaccaggcctcatacatctccttcaatgcggcctccaactcgcggtcccaaatcaaggctgccttggacaatgcgggaaagattatgagcctgactaaaaccgcccccgactacctggtgggccagcagcccgtggaggacatttccagcaatcggatttataaaattttggaactaaacgggtacgatccccaatatgcggcttccgtctttctgggatgggccacgaaaaagttcggcaagaggaacaccatctggctgtttgggcctgcaactaccgggaagaccaacatcgcggaggccatagcccacactgtgcccttctacgggtgcgtaaactggaccaatgagaactttcccttcaacgactgtgtcgacaagatggtgatctggtgggaggaggggaagatgaccgccaaggtcgtggagtcggccaaagccattctcggaggaagcaaggtgcgcgtggaccagaaatgcaagtcctcggcccagatagacccgactcccgtgatcgtcacctccaacaccaacatgtgcgccgtgattgacgggaactcaacgaccttcgaacaccagcagccgttgcaagaccggatgttcaaatttgaactcacccgccgtctggatcatgactttgggaaggtcaccaagcaggaagtcaaagactttttccggtgggcaaaggatcacgtggttgaggtggagcatgaattctacgtcaaaaagggtggagccaagaaaagacccgcccccagtgacgcagatataagtgagcccaaacgggtgcgcgagtcagttgcgcagccatcgacgtcagacgcggaagcttcgatcaactacgcagacaggtaccaaaacaaatgttctcgtcacgtgggcatgaatctgatgctgtttccctgcagacaatgcgagagaatgaatcagaattcaaatatctgcttcactcacggacagaaagactgtttagagtgctttcccgtgtcagaatctcaacccgtttctgtcgtcaaaaaggcgtatcagaaactgtgctacattcatcatatcatgggaaaggtgccagacgcttgcactgcctgcgatctggtcaatgtggatttggatgactgcatctttgaacaataaatgatttaaatcaggtatggctgccgatggttatcttccagattggctcgaggacactctctctgaaggaataagacagtggtggaagctcaaacctggcccaccaccaccaaagcccgcagagcggcataaggacgacagcaggggtcttgtgcttcctgggtacaagtacctcggacccttcaacggactcgacaagggagagccggtcaacgaggcagacgccgcggccctcgagcacgacaaagcctacgaccggcagctcgacagcggagacaacccgtacctcaagtacaaccacgccgacgcggagtttcaggagcgccttaaagaagatacgtcttttgggggcaacctcggacgagcagtcttccaggcgaaaaagagggttcttgaacctctgggcctggttgaggaacctgttaagacggctccgggaaaaaagaggccggtagagcactctcctgtggagccagactcctcctcgggaaccggaaaggcgggccagcagcctgcaagaaaaagattgaattttggtcagactggagacgcagactcagtacctgacccccagcctctcggacagccaccagcagccccctctggtctgggaactaatacgatggctacaggcagtggcgcaccaatggcagacaataacgagggcgccgacggagtgggtaattcctcgggaaattggcattgcgattccacatggatgggcgacagagtcatcaccaccagcacccgaacctgggccctgcccacctacaacaaccacctctacaaacaaatttccagccaatcaggagcctcgaacgacaatcactactttggctacagcaccccttgggggtattttgacttcaacagattccactgccacttttcaccacgtgactggcaaagactcatcaacaacaactggggattccgacccaagagactcaacttcaagctctttaacattcaagtcaaagaggtcacgcagaatgacggtacgacgacgattgccaataaccttaccagcacggttcaggtgtttactgactcggagtaccagctcccgtacgtcctcggctcggcgcatcaaggatgcctcccgccgttcccagcagacgtcttcatggtgccacagtatggatacctcaccctgaacaacgggagtcaggcagtaggacgctcttcattttactgcctggagtactttccttctcagatgctgcgtaccggaaacaactttaccttcagctacacttttgaggacgttcctttccacagcagctacgctcacagccagagtctggaccgtctcatgaatcctctcatcgaccagtacctgtattacttgagcagaacaaacactccaagtggaaccaccacgcagtcaaggcttcagttttctcaggccggagcgagtgacattcgggaccagtctaggaactggcttcctggaccctgttaccgccagcagcgagtatcaaagacatctgcggataacaacaacagtgaatactcgtggactggagctaccaagtaccacctcaatggcagagactctctggtgaatccgggcccggccatggcaagccacaaggacgatgaagaaaagttttttcctcagagcggggttctcatctttgggaagcaaggctcagagaaaacaaatgtggacattgaaaaggtcatgattacagacgaagaggaaatcaggacaaccaatcccgtggctacggagcagtatggttctgtatctaccaacctccagagaggcaacagacaagcagctaccgcagatgtcaacacacaaggcgttcttccaggcatggtctggcaggacagagatgtgtaccttcaggggcccatctgggcaaagattccacacacggacggacattttcacccctctcccctcatgggtggattcggacttaaacaccctcctccacagattctcatcaagaacaccccggtacctgcgaatccttcgaccaccttcagtgcggcaaagtttgcttccttcatcacacagtactccacgggacaggtcagcgtggagatcgagtgggagctgcagaaggaaaacagcaaacgctggaatcccgaaattcagtacacttccaactacaacaagtctgttaatgtggactttactgtggacactaatggcgtgtattcagagcctcgccccattggcaccagatacctgactcgtaatctgtaattgcttgttaatcaataaaccgtttaattcgtttcagttgaactttggtctctgcgtatttctttcttatctagtttccatgctctagagtcctgtattagaggtcacgtgagtgttttgcgacattttgcgacaccatgtggtcacgctgggtatttaagcccgagtgagcacgcagggtctccattttgaagcgggaggtttgaacgcgcagccaccacggcggggttttacgagattgtgattaaggtccccagcgaccttgacgggcatctgcccggcatttctgacagctttgtgaactgggtggccgagaaggaatgggagttgccgccagattctgacatggatctgaatctgattgagcaggcacccctgaccgtggccgagaagctgcatcgctggcgtaatagcgaagaggcccgcaccgatcgcccttcccaacagttgcgcagcctgaatggcgaatggaattccagacgattgagcgtcaaaatgtaggtatttccatgagcgtttttcctgttgcaatggctggcggtaatattgttctggatattaccagcaaggccgatagtttgagttcttctactcaggcaagtgatgttattactaatcaaagaagtattgcgacaacggttaatttgcgtgatggacagactcttttactcggtggcctcactgattataaaaacacttctcaggattctggcgtaccgttcctgtctaaaatccctttaatcggcctcctgtttagctcccgctctgattctaacgaggaaagcacgttatacgtgctcgtcaaagcaaccatagtacgcgccctgtagcggcgcattaagcgcggcgggtgtggtggttacgcgcagcgtgaccgctacacttgccagcgccctagcgcccgctcctttcgctttcttcccttcctttctcgccacgttcgccggctttccccgtcaagctctaaatcgggggctccctttagggttccgatttagtgctttacggcacctcgaccccaaaaaacttgattagggtgatggttcacgtagtgggccatcgccctgatagacggtttttcgccctttgacgttggagtccacgttctttaatagtggactcttgttccaaactggaacaacactcaaccctatctcggtctattcttttgatttataagggattttgccgatttcggcctattggttaaaaaatgagctgatttaacaaaaatttaacgcgaattttaacaaaatattaacgtttacaatttaaatatttgcttatacaatcttcctgtttttggggcttttctgattatcaaccggggtacatatgattgacatgctagttttacgattaccgttcatcgattctcttgtttgctccagactctcaggcaatgacctgatagcctttgtagagacctctcaaaaatagctaccctctccggcatgaatttatcagctagaacggttgaatatcatattgatggtgatttgactgtctccggcctttctcacccgtttgaatctttacctacacattactcaggcattgcatttaaaatatatgagggttctaaaaatttttatccttgcgttgaaataaaggcttctcccgcaaaagtattacagggtcataatgtttttggtacaaccgatttagctttatgctctgaggctttattgcttaattttgctaattctttgccttgcctgtatgatttattggatgttggaattcctgatgcggtattttctccttacgcatctgtgcggtatttcacaccgcatatggtgcactctcagtacaatctgctctgatgccgcatagttaagccagccccgacacccgccaacacccgctgacgcgccctgacgggcttgtctgctcccggcatccgcttacagacaagctgtgaccgtctccgggagctgcatgtgtcagaggttttcaccgtcatcaccgaaacgcgcgagacgaaagggcctcgtgatacgcctatttttataggttaatgtcatgataataatggtttcttagacgtcaggtggcacttttcggggaaatgtgcgcggaacccctatttgtttatttttctaaatacattcaaatatgtatccgctcatgagacaataaccctgataaatgcttcaataatattgaaaaaggaagagtatgagtattcaacatttccgtgtcgcccttattcccttttttgcggcattttgccttcctgtttttgctcacccagaaacgctggtgaaagtaaaagatgctgaagatcagttgggtgcacgagtgggttacatcgaactggatctcaacagcggtaagatccttgagagttttcgccccgaagaacgttttccaatgatgagcacttttaaagttctgctatgtggcgcggtattatcccgtattgacgccgggcaagagcaactcggtcgccgcatacactattctcagaatgacttggttgagtactcaccagtcacagaaaagcatcttacggatggcatgacagtaagagaattatgcagtgctgccataaccatgagtgataacactgcggccaacttacttctgacaacgatcggaggaccgaaggagctaaccgcttttttgcacaacatgggggatcatgtaactcgccttgatcgttgggaaccggagctgaatgaagccataccaaacgacgagcgtgacaccacgatgcctgtagcaatggcaacaacgttgcgcaaactattaactggcgaactacttactctagcttcccggcaacaattaatagactggatggaggcggataaagttgcaggaccacttctgcgctcggcccttccggctggctggtttattgctgataaatctggagccggtgagcgtgggtctcgcggtatcattgcagcactggggccagatggtaagccctcccgtatcgtagttatctacacgacggggagtcaggcaactatggatgaacgaaatagacagatcgctgagataggtgcctcactgattaagcattggtaactgtcagaccaagtttactcatatatactttagattgatttaaaacttcatttttaatttaaaaggatctaggtgaagatcctttttgataatctcatgaccaaaatcccttaacgtgagttttcgttccactgagcgtcagaccccgtagaaaagatcaaaggatcttcttgagatcctttttttctgcgcgtaatctgctgcttgcaaacaaaaaaaccaccgctaccagcggtggtttgtttgccggatcaagagctaccaactctttttccgaaggtaactggcttcagcagagcgcagataccaaatactgtccttctagtgtagccgtagttaggccaccacttcaagaactctgtagcaccgcctacatacctcgctctgctaatcctgttaccagtggctgctgccagtggcgataagtcgtgtcttaccgggttggactcaagacgatagttaccggataaggcgcagcggtcgggctgaacggggggttcgtgcacacagcccagcttggagcgaacgacctacaccgaactgagatacctacagcgtgagctatgagaaagcgccacgcttcccgaagggagaaaggcggacaggtatccggtaagcggcagggtcggaacaggagagcgcacgagggagcttccagggggaaacgcctggtatctttatagtcctgtcgggtttcgccacctctgacttgagcgtcgatttttgtgatgctcgtcaggggggcggagcctatggaaaaacgccagcaacgcggcctttttacggttcctggccttttgctggccttttgctcacatgttctttcctgcgttatcccctgattctgtggataaccgtattaccgcctttgagtgagctgataccgctcgccgcagccgaacgaccgagcgcagcgagtcagtgagcgaggaagcggaagagcgcccaatacgcaaaccgcctctccccgcgcgttggccgattcattaatgca

SEQ ID NO: 1240 - DNA, 1085 bp, synthetic construct
  variation 611: note = a, c, g, or t
  variation 640: note = a, c, g, or t
  variation 1039: note = a, c, g, or t
  misc_feature 1..1085: note = source = /note="Description of Artificial Sequence: Synthetic polynucleotide"
  source 1..1085: mol_type = other DNA
tgcccacttacaacaaccatctctacaagcaaatctccagcvvmdcaggagctascaacgacaaccactactttggctacagcaccccttgggggtattttgactttaacagattccactgccacttctcaccacgtgactggcagcgactcattaacaacaactggggattccggcccaagaaactcagcttcaagctcttcaacatccaagttagaggggtcacgcagaacgatggcacgacgactattgccaataaccttaccagcacggttcaagtgtttacggactcggagtatcagctcccgtacgtgctcgggtcggcgcaccaaggctgtctcccgccgtttccagcggacgtcttcatggtccctcagtatggatacctcaccctgaacaacggaagtcaagcggtgggacgctcatccttttactgcctggagtacttcccttcgcagatgctaaggactggaaataacttccaattcagctataccttcgaggatgtaccttttcacagcagctacgctcacagccagagtttggatcgcttgatgaatcctcttattgatcagtatctgtactacctgaacagaacgcaargcamcvcnrgcggaacarccrvcmhsmrsvvsctgvngtttagccaggctgggcctcagtctatgtctttgcaggccagaaattggctacctgggccctgctaccggcaacagagactttcaamarycbmcrvcsrsaacaacaacagtrastttccttggmcagcggccagcamatatcatctcaatggccgcgactcgctggtgaatccaggaccagctatggccagtcacrrggacgatrmsgrsaratttttccctatgcacggcaatctaatatttggcaaasaarrcrscrvsrvarvcratrycgmsdwcgrsvrsgtaatgattacggatgaagaagagattcgtaccaccaatcctgtggcaacagagcagtatggaactgtggcaaataacttgcagrvsvvsmrsrvcvvscccacgdhtvvsrnsgtcvmscatcagggggccttacctggcatggtgtggcaagatcgt

SEQ ID NO: 1241 - protein, 620 aa, synthetic construct
  VARIANT 263..264: note = Any naturally occurring amino acid
  VARIANT 267: note = Any naturally occurring amino acid
  VARIANT 450..453: note = Any naturally occurring amino acid
  VARIANT 456..460: note = Any naturally occurring amino acid
  VARIANT 462: note = Any naturally occurring amino acid
  VARIANT 491..495: note = Any naturally occurring amino acid
  VARIANT 500: note = Any naturally occurring amino acid
  VARIANT 504: note = Any naturally occurring amino acid
  VARIANT 508: note = Any naturally occurring amino acid
  VARIANT 528: note = Any naturally occurring amino acid
  VARIANT 531..533: note = Any naturally occurring amino acid
  VARIANT 546..557: note = Any naturally occurring amino acid
  VARIANT 586..590: note = Any naturally occurring amino acid
  VARIANT 593..595: note = Any naturally occurring amino acid
  VARIANT 597: note = Any naturally occurring amino acid
  REGION 1..620: note = source = /note="Description of Artificial Sequence: Synthetic polypeptide"
MAADGYLPDWLEDNLSEGIREWWALKPGVPQPKANQQHQDNRRGLVLPGYKYLGPGNGLDKGEPVNEADAAALEHDKAYDQQLKAGDNPYLKYNHADAEFQERLQEDTSFGGNLGRAVFQAKKRILEPLGLVEEAAKTAPGKKGAVDQSPQEPDSSSGVGKSGKQPARKRLNFGQTGDSESVPDPQPLGEPPAAPTSLGSNTMASGGGAPMADNNEGADGVGNSSGNWHCDSQWLGDRVITTSTRTWALPTYNNHLYKQISSXXGAXNDNHYFGYSTPWGYFDFNRFHCHFSPRDWQRLINNNWGFRPKKLSFKLFNIQVRGVTQNDGTTTIANNLTSTVQVFTDSEYQLPYVLGSAHQGCLPPFPADVFMVPQYGYLTLNNGSQAVGRSSFYCLEYFPSQMLRTGNNFQFSYTFEDVPFHSSYAHSQSLDRLMNPLIDQYLYYLNRTQXXXXGTXXXXXLXFSQAGPQSMSLQARNWLPGPCYRQQRLSXXXXXNNNSXFPWXAASXYHLNGRDSLVNPGPAMASHXDDXXXFFPMHGNLIFGKXXXXXXXXXXXXVMITDEEEIRTTNPVATEQYGTVANNLQXXXXXPTXXXVXHQGALPGMVWQDRDVYLQGPIWA

SEQ ID NO: 1242 - DNA, 1491 bp, synthetic construct
  misc_feature 1..1491: note = source = /note="Description of Artificial Sequence: Synthetic polynucleotide"
  source 1..1491: mol_type = other DNA
accaccagcaccagaacctgggccctgcccacttacaacaaccatctctacaagcaaatctccagccaatcaggagcttcaaacgacaaccactactttggctacagcaccccttgggggtattttgactttaacagattccactgccacttctcaccacgtgactggcagcgactcattaacaacaactggggattccggcccaagaaactcagcttcaagctcttcaacatccaagttagaggggtcacgcagaacgatggcacgacgactattgccaataaccttaccagcacggttcaagtgtttacggactcggagtatcagctcccgtacgtgctcgggtcggcgcaccaaggctgtctcccgccgtttccagcggacgtcttcatggtccctcagtatggatacctcaccctgaacaacggaagtcaagcggtgggacgctcatccttttactgcctggagtacttcccttcgcagatgctaaggactggaaataacttccaattcagctataccttcgaggatgtaccttttcacagcagctacgctcacagccagagtttggatcgcttgatgaatcctcttattgatcagtatctgtactacctgaacagaacgcaaggaacaacctctggaacaaccaaccaatcacggctgctttttagccaggctgggcctcagtctatgtctttgcaggccagaaattggctacctgggccctgctaccggcaacagagactttcaaagactgctaacgacaacaacaacagtaactttccttggacagcggccagcaaatatcatctcaatggccgcgactcgctggtgaatccaggaccagctatggccagtcacaaggacgatgaagaaaaatttttccctatgcacggcaatctaatatttggcaaagaagggacaacggcaagtaacgcagaattagataatgtaatgattacggatgaagaagagattcgtaccaccaatcctgtggcaacagagcagtatggaactgtggcaaataacttgcagagctcaaatacagctcccacgactggaactgtcaatcatcagggggccttacctggcatggtgtggcaagatcgtgacgtctaccttcaaggacctatctgggcaaagattcctcacacggatggacactttcatccttctcctctgatgggaggctttggactgaaacatccgcctcctcaaatcatgatcaaaaatactccggtaccggcaaatcctccgacgactttcagcccggccaagtttgcttcatttatcactcagtactccactggacaggtcagcgtggaaattgagtgggagctacagaaagaaaacagcaaacgttggaatccagagattcagtacacttccaactacaacaagtctgttaatgtggactttactgtagacactaatggtgtttatagtgaacctcgccctattggaacccggtatctcacacgaaacttgtga

SEQ ID NO: 1243 - protein, 482 aa, synthetic construct
  REGION 1..482: note = source = /note="Description of Artificial Sequence: Synthetic polypeptide"
TTSTRTWALPTYNNHLYKQISSQSGASNDNHYFGYSTPWYFDFNRFHCHFSPRDWQRLNNNWGFRPKKLSFKLFNIQRGVTQNDGTTTIANNLTSTQVFTDSEYQLPYVLGSAHQCLPPFPADVFMVPQYGYLTNNGSQAVGRSSFYCLEYFPQMLRTGNNFQFSYTFEDVPHSSYAHSQSLDRLMNPLIDYLYYLNRTQGTTSGTTNQSLLFSQAGPQSMSLQARNWLGPCYRQQRLSKTANDNNNSFPWTAASKYHLNGRDSLVNGPAMASHKDDEEKFFPMHGLIFGKEGTTASNAELDNVMITDEEEIRTTNPVATEQYGTVANNLQSSNTAPTTGTVNHQGALPGMVWQDRDVYLQGPIWAKIPHTDGHFHPSPLMGGFGLKHPPPQIMIKNTPVPANPPTTFSPAKFASFITQYSTGQVSVEIEWELQKENSKRWNPEIQYTSNYNKSVNVDFTVDTNGVYSEPRPIGTRYLTRNL

SEQ ID NO: 1244 - DNA, 1140 bp, synthetic construct
  variation 636: note = a, c, g, or t
  variation 665: note = a, c, g, or t
  variation 1064: note = a, c, g, or t
  misc_feature 1..1140: note = source = /note="Description of Artificial Sequence: Synthetic polynucleotide"
  source 1..1140: mol_type = other DNA
accaccagcaccagaacctgggccctgcccacttacaacaaccatctctacaagcaaatctccagcvvmdcaggagctascaacgacaaccactactttggctacagcaccccttgggggtattttgactttaacagattccactgccacttctcaccacgtgactggcagcgactcattaacaacaactggggattccggcccaagaaactcagcttcaagctcttcaacatccaagttagaggggtcacgcagaacgatggcacgacgactattgccaataaccttaccagcacggttcaagtgtttacggactcggagtatcagctcccgtacgtgctcgggtcggcgcaccaaggctgtctcccgccgtttccagcggacgtcttcatggtccctcagtatggatacctcaccctgaacaacggaagtcaagcggtgggacgctcatccttttactgcctggagtacttcccttcgcagatgctaaggactggaaataacttccaattcagctataccttcgaggatgtaccttttcacagcagctacgctcacagccagagtttggatcgcttgatgaatcctcttattgatcagtatctgtactacctgaacagaacgcaargcamcvcnrgcggaacarccrvcmhsmrsvvsctgvngtttagccaggctgggcctcagtctatgtctttgcaggccagaaattggctacctgggccctgctaccggcaacagagactttcaamarycbmcrvcsrsaacaacaacagtrastttccttggmcagcggccagcamatatcatctcaatggccgcgactcgctggtgaatccaggaccagctatggccagtcacrrggacgatrmsgrsaratttttccctatgcacggcaatctaatatttggcaaasaarrcrscrvsrvarvcratrycgmsdwcgrsvrsgtaatgattacggatgaagaagagattcgtaccaccaatcctgtggcaacagagcagtatggaactgtggcaaataacttgcagrvsvvsmrsrvcvvscccacgdhtvvsrnsgtcvmscatcagggggccttacctggcatggtgtggcaagatcgtgacgtctaccttcaaggacctatctgggca

SEQ ID NO: 1245 - protein, 620 aa, synthetic construct; identical to SEQ ID NO: 1241
  VARIANT 263..264: note = Any naturally occurring amino acid
  VARIANT 267: note = Any naturally occurring amino acid
  VARIANT 450..453: note = Any naturally occurring amino acid
  VARIANT 456..460: note = Any naturally occurring amino acid
  VARIANT 462: note = Any naturally occurring amino acid
  VARIANT 491..495: note = Any naturally occurring amino acid
  VARIANT 500: note = Any naturally occurring amino acid
  VARIANT 504: note = Any naturally occurring amino acid
  VARIANT 508: note = Any naturally occurring amino acid
  VARIANT 528: note = Any naturally occurring amino acid
  VARIANT 531..533: note = Any naturally occurring amino acid
  VARIANT 546..557: note = Any naturally occurring amino acid
  VARIANT 586..590: note = Any naturally occurring amino acid
  VARIANT 593..595: note = Any naturally occurring amino acid
  VARIANT 597: note = Any naturally occurring amino acid
  REGION 1..620: note = source = /note="Description of Artificial Sequence: Synthetic polypeptide"

SEQ ID NO: 1246 - protein, 738 aa, synthetic construct; identical to SEQ ID NO: 18
  REGION 1..738: note = source = /note="Description of Artificial Sequence: Synthetic polypeptide"

SEQ ID NO: 1247 - DNA, 2258 bp, synthetic construct
  misc_feature 1..2258: note = source = /note="Description of Artificial Sequence: Synthetic polynucleotide"
  source 1..2258: mol_type = other DNA
tcgaggacaacctctctgagggcattcgcgagtggtgggacttgaaacctggagccccgaaacccaaagccaaccagcaaaagcaggacgacggccggggtctggtgcttcctggctacaagtacctcggacccttcaacggactcgacaagggggagcccgtcaacgcggcggacgcagcggccctcgagcacgacaaggcctacgaccagcagctcaaagcgggtgacaatccgtacctgcggtataaccacgccgacgccgagtttcaggagcgtctgcaagaagatacgtcttttgggggcaacctcgggcgagcagtcttccaggccaagaagcgggttctcgaacctctcggtctggttgaggaaggcgctaagacggctcctggaaagaagagaccggtagagccatcaccccagcgttctccagactcctctacgggcatcggcaagaaaggccagcagcccgcgaaaaagagactcaactttgggcagactggcgactcagagtcagtgcccgaccctcaaccaatcggagaaccccccgcaggcccctctggtctgggatctggtacaatggctgcaggcggtggcgctccaatggcagacaataacgaaggcgccgacggagtgggtagttcctcaggaaattggcattgcgattccacatggctgggcgacagagtcatcaccaccagcacccgaacctgggccctccccacctacaacaaccacctctacaagcaaatctccaacgggacttcgggaggaagcaccaacgacaacacctacttcggctacagcaccccctgggggtattttgactttaacagattccactgccacttctcaccacgtgactggcagcgactcatcaacaacaactggggattccggcccaagagactcaacttcaagctcttcaacatccaggtcaaggaggtcacgcagaatgaaggcaccaagaccatcgccaataaccttaccagcacgattcaggtctttacggactcggaataccagctcccgtacgtcctcggctctgcgcaccagggctgcctgcctccgttcccggcggacgtcttcatgattcctcagtacgggtacctgactctgaacaatggcagtcaggccgtgggccgttcctccttctactgcctggagtactttccttctcaaatgctgagaacgggcaacaactttgagttcagctaccagtttgaggacgtgccttttcacagcagctacgcgcacagccaaagcctggaccggctgatgaaccccctcatcgaccagtacctgtactacctgtctcggactcagtccacgggaggtaccgcaggaactcagcagttgctattttctcaggccgggcctaataacatgtcggctcaggccaaaaactggctacccgggccctgctaccggcagcaacgcgtctccacgacactgtcgcaaaataacaacagcaactttgcctggaccggtgccaccaagtatcatctgaatggcagagactctctggtaaatcccggtgtcgctatggcaacccacaaggacgacgaagagcgattttttccgtccagcggagtcttaatgtttgggaaacagggagctggaaaagacaacgtggactatagcagcgttatgctaaccagtgaggaagaaattaaaaccaccaacccagtggccacagaacagtacggcgtggtggccgataacctgcaacagcaaaacgccgctcctattgtaggggccgtcaacagtcaaggagccttacctggcatggtctggcagaaccgggacgtgtacctgcagggtcctatctgggccaagattcctcacacggacggaaactttcatccctcgccgctgatgggaggctttggactgaaacacccgcctcctcagatcctgattaagaatacacctgttcccgcggatcctccaactaccttcagtcaagctaagctggcgtcgttcatcacgcagtacagcaccggacaggtcagcgtggaaattgaatgggagctgcagaaagaaaacagcaaacgctggaacccagagattcaatacacttccaactactacaaatctacaaatgtggactttgctgttaacacagatggcacttattctgagcctcgccccatcggcacccgttacctcacccgtaatctgtaattgcttgttaatcaataaaccggttgattcgtttcagttgaactttggtctctgcgaagggcgaattcgttt

SEQ ID NO: 1248 - DNA, 2208 bp, synthetic construct
  misc_feature 1..2208: note = source = /note="Description of Artificial Sequence: Synthetic polynucleotide"
  source 1..2208: mol_type = other DNA
atggctgccgatggttatcttccagattggctcgaggacactctctctgaaggaataagacagtggtggaagctcaaacctggcccaccaccaccaaagcccgcagagcggcataaggacgacagcaggggtcttgtgcttcctgggtacaagtacctcggacccttcaacggactcgacaagggagagccggtcaacgaggcagacgccgcggccctcgagcacgacaaagcctacgaccggcagctcgacagcggagacaacccgtacctcaagtacaaccacgccgacgcggagtttcaggagcgccttaaagaagatacgtcttttgggggcaacctcggacgagcagtcttccaggcgaaaaagagggttcttgaacctctgggcctggttgaggaacctgttaagacggctccgggaaaaaagaggccggtagagcactctcctgtggagccagactcctcctcgggaaccggaaaggcgggccagcagcctgcaagaaaaagattgaattttggtcagactggagacgcagactcagtacctgacccccagcctctcggacagccaccagcagccccctctggtctgggaactaatacgatggctacaggcagtggcgcaccaatggcagacaataacgagggcgccgacggagtgggtaattcctcgggaaattggcattgcgattccacatggatgggcgacagagtcatcaccaccagcacccgaacctgggccctgcccacctacaacaaccacctctacaaacaaatttccagccaatcaggagcctcgaacgacaatcactactttggctacagcaccccttgggggtattttgacttcaacagattccactgccacttttcaccacgtgactggcaaagactcatcaacaacaactggggattccgacccaagagactcaacttcaagctctttaacattcaagtcaaagaggtcacgcagaatgacggtacgacgacgattgccaataaccttaccagcacggttcaggtgtttactgactcggagtaccagctcccgtacgtcctcggctcggcgcatcaaggatgcctcccgccgttcccagcagacgtcttcatggtgccacagtatggatacctcaccctgaacaacgggagtcaggcagtaggacgctcttcattttactgcctggagtactttccttctcagatgctgcgtaccggaaacaactttaccttcagctacacttttgaggacgttcctttccacagcagctacgctcacagccagagtctggaccgtctcatgaatcctctcatcgaccagtacctgtatttcttaagcagaacaaacactccaagtggaaccaccacgcagtcaaggcttcagttttctcaggccggagcgagtgacattcgggaccagtctaggaactggcttcctggaccctgttaccgccagcagcgagtatcaaagacatctgcggataacaacaacagtgaattctcgtggaccggtgctaccaagtaccacctcaatggcagagactctctggtgaatccgggcccggccatggcaagccacaaggacgatgaagaaaagttttttcctcagagcggggttctcatctttgggaagcaaggctcagagaaaacaaatgtggacattgaaaaggtcatgattacagacgaagaggaaatcaggacaaccaatcccgtggctacggagcagtatggttctgtatctaccaacctccagagaggcaacagacaagcagctaccgcagatgtcaacacacaaggcgttcttccaggcatggtctggcaggacagagatgtgtaccttcaggggcccatctgggcaaagattccacacacggacggacattttcacccctctcccctcatgggtggattcggacttaaacaccctcctccacagattctcatcaagaacaccccggtacctgcgaatccttcgaccaccttcagtgcggcaaagtttgcttccttcatcacacagtactccacgggacaggtcagcgtggagatcgagtgggagctgcagaaggaaaacagcaaacgctggaatcccgaaattcagtacacttccaactacaacaagtctgttaatgtggactttactgtggacactaatggcgtgtattcagagcctcgccccattggtaccagattcctgactcgtaatctgtaa

SEQ ID NO: 1249 - protein, 737 aa, synthetic construct
  REGION 1..737: note = source = /note="Description of Artificial Sequence: Synthetic polypeptide"
MAADGYLPDWLEDNLSEGIREWWDLKPGAPKPKANQQKQDNGRGLVLPGYKYLGPFNGLDKGEPVNAADAAALEHDKAYDQQLQAGDNPYLRYNHADAEFQERLQEDTSFGGNLGRAVFQAKKRVLEPLGLVESPVKTAPGKKRPVEPSPQRSPDSSTGIGKKGQQPAKKRLNFGQTGDSESVPDPQPIGEPPAAPSGVGPNTMAAGGGAPMADNNEGADGVGSSSGNWHCDSTWLGDRVITTSTRTWALPTYNNHLYKQISNGTSGGSTNDNTYFGYSTPWGYFDFNRFHCHFSPRDWQRLINNNWGFRPKRLNFKLFNIQVKEVTQNEGTKTIANNLTSTIQVFTDSEYQLPYVLGSAHQGCLPPFPADVFMIPQYGYLTLNNGSQAVGRSSFYCLEYFPSQMLRTGNNFEFSYNFEDVPFHSSYAHSQSLDRLMNPLIDQYLYYLSRTQSTGGTAGTQQLLFSQAGPNNMSAQAKNWLPGPCYRQQRVSTTLSQNNNSNFAWTGATKYHLNGRDSLVNPGVAMATHKDDEERFFPSSGVLMFGKQGAGKDNVDYSSVMLTSEEEIKTTNPVATEQYGWADNLQQQNAAPIVGAVNSQGALPGMVWQNRDVYLQGPIWAKIPHTDGNFHPSPLMGGFGLKHPPPQILIKNTPVPADPPTTFNQAKLASFITQYSTGQVSVEIEWELQKENSKRWNPEIQYTSNYYKSTNVDFAVNTEGTYSEPRPIGTRYLTRNL

SEQ ID NO: 1250 - DNA, 2211 bp, synthetic construct
  misc_feature 1..2211: note = source = /note="Description of Artificial Sequence: Synthetic polynucleotide"
  source 1..2211: mol_type = other DNA
atggctgccgatggttatcttccagattggctcgaggacactctctctgaaggaataagacagtggtggaagctcaaacctggcccaccaccaccaaagcccgcagagcggcataaggacgacagcaggggtcttgtgcttcctgggtacaagtacctcggacccttcaacggactcgacaagggagagccggtcaacgaggcagacgccgcggccctcgagcacgacaaagcctacgaccggcagctcgacagcggagacaacccgtacctcaagtacaaccacgccgacgcggagtttcaggagcgccttaaagaagatacgtcttttgggggcaacctcggacgagcagtcttccaggcgaaaaagagggttcttgaacctctgggcctggttgaggaacctgttaagacggctccgggaaaaaagaggccggtagagcactctcctgtggagccagactcctcctcgggaaccggaaaggcgggccagcagcctgcaagaaaaagattgaattttggtcagactggagacgcagactcagtacctgacccccagcctctcggacagccaccagcagccccctctggtctgggaactaatacgatggctacaggcagtggcgcaccaatggcagacaataacgagggcgccgacggagtgggtaattcctcgggaaattggcattgcgattccacatggatgggcgacagagtcatcaccaccagcacccgaacctgggccctgcccacctacaacaaccacctctacaaacaaatttccagcgcttcaacgggagcctcgaacgacaatcactactttggctacagcaccccttgggggtattttgacttcaacagattccactgccacttttcaccacgtgactggcaaagactcatcaacaacaactggggattccgacccaagagactcaacttcaagctctttaacattcaagtcaaagaggtcacgcagaatgacggtacgacgacgattgccaataaccttaccagcacggttcaggtgtttactgactcggagtaccagctcccgtacgtcctcggctcggcgcatcaaggatgcctcccgccgttcccagcagacgtcttcatggtgccacagtatggatacctcaccctgaacaacgggagtcaggcagtaggacgctcttcattttactgcctggagtactttccttctcagatgctgcgtaccggaaacaactttaccttcagctacacttttgaggacgttcctttccacagcagctacgctcacagccagagtctggaccgtctcatgaatcctctcatcgaccagtacctgtattacttgagcagaacaaacactccaagtggaaccaccacgcagtcaaggcttcagttttctcaggccggagcgagtgacattcgggaccagtctaggaactggcttcctggaccctgttaccgccagcagcgagtatcaaagacatctgcggataacaacaacagtgaatactcgtggactggagctaccaagtaccacctcaatggcagagactctctggtgaatccgggcccggccatggcaagccacaaggacgatgaagaaaagttttttcctcagagcggggttctcatctttgggaagcaaggctcagagaaaacaaatgtggacattgaaaaggtcatgattacagacgaagaggaaatcaggacaaccaatcccgtggctacggagcagtatggttctgtatctaccaacctccagagaggcaacagacaagcagctaccgcagatgtcaacacacaaggcgttcttccaggcatggtctggcaggacagagatgtgtaccttcaggggcccatctgggcaaagattccacacacggacggacattttcacccctctcccctcatgggtggattcggacttaaacaccctcctccacagattctcatcaagaacaccccggtacctgcgaatccttcgaccaccttcagtgcggcaaagtttgcttccttcatcacacagtactccacgggacaggtcagcgtggagatcgagtgggagctgcagaaggaaaacagcaaacgctggaatcccgaaattcagtacacttccaactacgccaagtctgtcaatgtggactttactgtggacaataatggcgtgtattcagagcctcgccccattggcaccagatacctgactcgtaatctgtaa

SEQ ID NO: 1251 - DNA, 2208 bp, synthetic construct
  misc_feature 1..2208: note = source = /note="Description of Artificial Sequence: Synthetic polynucleotide"
  source 1..2208: mol_type = other DNA
atggctgccgatggttatcttccagattggctcgaggacaacctctctgagggcattcgcgagtggtgggacttgaaacctggagccccgaagcccaaagccaaccagcaaaagcaggacgacggccggggtctggtgcttcctggctacaagtacctcggacccttcaacggactcgacaagggggagcccgtcaacgcggcggacgcagcggccctcgagcacgacaaggcctacgaccagcagctcaaagcgggtgacaatccgtacctgcggtataaccacgccgacgccgagtttcaggagcgtctgcaagaagatacgtcttttgggggcaacctcgggcgagcagtcttccaggccaagaagcgggttctcgaacctctcggtctggttgaggaaggcgctaagacggctcctggaaagaaacgtccggtagagcagtcgccacaagagccagactcctcctcgggcatcggcaagacaggccagcagcccgctaaaaagagactcaattttggtcagactggcgactcagagtcagtccccgatccacaacctctcggagaacctccagcaacccccgctgctgtgggacctactacaatggcttcaggcggtggcgcaccaatggcagacaataacgaaggcgccgacggagtgggtaatgcctcaggaaattggcattgcgattccacatggctgggcgacagagtcatcaccaccagcacccgcacctgggccttgcccacctacaataaccacctctacaagcaaatctccagtgcttcaggggccagcaacgacaaccactacttcggctacagcaccccctgggggtattttgatttcaacagattccactgccacttttcaccacgtgactggcagcgactcatcaacaacaattggggattccggcccaagagactcaacttcaaactcttcaacatccaagtcaaggaggtcacgacgaatgatggcgtcacaaccatcgctaataaccttaccagcacggttcaagtcttctcggactcggagtaccagcttccgtacgtcctcggctctgcgcaccagggctgcctccctccgttcccggcggacgtgttcatgattccgcaatacggctacctgacgctcaacaatggcagccaagccgtgggacgttcatccttttactgcctggaatatttcccttctcagatgctgagaacgggcaacaactttaccttcagctacacctttgaggaagtgcctttccacagcagctacgcgcacagccagagcctggaccggctgatgaatcctctcatcgaccaatacctgtattacctgaacagaactcaaaatcagtccggaagtgcccaaaacaaggacttgctgtttagccgtgggtctccagctggcatgtctgttcagcccaaaaactggctacctggaccctgttatcggcagcagcgcgtttctaaaacaaaaacagacaacaacaacagcaattttacctggactggtgcttcaaaatataacctcaatgggcgtgaatccatcatcaaccctggcactgctatggcctcacacaaagacgacgaagacaagttctttcccatgagcggtgtcatgatttttggaaaagagagcgccggagcttcaaacactgcattggacaatgtcatgattacagacgaagaggaaattaaagccactaaccctgtggccaccgaaagatttgggaccgtggcagtcaatttccagagcagcagcacagaccctgcgaccggagatgtgcatgctatgggagcattacctggcatggtgtggcaagatagagacgtgtacctgcagggtcccatttgggccaaaattcctcacacagatggacactttcacccgtctcctcttatgggcggctttggactcaagaacccgcctcctcagatcctcatcaaaaacacgcctgttcctgcgaatcctccggcggagttttcagctacaaagtttgcttcattcatcacccaatactccacaggacaagtgagtgtggaaattgaatgggagctgcagaaagaaaacagcaagcgctggaatcccgaagtgcagtacacatccaattatgcaaaatctgccaacgttgattttactgtggacaacaatggactttatactgagcctcgccccattggcacccgttaccttacccgtcccctgtaa

SEQ ID NO: 1252 - DNA, 2205 bp, synthetic construct
  misc_feature 1..2205: note = source = /note="Description of Artificial Sequence: Synthetic polynucleotide"
  source 1..2205: mol_type = other DNA
atggctgccgatggttatcttccagattggctcgaggacaacctctdgagggcattcgcgagtggtgggacttgaaacctggagccccgaaacccaaagccaaccagcaaaagcaggacgacggccggggtdggtgcttcctggctacaagtacctcggacccttcaacggactcgacaagggggagcccgtcaacgcggcggatgcagcggccctcgagcacgacaaggcctacgaccagcagctcaaagcgggtgacaatccgtacctgcggtataaccacgccgacgccgagtttcaggagcgtctgcaagaagatacgtcttttgggggcaacctcgggcgagcagtcttccaggccaagaagagggttctcgaaccttttggtdggttgaggaaggtgctaagacggctcctggaaagaaacgtccggtagagcagtcgccacaagagccagactcctcctcgggcattggcaagacaggccagcagcccgctaaaaagagactcaattttggtcagactggcgactcagagtcagtccccgacccacaacctctcggagaacctccagcaacccccgctgctgtgggacctactacaatggcttcaggcggtggcgcaccaatggcagacaataacgaaggcgccgacggagtgggtaatgcctcaggaaattggcattgcgattccacatggctgggcgacagagtcatcaccaccagcacccgaacatgggccttgcccacctataacaaccacctctacaagcaaatctccagtgcttcaggggccagcaacgacaaccactacttcggctacagcaccccctgggggtattttgatttcaacagattccactgccatttctcaccacgtgactggcagcgactcatcaacaacaattggggattccggcccaagagactcaacttcaagctcttcaacatccaagtcaaggaggtcacgacgaatgatggcgtcacgaccatcgctaataaccttaccagcacggttcaagtcttctcggactcggagtaccagttgccgtacgtcctcggctctgcgcaccagggctgcctccctccgttcccggcggacgtgttcatgattccgcagtacggctacctaacgctcaacaatggcagccaggcagtgggacggtcatccttttactgcctggaatatttcccatcgcagatgctgagaacgggcaataactttaccttcagctacaccttcgaggacgtgcctttccacagcagctacgcgcacagccagagcctggaccggctgatgaatcctctcatcgaccagtacctgtattacctgaacagaactcagaatcagtccggaagtgcccaaaacaaggacttgctgtttagccgggggtctccagctggcatgtctgttcagcccaaaaactggctacctggaccctgttaccggcagcagcgcgtttctaaaacaaaaacagacaacaacaacagcaactttacctggactggtgcttcaaaatataaccttaatgggcgtgaatctataatcaaccctggcactgctatggcctcacacaaagacgacaaagacaagttctttcccatgagcggtgtcatgatttttggaaaggagagcgccggagcttcaaacactgcattggacaatgtcatgatcacagacgaagaggaaatcaaagccactaaccccgtggccaccgaaagatttgggactgtggcagtcaatctccagagcagcagcacagaccctgcgaccggagatgtgcatgttatgggagccttacctggaatggtgtggcaagacagagacgtatacctgcagggtcctatttgggccaaaattcctcacacggatggacactttcacccgtctcctctcatgggcggctttggacttaagcacccgcctcctcagatcctcatcaaaaacacgcctgttcctgcgaatcctccggcagagttttcggctacaaagtttgcttcattcatcacccagtattccacaggacaagtgagcgtggagattgaatgggagctgcagaaagaaaacagcaaacgctggaatcccgaagtgcagtatacatctaactatgcaaaatctgccaacgttgatttcactgtggacaacaatggactttatactgagcctcgccccattggcacccgttacctcacccgtcccctgtaa

SEQ ID NO: 1253 - DNA, 2208 bp, synthetic construct
  misc_feature 1..2208: note = source = /note="Description of Artificial Sequence: Synthetic polynucleotide"
  source 1..2208: mol_type = other DNA
atggctgccgatggttatcttccagattggctcgaggacaacctctctgagggcattcgcgagtggtgggacttgaaacctggagccccgaaacccaaagccaaccagcaaaagcaggacgacggccggggtctggtgcttcctggctacaagtacctcggacccttcaacggactcgacaagggggagcccgtcaacgcggcggatgcagcggccctcgagcacgacaaggcctacgaccagcagctcaaagcgggtgacaatccgtacctgcggtataaccacgccgacgccgagtttcaggagcgtctgcaagaagatacgtcttttgggggcaacctcgggcgagcagtcttccaggccaagaagagggttctcgaaccttttggtctggttgaggaaggtgctaagacggctcctggaaagaaacgtccggtagagcagtcgccacaagagccagactcctcctcgggcattggcaagacaggccagcagcccgctaaaaagagactcaattttggtcagactggcgactcagagtcagtccccgacccacaacctctcggagaacctccagcaacccccgctgctgtgggacctactacaatggcttcaggcggtggcgcaccaatggcagacaataacgaaggcgccgacggagtgggtaatgcctcaggaaattggcattgcgattccacatggctgggcgacagagtcatcaccaccagcacccgaacatgggccttgcccacctataacaaccacctctacaagcaaatctccagtgcttcaggggccagcaacgacaaccactacttcggctacagcaccccctgggggtattttgatttcaacagattccactgccatttctcaccacgtgactggcagcgactcatcaacaacaattggggattccggcccaagagactcaacttcaagctcttcaacatccaagtcaaggaggtcacgacgaatgatggcgtcacgaccatcgctaataaccttaccagcacggttcaagtcttctcggactcggagtaccagttgccgtacgtcctcggctctgcgcaccagggctgcctccctccgttcccggcggacgtgttcatgattccgcagtacggctacctaacgctcaacaatggcagccaggcagtgggacggtcatccttttactgcctggaatatttcccatcgcagatgctgagaacgggcaataactttaccttcagctacaccttcgaggacgtgcctttccacagcagctacgcgcacagccagagcctggaccggctgatgaatcctctcatcgaccagtacctgtattacctgaacagaactcagaatcagtccggaagtgcccaaaacaaggacttgctgtttagccgggggtctccagctggcatgtctgttcagcccaaaaactggctacctggaccctgttaccggcagcagcgcgtttctaaaacaaaaacagacaacaacaacagcaactttacctggactggtgcttcaaaatataaccttaatgggcgtgaatctataatcaaccctggcactgctatggcctcacacaaagacgacgaagacaagttctttcccatgagcggtgtcatgatttttggaaaggagagcgccggagcttcaaacactgcattggacaatgtcatgatcacagacgaagaggaaatcaaagccactaaccccgtggccaccgaaagatttgggactgtggcagtcaatctccagagcagcagcacagaccctgcgaccggagatgtgcatgttatgggagccttacctggaatggtgtggcaagacagagacgtatacctgcagggtcctatttgggccaaaattcctcacacggatggacactttcacccgtctcctctcatgggcggctttggacttaagcacccgcctcctcagatcctcatcaaaaacacgcctgttcctgcgaatcctccggcagagttttcggctacaaagtttgcttcattcatcacccagtattccacaggacaagtgagcgtggagattgaatgggagctgcagaaagaaaacagcaaacgctggaatcccgaagtgcagtatacatctaactatgcaaaatctgccaacgttgatttcactgtggacaacaatggactttatactgagcctcgccccattggcacccgttacctcacccgtcccctgtaa

SEQ ID NO: 1254 - DNA, 2208 bp, synthetic construct
  misc_feature 1..2208: note = source = /note="Description of Artificial Sequence: Synthetic polynucleotide"
  source 1..2208: mol_type = other DNA
atggctgccgatggttatcttccagattggctcgaggacactctctctgaaggaataagacagtggtggaagctcaaacctggcccaccaccaccaaagcccgcagagcggcataaggacgacagcaggggtcttgtgcttcctgggtacaagtacctcggacccttcaacggactcgacaagggagagccggtcaacgaggcagacgccgcggccctcgagcacgacaaagcctacgaccggcagctcgacagcggagacaacccgtacctcaagtacaaccacgccgacgcggagtttcaggagcgccttaaagaagatacgtcttttgggggcaacctcggacgagcagtcttccaggcgaaaaagagggttcttgaacctctgggcctggttgaggaacctgttaagacggctccgggaaaaaagaggccggtagagcactctcctgtggagccagactcctcctcgggaaccggaaaggcgggccagcagcctgcaagaaaaagattgaattttggtcagactggagacgcagactcagtacctgacccccagcctctcggacagccaccagcagccccctctggtctgggaactaatacgatggctacaggcagtggcgcaccaatggcagacaataacgagggcgccgacggagtgggtaattcctcgggaaattggcattgcgattccacatggatgggcgacagagtcatcaccaccagcacccgaacctgggccctgcccacctacaacaaccacctctacaaacaaatttccagccaatcaggagcctcgaacgacaatcactactttggctacagcaccccttgggggtattttgacttcaacagattccactgccacttttcaccacgtgactggcaaagactcatcaacaacaactggggattccgacccaagagactcaacttcaagctctttaacattcaagtcaaagaggtcacgcagaatgacggtacgacgacgattgccaataaccttaccagcacggttcaggtgtttactgactcggagtaccagctcccgtacgtcctcggctcggcgcatcaaggatgcctcccgccgttcccagcagacgtcttcatggtgccacagtatggatacctcaccctgaacaacgggagtcaggcagtaggacgctcttcattttactgcctggagtactttccttctcagatgctgcgtaccggaaacaactttaccttcagctacacttttgaggacgttcctttccacagcagctacgctcacagccagagtctggaccgtctcatgaatcctctcatcgaccagtacctgtattacttgagcagaacaaacactccaagtggaaccaccacgcagtcaaggcttcagttttctgtggccggacccagtaacatggctgtccagggaaggaactggcttcctggaccctgttaccgccagcagcgagtatcaaagacatctgcggataacaacaacagtgaatttgcttggactggagctaccaagtaccacctcaatggcagagactctctggtgaatccgggcccggccatggcaagccacaaggacgatgaagaaaagttttttcctcagagcggggttctcatctttgggaagcaaggctcagagaaaacaaatgtggacattgaaaaggtcatgattacagacgaagaggaaatcaggacaaccaatcccgtggctacggagcagtatggttctgtatctaccaacctccagcaacagaacacagcaccagctaccgcagatgtcaacacacaaggcgttcttccaggcatggtctggcaggacagagatgtgtaccttcaggggcccatctgggcaaagattccacacacggacggacattttcacccctctcccctcatgggtggattcggacttaaacaccctcctccacagattctcatcaagaacaccccggtacctgcgaatccttcgaccaccttcagtgcggcaaagtttgcttccttcatcacacagtactccacgggacaggtcagcgtggagatcgagtgggagctgcagaaggaaaacagcaaacgctggaatcccgaaattcagtacacttccaactacaacaagtctgttaatgtggactttactgtggacactaatggcgtgtattcagagcctcgccccattggcaccagatacctgactcgtaatctgtaa

SEQ ID NO: 1255 - protein, 735 aa, synthetic construct
  REGION 1..735: note = source = /note="Description of Artificial Sequence: Synthetic polypeptide"
MAADGYLPDWLEDTLSEGIRQWWKLKPGPPPPKPAERHKDDSRGLVLPGYKYLGPFNGLDKGEPVNEADAAALEHDKAYDRQLDSGDNPYLKYNHADAEFQERLKEDTSFGGNLGRAVFQAKKRVLEPLGLVEEPVKTAPGKKRPVEHSPVEPDSSSGTGKAGQQPARKRLNFGQTGDADSVPDPQPLGQPPAAPSGLGTNTMATGSGAPMADNNEGADGVGNSSGNWHCDSTWMGDRVITTSTRTWALPTYNNHLYKQISSQSGASNDNHYFGYSTPWGYFDFNRFHCHFSPRDWQRLINNNWGFRPKRLNFKLFNIQVKEVTQNDGTTTIANNLTSTVQVFTDSEYQLPYVLGSAHQGCLPPFPADVFMVPQYGYLTLNNGSQAVGRSSFYCLEYFPSQMLRTGNNFTFSYTFEDVPFHSSYAHSQSLDRLMNPLIDQYLYYLSRTNTPSGTTTQSRLQFSVAGPSNMAVQGRNWLPGPCYRQQRVSKTSADNNNSEFAWTGATKYHLNGRDSLVNPGPAMASHKDDEEKFFPQSGVLIFGKQGSEKTNVDIEKVMITDEEEIRTTNPVATEQYGSVSTNLQQQNTAPATADVNTQGVLPGMVWQDRDVYLQGPIWAKIPHTDGHFHPSPLMGGFGLKHPPPQILIKNTPVPANPSTTFSAAKFASFITQYSTGQVSVEIEWELQKENSKRWNPEIQYTSNYNKSVNVDFTVDTNGVYSEPRPIGTRYLTRNL

SEQ ID NO: 1256 - DNA, 2208 bp, synthetic construct
  misc_feature 1..2208: note = source = /note="Description of Artificial Sequence: Synthetic polynucleotide"
  source 1..2208: mol_type = other DNA
atggctgccgatggttatcttccagattggctcgaggacactctctctgaaggaataagacagtggtggaagctcaaacctggcccaccaccaccaaagcccgcagagcggcataaggacgacagcaggggtcttgtgcttcctgggtacaagtacctcggacccttcaacggactcgacaagggagagccggtcaacgaggcagacgccgcggccctcgagcacgacaaagcctacgaccggcagctcgacagcggagacaacccgtacctcaagtacaaccacgccgacgcggagtttcaggagcgccttaaagaagatacgtcttttgggggcaacctcggacgagcagtcttccaggcgaaaaagaggattcttgaacctctgggcctggttgaggaacctgttaagacggctccgggaaaaaagaggccggtagagcactctcctgcggagccagactcctcctcgggaaccggaaagtcgggccagcagcctgcaagaaaaagattgaattttggtcagactggagacgcagactcagtacctgacccccagcctctcggacagccaccagcagccccctctggtctgggaactaatacgatggcttcaggcagtggcgcaccaatggcagacaataacgagggcgccgacggagtgggtaattcctcgggaaattggcattgcgattccacatggatgggcgacagagtcatcaccaccagcacccgaacctgggccctgcccacctacaacaaccacctctacaaacaaatttccagccaatcaggagcctcgaacgacaatcactactttggctacagcaccccttgggggtattttgacttcaacagattccactgccacttttcaccacgtgactggcaaagactcatcaacaacaactggggattccgacccaagagactcagcttcaagctctttaacattcaagtcaaagaggtcacgcagaatgacggtacgacgacgattgccaataaccttaccagcacggttcaggtgtttactgactcggagtaccagctcccgtacgtcctcggctcggcgcatcaaggatgcctcccgccgttcccagcagacgtcttcatggtgccacagtatggatacctcaccctgaacaacgggagtcaggcagtaggacgctcttcattttactgcctggagtactttccttctcagatgctgcgtaccggaaacaactttaccttcagctacacttttgaggacgttcctttccacagcagctacgctcacagccagagtctggaccgtctcatgaatcctctcatcgaccagtacctgtattacttgagcagaacaaacactccaagtggaaccaccacgatgtcaaggcttcagttttctcaggccggagcgagtgacattcgggaccagtctaggaactggcttcctggaccctgttaccgccagcagcgagtatcaaagacagctgcggataacaacaacagtgattactcgtggactggagctaccaagtaccacctcaatggcagagactctctggtgaatccgggcccggccatggcaagccacaaggacgatgaagaaaagtattttcctcagagcggggttctcatctttgggaagcaagactcaggaaaaacaaatgtggacattgaaaaggtcatgattacagacgaagaggaaatcaggacaaccaatcccgtggctacggagcagtatggttctgtatctaccaacctccagagcggcaacacacaagcagctacctcagatgtcaacacacaaggcgttcttccaggcatggtctggcaggacagagatgtgtaccttcaggggcccatctgggcaaagattccacacacggacggacattttcacccctctcccctcatgggtggattcggacttaaacaccctcctccacagattctcatcaagaacaccccggtacctgcgaatccttcgaccaccttcagtgcggcaaagtttgcttccttcatcacacagtactccacgggacaggtcagcgtggagatcgagtgggagctgcagaaggaaaacagcaaacgctggaatcccgaaattcagtacacttccaactacaacaagtctgttaatgtggactttactgtggacactaatggcgtgtattcagagcctcgccccattggcaccagatacctgactcgtaatctgtaa

SEQ ID NO: 1257 - DNA, 2208 bp, synthetic construct
  misc_feature 1..2208: note = source = /note="Description of Artificial Sequence: Synthetic polynucleotide"
  source 1..2208: mol_type = other DNA
atggctgccgatggttatcttccagattggctcgaggacactctctctgaaggaataagacagtggtggaagctcaaacctggcccaccaccaccaaagcccgcagagcggcataaggacgacagcaggggtcttgtgcttcctgggtacaagtacctcggacccttcaacggactcgacaagggagagccggtcaacgaggcagacgccgcggccctcgagcacgacaaagcctacgaccggcagctcgacagcggagacaacccgtacctcaagtacaaccacgccgacgcggagtttcaggagcgccttaaagaagatacgtcttttgggggcaacctcggacgagcagtcttccaggcgaaaaagaggattcttgaacctctgggcctggttgaggaacctgttaagacggctccgggaaaaaagaggccggtagagcactctcctgcggagccagactcctcctcgggaaccggaaagtcgggccagcagcctgcaagaaaaagattgaattttggtcagactggagacgcagactcagtacctgacccccagcctctcggacagccaccagcagccccctctggtctgggaactaatacgatggcttcaggcagtggcgcaccaatggcagacaataacgagggcgccgacggagtgggtaattcctcgggaaattggcattgcgattccacatggatgggcgacagagtcatcaccaccagcacccgaacctgggccctgcccacctacaacaaccacctctacaaacaaatttccagccaatcaggagcctcgaacgacaatcactactttggctacagcaccccttgggggtattttgacttcaacagattccactgccacttttcaccacgtgactggcaaagactcatcaacaacaactggggattccgacccaagagactcaacttcaagctctttaacattcaagtcaaagaggtcacgcagaatgacggtacgacgacgattgccaataaccttaccagcacggttcaggtgtttactgactcggagtaccagctcccgtacgtcctcggctcggcgcatcaaggatgcctcccgccgttcccagcagacgtcttcatggtgccacagtatggatacctcaccctgaacaacgggagtcaggcagtaggacgctcttcattttactgcctggagtactttccttctcagatgctgcgtaccggaaacaactttaccttcagctacacttttgaggacgttcctttccacagcagctacgctcacagccagagtctggaccgtctcatgaatcctctcatcgaccagtacctgtattacttgagcagaacaaacactccaagtggaaccaccacgatgtcaaggcttcagttttctcaggccggagcgagtgacattcgggaccagtctaggaactggcttcctggaccctgttaccgccagcagcgagtatcaaagacagctgcggataacaacaacagtgattactcgtggactggagctaccaagtaccacctcaatggcagagactctctggtgaatccgggcccggccatggcaagccacaaggacgatgaagaaaagtattttcctcagagcggggttctcatctttgggaagcaagactcaggaaaaacaaatgtggacattgaaaaggtcatgattacagacgaagaggaaatcaggacaaccaatcccgtggctacggagcagtatggttctgtatctaccaacctccagagcggcaacacacaagcagctacctcagatgtcaacacacaaggcgttcttccaggcatggtctggcaggacagagatgtgtaccttcaggggcccatctgggcaaagattccacacacggacggacattttcacccctctcccctcatgggtggattcggacttaaacaccctcctccacagattctcatcaagaacaccccggtacctgcgaatccttcgaccaccttcagtgcggcaaagtttgcttccttcatcacacagtactccacgggacaggtcagcgtggagatcgagtgggagctgcagaaggaaaacagcaaacgctggaatcccgaaattcagtacacttccaactacaacaagtctgttaatgtggactttactgtggacactaatggcgtgtattcagagcctcgccccattggcaccagatacctgactcgtaatctgtaa

SEQ ID NO: 1258 - protein, 735 aa, synthetic construct
  REGION 1..735: note = source = /note="Description of Artificial Sequence: Synthetic polypeptide"
MAADGYLPDWLEDTLSEGIRQWWKLKPGPPPPKPAERHKDDSRGLVLPGYKYLGPFNGLDKGEPVNEADAAALEHDKAYDRQLDSGDNPYLKYNHADAEFQERLKEDTSFGGNLGRAVFQAKKRILEPLGLVEEPVKTAPGKKRPVEHSPAEPDSSSGTGKSGQQPARKRLNFGQTGDADSVPDPQPLGQPPAAPSGLGTNTMASGSGAPMADNNEGADGVGNSSGNWHCDSTWMGDRVITTSTRTWALPTYNNHLYKQISSQSGASNDNHYFGYSTPWGYFDFNRFHCHFSPRDWQRLINNNWGFRPKRLNFKLFNIQVKEVTQNDGTTTIANNLTSTVQVFTDSEYQLPYVLGSAHQGCLPPFPADVFMVPQYGYLTLNNGSQAVGRSSFYCLEYFPSQMLRTGNNFTFSYTFEDVPFHSSYAHSQSLDRLMNPLIDQYLYYLSRTNTPSGTTTMSRLQFSQAGASDIRDQSRNWLPGPCYRQQRVSKTAADNNNSDYSWTGATKYHLNGRDSLVNPGPAMASHKDDEEKYFPQSGVLIFGKQDSGKTNVDIEKVMITDEEEIRTTNPVATEQYGSVSTNLQSGNTQAATSDVNTQGVLPGMVWQDRDVYLQGPIWAKIPHTDGHFHPSPLMGGFGLKHPPPQILIKNTPVPANPSTTFSAAKFASFITQYSTGQVSVEIEWELQKENSKRWNPEIQYTSNYNKSVNVDFTVDTNGVYSEPRPIGTRYLTRNL

SEQ ID NO: 1259 - protein, 736 aa, synthetic construct
  REGION 1..736: note = source = /note="Description of Artificial Sequence: Synthetic polypeptide"
MAADGYLPDWLEDNLSEGIREWWDLKPGAPKPKANQQKQDDGRGLVLPGYKYLGPFNGLDKGEPVNAADAAALEHDKAYDQQLKAGDNPYLRYNHADAEFQERLQEDTSFGGNLGRAVFQAKKRVLEPFGLVEEGAKTAPGKKRPVEQSPQEPDSSSGIGKTGQQPAKKRLNFGQTGDSESVPDPQPLGEPPATPAAVGPTTMASGGGAPMADNNEGADGVGNASGNWHCDSTWLGDRVITTSTRTWALPTYNNHLYKQISSASTGASNDNHYFGYSTPWGYFDFNRFHCHFSPRDWQRLINNNWGFRPKRLNFKLFNIQVKEVTTNDGVTTIANNLTSTVQVFSDSEYQLPYVLGSAHQGCLPPFPADVFMIPQYGYLTLNNGSQAVGRSSFYCLEYFPSQMLRTGNNFTFSYTFEDVPFHSSYAHSQSLDRLMNPLIDQYLYFLNRTQNQSGSAQNKDLLFSRGSPAGMSVQPKNWLPGPCYRQQRVSKTKTDNNNSNFTWTGASKYNLNGRESIINPGTAMASHKDDKDKFFPMSGVMIFGKESAGASNTALDNVMITDEEEIKATNPVATERFGTVAVNLQSSSTDPATGDVHVMGALPGMVWQDRDVYLQGPIWAKIPHTDGHFHPSPLMGGFGLKHPPPQILIKNTPVPANPPAEFSATKFASFITQYSTGQVSVEIEWELQKENSKRWNPEVQYTSNYAKSANVDFTVDNNGLYTEPRPIGTRYLTRPL

SEQ ID NO: 1260 - protein, 747 aa, synthetic construct
  REGION 1..747: note = source = /note="Description of Artificial Sequence: Synthetic polypeptide"
MAADGYLPDWLEDTLSEGIRQWWKLKPGPPPPKPAERHKDDSRGLVLPGYKYLGPFNGLDKGEPVNEADAAALEHDKAYDRQLDSGDNPYLKYNHADAEFQERLKEDTSFGGNLGRAVFQAKKRVLEPLGLVEEPVKTAPGKKRPVEHSPVEPDSSSGTGKAGQQPARKRLNFGQTGDADSVPDPQPLGQPPAAPSGLGTNTMATGSGAPMADNNEGADGVGNSSGNWHCDSTWMGDRVITTSTRTWALPTYNNHLYKQISSQSGASNDNHYFGYSTPWGYFDFNRFHCHFSPRDWQRLINNNWGFRPKRLNFKLFNIQVKEVTQNDGTTTIANNLTSTVQVFTDSEYQLPYVLGSAHQGCLPPFPADVFMVPQYGYLTLNNGSQAVGRSSFYCLEYFPSQMLRTGNNFTFSYTFEDVPFHSSYAHSQSLDRLMNPLIDQYLYYLSRTNTPSGTTTQSRLQFSQAGASDIRDQSRNWLPGPCYRQQRVSKTSADNNNSEYSWTGATKYHLNGRDSLVNPGPAMASHKDDEEKFFPQSGVLIFGKQGSEKTNVDIEKVMITDEEEIRTTNPVATEQYGSVSTNLQRGNAAAGSTPPPMAARQAATADVNTQGVLPGMVWQDRDVYLQGPIWAKIPHTDGHFHPSPLMGGFGLKHPPPQILIKNTPVPANPSTTFSAAKFASFITQYSTGQVSVEIEWELQKENSKRWNPEIQYTSNYNKSVNVDFTVDTNGVYSEPRPIGTRYLTRNL

SEQ ID NO: 1261 - protein, 747 aa, synthetic construct
  REGION 1..747: note = source = /note="Description of Artificial Sequence: Synthetic polypeptide"
MAADGYLPDWLEDTLSEGIRQWWKLKPGPPPPKPAERHKDDSRGLVLPGYKYLGPFNGLDKGEPVNEADAAALEHDKAYDRQLDSGDNPYLKYNHADAEFQERLKEDTSFGGNLGRAVFQAKKRVLEPLGLVEEPVKTAPGKKRPVEHSPVEPDSSSGTGKAGQQPARKRLNFGQTGDADSVPDPQPLGQPPAAPSGLGTNTMATGSGAPMADNNEGADGVGNSSGNWHCDSTWMGDRVITTSTRTWALPTYNNHLYKQISSQSGASNDNHYFGYSTPWGYFDFNRFHCHFSPRDWQRLINNNWGFRPKRLNFKLFNIQVKEVTQNDGTTTIANNLTSTVQVFTDSEYQLPYVLGSAHQGCLPPFPADVFMVPQYGYLTLNNGSQAVGRSSFYCLEYFPSQMLRTGNNFTFSYTFEDVPFHSSYAHSQSLDRLMNPLIDQYLYYLSRTNTPSGTTTQSRLQFSQAGASDIRDQSRNWLPGPCYRQQRVSKTSADNNNSEYSWTGATKYHLNGRDSLVNPGPAMASHKDDEEKFFPQSGVLIFGKQGSEKTNVDIEKVMITDEEEIRTTNPVATEQYGSVSTNLQRGNAAAGETRAPLAARQAATADVNTQGVLPGMVWQDRDVYLQGPIWAKIPHTDGHFHPSPLMGGFGLKHPPPQILIKNTPVPANPSTTFSAAKFASFITQYSTGQVSVEIEWELQKENSKRWNPEIQYTSNYNKSVNVDFTVDTNGVYSEPRPIGTRYLTRNL

SEQ ID NO: 1262 - protein, 7 aa, synthetic construct
  REGION 1..7: note = source = /note="Description of Artificial Sequence: Synthetic peptide"
TLAVPFK

SEQ ID NO: 1263 - protein, 7 aa, synthetic construct
  REGION 1..7: note = source = /note="Description of Artificial Sequence: Synthetic peptide"
KFPVALT

SEQ ID NO: 1264 - protein, 6 aa, synthetic construct
  REGION 1..6: note = source = /note="Description of Artificial Sequence: Synthetic peptide"
LAVPFK

SEQ ID NO: 1265 - protein, 5 aa, synthetic construct
  REGION 1..5: note = source = /note="Description of Artificial Sequence: Synthetic peptide"
AVPFK

SEQ ID NO: 1266 - protein, 4 aa, synthetic construct
  REGION 1..4: note = source = /note="Description of Artificial Sequence: Synthetic peptide"
VPFK

SEQ ID NO: 1267 - protein, 6 aa, synthetic construct
  REGION 1..6: note = source = /note="Description of Artificial Sequence: Synthetic peptide"
TLAVPF

SEQ ID NO: 1268 - protein, 5 aa, synthetic construct
  REGION 1..5: note = source = /note="Description of Artificial Sequence: Synthetic peptide"
TLAVP

SEQ ID NO: 1269 - protein, 4 aa, synthetic construct
  REGION 1..4: note = source = /note="Description of Artificial Sequence: Synthetic peptide"
TLAV

SEQ ID NO: 1270 - protein, 7 aa, synthetic construct
  REGION 1..7: note = source = /note="Description of Artificial Sequence: Synthetic peptide"
SVSKPFL

SEQ ID NO: 1271 - protein, 7 aa, synthetic construct
  REGION 1..7: note = source = /note="Description of Artificial Sequence: Synthetic peptide"
FTLTTPK

SEQ ID NO: 1272 - protein, 7 aa, synthetic construct
  REGION 1..7: note = source = /note="Description of Artificial Sequence: Synthetic peptide"
MNATKNV

SEQ ID NO: 1273 - protein, 7 aa, synthetic construct
  REGION 1..7: note = source = /note="Description of Artificial Sequence: Synthetic peptide"
QSSQTPR

SEQ ID NO: 1274 - protein, 7 aa, synthetic construct
  REGION 1..7: note = source = /note="Description of Artificial Sequence: Synthetic peptide"
ILGTGTS

SEQ ID NO: 1275 - protein, 7 aa, synthetic construct
  REGION 1..7: note = source = /note="Description of Artificial Sequence: Synthetic peptide"
TRTNPEA

SEQ ID NO: 1276 - protein, 7 aa, synthetic construct
  REGION 1..7: note = source = /note="Description of Artificial Sequence: Synthetic peptide"
NGGTSSS

SEQ ID NO: 1277 - protein, 7 aa, synthetic construct
  REGION 1..7: note = source = /note="Description of Artificial Sequence: Synthetic peptide"
YTLSQGW

SEQ ID NO: 1278 - DNA, 21 bp, synthetic construct
  misc_feature 1..21: note = source = /note="Description of Artificial Sequence: Synthetic oligonucleotide"
  source 1..21: mol_type = other DNA
aagtttcctgtggcgttgact

SEQ ID NO: 1279 - DNA, 21 bp, synthetic construct
  misc_feature 1..21: note = source = /note="Description of Artificial Sequence: Synthetic oligonucleotide"
  source 1..21: mol_type = other DNA
actttggcggtgccttttaag

SEQ ID NO: 1280 - DNA, 21 bp, synthetic construct
  misc_feature 1..21: note = source = /note="Description of Artificial Sequence: Synthetic oligonucleotide"
  source 1..21: mol_type = other DNA
agtgtgagtaagccttttttg

SEQ ID NO: 1281 - DNA, 21 bp, synthetic construct
  misc_feature 1..21: note = source = /note="Description of Artificial Sequence: Synthetic oligonucleotide"
  source 1..21: mol_type = other DNA
tttacgttgacgacgcctaag

SEQ ID NO: 1282 - DNA, 21 bp, synthetic construct
  misc_feature 1..21: note = source = /note="Description of Artificial Sequence: Synthetic oligonucleotide"
  source 1..21: mol_type = other DNA
atgaatgctacgaagaatgtg

SEQ ID NO: 1283 - DNA, 21 bp, synthetic construct
  misc_feature 1..21: note = source = /note="Description of Artificial Sequence: Synthetic oligonucleotide"
  source 1..21: mol_type = other DNA
cagtcgtcgcagacgcctagg

SEQ ID NO: 1284 - DNA, 21 bp, synthetic construct
  misc_feature 1..21: note = source = /note="Description of Artificial Sequence: Synthetic oligonucleotide"
  source 1..21: mol_type = other DNA
attctggggactggtacttcg

SEQ ID NO: 1285 - DNA, 21 bp, synthetic construct
  misc_feature 1..21: note = source = /note="Description of Artificial Sequence: Synthetic oligonucleotide"
  source 1..21: mol_type = other DNA
acgcggactaatcctgaggct

SEQ ID NO: 1286 - DNA, 21 bp, synthetic construct
  misc_feature 1..21: note = source = /note="Description of Artificial Sequence: Synthetic oligonucleotide"
  source 1..21: mol_type = other DNA
aatggggggactagtagttct

SEQ ID NO: 1287 - DNA, 21 bp, synthetic construct
  misc_feature 1..21: note = source = /note="Description of Artificial Sequence: Synthetic oligonucleotide"
  source 1..21: mol_type = other DNA
tatactttgtcgcagggttgg

SEQ ID NO: 1288 - protein, 11 aa, synthetic construct
  REGION 1..11: note = source = /note="Description of Artificial Sequence: Synthetic peptide"
AQTLAVPFKAQ

SEQ ID NO: 1289 - protein, 11 aa, synthetic construct
  REGION 1..11: note = source = /note="Description of Artificial Sequence: Synthetic peptide"
AQSVSKPFLAQ

SEQ ID NO: 1290 - protein, 11 aa, synthetic construct
  REGION 1..11: note = source = /note="Description of Artificial Sequence: Synthetic peptide"
AQFTLTTPKAQ

SEQ ID NO: 1291 - protein, 11 aa, synthetic construct
  REGION 1..11: note = source = /note="Description of Artificial Sequence: Synthetic peptide"
DGTLAVPFKAQ

SEQ ID NO: 1292 - protein, 11 aa, synthetic construct
  REGION 1..11: note = source = /note="Description of Artificial Sequence: Synthetic peptide"
ESTLAVPFKAQ

SEQ ID NO: 1293 - protein, 11 aa, synthetic construct
  REGION 1..11: note = source = /note="Description of Artificial Sequence: Synthetic peptide"
GGTLAVPFKAQ

SEQ ID NO: 1294 - protein, 11 aa, synthetic construct
  REGION 1..11: note = source = /note="Description of Artificial Sequence: Synthetic peptide"
AQTLATPFKAQ

SEQ ID NO: 1295 - protein, 11 aa, synthetic construct
  REGION 1..11: note = source = /note="Description of Artificial Sequence: Synthetic peptide"
ATTLATPFKAQ

SEQ ID NO: 1296 - protein, 11 aa, synthetic construct
  REGION 1..11: note = source = /note="Description of Artificial Sequence: Synthetic peptide"
DGTLATPFKAQ

SEQ ID NO: 1297 - protein, 11 aa, synthetic construct
  REGION 1..11: note = source = /note="Description of Artificial Sequence: Synthetic peptide"
GGTLATPFKAQ

SEQ ID NO: 1298 - protein, 11 aa, synthetic construct
  REGION 1..11: note = source = /note="Description of Artificial Sequence: Synthetic peptide"
SGSLAVPFKAQ

SEQ ID NO: 1299 - protein, 11 aa, synthetic construct
  REGION 1..11: note = source = /note="Description of Artificial Sequence: Synthetic peptide"
AQTLAQPFKAQ

SEQ ID NO: 1300 - protein, 11 aa, synthetic construct
  REGION 1..11: note = source = /note="Description of Artificial Sequence: Synthetic peptide"
AQTLQQPFKAQ

SEQ ID NO: 1301 - protein, 11 aa, synthetic construct
  REGION 1..11: note = source = /note="Description of Artificial Sequence: Synthetic peptide"
AQTLSNPFKAQ

SEQ ID NO: 1302 - protein, 11 aa, synthetic construct
  REGION 1..11: note = source = /note="Description of Artificial Sequence: Synthetic peptide"
AQTLAVPFSNP

SEQ ID NO: 1303 - protein, 11 aa, synthetic construct
  REGION 1..11: note = source = /note="Description of Artificial Sequence: Synthetic peptide"
QGTLAVPFKAQ

SEQ ID NO: 1304 - protein, 11 aa, synthetic construct
  REGION 1..11: note = source = /note="Description of Artificial Sequence: Synthetic peptide"
NQTLAVPFKAQ

SEQ ID NO: 1305 - protein, 11 aa, synthetic construct
  REGION 1..11: note = source = /note="Description of Artificial Sequence: Synthetic peptide"
EGSLAVPFKAQ

SEQ ID NO: 1306 - protein, 11 aa, synthetic construct
  REGION 1..11: note = source = /note="Description of Artificial Sequence: Synthetic peptide"
SGNLAVPFKAQ

SEQ ID NO: 1307 - protein, 11 aa, synthetic construct
  REGION 1..11: note = source = /note="Description of Artificial Sequence: Synthetic peptide"
EGTLAVPFKAQ

SEQ ID NO: 1308 - protein, 11 aa, synthetic construct
  REGION 1..11: note = source = /note="Description of Artificial Sequence: Synthetic peptide"
DSTLAVPFKAQ

SEQ ID NO: 1309 - protein, 11 aa, synthetic construct
  REGION 1..11: note = source = /note="Description of Artificial Sequence: Synthetic peptide"
AVTLAVPFKAQ

SEQ ID NO: 1310 - protein, 11 aa, synthetic construct
  REGION 1..11: note = source = /note="Description of Artificial Sequence: Synthetic peptide"
AQTLSTPFKAQ

SEQ ID NO: 1311 - protein, 11 aa, synthetic construct
  REGION 1..11: note = source = /note="Description of Artificial Sequence: Synthetic peptide"
AQTLPQPFKAQ

SEQ ID NO: 1312 - protein, 11 aa, synthetic construct
  REGION 1..11: note = source = /note="Description of Artificial Sequence: Synthetic peptide"
AQTLSQPFKAQ

SEQ ID NO: 1313 - protein, 11 aa, synthetic construct
  REGION 1..11: note = source = /note="Description of Artificial Sequence: Synthetic peptide"
AQTLQLPFKAQ

SEQ ID NO: 1314 - protein, 11 aa, synthetic construct
  REGION 1..11: note = source = /note="Description of Artificial Sequence: Synthetic peptide"
AQTLTMPFKAQ

SEQ ID NO: 1315 - protein, 11 aa, synthetic construct
  REGION 1..11: note = source = /note="Description of Artificial Sequence: Synthetic peptide"
AQTLTTPFKAQ

SEQ ID NO: 1316 - protein, 11 aa, synthetic construct
  REGION 1..11: note = source = /note="Description of Artificial Sequence: Synthetic peptide"
AQYTLSQGWAQ

SEQ ID NO: 1317 - protein, 11 aa, synthetic construct
  REGION 1..11: note = source = /note="Description of Artificial Sequence: Synthetic peptide"
AQMNATKNVAQ

SEQ ID NO: 1318 - protein, 11 aa, synthetic construct
  REGION 1..11: note = source = /note="Description of Artificial Sequence: Synthetic peptide"
AQVSGGHHSAQ

SEQ ID NO: 1319 - protein, 11 aa, synthetic construct
  REGION 1..11: note = source = /note="Description of Artificial Sequence: Synthetic peptide"
AQTLTAPFKAQ

SEQ ID NO: 1320 - protein, 11 aa, synthetic construct
  REGION 1..11: note = source = /note="Description of Artificial Sequence: Synthetic peptide"
AQTLSKPFKAQ

SEQ ID NO: 1321 - protein, 7 aa, synthetic construct
  REGION 1..7: note = source = /note="Description of Artificial Sequence: Synthetic peptide"
QAVRTSL

SEQ ID NO: 1322 - protein, 7 aa, synthetic construct
  REGION 1..7: note = source = /note="Description of Artificial Sequence: Synthetic peptide"
LAKERLS

SEQ ID NO: 1323 - protein, 7 aa, synthetic construct
  REGION 1..7: note = source = /note="Description of Artificial Sequence: Synthetic peptide"
MNSTKNV

SEQ ID NO: 1324 - protein, 7 aa, synthetic construct
  REGION 1..7: note = source = /note="Description of Artificial Sequence: Synthetic peptide"
VSGGHHS

SEQ ID NO: 1325 - protein, 14 aa, synthetic construct
  REGION 1..14: note = source = /note="Description of Artificial Sequence: Synthetic peptide"
SAQTLAVPFKAQAQ

SEQ ID NO: 1326 - protein, 14 aa, synthetic construct
  VARIANT 2..4: note = Any amino acid
  REGION 1..14: note = source = /note="Description of Artificial Sequence: Synthetic peptide"
SXXXLAVPFKAQAQ

SEQ ID NO: 1327 - protein, 14 aa, synthetic construct
  VARIANT 4..6: note = Any amino acid
  REGION 1..14: note = source = /note="Description of Artificial Sequence: Synthetic peptide"
SAQXXXVPFKAQAQ

SEQ ID NO: 1328 - protein, 14 aa, synthetic construct
  VARIANT 6..8: note = Any amino acid
  REGION 1..14: note = source = /note="Description of Artificial Sequence: Synthetic peptide"
SAQTLXXXFKAQAQ

SEQ ID NO: 1329 - protein, 14 aa, synthetic construct
  VARIANT 8..10: note = Any amino acid
  REGION 1..14: note = source = /note="Description of Artificial Sequence: Synthetic peptide"
SAQTLAVXXXAQAQ

SEQ ID NO: 1330 - protein, 14 aa, synthetic construct
  VARIANT 10..12: note = Any amino acid
  REGION 1..14: note = source = /note="Description of Artificial Sequence: Synthetic peptide"
SAQTLAVPFXXXAQ

SEQ ID NO: 1331 - protein, 7 aa, synthetic construct
  REGION 1..7: note = source = /note="Description of Artificial Sequence: Synthetic peptide"
TNHQSAQ

SEQ ID NO: 1332 - protein, 7 aa, synthetic construct
  REGION 1..7: note = source = /note="Description of Artificial Sequence: Synthetic peptide"
AQAQTGW

SEQ ID NO: 1333 - protein, 9 aa, synthetic construct
  REGION 1..9: note = source = /note="Description of Artificial Sequence: Synthetic peptide"
DGTLATPFK

SEQ ID NO: 1334 - protein, 11 aa, synthetic construct
  VARIANT 10..11: note = Any amino acid
  REGION 1..11: note = source = /note="Description of Artificial Sequence: Synthetic peptide"
DGTLATPFKXX

SEQ ID NO: 1335 - protein, 8 aa, synthetic construct
  REGION 1..8: note = source = /note="Description of Artificial Sequence: Synthetic peptide"
LAVPFKAQ

SEQ ID NO: 1336 - protein, 6 aa, synthetic construct
  REGION 1..6: note = source = /note="Description of Artificial Sequence: Synthetic peptide"
VPFKAQ

SEQ ID NO: 1337 - protein, 4 aa, synthetic construct
  REGION 1..4: note = source = /note="Description of Artificial Sequence: Synthetic peptide"
FKAQ

SEQ ID NO: 1338 - protein, 6 aa, synthetic construct
  REGION 1..6: note = source = /note="Description of Artificial Sequence: Synthetic peptide"
AQTLAV

SEQ ID NO: 1339 - protein, 8 aa, synthetic construct
  REGION 1..8: note = source = /note="Description of Artificial Sequence: Synthetic peptide"
AQTLAVPF

SEQ ID NO: 1340 - protein, 4 aa, synthetic construct
  REGION 1..4: note = source = /note="Description of Artificial Sequence: Synthetic peptide"
QAVR

SEQ ID NO: 1341 - protein, 4 aa, synthetic construct
  REGION 1..4: note = source = /note="Description of Artificial Sequence: Synthetic peptide"
AVRT

SEQ ID NO: 1342 - protein, 4 aa, synthetic construct
  REGION 1..4: note = source = /note="Description of Artificial Sequence: Synthetic peptide"
VRTS

SEQ ID NO: 1343 - protein, 4 aa, synthetic construct
  REGION 1..4: note = source = /note="Description of Artificial Sequence: Synthetic peptide"
RTSL

SEQ ID NO: 1344 - protein, 5 aa, synthetic construct
  REGION 1..5: note = source = /note="Description of Artificial Sequence: Synthetic peptide"
QAVRT

SEQ ID NO: 1345 - protein, 5 aa, synthetic construct
  REGION 1..5: note = source = /note="Description of Artificial Sequence: Synthetic peptide"
AVRTS

SEQ ID NO: 1346 - protein, 5 aa, synthetic construct
  REGION 1..5: note = source = /note="Description of Artificial Sequence: Synthetic peptide"
VRTSL

SEQ ID NO: 1347 - protein, 6 aa, synthetic construct
  REGION 1..6: note = source = /note="Description of Artificial Sequence: Synthetic peptide"
QAVRTS

SEQ ID NO: 1348 - protein, 6 aa, synthetic construct
  REGION 1..6: note = source = /note="Description of Artificial Sequence: Synthetic peptide"
AVRTSL

SEQ ID NO: 1349 - DNA, 33 bp, synthetic construct
  misc_feature 1..33: note = source = /note="Description of Artificial Sequence: Synthetic oligonucleotide"
  source 1..33: mol_type = other DNA
gatgggactttggcggtgccttttaaggcacag

SEQ ID NO: 1350 - DNA, 33 bp, synthetic construct
  misc_feature 1..33: note = source = /note="Description of Artificial Sequence: Synthetic oligonucleotide"
  source 1..33: mol_type = other DNA
gatgggacgttggcggtgccttttaaggcacag

SEQ ID NO: 1351 - DNA, 21 bp, synthetic construct
  misc_feature 1..21: note = source = /note="Description of Artificial Sequence: Synthetic oligonucleotide"
  source 1..21: mol_type = other DNA
caggcggttaggacgtctttg

SEQ ID NO: 1352 - DNA, 27 bp, synthetic construct
  misc_feature 1..27: note = source = /note="Description of Artificial Sequence: Synthetic oligonucleotide"
  source 1..27: mol_type = other DNA
caggtcttcacggactcagactatcag

SEQ ID NO: 1353 - DNA, 32 bp, synthetic construct
  misc_feature 1..32: note = source = /note="Description of Artificial Sequence: Synthetic oligonucleotide"
  source 1..32: mol_type = other DNA
caagtaaaacctctacaaatgtggtaaaatcg

SEQ ID NO: 1354 - DNA, 36 bp, synthetic construct
  misc_feature 1..36: note = source = /note="Description of Artificial Sequence: Synthetic oligonucleotide"
  source 1..36: mol_type = other DNA
actcatcgaccaatacttgtactatctctctagaac

SEQ ID NO: 1355 - DNA, 26 bp, synthetic construct
  misc_feature 1..26: note = source = /note="Description of Artificial Sequence: Synthetic oligonucleotide"
  source 1..26: mol_type = other DNA
ggaagtattccttggttttgaaccca

SEQ ID NO: 1356 - DNA, 23 bp, synthetic construct
  misc_feature 1..23: note = source = /note="Description of Artificial Sequence: Synthetic oligonucleotide"
  source 1..23: mol_type = other DNA
ggtcgcggttcttgtttgtggat

SEQ ID NO: 1357 - DNA, 24 bp, synthetic construct
  misc_feature 1..24: note = source = /note="Description of Artificial Sequence: Synthetic oligonucleotide"
  source 1..24: mol_type = other DNA
cgaccttgaagcgcatgaactcct

SEQ ID NO: 1358 - DNA, 83 bp, synthetic construct
  variation 42..43: note = a, c, t, or g
  variation 45..46: note = a, c, t, or g
  variation 48..49: note = a, c, t, or g
  variation 51..52: note = a, c, t, or g
  variation 54..55: note = a, c, t, or g
  variation 57..58: note = a, c, t, or g
  variation 60..61: note = a, c, t, or g
  misc_feature 1..83: note = source = /note="Description of Artificial Sequence: Synthetic oligonucleotide"
  source 1..83: mol_type = other DNA
gtattccttggttttgaacccaaccggtctgcgcctgtgcmnnmnnmnnmnnmnnmnnmnnttgggcactctggtggtttgtc

SEQ ID NO: 1359 - DNA, 64 bp, synthetic construct
  variation 36..37: note = a, c, t, or g
  variation 39..40: note = a, c, t, or g
  variation 42..43: note = a, c, t, or g
  misc_feature 1..64: note = source = /note="Description of Artificial Sequence: Synthetic oligonucleotide"
  source 1..64: mol_type = other DNA
gtattccttggttttgaacccaaccggtctgcgcmnnmnnmnnaaaaggcaccgccaaagtttg

SEQ ID NO: 1360 - DNA, 70 bp, synthetic construct
  variation 42..43: note = a, c, t, or g
  variation 45..46: note = a, c, t, or g
  variation 48..49: note = a, c, t, or g
  misc_feature 1..70: note = source = /note="Description of Artificial Sequence: Synthetic oligonucleotide"
  source 1..70: mol_type = other DNA
gtattccttggttttgaacccaaccggtctgcgcctgtgcmnnmnnmnncaccgccaaagtttgggcact

SEQ ID NO: 1361 - DNA, 77 bp, synthetic construct
  variation 48..49: note = a, c, t, or g
  variation 51..52: note = a, c, t, or g
  variation 54..55: note = a, c, t, or g
  misc_feature 1..77: note = source = /note="Description of Artificial Sequence: Synthetic oligonucleotide"
  source 1..77: mol_type = other DNA
gtattccttggttttgaacccaaccggtctgcgcctgtgccttaaamnnmnnmnncaaagtttgggcactctggtgg

SEQ ID NO: 1362 - DNA, 83 bp, synthetic construct
  variation 54..55: note = a, c, t, or g
  variation 57..58: note = a, c, t, or g
  variation 60..61: note = a, c, t, or g
  misc_feature 1..83: note = source = /note="Description of Artificial Sequence: Synthetic oligonucleotide"
  source 1..83: mol_type = other DNA
gtattccttggttttgaacccaaccggtctgcgcctgtgccttaaaaggcacmnnmnnmnnttgggcactctggtggtttgtg

SEQ ID NO: 1363 - DNA, 21 bp, synthetic construct
  misc_feature 1..21: note = source = /note="Description of Artificial Sequence: Synthetic oligonucleotide"
  source 1..21: mol_type = other DNA
cttgcgaaggagcggctttcg

SEQ ID NO: 1364 - protein, 10 aa, synthetic construct
  REGION 1..10: note = source = /note="Description of Artificial Sequence: Synthetic peptide"
VNLTWSRASG

SEQ ID NO: 1365 - protein, 14 aa, synthetic construct
  REGION 1..14: note = source = /note="Description of Artificial Sequence: Synthetic peptide"
EFCINHRGYWVCGD

SEQ ID NO: 1366 - protein, 11 aa, synthetic construct
  REGION 1..11: note = source = /note="Description of Artificial Sequence: Synthetic peptide"
EDGQVMDVDLS

SEQ ID NO: 1367 - protein, 9 aa, synthetic construct
  REGION 1..9: note = source = /note="Description of Artificial Sequence: Synthetic peptide"
EKQRNGTLT

SEQ ID NO: 1368 - protein, 17 aa, synthetic construct
  REGION 1..17: note = source = /note="Description of Artificial Sequence: Synthetic peptide"
TYQCRVTHPHLPRALMR

SEQ ID NO: 1369 - protein, 14 aa, synthetic construct
  REGION 1..14: note = source = /note="Description of Artificial Sequence: Synthetic peptide"
RHSTTQPRKTKGSG

SEQ ID NO: 1370 - protein, 13 aa, synthetic construct
  REGION 1..13: note = source = /note="Description of Artificial Sequence: Synthetic peptide"
DSNPRGVSAYLSR

SEQ ID NO: 1371 - protein, 12 aa, synthetic construct
  REGION 1..12: note = source = /note="Description of Artificial Sequence: Synthetic peptide"
TITCLWDLAPSK

SEQ ID NO: 1372 - protein, 10 aa, synthetic construct
  REGION 1..10: note = source = /note="Description of Artificial Sequence: Synthetic peptide"
KTKGSGFFVF

SEQ ID NO: 1373 - protein, 12 aa, synthetic construct
  REGION 1..12: note = source = /note="Description of Artificial Sequence: Synthetic peptide"
THPHLPRALMRS

SEQ ID NO: 1374 - protein, 23 aa, synthetic construct
  REGION 1..23: note = source = /note="Description of Artificial Sequence: Synthetic peptide"
GETYQCRVTHPHLPRALMRSTTK

SEQ ID NO: 1375 - protein, 8 aa, synthetic construct
  REGION 1..8: note = source = /note="Description of Artificial Sequence: Synthetic peptide"
LPRALMRS

SEQ ID NO: 1376 - protein, 8 aa, synthetic construct
  REGION 1..8: note = source = /note="Description of Artificial Sequence: Synthetic peptide"
INHRGYWV

SEQ ID NO: 1377 - protein, 12 aa, synthetic construct
  REGION 1..12: note = source = /note="Description of Artificial Sequence: Synthetic peptide"
CDAGSVRTNAPD

SEQ ID NO: 1378 - protein, 17 aa, synthetic construct
  REGION 1..17: note = source = /note="Description of Artificial Sequence: Synthetic peptide"
AKAVSNLTESRSESLQS

SEQ ID NO: 1379 - protein, 13 aa, synthetic construct
  REGION 1..13: note = source = /note="Description of Artificial Sequence: Synthetic peptide"
SLTGDEFKKVLET

SEQ ID NO: 1380 - protein, 11 aa, synthetic construct
  REGION 1..11: note = source = /note="Description of Artificial Sequence: Synthetic peptide"
REAVAYRFEED

SEQ ID NO: 1381 - protein, 10 aa, synthetic construct
  REGION 1..10: note = source = /note="Description of Artificial Sequence: Synthetic peptide"
INPEIITLDG

SEQ ID NO: 1382 - protein, 15 aa, synthetic construct
  REGION 1..15: note = source = /note="Description of Artificial Sequence: Synthetic peptide"
DISVTGAPVITATYL

SEQ ID NO: 1383 - protein, 12 aa, synthetic construct
  REGION 1..12: note = source = /note="Description of Artificial Sequence: Synthetic peptide"
DISVTGAPVITA

SEQ ID NO: 1384 - protein, 17 aa, synthetic construct
  REGION 1..17: note = source = /note="Description of Artificial Sequence: Synthetic peptide"
PKTVSNLTESSSESVQS

SEQ ID NO: 1385 - protein, 13 aa, synthetic construct
  REGION 1..13: note = source = /note="Description of Artificial Sequence: Synthetic peptide"
SLMGDEFKAVLET

SEQ ID NO: 1386 - protein, 11 aa, synthetic construct
  REGION 1..11: note = source = /note="Description of Artificial Sequence: Synthetic peptide"
QHSVAYTFEED

SEQ ID NO: 1387 - protein, 10 aa, synthetic construct
  REGION 1..10: note = source = /note="Description of Artificial Sequence: Synthetic peptide"
INPEIITRDG

SEQ ID NO: 1388 - protein, 15 aa, synthetic construct
  REGION 1..15: note = source = /note="Description of Artificial Sequence: Synthetic peptide"
DISLTGDPVITASYL

SEQ ID NO: 1389 - protein, 12 aa, synthetic construct
  REGION 1..12: note = source = /note="Description of Artificial Sequence: Synthetic peptide"
DISLTGDPVITA

SEQ ID NO: 1390 - protein, 11 aa, synthetic construct
  REGION 1..11: note = source = /note="Description of Artificial Sequence: Synthetic peptide"
DQSIDFEIDSA

SEQ ID NO: 1391 - protein, 20 aa, synthetic construct
  REGION 1..20: note = source = /note="Description of Artificial Sequence: Synthetic peptide"
KNVSEDLPLPTFSPTLLGDS

SEQ ID NO: 1392 - protein, 11 aa, synthetic construct
  REGION 1..11: note = source = /note="Description of Artificial Sequence: Synthetic peptide"
KNVSEDLPLPT

SEQ ID NO: 1393 - protein, 12 aa, synthetic construct
  REGION 1..12: note = source = /note="Description of Artificial Sequence: Synthetic peptide"
CDSGRVRTDAPD

SEQ ID NO: 1394 - protein, 14 aa, synthetic construct
  REGION 1..14: note = source = /note="Description of Artificial Sequence: Synthetic peptide"
FPEHLLVDFLQSLS

SEQ ID NO: 1395 - protein, 9 aa, synthetic construct
  REGION 1..9: note = source = /note="Description of Artificial Sequence: Synthetic peptide"
DAEFRHDSG

SEQ ID NO: 1396 - protein, 16 aa, synthetic construct
  REGION 1..16: note = source = /note="Description of Artificial Sequence: Synthetic peptide"
HYAAAQWDFGNTMCQL

SEQ ID NO: 1397 - protein, 13 aa, synthetic construct
  REGION 1..13: note = source = /note="Description of Artificial Sequence: Synthetic peptide"
YAAQWDFGNTMCQ

SEQ ID NO: 1398 - protein, 10 aa, synthetic construct
  REGION 1..10: note = source = /note="Description of Artificial Sequence: Synthetic peptide"
RSQKEGLHYT

SEQ ID NO: 1399 - protein, 19 aa, synthetic construct
  REGION 1..19: note = source = /note="Description of Artificial Sequence: Synthetic peptide"
SSRTPSDKPVAHWANPQAE

SEQ ID NO: 1400 - protein, 15 aa, synthetic construct
  REGION 1..15: note = source = /note="Description of Artificial Sequence: Synthetic peptide"
SRTPSDKPVAHWANP

SEQ ID NO: 1401 - protein, 9 aa, synthetic construct
  REGION 1..9: note = source = /note="Description of Artificial Sequence: Synthetic peptide"
SSRTPSDKP

SEQ ID NO: 1402 - protein, 14 aa, synthetic construct
  REGION 1..14: note = source = /note="Description of Artificial Sequence: Synthetic peptide"
NADGNVDYHMNSVP

SEQ ID NO: 1403 - protein, 11 aa, synthetic construct
  REGION 1..11: note = source = /note="Description of Artificial Sequence: Synthetic peptide"
DGNVDYHMNSV

SEQ ID NO: 1404 - protein, 16 aa, synthetic construct
  REGION 1..16: note = source = /note="Description of Artificial Sequence: Synthetic peptide"
RSFKEFLQSSLRALRQ

SEQ ID NO: 1405 - protein, 11 aa, synthetic construct
  REGION 1..11: note = source = /note="Description of Artificial Sequence: Synthetic peptide"
FKEFLQSSLRA

SEQ ID NO: 1406 - protein, 10 aa, synthetic construct
  REGION 1..10: note = source = /note="Description of Artificial Sequence: Synthetic peptide"
QMWAPQWGPD

SEQ ID NO: 1407 - protein, 6 aa, synthetic construct
  REGION 1..6: note = source = /note="Description of Artificial Sequence: Synthetic peptide"
RGNRQA

SEQ ID NO: 1408 - protein, 6 aa, synthetic construct
  REGION 1..6: note = source = /note="Description of Artificial Sequence: Synthetic peptide"
SSSTDP

SEQ ID NO: 1409 - protein, 6 aa, synthetic construct
  REGION 1..6: note = source = /note="Description of Artificial Sequence: Synthetic peptide"
SSNTAP

SEQ ID NO: 1410 - protein, 6 aa, synthetic construct
  REGION 1..6: note = source = /note="Description of Artificial Sequence: Synthetic peptide"
SNSNLP

SEQ ID NO: 1411 - protein, 6 aa, synthetic construct
  REGION 1..6: note = source = /note="Description of Artificial Sequence: Synthetic peptide"
SSTTAP

SEQ ID NO: 1412 - protein, 6 aa, synthetic construct
  REGION 1..6: note = source = /note="Description of Artificial Sequence: Synthetic peptide"
AANTAA

SEQ ID NO: 1413 - protein, 6 aa, synthetic construct
  REGION 1..6: note = source = /note="Description of Artificial Sequence: Synthetic peptide"
QQNTAP

SEQ ID NO: 1414 - protein, 6 aa, synthetic construct
  REGION 1..6: note = source = /note="Description of Artificial Sequence: Synthetic peptide"
SAQAQA

SEQ ID NO: 1415 - protein, 6 aa, synthetic construct
  REGION 1..6: note = source = /note="Description of Artificial Sequence: Synthetic peptide"
QANTGP

SEQ ID NO: 1416 - protein, 6 aa, synthetic construct
  REGION 1..6: note = source = /note="Description of Artificial Sequence: Synthetic peptide"
NATTAP

SEQ ID NO: 1417 - protein, 6 aa, synthetic construct
  REGION 1..6: note = source = /note="Description of Artificial Sequence: Synthetic peptide"
SSTAGP

SEQ ID NO: 1418 - protein, 6 aa, synthetic construct
  REGION 1..6: note = source = /note="Description of Artificial Sequence: Synthetic peptide"
QQNTAA

SEQ ID NO: 1419 - protein, 6 aa, synthetic construct
  REGION 1..6: note = source = /note="Description of Artificial Sequence: Synthetic peptide"
PSTAGP

SEQ ID NO: 1420 - protein, 6 aa, synthetic construct
  REGION 1..6: note = source = /note="Description of Artificial Sequence: Synthetic peptide"
NQNTAP

SEQ ID NO: 1421 - protein, 6 aa, synthetic construct
  REGION 1..6: note = source = /note="Description of Artificial Sequence: Synthetic peptide"
QAANAP

SEQ ID NO: 1422 - protein, 6 aa, synthetic construct
  REGION 1..6: note = source = /note="Description of Artificial Sequence: Synthetic peptide"
SIVGLP

SEQ ID NO: 1423 - protein, 6 aa, synthetic construct
  REGION 1..6: note = source = /note="Description of Artificial Sequence: Synthetic peptide"
AASTAA

SEQ ID NO: 1424 - protein, 6 aa, synthetic construct
  REGION 1..6: note = source = /note="Description of Artificial Sequence: Synthetic peptide"
SQNTTA

SEQ ID NO: 1425 - protein, 6 aa, synthetic construct
  REGION 1..6: note = source = /note="Description of Artificial Sequence: Synthetic peptide"
QQDTAP

SEQ ID NO: 1426 - protein, 6 aa, synthetic construct
  REGION 1..6: note = source = /note="Description of Artificial Sequence: Synthetic peptide"
QTNTGP

SEQ ID NO: 1427 - protein, 6 aa, synthetic construct
  REGION 1..6: note = source = /note="Description of Artificial Sequence: Synthetic peptide"
QTNGAP

SEQ ID NO: 1428 - protein, 6 aa, synthetic construct
  REGION 1..6: note = source = /note="Description of Artificial Sequence: Synthetic peptide"
QQNAAP

SEQ ID NO: 1429 - protein, 6 aa, synthetic construct
  REGION 1..6: note = source = /note="Description of Artificial Sequence: Synthetic peptide"
AANTQA

SEQ ID NO: 1430 - protein, 6 aa, synthetic construct
  REGION 1..6: note = source = /note="Description of Artificial Sequence: Synthetic peptide"
NGRAHA

SEQ ID NO: 1431 - protein, 7 aa, synthetic construct
  REGION 1..7: note = source = /note="Description of Artificial Sequence: Synthetic peptide"
QPEHSST

SEQ ID NO: 1432 - protein, 7 aa, synthetic construct
  REGION 1..7: note = source = /note="Description of Artificial Sequence: Synthetic peptide"
VNTANST

SEQ ID NO: 1433 - protein, 7 aa, synthetic construct
  REGION 1..7: note = source = /note="Description of Artificial Sequence: Synthetic peptide"
HGPMQKS

SEQ ID NO: 1434 - protein, 7 aa, synthetic construct
  REGION 1..7: note = source = /note="Description of Artificial Sequence: Synthetic peptide"
PHKPPLA

SEQ ID NO: 1435 - protein, 7 aa, synthetic construct
  REGION 1..7: note = source = /note="Description of Artificial Sequence: Synthetic peptide"
IKNNEMW

SEQ ID NO: 1436 - protein, 7 aa, synthetic construct
  REGION 1..7: note = source = /note="Description of Artificial Sequence: Synthetic peptide"
RNLDTPM

SEQ ID NO: 1437 - protein, 7 aa, synthetic construct
  REGION 1..7: note = source = /note="Description of Artificial Sequence: Synthetic peptide"
VDSHRQS

SEQ ID NO: 1438 - protein, 7 aa, synthetic construct
  REGION 1..7: note = source = /note="Description of Artificial Sequence: Synthetic peptide"
YDSKTKT

SEQ ID NO: 1439 - protein, 7 aa, synthetic construct
  REGION 1..7: note = source = /note="Description of Artificial Sequence: Synthetic peptide"
SQLPHQK

SEQ ID NO: 1440 - protein, 7 aa, synthetic construct
  REGION 1..7: note = source = /note="Description of Artificial Sequence: Synthetic peptide"
STMQQNT

SEQ ID NO: 1441 - protein, 7 aa, synthetic construct
  REGION 1..7: note = source = /note="Description of Artificial Sequence: Synthetic peptide"
TERYMTQ

SEQ ID NO: 1442 - protein, 7 aa, synthetic construct
  REGION 1..7: note = source = /note="Description of Artificial Sequence: Synthetic peptide"
DASLSTS

SEQ ID NO: 1443 - protein, 7 aa, synthetic construct
  REGION 1..7: note = source = /note="Description of Artificial Sequence: Synthetic peptide"
DLPNKKT

SEQ ID NO: 1444 - protein, 7 aa, synthetic construct
  REGION 1..7: note = source = /note="Description of Artificial Sequence: Synthetic peptide"
DLTAARL

SEQ ID NO: 1445 - protein, 7 aa, synthetic construct
  REGION 1..7: note = source = /note="Description of Artificial Sequence: Synthetic peptide"
EPHQFNY

SEQ ID NO: 1446 - protein, 7 aa, synthetic construct
  REGION 1..7: note = source = /note="Description of Artificial Sequence: Synthetic peptide"
EPQSNHT

SEQ ID NO: 1447 - protein, 7 aa, synthetic construct
  REGION 1..7: note = source = /note="Description of Artificial Sequence: Synthetic peptide"
MSSWPSQ

SEQ ID NO: 1448 - protein, 7 aa, synthetic construct
  REGION 1..7: note = source = /note="Description of Artificial Sequence: Synthetic peptide"
NPKHNAT

SEQ ID NO: 1449 - protein, 7 aa, synthetic construct
  REGION 1..7: note = source = /note="Description of Artificial Sequence: Synthetic peptide"
PDGMRTT

SEQ ID NO: 1450 - protein, 7 aa, synthetic construct
  REGION 1..7: note = source = /note="Description of Artificial Sequence: Synthetic peptide"
PNNNKTT

SEQ ID NO: 1451 - protein, 7 aa, synthetic construct
  REGION 1..7: note = source = /note="Description of Artificial Sequence: Synthetic peptide"
QSTTHDS

SEQ ID NO: 1452 - protein, 7 aa, synthetic construct
  REGION 1..7: note = source = /note="Description of Artificial Sequence: Synthetic peptide"
TGSKQKQ

SEQ ID NO: 1453 - protein, 7 aa, synthetic construct
  REGION 1..7: note = source = /note="Description of Artificial Sequence: Synthetic peptide"
SLKHQAL

SEQ ID NO: 1454 - protein, 7 aa, synthetic construct
  REGION 1..7: note = source = /note="Description of Artificial Sequence: Synthetic peptide"
SPIDGEQ

SEQ ID NO: 1455 - protein, 8 aa, synthetic construct
  REGION 1..8: note = source = /note="Description of Artificial Sequence: Synthetic peptide"
WIFPWIQL

SEQ ID NO: 1456 - protein, 9 aa, synthetic construct
  REGION 1..9: note = source = /note="Description of Artificial Sequence: Synthetic peptide"
CDCRGDCFC

SEQ ID NO: 1457 - protein, 5 aa, synthetic construct
  REGION 1..5: note = source = /note="Description of Artificial Sequence: Synthetic peptide"
CNGRC

SEQ ID NO: 1458 - protein, 7 aa, synthetic construct
  REGION 1..7: note = source = /note="Description of Artificial Sequence: Synthetic peptide"
CPRECES

SEQ ID NO: 1459 - protein, 10 aa, synthetic construct
  REGION 1..10: note = source = /note="Description of Artificial Sequence: Synthetic peptide"
CTTHWGFTLC

SEQ ID NO: 1460 - protein, 9 aa, synthetic construct
  REGION 1..9: note = source = /note="Description of Artificial Sequence: Synthetic peptide"
CGRRAGGSC

SEQ ID NO: 1461 - protein, 9 aa, synthetic construct
  REGION 1..9: note = source = /note="Description of Artificial Sequence: Synthetic peptide"
CKGGRAKDC

SEQ ID NO: 1462 - protein, 9 aa, synthetic construct
  REGION 1..9: note = source = /note="Description of Artificial Sequence: Synthetic peptide"
CVPELGHEC

SEQ ID NO: 1463 - protein, 9 aa, synthetic construct
  REGION 1..9: note = source = /note="Description of Artificial Sequence: Synthetic peptide"
CRRETAWAK

SEQ ID NO: 1464 - protein, 14 aa, synthetic construct
  REGION 1..14: note = source = /note="Description of Artificial Sequence: Synthetic peptide"
VSWFSHRYSPFAVS

SEQ ID NO: 1465 - protein, 13 aa, synthetic construct
  REGION 1..13: note = source = /note="Description of Artificial Sequence: Synthetic peptide"
GYRDGYAGPILYN

SEQ ID NO: 1466 - skipped

SEQ ID NO: 1467 - protein, 4 aa, synthetic construct
  VARIANT 2: note = /replace="Met"
  SITE 1..4: note = /note="Variant residues given in the sequence have no preference with respect to those in the annotations for variant positions"
  REGION 1..4: note = source = /note="Description of Artificial Sequence: Synthetic peptide"
YENW

SEQ ID NO: 1468 - protein, 7 aa, synthetic construct
  REGION 1..7: note = source = /note="Description of Artificial Sequence: Synthetic peptide"
RPLPPLP

SEQ ID NO: 1469 - protein, 7 aa, synthetic construct
  REGION 1..7: note = source = /note="Description of Artificial Sequence: Synthetic peptide"
APPLPPR

SEQ ID NO: 1470 - protein, 12 aa, synthetic construct
  REGION 1..12: note = source = /note="Description of Artificial Sequence: Synthetic peptide"
DVFYPYPYASGS

SEQ ID NO: 1471 - protein, 6 aa, synthetic construct
  REGION 1..6: note = source = /note="Description of Artificial Sequence: Synthetic peptide"
MYWYPY

SEQ ID NO: 1472 - protein, 12 aa, synthetic construct
  REGION 1..12: note = source = /note="Description of Artificial Sequence: Synthetic peptide"
DITWDQLWDLMK

SEQ ID NO: 1473 - protein, 8 aa, synthetic construct
  VARIANT 5: note = /replace="Leu"
  SITE 1..8: note = /note="Variant residues given in the sequence have no preference with respect to those in the annotations for variant positions"
  REGION 1..8: note = source = /note="Description of Artificial Sequence: Synthetic peptide"
CWDDGWLC

SEQ ID NO: 1474 - protein, 14 aa, synthetic construct
  REGION 1..14: note = source = /note="Description of Artificial Sequence: Synthetic peptide"
EWCEYLGGYLRCYA

SEQ ID NO: 1475 - protein, 14 aa, synthetic construct
  VARIANT 2: note = Any amino acid
  VARIANT 4..5: note = Any amino acid
  VARIANT 8: note = Any amino acid
  VARIANT 11: note = Any amino acid
  VARIANT 13: note = Any amino acid
  REGION 1..14: note = source = /note="Description of Artificial Sequence: Synthetic peptide"
YXCXXGPXTWXCXP

SEQ ID NO: 1476 - protein, 14 aa, synthetic construct
  REGION 1..14: note = source = /note="Description of Artificial Sequence: Synthetic peptide"
IEGPTLRQWLAARA

SEQ ID NO: 1477 - skipped

SEQ ID NO: 1478 - protein, 7 aa, synthetic construct
  VARIANT 1: note = Any amino acid
  VARIANT 3..4: note = Any amino acid
  REGION 1..7: note = source = /note="Description of Artificial Sequence: Synthetic peptide"
XFXXYLW

SEQ ID NO: 1479 - protein, 13 aa, synthetic construct
  REGION 1..13: note = source = /note="Description of Artificial Sequence: Synthetic peptide"
SSIISHFRWGLCD

SEQ ID NO: 1480 - protein, 13 aa, synthetic construct
  REGION 1..13: note = source = /note="Description of Artificial Sequence: Synthetic peptide"
MSRPACPPNDKYE

SEQ ID NO: 1481 - protein, 8 aa, synthetic construct
  REGION 1..8: note = source = /note="Description of Artificial Sequence: Synthetic peptide"
CLRSGRGC

SEQ ID NO: 1482 - protein, 9 aa, synthetic construct
  REGION 1..9: note = source = /note="Description of Artificial Sequence: Synthetic peptide"
CHWMFSPWC

SEQ ID NO: 1483 - skipped

SEQ ID NO: 1484 - protein, 8 aa, synthetic construct
  REGION 1..8: note = source = /note="Description of Artificial Sequence: Synthetic peptide"
CSSRLDAC

SEQ ID NO: 1485 - protein, 7 aa, synthetic construct
  REGION 1..7: note = source = /note="Description of Artificial Sequence: Synthetic peptide"
CLPVASC

SEQ ID NO: 1486 - protein, 13 aa, synthetic construct
  REGION 1..13: note = source = /note="Description of Artificial Sequence: Synthetic peptide"
CGFECVRQCPERC

SEQ ID NO: 1487 - protein, 13 aa, synthetic construct
  REGION 1..13: note = source = /note="Description of Artificial Sequence: Synthetic peptide"
CVALCREACGEGC

SEQ ID NO: 1488 - protein, 9 aa, synthetic construct
  REGION 1..9: note = source = /note="Description of Artificial Sequence: Synthetic peptide"
SWCEPGWCR

SEQ ID NO: 1489 - protein, 7 aa, synthetic construct
  REGION 1..7: note = source = /note="Description of Artificial Sequence: Synthetic peptide"
YSGKWGW

(The sequence listing continues in the following parts.)
